United States Patent Application Publication US 2005/0255487 A1 - sequence listing, part 8

SEQ ID NO: 194281 - RNA, 19 nt, Homo sapiens
  misc_RNA (1)...(19): siRNA sense strand
ugggugaaguugcauccuu

SEQ ID NO: 194282 - RNA, 19 nt, Homo sapiens
  misc_RNA (1)...(19): siRNA sense strand
caucauuucccuguguaaa

SEQ ID NO: 194283 - RNA, 19 nt, Homo sapiens
  misc_RNA (1)...(19): siRNA sense strand
gcguggauaugugucugaa

SEQ ID NO: 194284 - RNA, 19 nt, Homo sapiens
  misc_RNA (1)...(19): siRNA sense strand
gcacuaucccaugguggaa

SEQ ID NO: 194285 - RNA, 19 nt, Homo sapiens
  misc_RNA (1)...(19): siRNA sense strand
gagccugucagcugcaugu

SEQ ID NO: 194286 - RNA, 19 nt, Homo sapiens
  misc_RNA (1)...(19): siRNA sense strand
guacagauaccuuuucaag

SEQ ID NO: 194287 - RNA, 19 nt, Homo sapiens
  misc_RNA (1)...(19): siRNA sense strand
gucccucucugcguggaua

SEQ ID NO: 194288 - RNA, 19 nt, Homo sapiens
  misc_RNA (1)...(19): siRNA sense strand
ggagcugcuuccaauuugc

SEQ ID NO: 194289 - RNA, 19 nt, Homo sapiens
  misc_RNA (1)...(19): siRNA sense strand
uuagcugaccugaauaaug

SEQ ID NO: 194290 - RNA, 19 nt, Homo sapiens
  misc_RNA (1)...(19): siRNA sense strand
guggcaaguucaacaggau

SEQ ID NO: 194291 - RNA, 19 nt, Homo sapiens
  misc_RNA (1)...(19): siRNA sense strand
acaacaauuuggucaacgu

SEQ ID NO: 194292 - RNA, 19 nt, Homo sapiens
  misc_RNA (1)...(19): siRNA sense strand
gacuacaucaggagaagau

SEQ ID NO: 194293 - RNA, 19 nt, Homo sapiens
  misc_RNA (1)...(19): siRNA sense strand
uaauaagccagagaucgaa

SEQ ID NO: 194294 - RNA, 19 nt, Homo sapiens
  misc_RNA (1)...(19): siRNA sense strand
ugucagauucucagcuuau

SEQ ID NO: 194295 - RNA, 19 nt, Homo sapiens
  misc_RNA (1)...(19): siRNA sense strand
ggauauccugcagauuauu

SEQ ID NO: 194296 - RNA, 19 nt, Homo sapiens
  misc_RNA (1)...(19): siRNA sense strand
agcaucaggccaaauguaa

SEQ ID NO: 194297 - RNA, 19 nt, Homo sapiens
  misc_RNA (1)...(19): siRNA sense strand
gcccuuugcuuggaucucu

SEQ ID NO: 194298 - RNA, 19 nt, Homo sapiens
  misc_RNA (1)...(19): siRNA sense strand
gcugaauguuuaugauacg

SEQ ID NO: 194299 - RNA, 19 nt, Homo sapiens
  misc_RNA (1)...(19): siRNA sense strand
agacuuugccaagguacua

SEQ ID NO: 194300 - RNA, 19 nt, Homo sapiens
  misc_RNA (1)...(19): siRNA sense strand
caagcaaguggcaaguuca

SEQ ID NO: 194301 - RNA, 19 nt, Homo sapiens
  misc_RNA (1)...(19): siRNA sense strand
agacaaguacagauaccuu

SEQ ID NO: 194302 - RNA, 19 nt, Homo sapiens
  misc_RNA (1)...(19): siRNA sense strand
gcaucauuucccuguguaa

SEQ ID NO: 194303 - RNA, 19 nt, Homo sapiens
  misc_RNA (1)...(19): siRNA sense strand
cugcaaagaguguccaauc

SEQ ID NO: 194304 - RNA, 19 nt, Homo sapiens
  misc_RNA (1)...(19): siRNA sense strand
cuuauaggacugccaugaa

SEQ ID NO: 194305 - RNA, 19 nt, Homo sapiens
  misc_RNA (1)...(19): siRNA sense strand
caaagaguguccaaucauu

SEQ ID NO: 194306 - RNA, 19 nt, Homo sapiens
  misc_RNA (1)...(19): siRNA sense strand
uagcugaccugaauaaugu

SEQ ID NO: 194307 - RNA, 19 nt, Homo sapiens
  misc_RNA (1)...(19): siRNA sense strand
gcaugauucuauccaaauu

SEQ ID NO: 194308 - RNA, 19 nt, Homo sapiens
  misc_RNA (1)...(19): siRNA sense strand
ugaacuggcugcugaaugu

SEQ ID NO: 194309 - RNA, 19 nt, Homo sapiens
  misc_RNA (1)...(19): siRNA sense strand
gauauccugcagauuauua

SEQ ID NO: 194310 - RNA, 19 nt, Homo sapiens
  misc_RNA (1)...(19): siRNA sense strand
gagaagauguucgagacuu

SEQ ID NO: 194311 - RNA, 19 nt, Homo sapiens
  misc_RNA (1)...(19): siRNA sense strand
gcacuuuaauuaugacauc

SEQ ID NO: 194312 - RNA, 19 nt, Homo sapiens
  misc_RNA (1)...(19): siRNA sense strand
guaaagcacauuuggaaga

SEQ ID NO: 194313 - RNA, 19 nt, Homo sapiens
  misc_RNA (1)...(19): siRNA sense strand
gaauauugcacuccgacua

SEQ ID NO: 194314 - RNA, 19 nt, Homo sapiens
  misc_RNA (1)...(19): siRNA sense strand
uuauaggacugccaugaaa

SEQ ID NO: 194315 - RNA, 19 nt, Homo sapiens
  misc_RNA (1)...(19): siRNA sense strand
gggugaaguugcauccuuu

SEQ ID NO: 194316 - RNA, 19 nt, Homo sapiens
  misc_RNA (1)...(19): siRNA sense strand
gcaagagcacaacaauuug

SEQ ID NO: 194317 - RNA, 19 nt, Homo sapiens
  misc_RNA (1)...(19): siRNA sense strand
gcacaacaauuuggucaac

SEQ ID NO: 194318 - RNA, 19 nt, Homo sapiens
  misc_RNA (1)...(19): siRNA sense strand
agcaagagcacaacaauuu

SEQ ID NO: 194319 - RNA, 19 nt, Homo sapiens
  misc_RNA (1)...(19): siRNA sense strand
agaagauguucgagacuuu

SEQ ID NO: 194320 - RNA, 19 nt, Homo sapiens
  misc_RNA (1)...(19): siRNA sense strand
gagcaagagcacaacaauu

SEQ ID NO: 194321 - RNA, 19 nt, Homo sapiens
  misc_RNA (1)...(19): siRNA sense strand
ucaagcaaguggcaaguuc

SEQ ID NO: 194322 - RNA, 19 nt, Homo sapiens
  misc_RNA (1)...(19): siRNA sense strand
ccacgagacucaaacaacu

SEQ ID NO: 194323 - RNA, 19 nt, Homo sapiens
  misc_RNA (1)...(19): siRNA sense strand
cagcacaaccucaagcaaa

SEQ ID NO: 194324 - RNA, 19 nt, Homo sapiens
  misc_RNA (1)...(19): siRNA sense strand
gcaaagaguguccaaucau

SEQ ID NO: 194325 - RNA, 19 nt, Homo sapiens
  misc_RNA (1)...(19): siRNA sense strand
auggauauccugcagauua

SEQ ID NO: 194326 - RNA, 19 nt, Homo sapiens
  misc_RNA (1)...(19): siRNA sense strand
uguaacaucugcaaagagu

SEQ ID NO: 194327 - RNA, 19 nt, Homo sapiens
  misc_RNA (1)...(19): siRNA sense strand
guccggagcugcuuccaau

SEQ ID NO: 194328 - RNA, 19 nt, Homo sapiens
  misc_RNA (1)...(19): siRNA sense strand
gcaaguggcaaguucaaca

SEQ ID NO: 194329 - RNA, 19 nt, Homo sapiens
  misc_RNA (1)...(19): siRNA sense strand
gcuuccaauuugcuaauaa

SEQ ID NO: 194330 - RNA, 19 nt, Homo sapiens
  misc_RNA (1)...(19): siRNA sense strand
uggaagacaaguacagaua

SEQ ID NO: 194331 - RNA, 19 nt, Homo sapiens
  misc_RNA (1)...(19): siRNA sense strand
ggauccguguccugucuuu

SEQ ID NO: 194332 - RNA, 19 nt, Homo sapiens
  misc_RNA (1)...(19): siRNA sense strand
gucuuuagcugaccugaau

SEQ ID NO: 194333 - RNA, 19 nt, Homo sapiens
  misc_RNA (1)...(19): siRNA sense strand
gacaaguacagauaccuuu

SEQ ID NO: 194334 - RNA, 19 nt, Homo sapiens
  misc_RNA (1)...(19): siRNA sense strand
ccaagcaucaggccaaaug

SEQ ID NO: 194335 - RNA, 19 nt, Homo sapiens
  misc_RNA (1)...(19): siRNA sense strand
ggagcaagagcacaacaau

SEQ ID NO: 194336 - RNA, 19 nt, Homo sapiens
  misc_RNA (1)...(19): siRNA sense strand
guguaaagcacauuuggaa

SEQ ID NO: 194337 - RNA, 19 nt, Homo sapiens
  misc_RNA (1)...(19): siRNA sense strand
caagacaguugggugaagu

SEQ ID NO: 194338 - RNA, 19 nt, Homo sapiens
  misc_RNA (1)...(19): siRNA sense strand
gaagauguucgagacuuug

SEQ ID NO: 194339 - RNA, 19 nt, Homo sapiens
  misc_RNA (1)...(19): siRNA sense strand
gucagauucucagcuuaua

SEQ ID NO: 194340 - RNA, 19 nt, Homo sapiens
  misc_RNA (1)...(19): siRNA sense strand
uaacaucugcaaagagugu

SEQ ID NO: 194341 - RNA, 19 nt, Homo sapiens
  misc_RNA (1)...(19): siRNA sense strand
cggagcugcuuccaauuug

SEQ ID NO: 194342 - RNA, 19 nt, Homo sapiens
  misc_RNA (1)...(19): siRNA sense strand
gaagacaaguacagauacc

SEQ ID NO: 194343 - RNA, 19 nt, Homo sapiens
  misc_RNA (1)...(19): siRNA sense strand
ccauggauauccugcagau

SEQ ID NO: 194344 - RNA, 19 nt, Homo sapiens
  misc_RNA (1)...(19): siRNA sense strand
ggcaucauuucccugugua

SEQ ID NO: 194345 - RNA, 19 nt, Homo sapiens
  misc_RNA (1)...(19): siRNA sense strand
uggauauccugcagauuau

SEQ ID NO: 194346 - RNA, 19 nt, Homo sapiens
  misc_RNA (1)...(19): siRNA sense strand
ggaagacaaguacagauac

SEQ ID NO: 194347 - RNA, 19 nt, Homo sapiens
  misc_RNA (1)...(19): siRNA sense strand
ugcaaagaguguccaauca

SEQ ID NO: 194348 - RNA, 19 nt, Homo sapiens
  misc_RNA (1)...(19): siRNA sense strand
guggauaugugucugaacu

SEQ ID NO: 194349 - RNA, 19 nt, Homo sapiens
  misc_RNA (1)...(19): siRNA sense strand
acuggcugcugaauguuua

SEQ ID NO: 194350 - RNA, 19 nt, Homo sapiens
  misc_RNA (1)...(19): siRNA sense strand
acuaucccaugguggaaua

SEQ ID NO: 194351 - RNA, 19 nt, Homo sapiens
  misc_RNA (1)...(19): siRNA sense strand
ccggagcugcuuccaauuu

SEQ ID NO: 194352 - RNA, 19 nt, Homo sapiens
  misc_RNA (1)...(19): siRNA sense strand
ccaaauuccaagacaguug

SEQ ID NO: 194353 - RNA, 19 nt, Homo sapiens
  misc_RNA (1)...(19): siRNA sense strand
cagaaacugccaagcauca

SEQ ID NO: 194354 - RNA, 19 nt, Homo sapiens
  misc_RNA (1)...(19): siRNA sense strand
uaugacaucugccaaagcu

SEQ ID NO: 194355 - RNA, 19 nt, Homo sapiens
  misc_RNA (1)...(19): siRNA sense strand
aaugucagauucucagcuu

SEQ ID NO: 194356 - RNA, 19 nt, Homo sapiens
  misc_RNA (1)...(19): siRNA sense strand
ucgagacuuugccaaggua

SEQ ID NO: 194357 - RNA, 19 nt, Homo sapiens
  misc_RNA (1)...(19): siRNA sense strand
gcaaaaggccauaaaaugc

SEQ ID NO: 194358 - RNA, 19 nt, Homo sapiens
  misc_RNA (1)...(19): siRNA sense strand
cugcaugauucuauccaaa

SEQ ID NO: 194359 - RNA, 19 nt, Homo sapiens
  misc_RNA (1)...(19): siRNA sense strand
uaaagcacauuuggaagac

SEQ ID NO: 194360 - RNA, 19 nt, Homo sapiens
  misc_RNA (1)...(19): siRNA sense strand
acaggagucuaaagcacuu

SEQ ID NO: 194361 - RNA, 19 nt, Homo sapiens
  misc_RNA (1)...(19): siRNA sense strand
acagauaccuuuucaagca

SEQ ID NO: 194362 - RNA, 19 nt, Homo sapiens
  misc_RNA (1)...(19): siRNA sense strand
aagcacauuuggaagacaa

SEQ ID NO: 194363 - RNA, 19 nt, Homo sapiens
  misc_RNA (1)...(19): siRNA sense strand
gcuaauaauaagccagaga

SEQ ID NO: 194364 - RNA, 19 nt, Homo sapiens
  misc_RNA (1)...(19): siRNA sense strand
caagagcacaacaauuugg

SEQ ID NO: 194365 - RNA, 19 nt, Homo sapiens
  misc_RNA (1)...(19): siRNA sense strand
ccugucagcugcaugugau

SEQ ID NO: 194366 - RNA, 19 nt, Homo sapiens
  misc_RNA (1)...(19): siRNA sense strand
gcugcugaauguuuaugau

SEQ ID NO: 194367 - RNA, 19 nt, Homo sapiens
  misc_RNA (1)...(19): siRNA sense strand
acagagcucuaccagucuu

SEQ ID NO: 194368 - RNA, 19 nt, Homo sapiens
  misc_RNA (1)...(19): siRNA sense strand
acaguugggugaaguugca

SEQ ID NO: 194369 - RNA, 19 nt, Homo sapiens
  misc_RNA (1)...(19): siRNA sense strand
guuugaccacuauuuauga

SEQ ID NO: 194370 - RNA, 19 nt, Homo sapiens
  misc_RNA (1)...(19): siRNA sense strand
gcuuauaggacugccauga

SEQ ID NO: 194371 - RNA, 19 nt, Homo sapiens
  misc_RNA (1)...(19): siRNA sense strand
caucaggccaaauguaaca

SEQ ID NO: 194372 - RNA, 19 nt, Homo sapiens
  misc_RNA (1)...(19): siRNA sense strand
gauucuauccaaauuccaa

SEQ ID NO: 194373 - RNA, 19 nt, Homo sapiens
  misc_RNA (1)...(19): siRNA sense strand
ggcaaguucaacaggauuu

SEQ ID NO: 194374 - RNA, 19 nt, Homo sapiens
  misc_RNA (1)...(19): siRNA sense strand
gaacuggcugcugaauguu

SEQ ID NO: 194375 - RNA, 19 nt, Homo sapiens
  misc_RNA (1)...(19): siRNA sense strand
cugcugaauguuuaugaua

SEQ ID NO: 194376 - RNA, 19 nt, Homo sapiens
  misc_RNA (1)...(19): siRNA sense strand
aagcaucaggccaaaugua

SEQ ID NO: 194377 - RNA, 19 nt, Homo sapiens
  misc_RNA (1)...(19): siRNA sense strand
uggcaucauuucccugugu

SEQ ID NO: 194378 - RNA, 19 nt, Homo sapiens
  misc_RNA (1)...(19): siRNA sense strand
ccaugaaacuccgaagacu

SEQ ID NO: 194379 - RNA, 19 nt, Homo sapiens
  misc_RNA (1)...(19): siRNA sense strand
auaauaagccagagaucga

SEQ ID NO: 194380 - RNA, 19 nt, Homo sapiens
  misc_RNA (1)...(19): siRNA sense strand
cuaauaauaagccagagau

SEQ ID NO: 194381 - RNA, 19 nt, Homo sapiens
  misc_RNA (1)...(19): siRNA sense strand
ugggugaaguugcauccuu

SEQ ID NO: 194382 - RNA, 19 nt, Homo sapiens
  misc_RNA (1)...(19): siRNA sense strand
caucauuucccuguguaaa

SEQ ID NO: 194383 - RNA, 19 nt, Homo sapiens
  misc_RNA (1)...(19): siRNA sense strand
gcguggauaugugucugaa

SEQ ID NO: 194384 - RNA, 19 nt, Homo sapiens
  misc_RNA (1)...(19): siRNA sense strand
gcacuaucccaugguggaa

SEQ ID NO: 194385 - RNA, 19 nt, Homo sapiens
  misc_RNA (1)...(19): siRNA sense strand
gagccugucagcugcaugu

SEQ ID NO: 194386 - RNA, 19 nt, Homo sapiens
  misc_RNA (1)...(19): siRNA sense strand
guacagauaccuuuucaag

SEQ ID NO: 194387 - RNA, 19 nt, Homo sapiens
  misc_RNA (1)...(19): siRNA sense strand
gucccucucugcguggaua

SEQ ID NO: 194388 - RNA, 19 nt, Homo sapiens
  misc_RNA (1)...(19): siRNA sense strand
ggagcugcuuccaauuugc

SEQ ID NO: 194389 - RNA, 19 nt, Homo sapiens
  misc_RNA (1)...(19): siRNA sense strand
uuagcugaccugaauaaug

SEQ ID NO: 194390 - RNA, 19 nt, Homo sapiens
  misc_RNA (1)...(19): siRNA sense strand
guggcaaguucaacaggau

SEQ ID NO: 194391 - RNA, 19 nt, Homo sapiens
  misc_RNA (1)...(19): siRNA sense strand
acaacaauuuggucaacgu

SEQ ID NO: 194392 - RNA, 19 nt, Homo sapiens
  misc_RNA (1)...(19): siRNA sense strand
gacuacaucaggagaagau

SEQ ID NO: 194393 - RNA, 19 nt, Homo sapiens
  misc_RNA (1)...(19): siRNA sense strand
uaauaagccagagaucgaa

SEQ ID NO: 194394 - RNA, 19 nt, Homo sapiens
  misc_RNA (1)...(19): siRNA sense strand
ugucagauucucagcuuau

SEQ ID NO: 194395 - RNA, 19 nt, Homo sapiens
  misc_RNA (1)...(19): siRNA sense strand
ggauauccugcagauuauu

SEQ ID NO: 194396 - RNA, 19 nt, Homo sapiens
  misc_RNA (1)...(19): siRNA sense strand
agcaucaggccaaauguaa

SEQ ID NO: 194397 - RNA, 19 nt, Homo sapiens
  misc_RNA (1)...(19): siRNA sense strand
gcccuuugcuuggaucucu

SEQ ID NO: 194398 - RNA, 19 nt, Homo sapiens
  misc_RNA (1)...(19): siRNA sense strand
gcugaauguuuaugauacg

SEQ ID NO: 194399 - RNA, 19 nt, Homo sapiens
  misc_RNA (1)...(19): siRNA sense strand
agacuuugccaagguacua

SEQ ID NO: 194400 - RNA, 19 nt, Homo sapiens
  misc_RNA (1)...(19): siRNA sense strand
caagcaaguggcaaguuca

SEQ ID NO: 194401 - RNA, 19 nt, Homo sapiens
  misc_RNA (1)...(19): siRNA sense strand
agacaaguacagauaccuu

SEQ ID NO: 194402 - RNA, 19 nt, Homo sapiens
  misc_RNA (1)...(19): siRNA sense strand
gcaucauuucccuguguaa

SEQ ID NO: 194403 - RNA, 19 nt, Homo sapiens
  misc_RNA (1)...(19): siRNA sense strand
cugcaaagaguguccaauc

SEQ ID NO: 194404 - RNA, 19 nt, Homo sapiens
  misc_RNA (1)...(19): siRNA sense strand
cuuauaggacugccaugaa

SEQ ID NO: 194405 - RNA, 19 nt, Homo sapiens
  misc_RNA (1)...(19): siRNA sense strand
caaagaguguccaaucauu

SEQ ID NO: 194406 - RNA, 19 nt, Homo sapiens
  misc_RNA (1)...(19): siRNA sense strand
uagcugaccugaauaaugu

SEQ ID NO: 194407 - RNA, 19 nt, Homo sapiens
  misc_RNA (1)...(19): siRNA sense strand
gcaugauucuauccaaauu

SEQ ID NO: 194408 - RNA, 19 nt, Homo sapiens
  misc_RNA (1)...(19): siRNA sense strand
ugaacuggcugcugaaugu

SEQ ID NO: 194409 - RNA, 19 nt, Homo sapiens
  misc_RNA (1)...(19): siRNA sense strand
gauauccugcagauuauua

SEQ ID NO: 194410 - RNA, 19 nt, Homo sapiens
  misc_RNA (1)...(19): siRNA sense strand
gagaagauguucgagacuu

SEQ ID NO: 194411 - RNA, 19 nt, Homo sapiens
  misc_RNA (1)...(19): siRNA sense strand
gcacuuuaauuaugacauc

SEQ ID NO: 194412 - RNA, 19 nt, Homo sapiens
  misc_RNA (1)...(19): siRNA sense strand
guaaagcacauuuggaaga

SEQ ID NO: 194413 - RNA, 19 nt, Homo sapiens
  misc_RNA (1)...(19): siRNA sense strand
gaauauugcacuccgacua

SEQ ID NO: 194414 - RNA, 19 nt, Homo sapiens
  misc_RNA (1)...(19): siRNA sense strand
uuauaggacugccaugaaa

SEQ ID NO: 194415 - RNA, 19 nt, Homo sapiens
  misc_RNA (1)...(19): siRNA sense strand
gggugaaguugcauccuuu

SEQ ID NO: 194416 - RNA, 19 nt, Homo sapiens
  misc_RNA (1)...(19): siRNA sense strand
gcaagagcacaacaauuug

SEQ ID NO: 194417 - RNA, 19 nt, Homo sapiens
  misc_RNA (1)...(19): siRNA sense strand
gcacaacaauuuggucaac

SEQ ID NO: 194418 - RNA, 19 nt, Homo sapiens
  misc_RNA (1)...(19): siRNA sense strand
agcaagagcacaacaauuu

SEQ ID NO: 194419 - RNA, 19 nt, Homo sapiens
  misc_RNA (1)...(19): siRNA sense strand
agaagauguucgagacuuu

SEQ ID NO: 194420 - RNA, 19 nt, Homo sapiens
  misc_RNA (1)...(19): siRNA sense strand
gagcaagagcacaacaauu

SEQ ID NO: 194421 - RNA, 19 nt, Homo sapiens
  misc_RNA (1)...(19): siRNA sense strand
ucaagcaaguggcaaguuc

SEQ ID NO: 194422 - RNA, 19 nt, Homo sapiens
  misc_RNA (1)...(19): siRNA sense strand
ccacgagacucaaacaacu

SEQ ID NO: 194423 - RNA, 19 nt, Homo sapiens
  misc_RNA (1)...(19): siRNA sense strand
cagcacaaccucaagcaaa

SEQ ID NO: 194424 - RNA, 19 nt, Homo sapiens
  misc_RNA (1)...(19): siRNA sense strand
gcaaagaguguccaaucau

SEQ ID NO: 194425 - RNA, 19 nt, Homo sapiens
  misc_RNA (1)...(19): siRNA sense strand
auggauauccugcagauua

SEQ ID NO: 194426 - RNA, 19 nt, Homo sapiens
  misc_RNA (1)...(19): siRNA sense strand
uguaacaucugcaaagagu

SEQ ID NO: 194427 - RNA, 19 nt, Homo sapiens
  misc_RNA (1)...(19): siRNA sense strand
guccggagcugcuuccaau

SEQ ID NO: 194428 - RNA, 19 nt, Homo sapiens
  misc_RNA (1)...(19): siRNA sense strand
gcaaguggcaaguucaaca

SEQ ID NO: 194429 - RNA, 19 nt, Homo sapiens
  misc_RNA (1)...(19): siRNA sense strand
gcuuccaauuugcuaauaa

SEQ ID NO: 194430 - RNA, 19 nt, Homo sapiens
  misc_RNA (1)...(19): siRNA sense strand
uggaagacaaguacagaua

SEQ ID NO: 194431 - RNA, 19 nt, Homo sapiens
  misc_RNA (1)...(19): siRNA sense strand
ggauccguguccugucuuu

SEQ ID NO: 194432 - RNA, 19 nt, Homo sapiens
  misc_RNA (1)...(19): siRNA sense strand
gucuuuagcugaccugaau

SEQ ID NO: 194433 - RNA, 19 nt, Homo sapiens
  misc_RNA (1)...(19): siRNA sense strand
gacaaguacagauaccuuu

SEQ ID NO: 194434 - RNA, 19 nt, Homo sapiens
  misc_RNA (1)...(19): siRNA sense strand
ccaagcaucaggccaaaug

SEQ ID NO: 194435 - RNA, 19 nt, Homo sapiens
  misc_RNA (1)...(19): siRNA sense strand
ggagcaagagcacaacaau

SEQ ID NO: 194436 - RNA, 19 nt, Homo sapiens
  misc_RNA (1)...(19): siRNA sense strand
guguaaagcacauuuggaa

SEQ ID NO: 194437 - RNA, 19 nt, Homo sapiens
  misc_RNA (1)...(19): siRNA sense strand
caagacaguugggugaagu

SEQ ID NO: 194438 - RNA, 19 nt, Homo sapiens
  misc_RNA (1)...(19): siRNA sense strand
gaagauguucgagacuuug

SEQ ID NO: 194439 - RNA, 19 nt, Homo sapiens
  misc_RNA (1)...(19): siRNA sense strand
gucagauucucagcuuaua

SEQ ID NO: 194440 - RNA, 19 nt, Homo sapiens
  misc_RNA (1)...(19): siRNA sense strand
uaacaucugcaaagagugu

SEQ ID NO: 194441 - RNA, 19 nt, Homo sapiens
  misc_RNA (1)...(19): siRNA sense strand
cggagcugcuuccaauuug

SEQ ID NO: 194442 - RNA, 19 nt, Homo sapiens
  misc_RNA (1)...(19): siRNA sense strand
gaagacaaguacagauacc

SEQ ID NO: 194443 - RNA, 19 nt, Homo sapiens
  misc_RNA (1)...(19): siRNA sense strand
ccauggauauccugcagau

SEQ ID NO: 194444 - RNA, 19 nt, Homo sapiens
  misc_RNA (1)...(19): siRNA sense strand
ggcaucauuucccugugua

SEQ ID NO: 194445 - RNA, 19 nt, Homo sapiens
  misc_RNA (1)...(19): siRNA sense strand
uggauauccugcagauuau

SEQ ID NO: 194446 - RNA, 19 nt, Homo sapiens
  misc_RNA (1)...(19): siRNA sense strand
ggaagacaaguacagauac

SEQ ID NO: 194447 - RNA, 19 nt, Homo sapiens
  misc_RNA (1)...(19): siRNA sense strand
ugcaaagaguguccaauca

SEQ ID NO: 194448 - RNA, 19 nt, Homo sapiens
  misc_RNA (1)...(19): siRNA sense strand
guggauaugugucugaacu

SEQ ID NO: 194449 - RNA, 19 nt, Homo sapiens
  misc_RNA (1)...(19): siRNA sense strand
acuggcugcugaauguuua

SEQ ID NO: 194450 - RNA, 19 nt, Homo sapiens
  misc_RNA (1)...(19): siRNA sense strand
acuaucccaugguggaaua

SEQ ID NO: 194451 - RNA, 19 nt, Homo sapiens
  misc_RNA (1)...(19): siRNA sense strand
ccggagcugcuuccaauuu

SEQ ID NO: 194452 - RNA, 19 nt, Homo sapiens
  misc_RNA (1)...(19): siRNA sense strand
ccaaauuccaagacaguug

SEQ ID NO: 194453 - RNA, 19 nt, Homo sapiens
  misc_RNA (1)...(19): siRNA sense strand
cagaaacugccaagcauca

SEQ ID NO: 194454 - RNA, 19 nt, Homo sapiens
  misc_RNA (1)...(19): siRNA sense strand
uaugacaucugccaaagcu

SEQ ID NO: 194455 - RNA, 19 nt, Homo sapiens
  misc_RNA (1)...(19): siRNA sense strand
aaugucagauucucagcuu

SEQ ID NO: 194456 - RNA, 19 nt, Homo sapiens
  misc_RNA (1)...(19): siRNA sense strand
ucgagacuuugccaaggua

SEQ ID NO: 194457 - RNA, 19 nt, Homo sapiens
  misc_RNA (1)...(19): siRNA sense strand
gcaaaaggccauaaaaugc

SEQ ID NO: 194458 - RNA, 19 nt, Homo sapiens
  misc_RNA (1)...(19): siRNA sense strand
cugcaugauucuauccaaa

SEQ ID NO: 194459 - RNA, 19 nt, Homo sapiens
  misc_RNA (1)...(19): siRNA sense strand
uaaagcacauuuggaagac

SEQ ID NO: 194460 - RNA, 19 nt, Homo sapiens
  misc_RNA (1)...(19): siRNA sense strand
acaggagucuaaagcacuu

SEQ ID NO: 194461 - RNA, 19 nt, Homo sapiens
  misc_RNA (1)...(19): siRNA sense strand
acagauaccuuuucaagca

SEQ ID NO: 194462 - RNA, 19 nt, Homo sapiens
  misc_RNA (1)...(19): siRNA sense strand
aagcacauuuggaagacaa

SEQ ID NO: 194463 - RNA, 19 nt, Homo sapiens
  misc_RNA (1)...(19): siRNA sense strand
gcuaauaauaagccagaga

SEQ ID NO: 194464 - RNA, 19 nt, Homo sapiens
  misc_RNA (1)...(19): siRNA sense strand
caagagcacaacaauuugg

SEQ ID NO: 194465 - RNA, 19 nt, Homo sapiens
  misc_RNA (1)...(19): siRNA sense strand
ccugucagcugcaugugau

SEQ ID NO: 194466 - RNA, 19 nt, Homo sapiens
  misc_RNA (1)...(19): siRNA sense strand
gcugcugaauguuuaugau

SEQ ID NO: 194467 - RNA, 19 nt, Homo sapiens
  misc_RNA (1)...(19): siRNA sense strand
acagagcucuaccagucuu

SEQ ID NO: 194468 - RNA, 19 nt, Homo sapiens
  misc_RNA (1)...(19): siRNA sense strand
acaguugggugaaguugca

SEQ ID NO: 194469 - RNA, 19 nt, Homo sapiens
  misc_RNA (1)...(19): siRNA sense strand
guuugaccacuauuuauga

SEQ ID NO: 194470 - RNA, 19 nt, Homo sapiens
  misc_RNA (1)...(19): siRNA sense strand
gcuuauaggacugccauga

SEQ ID NO: 194471 - RNA, 19 nt, Homo sapiens
  misc_RNA (1)...(19): siRNA sense strand
caucaggccaaauguaaca

SEQ ID NO: 194472 - RNA, 19 nt, Homo sapiens
  misc_RNA (1)...(19): siRNA sense strand
gauucuauccaaauuccaa

SEQ ID NO: 194473 - RNA, 19 nt, Homo sapiens
  misc_RNA (1)...(19): siRNA sense strand
ggcaaguucaacaggauuu

SEQ ID NO: 194474 - RNA, 19 nt, Homo sapiens
  misc_RNA (1)...(19): siRNA sense strand
gaacuggcugcugaauguu

SEQ ID NO: 194475 - RNA, 19 nt, Homo sapiens
  misc_RNA (1)...(19): siRNA sense strand
cugcugaauguuuaugaua

SEQ ID NO: 194476 - RNA, 19 nt, Homo sapiens
  misc_RNA (1)...(19): siRNA sense strand
aagcaucaggccaaaugua

SEQ ID NO: 194477 - RNA, 19 nt, Homo sapiens
  misc_RNA (1)...(19): siRNA sense strand
uggcaucauuucccugugu

SEQ ID NO: 194478 - RNA, 19 nt, Homo sapiens
  misc_RNA (1)...(19): siRNA sense strand
ccaugaaacuccgaagacu

SEQ ID NO: 194479 - RNA, 19 nt, Homo sapiens
  misc_RNA (1)...(19): siRNA sense strand
auaauaagccagagaucga

SEQ ID NO: 194480 - RNA, 19 nt, Homo sapiens
  misc_RNA (1)...(19): siRNA sense strand
cuaauaauaagccagagau

SEQ ID NO: 194481 - RNA, 19 nt, Homo sapiens
  misc_RNA (1)...(19): siRNA sense strand
ugggugaaguugcauccuu

SEQ ID NO: 194482 - RNA, 19 nt, Homo sapiens
  misc_RNA (1)...(19): siRNA sense strand
caucauuucccuguguaaa

SEQ ID NO: 194483 - RNA, 19 nt, Homo sapiens
  misc_RNA (1)...(19): siRNA sense strand
gcguggauaugugucugaa

SEQ ID NO: 194484 - RNA, 19 nt, Homo sapiens
  misc_RNA (1)...(19): siRNA sense strand
gcacuaucccaugguggaa

SEQ ID NO: 194485 - RNA, 19 nt, Homo sapiens
  misc_RNA (1)...(19): siRNA sense strand
gagccugucagcugcaugu

SEQ ID NO: 194486 - RNA, 19 nt, Homo sapiens
  misc_RNA (1)...(19): siRNA sense strand
guacagauaccuuuucaag

SEQ ID NO: 194487 - RNA, 19 nt, Homo sapiens
  misc_RNA (1)...(19): siRNA sense strand
gucccucucugcguggaua

SEQ ID NO: 194488 - RNA, 19 nt, Homo sapiens
  misc_RNA (1)...(19): siRNA sense strand
ggagcugcuuccaauuugc

SEQ ID NO: 194489 - RNA, 19 nt, Homo sapiens
  misc_RNA (1)...(19): siRNA sense strand
uuagcugaccugaauaaug

SEQ ID NO: 194490 - RNA, 19 nt, Homo sapiens
  misc_RNA (1)...(19): siRNA sense strand
guggcaaguucaacaggau

SEQ ID NO: 194491 - RNA, 19 nt, Homo sapiens
  misc_RNA (1)...(19): siRNA sense strand
acaacaauuuggucaacgu

SEQ ID NO: 194492 - RNA, 19 nt, Homo sapiens
  misc_RNA (1)...(19): siRNA sense strand
gacuacaucaggagaagau

SEQ ID NO: 194493 - RNA, 19 nt, Homo sapiens
  misc_RNA (1)...(19): siRNA sense strand
uaauaagccagagaucgaa

SEQ ID NO: 194494 - RNA, 19 nt, Homo sapiens
  misc_RNA (1)...(19): siRNA sense strand
ugucagauucucagcuuau

SEQ ID NO: 194495 - RNA, 19 nt, Homo sapiens
  misc_RNA (1)...(19): siRNA sense strand
ggauauccugcagauuauu

SEQ ID NO: 194496 - RNA, 19 nt, Homo sapiens
  misc_RNA (1)...(19): siRNA sense strand
agcaucaggccaaauguaa

SEQ ID NO: 194497 - RNA, 19 nt, Homo sapiens
  misc_RNA (1)...(19): siRNA sense strand
gcccuuugcuuggaucucu

SEQ ID NO: 194498 - RNA, 19 nt, Homo sapiens
  misc_RNA (1)...(19): siRNA sense strand
gcugaauguuuaugauacg

SEQ ID NO: 194499 - RNA, 19 nt, Homo sapiens
  misc_RNA (1)...(19): siRNA sense strand
agacuuugccaagguacua

SEQ ID NO: 194500 - RNA, 19 nt, Homo sapiens
  misc_RNA (1)...(19): siRNA sense strand
caagcaaguggcaaguuca

SEQ ID NO: 194501 - RNA, 19 nt, Homo sapiens
  misc_RNA (1)...(19): siRNA sense strand
agacaaguacagauaccuu

SEQ ID NO: 194502 - RNA, 19 nt, Homo sapiens
  misc_RNA (1)...(19): siRNA sense strand
gcaucauuucccuguguaa

SEQ ID NO: 194503 - RNA, 19 nt, Homo sapiens
  misc_RNA (1)...(19): siRNA sense strand
cugcaaagaguguccaauc

SEQ ID NO: 194504 - RNA, 19 nt, Homo sapiens
  misc_RNA (1)...(19): siRNA sense strand
cuuauaggacugccaugaa

SEQ ID NO: 194505 - RNA, 19 nt, Homo sapiens
  misc_RNA (1)...(19): siRNA sense strand
caaagaguguccaaucauu

SEQ ID NO: 194506 - RNA, 19 nt, Homo sapiens
  misc_RNA (1)...(19): siRNA sense strand
uagcugaccugaauaaugu

SEQ ID NO: 194507 - RNA, 19 nt, Homo sapiens
  misc_RNA (1)...(19): siRNA sense strand
gcaugauucuauccaaauu

SEQ ID NO: 194508 - RNA, 19 nt, Homo sapiens
  misc_RNA (1)...(19): siRNA sense strand
ugaacuggcugcugaaugu

SEQ ID NO: 194509 - RNA, 19 nt, Homo sapiens
  misc_RNA (1)...(19): siRNA sense strand
gauauccugcagauuauua

SEQ ID NO: 194510 - RNA, 19 nt, Homo sapiens
  misc_RNA (1)...(19): siRNA sense strand
gagaagauguucgagacuu

SEQ ID NO: 194511 - RNA, 19 nt, Homo sapiens
  misc_RNA (1)...(19): siRNA sense strand
gcacuuuaauuaugacauc

SEQ ID NO: 194512 - RNA, 19 nt, Homo sapiens
  misc_RNA (1)...(19): siRNA sense strand
guaaagcacauuuggaaga

SEQ ID NO: 194513 - RNA, 19 nt, Homo sapiens
  misc_RNA (1)...(19): siRNA sense strand
gaauauugcacuccgacua

SEQ ID NO: 194514 - RNA, 19 nt, Homo sapiens
  misc_RNA (1)...(19): siRNA sense strand
uuauaggacugccaugaaa

SEQ ID NO: 194515 - RNA, 19 nt, Homo sapiens
  misc_RNA (1)...(19): siRNA sense strand
gggugaaguugcauccuuu

SEQ ID NO: 194516 - RNA, 19 nt, Homo sapiens
  misc_RNA (1)...(19): siRNA sense strand
gcaagagcacaacaauuug

SEQ ID NO: 194517 - RNA, 19 nt, Homo sapiens
  misc_RNA (1)...(19): siRNA sense strand
gcacaacaauuuggucaac

SEQ ID NO: 194518 - RNA, 19 nt, Homo sapiens
  misc_RNA (1)...(19): siRNA sense strand
agcaagagcacaacaauuu

SEQ ID NO: 194519 - RNA, 19 nt, Homo sapiens
  misc_RNA (1)...(19): siRNA sense strand
agaagauguucgagacuuu

SEQ ID NO: 194520 - RNA, 19 nt, Homo sapiens
  misc_RNA (1)...(19): siRNA sense strand
gagcaagagcacaacaauu

SEQ ID NO: 194521 - RNA, 19 nt, Homo sapiens
  misc_RNA (1)...(19): siRNA sense strand
ucaagcaaguggcaaguuc

SEQ ID NO: 194522 - RNA, 19 nt, Homo sapiens
  misc_RNA (1)...(19): siRNA sense strand
ccacgagacucaaacaacu

SEQ ID NO: 194523 - RNA, 19 nt, Homo sapiens
  misc_RNA (1)...(19): siRNA sense strand
cagcacaaccucaagcaaa

SEQ ID NO: 194524 - RNA, 19 nt, Homo sapiens
  misc_RNA (1)...(19): siRNA sense strand
gcaaagaguguccaaucau

SEQ ID NO: 194525 - RNA, 19 nt, Homo sapiens
  misc_RNA (1)...(19): siRNA sense strand
auggauauccugcagauua

SEQ ID NO: 194526 - RNA, 19 nt, Homo sapiens
  misc_RNA (1)...(19): siRNA sense strand
uguaacaucugcaaagagu

SEQ ID NO: 194527 - RNA, 19 nt, Homo sapiens
  misc_RNA (1)...(19): siRNA sense strand
guccggagcugcuuccaau

SEQ ID NO: 194528 - RNA, 19 nt, Homo sapiens
  misc_RNA (1)...(19): siRNA sense strand
gcaaguggcaaguucaaca

SEQ ID NO: 194529 - RNA, 19 nt, Homo sapiens
  misc_RNA (1)...(19): siRNA sense strand
gcuuccaauuugcuaauaa

SEQ ID NO: 194530 - RNA, 19 nt, Homo sapiens
  misc_RNA (1)...(19): siRNA sense strand
uggaagacaaguacagaua

SEQ ID NO: 194531 - RNA, 19 nt, Homo sapiens
  misc_RNA (1)...(19): siRNA sense strand
ggauccguguccugucuuu

SEQ ID NO: 194532 - RNA, 19 nt, Homo sapiens
  misc_RNA (1)...(19): siRNA sense strand
gucuuuagcugaccugaau

SEQ ID NO: 194533 - RNA, 19 nt, Homo sapiens
  misc_RNA (1)...(19): siRNA sense strand
gacaaguacagauaccuuu

SEQ ID NO: 194534 - RNA, 19 nt, Homo sapiens
  misc_RNA (1)...(19): siRNA sense strand
ccaagcaucaggccaaaug

SEQ ID NO: 194535 - RNA, 19 nt, Homo sapiens
  misc_RNA (1)...(19): siRNA sense strand
ggagcaagagcacaacaau

SEQ ID NO: 194536 - RNA, 19 nt, Homo sapiens
  misc_RNA (1)...(19): siRNA sense strand
guguaaagcacauuuggaa

SEQ ID NO: 194537 - RNA, 19 nt, Homo sapiens
  misc_RNA (1)...(19): siRNA sense strand
caagacaguugggugaagu

SEQ ID NO: 194538 - RNA, 19 nt, Homo sapiens
  misc_RNA (1)...(19): siRNA sense strand
gaagauguucgagacuuug

SEQ ID NO: 194539 - RNA, 19 nt, Homo sapiens
  misc_RNA (1)...(19): siRNA sense strand
gucagauucucagcuuaua

SEQ ID NO: 194540 - RNA, 19 nt, Homo sapiens
  misc_RNA (1)...(19): siRNA sense strand
uaacaucugcaaagagugu

SEQ ID NO: 194541 - RNA, 19 nt, Homo sapiens
  misc_RNA (1)...(19): siRNA sense strand
cggagcugcuuccaauuug

SEQ ID NO: 194542 - RNA, 19 nt, Homo sapiens
  misc_RNA (1)...(19): siRNA sense strand
gaagacaaguacagauacc

SEQ ID NO: 194543 - RNA, 19 nt, Homo sapiens
  misc_RNA (1)...(19): siRNA sense strand
ccauggauauccugcagau

SEQ ID NO: 194544 - RNA, 19 nt, Homo sapiens
  misc_RNA (1)...(19): siRNA sense strand
ggcaucauuucccugugua

SEQ ID NO: 194545 - RNA, 19 nt, Homo sapiens
  misc_RNA (1)...(19): siRNA sense strand
uggauauccugcagauuau

SEQ ID NO: 194546 - RNA, 19 nt, Homo sapiens
  misc_RNA (1)...(19): siRNA sense strand
ggaagacaaguacagauac

SEQ ID NO: 194547 - RNA, 19 nt, Homo sapiens
  misc_RNA (1)...(19): siRNA sense strand
ugcaaagaguguccaauca

SEQ ID NO: 194548 - RNA, 19 nt, Homo sapiens
  misc_RNA (1)...(19): siRNA sense strand
guggauaugugucugaacu

SEQ ID NO: 194549 - RNA, 19 nt, Homo sapiens
  misc_RNA (1)...(19): siRNA sense strand
acuggcugcugaauguuua

SEQ ID NO: 194550 - RNA, 19 nt, Homo sapiens
  misc_RNA (1)...(19): siRNA sense strand
acuaucccaugguggaaua

SEQ ID NO: 194551 - RNA, 19 nt, Homo sapiens
  misc_RNA (1)...(19): siRNA sense strand
ccggagcugcuuccaauuu

SEQ ID NO: 194552 - RNA, 19 nt, Homo sapiens
  misc_RNA (1)...(19): siRNA sense strand
ccaaauuccaagacaguug

SEQ ID NO: 194553 - RNA, 19 nt, Homo sapiens
  misc_RNA (1)...(19): siRNA sense strand
cagaaacugccaagcauca

SEQ ID NO: 194554 - RNA, 19 nt, Homo sapiens
  misc_RNA (1)...(19): siRNA sense strand
uaugacaucugccaaagcu

SEQ ID NO: 194555 - RNA, 19 nt, Homo sapiens
  misc_RNA (1)...(19): siRNA sense strand
aaugucagauucucagcuu

SEQ ID NO: 194556 - RNA, 19 nt, Homo sapiens
  misc_RNA (1)...(19): siRNA sense strand
ucgagacuuugccaaggua

SEQ ID NO: 194557 - RNA, 19 nt, Homo sapiens
  misc_RNA (1)...(19): siRNA sense strand
gcaaaaggccauaaaaugc

SEQ ID NO: 194558 - RNA, 19 nt, Homo sapiens
  misc_RNA (1)...(19): siRNA sense strand
cugcaugauucuauccaaa

SEQ ID NO: 194559 - RNA, 19 nt, Homo sapiens
  misc_RNA (1)...(19): siRNA sense strand
uaaagcacauuuggaagac

SEQ ID NO: 194560 - RNA, 19 nt, Homo sapiens
  misc_RNA (1)...(19): siRNA sense strand
acaggagucuaaagcacuu

SEQ ID NO: 194561 - RNA, 19 nt, Homo sapiens
  misc_RNA (1)...(19): siRNA sense strand
acagauaccuuuucaagca

SEQ ID NO: 194562 - RNA, 19 nt, Homo sapiens
  misc_RNA (1)...(19): siRNA sense strand
aagcacauuuggaagacaa

SEQ ID NO: 194563 - RNA, 19 nt, Homo sapiens
  misc_RNA (1)...(19): siRNA sense strand
gcuaauaauaagccagaga

SEQ ID NO: 194564 - RNA, 19 nt, Homo sapiens
  misc_RNA (1)...(19): siRNA sense strand
caagagcacaacaauuugg

SEQ ID NO: 194565 - RNA, 19 nt, Homo sapiens
  misc_RNA (1)...(19): siRNA sense strand
ccugucagcugcaugugau

SEQ ID NO: 194566 - RNA, 19 nt, Homo sapiens
  misc_RNA (1)...(19): siRNA sense strand
gcugcugaauguuuaugau

SEQ ID NO: 194567 - RNA, 19 nt, Homo sapiens
  misc_RNA (1)...(19): siRNA sense strand
acagagcucuaccagucuu

SEQ ID NO: 194568 - RNA, 19 nt, Homo sapiens
  misc_RNA (1)...(19): siRNA sense strand
acaguugggugaaguugca

SEQ ID NO: 194569 - RNA, 19 nt, Homo sapiens
  misc_RNA (1)...(19): siRNA sense strand
guuugaccacuauuuauga

SEQ ID NO: 194570 - RNA, 19 nt, Homo sapiens
  misc_RNA (1)...(19): siRNA sense strand
gcuuauaggacugccauga

SEQ ID NO: 194571 - RNA, 19 nt, Homo sapiens
  misc_RNA (1)...(19): siRNA sense strand
caucaggccaaauguaaca

SEQ ID NO: 194572 - RNA, 19 nt, Homo sapiens
  misc_RNA (1)...(19): siRNA sense strand
gauucuauccaaauuccaa

SEQ ID NO: 194573 - RNA, 19 nt, Homo sapiens
  misc_RNA (1)...(19): siRNA sense strand
ggcaaguucaacaggauuu

SEQ ID NO: 194574 - RNA, 19 nt, Homo sapiens
  misc_RNA (1)...(19): siRNA sense strand
gaacuggcugcugaauguu

SEQ ID NO: 194575 - RNA, 19 nt, Homo sapiens
  misc_RNA (1)...(19): siRNA sense strand
cugcugaauguuuaugaua

SEQ ID NO: 194576 - RNA, 19 nt, Homo sapiens
  misc_RNA (1)...(19): siRNA sense strand
aagcaucaggccaaaugua

SEQ ID NO: 194577 - RNA, 19 nt, Homo sapiens
  misc_RNA (1)...(19): siRNA sense strand
uggcaucauuucccugugu

SEQ ID NO: 194578 - RNA, 19 nt, Homo sapiens
  misc_RNA (1)...(19): siRNA sense strand
ccaugaaacuccgaagacu

SEQ ID NO: 194579 - RNA, 19 nt, Homo sapiens
  misc_RNA (1)...(19): siRNA sense strand
auaauaagccagagaucga

SEQ ID NO: 194580 - RNA, 19 nt, Homo sapiens
  misc_RNA (1)...(19): siRNA sense strand
cuaauaauaagccagagau

SEQ ID NO: 194581 - RNA, 19 nt, Homo sapiens
  misc_RNA (1)...(19): siRNA sense strand
ugggugaaguugcauccuu

SEQ ID NO: 194582 - RNA, 19 nt, Homo sapiens
  misc_RNA (1)...(19): siRNA sense strand
caucauuucccuguguaaa

SEQ ID NO: 194583 - RNA, 19 nt, Homo sapiens
  misc_RNA (1)...(19): siRNA sense strand
gcguggauaugugucugaa

SEQ ID NO: 194584 - RNA, 19 nt, Homo sapiens
  misc_RNA (1)...(19): siRNA sense strand
gcacuaucccaugguggaa

SEQ ID NO: 194585 - RNA, 19 nt, Homo sapiens
  misc_RNA (1)...(19): siRNA sense strand
gagccugucagcugcaugu

SEQ ID NO: 194586 - RNA, 19 nt, Homo sapiens
  misc_RNA (1)...(19): siRNA sense strand
guacagauaccuuuucaag

SEQ ID NO: 194587 - RNA, 19 nt, Homo sapiens
  misc_RNA (1)...(19): siRNA sense strand
gucccucucugcguggaua

SEQ ID NO: 194588 - RNA, 19 nt, Homo sapiens
  misc_RNA (1)...(19): siRNA sense strand
ggagcugcuuccaauuugc

SEQ ID NO: 194589 - RNA, 19 nt, Homo sapiens
  misc_RNA (1)...(19): siRNA sense strand
uuagcugaccugaauaaug

SEQ ID NO: 194590 - RNA, 19 nt, Homo sapiens
  misc_RNA (1)...(19): siRNA sense strand
guggcaaguucaacaggau

SEQ ID NO: 194591 - RNA, 19 nt, Homo sapiens
  misc_RNA (1)...(19): siRNA sense strand
acaacaauuuggucaacgu

SEQ ID NO: 194592 - RNA, 19 nt, Homo sapiens
  misc_RNA (1)...(19): siRNA sense strand
gacuacaucaggagaagau

SEQ ID NO: 194593 - RNA, 19 nt, Homo sapiens
  misc_RNA (1)...(19): siRNA sense strand
uaauaagccagagaucgaa

SEQ ID NO: 194594 - RNA, 19 nt, Homo sapiens
  misc_RNA (1)...(19): siRNA sense strand
ugucagauucucagcuuau

SEQ ID NO: 194595 - RNA, 19 nt, Homo sapiens
  misc_RNA (1)...(19): siRNA sense strand
ggauauccugcagauuauu

SEQ ID NO: 194596 - RNA, 19 nt, Homo sapiens
  misc_RNA (1)...(19): siRNA sense strand
agcaucaggccaaauguaa

SEQ ID NO: 194597 - RNA, 19 nt, Homo sapiens
  misc_RNA (1)...(19): siRNA sense strand
gcccuuugcuuggaucucu

SEQ ID NO: 194598 - RNA, 19 nt, Homo sapiens
  misc_RNA (1)...(19): siRNA sense strand
gcugaauguuuaugauacg

SEQ ID NO: 194599 - RNA, 19 nt, Homo sapiens
  misc_RNA (1)...(19): siRNA sense strand
agacuuugccaagguacua

SEQ ID NO: 194600 - RNA, 19 nt, Homo sapiens
  misc_RNA (1)...(19): siRNA sense strand
caagcaaguggcaaguuca

SEQ ID NO: 194601 - RNA, 19 nt, Homo sapiens
  misc_RNA (1)...(19): siRNA sense strand
agacaaguacagauaccuu

SEQ ID NO: 194602 - RNA, 19 nt, Homo sapiens
  misc_RNA (1)...(19): siRNA sense strand
gcaucauuucccuguguaa

SEQ ID NO: 194603 - RNA, 19 nt, Homo sapiens
  misc_RNA (1)...(19): siRNA sense strand
cugcaaagaguguccaauc

SEQ ID NO: 194604 - RNA, 19 nt, Homo sapiens
  misc_RNA (1)...(19): siRNA sense strand
cuuauaggacugccaugaa

SEQ ID NO: 194605 - RNA, 19 nt, Homo sapiens
  misc_RNA (1)...(19): siRNA sense strand
caaagaguguccaaucauu

SEQ ID NO: 194606 - RNA, 19 nt, Homo sapiens
  misc_RNA (1)...(19): siRNA sense strand
uagcugaccugaauaaugu

SEQ ID NO: 194607 - RNA, 19 nt, Homo sapiens
  misc_RNA (1)...(19): siRNA sense strand
gcaugauucuauccaaauu

SEQ ID NO: 194608 - RNA, 19 nt, Homo sapiens
  misc_RNA (1)...(19): siRNA sense strand
ugaacuggcugcugaaugu

SEQ ID NO: 194609 - RNA, 19 nt, Homo sapiens
  misc_RNA (1)...(19): siRNA sense strand
gauauccugcagauuauua

SEQ ID NO: 194610 - RNA, 19 nt, Homo sapiens
  misc_RNA (1)...(19): siRNA sense strand
gagaagauguucgagacuu

SEQ ID NO: 194611 - RNA, 19 nt, Homo sapiens
  misc_RNA (1)...(19): siRNA sense strand
gcacuuuaauuaugacauc

SEQ ID NO: 194612 - RNA, 19 nt, Homo sapiens
  misc_RNA (1)...(19): siRNA sense strand
guaaagcacauuuggaaga

SEQ ID NO: 194613 - RNA, 19 nt, Homo sapiens
  misc_RNA (1)...(19): siRNA sense strand
gaauauugcacuccgacua

SEQ ID NO: 194614 - RNA, 19 nt, Homo sapiens
  misc_RNA (1)...(19): siRNA sense strand
uuauaggacugccaugaaa

SEQ ID NO: 194615 - RNA, 19 nt, Homo sapiens
  misc_RNA (1)...(19): siRNA sense strand
gggugaaguugcauccuuu

SEQ ID NO: 194616 - RNA, 19 nt, Homo sapiens
  misc_RNA (1)...(19): siRNA sense strand
gcaagagcacaacaauuug

SEQ ID NO: 194617 - RNA, 19 nt, Homo sapiens
  misc_RNA (1)...(19): siRNA sense strand
gcacaacaauuuggucaac

SEQ ID NO: 194618 - RNA, 19 nt, Homo sapiens
  misc_RNA (1)...(19): siRNA sense strand
agcaagagcacaacaauuu

SEQ ID NO: 194619 - RNA, 19 nt, Homo sapiens
  misc_RNA (1)...(19): siRNA sense strand
agaagauguucgagacuuu

SEQ ID NO: 194620 - RNA, 19 nt, Homo sapiens
  misc_RNA (1)...(19): siRNA sense strand
gagcaagagcacaacaauu

SEQ ID NO: 194621 - RNA, 19 nt, Homo sapiens
  misc_RNA (1)...(19): siRNA sense strand
ucaagcaaguggcaaguuc

SEQ ID NO: 194622 - RNA, 19 nt, Homo sapiens
  misc_RNA (1)...(19): siRNA sense strand
ccacgagacucaaacaacu

SEQ ID NO: 194623 - RNA, 19 nt, Homo sapiens
  misc_RNA (1)...(19): siRNA sense strand
cagcacaaccucaagcaaa

SEQ ID NO: 194624 - RNA, 19 nt, Homo sapiens
  misc_RNA (1)...(19): siRNA sense strand
gcaaagaguguccaaucau

SEQ ID NO: 194625 - RNA, 19 nt, Homo sapiens
  misc_RNA (1)...(19): siRNA sense strand
auggauauccugcagauua

SEQ ID NO: 194626 - RNA, 19 nt, Homo sapiens
  misc_RNA (1)...(19): siRNA sense strand
uguaacaucugcaaagagu

SEQ ID NO: 194627 - RNA, 19 nt, Homo sapiens
  misc_RNA (1)...(19): siRNA sense strand
guccggagcugcuuccaau

SEQ ID NO: 194628 - RNA, 19 nt, Homo sapiens
  misc_RNA (1)...(19): siRNA sense strand
gcaaguggcaaguucaaca

SEQ ID NO: 194629 - RNA, 19 nt, Homo sapiens
  misc_RNA (1)...(19): siRNA sense strand
gcuuccaauuugcuaauaa

SEQ ID NO: 194630 - RNA, 19 nt, Homo sapiens
  misc_RNA (1)...(19): siRNA sense strand
uggaagacaaguacagaua

SEQ ID NO: 194631 - RNA, 19 nt, Homo sapiens
  misc_RNA (1)...(19): siRNA sense strand
ggauccguguccugucuuu

SEQ ID NO: 194632 - RNA, 19 nt, Homo sapiens
  misc_RNA (1)...(19): siRNA sense strand
gucuuuagcugaccugaau

SEQ ID NO: 194633 - RNA, 19 nt, Homo sapiens
  misc_RNA (1)...(19): siRNA sense strand
gacaaguacagauaccuuu

SEQ ID NO: 194634 - RNA, 19 nt, Homo sapiens
  misc_RNA (1)...(19): siRNA sense strand
ccaagcaucaggccaaaug

SEQ ID NO: 194635 - RNA, 19 nt, Homo sapiens
  misc_RNA (1)...(19): siRNA sense strand
ggagcaagagcacaacaau

SEQ ID NO: 194636 - RNA, 19 nt, Homo sapiens
  misc_RNA (1)...(19): siRNA sense strand
guguaaagcacauuuggaa

SEQ ID NO: 194637 - RNA, 19 nt, Homo sapiens
  misc_RNA (1)...(19): siRNA sense strand
caagacaguugggugaagu

SEQ ID NO: 194638 - RNA, 19 nt, Homo sapiens
  misc_RNA (1)...(19): siRNA sense strand
gaagauguucgagacuuug

SEQ ID NO: 194639 - RNA, 19 nt, Homo sapiens
  misc_RNA (1)...(19): siRNA sense strand
gucagauucucagcuuaua

SEQ ID NO: 194640 - RNA, 19 nt, Homo sapiens
  misc_RNA (1)...(19): siRNA sense strand
uaacaucugcaaagagugu

SEQ ID NO: 194641 - RNA, 19 nt, Homo sapiens
  misc_RNA (1)...(19): siRNA sense strand
cggagcugcuuccaauuug

SEQ ID NO: 194642 - RNA, 19 nt, Homo sapiens
  misc_RNA (1)...(19): siRNA sense strand
gaagacaaguacagauacc

SEQ ID NO: 194643 - RNA, 19 nt, Homo sapiens
  misc_RNA (1)...(19): siRNA sense strand
ccauggauauccugcagau

SEQ ID NO: 194644 - RNA, 19 nt, Homo sapiens
  misc_RNA (1)...(19): siRNA sense strand
ggcaucauuucccugugua

SEQ ID NO: 194645 - RNA, 19 nt, Homo sapiens
  misc_RNA (1)...(19): siRNA sense strand
uggauauccugcagauuau

SEQ ID NO: 194646 - RNA, 19 nt, Homo sapiens
  misc_RNA (1)...(19): siRNA sense strand
ggaagacaaguacagauac

SEQ ID NO: 194647 - RNA, 19 nt, Homo sapiens
  misc_RNA (1)...(19): siRNA sense strand
ugcaaagaguguccaauca

SEQ ID NO: 194648 - RNA, 19 nt, Homo sapiens
  misc_RNA (1)...(19): siRNA sense strand
guggauaugugucugaacu

SEQ ID NO: 194649 - RNA, 19 nt, Homo sapiens
  misc_RNA (1)...(19): siRNA sense strand
acuggcugcugaauguuua

SEQ ID NO: 194650 - RNA, 19 nt, Homo sapiens
  misc_RNA (1)...(19): siRNA sense strand
acuaucccaugguggaaua

SEQ ID NO: 194651 - RNA, 19 nt, Homo sapiens
  misc_RNA (1)...(19): siRNA sense strand
ccggagcugcuuccaauuu

SEQ ID NO: 194652 - RNA, 19 nt, Homo sapiens
  misc_RNA (1)...(19): siRNA sense strand
ccaaauuccaagacaguug

SEQ ID NO: 194653 - RNA, 19 nt, Homo sapiens
  misc_RNA (1)...(19): siRNA sense strand
cagaaacugccaagcauca

SEQ ID NO: 194654 - RNA, 19 nt, Homo sapiens
  misc_RNA (1)...(19): siRNA sense strand
uaugacaucugccaaagcu

SEQ ID NO: 194655 - RNA, 19 nt, Homo sapiens
  misc_RNA (1)...(19): siRNA sense strand
aaugucagauucucagcuu

SEQ ID NO: 194656 - RNA, 19 nt, Homo sapiens
  misc_RNA (1)...(19): siRNA sense strand
ucgagacuuugccaaggua

SEQ ID NO: 194657 - RNA, 19 nt, Homo sapiens
  misc_RNA (1)...(19): siRNA sense strand
gcaaaaggccauaaaaugc

SEQ ID NO: 194658 - RNA, 19 nt, Homo sapiens
  misc_RNA (1)...(19): siRNA sense strand
cugcaugauucuauccaaa

SEQ ID NO: 194659 - RNA, 19 nt, Homo sapiens
  misc_RNA (1)...(19): siRNA sense strand
uaaagcacauuuggaagac

SEQ ID NO: 194660 - RNA, 19 nt, Homo sapiens
  misc_RNA (1)...(19): siRNA sense strand
acaggagucuaaagcacuu

SEQ ID NO: 194661 - RNA, 19 nt, Homo sapiens
  misc_RNA (1)...(19): siRNA sense strand
acagauaccuuuucaagca

SEQ ID NO: 194662 - RNA, 19 nt, Homo sapiens
  misc_RNA (1)...(19): siRNA sense strand
aagcacauuuggaagacaa

SEQ ID NO: 194663 - RNA, 19 nt, Homo sapiens
  misc_RNA (1)...(19): siRNA sense strand
gcuaauaauaagccagaga

SEQ ID NO: 194664 - RNA, 19 nt, Homo sapiens
  misc_RNA (1)...(19): siRNA sense strand
caagagcacaacaauuugg

SEQ ID NO: 194665 - RNA, 19 nt, Homo sapiens
  misc_RNA (1)...(19): siRNA sense strand
ccugucagcugcaugugau

SEQ ID NO: 194666 - RNA, 19 nt, Homo sapiens
  misc_RNA (1)...(19): siRNA sense strand
gcugcugaauguuuaugau

SEQ ID NO: 194667 - RNA, 19 nt, Homo sapiens
  misc_RNA (1)...(19): siRNA sense strand
acagagcucuaccagucuu

SEQ ID NO: 194668 - RNA, 19 nt, Homo sapiens
  misc_RNA (1)...(19): siRNA sense strand
acaguugggugaaguugca

SEQ ID NO: 194669 - RNA, 19 nt, Homo sapiens
  misc_RNA (1)...(19): siRNA sense strand
guuugaccacuauuuauga

SEQ ID NO: 194670 - RNA, 19 nt, Homo sapiens
  misc_RNA (1)...(19): siRNA sense strand
gcuuauaggacugccauga

SEQ ID NO: 194671 - RNA, 19 nt, Homo sapiens
  misc_RNA (1)...(19): siRNA sense strand
caucaggccaaauguaaca

SEQ ID NO: 194672 - RNA, 19 nt, Homo sapiens
  misc_RNA (1)...(19): siRNA sense strand
gauucuauccaaauuccaa

SEQ ID NO: 194673 - RNA, 19 nt, Homo sapiens
  misc_RNA (1)...(19): siRNA sense strand
ggcaaguucaacaggauuu

SEQ ID NO: 194674 - RNA, 19 nt, Homo sapiens
  misc_RNA (1)...(19): siRNA sense strand
gaacuggcugcugaauguu

SEQ ID NO: 194675 - RNA, 19 nt, Homo sapiens
  misc_RNA (1)...(19): siRNA sense strand
cugcugaauguuuaugaua

SEQ ID NO: 194676 - RNA, 19 nt, Homo sapiens
  misc_RNA (1)...(19): siRNA sense strand
aagcaucaggccaaaugua

SEQ ID NO: 194677 - RNA, 19 nt, Homo sapiens
  misc_RNA (1)...(19): siRNA sense strand
uggcaucauuucccugugu

SEQ ID NO: 194678 - RNA, 19 nt, Homo sapiens
  misc_RNA (1)...(19): siRNA sense strand
ccaugaaacuccgaagacu

SEQ ID NO: 194679 - RNA, 19 nt, Homo sapiens
  misc_RNA (1)...(19): siRNA sense strand
auaauaagccagagaucga

SEQ ID NO: 194680 - RNA, 19 nt, Homo sapiens
  misc_RNA (1)...(19): siRNA sense strand
cuaauaauaagccagagau

SEQ ID NO: 194681 - RNA, 19 nt, Homo sapiens
  misc_RNA (1)...(19): siRNA sense strand
ugggugaaguugcauccuu

SEQ ID NO: 194682 - RNA, 19 nt, Homo sapiens
  misc_RNA (1)...(19): siRNA sense strand
caucauuucccuguguaaa

SEQ ID NO: 194683 - RNA, 19 nt, Homo sapiens
  misc_RNA (1)...(19): siRNA sense strand
gcguggauaugugucugaa

SEQ ID NO: 194684 - RNA, 19 nt, Homo sapiens
  misc_RNA (1)...(19): siRNA sense strand
gcacuaucccaugguggaa

SEQ ID NO: 194685 - RNA, 19 nt, Homo sapiens
  misc_RNA (1)...(19): siRNA sense strand
gagccugucagcugcaugu

SEQ ID NO: 194686 - RNA, 19 nt, Homo sapiens
  misc_RNA (1)...(19): siRNA sense strand
guacagauaccuuuucaag

SEQ ID NO: 194687 - RNA, 19 nt, Homo sapiens
  misc_RNA (1)...(19): siRNA sense strand
gucccucucugcguggaua

SEQ ID NO: 194688 - RNA, 19 nt, Homo sapiens
  misc_RNA (1)...(19): siRNA sense strand
ggagcugcuuccaauuugc

SEQ ID NO: 194689 - RNA, 19 nt, Homo sapiens
  misc_RNA (1)...(19): siRNA sense strand
uuagcugaccugaauaaug

SEQ ID NO: 194690 - RNA, 19 nt, Homo sapiens
  misc_RNA (1)...(19): siRNA sense strand
guggcaaguucaacaggau

SEQ ID NO: 194691 - RNA, 19 nt, Homo sapiens
  misc_RNA (1)...(19): siRNA sense strand
acaacaauuuggucaacgu

SEQ ID NO: 194692 - RNA, 19 nt, Homo sapiens
  misc_RNA (1)...(19): siRNA sense strand
gacuacaucaggagaagau

SEQ ID NO: 194693 - RNA, 19 nt, Homo sapiens
  misc_RNA (1)...(19): siRNA sense strand
uaauaagccagagaucgaa

SEQ ID NO: 194694 - RNA, 19 nt, Homo sapiens
  misc_RNA (1)...(19): siRNA sense strand
ugucagauucucagcuuau

SEQ ID NO: 194695 - RNA, 19 nt, Homo sapiens
  misc_RNA (1)...(19): siRNA sense strand
ggauauccugcagauuauu

SEQ ID NO: 194696 - RNA, 19 nt, Homo sapiens
  misc_RNA (1)...(19): siRNA sense strand
agcaucaggccaaauguaa

SEQ ID NO: 194697 - RNA, 19 nt, Homo sapiens
  misc_RNA (1)...(19): siRNA sense strand
gcccuuugcuuggaucucu

SEQ ID NO: 194698 - RNA, 19 nt, Homo sapiens
  misc_RNA (1)...(19): siRNA sense strand
gcugaauguuuaugauacg

SEQ ID NO: 194699 - RNA, 19 nt, Homo sapiens
  misc_RNA (1)...(19): siRNA sense strand
agacuuugccaagguacua

SEQ ID NO: 194700 - RNA, 19 nt, Homo sapiens
  misc_RNA (1)...(19): siRNA sense strand
caagcaaguggcaaguuca

SEQ ID NO: 194701 - RNA, 19 nt, Homo sapiens
  misc_RNA (1)...(19): siRNA sense strand
agacaaguacagauaccuu

SEQ ID NO: 194702 - RNA, 19 nt, Homo sapiens
  misc_RNA (1)...(19): siRNA sense strand
gcaucauuucccuguguaa

SEQ ID NO: 194703 - RNA, 19 nt, Homo sapiens
  misc_RNA (1)...(19): siRNA sense strand
cugcaaagaguguccaauc

SEQ ID NO: 194704 - RNA, 19 nt, Homo sapiens
  misc_RNA (1)...(19): siRNA sense strand
cuuauaggacugccaugaa

SEQ ID NO: 194705 - RNA, 19 nt, Homo sapiens
  misc_RNA (1)...(19): siRNA sense strand
caaagaguguccaaucauu

SEQ ID NO: 194706 - RNA, 19 nt, Homo sapiens
  misc_RNA (1)...(19): siRNA sense strand
uagcugaccugaauaaugu

SEQ ID NO: 194707 - RNA, 19 nt, Homo sapiens
  misc_RNA (1)...(19): siRNA sense strand
gcaugauucuauccaaauu

SEQ ID NO: 194708 - RNA, 19 nt, Homo sapiens
  misc_RNA (1)...(19): siRNA sense strand
ugaacuggcugcugaaugu

SEQ ID NO: 194709 - RNA, 19 nt, Homo sapiens
  misc_RNA (1)...(19): siRNA sense strand
gauauccugcagauuauua

SEQ ID NO: 194710 - RNA, 19 nt, Homo sapiens
  misc_RNA (1)...(19): siRNA sense strand
gagaagauguucgagacuu

SEQ ID NO: 194711 - RNA, 19 nt, Homo sapiens
  misc_RNA (1)...(19): siRNA sense strand
gcacuuuaauuaugacauc

SEQ ID NO: 194712 - RNA, 19 nt, Homo sapiens
  misc_RNA (1)...(19): siRNA sense strand
guaaagcacauuuggaaga

SEQ ID NO: 194713 - RNA, 19 nt, Homo sapiens
  misc_RNA (1)...(19): siRNA sense strand
gaauauugcacuccgacua

SEQ ID NO: 194714 - RNA, 19 nt, Homo sapiens
  misc_RNA (1)...(19): siRNA sense strand
uuauaggacugccaugaaa

SEQ ID NO: 194715 - RNA, 19 nt, Homo sapiens
  misc_RNA (1)...(19): siRNA sense strand
gggugaaguugcauccuuu

SEQ ID NO: 194716 - RNA, 19 nt, Homo sapiens
  misc_RNA (1)...(19): siRNA sense strand
gcaagagcacaacaauuug

SEQ ID NO: 194717 - RNA, 19 nt, Homo sapiens
  misc_RNA (1)...(19): siRNA sense strand
gcacaacaauuuggucaac

SEQ ID NO: 194718 - RNA, 19 nt, Homo sapiens
  misc_RNA (1)...(19): siRNA sense strand
agcaagagcacaacaauuu

SEQ ID NO: 194719 - RNA, 19 nt, Homo sapiens
  misc_RNA (1)...(19): siRNA sense strand
agaagauguucgagacuuu

SEQ ID NO: 194720 - RNA, 19 nt, Homo sapiens
  misc_RNA (1)...(19): siRNA sense strand
gagcaagagcacaacaauu

SEQ ID NO: 194721 - RNA, 19 nt, Homo sapiens
  misc_RNA (1)...(19): siRNA sense strand
ucaagcaaguggcaaguuc

SEQ ID NO: 194722 - RNA, 19 nt, Homo sapiens
  misc_RNA (1)...(19): siRNA sense strand
ccacgagacucaaacaacu

SEQ ID NO: 194723 - RNA, 19 nt, Homo sapiens
  misc_RNA (1)...(19): siRNA sense strand
cagcacaaccucaagcaaa

SEQ ID NO: 194724 - RNA, 19 nt, Homo sapiens
  misc_RNA (1)...(19): siRNA sense strand
gcaaagaguguccaaucau

SEQ ID NO: 194725 - RNA, 19 nt, Homo sapiens
  misc_RNA (1)...(19): siRNA sense strand
auggauauccugcagauua

SEQ ID NO: 194726 - RNA, 19 nt, Homo sapiens
  misc_RNA (1)...(19): siRNA sense strand
uguaacaucugcaaagagu

SEQ ID NO: 194727 - RNA, 19 nt, Homo sapiens
  misc_RNA (1)...(19): siRNA sense strand
guccggagcugcuuccaau

SEQ ID NO: 194728 - RNA, 19 nt, Homo sapiens
  misc_RNA (1)...(19): siRNA sense strand
gcaaguggcaaguucaaca

SEQ ID NO: 194729 - RNA, 19 nt, Homo sapiens
  misc_RNA (1)...(19): siRNA sense strand
gcuuccaauuugcuaauaa

SEQ ID NO: 194730 - RNA, 19 nt, Homo sapiens
  misc_RNA (1)...(19): siRNA sense strand
uggaagacaaguacagaua

SEQ ID NO: 194731 - RNA, 19 nt, Homo sapiens
  misc_RNA (1)...(19): siRNA sense strand
ggauccguguccugucuuu

SEQ ID NO: 194732 - RNA, 19 nt, Homo sapiens
  misc_RNA (1)...(19): siRNA sense strand
gucuuuagcugaccugaau

SEQ ID NO: 194733 - RNA, 19 nt, Homo sapiens
  misc_RNA (1)...(19): siRNA sense strand
gacaaguacagauaccuuu

SEQ ID NO: 194734 - RNA, 19 nt, Homo sapiens
  misc_RNA (1)...(19): siRNA sense strand
ccaagcaucaggccaaaug

SEQ ID NO: 194735 - RNA, 19 nt, Homo sapiens
  misc_RNA (1)...(19): siRNA sense strand
ggagcaagagcacaacaau

SEQ ID NO: 194736 - RNA, 19 nt, Homo sapiens
  misc_RNA (1)...(19): siRNA sense strand
guguaaagcacauuuggaa

SEQ ID NO: 194737 - RNA, 19 nt, Homo sapiens
  misc_RNA (1)...(19): siRNA sense strand
caagacaguugggugaagu

SEQ ID NO: 194738 - RNA, 19 nt, Homo sapiens
  misc_RNA (1)...(19): siRNA sense strand
gaagauguucgagacuuug

SEQ ID NO: 194739 - RNA, 19 nt, Homo sapiens
  misc_RNA (1)...(19): siRNA sense strand
gucagauucucagcuuaua

SEQ ID NO: 194740 - RNA, 19 nt, Homo sapiens
  misc_RNA (1)...(19): siRNA sense strand
uaacaucugcaaagagugu

SEQ ID NO: 194741 - RNA, 19 nt, Homo sapiens
  misc_RNA (1)...(19): siRNA sense strand
cggagcugcuuccaauuug

SEQ ID NO: 194742 - RNA, 19 nt, Homo sapiens
  misc_RNA (1)...(19): siRNA sense strand
gaagacaaguacagauacc

SEQ ID NO: 194743 - RNA, 19 nt, Homo sapiens
  misc_RNA (1)...(19): siRNA sense strand
ccauggauauccugcagau

SEQ ID NO: 194744 - RNA, 19 nt, Homo sapiens
  misc_RNA (1)...(19): siRNA sense strand
ggcaucauuucccugugua

SEQ ID NO: 194745 - RNA, 19 nt, Homo sapiens
  misc_RNA (1)...(19): siRNA sense strand
uggauauccugcagauuau

SEQ ID NO: 194746 - RNA, 19 nt, Homo sapiens
  misc_RNA (1)...(19): siRNA sense strand
ggaagacaaguacagauac

SEQ ID NO: 194747 - RNA, 19 nt, Homo sapiens
  misc_RNA (1)...(19): siRNA sense strand
ugcaaagaguguccaauca

SEQ ID NO: 194748 - RNA, 19 nt, Homo sapiens
  misc_RNA (1)...(19): siRNA sense strand
guggauaugugucugaacu

SEQ ID NO: 194749 - RNA, 19 nt, Homo sapiens
  misc_RNA (1)...(19): siRNA sense strand
acuggcugcugaauguuua

SEQ ID NO: 194750 - RNA, 19 nt, Homo sapiens
  misc_RNA (1)...(19): siRNA sense strand
acuaucccaugguggaaua

SEQ ID NO: 194751 - RNA, 19 nt, Homo sapiens
  misc_RNA (1)...(19): siRNA sense strand
ccggagcugcuuccaauuu

SEQ ID NO: 194752 - RNA, 19 nt, Homo sapiens
  misc_RNA (1)...(19): siRNA sense strand
ccaaauuccaagacaguug

SEQ ID NO: 194753 - RNA, 19 nt, Homo sapiens
  misc_RNA (1)...(19): siRNA sense strand
cagaaacugccaagcauca

SEQ ID NO: 194754 - RNA, 19 nt, Homo sapiens
  misc_RNA (1)...(19): siRNA sense strand
uaugacaucugccaaagcu

SEQ ID NO: 194755 - RNA, 19 nt, Homo sapiens
  misc_RNA (1)...(19): siRNA sense strand
aaugucagauucucagcuu

SEQ ID NO: 194756 - RNA, 19 nt, Homo sapiens
  misc_RNA (1)...(19): siRNA sense strand
ucgagacuuugccaaggua

SEQ ID NO: 194757 - RNA, 19 nt, Homo sapiens
  misc_RNA (1)...(19): siRNA sense strand
gcaaaaggccauaaaaugc

SEQ ID NO: 194758 - RNA, 19 nt, Homo sapiens
  misc_RNA (1)...(19): siRNA sense strand
cugcaugauucuauccaaa

SEQ ID NO: 194759 - RNA, 19 nt, Homo sapiens
  misc_RNA (1)...(19): siRNA sense strand
uaaagcacauuuggaagac

SEQ ID NO: 194760 - RNA, 19 nt, Homo sapiens
  misc_RNA (1)...(19): siRNA sense strand
acaggagucuaaagcacuu

SEQ ID NO: 194761 - RNA, 19 nt, Homo sapiens
  misc_RNA (1)...(19): siRNA sense strand
acagauaccuuuucaagca

SEQ ID NO: 194762 - RNA, 19 nt, Homo sapiens
  misc_RNA (1)...(19): siRNA sense strand
aagcacauuuggaagacaa

SEQ ID NO: 194763 - RNA, 19 nt, Homo sapiens
  misc_RNA (1)...(19): siRNA sense strand
gcuaauaauaagccagaga

SEQ ID NO: 194764 - RNA, 19 nt, Homo sapiens
  misc_RNA (1)...(19): siRNA sense strand
caagagcacaacaauuugg

SEQ ID NO: 194765 - RNA, 19 nt, Homo sapiens
  misc_RNA (1)...(19): siRNA sense strand
ccugucagcugcaugugau

SEQ ID NO: 194766 - RNA, 19 nt, Homo sapiens
  misc_RNA (1)...(19): siRNA sense strand
gcugcugaauguuuaugau

SEQ ID NO: 194767 - RNA, 19 nt, Homo sapiens
  misc_RNA (1)...(19): siRNA sense strand
acagagcucuaccagucuu

SEQ ID NO: 194768 - RNA, 19 nt, Homo sapiens
  misc_RNA (1)...(19): siRNA sense strand
acaguugggugaaguugca

SEQ ID NO: 194769 - RNA, 19 nt, Homo sapiens
  misc_RNA (1)...(19): siRNA sense strand
guuugaccacuauuuauga

SEQ ID NO: 194770 - RNA, 19 nt, Homo sapiens
  misc_RNA (1)...(19): siRNA sense strand
gcuuauaggacugccauga

SEQ ID NO: 194771 - RNA, 19 nt, Homo sapiens
  misc_RNA (1)...(19): siRNA sense strand
caucaggccaaauguaaca

SEQ ID NO: 194772 - RNA, 19 nt, Homo sapiens
  misc_RNA (1)...(19): siRNA sense strand
gauucuauccaaauuccaa

SEQ ID NO: 194773 - RNA, 19 nt, Homo sapiens
  misc_RNA (1)...(19): siRNA sense strand
ggcaaguucaacaggauuu

SEQ ID NO: 194774 - RNA, 19 nt, Homo sapiens
  misc_RNA (1)...(19): siRNA sense strand
gaacuggcugcugaauguu

SEQ ID NO: 194775 - RNA, 19 nt, Homo sapiens
  misc_RNA (1)...(19): siRNA sense strand
cugcugaauguuuaugaua

SEQ ID NO: 194776 - RNA, 19 nt, Homo sapiens
  misc_RNA (1)...(19): siRNA sense strand
aagcaucaggccaaaugua

SEQ ID NO: 194777 - RNA, 19 nt, Homo sapiens
  misc_RNA (1)...(19): siRNA sense strand
uggcaucauuucccugugu

SEQ ID NO: 194778 - RNA, 19 nt, Homo sapiens
  misc_RNA (1)...(19): siRNA sense strand
ccaugaaacuccgaagacu

SEQ ID NO: 194779 - RNA, 19 nt, Homo sapiens
  misc_RNA (1)...(19): siRNA sense strand
auaauaagccagagaucga

SEQ ID NO: 194780 - RNA, 19 nt, Homo sapiens
  misc_RNA (1)...(19): siRNA sense strand
cuaauaauaagccagagau

SEQ ID NO: 194781 - RNA, 19 nt, Homo sapiens
  misc_RNA (1)...(19): siRNA sense strand
ugggugaaguugcauccuu

SEQ ID NO: 194782 - RNA, 19 nt, Homo sapiens
  misc_RNA (1)...(19): siRNA sense strand
caucauuucccuguguaaa

SEQ ID NO: 194783 - RNA, 19 nt, Homo sapiens
  misc_RNA (1)...(19): siRNA sense strand
gcguggauaugugucugaa

SEQ ID NO: 194784 - RNA, 19 nt, Homo sapiens
  misc_RNA (1)...(19): siRNA sense strand
gcacuaucccaugguggaa

SEQ ID NO: 194785 - RNA, 19 nt, Homo sapiens
  misc_RNA (1)...(19): siRNA sense strand
gagccugucagcugcaugu

SEQ ID NO: 194786 - RNA, 19 nt, Homo sapiens
  misc_RNA (1)...(19): siRNA sense strand
guacagauaccuuuucaag

SEQ ID NO: 194787 - RNA, 19 nt, Homo sapiens
  misc_RNA (1)...(19): siRNA sense strand
gucccucucugcguggaua

SEQ ID NO: 194788 - RNA, 19 nt, Homo sapiens
  misc_RNA (1)...(19): siRNA sense strand
ggagcugcuuccaauuugc

SEQ ID NO: 194789 - RNA, 19 nt, Homo sapiens
  misc_RNA (1)...(19): siRNA sense strand
uuagcugaccugaauaaug

SEQ ID NO: 194790 - RNA, 19 nt, Homo sapiens
  misc_RNA (1)...(19): siRNA sense strand
guggcaaguucaacaggau

SEQ ID NO: 194791 - RNA, 19 nt, Homo sapiens
  misc_RNA (1)...(19): siRNA sense strand
acaacaauuuggucaacgu

SEQ ID NO: 194792 - RNA, 19 nt, Homo sapiens
  misc_RNA (1)...(19): siRNA sense strand
gacuacaucaggagaagau

SEQ ID NO: 194793 - RNA, 19 nt, Homo sapiens
  misc_RNA (1)...(19): siRNA sense strand
uaauaagccagagaucgaa

SEQ ID NO: 194794 - RNA, 19 nt, Homo sapiens
  misc_RNA (1)...(19): siRNA sense strand
ugucagauucucagcuuau

SEQ ID NO: 194795 - RNA, 19 nt, Homo sapiens
  misc_RNA (1)...(19): siRNA sense strand
ggauauccugcagauuauu

SEQ ID NO: 194796 - RNA, 19 nt, Homo sapiens
  misc_RNA (1)...(19): siRNA sense strand
agcaucaggccaaauguaa

SEQ ID NO: 194797 - RNA, 19 nt, Homo sapiens
  misc_RNA (1)...(19): siRNA sense strand
gcccuuugcuuggaucucu

SEQ ID NO: 194798 - RNA, 19 nt, Homo sapiens
  misc_RNA (1)...(19): siRNA sense strand
gcugaauguuuaugauacg

SEQ ID NO: 194799 - RNA, 19 nt, Homo sapiens
  misc_RNA (1)...(19): siRNA sense strand
agacuuugccaagguacua

SEQ ID NO: 194800 - RNA, 19 nt, Homo sapiens
  misc_RNA (1)...(19): siRNA sense strand
caagcaaguggcaaguuca

SEQ ID NO: 194801 - RNA, 19 nt, Homo sapiens
  misc_RNA (1)...(19): siRNA sense strand
agacaaguacagauaccuu

SEQ ID NO: 194802 - RNA, 19 nt, Homo sapiens
  misc_RNA (1)...(19): siRNA sense strand
gcaucauuucccuguguaa

SEQ ID NO: 194803 - RNA, 19 nt, Homo sapiens
  misc_RNA (1)...(19): siRNA sense strand
cugcaaagaguguccaauc

SEQ ID NO: 194804 - RNA, 19 nt, Homo sapiens
  misc_RNA (1)...(19): siRNA sense strand
cuuauaggacugccaugaa

SEQ ID NO: 194805 - RNA, 19 nt, Homo sapiens
  misc_RNA (1)...(19): siRNA sense strand
caaagaguguccaaucauu

SEQ ID NO: 194806 - RNA, 19 nt, Homo sapiens
  misc_RNA (1)...(19): siRNA sense strand
uagcugaccugaauaaugu

SEQ ID NO: 194807 - RNA, 19 nt, Homo sapiens
  misc_RNA (1)...(19): siRNA sense strand
gcaugauucuauccaaauu

SEQ ID NO: 194808 - RNA, 19 nt, Homo sapiens
  misc_RNA (1)...(19): siRNA sense strand
ugaacuggcugcugaaugu

SEQ ID NO: 194809 - RNA, 19 nt, Homo sapiens
  misc_RNA (1)...(19): siRNA sense strand
gauauccugcagauuauua

SEQ ID NO: 194810 - RNA, 19 nt, Homo sapiens
  misc_RNA (1)...(19): siRNA sense strand
gagaagauguucgagacuu

SEQ ID NO: 194811 - RNA, 19 nt, Homo sapiens
  misc_RNA (1)...(19): siRNA sense strand
gcacuuuaauuaugacauc

SEQ ID NO: 194812 - RNA, 19 nt, Homo sapiens
  misc_RNA (1)...(19): siRNA sense strand
guaaagcacauuuggaaga

SEQ ID NO: 194813 - RNA, 19 nt, Homo sapiens
  misc_RNA (1)...(19): siRNA sense strand
gaauauugcacuccgacua

SEQ ID NO: 194814 - RNA, 19 nt, Homo sapiens
  misc_RNA (1)...(19): siRNA sense strand
uuauaggacugccaugaaa

SEQ ID NO: 194815 - RNA, 19 nt, Homo sapiens
  misc_RNA (1)...(19): siRNA sense strand
gggugaaguugcauccuuu

SEQ ID NO: 194816 - RNA, 19 nt, Homo sapiens
  misc_RNA (1)...(19): siRNA sense strand
gcaagagcacaacaauuug

SEQ ID NO: 194817 - RNA, 19 nt, Homo sapiens
  misc_RNA (1)...(19): siRNA sense strand
gcacaacaauuuggucaac

SEQ ID NO: 194818 - RNA, 19 nt, Homo sapiens
  misc_RNA (1)...(19): siRNA sense strand
agcaagagcacaacaauuu

SEQ ID NO: 194819 - RNA, 19 nt, Homo sapiens
  misc_RNA (1)...(19): siRNA sense strand
agaagauguucgagacuuu

SEQ ID NO: 194820 - RNA, 19 nt, Homo sapiens
  misc_RNA (1)...(19): siRNA sense strand
gagcaagagcacaacaauu

SEQ ID NO: 194821 - RNA, 19 nt, Homo sapiens
  misc_RNA (1)...(19): siRNA sense strand
ucaagcaaguggcaaguuc

SEQ ID NO: 194822 - RNA, 19 nt, Homo sapiens
  misc_RNA (1)...(19): siRNA sense strand
ccacgagacucaaacaacu

SEQ ID NO: 194823 - RNA, 19 nt, Homo sapiens
  misc_RNA (1)...(19): siRNA sense strand
cagcacaaccucaagcaaa

SEQ ID NO: 194824 - RNA, 19 nt, Homo sapiens
  misc_RNA (1)...(19): siRNA sense strand
gcaaagaguguccaaucau

SEQ ID NO: 194825 - RNA, 19 nt, Homo sapiens
  misc_RNA (1)...(19): siRNA sense strand
auggauauccugcagauua

SEQ ID NO: 194826 - RNA, 19 nt, Homo sapiens
  misc_RNA (1)...(19): siRNA sense strand
uguaacaucugcaaagagu

SEQ ID NO: 194827 - RNA, 19 nt, Homo sapiens
  misc_RNA (1)...(19): siRNA sense strand
guccggagcugcuuccaau

SEQ ID NO: 194828 - RNA, 19 nt, Homo sapiens
  misc_RNA (1)...(19): siRNA sense strand
gcaaguggcaaguucaaca

SEQ ID NO: 194829 - RNA, 19 nt, Homo sapiens
  misc_RNA (1)...(19): siRNA sense strand
gcuuccaauuugcuaauaa

SEQ ID NO: 194830 - RNA, 19 nt, Homo sapiens
  misc_RNA (1)...(19): siRNA sense strand
uggaagacaaguacagaua

SEQ ID NO: 194831 - RNA, 19 nt, Homo sapiens
  misc_RNA (1)...(19): siRNA sense strand
ggauccguguccugucuuu

SEQ ID NO: 194832 - RNA, 19 nt, Homo sapiens
  misc_RNA (1)...(19): siRNA sense strand
gucuuuagcugaccugaau

SEQ ID NO: 194833 - RNA, 19 nt, Homo sapiens
  misc_RNA (1)...(19): siRNA sense strand
gacaaguacagauaccuuu

SEQ ID NO: 194834 - RNA, 19 nt, Homo sapiens
  misc_RNA (1)...(19): siRNA sense strand
ccaagcaucaggccaaaug

SEQ ID NO: 194835 - RNA, 19 nt, Homo sapiens
  misc_RNA (1)...(19): siRNA sense strand
ggagcaagagcacaacaau

SEQ ID NO: 194836 - RNA, 19 nt, Homo sapiens
  misc_RNA (1)...(19): siRNA sense strand
guguaaagcacauuuggaa

SEQ ID NO: 194837 - RNA, 19 nt, Homo sapiens
  misc_RNA (1)...(19): siRNA sense strand
caagacaguugggugaagu

SEQ ID NO: 194838 - RNA, 19 nt, Homo sapiens
  misc_RNA (1)...(19): siRNA sense strand
gaagauguucgagacuuug

SEQ ID NO: 194839 - RNA, 19 nt, Homo sapiens
  misc_RNA (1)...(19): siRNA sense strand
gucagauucucagcuuaua

SEQ ID NO: 194840 - RNA, 19 nt, Homo sapiens
  misc_RNA (1)...(19): siRNA sense strand
uaacaucugcaaagagugu

SEQ ID NO: 194841 - RNA, 19 nt, Homo sapiens
  misc_RNA (1)...(19): siRNA sense strand
cggagcugcuuccaauuug

SEQ ID NO: 194842 - RNA, 19 nt, Homo sapiens
  misc_RNA (1)...(19): siRNA sense strand
gaagacaaguacagauacc

SEQ ID NO: 194843 - RNA, 19 nt, Homo sapiens
  misc_RNA (1)...(19): siRNA sense strand
ccauggauauccugcagau

SEQ ID NO: 194844 - RNA, 19 nt, Homo sapiens
  misc_RNA (1)...(19): siRNA sense strand
ggcaucauuucccugugua

SEQ ID NO: 194845 - RNA, 19 nt, Homo sapiens
  misc_RNA (1)...(19): siRNA sense strand
uggauauccugcagauuau

SEQ ID NO: 194846 - RNA, 19 nt, Homo sapiens
  misc_RNA (1)...(19): siRNA sense strand
ggaagacaaguacagauac

SEQ ID NO: 194847 - RNA, 19 nt, Homo sapiens
  misc_RNA (1)...(19): siRNA sense strand
ugcaaagaguguccaauca

SEQ ID NO: 194848 - RNA, 19 nt, Homo sapiens
  misc_RNA (1)...(19): siRNA sense strand
guggauaugugucugaacu

SEQ ID NO: 194849 - RNA, 19 nt, Homo sapiens
  misc_RNA (1)...(19): siRNA sense strand
acuggcugcugaauguuua

SEQ ID NO: 194850 - RNA, 19 nt, Homo sapiens
  misc_RNA (1)...(19): siRNA sense strand
acuaucccaugguggaaua

SEQ ID NO: 194851 - RNA, 19 nt, Homo sapiens
  misc_RNA (1)...(19): siRNA sense strand
ccggagcugcuuccaauuu

SEQ ID NO: 194852 - RNA, 19 nt, Homo sapiens
  misc_RNA (1)...(19): siRNA sense strand
ccaaauuccaagacaguug

SEQ ID NO: 194853 - RNA, 19 nt, Homo sapiens
  misc_RNA (1)...(19): siRNA sense strand
cagaaacugccaagcauca

SEQ ID NO: 194854 - RNA, 19 nt, Homo sapiens
  misc_RNA (1)...(19): siRNA sense strand
uaugacaucugccaaagcu

SEQ ID NO: 194855 - RNA, 19 nt, Homo sapiens
  misc_RNA (1)...(19): siRNA sense strand
aaugucagauucucagcuu

SEQ ID NO: 194856 - RNA, 19 nt, Homo sapiens
  misc_RNA (1)...(19): siRNA sense strand
ucgagacuuugccaaggua

SEQ ID NO: 194857 - RNA, 19 nt, Homo sapiens
  misc_RNA (1)...(19): siRNA sense strand
gcaaaaggccauaaaaugc

SEQ ID NO: 194858 - RNA, 19 nt, Homo sapiens
  misc_RNA (1)...(19): siRNA sense strand
cugcaugauucuauccaaa

SEQ ID NO: 194859 - RNA, 19 nt, Homo sapiens
  misc_RNA (1)...(19): siRNA sense strand
uaaagcacauuuggaagac

SEQ ID NO: 194860 - RNA, 19 nt, Homo sapiens
  misc_RNA (1)...(19): siRNA sense strand
acaggagucuaaagcacuu

SEQ ID NO: 194861 - RNA, 19 nt, Homo sapiens
  misc_RNA (1)...(19): siRNA sense strand
acagauaccuuuucaagca

SEQ ID NO: 194862 - RNA, 19 nt, Homo sapiens
  misc_RNA (1)...(19): siRNA sense strand
aagcacauuuggaagacaa

SEQ ID NO: 194863 - RNA, 19 nt, Homo sapiens
  misc_RNA (1)...(19): siRNA sense strand
gcuaauaauaagccagaga

SEQ ID NO: 194864 - RNA, 19 nt, Homo sapiens
  misc_RNA (1)...(19): siRNA sense strand
caagagcacaacaauuugg

SEQ ID NO: 194865 - RNA, 19 nt, Homo sapiens
  misc_RNA (1)...(19): siRNA sense strand
ccugucagcugcaugugau

SEQ ID NO: 194866 - RNA, 19 nt, Homo sapiens
  misc_RNA (1)...(19): siRNA sense strand
gcugcugaauguuuaugau

SEQ ID NO: 194867 - RNA, 19 nt, Homo sapiens
  misc_RNA (1)...(19): siRNA sense strand
acagagcucuaccagucuu

SEQ ID NO: 194868 - RNA, 19 nt, Homo sapiens
  misc_RNA (1)...(19): siRNA sense strand
acaguugggugaaguugca

SEQ ID NO: 194869 - RNA, 19 nt, Homo sapiens
  misc_RNA (1)...(19): siRNA sense strand
guuugaccacuauuuauga

SEQ ID NO: 194870 - RNA, 19 nt, Homo sapiens
  misc_RNA (1)...(19): siRNA sense strand
gcuuauaggacugccauga

SEQ ID NO: 194871 - RNA, 19 nt, Homo sapiens
  misc_RNA (1)...(19): siRNA sense strand
caucaggccaaauguaaca

SEQ ID NO: 194872 - RNA, 19 nt, Homo sapiens
  misc_RNA (1)...(19): siRNA sense strand
gauucuauccaaauuccaa

SEQ ID NO: 194873 - RNA, 19 nt, Homo sapiens
  misc_RNA (1)...(19): siRNA sense strand
ggcaaguucaacaggauuu

SEQ ID NO: 194874 - RNA, 19 nt, Homo sapiens
  misc_RNA (1)...(19): siRNA sense strand
gaacuggcugcugaauguu

SEQ ID NO: 194875 - RNA, 19 nt, Homo sapiens
  misc_RNA (1)...(19): siRNA sense strand
cugcugaauguuuaugaua

SEQ ID NO: 194876 - RNA, 19 nt, Homo sapiens
  misc_RNA (1)...(19): siRNA sense strand
aagcaucaggccaaaugua

SEQ ID NO: 194877 - RNA, 19 nt, Homo sapiens
  misc_RNA (1)...(19): siRNA sense strand
uggcaucauuucccugugu

SEQ ID NO: 194878 - RNA, 19 nt, Homo sapiens
  misc_RNA (1)...(19): siRNA sense strand
ccaugaaacuccgaagacu

SEQ ID NO: 194879 - RNA, 19 nt, Homo sapiens
  misc_RNA (1)...(19): siRNA sense strand
auaauaagccagagaucga

SEQ ID NO: 194880 - RNA, 19 nt, Homo sapiens
  misc_RNA (1)...(19): siRNA sense strand
cuaauaauaagccagagau

SEQ ID NO: 194881 - RNA, 19 nt, Homo sapiens
  misc_RNA (1)...(19): siRNA sense strand
ugggugaaguugcauccuu

SEQ ID NO: 194882 - RNA, 19 nt, Homo sapiens
  misc_RNA (1)...(19): siRNA sense strand
caucauuucccuguguaaa

SEQ ID NO: 194883 - RNA, 19 nt, Homo sapiens
  misc_RNA (1)...(19): siRNA sense strand
gcguggauaugugucugaa

SEQ ID NO: 194884 - RNA, 19 nt, Homo sapiens
  misc_RNA (1)...(19): siRNA sense strand
gcacuaucccaugguggaa

SEQ ID NO: 194885 - RNA, 19 nt, Homo sapiens
  misc_RNA (1)...(19): siRNA sense strand
gagccugucagcugcaugu

SEQ ID NO: 194886 - RNA, 19 nt, Homo sapiens
  misc_RNA (1)...(19): siRNA sense strand
guacagauaccuuuucaag

SEQ ID NO: 194887 - RNA, 19 nt, Homo sapiens
  misc_RNA (1)...(19): siRNA sense strand
gucccucucugcguggaua

SEQ ID NO: 194888 - RNA, 19 nt, Homo sapiens
  misc_RNA (1)...(19): siRNA sense strand
ggagcugcuuccaauuugc

SEQ ID NO: 194889 - RNA, 19 nt, Homo sapiens
  misc_RNA (1)...(19): siRNA sense strand
uuagcugaccugaauaaug

SEQ ID NO: 194890 - RNA, 19 nt, Homo sapiens
  misc_RNA (1)...(19): siRNA sense strand
guggcaaguucaacaggau

SEQ ID NO: 194891 - RNA, 19 nt, Homo sapiens
  misc_RNA (1)...(19): siRNA sense strand
acaacaauuuggucaacgu

SEQ ID NO: 194892 - RNA, 19 nt, Homo sapiens
  misc_RNA (1)...(19): siRNA sense strand
gacuacaucaggagaagau

SEQ ID NO: 194893 - RNA, 19 nt, Homo sapiens
  misc_RNA (1)...(19): siRNA sense strand
uaauaagccagagaucgaa

SEQ ID NO: 194894 - RNA, 19 nt, Homo sapiens
  misc_RNA (1)...(19): siRNA sense strand
ugucagauucucagcuuau

SEQ ID NO: 194895 - RNA, 19 nt, Homo sapiens
  misc_RNA (1)...(19): siRNA sense strand
ggauauccugcagauuauu

SEQ ID NO: 194896 - RNA, 19 nt, Homo sapiens
  misc_RNA (1)...(19): siRNA sense strand
agcaucaggccaaauguaa

SEQ ID NO: 194897 - RNA, 19 nt, Homo sapiens
  misc_RNA (1)...(19): siRNA sense strand
gcccuuugcuuggaucucu

SEQ ID NO: 194898 - RNA, 19 nt, Homo sapiens
  misc_RNA (1)...(19): siRNA sense strand
gcugaauguuuaugauacg

SEQ ID NO: 194899 - RNA, 19 nt, Homo sapiens
  misc_RNA (1)...(19): siRNA sense strand
agacuuugccaagguacua

SEQ ID NO: 194900 - RNA, 19 nt, Homo sapiens
  misc_RNA (1)...(19): siRNA sense strand
caagcaaguggcaaguuca

SEQ ID NO: 194901 - RNA, 19 nt, Homo sapiens
  misc_RNA (1)...(19): siRNA sense strand
agacaaguacagauaccuu

SEQ ID NO: 194902 - RNA, 19 nt, Homo sapiens
  misc_RNA (1)...(19): siRNA sense strand
gcaucauuucccuguguaa

SEQ ID NO: 194903 - RNA, 19 nt, Homo sapiens
  misc_RNA (1)...(19): siRNA sense strand
cugcaaagaguguccaauc

SEQ ID NO: 194904 - RNA, 19 nt, Homo sapiens
  misc_RNA (1)...(19): siRNA sense strand
cuuauaggacugccaugaa

SEQ ID NO: 194905 - RNA, 19 nt, Homo sapiens
  misc_RNA (1)...(19): siRNA sense strand
caaagaguguccaaucauu

SEQ ID NO: 194906 - RNA, 19 nt, Homo sapiens
  misc_RNA (1)...(19): siRNA sense strand
uagcugaccugaauaaugu

SEQ ID NO: 194907 - RNA, 19 nt, Homo sapiens
  misc_RNA (1)...(19): siRNA sense strand
gcaugauucuauccaaauu

SEQ ID NO: 194908 - RNA, 19 nt, Homo sapiens
  misc_RNA (1)...(19): siRNA sense strand
ugaacuggcugcugaaugu

SEQ ID NO: 194909 - RNA, 19 nt, Homo sapiens
  misc_RNA (1)...(19): siRNA sense strand
gauauccugcagauuauua

SEQ ID NO: 194910 - RNA, 19 nt, Homo sapiens
  misc_RNA (1)...(19): siRNA sense strand
gagaagauguucgagacuu

SEQ ID NO: 194911 - RNA, 19 nt, Homo sapiens
  misc_RNA (1)...(19): siRNA sense strand
gcacuuuaauuaugacauc

SEQ ID NO: 194912 - RNA, 19 nt, Homo sapiens
  misc_RNA (1)...(19): siRNA sense strand
guaaagcacauuuggaaga

SEQ ID NO: 194913 - RNA, 19 nt, Homo sapiens
  misc_RNA (1)...(19): siRNA sense strand
gaauauugcacuccgacua

SEQ ID NO: 194914 - RNA, 19 nt, Homo sapiens
  misc_RNA (1)...(19): siRNA sense strand
uuauaggacugccaugaaa

SEQ ID NO: 194915 - RNA, 19 nt, Homo sapiens
  misc_RNA (1)...(19): siRNA sense strand
gggugaaguugcauccuuu

SEQ ID NO: 194916 - RNA, 19 nt, Homo sapiens
  misc_RNA (1)...(19): siRNA sense strand
gcaagagcacaacaauuug

SEQ ID NO: 194917 - RNA, 19 nt, Homo sapiens
  misc_RNA (1)...(19): siRNA sense strand
gcacaacaauuuggucaac

SEQ ID NO: 194918 - RNA, 19 nt, Homo sapiens
  misc_RNA (1)...(19): siRNA sense strand
agcaagagcacaacaauuu

SEQ ID NO: 194919 - RNA, 19 nt, Homo sapiens
  misc_RNA (1)...(19): siRNA sense strand
agaagauguucgagacuuu

SEQ ID NO: 194920 - RNA, 19 nt, Homo sapiens
  misc_RNA (1)...(19): siRNA sense strand
gagcaagagcacaacaauu

SEQ ID NO: 194921 - RNA, 19 nt, Homo sapiens
  misc_RNA (1)...(19): siRNA sense strand
ucaagcaaguggcaaguuc

SEQ ID NO: 194922 - RNA, 19 nt, Homo sapiens
  misc_RNA (1)...(19): siRNA sense strand
ccacgagacucaaacaacu

SEQ ID NO: 194923 - RNA, 19 nt, Homo sapiens
  misc_RNA (1)...(19): siRNA sense strand
cagcacaaccucaagcaaa

SEQ ID NO: 194924 - RNA, 19 nt, Homo sapiens
  misc_RNA (1)...(19): siRNA sense strand
gcaaagaguguccaaucau

SEQ ID NO: 194925 - RNA, 19 nt, Homo sapiens
  misc_RNA (1)...(19): siRNA sense strand
auggauauccugcagauua

SEQ ID NO: 194926 - RNA, 19 nt, Homo sapiens
  misc_RNA (1)...(19): siRNA sense strand
uguaacaucugcaaagagu

SEQ ID NO: 194927 - RNA, 19 nt, Homo sapiens
  misc_RNA (1)...(19): siRNA sense strand
guccggagcugcuuccaau

SEQ ID NO: 194928 - RNA, 19 nt, Homo sapiens
  misc_RNA (1)...(19): siRNA sense strand
gcaaguggcaaguucaaca

SEQ ID NO: 194929 - RNA, 19 nt, Homo sapiens
  misc_RNA (1)...(19): siRNA sense strand
gcuuccaauuugcuaauaa

SEQ ID NO: 194930 - RNA, 19 nt, Homo sapiens
  misc_RNA (1)...(19): siRNA sense strand
uggaagacaaguacagaua

SEQ ID NO: 194931 - RNA, 19 nt, Homo sapiens
  misc_RNA (1)...(19): siRNA sense strand
ggauccguguccugucuuu

SEQ ID NO: 194932 - RNA, 19 nt, Homo sapiens
  misc_RNA (1)...(19): siRNA sense strand
gucuuuagcugaccugaau

SEQ ID NO: 194933 - RNA, 19 nt, Homo sapiens
  misc_RNA (1)...(19): siRNA sense strand
gacaaguacagauaccuuu

SEQ ID NO: 194934 - RNA, 19 nt, Homo sapiens
  misc_RNA (1)...(19): siRNA sense strand
ccaagcaucaggccaaaug

SEQ ID NO: 194935 - RNA, 19 nt, Homo sapiens
  misc_RNA (1)...(19): siRNA sense strand
ggagcaagagcacaacaau

SEQ ID NO: 194936 - RNA, 19 nt, Homo sapiens
  misc_RNA (1)...(19): siRNA sense strand
guguaaagcacauuuggaa

SEQ ID NO: 194937 - RNA, 19 nt, Homo sapiens
  misc_RNA (1)...(19): siRNA sense strand
caagacaguugggugaagu

SEQ ID NO: 194938 - RNA, 19 nt, Homo sapiens
  misc_RNA (1)...(19): siRNA sense strand
gaagauguucgagacuuug

SEQ ID NO: 194939 - RNA, 19 nt, Homo sapiens
  misc_RNA (1)...(19): siRNA sense strand
gucagauucucagcuuaua

SEQ ID NO: 194940 - RNA, 19 nt, Homo sapiens
  misc_RNA (1)...(19): siRNA sense strand
uaacaucugcaaagagugu

SEQ ID NO: 194941 - RNA, 19 nt, Homo sapiens
  misc_RNA (1)...(19): siRNA sense strand
cggagcugcuuccaauuug

SEQ ID NO: 194942 - RNA, 19 nt, Homo sapiens
  misc_RNA (1)...(19): siRNA sense strand
gaagacaaguacagauacc

SEQ ID NO: 194943 - RNA, 19 nt, Homo sapiens
  misc_RNA (1)...(19): siRNA sense strand
ccauggauauccugcagau

SEQ ID NO: 194944 - RNA, 19 nt, Homo sapiens
  misc_RNA (1)...(19): siRNA sense strand
ggcaucauuucccugugua

SEQ ID NO: 194945 - RNA, 19 nt, Homo sapiens
  misc_RNA (1)...(19): siRNA sense strand
uggauauccugcagauuau

SEQ ID NO: 194946 - RNA, 19 nt, Homo sapiens
  misc_RNA (1)...(19): siRNA sense strand
ggaagacaaguacagauac

SEQ ID NO: 194947 - RNA, 19 nt, Homo sapiens
  misc_RNA (1)...(19): siRNA sense strand
ugcaaagaguguccaauca

SEQ ID NO: 194948 - RNA, 19 nt, Homo sapiens
  misc_RNA (1)...(19): siRNA sense strand
guggauaugugucugaacu

SEQ ID NO: 194949 - RNA, 19 nt, Homo sapiens
  misc_RNA (1)...(19): siRNA sense strand
acuggcugcugaauguuua

SEQ ID NO: 194950 - RNA, 19 nt, Homo sapiens
  misc_RNA (1)...(19): siRNA sense strand
acuaucccaugguggaaua

SEQ ID NO: 194951 - RNA, 19 nt, Homo sapiens
  misc_RNA (1)...(19): siRNA sense strand
ccggagcugcuuccaauuu

SEQ ID NO: 194952 - RNA, 19 nt, Homo sapiens
  misc_RNA (1)...(19): siRNA sense strand
ccaaauuccaagacaguug

SEQ ID NO: 194953 - RNA, 19 nt, Homo sapiens
  misc_RNA (1)...(19): siRNA sense strand
cagaaacugccaagcauca

SEQ ID NO: 194954 - RNA, 19 nt, Homo sapiens
  misc_RNA (1)...(19): siRNA sense strand
uaugacaucugccaaagcu

SEQ ID NO: 194955 - RNA, 19 nt, Homo sapiens
  misc_RNA (1)...(19): siRNA sense strand
aaugucagauucucagcuu

SEQ ID NO: 194956 - RNA, 19 nt, Homo sapiens
  misc_RNA (1)...(19): siRNA sense strand
ucgagacuuugccaaggua

SEQ ID NO: 194957 - RNA, 19 nt, Homo sapiens
  misc_RNA (1)...(19): siRNA sense strand
gcaaaaggccauaaaaugc

SEQ ID NO: 194958 - RNA, 19 nt, Homo sapiens
  misc_RNA (1)...(19): siRNA sense strand
cugcaugauucuauccaaa

SEQ ID NO: 194959 - RNA, 19 nt, Homo sapiens
  misc_RNA (1)...(19): siRNA sense strand
uaaagcacauuuggaagac

SEQ ID NO: 194960 - RNA, 19 nt, Homo sapiens
  misc_RNA (1)...(19): siRNA sense strand
acaggagucuaaagcacuu

SEQ ID NO: 194961 - RNA, 19 nt, Homo sapiens
  misc_RNA (1)...(19): siRNA sense strand
acagauaccuuuucaagca

SEQ ID NO: 194962 - RNA, 19 nt, Homo sapiens
  misc_RNA (1)...(19): siRNA sense strand
aagcacauuuggaagacaa

SEQ ID NO: 194963 - RNA, 19 nt, Homo sapiens
  misc_RNA (1)...(19): siRNA sense strand
gcuaauaauaagccagaga

SEQ ID NO: 194964 - RNA, 19 nt, Homo sapiens
  misc_RNA (1)...(19): siRNA sense strand
caagagcacaacaauuugg

SEQ ID NO: 194965 - RNA, 19 nt, Homo sapiens
  misc_RNA (1)...(19): siRNA sense strand
ccugucagcugcaugugau

SEQ ID NO: 194966 - RNA, 19 nt, Homo sapiens
  misc_RNA (1)...(19): siRNA sense strand
gcugcugaauguuuaugau

SEQ ID NO: 194967 - RNA, 19 nt, Homo sapiens
  misc_RNA (1)...(19): siRNA sense strand
acagagcucuaccagucuu

SEQ ID NO: 194968 - RNA, 19 nt, Homo sapiens
  misc_RNA (1)...(19): siRNA sense strand
acaguugggugaaguugca

SEQ ID NO: 194969 - RNA, 19 nt, Homo sapiens
  misc_RNA (1)...(19): siRNA sense strand
guuugaccacuauuuauga

SEQ ID NO: 194970 - RNA, 19 nt, Homo sapiens
  misc_RNA (1)...(19): siRNA sense strand
gcuuauaggacugccauga

SEQ ID NO: 194971 - RNA, 19 nt, Homo sapiens
  misc_RNA (1)...(19): siRNA sense strand
caucaggccaaauguaaca

SEQ ID NO: 194972 - RNA, 19 nt, Homo sapiens
  misc_RNA (1)...(19): siRNA sense strand
gauucuauccaaauuccaa

SEQ ID NO: 194973 - RNA, 19 nt, Homo sapiens
  misc_RNA (1)...(19): siRNA sense strand
ggcaaguucaacaggauuu

SEQ ID NO: 194974 - RNA, 19 nt, Homo sapiens
  misc_RNA (1)...(19): siRNA sense strand
gaacuggcugcugaauguu

SEQ ID NO: 194975 - RNA, 19 nt, Homo sapiens
  misc_RNA (1)...(19): siRNA sense strand
cugcugaauguuuaugaua

SEQ ID NO: 194976 - RNA, 19 nt, Homo sapiens
  misc_RNA (1)...(19): siRNA sense strand
aagcaucaggccaaaugua

SEQ ID NO: 194977 - RNA, 19 nt, Homo sapiens
  misc_RNA (1)...(19): siRNA sense strand
uggcaucauuucccugugu

SEQ ID NO: 194978 - RNA, 19 nt, Homo sapiens
  misc_RNA (1)...(19): siRNA sense strand
ccaugaaacuccgaagacu

SEQ ID NO: 194979 - RNA, 19 nt, Homo sapiens
  misc_RNA (1)...(19): siRNA sense strand
auaauaagccagagaucga

SEQ ID NO: 194980 - RNA, 19 nt, Homo sapiens
  misc_RNA (1)...(19): siRNA sense strand
cuaauaauaagccagagau

SEQ ID NO: 194981 - RNA, 19 nt, Homo sapiens
  misc_RNA (1)...(19): siRNA sense strand
ugggugaaguugcauccuu

SEQ ID NO: 194982 - RNA, 19 nt, Homo sapiens
  misc_RNA (1)...(19): siRNA sense strand
caucauuucccuguguaaa

SEQ ID NO: 194983 - RNA, 19 nt, Homo sapiens
  misc_RNA (1)...(19): siRNA sense strand
gcguggauaugugucugaa

SEQ ID NO: 194984 - RNA, 19 nt, Homo sapiens
  misc_RNA (1)...(19): siRNA sense strand
gcacuaucccaugguggaa

SEQ ID NO: 194985 - RNA, 19 nt, Homo sapiens
  misc_RNA (1)...(19): siRNA sense strand
gagccugucagcugcaugu

SEQ ID NO: 194986 - RNA, 19 nt, Homo sapiens
  misc_RNA (1)...(19): siRNA sense strand
guacagauaccuuuucaag

SEQ ID NO: 194987 - RNA, 19 nt, Homo sapiens
  misc_RNA (1)...(19): siRNA sense strand
gucccucucugcguggaua

SEQ ID NO: 194988 - RNA, 19 nt, Homo sapiens
  misc_RNA (1)...(19): siRNA sense strand
ggagcugcuuccaauuugc

SEQ ID NO: 194989 - RNA, 19 nt, Homo sapiens
  misc_RNA (1)...(19): siRNA sense strand
uuagcugaccugaauaaug

SEQ ID NO: 194990 - RNA, 19 nt, Homo sapiens
  misc_RNA (1)...(19): siRNA sense strand
guggcaaguucaacaggau

SEQ ID NO: 194991 - RNA, 19 nt, Homo sapiens
  misc_RNA (1)...(19): siRNA sense strand
acaacaauuuggucaacgu

SEQ ID NO: 194992 - RNA, 19 nt, Homo sapiens
  misc_RNA (1)...(19): siRNA sense strand
gacuacaucaggagaagau

SEQ ID NO: 194993 - RNA, 19 nt, Homo sapiens
  misc_RNA (1)...(19): siRNA sense strand
uaauaagccagagaucgaa

SEQ ID NO: 194994 - RNA, 19 nt, Homo sapiens
  misc_RNA (1)...(19): siRNA sense strand
ugucagauucucagcuuau

SEQ ID NO: 194995 - RNA, 19 nt, Homo sapiens
  misc_RNA (1)...(19): siRNA sense strand
ggauauccugcagauuauu

SEQ ID NO: 194996 - RNA, 19 nt, Homo sapiens
  misc_RNA (1)...(19): siRNA sense strand
agcaucaggccaaauguaa

SEQ ID NO: 194997 - RNA, 19 nt, Homo sapiens
  misc_RNA (1)...(19): siRNA sense strand
gcccuuugcuuggaucucu

SEQ ID NO: 194998 - RNA, 19 nt, Homo sapiens
  misc_RNA (1)...(19): siRNA sense strand
gcugaauguuuaugauacg

SEQ ID NO: 194999 - RNA, 19 nt, Homo sapiens
  misc_RNA (1)...(19): siRNA sense strand
agacuuugccaagguacua

SEQ ID NO: 195000 - RNA, 19 nt, Homo sapiens
  misc_RNA (1)...(19): siRNA sense strand
caagcaaguggcaaguuca

SEQ ID NO: 195001 - RNA, 19 nt, Homo sapiens
  misc_RNA (1)...(19): siRNA sense strand
agacaaguacagauaccuu

SEQ ID NO: 195002 - RNA, 19 nt, Homo sapiens
  misc_RNA (1)...(19): siRNA sense strand
gcaucauuucccuguguaa

SEQ ID NO: 195003 - RNA, 19 nt, Homo sapiens
  misc_RNA (1)...(19): siRNA sense strand
cugcaaagaguguccaauc

SEQ ID NO: 195004 - RNA, 19 nt, Homo sapiens
  misc_RNA (1)...(19): siRNA sense strand
cuuauaggacugccaugaa

SEQ ID NO: 195005 - RNA, 19 nt, Homo sapiens
  misc_RNA (1)...(19): siRNA sense strand
caaagaguguccaaucauu

SEQ ID NO: 195006 - RNA, 19 nt, Homo sapiens
  misc_RNA (1)...(19): siRNA sense strand
uagcugaccugaauaaugu

SEQ ID NO: 195007 - RNA, 19 nt, Homo sapiens
  misc_RNA (1)...(19): siRNA sense strand
gcaugauucuauccaaauu

SEQ ID NO: 195008 - RNA, 19 nt, Homo sapiens
  misc_RNA (1)...(19): siRNA sense strand
ugaacuggcugcugaaugu

SEQ ID NO: 195009 - RNA, 19 nt, Homo sapiens
  misc_RNA (1)...(19): siRNA sense strand
gauauccugcagauuauua

SEQ ID NO: 195010 - RNA, 19 nt, Homo sapiens
  misc_RNA (1)...(19): siRNA sense strand
gagaagauguucgagacuu

SEQ ID NO: 195011 - RNA, 19 nt, Homo sapiens
  misc_RNA (1)...(19): siRNA sense strand
gcacuuuaauuaugacauc

SEQ ID NO: 195012 - RNA, 19 nt, Homo sapiens
  misc_RNA (1)...(19): siRNA sense strand
guaaagcacauuuggaaga

SEQ ID NO: 195013 - RNA, 19 nt, Homo sapiens
  misc_RNA (1)...(19): siRNA sense strand
gaauauugcacuccgacua

SEQ ID NO: 195014 - RNA, 19 nt, Homo sapiens
  misc_RNA (1)...(19): siRNA sense strand
uuauaggacugccaugaaa

SEQ ID NO: 195015 - RNA, 19 nt, Homo sapiens
  misc_RNA (1)...(19): siRNA sense strand
gggugaaguugcauccuuu

SEQ ID NO: 195016 - RNA, 19 nt, Homo sapiens
  misc_RNA (1)...(19): siRNA sense strand
gcaagagcacaacaauuug

SEQ ID NO: 195017 - RNA, 19 nt, Homo sapiens
  misc_RNA (1)...(19): siRNA sense strand
gcacaacaauuuggucaac

SEQ ID NO: 195018 - RNA, 19 nt, Homo sapiens
  misc_RNA (1)...(19): siRNA sense strand
agcaagagcacaacaauuu

SEQ ID NO: 195019 - RNA, 19 nt, Homo sapiens
  misc_RNA (1)...(19): siRNA sense strand
agaagauguucgagacuuu

SEQ ID NO: 195020 - RNA, 19 nt, Homo sapiens
  misc_RNA (1)...(19): siRNA sense strand
gagcaagagcacaacaauu

SEQ ID NO: 195021 - RNA, 19 nt, Homo sapiens
  misc_RNA (1)...(19): siRNA sense strand
ucaagcaaguggcaaguuc

SEQ ID NO: 195022 - RNA, 19 nt, Homo sapiens
  misc_RNA (1)...(19): siRNA sense strand
ccacgagacucaaacaacu

SEQ ID NO: 195023 - RNA, 19 nt, Homo sapiens
  misc_RNA (1)...(19): siRNA sense strand
cagcacaaccucaagcaaa

SEQ ID NO: 195024 - RNA, 19 nt, Homo sapiens
  misc_RNA (1)...(19): siRNA sense strand
gcaaagaguguccaaucau

SEQ ID NO: 195025 - RNA, 19 nt, Homo sapiens
  misc_RNA (1)...(19): siRNA sense strand
auggauauccugcagauua

SEQ ID NO: 195026 - RNA, 19 nt, Homo sapiens
  misc_RNA (1)...(19): siRNA sense strand
uguaacaucugcaaagagu

SEQ ID NO: 195027 - RNA, 19 nt, Homo sapiens
  misc_RNA (1)...(19): siRNA sense strand
guccggagcugcuuccaau

SEQ ID NO: 195028 - RNA, 19 nt, Homo sapiens
  misc_RNA (1)...(19): siRNA sense strand
gcaaguggcaaguucaaca

SEQ ID NO: 195029 - RNA, 19 nt, Homo sapiens
  misc_RNA (1)...(19): siRNA sense strand
gcuuccaauuugcuaauaa

SEQ ID NO: 195030 - RNA, 19 nt, Homo sapiens
  misc_RNA (1)...(19): siRNA sense strand
uggaagacaaguacagaua

SEQ ID NO: 195031 - RNA, 19 nt, Homo sapiens
  misc_RNA (1)...(19): siRNA sense strand
ggauccguguccugucuuu

SEQ ID NO: 195032 - RNA, 19 nt, Homo sapiens
  misc_RNA (1)...(19): siRNA sense strand
gucuuuagcugaccugaau

SEQ ID NO: 195033 - RNA, 19 nt, Homo sapiens
  misc_RNA (1)...(19): siRNA sense strand
gacaaguacagauaccuuu

SEQ ID NO: 195034 - RNA, 19 nt, Homo sapiens
  misc_RNA (1)...(19): siRNA sense strand
ccaagcaucaggccaaaug

SEQ ID NO: 195035 - RNA, 19 nt, Homo sapiens
  misc_RNA (1)...(19): siRNA sense strand
ggagcaagagcacaacaau

SEQ ID NO: 195036 - RNA, 19 nt, Homo sapiens
  misc_RNA (1)...(19): siRNA sense strand
guguaaagcacauuuggaa

SEQ ID NO: 195037 - RNA, 19 nt, Homo sapiens
  misc_RNA (1)...(19): siRNA sense strand
caagacaguugggugaagu

SEQ ID NO: 195038 - RNA, 19 nt, Homo sapiens
  misc_RNA (1)...(19): siRNA sense strand
gaagauguucgagacuuug

SEQ ID NO: 195039 - RNA, 19 nt, Homo sapiens
  misc_RNA (1)...(19): siRNA sense strand
gucagauucucagcuuaua

SEQ ID NO: 195040 - RNA, 19 nt, Homo sapiens
  misc_RNA (1)...(19): siRNA sense strand
uaacaucugcaaagagugu

SEQ ID NO: 195041 - RNA, 19 nt, Homo sapiens
  misc_RNA (1)...(19): siRNA sense strand
cggagcugcuuccaauuug

SEQ ID NO: 195042 - RNA, 19 nt, Homo sapiens
  misc_RNA (1)...(19): siRNA sense strand
gaagacaaguacagauacc

SEQ ID NO: 195043 - RNA, 19 nt, Homo sapiens
  misc_RNA (1)...(19): siRNA sense strand
ccauggauauccugcagau

SEQ ID NO: 195044 - RNA, 19 nt, Homo sapiens
  misc_RNA (1)...(19): siRNA sense strand
ggcaucauuucccugugua

SEQ ID NO: 195045 - RNA, 19 nt, Homo sapiens
  misc_RNA (1)...(19): siRNA sense strand
uggauauccugcagauuau

SEQ ID NO: 195046 - RNA, 19 nt, Homo sapiens
  misc_RNA (1)...(19): siRNA sense strand
ggaagacaaguacagauac

SEQ ID NO: 195047 - RNA, 19 nt, Homo sapiens
  misc_RNA (1)...(19): siRNA sense strand
ugcaaagaguguccaauca

SEQ ID NO: 195048 - RNA, 19 nt, Homo sapiens
  misc_RNA (1)...(19): siRNA sense strand
guggauaugugucugaacu

SEQ ID NO: 195049 - RNA, 19 nt, Homo sapiens
  misc_RNA (1)...(19): siRNA sense strand
acuggcugcugaauguuua

SEQ ID NO: 195050 - RNA, 19 nt, Homo sapiens
  misc_RNA (1)...(19): siRNA sense strand
acuaucccaugguggaaua

SEQ ID NO: 195051 - RNA, 19 nt, Homo sapiens
  misc_RNA (1)...(19): siRNA sense strand
ccggagcugcuuccaauuu

SEQ ID NO: 195052 - RNA, 19 nt, Homo sapiens
  misc_RNA (1)...(19): siRNA sense strand
ccaaauuccaagacaguug

SEQ ID NO: 195053 - RNA, 19 nt, Homo sapiens
  misc_RNA (1)...(19): siRNA sense strand
cagaaacugccaagcauca

SEQ ID NO: 195054 - RNA, 19 nt, Homo sapiens
  misc_RNA (1)...(19): siRNA sense strand
uaugacaucugccaaagcu

SEQ ID NO: 195055 - RNA, 19 nt, Homo sapiens
  misc_RNA (1)...(19): siRNA sense strand
aaugucagauucucagcuu

SEQ ID NO: 195056 - RNA, 19 nt, Homo sapiens
  misc_RNA (1)...(19): siRNA sense strand
ucgagacuuugccaaggua

SEQ ID NO: 195057 - RNA, 19 nt, Homo sapiens
  misc_RNA (1)...(19): siRNA sense strand
gcaaaaggccauaaaaugc

SEQ ID NO: 195058 - RNA, 19 nt, Homo sapiens
  misc_RNA (1)...(19): siRNA sense strand
cugcaugauucuauccaaa

SEQ ID NO: 195059 - RNA, 19 nt, Homo sapiens
  misc_RNA (1)...(19): siRNA sense strand
uaaagcacauuuggaagac

SEQ ID NO: 195060 - RNA, 19 nt, Homo sapiens
  misc_RNA (1)...(19): siRNA sense strand
acaggagucuaaagcacuu

SEQ ID NO: 195061 - RNA, 19 nt, Homo sapiens
  misc_RNA (1)...(19): siRNA sense strand
acagauaccuuuucaagca

SEQ ID NO: 195062 - RNA, 19 nt, Homo sapiens
  misc_RNA (1)...(19): siRNA sense strand
aagcacauuuggaagacaa

SEQ ID NO: 195063 - RNA, 19 nt, Homo sapiens
  misc_RNA (1)...(19): siRNA sense strand
gcuaauaauaagccagaga

SEQ ID NO: 195064 - RNA, 19 nt, Homo sapiens
  misc_RNA (1)...(19): siRNA sense strand
caagagcacaacaauuugg

SEQ ID NO: 195065 - RNA, 19 nt, Homo sapiens
  misc_RNA (1)...(19): siRNA sense strand
ccugucagcugcaugugau

SEQ ID NO: 195066 - RNA, 19 nt, Homo sapiens
  misc_RNA (1)...(19): siRNA sense strand
gcugcugaauguuuaugau

SEQ ID NO: 195067 - RNA, 19 nt, Homo sapiens
  misc_RNA (1)...(19): siRNA sense strand
acagagcucuaccagucuu

SEQ ID NO: 195068 - RNA, 19 nt, Homo sapiens
  misc_RNA (1)...(19): siRNA sense strand
acaguugggugaaguugca

SEQ ID NO: 195069 - RNA, 19 nt, Homo sapiens
  misc_RNA (1)...(19): siRNA sense strand
guuugaccacuauuuauga

SEQ ID NO: 195070 - RNA, 19 nt, Homo sapiens
  misc_RNA (1)...(19): siRNA sense strand
gcuuauaggacugccauga

SEQ ID NO: 195071 - RNA, 19 nt, Homo sapiens
  misc_RNA (1)...(19): siRNA sense strand
caucaggccaaauguaaca

SEQ ID NO: 195072 - RNA, 19 nt, Homo sapiens
  misc_RNA (1)...(19): siRNA sense strand
gauucuauccaaauuccaa

SEQ ID NO: 195073 - RNA, 19 nt, Homo sapiens
  misc_RNA (1)...(19): siRNA sense strand
ggcaaguucaacaggauuu

SEQ ID NO: 195074 - RNA, 19 nt, Homo sapiens
  misc_RNA (1)...(19): siRNA sense strand
gaacuggcugcugaauguu

SEQ ID NO: 195075 - RNA, 19 nt, Homo sapiens
  misc_RNA (1)...(19): siRNA sense strand
cugcugaauguuuaugaua

SEQ ID NO: 195076 - RNA, 19 nt, Homo sapiens
  misc_RNA (1)...(19): siRNA sense strand
aagcaucaggccaaaugua

SEQ ID NO: 195077 - RNA, 19 nt, Homo sapiens
  misc_RNA (1)...(19): siRNA sense strand
uggcaucauuucccugugu

SEQ ID NO: 195078 - RNA, 19 nt, Homo sapiens
  misc_RNA (1)...(19): siRNA sense strand
ccaugaaacuccgaagacu

SEQ ID NO: 195079 - RNA, 19 nt, Homo sapiens
  misc_RNA (1)...(19): siRNA sense strand
auaauaagccagagaucga

SEQ ID NO: 195080 - RNA, 19 nt, Homo sapiens
  misc_RNA (1)...(19): siRNA sense strand
cuaauaauaagccagagau

SEQ ID NO: 195081 - RNA, 19 nt, Homo sapiens
  misc_RNA (1)...(19): siRNA sense strand
ugggugaaguugcauccuu

SEQ ID NO: 195082 - RNA, 19 nt, Homo sapiens
  misc_RNA (1)...(19): siRNA sense strand
caucauuucccuguguaaa

SEQ ID NO: 195083 - RNA, 19 nt, Homo sapiens
  misc_RNA (1)...(19): siRNA sense strand
gcguggauaugugucugaa

SEQ ID NO: 195084 - RNA, 19 nt, Homo sapiens
  misc_RNA (1)...(19): siRNA sense strand
gcacuaucccaugguggaa

SEQ ID NO: 195085 - RNA, 19 nt, Homo sapiens
  misc_RNA (1)...(19): siRNA sense strand
gagccugucagcugcaugu

SEQ ID NO: 195086 - RNA, 19 nt, Homo sapiens
  misc_RNA (1)...(19): siRNA sense strand
guacagauaccuuuucaag

SEQ ID NO: 195087 - RNA, 19 nt, Homo sapiens
  misc_RNA (1)...(19): siRNA sense strand
gucccucucugcguggaua

SEQ ID NO: 195088 - RNA, 19 nt, Homo sapiens
  misc_RNA (1)...(19): siRNA sense strand
ggagcugcuuccaauuugc

SEQ ID NO: 195089 - RNA, 19 nt, Homo sapiens
  misc_RNA (1)...(19): siRNA sense strand
uuagcugaccugaauaaug

SEQ ID NO: 195090 - RNA, 19 nt, Homo sapiens
  misc_RNA (1)...(19): siRNA sense strand
guggcaaguucaacaggau

SEQ ID NO: 195091 - RNA, 19 nt, Homo sapiens
  misc_RNA (1)...(19): siRNA sense strand
acaacaauuuggucaacgu

SEQ ID NO: 195092 - RNA, 19 nt, Homo sapiens
  misc_RNA (1)...(19): siRNA sense strand
gacuacaucaggagaagau

SEQ ID NO: 195093 - RNA, 19 nt, Homo sapiens
  misc_RNA (1)...(19): siRNA sense strand
uaauaagccagagaucgaa

SEQ ID NO: 195094 - RNA, 19 nt, Homo sapiens
  misc_RNA (1)...(19): siRNA sense strand
ugucagauucucagcuuau

SEQ ID NO: 195095 - RNA, 19 nt, Homo sapiens
  misc_RNA (1)...(19): siRNA sense strand
ggauauccugcagauuauu

SEQ ID NO: 195096 - RNA, 19 nt, Homo sapiens
  misc_RNA (1)...(19): siRNA sense strand
agcaucaggccaaauguaa

SEQ ID NO: 195097 - RNA, 19 nt, Homo sapiens
  misc_RNA (1)...(19): siRNA sense strand
gcccuuugcuuggaucucu

SEQ ID NO: 195098 - RNA, 19 nt, Homo sapiens
  misc_RNA (1)...(19): siRNA sense strand
gcugaauguuuaugauacg

SEQ ID NO: 195099 - RNA, 19 nt, Homo sapiens
  misc_RNA (1)...(19): siRNA sense strand
agacuuugccaagguacua

SEQ ID NO: 195100 - RNA, 19 nt, Homo sapiens
  misc_RNA (1)...(19): siRNA sense strand
caagcaaguggcaaguuca

SEQ ID NO: 195101 - RNA, 19 nt, Homo sapiens
  misc_RNA (1)...(19): siRNA sense strand
agacaaguacagauaccuu

SEQ ID NO: 195102 - RNA, 19 nt, Homo sapiens
  misc_RNA (1)...(19): siRNA sense strand
gcaucauuucccuguguaa

SEQ ID NO: 195103 - RNA, 19 nt, Homo sapiens
  misc_RNA (1)...(19): siRNA sense strand
cugcaaagaguguccaauc

SEQ ID NO: 195104 - RNA, 19 nt, Homo sapiens
  misc_RNA (1)...(19): siRNA sense strand
cuuauaggacugccaugaa

SEQ ID NO: 195105 - RNA, 19 nt, Homo sapiens
  misc_RNA (1)...(19): siRNA sense strand
caaagaguguccaaucauu

SEQ ID NO: 195106 - RNA, 19 nt, Homo sapiens
  misc_RNA (1)...(19): siRNA sense strand
uagcugaccugaauaaugu

SEQ ID NO: 195107 - RNA, 19 nt, Homo sapiens
  misc_RNA (1)...(19): siRNA sense strand
gcaugauucuauccaaauu

SEQ ID NO: 195108 - RNA, 19 nt, Homo sapiens
  misc_RNA (1)...(19): siRNA sense strand
ugaacuggcugcugaaugu

SEQ ID NO: 195109 - RNA, 19 nt, Homo sapiens
  misc_RNA (1)...(19): siRNA sense strand
gauauccugcagauuauua

SEQ ID NO: 195110 - RNA, 19 nt, Homo sapiens
  misc_RNA (1)...(19): siRNA sense strand
gagaagauguucgagacuu

SEQ ID NO: 195111 - RNA, 19 nt, Homo sapiens
  misc_RNA (1)...(19): siRNA sense strand
gcacuuuaauuaugacauc

SEQ ID NO: 195112 - RNA, 19 nt, Homo sapiens
  misc_RNA (1)...(19): siRNA sense strand
guaaagcacauuuggaaga

SEQ ID NO: 195113 - RNA, 19 nt, Homo sapiens
  misc_RNA (1)...(19): siRNA sense strand
gaauauugcacuccgacua

SEQ ID NO: 195114 - RNA, 19 nt, Homo sapiens
  misc_RNA (1)...(19): siRNA sense strand
uuauaggacugccaugaaa

SEQ ID NO: 195115 - RNA, 19 nt, Homo sapiens
  misc_RNA (1)...(19): siRNA sense strand
gggugaaguugcauccuuu

SEQ ID NO: 195116 - RNA, 19 nt, Homo sapiens
  misc_RNA (1)...(19): siRNA sense strand
gcaagagcacaacaauuug

SEQ ID NO: 195117 - RNA, 19 nt, Homo sapiens
  misc_RNA (1)...(19): siRNA sense strand
gcacaacaauuuggucaac

SEQ ID NO: 195118 - RNA, 19 nt, Homo sapiens
  misc_RNA (1)...(19): siRNA sense strand
agcaagagcacaacaauuu

SEQ ID NO: 195119 - RNA, 19 nt, Homo sapiens
  misc_RNA (1)...(19): siRNA sense strand
agaagauguucgagacuuu

SEQ ID NO: 195120 - RNA, 19 nt, Homo sapiens
  misc_RNA (1)...(19): siRNA sense strand
gagcaagagcacaacaauu

SEQ ID NO: 195121 - RNA, 19 nt, Homo sapiens
  misc_RNA (1)...(19): siRNA sense strand
ucaagcaaguggcaaguuc

SEQ ID NO: 195122 - RNA, 19 nt, Homo sapiens
  misc_RNA (1)...(19): siRNA sense strand
ccacgagacucaaacaacu

SEQ ID NO: 195123 - RNA, 19 nt, Homo sapiens
  misc_RNA (1)...(19): siRNA sense strand
cagcacaaccucaagcaaa

SEQ ID NO: 195124 - RNA, 19 nt, Homo sapiens
  misc_RNA (1)...(19): siRNA sense strand
gcaaagaguguccaaucau

SEQ ID NO: 195125 - RNA, 19 nt, Homo sapiens
  misc_RNA (1)...(19): siRNA sense strand
auggauauccugcagauua

SEQ ID NO: 195126 - RNA, 19 nt, Homo sapiens
  misc_RNA (1)...(19): siRNA sense strand
uguaacaucugcaaagagu

SEQ ID NO: 195127 - RNA, 19 nt, Homo sapiens
  misc_RNA (1)...(19): siRNA sense strand
guccggagcugcuuccaau

SEQ ID NO: 195128 - RNA, 19 nt, Homo sapiens
  misc_RNA (1)...(19): siRNA sense strand
gcaaguggcaaguucaaca

SEQ ID NO: 195129 - RNA, 19 nt, Homo sapiens
  misc_RNA (1)...(19): siRNA sense strand
gcuuccaauuugcuaauaa

SEQ ID NO: 195130 - RNA, 19 nt, Homo sapiens
  misc_RNA (1)...(19): siRNA sense strand
uggaagacaaguacagaua

SEQ ID NO: 195131 - RNA, 19 nt, Homo sapiens
  misc_RNA (1)...(19): siRNA sense strand
ggauccguguccugucuuu

SEQ ID NO: 195132 - RNA, 19 nt, Homo sapiens
  misc_RNA (1)...(19): siRNA sense strand
gucuuuagcugaccugaau

SEQ ID NO: 195133 - RNA, 19 nt, Homo sapiens
  misc_RNA (1)...(19): siRNA sense strand
gacaaguacagauaccuuu

SEQ ID NO: 195134 - RNA, 19 nt, Homo sapiens
  misc_RNA (1)...(19): siRNA sense strand
ccaagcaucaggccaaaug

SEQ ID NO: 195135 - RNA, 19 nt, Homo sapiens
  misc_RNA (1)...(19): siRNA sense strand
ggagcaagagcacaacaau

SEQ ID NO: 195136 - RNA, 19 nt, Homo sapiens
  misc_RNA (1)...(19): siRNA sense strand
guguaaagcacauuuggaa

SEQ ID NO: 195137 - RNA, 19 nt, Homo sapiens
  misc_RNA (1)...(19): siRNA sense strand
caagacaguugggugaagu

SEQ ID NO: 195138 - RNA, 19 nt, Homo sapiens
  misc_RNA (1)...(19): siRNA sense strand
gaagauguucgagacuuug

SEQ ID NO: 195139 - RNA, 19 nt, Homo sapiens
  misc_RNA (1)...(19): siRNA sense strand
gucagauucucagcuuaua

SEQ ID NO: 195140 - RNA, 19 nt, Homo sapiens
  misc_RNA (1)...(19): siRNA sense strand
uaacaucugcaaagagugu

SEQ ID NO: 195141 - RNA, 19 nt, Homo sapiens
  misc_RNA (1)...(19): siRNA sense strand
cggagcugcuuccaauuug

SEQ ID NO: 195142 - RNA, 19 nt, Homo sapiens
  misc_RNA (1)...(19): siRNA sense strand
gaagacaaguacagauacc

SEQ ID NO: 195143 - RNA, 19 nt, Homo sapiens
  misc_RNA (1)...(19): siRNA sense strand
ccauggauauccugcagau

SEQ ID NO: 195144 - RNA, 19 nt, Homo sapiens
  misc_RNA (1)...(19): siRNA sense strand
ggcaucauuucccugugua

SEQ ID NO: 195145 - RNA, 19 nt, Homo sapiens
  misc_RNA (1)...(19): siRNA sense strand
uggauauccugcagauuau

SEQ ID NO: 195146 - RNA, 19 nt, Homo sapiens
  misc_RNA (1)...(19): siRNA sense strand
ggaagacaaguacagauac

SEQ ID NO: 195147 - RNA, 19 nt, Homo sapiens
  misc_RNA (1)...(19): siRNA sense strand
ugcaaagaguguccaauca

SEQ ID NO: 195148 - RNA, 19 nt, Homo sapiens
  misc_RNA (1)...(19): siRNA sense strand
guggauaugugucugaacu

SEQ ID NO: 195149 - RNA, 19 nt, Homo sapiens
  misc_RNA (1)...(19): siRNA sense strand
acuggcugcugaauguuua

SEQ ID NO: 195150 - RNA, 19 nt, Homo sapiens
  misc_RNA (1)...(19): siRNA sense strand
acuaucccaugguggaaua

SEQ ID NO: 195151 - RNA, 19 nt, Homo sapiens
  misc_RNA (1)...(19): siRNA sense strand
ccggagcugcuuccaauuu

SEQ ID NO: 195152 - RNA, 19 nt, Homo sapiens
  misc_RNA (1)...(19): siRNA sense strand
ccaaauuccaagacaguug

SEQ ID NO: 195153 - RNA, 19 nt, Homo sapiens
  misc_RNA (1)...(19): siRNA sense strand
cagaaacugccaagcauca

SEQ ID NO: 195154 - RNA, 19 nt, Homo sapiens
  misc_RNA (1)...(19): siRNA sense strand
uaugacaucugccaaagcu

SEQ ID NO: 195155 - RNA, 19 nt, Homo sapiens
  misc_RNA (1)...(19): siRNA sense strand
aaugucagauucucagcuu

SEQ ID NO: 195156 - RNA, 19 nt, Homo sapiens
  misc_RNA (1)...(19): siRNA sense strand
ucgagacuuugccaaggua

SEQ ID NO: 195157 - RNA, 19 nt, Homo sapiens
  misc_RNA (1)...(19): siRNA sense strand
gcaaaaggccauaaaaugc

SEQ ID NO: 195158 - RNA, 19 nt, Homo sapiens
  misc_RNA (1)...(19): siRNA sense strand
cugcaugauucuauccaaa

SEQ ID NO: 195159 - RNA, 19 nt, Homo sapiens
  misc_RNA (1)...(19): siRNA sense strand
uaaagcacauuuggaagac

SEQ ID NO: 195160 - RNA, 19 nt, Homo sapiens
  misc_RNA (1)...(19): siRNA sense strand
acaggagucuaaagcacuu

SEQ ID NO: 195161 - RNA, 19 nt, Homo sapiens
  misc_RNA (1)...(19): siRNA sense strand
acagauaccuuuucaagca

SEQ ID NO: 195162 - RNA, 19 nt, Homo sapiens
  misc_RNA (1)...(19): siRNA sense strand
aagcacauuuggaagacaa

SEQ ID NO: 195163 - RNA, 19 nt, Homo sapiens
  misc_RNA (1)...(19): siRNA sense strand
gcuaauaauaagccagaga

SEQ ID NO: 195164 - RNA, 19 nt, Homo sapiens
  misc_RNA (1)...(19): siRNA sense strand
caagagcacaacaauuugg

SEQ ID NO: 195165 - RNA, 19 nt, Homo sapiens
  misc_RNA (1)...(19): siRNA sense strand
ccugucagcugcaugugau

SEQ ID NO: 195166 - RNA, 19 nt, Homo sapiens
  misc_RNA (1)...(19): siRNA sense strand
gcugcugaauguuuaugau

SEQ ID NO: 195167 - RNA, 19 nt, Homo sapiens
  misc_RNA (1)...(19): siRNA sense strand
acagagcucuaccagucuu

SEQ ID NO: 195168 - RNA, 19 nt, Homo sapiens
  misc_RNA (1)...(19): siRNA sense strand
acaguugggugaaguugca

SEQ ID NO: 195169 - RNA, 19 nt, Homo sapiens
  misc_RNA (1)...(19): siRNA sense strand
guuugaccacuauuuauga

SEQ ID NO: 195170 - RNA, 19 nt, Homo sapiens
  misc_RNA (1)...(19): siRNA sense strand
gcuuauaggacugccauga

SEQ ID NO: 195171 - RNA, 19 nt, Homo sapiens
  misc_RNA (1)...(19): siRNA sense strand
caucaggccaaauguaaca

SEQ ID NO: 195172 - RNA, 19 nt, Homo sapiens
  misc_RNA (1)...(19): siRNA sense strand
gauucuauccaaauuccaa

SEQ ID NO: 195173 - RNA, 19 nt, Homo sapiens
  misc_RNA (1)...(19): siRNA sense strand
ggcaaguucaacaggauuu

SEQ ID NO: 195174 - RNA, 19 nt, Homo sapiens
  misc_RNA (1)...(19): siRNA sense strand
gaacuggcugcugaauguu

SEQ ID NO: 195175 - RNA, 19 nt, Homo sapiens
  misc_RNA (1)...(19): siRNA sense strand
cugcugaauguuuaugaua

SEQ ID NO: 195176 - RNA, 19 nt, Homo sapiens
  misc_RNA (1)...(19): siRNA sense strand
aagcaucaggccaaaugua

SEQ ID NO: 195177 - RNA, 19 nt, Homo sapiens
  misc_RNA (1)...(19): siRNA sense strand
uggcaucauuucccugugu

SEQ ID NO: 195178 - RNA, 19 nt, Homo sapiens
  misc_RNA (1)...(19): siRNA sense strand
ccaugaaacuccgaagacu

SEQ ID NO: 195179 - RNA, 19 nt, Homo sapiens
  misc_RNA (1)...(19): siRNA sense strand
auaauaagccagagaucga

SEQ ID NO: 195180 - RNA, 19 nt, Homo sapiens
  misc_RNA (1)...(19): siRNA sense strand
cuaauaauaagccagagau

SEQ ID NO: 195181 - RNA, 19 nt, Homo sapiens
  misc_RNA (1)...(19): siRNA sense strand
ugggugaaguugcauccuu

SEQ ID NO: 195182 - RNA, 19 nt, Homo sapiens
  misc_RNA (1)...(19): siRNA sense strand
caucauuucccuguguaaa

SEQ ID NO: 195183 - RNA, 19 nt, Homo sapiens
  misc_RNA (1)...(19): siRNA sense strand
gcguggauaugugucugaa

SEQ ID NO: 195184 - RNA, 19 nt, Homo sapiens
  misc_RNA (1)...(19): siRNA sense strand
gcacuaucccaugguggaa

SEQ ID NO: 195185 - RNA, 19 nt, Homo sapiens
  misc_RNA (1)...(19): siRNA sense strand
gagccugucagcugcaugu

SEQ ID NO: 195186 - RNA, 19 nt, Homo sapiens
  misc_RNA (1)...(19): siRNA sense strand
guacagauaccuuuucaag

SEQ ID NO: 195187 - RNA, 19 nt, Homo sapiens
  misc_RNA (1)...(19): siRNA sense strand
gucccucucugcguggaua

SEQ ID NO: 195188 - RNA, 19 nt, Homo sapiens
  misc_RNA (1)...(19): siRNA sense strand
ggagcugcuuccaauuugc

SEQ ID NO: 195189 - RNA, 19 nt, Homo sapiens
  misc_RNA (1)...(19): siRNA sense strand
uuagcugaccugaauaaug

SEQ ID NO: 195190 - RNA, 19 nt, Homo sapiens
  misc_RNA (1)...(19): siRNA sense strand
guggcaaguucaacaggau

SEQ ID NO: 195191 - RNA, 19 nt, Homo sapiens
  misc_RNA (1)...(19): siRNA sense strand
acaacaauuuggucaacgu

SEQ ID NO: 195192 - RNA, 19 nt, Homo sapiens
  misc_RNA (1)...(19): siRNA sense strand
gacuacaucaggagaagau

SEQ ID NO: 195193 - RNA, 19 nt, Homo sapiens
  misc_RNA (1)...(19): siRNA sense strand
uaauaagccagagaucgaa

SEQ ID NO: 195194 - RNA, 19 nt, Homo sapiens
  misc_RNA (1)...(19): siRNA sense strand
ugucagauucucagcuuau

SEQ ID NO: 195195 - RNA, 19 nt, Homo sapiens
  misc_RNA (1)...(19): siRNA sense strand
ggauauccugcagauuauu

SEQ ID NO: 195196 - RNA, 19 nt, Homo sapiens
  misc_RNA (1)...(19): siRNA sense strand
agcaucaggccaaauguaa

SEQ ID NO: 195197 - RNA, 19 nt, Homo sapiens
  misc_RNA (1)...(19): siRNA sense strand
gcccuuugcuuggaucucu

SEQ ID NO: 195198 - RNA, 19 nt, Homo sapiens
  misc_RNA (1)...(19): siRNA sense strand
gcugaauguuuaugauacg

SEQ ID NO: 195199 - RNA, 19 nt, Homo sapiens
  misc_RNA (1)...(19): siRNA sense strand
agacuuugccaagguacua

SEQ ID NO: 195200 - RNA, 19 nt, Homo sapiens
  misc_RNA (1)...(19): siRNA sense strand
caagcaaguggcaaguuca

SEQ ID NO: 195201 - RNA, 19 nt, Homo sapiens
  misc_RNA (1)...(19): siRNA sense strand
agacaaguacagauaccuu

SEQ ID NO: 195202 - RNA, 19 nt, Homo sapiens
  misc_RNA (1)...(19): siRNA sense strand
gcaucauuucccuguguaa

SEQ ID NO: 195203 - RNA, 19 nt, Homo sapiens
  misc_RNA (1)...(19): siRNA sense strand
cugcaaagaguguccaauc

SEQ ID NO: 195204 - RNA, 19 nt, Homo sapiens
  misc_RNA (1)...(19): siRNA sense strand
cuuauaggacugccaugaa

SEQ ID NO: 195205 - RNA, 19 nt, Homo sapiens
  misc_RNA (1)...(19): siRNA sense strand
caaagaguguccaaucauu

SEQ ID NO: 195206 - RNA, 19 nt, Homo sapiens
  misc_RNA (1)...(19): siRNA sense strand
uagcugaccugaauaaugu

SEQ ID NO: 195207 - RNA, 19 nt, Homo sapiens
  misc_RNA (1)...(19): siRNA sense strand
gcaugauucuauccaaauu

SEQ ID NO: 195208 - RNA, 19 nt, Homo sapiens
  misc_RNA (1)...(19): siRNA sense strand
ugaacuggcugcugaaugu

SEQ ID NO: 195209 - RNA, 19 nt, Homo sapiens
  misc_RNA (1)...(19): siRNA sense strand
gauauccugcagauuauua

SEQ ID NO: 195210 - RNA, 19 nt, Homo sapiens
  misc_RNA (1)...(19): siRNA sense strand
gagaagauguucgagacuu

SEQ ID NO: 195211 - RNA, 19 nt, Homo sapiens
  misc_RNA (1)...(19): siRNA sense strand
gcacuuuaauuaugacauc

SEQ ID NO: 195212 - RNA, 19 nt, Homo sapiens
  misc_RNA (1)...(19): siRNA sense strand
guaaagcacauuuggaaga

SEQ ID NO: 195213 - RNA, 19 nt, Homo sapiens
  misc_RNA (1)...(19): siRNA sense strand
gaauauugcacuccgacua

SEQ ID NO: 195214 - RNA, 19 nt, Homo sapiens
  misc_RNA (1)...(19): siRNA sense strand
uuauaggacugccaugaaa

SEQ ID NO: 195215 - RNA, 19 nt, Homo sapiens
  misc_RNA (1)...(19): siRNA sense strand
gggugaaguugcauccuuu

SEQ ID NO: 195216 - RNA, 19 nt, Homo sapiens
  misc_RNA (1)...(19): siRNA sense strand
gcaagagcacaacaauuug

SEQ ID NO: 195217 - RNA, 19 nt, Homo sapiens
  misc_RNA (1)...(19): siRNA sense strand
gcacaacaauuuggucaac

SEQ ID NO: 195218 - RNA, 19 nt, Homo sapiens
  misc_RNA (1)...(19): siRNA sense strand
agcaagagcacaacaauuu

SEQ ID NO: 195219 - RNA, 19 nt, Homo sapiens
  misc_RNA (1)...(19): siRNA sense strand
agaagauguucgagacuuu

SEQ ID NO: 195220 - RNA, 19 nt, Homo sapiens
  misc_RNA (1)...(19): siRNA sense strand
gagcaagagcacaacaauu

SEQ ID NO: 195221 - RNA, 19 nt, Homo sapiens
  misc_RNA (1)...(19): siRNA sense strand
ucaagcaaguggcaaguuc

SEQ ID NO: 195222 - RNA, 19 nt, Homo sapiens
  misc_RNA (1)...(19): siRNA sense strand
ccacgagacucaaacaacu

SEQ ID NO: 195223 - RNA, 19 nt, Homo sapiens
  misc_RNA (1)...(19): siRNA sense strand
cagcacaaccucaagcaaa

SEQ ID NO: 195224 - RNA, 19 nt, Homo sapiens
  misc_RNA (1)...(19): siRNA sense strand
gcaaagaguguccaaucau

SEQ ID NO: 195225 - RNA, 19 nt, Homo sapiens
  misc_RNA (1)...(19): siRNA sense strand
auggauauccugcagauua

SEQ ID NO: 195226 - RNA, 19 nt, Homo sapiens
  misc_RNA (1)...(19): siRNA sense strand
uguaacaucugcaaagagu

SEQ ID NO: 195227 - RNA, 19 nt, Homo sapiens
  misc_RNA (1)...(19): siRNA sense strand
guccggagcugcuuccaau

SEQ ID NO: 195228 - RNA, 19 nt, Homo sapiens
  misc_RNA (1)...(19): siRNA sense strand
gcaaguggcaaguucaaca

SEQ ID NO: 195229 - RNA, 19 nt, Homo sapiens
  misc_RNA (1)...(19): siRNA sense strand
gcuuccaauuugcuaauaa

SEQ ID NO: 195230 - RNA, 19 nt, Homo sapiens
  misc_RNA (1)...(19): siRNA sense strand
uggaagacaaguacagaua

SEQ ID NO: 195231 - RNA, 19 nt, Homo sapiens
  misc_RNA (1)...(19): siRNA sense strand
ggauccguguccugucuuu

SEQ ID NO: 195232 - RNA, 19 nt, Homo sapiens
  misc_RNA (1)...(19): siRNA sense strand
gucuuuagcugaccugaau

SEQ ID NO: 195233 - RNA, 19 nt, Homo sapiens
  misc_RNA (1)...(19): siRNA sense strand
gacaaguacagauaccuuu

SEQ ID NO: 195234 - RNA, 19 nt, Homo sapiens
  misc_RNA (1)...(19): siRNA sense strand
ccaagcaucaggccaaaug

SEQ ID NO: 195235 - RNA, 19 nt, Homo sapiens
  misc_RNA (1)...(19): siRNA sense strand
ggagcaagagcacaacaau

SEQ ID NO: 195236 - RNA, 19 nt, Homo sapiens
  misc_RNA (1)...(19): siRNA sense strand
guguaaagcacauuuggaa

SEQ ID NO: 195237 - RNA, 19 nt, Homo sapiens
  misc_RNA (1)...(19): siRNA sense strand
caagacaguugggugaagu

SEQ ID NO: 195238 - RNA, 19 nt, Homo sapiens
  misc_RNA (1)...(19): siRNA sense strand
gaagauguucgagacuuug

SEQ ID NO: 195239 - RNA, 19 nt, Homo sapiens
  misc_RNA (1)...(19): siRNA sense strand
gucagauucucagcuuaua

SEQ ID NO: 195240 - RNA, 19 nt, Homo sapiens
  misc_RNA (1)...(19): siRNA sense strand
uaacaucugcaaagagugu

SEQ ID NO: 195241 - RNA, 19 nt, Homo sapiens
  misc_RNA (1)...(19): siRNA sense strand
cggagcugcuuccaauuug

SEQ ID NO: 195242 - RNA, 19 nt, Homo sapiens
  misc_RNA (1)...(19): siRNA sense strand
gaagacaaguacagauacc

SEQ ID NO: 195243 - RNA, 19 nt, Homo sapiens
  misc_RNA (1)...(19): siRNA sense strand
ccauggauauccugcagau

SEQ ID NO: 195244 - RNA, 19 nt, Homo sapiens
  misc_RNA (1)...(19): siRNA sense strand
ggcaucauuucccugugua

SEQ ID NO: 195245 - RNA, 19 nt, Homo sapiens
  misc_RNA (1)...(19): siRNA sense strand
uggauauccugcagauuau

SEQ ID NO: 195246 - RNA, 19 nt, Homo sapiens
  misc_RNA (1)...(19): siRNA sense strand
ggaagacaaguacagauac

SEQ ID NO: 195247 - RNA, 19 nt, Homo sapiens
  misc_RNA (1)...(19): siRNA sense strand
ugcaaagaguguccaauca

SEQ ID NO: 195248 - RNA, 19 nt, Homo sapiens
  misc_RNA (1)...(19): siRNA sense strand
guggauaugugucugaacu

SEQ ID NO: 195249 - RNA, 19 nt, Homo sapiens
  misc_RNA (1)...(19): siRNA sense strand
acuggcugcugaauguuua

SEQ ID NO: 195250 - RNA, 19 nt, Homo sapiens
  misc_RNA (1)...(19): siRNA sense strand
acuaucccaugguggaaua

SEQ ID NO: 195251 - RNA, 19 nt, Homo sapiens
  misc_RNA (1)...(19): siRNA sense strand
ccggagcugcuuccaauuu

SEQ ID NO: 195252 - RNA, 19 nt, Homo sapiens
  misc_RNA (1)...(19): siRNA sense strand
ccaaauuccaagacaguug

SEQ ID NO: 195253 - RNA, 19 nt, Homo sapiens
  misc_RNA (1)...(19): siRNA sense strand
cagaaacugccaagcauca

SEQ ID NO: 195254 - RNA, 19 nt, Homo sapiens
  misc_RNA (1)...(19): siRNA sense strand
uaugacaucugccaaagcu

SEQ ID NO: 195255 - RNA, 19 nt, Homo sapiens
  misc_RNA (1)...(19): siRNA sense strand
aaugucagauucucagcuu

SEQ ID NO: 195256 - RNA, 19 nt, Homo sapiens
  misc_RNA (1)...(19): siRNA sense strand
ucgagacuuugccaaggua

SEQ ID NO: 195257 - RNA, 19 nt, Homo sapiens
  misc_RNA (1)...(19): siRNA sense strand
gcaaaaggccauaaaaugc

SEQ ID NO: 195258 - RNA, 19 nt, Homo sapiens
  misc_RNA (1)...(19): siRNA sense strand
cugcaugauucuauccaaa

SEQ ID NO: 195259 - RNA, 19 nt, Homo sapiens
  misc_RNA (1)...(19): siRNA sense strand
uaaagcacauuuggaagac

SEQ ID NO: 195260 - RNA, 19 nt, Homo sapiens
  misc_RNA (1)...(19): siRNA sense strand
acaggagucuaaagcacuu

SEQ ID NO: 195261 - RNA, 19 nt, Homo sapiens
  misc_RNA (1)...(19): siRNA sense strand
acagauaccuuuucaagca

SEQ ID NO: 195262 - RNA, 19 nt, Homo sapiens
  misc_RNA (1)...(19): siRNA sense strand
aagcacauuuggaagacaa

SEQ ID NO: 195263 - RNA, 19 nt, Homo sapiens
  misc_RNA (1)...(19): siRNA sense strand
gcuaauaauaagccagaga

SEQ ID NO: 195264 - RNA, 19 nt, Homo sapiens
  misc_RNA (1)...(19): siRNA sense strand
caagagcacaacaauuugg

SEQ ID NO: 195265 - RNA, 19 nt, Homo sapiens
  misc_RNA (1)...(19): siRNA sense strand
ccugucagcugcaugugau

SEQ ID NO: 195266 - RNA, 19 nt, Homo sapiens
  misc_RNA (1)...(19): siRNA sense strand
gcugcugaauguuuaugau

SEQ ID NO: 195267 - RNA, 19 nt, Homo sapiens
  misc_RNA (1)...(19): siRNA sense strand
acagagcucuaccagucuu

SEQ ID NO: 195268 - RNA, 19 nt, Homo sapiens
  misc_RNA (1)...(19): siRNA sense strand
acaguugggugaaguugca

SEQ ID NO: 195269 - RNA, 19 nt, Homo sapiens
  misc_RNA (1)...(19): siRNA sense strand
guuugaccacuauuuauga

SEQ ID NO: 195270 - RNA, 19 nt, Homo sapiens
  misc_RNA (1)...(19): siRNA sense strand
gcuuauaggacugccauga

SEQ ID NO: 195271 - RNA, 19 nt, Homo sapiens
  misc_RNA (1)...(19): siRNA sense strand
caucaggccaaauguaaca

SEQ ID NO: 195272 - RNA, 19 nt, Homo sapiens
  misc_RNA (1)...(19): siRNA sense strand
gauucuauccaaauuccaa

SEQ ID NO: 195273 - RNA, 19 nt, Homo sapiens
  misc_RNA (1)...(19): siRNA sense strand
ggcaaguucaacaggauuu

SEQ ID NO: 195274 - RNA, 19 nt, Homo sapiens
  misc_RNA (1)...(19): siRNA sense strand
gaacuggcugcugaauguu

SEQ ID NO: 195275 - RNA, 19 nt, Homo sapiens
  misc_RNA (1)...(19): siRNA sense strand
cugcugaauguuuaugaua

SEQ ID NO: 195276 - RNA, 19 nt, Homo sapiens
  misc_RNA (1)...(19): siRNA sense strand
aagcaucaggccaaaugua

SEQ ID NO: 195277 - RNA, 19 nt, Homo sapiens
  misc_RNA (1)...(19): siRNA sense strand
uggcaucauuucccugugu

SEQ ID NO: 195278 - RNA, 19 nt, Homo sapiens
  misc_RNA (1)...(19): siRNA sense strand
ccaugaaacuccgaagacu

SEQ ID NO: 195279 - RNA, 19 nt, Homo sapiens
  misc_RNA (1)...(19): siRNA sense strand
auaauaagccagagaucga

SEQ ID NO: 195280 - RNA, 19 nt, Homo sapiens
  misc_RNA (1)...(19): siRNA sense strand
cuaauaauaagccagagau

SEQ ID NO: 195281 - RNA, 19 nt, Homo sapiens
  misc_RNA (1)...(19): siRNA sense strand
ugggugaaguugcauccuu

SEQ ID NO: 195282 - RNA, 19 nt, Homo sapiens
  misc_RNA (1)...(19): siRNA sense strand
caucauuucccuguguaaa

SEQ ID NO: 195283 - RNA, 19 nt, Homo sapiens
  misc_RNA (1)...(19): siRNA sense strand
gcguggauaugugucugaa

SEQ ID NO: 195284 - RNA, 19 nt, Homo sapiens
  misc_RNA (1)...(19): siRNA sense strand
gcacuaucccaugguggaa

SEQ ID NO: 195285 - RNA, 19 nt, Homo sapiens
  misc_RNA (1)...(19): siRNA sense strand
gagccugucagcugcaugu

SEQ ID NO: 195286 - RNA, 19 nt, Homo sapiens
  misc_RNA (1)...(19): siRNA sense strand
guacagauaccuuuucaag

SEQ ID NO: 195287 - RNA, 19 nt, Homo sapiens
  misc_RNA (1)...(19): siRNA sense strand
gucccucucugcguggaua

SEQ ID NO: 195288 - RNA, 19 nt, Homo sapiens
  misc_RNA (1)...(19): siRNA sense strand
ggagcugcuuccaauuugc

SEQ ID NO: 195289 - RNA, 19 nt, Homo sapiens
  misc_RNA (1)...(19): siRNA sense strand
uuagcugaccugaauaaug

SEQ ID NO: 195290 - RNA, 19 nt, Homo sapiens
  misc_RNA (1)...(19): siRNA sense strand
guggcaaguucaacaggau

SEQ ID NO: 195291 - RNA, 19 nt, Homo sapiens
  misc_RNA (1)...(19): siRNA sense strand
acaacaauuuggucaacgu

SEQ ID NO: 195292 - RNA, 19 nt, Homo sapiens
  misc_RNA (1)...(19): siRNA sense strand
gacuacaucaggagaagau

SEQ ID NO: 195293 - RNA, 19 nt, Homo sapiens
  misc_RNA (1)...(19): siRNA sense strand
uaauaagccagagaucgaa

SEQ ID NO: 195294 - RNA, 19 nt, Homo sapiens
  misc_RNA (1)...(19): siRNA sense strand
ugucagauucucagcuuau

SEQ ID NO: 195295 - RNA, 19 nt, Homo sapiens
  misc_RNA (1)...(19): siRNA sense strand
ggauauccugcagauuauu

SEQ ID NO: 195296 - RNA, 19 nt, Homo sapiens
  misc_RNA (1)...(19): siRNA sense strand
agcaucaggccaaauguaa

SEQ ID NO: 195297 - RNA, 19 nt, Homo sapiens
  misc_RNA (1)...(19): siRNA sense strand
gcccuuugcuuggaucucu

SEQ ID NO: 195298 - RNA, 19 nt, Homo sapiens
  misc_RNA (1)...(19): siRNA sense strand
gcugaauguuuaugauacg

SEQ ID NO: 195299 - RNA, 19 nt, Homo sapiens
  misc_RNA (1)...(19): siRNA sense strand
agacuuugccaagguacua

SEQ ID NO: 195300 - RNA, 19 nt, Homo sapiens
  misc_RNA (1)...(19): siRNA sense strand
caagcaaguggcaaguuca

SEQ ID NO: 195301 - RNA, 19 nt, Homo sapiens
  misc_RNA (1)...(19): siRNA sense strand
agacaaguacagauaccuu

SEQ ID NO: 195302 - RNA, 19 nt, Homo sapiens
  misc_RNA (1)...(19): siRNA sense strand
gcaucauuucccuguguaa

SEQ ID NO: 195303 - RNA, 19 nt, Homo sapiens
  misc_RNA (1)...(19): siRNA sense strand
cugcaaagaguguccaauc

SEQ ID NO: 195304 - RNA, 19 nt, Homo sapiens
  misc_RNA (1)...(19): siRNA sense strand
cuuauaggacugccaugaa

SEQ ID NO: 195305 - RNA, 19 nt, Homo sapiens
  misc_RNA (1)...(19): siRNA sense strand
caaagaguguccaaucauu

SEQ ID NO: 195306 - RNA, 19 nt, Homo sapiens
  misc_RNA (1)...(19): siRNA sense strand
uagcugaccugaauaaugu

SEQ ID NO: 195307 - RNA, 19 nt, Homo sapiens
  misc_RNA (1)...(19): siRNA sense strand
gcaugauucuauccaaauu

SEQ ID NO: 195308 - RNA, 19 nt, Homo sapiens
  misc_RNA (1)...(19): siRNA sense strand
ugaacuggcugcugaaugu

SEQ ID NO: 195309 - RNA, 19 nt, Homo sapiens
  misc_RNA (1)...(19): siRNA sense strand
gauauccugcagauuauua

SEQ ID NO: 195310 - RNA, 19 nt, Homo sapiens
  misc_RNA (1)...(19): siRNA sense strand
gagaagauguucgagacuu

SEQ ID NO: 195311 - RNA, 19 nt, Homo sapiens
  misc_RNA (1)...(19): siRNA sense strand
gcacuuuaauuaugacauc

SEQ ID NO: 195312 - RNA, 19 nt, Homo sapiens
  misc_RNA (1)...(19): siRNA sense strand
guaaagcacauuuggaaga

SEQ ID NO: 195313 - RNA, 19 nt, Homo sapiens
  misc_RNA (1)...(19): siRNA sense strand
gaauauugcacuccgacua

SEQ ID NO: 195314 - RNA, 19 nt, Homo sapiens
  misc_RNA (1)...(19): siRNA sense strand
uuauaggacugccaugaaa

SEQ ID NO: 195315 - RNA, 19 nt, Homo sapiens
  misc_RNA (1)...(19): siRNA sense strand
gggugaaguugcauccuuu

SEQ ID NO: 195316 - RNA, 19 nt, Homo sapiens
  misc_RNA (1)...(19): siRNA sense strand
gcaagagcacaacaauuug

SEQ ID NO: 195317 - RNA, 19 nt, Homo sapiens
  misc_RNA (1)...(19): siRNA sense strand
gcacaacaauuuggucaac

SEQ ID NO: 195318 - RNA, 19 nt, Homo sapiens
  misc_RNA (1)...(19): siRNA sense strand
agcaagagcacaacaauuu

SEQ ID NO: 195319 - RNA, 19 nt, Homo sapiens
  misc_RNA (1)...(19): siRNA sense strand
agaagauguucgagacuuu

SEQ ID NO: 195320 - RNA, 19 nt, Homo sapiens
  misc_RNA (1)...(19): siRNA sense strand
gagcaagagcacaacaauu

SEQ ID NO: 195321 - RNA, 19 nt, Homo sapiens
  misc_RNA (1)...(19): siRNA sense strand
ucaagcaaguggcaaguuc

SEQ ID NO: 195322 - RNA, 19 nt, Homo sapiens
  misc_RNA (1)...(19): siRNA sense strand
ccacgagacucaaacaacu

SEQ ID NO: 195323 - RNA, 19 nt, Homo sapiens
  misc_RNA (1)...(19): siRNA sense strand
cagcacaaccucaagcaaa

SEQ ID NO: 195324 - RNA, 19 nt, Homo sapiens
  misc_RNA (1)...(19): siRNA sense strand
gcaaagaguguccaaucau

SEQ ID NO: 195325 - RNA, 19 nt, Homo sapiens
  misc_RNA (1)...(19): siRNA sense strand
auggauauccugcagauua

SEQ ID NO: 195326 - RNA, 19 nt, Homo sapiens
  misc_RNA (1)...(19): siRNA sense strand
uguaacaucugcaaagagu

SEQ ID NO: 195327 - RNA, 19 nt, Homo sapiens
  misc_RNA (1)...(19): siRNA sense strand
guccggagcugcuuccaau

SEQ ID NO: 195328 - RNA, 19 nt, Homo sapiens
  misc_RNA (1)...(19): siRNA sense strand
gcaaguggcaaguucaaca

SEQ ID NO: 195329 - RNA, 19 nt, Homo sapiens
  misc_RNA (1)...(19): siRNA sense strand
gcuuccaauuugcuaauaa

SEQ ID NO: 195330 - RNA, 19 nt, Homo sapiens
  misc_RNA (1)...(19): siRNA sense strand
uggaagacaaguacagaua

SEQ ID NO: 195331 - RNA, 19 nt, Homo sapiens
  misc_RNA (1)...(19): siRNA sense strand
ggauccguguccugucuuu

SEQ ID NO: 195332 - RNA, 19 nt, Homo sapiens
  misc_RNA (1)...(19): siRNA sense strand
gucuuuagcugaccugaau

SEQ ID NO: 195333 - RNA, 19 nt, Homo sapiens
  misc_RNA (1)...(19): siRNA sense strand
gacaaguacagauaccuuu

SEQ ID NO: 195334 - RNA, 19 nt, Homo sapiens
  misc_RNA (1)...(19): siRNA sense strand
ccaagcaucaggccaaaug

SEQ ID NO: 195335 - RNA, 19 nt, Homo sapiens
  misc_RNA (1)...(19): siRNA sense strand
ggagcaagagcacaacaau

SEQ ID NO: 195336 - RNA, 19 nt, Homo sapiens
  misc_RNA (1)...(19): siRNA sense strand
guguaaagcacauuuggaa

SEQ ID NO: 195337 - RNA, 19 nt, Homo sapiens
  misc_RNA (1)...(19): siRNA sense strand
caagacaguugggugaagu

SEQ ID NO: 195338 - RNA, 19 nt, Homo sapiens
  misc_RNA (1)...(19): siRNA sense strand
gaagauguucgagacuuug

SEQ ID NO: 195339 - RNA, 19 nt, Homo sapiens
  misc_RNA (1)...(19): siRNA sense strand
gucagauucucagcuuaua

SEQ ID NO: 195340 - RNA, 19 nt, Homo sapiens
  misc_RNA (1)...(19): siRNA sense strand
uaacaucugcaaagagugu

SEQ ID NO: 195341 - RNA, 19 nt, Homo sapiens
  misc_RNA (1)...(19): siRNA sense strand
cggagcugcuuccaauuug

SEQ ID NO: 195342 - RNA, 19 nt, Homo sapiens
  misc_RNA (1)...(19): siRNA sense strand
gaagacaaguacagauacc

SEQ ID NO: 195343 - RNA, 19 nt, Homo sapiens
  misc_RNA (1)...(19): siRNA sense strand
ccauggauauccugcagau

SEQ ID NO: 195344 - RNA, 19 nt, Homo sapiens
  misc_RNA (1)...(19): siRNA sense strand
ggcaucauuucccugugua

SEQ ID NO: 195345 - RNA, 19 nt, Homo sapiens
  misc_RNA (1)...(19): siRNA sense strand
uggauauccugcagauuau

SEQ ID NO: 195346 - RNA, 19 nt, Homo sapiens
  misc_RNA (1)...(19): siRNA sense strand
ggaagacaaguacagauac

SEQ ID NO: 195347 - RNA, 19 nt, Homo sapiens
  misc_RNA (1)...(19): siRNA sense strand
ugcaaagaguguccaauca

SEQ ID NO: 195348 - RNA, 19 nt, Homo sapiens
  misc_RNA (1)...(19): siRNA sense strand
guggauaugugucugaacu

SEQ ID NO: 195349 - RNA, 19 nt, Homo sapiens
  misc_RNA (1)...(19): siRNA sense strand
acuggcugcugaauguuua

SEQ ID NO: 195350 - RNA, 19 nt, Homo sapiens
  misc_RNA (1)...(19): siRNA sense strand
acuaucccaugguggaaua

SEQ ID NO: 195351 - RNA, 19 nt, Homo sapiens
  misc_RNA (1)...(19): siRNA sense strand
ccggagcugcuuccaauuu

SEQ ID NO: 195352 - RNA, 19 nt, Homo sapiens
  misc_RNA (1)...(19): siRNA sense strand
ccaaauuccaagacaguug

SEQ ID NO: 195353 - RNA, 19 nt, Homo sapiens
  misc_RNA (1)...(19): siRNA sense strand
cagaaacugccaagcauca

SEQ ID NO: 195354 - RNA, 19 nt, Homo sapiens
  misc_RNA (1)...(19): siRNA sense strand
uaugacaucugccaaagcu

SEQ ID NO: 195355 - RNA, 19 nt, Homo sapiens
  misc_RNA (1)...(19): siRNA sense strand
aaugucagauucucagcuu

SEQ ID NO: 195356 - RNA, 19 nt, Homo sapiens
  misc_RNA (1)...(19): siRNA sense strand
ucgagacuuugccaaggua

SEQ ID NO: 195357 - RNA, 19 nt, Homo sapiens
  misc_RNA (1)...(19): siRNA sense strand
gcaaaaggccauaaaaugc

SEQ ID NO: 195358 - RNA, 19 nt, Homo sapiens
  misc_RNA (1)...(19): siRNA sense strand
cugcaugauucuauccaaa

SEQ ID NO: 195359 - RNA, 19 nt, Homo sapiens
  misc_RNA (1)...(19): siRNA sense strand
uaaagcacauuuggaagac

SEQ ID NO: 195360 - RNA, 19 nt, Homo sapiens
  misc_RNA (1)...(19): siRNA sense strand
acaggagucuaaagcacuu

SEQ ID NO: 195361 - RNA, 19 nt, Homo sapiens
  misc_RNA (1)...(19): siRNA sense strand
acagauaccuuuucaagca

SEQ ID NO: 195362 - RNA, 19 nt, Homo sapiens
  misc_RNA (1)...(19): siRNA sense strand
aagcacauuuggaagacaa

SEQ ID NO: 195363 - RNA, 19 nt, Homo sapiens
  misc_RNA (1)...(19): siRNA sense strand
gcuaauaauaagccagaga

SEQ ID NO: 195364 - RNA, 19 nt, Homo sapiens
  misc_RNA (1)...(19): siRNA sense strand
caagagcacaacaauuugg

SEQ ID NO: 195365 - RNA, 19 nt, Homo sapiens
  misc_RNA (1)...(19): siRNA sense strand
ccugucagcugcaugugau

SEQ ID NO: 195366 - RNA, 19 nt, Homo sapiens
  misc_RNA (1)...(19): siRNA sense strand
gcugcugaauguuuaugau

SEQ ID NO: 195367 - RNA, 19 nt, Homo sapiens
  misc_RNA (1)...(19): siRNA sense strand
acagagcucuaccagucuu

SEQ ID NO: 195368 - RNA, 19 nt, Homo sapiens
  misc_RNA (1)...(19): siRNA sense strand
acaguugggugaaguugca

SEQ ID NO: 195369 - RNA, 19 nt, Homo sapiens
  misc_RNA (1)...(19): siRNA sense strand
guuugaccacuauuuauga

SEQ ID NO: 195370 - RNA, 19 nt, Homo sapiens
  misc_RNA (1)...(19): siRNA sense strand
gcuuauaggacugccauga

SEQ ID NO: 195371 - RNA, 19 nt, Homo sapiens
  misc_RNA (1)...(19): siRNA sense strand
caucaggccaaauguaaca

SEQ ID NO: 195372 - RNA, 19 nt, Homo sapiens
  misc_RNA (1)...(19): siRNA sense strand
gauucuauccaaauuccaa

SEQ ID NO: 195373 - RNA, 19 nt, Homo sapiens
  misc_RNA (1)...(19): siRNA sense strand
ggcaaguucaacaggauuu

SEQ ID NO: 195374 - RNA, 19 nt, Homo sapiens
  misc_RNA (1)...(19): siRNA sense strand
gaacuggcugcugaauguu

SEQ ID NO: 195375 - RNA, 19 nt, Homo sapiens
  misc_RNA (1)...(19): siRNA sense strand
cugcugaauguuuaugaua

SEQ ID NO: 195376 - RNA, 19 nt, Homo sapiens
  misc_RNA (1)...(19): siRNA sense strand
aagcaucaggccaaaugua

SEQ ID NO: 195377 - RNA, 19 nt, Homo sapiens
  misc_RNA (1)...(19): siRNA sense strand
uggcaucauuucccugugu

SEQ ID NO: 195378 - RNA, 19 nt, Homo sapiens
  misc_RNA (1)...(19): siRNA sense strand
ccaugaaacuccgaagacu

SEQ ID NO: 195379 - RNA, 19 nt, Homo sapiens
  misc_RNA (1)...(19): siRNA sense strand
auaauaagccagagaucga

SEQ ID NO: 195380 - RNA, 19 nt, Homo sapiens
  misc_RNA (1)...(19): siRNA sense strand
cuaauaauaagccagagau

SEQ ID NO: 195381 - RNA, 19 nt, Homo sapiens
  misc_RNA (1)...(19): siRNA sense strand
ugggugaaguugcauccuu

SEQ ID NO: 195382 - RNA, 19 nt, Homo sapiens
  misc_RNA (1)...(19): siRNA sense strand
caucauuucccuguguaaa

SEQ ID NO: 195383 - RNA, 19 nt, Homo sapiens
  misc_RNA (1)...(19): siRNA sense strand
gcguggauaugugucugaa

SEQ ID NO: 195384 - RNA, 19 nt, Homo sapiens
  misc_RNA (1)...(19): siRNA sense strand
gcacuaucccaugguggaa

SEQ ID NO: 195385 - RNA, 19 nt, Homo sapiens
  misc_RNA (1)...(19): siRNA sense strand
gagccugucagcugcaugu

SEQ ID NO: 195386 - RNA, 19 nt, Homo sapiens
  misc_RNA (1)...(19): siRNA sense strand
guacagauaccuuuucaag

SEQ ID NO: 195387 - RNA, 19 nt, Homo sapiens
  misc_RNA (1)...(19): siRNA sense strand
gucccucucugcguggaua

SEQ ID NO: 195388 - RNA, 19 nt, Homo sapiens
  misc_RNA (1)...(19): siRNA sense strand
ggagcugcuuccaauuugc

SEQ ID NO: 195389 - RNA, 19 nt, Homo sapiens
  misc_RNA (1)...(19): siRNA sense strand
uuagcugaccugaauaaug

SEQ ID NO: 195390 - RNA, 19 nt, Homo sapiens
  misc_RNA (1)...(19): siRNA sense strand
guggcaaguucaacaggau

SEQ ID NO: 195391 - RNA, 19 nt, Homo sapiens
  misc_RNA (1)...(19): siRNA sense strand
acaacaauuuggucaacgu

SEQ ID NO: 195392 - RNA, 19 nt, Homo sapiens
  misc_RNA (1)...(19): siRNA sense strand
gacuacaucaggagaagau

SEQ ID NO: 195393 - RNA, 19 nt, Homo sapiens
  misc_RNA (1)...(19): siRNA sense strand
uaauaagccagagaucgaa

SEQ ID NO: 195394 - RNA, 19 nt, Homo sapiens
  misc_RNA (1)...(19): siRNA sense strand
ugucagauucucagcuuau

SEQ ID NO: 195395 - RNA, 19 nt, Homo sapiens
  misc_RNA (1)...(19): siRNA sense strand
ggauauccugcagauuauu

SEQ ID NO: 195396 - RNA, 19 nt, Homo sapiens
  misc_RNA (1)...(19): siRNA sense strand
agcaucaggccaaauguaa

SEQ ID NO: 195397 - RNA, 19 nt, Homo sapiens
  misc_RNA (1)...(19): siRNA sense strand
gcccuuugcuuggaucucu

SEQ ID NO: 195398 - RNA, 19 nt, Homo sapiens
  misc_RNA (1)...(19): siRNA sense strand
gcugaauguuuaugauacg

SEQ ID NO: 195399 - RNA, 19 nt, Homo sapiens
  misc_RNA (1)...(19): siRNA sense strand
agacuuugccaagguacua

SEQ ID NO: 195400 - RNA, 19 nt, Homo sapiens
  misc_RNA (1)...(19): siRNA sense strand
caagcaaguggcaaguuca

SEQ ID NO: 195401 - RNA, 19 nt, Homo sapiens
  misc_RNA (1)...(19): siRNA sense strand
agacaaguacagauaccuu

SEQ ID NO: 195402 - RNA, 19 nt, Homo sapiens
  misc_RNA (1)...(19): siRNA sense strand
gcaucauuucccuguguaa

SEQ ID NO: 195403 - RNA, 19 nt, Homo sapiens
  misc_RNA (1)...(19): siRNA sense strand
cugcaaagaguguccaauc

SEQ ID NO: 195404 - RNA, 19 nt, Homo sapiens
  misc_RNA (1)...(19): siRNA sense strand
cuuauaggacugccaugaa

SEQ ID NO: 195405 - RNA, 19 nt, Homo sapiens
  misc_RNA (1)...(19): siRNA sense strand
caaagaguguccaaucauu

SEQ ID NO: 195406 - RNA, 19 nt, Homo sapiens
  misc_RNA (1)...(19): siRNA sense strand
uagcugaccugaauaaugu

SEQ ID NO: 195407 - RNA, 19 nt, Homo sapiens
  misc_RNA (1)...(19): siRNA sense strand
gcaugauucuauccaaauu

SEQ ID NO: 195408 - RNA, 19 nt, Homo sapiens
  misc_RNA (1)...(19): siRNA sense strand
ugaacuggcugcugaaugu

SEQ ID NO: 195409 - RNA, 19 nt, Homo sapiens
  misc_RNA (1)...(19): siRNA sense strand
gauauccugcagauuauua

SEQ ID NO: 195410 - RNA, 19 nt, Homo sapiens
  misc_RNA (1)...(19): siRNA sense strand
gagaagauguucgagacuu

SEQ ID NO: 195411 - RNA, 19 nt, Homo sapiens
  misc_RNA (1)...(19): siRNA sense strand
gcacuuuaauuaugacauc

SEQ ID NO: 195412 - RNA, 19 nt, Homo sapiens
  misc_RNA (1)...(19): siRNA sense strand
guaaagcacauuuggaaga

SEQ ID NO: 195413 - RNA, 19 nt, Homo sapiens
  misc_RNA (1)...(19): siRNA sense strand
gaauauugcacuccgacua

SEQ ID NO: 195414 - RNA, 19 nt, Homo sapiens
  misc_RNA (1)...(19): siRNA sense strand
uuauaggacugccaugaaa

SEQ ID NO: 195415 - RNA, 19 nt, Homo sapiens
  misc_RNA (1)...(19): siRNA sense strand
gggugaaguugcauccuuu

SEQ ID NO: 195416 - RNA, 19 nt, Homo sapiens
  misc_RNA (1)...(19): siRNA sense strand
gcaagagcacaacaauuug

SEQ ID NO: 195417 - RNA, 19 nt, Homo sapiens
  misc_RNA (1)...(19): siRNA sense strand
gcacaacaauuuggucaac

SEQ ID NO: 195418 - RNA, 19 nt, Homo sapiens
  misc_RNA (1)...(19): siRNA sense strand
agcaagagcacaacaauuu

SEQ ID NO: 195419 - RNA, 19 nt, Homo sapiens
  misc_RNA (1)...(19): siRNA sense strand
agaagauguucgagacuuu

SEQ ID NO: 195420 - RNA, 19 nt, Homo sapiens
  misc_RNA (1)...(19): siRNA sense strand
gagcaagagcacaacaauu

SEQ ID NO: 195421 - RNA, 19 nt, Homo sapiens
  misc_RNA (1)...(19): siRNA sense strand
ucaagcaaguggcaaguuc

SEQ ID NO: 195422 - RNA, 19 nt, Homo sapiens
  misc_RNA (1)...(19): siRNA sense strand
ccacgagacucaaacaacu

SEQ ID NO: 195423 - RNA, 19 nt, Homo sapiens
  misc_RNA (1)...(19): siRNA sense strand
cagcacaaccucaagcaaa

SEQ ID NO: 195424 - RNA, 19 nt, Homo sapiens
  misc_RNA (1)...(19): siRNA sense strand
gcaaagaguguccaaucau

SEQ ID NO: 195425 - RNA, 19 nt, Homo sapiens
  misc_RNA (1)...(19): siRNA sense strand
auggauauccugcagauua

SEQ ID NO: 195426 - RNA, 19 nt, Homo sapiens
  misc_RNA (1)...(19): siRNA sense strand
uguaacaucugcaaagagu

SEQ ID NO: 195427 - RNA, 19 nt, Homo sapiens
  misc_RNA (1)...(19): siRNA sense strand
guccggagcugcuuccaau

SEQ ID NO: 195428 - RNA, 19 nt, Homo sapiens
  misc_RNA (1)...(19): siRNA sense strand
gcaaguggcaaguucaaca

SEQ ID NO: 195429 - RNA, 19 nt, Homo sapiens
  misc_RNA (1)...(19): siRNA sense strand
gcuuccaauuugcuaauaa

SEQ ID NO: 195430 - RNA, 19 nt, Homo sapiens
  misc_RNA (1)...(19): siRNA sense strand
uggaagacaaguacagaua

SEQ ID NO: 195431 - RNA, 19 nt, Homo sapiens
  misc_RNA (1)...(19): siRNA sense strand
ggauccguguccugucuuu

SEQ ID NO: 195432 - RNA, 19 nt, Homo sapiens
  misc_RNA (1)...(19): siRNA sense strand
gucuuuagcugaccugaau

SEQ ID NO: 195433 - RNA, 19 nt, Homo sapiens
  misc_RNA (1)...(19): siRNA sense strand
gacaaguacagauaccuuu

SEQ ID NO: 195434 - RNA, 19 nt, Homo sapiens
  misc_RNA (1)...(19): siRNA sense strand
ccaagcaucaggccaaaug

SEQ ID NO: 195435 - RNA, 19 nt, Homo sapiens
  misc_RNA (1)...(19): siRNA sense strand
ggagcaagagcacaacaau

SEQ ID NO: 195436 - RNA, 19 nt, Homo sapiens
  misc_RNA (1)...(19): siRNA sense strand
guguaaagcacauuuggaa

SEQ ID NO: 195437 - RNA, 19 nt, Homo sapiens
  misc_RNA (1)...(19): siRNA sense strand
caagacaguugggugaagu

SEQ ID NO: 195438 - RNA, 19 nt, Homo sapiens
  misc_RNA (1)...(19): siRNA sense strand
gaagauguucgagacuuug

SEQ ID NO: 195439 - RNA, 19 nt, Homo sapiens
  misc_RNA (1)...(19): siRNA sense strand
gucagauucucagcuuaua

SEQ ID NO: 195440 - RNA, 19 nt, Homo sapiens
  misc_RNA (1)...(19): siRNA sense strand
uaacaucugcaaagagugu

SEQ ID NO: 195441 - RNA, 19 nt, Homo sapiens
  misc_RNA (1)...(19): siRNA sense strand
cggagcugcuuccaauuug

SEQ ID NO: 195442 - RNA, 19 nt, Homo sapiens
  misc_RNA (1)...(19): siRNA sense strand
gaagacaaguacagauacc

SEQ ID NO: 195443 - RNA, 19 nt, Homo sapiens
  misc_RNA (1)...(19): siRNA sense strand
ccauggauauccugcagau

SEQ ID NO: 195444 - RNA, 19 nt, Homo sapiens
  misc_RNA (1)...(19): siRNA sense strand
ggcaucauuucccugugua

SEQ ID NO: 195445 - RNA, 19 nt, Homo sapiens
  misc_RNA (1)...(19): siRNA sense strand
uggauauccugcagauuau

SEQ ID NO: 195446 - RNA, 19 nt, Homo sapiens
  misc_RNA (1)...(19): siRNA sense strand
ggaagacaaguacagauac

SEQ ID NO: 195447 - RNA, 19 nt, Homo sapiens
  misc_RNA (1)...(19): siRNA sense strand
ugcaaagaguguccaauca

SEQ ID NO: 195448 - RNA, 19 nt, Homo sapiens
  misc_RNA (1)...(19): siRNA sense strand
guggauaugugucugaacu

SEQ ID NO: 195449 - RNA, 19 nt, Homo sapiens
  misc_RNA (1)...(19): siRNA sense strand
acuggcugcugaauguuua

SEQ ID NO: 195450 - RNA, 19 nt, Homo sapiens
  misc_RNA (1)...(19): siRNA sense strand
acuaucccaugguggaaua

SEQ ID NO: 195451 - RNA, 19 nt, Homo sapiens
  misc_RNA (1)...(19): siRNA sense strand
ccggagcugcuuccaauuu

SEQ ID NO: 195452 - RNA, 19 nt, Homo sapiens
  misc_RNA (1)...(19): siRNA sense strand
ccaaauuccaagacaguug

SEQ ID NO: 195453 - RNA, 19 nt, Homo sapiens
  misc_RNA (1)...(19): siRNA sense strand
cagaaacugccaagcauca

SEQ ID NO: 195454 - RNA, 19 nt, Homo sapiens
  misc_RNA (1)...(19): siRNA sense strand
uaugacaucugccaaagcu

SEQ ID NO: 195455 - RNA, 19 nt, Homo sapiens
  misc_RNA (1)...(19): siRNA sense strand
aaugucagauucucagcuu

SEQ ID NO: 195456 - RNA, 19 nt, Homo sapiens
  misc_RNA (1)...(19): siRNA sense strand
ucgagacuuugccaaggua

SEQ ID NO: 195457 - RNA, 19 nt, Homo sapiens
  misc_RNA (1)...(19): siRNA sense strand
gcaaaaggccauaaaaugc

SEQ ID NO: 195458 - RNA, 19 nt, Homo sapiens
  misc_RNA (1)...(19): siRNA sense strand
cugcaugauucuauccaaa

SEQ ID NO: 195459 - RNA, 19 nt, Homo sapiens
  misc_RNA (1)...(19): siRNA sense strand
uaaagcacauuuggaagac

SEQ ID NO: 195460 - RNA, 19 nt, Homo sapiens
  misc_RNA (1)...(19): siRNA sense strand
acaggagucuaaagcacuu

SEQ ID NO: 195461 - RNA, 19 nt, Homo sapiens
  misc_RNA (1)...(19): siRNA sense strand
acagauaccuuuucaagca

SEQ ID NO: 195462 - RNA, 19 nt, Homo sapiens
  misc_RNA (1)...(19): siRNA sense strand
aagcacauuuggaagacaa

SEQ ID NO: 195463 - RNA, 19 nt, Homo sapiens
  misc_RNA (1)...(19): siRNA sense strand
gcuaauaauaagccagaga

SEQ ID NO: 195464 - RNA, 19 nt, Homo sapiens
  misc_RNA (1)...(19): siRNA sense strand
caagagcacaacaauuugg

SEQ ID NO: 195465 - RNA, 19 nt, Homo sapiens
  misc_RNA (1)...(19): siRNA sense strand
ccugucagcugcaugugau

SEQ ID NO: 195466 - RNA, 19 nt, Homo sapiens
  misc_RNA (1)...(19): siRNA sense strand
gcugcugaauguuuaugau

SEQ ID NO: 195467 - RNA, 19 nt, Homo sapiens
  misc_RNA (1)...(19): siRNA sense strand
acagagcucuaccagucuu

SEQ ID NO: 195468 - RNA, 19 nt, Homo sapiens
  misc_RNA (1)...(19): siRNA sense strand
acaguugggugaaguugca

SEQ ID NO: 195469 - RNA, 19 nt, Homo sapiens
  misc_RNA (1)...(19): siRNA sense strand
guuugaccacuauuuauga

SEQ ID NO: 195470 - RNA, 19 nt, Homo sapiens
  misc_RNA (1)...(19): siRNA sense strand
gcuuauaggacugccauga

SEQ ID NO: 195471 - RNA, 19 nt, Homo sapiens
  misc_RNA (1)...(19): siRNA sense strand
caucaggccaaauguaaca

SEQ ID NO: 195472 - RNA, 19 nt, Homo sapiens
  misc_RNA (1)...(19): siRNA sense strand
gauucuauccaaauuccaa

SEQ ID NO: 195473 - RNA, 19 nt, Homo sapiens
  misc_RNA (1)...(19): siRNA sense strand
ggcaaguucaacaggauuu

SEQ ID NO: 195474 - RNA, 19 nt, Homo sapiens
  misc_RNA (1)...(19): siRNA sense strand
gaacuggcugcugaauguu

SEQ ID NO: 195475 - RNA, 19 nt, Homo sapiens
  misc_RNA (1)...(19): siRNA sense strand
cugcugaauguuuaugaua

SEQ ID NO: 195476 - RNA, 19 nt, Homo sapiens
  misc_RNA (1)...(19): siRNA sense strand
aagcaucaggccaaaugua

SEQ ID NO: 195477 - RNA, 19 nt, Homo sapiens
  misc_RNA (1)...(19): siRNA sense strand
uggcaucauuucccugugu

SEQ ID NO: 195478 - RNA, 19 nt, Homo sapiens
  misc_RNA (1)...(19): siRNA sense strand
ccaugaaacuccgaagacu

SEQ ID NO: 195479 - RNA, 19 nt, Homo sapiens
  misc_RNA (1)...(19): siRNA sense strand
auaauaagccagagaucga

SEQ ID NO: 195480 - RNA, 19 nt, Homo sapiens
  misc_RNA (1)...(19): siRNA sense strand
cuaauaauaagccagagau

SEQ ID NO: 195481 - RNA, 19 nt, Homo sapiens
  misc_RNA (1)...(19): siRNA sense strand
ugggugaaguugcauccuu

SEQ ID NO: 195482 - RNA, 19 nt, Homo sapiens
  misc_RNA (1)...(19): siRNA sense strand
caucauuucccuguguaaa

SEQ ID NO: 195483 - RNA, 19 nt, Homo sapiens
  misc_RNA (1)...(19): siRNA sense strand
gcguggauaugugucugaa

SEQ ID NO: 195484 - RNA, 19 nt, Homo sapiens
  misc_RNA (1)...(19): siRNA sense strand
gcacuaucccaugguggaa

SEQ ID NO: 195485 - RNA, 19 nt, Homo sapiens
  misc_RNA (1)...(19): siRNA sense strand
gagccugucagcugcaugu

SEQ ID NO: 195486 - RNA, 19 nt, Homo sapiens
  misc_RNA (1)...(19): siRNA sense strand
guacagauaccuuuucaag

SEQ ID NO: 195487 - RNA, 19 nt, Homo sapiens
  misc_RNA (1)...(19): siRNA sense strand
gucccucucugcguggaua

SEQ ID NO: 195488 - RNA, 19 nt, Homo sapiens
  misc_RNA (1)...(19): siRNA sense strand
ggagcugcuuccaauuugc

SEQ ID NO: 195489 - RNA, 19 nt, Homo sapiens
  misc_RNA (1)...(19): siRNA sense strand
uuagcugaccugaauaaug

SEQ ID NO: 195490 - RNA, 19 nt, Homo sapiens
  misc_RNA (1)...(19): siRNA sense strand
guggcaaguucaacaggau

SEQ ID NO: 195491 - RNA, 19 nt, Homo sapiens
  misc_RNA (1)...(19): siRNA sense strand
acaacaauuuggucaacgu

SEQ ID NO: 195492 - RNA, 19 nt, Homo sapiens
  misc_RNA (1)...(19): siRNA sense strand
gacuacaucaggagaagau

SEQ ID NO: 195493 - RNA, 19 nt, Homo sapiens
  misc_RNA (1)...(19): siRNA sense strand
uaauaagccagagaucgaa

SEQ ID NO: 195494 - RNA, 19 nt, Homo sapiens
  misc_RNA (1)...(19): siRNA sense strand
ugucagauucucagcuuau

SEQ ID NO: 195495 - RNA, 19 nt, Homo sapiens
  misc_RNA (1)...(19): siRNA sense strand
ggauauccugcagauuauu

SEQ ID NO: 195496 - RNA, 19 nt, Homo sapiens
  misc_RNA (1)...(19): siRNA sense strand
agcaucaggccaaauguaa

SEQ ID NO: 195497 - RNA, 19 nt, Homo sapiens
  misc_RNA (1)...(19): siRNA sense strand
gcccuuugcuuggaucucu

SEQ ID NO: 195498 - RNA, 19 nt, Homo sapiens
  misc_RNA (1)...(19): siRNA sense strand
gcugaauguuuaugauacg

SEQ ID NO: 195499 - RNA, 19 nt, Homo sapiens
  misc_RNA (1)...(19): siRNA sense strand
agacuuugccaagguacua

SEQ ID NO: 195500 - RNA, 19 nt, Homo sapiens
  misc_RNA (1)...(19): siRNA sense strand
caagcaaguggcaaguuca

SEQ ID NO: 195501 - RNA, 19 nt, Homo sapiens
  misc_RNA (1)...(19): siRNA sense strand
agacaaguacagauaccuu

SEQ ID NO: 195502 - RNA, 19 nt, Homo sapiens
  misc_RNA (1)...(19): siRNA sense strand
gcaucauuucccuguguaa

SEQ ID NO: 195503 - RNA, 19 nt, Homo sapiens
  misc_RNA (1)...(19): siRNA sense strand
cugcaaagaguguccaauc

SEQ ID NO: 195504 - RNA, 19 nt, Homo sapiens
  misc_RNA (1)...(19): siRNA sense strand
cuuauaggacugccaugaa

SEQ ID NO: 195505 - RNA, 19 nt, Homo sapiens
  misc_RNA (1)...(19): siRNA sense strand
caaagaguguccaaucauu

SEQ ID NO: 195506 - RNA, 19 nt, Homo sapiens
  misc_RNA (1)...(19): siRNA sense strand
uagcugaccugaauaaugu

SEQ ID NO: 195507 - RNA, 19 nt, Homo sapiens
  misc_RNA (1)...(19): siRNA sense strand
gcaugauucuauccaaauu

SEQ ID NO: 195508 - RNA, 19 nt, Homo sapiens
  misc_RNA (1)...(19): siRNA sense strand
ugaacuggcugcugaaugu

SEQ ID NO: 195509 - RNA, 19 nt, Homo sapiens
  misc_RNA (1)...(19): siRNA sense strand
gauauccugcagauuauua

SEQ ID NO: 195510 - RNA, 19 nt, Homo sapiens
  misc_RNA (1)...(19): siRNA sense strand
gagaagauguucgagacuu

SEQ ID NO: 195511 - RNA, 19 nt, Homo sapiens
  misc_RNA (1)...(19): siRNA sense strand
gcacuuuaauuaugacauc

SEQ ID NO: 195512 - RNA, 19 nt, Homo sapiens
  misc_RNA (1)...(19): siRNA sense strand
guaaagcacauuuggaaga

SEQ ID NO: 195513 - RNA, 19 nt, Homo sapiens
  misc_RNA (1)...(19): siRNA sense strand
gaauauugcacuccgacua

SEQ ID NO: 195514 - RNA, 19 nt, Homo sapiens
  misc_RNA (1)...(19): siRNA sense strand
uuauaggacugccaugaaa

SEQ ID NO: 195515 - RNA, 19 nt, Homo sapiens
  misc_RNA (1)...(19): siRNA sense strand
gggugaaguugcauccuuu

SEQ ID NO: 195516 - RNA, 19 nt, Homo sapiens
  misc_RNA (1)...(19): siRNA sense strand
gcaagagcacaacaauuug

SEQ ID NO: 195517 - RNA, 19 nt, Homo sapiens
  misc_RNA (1)...(19): siRNA sense strand
gcacaacaauuuggucaac

SEQ ID NO: 195518 - RNA, 19 nt, Homo sapiens
  misc_RNA (1)...(19): siRNA sense strand
agcaagagcacaacaauuu

SEQ ID NO: 195519 - RNA, 19 nt, Homo sapiens
  misc_RNA (1)...(19): siRNA sense strand
agaagauguucgagacuuu

SEQ ID NO: 195520 - RNA, 19 nt, Homo sapiens
  misc_RNA (1)...(19): siRNA sense strand
gagcaagagcacaacaauu

SEQ ID NO: 195521 - RNA, 19 nt, Homo sapiens
  misc_RNA (1)...(19): siRNA sense strand
ucaagcaaguggcaaguuc

SEQ ID NO: 195522 - RNA, 19 nt, Homo sapiens
  misc_RNA (1)...(19): siRNA sense strand
ccacgagacucaaacaacu

SEQ ID NO: 195523 - RNA, 19 nt, Homo sapiens
  misc_RNA (1)...(19): siRNA sense strand
cagcacaaccucaagcaaa

SEQ ID NO: 195524 - RNA, 19 nt, Homo sapiens
  misc_RNA (1)...(19): siRNA sense strand
gcaaagaguguccaaucau

SEQ ID NO: 195525 - RNA, 19 nt, Homo sapiens
  misc_RNA (1)...(19): siRNA sense strand
auggauauccugcagauua

SEQ ID NO: 195526 - RNA, 19 nt, Homo sapiens
  misc_RNA (1)...(19): siRNA sense strand
uguaacaucugcaaagagu

SEQ ID NO: 195527 - RNA, 19 nt, Homo sapiens
  misc_RNA (1)...(19): siRNA sense strand
guccggagcugcuuccaau

SEQ ID NO: 195528 - RNA, 19 nt, Homo sapiens
  misc_RNA (1)...(19): siRNA sense strand
gcaaguggcaaguucaaca

SEQ ID NO: 195529 - RNA, 19 nt, Homo sapiens
  misc_RNA (1)...(19): siRNA sense strand
gcuuccaauuugcuaauaa

SEQ ID NO: 195530 - RNA, 19 nt, Homo sapiens
  misc_RNA (1)...(19): siRNA sense strand
uggaagacaaguacagaua

SEQ ID NO: 195531 - RNA, 19 nt, Homo sapiens
  misc_RNA (1)...(19): siRNA sense strand
ggauccguguccugucuuu

SEQ ID NO: 195532 - RNA, 19 nt, Homo sapiens
  misc_RNA (1)...(19): siRNA sense strand
gucuuuagcugaccugaau

SEQ ID NO: 195533 - RNA, 19 nt, Homo sapiens
  misc_RNA (1)...(19): siRNA sense strand
gacaaguacagauaccuuu

SEQ ID NO: 195534 - RNA, 19 nt, Homo sapiens
  misc_RNA (1)...(19): siRNA sense strand
ccaagcaucaggccaaaug

SEQ ID NO: 195535 - RNA, 19 nt, Homo sapiens
  misc_RNA (1)...(19): siRNA sense strand
ggagcaagagcacaacaau

SEQ ID NO: 195536 - RNA, 19 nt, Homo sapiens
  misc_RNA (1)...(19): siRNA sense strand
guguaaagcacauuuggaa

SEQ ID NO: 195537 - RNA, 19 nt, Homo sapiens
  misc_RNA (1)...(19): siRNA sense strand
caagacaguugggugaagu

SEQ ID NO: 195538 - RNA, 19 nt, Homo sapiens
  misc_RNA (1)...(19): siRNA sense strand
gaagauguucgagacuuug

SEQ ID NO: 195539 - RNA, 19 nt, Homo sapiens
  misc_RNA (1)...(19): siRNA sense strand
gucagauucucagcuuaua

SEQ ID NO: 195540 - RNA, 19 nt, Homo sapiens
  misc_RNA (1)...(19): siRNA sense strand
uaacaucugcaaagagugu

SEQ ID NO: 195541 - RNA, 19 nt, Homo sapiens
  misc_RNA (1)...(19): siRNA sense strand
cggagcugcuuccaauuug

SEQ ID NO: 195542 - RNA, 19 nt, Homo sapiens
  misc_RNA (1)...(19): siRNA sense strand
gaagacaaguacagauacc

SEQ ID NO: 195543 - RNA, 19 nt, Homo sapiens
  misc_RNA (1)...(19): siRNA sense strand
ccauggauauccugcagau

SEQ ID NO: 195544 - RNA, 19 nt, Homo sapiens
  misc_RNA (1)...(19): siRNA sense strand
ggcaucauuucccugugua

SEQ ID NO: 195545 - RNA, 19 nt, Homo sapiens
  misc_RNA (1)...(19): siRNA sense strand
uggauauccugcagauuau

SEQ ID NO: 195546 - RNA, 19 nt, Homo sapiens
  misc_RNA (1)...(19): siRNA sense strand
ggaagacaaguacagauac

SEQ ID NO: 195547 - RNA, 19 nt, Homo sapiens
  misc_RNA (1)...(19): siRNA sense strand
ugcaaagaguguccaauca

SEQ ID NO: 195548 - RNA, 19 nt, Homo sapiens
  misc_RNA (1)...(19): siRNA sense strand
guggauaugugucugaacu

SEQ ID NO: 195549 - RNA, 19 nt, Homo sapiens
  misc_RNA (1)...(19): siRNA sense strand
acuggcugcugaauguuua

SEQ ID NO: 195550 - RNA, 19 nt, Homo sapiens
  misc_RNA (1)...(19): siRNA sense strand
acuaucccaugguggaaua

SEQ ID NO: 195551 - RNA, 19 nt, Homo sapiens
  misc_RNA (1)...(19): siRNA sense strand
ccggagcugcuuccaauuu

SEQ ID NO: 195552 - RNA, 19 nt, Homo sapiens
  misc_RNA (1)...(19): siRNA sense strand
ccaaauuccaagacaguug

SEQ ID NO: 195553 - RNA, 19 nt, Homo sapiens
  misc_RNA (1)...(19): siRNA sense strand
cagaaacugccaagcauca

SEQ ID NO: 195554 - RNA, 19 nt, Homo sapiens
  misc_RNA (1)...(19): siRNA sense strand
uaugacaucugccaaagcu

SEQ ID NO: 195555 - RNA, 19 nt, Homo sapiens
  misc_RNA (1)...(19): siRNA sense strand
aaugucagauucucagcuu

SEQ ID NO: 195556 - RNA, 19 nt, Homo sapiens
  misc_RNA (1)...(19): siRNA sense strand
ucgagacuuugccaaggua

SEQ ID NO: 195557 - RNA, 19 nt, Homo sapiens
  misc_RNA (1)...(19): siRNA sense strand
gcaaaaggccauaaaaugc

SEQ ID NO: 195558 - RNA, 19 nt, Homo sapiens
  misc_RNA (1)...(19): siRNA sense strand
cugcaugauucuauccaaa

SEQ ID NO: 195559 - RNA, 19 nt, Homo sapiens
  misc_RNA (1)...(19): siRNA sense strand
uaaagcacauuuggaagac

SEQ ID NO: 195560 - RNA, 19 nt, Homo sapiens
  misc_RNA (1)...(19): siRNA sense strand
acaggagucuaaagcacuu

SEQ ID NO: 195561 - RNA, 19 nt, Homo sapiens
  misc_RNA (1)...(19): siRNA sense strand
acagauaccuuuucaagca

SEQ ID NO: 195562 - RNA, 19 nt, Homo sapiens
  misc_RNA (1)...(19): siRNA sense strand
aagcacauuuggaagacaa

SEQ ID NO: 195563 - RNA, 19 nt, Homo sapiens
  misc_RNA (1)...(19): siRNA sense strand
gcuaauaauaagccagaga

SEQ ID NO: 195564 - RNA, 19 nt, Homo sapiens
  misc_RNA (1)...(19): siRNA sense strand
caagagcacaacaauuugg

SEQ ID NO: 195565 - RNA, 19 nt, Homo sapiens
  misc_RNA (1)...(19): siRNA sense strand
ccugucagcugcaugugau

SEQ ID NO: 195566 - RNA, 19 nt, Homo sapiens
  misc_RNA (1)...(19): siRNA sense strand
gcugcugaauguuuaugau

SEQ ID NO: 195567 - RNA, 19 nt, Homo sapiens
  misc_RNA (1)...(19): siRNA sense strand
acagagcucuaccagucuu

SEQ ID NO: 195568 - RNA, 19 nt, Homo sapiens
  misc_RNA (1)...(19): siRNA sense strand
acaguugggugaaguugca

SEQ ID NO: 195569 - RNA, 19 nt, Homo sapiens
  misc_RNA (1)...(19): siRNA sense strand
guuugaccacuauuuauga

SEQ ID NO: 195570 - RNA, 19 nt, Homo sapiens
  misc_RNA (1)...(19): siRNA sense strand
gcuuauaggacugccauga

SEQ ID NO: 195571 - RNA, 19 nt, Homo sapiens
  misc_RNA (1)...(19): siRNA sense strand
caucaggccaaauguaaca

SEQ ID NO: 195572 - RNA, 19 nt, Homo sapiens
  misc_RNA (1)...(19): siRNA sense strand
gauucuauccaaauuccaa

SEQ ID NO: 195573 - RNA, 19 nt, Homo sapiens
  misc_RNA (1)...(19): siRNA sense strand
ggcaaguucaacaggauuu

SEQ ID NO: 195574 - RNA, 19 nt, Homo sapiens
  misc_RNA (1)...(19): siRNA sense strand
gaacuggcugcugaauguu

SEQ ID NO: 195575 - RNA, 19 nt, Homo sapiens
  misc_RNA (1)...(19): siRNA sense strand
cugcugaauguuuaugaua

SEQ ID NO: 195576 - RNA, 19 nt, Homo sapiens
  misc_RNA (1)...(19): siRNA sense strand
aagcaucaggccaaaugua

SEQ ID NO: 195577 - RNA, 19 nt, Homo sapiens
  misc_RNA (1)...(19): siRNA sense strand
uggcaucauuucccugugu

SEQ ID NO: 195578 - RNA, 19 nt, Homo sapiens
  misc_RNA (1)...(19): siRNA sense strand
ccaugaaacuccgaagacu

SEQ ID NO: 195579 - RNA, 19 nt, Homo sapiens
  misc_RNA (1)...(19): siRNA sense strand
auaauaagccagagaucga

SEQ ID NO: 195580 - RNA, 19 nt, Homo sapiens
  misc_RNA (1)...(19): siRNA sense strand
cuaauaauaagccagagau

SEQ ID NO: 195581 - RNA, 19 nt, Homo sapiens
  misc_RNA (1)...(19): siRNA sense strand
ugggugaaguugcauccuu

SEQ ID NO: 195582 - RNA, 19 nt, Homo sapiens
  misc_RNA (1)...(19): siRNA sense strand
caucauuucccuguguaaa

SEQ ID NO: 195583 - RNA, 19 nt, Homo sapiens
  misc_RNA (1)...(19): siRNA sense strand
gcguggauaugugucugaa

SEQ ID NO: 195584 - RNA, 19 nt, Homo sapiens
  misc_RNA (1)...(19): siRNA sense strand
gcacuaucccaugguggaa

SEQ ID NO: 195585 - RNA, 19 nt, Homo sapiens
  misc_RNA (1)...(19): siRNA sense strand
gagccugucagcugcaugu

SEQ ID NO: 195586 - RNA, 19 nt, Homo sapiens
  misc_RNA (1)...(19): siRNA sense strand
guacagauaccuuuucaag

SEQ ID NO: 195587 - RNA, 19 nt, Homo sapiens
  misc_RNA (1)...(19): siRNA sense strand
gucccucucugcguggaua

SEQ ID NO: 195588 - RNA, 19 nt, Homo sapiens
  misc_RNA (1)...(19): siRNA sense strand
ggagcugcuuccaauuugc

SEQ ID NO: 195589 - RNA, 19 nt, Homo sapiens
  misc_RNA (1)...(19): siRNA sense strand
uuagcugaccugaauaaug

SEQ ID NO: 195590 - RNA, 19 nt, Homo sapiens
  misc_RNA (1)...(19): siRNA sense strand
guggcaaguucaacaggau

SEQ ID NO: 195591 - RNA, 19 nt, Homo sapiens
  misc_RNA (1)...(19): siRNA sense strand
acaacaauuuggucaacgu

SEQ ID NO: 195592 - RNA, 19 nt, Homo sapiens
  misc_RNA (1)...(19): siRNA sense strand
gacuacaucaggagaagau

SEQ ID NO: 195593 - RNA, 19 nt, Homo sapiens
  misc_RNA (1)...(19): siRNA sense strand
uaauaagccagagaucgaa

SEQ ID NO: 195594 - RNA, 19 nt, Homo sapiens
  misc_RNA (1)...(19): siRNA sense strand
ugucagauucucagcuuau

SEQ ID NO: 195595 - RNA, 19 nt, Homo sapiens
  misc_RNA (1)...(19): siRNA sense strand
ggauauccugcagauuauu

SEQ ID NO: 195596 - RNA, 19 nt, Homo sapiens
  misc_RNA (1)...(19): siRNA sense strand
agcaucaggccaaauguaa

SEQ ID NO: 195597 - RNA, 19 nt, Homo sapiens
  misc_RNA (1)...(19): siRNA sense strand
gcccuuugcuuggaucucu

SEQ ID NO: 195598 - RNA, 19 nt, Homo sapiens
  misc_RNA (1)...(19): siRNA sense strand
gcugaauguuuaugauacg

SEQ ID NO: 195599 - RNA, 19 nt, Homo sapiens
  misc_RNA (1)...(19): siRNA sense strand
agacuuugccaagguacua

SEQ ID NO: 195600 - RNA, 19 nt, Homo sapiens
  misc_RNA (1)...(19): siRNA sense strand
caagcaaguggcaaguuca

SEQ ID NO: 195601 - RNA, 19 nt, Homo sapiens
  misc_RNA (1)...(19): siRNA sense strand
agacaaguacagauaccuu

SEQ ID NO: 195602 - RNA, 19 nt, Homo sapiens
  misc_RNA (1)...(19): siRNA sense strand
gcaucauuucccuguguaa

SEQ ID NO: 195603 - RNA, 19 nt, Homo sapiens
  misc_RNA (1)...(19): siRNA sense strand
cugcaaagaguguccaauc

SEQ ID NO: 195604 - RNA, 19 nt, Homo sapiens
  misc_RNA (1)...(19): siRNA sense strand
cuuauaggacugccaugaa

SEQ ID NO: 195605 - RNA, 19 nt, Homo sapiens
  misc_RNA (1)...(19): siRNA sense strand
caaagaguguccaaucauu

SEQ ID NO: 195606 - RNA, 19 nt, Homo sapiens
  misc_RNA (1)...(19): siRNA sense strand
uagcugaccugaauaaugu

SEQ ID NO: 195607 - RNA, 19 nt, Homo sapiens
  misc_RNA (1)...(19): siRNA sense strand
gcaugauucuauccaaauu

SEQ ID NO: 195608 - RNA, 19 nt, Homo sapiens
  misc_RNA (1)...(19): siRNA sense strand
ugaacuggcugcugaaugu

SEQ ID NO: 195609 - RNA, 19 nt, Homo sapiens
  misc_RNA (1)...(19): siRNA sense strand
gauauccugcagauuauua

SEQ ID NO: 195610 - RNA, 19 nt, Homo sapiens
  misc_RNA (1)...(19): siRNA sense strand
gagaagauguucgagacuu

SEQ ID NO: 195611 - RNA, 19 nt, Homo sapiens
  misc_RNA (1)...(19): siRNA sense strand
gcacuuuaauuaugacauc

SEQ ID NO: 195612 - RNA, 19 nt, Homo sapiens
  misc_RNA (1)...(19): siRNA sense strand
guaaagcacauuuggaaga

SEQ ID NO: 195613 - RNA, 19 nt, Homo sapiens
  misc_RNA (1)...(19): siRNA sense strand
gaauauugcacuccgacua

SEQ ID NO: 195614 - RNA, 19 nt, Homo sapiens
  misc_RNA (1)...(19): siRNA sense strand
uuauaggacugccaugaaa

SEQ ID NO: 195615 - RNA, 19 nt, Homo sapiens
  misc_RNA (1)...(19): siRNA sense strand
gggugaaguugcauccuuu

SEQ ID NO: 195616 - RNA, 19 nt, Homo sapiens
  misc_RNA (1)...(19): siRNA sense strand
gcaagagcacaacaauuug

SEQ ID NO: 195617 - RNA, 19 nt, Homo sapiens
  misc_RNA (1)...(19): siRNA sense strand
gcacaacaauuuggucaac

SEQ ID NO: 195618 - RNA, 19 nt, Homo sapiens
  misc_RNA (1)...(19): siRNA sense strand
agcaagagcacaacaauuu

SEQ ID NO: 195619 - RNA, 19 nt, Homo sapiens
  misc_RNA (1)...(19): siRNA sense strand
agaagauguucgagacuuu

SEQ ID NO: 195620 - RNA, 19 nt, Homo sapiens
  misc_RNA (1)...(19): siRNA sense strand
gagcaagagcacaacaauu

SEQ ID NO: 195621 - RNA, 19 nt, Homo sapiens
  misc_RNA (1)...(19): siRNA sense strand
ucaagcaaguggcaaguuc

SEQ ID NO: 195622 - RNA, 19 nt, Homo sapiens
  misc_RNA (1)...(19): siRNA sense strand
ccacgagacucaaacaacu

SEQ ID NO: 195623 - RNA, 19 nt, Homo sapiens
  misc_RNA (1)...(19): siRNA sense strand
cagcacaaccucaagcaaa

SEQ ID NO: 195624 - RNA, 19 nt, Homo sapiens
  misc_RNA (1)...(19): siRNA sense strand
gcaaagaguguccaaucau

SEQ ID NO: 195625 - RNA, 19 nt, Homo sapiens
  misc_RNA (1)...(19): siRNA sense strand
auggauauccugcagauua

SEQ ID NO: 195626 - RNA, 19 nt, Homo sapiens
  misc_RNA (1)...(19): siRNA sense strand
uguaacaucugcaaagagu

SEQ ID NO: 195627 - RNA, 19 nt, Homo sapiens
  misc_RNA (1)...(19): siRNA sense strand
guccggagcugcuuccaau

SEQ ID NO: 195628 - RNA, 19 nt, Homo sapiens
  misc_RNA (1)...(19): siRNA sense strand
gcaaguggcaaguucaaca

SEQ ID NO: 195629 - RNA, 19 nt, Homo sapiens
  misc_RNA (1)...(19): siRNA sense strand
gcuuccaauuugcuaauaa

SEQ ID NO: 195630 - RNA, 19 nt, Homo sapiens
  misc_RNA (1)...(19): siRNA sense strand
uggaagacaaguacagaua

SEQ ID NO: 195631 - RNA, 19 nt, Homo sapiens
  misc_RNA (1)...(19): siRNA sense strand
ggauccguguccugucuuu

SEQ ID NO: 195632 - RNA, 19 nt, Homo sapiens
  misc_RNA (1)...(19): siRNA sense strand
gucuuuagcugaccugaau

SEQ ID NO: 195633 - RNA, 19 nt, Homo sapiens
  misc_RNA (1)...(19): siRNA sense strand
gacaaguacagauaccuuu

SEQ ID NO: 195634 - RNA, 19 nt, Homo sapiens
  misc_RNA (1)...(19): siRNA sense strand
ccaagcaucaggccaaaug

SEQ ID NO: 195635 - RNA, 19 nt, Homo sapiens
  misc_RNA (1)...(19): siRNA sense strand
ggagcaagagcacaacaau

SEQ ID NO: 195636 - RNA, 19 nt, Homo sapiens
  misc_RNA (1)...(19): siRNA sense strand
guguaaagcacauuuggaa

SEQ ID NO: 195637 - RNA, 19 nt, Homo sapiens
  misc_RNA (1)...(19): siRNA sense strand
caagacaguugggugaagu

SEQ ID NO: 195638 - RNA, 19 nt, Homo sapiens
  misc_RNA (1)...(19): siRNA sense strand
gaagauguucgagacuuug

SEQ ID NO: 195639 - RNA, 19 nt, Homo sapiens
  misc_RNA (1)...(19): siRNA sense strand
gucagauucucagcuuaua

SEQ ID NO: 195640 - RNA, 19 nt, Homo sapiens
  misc_RNA (1)...(19): siRNA sense strand
uaacaucugcaaagagugu

SEQ ID NO: 195641 - RNA, 19 nt, Homo sapiens
  misc_RNA (1)...(19): siRNA sense strand
cggagcugcuuccaauuug

SEQ ID NO: 195642 - RNA, 19 nt, Homo sapiens
  misc_RNA (1)...(19): siRNA sense strand
gaagacaaguacagauacc

SEQ ID NO: 195643 - RNA, 19 nt, Homo sapiens
  misc_RNA (1)...(19): siRNA sense strand
ccauggauauccugcagau

SEQ ID NO: 195644 - RNA, 19 nt, Homo sapiens
  misc_RNA (1)...(19): siRNA sense strand
ggcaucauuucccugugua

SEQ ID NO: 195645 - RNA, 19 nt, Homo sapiens
  misc_RNA (1)...(19): siRNA sense strand
uggauauccugcagauuau

SEQ ID NO: 195646 - RNA, 19 nt, Homo sapiens
  misc_RNA (1)...(19): siRNA sense strand
ggaagacaaguacagauac

SEQ ID NO: 195647 - RNA, 19 nt, Homo sapiens
  misc_RNA (1)...(19): siRNA sense strand
ugcaaagaguguccaauca

SEQ ID NO: 195648 - RNA, 19 nt, Homo sapiens
  misc_RNA (1)...(19): siRNA sense strand
guggauaugugucugaacu

SEQ ID NO: 195649 - RNA, 19 nt, Homo sapiens
  misc_RNA (1)...(19): siRNA sense strand
acuggcugcugaauguuua

SEQ ID NO: 195650 - RNA, 19 nt, Homo sapiens
  misc_RNA (1)...(19): siRNA sense strand
acuaucccaugguggaaua

SEQ ID NO: 195651 - RNA, 19 nt, Homo sapiens
  misc_RNA (1)...(19): siRNA sense strand
ccggagcugcuuccaauuu

SEQ ID NO: 195652 - RNA, 19 nt, Homo sapiens
  misc_RNA (1)...(19): siRNA sense strand
ccaaauuccaagacaguug

SEQ ID NO: 195653 - RNA, 19 nt, Homo sapiens
  misc_RNA (1)...(19): siRNA sense strand
cagaaacugccaagcauca

SEQ ID NO: 195654 - RNA, 19 nt, Homo sapiens
  misc_RNA (1)...(19): siRNA sense strand
uaugacaucugccaaagcu

SEQ ID NO: 195655 - RNA, 19 nt, Homo sapiens
  misc_RNA (1)...(19): siRNA sense strand
aaugucagauucucagcuu

SEQ ID NO: 195656 - RNA, 19 nt, Homo sapiens
  misc_RNA (1)...(19): siRNA sense strand
ucgagacuuugccaaggua

SEQ ID NO: 195657 - RNA, 19 nt, Homo sapiens
  misc_RNA (1)...(19): siRNA sense strand
gcaaaaggccauaaaaugc

SEQ ID NO: 195658 - RNA, 19 nt, Homo sapiens
  misc_RNA (1)...(19): siRNA sense strand
cugcaugauucuauccaaa

SEQ ID NO: 195659 - RNA, 19 nt, Homo sapiens
  misc_RNA (1)...(19): siRNA sense strand
uaaagcacauuuggaagac

SEQ ID NO: 195660 - RNA, 19 nt, Homo sapiens
  misc_RNA (1)...(19): siRNA sense strand
acaggagucuaaagcacuu

SEQ ID NO: 195661 - RNA, 19 nt, Homo sapiens
  misc_RNA (1)...(19): siRNA sense strand
acagauaccuuuucaagca

SEQ ID NO: 195662 - RNA, 19 nt, Homo sapiens
  misc_RNA (1)...(19): siRNA sense strand
aagcacauuuggaagacaa

SEQ ID NO: 195663 - RNA, 19 nt, Homo sapiens
  misc_RNA (1)...(19): siRNA sense strand
gcuaauaauaagccagaga

SEQ ID NO: 195664 - RNA, 19 nt, Homo sapiens
  misc_RNA (1)...(19): siRNA sense strand
caagagcacaacaauuugg

SEQ ID NO: 195665 - RNA, 19 nt, Homo sapiens
  misc_RNA (1)...(19): siRNA sense strand
ccugucagcugcaugugau

SEQ ID NO: 195666 - RNA, 19 nt, Homo sapiens
  misc_RNA (1)...(19): siRNA sense strand
gcugcugaauguuuaugau

SEQ ID NO: 195667 - RNA, 19 nt, Homo sapiens
  misc_RNA (1)...(19): siRNA sense strand
acagagcucuaccagucuu

SEQ ID NO: 195668 - RNA, 19 nt, Homo sapiens
  misc_RNA (1)...(19): siRNA sense strand
acaguugggugaaguugca

SEQ ID NO: 195669 - RNA, 19 nt, Homo sapiens
  misc_RNA (1)...(19): siRNA sense strand
guuugaccacuauuuauga

SEQ ID NO: 195670 - RNA, 19 nt, Homo sapiens
  misc_RNA (1)...(19): siRNA sense strand
gcuuauaggacugccauga

SEQ ID NO: 195671 - RNA, 19 nt, Homo sapiens
  misc_RNA (1)...(19): siRNA sense strand
caucaggccaaauguaaca

SEQ ID NO: 195672 - RNA, 19 nt, Homo sapiens
  misc_RNA (1)...(19): siRNA sense strand
gauucuauccaaauuccaa

SEQ ID NO: 195673 - RNA, 19 nt, Homo sapiens
  misc_RNA (1)...(19): siRNA sense strand
ggcaaguucaacaggauuu

SEQ ID NO: 195674 - RNA, 19 nt, Homo sapiens
  misc_RNA (1)...(19): siRNA sense strand
gaacuggcugcugaauguu

SEQ ID NO: 195675 - RNA, 19 nt, Homo sapiens
  misc_RNA (1)...(19): siRNA sense strand
cugcugaauguuuaugaua

SEQ ID NO: 195676 - RNA, 19 nt, Homo sapiens
  misc_RNA (1)...(19): siRNA sense strand
aagcaucaggccaaaugua

SEQ ID NO: 195677 - RNA, 19 nt, Homo sapiens
  misc_RNA (1)...(19): siRNA sense strand
uggcaucauuucccugugu

SEQ ID NO: 195678 - RNA, 19 nt, Homo sapiens
  misc_RNA (1)...(19): siRNA sense strand
ccaugaaacuccgaagacu

SEQ ID NO: 195679 - RNA, 19 nt, Homo sapiens
  misc_RNA (1)...(19): siRNA sense strand
auaauaagccagagaucga

SEQ ID NO: 195680 - RNA, 19 nt, Homo sapiens
  misc_RNA (1)...(19): siRNA sense strand
cuaauaauaagccagagau

SEQ ID NO: 195681 - RNA, 19 nt, Homo sapiens
  misc_RNA (1)...(19): siRNA sense strand
ugggugaaguugcauccuu

SEQ ID NO: 195682 - RNA, 19 nt, Homo sapiens
  misc_RNA (1)...(19): siRNA sense strand
caucauuucccuguguaaa

SEQ ID NO: 195683 - RNA, 19 nt, Homo sapiens
  misc_RNA (1)...(19): siRNA sense strand
gcguggauaugugucugaa

SEQ ID NO: 195684 - RNA, 19 nt, Homo sapiens
  misc_RNA (1)...(19): siRNA sense strand
gcacuaucccaugguggaa

SEQ ID NO: 195685 - RNA, 19 nt, Homo sapiens
  misc_RNA (1)...(19): siRNA sense strand
gagccugucagcugcaugu

SEQ ID NO: 195686 - RNA, 19 nt, Homo sapiens
  misc_RNA (1)...(19): siRNA sense strand
guacagauaccuuuucaag

SEQ ID NO: 195687 - RNA, 19 nt, Homo sapiens
  misc_RNA (1)...(19): siRNA sense strand
gucccucucugcguggaua

SEQ ID NO: 195688 - RNA, 19 nt, Homo sapiens
  misc_RNA (1)...(19): siRNA sense strand
ggagcugcuuccaauuugc

SEQ ID NO: 195689 - RNA, 19 nt, Homo sapiens
  misc_RNA (1)...(19): siRNA sense strand
uuagcugaccugaauaaug

SEQ ID NO: 195690 - RNA, 19 nt, Homo sapiens
  misc_RNA (1)...(19): siRNA sense strand
guggcaaguucaacaggau

SEQ ID NO: 195691 - RNA, 19 nt, Homo sapiens
  misc_RNA (1)...(19): siRNA sense strand
acaacaauuuggucaacgu

SEQ ID NO: 195692 - RNA, 19 nt, Homo sapiens
  misc_RNA (1)...(19): siRNA sense strand
gacuacaucaggagaagau

SEQ ID NO: 195693 - RNA, 19 nt, Homo sapiens
  misc_RNA (1)...(19): siRNA sense strand
uaauaagccagagaucgaa

SEQ ID NO: 195694 - RNA, 19 nt, Homo sapiens
  misc_RNA (1)...(19): siRNA sense strand
ugucagauucucagcuuau

SEQ ID NO: 195695 - RNA, 19 nt, Homo sapiens
  misc_RNA (1)...(19): siRNA sense strand
ggauauccugcagauuauu

SEQ ID NO: 195696 - RNA, 19 nt, Homo sapiens
  misc_RNA (1)...(19): siRNA sense strand
agcaucaggccaaauguaa

SEQ ID NO: 195697 - RNA, 19 nt, Homo sapiens
  misc_RNA (1)...(19): siRNA sense strand
gcccuuugcuuggaucucu

SEQ ID NO: 195698 - RNA, 19 nt, Homo sapiens
  misc_RNA (1)...(19): siRNA sense strand
gcugaauguuuaugauacg

SEQ ID NO: 195699 - RNA, 19 nt, Homo sapiens
  misc_RNA (1)...(19): siRNA sense strand
agacuuugccaagguacua

SEQ ID NO: 195700 - RNA, 19 nt, Homo sapiens
  misc_RNA (1)...(19): siRNA sense strand
caagcaaguggcaaguuca

SEQ ID NO: 195701 - RNA, 19 nt, Homo sapiens
  misc_RNA (1)...(19): siRNA sense strand
agacaaguacagauaccuu

SEQ ID NO: 195702 - RNA, 19 nt, Homo sapiens
  misc_RNA (1)...(19): siRNA sense strand
gcaucauuucccuguguaa

SEQ ID NO: 195703 - RNA, 19 nt, Homo sapiens
  misc_RNA (1)...(19): siRNA sense strand
cugcaaagaguguccaauc

SEQ ID NO: 195704 - RNA, 19 nt, Homo sapiens
  misc_RNA (1)...(19): siRNA sense strand
cuuauaggacugccaugaa

SEQ ID NO: 195705 - RNA, 19 nt, Homo sapiens
  misc_RNA (1)...(19): siRNA sense strand
caaagaguguccaaucauu

SEQ ID NO: 195706 - RNA, 19 nt, Homo sapiens
  misc_RNA (1)...(19): siRNA sense strand
uagcugaccugaauaaugu

SEQ ID NO: 195707 - RNA, 19 nt, Homo sapiens
  misc_RNA (1)...(19): siRNA sense strand
gcaugauucuauccaaauu

SEQ ID NO: 195708 - RNA, 19 nt, Homo sapiens
  misc_RNA (1)...(19): siRNA sense strand
ugaacuggcugcugaaugu

SEQ ID NO: 195709 - RNA, 19 nt, Homo sapiens
  misc_RNA (1)...(19): siRNA sense strand
gauauccugcagauuauua

SEQ ID NO: 195710 - RNA, 19 nt, Homo sapiens
  misc_RNA (1)...(19): siRNA sense strand
gagaagauguucgagacuu

SEQ ID NO: 195711 - RNA, 19 nt, Homo sapiens
  misc_RNA (1)...(19): siRNA sense strand
gcacuuuaauuaugacauc

SEQ ID NO: 195712 - RNA, 19 nt, Homo sapiens
  misc_RNA (1)...(19): siRNA sense strand
guaaagcacauuuggaaga

SEQ ID NO: 195713 - RNA, 19 nt, Homo sapiens
  misc_RNA (1)...(19): siRNA sense strand
gaauauugcacuccgacua

SEQ ID NO: 195714 - RNA, 19 nt, Homo sapiens
  misc_RNA (1)...(19): siRNA sense strand
uuauaggacugccaugaaa

SEQ ID NO: 195715 - RNA, 19 nt, Homo sapiens
  misc_RNA (1)...(19): siRNA sense strand
gggugaaguugcauccuuu

SEQ ID NO: 195716 - RNA, 19 nt, Homo sapiens
  misc_RNA (1)...(19): siRNA sense strand
gcaagagcacaacaauuug

SEQ ID NO: 195717 - RNA, 19 nt, Homo sapiens
  misc_RNA (1)...(19): siRNA sense strand
gcacaacaauuuggucaac

SEQ ID NO: 195718 - RNA, 19 nt, Homo sapiens
  misc_RNA (1)...(19): siRNA sense strand
agcaagagcacaacaauuu

SEQ ID NO: 195719 - RNA, 19 nt, Homo sapiens
  misc_RNA (1)...(19): siRNA sense strand
agaagauguucgagacuuu

SEQ ID NO: 195720 - RNA, 19 nt, Homo sapiens
  misc_RNA (1)...(19): siRNA sense strand
gagcaagagcacaacaauu

SEQ ID NO: 195721 - RNA, 19 nt, Homo sapiens
  misc_RNA (1)...(19): siRNA sense strand
ucaagcaaguggcaaguuc

SEQ ID NO: 195722 - RNA, 19 nt, Homo sapiens
  misc_RNA (1)...(19): siRNA sense strand
ccacgagacucaaacaacu

SEQ ID NO: 195723 - RNA, 19 nt, Homo sapiens
  misc_RNA (1)...(19): siRNA sense strand
cagcacaaccucaagcaaa

SEQ ID NO: 195724 - RNA, 19 nt, Homo sapiens
  misc_RNA (1)...(19): siRNA sense strand
gcaaagaguguccaaucau

SEQ ID NO: 195725 - RNA, 19 nt, Homo sapiens
  misc_RNA (1)...(19): siRNA sense strand
auggauauccugcagauua

SEQ ID NO: 195726 - RNA, 19 nt, Homo sapiens
  misc_RNA (1)...(19): siRNA sense strand
uguaacaucugcaaagagu

SEQ ID NO: 195727 - RNA, 19 nt, Homo sapiens
  misc_RNA (1)...(19): siRNA sense strand
guccggagcugcuuccaau

SEQ ID NO: 195728 - RNA, 19 nt, Homo sapiens
  misc_RNA (1)...(19): siRNA sense strand
gcaaguggcaaguucaaca

SEQ ID NO: 195729 - RNA, 19 nt, Homo sapiens
  misc_RNA (1)...(19): siRNA sense strand
gcuuccaauuugcuaauaa

SEQ ID NO: 195730 - RNA, 19 nt, Homo sapiens
  misc_RNA (1)...(19): siRNA sense strand
uggaagacaaguacagaua

SEQ ID NO: 195731 - RNA, 19 nt, Homo sapiens
  misc_RNA (1)...(19): siRNA sense strand
ggauccguguccugucuuu

SEQ ID NO: 195732 - RNA, 19 nt, Homo sapiens
  misc_RNA (1)...(19): siRNA sense strand
gucuuuagcugaccugaau

SEQ ID NO: 195733 - RNA, 19 nt, Homo sapiens
  misc_RNA (1)...(19): siRNA sense strand
gacaaguacagauaccuuu

SEQ ID NO: 195734 - RNA, 19 nt, Homo sapiens
  misc_RNA (1)...(19): siRNA sense strand
ccaagcaucaggccaaaug

SEQ ID NO: 195735 - RNA, 19 nt, Homo sapiens
  misc_RNA (1)...(19): siRNA sense strand
ggagcaagagcacaacaau

SEQ ID NO: 195736 - RNA, 19 nt, Homo sapiens
  misc_RNA (1)...(19): siRNA sense strand
guguaaagcacauuuggaa

SEQ ID NO: 195737 - RNA, 19 nt, Homo sapiens
  misc_RNA (1)...(19): siRNA sense strand
caagacaguugggugaagu

SEQ ID NO: 195738 - RNA, 19 nt, Homo sapiens
  misc_RNA (1)...(19): siRNA sense strand
gaagauguucgagacuuug

SEQ ID NO: 195739 - RNA, 19 nt, Homo sapiens
  misc_RNA (1)...(19): siRNA sense strand
gucagauucucagcuuaua

SEQ ID NO: 195740 - RNA, 19 nt, Homo sapiens
  misc_RNA (1)...(19): siRNA sense strand
uaacaucugcaaagagugu

SEQ ID NO: 195741 - RNA, 19 nt, Homo sapiens
  misc_RNA (1)...(19): siRNA sense strand
cggagcugcuuccaauuug

SEQ ID NO: 195742 - RNA, 19 nt, Homo sapiens
  misc_RNA (1)...(19): siRNA sense strand
gaagacaaguacagauacc

SEQ ID NO: 195743 - RNA, 19 nt, Homo sapiens
  misc_RNA (1)...(19): siRNA sense strand
ccauggauauccugcagau

SEQ ID NO: 195744 - RNA, 19 nt, Homo sapiens
  misc_RNA (1)...(19): siRNA sense strand
ggcaucauuucccugugua

SEQ ID NO: 195745 - RNA, 19 nt, Homo sapiens
  misc_RNA (1)...(19): siRNA sense strand
uggauauccugcagauuau

SEQ ID NO: 195746 - RNA, 19 nt, Homo sapiens
  misc_RNA (1)...(19): siRNA sense strand
ggaagacaaguacagauac

SEQ ID NO: 195747 - RNA, 19 nt, Homo sapiens
  misc_RNA (1)...(19): siRNA sense strand
ugcaaagaguguccaauca

SEQ ID NO: 195748 - RNA, 19 nt, Homo sapiens
  misc_RNA (1)...(19): siRNA sense strand
guggauaugugucugaacu

SEQ ID NO: 195749 - RNA, 19 nt, Homo sapiens
  misc_RNA (1)...(19): siRNA sense strand
acuggcugcugaauguuua

SEQ ID NO: 195750 - RNA, 19 nt, Homo sapiens
  misc_RNA (1)...(19): siRNA sense strand
acuaucccaugguggaaua

SEQ ID NO: 195751 - RNA, 19 nt, Homo sapiens
  misc_RNA (1)...(19): siRNA sense strand
ccggagcugcuuccaauuu

SEQ ID NO: 195752 - RNA, 19 nt, Homo sapiens
  misc_RNA (1)...(19): siRNA sense strand
ccaaauuccaagacaguug

SEQ ID NO: 195753 - RNA, 19 nt, Homo sapiens
  misc_RNA (1)...(19): siRNA sense strand
cagaaacugccaagcauca

SEQ ID NO: 195754 - RNA, 19 nt, Homo sapiens
  misc_RNA (1)...(19): siRNA sense strand
uaugacaucugccaaagcu

SEQ ID NO: 195755 - RNA, 19 nt, Homo sapiens
  misc_RNA (1)...(19): siRNA sense strand
aaugucagauucucagcuu

SEQ ID NO: 195756 - RNA, 19 nt, Homo sapiens
  misc_RNA (1)...(19): siRNA sense strand
ucgagacuuugccaaggua

SEQ ID NO: 195757 - RNA, 19 nt, Homo sapiens
  misc_RNA (1)...(19): siRNA sense strand
gcaaaaggccauaaaaugc

SEQ ID NO: 195758 - RNA, 19 nt, Homo sapiens
  misc_RNA (1)...(19): siRNA sense strand
cugcaugauucuauccaaa

SEQ ID NO: 195759 - RNA, 19 nt, Homo sapiens
  misc_RNA (1)...(19): siRNA sense strand
uaaagcacauuuggaagac

SEQ ID NO: 195760 - RNA, 19 nt, Homo sapiens
  misc_RNA (1)...(19): siRNA sense strand
acaggagucuaaagcacuu

SEQ ID NO: 195761 - RNA, 19 nt, Homo sapiens
  misc_RNA (1)...(19): siRNA sense strand
acagauaccuuuucaagca

SEQ ID NO: 195762 - RNA, 19 nt, Homo sapiens
  misc_RNA (1)...(19): siRNA sense strand
aagcacauuuggaagacaa

SEQ ID NO: 195763 - RNA, 19 nt, Homo sapiens
  misc_RNA (1)...(19): siRNA sense strand
gcuaauaauaagccagaga

SEQ ID NO: 195764 - RNA, 19 nt, Homo sapiens
  misc_RNA (1)...(19): siRNA sense strand
caagagcacaacaauuugg

SEQ ID NO: 195765 - RNA, 19 nt, Homo sapiens
  misc_RNA (1)...(19): siRNA sense strand
ccugucagcugcaugugau

SEQ ID NO: 195766 - RNA, 19 nt, Homo sapiens
  misc_RNA (1)...(19): siRNA sense strand
gcugcugaauguuuaugau

SEQ ID NO: 195767 - RNA, 19 nt, Homo sapiens
  misc_RNA (1)...(19): siRNA sense strand
acagagcucuaccagucuu

SEQ ID NO: 195768 - RNA, 19 nt, Homo sapiens
  misc_RNA (1)...(19): siRNA sense strand
acaguugggugaaguugca

SEQ ID NO: 195769 - RNA, 19 nt, Homo sapiens
  misc_RNA (1)...(19): siRNA sense strand
guuugaccacuauuuauga

SEQ ID NO: 195770 - RNA, 19 nt, Homo sapiens
  misc_RNA (1)...(19): siRNA sense strand
gcuuauaggacugccauga

SEQ ID NO: 195771 - RNA, 19 nt, Homo sapiens
  misc_RNA (1)...(19): siRNA sense strand
caucaggccaaauguaaca

SEQ ID NO: 195772 - RNA, 19 nt, Homo sapiens
  misc_RNA (1)...(19): siRNA sense strand
gauucuauccaaauuccaa

SEQ ID NO: 195773 - RNA, 19 nt, Homo sapiens
  misc_RNA (1)...(19): siRNA sense strand
ggcaaguucaacaggauuu

SEQ ID NO: 195774 - RNA, 19 nt, Homo sapiens
  misc_RNA (1)...(19): siRNA sense strand
gaacuggcugcugaauguu

SEQ ID NO: 195775 - RNA, 19 nt, Homo sapiens
  misc_RNA (1)...(19): siRNA sense strand
cugcugaauguuuaugaua

SEQ ID NO: 195776 - RNA, 19 nt, Homo sapiens
  misc_RNA (1)...(19): siRNA sense strand
aagcaucaggccaaaugua

SEQ ID NO: 195777 - RNA, 19 nt, Homo sapiens
  misc_RNA (1)...(19): siRNA sense strand
uggcaucauuucccugugu

SEQ ID NO: 195778 - RNA, 19 nt, Homo sapiens
  misc_RNA (1)...(19): siRNA sense strand
ccaugaaacuccgaagacu

SEQ ID NO: 195779 - RNA, 19 nt, Homo sapiens
  misc_RNA (1)...(19): siRNA sense strand
auaauaagccagagaucga

SEQ ID NO: 195780 - RNA, 19 nt, Homo sapiens
  misc_RNA (1)...(19): siRNA sense strand
cuaauaauaagccagagau

SEQ ID NO: 195781 - RNA, 19 nt, Homo sapiens
  misc_RNA (1)...(19): siRNA sense strand
ugggugaaguugcauccuu

SEQ ID NO: 195782 - RNA, 19 nt, Homo sapiens
  misc_RNA (1)...(19): siRNA sense strand
caucauuucccuguguaaa

SEQ ID NO: 195783 - RNA, 19 nt, Homo sapiens
  misc_RNA (1)...(19): siRNA sense strand
gcguggauaugugucugaa

SEQ ID NO: 195784 - RNA, 19 nt, Homo sapiens
  misc_RNA (1)...(19): siRNA sense strand
gcacuaucccaugguggaa

SEQ ID NO: 195785 - RNA, 19 nt, Homo sapiens
  misc_RNA (1)...(19): siRNA sense strand
gagccugucagcugcaugu

SEQ ID NO: 195786 - RNA, 19 nt, Homo sapiens
  misc_RNA (1)...(19): siRNA sense strand
guacagauaccuuuucaag

SEQ ID NO: 195787 - RNA, 19 nt, Homo sapiens
  misc_RNA (1)...(19): siRNA sense strand
gucccucucugcguggaua

SEQ ID NO: 195788 - RNA, 19 nt, Homo sapiens
  misc_RNA (1)...(19): siRNA sense strand
ggagcugcuuccaauuugc

SEQ ID NO: 195789 - RNA, 19 nt, Homo sapiens
  misc_RNA (1)...(19): siRNA sense strand
uuagcugaccugaauaaug

SEQ ID NO: 195790 - RNA, 19 nt, Homo sapiens
  misc_RNA (1)...(19): siRNA sense strand
guggcaaguucaacaggau

SEQ ID NO: 195791 - RNA, 19 nt, Homo sapiens
  misc_RNA (1)...(19): siRNA sense strand
acaacaauuuggucaacgu

SEQ ID NO: 195792 - RNA, 19 nt, Homo sapiens
  misc_RNA (1)...(19): siRNA sense strand
gacuacaucaggagaagau

SEQ ID NO: 195793 - RNA, 19 nt, Homo sapiens
  misc_RNA (1)...(19): siRNA sense strand
uaauaagccagagaucgaa

SEQ ID NO: 195794 - RNA, 19 nt, Homo sapiens
  misc_RNA (1)...(19): siRNA sense strand
ugucagauucucagcuuau

SEQ ID NO: 195795 - RNA, 19 nt, Homo sapiens
  misc_RNA (1)...(19): siRNA sense strand
ggauauccugcagauuauu

SEQ ID NO: 195796 - RNA, 19 nt, Homo sapiens
  misc_RNA (1)...(19): siRNA sense strand
agcaucaggccaaauguaa

SEQ ID NO: 195797 - RNA, 19 nt, Homo sapiens
  misc_RNA (1)...(19): siRNA sense strand
gcccuuugcuuggaucucu

SEQ ID NO: 195798 - RNA, 19 nt, Homo sapiens
  misc_RNA (1)...(19): siRNA sense strand
gcugaauguuuaugauacg

SEQ ID NO: 195799 - RNA, 19 nt, Homo sapiens
  misc_RNA (1)...(19): siRNA sense strand
agacuuugccaagguacua

SEQ ID NO: 195800 - RNA, 19 nt, Homo sapiens
  misc_RNA (1)...(19): siRNA sense strand
caagcaaguggcaaguuca

SEQ ID NO: 195801 - RNA, 19 nt, Homo sapiens
  misc_RNA (1)...(19): siRNA sense strand
agacaaguacagauaccuu

SEQ ID NO: 195802 - RNA, 19 nt, Homo sapiens
  misc_RNA (1)...(19): siRNA sense strand
gcaucauuucccuguguaa

SEQ ID NO: 195803 - RNA, 19 nt, Homo sapiens
  misc_RNA (1)...(19): siRNA sense strand
cugcaaagaguguccaauc

SEQ ID NO: 195804 - RNA, 19 nt, Homo sapiens
  misc_RNA (1)...(19): siRNA sense strand
cuuauaggacugccaugaa

SEQ ID NO: 195805 - RNA, 19 nt, Homo sapiens
  misc_RNA (1)...(19): siRNA sense strand
caaagaguguccaaucauu

SEQ ID NO: 195806 - RNA, 19 nt, Homo sapiens
  misc_RNA (1)...(19): siRNA sense strand
uagcugaccugaauaaugu

SEQ ID NO: 195807 - RNA, 19 nt, Homo sapiens
  misc_RNA (1)...(19): siRNA sense strand
gcaugauucuauccaaauu

SEQ ID NO: 195808 - RNA, 19 nt, Homo sapiens
  misc_RNA (1)...(19): siRNA sense strand
ugaacuggcugcugaaugu

SEQ ID NO: 195809 - RNA, 19 nt, Homo sapiens
  misc_RNA (1)...(19): siRNA sense strand
gauauccugcagauuauua

SEQ ID NO: 195810 - RNA, 19 nt, Homo sapiens
  misc_RNA (1)...(19): siRNA sense strand
gagaagauguucgagacuu

SEQ ID NO: 195811 - RNA, 19 nt, Homo sapiens
  misc_RNA (1)...(19): siRNA sense strand
gcacuuuaauuaugacauc

SEQ ID NO: 195812 - RNA, 19 nt, Homo sapiens
  misc_RNA (1)...(19): siRNA sense strand
guaaagcacauuuggaaga

SEQ ID NO: 195813 - RNA, 19 nt, Homo sapiens
  misc_RNA (1)...(19): siRNA sense strand
gaauauugcacuccgacua

SEQ ID NO: 195814 - RNA, 19 nt, Homo sapiens
  misc_RNA (1)...(19): siRNA sense strand
uuauaggacugccaugaaa

SEQ ID NO: 195815 - RNA, 19 nt, Homo sapiens
  misc_RNA (1)...(19): siRNA sense strand
gggugaaguugcauccuuu

SEQ ID NO: 195816 - RNA, 19 nt, Homo sapiens
  misc_RNA (1)...(19): siRNA sense strand
gcaagagcacaacaauuug

SEQ ID NO: 195817 - RNA, 19 nt, Homo sapiens
  misc_RNA (1)...(19): siRNA sense strand
gcacaacaauuuggucaac

SEQ ID NO: 195818 - RNA, 19 nt, Homo sapiens
  misc_RNA (1)...(19): siRNA sense strand
agcaagagcacaacaauuu

SEQ ID NO: 195819 - RNA, 19 nt, Homo sapiens
  misc_RNA (1)...(19): siRNA sense strand
agaagauguucgagacuuu

SEQ ID NO: 195820 - RNA, 19 nt, Homo sapiens
  misc_RNA (1)...(19): siRNA sense strand
gagcaagagcacaacaauu

SEQ ID NO: 195821 - RNA, 19 nt, Homo sapiens
  misc_RNA (1)...(19): siRNA sense strand
ucaagcaaguggcaaguuc

SEQ ID NO: 195822 - RNA, 19 nt, Homo sapiens
  misc_RNA (1)...(19): siRNA sense strand
ccacgagacucaaacaacu

SEQ ID NO: 195823 - RNA, 19 nt, Homo sapiens
  misc_RNA (1)...(19): siRNA sense strand
cagcacaaccucaagcaaa

SEQ ID NO: 195824 - RNA, 19 nt, Homo sapiens
  misc_RNA (1)...(19): siRNA sense strand
gcaaagaguguccaaucau

SEQ ID NO: 195825 - RNA, 19 nt, Homo sapiens
  misc_RNA (1)...(19): siRNA sense strand
auggauauccugcagauua

SEQ ID NO: 195826 - RNA, 19 nt, Homo sapiens
  misc_RNA (1)...(19): siRNA sense strand
uguaacaucugcaaagagu

SEQ ID NO: 195827 - RNA, 19 nt, Homo sapiens
  misc_RNA (1)...(19): siRNA sense strand
guccggagcugcuuccaau

SEQ ID NO: 195828 - RNA, 19 nt, Homo sapiens
  misc_RNA (1)...(19): siRNA sense strand
gcaaguggcaaguucaaca

SEQ ID NO: 195829 - RNA, 19 nt, Homo sapiens
  misc_RNA (1)...(19): siRNA sense strand
gcuuccaauuugcuaauaa

SEQ ID NO: 195830 - RNA, 19 nt, Homo sapiens
  misc_RNA (1)...(19): siRNA sense strand
uggaagacaaguacagaua

SEQ ID NO: 195831 - RNA, 19 nt, Homo sapiens
  misc_RNA (1)...(19): siRNA sense strand
ggauccguguccugucuuu

SEQ ID NO: 195832 - RNA, 19 nt, Homo sapiens
  misc_RNA (1)...(19): siRNA sense strand
gucuuuagcugaccugaau

SEQ ID NO: 195833 - RNA, 19 nt, Homo sapiens
  misc_RNA (1)...(19): siRNA sense strand
gacaaguacagauaccuuu

SEQ ID NO: 195834 - RNA, 19 nt, Homo sapiens
  misc_RNA (1)...(19): siRNA sense strand
ccaagcaucaggccaaaug

SEQ ID NO: 195835 - RNA, 19 nt, Homo sapiens
  misc_RNA (1)...(19): siRNA sense strand
ggagcaagagcacaacaau

SEQ ID NO: 195836 - RNA, 19 nt, Homo sapiens
  misc_RNA (1)...(19): siRNA sense strand
guguaaagcacauuuggaa

SEQ ID NO: 195837 - RNA, 19 nt, Homo sapiens
  misc_RNA (1)...(19): siRNA sense strand
caagacaguugggugaagu

SEQ ID NO: 195838 - RNA, 19 nt, Homo sapiens
  misc_RNA (1)...(19): siRNA sense strand
gaagauguucgagacuuug

SEQ ID NO: 195839 - RNA, 19 nt, Homo sapiens
  misc_RNA (1)...(19): siRNA sense strand
gucagauucucagcuuaua

SEQ ID NO: 195840 - RNA, 19 nt, Homo sapiens
  misc_RNA (1)...(19): siRNA sense strand
uaacaucugcaaagagugu

SEQ ID NO: 195841 - RNA, 19 nt, Homo sapiens
  misc_RNA (1)...(19): siRNA sense strand
cggagcugcuuccaauuug

SEQ ID NO: 195842 - RNA, 19 nt, Homo sapiens
  misc_RNA (1)...(19): siRNA sense strand
gaagacaaguacagauacc

SEQ ID NO: 195843 - RNA, 19 nt, Homo sapiens
  misc_RNA (1)...(19): siRNA sense strand
ccauggauauccugcagau

SEQ ID NO: 195844 - RNA, 19 nt, Homo sapiens
  misc_RNA (1)...(19): siRNA sense strand
ggcaucauuucccugugua

SEQ ID NO: 195845 - RNA, 19 nt, Homo sapiens
  misc_RNA (1)...(19): siRNA sense strand
uggauauccugcagauuau

SEQ ID NO: 195846 - RNA, 19 nt, Homo sapiens
  misc_RNA (1)...(19): siRNA sense strand
ggaagacaaguacagauac

SEQ ID NO: 195847 - RNA, 19 nt, Homo sapiens
  misc_RNA (1)...(19): siRNA sense strand
ugcaaagaguguccaauca

SEQ ID NO: 195848 - RNA, 19 nt, Homo sapiens
  misc_RNA (1)...(19): siRNA sense strand
guggauaugugucugaacu

SEQ ID NO: 195849 - RNA, 19 nt, Homo sapiens
  misc_RNA (1)...(19): siRNA sense strand
acuggcugcugaauguuua

SEQ ID NO: 195850 - RNA, 19 nt, Homo sapiens
  misc_RNA (1)...(19): siRNA sense strand
acuaucccaugguggaaua

SEQ ID NO: 195851 - RNA, 19 nt, Homo sapiens
  misc_RNA (1)...(19): siRNA sense strand
ccggagcugcuuccaauuu

SEQ ID NO: 195852 - RNA, 19 nt, Homo sapiens
  misc_RNA (1)...(19): siRNA sense strand
ccaaauuccaagacaguug

SEQ ID NO: 195853 - RNA, 19 nt, Homo sapiens
  misc_RNA (1)...(19): siRNA sense strand
cagaaacugccaagcauca

SEQ ID NO: 195854 - RNA, 19 nt, Homo sapiens
  misc_RNA (1)...(19): siRNA sense strand
uaugacaucugccaaagcu

SEQ ID NO: 195855 - RNA, 19 nt, Homo sapiens
  misc_RNA (1)...(19): siRNA sense strand
aaugucagauucucagcuu

SEQ ID NO: 195856 - RNA, 19 nt, Homo sapiens
  misc_RNA (1)...(19): siRNA sense strand
ucgagacuuugccaaggua

SEQ ID NO: 195857 - RNA, 19 nt, Homo sapiens
  misc_RNA (1)...(19): siRNA sense strand
gcaaaaggccauaaaaugc

SEQ ID NO: 195858 - RNA, 19 nt, Homo sapiens
  misc_RNA (1)...(19): siRNA sense strand
cugcaugauucuauccaaa

SEQ ID NO: 195859 - RNA, 19 nt, Homo sapiens
  misc_RNA (1)...(19): siRNA sense strand
uaaagcacauuuggaagac

SEQ ID NO: 195860 - RNA, 19 nt, Homo sapiens
  misc_RNA (1)...(19): siRNA sense strand
acaggagucuaaagcacuu

SEQ ID NO: 195861 - RNA, 19 nt, Homo sapiens
  misc_RNA (1)...(19): siRNA sense strand
acagauaccuuuucaagca

SEQ ID NO: 195862 - RNA, 19 nt, Homo sapiens
  misc_RNA (1)...(19): siRNA sense strand
aagcacauuuggaagacaa

SEQ ID NO: 195863 - RNA, 19 nt, Homo sapiens
  misc_RNA (1)...(19): siRNA sense strand
gcuaauaauaagccagaga

SEQ ID NO: 195864 - RNA, 19 nt, Homo sapiens
  misc_RNA (1)...(19): siRNA sense strand
caagagcacaacaauuugg

SEQ ID NO: 195865 - RNA, 19 nt, Homo sapiens
  misc_RNA (1)...(19): siRNA sense strand
ccugucagcugcaugugau

SEQ ID NO: 195866 - RNA, 19 nt, Homo sapiens
  misc_RNA (1)...(19): siRNA sense strand
gcugcugaauguuuaugau

SEQ ID NO: 195867 - RNA, 19 nt, Homo sapiens
  misc_RNA (1)...(19): siRNA sense strand
acagagcucuaccagucuu

SEQ ID NO: 195868 - RNA, 19 nt, Homo sapiens
  misc_RNA (1)...(19): siRNA sense strand
acaguugggugaaguugca

SEQ ID NO: 195869 - RNA, 19 nt, Homo sapiens
  misc_RNA (1)...(19): siRNA sense strand
guuugaccacuauuuauga

SEQ ID NO: 195870 - RNA, 19 nt, Homo sapiens
  misc_RNA (1)...(19): siRNA sense strand
gcuuauaggacugccauga

SEQ ID NO: 195871 - RNA, 19 nt, Homo sapiens
  misc_RNA (1)...(19): siRNA sense strand
caucaggccaaauguaaca

SEQ ID NO: 195872 - RNA, 19 nt, Homo sapiens
  misc_RNA (1)...(19): siRNA sense strand
gauucuauccaaauuccaa

SEQ ID NO: 195873 - RNA, 19 nt, Homo sapiens
  misc_RNA (1)...(19): siRNA sense strand
ggcaaguucaacaggauuu

SEQ ID NO: 195874 - RNA, 19 nt, Homo sapiens
  misc_RNA (1)...(19): siRNA sense strand
gaacuggcugcugaauguu

SEQ ID NO: 195875 - RNA, 19 nt, Homo sapiens
  misc_RNA (1)...(19): siRNA sense strand
cugcugaauguuuaugaua

SEQ ID NO: 195876 - RNA, 19 nt, Homo sapiens
  misc_RNA (1)...(19): siRNA sense strand
aagcaucaggccaaaugua

SEQ ID NO: 195877 - RNA, 19 nt, Homo sapiens
  misc_RNA (1)...(19): siRNA sense strand
uggcaucauuucccugugu

SEQ ID NO: 195878 - RNA, 19 nt, Homo sapiens
  misc_RNA (1)...(19): siRNA sense strand
ccaugaaacuccgaagacu

SEQ ID NO: 195879 - RNA, 19 nt, Homo sapiens
  misc_RNA (1)...(19): siRNA sense strand
auaauaagccagagaucga

SEQ ID NO: 195880 - RNA, 19 nt, Homo sapiens
  misc_RNA (1)...(19): siRNA sense strand
cuaauaauaagccagagau

SEQ ID NO: 195881 - RNA, 19 nt, Homo sapiens
  misc_RNA (1)...(19): siRNA sense strand
ugggugaaguugcauccuu

SEQ ID NO: 195882 - RNA, 19 nt, Homo sapiens
  misc_RNA (1)...(19): siRNA sense strand
caucauuucccuguguaaa

SEQ ID NO: 195883 - RNA, 19 nt, Homo sapiens
  misc_RNA (1)...(19): siRNA sense strand
gcguggauaugugucugaa

SEQ ID NO: 195884 - RNA, 19 nt, Homo sapiens
  misc_RNA (1)...(19): siRNA sense strand
gcacuaucccaugguggaa

SEQ ID NO: 195885 - RNA, 19 nt, Homo sapiens
  misc_RNA (1)...(19): siRNA sense strand
gagccugucagcugcaugu

SEQ ID NO: 195886 - RNA, 19 nt, Homo sapiens
  misc_RNA (1)...(19): siRNA sense strand
guacagauaccuuuucaag

SEQ ID NO: 195887 - RNA, 19 nt, Homo sapiens
  misc_RNA (1)...(19): siRNA sense strand
gucccucucugcguggaua

SEQ ID NO: 195888 - RNA, 19 nt, Homo sapiens
  misc_RNA (1)...(19): siRNA sense strand
ggagcugcuuccaauuugc

SEQ ID NO: 195889 - RNA, 19 nt, Homo sapiens
  misc_RNA (1)...(19): siRNA sense strand
uuagcugaccugaauaaug

SEQ ID NO: 195890 - RNA, 19 nt, Homo sapiens
  misc_RNA (1)...(19): siRNA sense strand
guggcaaguucaacaggau

SEQ ID NO: 195891 - RNA, 19 nt, Homo sapiens
  misc_RNA (1)...(19): siRNA sense strand
acaacaauuuggucaacgu

SEQ ID NO: 195892 - RNA, 19 nt, Homo sapiens
  misc_RNA (1)...(19): siRNA sense strand
gacuacaucaggagaagau

SEQ ID NO: 195893 - RNA, 19 nt, Homo sapiens
  misc_RNA (1)...(19): siRNA sense strand
uaauaagccagagaucgaa

SEQ ID NO: 195894 - RNA, 19 nt, Homo sapiens
  misc_RNA (1)...(19): siRNA sense strand
ugucagauucucagcuuau

SEQ ID NO: 195895 - RNA, 19 nt, Homo sapiens
  misc_RNA (1)...(19): siRNA sense strand
ggauauccugcagauuauu

SEQ ID NO: 195896 - RNA, 19 nt, Homo sapiens
  misc_RNA (1)...(19): siRNA sense strand
agcaucaggccaaauguaa

SEQ ID NO: 195897 - RNA, 19 nt, Homo sapiens
  misc_RNA (1)...(19): siRNA sense strand
gcccuuugcuuggaucucu

SEQ ID NO: 195898 - RNA, 19 nt, Homo sapiens
  misc_RNA (1)...(19): siRNA sense strand
gcugaauguuuaugauacg

SEQ ID NO: 195899 - RNA, 19 nt, Homo sapiens
  misc_RNA (1)...(19): siRNA sense strand
agacuuugccaagguacua

SEQ ID NO: 195900 - RNA, 19 nt, Homo sapiens
  misc_RNA (1)...(19): siRNA sense strand
caagcaaguggcaaguuca

SEQ ID NO: 195901 - RNA, 19 nt, Homo sapiens
  misc_RNA (1)...(19): siRNA sense strand
agacaaguacagauaccuu

SEQ ID NO: 195902 - RNA, 19 nt, Homo sapiens
  misc_RNA (1)...(19): siRNA sense strand
gcaucauuucccuguguaa

SEQ ID NO: 195903 - RNA, 19 nt, Homo sapiens
  misc_RNA (1)...(19): siRNA sense strand
cugcaaagaguguccaauc

SEQ ID NO: 195904 - RNA, 19 nt, Homo sapiens
  misc_RNA (1)...(19): siRNA sense strand
cuuauaggacugccaugaa

SEQ ID NO: 195905 - RNA, 19 nt, Homo sapiens
  misc_RNA (1)...(19): siRNA sense strand
caaagaguguccaaucauu

SEQ ID NO: 195906 - RNA, 19 nt, Homo sapiens
  misc_RNA (1)...(19): siRNA sense strand
uagcugaccugaauaaugu

SEQ ID NO: 195907 - RNA, 19 nt, Homo sapiens
  misc_RNA (1)...(19): siRNA sense strand
gcaugauucuauccaaauu

SEQ ID NO: 195908 - RNA, 19 nt, Homo sapiens
  misc_RNA (1)...(19): siRNA sense strand
ugaacuggcugcugaaugu

SEQ ID NO: 195909 - RNA, 19 nt, Homo sapiens
  misc_RNA (1)...(19): siRNA sense strand
gauauccugcagauuauua

SEQ ID NO: 195910 - RNA, 19 nt, Homo sapiens
  misc_RNA (1)...(19): siRNA sense strand
gagaagauguucgagacuu

SEQ ID NO: 195911 - RNA, 19 nt, Homo sapiens
  misc_RNA (1)...(19): siRNA sense strand
gcacuuuaauuaugacauc

SEQ ID NO: 195912 - RNA, 19 nt, Homo sapiens
  misc_RNA (1)...(19): siRNA sense strand
guaaagcacauuuggaaga

SEQ ID NO: 195913 - RNA, 19 nt, Homo sapiens
  misc_RNA (1)...(19): siRNA sense strand
gaauauugcacuccgacua

SEQ ID NO: 195914 - RNA, 19 nt, Homo sapiens
  misc_RNA (1)...(19): siRNA sense strand
uuauaggacugccaugaaa

SEQ ID NO: 195915 - RNA, 19 nt, Homo sapiens
  misc_RNA (1)...(19): siRNA sense strand
gggugaaguugcauccuuu

SEQ ID NO: 195916 - RNA, 19 nt, Homo sapiens
  misc_RNA (1)...(19): siRNA sense strand
gcaagagcacaacaauuug

SEQ ID NO: 195917 - RNA, 19 nt, Homo sapiens
  misc_RNA (1)...(19): siRNA sense strand
gcacaacaauuuggucaac

SEQ ID NO: 195918 - RNA, 19 nt, Homo sapiens
  misc_RNA (1)...(19): siRNA sense strand
agcaagagcacaacaauuu

SEQ ID NO: 195919 - RNA, 19 nt, Homo sapiens
  misc_RNA (1)...(19): siRNA sense strand
agaagauguucgagacuuu

SEQ ID NO: 195920 - RNA, 19 nt, Homo sapiens
  misc_RNA (1)...(19): siRNA sense strand
gagcaagagcacaacaauu

SEQ ID NO: 195921 - RNA, 19 nt, Homo sapiens
  misc_RNA (1)...(19): siRNA sense strand
ucaagcaaguggcaaguuc

SEQ ID NO: 195922 - RNA, 19 nt, Homo sapiens
  misc_RNA (1)...(19): siRNA sense strand
ccacgagacucaaacaacu

SEQ ID NO: 195923 - RNA, 19 nt, Homo sapiens
  misc_RNA (1)...(19): siRNA sense strand
cagcacaaccucaagcaaa

SEQ ID NO: 195924 - RNA, 19 nt, Homo sapiens
  misc_RNA (1)...(19): siRNA sense strand
gcaaagaguguccaaucau

SEQ ID NO: 195925 - RNA, 19 nt, Homo sapiens
  misc_RNA (1)...(19): siRNA sense strand
auggauauccugcagauua

SEQ ID NO: 195926 - RNA, 19 nt, Homo sapiens
  misc_RNA (1)...(19): siRNA sense strand
uguaacaucugcaaagagu

SEQ ID NO: 195927 - RNA, 19 nt, Homo sapiens
  misc_RNA (1)...(19): siRNA sense strand
guccggagcugcuuccaau

SEQ ID NO: 195928 - RNA, 19 nt, Homo sapiens
  misc_RNA (1)...(19): siRNA sense strand
gcaaguggcaaguucaaca

SEQ ID NO: 195929 - RNA, 19 nt, Homo sapiens
  misc_RNA (1)...(19): siRNA sense strand
gcuuccaauuugcuaauaa

SEQ ID NO: 195930 - RNA, 19 nt, Homo sapiens
  misc_RNA (1)...(19): siRNA sense strand
uggaagacaaguacagaua

SEQ ID NO: 195931 - RNA, 19 nt, Homo sapiens
  misc_RNA (1)...(19): siRNA sense strand
ggauccguguccugucuuu

SEQ ID NO: 195932 - RNA, 19 nt, Homo sapiens
  misc_RNA (1)...(19): siRNA sense strand
gucuuuagcugaccugaau

SEQ ID NO: 195933 - RNA, 19 nt, Homo sapiens
  misc_RNA (1)...(19): siRNA sense strand
gacaaguacagauaccuuu

SEQ ID NO: 195934 - RNA, 19 nt, Homo sapiens
  misc_RNA (1)...(19): siRNA sense strand
ccaagcaucaggccaaaug

SEQ ID NO: 195935 - RNA, 19 nt, Homo sapiens
  misc_RNA (1)...(19): siRNA sense strand
ggagcaagagcacaacaau

SEQ ID NO: 195936 - RNA, 19 nt, Homo sapiens
  misc_RNA (1)...(19): siRNA sense strand
guguaaagcacauuuggaa

SEQ ID NO: 195937 - RNA, 19 nt, Homo sapiens
  misc_RNA (1)...(19): siRNA sense strand
caagacaguugggugaagu

SEQ ID NO: 195938 - RNA, 19 nt, Homo sapiens
  misc_RNA (1)...(19): siRNA sense strand
gaagauguucgagacuuug

SEQ ID NO: 195939 - RNA, 19 nt, Homo sapiens
  misc_RNA (1)...(19): siRNA sense strand
gucagauucucagcuuaua

SEQ ID NO: 195940 - RNA, 19 nt, Homo sapiens
  misc_RNA (1)...(19): siRNA sense strand
uaacaucugcaaagagugu

SEQ ID NO: 195941 - RNA, 19 nt, Homo sapiens
  misc_RNA (1)...(19): siRNA sense strand
cggagcugcuuccaauuug

SEQ ID NO: 195942 - RNA, 19 nt, Homo sapiens
  misc_RNA (1)...(19): siRNA sense strand
gaagacaaguacagauacc

SEQ ID NO: 195943 - RNA, 19 nt, Homo sapiens
  misc_RNA (1)...(19): siRNA sense strand
ccauggauauccugcagau

SEQ ID NO: 195944 - RNA, 19 nt, Homo sapiens
  misc_RNA (1)...(19): siRNA sense strand
ggcaucauuucccugugua

SEQ ID NO: 195945 - RNA, 19 nt, Homo sapiens
  misc_RNA (1)...(19): siRNA sense strand
uggauauccugcagauuau

SEQ ID NO: 195946 - RNA, 19 nt, Homo sapiens
  misc_RNA (1)...(19): siRNA sense strand
ggaagacaaguacagauac

SEQ ID NO: 195947 - RNA, 19 nt, Homo sapiens
  misc_RNA (1)...(19): siRNA sense strand
ugcaaagaguguccaauca

SEQ ID NO: 195948 - RNA, 19 nt, Homo sapiens
  misc_RNA (1)...(19): siRNA sense strand
guggauaugugucugaacu

SEQ ID NO: 195949 - RNA, 19 nt, Homo sapiens
  misc_RNA (1)...(19): siRNA sense strand
acuggcugcugaauguuua

SEQ ID NO: 195950 - RNA, 19 nt, Homo sapiens
  misc_RNA (1)...(19): siRNA sense strand
acuaucccaugguggaaua

SEQ ID NO: 195951 - RNA, 19 nt, Homo sapiens
  misc_RNA (1)...(19): siRNA sense strand
ccggagcugcuuccaauuu

SEQ ID NO: 195952 - RNA, 19 nt, Homo sapiens
  misc_RNA (1)...(19): siRNA sense strand
ccaaauuccaagacaguug

SEQ ID NO: 195953 - RNA, 19 nt, Homo sapiens
  misc_RNA (1)...(19): siRNA sense strand
cagaaacugccaagcauca

SEQ ID NO: 195954 - RNA, 19 nt, Homo sapiens
  misc_RNA (1)...(19): siRNA sense strand
uaugacaucugccaaagcu

SEQ ID NO: 195955 - RNA, 19 nt, Homo sapiens
  misc_RNA (1)...(19): siRNA sense strand
aaugucagauucucagcuu

SEQ ID NO: 195956 - RNA, 19 nt, Homo sapiens
  misc_RNA (1)...(19): siRNA sense strand
ucgagacuuugccaaggua

SEQ ID NO: 195957 - RNA, 19 nt, Homo sapiens
  misc_RNA (1)...(19): siRNA sense strand
gcaaaaggccauaaaaugc

SEQ ID NO: 195958 - RNA, 19 nt, Homo sapiens
  misc_RNA (1)...(19): siRNA sense strand
cugcaugauucuauccaaa

SEQ ID NO: 195959 - RNA, 19 nt, Homo sapiens
  misc_RNA (1)...(19): siRNA sense strand
uaaagcacauuuggaagac

SEQ ID NO: 195960 - RNA, 19 nt, Homo sapiens
  misc_RNA (1)...(19): siRNA sense strand
acaggagucuaaagcacuu

SEQ ID NO: 195961 - RNA, 19 nt, Homo sapiens
  misc_RNA (1)...(19): siRNA sense strand
acagauaccuuuucaagca

SEQ ID NO: 195962 - RNA, 19 nt, Homo sapiens
  misc_RNA (1)...(19): siRNA sense strand
aagcacauuuggaagacaa

SEQ ID NO: 195963 - RNA, 19 nt, Homo sapiens
  misc_RNA (1)...(19): siRNA sense strand
gcuaauaauaagccagaga

SEQ ID NO: 195964 - RNA, 19 nt, Homo sapiens
  misc_RNA (1)...(19): siRNA sense strand
caagagcacaacaauuugg

SEQ ID NO: 195965 - RNA, 19 nt, Homo sapiens
  misc_RNA (1)...(19): siRNA sense strand
ccugucagcugcaugugau

SEQ ID NO: 195966 - RNA, 19 nt, Homo sapiens
  misc_RNA (1)...(19): siRNA sense strand
gcugcugaauguuuaugau

SEQ ID NO: 195967 - RNA, 19 nt, Homo sapiens
  misc_RNA (1)...(19): siRNA sense strand
acagagcucuaccagucuu

SEQ ID NO: 195968 - RNA, 19 nt, Homo sapiens
  misc_RNA (1)...(19): siRNA sense strand
acaguugggugaaguugca

SEQ ID NO: 195969 - RNA, 19 nt, Homo sapiens
  misc_RNA (1)...(19): siRNA sense strand
guuugaccacuauuuauga

SEQ ID NO: 195970 - RNA, 19 nt, Homo sapiens
  misc_RNA (1)...(19): siRNA sense strand
gcuuauaggacugccauga

SEQ ID NO: 195971 - RNA, 19 nt, Homo sapiens
  misc_RNA (1)...(19): siRNA sense strand
caucaggccaaauguaaca

SEQ ID NO: 195972 - RNA, 19 nt, Homo sapiens
  misc_RNA (1)...(19): siRNA sense strand
gauucuauccaaauuccaa

SEQ ID NO: 195973 - RNA, 19 nt, Homo sapiens
  misc_RNA (1)...(19): siRNA sense strand
ggcaaguucaacaggauuu

SEQ ID NO: 195974 - RNA, 19 nt, Homo sapiens
  misc_RNA (1)...(19): siRNA sense strand
gaacuggcugcugaauguu

SEQ ID NO: 195975 - RNA, 19 nt, Homo sapiens
  misc_RNA (1)...(19): siRNA sense strand
cugcugaauguuuaugaua

SEQ ID NO: 195976 - RNA, 19 nt, Homo sapiens
  misc_RNA (1)...(19): siRNA sense strand
aagcaucaggccaaaugua

SEQ ID NO: 195977 - RNA, 19 nt, Homo sapiens
  misc_RNA (1)...(19): siRNA sense strand
uggcaucauuucccugugu

SEQ ID NO: 195978 - RNA, 19 nt, Homo sapiens
  misc_RNA (1)...(19): siRNA sense strand
ccaugaaacuccgaagacu

SEQ ID NO: 195979 - RNA, 19 nt, Homo sapiens
  misc_RNA (1)...(19): siRNA sense strand
auaauaagccagagaucga

SEQ ID NO: 195980 - RNA, 19 nt, Homo sapiens
  misc_RNA (1)...(19): siRNA sense strand
cuaauaauaagccagagau

SEQ ID NO: 195981 - RNA, 19 nt, Homo sapiens
  misc_RNA (1)...(19): siRNA sense strand
ugggugaaguugcauccuu

SEQ ID NO: 195982 - RNA, 19 nt, Homo sapiens
  misc_RNA (1)...(19): siRNA sense strand
caucauuucccuguguaaa

SEQ ID NO: 195983 - RNA, 19 nt, Homo sapiens
  misc_RNA (1)...(19): siRNA sense strand
gcguggauaugugucugaa

SEQ ID NO: 195984 - RNA, 19 nt, Homo sapiens
  misc_RNA (1)...(19): siRNA sense strand
gcacuaucccaugguggaa

SEQ ID NO: 195985 - RNA, 19 nt, Homo sapiens
  misc_RNA (1)...(19): siRNA sense strand
gagccugucagcugcaugu

SEQ ID NO: 195986 - RNA, 19 nt, Homo sapiens
  misc_RNA (1)...(19): siRNA sense strand
guacagauaccuuuucaag

SEQ ID NO: 195987 - RNA, 19 nt, Homo sapiens
  misc_RNA (1)...(19): siRNA sense strand
gucccucucugcguggaua

SEQ ID NO: 195988 - RNA, 19 nt, Homo sapiens
  misc_RNA (1)...(19): siRNA sense strand
ggagcugcuuccaauuugc

SEQ ID NO: 195989 - RNA, 19 nt, Homo sapiens
  misc_RNA (1)...(19): siRNA sense strand
uuagcugaccugaauaaug

SEQ ID NO: 195990 - RNA, 19 nt, Homo sapiens
  misc_RNA (1)...(19): siRNA sense strand
guggcaaguucaacaggau

SEQ ID NO: 195991 - RNA, 19 nt, Homo sapiens
  misc_RNA (1)...(19): siRNA sense strand
acaacaauuuggucaacgu

SEQ ID NO: 195992 - RNA, 19 nt, Homo sapiens
  misc_RNA (1)...(19): siRNA sense strand
gacuacaucaggagaagau

SEQ ID NO: 195993 - RNA, 19 nt, Homo sapiens
  misc_RNA (1)...(19): siRNA sense strand
uaauaagccagagaucgaa

SEQ ID NO: 195994 - RNA, 19 nt, Homo sapiens
  misc_RNA (1)...(19): siRNA sense strand
ugucagauucucagcuuau

SEQ ID NO: 195995 - RNA, 19 nt, Homo sapiens
  misc_RNA (1)...(19): siRNA sense strand
ggauauccugcagauuauu

SEQ ID NO: 195996 - RNA, 19 nt, Homo sapiens
  misc_RNA (1)...(19): siRNA sense strand
agcaucaggccaaauguaa

SEQ ID NO: 195997 - RNA, 19 nt, Homo sapiens
  misc_RNA (1)...(19): siRNA sense strand
gcccuuugcuuggaucucu

SEQ ID NO: 195998 - RNA, 19 nt, Homo sapiens
  misc_RNA (1)...(19): siRNA sense strand
gcugaauguuuaugauacg

SEQ ID NO: 195999 - RNA, 19 nt, Homo sapiens
  misc_RNA (1)...(19): siRNA sense strand
agacuuugccaagguacua

SEQ ID NO: 196000 - RNA, 19 nt, Homo sapiens
  misc_RNA (1)...(19): siRNA sense strand
caagcaaguggcaaguuca

SEQ ID NO: 196001 - RNA, 19 nt, Homo sapiens
  misc_RNA (1)...(19): siRNA sense strand
agacaaguacagauaccuu

SEQ ID NO: 196002 - RNA, 19 nt, Homo sapiens
  misc_RNA (1)...(19): siRNA sense strand
gcaucauuucccuguguaa

SEQ ID NO: 196003 - RNA, 19 nt, Homo sapiens
  misc_RNA (1)...(19): siRNA sense strand
cugcaaagaguguccaauc

SEQ ID NO: 196004 - RNA, 19 nt, Homo sapiens
  misc_RNA (1)...(19): siRNA sense strand
cuuauaggacugccaugaa

SEQ ID NO: 196005 - RNA, 19 nt, Homo sapiens
  misc_RNA (1)...(19): siRNA sense strand
caaagaguguccaaucauu

SEQ ID NO: 196006 - RNA, 19 nt, Homo sapiens
  misc_RNA (1)...(19): siRNA sense strand
uagcugaccugaauaaugu

SEQ ID NO: 196007 - RNA, 19 nt, Homo sapiens
  misc_RNA (1)...(19): siRNA sense strand
gcaugauucuauccaaauu

SEQ ID NO: 196008 - RNA, 19 nt, Homo sapiens
  misc_RNA (1)...(19): siRNA sense strand
ugaacuggcugcugaaugu

SEQ ID NO: 196009 - RNA, 19 nt, Homo sapiens
  misc_RNA (1)...(19): siRNA sense strand
gauauccugcagauuauua

SEQ ID NO: 196010 - RNA, 19 nt, Homo sapiens
  misc_RNA (1)...(19): siRNA sense strand
gagaagauguucgagacuu

SEQ ID NO: 196011 - RNA, 19 nt, Homo sapiens
  misc_RNA (1)...(19): siRNA sense strand
gcacuuuaauuaugacauc

SEQ ID NO: 196012 - RNA, 19 nt, Homo sapiens
  misc_RNA (1)...(19): siRNA sense strand
guaaagcacauuuggaaga

SEQ ID NO: 196013 - RNA, 19 nt, Homo sapiens
  misc_RNA (1)...(19): siRNA sense strand
gaauauugcacuccgacua

SEQ ID NO: 196014 - RNA, 19 nt, Homo sapiens
  misc_RNA (1)...(19): siRNA sense strand
uuauaggacugccaugaaa

SEQ ID NO: 196015 - RNA, 19 nt, Homo sapiens
  misc_RNA (1)...(19): siRNA sense strand
gggugaaguugcauccuuu

SEQ ID NO: 196016 - RNA, 19 nt, Homo sapiens
  misc_RNA (1)...(19): siRNA sense strand
gcaagagcacaacaauuug

SEQ ID NO: 196017 - RNA, 19 nt, Homo sapiens
  misc_RNA (1)...(19): siRNA sense strand
gcacaacaauuuggucaac

SEQ ID NO: 196018 - RNA, 19 nt, Homo sapiens
  misc_RNA (1)...(19): siRNA sense strand
agcaagagcacaacaauuu

SEQ ID NO: 196019 - RNA, 19 nt, Homo sapiens
  misc_RNA (1)...(19): siRNA sense strand
agaagauguucgagacuuu

SEQ ID NO: 196020 - RNA, 19 nt, Homo sapiens
  misc_RNA (1)...(19): siRNA sense strand
gagcaagagcacaacaauu

SEQ ID NO: 196021 - RNA, 19 nt, Homo sapiens
  misc_RNA (1)...(19): siRNA sense strand
ucaagcaaguggcaaguuc

SEQ ID NO: 196022 - RNA, 19 nt, Homo sapiens
  misc_RNA (1)...(19): siRNA sense strand
ccacgagacucaaacaacu

SEQ ID NO: 196023 - RNA, 19 nt, Homo sapiens
  misc_RNA (1)...(19): siRNA sense strand
cagcacaaccucaagcaaa

SEQ ID NO: 196024 - RNA, 19 nt, Homo sapiens
  misc_RNA (1)...(19): siRNA sense strand
gcaaagaguguccaaucau

SEQ ID NO: 196025 - RNA, 19 nt, Homo sapiens
  misc_RNA (1)...(19): siRNA sense strand
auggauauccugcagauua

SEQ ID NO: 196026 - RNA, 19 nt, Homo sapiens
  misc_RNA (1)...(19): siRNA sense strand
uguaacaucugcaaagagu

SEQ ID NO: 196027 - RNA, 19 nt, Homo sapiens
  misc_RNA (1)...(19): siRNA sense strand
guccggagcugcuuccaau

SEQ ID NO: 196028 - RNA, 19 nt, Homo sapiens
  misc_RNA (1)...(19): siRNA sense strand
gcaaguggcaaguucaaca

SEQ ID NO: 196029 - RNA, 19 nt, Homo sapiens
  misc_RNA (1)...(19): siRNA sense strand
gcuuccaauuugcuaauaa

SEQ ID NO: 196030 - RNA, 19 nt, Homo sapiens
  misc_RNA (1)...(19): siRNA sense strand
uggaagacaaguacagaua

SEQ ID NO: 196031 - RNA, 19 nt, Homo sapiens
  misc_RNA (1)...(19): siRNA sense strand
ggauccguguccugucuuu

SEQ ID NO: 196032 - RNA, 19 nt, Homo sapiens
  misc_RNA (1)...(19): siRNA sense strand
gucuuuagcugaccugaau

SEQ ID NO: 196033 - RNA, 19 nt, Homo sapiens
  misc_RNA (1)...(19): siRNA sense strand
gacaaguacagauaccuuu

SEQ ID NO: 196034 - RNA, 19 nt, Homo sapiens
  misc_RNA (1)...(19): siRNA sense strand
ccaagcaucaggccaaaug

SEQ ID NO: 196035 - RNA, 19 nt, Homo sapiens
  misc_RNA (1)...(19): siRNA sense strand
ggagcaagagcacaacaau

SEQ ID NO: 196036 - RNA, 19 nt, Homo sapiens
  misc_RNA (1)...(19): siRNA sense strand
guguaaagcacauuuggaa

SEQ ID NO: 196037 - RNA, 19 nt, Homo sapiens
  misc_RNA (1)...(19): siRNA sense strand
caagacaguugggugaagu

SEQ ID NO: 196038 - RNA, 19 nt, Homo sapiens
  misc_RNA (1)...(19): siRNA sense strand
gaagauguucgagacuuug

SEQ ID NO: 196039 - RNA, 19 nt, Homo sapiens
  misc_RNA (1)...(19): siRNA sense strand
gucagauucucagcuuaua

SEQ ID NO: 196040 - RNA, 19 nt, Homo sapiens
  misc_RNA (1)...(19): siRNA sense strand
uaacaucugcaaagagugu

SEQ ID NO: 196041 - RNA, 19 nt, Homo sapiens
  misc_RNA (1)...(19): siRNA sense strand
cggagcugcuuccaauuug

SEQ ID NO: 196042 - RNA, 19 nt, Homo sapiens
  misc_RNA (1)...(19): siRNA sense strand
gaagacaaguacagauacc

SEQ ID NO: 196043 - RNA, 19 nt, Homo sapiens
  misc_RNA (1)...(19): siRNA sense strand
ccauggauauccugcagau

SEQ ID NO: 196044 - RNA, 19 nt, Homo sapiens
  misc_RNA (1)...(19): siRNA sense strand
ggcaucauuucccugugua

SEQ ID NO: 196045 - RNA, 19 nt, Homo sapiens
  misc_RNA (1)...(19): siRNA sense strand
uggauauccugcagauuau

SEQ ID NO: 196046 - RNA, 19 nt, Homo sapiens
  misc_RNA (1)...(19): siRNA sense strand
ggaagacaaguacagauac

SEQ ID NO: 196047 - RNA, 19 nt, Homo sapiens
  misc_RNA (1)...(19): siRNA sense strand
ugcaaagaguguccaauca

SEQ ID NO: 196048 - RNA, 19 nt, Homo sapiens
  misc_RNA (1)...(19): siRNA sense strand
guggauaugugucugaacu

SEQ ID NO: 196049 - RNA, 19 nt, Homo sapiens
  misc_RNA (1)...(19): siRNA sense strand
acuggcugcugaauguuua

SEQ ID NO: 196050 - RNA, 19 nt, Homo sapiens
  misc_RNA (1)...(19): siRNA sense strand
acuaucccaugguggaaua

SEQ ID NO: 196051 - RNA, 19 nt, Homo sapiens
  misc_RNA (1)...(19): siRNA sense strand
ccggagcugcuuccaauuu

SEQ ID NO: 196052 - RNA, 19 nt, Homo sapiens
  misc_RNA (1)...(19): siRNA sense strand
ccaaauuccaagacaguug

SEQ ID NO: 196053 - RNA, 19 nt, Homo sapiens
  misc_RNA (1)...(19): siRNA sense strand
cagaaacugccaagcauca

SEQ ID NO: 196054 - RNA, 19 nt, Homo sapiens
  misc_RNA (1)...(19): siRNA sense strand
uaugacaucugccaaagcu

SEQ ID NO: 196055 - RNA, 19 nt, Homo sapiens
  misc_RNA (1)...(19): siRNA sense strand
aaugucagauucucagcuu

SEQ ID NO: 196056 - RNA, 19 nt, Homo sapiens
  misc_RNA (1)...(19): siRNA sense strand
ucgagacuuugccaaggua

SEQ ID NO: 196057 - RNA, 19 nt, Homo sapiens
  misc_RNA (1)...(19): siRNA sense strand
gcaaaaggccauaaaaugc

SEQ ID NO: 196058 - RNA, 19 nt, Homo sapiens
  misc_RNA (1)...(19): siRNA sense strand
cugcaugauucuauccaaa

SEQ ID NO: 196059 - RNA, 19 nt, Homo sapiens
  misc_RNA (1)...(19): siRNA sense strand
uaaagcacauuuggaagac

SEQ ID NO: 196060 - RNA, 19 nt, Homo sapiens
  misc_RNA (1)...(19): siRNA sense strand
acaggagucuaaagcacuu

SEQ ID NO: 196061 - RNA, 19 nt, Homo sapiens
  misc_RNA (1)...(19): siRNA sense strand
acagauaccuuuucaagca

SEQ ID NO: 196062 - RNA, 19 nt, Homo sapiens
  misc_RNA (1)...(19): siRNA sense strand
aagcacauuuggaagacaa

SEQ ID NO: 196063 - RNA, 19 nt, Homo sapiens
  misc_RNA (1)...(19): siRNA sense strand
gcuaauaauaagccagaga

SEQ ID NO: 196064 - RNA, 19 nt, Homo sapiens
  misc_RNA (1)...(19): siRNA sense strand
caagagcacaacaauuugg

SEQ ID NO: 196065 - RNA, 19 nt, Homo sapiens
  misc_RNA (1)...(19): siRNA sense strand
ccugucagcugcaugugau

SEQ ID NO: 196066 - RNA, 19 nt, Homo sapiens
  misc_RNA (1)...(19): siRNA sense strand
gcugcugaauguuuaugau

SEQ ID NO: 196067 - RNA, 19 nt, Homo sapiens
  misc_RNA (1)...(19): siRNA sense strand
acagagcucuaccagucuu

SEQ ID NO: 196068 - RNA, 19 nt, Homo sapiens
  misc_RNA (1)...(19): siRNA sense strand
acaguugggugaaguugca

SEQ ID NO: 196069 - RNA, 19 nt, Homo sapiens
  misc_RNA (1)...(19): siRNA sense strand
guuugaccacuauuuauga

SEQ ID NO: 196070 - RNA, 19 nt, Homo sapiens
  misc_RNA (1)...(19): siRNA sense strand
gcuuauaggacugccauga

SEQ ID NO: 196071 - RNA, 19 nt, Homo sapiens
  misc_RNA (1)...(19): siRNA sense strand
caucaggccaaauguaaca

SEQ ID NO: 196072 - RNA, 19 nt, Homo sapiens
  misc_RNA (1)...(19): siRNA sense strand
gauucuauccaaauuccaa

SEQ ID NO: 196073 - RNA, 19 nt, Homo sapiens
  misc_RNA (1)...(19): siRNA sense strand
ggcaaguucaacaggauuu

SEQ ID NO: 196074 - RNA, 19 nt, Homo sapiens
  misc_RNA (1)...(19): siRNA sense strand
gaacuggcugcugaauguu

SEQ ID NO: 196075 - RNA, 19 nt, Homo sapiens
  misc_RNA (1)...(19): siRNA sense strand
cugcugaauguuuaugaua

SEQ ID NO: 196076 - RNA, 19 nt, Homo sapiens
  misc_RNA (1)...(19): siRNA sense strand
aagcaucaggccaaaugua

SEQ ID NO: 196077 - RNA, 19 nt, Homo sapiens
  misc_RNA (1)...(19): siRNA sense strand
uggcaucauuucccugugu

SEQ ID NO: 196078 - RNA, 19 nt, Homo sapiens
  misc_RNA (1)...(19): siRNA sense strand
ccaugaaacuccgaagacu

SEQ ID NO: 196079 - RNA, 19 nt, Homo sapiens
  misc_RNA (1)...(19): siRNA sense strand
auaauaagccagagaucga

SEQ ID NO: 196080 - RNA, 19 nt, Homo sapiens
  misc_RNA (1)...(19): siRNA sense strand
cuaauaauaagccagagau

SEQ ID NO: 196081 - RNA, 19 nt, Homo sapiens
  misc_RNA (1)...(19): siRNA sense strand
ugggugaaguugcauccuu

SEQ ID NO: 196082 - RNA, 19 nt, Homo sapiens
  misc_RNA (1)...(19): siRNA sense strand
caucauuucccuguguaaa

SEQ ID NO: 196083 - RNA, 19 nt, Homo sapiens
  misc_RNA (1)...(19): siRNA sense strand
gcguggauaugugucugaa

SEQ ID NO: 196084 - RNA, 19 nt, Homo sapiens
  misc_RNA (1)...(19): siRNA sense strand
gcacuaucccaugguggaa

SEQ ID NO: 196085 - RNA, 19 nt, Homo sapiens
  misc_RNA (1)...(19): siRNA sense strand
gagccugucagcugcaugu

SEQ ID NO: 196086 - RNA, 19 nt, Homo sapiens
  misc_RNA (1)...(19): siRNA sense strand
guacagauaccuuuucaag

SEQ ID NO: 196087 - RNA, 19 nt, Homo sapiens
  misc_RNA (1)...(19): siRNA sense strand
gucccucucugcguggaua

SEQ ID NO: 196088 - RNA, 19 nt, Homo sapiens
  misc_RNA (1)...(19): siRNA sense strand
ggagcugcuuccaauuugc

SEQ ID NO: 196089 - RNA, 19 nt, Homo sapiens
  misc_RNA (1)...(19): siRNA sense strand
uuagcugaccugaauaaug

SEQ ID NO: 196090 - RNA, 19 nt, Homo sapiens
  misc_RNA (1)...(19): siRNA sense strand
guggcaaguucaacaggau

SEQ ID NO: 196091 - RNA, 19 nt, Homo sapiens
  misc_RNA (1)...(19): siRNA sense strand
acaacaauuuggucaacgu

SEQ ID NO: 196092 - RNA, 19 nt, Homo sapiens
  misc_RNA (1)...(19): siRNA sense strand
gacuacaucaggagaagau

SEQ ID NO: 196093 - RNA, 19 nt, Homo sapiens
  misc_RNA (1)...(19): siRNA sense strand
uaauaagccagagaucgaa

SEQ ID NO: 196094 - RNA, 19 nt, Homo sapiens
  misc_RNA (1)...(19): siRNA sense strand
ugucagauucucagcuuau

SEQ ID NO: 196095 - RNA, 19 nt, Homo sapiens
  misc_RNA (1)...(19): siRNA sense strand
ggauauccugcagauuauu

SEQ ID NO: 196096 - RNA, 19 nt, Homo sapiens
  misc_RNA (1)...(19): siRNA sense strand
agcaucaggccaaauguaa

SEQ ID NO: 196097 - RNA, 19 nt, Homo sapiens
  misc_RNA (1)...(19): siRNA sense strand
gcccuuugcuuggaucucu

SEQ ID NO: 196098 - RNA, 19 nt, Homo sapiens
  misc_RNA (1)...(19): siRNA sense strand
gcugaauguuuaugauacg

SEQ ID NO: 196099 - RNA, 19 nt, Homo sapiens
  misc_RNA (1)...(19): siRNA sense strand
agacuuugccaagguacua

SEQ ID NO: 196100 - RNA, 19 nt, Homo sapiens
  misc_RNA (1)...(19): siRNA sense strand
caagcaaguggcaaguuca

SEQ ID NO: 196101 - RNA, 19 nt, Homo sapiens
  misc_RNA (1)...(19): siRNA sense strand
agacaaguacagauaccuu

SEQ ID NO: 196102 - RNA, 19 nt, Homo sapiens
  misc_RNA (1)...(19): siRNA sense strand
gcaucauuucccuguguaa

SEQ ID NO: 196103 - RNA, 19 nt, Homo sapiens
  misc_RNA (1)...(19): siRNA sense strand
cugcaaagaguguccaauc

SEQ ID NO: 196104 - RNA, 19 nt, Homo sapiens
  misc_RNA (1)...(19): siRNA sense strand
cuuauaggacugccaugaa

SEQ ID NO: 196105 - RNA, 19 nt, Homo sapiens
  misc_RNA (1)...(19): siRNA sense strand
caaagaguguccaaucauu

SEQ ID NO: 196106 - RNA, 19 nt, Homo sapiens
  misc_RNA (1)...(19): siRNA sense strand
uagcugaccugaauaaugu

SEQ ID NO: 196107 - RNA, 19 nt, Homo sapiens
  misc_RNA (1)...(19): siRNA sense strand
gcaugauucuauccaaauu

SEQ ID NO: 196108 - RNA, 19 nt, Homo sapiens
  misc_RNA (1)...(19): siRNA sense strand
ugaacuggcugcugaaugu

SEQ ID NO: 196109 - RNA, 19 nt, Homo sapiens
  misc_RNA (1)...(19): siRNA sense strand
gauauccugcagauuauua

SEQ ID NO: 196110 - RNA, 19 nt, Homo sapiens
  misc_RNA (1)...(19): siRNA sense strand
gagaagauguucgagacuu

SEQ ID NO: 196111 - RNA, 19 nt, Homo sapiens
  misc_RNA (1)...(19): siRNA sense strand
gcacuuuaauuaugacauc

SEQ ID NO: 196112 - RNA, 19 nt, Homo sapiens
  misc_RNA (1)...(19): siRNA sense strand
guaaagcacauuuggaaga

SEQ ID NO: 196113 - RNA, 19 nt, Homo sapiens
  misc_RNA (1)...(19): siRNA sense strand
gaauauugcacuccgacua

SEQ ID NO: 196114 - RNA, 19 nt, Homo sapiens
  misc_RNA (1)...(19): siRNA sense strand
uuauaggacugccaugaaa

SEQ ID NO: 196115 - RNA, 19 nt, Homo sapiens
  misc_RNA (1)...(19): siRNA sense strand
gggugaaguugcauccuuu

SEQ ID NO: 196116 - RNA, 19 nt, Homo sapiens
  misc_RNA (1)...(19): siRNA sense strand
gcaagagcacaacaauuug

SEQ ID NO: 196117 - RNA, 19 nt, Homo sapiens
  misc_RNA (1)...(19): siRNA sense strand
gcacaacaauuuggucaac

SEQ ID NO: 196118 - RNA, 19 nt, Homo sapiens
  misc_RNA (1)...(19): siRNA sense strand
agcaagagcacaacaauuu

SEQ ID NO: 196119 - RNA, 19 nt, Homo sapiens
  misc_RNA (1)...(19): siRNA sense strand
agaagauguucgagacuuu

SEQ ID NO: 196120 - RNA, 19 nt, Homo sapiens
  misc_RNA (1)...(19): siRNA sense strand
gagcaagagcacaacaauu

SEQ ID NO: 196121 - RNA, 19 nt, Homo sapiens
  misc_RNA (1)...(19): siRNA sense strand
ucaagcaaguggcaaguuc

SEQ ID NO: 196122 - RNA, 19 nt, Homo sapiens
  misc_RNA (1)...(19): siRNA sense strand
ccacgagacucaaacaacu

SEQ ID NO: 196123 - RNA, 19 nt, Homo sapiens
  misc_RNA (1)...(19): siRNA sense strand
cagcacaaccucaagcaaa

SEQ ID NO: 196124 - RNA, 19 nt, Homo sapiens
  misc_RNA (1)...(19): siRNA sense strand
gcaaagaguguccaaucau

SEQ ID NO: 196125 - RNA, 19 nt, Homo sapiens
  misc_RNA (1)...(19): siRNA sense strand
auggauauccugcagauua

SEQ ID NO: 196126 - RNA, 19 nt, Homo sapiens
  misc_RNA (1)...(19): siRNA sense strand
uguaacaucugcaaagagu

SEQ ID NO: 196127 - RNA, 19 nt, Homo sapiens
  misc_RNA (1)...(19): siRNA sense strand
guccggagcugcuuccaau

SEQ ID NO: 196128 - RNA, 19 nt, Homo sapiens
  misc_RNA (1)...(19): siRNA sense strand
gcaaguggcaaguucaaca

SEQ ID NO: 196129 - RNA, 19 nt, Homo sapiens
  misc_RNA (1)...(19): siRNA sense strand
gcuuccaauuugcuaauaa

SEQ ID NO: 196130 - RNA, 19 nt, Homo sapiens
  misc_RNA (1)...(19): siRNA sense strand
uggaagacaaguacagaua

SEQ ID NO: 196131 - RNA, 19 nt, Homo sapiens
  misc_RNA (1)...(19): siRNA sense strand
ggauccguguccugucuuu

SEQ ID NO: 196132 - RNA, 19 nt, Homo sapiens
  misc_RNA (1)...(19): siRNA sense strand
gucuuuagcugaccugaau

SEQ ID NO: 196133 - RNA, 19 nt, Homo sapiens
  misc_RNA (1)...(19): siRNA sense strand
gacaaguacagauaccuuu

SEQ ID NO: 196134 - RNA, 19 nt, Homo sapiens
  misc_RNA (1)...(19): siRNA sense strand
ccaagcaucaggccaaaug

SEQ ID NO: 196135 - RNA, 19 nt, Homo sapiens
  misc_RNA (1)...(19): siRNA sense strand
ggagcaagagcacaacaau

SEQ ID NO: 196136 - RNA, 19 nt, Homo sapiens
  misc_RNA (1)...(19): siRNA sense strand
guguaaagcacauuuggaa

SEQ ID NO: 196137 - RNA, 19 nt, Homo sapiens
  misc_RNA (1)...(19): siRNA sense strand
caagacaguugggugaagu

SEQ ID NO: 196138 - RNA, 19 nt, Homo sapiens
  misc_RNA (1)...(19): siRNA sense strand
gaagauguucgagacuuug

SEQ ID NO: 196139 - RNA, 19 nt, Homo sapiens
  misc_RNA (1)...(19): siRNA sense strand
gucagauucucagcuuaua

SEQ ID NO: 196140 - RNA, 19 nt, Homo sapiens
  misc_RNA (1)...(19): siRNA sense strand
uaacaucugcaaagagugu

SEQ ID NO: 196141 - RNA, 19 nt, Homo sapiens
  misc_RNA (1)...(19): siRNA sense strand
cggagcugcuuccaauuug

SEQ ID NO: 196142 - RNA, 19 nt, Homo sapiens
  misc_RNA (1)...(19): siRNA sense strand
gaagacaaguacagauacc

SEQ ID NO: 196143 - RNA, 19 nt, Homo sapiens
  misc_RNA (1)...(19): siRNA sense strand
ccauggauauccugcagau

SEQ ID NO: 196144 - RNA, 19 nt, Homo sapiens
  misc_RNA (1)...(19): siRNA sense strand
ggcaucauuucccugugua

SEQ ID NO: 196145 - RNA, 19 nt, Homo sapiens
  misc_RNA (1)...(19): siRNA sense strand
uggauauccugcagauuau

SEQ ID NO: 196146 - RNA, 19 nt, Homo sapiens
  misc_RNA (1)...(19): siRNA sense strand
ggaagacaaguacagauac

SEQ ID NO: 196147 - RNA, 19 nt, Homo sapiens
  misc_RNA (1)...(19): siRNA sense strand
ugcaaagaguguccaauca

SEQ ID NO: 196148 - RNA, 19 nt, Homo sapiens
  misc_RNA (1)...(19): siRNA sense strand
guggauaugugucugaacu

SEQ ID NO: 196149 - RNA, 19 nt, Homo sapiens
  misc_RNA (1)...(19): siRNA sense strand
acuggcugcugaauguuua

SEQ ID NO: 196150 - RNA, 19 nt, Homo sapiens
  misc_RNA (1)...(19): siRNA sense strand
acuaucccaugguggaaua

SEQ ID NO: 196151 - RNA, 19 nt, Homo sapiens
  misc_RNA (1)...(19): siRNA sense strand
ccggagcugcuuccaauuu

SEQ ID NO: 196152 - RNA, 19 nt, Homo sapiens
  misc_RNA (1)...(19): siRNA sense strand
ccaaauuccaagacaguug

SEQ ID NO: 196153 - RNA, 19 nt, Homo sapiens
  misc_RNA (1)...(19): siRNA sense strand
cagaaacugccaagcauca

SEQ ID NO: 196154 - RNA, 19 nt, Homo sapiens
  misc_RNA (1)...(19): siRNA sense strand
uaugacaucugccaaagcu

SEQ ID NO: 196155 - RNA, 19 nt, Homo sapiens
  misc_RNA (1)...(19): siRNA sense strand
aaugucagauucucagcuu

SEQ ID NO: 196156 - RNA, 19 nt, Homo sapiens
  misc_RNA (1)...(19): siRNA sense strand
ucgagacuuugccaaggua

SEQ ID NO: 196157 - RNA, 19 nt, Homo sapiens
  misc_RNA (1)...(19): siRNA sense strand
gcaaaaggccauaaaaugc

SEQ ID NO: 196158 - RNA, 19 nt, Homo sapiens
  misc_RNA (1)...(19): siRNA sense strand
cugcaugauucuauccaaa

SEQ ID NO: 196159 - RNA, 19 nt, Homo sapiens
  misc_RNA (1)...(19): siRNA sense strand
uaaagcacauuuggaagac

SEQ ID NO: 196160 - RNA, 19 nt, Homo sapiens
  misc_RNA (1)...(19): siRNA sense strand
acaggagucuaaagcacuu

SEQ ID NO: 196161 - RNA, 19 nt, Homo sapiens
  misc_RNA (1)...(19): siRNA sense strand
acagauaccuuuucaagca

SEQ ID NO: 196162 - RNA, 19 nt, Homo sapiens
  misc_RNA (1)...(19): siRNA sense strand
aagcacauuuggaagacaa

SEQ ID NO: 196163 - RNA, 19 nt, Homo sapiens
  misc_RNA (1)...(19): siRNA sense strand
gcuaauaauaagccagaga

SEQ ID NO: 196164 - RNA, 19 nt, Homo sapiens
  misc_RNA (1)...(19): siRNA sense strand
caagagcacaacaauuugg

SEQ ID NO: 196165 - RNA, 19 nt, Homo sapiens
  misc_RNA (1)...(19): siRNA sense strand
ccugucagcugcaugugau

SEQ ID NO: 196166 - RNA, 19 nt, Homo sapiens
  misc_RNA (1)...(19): siRNA sense strand
gcugcugaauguuuaugau

SEQ ID NO: 196167 - RNA, 19 nt, Homo sapiens
  misc_RNA (1)...(19): siRNA sense strand
acagagcucuaccagucuu

SEQ ID NO: 196168 - RNA, 19 nt, Homo sapiens
  misc_RNA (1)...(19): siRNA sense strand
acaguugggugaaguugca

SEQ ID NO: 196169 - RNA, 19 nt, Homo sapiens
  misc_RNA (1)...(19): siRNA sense strand
guuugaccacuauuuauga

SEQ ID NO: 196170 - RNA, 19 nt, Homo sapiens
  misc_RNA (1)...(19): siRNA sense strand
gcuuauaggacugccauga

SEQ ID NO: 196171 - RNA, 19 nt, Homo sapiens
  misc_RNA (1)...(19): siRNA sense strand
caucaggccaaauguaaca

SEQ ID NO: 196172 - RNA, 19 nt, Homo sapiens
  misc_RNA (1)...(19): siRNA sense strand
gauucuauccaaauuccaa

SEQ ID NO: 196173 - RNA, 19 nt, Homo sapiens
  misc_RNA (1)...(19): siRNA sense strand
ggcaaguucaacaggauuu

SEQ ID NO: 196174 - RNA, 19 nt, Homo sapiens
  misc_RNA (1)...(19): siRNA sense strand
gaacuggcugcugaauguu

SEQ ID NO: 196175 - RNA, 19 nt, Homo sapiens
  misc_RNA (1)...(19): siRNA sense strand
cugcugaauguuuaugaua

SEQ ID NO: 196176 - RNA, 19 nt, Homo sapiens
  misc_RNA (1)...(19): siRNA sense strand
aagcaucaggccaaaugua

SEQ ID NO: 196177 - RNA, 19 nt, Homo sapiens
  misc_RNA (1)...(19): siRNA sense strand
uggcaucauuucccugugu

SEQ ID NO: 196178 - RNA, 19 nt, Homo sapiens
  misc_RNA (1)...(19): siRNA sense strand
ccaugaaacuccgaagacu

SEQ ID NO: 196179 - RNA, 19 nt, Homo sapiens
  misc_RNA (1)...(19): siRNA sense strand
auaauaagccagagaucga

SEQ ID NO: 196180 - RNA, 19 nt, Homo sapiens
  misc_RNA (1)...(19): siRNA sense strand
cuaauaauaagccagagau

SEQ ID NO: 196181 - RNA, 19 nt, Homo sapiens
  misc_RNA (1)...(19): siRNA sense strand
ugggugaaguugcauccuu

SEQ ID NO: 196182 - RNA, 19 nt, Homo sapiens
  misc_RNA (1)...(19): siRNA sense strand
caucauuucccuguguaaa

SEQ ID NO: 196183 - RNA, 19 nt, Homo sapiens
  misc_RNA (1)...(19): siRNA sense strand
gcguggauaugugucugaa

SEQ ID NO: 196184 - RNA, 19 nt, Homo sapiens
  misc_RNA (1)...(19): siRNA sense strand
gcacuaucccaugguggaa

SEQ ID NO: 196185 - RNA, 19 nt, Homo sapiens
  misc_RNA (1)...(19): siRNA sense strand
gagccugucagcugcaugu

SEQ ID NO: 196186 - RNA, 19 nt, Homo sapiens
  misc_RNA (1)...(19): siRNA sense strand
guacagauaccuuuucaag

SEQ ID NO: 196187 - RNA, 19 nt, Homo sapiens
  misc_RNA (1)...(19): siRNA sense strand
gucccucucugcguggaua

SEQ ID NO: 196188 - RNA, 19 nt, Homo sapiens
  misc_RNA (1)...(19): siRNA sense strand
ggagcugcuuccaauuugc

SEQ ID NO: 196189 - RNA, 19 nt, Homo sapiens
  misc_RNA (1)...(19): siRNA sense strand
uuagcugaccugaauaaug

SEQ ID NO: 196190 - RNA, 19 nt, Homo sapiens
  misc_RNA (1)...(19): siRNA sense strand
guggcaaguucaacaggau

SEQ ID NO: 196191 - RNA, 19 nt, Homo sapiens
  misc_RNA (1)...(19): siRNA sense strand
acaacaauuuggucaacgu

SEQ ID NO: 196192 - RNA, 19 nt, Homo sapiens
  misc_RNA (1)...(19): siRNA sense strand
gacuacaucaggagaagau

SEQ ID NO: 196193 - RNA, 19 nt, Homo sapiens
  misc_RNA (1)...(19): siRNA sense strand
uaauaagccagagaucgaa

SEQ ID NO: 196194 - RNA, 19 nt, Homo sapiens
  misc_RNA (1)...(19): siRNA sense strand
ugucagauucucagcuuau

SEQ ID NO: 196195 - RNA, 19 nt, Homo sapiens
  misc_RNA (1)...(19): siRNA sense strand
ggauauccugcagauuauu

SEQ ID NO: 196196 - RNA, 19 nt, Homo sapiens
  misc_RNA (1)...(19): siRNA sense strand
agcaucaggccaaauguaa

SEQ ID NO: 196197 - RNA, 19 nt, Homo sapiens
  misc_RNA (1)...(19): siRNA sense strand
gcccuuugcuuggaucucu

SEQ ID NO: 196198 - RNA, 19 nt, Homo sapiens
  misc_RNA (1)...(19): siRNA sense strand
gcugaauguuuaugauacg

SEQ ID NO: 196199 - RNA, 19 nt, Homo sapiens
  misc_RNA (1)...(19): siRNA sense strand
agacuuugccaagguacua

SEQ ID NO: 196200 - RNA, 19 nt, Homo sapiens
  misc_RNA (1)...(19): siRNA sense strand
caagcaaguggcaaguuca

SEQ ID NO: 196201 - RNA, 19 nt, Homo sapiens
  misc_RNA (1)...(19): siRNA sense strand
agacaaguacagauaccuu

SEQ ID NO: 196202 - RNA, 19 nt, Homo sapiens
  misc_RNA (1)...(19): siRNA sense strand
gcaucauuucccuguguaa

SEQ ID NO: 196203 - RNA, 19 nt, Homo sapiens
  misc_RNA (1)...(19): siRNA sense strand
cugcaaagaguguccaauc

SEQ ID NO: 196204 - RNA, 19 nt, Homo sapiens
  misc_RNA (1)...(19): siRNA sense strand
cuuauaggacugccaugaa

SEQ ID NO: 196205 - RNA, 19 nt, Homo sapiens
  misc_RNA (1)...(19): siRNA sense strand
caaagaguguccaaucauu

SEQ ID NO: 196206 - RNA, 19 nt, Homo sapiens
  misc_RNA (1)...(19): siRNA sense strand
uagcugaccugaauaaugu

SEQ ID NO: 196207 - RNA, 19 nt, Homo sapiens
  misc_RNA (1)...(19): siRNA sense strand
gcaugauucuauccaaauu

SEQ ID NO: 196208 - RNA, 19 nt, Homo sapiens
  misc_RNA (1)...(19): siRNA sense strand
ugaacuggcugcugaaugu

SEQ ID NO: 196209 - RNA, 19 nt, Homo sapiens
  misc_RNA (1)...(19): siRNA sense strand
gauauccugcagauuauua

SEQ ID NO: 196210 - RNA, 19 nt, Homo sapiens
  misc_RNA (1)...(19): siRNA sense strand
gagaagauguucgagacuu

SEQ ID NO: 196211 - RNA, 19 nt, Homo sapiens
  misc_RNA (1)...(19): siRNA sense strand
gcacuuuaauuaugacauc

SEQ ID NO: 196212 - RNA, 19 nt, Homo sapiens
  misc_RNA (1)...(19): siRNA sense strand
guaaagcacauuuggaaga

SEQ ID NO: 196213 - RNA, 19 nt, Homo sapiens
  misc_RNA (1)...(19): siRNA sense strand
gaauauugcacuccgacua

SEQ ID NO: 196214 - RNA, 19 nt, Homo sapiens
  misc_RNA (1)...(19): siRNA sense strand
uuauaggacugccaugaaa

SEQ ID NO: 196215 - RNA, 19 nt, Homo sapiens
  misc_RNA (1)...(19): siRNA sense strand
gggugaaguugcauccuuu

SEQ ID NO: 196216 - RNA, 19 nt, Homo sapiens
  misc_RNA (1)...(19): siRNA sense strand
gcaagagcacaacaauuug

SEQ ID NO: 196217 - RNA, 19 nt, Homo sapiens
  misc_RNA (1)...(19): siRNA sense strand
gcacaacaauuuggucaac

SEQ ID NO: 196218 - RNA, 19 nt, Homo sapiens
  misc_RNA (1)...(19): siRNA sense strand
agcaagagcacaacaauuu

SEQ ID NO: 196219 - RNA, 19 nt, Homo sapiens
  misc_RNA (1)...(19): siRNA sense strand
agaagauguucgagacuuu

SEQ ID NO: 196220 - RNA, 19 nt, Homo sapiens
  misc_RNA (1)...(19): siRNA sense strand
gagcaagagcacaacaauu

SEQ ID NO: 196221 - RNA, 19 nt, Homo sapiens
  misc_RNA (1)...(19): siRNA sense strand
ucaagcaaguggcaaguuc

SEQ ID NO: 196222 - RNA, 19 nt, Homo sapiens
  misc_RNA (1)...(19): siRNA sense strand
ccacgagacucaaacaacu

SEQ ID NO: 196223 - RNA, 19 nt, Homo sapiens
  misc_RNA (1)...(19): siRNA sense strand
cagcacaaccucaagcaaa

SEQ ID NO: 196224 - RNA, 19 nt, Homo sapiens
  misc_RNA (1)...(19): siRNA sense strand
gcaaagaguguccaaucau

SEQ ID NO: 196225 - RNA, 19 nt, Homo sapiens
  misc_RNA (1)...(19): siRNA sense strand
auggauauccugcagauua

SEQ ID NO: 196226 - RNA, 19 nt, Homo sapiens
  misc_RNA (1)...(19): siRNA sense strand
uguaacaucugcaaagagu

SEQ ID NO: 196227 - RNA, 19 nt, Homo sapiens
  misc_RNA (1)...(19): siRNA sense strand
guccggagcugcuuccaau

SEQ ID NO: 196228 - RNA, 19 nt, Homo sapiens
  misc_RNA (1)...(19): siRNA sense strand
gcaaguggcaaguucaaca

SEQ ID NO: 196229 - RNA, 19 nt, Homo sapiens
  misc_RNA (1)...(19): siRNA sense strand
gcuuccaauuugcuaauaa

SEQ ID NO: 196230 - RNA, 19 nt, Homo sapiens
  misc_RNA (1)...(19): siRNA sense strand
uggaagacaaguacagaua

SEQ ID NO: 196231 - RNA, 19 nt, Homo sapiens
  misc_RNA (1)...(19): siRNA sense strand
ggauccguguccugucuuu

SEQ ID NO: 196232 - RNA, 19 nt, Homo sapiens
  misc_RNA (1)...(19): siRNA sense strand
gucuuuagcugaccugaau

SEQ ID NO: 196233 - RNA, 19 nt, Homo sapiens
  misc_RNA (1)...(19): siRNA sense strand
gacaaguacagauaccuuu

SEQ ID NO: 196234 - RNA, 19 nt, Homo sapiens
  misc_RNA (1)...(19): siRNA sense strand
ccaagcaucaggccaaaug

SEQ ID NO: 196235 - RNA, 19 nt, Homo sapiens
  misc_RNA (1)...(19): siRNA sense strand
ggagcaagagcacaacaau

SEQ ID NO: 196236 - RNA, 19 nt, Homo sapiens
  misc_RNA (1)...(19): siRNA sense strand
guguaaagcacauuuggaa

SEQ ID NO: 196237 - RNA, 19 nt, Homo sapiens
  misc_RNA (1)...(19): siRNA sense strand
caagacaguugggugaagu

SEQ ID NO: 196238 - RNA, 19 nt, Homo sapiens
  misc_RNA (1)...(19): siRNA sense strand
gaagauguucgagacuuug

SEQ ID NO: 196239 - RNA, 19 nt, Homo sapiens
  misc_RNA (1)...(19): siRNA sense strand
gucagauucucagcuuaua

SEQ ID NO: 196240 - RNA, 19 nt, Homo sapiens
  misc_RNA (1)...(19): siRNA sense strand
uaacaucugcaaagagugu

SEQ ID NO: 196241 - RNA, 19 nt, Homo sapiens
  misc_RNA (1)...(19): siRNA sense strand
cggagcugcuuccaauuug

SEQ ID NO: 196242 - RNA, 19 nt, Homo sapiens
  misc_RNA (1)...(19): siRNA sense strand
gaagacaaguacagauacc

SEQ ID NO: 196243 - RNA, 19 nt, Homo sapiens
  misc_RNA (1)...(19): siRNA sense strand
ccauggauauccugcagau

SEQ ID NO: 196244 - RNA, 19 nt, Homo sapiens
  misc_RNA (1)...(19): siRNA sense strand
ggcaucauuucccugugua

SEQ ID NO: 196245 - RNA, 19 nt, Homo sapiens
  misc_RNA (1)...(19): siRNA sense strand
uggauauccugcagauuau

SEQ ID NO: 196246 - RNA, 19 nt, Homo sapiens
  misc_RNA (1)...(19): siRNA sense strand
ggaagacaaguacagauac

SEQ ID NO: 196247 - RNA, 19 nt, Homo sapiens
  misc_RNA (1)...(19): siRNA sense strand
ugcaaagaguguccaauca

SEQ ID NO: 196248 - RNA, 19 nt, Homo sapiens
  misc_RNA (1)...(19): siRNA sense strand
guggauaugugucugaacu

SEQ ID NO: 196249 - RNA, 19 nt, Homo sapiens
  misc_RNA (1)...(19): siRNA sense strand
acuggcugcugaauguuua

SEQ ID NO: 196250 - RNA, 19 nt, Homo sapiens
  misc_RNA (1)...(19): siRNA sense strand
acuaucccaugguggaaua

SEQ ID NO: 196251 - RNA, 19 nt, Homo sapiens
  misc_RNA (1)...(19): siRNA sense strand
ccggagcugcuuccaauuu

SEQ ID NO: 196252 - RNA, 19 nt, Homo sapiens
  misc_RNA (1)...(19): siRNA sense strand
ccaaauuccaagacaguug

SEQ ID NO: 196253 - RNA, 19 nt, Homo sapiens
  misc_RNA (1)...(19): siRNA sense strand
cagaaacugccaagcauca

SEQ ID NO: 196254 - RNA, 19 nt, Homo sapiens
  misc_RNA (1)...(19): siRNA sense strand
uaugacaucugccaaagcu

SEQ ID NO: 196255 - RNA, 19 nt, Homo sapiens
  misc_RNA (1)...(19): siRNA sense strand
aaugucagauucucagcuu

SEQ ID NO: 196256 - RNA, 19 nt, Homo sapiens
  misc_RNA (1)...(19): siRNA sense strand
ucgagacuuugccaaggua

SEQ ID NO: 196257 - RNA, 19 nt, Homo sapiens
  misc_RNA (1)...(19): siRNA sense strand
gcaaaaggccauaaaaugc

SEQ ID NO: 196258 - RNA, 19 nt, Homo sapiens
  misc_RNA (1)...(19): siRNA sense strand
cugcaugauucuauccaaa

SEQ ID NO: 196259 - RNA, 19 nt, Homo sapiens
  misc_RNA (1)...(19): siRNA sense strand
uaaagcacauuuggaagac

SEQ ID NO: 196260 - RNA, 19 nt, Homo sapiens
  misc_RNA (1)...(19): siRNA sense strand
acaggagucuaaagcacuu

SEQ ID NO: 196261 - RNA, 19 nt, Homo sapiens
  misc_RNA (1)...(19): siRNA sense strand
acagauaccuuuucaagca

SEQ ID NO: 196262 - RNA, 19 nt, Homo sapiens
  misc_RNA (1)...(19): siRNA sense strand
aagcacauuuggaagacaa

SEQ ID NO: 196263 - RNA, 19 nt, Homo sapiens
  misc_RNA (1)...(19): siRNA sense strand
gcuaauaauaagccagaga

SEQ ID NO: 196264 - RNA, 19 nt, Homo sapiens
  misc_RNA (1)...(19): siRNA sense strand
caagagcacaacaauuugg

SEQ ID NO: 196265 - RNA, 19 nt, Homo sapiens
  misc_RNA (1)...(19): siRNA sense strand
ccugucagcugcaugugau

SEQ ID NO: 196266 - RNA, 19 nt, Homo sapiens
  misc_RNA (1)...(19): siRNA sense strand
gcugcugaauguuuaugau

SEQ ID NO: 196267 - RNA, 19 nt, Homo sapiens
  misc_RNA (1)...(19): siRNA sense strand
acagagcucuaccagucuu

SEQ ID NO: 196268 - RNA, 19 nt, Homo sapiens
  misc_RNA (1)...(19): siRNA sense strand
acaguugggugaaguugca

SEQ ID NO: 196269 - RNA, 19 nt, Homo sapiens
  misc_RNA (1)...(19): siRNA sense strand
guuugaccacuauuuauga

SEQ ID NO: 196270 - RNA, 19 nt, Homo sapiens
  misc_RNA (1)...(19): siRNA sense strand
gcuuauaggacugccauga

SEQ ID NO: 196271 - RNA, 19 nt, Homo sapiens
  misc_RNA (1)...(19): siRNA sense strand
caucaggccaaauguaaca

SEQ ID NO: 196272 - RNA, 19 nt, Homo sapiens
  misc_RNA (1)...(19): siRNA sense strand
gauucuauccaaauuccaa

SEQ ID NO: 196273 - RNA, 19 nt, Homo sapiens
  misc_RNA (1)...(19): siRNA sense strand
ggcaaguucaacaggauuu

SEQ ID NO: 196274 - RNA, 19 nt, Homo sapiens
  misc_RNA (1)...(19): siRNA sense strand
gaacuggcugcugaauguu

SEQ ID NO: 196275 - RNA, 19 nt, Homo sapiens
  misc_RNA (1)...(19): siRNA sense strand
cugcugaauguuuaugaua

SEQ ID NO: 196276 - RNA, 19 nt, Homo sapiens
  misc_RNA (1)...(19): siRNA sense strand
aagcaucaggccaaaugua

SEQ ID NO: 196277 - RNA, 19 nt, Homo sapiens
  misc_RNA (1)...(19): siRNA sense strand
uggcaucauuucccugugu

SEQ ID NO: 196278 - RNA, 19 nt, Homo sapiens
  misc_RNA (1)...(19): siRNA sense strand
ccaugaaacuccgaagacu

SEQ ID NO: 196279 - RNA, 19 nt, Homo sapiens
  misc_RNA (1)...(19): siRNA sense strand
auaauaagccagagaucga

SEQ ID NO: 196280 - RNA, 19 nt, Homo sapiens
  misc_RNA (1)...(19): siRNA sense strand
cuaauaauaagccagagau

SEQ ID NO: 196281 - RNA, 19 nt, Homo sapiens
  misc_RNA (1)...(19): siRNA sense strand
ugggugaaguugcauccuu

SEQ ID NO: 196282 - RNA, 19 nt, Homo sapiens
  misc_RNA (1)...(19): siRNA sense strand
caucauuucccuguguaaa

SEQ ID NO: 196283 - RNA, 19 nt, Homo sapiens
  misc_RNA (1)...(19): siRNA sense strand
gcguggauaugugucugaa

SEQ ID NO: 196284 - RNA, 19 nt, Homo sapiens
  misc_RNA (1)...(19): siRNA sense strand
gcacuaucccaugguggaa

SEQ ID NO: 196285 - RNA, 19 nt, Homo sapiens
  misc_RNA (1)...(19): siRNA sense strand
gagccugucagcugcaugu

SEQ ID NO: 196286 - RNA, 19 nt, Homo sapiens
  misc_RNA (1)...(19): siRNA sense strand
guacagauaccuuuucaag

SEQ ID NO: 196287 - RNA, 19 nt, Homo sapiens
  misc_RNA (1)...(19): siRNA sense strand
gucccucucugcguggaua

SEQ ID NO: 196288 - RNA, 19 nt, Homo sapiens
  misc_RNA (1)...(19): siRNA sense strand
ggagcugcuuccaauuugc

SEQ ID NO: 196289 - RNA, 19 nt, Homo sapiens
  misc_RNA (1)...(19): siRNA sense strand
uuagcugaccugaauaaug

SEQ ID NO: 196290 - RNA, 19 nt, Homo sapiens
  misc_RNA (1)...(19): siRNA sense strand
guggcaaguucaacaggau

SEQ ID NO: 196291 - RNA, 19 nt, Homo sapiens
  misc_RNA (1)...(19): siRNA sense strand
acaacaauuuggucaacgu

SEQ ID NO: 196292 - RNA, 19 nt, Homo sapiens
  misc_RNA (1)...(19): siRNA sense strand
gacuacaucaggagaagau

SEQ ID NO: 196293 - RNA, 19 nt, Homo sapiens
  misc_RNA (1)...(19): siRNA sense strand
uaauaagccagagaucgaa

SEQ ID NO: 196294 - RNA, 19 nt, Homo sapiens
  misc_RNA (1)...(19): siRNA sense strand
ugucagauucucagcuuau

SEQ ID NO: 196295 - RNA, 19 nt, Homo sapiens
  misc_RNA (1)...(19): siRNA sense strand
ggauauccugcagauuauu

SEQ ID NO: 196296 - RNA, 19 nt, Homo sapiens
  misc_RNA (1)...(19): siRNA sense strand
agcaucaggccaaauguaa

SEQ ID NO: 196297 - RNA, 19 nt, Homo sapiens
  misc_RNA (1)...(19): siRNA sense strand
gcccuuugcuuggaucucu

SEQ ID NO: 196298 - RNA, 19 nt, Homo sapiens
  misc_RNA (1)...(19): siRNA sense strand
gcugaauguuuaugauacg

SEQ ID NO: 196299 - RNA, 19 nt, Homo sapiens
  misc_RNA (1)...(19): siRNA sense strand
agacuuugccaagguacua

SEQ ID NO: 196300 - RNA, 19 nt, Homo sapiens
  misc_RNA (1)...(19): siRNA sense strand
caagcaaguggcaaguuca

SEQ ID NO: 196301 - RNA, 19 nt, Homo sapiens
  misc_RNA (1)...(19): siRNA sense strand
agacaaguacagauaccuu

SEQ ID NO: 196302 - RNA, 19 nt, Homo sapiens
  misc_RNA (1)...(19): siRNA sense strand
gcaucauuucccuguguaa

SEQ ID NO: 196303 - RNA, 19 nt, Homo sapiens
  misc_RNA (1)...(19): siRNA sense strand
cugcaaagaguguccaauc

SEQ ID NO: 196304 - RNA, 19 nt, Homo sapiens
  misc_RNA (1)...(19): siRNA sense strand
cuuauaggacugccaugaa

SEQ ID NO: 196305 - RNA, 19 nt, Homo sapiens
  misc_RNA (1)...(19): siRNA sense strand
caaagaguguccaaucauu

SEQ ID NO: 196306 - RNA, 19 nt, Homo sapiens
  misc_RNA (1)...(19): siRNA sense strand
uagcugaccugaauaaugu

SEQ ID NO: 196307 - RNA, 19 nt, Homo sapiens
  misc_RNA (1)...(19): siRNA sense strand
gcaugauucuauccaaauu

SEQ ID NO: 196308 - RNA, 19 nt, Homo sapiens
  misc_RNA (1)...(19): siRNA sense strand
ugaacuggcugcugaaugu

SEQ ID NO: 196309 - RNA, 19 nt, Homo sapiens
  misc_RNA (1)...(19): siRNA sense strand
gauauccugcagauuauua

SEQ ID NO: 196310 - RNA, 19 nt, Homo sapiens
  misc_RNA (1)...(19): siRNA sense strand
gagaagauguucgagacuu

SEQ ID NO: 196311 - RNA, 19 nt, Homo sapiens
  misc_RNA (1)...(19): siRNA sense strand
gcacuuuaauuaugacauc

SEQ ID NO: 196312 - RNA, 19 nt, Homo sapiens
  misc_RNA (1)...(19): siRNA sense strand
guaaagcacauuuggaaga

SEQ ID NO: 196313 - RNA, 19 nt, Homo sapiens
  misc_RNA (1)...(19): siRNA sense strand
gaauauugcacuccgacua

SEQ ID NO: 196314 - RNA, 19 nt, Homo sapiens
  misc_RNA (1)...(19): siRNA sense strand
uuauaggacugccaugaaa

SEQ ID NO: 196315 - RNA, 19 nt, Homo sapiens
  misc_RNA (1)...(19): siRNA sense strand
gggugaaguugcauccuuu

SEQ ID NO: 196316 - RNA, 19 nt, Homo sapiens
  misc_RNA (1)...(19): siRNA sense strand
gcaagagcacaacaauuug

SEQ ID NO: 196317 - RNA, 19 nt, Homo sapiens
  misc_RNA (1)...(19): siRNA sense strand
gcacaacaauuuggucaac

SEQ ID NO: 196318 - RNA, 19 nt, Homo sapiens
  misc_RNA (1)...(19): siRNA sense strand
agcaagagcacaacaauuu

SEQ ID NO: 196319 - RNA, 19 nt, Homo sapiens
  misc_RNA (1)...(19): siRNA sense strand
agaagauguucgagacuuu

SEQ ID NO: 196320 - RNA, 19 nt, Homo sapiens
  misc_RNA (1)...(19): siRNA sense strand
gagcaagagcacaacaauu

SEQ ID NO: 196321 - RNA, 19 nt, Homo sapiens
  misc_RNA (1)...(19): siRNA sense strand
ucaagcaaguggcaaguuc

SEQ ID NO: 196322 - RNA, 19 nt, Homo sapiens
  misc_RNA (1)...(19): siRNA sense strand
ccacgagacucaaacaacu

SEQ ID NO: 196323 - RNA, 19 nt, Homo sapiens
  misc_RNA (1)...(19): siRNA sense strand
cagcacaaccucaagcaaa

SEQ ID NO: 196324 - RNA, 19 nt, Homo sapiens
  misc_RNA (1)...(19): siRNA sense strand
gcaaagaguguccaaucau

SEQ ID NO: 196325 - RNA, 19 nt, Homo sapiens
  misc_RNA (1)...(19): siRNA sense strand
auggauauccugcagauua

SEQ ID NO: 196326 - RNA, 19 nt, Homo sapiens
  misc_RNA (1)...(19): siRNA sense strand
uguaacaucugcaaagagu

SEQ ID NO: 196327 - RNA, 19 nt, Homo sapiens
  misc_RNA (1)...(19): siRNA sense strand
guccggagcugcuuccaau

SEQ ID NO: 196328 - RNA, 19 nt, Homo sapiens
  misc_RNA (1)...(19): siRNA sense strand
gcaaguggcaaguucaaca

SEQ ID NO: 196329 - RNA, 19 nt, Homo sapiens
  misc_RNA (1)...(19): siRNA sense strand
gcuuccaauuugcuaauaa

SEQ ID NO: 196330 - RNA, 19 nt, Homo sapiens
  misc_RNA (1)...(19): siRNA sense strand
uggaagacaaguacagaua

SEQ ID NO: 196331 - RNA, 19 nt, Homo sapiens
  misc_RNA (1)...(19): siRNA sense strand
ggauccguguccugucuuu

SEQ ID NO: 196332 - RNA, 19 nt, Homo sapiens
  misc_RNA (1)...(19): siRNA sense strand
gucuuuagcugaccugaau

SEQ ID NO: 196333 - RNA, 19 nt, Homo sapiens
  misc_RNA (1)...(19): siRNA sense strand
gacaaguacagauaccuuu

SEQ ID NO: 196334 - RNA, 19 nt, Homo sapiens
  misc_RNA (1)...(19): siRNA sense strand
ccaagcaucaggccaaaug

SEQ ID NO: 196335 - RNA, 19 nt, Homo sapiens
  misc_RNA (1)...(19): siRNA sense strand
ggagcaagagcacaacaau

SEQ ID NO: 196336 - RNA, 19 nt, Homo sapiens
  misc_RNA (1)...(19): siRNA sense strand
guguaaagcacauuuggaa

SEQ ID NO: 196337 - RNA, 19 nt, Homo sapiens
  misc_RNA (1)...(19): siRNA sense strand
caagacaguugggugaagu

SEQ ID NO: 196338 - RNA, 19 nt, Homo sapiens
  misc_RNA (1)...(19): siRNA sense strand
gaagauguucgagacuuug

SEQ ID NO: 196339 - RNA, 19 nt, Homo sapiens
  misc_RNA (1)...(19): siRNA sense strand
gucagauucucagcuuaua

SEQ ID NO: 196340 - RNA, 19 nt, Homo sapiens
  misc_RNA (1)...(19): siRNA sense strand
uaacaucugcaaagagugu

SEQ ID NO: 196341 - RNA, 19 nt, Homo sapiens
  misc_RNA (1)...(19): siRNA sense strand
cggagcugcuuccaauuug

SEQ ID NO: 196342 - RNA, 19 nt, Homo sapiens
  misc_RNA (1)...(19): siRNA sense strand
gaagacaaguacagauacc

SEQ ID NO: 196343 - RNA, 19 nt, Homo sapiens
  misc_RNA (1)...(19): siRNA sense strand
ccauggauauccugcagau

SEQ ID NO: 196344 - RNA, 19 nt, Homo sapiens
  misc_RNA (1)...(19): siRNA sense strand
ggcaucauuucccugugua

SEQ ID NO: 196345 - RNA, 19 nt, Homo sapiens
  misc_RNA (1)...(19): siRNA sense strand
uggauauccugcagauuau

SEQ ID NO: 196346 - RNA, 19 nt, Homo sapiens
  misc_RNA (1)...(19): siRNA sense strand
ggaagacaaguacagauac

SEQ ID NO: 196347 - RNA, 19 nt, Homo sapiens
  misc_RNA (1)...(19): siRNA sense strand
ugcaaagaguguccaauca

SEQ ID NO: 196348 - RNA, 19 nt, Homo sapiens
  misc_RNA (1)...(19): siRNA sense strand
guggauaugugucugaacu

SEQ ID NO: 196349 - RNA, 19 nt, Homo sapiens
  misc_RNA (1)...(19): siRNA sense strand
acuggcugcugaauguuua

SEQ ID NO: 196350 - RNA, 19 nt, Homo sapiens
  misc_RNA (1)...(19): siRNA sense strand
acuaucccaugguggaaua

SEQ ID NO: 196351 - RNA, 19 nt, Homo sapiens
  misc_RNA (1)...(19): siRNA sense strand
ccggagcugcuuccaauuu

SEQ ID NO: 196352 - RNA, 19 nt, Homo sapiens
  misc_RNA (1)...(19): siRNA sense strand
ccaaauuccaagacaguug

SEQ ID NO: 196353 - RNA, 19 nt, Homo sapiens
  misc_RNA (1)...(19): siRNA sense strand
cagaaacugccaagcauca

SEQ ID NO: 196354 - RNA, 19 nt, Homo sapiens
  misc_RNA (1)...(19): siRNA sense strand
uaugacaucugccaaagcu

SEQ ID NO: 196355 - RNA, 19 nt, Homo sapiens
  misc_RNA (1)...(19): siRNA sense strand
aaugucagauucucagcuu

SEQ ID NO: 196356 - RNA, 19 nt, Homo sapiens
  misc_RNA (1)...(19): siRNA sense strand
ucgagacuuugccaaggua

SEQ ID NO: 196357 - RNA, 19 nt, Homo sapiens
  misc_RNA (1)...(19): siRNA sense strand
gcaaaaggccauaaaaugc

SEQ ID NO: 196358 - RNA, 19 nt, Homo sapiens
  misc_RNA (1)...(19): siRNA sense strand
cugcaugauucuauccaaa

SEQ ID NO: 196359 - RNA, 19 nt, Homo sapiens
  misc_RNA (1)...(19): siRNA sense strand
uaaagcacauuuggaagac

SEQ ID NO: 196360 - RNA, 19 nt, Homo sapiens
  misc_RNA (1)...(19): siRNA sense strand
acaggagucuaaagcacuu

SEQ ID NO: 196361 - RNA, 19 nt, Homo sapiens
  misc_RNA (1)...(19): siRNA sense strand
acagauaccuuuucaagca

SEQ ID NO: 196362 - RNA, 19 nt, Homo sapiens
  misc_RNA (1)...(19): siRNA sense strand
aagcacauuuggaagacaa

SEQ ID NO: 196363 - RNA, 19 nt, Homo sapiens
  misc_RNA (1)...(19): siRNA sense strand
gcuaauaauaagccagaga

SEQ ID NO: 196364 - RNA, 19 nt, Homo sapiens
  misc_RNA (1)...(19): siRNA sense strand
caagagcacaacaauuugg

SEQ ID NO: 196365 - RNA, 19 nt, Homo sapiens
  misc_RNA (1)...(19): siRNA sense strand
ccugucagcugcaugugau

SEQ ID NO: 196366 - RNA, 19 nt, Homo sapiens
  misc_RNA (1)...(19): siRNA sense strand
gcugcugaauguuuaugau

SEQ ID NO: 196367 - RNA, 19 nt, Homo sapiens
  misc_RNA (1)...(19): siRNA sense strand
acagagcucuaccagucuu

SEQ ID NO: 196368 - RNA, 19 nt, Homo sapiens
  misc_RNA (1)...(19): siRNA sense strand
acaguugggugaaguugca

SEQ ID NO: 196369 - RNA, 19 nt, Homo sapiens
  misc_RNA (1)...(19): siRNA sense strand
guuugaccacuauuuauga

SEQ ID NO: 196370 - RNA, 19 nt, Homo sapiens
  misc_RNA (1)...(19): siRNA sense strand
gcuuauaggacugccauga

SEQ ID NO: 196371 - RNA, 19 nt, Homo sapiens
  misc_RNA (1)...(19): siRNA sense strand
caucaggccaaauguaaca

SEQ ID NO: 196372 - RNA, 19 nt, Homo sapiens
  misc_RNA (1)...(19): siRNA sense strand
gauucuauccaaauuccaa

SEQ ID NO: 196373 - RNA, 19 nt, Homo sapiens
  misc_RNA (1)...(19): siRNA sense strand
ggcaaguucaacaggauuu

SEQ ID NO: 196374 - RNA, 19 nt, Homo sapiens
  misc_RNA (1)...(19): siRNA sense strand
gaacuggcugcugaauguu

SEQ ID NO: 196375 - RNA, 19 nt, Homo sapiens
  misc_RNA (1)...(19): siRNA sense strand
cugcugaauguuuaugaua

SEQ ID NO: 196376 - RNA, 19 nt, Homo sapiens
  misc_RNA (1)...(19): siRNA sense strand
aagcaucaggccaaaugua

SEQ ID NO: 196377 - RNA, 19 nt, Homo sapiens
  misc_RNA (1)...(19): siRNA sense strand
uggcaucauuucccugugu

SEQ ID NO: 196378 - RNA, 19 nt, Homo sapiens
  misc_RNA (1)...(19): siRNA sense strand
ccaugaaacuccgaagacu

SEQ ID NO: 196379 - RNA, 19 nt, Homo sapiens
  misc_RNA (1)...(19): siRNA sense strand
auaauaagccagagaucga

SEQ ID NO: 196380 - RNA, 19 nt, Homo sapiens
  misc_RNA (1)...(19): siRNA sense strand
cuaauaauaagccagagau

SEQ ID NO: 196381 - RNA, 19 nt, Homo sapiens
  misc_RNA (1)...(19): siRNA sense strand
ugggugaaguugcauccuu

SEQ ID NO: 196382 - RNA, 19 nt, Homo sapiens
  misc_RNA (1)...(19): siRNA sense strand
caucauuucccuguguaaa

SEQ ID NO: 196383 - RNA, 19 nt, Homo sapiens
  misc_RNA (1)...(19): siRNA sense strand
gcguggauaugugucugaa

SEQ ID NO: 196384 - RNA, 19 nt, Homo sapiens
  misc_RNA (1)...(19): siRNA sense strand
gcacuaucccaugguggaa

SEQ ID NO: 196385 - RNA, 19 nt, Homo sapiens
  misc_RNA (1)...(19): siRNA sense strand
gagccugucagcugcaugu

SEQ ID NO: 196386 - RNA, 19 nt, Homo sapiens
  misc_RNA (1)...(19): siRNA sense strand
guacagauaccuuuucaag

SEQ ID NO: 196387 - RNA, 19 nt, Homo sapiens
  misc_RNA (1)...(19): siRNA sense strand
gucccucucugcguggaua

SEQ ID NO: 196388 - RNA, 19 nt, Homo sapiens
  misc_RNA (1)...(19): siRNA sense strand
ggagcugcuuccaauuugc

SEQ ID NO: 196389 - RNA, 19 nt, Homo sapiens
  misc_RNA (1)...(19): siRNA sense strand
uuagcugaccugaauaaug

SEQ ID NO: 196390 - RNA, 19 nt, Homo sapiens
  misc_RNA (1)...(19): siRNA sense strand
guggcaaguucaacaggau

SEQ ID NO: 196391 - RNA, 19 nt, Homo sapiens
  misc_RNA (1)...(19): siRNA sense strand
acaacaauuuggucaacgu

SEQ ID NO: 196392 - RNA, 19 nt, Homo sapiens
  misc_RNA (1)...(19): siRNA sense strand
gacuacaucaggagaagau

SEQ ID NO: 196393 - RNA, 19 nt, Homo sapiens
  misc_RNA (1)...(19): siRNA sense strand
uaauaagccagagaucgaa

SEQ ID NO: 196394 - RNA, 19 nt, Homo sapiens
  misc_RNA (1)...(19): siRNA sense strand
ugucagauucucagcuuau

SEQ ID NO: 196395 - RNA, 19 nt, Homo sapiens
  misc_RNA (1)...(19): siRNA sense strand
ggauauccugcagauuauu

SEQ ID NO: 196396 - RNA, 19 nt, Homo sapiens
  misc_RNA (1)...(19): siRNA sense strand
agcaucaggccaaauguaa

SEQ ID NO: 196397 - RNA, 19 nt, Homo sapiens
  misc_RNA (1)...(19): siRNA sense strand
gcccuuugcuuggaucucu

SEQ ID NO: 196398 - RNA, 19 nt, Homo sapiens
  misc_RNA (1)...(19): siRNA sense strand
gcugaauguuuaugauacg

SEQ ID NO: 196399 - RNA, 19 nt, Homo sapiens
  misc_RNA (1)...(19): siRNA sense strand
agacuuugccaagguacua

SEQ ID NO: 196400 - RNA, 19 nt, Homo sapiens
  misc_RNA (1)...(19): siRNA sense strand
caagcaaguggcaaguuca

SEQ ID NO: 196401 - RNA, 19 nt, Homo sapiens
  misc_RNA (1)...(19): siRNA sense strand
agacaaguacagauaccuu

SEQ ID NO: 196402 - RNA, 19 nt, Homo sapiens
  misc_RNA (1)...(19): siRNA sense strand
gcaucauuucccuguguaa

SEQ ID NO: 196403 - RNA, 19 nt, Homo sapiens
  misc_RNA (1)...(19): siRNA sense strand
cugcaaagaguguccaauc

SEQ ID NO: 196404 - RNA, 19 nt, Homo sapiens
  misc_RNA (1)...(19): siRNA sense strand
cuuauaggacugccaugaa

SEQ ID NO: 196405 - RNA, 19 nt, Homo sapiens
  misc_RNA (1)...(19): siRNA sense strand
caaagaguguccaaucauu

SEQ ID NO: 196406 - RNA, 19 nt, Homo sapiens
  misc_RNA (1)...(19): siRNA sense strand
uagcugaccugaauaaugu

SEQ ID NO: 196407 - RNA, 19 nt, Homo sapiens
  misc_RNA (1)...(19): siRNA sense strand
gcaugauucuauccaaauu

SEQ ID NO: 196408 - RNA, 19 nt, Homo sapiens
  misc_RNA (1)...(19): siRNA sense strand
ugaacuggcugcugaaugu

SEQ ID NO: 196409 - RNA, 19 nt, Homo sapiens
  misc_RNA (1)...(19): siRNA sense strand
gauauccugcagauuauua

SEQ ID NO: 196410 - RNA, 19 nt, Homo sapiens
  misc_RNA (1)...(19): siRNA sense strand
gagaagauguucgagacuu

SEQ ID NO: 196411 - RNA, 19 nt, Homo sapiens
  misc_RNA (1)...(19): siRNA sense strand
gcacuuuaauuaugacauc

SEQ ID NO: 196412 - RNA, 19 nt, Homo sapiens
  misc_RNA (1)...(19): siRNA sense strand
guaaagcacauuuggaaga

SEQ ID NO: 196413 - RNA, 19 nt, Homo sapiens
  misc_RNA (1)...(19): siRNA sense strand
gaauauugcacuccgacua

SEQ ID NO: 196414 - RNA, 19 nt, Homo sapiens
  misc_RNA (1)...(19): siRNA sense strand
uuauaggacugccaugaaa

SEQ ID NO: 196415 - RNA, 19 nt, Homo sapiens
  misc_RNA (1)...(19): siRNA sense strand
gggugaaguugcauccuuu

SEQ ID NO: 196416 - RNA, 19 nt, Homo sapiens
  misc_RNA (1)...(19): siRNA sense strand
gcaagagcacaacaauuug

SEQ ID NO: 196417 - RNA, 19 nt, Homo sapiens
  misc_RNA (1)...(19): siRNA sense strand
gcacaacaauuuggucaac

SEQ ID NO: 196418 - RNA, 19 nt, Homo sapiens
  misc_RNA (1)...(19): siRNA sense strand
agcaagagcacaacaauuu

SEQ ID NO: 196419 - RNA, 19 nt, Homo sapiens
  misc_RNA (1)...(19): siRNA sense strand
agaagauguucgagacuuu

SEQ ID NO: 196420 - RNA, 19 nt, Homo sapiens
  misc_RNA (1)...(19): siRNA sense strand
gagcaagagcacaacaauu

SEQ ID NO: 196421 - RNA, 19 nt, Homo sapiens
  misc_RNA (1)...(19): siRNA sense strand
ucaagcaaguggcaaguuc

SEQ ID NO: 196422 - RNA, 19 nt, Homo sapiens
  misc_RNA (1)...(19): siRNA sense strand
ccacgagacucaaacaacu

SEQ ID NO: 196423 - RNA, 19 nt, Homo sapiens
  misc_RNA (1)...(19): siRNA sense strand
cagcacaaccucaagcaaa

SEQ ID NO: 196424 - RNA, 19 nt, Homo sapiens
  misc_RNA (1)...(19): siRNA sense strand
gcaaagaguguccaaucau

SEQ ID NO: 196425 - RNA, 19 nt, Homo sapiens
  misc_RNA (1)...(19): siRNA sense strand
auggauauccugcagauua

SEQ ID NO: 196426 - RNA, 19 nt, Homo sapiens
  misc_RNA (1)...(19): siRNA sense strand
uguaacaucugcaaagagu

SEQ ID NO: 196427 - RNA, 19 nt, Homo sapiens
  misc_RNA (1)...(19): siRNA sense strand
guccggagcugcuuccaau

SEQ ID NO: 196428 - RNA, 19 nt, Homo sapiens
  misc_RNA (1)...(19): siRNA sense strand
gcaaguggcaaguucaaca

SEQ ID NO: 196429 - RNA, 19 nt, Homo sapiens
  misc_RNA (1)...(19): siRNA sense strand
gcuuccaauuugcuaauaa

SEQ ID NO: 196430 - RNA, 19 nt, Homo sapiens
  misc_RNA (1)...(19): siRNA sense strand
uggaagacaaguacagaua

SEQ ID NO: 196431 - RNA, 19 nt, Homo sapiens
  misc_RNA (1)...(19): siRNA sense strand
ggauccguguccugucuuu

SEQ ID NO: 196432 - RNA, 19 nt, Homo sapiens
  misc_RNA (1)...(19): siRNA sense strand
gucuuuagcugaccugaau

SEQ ID NO: 196433 - RNA, 19 nt, Homo sapiens
  misc_RNA (1)...(19): siRNA sense strand
gacaaguacagauaccuuu

SEQ ID NO: 196434 - RNA, 19 nt, Homo sapiens
  misc_RNA (1)...(19): siRNA sense strand
ccaagcaucaggccaaaug

SEQ ID NO: 196435 - RNA, 19 nt, Homo sapiens
  misc_RNA (1)...(19): siRNA sense strand
ggagcaagagcacaacaau

SEQ ID NO: 196436 - RNA, 19 nt, Homo sapiens
  misc_RNA (1)...(19): siRNA sense strand
guguaaagcacauuuggaa

SEQ ID NO: 196437 - RNA, 19 nt, Homo sapiens
  misc_RNA (1)...(19): siRNA sense strand
caagacaguugggugaagu

SEQ ID NO: 196438 - RNA, 19 nt, Homo sapiens
  misc_RNA (1)...(19): siRNA sense strand
gaagauguucgagacuuug

SEQ ID NO: 196439 - RNA, 19 nt, Homo sapiens
  misc_RNA (1)...(19): siRNA sense strand
gucagauucucagcuuaua

SEQ ID NO: 196440 - RNA, 19 nt, Homo sapiens
  misc_RNA (1)...(19): siRNA sense strand
uaacaucugcaaagagugu

SEQ ID NO: 196441 - RNA, 19 nt, Homo sapiens
  misc_RNA (1)...(19): siRNA sense strand
cggagcugcuuccaauuug

SEQ ID NO: 196442 - RNA, 19 nt, Homo sapiens
  misc_RNA (1)...(19): siRNA sense strand
gaagacaaguacagauacc

SEQ ID NO: 196443 - RNA, 19 nt, Homo sapiens
  misc_RNA (1)...(19): siRNA sense strand
ccauggauauccugcagau

SEQ ID NO: 196444 - RNA, 19 nt, Homo sapiens
  misc_RNA (1)...(19): siRNA sense strand
ggcaucauuucccugugua

SEQ ID NO: 196445 - RNA, 19 nt, Homo sapiens
  misc_RNA (1)...(19): siRNA sense strand
uggauauccugcagauuau

SEQ ID NO: 196446 - RNA, 19 nt, Homo sapiens
  misc_RNA (1)...(19): siRNA sense strand
ggaagacaaguacagauac

SEQ ID NO: 196447 - RNA, 19 nt, Homo sapiens
  misc_RNA (1)...(19): siRNA sense strand
ugcaaagaguguccaauca

SEQ ID NO: 196448 - RNA, 19 nt, Homo sapiens
  misc_RNA (1)...(19): siRNA sense strand
guggauaugugucugaacu

SEQ ID NO: 196449 - RNA, 19 nt, Homo sapiens
  misc_RNA (1)...(19): siRNA sense strand
acuggcugcugaauguuua

SEQ ID NO: 196450 - RNA, 19 nt, Homo sapiens
  misc_RNA (1)...(19): siRNA sense strand
acuaucccaugguggaaua

SEQ ID NO: 196451 - RNA, 19 nt, Homo sapiens
  misc_RNA (1)...(19): siRNA sense strand
ccggagcugcuuccaauuu

SEQ ID NO: 196452 - RNA, 19 nt, Homo sapiens
  misc_RNA (1)...(19): siRNA sense strand
ccaaauuccaagacaguug

SEQ ID NO: 196453 - RNA, 19 nt, Homo sapiens
  misc_RNA (1)...(19): siRNA sense strand
cagaaacugccaagcauca

SEQ ID NO: 196454 - RNA, 19 nt, Homo sapiens
  misc_RNA (1)...(19): siRNA sense strand
uaugacaucugccaaagcu

SEQ ID NO: 196455 - RNA, 19 nt, Homo sapiens
  misc_RNA (1)...(19): siRNA sense strand
aaugucagauucucagcuu

SEQ ID NO: 196456 - RNA, 19 nt, Homo sapiens
  misc_RNA (1)...(19): siRNA sense strand
ucgagacuuugccaaggua

SEQ ID NO: 196457 - RNA, 19 nt, Homo sapiens
  misc_RNA (1)...(19): siRNA sense strand
gcaaaaggccauaaaaugc

SEQ ID NO: 196458 - RNA, 19 nt, Homo sapiens
  misc_RNA (1)...(19): siRNA sense strand
cugcaugauucuauccaaa

SEQ ID NO: 196459 - RNA, 19 nt, Homo sapiens
  misc_RNA (1)...(19): siRNA sense strand
uaaagcacauuuggaagac

SEQ ID NO: 196460 - RNA, 19 nt, Homo sapiens
  misc_RNA (1)...(19): siRNA sense strand
acaggagucuaaagcacuu

SEQ ID NO: 196461 - RNA, 19 nt, Homo sapiens
  misc_RNA (1)...(19): siRNA sense strand
acagauaccuuuucaagca

SEQ ID NO: 196462 - RNA, 19 nt, Homo sapiens
  misc_RNA (1)...(19): siRNA sense strand
aagcacauuuggaagacaa

SEQ ID NO: 196463 - RNA, 19 nt, Homo sapiens
  misc_RNA (1)...(19): siRNA sense strand
gcuaauaauaagccagaga

SEQ ID NO: 196464 - RNA, 19 nt, Homo sapiens
  misc_RNA (1)...(19): siRNA sense strand
caagagcacaacaauuugg

SEQ ID NO: 196465 - RNA, 19 nt, Homo sapiens
  misc_RNA (1)...(19): siRNA sense strand
ccugucagcugcaugugau

SEQ ID NO: 196466 - RNA, 19 nt, Homo sapiens
  misc_RNA (1)...(19): siRNA sense strand
gcugcugaauguuuaugau

SEQ ID NO: 196467 - RNA, 19 nt, Homo sapiens
  misc_RNA (1)...(19): siRNA sense strand
acagagcucuaccagucuu

SEQ ID NO: 196468 - RNA, 19 nt, Homo sapiens
  misc_RNA (1)...(19): siRNA sense strand
acaguugggugaaguugca

SEQ ID NO: 196469 - RNA, 19 nt, Homo sapiens
  misc_RNA (1)...(19): siRNA sense strand
guuugaccacuauuuauga

SEQ ID NO: 196470 - RNA, 19 nt, Homo sapiens
  misc_RNA (1)...(19): siRNA sense strand
gcuuauaggacugccauga

SEQ ID NO: 196471 - RNA, 19 nt, Homo sapiens
  misc_RNA (1)...(19): siRNA sense strand
caucaggccaaauguaaca

SEQ ID NO: 196472 - RNA, 19 nt, Homo sapiens
  misc_RNA (1)...(19): siRNA sense strand
gauucuauccaaauuccaa

SEQ ID NO: 196473 - RNA, 19 nt, Homo sapiens
  misc_RNA (1)...(19): siRNA sense strand
ggcaaguucaacaggauuu

SEQ ID NO: 196474 - RNA, 19 nt, Homo sapiens
  misc_RNA (1)...(19): siRNA sense strand
gaacuggcugcugaauguu

SEQ ID NO: 196475 - RNA, 19 nt, Homo sapiens
  misc_RNA (1)...(19): siRNA sense strand
cugcugaauguuuaugaua

SEQ ID NO: 196476 - RNA, 19 nt, Homo sapiens
  misc_RNA (1)...(19): siRNA sense strand
aagcaucaggccaaaugua

SEQ ID NO: 196477 - RNA, 19 nt, Homo sapiens
  misc_RNA (1)...(19): siRNA sense strand
uggcaucauuucccugugu

SEQ ID NO: 196478 - RNA, 19 nt, Homo sapiens
  misc_RNA (1)...(19): siRNA sense strand
ccaugaaacuccgaagacu

SEQ ID NO: 196479 - RNA, 19 nt, Homo sapiens
  misc_RNA (1)...(19): siRNA sense strand
auaauaagccagagaucga

SEQ ID NO: 196480 - RNA, 19 nt, Homo sapiens
  misc_RNA (1)...(19): siRNA sense strand
cuaauaauaagccagagau

SEQ ID NO: 196481 - RNA, 19 nt, Homo sapiens
  misc_RNA (1)...(19): siRNA sense strand
ugggugaaguugcauccuu

SEQ ID NO: 196482 - RNA, 19 nt, Homo sapiens
  misc_RNA (1)...(19): siRNA sense strand
caucauuucccuguguaaa

SEQ ID NO: 196483 - RNA, 19 nt, Homo sapiens
  misc_RNA (1)...(19): siRNA sense strand
gcguggauaugugucugaa

SEQ ID NO: 196484 - RNA, 19 nt, Homo sapiens
  misc_RNA (1)...(19): siRNA sense strand
gcacuaucccaugguggaa

SEQ ID NO: 196485 - RNA, 19 nt, Homo sapiens
  misc_RNA (1)...(19): siRNA sense strand
gagccugucagcugcaugu

SEQ ID NO: 196486 - RNA, 19 nt, Homo sapiens
  misc_RNA (1)...(19): siRNA sense strand
guacagauaccuuuucaag

SEQ ID NO: 196487 - RNA, 19 nt, Homo sapiens
  misc_RNA (1)...(19): siRNA sense strand
gucccucucugcguggaua

SEQ ID NO: 196488 - RNA, 19 nt, Homo sapiens
  misc_RNA (1)...(19): siRNA sense strand
ggagcugcuuccaauuugc

SEQ ID NO: 196489 - RNA, 19 nt, Homo sapiens
  misc_RNA (1)...(19): siRNA sense strand
uuagcugaccugaauaaug

SEQ ID NO: 196490 - RNA, 19 nt, Homo sapiens
  misc_RNA (1)...(19): siRNA sense strand
guggcaaguucaacaggau

SEQ ID NO: 196491 - RNA, 19 nt, Homo sapiens
  misc_RNA (1)...(19): siRNA sense strand
acaacaauuuggucaacgu

SEQ ID NO: 196492 - RNA, 19 nt, Homo sapiens
  misc_RNA (1)...(19): siRNA sense strand
gacuacaucaggagaagau

SEQ ID NO: 196493 - RNA, 19 nt, Homo sapiens
  misc_RNA (1)...(19): siRNA sense strand
uaauaagccagagaucgaa

SEQ ID NO: 196494 - RNA, 19 nt, Homo sapiens
  misc_RNA (1)...(19): siRNA sense strand
ugucagauucucagcuuau

SEQ ID NO: 196495 - RNA, 19 nt, Homo sapiens
  misc_RNA (1)...(19): siRNA sense strand
ggauauccugcagauuauu

SEQ ID NO: 196496 - RNA, 19 nt, Homo sapiens
  misc_RNA (1)...(19): siRNA sense strand
agcaucaggccaaauguaa

SEQ ID NO: 196497 - RNA, 19 nt, Homo sapiens
  misc_RNA (1)...(19): siRNA sense strand
gcccuuugcuuggaucucu

SEQ ID NO: 196498 - RNA, 19 nt, Homo sapiens
  misc_RNA (1)...(19): siRNA sense strand
gcugaauguuuaugauacg

SEQ ID NO: 196499 - RNA, 19 nt, Homo sapiens
  misc_RNA (1)...(19): siRNA sense strand
agacuuugccaagguacua

SEQ ID NO: 196500 - RNA, 19 nt, Homo sapiens
  misc_RNA (1)...(19): siRNA sense strand
caagcaaguggcaaguuca

SEQ ID NO: 196501 - RNA, 19 nt, Homo sapiens
  misc_RNA (1)...(19): siRNA sense strand
agacaaguacagauaccuu

SEQ ID NO: 196502 - RNA, 19 nt, Homo sapiens
  misc_RNA (1)...(19): siRNA sense strand
gcaucauuucccuguguaa

SEQ ID NO: 196503 - RNA, 19 nt, Homo sapiens
  misc_RNA (1)...(19): siRNA sense strand
cugcaaagaguguccaauc

SEQ ID NO: 196504 - RNA, 19 nt, Homo sapiens
  misc_RNA (1)...(19): siRNA sense strand
cuuauaggacugccaugaa

SEQ ID NO: 196505 - RNA, 19 nt, Homo sapiens
  misc_RNA (1)...(19): siRNA sense strand
caaagaguguccaaucauu

SEQ ID NO: 196506 - RNA, 19 nt, Homo sapiens
  misc_RNA (1)...(19): siRNA sense strand
uagcugaccugaauaaugu

SEQ ID NO: 196507 - RNA, 19 nt, Homo sapiens
  misc_RNA (1)...(19): siRNA sense strand
gcaugauucuauccaaauu

SEQ ID NO: 196508 - RNA, 19 nt, Homo sapiens
  misc_RNA (1)...(19): siRNA sense strand
ugaacuggcugcugaaugu

SEQ ID NO: 196509 - RNA, 19 nt, Homo sapiens
  misc_RNA (1)...(19): siRNA sense strand
gauauccugcagauuauua

SEQ ID NO: 196510 - RNA, 19 nt, Homo sapiens
  misc_RNA (1)...(19): siRNA sense strand
gagaagauguucgagacuu

SEQ ID NO: 196511 - RNA, 19 nt, Homo sapiens
  misc_RNA (1)...(19): siRNA sense strand
gcacuuuaauuaugacauc

SEQ ID NO: 196512 - RNA, 19 nt, Homo sapiens
  misc_RNA (1)...(19): siRNA sense strand
guaaagcacauuuggaaga

SEQ ID NO: 196513 - RNA, 19 nt, Homo sapiens
  misc_RNA (1)...(19): siRNA sense strand
gaauauugcacuccgacua

SEQ ID NO: 196514 - RNA, 19 nt, Homo sapiens
  misc_RNA (1)...(19): siRNA sense strand
uuauaggacugccaugaaa

SEQ ID NO: 196515 - RNA, 19 nt, Homo sapiens
  misc_RNA (1)...(19): siRNA sense strand
gggugaaguugcauccuuu

SEQ ID NO: 196516 - RNA, 19 nt, Homo sapiens
  misc_RNA (1)...(19): siRNA sense strand
gcaagagcacaacaauuug

SEQ ID NO: 196517 - RNA, 19 nt, Homo sapiens
  misc_RNA (1)...(19): siRNA sense strand
gcacaacaauuuggucaac

SEQ ID NO: 196518 - RNA, 19 nt, Homo sapiens
  misc_RNA (1)...(19): siRNA sense strand
agcaagagcacaacaauuu

SEQ ID NO: 196519 - RNA, 19 nt, Homo sapiens
  misc_RNA (1)...(19): siRNA sense strand
agaagauguucgagacuuu

SEQ ID NO: 196520 - RNA, 19 nt, Homo sapiens
  misc_RNA (1)...(19): siRNA sense strand
gagcaagagcacaacaauu

SEQ ID NO: 196521 - RNA, 19 nt, Homo sapiens
  misc_RNA (1)...(19): siRNA sense strand
ucaagcaaguggcaaguuc

SEQ ID NO: 196522 - RNA, 19 nt, Homo sapiens
  misc_RNA (1)...(19): siRNA sense strand
ccacgagacucaaacaacu

SEQ ID NO: 196523 - RNA, 19 nt, Homo sapiens
  misc_RNA (1)...(19): siRNA sense strand
cagcacaaccucaagcaaa

SEQ ID NO: 196524 - RNA, 19 nt, Homo sapiens
  misc_RNA (1)...(19): siRNA sense strand
gcaaagaguguccaaucau

SEQ ID NO: 196525 - RNA, 19 nt, Homo sapiens
  misc_RNA (1)...(19): siRNA sense strand
auggauauccugcagauua

SEQ ID NO: 196526 - RNA, 19 nt, Homo sapiens
  misc_RNA (1)...(19): siRNA sense strand
uguaacaucugcaaagagu

SEQ ID NO: 196527 - RNA, 19 nt, Homo sapiens
  misc_RNA (1)...(19): siRNA sense strand
guccggagcugcuuccaau

SEQ ID NO: 196528 - RNA, 19 nt, Homo sapiens
  misc_RNA (1)...(19): siRNA sense strand
gcaaguggcaaguucaaca

SEQ ID NO: 196529 - RNA, 19 nt, Homo sapiens
  misc_RNA (1)...(19): siRNA sense strand
gcuuccaauuugcuaauaa

SEQ ID NO: 196530 - RNA, 19 nt, Homo sapiens
  misc_RNA (1)...(19): siRNA sense strand
uggaagacaaguacagaua

SEQ ID NO: 196531 - RNA, 19 nt, Homo sapiens
  misc_RNA (1)...(19): siRNA sense strand
ggauccguguccugucuuu

SEQ ID NO: 196532 - RNA, 19 nt, Homo sapiens
  misc_RNA (1)...(19): siRNA sense strand
gucuuuagcugaccugaau

SEQ ID NO: 196533 - RNA, 19 nt, Homo sapiens
  misc_RNA (1)...(19): siRNA sense strand
gacaaguacagauaccuuu

SEQ ID NO: 196534 - RNA, 19 nt, Homo sapiens
  misc_RNA (1)...(19): siRNA sense strand
ccaagcaucaggccaaaug

SEQ ID NO: 196535 - RNA, 19 nt, Homo sapiens
  misc_RNA (1)...(19): siRNA sense strand
ggagcaagagcacaacaau

SEQ ID NO: 196536 - RNA, 19 nt, Homo sapiens
  misc_RNA (1)...(19): siRNA sense strand
guguaaagcacauuuggaa

SEQ ID NO: 196537 - RNA, 19 nt, Homo sapiens
  misc_RNA (1)...(19): siRNA sense strand
caagacaguugggugaagu

SEQ ID NO: 196538 - RNA, 19 nt, Homo sapiens
  misc_RNA (1)...(19): siRNA sense strand
gaagauguucgagacuuug

SEQ ID NO: 196539 - RNA, 19 nt, Homo sapiens
  misc_RNA (1)...(19): siRNA sense strand
gucagauucucagcuuaua

SEQ ID NO: 196540 - RNA, 19 nt, Homo sapiens
  misc_RNA (1)...(19): siRNA sense strand
uaacaucugcaaagagugu

SEQ ID NO: 196541 - RNA, 19 nt, Homo sapiens
  misc_RNA (1)...(19): siRNA sense strand
cggagcugcuuccaauuug

SEQ ID NO: 196542 - RNA, 19 nt, Homo sapiens
  misc_RNA (1)...(19): siRNA sense strand
gaagacaaguacagauacc

SEQ ID NO: 196543 - RNA, 19 nt, Homo sapiens
  misc_RNA (1)...(19): siRNA sense strand
ccauggauauccugcagau

SEQ ID NO: 196544 - RNA, 19 nt, Homo sapiens
  misc_RNA (1)...(19): siRNA sense strand
ggcaucauuucccugugua

SEQ ID NO: 196545 - RNA, 19 nt, Homo sapiens
  misc_RNA (1)...(19): siRNA sense strand
uggauauccugcagauuau

SEQ ID NO: 196546 - RNA, 19 nt, Homo sapiens
  misc_RNA (1)...(19): siRNA sense strand
ggaagacaaguacagauac

SEQ ID NO: 196547 - RNA, 19 nt, Homo sapiens
  misc_RNA (1)...(19): siRNA sense strand
ugcaaagaguguccaauca

SEQ ID NO: 196548 - RNA, 19 nt, Homo sapiens
  misc_RNA (1)...(19): siRNA sense strand
guggauaugugucugaacu

SEQ ID NO: 196549 - RNA, 19 nt, Homo sapiens
  misc_RNA (1)...(19): siRNA sense strand
acuggcugcugaauguuua

SEQ ID NO: 196550 - RNA, 19 nt, Homo sapiens
  misc_RNA (1)...(19): siRNA sense strand
acuaucccaugguggaaua

SEQ ID NO: 196551 - RNA, 19 nt, Homo sapiens
  misc_RNA (1)...(19): siRNA sense strand
ccggagcugcuuccaauuu

SEQ ID NO: 196552 - RNA, 19 nt, Homo sapiens
  misc_RNA (1)...(19): siRNA sense strand
ccaaauuccaagacaguug

SEQ ID NO: 196553 - RNA, 19 nt, Homo sapiens
  misc_RNA (1)...(19): siRNA sense strand
cagaaacugccaagcauca

SEQ ID NO: 196554 - RNA, 19 nt, Homo sapiens
  misc_RNA (1)...(19): siRNA sense strand
uaugacaucugccaaagcu

SEQ ID NO: 196555 - RNA, 19 nt, Homo sapiens
  misc_RNA (1)...(19): siRNA sense strand
aaugucagauucucagcuu

SEQ ID NO: 196556 - RNA, 19 nt, Homo sapiens
  misc_RNA (1)...(19): siRNA sense strand
ucgagacuuugccaaggua

SEQ ID NO: 196557 - RNA, 19 nt, Homo sapiens
  misc_RNA (1)...(19): siRNA sense strand
gcaaaaggccauaaaaugc

SEQ ID NO: 196558 - RNA, 19 nt, Homo sapiens
  misc_RNA (1)...(19): siRNA sense strand
cugcaugauucuauccaaa

SEQ ID NO: 196559 - RNA, 19 nt, Homo sapiens
  misc_RNA (1)...(19): siRNA sense strand
uaaagcacauuuggaagac

SEQ ID NO: 196560 - RNA, 19 nt, Homo sapiens
  misc_RNA (1)...(19): siRNA sense strand
acaggagucuaaagcacuu

SEQ ID NO: 196561 - RNA, 19 nt, Homo sapiens
  misc_RNA (1)...(19): siRNA sense strand
acagauaccuuuucaagca

SEQ ID NO: 196562 - RNA, 19 nt, Homo sapiens
  misc_RNA (1)...(19): siRNA sense strand
aagcacauuuggaagacaa

SEQ ID NO: 196563 - RNA, 19 nt, Homo sapiens
  misc_RNA (1)...(19): siRNA sense strand
gcuaauaauaagccagaga

SEQ ID NO: 196564 - RNA, 19 nt, Homo sapiens
  misc_RNA (1)...(19): siRNA sense strand
caagagcacaacaauuugg

SEQ ID NO: 196565 - RNA, 19 nt, Homo sapiens
  misc_RNA (1)...(19): siRNA sense strand
ccugucagcugcaugugau

SEQ ID NO: 196566 - RNA, 19 nt, Homo sapiens
  misc_RNA (1)...(19): siRNA sense strand
gcugcugaauguuuaugau

SEQ ID NO: 196567 - RNA, 19 nt, Homo sapiens
  misc_RNA (1)...(19): siRNA sense strand
acagagcucuaccagucuu

SEQ ID NO: 196568 - RNA, 19 nt, Homo sapiens
  misc_RNA (1)...(19): siRNA sense strand
acaguugggugaaguugca

SEQ ID NO: 196569 - RNA, 19 nt, Homo sapiens
  misc_RNA (1)...(19): siRNA sense strand
guuugaccacuauuuauga

SEQ ID NO: 196570 - RNA, 19 nt, Homo sapiens
  misc_RNA (1)...(19): siRNA sense strand
gcuuauaggacugccauga

SEQ ID NO: 196571 - RNA, 19 nt, Homo sapiens
  misc_RNA (1)...(19): siRNA sense strand
caucaggccaaauguaaca

SEQ ID NO: 196572 - RNA, 19 nt, Homo sapiens
  misc_RNA (1)...(19): siRNA sense strand
gauucuauccaaauuccaa

SEQ ID NO: 196573 - RNA, 19 nt, Homo sapiens
  misc_RNA (1)...(19): siRNA sense strand
ggcaaguucaacaggauuu

SEQ ID NO: 196574 - RNA, 19 nt, Homo sapiens
  misc_RNA (1)...(19): siRNA sense strand
gaacuggcugcugaauguu

SEQ ID NO: 196575 - RNA, 19 nt, Homo sapiens
  misc_RNA (1)...(19): siRNA sense strand
cugcugaauguuuaugaua

SEQ ID NO: 196576 - RNA, 19 nt, Homo sapiens
  misc_RNA (1)...(19): siRNA sense strand
aagcaucaggccaaaugua

SEQ ID NO: 196577 - RNA, 19 nt, Homo sapiens
  misc_RNA (1)...(19): siRNA sense strand
uggcaucauuucccugugu

SEQ ID NO: 196578 - RNA, 19 nt, Homo sapiens
  misc_RNA (1)...(19): siRNA sense strand
ccaugaaacuccgaagacu

SEQ ID NO: 196579 - RNA, 19 nt, Homo sapiens
  misc_RNA (1)...(19): siRNA sense strand
auaauaagccagagaucga

SEQ ID NO: 196580 - RNA, 19 nt, Homo sapiens
  misc_RNA (1)...(19): siRNA sense strand
cuaauaauaagccagagau

SEQ ID NO: 196581 - RNA, 19 nt, Homo sapiens
  misc_RNA (1)...(19): siRNA sense strand
ugggugaaguugcauccuu

SEQ ID NO: 196582 - RNA, 19 nt, Homo sapiens
  misc_RNA (1)...(19): siRNA sense strand
caucauuucccuguguaaa

SEQ ID NO: 196583 - RNA, 19 nt, Homo sapiens
  misc_RNA (1)...(19): siRNA sense strand
gcguggauaugugucugaa

SEQ ID NO: 196584 - RNA, 19 nt, Homo sapiens
  misc_RNA (1)...(19): siRNA sense strand
gcacuaucccaugguggaa

SEQ ID NO: 196585 - RNA, 19 nt, Homo sapiens
  misc_RNA (1)...(19): siRNA sense strand
gagccugucagcugcaugu

SEQ ID NO: 196586 - RNA, 19 nt, Homo sapiens
  misc_RNA (1)...(19): siRNA sense strand
guacagauaccuuuucaag

SEQ ID NO: 196587 - RNA, 19 nt, Homo sapiens
  misc_RNA (1)...(19): siRNA sense strand
gucccucucugcguggaua

SEQ ID NO: 196588 - RNA, 19 nt, Homo sapiens
  misc_RNA (1)...(19): siRNA sense strand
ggagcugcuuccaauuugc

SEQ ID NO: 196589 - RNA, 19 nt, Homo sapiens
  misc_RNA (1)...(19): siRNA sense strand
uuagcugaccugaauaaug

SEQ ID NO: 196590 - RNA, 19 nt, Homo sapiens
  misc_RNA (1)...(19): siRNA sense strand
guggcaaguucaacaggau

SEQ ID NO: 196591 - RNA, 19 nt, Homo sapiens
  misc_RNA (1)...(19): siRNA sense strand
acaacaauuuggucaacgu

SEQ ID NO: 196592 - RNA, 19 nt, Homo sapiens
  misc_RNA (1)...(19): siRNA sense strand
gacuacaucaggagaagau

SEQ ID NO: 196593 - RNA, 19 nt, Homo sapiens
  misc_RNA (1)...(19): siRNA sense strand
uaauaagccagagaucgaa

SEQ ID NO: 196594 - RNA, 19 nt, Homo sapiens
  misc_RNA (1)...(19): siRNA sense strand
ugucagauucucagcuuau

SEQ ID NO: 196595 - RNA, 19 nt, Homo sapiens
  misc_RNA (1)...(19): siRNA sense strand
ggauauccugcagauuauu

SEQ ID NO: 196596 - RNA, 19 nt, Homo sapiens
  misc_RNA (1)...(19): siRNA sense strand
agcaucaggccaaauguaa

SEQ ID NO: 196597 - RNA, 19 nt, Homo sapiens
  misc_RNA (1)...(19): siRNA sense strand
gcccuuugcuuggaucucu

SEQ ID NO: 196598 - RNA, 19 nt, Homo sapiens
  misc_RNA (1)...(19): siRNA sense strand
gcugaauguuuaugauacg

SEQ ID NO: 196599 - RNA, 19 nt, Homo sapiens
  misc_RNA (1)...(19): siRNA sense strand
agacuuugccaagguacua

SEQ ID NO: 196600 - RNA, 19 nt, Homo sapiens
  misc_RNA (1)...(19): siRNA sense strand
caagcaaguggcaaguuca

SEQ ID NO: 196601 - RNA, 19 nt, Homo sapiens
  misc_RNA (1)...(19): siRNA sense strand
agacaaguacagauaccuu

SEQ ID NO: 196602 - RNA, 19 nt, Homo sapiens
  misc_RNA (1)...(19): siRNA sense strand
gcaucauuucccuguguaa

SEQ ID NO: 196603 - RNA, 19 nt, Homo sapiens
  misc_RNA (1)...(19): siRNA sense strand
cugcaaagaguguccaauc

SEQ ID NO: 196604 - RNA, 19 nt, Homo sapiens
  misc_RNA (1)...(19): siRNA sense strand
cuuauaggacugccaugaa

SEQ ID NO: 196605 - RNA, 19 nt, Homo sapiens
  misc_RNA (1)...(19): siRNA sense strand
caaagaguguccaaucauu

SEQ ID NO: 196606 - RNA, 19 nt, Homo sapiens
  misc_RNA (1)...(19): siRNA sense strand
uagcugaccugaauaaugu

SEQ ID NO: 196607 - RNA, 19 nt, Homo sapiens
  misc_RNA (1)...(19): siRNA sense strand
gcaugauucuauccaaauu

SEQ ID NO: 196608 - RNA, 19 nt, Homo sapiens
  misc_RNA (1)...(19): siRNA sense strand
ugaacuggcugcugaaugu

SEQ ID NO: 196609 - RNA, 19 nt, Homo sapiens
  misc_RNA (1)...(19): siRNA sense strand
gauauccugcagauuauua

SEQ ID NO: 196610 - RNA, 19 nt, Homo sapiens
  misc_RNA (1)...(19): siRNA sense strand
gagaagauguucgagacuu

SEQ ID NO: 196611 - RNA, 19 nt, Homo sapiens
  misc_RNA (1)...(19): siRNA sense strand
gcacuuuaauuaugacauc

SEQ ID NO: 196612 - RNA, 19 nt, Homo sapiens
  misc_RNA (1)...(19): siRNA sense strand
guaaagcacauuuggaaga

SEQ ID NO: 196613 - RNA, 19 nt, Homo sapiens
  misc_RNA (1)...(19): siRNA sense strand
gaauauugcacuccgacua

SEQ ID NO: 196614 - RNA, 19 nt, Homo sapiens
  misc_RNA (1)...(19): siRNA sense strand
uuauaggacugccaugaaa

SEQ ID NO: 196615 - RNA, 19 nt, Homo sapiens
  misc_RNA (1)...(19): siRNA sense strand
gggugaaguugcauccuuu

SEQ ID NO: 196616 - RNA, 19 nt, Homo sapiens
  misc_RNA (1)...(19): siRNA sense strand
gcaagagcacaacaauuug

SEQ ID NO: 196617 - RNA, 19 nt, Homo sapiens
  misc_RNA (1)...(19): siRNA sense strand
gcacaacaauuuggucaac

SEQ ID NO: 196618 - RNA, 19 nt, Homo sapiens
  misc_RNA (1)...(19): siRNA sense strand
agcaagagcacaacaauuu

SEQ ID NO: 196619 - RNA, 19 nt, Homo sapiens
  misc_RNA (1)...(19): siRNA sense strand
agaagauguucgagacuuu

SEQ ID NO: 196620 - RNA, 19 nt, Homo sapiens
  misc_RNA (1)...(19): siRNA sense strand
gagcaagagcacaacaauu

SEQ ID NO: 196621 - RNA, 19 nt, Homo sapiens
  misc_RNA (1)...(19): siRNA sense strand
ucaagcaaguggcaaguuc

SEQ ID NO: 196622 - RNA, 19 nt, Homo sapiens
  misc_RNA (1)...(19): siRNA sense strand
ccacgagacucaaacaacu

SEQ ID NO: 196623 - RNA, 19 nt, Homo sapiens
  misc_RNA (1)...(19): siRNA sense strand
cagcacaaccucaagcaaa

SEQ ID NO: 196624 - RNA, 19 nt, Homo sapiens
  misc_RNA (1)...(19): siRNA sense strand
gcaaagaguguccaaucau

SEQ ID NO: 196625 - RNA, 19 nt, Homo sapiens
  misc_RNA (1)...(19): siRNA sense strand
auggauauccugcagauua

SEQ ID NO: 196626 - RNA, 19 nt, Homo sapiens
  misc_RNA (1)...(19): siRNA sense strand
uguaacaucugcaaagagu

SEQ ID NO: 196627 - RNA, 19 nt, Homo sapiens
  misc_RNA (1)...(19): siRNA sense strand
guccggagcugcuuccaau

SEQ ID NO: 196628 - RNA, 19 nt, Homo sapiens
  misc_RNA (1)...(19): siRNA sense strand
gcaaguggcaaguucaaca

SEQ ID NO: 196629 - RNA, 19 nt, Homo sapiens
  misc_RNA (1)...(19): siRNA sense strand
gcuuccaauuugcuaauaa

SEQ ID NO: 196630 - RNA, 19 nt, Homo sapiens
  misc_RNA (1)...(19): siRNA sense strand
uggaagacaaguacagaua

SEQ ID NO: 196631 - RNA, 19 nt, Homo sapiens
  misc_RNA (1)...(19): siRNA sense strand
ggauccguguccugucuuu

SEQ ID NO: 196632 - RNA, 19 nt, Homo sapiens
  misc_RNA (1)...(19): siRNA sense strand
gucuuuagcugaccugaau

SEQ ID NO: 196633 - RNA, 19 nt, Homo sapiens
  misc_RNA (1)...(19): siRNA sense strand
gacaaguacagauaccuuu

SEQ ID NO: 196634 - RNA, 19 nt, Homo sapiens
  misc_RNA (1)...(19): siRNA sense strand
ccaagcaucaggccaaaug

SEQ ID NO: 196635 - RNA, 19 nt, Homo sapiens
  misc_RNA (1)...(19): siRNA sense strand
ggagcaagagcacaacaau

SEQ ID NO: 196636 - RNA, 19 nt, Homo sapiens
  misc_RNA (1)...(19): siRNA sense strand
guguaaagcacauuuggaa

SEQ ID NO: 196637 - RNA, 19 nt, Homo sapiens
  misc_RNA (1)...(19): siRNA sense strand
caagacaguugggugaagu

SEQ ID NO: 196638 - RNA, 19 nt, Homo sapiens
  misc_RNA (1)...(19): siRNA sense strand
gaagauguucgagacuuug

SEQ ID NO: 196639 - RNA, 19 nt, Homo sapiens
  misc_RNA (1)...(19): siRNA sense strand
gucagauucucagcuuaua

SEQ ID NO: 196640 - RNA, 19 nt, Homo sapiens
  misc_RNA (1)...(19): siRNA sense strand
uaacaucugcaaagagugu

SEQ ID NO: 196641 - RNA, 19 nt, Homo sapiens
  misc_RNA (1)...(19): siRNA sense strand
cggagcugcuuccaauuug

SEQ ID NO: 196642 - RNA, 19 nt, Homo sapiens
  misc_RNA (1)...(19): siRNA sense strand
gaagacaaguacagauacc

SEQ ID NO: 196643 - RNA, 19 nt, Homo sapiens
  misc_RNA (1)...(19): siRNA sense strand
ccauggauauccugcagau

SEQ ID NO: 196644 - RNA, 19 nt, Homo sapiens
  misc_RNA (1)...(19): siRNA sense strand
ggcaucauuucccugugua

SEQ ID NO: 196645 - RNA, 19 nt, Homo sapiens
  misc_RNA (1)...(19): siRNA sense strand
uggauauccugcagauuau

SEQ ID NO: 196646 - RNA, 19 nt, Homo sapiens
  misc_RNA (1)...(19): siRNA sense strand
ggaagacaaguacagauac

SEQ ID NO: 196647 - RNA, 19 nt, Homo sapiens
  misc_RNA (1)...(19): siRNA sense strand
ugcaaagaguguccaauca

SEQ ID NO: 196648 - RNA, 19 nt, Homo sapiens
  misc_RNA (1)...(19): siRNA sense strand
guggauaugugucugaacu

SEQ ID NO: 196649 - RNA, 19 nt, Homo sapiens
  misc_RNA (1)...(19): siRNA sense strand
acuggcugcugaauguuua

SEQ ID NO: 196650 - RNA, 19 nt, Homo sapiens
  misc_RNA (1)...(19): siRNA sense strand
acuaucccaugguggaaua

SEQ ID NO: 196651 - RNA, 19 nt, Homo sapiens
  misc_RNA (1)...(19): siRNA sense strand
ccggagcugcuuccaauuu

SEQ ID NO: 196652 - RNA, 19 nt, Homo sapiens
  misc_RNA (1)...(19): siRNA sense strand
ccaaauuccaagacaguug

SEQ ID NO: 196653 - RNA, 19 nt, Homo sapiens
  misc_RNA (1)...(19): siRNA sense strand
cagaaacugccaagcauca

SEQ ID NO: 196654 - RNA, 19 nt, Homo sapiens
  misc_RNA (1)...(19): siRNA sense strand
uaugacaucugccaaagcu

SEQ ID NO: 196655 - RNA, 19 nt, Homo sapiens
  misc_RNA (1)...(19): siRNA sense strand
aaugucagauucucagcuu

SEQ ID NO: 196656 - RNA, 19 nt, Homo sapiens
  misc_RNA (1)...(19): siRNA sense strand
ucgagacuuugccaaggua

SEQ ID NO: 196657 - RNA, 19 nt, Homo sapiens
  misc_RNA (1)...(19): siRNA sense strand
gcaaaaggccauaaaaugc

SEQ ID NO: 196658 - RNA, 19 nt, Homo sapiens
  misc_RNA (1)...(19): siRNA sense strand
cugcaugauucuauccaaa

SEQ ID NO: 196659 - RNA, 19 nt, Homo sapiens
  misc_RNA (1)...(19): siRNA sense strand
uaaagcacauuuggaagac

SEQ ID NO: 196660 - RNA, 19 nt, Homo sapiens
  misc_RNA (1)...(19): siRNA sense strand
acaggagucuaaagcacuu

SEQ ID NO: 196661 - RNA, 19 nt, Homo sapiens
  misc_RNA (1)...(19): siRNA sense strand
acagauaccuuuucaagca

SEQ ID NO: 196662 - RNA, 19 nt, Homo sapiens
  misc_RNA (1)...(19): siRNA sense strand
aagcacauuuggaagacaa

SEQ ID NO: 196663 - RNA, 19 nt, Homo sapiens
  misc_RNA (1)...(19): siRNA sense strand
gcuaauaauaagccagaga

SEQ ID NO: 196664 - RNA, 19 nt, Homo sapiens
  misc_RNA (1)...(19): siRNA sense strand
caagagcacaacaauuugg

SEQ ID NO: 196665 - RNA, 19 nt, Homo sapiens
  misc_RNA (1)...(19): siRNA sense strand
ccugucagcugcaugugau

SEQ ID NO: 196666 - RNA, 19 nt, Homo sapiens
  misc_RNA (1)...(19): siRNA sense strand
gcugcugaauguuuaugau

SEQ ID NO: 196667 - RNA, 19 nt, Homo sapiens
  misc_RNA (1)...(19): siRNA sense strand
acagagcucuaccagucuu

SEQ ID NO: 196668 - RNA, 19 nt, Homo sapiens
  misc_RNA (1)...(19): siRNA sense strand
acaguugggugaaguugca

SEQ ID NO: 196669 - RNA, 19 nt, Homo sapiens
  misc_RNA (1)...(19): siRNA sense strand
guuugaccacuauuuauga

SEQ ID NO: 196670 - RNA, 19 nt, Homo sapiens
  misc_RNA (1)...(19): siRNA sense strand
gcuuauaggacugccauga

SEQ ID NO: 196671 - RNA, 19 nt, Homo sapiens
  misc_RNA (1)...(19): siRNA sense strand
caucaggccaaauguaaca

SEQ ID NO: 196672 - RNA, 19 nt, Homo sapiens
  misc_RNA (1)...(19): siRNA sense strand
gauucuauccaaauuccaa

SEQ ID NO: 196673 - RNA, 19 nt, Homo sapiens
  misc_RNA (1)...(19): siRNA sense strand
ggcaaguucaacaggauuu

SEQ ID NO: 196674 - RNA, 19 nt, Homo sapiens
  misc_RNA (1)...(19): siRNA sense strand
gaacuggcugcugaauguu

SEQ ID NO: 196675 - RNA, 19 nt, Homo sapiens
  misc_RNA (1)...(19): siRNA sense strand
cugcugaauguuuaugaua

SEQ ID NO: 196676 - RNA, 19 nt, Homo sapiens
  misc_RNA (1)...(19): siRNA sense strand
aagcaucaggccaaaugua

SEQ ID NO: 196677 - RNA, 19 nt, Homo sapiens
  misc_RNA (1)...(19): siRNA sense strand
uggcaucauuucccugugu

SEQ ID NO: 196678 - RNA, 19 nt, Homo sapiens
  misc_RNA (1)...(19): siRNA sense strand
ccaugaaacuccgaagacu

SEQ ID NO: 196679 - RNA, 19 nt, Homo sapiens
  misc_RNA (1)...(19): siRNA sense strand
auaauaagccagagaucga

SEQ ID NO: 196680 - RNA, 19 nt, Homo sapiens
  misc_RNA (1)...(19): siRNA sense strand
cuaauaauaagccagagau

SEQ ID NO: 196681 - RNA, 19 nt, Homo sapiens
  misc_RNA (1)...(19): siRNA sense strand
ugggugaaguugcauccuu

SEQ ID NO: 196682 - RNA, 19 nt, Homo sapiens
  misc_RNA (1)...(19): siRNA sense strand
caucauuucccuguguaaa

SEQ ID NO: 196683 - RNA, 19 nt, Homo sapiens
  misc_RNA (1)...(19): siRNA sense strand
gcguggauaugugucugaa

SEQ ID NO: 196684 - RNA, 19 nt, Homo sapiens
  misc_RNA (1)...(19): siRNA sense strand
gcacuaucccaugguggaa

SEQ ID NO: 196685 - RNA, 19 nt, Homo sapiens
  misc_RNA (1)...(19): siRNA sense strand
gagccugucagcugcaugu

SEQ ID NO: 196686 - RNA, 19 nt, Homo sapiens
  misc_RNA (1)...(19): siRNA sense strand
guacagauaccuuuucaag

SEQ ID NO: 196687 - RNA, 19 nt, Homo sapiens
  misc_RNA (1)...(19): siRNA sense strand
gucccucucugcguggaua

SEQ ID NO: 196688 - RNA, 19 nt, Homo sapiens
  misc_RNA (1)...(19): siRNA sense strand
ggagcugcuuccaauuugc

SEQ ID NO: 196689 - RNA, 19 nt, Homo sapiens
  misc_RNA (1)...(19): siRNA sense strand
uuagcugaccugaauaaug

SEQ ID NO: 196690 - RNA, 19 nt, Homo sapiens
  misc_RNA (1)...(19): siRNA sense strand
guggcaaguucaacaggau

SEQ ID NO: 196691 - RNA, 19 nt, Homo sapiens
  misc_RNA (1)...(19): siRNA sense strand
acaacaauuuggucaacgu

SEQ ID NO: 196692 - RNA, 19 nt, Homo sapiens
  misc_RNA (1)...(19): siRNA sense strand
gacuacaucaggagaagau

SEQ ID NO: 196693 - RNA, 19 nt, Homo sapiens
  misc_RNA (1)...(19): siRNA sense strand
uaauaagccagagaucgaa

SEQ ID NO: 196694 - RNA, 19 nt, Homo sapiens
  misc_RNA (1)...(19): siRNA sense strand
ugucagauucucagcuuau

SEQ ID NO: 196695 - RNA, 19 nt, Homo sapiens
  misc_RNA (1)...(19): siRNA sense strand
ggauauccugcagauuauu

SEQ ID NO: 196696 - RNA, 19 nt, Homo sapiens
  misc_RNA (1)...(19): siRNA sense strand
agcaucaggccaaauguaa

SEQ ID NO: 196697 - RNA, 19 nt, Homo sapiens
  misc_RNA (1)...(19): siRNA sense strand
gcccuuugcuuggaucucu

SEQ ID NO: 196698 - RNA, 19 nt, Homo sapiens
  misc_RNA (1)...(19): siRNA sense strand
gcugaauguuuaugauacg

SEQ ID NO: 196699 - RNA, 19 nt, Homo sapiens
  misc_RNA (1)...(19): siRNA sense strand
agacuuugccaagguacua

SEQ ID NO: 196700 - RNA, 19 nt, Homo sapiens
  misc_RNA (1)...(19): siRNA sense strand
caagcaaguggcaaguuca

SEQ ID NO: 196701 - RNA, 19 nt, Homo sapiens
  misc_RNA (1)...(19): siRNA sense strand
agacaaguacagauaccuu

SEQ ID NO: 196702 - RNA, 19 nt, Homo sapiens
  misc_RNA (1)...(19): siRNA sense strand
gcaucauuucccuguguaa

SEQ ID NO: 196703 - RNA, 19 nt, Homo sapiens
  misc_RNA (1)...(19): siRNA sense strand
cugcaaagaguguccaauc

SEQ ID NO: 196704 - RNA, 19 nt, Homo sapiens
  misc_RNA (1)...(19): siRNA sense strand
cuuauaggacugccaugaa

SEQ ID NO: 196705 - RNA, 19 nt, Homo sapiens
  misc_RNA (1)...(19): siRNA sense strand
caaagaguguccaaucauu

SEQ ID NO: 196706 - RNA, 19 nt, Homo sapiens
  misc_RNA (1)...(19): siRNA sense strand
uagcugaccugaauaaugu

SEQ ID NO: 196707 - RNA, 19 nt, Homo sapiens
  misc_RNA (1)...(19): siRNA sense strand
gcaugauucuauccaaauu

SEQ ID NO: 196708 - RNA, 19 nt, Homo sapiens
  misc_RNA (1)...(19): siRNA sense strand
ugaacuggcugcugaaugu

SEQ ID NO: 196709 - RNA, 19 nt, Homo sapiens
  misc_RNA (1)...(19): siRNA sense strand
gauauccugcagauuauua

SEQ ID NO: 196710 - RNA, 19 nt, Homo sapiens
  misc_RNA (1)...(19): siRNA sense strand
gagaagauguucgagacuu

SEQ ID NO: 196711 - RNA, 19 nt, Homo sapiens
  misc_RNA (1)...(19): siRNA sense strand
gcacuuuaauuaugacauc

SEQ ID NO: 196712 - RNA, 19 nt, Homo sapiens
  misc_RNA (1)...(19): siRNA sense strand
guaaagcacauuuggaaga

SEQ ID NO: 196713 - RNA, 19 nt, Homo sapiens
  misc_RNA (1)...(19): siRNA sense strand
gaauauugcacuccgacua

SEQ ID NO: 196714 - RNA, 19 nt, Homo sapiens
  misc_RNA (1)...(19): siRNA sense strand
uuauaggacugccaugaaa

SEQ ID NO: 196715 - RNA, 19 nt, Homo sapiens
  misc_RNA (1)...(19): siRNA sense strand
gggugaaguugcauccuuu

SEQ ID NO: 196716 - RNA, 19 nt, Homo sapiens
  misc_RNA (1)...(19): siRNA sense strand
gcaagagcacaacaauuug

SEQ ID NO: 196717 - RNA, 19 nt, Homo sapiens
  misc_RNA (1)...(19): siRNA sense strand
gcacaacaauuuggucaac

SEQ ID NO: 196718 - RNA, 19 nt, Homo sapiens
  misc_RNA (1)...(19): siRNA sense strand
agcaagagcacaacaauuu

SEQ ID NO: 196719 - RNA, 19 nt, Homo sapiens
  misc_RNA (1)...(19): siRNA sense strand
agaagauguucgagacuuu

SEQ ID NO: 196720 - RNA, 19 nt, Homo sapiens
  misc_RNA (1)...(19): siRNA sense strand
gagcaagagcacaacaauu

SEQ ID NO: 196721 - RNA, 19 nt, Homo sapiens
  misc_RNA (1)...(19): siRNA sense strand
ucaagcaaguggcaaguuc

SEQ ID NO: 196722 - RNA, 19 nt, Homo sapiens
  misc_RNA (1)...(19): siRNA sense strand
ccacgagacucaaacaacu

SEQ ID NO: 196723 - RNA, 19 nt, Homo sapiens
  misc_RNA (1)...(19): siRNA sense strand
cagcacaaccucaagcaaa

SEQ ID NO: 196724 - RNA, 19 nt, Homo sapiens
  misc_RNA (1)...(19): siRNA sense strand
gcaaagaguguccaaucau

SEQ ID NO: 196725 - RNA, 19 nt, Homo sapiens
  misc_RNA (1)...(19): siRNA sense strand
auggauauccugcagauua

SEQ ID NO: 196726 - RNA, 19 nt, Homo sapiens
  misc_RNA (1)...(19): siRNA sense strand
uguaacaucugcaaagagu

SEQ ID NO: 196727 - RNA, 19 nt, Homo sapiens
  misc_RNA (1)...(19): siRNA sense strand
guccggagcugcuuccaau

SEQ ID NO: 196728 - RNA, 19 nt, Homo sapiens
  misc_RNA (1)...(19): siRNA sense strand
gcaaguggcaaguucaaca

SEQ ID NO: 196729 - RNA, 19 nt, Homo sapiens
  misc_RNA (1)...(19): siRNA sense strand
gcuuccaauuugcuaauaa

SEQ ID NO: 196730 - RNA, 19 nt, Homo sapiens
  misc_RNA (1)...(19): siRNA sense strand
uggaagacaaguacagaua

SEQ ID NO: 196731 - RNA, 19 nt, Homo sapiens
  misc_RNA (1)...(19): siRNA sense strand
ggauccguguccugucuuu

SEQ ID NO: 196732 - RNA, 19 nt, Homo sapiens
  misc_RNA (1)...(19): siRNA sense strand
gucuuuagcugaccugaau

SEQ ID NO: 196733 - RNA, 19 nt, Homo sapiens
  misc_RNA (1)...(19): siRNA sense strand
gacaaguacagauaccuuu

SEQ ID NO: 196734 - RNA, 19 nt, Homo sapiens
  misc_RNA (1)...(19): siRNA sense strand
ccaagcaucaggccaaaug

SEQ ID NO: 196735 - RNA, 19 nt, Homo sapiens
  misc_RNA (1)...(19): siRNA sense strand
ggagcaagagcacaacaau

SEQ ID NO: 196736 - RNA, 19 nt, Homo sapiens
  misc_RNA (1)...(19): siRNA sense strand
guguaaagcacauuuggaa

SEQ ID NO: 196737 - RNA, 19 nt, Homo sapiens
  misc_RNA (1)...(19): siRNA sense strand
caagacaguugggugaagu

SEQ ID NO: 196738 - RNA, 19 nt, Homo sapiens
  misc_RNA (1)...(19): siRNA sense strand
gaagauguucgagacuuug

SEQ ID NO: 196739 - RNA, 19 nt, Homo sapiens
  misc_RNA (1)...(19): siRNA sense strand
gucagauucucagcuuaua

SEQ ID NO: 196740 - RNA, 19 nt, Homo sapiens
  misc_RNA (1)...(19): siRNA sense strand
uaacaucugcaaagagugu

SEQ ID NO: 196741 - RNA, 19 nt, Homo sapiens
  misc_RNA (1)...(19): siRNA sense strand
cggagcugcuuccaauuug

SEQ ID NO: 196742 - RNA, 19 nt, Homo sapiens
  misc_RNA (1)...(19): siRNA sense strand
gaagacaaguacagauacc

SEQ ID NO: 196743 - RNA, 19 nt, Homo sapiens
  misc_RNA (1)...(19): siRNA sense strand
ccauggauauccugcagau

SEQ ID NO: 196744 - RNA, 19 nt, Homo sapiens
  misc_RNA (1)...(19): siRNA sense strand
ggcaucauuucccugugua

SEQ ID NO: 196745 - RNA, 19 nt, Homo sapiens
  misc_RNA (1)...(19): siRNA sense strand
uggauauccugcagauuau

SEQ ID NO: 196746 - RNA, 19 nt, Homo sapiens
  misc_RNA (1)...(19): siRNA sense strand
ggaagacaaguacagauac

SEQ ID NO: 196747 - RNA, 19 nt, Homo sapiens
  misc_RNA (1)...(19): siRNA sense strand
ugcaaagaguguccaauca

SEQ ID NO: 196748 - RNA, 19 nt, Homo sapiens
  misc_RNA (1)...(19): siRNA sense strand
guggauaugugucugaacu

SEQ ID NO: 196749 - RNA, 19 nt, Homo sapiens
  misc_RNA (1)...(19): siRNA sense strand
acuggcugcugaauguuua

SEQ ID NO: 196750 - RNA, 19 nt, Homo sapiens
  misc_RNA (1)...(19): siRNA sense strand
acuaucccaugguggaaua

SEQ ID NO: 196751 - RNA, 19 nt, Homo sapiens
  misc_RNA (1)...(19): siRNA sense strand
ccggagcugcuuccaauuu

SEQ ID NO: 196752 - RNA, 19 nt, Homo sapiens
  misc_RNA (1)...(19): siRNA sense strand
ccaaauuccaagacaguug

SEQ ID NO: 196753 - RNA, 19 nt, Homo sapiens
  misc_RNA (1)...(19): siRNA sense strand
cagaaacugccaagcauca

SEQ ID NO: 196754 - RNA, 19 nt, Homo sapiens
  misc_RNA (1)...(19): siRNA sense strand
uaugacaucugccaaagcu

SEQ ID NO: 196755 - RNA, 19 nt, Homo sapiens
  misc_RNA (1)...(19): siRNA sense strand
aaugucagauucucagcuu

SEQ ID NO: 196756 - RNA, 19 nt, Homo sapiens
  misc_RNA (1)...(19): siRNA sense strand
ucgagacuuugccaaggua

SEQ ID NO: 196757 - RNA, 19 nt, Homo sapiens
  misc_RNA (1)...(19): siRNA sense strand
gcaaaaggccauaaaaugc

SEQ ID NO: 196758 - RNA, 19 nt, Homo sapiens
  misc_RNA (1)...(19): siRNA sense strand
cugcaugauucuauccaaa

SEQ ID NO: 196759 - RNA, 19 nt, Homo sapiens
  misc_RNA (1)...(19): siRNA sense strand
uaaagcacauuuggaagac

SEQ ID NO: 196760 - RNA, 19 nt, Homo sapiens
  misc_RNA (1)...(19): siRNA sense strand
acaggagucuaaagcacuu

SEQ ID NO: 196761 - RNA, 19 nt, Homo sapiens
  misc_RNA (1)...(19): siRNA sense strand
acagauaccuuuucaagca

SEQ ID NO: 196762 - RNA, 19 nt, Homo sapiens
  misc_RNA (1)...(19): siRNA sense strand
aagcacauuuggaagacaa

SEQ ID NO: 196763 - RNA, 19 nt, Homo sapiens
  misc_RNA (1)...(19): siRNA sense strand
gcuaauaauaagccagaga

SEQ ID NO: 196764 - RNA, 19 nt, Homo sapiens
  misc_RNA (1)...(19): siRNA sense strand
caagagcacaacaauuugg

SEQ ID NO: 196765 - RNA, 19 nt, Homo sapiens
  misc_RNA (1)...(19): siRNA sense strand
ccugucagcugcaugugau

SEQ ID NO: 196766 - RNA, 19 nt, Homo sapiens
  misc_RNA (1)...(19): siRNA sense strand
gcugcugaauguuuaugau

SEQ ID NO: 196767 - RNA, 19 nt, Homo sapiens
  misc_RNA (1)...(19): siRNA sense strand
acagagcucuaccagucuu

SEQ ID NO: 196768 - RNA, 19 nt, Homo sapiens
  misc_RNA (1)...(19): siRNA sense strand
acaguugggugaaguugca

SEQ ID NO: 196769 - RNA, 19 nt, Homo sapiens
  misc_RNA (1)...(19): siRNA sense strand
guuugaccacuauuuauga

SEQ ID NO: 196770 - RNA, 19 nt, Homo sapiens
  misc_RNA (1)...(19): siRNA sense strand
gcuuauaggacugccauga

SEQ ID NO: 196771 - RNA, 19 nt, Homo sapiens
  misc_RNA (1)...(19): siRNA sense strand
caucaggccaaauguaaca

SEQ ID NO: 196772 - RNA, 19 nt, Homo sapiens
  misc_RNA (1)...(19): siRNA sense strand
gauucuauccaaauuccaa

SEQ ID NO: 196773 - RNA, 19 nt, Homo sapiens
  misc_RNA (1)...(19): siRNA sense strand
ggcaaguucaacaggauuu

SEQ ID NO: 196774 - RNA, 19 nt, Homo sapiens
  misc_RNA (1)...(19): siRNA sense strand
gaacuggcugcugaauguu

SEQ ID NO: 196775 - RNA, 19 nt, Homo sapiens
  misc_RNA (1)...(19): siRNA sense strand
cugcugaauguuuaugaua

SEQ ID NO: 196776 - RNA, 19 nt, Homo sapiens
  misc_RNA (1)...(19): siRNA sense strand
aagcaucaggccaaaugua

SEQ ID NO: 196777 - RNA, 19 nt, Homo sapiens
  misc_RNA (1)...(19): siRNA sense strand
uggcaucauuucccugugu

SEQ ID NO: 196778 - RNA, 19 nt, Homo sapiens
  misc_RNA (1)...(19): siRNA sense strand
ccaugaaacuccgaagacu

SEQ ID NO: 196779 - RNA, 19 nt, Homo sapiens
  misc_RNA (1)...(19): siRNA sense strand
auaauaagccagagaucga

SEQ ID NO: 196780 - RNA, 19 nt, Homo sapiens
  misc_RNA (1)...(19): siRNA sense strand
cuaauaauaagccagagau

SEQ ID NO: 196781 - RNA, 19 nt, Homo sapiens
  misc_RNA (1)...(19): siRNA sense strand
ugggugaaguugcauccuu

SEQ ID NO: 196782 - RNA, 19 nt, Homo sapiens
  misc_RNA (1)...(19): siRNA sense strand
caucauuucccuguguaaa

SEQ ID NO: 196783 - RNA, 19 nt, Homo sapiens
  misc_RNA (1)...(19): siRNA sense strand
gcguggauaugugucugaa

SEQ ID NO: 196784 - RNA, 19 nt, Homo sapiens
  misc_RNA (1)...(19): siRNA sense strand
gcacuaucccaugguggaa

SEQ ID NO: 196785 - RNA, 19 nt, Homo sapiens
  misc_RNA (1)...(19): siRNA sense strand
gagccugucagcugcaugu

SEQ ID NO: 196786 - RNA, 19 nt, Homo sapiens
  misc_RNA (1)...(19): siRNA sense strand
guacagauaccuuuucaag

SEQ ID NO: 196787 - RNA, 19 nt, Homo sapiens
  misc_RNA (1)...(19): siRNA sense strand
gucccucucugcguggaua

SEQ ID NO: 196788 - RNA, 19 nt, Homo sapiens
  misc_RNA (1)...(19): siRNA sense strand
ggagcugcuuccaauuugc

SEQ ID NO: 196789 - RNA, 19 nt, Homo sapiens
  misc_RNA (1)...(19): siRNA sense strand
uuagcugaccugaauaaug

SEQ ID NO: 196790 - RNA, 19 nt, Homo sapiens
  misc_RNA (1)...(19): siRNA sense strand
guggcaaguucaacaggau

SEQ ID NO: 196791 - RNA, 19 nt, Homo sapiens
  misc_RNA (1)...(19): siRNA sense strand
acaacaauuuggucaacgu

SEQ ID NO: 196792 - RNA, 19 nt, Homo sapiens
  misc_RNA (1)...(19): siRNA sense strand
gacuacaucaggagaagau

SEQ ID NO: 196793 - RNA, 19 nt, Homo sapiens
  misc_RNA (1)...(19): siRNA sense strand
uaauaagccagagaucgaa

SEQ ID NO: 196794 - RNA, 19 nt, Homo sapiens
  misc_RNA (1)...(19): siRNA sense strand
ugucagauucucagcuuau

SEQ ID NO: 196795 - RNA, 19 nt, Homo sapiens
  misc_RNA (1)...(19): siRNA sense strand
ggauauccugcagauuauu

SEQ ID NO: 196796 - RNA, 19 nt, Homo sapiens
  misc_RNA (1)...(19): siRNA sense strand
agcaucaggccaaauguaa

SEQ ID NO: 196797 - RNA, 19 nt, Homo sapiens
  misc_RNA (1)...(19): siRNA sense strand
gcccuuugcuuggaucucu

SEQ ID NO: 196798 - RNA, 19 nt, Homo sapiens
  misc_RNA (1)...(19): siRNA sense strand
gcugaauguuuaugauacg

SEQ ID NO: 196799 - RNA, 19 nt, Homo sapiens
  misc_RNA (1)...(19): siRNA sense strand
agacuuugccaagguacua

SEQ ID NO: 196800 - RNA, 19 nt, Homo sapiens
  misc_RNA (1)...(19): siRNA sense strand
caagcaaguggcaaguuca

SEQ ID NO: 196801 - RNA, 19 nt, Homo sapiens
  misc_RNA (1)...(19): siRNA sense strand
agacaaguacagauaccuu

SEQ ID NO: 196802 - RNA, 19 nt, Homo sapiens
  misc_RNA (1)...(19): siRNA sense strand
gcaucauuucccuguguaa

SEQ ID NO: 196803 - RNA, 19 nt, Homo sapiens
  misc_RNA (1)...(19): siRNA sense strand
cugcaaagaguguccaauc

SEQ ID NO: 196804 - RNA, 19 nt, Homo sapiens
  misc_RNA (1)...(19): siRNA sense strand
cuuauaggacugccaugaa

SEQ ID NO: 196805 - RNA, 19 nt, Homo sapiens
  misc_RNA (1)...(19): siRNA sense strand
caaagaguguccaaucauu

SEQ ID NO: 196806 - RNA, 19 nt, Homo sapiens
  misc_RNA (1)...(19): siRNA sense strand
uagcugaccugaauaaugu

SEQ ID NO: 196807 - RNA, 19 nt, Homo sapiens
  misc_RNA (1)...(19): siRNA sense strand
gcaugauucuauccaaauu

SEQ ID NO: 196808 - RNA, 19 nt, Homo sapiens
  misc_RNA (1)...(19): siRNA sense strand
ugaacuggcugcugaaugu

SEQ ID NO: 196809 - RNA, 19 nt, Homo sapiens
  misc_RNA (1)...(19): siRNA sense strand
gauauccugcagauuauua

SEQ ID NO: 196810 - RNA, 19 nt, Homo sapiens
  misc_RNA (1)...(19): siRNA sense strand
gagaagauguucgagacuu

SEQ ID NO: 196811 - RNA, 19 nt, Homo sapiens
  misc_RNA (1)...(19): siRNA sense strand
gcacuuuaauuaugacauc

SEQ ID NO: 196812 - RNA, 19 nt, Homo sapiens
  misc_RNA (1)...(19): siRNA sense strand
guaaagcacauuuggaaga

SEQ ID NO: 196813 - RNA, 19 nt, Homo sapiens
  misc_RNA (1)...(19): siRNA sense strand
gaauauugcacuccgacua

SEQ ID NO: 196814 - RNA, 19 nt, Homo sapiens
  misc_RNA (1)...(19): siRNA sense strand
uuauaggacugccaugaaa

SEQ ID NO: 196815 - RNA, 19 nt, Homo sapiens
  misc_RNA (1)...(19): siRNA sense strand
gggugaaguugcauccuuu

SEQ ID NO: 196816 - RNA, 19 nt, Homo sapiens
  misc_RNA (1)...(19): siRNA sense strand
gcaagagcacaacaauuug

SEQ ID NO: 196817 - RNA, 19 nt, Homo sapiens
  misc_RNA (1)...(19): siRNA sense strand
gcacaacaauuuggucaac

SEQ ID NO: 196818 - RNA, 19 nt, Homo sapiens
  misc_RNA (1)...(19): siRNA sense strand
agcaagagcacaacaauuu

SEQ ID NO: 196819 - RNA, 19 nt, Homo sapiens
  misc_RNA (1)...(19): siRNA sense strand
agaagauguucgagacuuu

SEQ ID NO: 196820 - RNA, 19 nt, Homo sapiens
  misc_RNA (1)...(19): siRNA sense strand
gagcaagagcacaacaauu

SEQ ID NO: 196821 - RNA, 19 nt, Homo sapiens
  misc_RNA (1)...(19): siRNA sense strand
ucaagcaaguggcaaguuc

SEQ ID NO: 196822 - RNA, 19 nt, Homo sapiens
  misc_RNA (1)...(19): siRNA sense strand
ccacgagacucaaacaacu

SEQ ID NO: 196823 - RNA, 19 nt, Homo sapiens
  misc_RNA (1)...(19): siRNA sense strand
cagcacaaccucaagcaaa

SEQ ID NO: 196824 - RNA, 19 nt, Homo sapiens
  misc_RNA (1)...(19): siRNA sense strand
gcaaagaguguccaaucau

SEQ ID NO: 196825 - RNA, 19 nt, Homo sapiens
  misc_RNA (1)...(19): siRNA sense strand
auggauauccugcagauua

SEQ ID NO: 196826 - RNA, 19 nt, Homo sapiens
  misc_RNA (1)...(19): siRNA sense strand
uguaacaucugcaaagagu

SEQ ID NO: 196827 - RNA, 19 nt, Homo sapiens
  misc_RNA (1)...(19): siRNA sense strand
guccggagcugcuuccaau

SEQ ID NO: 196828 - RNA, 19 nt, Homo sapiens
  misc_RNA (1)...(19): siRNA sense strand
gcaaguggcaaguucaaca

SEQ ID NO: 196829 - RNA, 19 nt, Homo sapiens
  misc_RNA (1)...(19): siRNA sense strand
gcuuccaauuugcuaauaa

SEQ ID NO: 196830 - RNA, 19 nt, Homo sapiens
  misc_RNA (1)...(19): siRNA sense strand
uggaagacaaguacagaua

SEQ ID NO: 196831 - RNA, 19 nt, Homo sapiens
  misc_RNA (1)...(19): siRNA sense strand
ggauccguguccugucuuu

SEQ ID NO: 196832 - RNA, 19 nt, Homo sapiens
  misc_RNA (1)...(19): siRNA sense strand
gucuuuagcugaccugaau

SEQ ID NO: 196833 - RNA, 19 nt, Homo sapiens
  misc_RNA (1)...(19): siRNA sense strand
gacaaguacagauaccuuu

SEQ ID NO: 196834 - RNA, 19 nt, Homo sapiens
  misc_RNA (1)...(19): siRNA sense strand
ccaagcaucaggccaaaug

SEQ ID NO: 196835 - RNA, 19 nt, Homo sapiens
  misc_RNA (1)...(19): siRNA sense strand
ggagcaagagcacaacaau

SEQ ID NO: 196836 - RNA, 19 nt, Homo sapiens
  misc_RNA (1)...(19): siRNA sense strand
guguaaagcacauuuggaa

SEQ ID NO: 196837 - RNA, 19 nt, Homo sapiens
  misc_RNA (1)...(19): siRNA sense strand
caagacaguugggugaagu

SEQ ID NO: 196838 - RNA, 19 nt, Homo sapiens
  misc_RNA (1)...(19): siRNA sense strand
gaagauguucgagacuuug

SEQ ID NO: 196839 - RNA, 19 nt, Homo sapiens
  misc_RNA (1)...(19): siRNA sense strand
gucagauucucagcuuaua

SEQ ID NO: 196840 - RNA, 19 nt, Homo sapiens
  misc_RNA (1)...(19): siRNA sense strand
uaacaucugcaaagagugu

SEQ ID NO: 196841 - RNA, 19 nt, Homo sapiens
  misc_RNA (1)...(19): siRNA sense strand
cggagcugcuuccaauuug

SEQ ID NO: 196842 - RNA, 19 nt, Homo sapiens
  misc_RNA (1)...(19): siRNA sense strand
gaagacaaguacagauacc

SEQ ID NO: 196843 - RNA, 19 nt, Homo sapiens
  misc_RNA (1)...(19): siRNA sense strand
ccauggauauccugcagau

SEQ ID NO: 196844 - RNA, 19 nt, Homo sapiens
  misc_RNA (1)...(19): siRNA sense strand
ggcaucauuucccugugua

SEQ ID NO: 196845 - RNA, 19 nt, Homo sapiens
  misc_RNA (1)...(19): siRNA sense strand
uggauauccugcagauuau

SEQ ID NO: 196846 - RNA, 19 nt, Homo sapiens
  misc_RNA (1)...(19): siRNA sense strand
ggaagacaaguacagauac

SEQ ID NO: 196847 - RNA, 19 nt, Homo sapiens
  misc_RNA (1)...(19): siRNA sense strand
ugcaaagaguguccaauca

SEQ ID NO: 196848 - RNA, 19 nt, Homo sapiens
  misc_RNA (1)...(19): siRNA sense strand
guggauaugugucugaacu

SEQ ID NO: 196849 - RNA, 19 nt, Homo sapiens
  misc_RNA (1)...(19): siRNA sense strand
acuggcugcugaauguuua

SEQ ID NO: 196850 - RNA, 19 nt, Homo sapiens
  misc_RNA (1)...(19): siRNA sense strand
acuaucccaugguggaaua

SEQ ID NO: 196851 - RNA, 19 nt, Homo sapiens
  misc_RNA (1)...(19): siRNA sense strand
ccggagcugcuuccaauuu

SEQ ID NO: 196852 - RNA, 19 nt, Homo sapiens
  misc_RNA (1)...(19): siRNA sense strand
ccaaauuccaagacaguug

SEQ ID NO: 196853 - RNA, 19 nt, Homo sapiens
  misc_RNA (1)...(19): siRNA sense strand
cagaaacugccaagcauca

SEQ ID NO: 196854 - RNA, 19 nt, Homo sapiens
  misc_RNA (1)...(19): siRNA sense strand
uaugacaucugccaaagcu

SEQ ID NO: 196855 - RNA, 19 nt, Homo sapiens
  misc_RNA (1)...(19): siRNA sense strand
aaugucagauucucagcuu

SEQ ID NO: 196856 - RNA, 19 nt, Homo sapiens
  misc_RNA (1)...(19): siRNA sense strand
ucgagacuuugccaaggua

SEQ ID NO: 196857 - RNA, 19 nt, Homo sapiens
  misc_RNA (1)...(19): siRNA sense strand
gcaaaaggccauaaaaugc

SEQ ID NO: 196858 - RNA, 19 nt, Homo sapiens
  misc_RNA (1)...(19): siRNA sense strand
cugcaugauucuauccaaa

SEQ ID NO: 196859 - RNA, 19 nt, Homo sapiens
  misc_RNA (1)...(19): siRNA sense strand
uaaagcacauuuggaagac

SEQ ID NO: 196860 - RNA, 19 nt, Homo sapiens
  misc_RNA (1)...(19): siRNA sense strand
acaggagucuaaagcacuu

SEQ ID NO: 196861 - RNA, 19 nt, Homo sapiens
  misc_RNA (1)...(19): siRNA sense strand
acagauaccuuuucaagca

SEQ ID NO: 196862 - RNA, 19 nt, Homo sapiens
  misc_RNA (1)...(19): siRNA sense strand
aagcacauuuggaagacaa

SEQ ID NO: 196863 - RNA, 19 nt, Homo sapiens
  misc_RNA (1)...(19): siRNA sense strand
gcuaauaauaagccagaga

SEQ ID NO: 196864 - RNA, 19 nt, Homo sapiens
  misc_RNA (1)...(19): siRNA sense strand
caagagcacaacaauuugg

SEQ ID NO: 196865 - RNA, 19 nt, Homo sapiens
  misc_RNA (1)...(19): siRNA sense strand
ccugucagcugcaugugau

SEQ ID NO: 196866 - RNA, 19 nt, Homo sapiens
  misc_RNA (1)...(19): siRNA sense strand
gcugcugaauguuuaugau

SEQ ID NO: 196867 - RNA, 19 nt, Homo sapiens
  misc_RNA (1)...(19): siRNA sense strand
acagagcucuaccagucuu

SEQ ID NO: 196868 - RNA, 19 nt, Homo sapiens
  misc_RNA (1)...(19): siRNA sense strand
acaguugggugaaguugca

SEQ ID NO: 196869 - RNA, 19 nt, Homo sapiens
  misc_RNA (1)...(19): siRNA sense strand
guuugaccacuauuuauga

SEQ ID NO: 196870 - RNA, 19 nt, Homo sapiens
  misc_RNA (1)...(19): siRNA sense strand
gcuuauaggacugccauga

SEQ ID NO: 196871 - RNA, 19 nt, Homo sapiens
  misc_RNA (1)...(19): siRNA sense strand
caucaggccaaauguaaca

SEQ ID NO: 196872 - RNA, 19 nt, Homo sapiens
  misc_RNA (1)...(19): siRNA sense strand
gauucuauccaaauuccaa

SEQ ID NO: 196873 - RNA, 19 nt, Homo sapiens
  misc_RNA (1)...(19): siRNA sense strand
ggcaaguucaacaggauuu

SEQ ID NO: 196874 - RNA, 19 nt, Homo sapiens
  misc_RNA (1)...(19): siRNA sense strand
gaacuggcugcugaauguu

SEQ ID NO: 196875 - RNA, 19 nt, Homo sapiens
  misc_RNA (1)...(19): siRNA sense strand
cugcugaauguuuaugaua

SEQ ID NO: 196876 - RNA, 19 nt, Homo sapiens
  misc_RNA (1)...(19): siRNA sense strand
aagcaucaggccaaaugua

SEQ ID NO: 196877 - RNA, 19 nt, Homo sapiens
  misc_RNA (1)...(19): siRNA sense strand
uggcaucauuucccugugu

SEQ ID NO: 196878 - RNA, 19 nt, Homo sapiens
  misc_RNA (1)...(19): siRNA sense strand
ccaugaaacuccgaagacu

SEQ ID NO: 196879 - RNA, 19 nt, Homo sapiens
  misc_RNA (1)...(19): siRNA sense strand
auaauaagccagagaucga

SEQ ID NO: 196880 - RNA, 19 nt, Homo sapiens
  misc_RNA (1)...(19): siRNA sense strand
cuaauaauaagccagagau

SEQ ID NO: 196881 - RNA, 19 nt, Homo sapiens
  misc_RNA (1)...(19): siRNA sense strand
ugggugaaguugcauccuu

SEQ ID NO: 196882 - RNA, 19 nt, Homo sapiens
  misc_RNA (1)...(19): siRNA sense strand
caucauuucccuguguaaa

SEQ ID NO: 196883 - RNA, 19 nt, Homo sapiens
  misc_RNA (1)...(19): siRNA sense strand
gcguggauaugugucugaa

SEQ ID NO: 196884 - RNA, 19 nt, Homo sapiens
  misc_RNA (1)...(19): siRNA sense strand
gcacuaucccaugguggaa

SEQ ID NO: 196885 - RNA, 19 nt, Homo sapiens
  misc_RNA (1)...(19): siRNA sense strand
gagccugucagcugcaugu

SEQ ID NO: 196886 - RNA, 19 nt, Homo sapiens
  misc_RNA (1)...(19): siRNA sense strand
guacagauaccuuuucaag

SEQ ID NO: 196887 - RNA, 19 nt, Homo sapiens
  misc_RNA (1)...(19): siRNA sense strand
gucccucucugcguggaua

SEQ ID NO: 196888 - RNA, 19 nt, Homo sapiens
  misc_RNA (1)...(19): siRNA sense strand
ggagcugcuuccaauuugc

SEQ ID NO: 196889 - RNA, 19 nt, Homo sapiens
  misc_RNA (1)...(19): siRNA sense strand
uuagcugaccugaauaaug

SEQ ID NO: 196890 - RNA, 19 nt, Homo sapiens
  misc_RNA (1)...(19): siRNA sense strand
guggcaaguucaacaggau

SEQ ID NO: 196891 - RNA, 19 nt, Homo sapiens
  misc_RNA (1)...(19): siRNA sense strand
acaacaauuuggucaacgu

SEQ ID NO: 196892 - RNA, 19 nt, Homo sapiens
  misc_RNA (1)...(19): siRNA sense strand
gacuacaucaggagaagau

SEQ ID NO: 196893 - RNA, 19 nt, Homo sapiens
  misc_RNA (1)...(19): siRNA sense strand
uaauaagccagagaucgaa

SEQ ID NO: 196894 - RNA, 19 nt, Homo sapiens
  misc_RNA (1)...(19): siRNA sense strand
ugucagauucucagcuuau

SEQ ID NO: 196895 - RNA, 19 nt, Homo sapiens
  misc_RNA (1)...(19): siRNA sense strand
ggauauccugcagauuauu

SEQ ID NO: 196896 - RNA, 19 nt, Homo sapiens
  misc_RNA (1)...(19): siRNA sense strand
agcaucaggccaaauguaa

SEQ ID NO: 196897 - RNA, 19 nt, Homo sapiens
  misc_RNA (1)...(19): siRNA sense strand
gcccuuugcuuggaucucu

SEQ ID NO: 196898 - RNA, 19 nt, Homo sapiens
  misc_RNA (1)...(19): siRNA sense strand
gcugaauguuuaugauacg

SEQ ID NO: 196899 - RNA, 19 nt, Homo sapiens
  misc_RNA (1)...(19): siRNA sense strand
agacuuugccaagguacua

SEQ ID NO: 196900 - RNA, 19 nt, Homo sapiens
  misc_RNA (1)...(19): siRNA sense strand
caagcaaguggcaaguuca

SEQ ID NO: 196901 - RNA, 19 nt, Homo sapiens
  misc_RNA (1)...(19): siRNA sense strand
agacaaguacagauaccuu

SEQ ID NO: 196902 - RNA, 19 nt, Homo sapiens
  misc_RNA (1)...(19): siRNA sense strand
gcaucauuucccuguguaa

SEQ ID NO: 196903 - RNA, 19 nt, Homo sapiens
  misc_RNA (1)...(19): siRNA sense strand
cugcaaagaguguccaauc

SEQ ID NO: 196904 - RNA, 19 nt, Homo sapiens
  misc_RNA (1)...(19): siRNA sense strand
cuuauaggacugccaugaa

SEQ ID NO: 196905 - RNA, 19 nt, Homo sapiens
  misc_RNA (1)...(19): siRNA sense strand
caaagaguguccaaucauu

SEQ ID NO: 196906 - RNA, 19 nt, Homo sapiens
  misc_RNA (1)...(19): siRNA sense strand
uagcugaccugaauaaugu

SEQ ID NO: 196907 - RNA, 19 nt, Homo sapiens
  misc_RNA (1)...(19): siRNA sense strand
gcaugauucuauccaaauu

SEQ ID NO: 196908 - RNA, 19 nt, Homo sapiens
  misc_RNA (1)...(19): siRNA sense strand
ugaacuggcugcugaaugu

SEQ ID NO: 196909 - RNA, 19 nt, Homo sapiens
  misc_RNA (1)...(19): siRNA sense strand
gauauccugcagauuauua

SEQ ID NO: 196910 - RNA, 19 nt, Homo sapiens
  misc_RNA (1)...(19): siRNA sense strand
gagaagauguucgagacuu

SEQ ID NO: 196911 - RNA, 19 nt, Homo sapiens
  misc_RNA (1)...(19): siRNA sense strand
gcacuuuaauuaugacauc

SEQ ID NO: 196912 - RNA, 19 nt, Homo sapiens
  misc_RNA (1)...(19): siRNA sense strand
guaaagcacauuuggaaga

SEQ ID NO: 196913 - RNA, 19 nt, Homo sapiens
  misc_RNA (1)...(19): siRNA sense strand
gaauauugcacuccgacua

SEQ ID NO: 196914 - RNA, 19 nt, Homo sapiens
  misc_RNA (1)...(19): siRNA sense strand
uuauaggacugccaugaaa

SEQ ID NO: 196915 - RNA, 19 nt, Homo sapiens
  misc_RNA (1)...(19): siRNA sense strand
gggugaaguugcauccuuu

SEQ ID NO: 196916 - RNA, 19 nt, Homo sapiens
  misc_RNA (1)...(19): siRNA sense strand
gcaagagcacaacaauuug

SEQ ID NO: 196917 - RNA, 19 nt, Homo sapiens
  misc_RNA (1)...(19): siRNA sense strand
gcacaacaauuuggucaac

SEQ ID NO: 196918 - RNA, 19 nt, Homo sapiens
  misc_RNA (1)...(19): siRNA sense strand
agcaagagcacaacaauuu

SEQ ID NO: 196919 - RNA, 19 nt, Homo sapiens
  misc_RNA (1)...(19): siRNA sense strand
agaagauguucgagacuuu

SEQ ID NO: 196920 - RNA, 19 nt, Homo sapiens
  misc_RNA (1)...(19): siRNA sense strand
gagcaagagcacaacaauu

SEQ ID NO: 196921 - RNA, 19 nt, Homo sapiens
  misc_RNA (1)...(19): siRNA sense strand
ucaagcaaguggcaaguuc

SEQ ID NO: 196922 - RNA, 19 nt, Homo sapiens
  misc_RNA (1)...(19): siRNA sense strand
ccacgagacucaaacaacu

SEQ ID NO: 196923 - RNA, 19 nt, Homo sapiens
  misc_RNA (1)...(19): siRNA sense strand
cagcacaaccucaagcaaa

SEQ ID NO: 196924 - RNA, 19 nt, Homo sapiens
  misc_RNA (1)...(19): siRNA sense strand
gcaaagaguguccaaucau

SEQ ID NO: 196925 - RNA, 19 nt, Homo sapiens
  misc_RNA (1)...(19): siRNA sense strand
auggauauccugcagauua

SEQ ID NO: 196926 - RNA, 19 nt, Homo sapiens
  misc_RNA (1)...(19): siRNA sense strand
uguaacaucugcaaagagu

SEQ ID NO: 196927 - RNA, 19 nt, Homo sapiens
  misc_RNA (1)...(19): siRNA sense strand
guccggagcugcuuccaau

SEQ ID NO: 196928 - RNA, 19 nt, Homo sapiens
  misc_RNA (1)...(19): siRNA sense strand
gcaaguggcaaguucaaca

SEQ ID NO: 196929 - RNA, 19 nt, Homo sapiens
  misc_RNA (1)...(19): siRNA sense strand
gcuuccaauuugcuaauaa

SEQ ID NO: 196930 - RNA, 19 nt, Homo sapiens
  misc_RNA (1)...(19): siRNA sense strand
uggaagacaaguacagaua

SEQ ID NO: 196931 - RNA, 19 nt, Homo sapiens
  misc_RNA (1)...(19): siRNA sense strand
ggauccguguccugucuuu

SEQ ID NO: 196932 - RNA, 19 nt, Homo sapiens
  misc_RNA (1)...(19): siRNA sense strand
gucuuuagcugaccugaau

SEQ ID NO: 196933 - RNA, 19 nt, Homo sapiens
  misc_RNA (1)...(19): siRNA sense strand
gacaaguacagauaccuuu

SEQ ID NO: 196934 - RNA, 19 nt, Homo sapiens
  misc_RNA (1)...(19): siRNA sense strand
ccaagcaucaggccaaaug

SEQ ID NO: 196935 - RNA, 19 nt, Homo sapiens
  misc_RNA (1)...(19): siRNA sense strand
ggagcaagagcacaacaau

SEQ ID NO: 196936 - RNA, 19 nt, Homo sapiens
  misc_RNA (1)...(19): siRNA sense strand
guguaaagcacauuuggaa

SEQ ID NO: 196937 - RNA, 19 nt, Homo sapiens
  misc_RNA (1)...(19): siRNA sense strand
caagacaguugggugaagu

SEQ ID NO: 196938 - RNA, 19 nt, Homo sapiens
  misc_RNA (1)...(19): siRNA sense strand
gaagauguucgagacuuug

SEQ ID NO: 196939 - RNA, 19 nt, Homo sapiens
  misc_RNA (1)...(19): siRNA sense strand
gucagauucucagcuuaua

SEQ ID NO: 196940 - RNA, 19 nt, Homo sapiens
  misc_RNA (1)...(19): siRNA sense strand
uaacaucugcaaagagugu

SEQ ID NO: 196941 - RNA, 19 nt, Homo sapiens
  misc_RNA (1)...(19): siRNA sense strand
cggagcugcuuccaauuug

SEQ ID NO: 196942 - RNA, 19 nt, Homo sapiens
  misc_RNA (1)...(19): siRNA sense strand
gaagacaaguacagauacc

SEQ ID NO: 196943 - RNA, 19 nt, Homo sapiens
  misc_RNA (1)...(19): siRNA sense strand
ccauggauauccugcagau

SEQ ID NO: 196944 - RNA, 19 nt, Homo sapiens
  misc_RNA (1)...(19): siRNA sense strand
ggcaucauuucccugugua

SEQ ID NO: 196945 - RNA, 19 nt, Homo sapiens
  misc_RNA (1)...(19): siRNA sense strand
uggauauccugcagauuau

SEQ ID NO: 196946 - RNA, 19 nt, Homo sapiens
  misc_RNA (1)...(19): siRNA sense strand
ggaagacaaguacagauac

SEQ ID NO: 196947 - RNA, 19 nt, Homo sapiens
  misc_RNA (1)...(19): siRNA sense strand
ugcaaagaguguccaauca

SEQ ID NO: 196948 - RNA, 19 nt, Homo sapiens
  misc_RNA (1)...(19): siRNA sense strand
guggauaugugucugaacu

SEQ ID NO: 196949 - RNA, 19 nt, Homo sapiens
  misc_RNA (1)...(19): siRNA sense strand
acuggcugcugaauguuua

SEQ ID NO: 196950 - RNA, 19 nt, Homo sapiens
  misc_RNA (1)...(19): siRNA sense strand
acuaucccaugguggaaua

SEQ ID NO: 196951 - RNA, 19 nt, Homo sapiens
  misc_RNA (1)...(19): siRNA sense strand
ccggagcugcuuccaauuu

SEQ ID NO: 196952 - RNA, 19 nt, Homo sapiens
  misc_RNA (1)...(19): siRNA sense strand
ccaaauuccaagacaguug

SEQ ID NO: 196953 - RNA, 19 nt, Homo sapiens
  misc_RNA (1)...(19): siRNA sense strand
cagaaacugccaagcauca

SEQ ID NO: 196954 - RNA, 19 nt, Homo sapiens
  misc_RNA (1)...(19): siRNA sense strand
uaugacaucugccaaagcu

SEQ ID NO: 196955 - RNA, 19 nt, Homo sapiens
  misc_RNA (1)...(19): siRNA sense strand
aaugucagauucucagcuu

SEQ ID NO: 196956 - RNA, 19 nt, Homo sapiens
  misc_RNA (1)...(19): siRNA sense strand
ucgagacuuugccaaggua

SEQ ID NO: 196957 - RNA, 19 nt, Homo sapiens
  misc_RNA (1)...(19): siRNA sense strand
gcaaaaggccauaaaaugc

SEQ ID NO: 196958 - RNA, 19 nt, Homo sapiens
  misc_RNA (1)...(19): siRNA sense strand
cugcaugauucuauccaaa

SEQ ID NO: 196959 - RNA, 19 nt, Homo sapiens
  misc_RNA (1)...(19): siRNA sense strand
uaaagcacauuuggaagac

SEQ ID NO: 196960 - RNA, 19 nt, Homo sapiens
  misc_RNA (1)...(19): siRNA sense strand
acaggagucuaaagcacuu

SEQ ID NO: 196961 - RNA, 19 nt, Homo sapiens
  misc_RNA (1)...(19): siRNA sense strand
acagauaccuuuucaagca

SEQ ID NO: 196962 - RNA, 19 nt, Homo sapiens
  misc_RNA (1)...(19): siRNA sense strand
aagcacauuuggaagacaa

SEQ ID NO: 196963 - RNA, 19 nt, Homo sapiens
  misc_RNA (1)...(19): siRNA sense strand
gcuaauaauaagccagaga

SEQ ID NO: 196964 - RNA, 19 nt, Homo sapiens
  misc_RNA (1)...(19): siRNA sense strand
caagagcacaacaauuugg

SEQ ID NO: 196965 - RNA, 19 nt, Homo sapiens
  misc_RNA (1)...(19): siRNA sense strand
ccugucagcugcaugugau

SEQ ID NO: 196966 - RNA, 19 nt, Homo sapiens
  misc_RNA (1)...(19): siRNA sense strand
gcugcugaauguuuaugau

SEQ ID NO: 196967 - RNA, 19 nt, Homo sapiens
  misc_RNA (1)...(19): siRNA sense strand
acagagcucuaccagucuu

SEQ ID NO: 196968 - RNA, 19 nt, Homo sapiens
  misc_RNA (1)...(19): siRNA sense strand
acaguugggugaaguugca

SEQ ID NO: 196969 - RNA, 19 nt, Homo sapiens
  misc_RNA (1)...(19): siRNA sense strand
guuugaccacuauuuauga

SEQ ID NO: 196970 - RNA, 19 nt, Homo sapiens
  misc_RNA (1)...(19): siRNA sense strand
gcuuauaggacugccauga

SEQ ID NO: 196971 - RNA, 19 nt, Homo sapiens
  misc_RNA (1)...(19): siRNA sense strand
caucaggccaaauguaaca

SEQ ID NO: 196972 - RNA, 19 nt, Homo sapiens
  misc_RNA (1)...(19): siRNA sense strand
gauucuauccaaauuccaa

SEQ ID NO: 196973 - RNA, 19 nt, Homo sapiens
  misc_RNA (1)...(19): siRNA sense strand
ggcaaguucaacaggauuu

SEQ ID NO: 196974 - RNA, 19 nt, Homo sapiens
  misc_RNA (1)...(19): siRNA sense strand
gaacuggcugcugaauguu

SEQ ID NO: 196975 - RNA, 19 nt, Homo sapiens
  misc_RNA (1)...(19): siRNA sense strand
cugcugaauguuuaugaua

SEQ ID NO: 196976 - RNA, 19 nt, Homo sapiens
  misc_RNA (1)...(19): siRNA sense strand
aagcaucaggccaaaugua

SEQ ID NO: 196977 - RNA, 19 nt, Homo sapiens
  misc_RNA (1)...(19): siRNA sense strand
uggcaucauuucccugugu

SEQ ID NO: 196978 - RNA, 19 nt, Homo sapiens
  misc_RNA (1)...(19): siRNA sense strand
ccaugaaacuccgaagacu

SEQ ID NO: 196979 - RNA, 19 nt, Homo sapiens
  misc_RNA (1)...(19): siRNA sense strand
auaauaagccagagaucga

SEQ ID NO: 196980 - RNA, 19 nt, Homo sapiens
  misc_RNA (1)...(19): siRNA sense strand
cuaauaauaagccagagau

SEQ ID NO: 196981 - RNA, 19 nt, Homo sapiens
  misc_RNA (1)...(19): siRNA sense strand
ugggugaaguugcauccuu

SEQ ID NO: 196982 - RNA, 19 nt, Homo sapiens
  misc_RNA (1)...(19): siRNA sense strand
caucauuucccuguguaaa

SEQ ID NO: 196983 - RNA, 19 nt, Homo sapiens
  misc_RNA (1)...(19): siRNA sense strand
gcguggauaugugucugaa

SEQ ID NO: 196984 - RNA, 19 nt, Homo sapiens
  misc_RNA (1)...(19): siRNA sense strand
gcacuaucccaugguggaa

SEQ ID NO: 196985 - RNA, 19 nt, Homo sapiens
  misc_RNA (1)...(19): siRNA sense strand
gagccugucagcugcaugu

SEQ ID NO: 196986 - RNA, 19 nt, Homo sapiens
  misc_RNA (1)...(19): siRNA sense strand
guacagauaccuuuucaag

SEQ ID NO: 196987 - RNA, 19 nt, Homo sapiens
  misc_RNA (1)...(19): siRNA sense strand
gucccucucugcguggaua

SEQ ID NO: 196988 - RNA, 19 nt, Homo sapiens
  misc_RNA (1)...(19): siRNA sense strand
ggagcugcuuccaauuugc

SEQ ID NO: 196989 - RNA, 19 nt, Homo sapiens
  misc_RNA (1)...(19): siRNA sense strand
uuagcugaccugaauaaug

SEQ ID NO: 196990 - RNA, 19 nt, Homo sapiens
  misc_RNA (1)...(19): siRNA sense strand
guggcaaguucaacaggau

SEQ ID NO: 196991 - RNA, 19 nt, Homo sapiens
  misc_RNA (1)...(19): siRNA sense strand
acaacaauuuggucaacgu

SEQ ID NO: 196992 - RNA, 19 nt, Homo sapiens
  misc_RNA (1)...(19): siRNA sense strand
gacuacaucaggagaagau

SEQ ID NO: 196993 - RNA, 19 nt, Homo sapiens
  misc_RNA (1)...(19): siRNA sense strand
uaauaagccagagaucgaa

SEQ ID NO: 196994 - RNA, 19 nt, Homo sapiens
  misc_RNA (1)...(19): siRNA sense strand
ugucagauucucagcuuau

SEQ ID NO: 196995 - RNA, 19 nt, Homo sapiens
  misc_RNA (1)...(19): siRNA sense strand
ggauauccugcagauuauu

SEQ ID NO: 196996 - RNA, 19 nt, Homo sapiens
  misc_RNA (1)...(19): siRNA sense strand
agcaucaggccaaauguaa

SEQ ID NO: 196997 - RNA, 19 nt, Homo sapiens
  misc_RNA (1)...(19): siRNA sense strand
gcccuuugcuuggaucucu

SEQ ID NO: 196998 - RNA, 19 nt, Homo sapiens
  misc_RNA (1)...(19): siRNA sense strand
gcugaauguuuaugauacg

SEQ ID NO: 196999 - RNA, 19 nt, Homo sapiens
  misc_RNA (1)...(19): siRNA sense strand
agacuuugccaagguacua

SEQ ID NO: 197000 - RNA, 19 nt, Homo sapiens
  misc_RNA (1)...(19): siRNA sense strand
caagcaaguggcaaguuca

SEQ ID NO: 197001 - RNA, 19 nt, Homo sapiens
  misc_RNA (1)...(19): siRNA sense strand
agacaaguacagauaccuu

SEQ ID NO: 197002 - RNA, 19 nt, Homo sapiens
  misc_RNA (1)...(19): siRNA sense strand
gcaucauuucccuguguaa

SEQ ID NO: 197003 - RNA, 19 nt, Homo sapiens
  misc_RNA (1)...(19): siRNA sense strand
cugcaaagaguguccaauc

SEQ ID NO: 197004 - RNA, 19 nt, Homo sapiens
  misc_RNA (1)...(19): siRNA sense strand
cuuauaggacugccaugaa

SEQ ID NO: 197005 - RNA, 19 nt, Homo sapiens
  misc_RNA (1)...(19): siRNA sense strand
caaagaguguccaaucauu

SEQ ID NO: 197006 - RNA, 19 nt, Homo sapiens
  misc_RNA (1)...(19): siRNA sense strand
uagcugaccugaauaaugu

SEQ ID NO: 197007 - RNA, 19 nt, Homo sapiens
  misc_RNA (1)...(19): siRNA sense strand
gcaugauucuauccaaauu

SEQ ID NO: 197008 - RNA, 19 nt, Homo sapiens
  misc_RNA (1)...(19): siRNA sense strand
ugaacuggcugcugaaugu

SEQ ID NO: 197009 - RNA, 19 nt, Homo sapiens
  misc_RNA (1)...(19): siRNA sense strand
gauauccugcagauuauua

SEQ ID NO: 197010 - RNA, 19 nt, Homo sapiens
  misc_RNA (1)...(19): siRNA sense strand
gagaagauguucgagacuu

SEQ ID NO: 197011 - RNA, 19 nt, Homo sapiens
  misc_RNA (1)...(19): siRNA sense strand
gcacuuuaauuaugacauc

SEQ ID NO: 197012 - RNA, 19 nt, Homo sapiens
  misc_RNA (1)...(19): siRNA sense strand
guaaagcacauuuggaaga

SEQ ID NO: 197013 - RNA, 19 nt, Homo sapiens
  misc_RNA (1)...(19): siRNA sense strand
gaauauugcacuccgacua

SEQ ID NO: 197014 - RNA, 19 nt, Homo sapiens
  misc_RNA (1)...(19): siRNA sense strand
uuauaggacugccaugaaa

SEQ ID NO: 197015 - RNA, 19 nt, Homo sapiens
  misc_RNA (1)...(19): siRNA sense strand
gggugaaguugcauccuuu

SEQ ID NO: 197016 - RNA, 19 nt, Homo sapiens
  misc_RNA (1)...(19): siRNA sense strand
gcaagagcacaacaauuug

SEQ ID NO: 197017 - RNA, 19 nt, Homo sapiens
  misc_RNA (1)...(19): siRNA sense strand
gcacaacaauuuggucaac

SEQ ID NO: 197018 - RNA, 19 nt, Homo sapiens
  misc_RNA (1)...(19): siRNA sense strand
agcaagagcacaacaauuu

SEQ ID NO: 197019 - RNA, 19 nt, Homo sapiens
  misc_RNA (1)...(19): siRNA sense strand
agaagauguucgagacuuu

SEQ ID NO: 197020 - RNA, 19 nt, Homo sapiens
  misc_RNA (1)...(19): siRNA sense strand
gagcaagagcacaacaauu

SEQ ID NO: 197021 - RNA, 19 nt, Homo sapiens
  misc_RNA (1)...(19): siRNA sense strand
ucaagcaaguggcaaguuc

SEQ ID NO: 197022 - RNA, 19 nt, Homo sapiens
  misc_RNA (1)...(19): siRNA sense strand
ccacgagacucaaacaacu

SEQ ID NO: 197023 - RNA, 19 nt, Homo sapiens
  misc_RNA (1)...(19): siRNA sense strand
cagcacaaccucaagcaaa

SEQ ID NO: 197024 - RNA, 19 nt, Homo sapiens
  misc_RNA (1)...(19): siRNA sense strand
gcaaagaguguccaaucau

SEQ ID NO: 197025 - RNA, 19 nt, Homo sapiens
  misc_RNA (1)...(19): siRNA sense strand
auggauauccugcagauua

SEQ ID NO: 197026 - RNA, 19 nt, Homo sapiens
  misc_RNA (1)...(19): siRNA sense strand
uguaacaucugcaaagagu

SEQ ID NO: 197027 - RNA, 19 nt, Homo sapiens
  misc_RNA (1)...(19): siRNA sense strand
guccggagcugcuuccaau

SEQ ID NO: 197028 - RNA, 19 nt, Homo sapiens
  misc_RNA (1)...(19): siRNA sense strand
gcaaguggcaaguucaaca

SEQ ID NO: 197029 - RNA, 19 nt, Homo sapiens
  misc_RNA (1)...(19): siRNA sense strand
gcuuccaauuugcuaauaa

SEQ ID NO: 197030 - RNA, 19 nt, Homo sapiens
  misc_RNA (1)...(19): siRNA sense strand
uggaagacaaguacagaua

SEQ ID NO: 197031 - RNA, 19 nt, Homo sapiens
  misc_RNA (1)...(19): siRNA sense strand
ggauccguguccugucuuu

SEQ ID NO: 197032 - RNA, 19 nt, Homo sapiens
  misc_RNA (1)...(19): siRNA sense strand
gucuuuagcugaccugaau

SEQ ID NO: 197033 - RNA, 19 nt, Homo sapiens
  misc_RNA (1)...(19): siRNA sense strand
gacaaguacagauaccuuu

SEQ ID NO: 197034 - RNA, 19 nt, Homo sapiens
  misc_RNA (1)...(19): siRNA sense strand
ccaagcaucaggccaaaug

SEQ ID NO: 197035 - RNA, 19 nt, Homo sapiens
  misc_RNA (1)...(19): siRNA sense strand
ggagcaagagcacaacaau

SEQ ID NO: 197036 - RNA, 19 nt, Homo sapiens
  misc_RNA (1)...(19): siRNA sense strand
guguaaagcacauuuggaa

SEQ ID NO: 197037 - RNA, 19 nt, Homo sapiens
  misc_RNA (1)...(19): siRNA sense strand
caagacaguugggugaagu

SEQ ID NO: 197038 - RNA, 19 nt, Homo sapiens
  misc_RNA (1)...(19): siRNA sense strand
gaagauguucgagacuuug

SEQ ID NO: 197039 - RNA, 19 nt, Homo sapiens
  misc_RNA (1)...(19): siRNA sense strand
gucagauucucagcuuaua

SEQ ID NO: 197040 - RNA, 19 nt, Homo sapiens
  misc_RNA (1)...(19): siRNA sense strand
uaacaucugcaaagagugu

SEQ ID NO: 197041 - RNA, 19 nt, Homo sapiens
  misc_RNA (1)...(19): siRNA sense strand
cggagcugcuuccaauuug

SEQ ID NO: 197042 - RNA, 19 nt, Homo sapiens
  misc_RNA (1)...(19): siRNA sense strand
gaagacaaguacagauacc

SEQ ID NO: 197043 - RNA, 19 nt, Homo sapiens
  misc_RNA (1)...(19): siRNA sense strand
ccauggauauccugcagau

SEQ ID NO: 197044 - RNA, 19 nt, Homo sapiens
  misc_RNA (1)...(19): siRNA sense strand
ggcaucauuucccugugua

SEQ ID NO: 197045 - RNA, 19 nt, Homo sapiens
  misc_RNA (1)...(19): siRNA sense strand
uggauauccugcagauuau

SEQ ID NO: 197046 - RNA, 19 nt, Homo sapiens
  misc_RNA (1)...(19): siRNA sense strand
ggaagacaaguacagauac

SEQ ID NO: 197047 - RNA, 19 nt, Homo sapiens
  misc_RNA (1)...(19): siRNA sense strand
ugcaaagaguguccaauca

SEQ ID NO: 197048 - RNA, 19 nt, Homo sapiens
  misc_RNA (1)...(19): siRNA sense strand
guggauaugugucugaacu

SEQ ID NO: 197049 - RNA, 19 nt, Homo sapiens
  misc_RNA (1)...(19): siRNA sense strand
acuggcugcugaauguuua

SEQ ID NO: 197050 - RNA, 19 nt, Homo sapiens
  misc_RNA (1)...(19): siRNA sense strand
acuaucccaugguggaaua

SEQ ID NO: 197051 - RNA, 19 nt, Homo sapiens
  misc_RNA (1)...(19): siRNA sense strand
ccggagcugcuuccaauuu

SEQ ID NO: 197052 - RNA, 19 nt, Homo sapiens
  misc_RNA (1)...(19): siRNA sense strand
ccaaauuccaagacaguug

SEQ ID NO: 197053 - RNA, 19 nt, Homo sapiens
  misc_RNA (1)...(19): siRNA sense strand
cagaaacugccaagcauca

SEQ ID NO: 197054 - RNA, 19 nt, Homo sapiens
  misc_RNA (1)...(19): siRNA sense strand
uaugacaucugccaaagcu

SEQ ID NO: 197055 - RNA, 19 nt, Homo sapiens
  misc_RNA (1)...(19): siRNA sense strand
aaugucagauucucagcuu

SEQ ID NO: 197056 - RNA, 19 nt, Homo sapiens
  misc_RNA (1)...(19): siRNA sense strand
ucgagacuuugccaaggua

SEQ ID NO: 197057 - RNA, 19 nt, Homo sapiens
  misc_RNA (1)...(19): siRNA sense strand
gcaaaaggccauaaaaugc

SEQ ID NO: 197058 - RNA, 19 nt, Homo sapiens
  misc_RNA (1)...(19): siRNA sense strand
cugcaugauucuauccaaa

SEQ ID NO: 197059 - RNA, 19 nt, Homo sapiens
  misc_RNA (1)...(19): siRNA sense strand
uaaagcacauuuggaagac

SEQ ID NO: 197060 - RNA, 19 nt, Homo sapiens
  misc_RNA (1)...(19): siRNA sense strand
acaggagucuaaagcacuu

SEQ ID NO: 197061 - RNA, 19 nt, Homo sapiens
  misc_RNA (1)...(19): siRNA sense strand
acagauaccuuuucaagca

SEQ ID NO: 197062 - RNA, 19 nt, Homo sapiens
  misc_RNA (1)...(19): siRNA sense strand
aagcacauuuggaagacaa

SEQ ID NO: 197063 - RNA, 19 nt, Homo sapiens
  misc_RNA (1)...(19): siRNA sense strand
gcuaauaauaagccagaga

SEQ ID NO: 197064 - RNA, 19 nt, Homo sapiens
  misc_RNA (1)...(19): siRNA sense strand
caagagcacaacaauuugg

SEQ ID NO: 197065 - RNA, 19 nt, Homo sapiens
  misc_RNA (1)...(19): siRNA sense strand
ccugucagcugcaugugau

SEQ ID NO: 197066 - RNA, 19 nt, Homo sapiens
  misc_RNA (1)...(19): siRNA sense strand
gcugcugaauguuuaugau

SEQ ID NO: 197067 - RNA, 19 nt, Homo sapiens
  misc_RNA (1)...(19): siRNA sense strand
acagagcucuaccagucuu

SEQ ID NO: 197068 - RNA, 19 nt, Homo sapiens
  misc_RNA (1)...(19): siRNA sense strand
acaguugggugaaguugca

SEQ ID NO: 197069 - RNA, 19 nt, Homo sapiens
  misc_RNA (1)...(19): siRNA sense strand
guuugaccacuauuuauga

SEQ ID NO: 197070 - RNA, 19 nt, Homo sapiens
  misc_RNA (1)...(19): siRNA sense strand
gcuuauaggacugccauga

SEQ ID NO: 197071 - RNA, 19 nt, Homo sapiens
  misc_RNA (1)...(19): siRNA sense strand
caucaggccaaauguaaca

SEQ ID NO: 197072 - RNA, 19 nt, Homo sapiens
  misc_RNA (1)...(19): siRNA sense strand
gauucuauccaaauuccaa

SEQ ID NO: 197073 - RNA, 19 nt, Homo sapiens
  misc_RNA (1)...(19): siRNA sense strand
ggcaaguucaacaggauuu

SEQ ID NO: 197074 - RNA, 19 nt, Homo sapiens
  misc_RNA (1)...(19): siRNA sense strand
gaacuggcugcugaauguu

SEQ ID NO: 197075 - RNA, 19 nt, Homo sapiens
  misc_RNA (1)...(19): siRNA sense strand
cugcugaauguuuaugaua

SEQ ID NO: 197076 - RNA, 19 nt, Homo sapiens
  misc_RNA (1)...(19): siRNA sense strand
aagcaucaggccaaaugua

SEQ ID NO: 197077 - RNA, 19 nt, Homo sapiens
  misc_RNA (1)...(19): siRNA sense strand
uggcaucauuucccugugu

SEQ ID NO: 197078 - RNA, 19 nt, Homo sapiens
  misc_RNA (1)...(19): siRNA sense strand
ccaugaaacuccgaagacu

SEQ ID NO: 197079 - RNA, 19 nt, Homo sapiens
  misc_RNA (1)...(19): siRNA sense strand
auaauaagccagagaucga

SEQ ID NO: 197080 - RNA, 19 nt, Homo sapiens
  misc_RNA (1)...(19): siRNA sense strand
cuaauaauaagccagagau

SEQ ID NO: 197081 - RNA, 19 nt, Homo sapiens
  misc_RNA (1)...(19): siRNA sense strand
ugggugaaguugcauccuu

SEQ ID NO: 197082 - RNA, 19 nt, Homo sapiens
  misc_RNA (1)...(19): siRNA sense strand
caucauuucccuguguaaa

SEQ ID NO: 197083 - RNA, 19 nt, Homo sapiens
  misc_RNA (1)...(19): siRNA sense strand
gcguggauaugugucugaa

SEQ ID NO: 197084 - RNA, 19 nt, Homo sapiens
  misc_RNA (1)...(19): siRNA sense strand
gcacuaucccaugguggaa

SEQ ID NO: 197085 - RNA, 19 nt, Homo sapiens
  misc_RNA (1)...(19): siRNA sense strand
gagccugucagcugcaugu

SEQ ID NO: 197086 - RNA, 19 nt, Homo sapiens
  misc_RNA (1)...(19): siRNA sense strand
guacagauaccuuuucaag

SEQ ID NO: 197087 - RNA, 19 nt, Homo sapiens
  misc_RNA (1)...(19): siRNA sense strand
gucccucucugcguggaua

SEQ ID NO: 197088 - RNA, 19 nt, Homo sapiens
  misc_RNA (1)...(19): siRNA sense strand
ggagcugcuuccaauuugc

SEQ ID NO: 197089 - RNA, 19 nt, Homo sapiens
  misc_RNA (1)...(19): siRNA sense strand
uuagcugaccugaauaaug

SEQ ID NO: 197090 - RNA, 19 nt, Homo sapiens
  misc_RNA (1)...(19): siRNA sense strand
guggcaaguucaacaggau

SEQ ID NO: 197091 - RNA, 19 nt, Homo sapiens
  misc_RNA (1)...(19): siRNA sense strand
acaacaauuuggucaacgu

SEQ ID NO: 197092 - RNA, 19 nt, Homo sapiens
  misc_RNA (1)...(19): siRNA sense strand
gacuacaucaggagaagau

SEQ ID NO: 197093 - RNA, 19 nt, Homo sapiens
  misc_RNA (1)...(19): siRNA sense strand
uaauaagccagagaucgaa

SEQ ID NO: 197094 - RNA, 19 nt, Homo sapiens
  misc_RNA (1)...(19): siRNA sense strand
ugucagauucucagcuuau

SEQ ID NO: 197095 - RNA, 19 nt, Homo sapiens
  misc_RNA (1)...(19): siRNA sense strand
ggauauccugcagauuauu

SEQ ID NO: 197096 - RNA, 19 nt, Homo sapiens
  misc_RNA (1)...(19): siRNA sense strand
agcaucaggccaaauguaa

SEQ ID NO: 197097 - RNA, 19 nt, Homo sapiens
  misc_RNA (1)...(19): siRNA sense strand
gcccuuugcuuggaucucu

SEQ ID NO: 197098 - RNA, 19 nt, Homo sapiens
  misc_RNA (1)...(19): siRNA sense strand
gcugaauguuuaugauacg

SEQ ID NO: 197099 - RNA, 19 nt, Homo sapiens
  misc_RNA (1)...(19): siRNA sense strand
agacuuugccaagguacua

SEQ ID NO: 197100 - RNA, 19 nt, Homo sapiens
  misc_RNA (1)...(19): siRNA sense strand
caagcaaguggcaaguuca

SEQ ID NO: 197101 - RNA, 19 nt, Homo sapiens
  misc_RNA (1)...(19): siRNA sense strand
agacaaguacagauaccuu

SEQ ID NO: 197102 - RNA, 19 nt, Homo sapiens
  misc_RNA (1)...(19): siRNA sense strand
gcaucauuucccuguguaa

SEQ ID NO: 197103 - RNA, 19 nt, Homo sapiens
  misc_RNA (1)...(19): siRNA sense strand
cugcaaagaguguccaauc

SEQ ID NO: 197104 - RNA, 19 nt, Homo sapiens
  misc_RNA (1)...(19): siRNA sense strand
cuuauaggacugccaugaa

SEQ ID NO: 197105 - RNA, 19 nt, Homo sapiens
  misc_RNA (1)...(19): siRNA sense strand
caaagaguguccaaucauu

SEQ ID NO: 197106 - RNA, 19 nt, Homo sapiens
  misc_RNA (1)...(19): siRNA sense strand
uagcugaccugaauaaugu

SEQ ID NO: 197107 - RNA, 19 nt, Homo sapiens
  misc_RNA (1)...(19): siRNA sense strand
gcaugauucuauccaaauu

SEQ ID NO: 197108 - RNA, 19 nt, Homo sapiens
  misc_RNA (1)...(19): siRNA sense strand
ugaacuggcugcugaaugu

SEQ ID NO: 197109 - RNA, 19 nt, Homo sapiens
  misc_RNA (1)...(19): siRNA sense strand
gauauccugcagauuauua

SEQ ID NO: 197110 - RNA, 19 nt, Homo sapiens
  misc_RNA (1)...(19): siRNA sense strand
gagaagauguucgagacuu

SEQ ID NO: 197111 - RNA, 19 nt, Homo sapiens
  misc_RNA (1)...(19): siRNA sense strand
gcacuuuaauuaugacauc

SEQ ID NO: 197112 - RNA, 19 nt, Homo sapiens
  misc_RNA (1)...(19): siRNA sense strand
guaaagcacauuuggaaga

SEQ ID NO: 197113 - RNA, 19 nt, Homo sapiens
  misc_RNA (1)...(19): siRNA sense strand
gaauauugcacuccgacua

SEQ ID NO: 197114 - RNA, 19 nt, Homo sapiens
  misc_RNA (1)...(19): siRNA sense strand
uuauaggacugccaugaaa

SEQ ID NO: 197115 - RNA, 19 nt, Homo sapiens
  misc_RNA (1)...(19): siRNA sense strand
gggugaaguugcauccuuu

SEQ ID NO: 197116 - RNA, 19 nt, Homo sapiens
  misc_RNA (1)...(19): siRNA sense strand
gcaagagcacaacaauuug

SEQ ID NO: 197117 - RNA, 19 nt, Homo sapiens
  misc_RNA (1)...(19): siRNA sense strand
gcacaacaauuuggucaac

SEQ ID NO: 197118 - RNA, 19 nt, Homo sapiens
  misc_RNA (1)...(19): siRNA sense strand
agcaagagcacaacaauuu

SEQ ID NO: 197119 - RNA, 19 nt, Homo sapiens
  misc_RNA (1)...(19): siRNA sense strand
agaagauguucgagacuuu

SEQ ID NO: 197120 - RNA, 19 nt, Homo sapiens
  misc_RNA (1)...(19): siRNA sense strand
gagcaagagcacaacaauu

SEQ ID NO: 197121 - RNA, 19 nt, Homo sapiens
  misc_RNA (1)...(19): siRNA sense strand
ucaagcaaguggcaaguuc

SEQ ID NO: 197122 - RNA, 19 nt, Homo sapiens
  misc_RNA (1)...(19): siRNA sense strand
ccacgagacucaaacaacu

SEQ ID NO: 197123 - RNA, 19 nt, Homo sapiens
  misc_RNA (1)...(19): siRNA sense strand
cagcacaaccucaagcaaa

SEQ ID NO: 197124 - RNA, 19 nt, Homo sapiens
  misc_RNA (1)...(19): siRNA sense strand
gcaaagaguguccaaucau

SEQ ID NO: 197125 - RNA, 19 nt, Homo sapiens
  misc_RNA (1)...(19): siRNA sense strand
auggauauccugcagauua

SEQ ID NO: 197126 - RNA, 19 nt, Homo sapiens
  misc_RNA (1)...(19): siRNA sense strand
uguaacaucugcaaagagu

SEQ ID NO: 197127 - RNA, 19 nt, Homo sapiens
  misc_RNA (1)...(19): siRNA sense strand
guccggagcugcuuccaau

SEQ ID NO: 197128 - RNA, 19 nt, Homo sapiens
  misc_RNA (1)...(19): siRNA sense strand
gcaaguggcaaguucaaca

SEQ ID NO: 197129 - RNA, 19 nt, Homo sapiens
  misc_RNA (1)...(19): siRNA sense strand
gcuuccaauuugcuaauaa

SEQ ID NO: 197130 - RNA, 19 nt, Homo sapiens
  misc_RNA (1)...(19): siRNA sense strand
uggaagacaaguacagaua

SEQ ID NO: 197131 - RNA, 19 nt, Homo sapiens
  misc_RNA (1)...(19): siRNA sense strand
ggauccguguccugucuuu

SEQ ID NO: 197132 - RNA, 19 nt, Homo sapiens
  misc_RNA (1)...(19): siRNA sense strand
gucuuuagcugaccugaau

SEQ ID NO: 197133 - RNA, 19 nt, Homo sapiens
  misc_RNA (1)...(19): siRNA sense strand
gacaaguacagauaccuuu

SEQ ID NO: 197134 - RNA, 19 nt, Homo sapiens
  misc_RNA (1)...(19): siRNA sense strand
ccaagcaucaggccaaaug

SEQ ID NO: 197135 - RNA, 19 nt, Homo sapiens
  misc_RNA (1)...(19): siRNA sense strand
ggagcaagagcacaacaau

SEQ ID NO: 197136 - RNA, 19 nt, Homo sapiens
  misc_RNA (1)...(19): siRNA sense strand
guguaaagcacauuuggaa

SEQ ID NO: 197137 - RNA, 19 nt, Homo sapiens
  misc_RNA (1)...(19): siRNA sense strand
caagacaguugggugaagu

SEQ ID NO: 197138 - RNA, 19 nt, Homo sapiens
  misc_RNA (1)...(19): siRNA sense strand
gaagauguucgagacuuug

SEQ ID NO: 197139 - RNA, 19 nt, Homo sapiens
  misc_RNA (1)...(19): siRNA sense strand
gucagauucucagcuuaua

SEQ ID NO: 197140 - RNA, 19 nt, Homo sapiens
  misc_RNA (1)...(19): siRNA sense strand
uaacaucugcaaagagugu

SEQ ID NO: 197141 - RNA, 19 nt, Homo sapiens
  misc_RNA (1)...(19): siRNA sense strand
cggagcugcuuccaauuug

SEQ ID NO: 197142 - RNA, 19 nt, Homo sapiens
  misc_RNA (1)...(19): siRNA sense strand
gaagacaaguacagauacc

SEQ ID NO: 197143 - RNA, 19 nt, Homo sapiens
  misc_RNA (1)...(19): siRNA sense strand
ccauggauauccugcagau

SEQ ID NO: 197144 - RNA, 19 nt, Homo sapiens
  misc_RNA (1)...(19): siRNA sense strand
ggcaucauuucccugugua

SEQ ID NO: 197145 - RNA, 19 nt, Homo sapiens
  misc_RNA (1)...(19): siRNA sense strand
uggauauccugcagauuau

SEQ ID NO: 197146 - RNA, 19 nt, Homo sapiens
  misc_RNA (1)...(19): siRNA sense strand
ggaagacaaguacagauac

SEQ ID NO: 197147 - RNA, 19 nt, Homo sapiens
  misc_RNA (1)...(19): siRNA sense strand
ugcaaagaguguccaauca

SEQ ID NO: 197148 - RNA, 19 nt, Homo sapiens
  misc_RNA (1)...(19): siRNA sense strand
guggauaugugucugaacu

SEQ ID NO: 197149 - RNA, 19 nt, Homo sapiens
  misc_RNA (1)...(19): siRNA sense strand
acuggcugcugaauguuua

SEQ ID NO: 197150 - RNA, 19 nt, Homo sapiens
  misc_RNA (1)...(19): siRNA sense strand
acuaucccaugguggaaua

SEQ ID NO: 197151 - RNA, 19 nt, Homo sapiens
  misc_RNA (1)...(19): siRNA sense strand
ccggagcugcuuccaauuu

SEQ ID NO: 197152 - RNA, 19 nt, Homo sapiens
  misc_RNA (1)...(19): siRNA sense strand
ccaaauuccaagacaguug

SEQ ID NO: 197153 - RNA, 19 nt, Homo sapiens
  misc_RNA (1)...(19): siRNA sense strand
cagaaacugccaagcauca

SEQ ID NO: 197154 - RNA, 19 nt, Homo sapiens
  misc_RNA (1)...(19): siRNA sense strand
uaugacaucugccaaagcu

SEQ ID NO: 197155 - RNA, 19 nt, Homo sapiens
  misc_RNA (1)...(19): siRNA sense strand
aaugucagauucucagcuu

SEQ ID NO: 197156 - RNA, 19 nt, Homo sapiens
  misc_RNA (1)...(19): siRNA sense strand
ucgagacuuugccaaggua

SEQ ID NO: 197157 - RNA, 19 nt, Homo sapiens
  misc_RNA (1)...(19): siRNA sense strand
gcaaaaggccauaaaaugc

SEQ ID NO: 197158 - RNA, 19 nt, Homo sapiens
  misc_RNA (1)...(19): siRNA sense strand
cugcaugauucuauccaaa

SEQ ID NO: 197159 - RNA, 19 nt, Homo sapiens
  misc_RNA (1)...(19): siRNA sense strand
uaaagcacauuuggaagac

SEQ ID NO: 197160 - RNA, 19 nt, Homo sapiens
  misc_RNA (1)...(19): siRNA sense strand
acaggagucuaaagcacuu

SEQ ID NO: 197161 - RNA, 19 nt, Homo sapiens
  misc_RNA (1)...(19): siRNA sense strand
acagauaccuuuucaagca

SEQ ID NO: 197162 - RNA, 19 nt, Homo sapiens
  misc_RNA (1)...(19): siRNA sense strand
aagcacauuuggaagacaa

SEQ ID NO: 197163 - RNA, 19 nt, Homo sapiens
  misc_RNA (1)...(19): siRNA sense strand
gcuaauaauaagccagaga

SEQ ID NO: 197164 - RNA, 19 nt, Homo sapiens
  misc_RNA (1)...(19): siRNA sense strand
caagagcacaacaauuugg

SEQ ID NO: 197165 - RNA, 19 nt, Homo sapiens
  misc_RNA (1)...(19): siRNA sense strand
ccugucagcugcaugugau

SEQ ID NO: 197166 - RNA, 19 nt, Homo sapiens
  misc_RNA (1)...(19): siRNA sense strand
gcugcugaauguuuaugau

SEQ ID NO: 197167 - RNA, 19 nt, Homo sapiens
  misc_RNA (1)...(19): siRNA sense strand
acagagcucuaccagucuu

SEQ ID NO: 197168 - RNA, 19 nt, Homo sapiens
  misc_RNA (1)...(19): siRNA sense strand
acaguugggugaaguugca

SEQ ID NO: 197169 - RNA, 19 nt, Homo sapiens
  misc_RNA (1)...(19): siRNA sense strand
guuugaccacuauuuauga

SEQ ID NO: 197170 - RNA, 19 nt, Homo sapiens
  misc_RNA (1)...(19): siRNA sense strand
gcuuauaggacugccauga

SEQ ID NO: 197171 - RNA, 19 nt, Homo sapiens
  misc_RNA (1)...(19): siRNA sense strand
caucaggccaaauguaaca

SEQ ID NO: 197172 - RNA, 19 nt, Homo sapiens
  misc_RNA (1)...(19): siRNA sense strand
gauucuauccaaauuccaa

SEQ ID NO: 197173 - RNA, 19 nt, Homo sapiens
  misc_RNA (1)...(19): siRNA sense strand
ggcaaguucaacaggauuu

SEQ ID NO: 197174 - RNA, 19 nt, Homo sapiens
  misc_RNA (1)...(19): siRNA sense strand
gaacuggcugcugaauguu

SEQ ID NO: 197175 - RNA, 19 nt, Homo sapiens
  misc_RNA (1)...(19): siRNA sense strand
cugcugaauguuuaugaua

SEQ ID NO: 197176 - RNA, 19 nt, Homo sapiens
  misc_RNA (1)...(19): siRNA sense strand
aagcaucaggccaaaugua

SEQ ID NO: 197177 - RNA, 19 nt, Homo sapiens
  misc_RNA (1)...(19): siRNA sense strand
uggcaucauuucccugugu

SEQ ID NO: 197178 - RNA, 19 nt, Homo sapiens
  misc_RNA (1)...(19): siRNA sense strand
ccaugaaacuccgaagacu

SEQ ID NO: 197179 - RNA, 19 nt, Homo sapiens
  misc_RNA (1)...(19): siRNA sense strand
auaauaagccagagaucga

SEQ ID NO: 197180 - RNA, 19 nt, Homo sapiens
  misc_RNA (1)...(19): siRNA sense strand
cuaauaauaagccagagau

SEQ ID NO: 197181 - RNA, 19 nt, Homo sapiens
  misc_RNA (1)...(19): siRNA sense strand
ugggugaaguugcauccuu

SEQ ID NO: 197182 - RNA, 19 nt, Homo sapiens
  misc_RNA (1)...(19): siRNA sense strand
caucauuucccuguguaaa

SEQ ID NO: 197183 - RNA, 19 nt, Homo sapiens
  misc_RNA (1)...(19): siRNA sense strand
gcguggauaugugucugaa

SEQ ID NO: 197184 - RNA, 19 nt, Homo sapiens
  misc_RNA (1)...(19): siRNA sense strand
gcacuaucccaugguggaa

SEQ ID NO: 197185 - RNA, 19 nt, Homo sapiens
  misc_RNA (1)...(19): siRNA sense strand
gagccugucagcugcaugu

SEQ ID NO: 197186 - RNA, 19 nt, Homo sapiens
  misc_RNA (1)...(19): siRNA sense strand
guacagauaccuuuucaag

SEQ ID NO: 197187 - RNA, 19 nt, Homo sapiens
  misc_RNA (1)...(19): siRNA sense strand
gucccucucugcguggaua

SEQ ID NO: 197188 - RNA, 19 nt, Homo sapiens
  misc_RNA (1)...(19): siRNA sense strand
ggagcugcuuccaauuugc

SEQ ID NO: 197189 - RNA, 19 nt, Homo sapiens
  misc_RNA (1)...(19): siRNA sense strand
uuagcugaccugaauaaug

SEQ ID NO: 197190 - RNA, 19 nt, Homo sapiens
  misc_RNA (1)...(19): siRNA sense strand
guggcaaguucaacaggau

SEQ ID NO: 197191 - RNA, 19 nt, Homo sapiens
  misc_RNA (1)...(19): siRNA sense strand
acaacaauuuggucaacgu

SEQ ID NO: 197192 - RNA, 19 nt, Homo sapiens
  misc_RNA (1)...(19): siRNA sense strand
gacuacaucaggagaagau

SEQ ID NO: 197193 - RNA, 19 nt, Homo sapiens
  misc_RNA (1)...(19): siRNA sense strand
uaauaagccagagaucgaa

SEQ ID NO: 197194 - RNA, 19 nt, Homo sapiens
  misc_RNA (1)...(19): siRNA sense strand
ugucagauucucagcuuau

SEQ ID NO: 197195 - RNA, 19 nt, Homo sapiens
  misc_RNA (1)...(19): siRNA sense strand
ggauauccugcagauuauu

SEQ ID NO: 197196 - RNA, 19 nt, Homo sapiens
  misc_RNA (1)...(19): siRNA sense strand
agcaucaggccaaauguaa

SEQ ID NO: 197197 - RNA, 19 nt, Homo sapiens
  misc_RNA (1)...(19): siRNA sense strand
gcccuuugcuuggaucucu

SEQ ID NO: 197198 - RNA, 19 nt, Homo sapiens
  misc_RNA (1)...(19): siRNA sense strand
gcugaauguuuaugauacg

SEQ ID NO: 197199 - RNA, 19 nt, Homo sapiens
  misc_RNA (1)...(19): siRNA sense strand
agacuuugccaagguacua

SEQ ID NO: 197200 - RNA, 19 nt, Homo sapiens
  misc_RNA (1)...(19): siRNA sense strand
caagcaaguggcaaguuca

SEQ ID NO: 197201 - RNA, 19 nt, Homo sapiens
  misc_RNA (1)...(19): siRNA sense strand
agacaaguacagauaccuu

SEQ ID NO: 197202 - RNA, 19 nt, Homo sapiens
  misc_RNA (1)...(19): siRNA sense strand
gcaucauuucccuguguaa

SEQ ID NO: 197203 - RNA, 19 nt, Homo sapiens
  misc_RNA (1)...(19): siRNA sense strand
cugcaaagaguguccaauc

SEQ ID NO: 197204 - RNA, 19 nt, Homo sapiens
  misc_RNA (1)...(19): siRNA sense strand
cuuauaggacugccaugaa

SEQ ID NO: 197205 - RNA, 19 nt, Homo sapiens
  misc_RNA (1)...(19): siRNA sense strand
caaagaguguccaaucauu

SEQ ID NO: 197206 - RNA, 19 nt, Homo sapiens
  misc_RNA (1)...(19): siRNA sense strand
uagcugaccugaauaaugu

SEQ ID NO: 197207 - RNA, 19 nt, Homo sapiens
  misc_RNA (1)...(19): siRNA sense strand
gcaugauucuauccaaauu

SEQ ID NO: 197208 - RNA, 19 nt, Homo sapiens
  misc_RNA (1)...(19): siRNA sense strand
ugaacuggcugcugaaugu

SEQ ID NO: 197209 - RNA, 19 nt, Homo sapiens
  misc_RNA (1)...(19): siRNA sense strand
gauauccugcagauuauua

SEQ ID NO: 197210 - RNA, 19 nt, Homo sapiens
  misc_RNA (1)...(19): siRNA sense strand
gagaagauguucgagacuu

SEQ ID NO: 197211 - RNA, 19 nt, Homo sapiens
  misc_RNA (1)...(19): siRNA sense strand
gcacuuuaauuaugacauc

SEQ ID NO: 197212 - RNA, 19 nt, Homo sapiens
  misc_RNA (1)...(19): siRNA sense strand
guaaagcacauuuggaaga

SEQ ID NO: 197213 - RNA, 19 nt, Homo sapiens
  misc_RNA (1)...(19): siRNA sense strand
gaauauugcacuccgacua

SEQ ID NO: 197214 - RNA, 19 nt, Homo sapiens
  misc_RNA (1)...(19): siRNA sense strand
uuauaggacugccaugaaa

SEQ ID NO: 197215 - RNA, 19 nt, Homo sapiens
  misc_RNA (1)...(19): siRNA sense strand
gggugaaguugcauccuuu

SEQ ID NO: 197216 - RNA, 19 nt, Homo sapiens
  misc_RNA (1)...(19): siRNA sense strand
gcaagagcacaacaauuug

SEQ ID NO: 197217 - RNA, 19 nt, Homo sapiens
  misc_RNA (1)...(19): siRNA sense strand
gcacaacaauuuggucaac

SEQ ID NO: 197218 - RNA, 19 nt, Homo sapiens
  misc_RNA (1)...(19): siRNA sense strand
agcaagagcacaacaauuu

SEQ ID NO: 197219 - RNA, 19 nt, Homo sapiens
  misc_RNA (1)...(19): siRNA sense strand
agaagauguucgagacuuu

SEQ ID NO: 197220 - RNA, 19 nt, Homo sapiens
  misc_RNA (1)...(19): siRNA sense strand
gagcaagagcacaacaauu

SEQ ID NO: 197221 - RNA, 19 nt, Homo sapiens
  misc_RNA (1)...(19): siRNA sense strand
ucaagcaaguggcaaguuc

SEQ ID NO: 197222 - RNA, 19 nt, Homo sapiens
  misc_RNA (1)...(19): siRNA sense strand
ccacgagacucaaacaacu

SEQ ID NO: 197223 - RNA, 19 nt, Homo sapiens
  misc_RNA (1)...(19): siRNA sense strand
cagcacaaccucaagcaaa

SEQ ID NO: 197224 - RNA, 19 nt, Homo sapiens
  misc_RNA (1)...(19): siRNA sense strand
gcaaagaguguccaaucau

SEQ ID NO: 197225 - RNA, 19 nt, Homo sapiens
  misc_RNA (1)...(19): siRNA sense strand
auggauauccugcagauua

SEQ ID NO: 197226 - RNA, 19 nt, Homo sapiens
  misc_RNA (1)...(19): siRNA sense strand
uguaacaucugcaaagagu

SEQ ID NO: 197227 - RNA, 19 nt, Homo sapiens
  misc_RNA (1)...(19): siRNA sense strand
guccggagcugcuuccaau

SEQ ID NO: 197228 - RNA, 19 nt, Homo sapiens
  misc_RNA (1)...(19): siRNA sense strand
gcaaguggcaaguucaaca

SEQ ID NO: 197229 - RNA, 19 nt, Homo sapiens
  misc_RNA (1)...(19): siRNA sense strand
gcuuccaauuugcuaauaa

SEQ ID NO: 197230 - RNA, 19 nt, Homo sapiens
  misc_RNA (1)...(19): siRNA sense strand
uggaagacaaguacagaua

SEQ ID NO: 197231 - RNA, 19 nt, Homo sapiens
  misc_RNA (1)...(19): siRNA sense strand
ggauccguguccugucuuu

SEQ ID NO: 197232 - RNA, 19 nt, Homo sapiens
  misc_RNA (1)...(19): siRNA sense strand
gucuuuagcugaccugaau

SEQ ID NO: 197233 - RNA, 19 nt, Homo sapiens
  misc_RNA (1)...(19): siRNA sense strand
gacaaguacagauaccuuu

SEQ ID NO: 197234 - RNA, 19 nt, Homo sapiens
  misc_RNA (1)...(19): siRNA sense strand
ccaagcaucaggccaaaug

SEQ ID NO: 197235 - RNA, 19 nt, Homo sapiens
  misc_RNA (1)...(19): siRNA sense strand
ggagcaagagcacaacaau

SEQ ID NO: 197236 - RNA, 19 nt, Homo sapiens
  misc_RNA (1)...(19): siRNA sense strand
guguaaagcacauuuggaa

SEQ ID NO: 197237 - RNA, 19 nt, Homo sapiens
  misc_RNA (1)...(19): siRNA sense strand
caagacaguugggugaagu

SEQ ID NO: 197238 - RNA, 19 nt, Homo sapiens
  misc_RNA (1)...(19): siRNA sense strand
gaagauguucgagacuuug

SEQ ID NO: 197239 - RNA, 19 nt, Homo sapiens
  misc_RNA (1)...(19): siRNA sense strand
gucagauucucagcuuaua

SEQ ID NO: 197240 - RNA, 19 nt, Homo sapiens
  misc_RNA (1)...(19): siRNA sense strand
uaacaucugcaaagagugu

SEQ ID NO: 197241 - RNA, 19 nt, Homo sapiens
  misc_RNA (1)...(19): siRNA sense strand
cggagcugcuuccaauuug

SEQ ID NO: 197242 - RNA, 19 nt, Homo sapiens
  misc_RNA (1)...(19): siRNA sense strand
gaagacaaguacagauacc

SEQ ID NO: 197243 - RNA, 19 nt, Homo sapiens
  misc_RNA (1)...(19): siRNA sense strand
ccauggauauccugcagau

SEQ ID NO: 197244 - RNA, 19 nt, Homo sapiens
  misc_RNA (1)...(19): siRNA sense strand
ggcaucauuucccugugua

SEQ ID NO: 197245 - RNA, 19 nt, Homo sapiens
  misc_RNA (1)...(19): siRNA sense strand
uggauauccugcagauuau

SEQ ID NO: 197246 - RNA, 19 nt, Homo sapiens
  misc_RNA (1)...(19): siRNA sense strand
ggaagacaaguacagauac

SEQ ID NO: 197247 - RNA, 19 nt, Homo sapiens
  misc_RNA (1)...(19): siRNA sense strand
ugcaaagaguguccaauca

SEQ ID NO: 197248 - RNA, 19 nt, Homo sapiens
  misc_RNA (1)...(19): siRNA sense strand
guggauaugugucugaacu

SEQ ID NO: 197249 - RNA, 19 nt, Homo sapiens
  misc_RNA (1)...(19): siRNA sense strand
acuggcugcugaauguuua

SEQ ID NO: 197250 - RNA, 19 nt, Homo sapiens
  misc_RNA (1)...(19): siRNA sense strand
acuaucccaugguggaaua

SEQ ID NO: 197251 - RNA, 19 nt, Homo sapiens
  misc_RNA (1)...(19): siRNA sense strand
ccggagcugcuuccaauuu

SEQ ID NO: 197252 - RNA, 19 nt, Homo sapiens
  misc_RNA (1)...(19): siRNA sense strand
ccaaauuccaagacaguug

SEQ ID NO: 197253 - RNA, 19 nt, Homo sapiens
  misc_RNA (1)...(19): siRNA sense strand
cagaaacugccaagcauca

SEQ ID NO: 197254 - RNA, 19 nt, Homo sapiens
  misc_RNA (1)...(19): siRNA sense strand
uaugacaucugccaaagcu

SEQ ID NO: 197255 - RNA, 19 nt, Homo sapiens
  misc_RNA (1)...(19): siRNA sense strand
aaugucagauucucagcuu

SEQ ID NO: 197256 - RNA, 19 nt, Homo sapiens
  misc_RNA (1)...(19): siRNA sense strand
ucgagacuuugccaaggua

SEQ ID NO: 197257 - RNA, 19 nt, Homo sapiens
  misc_RNA (1)...(19): siRNA sense strand
gcaaaaggccauaaaaugc

SEQ ID NO: 197258 - RNA, 19 nt, Homo sapiens
  misc_RNA (1)...(19): siRNA sense strand
cugcaugauucuauccaaa

SEQ ID NO: 197259 - RNA, 19 nt, Homo sapiens
  misc_RNA (1)...(19): siRNA sense strand
uaaagcacauuuggaagac

SEQ ID NO: 197260 - RNA, 19 nt, Homo sapiens
  misc_RNA (1)...(19): siRNA sense strand
acaggagucuaaagcacuu

SEQ ID NO: 197261 - RNA, 19 nt, Homo sapiens
  misc_RNA (1)...(19): siRNA sense strand
acagauaccuuuucaagca

SEQ ID NO: 197262 - RNA, 19 nt, Homo sapiens
  misc_RNA (1)...(19): siRNA sense strand
aagcacauuuggaagacaa

SEQ ID NO: 197263 - RNA, 19 nt, Homo sapiens
  misc_RNA (1)...(19): siRNA sense strand
gcuaauaauaagccagaga

SEQ ID NO: 197264 - RNA, 19 nt, Homo sapiens
  misc_RNA (1)...(19): siRNA sense strand
caagagcacaacaauuugg

SEQ ID NO: 197265 - RNA, 19 nt, Homo sapiens
  misc_RNA (1)...(19): siRNA sense strand
ccugucagcugcaugugau

SEQ ID NO: 197266 - RNA, 19 nt, Homo sapiens
  misc_RNA (1)...(19): siRNA sense strand
gcugcugaauguuuaugau

SEQ ID NO: 197267 - RNA, 19 nt, Homo sapiens
  misc_RNA (1)...(19): siRNA sense strand
acagagcucuaccagucuu

SEQ ID NO: 197268 - RNA, 19 nt, Homo sapiens
  misc_RNA (1)...(19): siRNA sense strand
acaguugggugaaguugca

SEQ ID NO: 197269 - RNA, 19 nt, Homo sapiens
  misc_RNA (1)...(19): siRNA sense strand
guuugaccacuauuuauga

SEQ ID NO: 197270 - RNA, 19 nt, Homo sapiens
  misc_RNA (1)...(19): siRNA sense strand
gcuuauaggacugccauga

SEQ ID NO: 197271 - RNA, 19 nt, Homo sapiens
  misc_RNA (1)...(19): siRNA sense strand
caucaggccaaauguaaca

SEQ ID NO: 197272 - RNA, 19 nt, Homo sapiens
  misc_RNA (1)...(19): siRNA sense strand
gauucuauccaaauuccaa

SEQ ID NO: 197273 - RNA, 19 nt, Homo sapiens
  misc_RNA (1)...(19): siRNA sense strand
ggcaaguucaacaggauuu

SEQ ID NO: 197274 - RNA, 19 nt, Homo sapiens
  misc_RNA (1)...(19): siRNA sense strand
gaacuggcugcugaauguu

SEQ ID NO: 197275 - RNA, 19 nt, Homo sapiens
  misc_RNA (1)...(19): siRNA sense strand
cugcugaauguuuaugaua

SEQ ID NO: 197276 - RNA, 19 nt, Homo sapiens
  misc_RNA (1)...(19): siRNA sense strand
aagcaucaggccaaaugua

SEQ ID NO: 197277 - RNA, 19 nt, Homo sapiens
  misc_RNA (1)...(19): siRNA sense strand
uggcaucauuucccugugu

SEQ ID NO: 197278 - RNA, 19 nt, Homo sapiens
  misc_RNA (1)...(19): siRNA sense strand
ccaugaaacuccgaagacu

SEQ ID NO: 197279 - RNA, 19 nt, Homo sapiens
  misc_RNA (1)...(19): siRNA sense strand
auaauaagccagagaucga

SEQ ID NO: 197280 - RNA, 19 nt, Homo sapiens
  misc_RNA (1)...(19): siRNA sense strand
cuaauaauaagccagagau

SEQ ID NO: 197281 - RNA, 19 nt, Homo sapiens
  misc_RNA (1)...(19): siRNA sense strand
ugggugaaguugcauccuu

SEQ ID NO: 197282 - RNA, 19 nt, Homo sapiens
  misc_RNA (1)...(19): siRNA sense strand
caucauuucccuguguaaa

SEQ ID NO: 197283 - RNA, 19 nt, Homo sapiens
  misc_RNA (1)...(19): siRNA sense strand
gcguggauaugugucugaa

SEQ ID NO: 197284 - RNA, 19 nt, Homo sapiens
  misc_RNA (1)...(19): siRNA sense strand
gcacuaucccaugguggaa

SEQ ID NO: 197285 - RNA, 19 nt, Homo sapiens
  misc_RNA (1)...(19): siRNA sense strand
gagccugucagcugcaugu

SEQ ID NO: 197286 - RNA, 19 nt, Homo sapiens
  misc_RNA (1)...(19): siRNA sense strand
guacagauaccuuuucaag

SEQ ID NO: 197287 - RNA, 19 nt, Homo sapiens
  misc_RNA (1)...(19): siRNA sense strand
gucccucucugcguggaua

SEQ ID NO: 197288 - RNA, 19 nt, Homo sapiens
  misc_RNA (1)...(19): siRNA sense strand
ggagcugcuuccaauuugc

SEQ ID NO: 197289 - RNA, 19 nt, Homo sapiens
  misc_RNA (1)...(19): siRNA sense strand
uuagcugaccugaauaaug

SEQ ID NO: 197290 - RNA, 19 nt, Homo sapiens
  misc_RNA (1)...(19): siRNA sense strand
guggcaaguucaacaggau

SEQ ID NO: 197291 - RNA, 19 nt, Homo sapiens
  misc_RNA (1)...(19): siRNA sense strand
acaacaauuuggucaacgu

SEQ ID NO: 197292 - RNA, 19 nt, Homo sapiens
  misc_RNA (1)...(19): siRNA sense strand
gacuacaucaggagaagau

SEQ ID NO: 197293 - RNA, 19 nt, Homo sapiens
  misc_RNA (1)...(19): siRNA sense strand
uaauaagccagagaucgaa

SEQ ID NO: 197294 - RNA, 19 nt, Homo sapiens
  misc_RNA (1)...(19): siRNA sense strand
ugucagauucucagcuuau

SEQ ID NO: 197295 - RNA, 19 nt, Homo sapiens
  misc_RNA (1)...(19): siRNA sense strand
ggauauccugcagauuauu

SEQ ID NO: 197296 - RNA, 19 nt, Homo sapiens
  misc_RNA (1)...(19): siRNA sense strand
agcaucaggccaaauguaa

SEQ ID NO: 197297 - RNA, 19 nt, Homo sapiens
  misc_RNA (1)...(19): siRNA sense strand
gcccuuugcuuggaucucu

SEQ ID NO: 197298 - RNA, 19 nt, Homo sapiens
  misc_RNA (1)...(19): siRNA sense strand
gcugaauguuuaugauacg

SEQ ID NO: 197299 - RNA, 19 nt, Homo sapiens
  misc_RNA (1)...(19): siRNA sense strand
agacuuugccaagguacua

SEQ ID NO: 197300 - RNA, 19 nt, Homo sapiens
  misc_RNA (1)...(19): siRNA sense strand
caagcaaguggcaaguuca

SEQ ID NO: 197301 - RNA, 19 nt, Homo sapiens
  misc_RNA (1)...(19): siRNA sense strand
agacaaguacagauaccuu

SEQ ID NO: 197302 - RNA, 19 nt, Homo sapiens
  misc_RNA (1)...(19): siRNA sense strand
gcaucauuucccuguguaa

SEQ ID NO: 197303 - RNA, 19 nt, Homo sapiens
  misc_RNA (1)...(19): siRNA sense strand
cugcaaagaguguccaauc

SEQ ID NO: 197304 - RNA, 19 nt, Homo sapiens
  misc_RNA (1)...(19): siRNA sense strand
cuuauaggacugccaugaa

SEQ ID NO: 197305 - RNA, 19 nt, Homo sapiens
  misc_RNA (1)...(19): siRNA sense strand
caaagaguguccaaucauu

SEQ ID NO: 197306 - RNA, 19 nt, Homo sapiens
  misc_RNA (1)...(19): siRNA sense strand
uagcugaccugaauaaugu

SEQ ID NO: 197307 - RNA, 19 nt, Homo sapiens
  misc_RNA (1)...(19): siRNA sense strand
gcaugauucuauccaaauu

SEQ ID NO: 197308 - RNA, 19 nt, Homo sapiens
  misc_RNA (1)...(19): siRNA sense strand
ugaacuggcugcugaaugu

SEQ ID NO: 197309 - RNA, 19 nt, Homo sapiens
  misc_RNA (1)...(19): siRNA sense strand
gauauccugcagauuauua

SEQ ID NO: 197310 - RNA, 19 nt, Homo sapiens
  misc_RNA (1)...(19): siRNA sense strand
gagaagauguucgagacuu

SEQ ID NO: 197311 - RNA, 19 nt, Homo sapiens
  misc_RNA (1)...(19): siRNA sense strand
gcacuuuaauuaugacauc

SEQ ID NO: 197312 - RNA, 19 nt, Homo sapiens
  misc_RNA (1)...(19): siRNA sense strand
guaaagcacauuuggaaga

SEQ ID NO: 197313 - RNA, 19 nt, Homo sapiens
  misc_RNA (1)...(19): siRNA sense strand
gaauauugcacuccgacua

SEQ ID NO: 197314 - RNA, 19 nt, Homo sapiens
  misc_RNA (1)...(19): siRNA sense strand
uuauaggacugccaugaaa

SEQ ID NO: 197315 - RNA, 19 nt, Homo sapiens
  misc_RNA (1)...(19): siRNA sense strand
gggugaaguugcauccuuu

SEQ ID NO: 197316 - RNA, 19 nt, Homo sapiens
  misc_RNA (1)...(19): siRNA sense strand
gcaagagcacaacaauuug

SEQ ID NO: 197317 - RNA, 19 nt, Homo sapiens
  misc_RNA (1)...(19): siRNA sense strand
gcacaacaauuuggucaac

SEQ ID NO: 197318 - RNA, 19 nt, Homo sapiens
  misc_RNA (1)...(19): siRNA sense strand
agcaagagcacaacaauuu

SEQ ID NO: 197319 - RNA, 19 nt, Homo sapiens
  misc_RNA (1)...(19): siRNA sense strand
agaagauguucgagacuuu

SEQ ID NO: 197320 - RNA, 19 nt, Homo sapiens
  misc_RNA (1)...(19): siRNA sense strand
gagcaagagcacaacaauu

SEQ ID NO: 197321 - RNA, 19 nt, Homo sapiens
  misc_RNA (1)...(19): siRNA sense strand
ucaagcaaguggcaaguuc

SEQ ID NO: 197322 - RNA, 19 nt, Homo sapiens
  misc_RNA (1)...(19): siRNA sense strand
ccacgagacucaaacaacu

SEQ ID NO: 197323 - RNA, 19 nt, Homo sapiens
  misc_RNA (1)...(19): siRNA sense strand
cagcacaaccucaagcaaa

SEQ ID NO: 197324 - RNA, 19 nt, Homo sapiens
  misc_RNA (1)...(19): siRNA sense strand
gcaaagaguguccaaucau

SEQ ID NO: 197325 - RNA, 19 nt, Homo sapiens
  misc_RNA (1)...(19): siRNA sense strand
auggauauccugcagauua

SEQ ID NO: 197326 - RNA, 19 nt, Homo sapiens
  misc_RNA (1)...(19): siRNA sense strand
uguaacaucugcaaagagu

SEQ ID NO: 197327 - RNA, 19 nt, Homo sapiens
  misc_RNA (1)...(19): siRNA sense strand
guccggagcugcuuccaau

SEQ ID NO: 197328 - RNA, 19 nt, Homo sapiens
  misc_RNA (1)...(19): siRNA sense strand
gcaaguggcaaguucaaca

SEQ ID NO: 197329 - RNA, 19 nt, Homo sapiens
  misc_RNA (1)...(19): siRNA sense strand
gcuuccaauuugcuaauaa

SEQ ID NO: 197330 - RNA, 19 nt, Homo sapiens
  misc_RNA (1)...(19): siRNA sense strand
uggaagacaaguacagaua

SEQ ID NO: 197331 - RNA, 19 nt, Homo sapiens
  misc_RNA (1)...(19): siRNA sense strand
ggauccguguccugucuuu

SEQ ID NO: 197332 - RNA, 19 nt, Homo sapiens
  misc_RNA (1)...(19): siRNA sense strand
gucuuuagcugaccugaau

SEQ ID NO: 197333 - RNA, 19 nt, Homo sapiens
  misc_RNA (1)...(19): siRNA sense strand
gacaaguacagauaccuuu

SEQ ID NO: 197334 - RNA, 19 nt, Homo sapiens
  misc_RNA (1)...(19): siRNA sense strand
ccaagcaucaggccaaaug

SEQ ID NO: 197335 - RNA, 19 nt, Homo sapiens
  misc_RNA (1)...(19): siRNA sense strand
ggagcaagagcacaacaau

SEQ ID NO: 197336 - RNA, 19 nt, Homo sapiens
  misc_RNA (1)...(19): siRNA sense strand
guguaaagcacauuuggaa

SEQ ID NO: 197337 - RNA, 19 nt, Homo sapiens
  misc_RNA (1)...(19): siRNA sense strand
caagacaguugggugaagu

SEQ ID NO: 197338 - RNA, 19 nt, Homo sapiens
  misc_RNA (1)...(19): siRNA sense strand
gaagauguucgagacuuug

SEQ ID NO: 197339 - RNA, 19 nt, Homo sapiens
  misc_RNA (1)...(19): siRNA sense strand
gucagauucucagcuuaua

SEQ ID NO: 197340 - RNA, 19 nt, Homo sapiens
  misc_RNA (1)...(19): siRNA sense strand
uaacaucugcaaagagugu

SEQ ID NO: 197341 - RNA, 19 nt, Homo sapiens
  misc_RNA (1)...(19): siRNA sense strand
cggagcugcuuccaauuug

SEQ ID NO: 197342 - RNA, 19 nt, Homo sapiens
  misc_RNA (1)...(19): siRNA sense strand
gaagacaaguacagauacc

SEQ ID NO: 197343 - RNA, 19 nt, Homo sapiens
  misc_RNA (1)...(19): siRNA sense strand
ccauggauauccugcagau

SEQ ID NO: 197344 - RNA, 19 nt, Homo sapiens
  misc_RNA (1)...(19): siRNA sense strand
ggcaucauuucccugugua

SEQ ID NO: 197345 - RNA, 19 nt, Homo sapiens
  misc_RNA (1)...(19): siRNA sense strand
uggauauccugcagauuau

SEQ ID NO: 197346 - RNA, 19 nt, Homo sapiens
  misc_RNA (1)...(19): siRNA sense strand
ggaagacaaguacagauac

SEQ ID NO: 197347 - RNA, 19 nt, Homo sapiens
  misc_RNA (1)...(19): siRNA sense strand
ugcaaagaguguccaauca

SEQ ID NO: 197348 - RNA, 19 nt, Homo sapiens
  misc_RNA (1)...(19): siRNA sense strand
guggauaugugucugaacu

SEQ ID NO: 197349 - RNA, 19 nt, Homo sapiens
  misc_RNA (1)...(19): siRNA sense strand
acuggcugcugaauguuua

SEQ ID NO: 197350 - RNA, 19 nt, Homo sapiens
  misc_RNA (1)...(19): siRNA sense strand
acuaucccaugguggaaua

SEQ ID NO: 197351 - RNA, 19 nt, Homo sapiens
  misc_RNA (1)...(19): siRNA sense strand
ccggagcugcuuccaauuu

SEQ ID NO: 197352 - RNA, 19 nt, Homo sapiens
  misc_RNA (1)...(19): siRNA sense strand
ccaaauuccaagacaguug

SEQ ID NO: 197353 - RNA, 19 nt, Homo sapiens
  misc_RNA (1)...(19): siRNA sense strand
cagaaacugccaagcauca

SEQ ID NO: 197354 - RNA, 19 nt, Homo sapiens
  misc_RNA (1)...(19): siRNA sense strand
uaugacaucugccaaagcu

SEQ ID NO: 197355 - RNA, 19 nt, Homo sapiens
  misc_RNA (1)...(19): siRNA sense strand
aaugucagauucucagcuu

SEQ ID NO: 197356 - RNA, 19 nt, Homo sapiens
  misc_RNA (1)...(19): siRNA sense strand
ucgagacuuugccaaggua

SEQ ID NO: 197357 - RNA, 19 nt, Homo sapiens
  misc_RNA (1)...(19): siRNA sense strand
gcaaaaggccauaaaaugc

SEQ ID NO: 197358 - RNA, 19 nt, Homo sapiens
  misc_RNA (1)...(19): siRNA sense strand
cugcaugauucuauccaaa

SEQ ID NO: 197359 - RNA, 19 nt, Homo sapiens
  misc_RNA (1)...(19): siRNA sense strand
uaaagcacauuuggaagac

SEQ ID NO: 197360 - RNA, 19 nt, Homo sapiens
  misc_RNA (1)...(19): siRNA sense strand
acaggagucuaaagcacuu

SEQ ID NO: 197361 - RNA, 19 nt, Homo sapiens
  misc_RNA (1)...(19): siRNA sense strand
acagauaccuuuucaagca

SEQ ID NO: 197362 - RNA, 19 nt, Homo sapiens
  misc_RNA (1)...(19): siRNA sense strand
aagcacauuuggaagacaa

SEQ ID NO: 197363 - RNA, 19 nt, Homo sapiens
  misc_RNA (1)...(19): siRNA sense strand
gcuaauaauaagccagaga

SEQ ID NO: 197364 - RNA, 19 nt, Homo sapiens
  misc_RNA (1)...(19): siRNA sense strand
caagagcacaacaauuugg

SEQ ID NO: 197365 - RNA, 19 nt, Homo sapiens
  misc_RNA (1)...(19): siRNA sense strand
ccugucagcugcaugugau

SEQ ID NO: 197366 - RNA, 19 nt, Homo sapiens
  misc_RNA (1)...(19): siRNA sense strand
gcugcugaauguuuaugau

SEQ ID NO: 197367 - RNA, 19 nt, Homo sapiens
  misc_RNA (1)...(19): siRNA sense strand
acagagcucuaccagucuu

SEQ ID NO: 197368 - RNA, 19 nt, Homo sapiens
  misc_RNA (1)...(19): siRNA sense strand
acaguugggugaaguugca

SEQ ID NO: 197369 - RNA, 19 nt, Homo sapiens
  misc_RNA (1)...(19): siRNA sense strand
guuugaccacuauuuauga

SEQ ID NO: 197370 - RNA, 19 nt, Homo sapiens
  misc_RNA (1)...(19): siRNA sense strand
gcuuauaggacugccauga

SEQ ID NO: 197371 - RNA, 19 nt, Homo sapiens
  misc_RNA (1)...(19): siRNA sense strand
caucaggccaaauguaaca

SEQ ID NO: 197372 - RNA, 19 nt, Homo sapiens
  misc_RNA (1)...(19): siRNA sense strand
gauucuauccaaauuccaa

SEQ ID NO: 197373 - RNA, 19 nt, Homo sapiens
  misc_RNA (1)...(19): siRNA sense strand
ggcaaguucaacaggauuu

SEQ ID NO: 197374 - RNA, 19 nt, Homo sapiens
  misc_RNA (1)...(19): siRNA sense strand
gaacuggcugcugaauguu

SEQ ID NO: 197375 - RNA, 19 nt, Homo sapiens
  misc_RNA (1)...(19): siRNA sense strand
cugcugaauguuuaugaua

SEQ ID NO: 197376 - RNA, 19 nt, Homo sapiens
  misc_RNA (1)...(19): siRNA sense strand
aagcaucaggccaaaugua

SEQ ID NO: 197377 - RNA, 19 nt, Homo sapiens
  misc_RNA (1)...(19): siRNA sense strand
uggcaucauuucccugugu

SEQ ID NO: 197378 - RNA, 19 nt, Homo sapiens
  misc_RNA (1)...(19): siRNA sense strand
ccaugaaacuccgaagacu

SEQ ID NO: 197379 - RNA, 19 nt, Homo sapiens
  misc_RNA (1)...(19): siRNA sense strand
auaauaagccagagaucga

SEQ ID NO: 197380 - RNA, 19 nt, Homo sapiens
  misc_RNA (1)...(19): siRNA sense strand
cuaauaauaagccagagau

SEQ ID NO: 197381 - RNA, 19 nt, Homo sapiens
  misc_RNA (1)...(19): siRNA sense strand
ugggugaaguugcauccuu

SEQ ID NO: 197382 - RNA, 19 nt, Homo sapiens
  misc_RNA (1)...(19): siRNA sense strand
caucauuucccuguguaaa

SEQ ID NO: 197383 - RNA, 19 nt, Homo sapiens
  misc_RNA (1)...(19): siRNA sense strand
gcguggauaugugucugaa

SEQ ID NO: 197384 - RNA, 19 nt, Homo sapiens
  misc_RNA (1)...(19): siRNA sense strand
gcacuaucccaugguggaa

SEQ ID NO: 197385 - RNA, 19 nt, Homo sapiens
  misc_RNA (1)...(19): siRNA sense strand
gagccugucagcugcaugu

SEQ ID NO: 197386 - RNA, 19 nt, Homo sapiens
  misc_RNA (1)...(19): siRNA sense strand
guacagauaccuuuucaag

SEQ ID NO: 197387 - RNA, 19 nt, Homo sapiens
  misc_RNA (1)...(19): siRNA sense strand
gucccucucugcguggaua

SEQ ID NO: 197388 - RNA, 19 nt, Homo sapiens
  misc_RNA (1)...(19): siRNA sense strand
ggagcugcuuccaauuugc

SEQ ID NO: 197389 - RNA, 19 nt, Homo sapiens
  misc_RNA (1)...(19): siRNA sense strand
uuagcugaccugaauaaug

SEQ ID NO: 197390 - RNA, 19 nt, Homo sapiens
  misc_RNA (1)...(19): siRNA sense strand
guggcaaguucaacaggau

SEQ ID NO: 197391 - RNA, 19 nt, Homo sapiens
  misc_RNA (1)...(19): siRNA sense strand
acaacaauuuggucaacgu

SEQ ID NO: 197392 - RNA, 19 nt, Homo sapiens
  misc_RNA (1)...(19): siRNA sense strand
gacuacaucaggagaagau

SEQ ID NO: 197393 - RNA, 19 nt, Homo sapiens
  misc_RNA (1)...(19): siRNA sense strand
uaauaagccagagaucgaa

SEQ ID NO: 197394 - RNA, 19 nt, Homo sapiens
  misc_RNA (1)...(19): siRNA sense strand
ugucagauucucagcuuau

SEQ ID NO: 197395 - RNA, 19 nt, Homo sapiens
  misc_RNA (1)...(19): siRNA sense strand
ggauauccugcagauuauu

SEQ ID NO: 197396 - RNA, 19 nt, Homo sapiens
  misc_RNA (1)...(19): siRNA sense strand
agcaucaggccaaauguaa

SEQ ID NO: 197397 - RNA, 19 nt, Homo sapiens
  misc_RNA (1)...(19): siRNA sense strand
gcccuuugcuuggaucucu

SEQ ID NO: 197398 - RNA, 19 nt, Homo sapiens
  misc_RNA (1)...(19): siRNA sense strand
gcugaauguuuaugauacg

SEQ ID NO: 197399 - RNA, 19 nt, Homo sapiens
  misc_RNA (1)...(19): siRNA sense strand
agacuuugccaagguacua

SEQ ID NO: 197400 - RNA, 19 nt, Homo sapiens
  misc_RNA (1)...(19): siRNA sense strand
caagcaaguggcaaguuca

SEQ ID NO: 197401 - RNA, 19 nt, Homo sapiens
  misc_RNA (1)...(19): siRNA sense strand
agacaaguacagauaccuu

SEQ ID NO: 197402 - RNA, 19 nt, Homo sapiens
  misc_RNA (1)...(19): siRNA sense strand
gcaucauuucccuguguaa

SEQ ID NO: 197403 - RNA, 19 nt, Homo sapiens
  misc_RNA (1)...(19): siRNA sense strand
cugcaaagaguguccaauc

SEQ ID NO: 197404 - RNA, 19 nt, Homo sapiens
  misc_RNA (1)...(19): siRNA sense strand
cuuauaggacugccaugaa

SEQ ID NO: 197405 - RNA, 19 nt, Homo sapiens
  misc_RNA (1)...(19): siRNA sense strand
caaagaguguccaaucauu

SEQ ID NO: 197406 - RNA, 19 nt, Homo sapiens
  misc_RNA (1)...(19): siRNA sense strand
uagcugaccugaauaaugu

SEQ ID NO: 197407 - RNA, 19 nt, Homo sapiens
  misc_RNA (1)...(19): siRNA sense strand
gcaugauucuauccaaauu

SEQ ID NO: 197408 - RNA, 19 nt, Homo sapiens
  misc_RNA (1)...(19): siRNA sense strand
ugaacuggcugcugaaugu

SEQ ID NO: 197409 - RNA, 19 nt, Homo sapiens
  misc_RNA (1)...(19): siRNA sense strand
gauauccugcagauuauua

SEQ ID NO: 197410 - RNA, 19 nt, Homo sapiens
  misc_RNA (1)...(19): siRNA sense strand
gagaagauguucgagacuu

SEQ ID NO: 197411 - RNA, 19 nt, Homo sapiens
  misc_RNA (1)...(19): siRNA sense strand
gcacuuuaauuaugacauc

SEQ ID NO: 197412 - RNA, 19 nt, Homo sapiens
  misc_RNA (1)...(19): siRNA sense strand
guaaagcacauuuggaaga

SEQ ID NO: 197413 - RNA, 19 nt, Homo sapiens
  misc_RNA (1)...(19): siRNA sense strand
gaauauugcacuccgacua

SEQ ID NO: 197414 - RNA, 19 nt, Homo sapiens
  misc_RNA (1)...(19): siRNA sense strand
uuauaggacugccaugaaa

SEQ ID NO: 197415 - RNA, 19 nt, Homo sapiens
  misc_RNA (1)...(19): siRNA sense strand
gggugaaguugcauccuuu

SEQ ID NO: 197416 - RNA, 19 nt, Homo sapiens
  misc_RNA (1)...(19): siRNA sense strand
gcaagagcacaacaauuug

SEQ ID NO: 197417 - RNA, 19 nt, Homo sapiens
  misc_RNA (1)...(19): siRNA sense strand
gcacaacaauuuggucaac

SEQ ID NO: 197418 - RNA, 19 nt, Homo sapiens
  misc_RNA (1)...(19): siRNA sense strand
agcaagagcacaacaauuu

SEQ ID NO: 197419 - RNA, 19 nt, Homo sapiens
  misc_RNA (1)...(19): siRNA sense strand
agaagauguucgagacuuu

SEQ ID NO: 197420 - RNA, 19 nt, Homo sapiens
  misc_RNA (1)...(19): siRNA sense strand
gagcaagagcacaacaauu

SEQ ID NO: 197421 - RNA, 19 nt, Homo sapiens
  misc_RNA (1)...(19): siRNA sense strand
ucaagcaaguggcaaguuc

SEQ ID NO: 197422 - RNA, 19 nt, Homo sapiens
  misc_RNA (1)...(19): siRNA sense strand
ccacgagacucaaacaacu

SEQ ID NO: 197423 - RNA, 19 nt, Homo sapiens
  misc_RNA (1)...(19): siRNA sense strand
cagcacaaccucaagcaaa

SEQ ID NO: 197424 - RNA, 19 nt, Homo sapiens
  misc_RNA (1)...(19): siRNA sense strand
gcaaagaguguccaaucau

SEQ ID NO: 197425 - RNA, 19 nt, Homo sapiens
  misc_RNA (1)...(19): siRNA sense strand
auggauauccugcagauua

SEQ ID NO: 197426 - RNA, 19 nt, Homo sapiens
  misc_RNA (1)...(19): siRNA sense strand
uguaacaucugcaaagagu

SEQ ID NO: 197427 - RNA, 19 nt, Homo sapiens
  misc_RNA (1)...(19): siRNA sense strand
guccggagcugcuuccaau

SEQ ID NO: 197428 - RNA, 19 nt, Homo sapiens
  misc_RNA (1)...(19): siRNA sense strand
gcaaguggcaaguucaaca

SEQ ID NO: 197429 - RNA, 19 nt, Homo sapiens
  misc_RNA (1)...(19): siRNA sense strand
gcuuccaauuugcuaauaa

SEQ ID NO: 197430 - RNA, 19 nt, Homo sapiens
  misc_RNA (1)...(19): siRNA sense strand
uggaagacaaguacagaua

SEQ ID NO: 197431 - RNA, 19 nt, Homo sapiens
  misc_RNA (1)...(19): siRNA sense strand
ggauccguguccugucuuu

SEQ ID NO: 197432 - RNA, 19 nt, Homo sapiens
  misc_RNA (1)...(19): siRNA sense strand
gucuuuagcugaccugaau

SEQ ID NO: 197433 - RNA, 19 nt, Homo sapiens
  misc_RNA (1)...(19): siRNA sense strand
gacaaguacagauaccuuu

SEQ ID NO: 197434 - RNA, 19 nt, Homo sapiens
  misc_RNA (1)...(19): siRNA sense strand
ccaagcaucaggccaaaug

SEQ ID NO: 197435 - RNA, 19 nt, Homo sapiens
  misc_RNA (1)...(19): siRNA sense strand
ggagcaagagcacaacaau

SEQ ID NO: 197436 - RNA, 19 nt, Homo sapiens
  misc_RNA (1)...(19): siRNA sense strand
guguaaagcacauuuggaa

SEQ ID NO: 197437 - RNA, 19 nt, Homo sapiens
  misc_RNA (1)...(19): siRNA sense strand
caagacaguugggugaagu

SEQ ID NO: 197438 - RNA, 19 nt, Homo sapiens
  misc_RNA (1)...(19): siRNA sense strand
gaagauguucgagacuuug

SEQ ID NO: 197439 - RNA, 19 nt, Homo sapiens
  misc_RNA (1)...(19): siRNA sense strand
gucagauucucagcuuaua

SEQ ID NO: 197440 - RNA, 19 nt, Homo sapiens
  misc_RNA (1)...(19): siRNA sense strand
uaacaucugcaaagagugu

SEQ ID NO: 197441 - RNA, 19 nt, Homo sapiens
  misc_RNA (1)...(19): siRNA sense strand
cggagcugcuuccaauuug

SEQ ID NO: 197442 - RNA, 19 nt, Homo sapiens
  misc_RNA (1)...(19): siRNA sense strand
gaagacaaguacagauacc

SEQ ID NO: 197443 - RNA, 19 nt, Homo sapiens
  misc_RNA (1)...(19): siRNA sense strand
ccauggauauccugcagau

SEQ ID NO: 197444 - RNA, 19 nt, Homo sapiens
  misc_RNA (1)...(19): siRNA sense strand
ggcaucauuucccugugua

SEQ ID NO: 197445 - RNA, 19 nt, Homo sapiens
  misc_RNA (1)...(19): siRNA sense strand
uggauauccugcagauuau

SEQ ID NO: 197446 - RNA, 19 nt, Homo sapiens
  misc_RNA (1)...(19): siRNA sense strand
ggaagacaaguacagauac

SEQ ID NO: 197447 - RNA, 19 nt, Homo sapiens
  misc_RNA (1)...(19): siRNA sense strand
ugcaaagaguguccaauca

SEQ ID NO: 197448 - RNA, 19 nt, Homo sapiens
  misc_RNA (1)...(19): siRNA sense strand
guggauaugugucugaacu

SEQ ID NO: 197449 - RNA, 19 nt, Homo sapiens
  misc_RNA (1)...(19): siRNA sense strand
acuggcugcugaauguuua

SEQ ID NO: 197450 - RNA, 19 nt, Homo sapiens
  misc_RNA (1)...(19): siRNA sense strand
acuaucccaugguggaaua

SEQ ID NO: 197451 - RNA, 19 nt, Homo sapiens
  misc_RNA (1)...(19): siRNA sense strand
ccggagcugcuuccaauuu

SEQ ID NO: 197452 - RNA, 19 nt, Homo sapiens
  misc_RNA (1)...(19): siRNA sense strand
ccaaauuccaagacaguug

SEQ ID NO: 197453 - RNA, 19 nt, Homo sapiens
  misc_RNA (1)...(19): siRNA sense strand
cagaaacugccaagcauca

SEQ ID NO: 197454 - RNA, 19 nt, Homo sapiens
  misc_RNA (1)...(19): siRNA sense strand
uaugacaucugccaaagcu

SEQ ID NO: 197455 - RNA, 19 nt, Homo sapiens
  misc_RNA (1)...(19): siRNA sense strand
aaugucagauucucagcuu

SEQ ID NO: 197456 - RNA, 19 nt, Homo sapiens
  misc_RNA (1)...(19): siRNA sense strand
ucgagacuuugccaaggua

SEQ ID NO: 197457 - RNA, 19 nt, Homo sapiens
  misc_RNA (1)...(19): siRNA sense strand
gcaaaaggccauaaaaugc

SEQ ID NO: 197458 - RNA, 19 nt, Homo sapiens
  misc_RNA (1)...(19): siRNA sense strand
cugcaugauucuauccaaa

SEQ ID NO: 197459 - RNA, 19 nt, Homo sapiens
  misc_RNA (1)...(19): siRNA sense strand
uaaagcacauuuggaagac

SEQ ID NO: 197460 - RNA, 19 nt, Homo sapiens
  misc_RNA (1)...(19): siRNA sense strand
acaggagucuaaagcacuu

SEQ ID NO: 197461 - RNA, 19 nt, Homo sapiens
  misc_RNA (1)...(19): siRNA sense strand
acagauaccuuuucaagca

SEQ ID NO: 197462 - RNA, 19 nt, Homo sapiens
  misc_RNA (1)...(19): siRNA sense strand
aagcacauuuggaagacaa

SEQ ID NO: 197463 - RNA, 19 nt, Homo sapiens
  misc_RNA (1)...(19): siRNA sense strand
gcuaauaauaagccagaga

SEQ ID NO: 197464 - RNA, 19 nt, Homo sapiens
  misc_RNA (1)...(19): siRNA sense strand
caagagcacaacaauuugg

SEQ ID NO: 197465 - RNA, 19 nt, Homo sapiens
  misc_RNA (1)...(19): siRNA sense strand
ccugucagcugcaugugau

SEQ ID NO: 197466 - RNA, 19 nt, Homo sapiens
  misc_RNA (1)...(19): siRNA sense strand
gcugcugaauguuuaugau

SEQ ID NO: 197467 - RNA, 19 nt, Homo sapiens
  misc_RNA (1)...(19): siRNA sense strand
acagagcucuaccagucuu

SEQ ID NO: 197468 - RNA, 19 nt, Homo sapiens
  misc_RNA (1)...(19): siRNA sense strand
acaguugggugaaguugca

SEQ ID NO: 197469 - RNA, 19 nt, Homo sapiens
  misc_RNA (1)...(19): siRNA sense strand
guuugaccacuauuuauga

SEQ ID NO: 197470 - RNA, 19 nt, Homo sapiens
  misc_RNA (1)...(19): siRNA sense strand
gcuuauaggacugccauga

SEQ ID NO: 197471 - RNA, 19 nt, Homo sapiens
  misc_RNA (1)...(19): siRNA sense strand
caucaggccaaauguaaca

SEQ ID NO: 197472 - RNA, 19 nt, Homo sapiens
  misc_RNA (1)...(19): siRNA sense strand
gauucuauccaaauuccaa

SEQ ID NO: 197473 - RNA, 19 nt, Homo sapiens
  misc_RNA (1)...(19): siRNA sense strand
ggcaaguucaacaggauuu

SEQ ID NO: 197474 - RNA, 19 nt, Homo sapiens
  misc_RNA (1)...(19): siRNA sense strand
gaacuggcugcugaauguu

SEQ ID NO: 197475 - RNA, 19 nt, Homo sapiens
  misc_RNA (1)...(19): siRNA sense strand
cugcugaauguuuaugaua

SEQ ID NO: 197476 - RNA, 19 nt, Homo sapiens
  misc_RNA (1)...(19): siRNA sense strand
aagcaucaggccaaaugua

SEQ ID NO: 197477 - RNA, 19 nt, Homo sapiens
  misc_RNA (1)...(19): siRNA sense strand
uggcaucauuucccugugu

SEQ ID NO: 197478 - RNA, 19 nt, Homo sapiens
  misc_RNA (1)...(19): siRNA sense strand
ccaugaaacuccgaagacu

SEQ ID NO: 197479 - RNA, 19 nt, Homo sapiens
  misc_RNA (1)...(19): siRNA sense strand
auaauaagccagagaucga

SEQ ID NO: 197480 - RNA, 19 nt, Homo sapiens
  misc_RNA (1)...(19): siRNA sense strand
cuaauaauaagccagagau

SEQ ID NO: 197481 - RNA, 19 nt, Homo sapiens
  misc_RNA (1)...(19): siRNA sense strand
ugggugaaguugcauccuu

SEQ ID NO: 197482 - RNA, 19 nt, Homo sapiens
  misc_RNA (1)...(19): siRNA sense strand
caucauuucccuguguaaa

SEQ ID NO: 197483 - RNA, 19 nt, Homo sapiens
  misc_RNA (1)...(19): siRNA sense strand
gcguggauaugugucugaa

SEQ ID NO: 197484 - RNA, 19 nt, Homo sapiens
  misc_RNA (1)...(19): siRNA sense strand
gcacuaucccaugguggaa

SEQ ID NO: 197485 - RNA, 19 nt, Homo sapiens
  misc_RNA (1)...(19): siRNA sense strand
gagccugucagcugcaugu

SEQ ID NO: 197486 - RNA, 19 nt, Homo sapiens
  misc_RNA (1)...(19): siRNA sense strand
guacagauaccuuuucaag

SEQ ID NO: 197487 - RNA, 19 nt, Homo sapiens
  misc_RNA (1)...(19): siRNA sense strand
gucccucucugcguggaua

SEQ ID NO: 197488 - RNA, 19 nt, Homo sapiens
  misc_RNA (1)...(19): siRNA sense strand
ggagcugcuuccaauuugc

SEQ ID NO: 197489 - RNA, 19 nt, Homo sapiens
  misc_RNA (1)...(19): siRNA sense strand
uuagcugaccugaauaaug

SEQ ID NO: 197490 - RNA, 19 nt, Homo sapiens
  misc_RNA (1)...(19): siRNA sense strand
guggcaaguucaacaggau

SEQ ID NO: 197491 - RNA, 19 nt, Homo sapiens
  misc_RNA (1)...(19): siRNA sense strand
acaacaauuuggucaacgu

SEQ ID NO: 197492 - RNA, 19 nt, Homo sapiens
  misc_RNA (1)...(19): siRNA sense strand
gacuacaucaggagaagau

SEQ ID NO: 197493 - RNA, 19 nt, Homo sapiens
  misc_RNA (1)...(19): siRNA sense strand
uaauaagccagagaucgaa

SEQ ID NO: 197494 - RNA, 19 nt, Homo sapiens
  misc_RNA (1)...(19): siRNA sense strand
ugucagauucucagcuuau

SEQ ID NO: 197495 - RNA, 19 nt, Homo sapiens
  misc_RNA (1)...(19): siRNA sense strand
ggauauccugcagauuauu

SEQ ID NO: 197496 - RNA, 19 nt, Homo sapiens
  misc_RNA (1)...(19): siRNA sense strand
agcaucaggccaaauguaa

SEQ ID NO: 197497 - RNA, 19 nt, Homo sapiens
  misc_RNA (1)...(19): siRNA sense strand
gcccuuugcuuggaucucu

SEQ ID NO: 197498 - RNA, 19 nt, Homo sapiens
  misc_RNA (1)...(19): siRNA sense strand
gcugaauguuuaugauacg

SEQ ID NO: 197499 - RNA, 19 nt, Homo sapiens
  misc_RNA (1)...(19): siRNA sense strand
agacuuugccaagguacua

SEQ ID NO: 197500 - RNA, 19 nt, Homo sapiens
  misc_RNA (1)...(19): siRNA sense strand
caagcaaguggcaaguuca

SEQ ID NO: 197501 - RNA, 19 nt, Homo sapiens
  misc_RNA (1)...(19): siRNA sense strand
agacaaguacagauaccuu

SEQ ID NO: 197502 - RNA, 19 nt, Homo sapiens
  misc_RNA (1)...(19): siRNA sense strand
gcaucauuucccuguguaa

SEQ ID NO: 197503 - RNA, 19 nt, Homo sapiens
  misc_RNA (1)...(19): siRNA sense strand
cugcaaagaguguccaauc

SEQ ID NO: 197504 - RNA, 19 nt, Homo sapiens
  misc_RNA (1)...(19): siRNA sense strand
cuuauaggacugccaugaa

SEQ ID NO: 197505 - RNA, 19 nt, Homo sapiens
  misc_RNA (1)...(19): siRNA sense strand
caaagaguguccaaucauu

SEQ ID NO: 197506 - RNA, 19 nt, Homo sapiens
  misc_RNA (1)...(19): siRNA sense strand
uagcugaccugaauaaugu

SEQ ID NO: 197507 - RNA, 19 nt, Homo sapiens
  misc_RNA (1)...(19): siRNA sense strand
gcaugauucuauccaaauu

SEQ ID NO: 197508 - RNA, 19 nt, Homo sapiens
  misc_RNA (1)...(19): siRNA sense strand
ugaacuggcugcugaaugu

SEQ ID NO: 197509 - RNA, 19 nt, Homo sapiens
  misc_RNA (1)...(19): siRNA sense strand
gauauccugcagauuauua

SEQ ID NO: 197510 - RNA, 19 nt, Homo sapiens
  misc_RNA (1)...(19): siRNA sense strand
gagaagauguucgagacuu

SEQ ID NO: 197511 - RNA, 19 nt, Homo sapiens
  misc_RNA (1)...(19): siRNA sense strand
gcacuuuaauuaugacauc

SEQ ID NO: 197512 - RNA, 19 nt, Homo sapiens
  misc_RNA (1)...(19): siRNA sense strand
guaaagcacauuuggaaga

SEQ ID NO: 197513 - RNA, 19 nt, Homo sapiens
  misc_RNA (1)...(19): siRNA sense strand
gaauauugcacuccgacua

SEQ ID NO: 197514 - RNA, 19 nt, Homo sapiens
  misc_RNA (1)...(19): siRNA sense strand
uuauaggacugccaugaaa

SEQ ID NO: 197515 - RNA, 19 nt, Homo sapiens
  misc_RNA (1)...(19): siRNA sense strand
gggugaaguugcauccuuu

SEQ ID NO: 197516 - RNA, 19 nt, Homo sapiens
  misc_RNA (1)...(19): siRNA sense strand
gcaagagcacaacaauuug

SEQ ID NO: 197517 - RNA, 19 nt, Homo sapiens
  misc_RNA (1)...(19): siRNA sense strand
gcacaacaauuuggucaac

SEQ ID NO: 197518 - RNA, 19 nt, Homo sapiens
  misc_RNA (1)...(19): siRNA sense strand
agcaagagcacaacaauuu

SEQ ID NO: 197519 - RNA, 19 nt, Homo sapiens
  misc_RNA (1)...(19): siRNA sense strand
agaagauguucgagacuuu

SEQ ID NO: 197520 - RNA, 19 nt, Homo sapiens
  misc_RNA (1)...(19): siRNA sense strand
gagcaagagcacaacaauu

SEQ ID NO: 197521 - RNA, 19 nt, Homo sapiens
  misc_RNA (1)...(19): siRNA sense strand
ucaagcaaguggcaaguuc

SEQ ID NO: 197522 - RNA, 19 nt, Homo sapiens
  misc_RNA (1)...(19): siRNA sense strand
ccacgagacucaaacaacu

SEQ ID NO: 197523 - RNA, 19 nt, Homo sapiens
  misc_RNA (1)...(19): siRNA sense strand
cagcacaaccucaagcaaa

SEQ ID NO: 197524 - RNA, 19 nt, Homo sapiens
  misc_RNA (1)...(19): siRNA sense strand
gcaaagaguguccaaucau

SEQ ID NO: 197525 - RNA, 19 nt, Homo sapiens
  misc_RNA (1)...(19): siRNA sense strand
auggauauccugcagauua

SEQ ID NO: 197526 - RNA, 19 nt, Homo sapiens
  misc_RNA (1)...(19): siRNA sense strand
uguaacaucugcaaagagu

SEQ ID NO: 197527 - RNA, 19 nt, Homo sapiens
  misc_RNA (1)...(19): siRNA sense strand
guccggagcugcuuccaau

SEQ ID NO: 197528 - RNA, 19 nt, Homo sapiens
  misc_RNA (1)...(19): siRNA sense strand
gcaaguggcaaguucaaca

SEQ ID NO: 197529 - RNA, 19 nt, Homo sapiens
  misc_RNA (1)...(19): siRNA sense strand
gcuuccaauuugcuaauaa

SEQ ID NO: 197530 - RNA, 19 nt, Homo sapiens
  misc_RNA (1)...(19): siRNA sense strand
uggaagacaaguacagaua

SEQ ID NO: 197531 - RNA, 19 nt, Homo sapiens
  misc_RNA (1)...(19): siRNA sense strand
ggauccguguccugucuuu

SEQ ID NO: 197532 - RNA, 19 nt, Homo sapiens
  misc_RNA (1)...(19): siRNA sense strand
gucuuuagcugaccugaau

SEQ ID NO: 197533 - RNA, 19 nt, Homo sapiens
  misc_RNA (1)...(19): siRNA sense strand
gacaaguacagauaccuuu

SEQ ID NO: 197534 - RNA, 19 nt, Homo sapiens
  misc_RNA (1)...(19): siRNA sense strand
ccaagcaucaggccaaaug

SEQ ID NO: 197535 - RNA, 19 nt, Homo sapiens
  misc_RNA (1)...(19): siRNA sense strand
ggagcaagagcacaacaau

SEQ ID NO: 197536 - RNA, 19 nt, Homo sapiens
  misc_RNA (1)...(19): siRNA sense strand
guguaaagcacauuuggaa

SEQ ID NO: 197537 - RNA, 19 nt, Homo sapiens
  misc_RNA (1)...(19): siRNA sense strand
caagacaguugggugaagu

SEQ ID NO: 197538 - RNA, 19 nt, Homo sapiens
  misc_RNA (1)...(19): siRNA sense strand
gaagauguucgagacuuug

SEQ ID NO: 197539 - RNA, 19 nt, Homo sapiens
  misc_RNA (1)...(19): siRNA sense strand
gucagauucucagcuuaua

SEQ ID NO: 197540 - RNA, 19 nt, Homo sapiens
  misc_RNA (1)...(19): siRNA sense strand
uaacaucugcaaagagugu

SEQ ID NO: 197541 - RNA, 19 nt, Homo sapiens
  misc_RNA (1)...(19): siRNA sense strand
cggagcugcuuccaauuug

SEQ ID NO: 197542 - RNA, 19 nt, Homo sapiens
  misc_RNA (1)...(19): siRNA sense strand
gaagacaaguacagauacc

SEQ ID NO: 197543 - RNA, 19 nt, Homo sapiens
  misc_RNA (1)...(19): siRNA sense strand
ccauggauauccugcagau

SEQ ID NO: 197544 - RNA, 19 nt, Homo sapiens
  misc_RNA (1)...(19): siRNA sense strand
ggcaucauuucccugugua

SEQ ID NO: 197545 - RNA, 19 nt, Homo sapiens
  misc_RNA (1)...(19): siRNA sense strand
uggauauccugcagauuau

SEQ ID NO: 197546 - RNA, 19 nt, Homo sapiens
  misc_RNA (1)...(19): siRNA sense strand
ggaagacaaguacagauac

SEQ ID NO: 197547 - RNA, 19 nt, Homo sapiens
  misc_RNA (1)...(19): siRNA sense strand
ugcaaagaguguccaauca

SEQ ID NO: 197548 - RNA, 19 nt, Homo sapiens
  misc_RNA (1)...(19): siRNA sense strand
guggauaugugucugaacu

SEQ ID NO: 197549 - RNA, 19 nt, Homo sapiens
  misc_RNA (1)...(19): siRNA sense strand
acuggcugcugaauguuua

SEQ ID NO: 197550 - RNA, 19 nt, Homo sapiens
  misc_RNA (1)...(19): siRNA sense strand
acuaucccaugguggaaua

SEQ ID NO: 197551 - RNA, 19 nt, Homo sapiens
  misc_RNA (1)...(19): siRNA sense strand
ccggagcugcuuccaauuu

SEQ ID NO: 197552 - RNA, 19 nt, Homo sapiens
  misc_RNA (1)...(19): siRNA sense strand
ccaaauuccaagacaguug

SEQ ID NO: 197553 - RNA, 19 nt, Homo sapiens
  misc_RNA (1)...(19): siRNA sense strand
cagaaacugccaagcauca

SEQ ID NO: 197554 - RNA, 19 nt, Homo sapiens
  misc_RNA (1)...(19): siRNA sense strand
uaugacaucugccaaagcu

SEQ ID NO: 197555 - RNA, 19 nt, Homo sapiens
  misc_RNA (1)...(19): siRNA sense strand
aaugucagauucucagcuu

SEQ ID NO: 197556 - RNA, 19 nt, Homo sapiens
  misc_RNA (1)...(19): siRNA sense strand
ucgagacuuugccaaggua

SEQ ID NO: 197557 - RNA, 19 nt, Homo sapiens
  misc_RNA (1)...(19): siRNA sense strand
gcaaaaggccauaaaaugc

SEQ ID NO: 197558 - RNA, 19 nt, Homo sapiens
  misc_RNA (1)...(19): siRNA sense strand
cugcaugauucuauccaaa

SEQ ID NO: 197559 - RNA, 19 nt, Homo sapiens
  misc_RNA (1)...(19): siRNA sense strand
uaaagcacauuuggaagac

SEQ ID NO: 197560 - RNA, 19 nt, Homo sapiens
  misc_RNA (1)...(19): siRNA sense strand
acaggagucuaaagcacuu

SEQ ID NO: 197561 - RNA, 19 nt, Homo sapiens
  misc_RNA (1)...(19): siRNA sense strand
acagauaccuuuucaagca

SEQ ID NO: 197562 - RNA, 19 nt, Homo sapiens
  misc_RNA (1)...(19): siRNA sense strand
aagcacauuuggaagacaa

SEQ ID NO: 197563 - RNA, 19 nt, Homo sapiens
  misc_RNA (1)...(19): siRNA sense strand
gcuaauaauaagccagaga

SEQ ID NO: 197564 - RNA, 19 nt, Homo sapiens
  misc_RNA (1)...(19): siRNA sense strand
caagagcacaacaauuugg

SEQ ID NO: 197565 - RNA, 19 nt, Homo sapiens
  misc_RNA (1)...(19): siRNA sense strand
ccugucagcugcaugugau

SEQ ID NO: 197566 - RNA, 19 nt, Homo sapiens
  misc_RNA (1)...(19): siRNA sense strand
gcugcugaauguuuaugau

SEQ ID NO: 197567 - RNA, 19 nt, Homo sapiens
  misc_RNA (1)...(19): siRNA sense strand
acagagcucuaccagucuu

SEQ ID NO: 197568 - RNA, 19 nt, Homo sapiens
  misc_RNA (1)...(19): siRNA sense strand
acaguugggugaaguugca

SEQ ID NO: 197569 - RNA, 19 nt, Homo sapiens
  misc_RNA (1)...(19): siRNA sense strand
guuugaccacuauuuauga

SEQ ID NO: 197570 - RNA, 19 nt, Homo sapiens
  misc_RNA (1)...(19): siRNA sense strand
gcuuauaggacugccauga

SEQ ID NO: 197571 - RNA, 19 nt, Homo sapiens
  misc_RNA (1)...(19): siRNA sense strand
caucaggccaaauguaaca

SEQ ID NO: 197572 - RNA, 19 nt, Homo sapiens
  misc_RNA (1)...(19): siRNA sense strand
gauucuauccaaauuccaa

SEQ ID NO: 197573 - RNA, 19 nt, Homo sapiens
  misc_RNA (1)...(19): siRNA sense strand
ggcaaguucaacaggauuu

SEQ ID NO: 197574 - RNA, 19 nt, Homo sapiens
  misc_RNA (1)...(19): siRNA sense strand
gaacuggcugcugaauguu

SEQ ID NO: 197575 - RNA, 19 nt, Homo sapiens
  misc_RNA (1)...(19): siRNA sense strand
cugcugaauguuuaugaua

SEQ ID NO: 197576 - RNA, 19 nt, Homo sapiens
  misc_RNA (1)...(19): siRNA sense strand
aagcaucaggccaaaugua

SEQ ID NO: 197577 - RNA, 19 nt, Homo sapiens
  misc_RNA (1)...(19): siRNA sense strand
uggcaucauuucccugugu

SEQ ID NO: 197578 - RNA, 19 nt, Homo sapiens
  misc_RNA (1)...(19): siRNA sense strand
ccaugaaacuccgaagacu

SEQ ID NO: 197579 - RNA, 19 nt, Homo sapiens
  misc_RNA (1)...(19): siRNA sense strand
auaauaagccagagaucga

SEQ ID NO: 197580 - RNA, 19 nt, Homo sapiens
  misc_RNA (1)...(19): siRNA sense strand
cuaauaauaagccagagau

SEQ ID NO: 197581 - RNA, 19 nt, Homo sapiens
  misc_RNA (1)...(19): siRNA sense strand
ugggugaaguugcauccuu

SEQ ID NO: 197582 - RNA, 19 nt, Homo sapiens
  misc_RNA (1)...(19): siRNA sense strand
caucauuucccuguguaaa

SEQ ID NO: 197583 - RNA, 19 nt, Homo sapiens
  misc_RNA (1)...(19): siRNA sense strand
gcguggauaugugucugaa

SEQ ID NO: 197584 - RNA, 19 nt, Homo sapiens
  misc_RNA (1)...(19): siRNA sense strand
gcacuaucccaugguggaa

SEQ ID NO: 197585 - RNA, 19 nt, Homo sapiens
  misc_RNA (1)...(19): siRNA sense strand
gagccugucagcugcaugu

SEQ ID NO: 197586 - RNA, 19 nt, Homo sapiens
  misc_RNA (1)...(19): siRNA sense strand
guacagauaccuuuucaag

SEQ ID NO: 197587 - RNA, 19 nt, Homo sapiens
  misc_RNA (1)...(19): siRNA sense strand
gucccucucugcguggaua

SEQ ID NO: 197588 - RNA, 19 nt, Homo sapiens
  misc_RNA (1)...(19): siRNA sense strand
ggagcugcuuccaauuugc

SEQ ID NO: 197589 - RNA, 19 nt, Homo sapiens
  misc_RNA (1)...(19): siRNA sense strand
uuagcugaccugaauaaug

SEQ ID NO: 197590 - RNA, 19 nt, Homo sapiens
  misc_RNA (1)...(19): siRNA sense strand
guggcaaguucaacaggau

SEQ ID NO: 197591 - RNA, 19 nt, Homo sapiens
  misc_RNA (1)...(19): siRNA sense strand
acaacaauuuggucaacgu

SEQ ID NO: 197592 - RNA, 19 nt, Homo sapiens
  misc_RNA (1)...(19): siRNA sense strand
gacuacaucaggagaagau

SEQ ID NO: 197593 - RNA, 19 nt, Homo sapiens
  misc_RNA (1)...(19): siRNA sense strand
uaauaagccagagaucgaa

SEQ ID NO: 197594 - RNA, 19 nt, Homo sapiens
  misc_RNA (1)...(19): siRNA sense strand
ugucagauucucagcuuau

SEQ ID NO: 197595 - RNA, 19 nt, Homo sapiens
  misc_RNA (1)...(19): siRNA sense strand
ggauauccugcagauuauu

SEQ ID NO: 197596 - RNA, 19 nt, Homo sapiens
  misc_RNA (1)...(19): siRNA sense strand
agcaucaggccaaauguaa

SEQ ID NO: 197597 - RNA, 19 nt, Homo sapiens
  misc_RNA (1)...(19): siRNA sense strand
gcccuuugcuuggaucucu

SEQ ID NO: 197598 - RNA, 19 nt, Homo sapiens
  misc_RNA (1)...(19): siRNA sense strand
gcugaauguuuaugauacg

SEQ ID NO: 197599 - RNA, 19 nt, Homo sapiens
  misc_RNA (1)...(19): siRNA sense strand
agacuuugccaagguacua

SEQ ID NO: 197600 - RNA, 19 nt, Homo sapiens
  misc_RNA (1)...(19): siRNA sense strand
caagcaaguggcaaguuca

SEQ ID NO: 197601 - RNA, 19 nt, Homo sapiens
  misc_RNA (1)...(19): siRNA sense strand
agacaaguacagauaccuu

SEQ ID NO: 197602 - RNA, 19 nt, Homo sapiens
  misc_RNA (1)...(19): siRNA sense strand
gcaucauuucccuguguaa

SEQ ID NO: 197603 - RNA, 19 nt, Homo sapiens
  misc_RNA (1)...(19): siRNA sense strand
cugcaaagaguguccaauc

SEQ ID NO: 197604 - RNA, 19 nt, Homo sapiens
  misc_RNA (1)...(19): siRNA sense strand
cuuauaggacugccaugaa

SEQ ID NO: 197605 - RNA, 19 nt, Homo sapiens
  misc_RNA (1)...(19): siRNA sense strand
caaagaguguccaaucauu

SEQ ID NO: 197606 - RNA, 19 nt, Homo sapiens
  misc_RNA (1)...(19): siRNA sense strand
uagcugaccugaauaaugu

SEQ ID NO: 197607 - RNA, 19 nt, Homo sapiens
  misc_RNA (1)...(19): siRNA sense strand
gcaugauucuauccaaauu

SEQ ID NO: 197608 - RNA, 19 nt, Homo sapiens
  misc_RNA (1)...(19): siRNA sense strand
ugaacuggcugcugaaugu

SEQ ID NO: 197609 - RNA, 19 nt, Homo sapiens
  misc_RNA (1)...(19): siRNA sense strand
gauauccugcagauuauua

SEQ ID NO: 197610 - RNA, 19 nt, Homo sapiens
  misc_RNA (1)...(19): siRNA sense strand
gagaagauguucgagacuu

SEQ ID NO: 197611 - RNA, 19 nt, Homo sapiens
  misc_RNA (1)...(19): siRNA sense strand
gcacuuuaauuaugacauc

SEQ ID NO: 197612 - RNA, 19 nt, Homo sapiens
  misc_RNA (1)...(19): siRNA sense strand
guaaagcacauuuggaaga

SEQ ID NO: 197613 - RNA, 19 nt, Homo sapiens
  misc_RNA (1)...(19): siRNA sense strand
gaauauugcacuccgacua

SEQ ID NO: 197614 - RNA, 19 nt, Homo sapiens
  misc_RNA (1)...(19): siRNA sense strand
uuauaggacugccaugaaa

SEQ ID NO: 197615 - RNA, 19 nt, Homo sapiens
  misc_RNA (1)...(19): siRNA sense strand
gggugaaguugcauccuuu

SEQ ID NO: 197616 - RNA, 19 nt, Homo sapiens
  misc_RNA (1)...(19): siRNA sense strand
gcaagagcacaacaauuug

SEQ ID NO: 197617 - RNA, 19 nt, Homo sapiens
  misc_RNA (1)...(19): siRNA sense strand
gcacaacaauuuggucaac

SEQ ID NO: 197618 - RNA, 19 nt, Homo sapiens
  misc_RNA (1)...(19): siRNA sense strand
agcaagagcacaacaauuu

SEQ ID NO: 197619 - RNA, 19 nt, Homo sapiens
  misc_RNA (1)...(19): siRNA sense strand
agaagauguucgagacuuu

SEQ ID NO: 197620 - RNA, 19 nt, Homo sapiens
  misc_RNA (1)...(19): siRNA sense strand
gagcaagagcacaacaauu

SEQ ID NO: 197621 - RNA, 19 nt, Homo sapiens
  misc_RNA (1)...(19): siRNA sense strand
ucaagcaaguggcaaguuc

SEQ ID NO: 197622 - RNA, 19 nt, Homo sapiens
  misc_RNA (1)...(19): siRNA sense strand
ccacgagacucaaacaacu

SEQ ID NO: 197623 - RNA, 19 nt, Homo sapiens
  misc_RNA (1)...(19): siRNA sense strand
cagcacaaccucaagcaaa

SEQ ID NO: 197624 - RNA, 19 nt, Homo sapiens
  misc_RNA (1)...(19): siRNA sense strand
gcaaagaguguccaaucau

SEQ ID NO: 197625 - RNA, 19 nt, Homo sapiens
  misc_RNA (1)...(19): siRNA sense strand
auggauauccugcagauua

SEQ ID NO: 197626 - RNA, 19 nt, Homo sapiens
  misc_RNA (1)...(19): siRNA sense strand
uguaacaucugcaaagagu

SEQ ID NO: 197627 - RNA, 19 nt, Homo sapiens
  misc_RNA (1)...(19): siRNA sense strand
guccggagcugcuuccaau

SEQ ID NO: 197628 - RNA, 19 nt, Homo sapiens
  misc_RNA (1)...(19): siRNA sense strand
gcaaguggcaaguucaaca

SEQ ID NO: 197629 - RNA, 19 nt, Homo sapiens
  misc_RNA (1)...(19): siRNA sense strand
gcuuccaauuugcuaauaa

SEQ ID NO: 197630 - RNA, 19 nt, Homo sapiens
  misc_RNA (1)...(19): siRNA sense strand
uggaagacaaguacagaua

SEQ ID NO: 197631 - RNA, 19 nt, Homo sapiens
  misc_RNA (1)...(19): siRNA sense strand
ggauccguguccugucuuu

SEQ ID NO: 197632 - RNA, 19 nt, Homo sapiens
  misc_RNA (1)...(19): siRNA sense strand
gucuuuagcugaccugaau

SEQ ID NO: 197633 - RNA, 19 nt, Homo sapiens
  misc_RNA (1)...(19): siRNA sense strand
gacaaguacagauaccuuu

SEQ ID NO: 197634 - RNA, 19 nt, Homo sapiens
  misc_RNA (1)...(19): siRNA sense strand
ccaagcaucaggccaaaug

SEQ ID NO: 197635 - RNA, 19 nt, Homo sapiens
  misc_RNA (1)...(19): siRNA sense strand
ggagcaagagcacaacaau

SEQ ID NO: 197636 - RNA, 19 nt, Homo sapiens
  misc_RNA (1)...(19): siRNA sense strand
guguaaagcacauuuggaa

SEQ ID NO: 197637 - RNA, 19 nt, Homo sapiens
  misc_RNA (1)...(19): siRNA sense strand
caagacaguugggugaagu

SEQ ID NO: 197638 - RNA, 19 nt, Homo sapiens
  misc_RNA (1)...(19): siRNA sense strand
gaagauguucgagacuuug

SEQ ID NO: 197639 - RNA, 19 nt, Homo sapiens
  misc_RNA (1)...(19): siRNA sense strand
gucagauucucagcuuaua

SEQ ID NO: 197640 - RNA, 19 nt, Homo sapiens
  misc_RNA (1)...(19): siRNA sense strand
uaacaucugcaaagagugu

SEQ ID NO: 197641 - RNA, 19 nt, Homo sapiens
  misc_RNA (1)...(19): siRNA sense strand
cggagcugcuuccaauuug

SEQ ID NO: 197642 - RNA, 19 nt, Homo sapiens
  misc_RNA (1)...(19): siRNA sense strand
gaagacaaguacagauacc

SEQ ID NO: 197643 - RNA, 19 nt, Homo sapiens
  misc_RNA (1)...(19): siRNA sense strand
ccauggauauccugcagau

SEQ ID NO: 197644 - RNA, 19 nt, Homo sapiens
  misc_RNA (1)...(19): siRNA sense strand
ggcaucauuucccugugua

SEQ ID NO: 197645 - RNA, 19 nt, Homo sapiens
  misc_RNA (1)...(19): siRNA sense strand
uggauauccugcagauuau

SEQ ID NO: 197646 - RNA, 19 nt, Homo sapiens
  misc_RNA (1)...(19): siRNA sense strand
ggaagacaaguacagauac

SEQ ID NO: 197647 - RNA, 19 nt, Homo sapiens
  misc_RNA (1)...(19): siRNA sense strand
ugcaaagaguguccaauca

SEQ ID NO: 197648 - RNA, 19 nt, Homo sapiens
  misc_RNA (1)...(19): siRNA sense strand
guggauaugugucugaacu

SEQ ID NO: 197649 - RNA, 19 nt, Homo sapiens
  misc_RNA (1)...(19): siRNA sense strand
acuggcugcugaauguuua

SEQ ID NO: 197650 - RNA, 19 nt, Homo sapiens
  misc_RNA (1)...(19): siRNA sense strand
acuaucccaugguggaaua

SEQ ID NO: 197651 - RNA, 19 nt, Homo sapiens
  misc_RNA (1)...(19): siRNA sense strand
ccggagcugcuuccaauuu

SEQ ID NO: 197652 - RNA, 19 nt, Homo sapiens
  misc_RNA (1)...(19): siRNA sense strand
ccaaauuccaagacaguug

SEQ ID NO: 197653 - RNA, 19 nt, Homo sapiens
  misc_RNA (1)...(19): siRNA sense strand
cagaaacugccaagcauca

SEQ ID NO: 197654 - RNA, 19 nt, Homo sapiens
  misc_RNA (1)...(19): siRNA sense strand
uaugacaucugccaaagcu

SEQ ID NO: 197655 - RNA, 19 nt, Homo sapiens
  misc_RNA (1)...(19): siRNA sense strand
aaugucagauucucagcuu

SEQ ID NO: 197656 - RNA, 19 nt, Homo sapiens
  misc_RNA (1)...(19): siRNA sense strand
ucgagacuuugccaaggua

SEQ ID NO: 197657 - RNA, 19 nt, Homo sapiens
  misc_RNA (1)...(19): siRNA sense strand
gcaaaaggccauaaaaugc

SEQ ID NO: 197658 - RNA, 19 nt, Homo sapiens
  misc_RNA (1)...(19): siRNA sense strand
cugcaugauucuauccaaa

SEQ ID NO: 197659 - RNA, 19 nt, Homo sapiens
  misc_RNA (1)...(19): siRNA sense strand
uaaagcacauuuggaagac

SEQ ID NO: 197660 - RNA, 19 nt, Homo sapiens
  misc_RNA (1)...(19): siRNA sense strand
acaggagucuaaagcacuu

SEQ ID NO: 197661 - RNA, 19 nt, Homo sapiens
  misc_RNA (1)...(19): siRNA sense strand
acagauaccuuuucaagca

SEQ ID NO: 197662 - RNA, 19 nt, Homo sapiens
  misc_RNA (1)...(19): siRNA sense strand
aagcacauuuggaagacaa

SEQ ID NO: 197663 - RNA, 19 nt, Homo sapiens
  misc_RNA (1)...(19): siRNA sense strand
gcuaauaauaagccagaga

SEQ ID NO: 197664 - RNA, 19 nt, Homo sapiens
  misc_RNA (1)...(19): siRNA sense strand
caagagcacaacaauuugg

SEQ ID NO: 197665 - RNA, 19 nt, Homo sapiens
  misc_RNA (1)...(19): siRNA sense strand
ccugucagcugcaugugau

SEQ ID NO: 197666 - RNA, 19 nt, Homo sapiens
  misc_RNA (1)...(19): siRNA sense strand
gcugcugaauguuuaugau

SEQ ID NO: 197667 - RNA, 19 nt, Homo sapiens
  misc_RNA (1)...(19): siRNA sense strand
acagagcucuaccagucuu

SEQ ID NO: 197668 - RNA, 19 nt, Homo sapiens
  misc_RNA (1)...(19): siRNA sense strand
acaguugggugaaguugca

SEQ ID NO: 197669 - RNA, 19 nt, Homo sapiens
  misc_RNA (1)...(19): siRNA sense strand
guuugaccacuauuuauga

SEQ ID NO: 197670 - RNA, 19 nt, Homo sapiens
  misc_RNA (1)...(19): siRNA sense strand
gcuuauaggacugccauga

SEQ ID NO: 197671 - RNA, 19 nt, Homo sapiens
  misc_RNA (1)...(19): siRNA sense strand
caucaggccaaauguaaca

SEQ ID NO: 197672 - RNA, 19 nt, Homo sapiens
  misc_RNA (1)...(19): siRNA sense strand
gauucuauccaaauuccaa

SEQ ID NO: 197673 - RNA, 19 nt, Homo sapiens
  misc_RNA (1)...(19): siRNA sense strand
ggcaaguucaacaggauuu

SEQ ID NO: 197674 - RNA, 19 nt, Homo sapiens
  misc_RNA (1)...(19): siRNA sense strand
gaacuggcugcugaauguu

SEQ ID NO: 197675 - RNA, 19 nt, Homo sapiens
  misc_RNA (1)...(19): siRNA sense strand
cugcugaauguuuaugaua

SEQ ID NO: 197676 - RNA, 19 nt, Homo sapiens
  misc_RNA (1)...(19): siRNA sense strand
aagcaucaggccaaaugua

SEQ ID NO: 197677 - RNA, 19 nt, Homo sapiens
  misc_RNA (1)...(19): siRNA sense strand
uggcaucauuucccugugu

SEQ ID NO: 197678 - RNA, 19 nt, Homo sapiens
  misc_RNA (1)...(19): siRNA sense strand
ccaugaaacuccgaagacu

SEQ ID NO: 197679 - RNA, 19 nt, Homo sapiens
  misc_RNA (1)...(19): siRNA sense strand
auaauaagccagagaucga

SEQ ID NO: 197680 - RNA, 19 nt, Homo sapiens
  misc_RNA (1)...(19): siRNA sense strand
cuaauaauaagccagagau

SEQ ID NO: 197681 - RNA, 19 nt, Homo sapiens
  misc_RNA (1)...(19): siRNA sense strand
ugggugaaguugcauccuu

SEQ ID NO: 197682 - RNA, 19 nt, Homo sapiens
  misc_RNA (1)...(19): siRNA sense strand
caucauuucccuguguaaa

SEQ ID NO: 197683 - RNA, 19 nt, Homo sapiens
  misc_RNA (1)...(19): siRNA sense strand
gcguggauaugugucugaa

SEQ ID NO: 197684 - RNA, 19 nt, Homo sapiens
  misc_RNA (1)...(19): siRNA sense strand
gcacuaucccaugguggaa

SEQ ID NO: 197685 - RNA, 19 nt, Homo sapiens
  misc_RNA (1)...(19): siRNA sense strand
gagccugucagcugcaugu

SEQ ID NO: 197686 - RNA, 19 nt, Homo sapiens
  misc_RNA (1)...(19): siRNA sense strand
guacagauaccuuuucaag

SEQ ID NO: 197687 - RNA, 19 nt, Homo sapiens
  misc_RNA (1)...(19): siRNA sense strand
gucccucucugcguggaua

SEQ ID NO: 197688 - RNA, 19 nt, Homo sapiens
  misc_RNA (1)...(19): siRNA sense strand
ggagcugcuuccaauuugc

SEQ ID NO: 197689 - RNA, 19 nt, Homo sapiens
  misc_RNA (1)...(19): siRNA sense strand
uuagcugaccugaauaaug

SEQ ID NO: 197690 - RNA, 19 nt, Homo sapiens
  misc_RNA (1)...(19): siRNA sense strand
guggcaaguucaacaggau

SEQ ID NO: 197691 - RNA, 19 nt, Homo sapiens
  misc_RNA (1)...(19): siRNA sense strand
acaacaauuuggucaacgu

SEQ ID NO: 197692 - RNA, 19 nt, Homo sapiens
  misc_RNA (1)...(19): siRNA sense strand
gacuacaucaggagaagau

SEQ ID NO: 197693 - RNA, 19 nt, Homo sapiens
  misc_RNA (1)...(19): siRNA sense strand
uaauaagccagagaucgaa

SEQ ID NO: 197694 - RNA, 19 nt, Homo sapiens
  misc_RNA (1)...(19): siRNA sense strand
ugucagauucucagcuuau

SEQ ID NO: 197695 - RNA, 19 nt, Homo sapiens
  misc_RNA (1)...(19): siRNA sense strand
ggauauccugcagauuauu

SEQ ID NO: 197696 - RNA, 19 nt, Homo sapiens
  misc_RNA (1)...(19): siRNA sense strand
agcaucaggccaaauguaa

SEQ ID NO: 197697 - RNA, 19 nt, Homo sapiens
  misc_RNA (1)...(19): siRNA sense strand
gcccuuugcuuggaucucu

SEQ ID NO: 197698 - RNA, 19 nt, Homo sapiens
  misc_RNA (1)...(19): siRNA sense strand
gcugaauguuuaugauacg

SEQ ID NO: 197699 - RNA, 19 nt, Homo sapiens
  misc_RNA (1)...(19): siRNA sense strand
agacuuugccaagguacua

SEQ ID NO: 197700 - RNA, 19 nt, Homo sapiens
  misc_RNA (1)...(19): siRNA sense strand
caagcaaguggcaaguuca

SEQ ID NO: 197701 - RNA, 19 nt, Homo sapiens
  misc_RNA (1)...(19): siRNA sense strand
agacaaguacagauaccuu

SEQ ID NO: 197702 - RNA, 19 nt, Homo sapiens
  misc_RNA (1)...(19): siRNA sense strand
gcaucauuucccuguguaa

SEQ ID NO: 197703 - RNA, 19 nt, Homo sapiens
  misc_RNA (1)...(19): siRNA sense strand
cugcaaagaguguccaauc

SEQ ID NO: 197704 - RNA, 19 nt, Homo sapiens
  misc_RNA (1)...(19): siRNA sense strand
cuuauaggacugccaugaa

SEQ ID NO: 197705 - RNA, 19 nt, Homo sapiens
  misc_RNA (1)...(19): siRNA sense strand
caaagaguguccaaucauu

SEQ ID NO: 197706 - RNA, 19 nt, Homo sapiens
  misc_RNA (1)...(19): siRNA sense strand
uagcugaccugaauaaugu

SEQ ID NO: 197707 - RNA, 19 nt, Homo sapiens
  misc_RNA (1)...(19): siRNA sense strand
gcaugauucuauccaaauu

SEQ ID NO: 197708 - RNA, 19 nt, Homo sapiens
  misc_RNA (1)...(19): siRNA sense strand
ugaacuggcugcugaaugu

SEQ ID NO: 197709 - RNA, 19 nt, Homo sapiens
  misc_RNA (1)...(19): siRNA sense strand
gauauccugcagauuauua

SEQ ID NO: 197710 - RNA, 19 nt, Homo sapiens
  misc_RNA (1)...(19): siRNA sense strand
gagaagauguucgagacuu

SEQ ID NO: 197711 - RNA, 19 nt, Homo sapiens
  misc_RNA (1)...(19): siRNA sense strand
gcacuuuaauuaugacauc

SEQ ID NO: 197712 - RNA, 19 nt, Homo sapiens
  misc_RNA (1)...(19): siRNA sense strand
guaaagcacauuuggaaga

SEQ ID NO: 197713 - RNA, 19 nt, Homo sapiens
  misc_RNA (1)...(19): siRNA sense strand
gaauauugcacuccgacua

SEQ ID NO: 197714 - RNA, 19 nt, Homo sapiens
  misc_RNA (1)...(19): siRNA sense strand
uuauaggacugccaugaaa

SEQ ID NO: 197715 - RNA, 19 nt, Homo sapiens
  misc_RNA (1)...(19): siRNA sense strand
gggugaaguugcauccuuu

SEQ ID NO: 197716 - RNA, 19 nt, Homo sapiens
  misc_RNA (1)...(19): siRNA sense strand
gcaagagcacaacaauuug

SEQ ID NO: 197717 - RNA, 19 nt, Homo sapiens
  misc_RNA (1)...(19): siRNA sense strand
gcacaacaauuuggucaac

SEQ ID NO: 197718 - RNA, 19 nt, Homo sapiens
  misc_RNA (1)...(19): siRNA sense strand
agcaagagcacaacaauuu

SEQ ID NO: 197719 - RNA, 19 nt, Homo sapiens
  misc_RNA (1)...(19): siRNA sense strand
agaagauguucgagacuuu

SEQ ID NO: 197720 - RNA, 19 nt, Homo sapiens
  misc_RNA (1)...(19): siRNA sense strand
gagcaagagcacaacaauu

SEQ ID NO: 197721 - RNA, 19 nt, Homo sapiens
  misc_RNA (1)...(19): siRNA sense strand
ucaagcaaguggcaaguuc

SEQ ID NO: 197722 - RNA, 19 nt, Homo sapiens
  misc_RNA (1)...(19): siRNA sense strand
ccacgagacucaaacaacu

SEQ ID NO: 197723 - RNA, 19 nt, Homo sapiens
  misc_RNA (1)...(19): siRNA sense strand
cagcacaaccucaagcaaa

SEQ ID NO: 197724 - RNA, 19 nt, Homo sapiens
  misc_RNA (1)...(19): siRNA sense strand
gcaaagaguguccaaucau

SEQ ID NO: 197725 - RNA, 19 nt, Homo sapiens
  misc_RNA (1)...(19): siRNA sense strand
auggauauccugcagauua

SEQ ID NO: 197726 - RNA, 19 nt, Homo sapiens
  misc_RNA (1)...(19): siRNA sense strand
uguaacaucugcaaagagu

SEQ ID NO: 197727 - RNA, 19 nt, Homo sapiens
  misc_RNA (1)...(19): siRNA sense strand
guccggagcugcuuccaau

SEQ ID NO: 197728 - RNA, 19 nt, Homo sapiens
  misc_RNA (1)...(19): siRNA sense strand
gcaaguggcaaguucaaca

SEQ ID NO: 197729 - RNA, 19 nt, Homo sapiens
  misc_RNA (1)...(19): siRNA sense strand
gcuuccaauuugcuaauaa

SEQ ID NO: 197730 - RNA, 19 nt, Homo sapiens
  misc_RNA (1)...(19): siRNA sense strand
uggaagacaaguacagaua

SEQ ID NO: 197731 - RNA, 19 nt, Homo sapiens
  misc_RNA (1)...(19): siRNA sense strand
ggauccguguccugucuuu

SEQ ID NO: 197732 - RNA, 19 nt, Homo sapiens
  misc_RNA (1)...(19): siRNA sense strand
gucuuuagcugaccugaau

SEQ ID NO: 197733 - RNA, 19 nt, Homo sapiens
  misc_RNA (1)...(19): siRNA sense strand
gacaaguacagauaccuuu

SEQ ID NO: 197734 - RNA, 19 nt, Homo sapiens
  misc_RNA (1)...(19): siRNA sense strand
ccaagcaucaggccaaaug

SEQ ID NO: 197735 - RNA, 19 nt, Homo sapiens
  misc_RNA (1)...(19): siRNA sense strand
ggagcaagagcacaacaau

SEQ ID NO: 197736 - RNA, 19 nt, Homo sapiens
  misc_RNA (1)...(19): siRNA sense strand
guguaaagcacauuuggaa

SEQ ID NO: 197737 - RNA, 19 nt, Homo sapiens
  misc_RNA (1)...(19): siRNA sense strand
caagacaguugggugaagu

SEQ ID NO: 197738 - RNA, 19 nt, Homo sapiens
  misc_RNA (1)...(19): siRNA sense strand
gaagauguucgagacuuug

SEQ ID NO: 197739 - RNA, 19 nt, Homo sapiens
  misc_RNA (1)...(19): siRNA sense strand
gucagauucucagcuuaua

SEQ ID NO: 197740 - RNA, 19 nt, Homo sapiens
  misc_RNA (1)...(19): siRNA sense strand
uaacaucugcaaagagugu

SEQ ID NO: 197741 - RNA, 19 nt, Homo sapiens
  misc_RNA (1)...(19): siRNA sense strand
cggagcugcuuccaauuug

SEQ ID NO: 197742 - RNA, 19 nt, Homo sapiens
  misc_RNA (1)...(19): siRNA sense strand
gaagacaaguacagauacc

SEQ ID NO: 197743 - RNA, 19 nt, Homo sapiens
  misc_RNA (1)...(19): siRNA sense strand
ccauggauauccugcagau

SEQ ID NO: 197744 - RNA, 19 nt, Homo sapiens
  misc_RNA (1)...(19): siRNA sense strand
ggcaucauuucccugugua

SEQ ID NO: 197745 - RNA, 19 nt, Homo sapiens
  misc_RNA (1)...(19): siRNA sense strand
uggauauccugcagauuau

SEQ ID NO: 197746 - RNA, 19 nt, Homo sapiens
  misc_RNA (1)...(19): siRNA sense strand
ggaagacaaguacagauac

SEQ ID NO: 197747 - RNA, 19 nt, Homo sapiens
  misc_RNA (1)...(19): siRNA sense strand
ugcaaagaguguccaauca

SEQ ID NO: 197748 - RNA, 19 nt, Homo sapiens
  misc_RNA (1)...(19): siRNA sense strand
guggauaugugucugaacu

SEQ ID NO: 197749 - RNA, 19 nt, Homo sapiens
  misc_RNA (1)...(19): siRNA sense strand
acuggcugcugaauguuua

SEQ ID NO: 197750 - RNA, 19 nt, Homo sapiens
  misc_RNA (1)...(19): siRNA sense strand
acuaucccaugguggaaua

SEQ ID NO: 197751 - RNA, 19 nt, Homo sapiens
  misc_RNA (1)...(19): siRNA sense strand
ccggagcugcuuccaauuu

SEQ ID NO: 197752 - RNA, 19 nt, Homo sapiens
  misc_RNA (1)...(19): siRNA sense strand
ccaaauuccaagacaguug

SEQ ID NO: 197753 - RNA, 19 nt, Homo sapiens
  misc_RNA (1)...(19): siRNA sense strand
cagaaacugccaagcauca

SEQ ID NO: 197754 - RNA, 19 nt, Homo sapiens
  misc_RNA (1)...(19): siRNA sense strand
uaugacaucugccaaagcu

SEQ ID NO: 197755 - RNA, 19 nt, Homo sapiens
  misc_RNA (1)...(19): siRNA sense strand
aaugucagauucucagcuu

SEQ ID NO: 197756 - RNA, 19 nt, Homo sapiens
  misc_RNA (1)...(19): siRNA sense strand
ucgagacuuugccaaggua

SEQ ID NO: 197757 - RNA, 19 nt, Homo sapiens
  misc_RNA (1)...(19): siRNA sense strand
gcaaaaggccauaaaaugc

SEQ ID NO: 197758 - RNA, 19 nt, Homo sapiens
  misc_RNA (1)...(19): siRNA sense strand
cugcaugauucuauccaaa

SEQ ID NO: 197759 - RNA, 19 nt, Homo sapiens
  misc_RNA (1)...(19): siRNA sense strand
uaaagcacauuuggaagac

SEQ ID NO: 197760 - RNA, 19 nt, Homo sapiens
  misc_RNA (1)...(19): siRNA sense strand
acaggagucuaaagcacuu

SEQ ID NO: 197761 - RNA, 19 nt, Homo sapiens
  misc_RNA (1)...(19): siRNA sense strand
acagauaccuuuucaagca

SEQ ID NO: 197762 - RNA, 19 nt, Homo sapiens
  misc_RNA (1)...(19): siRNA sense strand
aagcacauuuggaagacaa

SEQ ID NO: 197763 - RNA, 19 nt, Homo sapiens
  misc_RNA (1)...(19): siRNA sense strand
gcuaauaauaagccagaga

SEQ ID NO: 197764 - RNA, 19 nt, Homo sapiens
  misc_RNA (1)...(19): siRNA sense strand
caagagcacaacaauuugg

SEQ ID NO: 197765 - RNA, 19 nt, Homo sapiens
  misc_RNA (1)...(19): siRNA sense strand
ccugucagcugcaugugau

SEQ ID NO: 197766 - RNA, 19 nt, Homo sapiens
  misc_RNA (1)...(19): siRNA sense strand
gcugcugaauguuuaugau

SEQ ID NO: 197767 - RNA, 19 nt, Homo sapiens
  misc_RNA (1)...(19): siRNA sense strand
acagagcucuaccagucuu

SEQ ID NO: 197768 - RNA, 19 nt, Homo sapiens
  misc_RNA (1)...(19): siRNA sense strand
acaguugggugaaguugca

SEQ ID NO: 197769 - RNA, 19 nt, Homo sapiens
  misc_RNA (1)...(19): siRNA sense strand
guuugaccacuauuuauga

SEQ ID NO: 197770 - RNA, 19 nt, Homo sapiens
  misc_RNA (1)...(19): siRNA sense strand
gcuuauaggacugccauga

SEQ ID NO: 197771 - RNA, 19 nt, Homo sapiens
  misc_RNA (1)...(19): siRNA sense strand
caucaggccaaauguaaca

SEQ ID NO: 197772 - RNA, 19 nt, Homo sapiens
  misc_RNA (1)...(19): siRNA sense strand
gauucuauccaaauuccaa

SEQ ID NO: 197773 - RNA, 19 nt, Homo sapiens
  misc_RNA (1)...(19): siRNA sense strand
ggcaaguucaacaggauuu

SEQ ID NO: 197774 - RNA, 19 nt, Homo sapiens
  misc_RNA (1)...(19): siRNA sense strand
gaacuggcugcugaauguu

SEQ ID NO: 197775 - RNA, 19 nt, Homo sapiens
  misc_RNA (1)...(19): siRNA sense strand
cugcugaauguuuaugaua

SEQ ID NO: 197776 - RNA, 19 nt, Homo sapiens
  misc_RNA (1)...(19): siRNA sense strand
aagcaucaggccaaaugua

SEQ ID NO: 197777 - RNA, 19 nt, Homo sapiens
  misc_RNA (1)...(19): siRNA sense strand
uggcaucauuucccugugu

SEQ ID NO: 197778 - RNA, 19 nt, Homo sapiens
  misc_RNA (1)...(19): siRNA sense strand
ccaugaaacuccgaagacu

SEQ ID NO: 197779 - RNA, 19 nt, Homo sapiens
  misc_RNA (1)...(19): siRNA sense strand
auaauaagccagagaucga

SEQ ID NO: 197780 - RNA, 19 nt, Homo sapiens
  misc_RNA (1)...(19): siRNA sense strand
cuaauaauaagccagagau

SEQ ID NO: 197781 - RNA, 19 nt, Homo sapiens
  misc_RNA (1)...(19): siRNA sense strand
ugggugaaguugcauccuu

SEQ ID NO: 197782 - RNA, 19 nt, Homo sapiens
  misc_RNA (1)...(19): siRNA sense strand
caucauuucccuguguaaa

SEQ ID NO: 197783 - RNA, 19 nt, Homo sapiens
  misc_RNA (1)...(19): siRNA sense strand
gcguggauaugugucugaa

SEQ ID NO: 197784 - RNA, 19 nt, Homo sapiens
  misc_RNA (1)...(19): siRNA sense strand
gcacuaucccaugguggaa

SEQ ID NO: 197785 - RNA, 19 nt, Homo sapiens
  misc_RNA (1)...(19): siRNA sense strand
gagccugucagcugcaugu

SEQ ID NO: 197786 - RNA, 19 nt, Homo sapiens
  misc_RNA (1)...(19): siRNA sense strand
guacagauaccuuuucaag

SEQ ID NO: 197787 - RNA, 19 nt, Homo sapiens
  misc_RNA (1)...(19): siRNA sense strand
gucccucucugcguggaua

SEQ ID NO: 197788 - RNA, 19 nt, Homo sapiens
  misc_RNA (1)...(19): siRNA sense strand
ggagcugcuuccaauuugc

SEQ ID NO: 197789 - RNA, 19 nt, Homo sapiens
  misc_RNA (1)...(19): siRNA sense strand
uuagcugaccugaauaaug

SEQ ID NO: 197790 - RNA, 19 nt, Homo sapiens
  misc_RNA (1)...(19): siRNA sense strand
guggcaaguucaacaggau

SEQ ID NO: 197791 - RNA, 19 nt, Homo sapiens
  misc_RNA (1)...(19): siRNA sense strand
acaacaauuuggucaacgu

SEQ ID NO: 197792 - RNA, 19 nt, Homo sapiens
  misc_RNA (1)...(19): siRNA sense strand
gacuacaucaggagaagau

SEQ ID NO: 197793 - RNA, 19 nt, Homo sapiens
  misc_RNA (1)...(19): siRNA sense strand
uaauaagccagagaucgaa

SEQ ID NO: 197794 - RNA, 19 nt, Homo sapiens
  misc_RNA (1)...(19): siRNA sense strand
ugucagauucucagcuuau

SEQ ID NO: 197795 - RNA, 19 nt, Homo sapiens
  misc_RNA (1)...(19): siRNA sense strand
ggauauccugcagauuauu

SEQ ID NO: 197796 - RNA, 19 nt, Homo sapiens
  misc_RNA (1)...(19): siRNA sense strand
agcaucaggccaaauguaa

SEQ ID NO: 197797 - RNA, 19 nt, Homo sapiens
  misc_RNA (1)...(19): siRNA sense strand
gcccuuugcuuggaucucu

SEQ ID NO: 197798 - RNA, 19 nt, Homo sapiens
  misc_RNA (1)...(19): siRNA sense strand
gcugaauguuuaugauacg

SEQ ID NO: 197799 - RNA, 19 nt, Homo sapiens
  misc_RNA (1)...(19): siRNA sense strand
agacuuugccaagguacua

SEQ ID NO: 197800 - RNA, 19 nt, Homo sapiens
  misc_RNA (1)...(19): siRNA sense strand
caagcaaguggcaaguuca

SEQ ID NO: 197801 - RNA, 19 nt, Homo sapiens
  misc_RNA (1)...(19): siRNA sense strand
agacaaguacagauaccuu

SEQ ID NO: 197802 - RNA, 19 nt, Homo sapiens
  misc_RNA (1)...(19): siRNA sense strand
gcaucauuucccuguguaa

SEQ ID NO: 197803 - RNA, 19 nt, Homo sapiens
  misc_RNA (1)...(19): siRNA sense strand
cugcaaagaguguccaauc

SEQ ID NO: 197804 - RNA, 19 nt, Homo sapiens
  misc_RNA (1)...(19): siRNA sense strand
cuuauaggacugccaugaa

SEQ ID NO: 197805 - RNA, 19 nt, Homo sapiens
  misc_RNA (1)...(19): siRNA sense strand
caaagaguguccaaucauu

SEQ ID NO: 197806 - RNA, 19 nt, Homo sapiens
  misc_RNA (1)...(19): siRNA sense strand
uagcugaccugaauaaugu

SEQ ID NO: 197807 - RNA, 19 nt, Homo sapiens
  misc_RNA (1)...(19): siRNA sense strand
gcaugauucuauccaaauu

SEQ ID NO: 197808 - RNA, 19 nt, Homo sapiens
  misc_RNA (1)...(19): siRNA sense strand
ugaacuggcugcugaaugu

SEQ ID NO: 197809 - RNA, 19 nt, Homo sapiens
  misc_RNA (1)...(19): siRNA sense strand
gauauccugcagauuauua

SEQ ID NO: 197810 - RNA, 19 nt, Homo sapiens
  misc_RNA (1)...(19): siRNA sense strand
gagaagauguucgagacuu

SEQ ID NO: 197811 - RNA, 19 nt, Homo sapiens
  misc_RNA (1)...(19): siRNA sense strand
gcacuuuaauuaugacauc

SEQ ID NO: 197812 - RNA, 19 nt, Homo sapiens
  misc_RNA (1)...(19): siRNA sense strand
guaaagcacauuuggaaga

SEQ ID NO: 197813 - RNA, 19 nt, Homo sapiens
  misc_RNA (1)...(19): siRNA sense strand
gaauauugcacuccgacua

SEQ ID NO: 197814 - RNA, 19 nt, Homo sapiens
  misc_RNA (1)...(19): siRNA sense strand
uuauaggacugccaugaaa

SEQ ID NO: 197815 - RNA, 19 nt, Homo sapiens
  misc_RNA (1)...(19): siRNA sense strand
gggugaaguugcauccuuu

SEQ ID NO: 197816 - RNA, 19 nt, Homo sapiens
  misc_RNA (1)...(19): siRNA sense strand
gcaagagcacaacaauuug

SEQ ID NO: 197817 - RNA, 19 nt, Homo sapiens
  misc_RNA (1)...(19): siRNA sense strand
gcacaacaauuuggucaac

SEQ ID NO: 197818 - RNA, 19 nt, Homo sapiens
  misc_RNA (1)...(19): siRNA sense strand
agcaagagcacaacaauuu

SEQ ID NO: 197819 - RNA, 19 nt, Homo sapiens
  misc_RNA (1)...(19): siRNA sense strand
agaagauguucgagacuuu

SEQ ID NO: 197820 - RNA, 19 nt, Homo sapiens
  misc_RNA (1)...(19): siRNA sense strand
gagcaagagcacaacaauu

SEQ ID NO: 197821 - RNA, 19 nt, Homo sapiens
  misc_RNA (1)...(19): siRNA sense strand
ucaagcaaguggcaaguuc

SEQ ID NO: 197822 - RNA, 19 nt, Homo sapiens
  misc_RNA (1)...(19): siRNA sense strand
ccacgagacucaaacaacu

SEQ ID NO: 197823 - RNA, 19 nt, Homo sapiens
  misc_RNA (1)...(19): siRNA sense strand
cagcacaaccucaagcaaa

SEQ ID NO: 197824 - RNA, 19 nt, Homo sapiens
  misc_RNA (1)...(19): siRNA sense strand
gcaaagaguguccaaucau

SEQ ID NO: 197825 - RNA, 19 nt, Homo sapiens
  misc_RNA (1)...(19): siRNA sense strand
auggauauccugcagauua

SEQ ID NO: 197826 - RNA, 19 nt, Homo sapiens
  misc_RNA (1)...(19): siRNA sense strand
uguaacaucugcaaagagu

SEQ ID NO: 197827 - RNA, 19 nt, Homo sapiens
  misc_RNA (1)...(19): siRNA sense strand
guccggagcugcuuccaau

SEQ ID NO: 197828 - RNA, 19 nt, Homo sapiens
  misc_RNA (1)...(19): siRNA sense strand
gcaaguggcaaguucaaca

SEQ ID NO: 197829 - RNA, 19 nt, Homo sapiens
  misc_RNA (1)...(19): siRNA sense strand
gcuuccaauuugcuaauaa

SEQ ID NO: 197830 - RNA, 19 nt, Homo sapiens
  misc_RNA (1)...(19): siRNA sense strand
uggaagacaaguacagaua

SEQ ID NO: 197831 - RNA, 19 nt, Homo sapiens
  misc_RNA (1)...(19): siRNA sense strand
ggauccguguccugucuuu

SEQ ID NO: 197832 - RNA, 19 nt, Homo sapiens
  misc_RNA (1)...(19): siRNA sense strand
gucuuuagcugaccugaau

SEQ ID NO: 197833 - RNA, 19 nt, Homo sapiens
  misc_RNA (1)...(19): siRNA sense strand
gacaaguacagauaccuuu

SEQ ID NO: 197834 - RNA, 19 nt, Homo sapiens
  misc_RNA (1)...(19): siRNA sense strand
ccaagcaucaggccaaaug

SEQ ID NO: 197835 - RNA, 19 nt, Homo sapiens
  misc_RNA (1)...(19): siRNA sense strand
ggagcaagagcacaacaau

SEQ ID NO: 197836 - RNA, 19 nt, Homo sapiens
  misc_RNA (1)...(19): siRNA sense strand
guguaaagcacauuuggaa

SEQ ID NO: 197837 - RNA, 19 nt, Homo sapiens
  misc_RNA (1)...(19): siRNA sense strand
caagacaguugggugaagu

SEQ ID NO: 197838 - RNA, 19 nt, Homo sapiens
  misc_RNA (1)...(19): siRNA sense strand
gaagauguucgagacuuug

SEQ ID NO: 197839 - RNA, 19 nt, Homo sapiens
  misc_RNA (1)...(19): siRNA sense strand
gucagauucucagcuuaua

SEQ ID NO: 197840 - RNA, 19 nt, Homo sapiens
  misc_RNA (1)...(19): siRNA sense strand
uaacaucugcaaagagugu

SEQ ID NO: 197841 - RNA, 19 nt, Homo sapiens
  misc_RNA (1)...(19): siRNA sense strand
cggagcugcuuccaauuug

SEQ ID NO: 197842 - RNA, 19 nt, Homo sapiens
  misc_RNA (1)...(19): siRNA sense strand
gaagacaaguacagauacc

SEQ ID NO: 197843 - RNA, 19 nt, Homo sapiens
  misc_RNA (1)...(19): siRNA sense strand
ccauggauauccugcagau

SEQ ID NO: 197844 - RNA, 19 nt, Homo sapiens
  misc_RNA (1)...(19): siRNA sense strand
ggcaucauuucccugugua

SEQ ID NO: 197845 - RNA, 19 nt, Homo sapiens
  misc_RNA (1)...(19): siRNA sense strand
uggauauccugcagauuau

SEQ ID NO: 197846 - RNA, 19 nt, Homo sapiens
  misc_RNA (1)...(19): siRNA sense strand
ggaagacaaguacagauac

SEQ ID NO: 197847 - RNA, 19 nt, Homo sapiens
  misc_RNA (1)...(19): siRNA sense strand
ugcaaagaguguccaauca

SEQ ID NO: 197848 - RNA, 19 nt, Homo sapiens
  misc_RNA (1)...(19): siRNA sense strand
guggauaugugucugaacu

SEQ ID NO: 197849 - RNA, 19 nt, Homo sapiens
  misc_RNA (1)...(19): siRNA sense strand
acuggcugcugaauguuua

SEQ ID NO: 197850 - RNA, 19 nt, Homo sapiens
  misc_RNA (1)...(19): siRNA sense strand
acuaucccaugguggaaua

SEQ ID NO: 197851 - RNA, 19 nt, Homo sapiens
  misc_RNA (1)...(19): siRNA sense strand
ccggagcugcuuccaauuu

SEQ ID NO: 197852 - RNA, 19 nt, Homo sapiens
  misc_RNA (1)...(19): siRNA sense strand
ccaaauuccaagacaguug

SEQ ID NO: 197853 - RNA, 19 nt, Homo sapiens
  misc_RNA (1)...(19): siRNA sense strand
cagaaacugccaagcauca

SEQ ID NO: 197854 - RNA, 19 nt, Homo sapiens
  misc_RNA (1)...(19): siRNA sense strand
uaugacaucugccaaagcu

SEQ ID NO: 197855 - RNA, 19 nt, Homo sapiens
  misc_RNA (1)...(19): siRNA sense strand
aaugucagauucucagcuu

SEQ ID NO: 197856 - RNA, 19 nt, Homo sapiens
  misc_RNA (1)...(19): siRNA sense strand
ucgagacuuugccaaggua

SEQ ID NO: 197857 - RNA, 19 nt, Homo sapiens
  misc_RNA (1)...(19): siRNA sense strand
gcaaaaggccauaaaaugc

SEQ ID NO: 197858 - RNA, 19 nt, Homo sapiens
  misc_RNA (1)...(19): siRNA sense strand
cugcaugauucuauccaaa

SEQ ID NO: 197859 - RNA, 19 nt, Homo sapiens
  misc_RNA (1)...(19): siRNA sense strand
uaaagcacauuuggaagac

SEQ ID NO: 197860 - RNA, 19 nt, Homo sapiens
  misc_RNA (1)...(19): siRNA sense strand
acaggagucuaaagcacuu

SEQ ID NO: 197861 - RNA, 19 nt, Homo sapiens
  misc_RNA (1)...(19): siRNA sense strand
acagauaccuuuucaagca

SEQ ID NO: 197862 - RNA, 19 nt, Homo sapiens
  misc_RNA (1)...(19): siRNA sense strand
aagcacauuuggaagacaa

SEQ ID NO: 197863 - RNA, 19 nt, Homo sapiens
  misc_RNA (1)...(19): siRNA sense strand
gcuaauaauaagccagaga

SEQ ID NO: 197864 - RNA, 19 nt, Homo sapiens
  misc_RNA (1)...(19): siRNA sense strand
caagagcacaacaauuugg

SEQ ID NO: 197865 - RNA, 19 nt, Homo sapiens
  misc_RNA (1)...(19): siRNA sense strand
ccugucagcugcaugugau

SEQ ID NO: 197866 - RNA, 19 nt, Homo sapiens
  misc_RNA (1)...(19): siRNA sense strand
gcugcugaauguuuaugau

SEQ ID NO: 197867 - RNA, 19 nt, Homo sapiens
  misc_RNA (1)...(19): siRNA sense strand
acagagcucuaccagucuu

SEQ ID NO: 197868 - RNA, 19 nt, Homo sapiens
  misc_RNA (1)...(19): siRNA sense strand
acaguugggugaaguugca

SEQ ID NO: 197869 - RNA, 19 nt, Homo sapiens
  misc_RNA (1)...(19): siRNA sense strand
guuugaccacuauuuauga

SEQ ID NO: 197870 - RNA, 19 nt, Homo sapiens
  misc_RNA (1)...(19): siRNA sense strand
gcuuauaggacugccauga

SEQ ID NO: 197871 - RNA, 19 nt, Homo sapiens
  misc_RNA (1)...(19): siRNA sense strand
caucaggccaaauguaaca

SEQ ID NO: 197872 - RNA, 19 nt, Homo sapiens
  misc_RNA (1)...(19): siRNA sense strand
gauucuauccaaauuccaa

SEQ ID NO: 197873 - RNA, 19 nt, Homo sapiens
  misc_RNA (1)...(19): siRNA sense strand
ggcaaguucaacaggauuu

SEQ ID NO: 197874 - RNA, 19 nt, Homo sapiens
  misc_RNA (1)...(19): siRNA sense strand
gaacuggcugcugaauguu

SEQ ID NO: 197875 - RNA, 19 nt, Homo sapiens
  misc_RNA (1)...(19): siRNA sense strand
cugcugaauguuuaugaua

SEQ ID NO: 197876 - RNA, 19 nt, Homo sapiens
  misc_RNA (1)...(19): siRNA sense strand
aagcaucaggccaaaugua

SEQ ID NO: 197877 - RNA, 19 nt, Homo sapiens
  misc_RNA (1)...(19): siRNA sense strand
uggcaucauuucccugugu

SEQ ID NO: 197878 - RNA, 19 nt, Homo sapiens
  misc_RNA (1)...(19): siRNA sense strand
ccaugaaacuccgaagacu

SEQ ID NO: 197879 - RNA, 19 nt, Homo sapiens
  misc_RNA (1)...(19): siRNA sense strand
auaauaagccagagaucga

SEQ ID NO: 197880 - RNA, 19 nt, Homo sapiens
  misc_RNA (1)...(19): siRNA sense strand
cuaauaauaagccagagau

SEQ ID NO: 197881 - RNA, 19 nt, Homo sapiens
  misc_RNA (1)...(19): siRNA sense strand
ugggugaaguugcauccuu

SEQ ID NO: 197882 - RNA, 19 nt, Homo sapiens
  misc_RNA (1)...(19): siRNA sense strand
caucauuucccuguguaaa

SEQ ID NO: 197883 - RNA, 19 nt, Homo sapiens
  misc_RNA (1)...(19): siRNA sense strand
gcguggauaugugucugaa

SEQ ID NO: 197884 - RNA, 19 nt, Homo sapiens
  misc_RNA (1)...(19): siRNA sense strand
gcacuaucccaugguggaa

SEQ ID NO: 197885 - RNA, 19 nt, Homo sapiens
  misc_RNA (1)...(19): siRNA sense strand
gagccugucagcugcaugu

SEQ ID NO: 197886 - RNA, 19 nt, Homo sapiens
  misc_RNA (1)...(19): siRNA sense strand
guacagauaccuuuucaag

SEQ ID NO: 197887 - RNA, 19 nt, Homo sapiens
  misc_RNA (1)...(19): siRNA sense strand
gucccucucugcguggaua

SEQ ID NO: 197888 - RNA, 19 nt, Homo sapiens
  misc_RNA (1)...(19): siRNA sense strand
ggagcugcuuccaauuugc

SEQ ID NO: 197889 - RNA, 19 nt, Homo sapiens
  misc_RNA (1)...(19): siRNA sense strand
uuagcugaccugaauaaug

SEQ ID NO: 197890 - RNA, 19 nt, Homo sapiens
  misc_RNA (1)...(19): siRNA sense strand
guggcaaguucaacaggau

SEQ ID NO: 197891 - RNA, 19 nt, Homo sapiens
  misc_RNA (1)...(19): siRNA sense strand
acaacaauuuggucaacgu

SEQ ID NO: 197892 - RNA, 19 nt, Homo sapiens
  misc_RNA (1)...(19): siRNA sense strand
gacuacaucaggagaagau

SEQ ID NO: 197893 - RNA, 19 nt, Homo sapiens
  misc_RNA (1)...(19): siRNA sense strand
uaauaagccagagaucgaa

SEQ ID NO: 197894 - RNA, 19 nt, Homo sapiens
  misc_RNA (1)...(19): siRNA sense strand
ugucagauucucagcuuau

SEQ ID NO: 197895 - RNA, 19 nt, Homo sapiens
  misc_RNA (1)...(19): siRNA sense strand
ggauauccugcagauuauu

SEQ ID NO: 197896 - RNA, 19 nt, Homo sapiens
  misc_RNA (1)...(19): siRNA sense strand
agcaucaggccaaauguaa

SEQ ID NO: 197897 - RNA, 19 nt, Homo sapiens
  misc_RNA (1)...(19): siRNA sense strand
gcccuuugcuuggaucucu

SEQ ID NO: 197898 - RNA, 19 nt, Homo sapiens
  misc_RNA (1)...(19): siRNA sense strand
gcugaauguuuaugauacg

SEQ ID NO: 197899 - RNA, 19 nt, Homo sapiens
  misc_RNA (1)...(19): siRNA sense strand
agacuuugccaagguacua

SEQ ID NO: 197900 - RNA, 19 nt, Homo sapiens
  misc_RNA (1)...(19): siRNA sense strand
caagcaaguggcaaguuca

SEQ ID NO: 197901 - RNA, 19 nt, Homo sapiens
  misc_RNA (1)...(19): siRNA sense strand
agacaaguacagauaccuu

SEQ ID NO: 197902 - RNA, 19 nt, Homo sapiens
  misc_RNA (1)...(19): siRNA sense strand
gcaucauuucccuguguaa

SEQ ID NO: 197903 - RNA, 19 nt, Homo sapiens
  misc_RNA (1)...(19): siRNA sense strand
cugcaaagaguguccaauc

SEQ ID NO: 197904 - RNA, 19 nt, Homo sapiens
  misc_RNA (1)...(19): siRNA sense strand
cuuauaggacugccaugaa

SEQ ID NO: 197905 - RNA, 19 nt, Homo sapiens
  misc_RNA (1)...(19): siRNA sense strand
caaagaguguccaaucauu

SEQ ID NO: 197906 - RNA, 19 nt, Homo sapiens
  misc_RNA (1)...(19): siRNA sense strand
uagcugaccugaauaaugu

SEQ ID NO: 197907 - RNA, 19 nt, Homo sapiens
  misc_RNA (1)...(19): siRNA sense strand
gcaugauucuauccaaauu

SEQ ID NO: 197908 - RNA, 19 nt, Homo sapiens
  misc_RNA (1)...(19): siRNA sense strand
ugaacuggcugcugaaugu

SEQ ID NO: 197909 - RNA, 19 nt, Homo sapiens
  misc_RNA (1)...(19): siRNA sense strand
gauauccugcagauuauua

SEQ ID NO: 197910 - RNA, 19 nt, Homo sapiens
  misc_RNA (1)...(19): siRNA sense strand
gagaagauguucgagacuu

SEQ ID NO: 197911 - RNA, 19 nt, Homo sapiens
  misc_RNA (1)...(19): siRNA sense strand
gcacuuuaauuaugacauc

SEQ ID NO: 197912 - RNA, 19 nt, Homo sapiens
  misc_RNA (1)...(19): siRNA sense strand
guaaagcacauuuggaaga

SEQ ID NO: 197913 - RNA, 19 nt, Homo sapiens
  misc_RNA (1)...(19): siRNA sense strand
gaauauugcacuccgacua

SEQ ID NO: 197914 - RNA, 19 nt, Homo sapiens
  misc_RNA (1)...(19): siRNA sense strand
uuauaggacugccaugaaa

SEQ ID NO: 197915 - RNA, 19 nt, Homo sapiens
  misc_RNA (1)...(19): siRNA sense strand
gggugaaguugcauccuuu

SEQ ID NO: 197916 - RNA, 19 nt, Homo sapiens
  misc_RNA (1)...(19): siRNA sense strand
gcaagagcacaacaauuug

SEQ ID NO: 197917 - RNA, 19 nt, Homo sapiens
  misc_RNA (1)...(19): siRNA sense strand
gcacaacaauuuggucaac

SEQ ID NO: 197918 - RNA, 19 nt, Homo sapiens
  misc_RNA (1)...(19): siRNA sense strand
agcaagagcacaacaauuu

SEQ ID NO: 197919 - RNA, 19 nt, Homo sapiens
  misc_RNA (1)...(19): siRNA sense strand
agaagauguucgagacuuu

SEQ ID NO: 197920 - RNA, 19 nt, Homo sapiens
  misc_RNA (1)...(19): siRNA sense strand
gagcaagagcacaacaauu

SEQ ID NO: 197921 - RNA, 19 nt, Homo sapiens
  misc_RNA (1)...(19): siRNA sense strand
ucaagcaaguggcaaguuc

SEQ ID NO: 197922 - RNA, 19 nt, Homo sapiens
  misc_RNA (1)...(19): siRNA sense strand
ccacgagacucaaacaacu

SEQ ID NO: 197923 - RNA, 19 nt, Homo sapiens
  misc_RNA (1)...(19): siRNA sense strand
cagcacaaccucaagcaaa

SEQ ID NO: 197924 - RNA, 19 nt, Homo sapiens
  misc_RNA (1)...(19): siRNA sense strand
gcaaagaguguccaaucau

SEQ ID NO: 197925 - RNA, 19 nt, Homo sapiens
  misc_RNA (1)...(19): siRNA sense strand
auggauauccugcagauua

SEQ ID NO: 197926 - RNA, 19 nt, Homo sapiens
  misc_RNA (1)...(19): siRNA sense strand
uguaacaucugcaaagagu

SEQ ID NO: 197927 - RNA, 19 nt, Homo sapiens
  misc_RNA (1)...(19): siRNA sense strand
guccggagcugcuuccaau

SEQ ID NO: 197928 - RNA, 19 nt, Homo sapiens
  misc_RNA (1)...(19): siRNA sense strand
gcaaguggcaaguucaaca

SEQ ID NO: 197929 - RNA, 19 nt, Homo sapiens
  misc_RNA (1)...(19): siRNA sense strand
gcuuccaauuugcuaauaa

SEQ ID NO: 197930 - RNA, 19 nt, Homo sapiens
  misc_RNA (1)...(19): siRNA sense strand
uggaagacaaguacagaua

SEQ ID NO: 197931 - RNA, 19 nt, Homo sapiens
  misc_RNA (1)...(19): siRNA sense strand
ggauccguguccugucuuu

SEQ ID NO: 197932 - RNA, 19 nt, Homo sapiens
  misc_RNA (1)...(19): siRNA sense strand
gucuuuagcugaccugaau

SEQ ID NO: 197933 - RNA, 19 nt, Homo sapiens
  misc_RNA (1)...(19): siRNA sense strand
gacaaguacagauaccuuu

SEQ ID NO: 197934 - RNA, 19 nt, Homo sapiens
  misc_RNA (1)...(19): siRNA sense strand
ccaagcaucaggccaaaug

SEQ ID NO: 197935 - RNA, 19 nt, Homo sapiens
  misc_RNA (1)...(19): siRNA sense strand
ggagcaagagcacaacaau

SEQ ID NO: 197936 - RNA, 19 nt, Homo sapiens
  misc_RNA (1)...(19): siRNA sense strand
guguaaagcacauuuggaa

SEQ ID NO: 197937 - RNA, 19 nt, Homo sapiens
  misc_RNA (1)...(19): siRNA sense strand
caagacaguugggugaagu

SEQ ID NO: 197938 - RNA, 19 nt, Homo sapiens
  misc_RNA (1)...(19): siRNA sense strand
gaagauguucgagacuuug

SEQ ID NO: 197939 - RNA, 19 nt, Homo sapiens
  misc_RNA (1)...(19): siRNA sense strand
gucagauucucagcuuaua

SEQ ID NO: 197940 - RNA, 19 nt, Homo sapiens
  misc_RNA (1)...(19): siRNA sense strand
uaacaucugcaaagagugu

SEQ ID NO: 197941 - RNA, 19 nt, Homo sapiens
  misc_RNA (1)...(19): siRNA sense strand
cggagcugcuuccaauuug

SEQ ID NO: 197942 - RNA, 19 nt, Homo sapiens
  misc_RNA (1)...(19): siRNA sense strand
gaagacaaguacagauacc

SEQ ID NO: 197943 - RNA, 19 nt, Homo sapiens
  misc_RNA (1)...(19): siRNA sense strand
ccauggauauccugcagau

SEQ ID NO: 197944 - RNA, 19 nt, Homo sapiens
  misc_RNA (1)...(19): siRNA sense strand
ggcaucauuucccugugua

SEQ ID NO: 197945 - RNA, 19 nt, Homo sapiens
  misc_RNA (1)...(19): siRNA sense strand
uggauauccugcagauuau

SEQ ID NO: 197946 - RNA, 19 nt, Homo sapiens
  misc_RNA (1)...(19): siRNA sense strand
ggaagacaaguacagauac

SEQ ID NO: 197947 - RNA, 19 nt, Homo sapiens
  misc_RNA (1)...(19): siRNA sense strand
ugcaaagaguguccaauca

SEQ ID NO: 197948 - RNA, 19 nt, Homo sapiens
  misc_RNA (1)...(19): siRNA sense strand
guggauaugugucugaacu

SEQ ID NO: 197949 - RNA, 19 nt, Homo sapiens
  misc_RNA (1)...(19): siRNA sense strand
acuggcugcugaauguuua

SEQ ID NO: 197950 - RNA, 19 nt, Homo sapiens
  misc_RNA (1)...(19): siRNA sense strand
acuaucccaugguggaaua

SEQ ID NO: 197951 - RNA, 19 nt, Homo sapiens
  misc_RNA (1)...(19): siRNA sense strand
ccggagcugcuuccaauuu

SEQ ID NO: 197952 - RNA, 19 nt, Homo sapiens
  misc_RNA (1)...(19): siRNA sense strand
ccaaauuccaagacaguug

SEQ ID NO: 197953 - RNA, 19 nt, Homo sapiens
  misc_RNA (1)...(19): siRNA sense strand
cagaaacugccaagcauca

SEQ ID NO: 197954 - RNA, 19 nt, Homo sapiens
  misc_RNA (1)...(19): siRNA sense strand
uaugacaucugccaaagcu

SEQ ID NO: 197955 - RNA, 19 nt, Homo sapiens
  misc_RNA (1)...(19): siRNA sense strand
aaugucagauucucagcuu

SEQ ID NO: 197956 - RNA, 19 nt, Homo sapiens
  misc_RNA (1)...(19): siRNA sense strand
ucgagacuuugccaaggua

SEQ ID NO: 197957 - RNA, 19 nt, Homo sapiens
  misc_RNA (1)...(19): siRNA sense strand
gcaaaaggccauaaaaugc

SEQ ID NO: 197958 - RNA, 19 nt, Homo sapiens
  misc_RNA (1)...(19): siRNA sense strand
cugcaugauucuauccaaa

SEQ ID NO: 197959 - RNA, 19 nt, Homo sapiens
  misc_RNA (1)...(19): siRNA sense strand
uaaagcacauuuggaagac

SEQ ID NO: 197960 - RNA, 19 nt, Homo sapiens
  misc_RNA (1)...(19): siRNA sense strand
acaggagucuaaagcacuu

SEQ ID NO: 197961 - RNA, 19 nt, Homo sapiens
  misc_RNA (1)...(19): siRNA sense strand
acagauaccuuuucaagca

SEQ ID NO: 197962 - RNA, 19 nt, Homo sapiens
  misc_RNA (1)...(19): siRNA sense strand
aagcacauuuggaagacaa

SEQ ID NO: 197963 - RNA, 19 nt, Homo sapiens
  misc_RNA (1)...(19): siRNA sense strand
gcuaauaauaagccagaga

SEQ ID NO: 197964 - RNA, 19 nt, Homo sapiens
  misc_RNA (1)...(19): siRNA sense strand
caagagcacaacaauuugg

SEQ ID NO: 197965 - RNA, 19 nt, Homo sapiens
  misc_RNA (1)...(19): siRNA sense strand
ccugucagcugcaugugau

SEQ ID NO: 197966 - RNA, 19 nt, Homo sapiens
  misc_RNA (1)...(19): siRNA sense strand
gcugcugaauguuuaugau

SEQ ID NO: 197967 - RNA, 19 nt, Homo sapiens
  misc_RNA (1)...(19): siRNA sense strand
acagagcucuaccagucuu

SEQ ID NO: 197968 - RNA, 19 nt, Homo sapiens
  misc_RNA (1)...(19): siRNA sense strand
acaguugggugaaguugca

SEQ ID NO: 197969 - RNA, 19 nt, Homo sapiens
  misc_RNA (1)...(19): siRNA sense strand
guuugaccacuauuuauga

SEQ ID NO: 197970 - RNA, 19 nt, Homo sapiens
  misc_RNA (1)...(19): siRNA sense strand
gcuuauaggacugccauga

SEQ ID NO: 197971 - RNA, 19 nt, Homo sapiens
  misc_RNA (1)...(19): siRNA sense strand
caucaggccaaauguaaca

SEQ ID NO: 197972 - RNA, 19 nt, Homo sapiens
  misc_RNA (1)...(19): siRNA sense strand
gauucuauccaaauuccaa

SEQ ID NO: 197973 - RNA, 19 nt, Homo sapiens
  misc_RNA (1)...(19): siRNA sense strand
ggcaaguucaacaggauuu

SEQ ID NO: 197974 - RNA, 19 nt, Homo sapiens
  misc_RNA (1)...(19): siRNA sense strand
gaacuggcugcugaauguu

SEQ ID NO: 197975 - RNA, 19 nt, Homo sapiens
  misc_RNA (1)...(19): siRNA sense strand
cugcugaauguuuaugaua

SEQ ID NO: 197976 - RNA, 19 nt, Homo sapiens
  misc_RNA (1)...(19): siRNA sense strand
aagcaucaggccaaaugua

SEQ ID NO: 197977 - RNA, 19 nt, Homo sapiens
  misc_RNA (1)...(19): siRNA sense strand
uggcaucauuucccugugu

SEQ ID NO: 197978 - RNA, 19 nt, Homo sapiens
  misc_RNA (1)...(19): siRNA sense strand
ccaugaaacuccgaagacu

SEQ ID NO: 197979 - RNA, 19 nt, Homo sapiens
  misc_RNA (1)...(19): siRNA sense strand
auaauaagccagagaucga

SEQ ID NO: 197980 - RNA, 19 nt, Homo sapiens
  misc_RNA (1)...(19): siRNA sense strand
cuaauaauaagccagagau

SEQ ID NO: 197981 - RNA, 19 nt, Homo sapiens
  misc_RNA (1)...(19): siRNA sense strand
ugggugaaguugcauccuu

SEQ ID NO: 197982 - RNA, 19 nt, Homo sapiens
  misc_RNA (1)...(19): siRNA sense strand
caucauuucccuguguaaa

SEQ ID NO: 197983 - RNA, 19 nt, Homo sapiens
  misc_RNA (1)...(19): siRNA sense strand
gcguggauaugugucugaa

SEQ ID NO: 197984 - RNA, 19 nt, Homo sapiens
  misc_RNA (1)...(19): siRNA sense strand
gcacuaucccaugguggaa

SEQ ID NO: 197985 - RNA, 19 nt, Homo sapiens
  misc_RNA (1)...(19): siRNA sense strand
gagccugucagcugcaugu

SEQ ID NO: 197986 - RNA, 19 nt, Homo sapiens
  misc_RNA (1)...(19): siRNA sense strand
guacagauaccuuuucaag

SEQ ID NO: 197987 - RNA, 19 nt, Homo sapiens
  misc_RNA (1)...(19): siRNA sense strand
gucccucucugcguggaua

SEQ ID NO: 197988 - RNA, 19 nt, Homo sapiens
  misc_RNA (1)...(19): siRNA sense strand
ggagcugcuuccaauuugc

SEQ ID NO: 197989 - RNA, 19 nt, Homo sapiens
  misc_RNA (1)...(19): siRNA sense strand
uuagcugaccugaauaaug

SEQ ID NO: 197990 - RNA, 19 nt, Homo sapiens
  misc_RNA (1)...(19): siRNA sense strand
guggcaaguucaacaggau

SEQ ID NO: 197991 - RNA, 19 nt, Homo sapiens
  misc_RNA (1)...(19): siRNA sense strand
acaacaauuuggucaacgu

SEQ ID NO: 197992 - RNA, 19 nt, Homo sapiens
  misc_RNA (1)...(19): siRNA sense strand
gacuacaucaggagaagau

SEQ ID NO: 197993 - RNA, 19 nt, Homo sapiens
  misc_RNA (1)...(19): siRNA sense strand
uaauaagccagagaucgaa

SEQ ID NO: 197994 - RNA, 19 nt, Homo sapiens
  misc_RNA (1)...(19): siRNA sense strand
ugucagauucucagcuuau

SEQ ID NO: 197995 - RNA, 19 nt, Homo sapiens
  misc_RNA (1)...(19): siRNA sense strand
ggauauccugcagauuauu

SEQ ID NO: 197996 - RNA, 19 nt, Homo sapiens
  misc_RNA (1)...(19): siRNA sense strand
agcaucaggccaaauguaa

SEQ ID NO: 197997 - RNA, 19 nt, Homo sapiens
  misc_RNA (1)...(19): siRNA sense strand
gcccuuugcuuggaucucu

SEQ ID NO: 197998 - RNA, 19 nt, Homo sapiens
  misc_RNA (1)...(19): siRNA sense strand
gcugaauguuuaugauacg

SEQ ID NO: 197999 - RNA, 19 nt, Homo sapiens
  misc_RNA (1)...(19): siRNA sense strand
agacuuugccaagguacua

SEQ ID NO: 198000 - RNA, 19 nt, Homo sapiens
  misc_RNA (1)...(19): siRNA sense strand
caagcaaguggcaaguuca

SEQ ID NO: 198001 - RNA, 19 nt, Homo sapiens
  misc_RNA (1)...(19): siRNA sense strand
agacaaguacagauaccuu

SEQ ID NO: 198002 - RNA, 19 nt, Homo sapiens
  misc_RNA (1)...(19): siRNA sense strand
gcaucauuucccuguguaa

SEQ ID NO: 198003 - RNA, 19 nt, Homo sapiens
  misc_RNA (1)...(19): siRNA sense strand
cugcaaagaguguccaauc

SEQ ID NO: 198004 - RNA, 19 nt, Homo sapiens
  misc_RNA (1)...(19): siRNA sense strand
cuuauaggacugccaugaa

SEQ ID NO: 198005 - RNA, 19 nt, Homo sapiens
  misc_RNA (1)...(19): siRNA sense strand
caaagaguguccaaucauu

SEQ ID NO: 198006 - RNA, 19 nt, Homo sapiens
  misc_RNA (1)...(19): siRNA sense strand
uagcugaccugaauaaugu

SEQ ID NO: 198007 - RNA, 19 nt, Homo sapiens
  misc_RNA (1)...(19): siRNA sense strand
gcaugauucuauccaaauu

SEQ ID NO: 198008 - RNA, 19 nt, Homo sapiens
  misc_RNA (1)...(19): siRNA sense strand
ugaacuggcugcugaaugu

SEQ ID NO: 198009 - RNA, 19 nt, Homo sapiens
  misc_RNA (1)...(19): siRNA sense strand
gauauccugcagauuauua

SEQ ID NO: 198010 - RNA, 19 nt, Homo sapiens
  misc_RNA (1)...(19): siRNA sense strand
gagaagauguucgagacuu

SEQ ID NO: 198011 - RNA, 19 nt, Homo sapiens
  misc_RNA (1)...(19): siRNA sense strand
gcacuuuaauuaugacauc

SEQ ID NO: 198012 - RNA, 19 nt, Homo sapiens
  misc_RNA (1)...(19): siRNA sense strand
guaaagcacauuuggaaga

SEQ ID NO: 198013 - RNA, 19 nt, Homo sapiens
  misc_RNA (1)...(19): siRNA sense strand
gaauauugcacuccgacua

SEQ ID NO: 198014 - RNA, 19 nt, Homo sapiens
  misc_RNA (1)...(19): siRNA sense strand
uuauaggacugccaugaaa

SEQ ID NO: 198015 - RNA, 19 nt, Homo sapiens
  misc_RNA (1)...(19): siRNA sense strand
gggugaaguugcauccuuu

SEQ ID NO: 198016 - RNA, 19 nt, Homo sapiens
  misc_RNA (1)...(19): siRNA sense strand
gcaagagcacaacaauuug

SEQ ID NO: 198017 - RNA, 19 nt, Homo sapiens
  misc_RNA (1)...(19): siRNA sense strand
gcacaacaauuuggucaac

SEQ ID NO: 198018 - RNA, 19 nt, Homo sapiens
  misc_RNA (1)...(19): siRNA sense strand
agcaagagcacaacaauuu

SEQ ID NO: 198019 - RNA, 19 nt, Homo sapiens
  misc_RNA (1)...(19): siRNA sense strand
agaagauguucgagacuuu

SEQ ID NO: 198020 - RNA, 19 nt, Homo sapiens
  misc_RNA (1)...(19): siRNA sense strand
gagcaagagcacaacaauu

SEQ ID NO: 198021 - RNA, 19 nt, Homo sapiens
  misc_RNA (1)...(19): siRNA sense strand
ucaagcaaguggcaaguuc

SEQ ID NO: 198022 - RNA, 19 nt, Homo sapiens
  misc_RNA (1)...(19): siRNA sense strand
ccacgagacucaaacaacu

SEQ ID NO: 198023 - RNA, 19 nt, Homo sapiens
  misc_RNA (1)...(19): siRNA sense strand
cagcacaaccucaagcaaa

SEQ ID NO: 198024 - RNA, 19 nt, Homo sapiens
  misc_RNA (1)...(19): siRNA sense strand
gcaaagaguguccaaucau

SEQ ID NO: 198025 - RNA, 19 nt, Homo sapiens
  misc_RNA (1)...(19): siRNA sense strand
auggauauccugcagauua

SEQ ID NO: 198026 - RNA, 19 nt, Homo sapiens
  misc_RNA (1)...(19): siRNA sense strand
uguaacaucugcaaagagu

SEQ ID NO: 198027 - RNA, 19 nt, Homo sapiens
  misc_RNA (1)...(19): siRNA sense strand
guccggagcugcuuccaau

SEQ ID NO: 198028 - RNA, 19 nt, Homo sapiens
  misc_RNA (1)...(19): siRNA sense strand
gcaaguggcaaguucaaca

SEQ ID NO: 198029 - RNA, 19 nt, Homo sapiens
  misc_RNA (1)...(19): siRNA sense strand
gcuuccaauuugcuaauaa

SEQ ID NO: 198030 - RNA, 19 nt, Homo sapiens
  misc_RNA (1)...(19): siRNA sense strand
uggaagacaaguacagaua

SEQ ID NO: 198031 - RNA, 19 nt, Homo sapiens
  misc_RNA (1)...(19): siRNA sense strand
ggauccguguccugucuuu

SEQ ID NO: 198032 - RNA, 19 nt, Homo sapiens
  misc_RNA (1)...(19): siRNA sense strand
gucuuuagcugaccugaau

SEQ ID NO: 198033 - RNA, 19 nt, Homo sapiens
  misc_RNA (1)...(19): siRNA sense strand
gacaaguacagauaccuuu

SEQ ID NO: 198034 - RNA, 19 nt, Homo sapiens
  misc_RNA (1)...(19): siRNA sense strand
ccaagcaucaggccaaaug

SEQ ID NO: 198035 - RNA, 19 nt, Homo sapiens
  misc_RNA (1)...(19): siRNA sense strand
ggagcaagagcacaacaau

SEQ ID NO: 198036 - RNA, 19 nt, Homo sapiens
  misc_RNA (1)...(19): siRNA sense strand
guguaaagcacauuuggaa

SEQ ID NO: 198037 - RNA, 19 nt, Homo sapiens
  misc_RNA (1)...(19): siRNA sense strand
caagacaguugggugaagu

SEQ ID NO: 198038 - RNA, 19 nt, Homo sapiens
  misc_RNA (1)...(19): siRNA sense strand
gaagauguucgagacuuug

SEQ ID NO: 198039 - RNA, 19 nt, Homo sapiens
  misc_RNA (1)...(19): siRNA sense strand
gucagauucucagcuuaua

SEQ ID NO: 198040 - RNA, 19 nt, Homo sapiens
  misc_RNA (1)...(19): siRNA sense strand
uaacaucugcaaagagugu

SEQ ID NO: 198041 - RNA, 19 nt, Homo sapiens
  misc_RNA (1)...(19): siRNA sense strand
cggagcugcuuccaauuug

SEQ ID NO: 198042 - RNA, 19 nt, Homo sapiens
  misc_RNA (1)...(19): siRNA sense strand
gaagacaaguacagauacc

SEQ ID NO: 198043 - RNA, 19 nt, Homo sapiens
  misc_RNA (1)...(19): siRNA sense strand
ccauggauauccugcagau

SEQ ID NO: 198044 - RNA, 19 nt, Homo sapiens
  misc_RNA (1)...(19): siRNA sense strand
ggcaucauuucccugugua

SEQ ID NO: 198045 - RNA, 19 nt, Homo sapiens
  misc_RNA (1)...(19): siRNA sense strand
uggauauccugcagauuau

SEQ ID NO: 198046 - RNA, 19 nt, Homo sapiens
  misc_RNA (1)...(19): siRNA sense strand
ggaagacaaguacagauac

SEQ ID NO: 198047 - RNA, 19 nt, Homo sapiens
  misc_RNA (1)...(19): siRNA sense strand
ugcaaagaguguccaauca

SEQ ID NO: 198048 - RNA, 19 nt, Homo sapiens
  misc_RNA (1)...(19): siRNA sense strand
guggauaugugucugaacu

SEQ ID NO: 198049 - RNA, 19 nt, Homo sapiens
  misc_RNA (1)...(19): siRNA sense strand
acuggcugcugaauguuua

SEQ ID NO: 198050 - RNA, 19 nt, Homo sapiens
  misc_RNA (1)...(19): siRNA sense strand
acuaucccaugguggaaua

SEQ ID NO: 198051 - RNA, 19 nt, Homo sapiens
  misc_RNA (1)...(19): siRNA sense strand
ccggagcugcuuccaauuu

SEQ ID NO: 198052 - RNA, 19 nt, Homo sapiens
  misc_RNA (1)...(19): siRNA sense strand
ccaaauuccaagacaguug

SEQ ID NO: 198053 - RNA, 19 nt, Homo sapiens
  misc_RNA (1)...(19): siRNA sense strand
cagaaacugccaagcauca

SEQ ID NO: 198054 - RNA, 19 nt, Homo sapiens
  misc_RNA (1)...(19): siRNA sense strand
uaugacaucugccaaagcu

SEQ ID NO: 198055 - RNA, 19 nt, Homo sapiens
  misc_RNA (1)...(19): siRNA sense strand
aaugucagauucucagcuu

SEQ ID NO: 198056 - RNA, 19 nt, Homo sapiens
  misc_RNA (1)...(19): siRNA sense strand
ucgagacuuugccaaggua

SEQ ID NO: 198057 - RNA, 19 nt, Homo sapiens
  misc_RNA (1)...(19): siRNA sense strand
gcaaaaggccauaaaaugc

SEQ ID NO: 198058 - RNA, 19 nt, Homo sapiens
  misc_RNA (1)...(19): siRNA sense strand
cugcaugauucuauccaaa

SEQ ID NO: 198059 - RNA, 19 nt, Homo sapiens
  misc_RNA (1)...(19): siRNA sense strand
uaaagcacauuuggaagac

SEQ ID NO: 198060 - RNA, 19 nt, Homo sapiens
  misc_RNA (1)...(19): siRNA sense strand
acaggagucuaaagcacuu

SEQ ID NO: 198061 - RNA, 19 nt, Homo sapiens
  misc_RNA (1)...(19): siRNA sense strand
acagauaccuuuucaagca

SEQ ID NO: 198062 - RNA, 19 nt, Homo sapiens
  misc_RNA (1)...(19): siRNA sense strand
aagcacauuuggaagacaa

SEQ ID NO: 198063 - RNA, 19 nt, Homo sapiens
  misc_RNA (1)...(19): siRNA sense strand
gcuaauaauaagccagaga

SEQ ID NO: 198064 - RNA, 19 nt, Homo sapiens
  misc_RNA (1)...(19): siRNA sense strand
caagagcacaacaauuugg

SEQ ID NO: 198065 - RNA, 19 nt, Homo sapiens
  misc_RNA (1)...(19): siRNA sense strand
ccugucagcugcaugugau

SEQ ID NO: 198066 - RNA, 19 nt, Homo sapiens
  misc_RNA (1)...(19): siRNA sense strand
gcugcugaauguuuaugau

SEQ ID NO: 198067 - RNA, 19 nt, Homo sapiens
  misc_RNA (1)...(19): siRNA sense strand
acagagcucuaccagucuu

SEQ ID NO: 198068 - RNA, 19 nt, Homo sapiens
  misc_RNA (1)...(19): siRNA sense strand
acaguugggugaaguugca

SEQ ID NO: 198069 - RNA, 19 nt, Homo sapiens
  misc_RNA (1)...(19): siRNA sense strand
guuugaccacuauuuauga

SEQ ID NO: 198070 - RNA, 19 nt, Homo sapiens
  misc_RNA (1)...(19): siRNA sense strand
gcuuauaggacugccauga

SEQ ID NO: 198071 - RNA, 19 nt, Homo sapiens
  misc_RNA (1)...(19): siRNA sense strand
caucaggccaaauguaaca

SEQ ID NO: 198072 - RNA, 19 nt, Homo sapiens
  misc_RNA (1)...(19): siRNA sense strand
gauucuauccaaauuccaa

SEQ ID NO: 198073 - RNA, 19 nt, Homo sapiens
  misc_RNA (1)...(19): siRNA sense strand
ggcaaguucaacaggauuu

SEQ ID NO: 198074 - RNA, 19 nt, Homo sapiens
  misc_RNA (1)...(19): siRNA sense strand
gaacuggcugcugaauguu

SEQ ID NO: 198075 - RNA, 19 nt, Homo sapiens
  misc_RNA (1)...(19): siRNA sense strand
cugcugaauguuuaugaua

SEQ ID NO: 198076 - RNA, 19 nt, Homo sapiens
  misc_RNA (1)...(19): siRNA sense strand
aagcaucaggccaaaugua

SEQ ID NO: 198077 - RNA, 19 nt, Homo sapiens
  misc_RNA (1)...(19): siRNA sense strand
uggcaucauuucccugugu

SEQ ID NO: 198078 - RNA, 19 nt, Homo sapiens
  misc_RNA (1)...(19): siRNA sense strand
ccaugaaacuccgaagacu

SEQ ID NO: 198079 - RNA, 19 nt, Homo sapiens
  misc_RNA (1)...(19): siRNA sense strand
auaauaagccagagaucga

SEQ ID NO: 198080 - RNA, 19 nt, Homo sapiens
  misc_RNA (1)...(19): siRNA sense strand
cuaauaauaagccagagau

SEQ ID NO: 198081 - RNA, 19 nt, Homo sapiens
  misc_RNA (1)...(19): siRNA sense strand
ugggugaaguugcauccuu

SEQ ID NO: 198082 - RNA, 19 nt, Homo sapiens
  misc_RNA (1)...(19): siRNA sense strand
caucauuucccuguguaaa

SEQ ID NO: 198083 - RNA, 19 nt, Homo sapiens
  misc_RNA (1)...(19): siRNA sense strand
gcguggauaugugucugaa

SEQ ID NO: 198084 - RNA, 19 nt, Homo sapiens
  misc_RNA (1)...(19): siRNA sense strand
gcacuaucccaugguggaa

SEQ ID NO: 198085 - RNA, 19 nt, Homo sapiens
  misc_RNA (1)...(19): siRNA sense strand
gagccugucagcugcaugu

SEQ ID NO: 198086 - RNA, 19 nt, Homo sapiens
  misc_RNA (1)...(19): siRNA sense strand
guacagauaccuuuucaag

SEQ ID NO: 198087 - RNA, 19 nt, Homo sapiens
  misc_RNA (1)...(19): siRNA sense strand
gucccucucugcguggaua

SEQ ID NO: 198088 - RNA, 19 nt, Homo sapiens
  misc_RNA (1)...(19): siRNA sense strand
ggagcugcuuccaauuugc

SEQ ID NO: 198089 - RNA, 19 nt, Homo sapiens
  misc_RNA (1)...(19): siRNA sense strand
uuagcugaccugaauaaug

SEQ ID NO: 198090 - RNA, 19 nt, Homo sapiens
  misc_RNA (1)...(19): siRNA sense strand
guggcaaguucaacaggau

SEQ ID NO: 198091 - RNA, 19 nt, Homo sapiens
  misc_RNA (1)...(19): siRNA sense strand
acaacaauuuggucaacgu

SEQ ID NO: 198092 - RNA, 19 nt, Homo sapiens
  misc_RNA (1)...(19): siRNA sense strand
gacuacaucaggagaagau

SEQ ID NO: 198093 - RNA, 19 nt, Homo sapiens
  misc_RNA (1)...(19): siRNA sense strand
uaauaagccagagaucgaa

SEQ ID NO: 198094 - RNA, 19 nt, Homo sapiens
  misc_RNA (1)...(19): siRNA sense strand
ugucagauucucagcuuau

SEQ ID NO: 198095 - RNA, 19 nt, Homo sapiens
  misc_RNA (1)...(19): siRNA sense strand
ggauauccugcagauuauu

SEQ ID NO: 198096 - RNA, 19 nt, Homo sapiens
  misc_RNA (1)...(19): siRNA sense strand
agcaucaggccaaauguaa

SEQ ID NO: 198097 - RNA, 19 nt, Homo sapiens
  misc_RNA (1)...(19): siRNA sense strand
gcccuuugcuuggaucucu

SEQ ID NO: 198098 - RNA, 19 nt, Homo sapiens
  misc_RNA (1)...(19): siRNA sense strand
gcugaauguuuaugauacg

SEQ ID NO: 198099 - RNA, 19 nt, Homo sapiens
  misc_RNA (1)...(19): siRNA sense strand
agacuuugccaagguacua

SEQ ID NO: 198100 - RNA, 19 nt, Homo sapiens
  misc_RNA (1)...(19): siRNA sense strand
caagcaaguggcaaguuca

SEQ ID NO: 198101 - RNA, 19 nt, Homo sapiens
  misc_RNA (1)...(19): siRNA sense strand
agacaaguacagauaccuu

SEQ ID NO: 198102 - RNA, 19 nt, Homo sapiens
  misc_RNA (1)...(19): siRNA sense strand
gcaucauuucccuguguaa

SEQ ID NO: 198103 - RNA, 19 nt, Homo sapiens
  misc_RNA (1)...(19): siRNA sense strand
cugcaaagaguguccaauc

SEQ ID NO: 198104 - RNA, 19 nt, Homo sapiens
  misc_RNA (1)...(19): siRNA sense strand
cuuauaggacugccaugaa

SEQ ID NO: 198105 - RNA, 19 nt, Homo sapiens
  misc_RNA (1)...(19): siRNA sense strand
caaagaguguccaaucauu

SEQ ID NO: 198106 - RNA, 19 nt, Homo sapiens
  misc_RNA (1)...(19): siRNA sense strand
uagcugaccugaauaaugu

SEQ ID NO: 198107 - RNA, 19 nt, Homo sapiens
  misc_RNA (1)...(19): siRNA sense strand
gcaugauucuauccaaauu

SEQ ID NO: 198108 - RNA, 19 nt, Homo sapiens
  misc_RNA (1)...(19): siRNA sense strand
ugaacuggcugcugaaugu

SEQ ID NO: 198109 - RNA, 19 nt, Homo sapiens
  misc_RNA (1)...(19): siRNA sense strand
gauauccugcagauuauua

SEQ ID NO: 198110 - RNA, 19 nt, Homo sapiens
  misc_RNA (1)...(19): siRNA sense strand
gagaagauguucgagacuu

SEQ ID NO: 198111 - RNA, 19 nt, Homo sapiens
  misc_RNA (1)...(19): siRNA sense strand
gcacuuuaauuaugacauc

SEQ ID NO: 198112 - RNA, 19 nt, Homo sapiens
  misc_RNA (1)...(19): siRNA sense strand
guaaagcacauuuggaaga

SEQ ID NO: 198113 - RNA, 19 nt, Homo sapiens
  misc_RNA (1)...(19): siRNA sense strand
gaauauugcacuccgacua

SEQ ID NO: 198114 - RNA, 19 nt, Homo sapiens
  misc_RNA (1)...(19): siRNA sense strand
uuauaggacugccaugaaa

SEQ ID NO: 198115 - RNA, 19 nt, Homo sapiens
  misc_RNA (1)...(19): siRNA sense strand
gggugaaguugcauccuuu

SEQ ID NO: 198116 - RNA, 19 nt, Homo sapiens
  misc_RNA (1)...(19): siRNA sense strand
gcaagagcacaacaauuug

SEQ ID NO: 198117 - RNA, 19 nt, Homo sapiens
  misc_RNA (1)...(19): siRNA sense strand
gcacaacaauuuggucaac

SEQ ID NO: 198118 - RNA, 19 nt, Homo sapiens
  misc_RNA (1)...(19): siRNA sense strand
agcaagagcacaacaauuu

SEQ ID NO: 198119 - RNA, 19 nt, Homo sapiens
  misc_RNA (1)...(19): siRNA sense strand
agaagauguucgagacuuu

SEQ ID NO: 198120 - RNA, 19 nt, Homo sapiens
  misc_RNA (1)...(19): siRNA sense strand
gagcaagagcacaacaauu

SEQ ID NO: 198121 - RNA, 19 nt, Homo sapiens
  misc_RNA (1)...(19): siRNA sense strand
ucaagcaaguggcaaguuc

SEQ ID NO: 198122 - RNA, 19 nt, Homo sapiens
  misc_RNA (1)...(19): siRNA sense strand
ccacgagacucaaacaacu

SEQ ID NO: 198123 - RNA, 19 nt, Homo sapiens
  misc_RNA (1)...(19): siRNA sense strand
cagcacaaccucaagcaaa

SEQ ID NO: 198124 - RNA, 19 nt, Homo sapiens
  misc_RNA (1)...(19): siRNA sense strand
gcaaagaguguccaaucau

SEQ ID NO: 198125 - RNA, 19 nt, Homo sapiens
  misc_RNA (1)...(19): siRNA sense strand
auggauauccugcagauua

SEQ ID NO: 198126 - RNA, 19 nt, Homo sapiens
  misc_RNA (1)...(19): siRNA sense strand
uguaacaucugcaaagagu

SEQ ID NO: 198127 - RNA, 19 nt, Homo sapiens
  misc_RNA (1)...(19): siRNA sense strand
guccggagcugcuuccaau

SEQ ID NO: 198128 - RNA, 19 nt, Homo sapiens
  misc_RNA (1)...(19): siRNA sense strand
gcaaguggcaaguucaaca

SEQ ID NO: 198129 - RNA, 19 nt, Homo sapiens
  misc_RNA (1)...(19): siRNA sense strand
gcuuccaauuugcuaauaa

SEQ ID NO: 198130 - RNA, 19 nt, Homo sapiens
  misc_RNA (1)...(19): siRNA sense strand
uggaagacaaguacagaua

SEQ ID NO: 198131 - RNA, 19 nt, Homo sapiens
  misc_RNA (1)...(19): siRNA sense strand
ggauccguguccugucuuu

SEQ ID NO: 198132 - RNA, 19 nt, Homo sapiens
  misc_RNA (1)...(19): siRNA sense strand
gucuuuagcugaccugaau

SEQ ID NO: 198133 - RNA, 19 nt, Homo sapiens
  misc_RNA (1)...(19): siRNA sense strand
gacaaguacagauaccuuu

SEQ ID NO: 198134 - RNA, 19 nt, Homo sapiens
  misc_RNA (1)...(19): siRNA sense strand
ccaagcaucaggccaaaug

SEQ ID NO: 198135 - RNA, 19 nt, Homo sapiens
  misc_RNA (1)...(19): siRNA sense strand
ggagcaagagcacaacaau

SEQ ID NO: 198136 - RNA, 19 nt, Homo sapiens
  misc_RNA (1)...(19): siRNA sense strand
guguaaagcacauuuggaa

SEQ ID NO: 198137 - RNA, 19 nt, Homo sapiens
  misc_RNA (1)...(19): siRNA sense strand
caagacaguugggugaagu

SEQ ID NO: 198138 - RNA, 19 nt, Homo sapiens
  misc_RNA (1)...(19): siRNA sense strand
gaagauguucgagacuuug

SEQ ID NO: 198139 - RNA, 19 nt, Homo sapiens
  misc_RNA (1)...(19): siRNA sense strand
gucagauucucagcuuaua

SEQ ID NO: 198140 - RNA, 19 nt, Homo sapiens
  misc_RNA (1)...(19): siRNA sense strand
uaacaucugcaaagagugu

SEQ ID NO: 198141 - RNA, 19 nt, Homo sapiens
  misc_RNA (1)...(19): siRNA sense strand
cggagcugcuuccaauuug

SEQ ID NO: 198142 - RNA, 19 nt, Homo sapiens
  misc_RNA (1)...(19): siRNA sense strand
gaagacaaguacagauacc

SEQ ID NO: 198143 - RNA, 19 nt, Homo sapiens
  misc_RNA (1)...(19): siRNA sense strand
ccauggauauccugcagau

SEQ ID NO: 198144 - RNA, 19 nt, Homo sapiens
  misc_RNA (1)...(19): siRNA sense strand
ggcaucauuucccugugua

SEQ ID NO: 198145 - RNA, 19 nt, Homo sapiens
  misc_RNA (1)...(19): siRNA sense strand
uggauauccugcagauuau

SEQ ID NO: 198146 - RNA, 19 nt, Homo sapiens
  misc_RNA (1)...(19): siRNA sense strand
ggaagacaaguacagauac

SEQ ID NO: 198147 - RNA, 19 nt, Homo sapiens
  misc_RNA (1)...(19): siRNA sense strand
ugcaaagaguguccaauca

SEQ ID NO: 198148 - RNA, 19 nt, Homo sapiens
  misc_RNA (1)...(19): siRNA sense strand
guggauaugugucugaacu

SEQ ID NO: 198149 - RNA, 19 nt, Homo sapiens
  misc_RNA (1)...(19): siRNA sense strand
acuggcugcugaauguuua

SEQ ID NO: 198150 - RNA, 19 nt, Homo sapiens
  misc_RNA (1)...(19): siRNA sense strand
acuaucccaugguggaaua

SEQ ID NO: 198151 - RNA, 19 nt, Homo sapiens
  misc_RNA (1)...(19): siRNA sense strand
ccggagcugcuuccaauuu

SEQ ID NO: 198152 - RNA, 19 nt, Homo sapiens
  misc_RNA (1)...(19): siRNA sense strand
ccaaauuccaagacaguug

SEQ ID NO: 198153 - RNA, 19 nt, Homo sapiens
  misc_RNA (1)...(19): siRNA sense strand
cagaaacugccaagcauca

SEQ ID NO: 198154 - RNA, 19 nt, Homo sapiens
  misc_RNA (1)...(19): siRNA sense strand
uaugacaucugccaaagcu

SEQ ID NO: 198155 - RNA, 19 nt, Homo sapiens
  misc_RNA (1)...(19): siRNA sense strand
aaugucagauucucagcuu

SEQ ID NO: 198156 - RNA, 19 nt, Homo sapiens
  misc_RNA (1)...(19): siRNA sense strand
ucgagacuuugccaaggua

SEQ ID NO: 198157 - RNA, 19 nt, Homo sapiens
  misc_RNA (1)...(19): siRNA sense strand
gcaaaaggccauaaaaugc

SEQ ID NO: 198158 - RNA, 19 nt, Homo sapiens
  misc_RNA (1)...(19): siRNA sense strand
cugcaugauucuauccaaa

SEQ ID NO: 198159 - RNA, 19 nt, Homo sapiens
  misc_RNA (1)...(19): siRNA sense strand
uaaagcacauuuggaagac

SEQ ID NO: 198160 - RNA, 19 nt, Homo sapiens
  misc_RNA (1)...(19): siRNA sense strand
acaggagucuaaagcacuu

SEQ ID NO: 198161 - RNA, 19 nt, Homo sapiens
  misc_RNA (1)...(19): siRNA sense strand
acagauaccuuuucaagca

SEQ ID NO: 198162 - RNA, 19 nt, Homo sapiens
  misc_RNA (1)...(19): siRNA sense strand
aagcacauuuggaagacaa

SEQ ID NO: 198163 - RNA, 19 nt, Homo sapiens
  misc_RNA (1)...(19): siRNA sense strand
gcuaauaauaagccagaga

SEQ ID NO: 198164 - RNA, 19 nt, Homo sapiens
  misc_RNA (1)...(19): siRNA sense strand
caagagcacaacaauuugg

SEQ ID NO: 198165 - RNA, 19 nt, Homo sapiens
  misc_RNA (1)...(19): siRNA sense strand
ccugucagcugcaugugau

SEQ ID NO: 198166 - RNA, 19 nt, Homo sapiens
  misc_RNA (1)...(19): siRNA sense strand
gcugcugaauguuuaugau

SEQ ID NO: 198167 - RNA, 19 nt, Homo sapiens
  misc_RNA (1)...(19): siRNA sense strand
acagagcucuaccagucuu

SEQ ID NO: 198168 - RNA, 19 nt, Homo sapiens
  misc_RNA (1)...(19): siRNA sense strand
acaguugggugaaguugca

SEQ ID NO: 198169 - RNA, 19 nt, Homo sapiens
  misc_RNA (1)...(19): siRNA sense strand
guuugaccacuauuuauga

SEQ ID NO: 198170 - RNA, 19 nt, Homo sapiens
  misc_RNA (1)...(19): siRNA sense strand
gcuuauaggacugccauga

SEQ ID NO: 198171 - RNA, 19 nt, Homo sapiens
  misc_RNA (1)...(19): siRNA sense strand
caucaggccaaauguaaca

SEQ ID NO: 198172 - RNA, 19 nt, Homo sapiens
  misc_RNA (1)...(19): siRNA sense strand
gauucuauccaaauuccaa

SEQ ID NO: 198173 - RNA, 19 nt, Homo sapiens
  misc_RNA (1)...(19): siRNA sense strand
ggcaaguucaacaggauuu

SEQ ID NO: 198174 - RNA, 19 nt, Homo sapiens
  misc_RNA (1)...(19): siRNA sense strand
gaacuggcugcugaauguu

SEQ ID NO: 198175 - RNA, 19 nt, Homo sapiens
  misc_RNA (1)...(19): siRNA sense strand
cugcugaauguuuaugaua

SEQ ID NO: 198176 - RNA, 19 nt, Homo sapiens
  misc_RNA (1)...(19): siRNA sense strand
aagcaucaggccaaaugua

SEQ ID NO: 198177 - RNA, 19 nt, Homo sapiens
  misc_RNA (1)...(19): siRNA sense strand
uggcaucauuucccugugu

SEQ ID NO: 198178 - RNA, 19 nt, Homo sapiens
  misc_RNA (1)...(19): siRNA sense strand
ccaugaaacuccgaagacu

SEQ ID NO: 198179 - RNA, 19 nt, Homo sapiens
  misc_RNA (1)...(19): siRNA sense strand
auaauaagccagagaucga

SEQ ID NO: 198180 - RNA, 19 nt, Homo sapiens
  misc_RNA (1)...(19): siRNA sense strand
cuaauaauaagccagagau

SEQ ID NO: 198181 - RNA, 19 nt, Homo sapiens
  misc_RNA (1)...(19): siRNA sense strand
ugggugaaguugcauccuu

SEQ ID NO: 198182 - RNA, 19 nt, Homo sapiens
  misc_RNA (1)...(19): siRNA sense strand
caucauuucccuguguaaa

SEQ ID NO: 198183 - RNA, 19 nt, Homo sapiens
  misc_RNA (1)...(19): siRNA sense strand
gcguggauaugugucugaa

SEQ ID NO: 198184 - RNA, 19 nt, Homo sapiens
  misc_RNA (1)...(19): siRNA sense strand
gcacuaucccaugguggaa

SEQ ID NO: 198185 - RNA, 19 nt, Homo sapiens
  misc_RNA (1)...(19): siRNA sense strand
gagccugucagcugcaugu

SEQ ID NO: 198186 - RNA, 19 nt, Homo sapiens
  misc_RNA (1)...(19): siRNA sense strand
guacagauaccuuuucaag

SEQ ID NO: 198187 - RNA, 19 nt, Homo sapiens
  misc_RNA (1)...(19): siRNA sense strand
gucccucucugcguggaua

SEQ ID NO: 198188 - RNA, 19 nt, Homo sapiens
  misc_RNA (1)...(19): siRNA sense strand
ggagcugcuuccaauuugc

SEQ ID NO: 198189 - RNA, 19 nt, Homo sapiens
  misc_RNA (1)...(19): siRNA sense strand
uuagcugaccugaauaaug

SEQ ID NO: 198190 - RNA, 19 nt, Homo sapiens
  misc_RNA (1)...(19): siRNA sense strand
guggcaaguucaacaggau

SEQ ID NO: 198191 - RNA, 19 nt, Homo sapiens
  misc_RNA (1)...(19): siRNA sense strand
acaacaauuuggucaacgu

SEQ ID NO: 198192 - RNA, 19 nt, Homo sapiens
  misc_RNA (1)...(19): siRNA sense strand
gacuacaucaggagaagau

SEQ ID NO: 198193 - RNA, 19 nt, Homo sapiens
  misc_RNA (1)...(19): siRNA sense strand
uaauaagccagagaucgaa

SEQ ID NO: 198194 - RNA, 19 nt, Homo sapiens
  misc_RNA (1)...(19): siRNA sense strand
ugucagauucucagcuuau

SEQ ID NO: 198195 - RNA, 19 nt, Homo sapiens
  misc_RNA (1)...(19): siRNA sense strand
ggauauccugcagauuauu

SEQ ID NO: 198196 - RNA, 19 nt, Homo sapiens
  misc_RNA (1)...(19): siRNA sense strand
agcaucaggccaaauguaa

SEQ ID NO: 198197 - RNA, 19 nt, Homo sapiens
  misc_RNA (1)...(19): siRNA sense strand
gcccuuugcuuggaucucu

SEQ ID NO: 198198 - RNA, 19 nt, Homo sapiens
  misc_RNA (1)...(19): siRNA sense strand
gcugaauguuuaugauacg

SEQ ID NO: 198199 - RNA, 19 nt, Homo sapiens
  misc_RNA (1)...(19): siRNA sense strand
agacuuugccaagguacua

SEQ ID NO: 198200 - RNA, 19 nt, Homo sapiens
  misc_RNA (1)...(19): siRNA sense strand
caagcaaguggcaaguuca

SEQ ID NO: 198201 - RNA, 19 nt, Homo sapiens
  misc_RNA (1)...(19): siRNA sense strand
agacaaguacagauaccuu

SEQ ID NO: 198202 - RNA, 19 nt, Homo sapiens
  misc_RNA (1)...(19): siRNA sense strand
gcaucauuucccuguguaa

SEQ ID NO: 198203 - RNA, 19 nt, Homo sapiens
  misc_RNA (1)...(19): siRNA sense strand
cugcaaagaguguccaauc

SEQ ID NO: 198204 - RNA, 19 nt, Homo sapiens
  misc_RNA (1)...(19): siRNA sense strand
cuuauaggacugccaugaa

SEQ ID NO: 198205 - RNA, 19 nt, Homo sapiens
  misc_RNA (1)...(19): siRNA sense strand
caaagaguguccaaucauu

SEQ ID NO: 198206 - RNA, 19 nt, Homo sapiens
  misc_RNA (1)...(19): siRNA sense strand
uagcugaccugaauaaugu

SEQ ID NO: 198207 - RNA, 19 nt, Homo sapiens
  misc_RNA (1)...(19): siRNA sense strand
gcaugauucuauccaaauu

SEQ ID NO: 198208 - RNA, 19 nt, Homo sapiens
  misc_RNA (1)...(19): siRNA sense strand
ugaacuggcugcugaaugu

SEQ ID NO: 198209 - RNA, 19 nt, Homo sapiens
  misc_RNA (1)...(19): siRNA sense strand
gauauccugcagauuauua

SEQ ID NO: 198210 - RNA, 19 nt, Homo sapiens
  misc_RNA (1)...(19): siRNA sense strand
gagaagauguucgagacuu

SEQ ID NO: 198211 - RNA, 19 nt, Homo sapiens
  misc_RNA (1)...(19): siRNA sense strand
gcacuuuaauuaugacauc

SEQ ID NO: 198212 - RNA, 19 nt, Homo sapiens
  misc_RNA (1)...(19): siRNA sense strand
guaaagcacauuuggaaga

SEQ ID NO: 198213 - RNA, 19 nt, Homo sapiens
  misc_RNA (1)...(19): siRNA sense strand
gaauauugcacuccgacua

SEQ ID NO: 198214 - RNA, 19 nt, Homo sapiens
  misc_RNA (1)...(19): siRNA sense strand
uuauaggacugccaugaaa

SEQ ID NO: 198215 - RNA, 19 nt, Homo sapiens
  misc_RNA (1)...(19): siRNA sense strand
gggugaaguugcauccuuu

SEQ ID NO: 198216 - RNA, 19 nt, Homo sapiens
  misc_RNA (1)...(19): siRNA sense strand
gcaagagcacaacaauuug

SEQ ID NO: 198217 - RNA, 19 nt, Homo sapiens
  misc_RNA (1)...(19): siRNA sense strand
gcacaacaauuuggucaac

SEQ ID NO: 198218 - RNA, 19 nt, Homo sapiens
  misc_RNA (1)...(19): siRNA sense strand
agcaagagcacaacaauuu

SEQ ID NO: 198219 - RNA, 19 nt, Homo sapiens
  misc_RNA (1)...(19): siRNA sense strand
agaagauguucgagacuuu

SEQ ID NO: 198220 - RNA, 19 nt, Homo sapiens
  misc_RNA (1)...(19): siRNA sense strand
gagcaagagcacaacaauu

SEQ ID NO: 198221 - RNA, 19 nt, Homo sapiens
  misc_RNA (1)...(19): siRNA sense strand
ucaagcaaguggcaaguuc

SEQ ID NO: 198222 - RNA, 19 nt, Homo sapiens
  misc_RNA (1)...(19): siRNA sense strand
ccacgagacucaaacaacu

SEQ ID NO: 198223 - RNA, 19 nt, Homo sapiens
  misc_RNA (1)...(19): siRNA sense strand
cagcacaaccucaagcaaa

SEQ ID NO: 198224 - RNA, 19 nt, Homo sapiens
  misc_RNA (1)...(19): siRNA sense strand
gcaaagaguguccaaucau

SEQ ID NO: 198225 - RNA, 19 nt, Homo sapiens
  misc_RNA (1)...(19): siRNA sense strand
auggauauccugcagauua

SEQ ID NO: 198226 - RNA, 19 nt, Homo sapiens
  misc_RNA (1)...(19): siRNA sense strand
uguaacaucugcaaagagu

SEQ ID NO: 198227 - RNA, 19 nt, Homo sapiens
  misc_RNA (1)...(19): siRNA sense strand
guccggagcugcuuccaau

SEQ ID NO: 198228 - RNA, 19 nt, Homo sapiens
  misc_RNA (1)...(19): siRNA sense strand
gcaaguggcaaguucaaca

SEQ ID NO: 198229 - RNA, 19 nt, Homo sapiens
  misc_RNA (1)...(19): siRNA sense strand
gcuuccaauuugcuaauaa

SEQ ID NO: 198230 - RNA, 19 nt, Homo sapiens
  misc_RNA (1)...(19): siRNA sense strand
uggaagacaaguacagaua

SEQ ID NO: 198231 - RNA, 19 nt, Homo sapiens
  misc_RNA (1)...(19): siRNA sense strand
ggauccguguccugucuuu

SEQ ID NO: 198232 - RNA, 19 nt, Homo sapiens
  misc_RNA (1)...(19): siRNA sense strand
gucuuuagcugaccugaau

SEQ ID NO: 198233 - RNA, 19 nt, Homo sapiens
  misc_RNA (1)...(19): siRNA sense strand
gacaaguacagauaccuuu

SEQ ID NO: 198234 - RNA, 19 nt, Homo sapiens
  misc_RNA (1)...(19): siRNA sense strand
ccaagcaucaggccaaaug

SEQ ID NO: 198235 - RNA, 19 nt, Homo sapiens
  misc_RNA (1)...(19): siRNA sense strand
ggagcaagagcacaacaau

SEQ ID NO: 198236 - RNA, 19 nt, Homo sapiens
  misc_RNA (1)...(19): siRNA sense strand
guguaaagcacauuuggaa

SEQ ID NO: 198237 - RNA, 19 nt, Homo sapiens
  misc_RNA (1)...(19): siRNA sense strand
caagacaguugggugaagu

SEQ ID NO: 198238 - RNA, 19 nt, Homo sapiens
  misc_RNA (1)...(19): siRNA sense strand
gaagauguucgagacuuug

SEQ ID NO: 198239 - RNA, 19 nt, Homo sapiens
  misc_RNA (1)...(19): siRNA sense strand
gucagauucucagcuuaua

SEQ ID NO: 198240 - RNA, 19 nt, Homo sapiens
  misc_RNA (1)...(19): siRNA sense strand
uaacaucugcaaagagugu

SEQ ID NO: 198241 - RNA, 19 nt, Homo sapiens
  misc_RNA (1)...(19): siRNA sense strand
cggagcugcuuccaauuug

SEQ ID NO: 198242 - RNA, 19 nt, Homo sapiens
  misc_RNA (1)...(19): siRNA sense strand
gaagacaaguacagauacc

SEQ ID NO: 198243 - RNA, 19 nt, Homo sapiens
  misc_RNA (1)...(19): siRNA sense strand
ccauggauauccugcagau

SEQ ID NO: 198244 - RNA, 19 nt, Homo sapiens
  misc_RNA (1)...(19): siRNA sense strand
ggcaucauuucccugugua

SEQ ID NO: 198245 - RNA, 19 nt, Homo sapiens
  misc_RNA (1)...(19): siRNA sense strand
uggauauccugcagauuau

SEQ ID NO: 198246 - RNA, 19 nt, Homo sapiens
  misc_RNA (1)...(19): siRNA sense strand
ggaagacaaguacagauac

SEQ ID NO: 198247 - RNA, 19 nt, Homo sapiens
  misc_RNA (1)...(19): siRNA sense strand
ugcaaagaguguccaauca

SEQ ID NO: 198248 - RNA, 19 nt, Homo sapiens
  misc_RNA (1)...(19): siRNA sense strand
guggauaugugucugaacu

SEQ ID NO: 198249 - RNA, 19 nt, Homo sapiens
  misc_RNA (1)...(19): siRNA sense strand
acuggcugcugaauguuua

SEQ ID NO: 198250 - RNA, 19 nt, Homo sapiens
  misc_RNA (1)...(19): siRNA sense strand
acuaucccaugguggaaua

SEQ ID NO: 198251 - RNA, 19 nt, Homo sapiens
  misc_RNA (1)...(19): siRNA sense strand
ccggagcugcuuccaauuu

SEQ ID NO: 198252 - RNA, 19 nt, Homo sapiens
  misc_RNA (1)...(19): siRNA sense strand
ccaaauuccaagacaguug

SEQ ID NO: 198253 - RNA, 19 nt, Homo sapiens
  misc_RNA (1)...(19): siRNA sense strand
cagaaacugccaagcauca

SEQ ID NO: 198254 - RNA, 19 nt, Homo sapiens
  misc_RNA (1)...(19): siRNA sense strand
uaugacaucugccaaagcu

SEQ ID NO: 198255 - RNA, 19 nt, Homo sapiens
  misc_RNA (1)...(19): siRNA sense strand
aaugucagauucucagcuu

SEQ ID NO: 198256 - RNA, 19 nt, Homo sapiens
  misc_RNA (1)...(19): siRNA sense strand
ucgagacuuugccaaggua

SEQ ID NO: 198257 - RNA, 19 nt, Homo sapiens
  misc_RNA (1)...(19): siRNA sense strand
gcaaaaggccauaaaaugc

SEQ ID NO: 198258 - RNA, 19 nt, Homo sapiens
  misc_RNA (1)...(19): siRNA sense strand
cugcaugauucuauccaaa

SEQ ID NO: 198259 - RNA, 19 nt, Homo sapiens
  misc_RNA (1)...(19): siRNA sense strand
uaaagcacauuuggaagac

SEQ ID NO: 198260 - RNA, 19 nt, Homo sapiens
  misc_RNA (1)...(19): siRNA sense strand
acaggagucuaaagcacuu

SEQ ID NO: 198261 - RNA, 19 nt, Homo sapiens
  misc_RNA (1)...(19): siRNA sense strand
acagauaccuuuucaagca

SEQ ID NO: 198262 - RNA, 19 nt, Homo sapiens
  misc_RNA (1)...(19): siRNA sense strand
aagcacauuuggaagacaa

SEQ ID NO: 198263 - RNA, 19 nt, Homo sapiens
  misc_RNA (1)...(19): siRNA sense strand
gcuaauaauaagccagaga

SEQ ID NO: 198264 - RNA, 19 nt, Homo sapiens
  misc_RNA (1)...(19): siRNA sense strand
caagagcacaacaauuugg

SEQ ID NO: 198265 - RNA, 19 nt, Homo sapiens
  misc_RNA (1)...(19): siRNA sense strand
ccugucagcugcaugugau

SEQ ID NO: 198266 - RNA, 19 nt, Homo sapiens
  misc_RNA (1)...(19): siRNA sense strand
gcugcugaauguuuaugau

SEQ ID NO: 198267 - RNA, 19 nt, Homo sapiens
  misc_RNA (1)...(19): siRNA sense strand
acagagcucuaccagucuu

SEQ ID NO: 198268 - RNA, 19 nt, Homo sapiens
  misc_RNA (1)...(19): siRNA sense strand
acaguugggugaaguugca

SEQ ID NO: 198269 - RNA, 19 nt, Homo sapiens
  misc_RNA (1)...(19): siRNA sense strand
guuugaccacuauuuauga

SEQ ID NO: 198270 - RNA, 19 nt, Homo sapiens
  misc_RNA (1)...(19): siRNA sense strand
gcuuauaggacugccauga

SEQ ID NO: 198271 - RNA, 19 nt, Homo sapiens
  misc_RNA (1)...(19): siRNA sense strand
caucaggccaaauguaaca

SEQ ID NO: 198272 - RNA, 19 nt, Homo sapiens
  misc_RNA (1)...(19): siRNA sense strand
gauucuauccaaauuccaa

SEQ ID NO: 198273 - RNA, 19 nt, Homo sapiens
  misc_RNA (1)...(19): siRNA sense strand
ggcaaguucaacaggauuu

SEQ ID NO: 198274 - RNA, 19 nt, Homo sapiens
  misc_RNA (1)...(19): siRNA sense strand
gaacuggcugcugaauguu

SEQ ID NO: 198275 - RNA, 19 nt, Homo sapiens
  misc_RNA (1)...(19): siRNA sense strand
cugcugaauguuuaugaua

SEQ ID NO: 198276 - RNA, 19 nt, Homo sapiens
  misc_RNA (1)...(19): siRNA sense strand
aagcaucaggccaaaugua

SEQ ID NO: 198277 - RNA, 19 nt, Homo sapiens
  misc_RNA (1)...(19): siRNA sense strand
uggcaucauuucccugugu

SEQ ID NO: 198278 - RNA, 19 nt, Homo sapiens
  misc_RNA (1)...(19): siRNA sense strand
ccaugaaacuccgaagacu

SEQ ID NO: 198279 - RNA, 19 nt, Homo sapiens
  misc_RNA (1)...(19): siRNA sense strand
auaauaagccagagaucga

SEQ ID NO: 198280 - RNA, 19 nt, Homo sapiens
  misc_RNA (1)...(19): siRNA sense strand
cuaauaauaagccagagau

SEQ ID NO: 198281 - RNA, 19 nt, Homo sapiens
  misc_RNA (1)...(19): siRNA sense strand
ugggugaaguugcauccuu

SEQ ID NO: 198282 - RNA, 19 nt, Homo sapiens
  misc_RNA (1)...(19): siRNA sense strand
caucauuucccuguguaaa

SEQ ID NO: 198283 - RNA, 19 nt, Homo sapiens
  misc_RNA (1)...(19): siRNA sense strand
gcguggauaugugucugaa

SEQ ID NO: 198284 - RNA, 19 nt, Homo sapiens
  misc_RNA (1)...(19): siRNA sense strand
gcacuaucccaugguggaa

SEQ ID NO: 198285 - RNA, 19 nt, Homo sapiens
  misc_RNA (1)...(19): siRNA sense strand
gagccugucagcugcaugu

SEQ ID NO: 198286 - RNA, 19 nt, Homo sapiens
  misc_RNA (1)...(19): siRNA sense strand
guacagauaccuuuucaag

SEQ ID NO: 198287 - RNA, 19 nt, Homo sapiens
  misc_RNA (1)...(19): siRNA sense strand
gucccucucugcguggaua

SEQ ID NO: 198288 - RNA, 19 nt, Homo sapiens
  misc_RNA (1)...(19): siRNA sense strand
ggagcugcuuccaauuugc

SEQ ID NO: 198289 - RNA, 19 nt, Homo sapiens
  misc_RNA (1)...(19): siRNA sense strand
uuagcugaccugaauaaug

SEQ ID NO: 198290 - RNA, 19 nt, Homo sapiens
  misc_RNA (1)...(19): siRNA sense strand
guggcaaguucaacaggau

SEQ ID NO: 198291 - RNA, 19 nt, Homo sapiens
  misc_RNA (1)...(19): siRNA sense strand
acaacaauuuggucaacgu

SEQ ID NO: 198292 - RNA, 19 nt, Homo sapiens
  misc_RNA (1)...(19): siRNA sense strand
gacuacaucaggagaagau

SEQ ID NO: 198293 - RNA, 19 nt, Homo sapiens
  misc_RNA (1)...(19): siRNA sense strand
uaauaagccagagaucgaa

SEQ ID NO: 198294 - RNA, 19 nt, Homo sapiens
  misc_RNA (1)...(19): siRNA sense strand
ugucagauucucagcuuau

SEQ ID NO: 198295 - RNA, 19 nt, Homo sapiens
  misc_RNA (1)...(19): siRNA sense strand
ggauauccugcagauuauu

SEQ ID NO: 198296 - RNA, 19 nt, Homo sapiens
  misc_RNA (1)...(19): siRNA sense strand
agcaucaggccaaauguaa

SEQ ID NO: 198297 - RNA, 19 nt, Homo sapiens
  misc_RNA (1)...(19): siRNA sense strand
gcccuuugcuuggaucucu

SEQ ID NO: 198298 - RNA, 19 nt, Homo sapiens
  misc_RNA (1)...(19): siRNA sense strand
gcugaauguuuaugauacg

SEQ ID NO: 198299 - RNA, 19 nt, Homo sapiens
  misc_RNA (1)...(19): siRNA sense strand
agacuuugccaagguacua

SEQ ID NO: 198300 - RNA, 19 nt, Homo sapiens
  misc_RNA (1)...(19): siRNA sense strand
caagcaaguggcaaguuca

SEQ ID NO: 198301 - RNA, 19 nt, Homo sapiens
  misc_RNA (1)...(19): siRNA sense strand
agacaaguacagauaccuu

SEQ ID NO: 198302 - RNA, 19 nt, Homo sapiens
  misc_RNA (1)...(19): siRNA sense strand
gcaucauuucccuguguaa

SEQ ID NO: 198303 - RNA, 19 nt, Homo sapiens
  misc_RNA (1)...(19): siRNA sense strand
cugcaaagaguguccaauc

SEQ ID NO: 198304 - RNA, 19 nt, Homo sapiens
  misc_RNA (1)...(19): siRNA sense strand
cuuauaggacugccaugaa

SEQ ID NO: 198305 - RNA, 19 nt, Homo sapiens
  misc_RNA (1)...(19): siRNA sense strand
caaagaguguccaaucauu

SEQ ID NO: 198306 - RNA, 19 nt, Homo sapiens
  misc_RNA (1)...(19): siRNA sense strand
uagcugaccugaauaaugu

SEQ ID NO: 198307 - RNA, 19 nt, Homo sapiens
  misc_RNA (1)...(19): siRNA sense strand
gcaugauucuauccaaauu

SEQ ID NO: 198308 - RNA, 19 nt, Homo sapiens
  misc_RNA (1)...(19): siRNA sense strand
ugaacuggcugcugaaugu

SEQ ID NO: 198309 - RNA, 19 nt, Homo sapiens
  misc_RNA (1)...(19): siRNA sense strand
gauauccugcagauuauua

SEQ ID NO: 198310 - RNA, 19 nt, Homo sapiens
  misc_RNA (1)...(19): siRNA sense strand
gagaagauguucgagacuu

SEQ ID NO: 198311 - RNA, 19 nt, Homo sapiens
  misc_RNA (1)...(19): siRNA sense strand
gcacuuuaauuaugacauc

SEQ ID NO: 198312 - RNA, 19 nt, Homo sapiens
  misc_RNA (1)...(19): siRNA sense strand
guaaagcacauuuggaaga

SEQ ID NO: 198313 - RNA, 19 nt, Homo sapiens
  misc_RNA (1)...(19): siRNA sense strand
gaauauugcacuccgacua

SEQ ID NO: 198314 - RNA, 19 nt, Homo sapiens
  misc_RNA (1)...(19): siRNA sense strand
uuauaggacugccaugaaa

SEQ ID NO: 198315 - RNA, 19 nt, Homo sapiens
  misc_RNA (1)...(19): siRNA sense strand
gggugaaguugcauccuuu

SEQ ID NO: 198316 - RNA, 19 nt, Homo sapiens
  misc_RNA (1)...(19): siRNA sense strand
gcaagagcacaacaauuug

SEQ ID NO: 198317 - RNA, 19 nt, Homo sapiens
  misc_RNA (1)...(19): siRNA sense strand
gcacaacaauuuggucaac

SEQ ID NO: 198318 - RNA, 19 nt, Homo sapiens
  misc_RNA (1)...(19): siRNA sense strand
agcaagagcacaacaauuu

SEQ ID NO: 198319 - RNA, 19 nt, Homo sapiens
  misc_RNA (1)...(19): siRNA sense strand
agaagauguucgagacuuu

SEQ ID NO: 198320 - RNA, 19 nt, Homo sapiens
  misc_RNA (1)...(19): siRNA sense strand
gagcaagagcacaacaauu

SEQ ID NO: 198321 - RNA, 19 nt, Homo sapiens
  misc_RNA (1)...(19): siRNA sense strand
ucaagcaaguggcaaguuc

SEQ ID NO: 198322 - RNA, 19 nt, Homo sapiens
  misc_RNA (1)...(19): siRNA sense strand
ccacgagacucaaacaacu

SEQ ID NO: 198323 - RNA, 19 nt, Homo sapiens
  misc_RNA (1)...(19): siRNA sense strand
cagcacaaccucaagcaaa

SEQ ID NO: 198324 - RNA, 19 nt, Homo sapiens
  misc_RNA (1)...(19): siRNA sense strand
gcaaagaguguccaaucau

SEQ ID NO: 198325 - RNA, 19 nt, Homo sapiens
  misc_RNA (1)...(19): siRNA sense strand
auggauauccugcagauua

SEQ ID NO: 198326 - RNA, 19 nt, Homo sapiens
  misc_RNA (1)...(19): siRNA sense strand
uguaacaucugcaaagagu

SEQ ID NO: 198327 - RNA, 19 nt, Homo sapiens
  misc_RNA (1)...(19): siRNA sense strand
guccggagcugcuuccaau

SEQ ID NO: 198328 - RNA, 19 nt, Homo sapiens
  misc_RNA (1)...(19): siRNA sense strand
gcaaguggcaaguucaaca

SEQ ID NO: 198329 - RNA, 19 nt, Homo sapiens
  misc_RNA (1)...(19): siRNA sense strand
gcuuccaauuugcuaauaa

SEQ ID NO: 198330 - RNA, 19 nt, Homo sapiens
  misc_RNA (1)...(19): siRNA sense strand
uggaagacaaguacagaua

SEQ ID NO: 198331 - RNA, 19 nt, Homo sapiens
  misc_RNA (1)...(19): siRNA sense strand
ggauccguguccugucuuu

SEQ ID NO: 198332 - RNA, 19 nt, Homo sapiens
  misc_RNA (1)...(19): siRNA sense strand
gucuuuagcugaccugaau

SEQ ID NO: 198333 - RNA, 19 nt, Homo sapiens
  misc_RNA (1)...(19): siRNA sense strand
gacaaguacagauaccuuu

SEQ ID NO: 198334 - RNA, 19 nt, Homo sapiens
  misc_RNA (1)...(19): siRNA sense strand
ccaagcaucaggccaaaug

SEQ ID NO: 198335 - RNA, 19 nt, Homo sapiens
  misc_RNA (1)...(19): siRNA sense strand
ggagcaagagcacaacaau

SEQ ID NO: 198336 - RNA, 19 nt, Homo sapiens
  misc_RNA (1)...(19): siRNA sense strand
guguaaagcacauuuggaa

SEQ ID NO: 198337 - RNA, 19 nt, Homo sapiens
  misc_RNA (1)...(19): siRNA sense strand
caagacaguugggugaagu

SEQ ID NO: 198338 - RNA, 19 nt, Homo sapiens
  misc_RNA (1)...(19): siRNA sense strand
gaagauguucgagacuuug

SEQ ID NO: 198339 - RNA, 19 nt, Homo sapiens
  misc_RNA (1)...(19): siRNA sense strand
gucagauucucagcuuaua

SEQ ID NO: 198340 - RNA, 19 nt, Homo sapiens
  misc_RNA (1)...(19): siRNA sense strand
uaacaucugcaaagagugu

SEQ ID NO: 198341 - RNA, 19 nt, Homo sapiens
  misc_RNA (1)...(19): siRNA sense strand
cggagcugcuuccaauuug

SEQ ID NO: 198342 - RNA, 19 nt, Homo sapiens
  misc_RNA (1)...(19): siRNA sense strand
gaagacaaguacagauacc

SEQ ID NO: 198343 - RNA, 19 nt, Homo sapiens
  misc_RNA (1)...(19): siRNA sense strand
ccauggauauccugcagau

SEQ ID NO: 198344 - RNA, 19 nt, Homo sapiens
  misc_RNA (1)...(19): siRNA sense strand
ggcaucauuucccugugua

SEQ ID NO: 198345 - RNA, 19 nt, Homo sapiens
  misc_RNA (1)...(19): siRNA sense strand
uggauauccugcagauuau

SEQ ID NO: 198346 - RNA, 19 nt, Homo sapiens
  misc_RNA (1)...(19): siRNA sense strand
ggaagacaaguacagauac

SEQ ID NO: 198347 - RNA, 19 nt, Homo sapiens
  misc_RNA (1)...(19): siRNA sense strand
ugcaaagaguguccaauca

SEQ ID NO: 198348 - RNA, 19 nt, Homo sapiens
  misc_RNA (1)...(19): siRNA sense strand
guggauaugugucugaacu

SEQ ID NO: 198349 - RNA, 19 nt, Homo sapiens
  misc_RNA (1)...(19): siRNA sense strand
acuggcugcugaauguuua

SEQ ID NO: 198350 - RNA, 19 nt, Homo sapiens
  misc_RNA (1)...(19): siRNA sense strand
acuaucccaugguggaaua

SEQ ID NO: 198351 - RNA, 19 nt, Homo sapiens
  misc_RNA (1)...(19): siRNA sense strand
ccggagcugcuuccaauuu

SEQ ID NO: 198352 - RNA, 19 nt, Homo sapiens
  misc_RNA (1)...(19): siRNA sense strand
ccaaauuccaagacaguug

SEQ ID NO: 198353 - RNA, 19 nt, Homo sapiens
  misc_RNA (1)...(19): siRNA sense strand
cagaaacugccaagcauca

SEQ ID NO: 198354 - RNA, 19 nt, Homo sapiens
  misc_RNA (1)...(19): siRNA sense strand
uaugacaucugccaaagcu

SEQ ID NO: 198355 - RNA, 19 nt, Homo sapiens
  misc_RNA (1)...(19): siRNA sense strand
aaugucagauucucagcuu

SEQ ID NO: 198356 - RNA, 19 nt, Homo sapiens
  misc_RNA (1)...(19): siRNA sense strand
ucgagacuuugccaaggua

SEQ ID NO: 198357 - RNA, 19 nt, Homo sapiens
  misc_RNA (1)...(19): siRNA sense strand
gcaaaaggccauaaaaugc

SEQ ID NO: 198358 - RNA, 19 nt, Homo sapiens
  misc_RNA (1)...(19): siRNA sense strand
cugcaugauucuauccaaa

SEQ ID NO: 198359 - RNA, 19 nt, Homo sapiens
  misc_RNA (1)...(19): siRNA sense strand
uaaagcacauuuggaagac

SEQ ID NO: 198360 - RNA, 19 nt, Homo sapiens
  misc_RNA (1)...(19): siRNA sense strand
acaggagucuaaagcacuu

SEQ ID NO: 198361 - RNA, 19 nt, Homo sapiens
  misc_RNA (1)...(19): siRNA sense strand
acagauaccuuuucaagca

SEQ ID NO: 198362 - RNA, 19 nt, Homo sapiens
  misc_RNA (1)...(19): siRNA sense strand
aagcacauuuggaagacaa

SEQ ID NO: 198363 - RNA, 19 nt, Homo sapiens
  misc_RNA (1)...(19): siRNA sense strand
gcuaauaauaagccagaga

SEQ ID NO: 198364 - RNA, 19 nt, Homo sapiens
  misc_RNA (1)...(19): siRNA sense strand
caagagcacaacaauuugg

SEQ ID NO: 198365 - RNA, 19 nt, Homo sapiens
  misc_RNA (1)...(19): siRNA sense strand
ccugucagcugcaugugau

SEQ ID NO: 198366 - RNA, 19 nt, Homo sapiens
  misc_RNA (1)...(19): siRNA sense strand
gcugcugaauguuuaugau

SEQ ID NO: 198367 - RNA, 19 nt, Homo sapiens
  misc_RNA (1)...(19): siRNA sense strand
acagagcucuaccagucuu

SEQ ID NO: 198368 - RNA, 19 nt, Homo sapiens
  misc_RNA (1)...(19): siRNA sense strand
acaguugggugaaguugca

SEQ ID NO: 198369 - RNA, 19 nt, Homo sapiens
  misc_RNA (1)...(19): siRNA sense strand
guuugaccacuauuuauga

SEQ ID NO: 198370 - RNA, 19 nt, Homo sapiens
  misc_RNA (1)...(19): siRNA sense strand
gcuuauaggacugccauga

SEQ ID NO: 198371 - RNA, 19 nt, Homo sapiens
  misc_RNA (1)...(19): siRNA sense strand
caucaggccaaauguaaca

SEQ ID NO: 198372 - RNA, 19 nt, Homo sapiens
  misc_RNA (1)...(19): siRNA sense strand
gauucuauccaaauuccaa

SEQ ID NO: 198373 - RNA, 19 nt, Homo sapiens
  misc_RNA (1)...(19): siRNA sense strand
ggcaaguucaacaggauuu

SEQ ID NO: 198374 - RNA, 19 nt, Homo sapiens
  misc_RNA (1)...(19): siRNA sense strand
gaacuggcugcugaauguu

SEQ ID NO: 198375 - RNA, 19 nt, Homo sapiens
  misc_RNA (1)...(19): siRNA sense strand
cugcugaauguuuaugaua

SEQ ID NO: 198376 - RNA, 19 nt, Homo sapiens
  misc_RNA (1)...(19): siRNA sense strand
aagcaucaggccaaaugua

SEQ ID NO: 198377 - RNA, 19 nt, Homo sapiens
  misc_RNA (1)...(19): siRNA sense strand
uggcaucauuucccugugu

SEQ ID NO: 198378 - RNA, 19 nt, Homo sapiens
  misc_RNA (1)...(19): siRNA sense strand
ccaugaaacuccgaagacu

SEQ ID NO: 198379 - RNA, 19 nt, Homo sapiens
  misc_RNA (1)...(19): siRNA sense strand
auaauaagccagagaucga

SEQ ID NO: 198380 - RNA, 19 nt, Homo sapiens
  misc_RNA (1)...(19): siRNA sense strand
cuaauaauaagccagagau

SEQ ID NO: 198381 - RNA, 19 nt, Homo sapiens
  misc_RNA (1)...(19): siRNA sense strand
ugggugaaguugcauccuu

SEQ ID NO: 198382 - RNA, 19 nt, Homo sapiens
  misc_RNA (1)...(19): siRNA sense strand
caucauuucccuguguaaa

SEQ ID NO: 198383 - RNA, 19 nt, Homo sapiens
  misc_RNA (1)...(19): siRNA sense strand
gcguggauaugugucugaa

SEQ ID NO: 198384 - RNA, 19 nt, Homo sapiens
  misc_RNA (1)...(19): siRNA sense strand
gcacuaucccaugguggaa

SEQ ID NO: 198385 - RNA, 19 nt, Homo sapiens
  misc_RNA (1)...(19): siRNA sense strand
gagccugucagcugcaugu

SEQ ID NO: 198386 - RNA, 19 nt, Homo sapiens
  misc_RNA (1)...(19): siRNA sense strand
guacagauaccuuuucaag

SEQ ID NO: 198387 - RNA, 19 nt, Homo sapiens
  misc_RNA (1)...(19): siRNA sense strand
gucccucucugcguggaua

SEQ ID NO: 198388 - RNA, 19 nt, Homo sapiens
  misc_RNA (1)...(19): siRNA sense strand
ggagcugcuuccaauuugc

SEQ ID NO: 198389 - RNA, 19 nt, Homo sapiens
  misc_RNA (1)...(19): siRNA sense strand
uuagcugaccugaauaaug

SEQ ID NO: 198390 - RNA, 19 nt, Homo sapiens
  misc_RNA (1)...(19): siRNA sense strand
guggcaaguucaacaggau

SEQ ID NO: 198391 - RNA, 19 nt, Homo sapiens
  misc_RNA (1)...(19): siRNA sense strand
acaacaauuuggucaacgu

SEQ ID NO: 198392 - RNA, 19 nt, Homo sapiens
  misc_RNA (1)...(19): siRNA sense strand
gacuacaucaggagaagau

SEQ ID NO: 198393 - RNA, 19 nt, Homo sapiens
  misc_RNA (1)...(19): siRNA sense strand
uaauaagccagagaucgaa

SEQ ID NO: 198394 - RNA, 19 nt, Homo sapiens
  misc_RNA (1)...(19): siRNA sense strand
ugucagauucucagcuuau

SEQ ID NO: 198395 - RNA, 19 nt, Homo sapiens
  misc_RNA (1)...(19): siRNA sense strand
ggauauccugcagauuauu

SEQ ID NO: 198396 - RNA, 19 nt, Homo sapiens
  misc_RNA (1)...(19): siRNA sense strand
agcaucaggccaaauguaa

SEQ ID NO: 198397 - RNA, 19 nt, Homo sapiens
  misc_RNA (1)...(19): siRNA sense strand
gcccuuugcuuggaucucu

SEQ ID NO: 198398 - RNA, 19 nt, Homo sapiens
  misc_RNA (1)...(19): siRNA sense strand
gcugaauguuuaugauacg

SEQ ID NO: 198399 - RNA, 19 nt, Homo sapiens
  misc_RNA (1)...(19): siRNA sense strand
agacuuugccaagguacua

SEQ ID NO: 198400 - RNA, 19 nt, Homo sapiens
  misc_RNA (1)...(19): siRNA sense strand
caagcaaguggcaaguuca

SEQ ID NO: 198401 - RNA, 19 nt, Homo sapiens
  misc_RNA (1)...(19): siRNA sense strand
agacaaguacagauaccuu

SEQ ID NO: 198402 - RNA, 19 nt, Homo sapiens
  misc_RNA (1)...(19): siRNA sense strand
gcaucauuucccuguguaa

SEQ ID NO: 198403 - RNA, 19 nt, Homo sapiens
  misc_RNA (1)...(19): siRNA sense strand
cugcaaagaguguccaauc

SEQ ID NO: 198404 - RNA, 19 nt, Homo sapiens
  misc_RNA (1)...(19): siRNA sense strand
cuuauaggacugccaugaa

SEQ ID NO: 198405 - RNA, 19 nt, Homo sapiens
  misc_RNA (1)...(19): siRNA sense strand
caaagaguguccaaucauu

SEQ ID NO: 198406 - RNA, 19 nt, Homo sapiens
  misc_RNA (1)...(19): siRNA sense strand
uagcugaccugaauaaugu

SEQ ID NO: 198407 - RNA, 19 nt, Homo sapiens
  misc_RNA (1)...(19): siRNA sense strand
gcaugauucuauccaaauu

SEQ ID NO: 198408 - RNA, 19 nt, Homo sapiens
  misc_RNA (1)...(19): siRNA sense strand
ugaacuggcugcugaaugu

SEQ ID NO: 198409 - RNA, 19 nt, Homo sapiens
  misc_RNA (1)...(19): siRNA sense strand
gauauccugcagauuauua

SEQ ID NO: 198410 - RNA, 19 nt, Homo sapiens
  misc_RNA (1)...(19): siRNA sense strand
gagaagauguucgagacuu

SEQ ID NO: 198411 - RNA, 19 nt, Homo sapiens
  misc_RNA (1)...(19): siRNA sense strand
gcacuuuaauuaugacauc

SEQ ID NO: 198412 - RNA, 19 nt, Homo sapiens
  misc_RNA (1)...(19): siRNA sense strand
guaaagcacauuuggaaga

SEQ ID NO: 198413 - RNA, 19 nt, Homo sapiens
  misc_RNA (1)...(19): siRNA sense strand
gaauauugcacuccgacua

SEQ ID NO: 198414 - RNA, 19 nt, Homo sapiens
  misc_RNA (1)...(19): siRNA sense strand
uuauaggacugccaugaaa

SEQ ID NO: 198415 - RNA, 19 nt, Homo sapiens
  misc_RNA (1)...(19): siRNA sense strand
gggugaaguugcauccuuu

SEQ ID NO: 198416 - RNA, 19 nt, Homo sapiens
  misc_RNA (1)...(19): siRNA sense strand
gcaagagcacaacaauuug

SEQ ID NO: 198417 - RNA, 19 nt, Homo sapiens
  misc_RNA (1)...(19): siRNA sense strand
gcacaacaauuuggucaac

SEQ ID NO: 198418 - RNA, 19 nt, Homo sapiens
  misc_RNA (1)...(19): siRNA sense strand
agcaagagcacaacaauuu

SEQ ID NO: 198419 - RNA, 19 nt, Homo sapiens
  misc_RNA (1)...(19): siRNA sense strand
agaagauguucgagacuuu

SEQ ID NO: 198420 - RNA, 19 nt, Homo sapiens
  misc_RNA (1)...(19): siRNA sense strand
gagcaagagcacaacaauu

SEQ ID NO: 198421 - RNA, 19 nt, Homo sapiens
  misc_RNA (1)...(19): siRNA sense strand
ucaagcaaguggcaaguuc

SEQ ID NO: 198422 - RNA, 19 nt, Homo sapiens
  misc_RNA (1)...(19): siRNA sense strand
ccacgagacucaaacaacu

SEQ ID NO: 198423 - RNA, 19 nt, Homo sapiens
  misc_RNA (1)...(19): siRNA sense strand
cagcacaaccucaagcaaa

SEQ ID NO: 198424 - RNA, 19 nt, Homo sapiens
  misc_RNA (1)...(19): siRNA sense strand
gcaaagaguguccaaucau

SEQ ID NO: 198425 - RNA, 19 nt, Homo sapiens
  misc_RNA (1)...(19): siRNA sense strand
auggauauccugcagauua

SEQ ID NO: 198426 - RNA, 19 nt, Homo sapiens
  misc_RNA (1)...(19): siRNA sense strand
uguaacaucugcaaagagu

SEQ ID NO: 198427 - RNA, 19 nt, Homo sapiens
  misc_RNA (1)...(19): siRNA sense strand
guccggagcugcuuccaau

SEQ ID NO: 198428 - RNA, 19 nt, Homo sapiens
  misc_RNA (1)...(19): siRNA sense strand
gcaaguggcaaguucaaca

SEQ ID NO: 198429 - RNA, 19 nt, Homo sapiens
  misc_RNA (1)...(19): siRNA sense strand
gcuuccaauuugcuaauaa

SEQ ID NO: 198430 - RNA, 19 nt, Homo sapiens
  misc_RNA (1)...(19): siRNA sense strand
uggaagacaaguacagaua

SEQ ID NO: 198431 - RNA, 19 nt, Homo sapiens
  misc_RNA (1)...(19): siRNA sense strand
ggauccguguccugucuuu

SEQ ID NO: 198432 - RNA, 19 nt, Homo sapiens
  misc_RNA (1)...(19): siRNA sense strand
gucuuuagcugaccugaau

SEQ ID NO: 198433 - RNA, 19 nt, Homo sapiens
  misc_RNA (1)...(19): siRNA sense strand
gacaaguacagauaccuuu

SEQ ID NO: 198434 - RNA, 19 nt, Homo sapiens
  misc_RNA (1)...(19): siRNA sense strand
ccaagcaucaggccaaaug

SEQ ID NO: 198435 - RNA, 19 nt, Homo sapiens
  misc_RNA (1)...(19): siRNA sense strand
ggagcaagagcacaacaau

SEQ ID NO: 198436 - RNA, 19 nt, Homo sapiens
  misc_RNA (1)...(19): siRNA sense strand
guguaaagcacauuuggaa

SEQ ID NO: 198437 - RNA, 19 nt, Homo sapiens
  misc_RNA (1)...(19): siRNA sense strand
caagacaguugggugaagu

SEQ ID NO: 198438 - RNA, 19 nt, Homo sapiens
  misc_RNA (1)...(19): siRNA sense strand
gaagauguucgagacuuug

SEQ ID NO: 198439 - RNA, 19 nt, Homo sapiens
  misc_RNA (1)...(19): siRNA sense strand
gucagauucucagcuuaua

SEQ ID NO: 198440 - RNA, 19 nt, Homo sapiens
  misc_RNA (1)...(19): siRNA sense strand
uaacaucugcaaagagugu

SEQ ID NO: 198441 - RNA, 19 nt, Homo sapiens
  misc_RNA (1)...(19): siRNA sense strand
cggagcugcuuccaauuug

SEQ ID NO: 198442 - RNA, 19 nt, Homo sapiens
  misc_RNA (1)...(19): siRNA sense strand
gaagacaaguacagauacc

SEQ ID NO: 198443 - RNA, 19 nt, Homo sapiens
  misc_RNA (1)...(19): siRNA sense strand
ccauggauauccugcagau

SEQ ID NO: 198444 - RNA, 19 nt, Homo sapiens
  misc_RNA (1)...(19): siRNA sense strand
ggcaucauuucccugugua

SEQ ID NO: 198445 - RNA, 19 nt, Homo sapiens
  misc_RNA (1)...(19): siRNA sense strand
uggauauccugcagauuau

SEQ ID NO: 198446 - RNA, 19 nt, Homo sapiens
  misc_RNA (1)...(19): siRNA sense strand
ggaagacaaguacagauac

SEQ ID NO: 198447 - RNA, 19 nt, Homo sapiens
  misc_RNA (1)...(19): siRNA sense strand
ugcaaagaguguccaauca

SEQ ID NO: 198448 - RNA, 19 nt, Homo sapiens
  misc_RNA (1)...(19): siRNA sense strand
guggauaugugucugaacu

SEQ ID NO: 198449 - RNA, 19 nt, Homo sapiens
  misc_RNA (1)...(19): siRNA sense strand
acuggcugcugaauguuua

SEQ ID NO: 198450 - RNA, 19 nt, Homo sapiens
  misc_RNA (1)...(19): siRNA sense strand
acuaucccaugguggaaua

SEQ ID NO: 198451 - RNA, 19 nt, Homo sapiens
  misc_RNA (1)...(19): siRNA sense strand
ccggagcugcuuccaauuu

SEQ ID NO: 198452 - RNA, 19 nt, Homo sapiens
  misc_RNA (1)...(19): siRNA sense strand
ccaaauuccaagacaguug

SEQ ID NO: 198453 - RNA, 19 nt, Homo sapiens
  misc_RNA (1)...(19): siRNA sense strand
cagaaacugccaagcauca

SEQ ID NO: 198454 - RNA, 19 nt, Homo sapiens
  misc_RNA (1)...(19): siRNA sense strand
uaugacaucugccaaagcu

SEQ ID NO: 198455 - RNA, 19 nt, Homo sapiens
  misc_RNA (1)...(19): siRNA sense strand
aaugucagauucucagcuu

SEQ ID NO: 198456 - RNA, 19 nt, Homo sapiens
  misc_RNA (1)...(19): siRNA sense strand
ucgagacuuugccaaggua

SEQ ID NO: 198457 - RNA, 19 nt, Homo sapiens
  misc_RNA (1)...(19): siRNA sense strand
gcaaaaggccauaaaaugc

SEQ ID NO: 198458 - RNA, 19 nt, Homo sapiens
  misc_RNA (1)...(19): siRNA sense strand
cugcaugauucuauccaaa

SEQ ID NO: 198459 - RNA, 19 nt, Homo sapiens
  misc_RNA (1)...(19): siRNA sense strand
uaaagcacauuuggaagac

SEQ ID NO: 198460 - RNA, 19 nt, Homo sapiens
  misc_RNA (1)...(19): siRNA sense strand
acaggagucuaaagcacuu

SEQ ID NO: 198461 - RNA, 19 nt, Homo sapiens
  misc_RNA (1)...(19): siRNA sense strand
acagauaccuuuucaagca

SEQ ID NO: 198462 - RNA, 19 nt, Homo sapiens
  misc_RNA (1)...(19): siRNA sense strand
aagcacauuuggaagacaa

SEQ ID NO: 198463 - RNA, 19 nt, Homo sapiens
  misc_RNA (1)...(19): siRNA sense strand
gcuaauaauaagccagaga

SEQ ID NO: 198464 - RNA, 19 nt, Homo sapiens
  misc_RNA (1)...(19): siRNA sense strand
caagagcacaacaauuugg

SEQ ID NO: 198465 - RNA, 19 nt, Homo sapiens
  misc_RNA (1)...(19): siRNA sense strand
ccugucagcugcaugugau

SEQ ID NO: 198466 - RNA, 19 nt, Homo sapiens
  misc_RNA (1)...(19): siRNA sense strand
gcugcugaauguuuaugau

SEQ ID NO: 198467 - RNA, 19 nt, Homo sapiens
  misc_RNA (1)...(19): siRNA sense strand
acagagcucuaccagucuu

SEQ ID NO: 198468 - RNA, 19 nt, Homo sapiens
  misc_RNA (1)...(19): siRNA sense strand
acaguugggugaaguugca

SEQ ID NO: 198469 - RNA, 19 nt, Homo sapiens
  misc_RNA (1)...(19): siRNA sense strand
guuugaccacuauuuauga

SEQ ID NO: 198470 - RNA, 19 nt, Homo sapiens
  misc_RNA (1)...(19): siRNA sense strand
gcuuauaggacugccauga

SEQ ID NO: 198471 - RNA, 19 nt, Homo sapiens
  misc_RNA (1)...(19): siRNA sense strand
caucaggccaaauguaaca

SEQ ID NO: 198472 - RNA, 19 nt, Homo sapiens
  misc_RNA (1)...(19): siRNA sense strand
gauucuauccaaauuccaa

SEQ ID NO: 198473 - RNA, 19 nt, Homo sapiens
  misc_RNA (1)...(19): siRNA sense strand
ggcaaguucaacaggauuu

SEQ ID NO: 198474 - RNA, 19 nt, Homo sapiens
  misc_RNA (1)...(19): siRNA sense strand
gaacuggcugcugaauguu

SEQ ID NO: 198475 - RNA, 19 nt, Homo sapiens
  misc_RNA (1)...(19): siRNA sense strand
cugcugaauguuuaugaua

SEQ ID NO: 198476 - RNA, 19 nt, Homo sapiens
  misc_RNA (1)...(19): siRNA sense strand
aagcaucaggccaaaugua

SEQ ID NO: 198477 - RNA, 19 nt, Homo sapiens
  misc_RNA (1)...(19): siRNA sense strand
uggcaucauuucccugugu

SEQ ID NO: 198478 - RNA, 19 nt, Homo sapiens
  misc_RNA (1)...(19): siRNA sense strand
ccaugaaacuccgaagacu

SEQ ID NO: 198479 - RNA, 19 nt, Homo sapiens
  misc_RNA (1)...(19): siRNA sense strand
auaauaagccagagaucga

SEQ ID NO: 198480 - RNA, 19 nt, Homo sapiens
  misc_RNA (1)...(19): siRNA sense strand
cuaauaauaagccagagau

SEQ ID NO: 198481 - RNA, 19 nt, Homo sapiens
  misc_RNA (1)...(19): siRNA sense strand
ugggugaaguugcauccuu

SEQ ID NO: 198482 - RNA, 19 nt, Homo sapiens
  misc_RNA (1)...(19): siRNA sense strand
caucauuucccuguguaaa

SEQ ID NO: 198483 - RNA, 19 nt, Homo sapiens
  misc_RNA (1)...(19): siRNA sense strand
gcguggauaugugucugaa

SEQ ID NO: 198484 - RNA, 19 nt, Homo sapiens
  misc_RNA (1)...(19): siRNA sense strand
gcacuaucccaugguggaa

SEQ ID NO: 198485 - RNA, 19 nt, Homo sapiens
  misc_RNA (1)...(19): siRNA sense strand
gagccugucagcugcaugu

SEQ ID NO: 198486 - RNA, 19 nt, Homo sapiens
  misc_RNA (1)...(19): siRNA sense strand
guacagauaccuuuucaag

SEQ ID NO: 198487 - RNA, 19 nt, Homo sapiens
  misc_RNA (1)...(19): siRNA sense strand
gucccucucugcguggaua

SEQ ID NO: 198488 - RNA, 19 nt, Homo sapiens
  misc_RNA (1)...(19): siRNA sense strand
ggagcugcuuccaauuugc

SEQ ID NO: 198489 - RNA, 19 nt, Homo sapiens
  misc_RNA (1)...(19): siRNA sense strand
uuagcugaccugaauaaug

SEQ ID NO: 198490 - RNA, 19 nt, Homo sapiens
  misc_RNA (1)...(19): siRNA sense strand
guggcaaguucaacaggau

SEQ ID NO: 198491 - RNA, 19 nt, Homo sapiens
  misc_RNA (1)...(19): siRNA sense strand
acaacaauuuggucaacgu

SEQ ID NO: 198492 - RNA, 19 nt, Homo sapiens
  misc_RNA (1)...(19): siRNA sense strand
gacuacaucaggagaagau

SEQ ID NO: 198493 - RNA, 19 nt, Homo sapiens
  misc_RNA (1)...(19): siRNA sense strand
uaauaagccagagaucgaa

SEQ ID NO: 198494 - RNA, 19 nt, Homo sapiens
  misc_RNA (1)...(19): siRNA sense strand
ugucagauucucagcuuau

SEQ ID NO: 198495 - RNA, 19 nt, Homo sapiens
  misc_RNA (1)...(19): siRNA sense strand
ggauauccugcagauuauu

SEQ ID NO: 198496 - RNA, 19 nt, Homo sapiens
  misc_RNA (1)...(19): siRNA sense strand
agcaucaggccaaauguaa

SEQ ID NO: 198497 - RNA, 19 nt, Homo sapiens
  misc_RNA (1)...(19): siRNA sense strand
gcccuuugcuuggaucucu

SEQ ID NO: 198498 - RNA, 19 nt, Homo sapiens
  misc_RNA (1)...(19): siRNA sense strand
gcugaauguuuaugauacg

SEQ ID NO: 198499 - RNA, 19 nt, Homo sapiens
  misc_RNA (1)...(19): siRNA sense strand
agacuuugccaagguacua

SEQ ID NO: 198500 - RNA, 19 nt, Homo sapiens
  misc_RNA (1)...(19): siRNA sense strand
caagcaaguggcaaguuca

SEQ ID NO: 198501 - RNA, 19 nt, Homo sapiens
  misc_RNA (1)...(19): siRNA sense strand
agacaaguacagauaccuu

SEQ ID NO: 198502 - RNA, 19 nt, Homo sapiens
  misc_RNA (1)...(19): siRNA sense strand
gcaucauuucccuguguaa

SEQ ID NO: 198503 - RNA, 19 nt, Homo sapiens
  misc_RNA (1)...(19): siRNA sense strand
cugcaaagaguguccaauc

SEQ ID NO: 198504 - RNA, 19 nt, Homo sapiens
  misc_RNA (1)...(19): siRNA sense strand
cuuauaggacugccaugaa

SEQ ID NO: 198505 - RNA, 19 nt, Homo sapiens
  misc_RNA (1)...(19): siRNA sense strand
caaagaguguccaaucauu

SEQ ID NO: 198506 - RNA, 19 nt, Homo sapiens
  misc_RNA (1)...(19): siRNA sense strand
uagcugaccugaauaaugu

SEQ ID NO: 198507 - RNA, 19 nt, Homo sapiens
  misc_RNA (1)...(19): siRNA sense strand
gcaugauucuauccaaauu

SEQ ID NO: 198508 - RNA, 19 nt, Homo sapiens
  misc_RNA (1)...(19): siRNA sense strand
ugaacuggcugcugaaugu

SEQ ID NO: 198509 - RNA, 19 nt, Homo sapiens
  misc_RNA (1)...(19): siRNA sense strand
gauauccugcagauuauua

SEQ ID NO: 198510 - RNA, 19 nt, Homo sapiens
  misc_RNA (1)...(19): siRNA sense strand
gagaagauguucgagacuu

SEQ ID NO: 198511 - RNA, 19 nt, Homo sapiens
  misc_RNA (1)...(19): siRNA sense strand
gcacuuuaauuaugacauc

SEQ ID NO: 198512 - RNA, 19 nt, Homo sapiens
  misc_RNA (1)...(19): siRNA sense strand
guaaagcacauuuggaaga

SEQ ID NO: 198513 - RNA, 19 nt, Homo sapiens
  misc_RNA (1)...(19): siRNA sense strand
gaauauugcacuccgacua

SEQ ID NO: 198514 - RNA, 19 nt, Homo sapiens
  misc_RNA (1)...(19): siRNA sense strand
uuauaggacugccaugaaa

SEQ ID NO: 198515 - RNA, 19 nt, Homo sapiens
  misc_RNA (1)...(19): siRNA sense strand
gggugaaguugcauccuuu

SEQ ID NO: 198516 - RNA, 19 nt, Homo sapiens
  misc_RNA (1)...(19): siRNA sense strand
gcaagagcacaacaauuug

SEQ ID NO: 198517 - RNA, 19 nt, Homo sapiens
  misc_RNA (1)...(19): siRNA sense strand
gcacaacaauuuggucaac

SEQ ID NO: 198518 - RNA, 19 nt, Homo sapiens
  misc_RNA (1)...(19): siRNA sense strand
agcaagagcacaacaauuu

SEQ ID NO: 198519 - RNA, 19 nt, Homo sapiens
  misc_RNA (1)...(19): siRNA sense strand
agaagauguucgagacuuu

SEQ ID NO: 198520 - RNA, 19 nt, Homo sapiens
  misc_RNA (1)...(19): siRNA sense strand
gagcaagagcacaacaauu

SEQ ID NO: 198521 - RNA, 19 nt, Homo sapiens
  misc_RNA (1)...(19): siRNA sense strand
ucaagcaaguggcaaguuc

SEQ ID NO: 198522 - RNA, 19 nt, Homo sapiens
  misc_RNA (1)...(19): siRNA sense strand
ccacgagacucaaacaacu

SEQ ID NO: 198523 - RNA, 19 nt, Homo sapiens
  misc_RNA (1)...(19): siRNA sense strand
cagcacaaccucaagcaaa

SEQ ID NO: 198524 - RNA, 19 nt, Homo sapiens
  misc_RNA (1)...(19): siRNA sense strand
gcaaagaguguccaaucau

SEQ ID NO: 198525 - RNA, 19 nt, Homo sapiens
  misc_RNA (1)...(19): siRNA sense strand
auggauauccugcagauua

SEQ ID NO: 198526 - RNA, 19 nt, Homo sapiens
  misc_RNA (1)...(19): siRNA sense strand
uguaacaucugcaaagagu

SEQ ID NO: 198527 - RNA, 19 nt, Homo sapiens
  misc_RNA (1)...(19): siRNA sense strand
guccggagcugcuuccaau

SEQ ID NO: 198528 - RNA, 19 nt, Homo sapiens
  misc_RNA (1)...(19): siRNA sense strand
gcaaguggcaaguucaaca

SEQ ID NO: 198529 - RNA, 19 nt, Homo sapiens
  misc_RNA (1)...(19): siRNA sense strand
gcuuccaauuugcuaauaa

SEQ ID NO: 198530 - RNA, 19 nt, Homo sapiens
  misc_RNA (1)...(19): siRNA sense strand
uggaagacaaguacagaua

SEQ ID NO: 198531 - RNA, 19 nt, Homo sapiens
  misc_RNA (1)...(19): siRNA sense strand
ggauccguguccugucuuu

SEQ ID NO: 198532 - RNA, 19 nt, Homo sapiens
  misc_RNA (1)...(19): siRNA sense strand
gucuuuagcugaccugaau

SEQ ID NO: 198533 - RNA, 19 nt, Homo sapiens
  misc_RNA (1)...(19): siRNA sense strand
gacaaguacagauaccuuu

SEQ ID NO: 198534 - RNA, 19 nt, Homo sapiens
  misc_RNA (1)...(19): siRNA sense strand
ccaagcaucaggccaaaug

SEQ ID NO: 198535 - RNA, 19 nt, Homo sapiens
  misc_RNA (1)...(19): siRNA sense strand
ggagcaagagcacaacaau

SEQ ID NO: 198536 - RNA, 19 nt, Homo sapiens
  misc_RNA (1)...(19): siRNA sense strand
guguaaagcacauuuggaa

SEQ ID NO: 198537 - RNA, 19 nt, Homo sapiens
  misc_RNA (1)...(19): siRNA sense strand
caagacaguugggugaagu

SEQ ID NO: 198538 - RNA, 19 nt, Homo sapiens
  misc_RNA (1)...(19): siRNA sense strand
gaagauguucgagacuuug

SEQ ID NO: 198539 - RNA, 19 nt, Homo sapiens
  misc_RNA (1)...(19): siRNA sense strand
gucagauucucagcuuaua

SEQ ID NO: 198540 - RNA, 19 nt, Homo sapiens
  misc_RNA (1)...(19): siRNA sense strand
uaacaucugcaaagagugu

SEQ ID NO: 198541 - RNA, 19 nt, Homo sapiens
  misc_RNA (1)...(19): siRNA sense strand
cggagcugcuuccaauuug

SEQ ID NO: 198542 - RNA, 19 nt, Homo sapiens
  misc_RNA (1)...(19): siRNA sense strand
gaagacaaguacagauacc

SEQ ID NO: 198543 - RNA, 19 nt, Homo sapiens
  misc_RNA (1)...(19): siRNA sense strand
ccauggauauccugcagau

SEQ ID NO: 198544 - RNA, 19 nt, Homo sapiens
  misc_RNA (1)...(19): siRNA sense strand
ggcaucauuucccugugua

SEQ ID NO: 198545 - RNA, 19 nt, Homo sapiens
  misc_RNA (1)...(19): siRNA sense strand
uggauauccugcagauuau

SEQ ID NO: 198546 - RNA, 19 nt, Homo sapiens
  misc_RNA (1)...(19): siRNA sense strand
ggaagacaaguacagauac

SEQ ID NO: 198547 - RNA, 19 nt, Homo sapiens
  misc_RNA (1)...(19): siRNA sense strand
ugcaaagaguguccaauca

SEQ ID NO: 198548 - RNA, 19 nt, Homo sapiens
  misc_RNA (1)...(19): siRNA sense strand
guggauaugugucugaacu

SEQ ID NO: 198549 - RNA, 19 nt, Homo sapiens
  misc_RNA (1)...(19): siRNA sense strand
acuggcugcugaauguuua

SEQ ID NO: 198550 - RNA, 19 nt, Homo sapiens
  misc_RNA (1)...(19): siRNA sense strand
acuaucccaugguggaaua

SEQ ID NO: 198551 - RNA, 19 nt, Homo sapiens
  misc_RNA (1)...(19): siRNA sense strand
ccggagcugcuuccaauuu

SEQ ID NO: 198552 - RNA, 19 nt, Homo sapiens
  misc_RNA (1)...(19): siRNA sense strand
ccaaauuccaagacaguug

SEQ ID NO: 198553 - RNA, 19 nt, Homo sapiens
  misc_RNA (1)...(19): siRNA sense strand
cagaaacugccaagcauca

SEQ ID NO: 198554 - RNA, 19 nt, Homo sapiens
  misc_RNA (1)...(19): siRNA sense strand
uaugacaucugccaaagcu

SEQ ID NO: 198555 - RNA, 19 nt, Homo sapiens
  misc_RNA (1)...(19): siRNA sense strand
aaugucagauucucagcuu

SEQ ID NO: 198556 - RNA, 19 nt, Homo sapiens
  misc_RNA (1)...(19): siRNA sense strand
ucgagacuuugccaaggua

SEQ ID NO: 198557 - RNA, 19 nt, Homo sapiens
  misc_RNA (1)...(19): siRNA sense strand
gcaaaaggccauaaaaugc

SEQ ID NO: 198558 - RNA, 19 nt, Homo sapiens
  misc_RNA (1)...(19): siRNA sense strand
cugcaugauucuauccaaa

SEQ ID NO: 198559 - RNA, 19 nt, Homo sapiens
  misc_RNA (1)...(19): siRNA sense strand
uaaagcacauuuggaagac

SEQ ID NO: 198560 - RNA, 19 nt, Homo sapiens
  misc_RNA (1)...(19): siRNA sense strand
acaggagucuaaagcacuu

SEQ ID NO: 198561 - RNA, 19 nt, Homo sapiens
  misc_RNA (1)...(19): siRNA sense strand
acagauaccuuuucaagca

SEQ ID NO: 198562 - RNA, 19 nt, Homo sapiens
  misc_RNA (1)...(19): siRNA sense strand
aagcacauuuggaagacaa

SEQ ID NO: 198563 - RNA, 19 nt, Homo sapiens
  misc_RNA (1)...(19): siRNA sense strand
gcuaauaauaagccagaga

SEQ ID NO: 198564 - RNA, 19 nt, Homo sapiens
  misc_RNA (1)...(19): siRNA sense strand
caagagcacaacaauuugg

SEQ ID NO: 198565 - RNA, 19 nt, Homo sapiens
  misc_RNA (1)...(19): siRNA sense strand
ccugucagcugcaugugau

SEQ ID NO: 198566 - RNA, 19 nt, Homo sapiens
  misc_RNA (1)...(19): siRNA sense strand
gcugcugaauguuuaugau

SEQ ID NO: 198567 - RNA, 19 nt, Homo sapiens
  misc_RNA (1)...(19): siRNA sense strand
acagagcucuaccagucuu

SEQ ID NO: 198568 - RNA, 19 nt, Homo sapiens
  misc_RNA (1)...(19): siRNA sense strand
acaguugggugaaguugca

SEQ ID NO: 198569 - RNA, 19 nt, Homo sapiens
  misc_RNA (1)...(19): siRNA sense strand
guuugaccacuauuuauga

SEQ ID NO: 198570 - RNA, 19 nt, Homo sapiens
  misc_RNA (1)...(19): siRNA sense strand
gcuuauaggacugccauga

SEQ ID NO: 198571 - RNA, 19 nt, Homo sapiens
  misc_RNA (1)...(19): siRNA sense strand
caucaggccaaauguaaca

SEQ ID NO: 198572 - RNA, 19 nt, Homo sapiens
  misc_RNA (1)...(19): siRNA sense strand
gauucuauccaaauuccaa

SEQ ID NO: 198573 - RNA, 19 nt, Homo sapiens
  misc_RNA (1)...(19): siRNA sense strand
ggcaaguucaacaggauuu

SEQ ID NO: 198574 - RNA, 19 nt, Homo sapiens
  misc_RNA (1)...(19): siRNA sense strand
gaacuggcugcugaauguu

SEQ ID NO: 198575 - RNA, 19 nt, Homo sapiens
  misc_RNA (1)...(19): siRNA sense strand
cugcugaauguuuaugaua

SEQ ID NO: 198576 - RNA, 19 nt, Homo sapiens
  misc_RNA (1)...(19): siRNA sense strand
aagcaucaggccaaaugua

SEQ ID NO: 198577 - RNA, 19 nt, Homo sapiens
  misc_RNA (1)...(19): siRNA sense strand
uggcaucauuucccugugu

SEQ ID NO: 198578 - RNA, 19 nt, Homo sapiens
  misc_RNA (1)...(19): siRNA sense strand
ccaugaaacuccgaagacu

SEQ ID NO: 198579 - RNA, 19 nt, Homo sapiens
  misc_RNA (1)...(19): siRNA sense strand
auaauaagccagagaucga

SEQ ID NO: 198580 - RNA, 19 nt, Homo sapiens
  misc_RNA (1)...(19): siRNA sense strand
cuaauaauaagccagagau

SEQ ID NO: 198581 - RNA, 19 nt, Homo sapiens
  misc_RNA (1)...(19): siRNA sense strand
ugggugaaguugcauccuu

SEQ ID NO: 198582 - RNA, 19 nt, Homo sapiens
  misc_RNA (1)...(19): siRNA sense strand
caucauuucccuguguaaa

SEQ ID NO: 198583 - RNA, 19 nt, Homo sapiens
  misc_RNA (1)...(19): siRNA sense strand
gcguggauaugugucugaa

SEQ ID NO: 198584 - RNA, 19 nt, Homo sapiens
  misc_RNA (1)...(19): siRNA sense strand
gcacuaucccaugguggaa

SEQ ID NO: 198585 - RNA, 19 nt, Homo sapiens
  misc_RNA (1)...(19): siRNA sense strand
gagccugucagcugcaugu

SEQ ID NO: 198586 - RNA, 19 nt, Homo sapiens
  misc_RNA (1)...(19): siRNA sense strand
guacagauaccuuuucaag

SEQ ID NO: 198587 - RNA, 19 nt, Homo sapiens
  misc_RNA (1)...(19): siRNA sense strand
gucccucucugcguggaua

SEQ ID NO: 198588 - RNA, 19 nt, Homo sapiens
  misc_RNA (1)...(19): siRNA sense strand
ggagcugcuuccaauuugc

SEQ ID NO: 198589 - RNA, 19 nt, Homo sapiens
  misc_RNA (1)...(19): siRNA sense strand
uuagcugaccugaauaaug

SEQ ID NO: 198590 - RNA, 19 nt, Homo sapiens
  misc_RNA (1)...(19): siRNA sense strand
guggcaaguucaacaggau

SEQ ID NO: 198591 - RNA, 19 nt, Homo sapiens
  misc_RNA (1)...(19): siRNA sense strand
acaacaauuuggucaacgu

SEQ ID NO: 198592 - RNA, 19 nt, Homo sapiens
  misc_RNA (1)...(19): siRNA sense strand
gacuacaucaggagaagau

SEQ ID NO: 198593 - RNA, 19 nt, Homo sapiens
  misc_RNA (1)...(19): siRNA sense strand
uaauaagccagagaucgaa

SEQ ID NO: 198594 - RNA, 19 nt, Homo sapiens
  misc_RNA (1)...(19): siRNA sense strand
ugucagauucucagcuuau

SEQ ID NO: 198595 - RNA, 19 nt, Homo sapiens
  misc_RNA (1)...(19): siRNA sense strand
ggauauccugcagauuauu

SEQ ID NO: 198596 - RNA, 19 nt, Homo sapiens
  misc_RNA (1)...(19): siRNA sense strand
agcaucaggccaaauguaa

SEQ ID NO: 198597 - RNA, 19 nt, Homo sapiens
  misc_RNA (1)...(19): siRNA sense strand
gcccuuugcuuggaucucu

SEQ ID NO: 198598 - RNA, 19 nt, Homo sapiens
  misc_RNA (1)...(19): siRNA sense strand
gcugaauguuuaugauacg

SEQ ID NO: 198599 - RNA, 19 nt, Homo sapiens
  misc_RNA (1)...(19): siRNA sense strand
agacuuugccaagguacua

SEQ ID NO: 198600 - RNA, 19 nt, Homo sapiens
  misc_RNA (1)...(19): siRNA sense strand
caagcaaguggcaaguuca

SEQ ID NO: 198601 - RNA, 19 nt, Homo sapiens
  misc_RNA (1)...(19): siRNA sense strand
agacaaguacagauaccuu

SEQ ID NO: 198602 - RNA, 19 nt, Homo sapiens
  misc_RNA (1)...(19): siRNA sense strand
gcaucauuucccuguguaa

SEQ ID NO: 198603 - RNA, 19 nt, Homo sapiens
  misc_RNA (1)...(19): siRNA sense strand
cugcaaagaguguccaauc

SEQ ID NO: 198604 - RNA, 19 nt, Homo sapiens
  misc_RNA (1)...(19): siRNA sense strand
cuuauaggacugccaugaa

SEQ ID NO: 198605 - RNA, 19 nt, Homo sapiens
  misc_RNA (1)...(19): siRNA sense strand
caaagaguguccaaucauu

SEQ ID NO: 198606 - RNA, 19 nt, Homo sapiens
  misc_RNA (1)...(19): siRNA sense strand
uagcugaccugaauaaugu

SEQ ID NO: 198607 - RNA, 19 nt, Homo sapiens
  misc_RNA (1)...(19): siRNA sense strand
gcaugauucuauccaaauu

SEQ ID NO: 198608 - RNA, 19 nt, Homo sapiens
  misc_RNA (1)...(19): siRNA sense strand
ugaacuggcugcugaaugu

SEQ ID NO: 198609 - RNA, 19 nt, Homo sapiens
  misc_RNA (1)...(19): siRNA sense strand
gauauccugcagauuauua

SEQ ID NO: 198610 - RNA, 19 nt, Homo sapiens
  misc_RNA (1)...(19): siRNA sense strand
gagaagauguucgagacuu

SEQ ID NO: 198611 - RNA, 19 nt, Homo sapiens
  misc_RNA (1)...(19): siRNA sense strand
gcacuuuaauuaugacauc

SEQ ID NO: 198612 - RNA, 19 nt, Homo sapiens
  misc_RNA (1)...(19): siRNA sense strand
guaaagcacauuuggaaga

SEQ ID NO: 198613 - RNA, 19 nt, Homo sapiens
  misc_RNA (1)...(19): siRNA sense strand
gaauauugcacuccgacua

SEQ ID NO: 198614 - RNA, 19 nt, Homo sapiens
  misc_RNA (1)...(19): siRNA sense strand
uuauaggacugccaugaaa

SEQ ID NO: 198615 - RNA, 19 nt, Homo sapiens
  misc_RNA (1)...(19): siRNA sense strand
gggugaaguugcauccuuu

SEQ ID NO: 198616 - RNA, 19 nt, Homo sapiens
  misc_RNA (1)...(19): siRNA sense strand
gcaagagcacaacaauuug

SEQ ID NO: 198617 - RNA, 19 nt, Homo sapiens
  misc_RNA (1)...(19): siRNA sense strand
gcacaacaauuuggucaac

SEQ ID NO: 198618 - RNA, 19 nt, Homo sapiens
  misc_RNA (1)...(19): siRNA sense strand
agcaagagcacaacaauuu

SEQ ID NO: 198619 - RNA, 19 nt, Homo sapiens
  misc_RNA (1)...(19): siRNA sense strand
agaagauguucgagacuuu

SEQ ID NO: 198620 - RNA, 19 nt, Homo sapiens
  misc_RNA (1)...(19): siRNA sense strand
gagcaagagcacaacaauu

SEQ ID NO: 198621 - RNA, 19 nt, Homo sapiens
  misc_RNA (1)...(19): siRNA sense strand
ucaagcaaguggcaaguuc

SEQ ID NO: 198622 - RNA, 19 nt, Homo sapiens
  misc_RNA (1)...(19): siRNA sense strand
ccacgagacucaaacaacu

SEQ ID NO: 198623 - RNA, 19 nt, Homo sapiens
  misc_RNA (1)...(19): siRNA sense strand
cagcacaaccucaagcaaa

SEQ ID NO: 198624 - RNA, 19 nt, Homo sapiens
  misc_RNA (1)...(19): siRNA sense strand
gcaaagaguguccaaucau

SEQ ID NO: 198625 - RNA, 19 nt, Homo sapiens
  misc_RNA (1)...(19): siRNA sense strand
auggauauccugcagauua

SEQ ID NO: 198626 - RNA, 19 nt, Homo sapiens
  misc_RNA (1)...(19): siRNA sense strand
uguaacaucugcaaagagu

SEQ ID NO: 198627 - RNA, 19 nt, Homo sapiens
  misc_RNA (1)...(19): siRNA sense strand
guccggagcugcuuccaau

SEQ ID NO: 198628 - RNA, 19 nt, Homo sapiens
  misc_RNA (1)...(19): siRNA sense strand
gcaaguggcaaguucaaca

SEQ ID NO: 198629 - RNA, 19 nt, Homo sapiens
  misc_RNA (1)...(19): siRNA sense strand
gcuuccaauuugcuaauaa

SEQ ID NO: 198630 - RNA, 19 nt, Homo sapiens
  misc_RNA (1)...(19): siRNA sense strand
uggaagacaaguacagaua

SEQ ID NO: 198631 - RNA, 19 nt, Homo sapiens
  misc_RNA (1)...(19): siRNA sense strand
ggauccguguccugucuuu

SEQ ID NO: 198632 - RNA, 19 nt, Homo sapiens
  misc_RNA (1)...(19): siRNA sense strand
gucuuuagcugaccugaau

SEQ ID NO: 198633 - RNA, 19 nt, Homo sapiens
  misc_RNA (1)...(19): siRNA sense strand
gacaaguacagauaccuuu

SEQ ID NO: 198634 - RNA, 19 nt, Homo sapiens
  misc_RNA (1)...(19): siRNA sense strand
ccaagcaucaggccaaaug

SEQ ID NO: 198635 - RNA, 19 nt, Homo sapiens
  misc_RNA (1)...(19): siRNA sense strand
ggagcaagagcacaacaau

SEQ ID NO: 198636 - RNA, 19 nt, Homo sapiens
  misc_RNA (1)...(19): siRNA sense strand
guguaaagcacauuuggaa

SEQ ID NO: 198637 - RNA, 19 nt, Homo sapiens
  misc_RNA (1)...(19): siRNA sense strand
caagacaguugggugaagu

SEQ ID NO: 198638 - RNA, 19 nt, Homo sapiens
  misc_RNA (1)...(19): siRNA sense strand
gaagauguucgagacuuug

SEQ ID NO: 198639 - RNA, 19 nt, Homo sapiens
  misc_RNA (1)...(19): siRNA sense strand
gucagauucucagcuuaua

SEQ ID NO: 198640 - RNA, 19 nt, Homo sapiens
  misc_RNA (1)...(19): siRNA sense strand
uaacaucugcaaagagugu

SEQ ID NO: 198641 - RNA, 19 nt, Homo sapiens
  misc_RNA (1)...(19): siRNA sense strand
cggagcugcuuccaauuug

SEQ ID NO: 198642 - RNA, 19 nt, Homo sapiens
  misc_RNA (1)...(19): siRNA sense strand
gaagacaaguacagauacc

SEQ ID NO: 198643 - RNA, 19 nt, Homo sapiens
  misc_RNA (1)...(19): siRNA sense strand
ccauggauauccugcagau

SEQ ID NO: 198644 - RNA, 19 nt, Homo sapiens
  misc_RNA (1)...(19): siRNA sense strand
ggcaucauuucccugugua

SEQ ID NO: 198645 - RNA, 19 nt, Homo sapiens
  misc_RNA (1)...(19): siRNA sense strand
uggauauccugcagauuau

SEQ ID NO: 198646 - RNA, 19 nt, Homo sapiens
  misc_RNA (1)...(19): siRNA sense strand
ggaagacaaguacagauac

SEQ ID NO: 198647 - RNA, 19 nt, Homo sapiens
  misc_RNA (1)...(19): siRNA sense strand
ugcaaagaguguccaauca

SEQ ID NO: 198648 - RNA, 19 nt, Homo sapiens
  misc_RNA (1)...(19): siRNA sense strand
guggauaugugucugaacu

SEQ ID NO: 198649 - RNA, 19 nt, Homo sapiens
  misc_RNA (1)...(19): siRNA sense strand
acuggcugcugaauguuua

SEQ ID NO: 198650 - RNA, 19 nt, Homo sapiens
  misc_RNA (1)...(19): siRNA sense strand
acuaucccaugguggaaua

SEQ ID NO: 198651 - RNA, 19 nt, Homo sapiens
  misc_RNA (1)...(19): siRNA sense strand
ccggagcugcuuccaauuu

SEQ ID NO: 198652 - RNA, 19 nt, Homo sapiens
  misc_RNA (1)...(19): siRNA sense strand
ccaaauuccaagacaguug

SEQ ID NO: 198653 - RNA, 19 nt, Homo sapiens
  misc_RNA (1)...(19): siRNA sense strand
cagaaacugccaagcauca

SEQ ID NO: 198654 - RNA, 19 nt, Homo sapiens
  misc_RNA (1)...(19): siRNA sense strand
uaugacaucugccaaagcu

SEQ ID NO: 198655 - RNA, 19 nt, Homo sapiens
  misc_RNA (1)...(19): siRNA sense strand
aaugucagauucucagcuu

SEQ ID NO: 198656 - RNA, 19 nt, Homo sapiens
  misc_RNA (1)...(19): siRNA sense strand
ucgagacuuugccaaggua

SEQ ID NO: 198657 - RNA, 19 nt, Homo sapiens
  misc_RNA (1)...(19): siRNA sense strand
gcaaaaggccauaaaaugc

SEQ ID NO: 198658 - RNA, 19 nt, Homo sapiens
  misc_RNA (1)...(19): siRNA sense strand
cugcaugauucuauccaaa

SEQ ID NO: 198659 - RNA, 19 nt, Homo sapiens
  misc_RNA (1)...(19): siRNA sense strand
uaaagcacauuuggaagac

SEQ ID NO: 198660 - RNA, 19 nt, Homo sapiens
  misc_RNA (1)...(19): siRNA sense strand
acaggagucuaaagcacuu

SEQ ID NO: 198661 - RNA, 19 nt, Homo sapiens
  misc_RNA (1)...(19): siRNA sense strand
acagauaccuuuucaagca

SEQ ID NO: 198662 - RNA, 19 nt, Homo sapiens
  misc_RNA (1)...(19): siRNA sense strand
aagcacauuuggaagacaa

SEQ ID NO: 198663 - RNA, 19 nt, Homo sapiens
  misc_RNA (1)...(19): siRNA sense strand
gcuaauaauaagccagaga

SEQ ID NO: 198664 - RNA, 19 nt, Homo sapiens
  misc_RNA (1)...(19): siRNA sense strand
caagagcacaacaauuugg

SEQ ID NO: 198665 - RNA, 19 nt, Homo sapiens
  misc_RNA (1)...(19): siRNA sense strand
ccugucagcugcaugugau

SEQ ID NO: 198666 - RNA, 19 nt, Homo sapiens
  misc_RNA (1)...(19): siRNA sense strand
gcugcugaauguuuaugau

SEQ ID NO: 198667 - RNA, 19 nt, Homo sapiens
  misc_RNA (1)...(19): siRNA sense strand
acagagcucuaccagucuu

SEQ ID NO: 198668 - RNA, 19 nt, Homo sapiens
  misc_RNA (1)...(19): siRNA sense strand
acaguugggugaaguugca

SEQ ID NO: 198669 - RNA, 19 nt, Homo sapiens
  misc_RNA (1)...(19): siRNA sense strand
guuugaccacuauuuauga

SEQ ID NO: 198670 - RNA, 19 nt, Homo sapiens
  misc_RNA (1)...(19): siRNA sense strand
gcuuauaggacugccauga

SEQ ID NO: 198671 - RNA, 19 nt, Homo sapiens
  misc_RNA (1)...(19): siRNA sense strand
caucaggccaaauguaaca

SEQ ID NO: 198672 - RNA, 19 nt, Homo sapiens
  misc_RNA (1)...(19): siRNA sense strand
gauucuauccaaauuccaa

SEQ ID NO: 198673 - RNA, 19 nt, Homo sapiens
  misc_RNA (1)...(19): siRNA sense strand
ggcaaguucaacaggauuu

SEQ ID NO: 198674 - RNA, 19 nt, Homo sapiens
  misc_RNA (1)...(19): siRNA sense strand
gaacuggcugcugaauguu

SEQ ID NO: 198675 - RNA, 19 nt, Homo sapiens
  misc_RNA (1)...(19): siRNA sense strand
cugcugaauguuuaugaua

SEQ ID NO: 198676 - RNA, 19 nt, Homo sapiens
  misc_RNA (1)...(19): siRNA sense strand
aagcaucaggccaaaugua

SEQ ID NO: 198677 - RNA, 19 nt, Homo sapiens
  misc_RNA (1)...(19): siRNA sense strand
uggcaucauuucccugugu

SEQ ID NO: 198678 - RNA, 19 nt, Homo sapiens
  misc_RNA (1)...(19): siRNA sense strand
ccaugaaacuccgaagacu

SEQ ID NO: 198679 - RNA, 19 nt, Homo sapiens
  misc_RNA (1)...(19): siRNA sense strand
auaauaagccagagaucga

SEQ ID NO: 198680 - RNA, 19 nt, Homo sapiens
  misc_RNA (1)...(19): siRNA sense strand
cuaauaauaagccagagau

SEQ ID NO: 198681 - RNA, 19 nt, Homo sapiens
  misc_RNA (1)...(19): siRNA sense strand
ugggugaaguugcauccuu

SEQ ID NO: 198682 - RNA, 19 nt, Homo sapiens
  misc_RNA (1)...(19): siRNA sense strand
caucauuucccuguguaaa

SEQ ID NO: 198683 - RNA, 19 nt, Homo sapiens
  misc_RNA (1)...(19): siRNA sense strand
gcguggauaugugucugaa

SEQ ID NO: 198684 - RNA, 19 nt, Homo sapiens
  misc_RNA (1)...(19): siRNA sense strand
gcacuaucccaugguggaa

SEQ ID NO: 198685 - RNA, 19 nt, Homo sapiens
  misc_RNA (1)...(19): siRNA sense strand
gagccugucagcugcaugu

SEQ ID NO: 198686 - RNA, 19 nt, Homo sapiens
  misc_RNA (1)...(19): siRNA sense strand
guacagauaccuuuucaag

SEQ ID NO: 198687 - RNA, 19 nt, Homo sapiens
  misc_RNA (1)...(19): siRNA sense strand
gucccucucugcguggaua

SEQ ID NO: 198688 - RNA, 19 nt, Homo sapiens
  misc_RNA (1)...(19): siRNA sense strand
ggagcugcuuccaauuugc

SEQ ID NO: 198689 - RNA, 19 nt, Homo sapiens
  misc_RNA (1)...(19): siRNA sense strand
uuagcugaccugaauaaug

SEQ ID NO: 198690 - RNA, 19 nt, Homo sapiens
  misc_RNA (1)...(19): siRNA sense strand
guggcaaguucaacaggau

SEQ ID NO: 198691 - RNA, 19 nt, Homo sapiens
  misc_RNA (1)...(19): siRNA sense strand
acaacaauuuggucaacgu

SEQ ID NO: 198692 - RNA, 19 nt, Homo sapiens
  misc_RNA (1)...(19): siRNA sense strand
gacuacaucaggagaagau

SEQ ID NO: 198693 - RNA, 19 nt, Homo sapiens
  misc_RNA (1)...(19): siRNA sense strand
uaauaagccagagaucgaa

SEQ ID NO: 198694 - RNA, 19 nt, Homo sapiens
  misc_RNA (1)...(19): siRNA sense strand
ugucagauucucagcuuau

SEQ ID NO: 198695 - RNA, 19 nt, Homo sapiens
  misc_RNA (1)...(19): siRNA sense strand
ggauauccugcagauuauu

SEQ ID NO: 198696 - RNA, 19 nt, Homo sapiens
  misc_RNA (1)...(19): siRNA sense strand
agcaucaggccaaauguaa

SEQ ID NO: 198697 - RNA, 19 nt, Homo sapiens
  misc_RNA (1)...(19): siRNA sense strand
gcccuuugcuuggaucucu

SEQ ID NO: 198698 - RNA, 19 nt, Homo sapiens
  misc_RNA (1)...(19): siRNA sense strand
gcugaauguuuaugauacg

SEQ ID NO: 198699 - RNA, 19 nt, Homo sapiens
  misc_RNA (1)...(19): siRNA sense strand
agacuuugccaagguacua

SEQ ID NO: 198700 - RNA, 19 nt, Homo sapiens
  misc_RNA (1)...(19): siRNA sense strand
caagcaaguggcaaguuca

SEQ ID NO: 198701 - RNA, 19 nt, Homo sapiens
  misc_RNA (1)...(19): siRNA sense strand
agacaaguacagauaccuu

SEQ ID NO: 198702 - RNA, 19 nt, Homo sapiens
  misc_RNA (1)...(19): siRNA sense strand
gcaucauuucccuguguaa

SEQ ID NO: 198703 - RNA, 19 nt, Homo sapiens
  misc_RNA (1)...(19): siRNA sense strand
cugcaaagaguguccaauc

SEQ ID NO: 198704 - RNA, 19 nt, Homo sapiens
  misc_RNA (1)...(19): siRNA sense strand
cuuauaggacugccaugaa

SEQ ID NO: 198705 - RNA, 19 nt, Homo sapiens
  misc_RNA (1)...(19): siRNA sense strand
caaagaguguccaaucauu

SEQ ID NO: 198706 - RNA, 19 nt, Homo sapiens
  misc_RNA (1)...(19): siRNA sense strand
uagcugaccugaauaaugu

SEQ ID NO: 198707 - RNA, 19 nt, Homo sapiens
  misc_RNA (1)...(19): siRNA sense strand
gcaugauucuauccaaauu

SEQ ID NO: 198708 - RNA, 19 nt, Homo sapiens
  misc_RNA (1)...(19): siRNA sense strand
ugaacuggcugcugaaugu

SEQ ID NO: 198709 - RNA, 19 nt, Homo sapiens
  misc_RNA (1)...(19): siRNA sense strand
gauauccugcagauuauua

SEQ ID NO: 198710 - RNA, 19 nt, Homo sapiens
  misc_RNA (1)...(19): siRNA sense strand
gagaagauguucgagacuu

SEQ ID NO: 198711 - RNA, 19 nt, Homo sapiens
  misc_RNA (1)...(19): siRNA sense strand
gcacuuuaauuaugacauc

SEQ ID NO: 198712 - RNA, 19 nt, Homo sapiens
  misc_RNA (1)...(19): siRNA sense strand
guaaagcacauuuggaaga

SEQ ID NO: 198713 - RNA, 19 nt, Homo sapiens
  misc_RNA (1)...(19): siRNA sense strand
gaauauugcacuccgacua

SEQ ID NO: 198714 - RNA, 19 nt, Homo sapiens
  misc_RNA (1)...(19): siRNA sense strand
uuauaggacugccaugaaa

SEQ ID NO: 198715 - RNA, 19 nt, Homo sapiens
  misc_RNA (1)...(19): siRNA sense strand
gggugaaguugcauccuuu

SEQ ID NO: 198716 - RNA, 19 nt, Homo sapiens
  misc_RNA (1)...(19): siRNA sense strand
gcaagagcacaacaauuug

SEQ ID NO: 198717 - RNA, 19 nt, Homo sapiens
  misc_RNA (1)...(19): siRNA sense strand
gcacaacaauuuggucaac

SEQ ID NO: 198718 - RNA, 19 nt, Homo sapiens
  misc_RNA (1)...(19): siRNA sense strand
agcaagagcacaacaauuu

SEQ ID NO: 198719 - RNA, 19 nt, Homo sapiens
  misc_RNA (1)...(19): siRNA sense strand
agaagauguucgagacuuu

SEQ ID NO: 198720 - RNA, 19 nt, Homo sapiens
  misc_RNA (1)...(19): siRNA sense strand
gagcaagagcacaacaauu

SEQ ID NO: 198721 - RNA, 19 nt, Homo sapiens
  misc_RNA (1)...(19): siRNA sense strand
ucaagcaaguggcaaguuc

SEQ ID NO: 198722 - RNA, 19 nt, Homo sapiens
  misc_RNA (1)...(19): siRNA sense strand
ccacgagacucaaacaacu

SEQ ID NO: 198723 - RNA, 19 nt, Homo sapiens
  misc_RNA (1)...(19): siRNA sense strand
cagcacaaccucaagcaaa

SEQ ID NO: 198724 - RNA, 19 nt, Homo sapiens
  misc_RNA (1)...(19): siRNA sense strand
gcaaagaguguccaaucau

SEQ ID NO: 198725 - RNA, 19 nt, Homo sapiens
  misc_RNA (1)...(19): siRNA sense strand
auggauauccugcagauua

SEQ ID NO: 198726 - RNA, 19 nt, Homo sapiens
  misc_RNA (1)...(19): siRNA sense strand
uguaacaucugcaaagagu

SEQ ID NO: 198727 - RNA, 19 nt, Homo sapiens
  misc_RNA (1)...(19): siRNA sense strand
guccggagcugcuuccaau

SEQ ID NO: 198728 - RNA, 19 nt, Homo sapiens
  misc_RNA (1)...(19): siRNA sense strand
gcaaguggcaaguucaaca

SEQ ID NO: 198729 - RNA, 19 nt, Homo sapiens
  misc_RNA (1)...(19): siRNA sense strand
gcuuccaauuugcuaauaa

SEQ ID NO: 198730 - RNA, 19 nt, Homo sapiens
  misc_RNA (1)...(19): siRNA sense strand
uggaagacaaguacagaua

SEQ ID NO: 198731 - RNA, 19 nt, Homo sapiens
  misc_RNA (1)...(19): siRNA sense strand
ggauccguguccugucuuu

SEQ ID NO: 198732 - RNA, 19 nt, Homo sapiens
  misc_RNA (1)...(19): siRNA sense strand
gucuuuagcugaccugaau

SEQ ID NO: 198733 - RNA, 19 nt, Homo sapiens
  misc_RNA (1)...(19): siRNA sense strand
gacaaguacagauaccuuu

SEQ ID NO: 198734 - RNA, 19 nt, Homo sapiens
  misc_RNA (1)...(19): siRNA sense strand
ccaagcaucaggccaaaug

SEQ ID NO: 198735 - RNA, 19 nt, Homo sapiens
  misc_RNA (1)...(19): siRNA sense strand
ggagcaagagcacaacaau

SEQ ID NO: 198736 - RNA, 19 nt, Homo sapiens
  misc_RNA (1)...(19): siRNA sense strand
guguaaagcacauuuggaa

SEQ ID NO: 198737 - RNA, 19 nt, Homo sapiens
  misc_RNA (1)...(19): siRNA sense strand
caagacaguugggugaagu

SEQ ID NO: 198738 - RNA, 19 nt, Homo sapiens
  misc_RNA (1)...(19): siRNA sense strand
gaagauguucgagacuuug

SEQ ID NO: 198739 - RNA, 19 nt, Homo sapiens
  misc_RNA (1)...(19): siRNA sense strand
gucagauucucagcuuaua

SEQ ID NO: 198740 - RNA, 19 nt, Homo sapiens
  misc_RNA (1)...(19): siRNA sense strand
uaacaucugcaaagagugu

SEQ ID NO: 198741 - RNA, 19 nt, Homo sapiens
  misc_RNA (1)...(19): siRNA sense strand
cggagcugcuuccaauuug

SEQ ID NO: 198742 - RNA, 19 nt, Homo sapiens
  misc_RNA (1)...(19): siRNA sense strand
gaagacaaguacagauacc

SEQ ID NO: 198743 - RNA, 19 nt, Homo sapiens
  misc_RNA (1)...(19): siRNA sense strand
ccauggauauccugcagau

SEQ ID NO: 198744 - RNA, 19 nt, Homo sapiens
  misc_RNA (1)...(19): siRNA sense strand
ggcaucauuucccugugua

SEQ ID NO: 198745 - RNA, 19 nt, Homo sapiens
  misc_RNA (1)...(19): siRNA sense strand
uggauauccugcagauuau

SEQ ID NO: 198746 - RNA, 19 nt, Homo sapiens
  misc_RNA (1)...(19): siRNA sense strand
ggaagacaaguacagauac

SEQ ID NO: 198747 - RNA, 19 nt, Homo sapiens
  misc_RNA (1)...(19): siRNA sense strand
ugcaaagaguguccaauca

SEQ ID NO: 198748 - RNA, 19 nt, Homo sapiens
  misc_RNA (1)...(19): siRNA sense strand
guggauaugugucugaacu

SEQ ID NO: 198749 - RNA, 19 nt, Homo sapiens
  misc_RNA (1)...(19): siRNA sense strand
acuggcugcugaauguuua

SEQ ID NO: 198750 - RNA, 19 nt, Homo sapiens
  misc_RNA (1)...(19): siRNA sense strand
acuaucccaugguggaaua

SEQ ID NO: 198751 - RNA, 19 nt, Homo sapiens
  misc_RNA (1)...(19): siRNA sense strand
ccggagcugcuuccaauuu

SEQ ID NO: 198752 - RNA, 19 nt, Homo sapiens
  misc_RNA (1)...(19): siRNA sense strand
ccaaauuccaagacaguug

SEQ ID NO: 198753 - RNA, 19 nt, Homo sapiens
  misc_RNA (1)...(19): siRNA sense strand
cagaaacugccaagcauca

SEQ ID NO: 198754 - RNA, 19 nt, Homo sapiens
  misc_RNA (1)...(19): siRNA sense strand
uaugacaucugccaaagcu

SEQ ID NO: 198755 - RNA, 19 nt, Homo sapiens
  misc_RNA (1)...(19): siRNA sense strand
aaugucagauucucagcuu

SEQ ID NO: 198756 - RNA, 19 nt, Homo sapiens
  misc_RNA (1)...(19): siRNA sense strand
ucgagacuuugccaaggua

SEQ ID NO: 198757 - RNA, 19 nt, Homo sapiens
  misc_RNA (1)...(19): siRNA sense strand
gcaaaaggccauaaaaugc

SEQ ID NO: 198758 - RNA, 19 nt, Homo sapiens
  misc_RNA (1)...(19): siRNA sense strand
cugcaugauucuauccaaa

SEQ ID NO: 198759 - RNA, 19 nt, Homo sapiens
  misc_RNA (1)...(19): siRNA sense strand
uaaagcacauuuggaagac

SEQ ID NO: 198760 - RNA, 19 nt, Homo sapiens
  misc_RNA (1)...(19): siRNA sense strand
acaggagucuaaagcacuu

SEQ ID NO: 198761 - RNA, 19 nt, Homo sapiens
  misc_RNA (1)...(19): siRNA sense strand
acagauaccuuuucaagca

SEQ ID NO: 198762 - RNA, 19 nt, Homo sapiens
  misc_RNA (1)...(19): siRNA sense strand
aagcacauuuggaagacaa

SEQ ID NO: 198763 - RNA, 19 nt, Homo sapiens
  misc_RNA (1)...(19): siRNA sense strand
gcuaauaauaagccagaga

SEQ ID NO: 198764 - RNA, 19 nt, Homo sapiens
  misc_RNA (1)...(19): siRNA sense strand
caagagcacaacaauuugg

SEQ ID NO: 198765 - RNA, 19 nt, Homo sapiens
  misc_RNA (1)...(19): siRNA sense strand
ccugucagcugcaugugau

SEQ ID NO: 198766 - RNA, 19 nt, Homo sapiens
  misc_RNA (1)...(19): siRNA sense strand
gcugcugaauguuuaugau

SEQ ID NO: 198767 - RNA, 19 nt, Homo sapiens
  misc_RNA (1)...(19): siRNA sense strand
acagagcucuaccagucuu

SEQ ID NO: 198768 - RNA, 19 nt, Homo sapiens
  misc_RNA (1)...(19): siRNA sense strand
acaguugggugaaguugca

SEQ ID NO: 198769 - RNA, 19 nt, Homo sapiens
  misc_RNA (1)...(19): siRNA sense strand
guuugaccacuauuuauga

SEQ ID NO: 198770 - RNA, 19 nt, Homo sapiens
  misc_RNA (1)...(19): siRNA sense strand
gcuuauaggacugccauga

SEQ ID NO: 198771 - RNA, 19 nt, Homo sapiens
  misc_RNA (1)...(19): siRNA sense strand
caucaggccaaauguaaca

SEQ ID NO: 198772 - RNA, 19 nt, Homo sapiens
  misc_RNA (1)...(19): siRNA sense strand
gauucuauccaaauuccaa

SEQ ID NO: 198773 - RNA, 19 nt, Homo sapiens
  misc_RNA (1)...(19): siRNA sense strand
ggcaaguucaacaggauuu

SEQ ID NO: 198774 - RNA, 19 nt, Homo sapiens
  misc_RNA (1)...(19): siRNA sense strand
gaacuggcugcugaauguu

SEQ ID NO: 198775 - RNA, 19 nt, Homo sapiens
  misc_RNA (1)...(19): siRNA sense strand
cugcugaauguuuaugaua

SEQ ID NO: 198776 - RNA, 19 nt, Homo sapiens
  misc_RNA (1)...(19): siRNA sense strand
aagcaucaggccaaaugua

SEQ ID NO: 198777 - RNA, 19 nt, Homo sapiens
  misc_RNA (1)...(19): siRNA sense strand
uggcaucauuucccugugu

SEQ ID NO: 198778 - RNA, 19 nt, Homo sapiens
  misc_RNA (1)...(19): siRNA sense strand
ccaugaaacuccgaagacu

SEQ ID NO: 198779 - RNA, 19 nt, Homo sapiens
  misc_RNA (1)...(19): siRNA sense strand
auaauaagccagagaucga

SEQ ID NO: 198780 - RNA, 19 nt, Homo sapiens
  misc_RNA (1)...(19): siRNA sense strand
cuaauaauaagccagagau

SEQ ID NO: 198781 - RNA, 19 nt, Homo sapiens
  misc_RNA (1)...(19): siRNA sense strand
ugggugaaguugcauccuu

SEQ ID NO: 198782 - RNA, 19 nt, Homo sapiens
  misc_RNA (1)...(19): siRNA sense strand
caucauuucccuguguaaa

SEQ ID NO: 198783 - RNA, 19 nt, Homo sapiens
  misc_RNA (1)...(19): siRNA sense strand
gcguggauaugugucugaa

SEQ ID NO: 198784 - RNA, 19 nt, Homo sapiens
  misc_RNA (1)...(19): siRNA sense strand
gcacuaucccaugguggaa

SEQ ID NO: 198785 - RNA, 19 nt, Homo sapiens
  misc_RNA (1)...(19): siRNA sense strand
gagccugucagcugcaugu

SEQ ID NO: 198786 - RNA, 19 nt, Homo sapiens
  misc_RNA (1)...(19): siRNA sense strand
guacagauaccuuuucaag

SEQ ID NO: 198787 - RNA, 19 nt, Homo sapiens
  misc_RNA (1)...(19): siRNA sense strand
gucccucucugcguggaua

SEQ ID NO: 198788 - RNA, 19 nt, Homo sapiens
  misc_RNA (1)...(19): siRNA sense strand
ggagcugcuuccaauuugc

SEQ ID NO: 198789 - RNA, 19 nt, Homo sapiens
  misc_RNA (1)...(19): siRNA sense strand
uuagcugaccugaauaaug

SEQ ID NO: 198790 - RNA, 19 nt, Homo sapiens
  misc_RNA (1)...(19): siRNA sense strand
guggcaaguucaacaggau

SEQ ID NO: 198791 - RNA, 19 nt, Homo sapiens
  misc_RNA (1)...(19): siRNA sense strand
acaacaauuuggucaacgu

SEQ ID NO: 198792 - RNA, 19 nt, Homo sapiens
  misc_RNA (1)...(19): siRNA sense strand
gacuacaucaggagaagau

SEQ ID NO: 198793 - RNA, 19 nt, Homo sapiens
  misc_RNA (1)...(19): siRNA sense strand
uaauaagccagagaucgaa

SEQ ID NO: 198794 - RNA, 19 nt, Homo sapiens
  misc_RNA (1)...(19): siRNA sense strand
ugucagauucucagcuuau

SEQ ID NO: 198795 - RNA, 19 nt, Homo sapiens
  misc_RNA (1)...(19): siRNA sense strand
ggauauccugcagauuauu

SEQ ID NO: 198796 - RNA, 19 nt, Homo sapiens
  misc_RNA (1)...(19): siRNA sense strand
agcaucaggccaaauguaa

SEQ ID NO: 198797 - RNA, 19 nt, Homo sapiens
  misc_RNA (1)...(19): siRNA sense strand
gcccuuugcuuggaucucu

SEQ ID NO: 198798 - RNA, 19 nt, Homo sapiens
  misc_RNA (1)...(19): siRNA sense strand
gcugaauguuuaugauacg

SEQ ID NO: 198799 - RNA, 19 nt, Homo sapiens
  misc_RNA (1)...(19): siRNA sense strand
agacuuugccaagguacua

SEQ ID NO: 198800 - RNA, 19 nt, Homo sapiens
  misc_RNA (1)...(19): siRNA sense strand
caagcaaguggcaaguuca

SEQ ID NO: 198801 - RNA, 19 nt, Homo sapiens
  misc_RNA (1)...(19): siRNA sense strand
agacaaguacagauaccuu

SEQ ID NO: 198802 - RNA, 19 nt, Homo sapiens
  misc_RNA (1)...(19): siRNA sense strand
gcaucauuucccuguguaa

SEQ ID NO: 198803 - RNA, 19 nt, Homo sapiens
  misc_RNA (1)...(19): siRNA sense strand
cugcaaagaguguccaauc

SEQ ID NO: 198804 - RNA, 19 nt, Homo sapiens
  misc_RNA (1)...(19): siRNA sense strand
cuuauaggacugccaugaa

SEQ ID NO: 198805 - RNA, 19 nt, Homo sapiens
  misc_RNA (1)...(19): siRNA sense strand
caaagaguguccaaucauu

SEQ ID NO: 198806 - RNA, 19 nt, Homo sapiens
  misc_RNA (1)...(19): siRNA sense strand
uagcugaccugaauaaugu

SEQ ID NO: 198807 - RNA, 19 nt, Homo sapiens
  misc_RNA (1)...(19): siRNA sense strand
gcaugauucuauccaaauu

SEQ ID NO: 198808 - RNA, 19 nt, Homo sapiens
  misc_RNA (1)...(19): siRNA sense strand
ugaacuggcugcugaaugu

SEQ ID NO: 198809 - RNA, 19 nt, Homo sapiens
  misc_RNA (1)...(19): siRNA sense strand
gauauccugcagauuauua

SEQ ID NO: 198810 - RNA, 19 nt, Homo sapiens
  misc_RNA (1)...(19): siRNA sense strand
gagaagauguucgagacuu

SEQ ID NO: 198811 - RNA, 19 nt, Homo sapiens
  misc_RNA (1)...(19): siRNA sense strand
gcacuuuaauuaugacauc

SEQ ID NO: 198812 - RNA, 19 nt, Homo sapiens
  misc_RNA (1)...(19): siRNA sense strand
guaaagcacauuuggaaga

SEQ ID NO: 198813 - RNA, 19 nt, Homo sapiens
  misc_RNA (1)...(19): siRNA sense strand
gaauauugcacuccgacua

SEQ ID NO: 198814 - RNA, 19 nt, Homo sapiens
  misc_RNA (1)...(19): siRNA sense strand
uuauaggacugccaugaaa

SEQ ID NO: 198815 - RNA, 19 nt, Homo sapiens
  misc_RNA (1)...(19): siRNA sense strand
gggugaaguugcauccuuu

SEQ ID NO: 198816 - RNA, 19 nt, Homo sapiens
  misc_RNA (1)...(19): siRNA sense strand
gcaagagcacaacaauuug

SEQ ID NO: 198817 - RNA, 19 nt, Homo sapiens
  misc_RNA (1)...(19): siRNA sense strand
gcacaacaauuuggucaac

SEQ ID NO: 198818 - RNA, 19 nt, Homo sapiens
  misc_RNA (1)...(19): siRNA sense strand
agcaagagcacaacaauuu

SEQ ID NO: 198819 - RNA, 19 nt, Homo sapiens
  misc_RNA (1)...(19): siRNA sense strand
agaagauguucgagacuuu

SEQ ID NO: 198820 - RNA, 19 nt, Homo sapiens
  misc_RNA (1)...(19): siRNA sense strand
gagcaagagcacaacaauu

SEQ ID NO: 198821 - RNA, 19 nt, Homo sapiens
  misc_RNA (1)...(19): siRNA sense strand
ucaagcaaguggcaaguuc

SEQ ID NO: 198822 - RNA, 19 nt, Homo sapiens
  misc_RNA (1)...(19): siRNA sense strand
ccacgagacucaaacaacu

SEQ ID NO: 198823 - RNA, 19 nt, Homo sapiens
  misc_RNA (1)...(19): siRNA sense strand
cagcacaaccucaagcaaa

SEQ ID NO: 198824 - RNA, 19 nt, Homo sapiens
  misc_RNA (1)...(19): siRNA sense strand
gcaaagaguguccaaucau

SEQ ID NO: 198825 - RNA, 19 nt, Homo sapiens
  misc_RNA (1)...(19): siRNA sense strand
auggauauccugcagauua

SEQ ID NO: 198826 - RNA, 19 nt, Homo sapiens
  misc_RNA (1)...(19): siRNA sense strand
uguaacaucugcaaagagu

SEQ ID NO: 198827 - RNA, 19 nt, Homo sapiens
  misc_RNA (1)...(19): siRNA sense strand
guccggagcugcuuccaau

SEQ ID NO: 198828 - RNA, 19 nt, Homo sapiens
  misc_RNA (1)...(19): siRNA sense strand
gcaaguggcaaguucaaca

SEQ ID NO: 198829 - RNA, 19 nt, Homo sapiens
  misc_RNA (1)...(19): siRNA sense strand
gcuuccaauuugcuaauaa

SEQ ID NO: 198830 - RNA, 19 nt, Homo sapiens
  misc_RNA (1)...(19): siRNA sense strand
uggaagacaaguacagaua

SEQ ID NO: 198831 - RNA, 19 nt, Homo sapiens
  misc_RNA (1)...(19): siRNA sense strand
ggauccguguccugucuuu

SEQ ID NO: 198832 - RNA, 19 nt, Homo sapiens
  misc_RNA (1)...(19): siRNA sense strand
gucuuuagcugaccugaau

SEQ ID NO: 198833 - RNA, 19 nt, Homo sapiens
  misc_RNA (1)...(19): siRNA sense strand
gacaaguacagauaccuuu

SEQ ID NO: 198834 - RNA, 19 nt, Homo sapiens
  misc_RNA (1)...(19): siRNA sense strand
ccaagcaucaggccaaaug

SEQ ID NO: 198835 - RNA, 19 nt, Homo sapiens
  misc_RNA (1)...(19): siRNA sense strand
ggagcaagagcacaacaau

SEQ ID NO: 198836 - RNA, 19 nt, Homo sapiens
  misc_RNA (1)...(19): siRNA sense strand
guguaaagcacauuuggaa

SEQ ID NO: 198837 - RNA, 19 nt, Homo sapiens
  misc_RNA (1)...(19): siRNA sense strand
caagacaguugggugaagu

SEQ ID NO: 198838 - RNA, 19 nt, Homo sapiens
  misc_RNA (1)...(19): siRNA sense strand
gaagauguucgagacuuug

SEQ ID NO: 198839 - RNA, 19 nt, Homo sapiens
  misc_RNA (1)...(19): siRNA sense strand
gucagauucucagcuuaua

SEQ ID NO: 198840 - RNA, 19 nt, Homo sapiens
  misc_RNA (1)...(19): siRNA sense strand
uaacaucugcaaagagugu

SEQ ID NO: 198841 - RNA, 19 nt, Homo sapiens
  misc_RNA (1)...(19): siRNA sense strand
cggagcugcuuccaauuug

SEQ ID NO: 198842 - RNA, 19 nt, Homo sapiens
  misc_RNA (1)...(19): siRNA sense strand
gaagacaaguacagauacc

SEQ ID NO: 198843 - RNA, 19 nt, Homo sapiens
  misc_RNA (1)...(19): siRNA sense strand
ccauggauauccugcagau

SEQ ID NO: 198844 - RNA, 19 nt, Homo sapiens
  misc_RNA (1)...(19): siRNA sense strand
ggcaucauuucccugugua

SEQ ID NO: 198845 - RNA, 19 nt, Homo sapiens
  misc_RNA (1)...(19): siRNA sense strand
uggauauccugcagauuau

SEQ ID NO: 198846 - RNA, 19 nt, Homo sapiens
  misc_RNA (1)...(19): siRNA sense strand
ggaagacaaguacagauac

SEQ ID NO: 198847 - RNA, 19 nt, Homo sapiens
  misc_RNA (1)...(19): siRNA sense strand
ugcaaagaguguccaauca

SEQ ID NO: 198848 - RNA, 19 nt, Homo sapiens
  misc_RNA (1)...(19): siRNA sense strand
guggauaugugucugaacu

SEQ ID NO: 198849 - RNA, 19 nt, Homo sapiens
  misc_RNA (1)...(19): siRNA sense strand
acuggcugcugaauguuua

SEQ ID NO: 198850 - RNA, 19 nt, Homo sapiens
  misc_RNA (1)...(19): siRNA sense strand
acuaucccaugguggaaua

SEQ ID NO: 198851 - RNA, 19 nt, Homo sapiens
  misc_RNA (1)...(19): siRNA sense strand
ccggagcugcuuccaauuu

SEQ ID NO: 198852 - RNA, 19 nt, Homo sapiens
  misc_RNA (1)...(19): siRNA sense strand
ccaaauuccaagacaguug

SEQ ID NO: 198853 - RNA, 19 nt, Homo sapiens
  misc_RNA (1)...(19): siRNA sense strand
cagaaacugccaagcauca

SEQ ID NO: 198854 - RNA, 19 nt, Homo sapiens
  misc_RNA (1)...(19): siRNA sense strand
uaugacaucugccaaagcu

SEQ ID NO: 198855 - RNA, 19 nt, Homo sapiens
  misc_RNA (1)...(19): siRNA sense strand
aaugucagauucucagcuu

SEQ ID NO: 198856 - RNA, 19 nt, Homo sapiens
  misc_RNA (1)...(19): siRNA sense strand
ucgagacuuugccaaggua

SEQ ID NO: 198857 - RNA, 19 nt, Homo sapiens
  misc_RNA (1)...(19): siRNA sense strand
gcaaaaggccauaaaaugc

SEQ ID NO: 198858 - RNA, 19 nt, Homo sapiens
  misc_RNA (1)...(19): siRNA sense strand
cugcaugauucuauccaaa

SEQ ID NO: 198859 - RNA, 19 nt, Homo sapiens
  misc_RNA (1)...(19): siRNA sense strand
uaaagcacauuuggaagac

SEQ ID NO: 198860 - RNA, 19 nt, Homo sapiens
  misc_RNA (1)...(19): siRNA sense strand
acaggagucuaaagcacuu

SEQ ID NO: 198861 - RNA, 19 nt, Homo sapiens
  misc_RNA (1)...(19): siRNA sense strand
acagauaccuuuucaagca

SEQ ID NO: 198862 - RNA, 19 nt, Homo sapiens
  misc_RNA (1)...(19): siRNA sense strand
aagcacauuuggaagacaa

SEQ ID NO: 198863 - RNA, 19 nt, Homo sapiens
  misc_RNA (1)...(19): siRNA sense strand
gcuaauaauaagccagaga

SEQ ID NO: 198864 - RNA, 19 nt, Homo sapiens
  misc_RNA (1)...(19): siRNA sense strand
caagagcacaacaauuugg

SEQ ID NO: 198865 - RNA, 19 nt, Homo sapiens
  misc_RNA (1)...(19): siRNA sense strand
ccugucagcugcaugugau

SEQ ID NO: 198866 - RNA, 19 nt, Homo sapiens
  misc_RNA (1)...(19): siRNA sense strand
gcugcugaauguuuaugau

SEQ ID NO: 198867 - RNA, 19 nt, Homo sapiens
  misc_RNA (1)...(19): siRNA sense strand
acagagcucuaccagucuu

SEQ ID NO: 198868 - RNA, 19 nt, Homo sapiens
  misc_RNA (1)...(19): siRNA sense strand
acaguugggugaaguugca

SEQ ID NO: 198869 - RNA, 19 nt, Homo sapiens
  misc_RNA (1)...(19): siRNA sense strand
guuugaccacuauuuauga

SEQ ID NO: 198870 - RNA, 19 nt, Homo sapiens
  misc_RNA (1)...(19): siRNA sense strand
gcuuauaggacugccauga

SEQ ID NO: 198871 - RNA, 19 nt, Homo sapiens
  misc_RNA (1)...(19): siRNA sense strand
caucaggccaaauguaaca

SEQ ID NO: 198872 - RNA, 19 nt, Homo sapiens
  misc_RNA (1)...(19): siRNA sense strand
gauucuauccaaauuccaa

SEQ ID NO: 198873 - RNA, 19 nt, Homo sapiens
  misc_RNA (1)...(19): siRNA sense strand
ggcaaguucaacaggauuu

SEQ ID NO: 198874 - RNA, 19 nt, Homo sapiens
  misc_RNA (1)...(19): siRNA sense strand
gaacuggcugcugaauguu

SEQ ID NO: 198875 - RNA, 19 nt, Homo sapiens
  misc_RNA (1)...(19): siRNA sense strand
cugcugaauguuuaugaua

SEQ ID NO: 198876 - RNA, 19 nt, Homo sapiens
  misc_RNA (1)...(19): siRNA sense strand
aagcaucaggccaaaugua

SEQ ID NO: 198877 - RNA, 19 nt, Homo sapiens
  misc_RNA (1)...(19): siRNA sense strand
uggcaucauuucccugugu

SEQ ID NO: 198878 - RNA, 19 nt, Homo sapiens
  misc_RNA (1)...(19): siRNA sense strand
ccaugaaacuccgaagacu

SEQ ID NO: 198879 - RNA, 19 nt, Homo sapiens
  misc_RNA (1)...(19): siRNA sense strand
auaauaagccagagaucga

SEQ ID NO: 198880 - RNA, 19 nt, Homo sapiens
  misc_RNA (1)...(19): siRNA sense strand
cuaauaauaagccagagau

SEQ ID NO: 198881 - RNA, 19 nt, Homo sapiens
  misc_RNA (1)...(19): siRNA sense strand
ugggugaaguugcauccuu

SEQ ID NO: 198882 - RNA, 19 nt, Homo sapiens
  misc_RNA (1)...(19): siRNA sense strand
caucauuucccuguguaaa

SEQ ID NO: 198883 - RNA, 19 nt, Homo sapiens
  misc_RNA (1)...(19): siRNA sense strand
gcguggauaugugucugaa

SEQ ID NO: 198884 - RNA, 19 nt, Homo sapiens
  misc_RNA (1)...(19): siRNA sense strand
gcacuaucccaugguggaa

SEQ ID NO: 198885 - RNA, 19 nt, Homo sapiens
  misc_RNA (1)...(19): siRNA sense strand
gagccugucagcugcaugu

SEQ ID NO: 198886 - RNA, 19 nt, Homo sapiens
  misc_RNA (1)...(19): siRNA sense strand
guacagauaccuuuucaag

SEQ ID NO: 198887 - RNA, 19 nt, Homo sapiens
  misc_RNA (1)...(19): siRNA sense strand
gucccucucugcguggaua

SEQ ID NO: 198888 - RNA, 19 nt, Homo sapiens
  misc_RNA (1)...(19): siRNA sense strand
ggagcugcuuccaauuugc

SEQ ID NO: 198889 - RNA, 19 nt, Homo sapiens
  misc_RNA (1)...(19): siRNA sense strand
uuagcugaccugaauaaug

SEQ ID NO: 198890 - RNA, 19 nt, Homo sapiens
  misc_RNA (1)...(19): siRNA sense strand
guggcaaguucaacaggau

SEQ ID NO: 198891 - RNA, 19 nt, Homo sapiens
  misc_RNA (1)...(19): siRNA sense strand
acaacaauuuggucaacgu

SEQ ID NO: 198892 - RNA, 19 nt, Homo sapiens
  misc_RNA (1)...(19): siRNA sense strand
gacuacaucaggagaagau

SEQ ID NO: 198893 - RNA, 19 nt, Homo sapiens
  misc_RNA (1)...(19): siRNA sense strand
uaauaagccagagaucgaa

SEQ ID NO: 198894 - RNA, 19 nt, Homo sapiens
  misc_RNA (1)...(19): siRNA sense strand
ugucagauucucagcuuau

SEQ ID NO: 198895 - RNA, 19 nt, Homo sapiens
  misc_RNA (1)...(19): siRNA sense strand
ggauauccugcagauuauu

SEQ ID NO: 198896 - RNA, 19 nt, Homo sapiens
  misc_RNA (1)...(19): siRNA sense strand
agcaucaggccaaauguaa

SEQ ID NO: 198897 - RNA, 19 nt, Homo sapiens
  misc_RNA (1)...(19): siRNA sense strand
gcccuuugcuuggaucucu

SEQ ID NO: 198898 - RNA, 19 nt, Homo sapiens
  misc_RNA (1)...(19): siRNA sense strand
gcugaauguuuaugauacg

SEQ ID NO: 198899 - RNA, 19 nt, Homo sapiens
  misc_RNA (1)...(19): siRNA sense strand
agacuuugccaagguacua

SEQ ID NO: 198900 - RNA, 19 nt, Homo sapiens
  misc_RNA (1)...(19): siRNA sense strand
caagcaaguggcaaguuca

SEQ ID NO: 198901 - RNA, 19 nt, Homo sapiens
  misc_RNA (1)...(19): siRNA sense strand
agacaaguacagauaccuu

SEQ ID NO: 198902 - RNA, 19 nt, Homo sapiens
  misc_RNA (1)...(19): siRNA sense strand
gcaucauuucccuguguaa

SEQ ID NO: 198903 - RNA, 19 nt, Homo sapiens
  misc_RNA (1)...(19): siRNA sense strand
cugcaaagaguguccaauc

SEQ ID NO: 198904 - RNA, 19 nt, Homo sapiens
  misc_RNA (1)...(19): siRNA sense strand
cuuauaggacugccaugaa

SEQ ID NO: 198905 - RNA, 19 nt, Homo sapiens
  misc_RNA (1)...(19): siRNA sense strand
caaagaguguccaaucauu

SEQ ID NO: 198906 - RNA, 19 nt, Homo sapiens
  misc_RNA (1)...(19): siRNA sense strand
uagcugaccugaauaaugu

SEQ ID NO: 198907 - RNA, 19 nt, Homo sapiens
  misc_RNA (1)...(19): siRNA sense strand
gcaugauucuauccaaauu

SEQ ID NO: 198908 - RNA, 19 nt, Homo sapiens
  misc_RNA (1)...(19): siRNA sense strand
ugaacuggcugcugaaugu

SEQ ID NO: 198909 - RNA, 19 nt, Homo sapiens
  misc_RNA (1)...(19): siRNA sense strand
gauauccugcagauuauua

SEQ ID NO: 198910 - RNA, 19 nt, Homo sapiens
  misc_RNA (1)...(19): siRNA sense strand
gagaagauguucgagacuu

SEQ ID NO: 198911 - RNA, 19 nt, Homo sapiens
  misc_RNA (1)...(19): siRNA sense strand
gcacuuuaauuaugacauc

SEQ ID NO: 198912 - RNA, 19 nt, Homo sapiens
  misc_RNA (1)...(19): siRNA sense strand
guaaagcacauuuggaaga

SEQ ID NO: 198913 - RNA, 19 nt, Homo sapiens
  misc_RNA (1)...(19): siRNA sense strand
gaauauugcacuccgacua

SEQ ID NO: 198914 - RNA, 19 nt, Homo sapiens
  misc_RNA (1)...(19): siRNA sense strand
uuauaggacugccaugaaa

SEQ ID NO: 198915 - RNA, 19 nt, Homo sapiens
  misc_RNA (1)...(19): siRNA sense strand
gggugaaguugcauccuuu

SEQ ID NO: 198916 - RNA, 19 nt, Homo sapiens
  misc_RNA (1)...(19): siRNA sense strand
gcaagagcacaacaauuug

SEQ ID NO: 198917 - RNA, 19 nt, Homo sapiens
  misc_RNA (1)...(19): siRNA sense strand
gcacaacaauuuggucaac

SEQ ID NO: 198918 - RNA, 19 nt, Homo sapiens
  misc_RNA (1)...(19): siRNA sense strand
agcaagagcacaacaauuu

SEQ ID NO: 198919 - RNA, 19 nt, Homo sapiens
  misc_RNA (1)...(19): siRNA sense strand
agaagauguucgagacuuu

SEQ ID NO: 198920 - RNA, 19 nt, Homo sapiens
  misc_RNA (1)...(19): siRNA sense strand
gagcaagagcacaacaauu

SEQ ID NO: 198921 - RNA, 19 nt, Homo sapiens
  misc_RNA (1)...(19): siRNA sense strand
ucaagcaaguggcaaguuc

SEQ ID NO: 198922 - RNA, 19 nt, Homo sapiens
  misc_RNA (1)...(19): siRNA sense strand
ccacgagacucaaacaacu

SEQ ID NO: 198923 - RNA, 19 nt, Homo sapiens
  misc_RNA (1)...(19): siRNA sense strand
cagcacaaccucaagcaaa

SEQ ID NO: 198924 - RNA, 19 nt, Homo sapiens
  misc_RNA (1)...(19): siRNA sense strand
gcaaagaguguccaaucau

SEQ ID NO: 198925 - RNA, 19 nt, Homo sapiens
  misc_RNA (1)...(19): siRNA sense strand
auggauauccugcagauua

SEQ ID NO: 198926 - RNA, 19 nt, Homo sapiens
  misc_RNA (1)...(19): siRNA sense strand
uguaacaucugcaaagagu

SEQ ID NO: 198927 - RNA, 19 nt, Homo sapiens
  misc_RNA (1)...(19): siRNA sense strand
guccggagcugcuuccaau

SEQ ID NO: 198928 - RNA, 19 nt, Homo sapiens
  misc_RNA (1)...(19): siRNA sense strand
gcaaguggcaaguucaaca

SEQ ID NO: 198929 - RNA, 19 nt, Homo sapiens
  misc_RNA (1)...(19): siRNA sense strand
gcuuccaauuugcuaauaa

SEQ ID NO: 198930 - RNA, 19 nt, Homo sapiens
  misc_RNA (1)...(19): siRNA sense strand
uggaagacaaguacagaua

SEQ ID NO: 198931 - RNA, 19 nt, Homo sapiens
  misc_RNA (1)...(19): siRNA sense strand
ggauccguguccugucuuu

SEQ ID NO: 198932 - RNA, 19 nt, Homo sapiens
  misc_RNA (1)...(19): siRNA sense strand
gucuuuagcugaccugaau

SEQ ID NO: 198933 - RNA, 19 nt, Homo sapiens
  misc_RNA (1)...(19): siRNA sense strand
gacaaguacagauaccuuu

SEQ ID NO: 198934 - RNA, 19 nt, Homo sapiens
  misc_RNA (1)...(19): siRNA sense strand
ccaagcaucaggccaaaug

SEQ ID NO: 198935 - RNA, 19 nt, Homo sapiens
  misc_RNA (1)...(19): siRNA sense strand
ggagcaagagcacaacaau

SEQ ID NO: 198936 - RNA, 19 nt, Homo sapiens
  misc_RNA (1)...(19): siRNA sense strand
guguaaagcacauuuggaa

SEQ ID NO: 198937 - RNA, 19 nt, Homo sapiens
  misc_RNA (1)...(19): siRNA sense strand
caagacaguugggugaagu

SEQ ID NO: 198938 - RNA, 19 nt, Homo sapiens
  misc_RNA (1)...(19): siRNA sense strand
gaagauguucgagacuuug

SEQ ID NO: 198939 - RNA, 19 nt, Homo sapiens
  misc_RNA (1)...(19): siRNA sense strand
gucagauucucagcuuaua

SEQ ID NO: 198940 - RNA, 19 nt, Homo sapiens
  misc_RNA (1)...(19): siRNA sense strand
uaacaucugcaaagagugu

SEQ ID NO: 198941 - RNA, 19 nt, Homo sapiens
  misc_RNA (1)...(19): siRNA sense strand
cggagcugcuuccaauuug

SEQ ID NO: 198942 - RNA, 19 nt, Homo sapiens
  misc_RNA (1)...(19): siRNA sense strand
gaagacaaguacagauacc

SEQ ID NO: 198943 - RNA, 19 nt, Homo sapiens
  misc_RNA (1)...(19): siRNA sense strand
ccauggauauccugcagau

SEQ ID NO: 198944 - RNA, 19 nt, Homo sapiens
  misc_RNA (1)...(19): siRNA sense strand
ggcaucauuucccugugua

SEQ ID NO: 198945 - RNA, 19 nt, Homo sapiens
  misc_RNA (1)...(19): siRNA sense strand
uggauauccugcagauuau

SEQ ID NO: 198946 - RNA, 19 nt, Homo sapiens
  misc_RNA (1)...(19): siRNA sense strand
ggaagacaaguacagauac

SEQ ID NO: 198947 - RNA, 19 nt, Homo sapiens
  misc_RNA (1)...(19): siRNA sense strand
ugcaaagaguguccaauca

SEQ ID NO: 198948 - RNA, 19 nt, Homo sapiens
  misc_RNA (1)...(19): siRNA sense strand
guggauaugugucugaacu

SEQ ID NO: 198949 - RNA, 19 nt, Homo sapiens
  misc_RNA (1)...(19): siRNA sense strand
acuggcugcugaauguuua

SEQ ID NO: 198950 - RNA, 19 nt, Homo sapiens
  misc_RNA (1)...(19): siRNA sense strand
acuaucccaugguggaaua

SEQ ID NO: 198951 - RNA, 19 nt, Homo sapiens
  misc_RNA (1)...(19): siRNA sense strand
ccggagcugcuuccaauuu

SEQ ID NO: 198952 - RNA, 19 nt, Homo sapiens
  misc_RNA (1)...(19): siRNA sense strand
ccaaauuccaagacaguug

SEQ ID NO: 198953 - RNA, 19 nt, Homo sapiens
  misc_RNA (1)...(19): siRNA sense strand
cagaaacugccaagcauca

SEQ ID NO: 198954 - RNA, 19 nt, Homo sapiens
  misc_RNA (1)...(19): siRNA sense strand
uaugacaucugccaaagcu

SEQ ID NO: 198955 - RNA, 19 nt, Homo sapiens
  misc_RNA (1)...(19): siRNA sense strand
aaugucagauucucagcuu

SEQ ID NO: 198956 - RNA, 19 nt, Homo sapiens
  misc_RNA (1)...(19): siRNA sense strand
ucgagacuuugccaaggua

SEQ ID NO: 198957 - RNA, 19 nt, Homo sapiens
  misc_RNA (1)...(19): siRNA sense strand
gcaaaaggccauaaaaugc

SEQ ID NO: 198958 - RNA, 19 nt, Homo sapiens
  misc_RNA (1)...(19): siRNA sense strand
cugcaugauucuauccaaa

SEQ ID NO: 198959 - RNA, 19 nt, Homo sapiens
  misc_RNA (1)...(19): siRNA sense strand
uaaagcacauuuggaagac

SEQ ID NO: 198960 - RNA, 19 nt, Homo sapiens
  misc_RNA (1)...(19): siRNA sense strand
acaggagucuaaagcacuu

SEQ ID NO: 198961 - RNA, 19 nt, Homo sapiens
  misc_RNA (1)...(19): siRNA sense strand
acagauaccuuuucaagca

SEQ ID NO: 198962 - RNA, 19 nt, Homo sapiens
  misc_RNA (1)...(19): siRNA sense strand
aagcacauuuggaagacaa

SEQ ID NO: 198963 - RNA, 19 nt, Homo sapiens
  misc_RNA (1)...(19): siRNA sense strand
gcuaauaauaagccagaga

SEQ ID NO: 198964 - RNA, 19 nt, Homo sapiens
  misc_RNA (1)...(19): siRNA sense strand
caagagcacaacaauuugg

SEQ ID NO: 198965 - RNA, 19 nt, Homo sapiens
  misc_RNA (1)...(19): siRNA sense strand
ccugucagcugcaugugau

SEQ ID NO: 198966 - RNA, 19 nt, Homo sapiens
  misc_RNA (1)...(19): siRNA sense strand
gcugcugaauguuuaugau

SEQ ID NO: 198967 - RNA, 19 nt, Homo sapiens
  misc_RNA (1)...(19): siRNA sense strand
acagagcucuaccagucuu

SEQ ID NO: 198968 - RNA, 19 nt, Homo sapiens
  misc_RNA (1)...(19): siRNA sense strand
acaguugggugaaguugca

SEQ ID NO: 198969 - RNA, 19 nt, Homo sapiens
  misc_RNA (1)...(19): siRNA sense strand
guuugaccacuauuuauga

SEQ ID NO: 198970 - RNA, 19 nt, Homo sapiens
  misc_RNA (1)...(19): siRNA sense strand
gcuuauaggacugccauga

SEQ ID NO: 198971 - RNA, 19 nt, Homo sapiens
  misc_RNA (1)...(19): siRNA sense strand
caucaggccaaauguaaca

SEQ ID NO: 198972 - RNA, 19 nt, Homo sapiens
  misc_RNA (1)...(19): siRNA sense strand
gauucuauccaaauuccaa

SEQ ID NO: 198973 - RNA, 19 nt, Homo sapiens
  misc_RNA (1)...(19): siRNA sense strand
ggcaaguucaacaggauuu

SEQ ID NO: 198974 - RNA, 19 nt, Homo sapiens
  misc_RNA (1)...(19): siRNA sense strand
gaacuggcugcugaauguu

SEQ ID NO: 198975 - RNA, 19 nt, Homo sapiens
  misc_RNA (1)...(19): siRNA sense strand
cugcugaauguuuaugaua

SEQ ID NO: 198976 - RNA, 19 nt, Homo sapiens
  misc_RNA (1)...(19): siRNA sense strand
aagcaucaggccaaaugua

SEQ ID NO: 198977 - RNA, 19 nt, Homo sapiens
  misc_RNA (1)...(19): siRNA sense strand
uggcaucauuucccugugu

SEQ ID NO: 198978 - RNA, 19 nt, Homo sapiens
  misc_RNA (1)...(19): siRNA sense strand
ccaugaaacuccgaagacu

SEQ ID NO: 198979 - RNA, 19 nt, Homo sapiens
  misc_RNA (1)...(19): siRNA sense strand
auaauaagccagagaucga

SEQ ID NO: 198980 - RNA, 19 nt, Homo sapiens
  misc_RNA (1)...(19): siRNA sense strand
cuaauaauaagccagagau

SEQ ID NO: 198981 - RNA, 19 nt, Homo sapiens
  misc_RNA (1)...(19): siRNA sense strand
ugggugaaguugcauccuu

SEQ ID NO: 198982 - RNA, 19 nt, Homo sapiens
  misc_RNA (1)...(19): siRNA sense strand
caucauuucccuguguaaa

SEQ ID NO: 198983 - RNA, 19 nt, Homo sapiens
  misc_RNA (1)...(19): siRNA sense strand
gcguggauaugugucugaa

SEQ ID NO: 198984 - RNA, 19 nt, Homo sapiens
  misc_RNA (1)...(19): siRNA sense strand
gcacuaucccaugguggaa

SEQ ID NO: 198985 - RNA, 19 nt, Homo sapiens
  misc_RNA (1)...(19): siRNA sense strand
gagccugucagcugcaugu

SEQ ID NO: 198986 - RNA, 19 nt, Homo sapiens
  misc_RNA (1)...(19): siRNA sense strand
guacagauaccuuuucaag

SEQ ID NO: 198987 - RNA, 19 nt, Homo sapiens
  misc_RNA (1)...(19): siRNA sense strand
gucccucucugcguggaua

SEQ ID NO: 198988 - RNA, 19 nt, Homo sapiens
  misc_RNA (1)...(19): siRNA sense strand
ggagcugcuuccaauuugc

SEQ ID NO: 198989 - RNA, 19 nt, Homo sapiens
  misc_RNA (1)...(19): siRNA sense strand
uuagcugaccugaauaaug

SEQ ID NO: 198990 - RNA, 19 nt, Homo sapiens
  misc_RNA (1)...(19): siRNA sense strand
guggcaaguucaacaggau

SEQ ID NO: 198991 - RNA, 19 nt, Homo sapiens
  misc_RNA (1)...(19): siRNA sense strand
acaacaauuuggucaacgu

SEQ ID NO: 198992 - RNA, 19 nt, Homo sapiens
  misc_RNA (1)...(19): siRNA sense strand
gacuacaucaggagaagau

SEQ ID NO: 198993 - RNA, 19 nt, Homo sapiens
  misc_RNA (1)...(19): siRNA sense strand
uaauaagccagagaucgaa

SEQ ID NO: 198994 - RNA, 19 nt, Homo sapiens
  misc_RNA (1)...(19): siRNA sense strand
ugucagauucucagcuuau

SEQ ID NO: 198995 - RNA, 19 nt, Homo sapiens
  misc_RNA (1)...(19): siRNA sense strand
ggauauccugcagauuauu

SEQ ID NO: 198996 - RNA, 19 nt, Homo sapiens
  misc_RNA (1)...(19): siRNA sense strand
agcaucaggccaaauguaa

SEQ ID NO: 198997 - RNA, 19 nt, Homo sapiens
  misc_RNA (1)...(19): siRNA sense strand
gcccuuugcuuggaucucu

SEQ ID NO: 198998 - RNA, 19 nt, Homo sapiens
  misc_RNA (1)...(19): siRNA sense strand
gcugaauguuuaugauacg

SEQ ID NO: 198999 - RNA, 19 nt, Homo sapiens
  misc_RNA (1)...(19): siRNA sense strand
agacuuugccaagguacua

SEQ ID NO: 199000 - RNA, 19 nt, Homo sapiens
  misc_RNA (1)...(19): siRNA sense strand
caagcaaguggcaaguuca

SEQ ID NO: 199001 - RNA, 19 nt, Homo sapiens
  misc_RNA (1)...(19): siRNA sense strand
agacaaguacagauaccuu

SEQ ID NO: 199002 - RNA, 19 nt, Homo sapiens
  misc_RNA (1)...(19): siRNA sense strand
gcaucauuucccuguguaa

SEQ ID NO: 199003 - RNA, 19 nt, Homo sapiens
  misc_RNA (1)...(19): siRNA sense strand
cugcaaagaguguccaauc

SEQ ID NO: 199004 - RNA, 19 nt, Homo sapiens
  misc_RNA (1)...(19): siRNA sense strand
cuuauaggacugccaugaa

SEQ ID NO: 199005 - RNA, 19 nt, Homo sapiens
  misc_RNA (1)...(19): siRNA sense strand
caaagaguguccaaucauu

SEQ ID NO: 199006 - RNA, 19 nt, Homo sapiens
  misc_RNA (1)...(19): siRNA sense strand
uagcugaccugaauaaugu

SEQ ID NO: 199007 - RNA, 19 nt, Homo sapiens
  misc_RNA (1)...(19): siRNA sense strand
gcaugauucuauccaaauu

SEQ ID NO: 199008 - RNA, 19 nt, Homo sapiens
  misc_RNA (1)...(19): siRNA sense strand
ugaacuggcugcugaaugu

SEQ ID NO: 199009 - RNA, 19 nt, Homo sapiens
  misc_RNA (1)...(19): siRNA sense strand
gauauccugcagauuauua

SEQ ID NO: 199010 - RNA, 19 nt, Homo sapiens
  misc_RNA (1)...(19): siRNA sense strand
gagaagauguucgagacuu

SEQ ID NO: 199011 - RNA, 19 nt, Homo sapiens
  misc_RNA (1)...(19): siRNA sense strand
gcacuuuaauuaugacauc

SEQ ID NO: 199012 - RNA, 19 nt, Homo sapiens
  misc_RNA (1)...(19): siRNA sense strand
guaaagcacauuuggaaga

SEQ ID NO: 199013 - RNA, 19 nt, Homo sapiens
  misc_RNA (1)...(19): siRNA sense strand
gaauauugcacuccgacua

SEQ ID NO: 199014 - RNA, 19 nt, Homo sapiens
  misc_RNA (1)...(19): siRNA sense strand
uuauaggacugccaugaaa

SEQ ID NO: 199015 - RNA, 19 nt, Homo sapiens
  misc_RNA (1)...(19): siRNA sense strand
gggugaaguugcauccuuu

SEQ ID NO: 199016 - RNA, 19 nt, Homo sapiens
  misc_RNA (1)...(19): siRNA sense strand
gcaagagcacaacaauuug

SEQ ID NO: 199017 - RNA, 19 nt, Homo sapiens
  misc_RNA (1)...(19): siRNA sense strand
gcacaacaauuuggucaac

SEQ ID NO: 199018 - RNA, 19 nt, Homo sapiens
  misc_RNA (1)...(19): siRNA sense strand
agcaagagcacaacaauuu

SEQ ID NO: 199019 - RNA, 19 nt, Homo sapiens
  misc_RNA (1)...(19): siRNA sense strand
agaagauguucgagacuuu

SEQ ID NO: 199020 - RNA, 19 nt, Homo sapiens
  misc_RNA (1)...(19): siRNA sense strand
gagcaagagcacaacaauu

SEQ ID NO: 199021 - RNA, 19 nt, Homo sapiens
  misc_RNA (1)...(19): siRNA sense strand
ucaagcaaguggcaaguuc

SEQ ID NO: 199022 - RNA, 19 nt, Homo sapiens
  misc_RNA (1)...(19): siRNA sense strand
ccacgagacucaaacaacu

SEQ ID NO: 199023 - RNA, 19 nt, Homo sapiens
  misc_RNA (1)...(19): siRNA sense strand
cagcacaaccucaagcaaa

SEQ ID NO: 199024 - RNA, 19 nt, Homo sapiens
  misc_RNA (1)...(19): siRNA sense strand
gcaaagaguguccaaucau

SEQ ID NO: 199025 - RNA, 19 nt, Homo sapiens
  misc_RNA (1)...(19): siRNA sense strand
auggauauccugcagauua

SEQ ID NO: 199026 - RNA, 19 nt, Homo sapiens
  misc_RNA (1)...(19): siRNA sense strand
uguaacaucugcaaagagu

SEQ ID NO: 199027 - RNA, 19 nt, Homo sapiens
  misc_RNA (1)...(19): siRNA sense strand
guccggagcugcuuccaau

SEQ ID NO: 199028 - RNA, 19 nt, Homo sapiens
  misc_RNA (1)...(19): siRNA sense strand
gcaaguggcaaguucaaca

SEQ ID NO: 199029 - RNA, 19 nt, Homo sapiens
  misc_RNA (1)...(19): siRNA sense strand
gcuuccaauuugcuaauaa

SEQ ID NO: 199030 - RNA, 19 nt, Homo sapiens
  misc_RNA (1)...(19): siRNA sense strand
uggaagacaaguacagaua

SEQ ID NO: 199031 - RNA, 19 nt, Homo sapiens
  misc_RNA (1)...(19): siRNA sense strand
ggauccguguccugucuuu

SEQ ID NO: 199032 - RNA, 19 nt, Homo sapiens
  misc_RNA (1)...(19): siRNA sense strand
gucuuuagcugaccugaau

SEQ ID NO: 199033 - RNA, 19 nt, Homo sapiens
  misc_RNA (1)...(19): siRNA sense strand
gacaaguacagauaccuuu

SEQ ID NO: 199034 - RNA, 19 nt, Homo sapiens
  misc_RNA (1)...(19): siRNA sense strand
ccaagcaucaggccaaaug

SEQ ID NO: 199035 - RNA, 19 nt, Homo sapiens
  misc_RNA (1)...(19): siRNA sense strand
ggagcaagagcacaacaau

SEQ ID NO: 199036 - RNA, 19 nt, Homo sapiens
  misc_RNA (1)...(19): siRNA sense strand
guguaaagcacauuuggaa

SEQ ID NO: 199037 - RNA, 19 nt, Homo sapiens
  misc_RNA (1)...(19): siRNA sense strand
caagacaguugggugaagu

SEQ ID NO: 199038 - RNA, 19 nt, Homo sapiens
  misc_RNA (1)...(19): siRNA sense strand
gaagauguucgagacuuug

SEQ ID NO: 199039 - RNA, 19 nt, Homo sapiens
  misc_RNA (1)...(19): siRNA sense strand
gucagauucucagcuuaua

SEQ ID NO: 199040 - RNA, 19 nt, Homo sapiens
  misc_RNA (1)...(19): siRNA sense strand
uaacaucugcaaagagugu

SEQ ID NO: 199041 - RNA, 19 nt, Homo sapiens
  misc_RNA (1)...(19): siRNA sense strand
cggagcugcuuccaauuug

SEQ ID NO: 199042 - RNA, 19 nt, Homo sapiens
  misc_RNA (1)...(19): siRNA sense strand
gaagacaaguacagauacc

SEQ ID NO: 199043 - RNA, 19 nt, Homo sapiens
  misc_RNA (1)...(19): siRNA sense strand
ccauggauauccugcagau

SEQ ID NO: 199044 - RNA, 19 nt, Homo sapiens
  misc_RNA (1)...(19): siRNA sense strand
ggcaucauuucccugugua

SEQ ID NO: 199045 - RNA, 19 nt, Homo sapiens
  misc_RNA (1)...(19): siRNA sense strand
uggauauccugcagauuau

SEQ ID NO: 199046 - RNA, 19 nt, Homo sapiens
  misc_RNA (1)...(19): siRNA sense strand
ggaagacaaguacagauac

SEQ ID NO: 199047 - RNA, 19 nt, Homo sapiens
  misc_RNA (1)...(19): siRNA sense strand
ugcaaagaguguccaauca

SEQ ID NO: 199048 - RNA, 19 nt, Homo sapiens
  misc_RNA (1)...(19): siRNA sense strand
guggauaugugucugaacu

SEQ ID NO: 199049 - RNA, 19 nt, Homo sapiens
  misc_RNA (1)...(19): siRNA sense strand
acuggcugcugaauguuua

SEQ ID NO: 199050 - RNA, 19 nt, Homo sapiens
  misc_RNA (1)...(19): siRNA sense strand
acuaucccaugguggaaua

SEQ ID NO: 199051 - RNA, 19 nt, Homo sapiens
  misc_RNA (1)...(19): siRNA sense strand
ccggagcugcuuccaauuu

SEQ ID NO: 199052 - RNA, 19 nt, Homo sapiens
  misc_RNA (1)...(19): siRNA sense strand
ccaaauuccaagacaguug

SEQ ID NO: 199053 - RNA, 19 nt, Homo sapiens
  misc_RNA (1)...(19): siRNA sense strand
cagaaacugccaagcauca

SEQ ID NO: 199054 - RNA, 19 nt, Homo sapiens
  misc_RNA (1)...(19): siRNA sense strand
uaugacaucugccaaagcu

SEQ ID NO: 199055 - RNA, 19 nt, Homo sapiens
  misc_RNA (1)...(19): siRNA sense strand
aaugucagauucucagcuu

SEQ ID NO: 199056 - RNA, 19 nt, Homo sapiens
  misc_RNA (1)...(19): siRNA sense strand
ucgagacuuugccaaggua

SEQ ID NO: 199057 - RNA, 19 nt, Homo sapiens
  misc_RNA (1)...(19): siRNA sense strand
gcaaaaggccauaaaaugc

SEQ ID NO: 199058 - RNA, 19 nt, Homo sapiens
  misc_RNA (1)...(19): siRNA sense strand
cugcaugauucuauccaaa

SEQ ID NO: 199059 - RNA, 19 nt, Homo sapiens
  misc_RNA (1)...(19): siRNA sense strand
uaaagcacauuuggaagac

SEQ ID NO: 199060 - RNA, 19 nt, Homo sapiens
  misc_RNA (1)...(19): siRNA sense strand
acaggagucuaaagcacuu

SEQ ID NO: 199061 - RNA, 19 nt, Homo sapiens
  misc_RNA (1)...(19): siRNA sense strand
acagauaccuuuucaagca

SEQ ID NO: 199062 - RNA, 19 nt, Homo sapiens
  misc_RNA (1)...(19): siRNA sense strand
aagcacauuuggaagacaa

SEQ ID NO: 199063 - RNA, 19 nt, Homo sapiens
  misc_RNA (1)...(19): siRNA sense strand
gcuaauaauaagccagaga

SEQ ID NO: 199064 - RNA, 19 nt, Homo sapiens
  misc_RNA (1)...(19): siRNA sense strand
caagagcacaacaauuugg

SEQ ID NO: 199065 - RNA, 19 nt, Homo sapiens
  misc_RNA (1)...(19): siRNA sense strand
ccugucagcugcaugugau

SEQ ID NO: 199066 - RNA, 19 nt, Homo sapiens
  misc_RNA (1)...(19): siRNA sense strand
gcugcugaauguuuaugau

SEQ ID NO: 199067 - RNA, 19 nt, Homo sapiens
  misc_RNA (1)...(19): siRNA sense strand
acagagcucuaccagucuu

SEQ ID NO: 199068 - RNA, 19 nt, Homo sapiens
  misc_RNA (1)...(19): siRNA sense strand
acaguugggugaaguugca

SEQ ID NO: 199069 - RNA, 19 nt, Homo sapiens
  misc_RNA (1)...(19): siRNA sense strand
guuugaccacuauuuauga

SEQ ID NO: 199070 - RNA, 19 nt, Homo sapiens
  misc_RNA (1)...(19): siRNA sense strand
gcuuauaggacugccauga

SEQ ID NO: 199071 - RNA, 19 nt, Homo sapiens
  misc_RNA (1)...(19): siRNA sense strand
caucaggccaaauguaaca

SEQ ID NO: 199072 - RNA, 19 nt, Homo sapiens
  misc_RNA (1)...(19): siRNA sense strand
gauucuauccaaauuccaa

SEQ ID NO: 199073 - RNA, 19 nt, Homo sapiens
  misc_RNA (1)...(19): siRNA sense strand
ggcaaguucaacaggauuu

SEQ ID NO: 199074 - RNA, 19 nt, Homo sapiens
  misc_RNA (1)...(19): siRNA sense strand
gaacuggcugcugaauguu

SEQ ID NO: 199075 - RNA, 19 nt, Homo sapiens
  misc_RNA (1)...(19): siRNA sense strand
cugcugaauguuuaugaua

SEQ ID NO: 199076 - RNA, 19 nt, Homo sapiens
  misc_RNA (1)...(19): siRNA sense strand
aagcaucaggccaaaugua

SEQ ID NO: 199077 - RNA, 19 nt, Homo sapiens
  misc_RNA (1)...(19): siRNA sense strand
uggcaucauuucccugugu

SEQ ID NO: 199078 - RNA, 19 nt, Homo sapiens
  misc_RNA (1)...(19): siRNA sense strand
ccaugaaacuccgaagacu

SEQ ID NO: 199079 - RNA, 19 nt, Homo sapiens
  misc_RNA (1)...(19): siRNA sense strand
auaauaagccagagaucga

SEQ ID NO: 199080 - RNA, 19 nt, Homo sapiens
  misc_RNA (1)...(19): siRNA sense strand
cuaauaauaagccagagau

SEQ ID NO: 199081 - RNA, 19 nt, Homo sapiens
  misc_RNA (1)...(19): siRNA sense strand
ugggugaaguugcauccuu

SEQ ID NO: 199082 - RNA, 19 nt, Homo sapiens
  misc_RNA (1)...(19): siRNA sense strand
caucauuucccuguguaaa

SEQ ID NO: 199083 - RNA, 19 nt, Homo sapiens
  misc_RNA (1)...(19): siRNA sense strand
gcguggauaugugucugaa

SEQ ID NO: 199084 - RNA, 19 nt, Homo sapiens
  misc_RNA (1)...(19): siRNA sense strand
gcacuaucccaugguggaa

SEQ ID NO: 199085 - RNA, 19 nt, Homo sapiens
  misc_RNA (1)...(19): siRNA sense strand
gagccugucagcugcaugu

SEQ ID NO: 199086 - RNA, 19 nt, Homo sapiens
  misc_RNA (1)...(19): siRNA sense strand
guacagauaccuuuucaag

SEQ ID NO: 199087 - RNA, 19 nt, Homo sapiens
  misc_RNA (1)...(19): siRNA sense strand
gucccucucugcguggaua

SEQ ID NO: 199088 - RNA, 19 nt, Homo sapiens
  misc_RNA (1)...(19): siRNA sense strand
ggagcugcuuccaauuugc

SEQ ID NO: 199089 - RNA, 19 nt, Homo sapiens
  misc_RNA (1)...(19): siRNA sense strand
uuagcugaccugaauaaug

SEQ ID NO: 199090 - RNA, 19 nt, Homo sapiens
  misc_RNA (1)...(19): siRNA sense strand
guggcaaguucaacaggau

SEQ ID NO: 199091 - RNA, 19 nt, Homo sapiens
  misc_RNA (1)...(19): siRNA sense strand
acaacaauuuggucaacgu

SEQ ID NO: 199092 - RNA, 19 nt, Homo sapiens
  misc_RNA (1)...(19): siRNA sense strand
gacuacaucaggagaagau

SEQ ID NO: 199093 - RNA, 19 nt, Homo sapiens
  misc_RNA (1)...(19): siRNA sense strand
uaauaagccagagaucgaa

SEQ ID NO: 199094 - RNA, 19 nt, Homo sapiens
  misc_RNA (1)...(19): siRNA sense strand
ugucagauucucagcuuau

SEQ ID NO: 199095 - RNA, 19 nt, Homo sapiens
  misc_RNA (1)...(19): siRNA sense strand
ggauauccugcagauuauu

SEQ ID NO: 199096 - RNA, 19 nt, Homo sapiens
  misc_RNA (1)...(19): siRNA sense strand
agcaucaggccaaauguaa

SEQ ID NO: 199097 - RNA, 19 nt, Homo sapiens
  misc_RNA (1)...(19): siRNA sense strand
gcccuuugcuuggaucucu

SEQ ID NO: 199098 - RNA, 19 nt, Homo sapiens
  misc_RNA (1)...(19): siRNA sense strand
gcugaauguuuaugauacg

SEQ ID NO: 199099 - RNA, 19 nt, Homo sapiens
  misc_RNA (1)...(19): siRNA sense strand
agacuuugccaagguacua

SEQ ID NO: 199100 - RNA, 19 nt, Homo sapiens
  misc_RNA (1)...(19): siRNA sense strand
caagcaaguggcaaguuca

SEQ ID NO: 199101 - RNA, 19 nt, Homo sapiens
  misc_RNA (1)...(19): siRNA sense strand
agacaaguacagauaccuu

SEQ ID NO: 199102 - RNA, 19 nt, Homo sapiens
  misc_RNA (1)...(19): siRNA sense strand
gcaucauuucccuguguaa

SEQ ID NO: 199103 - RNA, 19 nt, Homo sapiens
  misc_RNA (1)...(19): siRNA sense strand
cugcaaagaguguccaauc

SEQ ID NO: 199104 - RNA, 19 nt, Homo sapiens
  misc_RNA (1)...(19): siRNA sense strand
cuuauaggacugccaugaa

SEQ ID NO: 199105 - RNA, 19 nt, Homo sapiens
  misc_RNA (1)...(19): siRNA sense strand
caaagaguguccaaucauu

SEQ ID NO: 199106 - RNA, 19 nt, Homo sapiens
  misc_RNA (1)...(19): siRNA sense strand
uagcugaccugaauaaugu

SEQ ID NO: 199107 - RNA, 19 nt, Homo sapiens
  misc_RNA (1)...(19): siRNA sense strand
gcaugauucuauccaaauu

SEQ ID NO: 199108 - RNA, 19 nt, Homo sapiens
  misc_RNA (1)...(19): siRNA sense strand
ugaacuggcugcugaaugu

SEQ ID NO: 199109 - RNA, 19 nt, Homo sapiens
  misc_RNA (1)...(19): siRNA sense strand
gauauccugcagauuauua

SEQ ID NO: 199110 - RNA, 19 nt, Homo sapiens
  misc_RNA (1)...(19): siRNA sense strand
gagaagauguucgagacuu

SEQ ID NO: 199111 - RNA, 19 nt, Homo sapiens
  misc_RNA (1)...(19): siRNA sense strand
gcacuuuaauuaugacauc

SEQ ID NO: 199112 - RNA, 19 nt, Homo sapiens
  misc_RNA (1)...(19): siRNA sense strand
guaaagcacauuuggaaga

SEQ ID NO: 199113 - RNA, 19 nt, Homo sapiens
  misc_RNA (1)...(19): siRNA sense strand
gaauauugcacuccgacua

SEQ ID NO: 199114 - RNA, 19 nt, Homo sapiens
  misc_RNA (1)...(19): siRNA sense strand
uuauaggacugccaugaaa

SEQ ID NO: 199115 - RNA, 19 nt, Homo sapiens
  misc_RNA (1)...(19): siRNA sense strand
gggugaaguugcauccuuu

SEQ ID NO: 199116 - RNA, 19 nt, Homo sapiens
  misc_RNA (1)...(19): siRNA sense strand
gcaagagcacaacaauuug

SEQ ID NO: 199117 - RNA, 19 nt, Homo sapiens
  misc_RNA (1)...(19): siRNA sense strand
gcacaacaauuuggucaac

SEQ ID NO: 199118 - RNA, 19 nt, Homo sapiens
  misc_RNA (1)...(19): siRNA sense strand
agcaagagcacaacaauuu

SEQ ID NO: 199119 - RNA, 19 nt, Homo sapiens
  misc_RNA (1)...(19): siRNA sense strand
agaagauguucgagacuuu

SEQ ID NO: 199120 - RNA, 19 nt, Homo sapiens
  misc_RNA (1)...(19): siRNA sense strand
gagcaagagcacaacaauu

SEQ ID NO: 199121 - RNA, 19 nt, Homo sapiens
  misc_RNA (1)...(19): siRNA sense strand
ucaagcaaguggcaaguuc

SEQ ID NO: 199122 - RNA, 19 nt, Homo sapiens
  misc_RNA (1)...(19): siRNA sense strand
ccacgagacucaaacaacu

SEQ ID NO: 199123 - RNA, 19 nt, Homo sapiens
  misc_RNA (1)...(19): siRNA sense strand
cagcacaaccucaagcaaa

SEQ ID NO: 199124 - RNA, 19 nt, Homo sapiens
  misc_RNA (1)...(19): siRNA sense strand
gcaaagaguguccaaucau

SEQ ID NO: 199125 - RNA, 19 nt, Homo sapiens
  misc_RNA (1)...(19): siRNA sense strand
auggauauccugcagauua

SEQ ID NO: 199126 - RNA, 19 nt, Homo sapiens
  misc_RNA (1)...(19): siRNA sense strand
uguaacaucugcaaagagu

SEQ ID NO: 199127 - RNA, 19 nt, Homo sapiens
  misc_RNA (1)...(19): siRNA sense strand
guccggagcugcuuccaau

SEQ ID NO: 199128 - RNA, 19 nt, Homo sapiens
  misc_RNA (1)...(19): siRNA sense strand
gcaaguggcaaguucaaca

SEQ ID NO: 199129 - RNA, 19 nt, Homo sapiens
  misc_RNA (1)...(19): siRNA sense strand
gcuuccaauuugcuaauaa

SEQ ID NO: 199130 - RNA, 19 nt, Homo sapiens
  misc_RNA (1)...(19): siRNA sense strand
uggaagacaaguacagaua

SEQ ID NO: 199131 - RNA, 19 nt, Homo sapiens
  misc_RNA (1)...(19): siRNA sense strand
ggauccguguccugucuuu

SEQ ID NO: 199132 - RNA, 19 nt, Homo sapiens
  misc_RNA (1)...(19): siRNA sense strand
gucuuuagcugaccugaau

SEQ ID NO: 199133 - RNA, 19 nt, Homo sapiens
  misc_RNA (1)...(19): siRNA sense strand
gacaaguacagauaccuuu

SEQ ID NO: 199134 - RNA, 19 nt, Homo sapiens
  misc_RNA (1)...(19): siRNA sense strand
ccaagcaucaggccaaaug

SEQ ID NO: 199135 - RNA, 19 nt, Homo sapiens
  misc_RNA (1)...(19): siRNA sense strand
ggagcaagagcacaacaau

SEQ ID NO: 199136 - RNA, 19 nt, Homo sapiens
  misc_RNA (1)...(19): siRNA sense strand
guguaaagcacauuuggaa

SEQ ID NO: 199137 - RNA, 19 nt, Homo sapiens
  misc_RNA (1)...(19): siRNA sense strand
caagacaguugggugaagu

SEQ ID NO: 199138 - RNA, 19 nt, Homo sapiens
  misc_RNA (1)...(19): siRNA sense strand
gaagauguucgagacuuug

SEQ ID NO: 199139 - RNA, 19 nt, Homo sapiens
  misc_RNA (1)...(19): siRNA sense strand
gucagauucucagcuuaua

SEQ ID NO: 199140 - RNA, 19 nt, Homo sapiens
  misc_RNA (1)...(19): siRNA sense strand
uaacaucugcaaagagugu

SEQ ID NO: 199141 - RNA, 19 nt, Homo sapiens
  misc_RNA (1)...(19): siRNA sense strand
cggagcugcuuccaauuug

SEQ ID NO: 199142 - RNA, 19 nt, Homo sapiens
  misc_RNA (1)...(19): siRNA sense strand
gaagacaaguacagauacc

SEQ ID NO: 199143 - RNA, 19 nt, Homo sapiens
  misc_RNA (1)...(19): siRNA sense strand
ccauggauauccugcagau

SEQ ID NO: 199144 - RNA, 19 nt, Homo sapiens
  misc_RNA (1)...(19): siRNA sense strand
ggcaucauuucccugugua

SEQ ID NO: 199145 - RNA, 19 nt, Homo sapiens
  misc_RNA (1)...(19): siRNA sense strand
uggauauccugcagauuau

SEQ ID NO: 199146 - RNA, 19 nt, Homo sapiens
  misc_RNA (1)...(19): siRNA sense strand
ggaagacaaguacagauac

SEQ ID NO: 199147 - RNA, 19 nt, Homo sapiens
  misc_RNA (1)...(19): siRNA sense strand
ugcaaagaguguccaauca

SEQ ID NO: 199148 - RNA, 19 nt, Homo sapiens
  misc_RNA (1)...(19): siRNA sense strand
guggauaugugucugaacu

SEQ ID NO: 199149 - RNA, 19 nt, Homo sapiens
  misc_RNA (1)...(19): siRNA sense strand
acuggcugcugaauguuua

SEQ ID NO: 199150 - RNA, 19 nt, Homo sapiens
  misc_RNA (1)...(19): siRNA sense strand
acuaucccaugguggaaua

SEQ ID NO: 199151 - RNA, 19 nt, Homo sapiens
  misc_RNA (1)...(19): siRNA sense strand
ccggagcugcuuccaauuu

SEQ ID NO: 199152 - RNA, 19 nt, Homo sapiens
  misc_RNA (1)...(19): siRNA sense strand
ccaaauuccaagacaguug

SEQ ID NO: 199153 - RNA, 19 nt, Homo sapiens
  misc_RNA (1)...(19): siRNA sense strand
cagaaacugccaagcauca

SEQ ID NO: 199154 - RNA, 19 nt, Homo sapiens
  misc_RNA (1)...(19): siRNA sense strand
uaugacaucugccaaagcu

SEQ ID NO: 199155 - RNA, 19 nt, Homo sapiens
  misc_RNA (1)...(19): siRNA sense strand
aaugucagauucucagcuu

SEQ ID NO: 199156 - RNA, 19 nt, Homo sapiens
  misc_RNA (1)...(19): siRNA sense strand
ucgagacuuugccaaggua

SEQ ID NO: 199157 - RNA, 19 nt, Homo sapiens
  misc_RNA (1)...(19): siRNA sense strand
gcaaaaggccauaaaaugc

SEQ ID NO: 199158 - RNA, 19 nt, Homo sapiens
  misc_RNA (1)...(19): siRNA sense strand
cugcaugauucuauccaaa

SEQ ID NO: 199159 - RNA, 19 nt, Homo sapiens
  misc_RNA (1)...(19): siRNA sense strand
uaaagcacauuuggaagac

SEQ ID NO: 199160 - RNA, 19 nt, Homo sapiens
  misc_RNA (1)...(19): siRNA sense strand
acaggagucuaaagcacuu

SEQ ID NO: 199161 - RNA, 19 nt, Homo sapiens
  misc_RNA (1)...(19): siRNA sense strand
acagauaccuuuucaagca

SEQ ID NO: 199162 - RNA, 19 nt, Homo sapiens
  misc_RNA (1)...(19): siRNA sense strand
aagcacauuuggaagacaa

SEQ ID NO: 199163 - RNA, 19 nt, Homo sapiens
  misc_RNA (1)...(19): siRNA sense strand
gcuaauaauaagccagaga

SEQ ID NO: 199164 - RNA, 19 nt, Homo sapiens
  misc_RNA (1)...(19): siRNA sense strand
caagagcacaacaauuugg

SEQ ID NO: 199165 - RNA, 19 nt, Homo sapiens
  misc_RNA (1)...(19): siRNA sense strand
ccugucagcugcaugugau

SEQ ID NO: 199166 - RNA, 19 nt, Homo sapiens
  misc_RNA (1)...(19): siRNA sense strand
gcugcugaauguuuaugau

SEQ ID NO: 199167 - RNA, 19 nt, Homo sapiens
  misc_RNA (1)...(19): siRNA sense strand
acagagcucuaccagucuu

SEQ ID NO: 199168 - RNA, 19 nt, Homo sapiens
  misc_RNA (1)...(19): siRNA sense strand
acaguugggugaaguugca

SEQ ID NO: 199169 - RNA, 19 nt, Homo sapiens
  misc_RNA (1)...(19): siRNA sense strand
guuugaccacuauuuauga

SEQ ID NO: 199170 - RNA, 19 nt, Homo sapiens
  misc_RNA (1)...(19): siRNA sense strand
gcuuauaggacugccauga

SEQ ID NO: 199171 - RNA, 19 nt, Homo sapiens
  misc_RNA (1)...(19): siRNA sense strand
caucaggccaaauguaaca

SEQ ID NO: 199172 - RNA, 19 nt, Homo sapiens
  misc_RNA (1)...(19): siRNA sense strand
gauucuauccaaauuccaa

SEQ ID NO: 199173 - RNA, 19 nt, Homo sapiens
  misc_RNA (1)...(19): siRNA sense strand
ggcaaguucaacaggauuu

SEQ ID NO: 199174 - RNA, 19 nt, Homo sapiens
  misc_RNA (1)...(19): siRNA sense strand
gaacuggcugcugaauguu

SEQ ID NO: 199175 - RNA, 19 nt, Homo sapiens
  misc_RNA (1)...(19): siRNA sense strand
cugcugaauguuuaugaua

SEQ ID NO: 199176 - RNA, 19 nt, Homo sapiens
  misc_RNA (1)...(19): siRNA sense strand
aagcaucaggccaaaugua

SEQ ID NO: 199177 - RNA, 19 nt, Homo sapiens
  misc_RNA (1)...(19): siRNA sense strand
uggcaucauuucccugugu

SEQ ID NO: 199178 - RNA, 19 nt, Homo sapiens
  misc_RNA (1)...(19): siRNA sense strand
ccaugaaacuccgaagacu

SEQ ID NO: 199179 - RNA, 19 nt, Homo sapiens
  misc_RNA (1)...(19): siRNA sense strand
auaauaagccagagaucga

SEQ ID NO: 199180 - RNA, 19 nt, Homo sapiens
  misc_RNA (1)...(19): siRNA sense strand
cuaauaauaagccagagau

SEQ ID NO: 199181 - RNA, 19 nt, Homo sapiens
  misc_RNA (1)...(19): siRNA sense strand
ugggugaaguugcauccuu

SEQ ID NO: 199182 - RNA, 19 nt, Homo sapiens
  misc_RNA (1)...(19): siRNA sense strand
caucauuucccuguguaaa

SEQ ID NO: 199183 - RNA, 19 nt, Homo sapiens
  misc_RNA (1)...(19): siRNA sense strand
gcguggauaugugucugaa

SEQ ID NO: 199184 - RNA, 19 nt, Homo sapiens
  misc_RNA (1)...(19): siRNA sense strand
gcacuaucccaugguggaa

SEQ ID NO: 199185 - RNA, 19 nt, Homo sapiens
  misc_RNA (1)...(19): siRNA sense strand
gagccugucagcugcaugu

SEQ ID NO: 199186 - RNA, 19 nt, Homo sapiens
  misc_RNA (1)...(19): siRNA sense strand
guacagauaccuuuucaag

SEQ ID NO: 199187 - RNA, 19 nt, Homo sapiens
  misc_RNA (1)...(19): siRNA sense strand
gucccucucugcguggaua

SEQ ID NO: 199188 - RNA, 19 nt, Homo sapiens
  misc_RNA (1)...(19): siRNA sense strand
ggagcugcuuccaauuugc

SEQ ID NO: 199189 - RNA, 19 nt, Homo sapiens
  misc_RNA (1)...(19): siRNA sense strand
uuagcugaccugaauaaug

SEQ ID NO: 199190 - RNA, 19 nt, Homo sapiens
  misc_RNA (1)...(19): siRNA sense strand
guggcaaguucaacaggau

SEQ ID NO: 199191 - RNA, 19 nt, Homo sapiens
  misc_RNA (1)...(19): siRNA sense strand
acaacaauuuggucaacgu

SEQ ID NO: 199192 - RNA, 19 nt, Homo sapiens
  misc_RNA (1)...(19): siRNA sense strand
gacuacaucaggagaagau

SEQ ID NO: 199193 - RNA, 19 nt, Homo sapiens
  misc_RNA (1)...(19): siRNA sense strand
uaauaagccagagaucgaa

SEQ ID NO: 199194 - RNA, 19 nt, Homo sapiens
  misc_RNA (1)...(19): siRNA sense strand
ugucagauucucagcuuau

SEQ ID NO: 199195 - RNA, 19 nt, Homo sapiens
  misc_RNA (1)...(19): siRNA sense strand
ggauauccugcagauuauu

SEQ ID NO: 199196 - RNA, 19 nt, Homo sapiens
  misc_RNA (1)...(19): siRNA sense strand
agcaucaggccaaauguaa

SEQ ID NO: 199197 - RNA, 19 nt, Homo sapiens
  misc_RNA (1)...(19): siRNA sense strand
gcccuuugcuuggaucucu

SEQ ID NO: 199198 - RNA, 19 nt, Homo sapiens
  misc_RNA (1)...(19): siRNA sense strand
gcugaauguuuaugauacg

SEQ ID NO: 199199 - RNA, 19 nt, Homo sapiens
  misc_RNA (1)...(19): siRNA sense strand
agacuuugccaagguacua

SEQ ID NO: 199200 - RNA, 19 nt, Homo sapiens
  misc_RNA (1)...(19): siRNA sense strand
caagcaaguggcaaguuca

SEQ ID NO: 199201 - RNA, 19 nt, Homo sapiens
  misc_RNA (1)...(19): siRNA sense strand
agacaaguacagauaccuu

SEQ ID NO: 199202 - RNA, 19 nt, Homo sapiens
  misc_RNA (1)...(19): siRNA sense strand
gcaucauuucccuguguaa

SEQ ID NO: 199203 - RNA, 19 nt, Homo sapiens
  misc_RNA (1)...(19): siRNA sense strand
cugcaaagaguguccaauc

SEQ ID NO: 199204 - RNA, 19 nt, Homo sapiens
  misc_RNA (1)...(19): siRNA sense strand
cuuauaggacugccaugaa

SEQ ID NO: 199205 - RNA, 19 nt, Homo sapiens
  misc_RNA (1)...(19): siRNA sense strand
caaagaguguccaaucauu

SEQ ID NO: 199206 - RNA, 19 nt, Homo sapiens
  misc_RNA (1)...(19): siRNA sense strand
uagcugaccugaauaaugu

SEQ ID NO: 199207 - RNA, 19 nt, Homo sapiens
  misc_RNA (1)...(19): siRNA sense strand
gcaugauucuauccaaauu

SEQ ID NO: 199208 - RNA, 19 nt, Homo sapiens
  misc_RNA (1)...(19): siRNA sense strand
ugaacuggcugcugaaugu

SEQ ID NO: 199209 - RNA, 19 nt, Homo sapiens
  misc_RNA (1)...(19): siRNA sense strand
gauauccugcagauuauua

SEQ ID NO: 199210 - RNA, 19 nt, Homo sapiens
  misc_RNA (1)...(19): siRNA sense strand
gagaagauguucgagacuu

SEQ ID NO: 199211 - RNA, 19 nt, Homo sapiens
  misc_RNA (1)...(19): siRNA sense strand
gcacuuuaauuaugacauc

SEQ ID NO: 199212 - RNA, 19 nt, Homo sapiens
  misc_RNA (1)...(19): siRNA sense strand
guaaagcacauuuggaaga

SEQ ID NO: 199213 - RNA, 19 nt, Homo sapiens
  misc_RNA (1)...(19): siRNA sense strand
gaauauugcacuccgacua

SEQ ID NO: 199214 - RNA, 19 nt, Homo sapiens
  misc_RNA (1)...(19): siRNA sense strand
uuauaggacugccaugaaa

SEQ ID NO: 199215 - RNA, 19 nt, Homo sapiens
  misc_RNA (1)...(19): siRNA sense strand
gggugaaguugcauccuuu

SEQ ID NO: 199216 - RNA, 19 nt, Homo sapiens
  misc_RNA (1)...(19): siRNA sense strand
gcaagagcacaacaauuug

SEQ ID NO: 199217 - RNA, 19 nt, Homo sapiens
  misc_RNA (1)...(19): siRNA sense strand
gcacaacaauuuggucaac

SEQ ID NO: 199218 - RNA, 19 nt, Homo sapiens
  misc_RNA (1)...(19): siRNA sense strand
agcaagagcacaacaauuu

SEQ ID NO: 199219 - RNA, 19 nt, Homo sapiens
  misc_RNA (1)...(19): siRNA sense strand
agaagauguucgagacuuu

SEQ ID NO: 199220 - RNA, 19 nt, Homo sapiens
  misc_RNA (1)...(19): siRNA sense strand
gagcaagagcacaacaauu

SEQ ID NO: 199221 - RNA, 19 nt, Homo sapiens
  misc_RNA (1)...(19): siRNA sense strand
ucaagcaaguggcaaguuc

SEQ ID NO: 199222 - RNA, 19 nt, Homo sapiens
  misc_RNA (1)...(19): siRNA sense strand
ccacgagacucaaacaacu

SEQ ID NO: 199223 - RNA, 19 nt, Homo sapiens
  misc_RNA (1)...(19): siRNA sense strand
cagcacaaccucaagcaaa

SEQ ID NO: 199224 - RNA, 19 nt, Homo sapiens
  misc_RNA (1)...(19): siRNA sense strand
gcaaagaguguccaaucau

SEQ ID NO: 199225 - RNA, 19 nt, Homo sapiens
  misc_RNA (1)...(19): siRNA sense strand
auggauauccugcagauua

SEQ ID NO: 199226 - RNA, 19 nt, Homo sapiens
  misc_RNA (1)...(19): siRNA sense strand
uguaacaucugcaaagagu

SEQ ID NO: 199227 - RNA, 19 nt, Homo sapiens
  misc_RNA (1)...(19): siRNA sense strand
guccggagcugcuuccaau

SEQ ID NO: 199228 - RNA, 19 nt, Homo sapiens
  misc_RNA (1)...(19): siRNA sense strand
gcaaguggcaaguucaaca

SEQ ID NO: 199229 - RNA, 19 nt, Homo sapiens
  misc_RNA (1)...(19): siRNA sense strand
gcuuccaauuugcuaauaa

SEQ ID NO: 199230 - RNA, 19 nt, Homo sapiens
  misc_RNA (1)...(19): siRNA sense strand
uggaagacaaguacagaua

SEQ ID NO: 199231 - RNA, 19 nt, Homo sapiens
  misc_RNA (1)...(19): siRNA sense strand
ggauccguguccugucuuu

SEQ ID NO: 199232 - RNA, 19 nt, Homo sapiens
  misc_RNA (1)...(19): siRNA sense strand
gucuuuagcugaccugaau

SEQ ID NO: 199233 - RNA, 19 nt, Homo sapiens
  misc_RNA (1)...(19): siRNA sense strand
gacaaguacagauaccuuu

SEQ ID NO: 199234 - RNA, 19 nt, Homo sapiens
  misc_RNA (1)...(19): siRNA sense strand
ccaagcaucaggccaaaug

SEQ ID NO: 199235 - RNA, 19 nt, Homo sapiens
  misc_RNA (1)...(19): siRNA sense strand
ggagcaagagcacaacaau

SEQ ID NO: 199236 - RNA, 19 nt, Homo sapiens
  misc_RNA (1)...(19): siRNA sense strand
guguaaagcacauuuggaa

SEQ ID NO: 199237 - RNA, 19 nt, Homo sapiens
  misc_RNA (1)...(19): siRNA sense strand
caagacaguugggugaagu

SEQ ID NO: 199238 - RNA, 19 nt, Homo sapiens
  misc_RNA (1)...(19): siRNA sense strand
gaagauguucgagacuuug

SEQ ID NO: 199239 - RNA, 19 nt, Homo sapiens
  misc_RNA (1)...(19): siRNA sense strand
gucagauucucagcuuaua

SEQ ID NO: 199240 - RNA, 19 nt, Homo sapiens
  misc_RNA (1)...(19): siRNA sense strand
uaacaucugcaaagagugu

SEQ ID NO: 199241 - RNA, 19 nt, Homo sapiens
  misc_RNA (1)...(19): siRNA sense strand
cggagcugcuuccaauuug

SEQ ID NO: 199242 - RNA, 19 nt, Homo sapiens
  misc_RNA (1)...(19): siRNA sense strand
gaagacaaguacagauacc

SEQ ID NO: 199243 - RNA, 19 nt, Homo sapiens
  misc_RNA (1)...(19): siRNA sense strand
ccauggauauccugcagau

SEQ ID NO: 199244 - RNA, 19 nt, Homo sapiens
  misc_RNA (1)...(19): siRNA sense strand
ggcaucauuucccugugua

SEQ ID NO: 199245 - RNA, 19 nt, Homo sapiens
  misc_RNA (1)...(19): siRNA sense strand
uggauauccugcagauuau

SEQ ID NO: 199246 - RNA, 19 nt, Homo sapiens
  misc_RNA (1)...(19): siRNA sense strand
ggaagacaaguacagauac

SEQ ID NO: 199247 - RNA, 19 nt, Homo sapiens
  misc_RNA (1)...(19): siRNA sense strand
ugcaaagaguguccaauca

SEQ ID NO: 199248 - RNA, 19 nt, Homo sapiens
  misc_RNA (1)...(19): siRNA sense strand
guggauaugugucugaacu

SEQ ID NO: 199249 - RNA, 19 nt, Homo sapiens
  misc_RNA (1)...(19): siRNA sense strand
acuggcugcugaauguuua

SEQ ID NO: 199250 - RNA, 19 nt, Homo sapiens
  misc_RNA (1)...(19): siRNA sense strand
acuaucccaugguggaaua

SEQ ID NO: 199251 - RNA, 19 nt, Homo sapiens
  misc_RNA (1)...(19): siRNA sense strand
ccggagcugcuuccaauuu

SEQ ID NO: 199252 - RNA, 19 nt, Homo sapiens
  misc_RNA (1)...(19): siRNA sense strand
ccaaauuccaagacaguug

SEQ ID NO: 199253 - RNA, 19 nt, Homo sapiens
  misc_RNA (1)...(19): siRNA sense strand
cagaaacugccaagcauca

SEQ ID NO: 199254 - RNA, 19 nt, Homo sapiens
  misc_RNA (1)...(19): siRNA sense strand
uaugacaucugccaaagcu

SEQ ID NO: 199255 - RNA, 19 nt, Homo sapiens
  misc_RNA (1)...(19): siRNA sense strand
aaugucagauucucagcuu

SEQ ID NO: 199256 - RNA, 19 nt, Homo sapiens
  misc_RNA (1)...(19): siRNA sense strand
ucgagacuuugccaaggua

SEQ ID NO: 199257 - RNA, 19 nt, Homo sapiens
  misc_RNA (1)...(19): siRNA sense strand
gcaaaaggccauaaaaugc

SEQ ID NO: 199258 - RNA, 19 nt, Homo sapiens
  misc_RNA (1)...(19): siRNA sense strand
cugcaugauucuauccaaa

SEQ ID NO: 199259 - RNA, 19 nt, Homo sapiens
  misc_RNA (1)...(19): siRNA sense strand
uaaagcacauuuggaagac

SEQ ID NO: 199260 - RNA, 19 nt, Homo sapiens
  misc_RNA (1)...(19): siRNA sense strand
acaggagucuaaagcacuu

SEQ ID NO: 199261 - RNA, 19 nt, Homo sapiens
  misc_RNA (1)...(19): siRNA sense strand
acagauaccuuuucaagca

SEQ ID NO: 199262 - RNA, 19 nt, Homo sapiens
  misc_RNA (1)...(19): siRNA sense strand
aagcacauuuggaagacaa

SEQ ID NO: 199263 - RNA, 19 nt, Homo sapiens
  misc_RNA (1)...(19): siRNA sense strand
gcuaauaauaagccagaga

SEQ ID NO: 199264 - RNA, 19 nt, Homo sapiens
  misc_RNA (1)...(19): siRNA sense strand
caagagcacaacaauuugg

SEQ ID NO: 199265 - RNA, 19 nt, Homo sapiens
  misc_RNA (1)...(19): siRNA sense strand
ccugucagcugcaugugau

SEQ ID NO: 199266 - RNA, 19 nt, Homo sapiens
  misc_RNA (1)...(19): siRNA sense strand
gcugcugaauguuuaugau

SEQ ID NO: 199267 - RNA, 19 nt, Homo sapiens
  misc_RNA (1)...(19): siRNA sense strand
acagagcucuaccagucuu

SEQ ID NO: 199268 - RNA, 19 nt, Homo sapiens
  misc_RNA (1)...(19): siRNA sense strand
acaguugggugaaguugca

SEQ ID NO: 199269 - RNA, 19 nt, Homo sapiens
  misc_RNA (1)...(19): siRNA sense strand
guuugaccacuauuuauga

SEQ ID NO: 199270 - RNA, 19 nt, Homo sapiens
  misc_RNA (1)...(19): siRNA sense strand
gcuuauaggacugccauga

SEQ ID NO: 199271 - RNA, 19 nt, Homo sapiens
  misc_RNA (1)...(19): siRNA sense strand
caucaggccaaauguaaca

SEQ ID NO: 199272 - RNA, 19 nt, Homo sapiens
  misc_RNA (1)...(19): siRNA sense strand
gauucuauccaaauuccaa

SEQ ID NO: 199273 - RNA, 19 nt, Homo sapiens
  misc_RNA (1)...(19): siRNA sense strand
ggcaaguucaacaggauuu

SEQ ID NO: 199274 - RNA, 19 nt, Homo sapiens
  misc_RNA (1)...(19): siRNA sense strand
gaacuggcugcugaauguu

SEQ ID NO: 199275 - RNA, 19 nt, Homo sapiens
  misc_RNA (1)...(19): siRNA sense strand
cugcugaauguuuaugaua

SEQ ID NO: 199276 - RNA, 19 nt, Homo sapiens
  misc_RNA (1)...(19): siRNA sense strand
aagcaucaggccaaaugua

SEQ ID NO: 199277 - RNA, 19 nt, Homo sapiens
  misc_RNA (1)...(19): siRNA sense strand
uggcaucauuucccugugu

SEQ ID NO: 199278 - RNA, 19 nt, Homo sapiens
  misc_RNA (1)...(19): siRNA sense strand
ccaugaaacuccgaagacu

SEQ ID NO: 199279 - RNA, 19 nt, Homo sapiens
  misc_RNA (1)...(19): siRNA sense strand
auaauaagccagagaucga

SEQ ID NO: 199280 - RNA, 19 nt, Homo sapiens
  misc_RNA (1)...(19): siRNA sense strand
cuaauaauaagccagagau

SEQ ID NO: 199281 - RNA, 19 nt, Homo sapiens
  misc_RNA (1)...(19): siRNA sense strand
ugggugaaguugcauccuu

SEQ ID NO: 199282 - RNA, 19 nt, Homo sapiens
  misc_RNA (1)...(19): siRNA sense strand
caucauuucccuguguaaa

SEQ ID NO: 199283 - RNA, 19 nt, Homo sapiens
  misc_RNA (1)...(19): siRNA sense strand
gcguggauaugugucugaa

SEQ ID NO: 199284 - RNA, 19 nt, Homo sapiens
  misc_RNA (1)...(19): siRNA sense strand
gcacuaucccaugguggaa

SEQ ID NO: 199285 - RNA, 19 nt, Homo sapiens
  misc_RNA (1)...(19): siRNA sense strand
gagccugucagcugcaugu

SEQ ID NO: 199286 - RNA, 19 nt, Homo sapiens
  misc_RNA (1)...(19): siRNA sense strand
guacagauaccuuuucaag

SEQ ID NO: 199287 - RNA, 19 nt, Homo sapiens
  misc_RNA (1)...(19): siRNA sense strand
gucccucucugcguggaua

SEQ ID NO: 199288 - RNA, 19 nt, Homo sapiens
  misc_RNA (1)...(19): siRNA sense strand
ggagcugcuuccaauuugc

SEQ ID NO: 199289 - RNA, 19 nt, Homo sapiens
  misc_RNA (1)...(19): siRNA sense strand
uuagcugaccugaauaaug

SEQ ID NO: 199290 - RNA, 19 nt, Homo sapiens
  misc_RNA (1)...(19): siRNA sense strand
guggcaaguucaacaggau

SEQ ID NO: 199291 - RNA, 19 nt, Homo sapiens
  misc_RNA (1)...(19): siRNA sense strand
acaacaauuuggucaacgu

SEQ ID NO: 199292 - RNA, 19 nt, Homo sapiens
  misc_RNA (1)...(19): siRNA sense strand
gacuacaucaggagaagau

SEQ ID NO: 199293 - RNA, 19 nt, Homo sapiens
  misc_RNA (1)...(19): siRNA sense strand
uaauaagccagagaucgaa

SEQ ID NO: 199294 - RNA, 19 nt, Homo sapiens
  misc_RNA (1)...(19): siRNA sense strand
ugucagauucucagcuuau

SEQ ID NO: 199295 - RNA, 19 nt, Homo sapiens
  misc_RNA (1)...(19): siRNA sense strand
ggauauccugcagauuauu

SEQ ID NO: 199296 - RNA, 19 nt, Homo sapiens
  misc_RNA (1)...(19): siRNA sense strand
agcaucaggccaaauguaa

SEQ ID NO: 199297 - RNA, 19 nt, Homo sapiens
  misc_RNA (1)...(19): siRNA sense strand
gcccuuugcuuggaucucu

SEQ ID NO: 199298 - RNA, 19 nt, Homo sapiens
  misc_RNA (1)...(19): siRNA sense strand
gcugaauguuuaugauacg

SEQ ID NO: 199299 - RNA, 19 nt, Homo sapiens
  misc_RNA (1)...(19): siRNA sense strand
agacuuugccaagguacua

SEQ ID NO: 199300 - RNA, 19 nt, Homo sapiens
  misc_RNA (1)...(19): siRNA sense strand
caagcaaguggcaaguuca

SEQ ID NO: 199301 - RNA, 19 nt, Homo sapiens
  misc_RNA (1)...(19): siRNA sense strand
agacaaguacagauaccuu

SEQ ID NO: 199302 - RNA, 19 nt, Homo sapiens
  misc_RNA (1)...(19): siRNA sense strand
gcaucauuucccuguguaa

SEQ ID NO: 199303 - RNA, 19 nt, Homo sapiens
  misc_RNA (1)...(19): siRNA sense strand
cugcaaagaguguccaauc

SEQ ID NO: 199304 - RNA, 19 nt, Homo sapiens
  misc_RNA (1)...(19): siRNA sense strand
cuuauaggacugccaugaa

SEQ ID NO: 199305 - RNA, 19 nt, Homo sapiens
  misc_RNA (1)...(19): siRNA sense strand
caaagaguguccaaucauu

SEQ ID NO: 199306 - RNA, 19 nt, Homo sapiens
  misc_RNA (1)...(19): siRNA sense strand
uagcugaccugaauaaugu

SEQ ID NO: 199307 - RNA, 19 nt, Homo sapiens
  misc_RNA (1)...(19): siRNA sense strand
gcaugauucuauccaaauu

SEQ ID NO: 199308 - RNA, 19 nt, Homo sapiens
  misc_RNA (1)...(19): siRNA sense strand
ugaacuggcugcugaaugu

SEQ ID NO: 199309 - RNA, 19 nt, Homo sapiens
  misc_RNA (1)...(19): siRNA sense strand
gauauccugcagauuauua

SEQ ID NO: 199310 - RNA, 19 nt, Homo sapiens
  misc_RNA (1)...(19): siRNA sense strand
gagaagauguucgagacuu

SEQ ID NO: 199311 - RNA, 19 nt, Homo sapiens
  misc_RNA (1)...(19): siRNA sense strand
gcacuuuaauuaugacauc

SEQ ID NO: 199312 - RNA, 19 nt, Homo sapiens
  misc_RNA (1)...(19): siRNA sense strand
guaaagcacauuuggaaga

SEQ ID NO: 199313 - RNA, 19 nt, Homo sapiens
  misc_RNA (1)...(19): siRNA sense strand
gaauauugcacuccgacua

SEQ ID NO: 199314 - RNA, 19 nt, Homo sapiens
  misc_RNA (1)...(19): siRNA sense strand
uuauaggacugccaugaaa

SEQ ID NO: 199315 - RNA, 19 nt, Homo sapiens
  misc_RNA (1)...(19): siRNA sense strand
gggugaaguugcauccuuu

SEQ ID NO: 199316 - RNA, 19 nt, Homo sapiens
  misc_RNA (1)...(19): siRNA sense strand
gcaagagcacaacaauuug

SEQ ID NO: 199317 - RNA, 19 nt, Homo sapiens
  misc_RNA (1)...(19): siRNA sense strand
gcacaacaauuuggucaac

SEQ ID NO: 199318 - RNA, 19 nt, Homo sapiens
  misc_RNA (1)...(19): siRNA sense strand
agcaagagcacaacaauuu

SEQ ID NO: 199319 - RNA, 19 nt, Homo sapiens
  misc_RNA (1)...(19): siRNA sense strand
agaagauguucgagacuuu

SEQ ID NO: 199320 - RNA, 19 nt, Homo sapiens
  misc_RNA (1)...(19): siRNA sense strand
gagcaagagcacaacaauu

SEQ ID NO: 199321 - RNA, 19 nt, Homo sapiens
  misc_RNA (1)...(19): siRNA sense strand
ucaagcaaguggcaaguuc

SEQ ID NO: 199322 - RNA, 19 nt, Homo sapiens
  misc_RNA (1)...(19): siRNA sense strand
ccacgagacucaaacaacu

SEQ ID NO: 199323 - RNA, 19 nt, Homo sapiens
  misc_RNA (1)...(19): siRNA sense strand
cagcacaaccucaagcaaa

SEQ ID NO: 199324 - RNA, 19 nt, Homo sapiens
  misc_RNA (1)...(19): siRNA sense strand
gcaaagaguguccaaucau

SEQ ID NO: 199325 - RNA, 19 nt, Homo sapiens
  misc_RNA (1)...(19): siRNA sense strand
auggauauccugcagauua

SEQ ID NO: 199326 - RNA, 19 nt, Homo sapiens
  misc_RNA (1)...(19): siRNA sense strand
uguaacaucugcaaagagu

SEQ ID NO: 199327 - RNA, 19 nt, Homo sapiens
  misc_RNA (1)...(19): siRNA sense strand
guccggagcugcuuccaau

SEQ ID NO: 199328 - RNA, 19 nt, Homo sapiens
  misc_RNA (1)...(19): siRNA sense strand
gcaaguggcaaguucaaca

SEQ ID NO: 199329 - RNA, 19 nt, Homo sapiens
  misc_RNA (1)...(19): siRNA sense strand
gcuuccaauuugcuaauaa

SEQ ID NO: 199330 - RNA, 19 nt, Homo sapiens
  misc_RNA (1)...(19): siRNA sense strand
uggaagacaaguacagaua

SEQ ID NO: 199331 - RNA, 19 nt, Homo sapiens
  misc_RNA (1)...(19): siRNA sense strand
ggauccguguccugucuuu

SEQ ID NO: 199332 - RNA, 19 nt, Homo sapiens
  misc_RNA (1)...(19): siRNA sense strand
gucuuuagcugaccugaau

SEQ ID NO: 199333 - RNA, 19 nt, Homo sapiens
  misc_RNA (1)...(19): siRNA sense strand
gacaaguacagauaccuuu

SEQ ID NO: 199334 - RNA, 19 nt, Homo sapiens
  misc_RNA (1)...(19): siRNA sense strand
ccaagcaucaggccaaaug

SEQ ID NO: 199335 - RNA, 19 nt, Homo sapiens
  misc_RNA (1)...(19): siRNA sense strand
ggagcaagagcacaacaau

SEQ ID NO: 199336 - RNA, 19 nt, Homo sapiens
  misc_RNA (1)...(19): siRNA sense strand
guguaaagcacauuuggaa

SEQ ID NO: 199337 - RNA, 19 nt, Homo sapiens
  misc_RNA (1)...(19): siRNA sense strand
caagacaguugggugaagu

SEQ ID NO: 199338 - RNA, 19 nt, Homo sapiens
  misc_RNA (1)...(19): siRNA sense strand
gaagauguucgagacuuug

SEQ ID NO: 199339 - RNA, 19 nt, Homo sapiens
  misc_RNA (1)...(19): siRNA sense strand
gucagauucucagcuuaua

SEQ ID NO: 199340 - RNA, 19 nt, Homo sapiens
  misc_RNA (1)...(19): siRNA sense strand
uaacaucugcaaagagugu

SEQ ID NO: 199341 - RNA, 19 nt, Homo sapiens
  misc_RNA (1)...(19): siRNA sense strand
cggagcugcuuccaauuug

SEQ ID NO: 199342 - RNA, 19 nt, Homo sapiens
  misc_RNA (1)...(19): siRNA sense strand
gaagacaaguacagauacc

SEQ ID NO: 199343 - RNA, 19 nt, Homo sapiens
  misc_RNA (1)...(19): siRNA sense strand
ccauggauauccugcagau

SEQ ID NO: 199344 - RNA, 19 nt, Homo sapiens
  misc_RNA (1)...(19): siRNA sense strand
ggcaucauuucccugugua

SEQ ID NO: 199345 - RNA, 19 nt, Homo sapiens
  misc_RNA (1)...(19): siRNA sense strand
uggauauccugcagauuau

SEQ ID NO: 199346 - RNA, 19 nt, Homo sapiens
  misc_RNA (1)...(19): siRNA sense strand
ggaagacaaguacagauac

SEQ ID NO: 199347 - RNA, 19 nt, Homo sapiens
  misc_RNA (1)...(19): siRNA sense strand
ugcaaagaguguccaauca

SEQ ID NO: 199348 - RNA, 19 nt, Homo sapiens
  misc_RNA (1)...(19): siRNA sense strand
guggauaugugucugaacu

SEQ ID NO: 199349 - RNA, 19 nt, Homo sapiens
  misc_RNA (1)...(19): siRNA sense strand
acuggcugcugaauguuua

SEQ ID NO: 199350 - RNA, 19 nt, Homo sapiens
  misc_RNA (1)...(19): siRNA sense strand
acuaucccaugguggaaua

SEQ ID NO: 199351 - RNA, 19 nt, Homo sapiens
  misc_RNA (1)...(19): siRNA sense strand
ccggagcugcuuccaauuu

SEQ ID NO: 199352 - RNA, 19 nt, Homo sapiens
  misc_RNA (1)...(19): siRNA sense strand
ccaaauuccaagacaguug

SEQ ID NO: 199353 - RNA, 19 nt, Homo sapiens
  misc_RNA (1)...(19): siRNA sense strand
cagaaacugccaagcauca

SEQ ID NO: 199354 - RNA, 19 nt, Homo sapiens
  misc_RNA (1)...(19): siRNA sense strand
uaugacaucugccaaagcu

SEQ ID NO: 199355 - RNA, 19 nt, Homo sapiens
  misc_RNA (1)...(19): siRNA sense strand
aaugucagauucucagcuu

SEQ ID NO: 199356 - RNA, 19 nt, Homo sapiens
  misc_RNA (1)...(19): siRNA sense strand
ucgagacuuugccaaggua

SEQ ID NO: 199357 - RNA, 19 nt, Homo sapiens
  misc_RNA (1)...(19): siRNA sense strand
gcaaaaggccauaaaaugc

SEQ ID NO: 199358 - RNA, 19 nt, Homo sapiens
  misc_RNA (1)...(19): siRNA sense strand
cugcaugauucuauccaaa

SEQ ID NO: 199359 - RNA, 19 nt, Homo sapiens
  misc_RNA (1)...(19): siRNA sense strand
uaaagcacauuuggaagac

SEQ ID NO: 199360 - RNA, 19 nt, Homo sapiens
  misc_RNA (1)...(19): siRNA sense strand
acaggagucuaaagcacuu

SEQ ID NO: 199361 - RNA, 19 nt, Homo sapiens
  misc_RNA (1)...(19): siRNA sense strand
acagauaccuuuucaagca

SEQ ID NO: 199362 - RNA, 19 nt, Homo sapiens
  misc_RNA (1)...(19): siRNA sense strand
aagcacauuuggaagacaa

SEQ ID NO: 199363 - RNA, 19 nt, Homo sapiens
  misc_RNA (1)...(19): siRNA sense strand
gcuaauaauaagccagaga

SEQ ID NO: 199364 - RNA, 19 nt, Homo sapiens
  misc_RNA (1)...(19): siRNA sense strand
caagagcacaacaauuugg

SEQ ID NO: 199365 - RNA, 19 nt, Homo sapiens
  misc_RNA (1)...(19): siRNA sense strand
ccugucagcugcaugugau

SEQ ID NO: 199366 - RNA, 19 nt, Homo sapiens
  misc_RNA (1)...(19): siRNA sense strand
gcugcugaauguuuaugau

SEQ ID NO: 199367 - RNA, 19 nt, Homo sapiens
  misc_RNA (1)...(19): siRNA sense strand
acagagcucuaccagucuu

SEQ ID NO: 199368 - RNA, 19 nt, Homo sapiens
  misc_RNA (1)...(19): siRNA sense strand
acaguugggugaaguugca

SEQ ID NO: 199369 - RNA, 19 nt, Homo sapiens
  misc_RNA (1)...(19): siRNA sense strand
guuugaccacuauuuauga

SEQ ID NO: 199370 - RNA, 19 nt, Homo sapiens
  misc_RNA (1)...(19): siRNA sense strand
gcuuauaggacugccauga

SEQ ID NO: 199371 - RNA, 19 nt, Homo sapiens
  misc_RNA (1)...(19): siRNA sense strand
caucaggccaaauguaaca

SEQ ID NO: 199372 - RNA, 19 nt, Homo sapiens
  misc_RNA (1)...(19): siRNA sense strand
gauucuauccaaauuccaa

SEQ ID NO: 199373 - RNA, 19 nt, Homo sapiens
  misc_RNA (1)...(19): siRNA sense strand
ggcaaguucaacaggauuu

SEQ ID NO: 199374 - RNA, 19 nt, Homo sapiens
  misc_RNA (1)...(19): siRNA sense strand
gaacuggcugcugaauguu

SEQ ID NO: 199375 - RNA, 19 nt, Homo sapiens
  misc_RNA (1)...(19): siRNA sense strand
cugcugaauguuuaugaua

SEQ ID NO: 199376 - RNA, 19 nt, Homo sapiens
  misc_RNA (1)...(19): siRNA sense strand
aagcaucaggccaaaugua

SEQ ID NO: 199377 - RNA, 19 nt, Homo sapiens
  misc_RNA (1)...(19): siRNA sense strand
uggcaucauuucccugugu

SEQ ID NO: 199378 - RNA, 19 nt, Homo sapiens
  misc_RNA (1)...(19): siRNA sense strand
ccaugaaacuccgaagacu

SEQ ID NO: 199379 - RNA, 19 nt, Homo sapiens
  misc_RNA (1)...(19): siRNA sense strand
auaauaagccagagaucga

SEQ ID NO: 199380 - RNA, 19 nt, Homo sapiens
  misc_RNA (1)...(19): siRNA sense strand
cuaauaauaagccagagau

SEQ ID NO: 199381 - RNA, 19 nt, Homo sapiens
  misc_RNA (1)...(19): siRNA sense strand
ugggugaaguugcauccuu

SEQ ID NO: 199382 - RNA, 19 nt, Homo sapiens
  misc_RNA (1)...(19): siRNA sense strand
caucauuucccuguguaaa

SEQ ID NO: 199383 - RNA, 19 nt, Homo sapiens
  misc_RNA (1)...(19): siRNA sense strand
gcguggauaugugucugaa

SEQ ID NO: 199384 - RNA, 19 nt, Homo sapiens
  misc_RNA (1)...(19): siRNA sense strand
gcacuaucccaugguggaa

SEQ ID NO: 199385 - RNA, 19 nt, Homo sapiens
  misc_RNA (1)...(19): siRNA sense strand
gagccugucagcugcaugu

SEQ ID NO: 199386 - RNA, 19 nt, Homo sapiens
  misc_RNA (1)...(19): siRNA sense strand
guacagauaccuuuucaag

SEQ ID NO: 199387 - RNA, 19 nt, Homo sapiens
  misc_RNA (1)...(19): siRNA sense strand
gucccucucugcguggaua

SEQ ID NO: 199388 - RNA, 19 nt, Homo sapiens
  misc_RNA (1)...(19): siRNA sense strand
ggagcugcuuccaauuugc

SEQ ID NO: 199389 - RNA, 19 nt, Homo sapiens
  misc_RNA (1)...(19): siRNA sense strand
uuagcugaccugaauaaug

SEQ ID NO: 199390 - RNA, 19 nt, Homo sapiens
  misc_RNA (1)...(19): siRNA sense strand
guggcaaguucaacaggau

SEQ ID NO: 199391 - RNA, 19 nt, Homo sapiens
  misc_RNA (1)...(19): siRNA sense strand
acaacaauuuggucaacgu

SEQ ID NO: 199392 - RNA, 19 nt, Homo sapiens
  misc_RNA (1)...(19): siRNA sense strand
gacuacaucaggagaagau

SEQ ID NO: 199393 - RNA, 19 nt, Homo sapiens
  misc_RNA (1)...(19): siRNA sense strand
uaauaagccagagaucgaa

SEQ ID NO: 199394 - RNA, 19 nt, Homo sapiens
  misc_RNA (1)...(19): siRNA sense strand
ugucagauucucagcuuau

SEQ ID NO: 199395 - RNA, 19 nt, Homo sapiens
  misc_RNA (1)...(19): siRNA sense strand
ggauauccugcagauuauu

SEQ ID NO: 199396 - RNA, 19 nt, Homo sapiens
  misc_RNA (1)...(19): siRNA sense strand
agcaucaggccaaauguaa

SEQ ID NO: 199397 - RNA, 19 nt, Homo sapiens
  misc_RNA (1)...(19): siRNA sense strand
gcccuuugcuuggaucucu

SEQ ID NO: 199398 - RNA, 19 nt, Homo sapiens
  misc_RNA (1)...(19): siRNA sense strand
gcugaauguuuaugauacg

SEQ ID NO: 199399 - RNA, 19 nt, Homo sapiens
  misc_RNA (1)...(19): siRNA sense strand
agacuuugccaagguacua

SEQ ID NO: 199400 - RNA, 19 nt, Homo sapiens
  misc_RNA (1)...(19): siRNA sense strand
caagcaaguggcaaguuca

SEQ ID NO: 199401 - RNA, 19 nt, Homo sapiens
  misc_RNA (1)...(19): siRNA sense strand
agacaaguacagauaccuu

SEQ ID NO: 199402 - RNA, 19 nt, Homo sapiens
  misc_RNA (1)...(19): siRNA sense strand
gcaucauuucccuguguaa

SEQ ID NO: 199403 - RNA, 19 nt, Homo sapiens
  misc_RNA (1)...(19): siRNA sense strand
cugcaaagaguguccaauc

SEQ ID NO: 199404 - RNA, 19 nt, Homo sapiens
  misc_RNA (1)...(19): siRNA sense strand
cuuauaggacugccaugaa

SEQ ID NO: 199405 - RNA, 19 nt, Homo sapiens
  misc_RNA (1)...(19): siRNA sense strand
caaagaguguccaaucauu

SEQ ID NO: 199406 - RNA, 19 nt, Homo sapiens
  misc_RNA (1)...(19): siRNA sense strand
uagcugaccugaauaaugu

SEQ ID NO: 199407 - RNA, 19 nt, Homo sapiens
  misc_RNA (1)...(19): siRNA sense strand
gcaugauucuauccaaauu

SEQ ID NO: 199408 - RNA, 19 nt, Homo sapiens
  misc_RNA (1)...(19): siRNA sense strand
ugaacuggcugcugaaugu

SEQ ID NO: 199409 - RNA, 19 nt, Homo sapiens
  misc_RNA (1)...(19): siRNA sense strand
gauauccugcagauuauua

SEQ ID NO: 199410 - RNA, 19 nt, Homo sapiens
  misc_RNA (1)...(19): siRNA sense strand
gagaagauguucgagacuu

SEQ ID NO: 199411 - RNA, 19 nt, Homo sapiens
  misc_RNA (1)...(19): siRNA sense strand
gcacuuuaauuaugacauc

SEQ ID NO: 199412 - RNA, 19 nt, Homo sapiens
  misc_RNA (1)...(19): siRNA sense strand
guaaagcacauuuggaaga

SEQ ID NO: 199413 - RNA, 19 nt, Homo sapiens
  misc_RNA (1)...(19): siRNA sense strand
gaauauugcacuccgacua

SEQ ID NO: 199414 - RNA, 19 nt, Homo sapiens
  misc_RNA (1)...(19): siRNA sense strand
uuauaggacugccaugaaa

SEQ ID NO: 199415 - RNA, 19 nt, Homo sapiens
  misc_RNA (1)...(19): siRNA sense strand
gggugaaguugcauccuuu

SEQ ID NO: 199416 - RNA, 19 nt, Homo sapiens
  misc_RNA (1)...(19): siRNA sense strand
gcaagagcacaacaauuug

SEQ ID NO: 199417 - RNA, 19 nt, Homo sapiens
  misc_RNA (1)...(19): siRNA sense strand
gcacaacaauuuggucaac

SEQ ID NO: 199418 - RNA, 19 nt, Homo sapiens
  misc_RNA (1)...(19): siRNA sense strand
agcaagagcacaacaauuu

SEQ ID NO: 199419 - RNA, 19 nt, Homo sapiens
  misc_RNA (1)...(19): siRNA sense strand
agaagauguucgagacuuu

SEQ ID NO: 199420 - RNA, 19 nt, Homo sapiens
  misc_RNA (1)...(19): siRNA sense strand
gagcaagagcacaacaauu

SEQ ID NO: 199421 - RNA, 19 nt, Homo sapiens
  misc_RNA (1)...(19): siRNA sense strand
ucaagcaaguggcaaguuc

SEQ ID NO: 199422 - RNA, 19 nt, Homo sapiens
  misc_RNA (1)...(19): siRNA sense strand
ccacgagacucaaacaacu

SEQ ID NO: 199423 - RNA, 19 nt, Homo sapiens
  misc_RNA (1)...(19): siRNA sense strand
cagcacaaccucaagcaaa

SEQ ID NO: 199424 - RNA, 19 nt, Homo sapiens
  misc_RNA (1)...(19): siRNA sense strand
gcaaagaguguccaaucau

SEQ ID NO: 199425 - RNA, 19 nt, Homo sapiens
  misc_RNA (1)...(19): siRNA sense strand
auggauauccugcagauua

SEQ ID NO: 199426 - RNA, 19 nt, Homo sapiens
  misc_RNA (1)...(19): siRNA sense strand
uguaacaucugcaaagagu

SEQ ID NO: 199427 - RNA, 19 nt, Homo sapiens
  misc_RNA (1)...(19): siRNA sense strand
guccggagcugcuuccaau

SEQ ID NO: 199428 - RNA, 19 nt, Homo sapiens
  misc_RNA (1)...(19): siRNA sense strand
gcaaguggcaaguucaaca

SEQ ID NO: 199429 - RNA, 19 nt, Homo sapiens
  misc_RNA (1)...(19): siRNA sense strand
gcuuccaauuugcuaauaa

SEQ ID NO: 199430 - RNA, 19 nt, Homo sapiens
  misc_RNA (1)...(19): siRNA sense strand
uggaagacaaguacagaua

SEQ ID NO: 199431 - RNA, 19 nt, Homo sapiens
  misc_RNA (1)...(19): siRNA sense strand
ggauccguguccugucuuu

SEQ ID NO: 199432 - RNA, 19 nt, Homo sapiens
  misc_RNA (1)...(19): siRNA sense strand
gucuuuagcugaccugaau

SEQ ID NO: 199433 - RNA, 19 nt, Homo sapiens
  misc_RNA (1)...(19): siRNA sense strand
gacaaguacagauaccuuu

SEQ ID NO: 199434 - RNA, 19 nt, Homo sapiens
  misc_RNA (1)...(19): siRNA sense strand
ccaagcaucaggccaaaug

SEQ ID NO: 199435 - RNA, 19 nt, Homo sapiens
  misc_RNA (1)...(19): siRNA sense strand
ggagcaagagcacaacaau

SEQ ID NO: 199436 - RNA, 19 nt, Homo sapiens
  misc_RNA (1)...(19): siRNA sense strand
guguaaagcacauuuggaa

SEQ ID NO: 199437 - RNA, 19 nt, Homo sapiens
  misc_RNA (1)...(19): siRNA sense strand
caagacaguugggugaagu

SEQ ID NO: 199438 - RNA, 19 nt, Homo sapiens
  misc_RNA (1)...(19): siRNA sense strand
gaagauguucgagacuuug

SEQ ID NO: 199439 - RNA, 19 nt, Homo sapiens
  misc_RNA (1)...(19): siRNA sense strand
gucagauucucagcuuaua

SEQ ID NO: 199440 - RNA, 19 nt, Homo sapiens
  misc_RNA (1)...(19): siRNA sense strand
uaacaucugcaaagagugu

SEQ ID NO: 199441 - RNA, 19 nt, Homo sapiens
  misc_RNA (1)...(19): siRNA sense strand
cggagcugcuuccaauuug

SEQ ID NO: 199442 - RNA, 19 nt, Homo sapiens
  misc_RNA (1)...(19): siRNA sense strand
gaagacaaguacagauacc

SEQ ID NO: 199443 - RNA, 19 nt, Homo sapiens
  misc_RNA (1)...(19): siRNA sense strand
ccauggauauccugcagau

SEQ ID NO: 199444 - RNA, 19 nt, Homo sapiens
  misc_RNA (1)...(19): siRNA sense strand
ggcaucauuucccugugua

SEQ ID NO: 199445 - RNA, 19 nt, Homo sapiens
  misc_RNA (1)...(19): siRNA sense strand
uggauauccugcagauuau

SEQ ID NO: 199446 - RNA, 19 nt, Homo sapiens
  misc_RNA (1)...(19): siRNA sense strand
ggaagacaaguacagauac

SEQ ID NO: 199447 - RNA, 19 nt, Homo sapiens
  misc_RNA (1)...(19): siRNA sense strand
ugcaaagaguguccaauca

SEQ ID NO: 199448 - RNA, 19 nt, Homo sapiens
  misc_RNA (1)...(19): siRNA sense strand
guggauaugugucugaacu

SEQ ID NO: 199449 - RNA, 19 nt, Homo sapiens
  misc_RNA (1)...(19): siRNA sense strand
acuggcugcugaauguuua

SEQ ID NO: 199450 - RNA, 19 nt, Homo sapiens
  misc_RNA (1)...(19): siRNA sense strand
acuaucccaugguggaaua

SEQ ID NO: 199451 - RNA, 19 nt, Homo sapiens
  misc_RNA (1)...(19): siRNA sense strand
ccggagcugcuuccaauuu

SEQ ID NO: 199452 - RNA, 19 nt, Homo sapiens
  misc_RNA (1)...(19): siRNA sense strand
ccaaauuccaagacaguug

SEQ ID NO: 199453 - RNA, 19 nt, Homo sapiens
  misc_RNA (1)...(19): siRNA sense strand
cagaaacugccaagcauca

SEQ ID NO: 199454 - RNA, 19 nt, Homo sapiens
  misc_RNA (1)...(19): siRNA sense strand
uaugacaucugccaaagcu

SEQ ID NO: 199455 - RNA, 19 nt, Homo sapiens
  misc_RNA (1)...(19): siRNA sense strand
aaugucagauucucagcuu

SEQ ID NO: 199456 - RNA, 19 nt, Homo sapiens
  misc_RNA (1)...(19): siRNA sense strand
ucgagacuuugccaaggua

SEQ ID NO: 199457 - RNA, 19 nt, Homo sapiens
  misc_RNA (1)...(19): siRNA sense strand
gcaaaaggccauaaaaugc

SEQ ID NO: 199458 - RNA, 19 nt, Homo sapiens
  misc_RNA (1)...(19): siRNA sense strand
cugcaugauucuauccaaa

SEQ ID NO: 199459 - RNA, 19 nt, Homo sapiens
  misc_RNA (1)...(19): siRNA sense strand
uaaagcacauuuggaagac

SEQ ID NO: 199460 - RNA, 19 nt, Homo sapiens
  misc_RNA (1)...(19): siRNA sense strand
acaggagucuaaagcacuu

SEQ ID NO: 199461 - RNA, 19 nt, Homo sapiens
  misc_RNA (1)...(19): siRNA sense strand
acagauaccuuuucaagca

SEQ ID NO: 199462 - RNA, 19 nt, Homo sapiens
  misc_RNA (1)...(19): siRNA sense strand
aagcacauuuggaagacaa

SEQ ID NO: 199463 - RNA, 19 nt, Homo sapiens
  misc_RNA (1)...(19): siRNA sense strand
gcuaauaauaagccagaga

SEQ ID NO: 199464 - RNA, 19 nt, Homo sapiens
  misc_RNA (1)...(19): siRNA sense strand
caagagcacaacaauuugg

SEQ ID NO: 199465 - RNA, 19 nt, Homo sapiens
  misc_RNA (1)...(19): siRNA sense strand
ccugucagcugcaugugau

SEQ ID NO: 199466 - RNA, 19 nt, Homo sapiens
  misc_RNA (1)...(19): siRNA sense strand
gcugcugaauguuuaugau

SEQ ID NO: 199467 - RNA, 19 nt, Homo sapiens
  misc_RNA (1)...(19): siRNA sense strand
acagagcucuaccagucuu

SEQ ID NO: 199468 - RNA, 19 nt, Homo sapiens
  misc_RNA (1)...(19): siRNA sense strand
acaguugggugaaguugca

SEQ ID NO: 199469 - RNA, 19 nt, Homo sapiens
  misc_RNA (1)...(19): siRNA sense strand
guuugaccacuauuuauga

SEQ ID NO: 199470 - RNA, 19 nt, Homo sapiens
  misc_RNA (1)...(19): siRNA sense strand
gcuuauaggacugccauga

SEQ ID NO: 199471 - RNA, 19 nt, Homo sapiens
  misc_RNA (1)...(19): siRNA sense strand
caucaggccaaauguaaca

SEQ ID NO: 199472 - RNA, 19 nt, Homo sapiens
  misc_RNA (1)...(19): siRNA sense strand
gauucuauccaaauuccaa

SEQ ID NO: 199473 - RNA, 19 nt, Homo sapiens
  misc_RNA (1)...(19): siRNA sense strand
ggcaaguucaacaggauuu

SEQ ID NO: 199474 - RNA, 19 nt, Homo sapiens
  misc_RNA (1)...(19): siRNA sense strand
gaacuggcugcugaauguu

SEQ ID NO: 199475 - RNA, 19 nt, Homo sapiens
  misc_RNA (1)...(19): siRNA sense strand
cugcugaauguuuaugaua

SEQ ID NO: 199476 - RNA, 19 nt, Homo sapiens
  misc_RNA (1)...(19): siRNA sense strand
aagcaucaggccaaaugua

SEQ ID NO: 199477 - RNA, 19 nt, Homo sapiens
  misc_RNA (1)...(19): siRNA sense strand
uggcaucauuucccugugu

SEQ ID NO: 199478 - RNA, 19 nt, Homo sapiens
  misc_RNA (1)...(19): siRNA sense strand
ccaugaaacuccgaagacu

SEQ ID NO: 199479 - RNA, 19 nt, Homo sapiens
  misc_RNA (1)...(19): siRNA sense strand
auaauaagccagagaucga

SEQ ID NO: 199480 - RNA, 19 nt, Homo sapiens
  misc_RNA (1)...(19): siRNA sense strand
cuaauaauaagccagagau

SEQ ID NO: 199481 - RNA, 19 nt, Homo sapiens
  misc_RNA (1)...(19): siRNA sense strand
ugggugaaguugcauccuu

SEQ ID NO: 199482 - RNA, 19 nt, Homo sapiens
  misc_RNA (1)...(19): siRNA sense strand
caucauuucccuguguaaa

SEQ ID NO: 199483 - RNA, 19 nt, Homo sapiens
  misc_RNA (1)...(19): siRNA sense strand
gcguggauaugugucugaa

SEQ ID NO: 199484 - RNA, 19 nt, Homo sapiens
  misc_RNA (1)...(19): siRNA sense strand
gcacuaucccaugguggaa

SEQ ID NO: 199485 - RNA, 19 nt, Homo sapiens
  misc_RNA (1)...(19): siRNA sense strand
gagccugucagcugcaugu

SEQ ID NO: 199486 - RNA, 19 nt, Homo sapiens
  misc_RNA (1)...(19): siRNA sense strand
guacagauaccuuuucaag

SEQ ID NO: 199487 - RNA, 19 nt, Homo sapiens
  misc_RNA (1)...(19): siRNA sense strand
gucccucucugcguggaua

SEQ ID NO: 199488 - RNA, 19 nt, Homo sapiens
  misc_RNA (1)...(19): siRNA sense strand
ggagcugcuuccaauuugc

SEQ ID NO: 199489 - RNA, 19 nt, Homo sapiens
  misc_RNA (1)...(19): siRNA sense strand
uuagcugaccugaauaaug

SEQ ID NO: 199490 - RNA, 19 nt, Homo sapiens
  misc_RNA (1)...(19): siRNA sense strand
guggcaaguucaacaggau

SEQ ID NO: 199491 - RNA, 19 nt, Homo sapiens
  misc_RNA (1)...(19): siRNA sense strand
acaacaauuuggucaacgu

SEQ ID NO: 199492 - RNA, 19 nt, Homo sapiens
  misc_RNA (1)...(19): siRNA sense strand
gacuacaucaggagaagau

SEQ ID NO: 199493 - RNA, 19 nt, Homo sapiens
  misc_RNA (1)...(19): siRNA sense strand
uaauaagccagagaucgaa

SEQ ID NO: 199494 - RNA, 19 nt, Homo sapiens
  misc_RNA (1)...(19): siRNA sense strand
ugucagauucucagcuuau

SEQ ID NO: 199495 - RNA, 19 nt, Homo sapiens
  misc_RNA (1)...(19): siRNA sense strand
ggauauccugcagauuauu

SEQ ID NO: 199496 - RNA, 19 nt, Homo sapiens
  misc_RNA (1)...(19): siRNA sense strand
agcaucaggccaaauguaa

SEQ ID NO: 199497 - RNA, 19 nt, Homo sapiens
  misc_RNA (1)...(19): siRNA sense strand
gcccuuugcuuggaucucu

SEQ ID NO: 199498 - RNA, 19 nt, Homo sapiens
  misc_RNA (1)...(19): siRNA sense strand
gcugaauguuuaugauacg

SEQ ID NO: 199499 - RNA, 19 nt, Homo sapiens
  misc_RNA (1)...(19): siRNA sense strand
agacuuugccaagguacua

SEQ ID NO: 199500 - RNA, 19 nt, Homo sapiens
  misc_RNA (1)...(19): siRNA sense strand
caagcaaguggcaaguuca

SEQ ID NO: 199501 - RNA, 19 nt, Homo sapiens
  misc_RNA (1)...(19): siRNA sense strand
agacaaguacagauaccuu

SEQ ID NO: 199502 - RNA, 19 nt, Homo sapiens
  misc_RNA (1)...(19): siRNA sense strand
gcaucauuucccuguguaa

SEQ ID NO: 199503 - RNA, 19 nt, Homo sapiens
  misc_RNA (1)...(19): siRNA sense strand
cugcaaagaguguccaauc

SEQ ID NO: 199504 - RNA, 19 nt, Homo sapiens
  misc_RNA (1)...(19): siRNA sense strand
cuuauaggacugccaugaa

SEQ ID NO: 199505 - RNA, 19 nt, Homo sapiens
  misc_RNA (1)...(19): siRNA sense strand
caaagaguguccaaucauu

SEQ ID NO: 199506 - RNA, 19 nt, Homo sapiens
  misc_RNA (1)...(19): siRNA sense strand
uagcugaccugaauaaugu

SEQ ID NO: 199507 - RNA, 19 nt, Homo sapiens
  misc_RNA (1)...(19): siRNA sense strand
gcaugauucuauccaaauu

SEQ ID NO: 199508 - RNA, 19 nt, Homo sapiens
  misc_RNA (1)...(19): siRNA sense strand
ugaacuggcugcugaaugu

SEQ ID NO: 199509 - RNA, 19 nt, Homo sapiens
  misc_RNA (1)...(19): siRNA sense strand
gauauccugcagauuauua

SEQ ID NO: 199510 - RNA, 19 nt, Homo sapiens
  misc_RNA (1)...(19): siRNA sense strand
gagaagauguucgagacuu

SEQ ID NO: 199511 - RNA, 19 nt, Homo sapiens
  misc_RNA (1)...(19): siRNA sense strand
gcacuuuaauuaugacauc

SEQ ID NO: 199512 - RNA, 19 nt, Homo sapiens
  misc_RNA (1)...(19): siRNA sense strand
guaaagcacauuuggaaga

SEQ ID NO: 199513 - RNA, 19 nt, Homo sapiens
  misc_RNA (1)...(19): siRNA sense strand
gaauauugcacuccgacua

SEQ ID NO: 199514 - RNA, 19 nt, Homo sapiens
  misc_RNA (1)...(19): siRNA sense strand
uuauaggacugccaugaaa

SEQ ID NO: 199515 - RNA, 19 nt, Homo sapiens
  misc_RNA (1)...(19): siRNA sense strand
gggugaaguugcauccuuu

SEQ ID NO: 199516 - RNA, 19 nt, Homo sapiens
  misc_RNA (1)...(19): siRNA sense strand
gcaagagcacaacaauuug

SEQ ID NO: 199517 - RNA, 19 nt, Homo sapiens
  misc_RNA (1)...(19): siRNA sense strand
gcacaacaauuuggucaac

SEQ ID NO: 199518 - RNA, 19 nt, Homo sapiens
  misc_RNA (1)...(19): siRNA sense strand
agcaagagcacaacaauuu

SEQ ID NO: 199519 - RNA, 19 nt, Homo sapiens
  misc_RNA (1)...(19): siRNA sense strand
agaagauguucgagacuuu

SEQ ID NO: 199520 - RNA, 19 nt, Homo sapiens
  misc_RNA (1)...(19): siRNA sense strand
gagcaagagcacaacaauu

SEQ ID NO: 199521 - RNA, 19 nt, Homo sapiens
  misc_RNA (1)...(19): siRNA sense strand
ucaagcaaguggcaaguuc

SEQ ID NO: 199522 - RNA, 19 nt, Homo sapiens
  misc_RNA (1)...(19): siRNA sense strand
ccacgagacucaaacaacu

SEQ ID NO: 199523 - RNA, 19 nt, Homo sapiens
  misc_RNA (1)...(19): siRNA sense strand
cagcacaaccucaagcaaa

SEQ ID NO: 199524 - RNA, 19 nt, Homo sapiens
  misc_RNA (1)...(19): siRNA sense strand
gcaaagaguguccaaucau

SEQ ID NO: 199525 - RNA, 19 nt, Homo sapiens
  misc_RNA (1)...(19): siRNA sense strand
auggauauccugcagauua

SEQ ID NO: 199526 - RNA, 19 nt, Homo sapiens
  misc_RNA (1)...(19): siRNA sense strand
uguaacaucugcaaagagu

SEQ ID NO: 199527 - RNA, 19 nt, Homo sapiens
  misc_RNA (1)...(19): siRNA sense strand
guccggagcugcuuccaau

SEQ ID NO: 199528 - RNA, 19 nt, Homo sapiens
  misc_RNA (1)...(19): siRNA sense strand
gcaaguggcaaguucaaca

SEQ ID NO: 199529 - RNA, 19 nt, Homo sapiens
  misc_RNA (1)...(19): siRNA sense strand
gcuuccaauuugcuaauaa

SEQ ID NO: 199530 - RNA, 19 nt, Homo sapiens
  misc_RNA (1)...(19): siRNA sense strand
uggaagacaaguacagaua

SEQ ID NO: 199531 - RNA, 19 nt, Homo sapiens
  misc_RNA (1)...(19): siRNA sense strand
ggauccguguccugucuuu

SEQ ID NO: 199532 - RNA, 19 nt, Homo sapiens
  misc_RNA (1)...(19): siRNA sense strand
gucuuuagcugaccugaau

SEQ ID NO: 199533 - RNA, 19 nt, Homo sapiens
  misc_RNA (1)...(19): siRNA sense strand
gacaaguacagauaccuuu

SEQ ID NO: 199534 - RNA, 19 nt, Homo sapiens
  misc_RNA (1)...(19): siRNA sense strand
ccaagcaucaggccaaaug

SEQ ID NO: 199535 - RNA, 19 nt, Homo sapiens
  misc_RNA (1)...(19): siRNA sense strand
ggagcaagagcacaacaau

SEQ ID NO: 199536 - RNA, 19 nt, Homo sapiens
  misc_RNA (1)...(19): siRNA sense strand
guguaaagcacauuuggaa

SEQ ID NO: 199537 - RNA, 19 nt, Homo sapiens
  misc_RNA (1)...(19): siRNA sense strand
caagacaguugggugaagu

SEQ ID NO: 199538 - RNA, 19 nt, Homo sapiens
  misc_RNA (1)...(19): siRNA sense strand
gaagauguucgagacuuug

SEQ ID NO: 199539 - RNA, 19 nt, Homo sapiens
  misc_RNA (1)...(19): siRNA sense strand
gucagauucucagcuuaua

SEQ ID NO: 199540 - RNA, 19 nt, Homo sapiens
  misc_RNA (1)...(19): siRNA sense strand
uaacaucugcaaagagugu

SEQ ID NO: 199541 - RNA, 19 nt, Homo sapiens
  misc_RNA (1)...(19): siRNA sense strand
cggagcugcuuccaauuug

SEQ ID NO: 199542 - RNA, 19 nt, Homo sapiens
  misc_RNA (1)...(19): siRNA sense strand
gaagacaaguacagauacc

SEQ ID NO: 199543 - RNA, 19 nt, Homo sapiens
  misc_RNA (1)...(19): siRNA sense strand
ccauggauauccugcagau

SEQ ID NO: 199544 - RNA, 19 nt, Homo sapiens
  misc_RNA (1)...(19): siRNA sense strand
ggcaucauuucccugugua

SEQ ID NO: 199545 - RNA, 19 nt, Homo sapiens
  misc_RNA (1)...(19): siRNA sense strand
uggauauccugcagauuau

SEQ ID NO: 199546 - RNA, 19 nt, Homo sapiens
  misc_RNA (1)...(19): siRNA sense strand
ggaagacaaguacagauac

SEQ ID NO: 199547 - RNA, 19 nt, Homo sapiens
  misc_RNA (1)...(19): siRNA sense strand
ugcaaagaguguccaauca

SEQ ID NO: 199548 - RNA, 19 nt, Homo sapiens
  misc_RNA (1)...(19): siRNA sense strand
guggauaugugucugaacu

SEQ ID NO: 199549 - RNA, 19 nt, Homo sapiens
  misc_RNA (1)...(19): siRNA sense strand
acuggcugcugaauguuua

SEQ ID NO: 199550 - RNA, 19 nt, Homo sapiens
  misc_RNA (1)...(19): siRNA sense strand
acuaucccaugguggaaua

SEQ ID NO: 199551 - RNA, 19 nt, Homo sapiens
  misc_RNA (1)...(19): siRNA sense strand
ccggagcugcuuccaauuu

SEQ ID NO: 199552 - RNA, 19 nt, Homo sapiens
  misc_RNA (1)...(19): siRNA sense strand
ccaaauuccaagacaguug

SEQ ID NO: 199553 - RNA, 19 nt, Homo sapiens
  misc_RNA (1)...(19): siRNA sense strand
cagaaacugccaagcauca

SEQ ID NO: 199554 - RNA, 19 nt, Homo sapiens
  misc_RNA (1)...(19): siRNA sense strand
uaugacaucugccaaagcu

SEQ ID NO: 199555 - RNA, 19 nt, Homo sapiens
  misc_RNA (1)...(19): siRNA sense strand
aaugucagauucucagcuu

SEQ ID NO: 199556 - RNA, 19 nt, Homo sapiens
  misc_RNA (1)...(19): siRNA sense strand
ucgagacuuugccaaggua

SEQ ID NO: 199557 - RNA, 19 nt, Homo sapiens
  misc_RNA (1)...(19): siRNA sense strand
gcaaaaggccauaaaaugc

SEQ ID NO: 199558 - RNA, 19 nt, Homo sapiens
  misc_RNA (1)...(19): siRNA sense strand
cugcaugauucuauccaaa

SEQ ID NO: 199559 - RNA, 19 nt, Homo sapiens
  misc_RNA (1)...(19): siRNA sense strand
uaaagcacauuuggaagac

SEQ ID NO: 199560 - RNA, 19 nt, Homo sapiens
  misc_RNA (1)...(19): siRNA sense strand
acaggagucuaaagcacuu

SEQ ID NO: 199561 - RNA, 19 nt, Homo sapiens
  misc_RNA (1)...(19): siRNA sense strand
acagauaccuuuucaagca

SEQ ID NO: 199562 - RNA, 19 nt, Homo sapiens
  misc_RNA (1)...(19): siRNA sense strand
aagcacauuuggaagacaa

SEQ ID NO: 199563 - RNA, 19 nt, Homo sapiens
  misc_RNA (1)...(19): siRNA sense strand
gcuaauaauaagccagaga

SEQ ID NO: 199564 - RNA, 19 nt, Homo sapiens
  misc_RNA (1)...(19): siRNA sense strand
caagagcacaacaauuugg

SEQ ID NO: 199565 - RNA, 19 nt, Homo sapiens
  misc_RNA (1)...(19): siRNA sense strand
ccugucagcugcaugugau

SEQ ID NO: 199566 - RNA, 19 nt, Homo sapiens
  misc_RNA (1)...(19): siRNA sense strand
gcugcugaauguuuaugau

SEQ ID NO: 199567 - RNA, 19 nt, Homo sapiens
  misc_RNA (1)...(19): siRNA sense strand
acagagcucuaccagucuu

SEQ ID NO: 199568 - RNA, 19 nt, Homo sapiens
  misc_RNA (1)...(19): siRNA sense strand
acaguugggugaaguugca

SEQ ID NO: 199569 - RNA, 19 nt, Homo sapiens
  misc_RNA (1)...(19): siRNA sense strand
guuugaccacuauuuauga

SEQ ID NO: 199570 - RNA, 19 nt, Homo sapiens
  misc_RNA (1)...(19): siRNA sense strand
gcuuauaggacugccauga

SEQ ID NO: 199571 - RNA, 19 nt, Homo sapiens
  misc_RNA (1)...(19): siRNA sense strand
caucaggccaaauguaaca

SEQ ID NO: 199572 - RNA, 19 nt, Homo sapiens
  misc_RNA (1)...(19): siRNA sense strand
gauucuauccaaauuccaa

SEQ ID NO: 199573 - RNA, 19 nt, Homo sapiens
  misc_RNA (1)...(19): siRNA sense strand
ggcaaguucaacaggauuu

SEQ ID NO: 199574 - RNA, 19 nt, Homo sapiens
  misc_RNA (1)...(19): siRNA sense strand
gaacuggcugcugaauguu

SEQ ID NO: 199575 - RNA, 19 nt, Homo sapiens
  misc_RNA (1)...(19): siRNA sense strand
cugcugaauguuuaugaua

SEQ ID NO: 199576 - RNA, 19 nt, Homo sapiens
  misc_RNA (1)...(19): siRNA sense strand
aagcaucaggccaaaugua

SEQ ID NO: 199577 - RNA, 19 nt, Homo sapiens
  misc_RNA (1)...(19): siRNA sense strand
uggcaucauuucccugugu

SEQ ID NO: 199578 - RNA, 19 nt, Homo sapiens
  misc_RNA (1)...(19): siRNA sense strand
ccaugaaacuccgaagacu

SEQ ID NO: 199579 - RNA, 19 nt, Homo sapiens
  misc_RNA (1)...(19): siRNA sense strand
auaauaagccagagaucga

SEQ ID NO: 199580 - RNA, 19 nt, Homo sapiens
  misc_RNA (1)...(19): siRNA sense strand
cuaauaauaagccagagau

SEQ ID NO: 199581 - RNA, 19 nt, Homo sapiens
  misc_RNA (1)...(19): siRNA sense strand
ugggugaaguugcauccuu

SEQ ID NO: 199582 - RNA, 19 nt, Homo sapiens
  misc_RNA (1)...(19): siRNA sense strand
caucauuucccuguguaaa

SEQ ID NO: 199583 - RNA, 19 nt, Homo sapiens
  misc_RNA (1)...(19): siRNA sense strand
gcguggauaugugucugaa

SEQ ID NO: 199584 - RNA, 19 nt, Homo sapiens
  misc_RNA (1)...(19): siRNA sense strand
gcacuaucccaugguggaa

SEQ ID NO: 199585 - RNA, 19 nt, Homo sapiens
  misc_RNA (1)...(19): siRNA sense strand
gagccugucagcugcaugu

SEQ ID NO: 199586 - RNA, 19 nt, Homo sapiens
  misc_RNA (1)...(19): siRNA sense strand
guacagauaccuuuucaag

SEQ ID NO: 199587 - RNA, 19 nt, Homo sapiens
  misc_RNA (1)...(19): siRNA sense strand
gucccucucugcguggaua

SEQ ID NO: 199588 - RNA, 19 nt, Homo sapiens
  misc_RNA (1)...(19): siRNA sense strand
ggagcugcuuccaauuugc

SEQ ID NO: 199589 - RNA, 19 nt, Homo sapiens
  misc_RNA (1)...(19): siRNA sense strand
uuagcugaccugaauaaug

SEQ ID NO: 199590 - RNA, 19 nt, Homo sapiens
  misc_RNA (1)...(19): siRNA sense strand
guggcaaguucaacaggau

SEQ ID NO: 199591 - RNA, 19 nt, Homo sapiens
  misc_RNA (1)...(19): siRNA sense strand
acaacaauuuggucaacgu

SEQ ID NO: 199592 - RNA, 19 nt, Homo sapiens
  misc_RNA (1)...(19): siRNA sense strand
gacuacaucaggagaagau

SEQ ID NO: 199593 - RNA, 19 nt, Homo sapiens
  misc_RNA (1)...(19): siRNA sense strand
uaauaagccagagaucgaa

SEQ ID NO: 199594 - RNA, 19 nt, Homo sapiens
  misc_RNA (1)...(19): siRNA sense strand
ugucagauucucagcuuau

SEQ ID NO: 199595 - RNA, 19 nt, Homo sapiens
  misc_RNA (1)...(19): siRNA sense strand
ggauauccugcagauuauu

SEQ ID NO: 199596 - RNA, 19 nt, Homo sapiens
  misc_RNA (1)...(19): siRNA sense strand
agcaucaggccaaauguaa

SEQ ID NO: 199597 - RNA, 19 nt, Homo sapiens
  misc_RNA (1)...(19): siRNA sense strand
gcccuuugcuuggaucucu

SEQ ID NO: 199598 - RNA, 19 nt, Homo sapiens
  misc_RNA (1)...(19): siRNA sense strand
gcugaauguuuaugauacg

SEQ ID NO: 199599 - RNA, 19 nt, Homo sapiens
  misc_RNA (1)...(19): siRNA sense strand
agacuuugccaagguacua

SEQ ID NO: 199600 - RNA, 19 nt, Homo sapiens
  misc_RNA (1)...(19): siRNA sense strand
caagcaaguggcaaguuca

SEQ ID NO: 199601 - RNA, 19 nt, Homo sapiens
  misc_RNA (1)...(19): siRNA sense strand
agacaaguacagauaccuu

SEQ ID NO: 199602 - RNA, 19 nt, Homo sapiens
  misc_RNA (1)...(19): siRNA sense strand
gcaucauuucccuguguaa

SEQ ID NO: 199603 - RNA, 19 nt, Homo sapiens
  misc_RNA (1)...(19): siRNA sense strand
cugcaaagaguguccaauc

SEQ ID NO: 199604 - RNA, 19 nt, Homo sapiens
  misc_RNA (1)...(19): siRNA sense strand
cuuauaggacugccaugaa

SEQ ID NO: 199605 - RNA, 19 nt, Homo sapiens
  misc_RNA (1)...(19): siRNA sense strand
caaagaguguccaaucauu

SEQ ID NO: 199606 - RNA, 19 nt, Homo sapiens
  misc_RNA (1)...(19): siRNA sense strand
uagcugaccugaauaaugu

SEQ ID NO: 199607 - RNA, 19 nt, Homo sapiens
  misc_RNA (1)...(19): siRNA sense strand
gcaugauucuauccaaauu

SEQ ID NO: 199608 - RNA, 19 nt, Homo sapiens
  misc_RNA (1)...(19): siRNA sense strand
ugaacuggcugcugaaugu

SEQ ID NO: 199609 - RNA, 19 nt, Homo sapiens
  misc_RNA (1)...(19): siRNA sense strand
gauauccugcagauuauua

SEQ ID NO: 199610 - RNA, 19 nt, Homo sapiens
  misc_RNA (1)...(19): siRNA sense strand
gagaagauguucgagacuu

SEQ ID NO: 199611 - RNA, 19 nt, Homo sapiens
  misc_RNA (1)...(19): siRNA sense strand
gcacuuuaauuaugacauc

SEQ ID NO: 199612 - RNA, 19 nt, Homo sapiens
  misc_RNA (1)...(19): siRNA sense strand
guaaagcacauuuggaaga

SEQ ID NO: 199613 - RNA, 19 nt, Homo sapiens
  misc_RNA (1)...(19): siRNA sense strand
gaauauugcacuccgacua

SEQ ID NO: 199614 - RNA, 19 nt, Homo sapiens
  misc_RNA (1)...(19): siRNA sense strand
uuauaggacugccaugaaa

SEQ ID NO: 199615 - RNA, 19 nt, Homo sapiens
  misc_RNA (1)...(19): siRNA sense strand
gggugaaguugcauccuuu

SEQ ID NO: 199616 - RNA, 19 nt, Homo sapiens
  misc_RNA (1)...(19): siRNA sense strand
gcaagagcacaacaauuug

SEQ ID NO: 199617 - RNA, 19 nt, Homo sapiens
  misc_RNA (1)...(19): siRNA sense strand
gcacaacaauuuggucaac

SEQ ID NO: 199618 - RNA, 19 nt, Homo sapiens
  misc_RNA (1)...(19): siRNA sense strand
agcaagagcacaacaauuu

SEQ ID NO: 199619 - RNA, 19 nt, Homo sapiens
  misc_RNA (1)...(19): siRNA sense strand
agaagauguucgagacuuu

SEQ ID NO: 199620 - RNA, 19 nt, Homo sapiens
  misc_RNA (1)...(19): siRNA sense strand
gagcaagagcacaacaauu

SEQ ID NO: 199621 - RNA, 19 nt, Homo sapiens
  misc_RNA (1)...(19): siRNA sense strand
ucaagcaaguggcaaguuc

SEQ ID NO: 199622 - RNA, 19 nt, Homo sapiens
  misc_RNA (1)...(19): siRNA sense strand
ccacgagacucaaacaacu

SEQ ID NO: 199623 - RNA, 19 nt, Homo sapiens
  misc_RNA (1)...(19): siRNA sense strand
cagcacaaccucaagcaaa

SEQ ID NO: 199624 - RNA, 19 nt, Homo sapiens
  misc_RNA (1)...(19): siRNA sense strand
gcaaagaguguccaaucau

SEQ ID NO: 199625 - RNA, 19 nt, Homo sapiens
  misc_RNA (1)...(19): siRNA sense strand
auggauauccugcagauua

SEQ ID NO: 199626 - RNA, 19 nt, Homo sapiens
  misc_RNA (1)...(19): siRNA sense strand
uguaacaucugcaaagagu

SEQ ID NO: 199627 - RNA, 19 nt, Homo sapiens
  misc_RNA (1)...(19): siRNA sense strand
guccggagcugcuuccaau

SEQ ID NO: 199628 - RNA, 19 nt, Homo sapiens
  misc_RNA (1)...(19): siRNA sense strand
gcaaguggcaaguucaaca

SEQ ID NO: 199629 - RNA, 19 nt, Homo sapiens
  misc_RNA (1)...(19): siRNA sense strand
gcuuccaauuugcuaauaa

SEQ ID NO: 199630 - RNA, 19 nt, Homo sapiens
  misc_RNA (1)...(19): siRNA sense strand
uggaagacaaguacagaua

SEQ ID NO: 199631 - RNA, 19 nt, Homo sapiens
  misc_RNA (1)...(19): siRNA sense strand
ggauccguguccugucuuu

SEQ ID NO: 199632 - RNA, 19 nt, Homo sapiens
  misc_RNA (1)...(19): siRNA sense strand
gucuuuagcugaccugaau

SEQ ID NO: 199633 - RNA, 19 nt, Homo sapiens
  misc_RNA (1)...(19): siRNA sense strand
gacaaguacagauaccuuu

SEQ ID NO: 199634 - RNA, 19 nt, Homo sapiens
  misc_RNA (1)...(19): siRNA sense strand
ccaagcaucaggccaaaug

SEQ ID NO: 199635 - RNA, 19 nt, Homo sapiens
  misc_RNA (1)...(19): siRNA sense strand
ggagcaagagcacaacaau

SEQ ID NO: 199636 - RNA, 19 nt, Homo sapiens
  misc_RNA (1)...(19): siRNA sense strand
guguaaagcacauuuggaa

SEQ ID NO: 199637 - RNA, 19 nt, Homo sapiens
  misc_RNA (1)...(19): siRNA sense strand
caagacaguugggugaagu

SEQ ID NO: 199638 - RNA, 19 nt, Homo sapiens
  misc_RNA (1)...(19): siRNA sense strand
gaagauguucgagacuuug

SEQ ID NO: 199639 - RNA, 19 nt, Homo sapiens
  misc_RNA (1)...(19): siRNA sense strand
gucagauucucagcuuaua

SEQ ID NO: 199640 - RNA, 19 nt, Homo sapiens
  misc_RNA (1)...(19): siRNA sense strand
uaacaucugcaaagagugu

SEQ ID NO: 199641 - RNA, 19 nt, Homo sapiens
  misc_RNA (1)...(19): siRNA sense strand
cggagcugcuuccaauuug

SEQ ID NO: 199642 - RNA, 19 nt, Homo sapiens
  misc_RNA (1)...(19): siRNA sense strand
gaagacaaguacagauacc

SEQ ID NO: 199643 - RNA, 19 nt, Homo sapiens
  misc_RNA (1)...(19): siRNA sense strand
ccauggauauccugcagau

SEQ ID NO: 199644 - RNA, 19 nt, Homo sapiens
  misc_RNA (1)...(19): siRNA sense strand
ggcaucauuucccugugua

SEQ ID NO: 199645 - RNA, 19 nt, Homo sapiens
  misc_RNA (1)...(19): siRNA sense strand
uggauauccugcagauuau

SEQ ID NO: 199646 - RNA, 19 nt, Homo sapiens
  misc_RNA (1)...(19): siRNA sense strand
ggaagacaaguacagauac

SEQ ID NO: 199647 - RNA, 19 nt, Homo sapiens
  misc_RNA (1)...(19): siRNA sense strand
ugcaaagaguguccaauca

SEQ ID NO: 199648 - RNA, 19 nt, Homo sapiens
  misc_RNA (1)...(19): siRNA sense strand
guggauaugugucugaacu

SEQ ID NO: 199649 - RNA, 19 nt, Homo sapiens
  misc_RNA (1)...(19): siRNA sense strand
acuggcugcugaauguuua

SEQ ID NO: 199650 - RNA, 19 nt, Homo sapiens
  misc_RNA (1)...(19): siRNA sense strand
acuaucccaugguggaaua

SEQ ID NO: 199651 - RNA, 19 nt, Homo sapiens
  misc_RNA (1)...(19): siRNA sense strand
ccggagcugcuuccaauuu

SEQ ID NO: 199652 - RNA, 19 nt, Homo sapiens
  misc_RNA (1)...(19): siRNA sense strand
ccaaauuccaagacaguug

SEQ ID NO: 199653 - RNA, 19 nt, Homo sapiens
  misc_RNA (1)...(19): siRNA sense strand
cagaaacugccaagcauca

SEQ ID NO: 199654 - RNA, 19 nt, Homo sapiens
  misc_RNA (1)...(19): siRNA sense strand
uaugacaucugccaaagcu

SEQ ID NO: 199655 - RNA, 19 nt, Homo sapiens
  misc_RNA (1)...(19): siRNA sense strand
aaugucagauucucagcuu

SEQ ID NO: 199656 - RNA, 19 nt, Homo sapiens
  misc_RNA (1)...(19): siRNA sense strand
ucgagacuuugccaaggua

SEQ ID NO: 199657 - RNA, 19 nt, Homo sapiens
  misc_RNA (1)...(19): siRNA sense strand
gcaaaaggccauaaaaugc

SEQ ID NO: 199658 - RNA, 19 nt, Homo sapiens
  misc_RNA (1)...(19): siRNA sense strand
cugcaugauucuauccaaa

SEQ ID NO: 199659 - RNA, 19 nt, Homo sapiens
  misc_RNA (1)...(19): siRNA sense strand
uaaagcacauuuggaagac

SEQ ID NO: 199660 - RNA, 19 nt, Homo sapiens
  misc_RNA (1)...(19): siRNA sense strand
acaggagucuaaagcacuu

SEQ ID NO: 199661 - RNA, 19 nt, Homo sapiens
  misc_RNA (1)...(19): siRNA sense strand
acagauaccuuuucaagca

SEQ ID NO: 199662 - RNA, 19 nt, Homo sapiens
  misc_RNA (1)...(19): siRNA sense strand
aagcacauuuggaagacaa

SEQ ID NO: 199663 - RNA, 19 nt, Homo sapiens
  misc_RNA (1)...(19): siRNA sense strand
gcuaauaauaagccagaga

SEQ ID NO: 199664 - RNA, 19 nt, Homo sapiens
  misc_RNA (1)...(19): siRNA sense strand
caagagcacaacaauuugg

SEQ ID NO: 199665 - RNA, 19 nt, Homo sapiens
  misc_RNA (1)...(19): siRNA sense strand
ccugucagcugcaugugau

SEQ ID NO: 199666 - RNA, 19 nt, Homo sapiens
  misc_RNA (1)...(19): siRNA sense strand
gcugcugaauguuuaugau

SEQ ID NO: 199667 - RNA, 19 nt, Homo sapiens
  misc_RNA (1)...(19): siRNA sense strand
acagagcucuaccagucuu

SEQ ID NO: 199668 - RNA, 19 nt, Homo sapiens
  misc_RNA (1)...(19): siRNA sense strand
acaguugggugaaguugca

SEQ ID NO: 199669 - RNA, 19 nt, Homo sapiens
  misc_RNA (1)...(19): siRNA sense strand
guuugaccacuauuuauga

SEQ ID NO: 199670 - RNA, 19 nt, Homo sapiens
  misc_RNA (1)...(19): siRNA sense strand
gcuuauaggacugccauga

SEQ ID NO: 199671 - RNA, 19 nt, Homo sapiens
  misc_RNA (1)...(19): siRNA sense strand
caucaggccaaauguaaca

SEQ ID NO: 199672 - RNA, 19 nt, Homo sapiens
  misc_RNA (1)...(19): siRNA sense strand
gauucuauccaaauuccaa

SEQ ID NO: 199673 - RNA, 19 nt, Homo sapiens
  misc_RNA (1)...(19): siRNA sense strand
ggcaaguucaacaggauuu

SEQ ID NO: 199674 - RNA, 19 nt, Homo sapiens
  misc_RNA (1)...(19): siRNA sense strand
gaacuggcugcugaauguu

SEQ ID NO: 199675 - RNA, 19 nt, Homo sapiens
  misc_RNA (1)...(19): siRNA sense strand
cugcugaauguuuaugaua

SEQ ID NO: 199676 - RNA, 19 nt, Homo sapiens
  misc_RNA (1)...(19): siRNA sense strand
aagcaucaggccaaaugua

SEQ ID NO: 199677 - RNA, 19 nt, Homo sapiens
  misc_RNA (1)...(19): siRNA sense strand
uggcaucauuucccugugu

SEQ ID NO: 199678 - RNA, 19 nt, Homo sapiens
  misc_RNA (1)...(19): siRNA sense strand
ccaugaaacuccgaagacu

SEQ ID NO: 199679 - RNA, 19 nt, Homo sapiens
  misc_RNA (1)...(19): siRNA sense strand
auaauaagccagagaucga

SEQ ID NO: 199680 - RNA, 19 nt, Homo sapiens
  misc_RNA (1)...(19): siRNA sense strand
cuaauaauaagccagagau

SEQ ID NO: 199681 - RNA, 19 nt, Homo sapiens
  misc_RNA (1)...(19): siRNA sense strand
ugggugaaguugcauccuu

SEQ ID NO: 199682 - RNA, 19 nt, Homo sapiens
  misc_RNA (1)...(19): siRNA sense strand
caucauuucccuguguaaa

SEQ ID NO: 199683 - RNA, 19 nt, Homo sapiens
  misc_RNA (1)...(19): siRNA sense strand
gcguggauaugugucugaa

SEQ ID NO: 199684 - RNA, 19 nt, Homo sapiens
  misc_RNA (1)...(19): siRNA sense strand
gcacuaucccaugguggaa

SEQ ID NO: 199685 - RNA, 19 nt, Homo sapiens
  misc_RNA (1)...(19): siRNA sense strand
gagccugucagcugcaugu

SEQ ID NO: 199686 - RNA, 19 nt, Homo sapiens
  misc_RNA (1)...(19): siRNA sense strand
guacagauaccuuuucaag

SEQ ID NO: 199687 - RNA, 19 nt, Homo sapiens
  misc_RNA (1)...(19): siRNA sense strand
gucccucucugcguggaua

SEQ ID NO: 199688 - RNA, 19 nt, Homo sapiens
  misc_RNA (1)...(19): siRNA sense strand
ggagcugcuuccaauuugc

SEQ ID NO: 199689 - RNA, 19 nt, Homo sapiens
  misc_RNA (1)...(19): siRNA sense strand
uuagcugaccugaauaaug

SEQ ID NO: 199690 - RNA, 19 nt, Homo sapiens
  misc_RNA (1)...(19): siRNA sense strand
guggcaaguucaacaggau

SEQ ID NO: 199691 - RNA, 19 nt, Homo sapiens
  misc_RNA (1)...(19): siRNA sense strand
acaacaauuuggucaacgu

SEQ ID NO: 199692 - RNA, 19 nt, Homo sapiens
  misc_RNA (1)...(19): siRNA sense strand
gacuacaucaggagaagau

SEQ ID NO: 199693 - RNA, 19 nt, Homo sapiens
  misc_RNA (1)...(19): siRNA sense strand
uaauaagccagagaucgaa

SEQ ID NO: 199694 - RNA, 19 nt, Homo sapiens
  misc_RNA (1)...(19): siRNA sense strand
ugucagauucucagcuuau

SEQ ID NO: 199695 - RNA, 19 nt, Homo sapiens
  misc_RNA (1)...(19): siRNA sense strand
ggauauccugcagauuauu

SEQ ID NO: 199696 - RNA, 19 nt, Homo sapiens
  misc_RNA (1)...(19): siRNA sense strand
agcaucaggccaaauguaa

SEQ ID NO: 199697 - RNA, 19 nt, Homo sapiens
  misc_RNA (1)...(19): siRNA sense strand
gcccuuugcuuggaucucu

SEQ ID NO: 199698 - RNA, 19 nt, Homo sapiens
  misc_RNA (1)...(19): siRNA sense strand
gcugaauguuuaugauacg

SEQ ID NO: 199699 - RNA, 19 nt, Homo sapiens
  misc_RNA (1)...(19): siRNA sense strand
agacuuugccaagguacua

SEQ ID NO: 199700 - RNA, 19 nt, Homo sapiens
  misc_RNA (1)...(19): siRNA sense strand
caagcaaguggcaaguuca

SEQ ID NO: 199701 - RNA, 19 nt, Homo sapiens
  misc_RNA (1)...(19): siRNA sense strand
agacaaguacagauaccuu

SEQ ID NO: 199702 - RNA, 19 nt, Homo sapiens
  misc_RNA (1)...(19): siRNA sense strand
gcaucauuucccuguguaa

SEQ ID NO: 199703 - RNA, 19 nt, Homo sapiens
  misc_RNA (1)...(19): siRNA sense strand
cugcaaagaguguccaauc

SEQ ID NO: 199704 - RNA, 19 nt, Homo sapiens
  misc_RNA (1)...(19): siRNA sense strand
cuuauaggacugccaugaa

SEQ ID NO: 199705 - RNA, 19 nt, Homo sapiens
  misc_RNA (1)...(19): siRNA sense strand
caaagaguguccaaucauu

SEQ ID NO: 199706 - RNA, 19 nt, Homo sapiens
  misc_RNA (1)...(19): siRNA sense strand
uagcugaccugaauaaugu

SEQ ID NO: 199707 - RNA, 19 nt, Homo sapiens
  misc_RNA (1)...(19): siRNA sense strand
gcaugauucuauccaaauu

SEQ ID NO: 199708 - RNA, 19 nt, Homo sapiens
  misc_RNA (1)...(19): siRNA sense strand
ugaacuggcugcugaaugu

SEQ ID NO: 199709 - RNA, 19 nt, Homo sapiens
  misc_RNA (1)...(19): siRNA sense strand
gauauccugcagauuauua

SEQ ID NO: 199710 - RNA, 19 nt, Homo sapiens
  misc_RNA (1)...(19): siRNA sense strand
gagaagauguucgagacuu

SEQ ID NO: 199711 - RNA, 19 nt, Homo sapiens
  misc_RNA (1)...(19): siRNA sense strand
gcacuuuaauuaugacauc

SEQ ID NO: 199712 - RNA, 19 nt, Homo sapiens
  misc_RNA (1)...(19): siRNA sense strand
guaaagcacauuuggaaga

SEQ ID NO: 199713 - RNA, 19 nt, Homo sapiens
  misc_RNA (1)...(19): siRNA sense strand
gaauauugcacuccgacua

SEQ ID NO: 199714 - RNA, 19 nt, Homo sapiens
  misc_RNA (1)...(19): siRNA sense strand
uuauaggacugccaugaaa

SEQ ID NO: 199715 - RNA, 19 nt, Homo sapiens
  misc_RNA (1)...(19): siRNA sense strand
gggugaaguugcauccuuu

SEQ ID NO: 199716 - RNA, 19 nt, Homo sapiens
  misc_RNA (1)...(19): siRNA sense strand
gcaagagcacaacaauuug

SEQ ID NO: 199717 - RNA, 19 nt, Homo sapiens
  misc_RNA (1)...(19): siRNA sense strand
gcacaacaauuuggucaac

SEQ ID NO: 199718 - RNA, 19 nt, Homo sapiens
  misc_RNA (1)...(19): siRNA sense strand
agcaagagcacaacaauuu

SEQ ID NO: 199719 - RNA, 19 nt, Homo sapiens
  misc_RNA (1)...(19): siRNA sense strand
agaagauguucgagacuuu

SEQ ID NO: 199720 - RNA, 19 nt, Homo sapiens
  misc_RNA (1)...(19): siRNA sense strand
gagcaagagcacaacaauu

SEQ ID NO: 199721 - RNA, 19 nt, Homo sapiens
  misc_RNA (1)...(19): siRNA sense strand
ucaagcaaguggcaaguuc

SEQ ID NO: 199722 - RNA, 19 nt, Homo sapiens
  misc_RNA (1)...(19): siRNA sense strand
ccacgagacucaaacaacu

SEQ ID NO: 199723 - RNA, 19 nt, Homo sapiens
  misc_RNA (1)...(19): siRNA sense strand
cagcacaaccucaagcaaa

SEQ ID NO: 199724 - RNA, 19 nt, Homo sapiens
  misc_RNA (1)...(19): siRNA sense strand
gcaaagaguguccaaucau

SEQ ID NO: 199725 - RNA, 19 nt, Homo sapiens
  misc_RNA (1)...(19): siRNA sense strand
auggauauccugcagauua

SEQ ID NO: 199726 - RNA, 19 nt, Homo sapiens
  misc_RNA (1)...(19): siRNA sense strand
uguaacaucugcaaagagu

SEQ ID NO: 199727 - RNA, 19 nt, Homo sapiens
  misc_RNA (1)...(19): siRNA sense strand
guccggagcugcuuccaau

SEQ ID NO: 199728 - RNA, 19 nt, Homo sapiens
  misc_RNA (1)...(19): siRNA sense strand
gcaaguggcaaguucaaca

SEQ ID NO: 199729 - RNA, 19 nt, Homo sapiens
  misc_RNA (1)...(19): siRNA sense strand
gcuuccaauuugcuaauaa

SEQ ID NO: 199730 - RNA, 19 nt, Homo sapiens
  misc_RNA (1)...(19): siRNA sense strand
uggaagacaaguacagaua

SEQ ID NO: 199731 - RNA, 19 nt, Homo sapiens
  misc_RNA (1)...(19): siRNA sense strand
ggauccguguccugucuuu

SEQ ID NO: 199732 - RNA, 19 nt, Homo sapiens
  misc_RNA (1)...(19): siRNA sense strand
gucuuuagcugaccugaau

SEQ ID NO: 199733 - RNA, 19 nt, Homo sapiens
  misc_RNA (1)...(19): siRNA sense strand
gacaaguacagauaccuuu

SEQ ID NO: 199734 - RNA, 19 nt, Homo sapiens
  misc_RNA (1)...(19): siRNA sense strand
ccaagcaucaggccaaaug

SEQ ID NO: 199735 - RNA, 19 nt, Homo sapiens
  misc_RNA (1)...(19): siRNA sense strand
ggagcaagagcacaacaau

SEQ ID NO: 199736 - RNA, 19 nt, Homo sapiens
  misc_RNA (1)...(19): siRNA sense strand
guguaaagcacauuuggaa

SEQ ID NO: 199737 - RNA, 19 nt, Homo sapiens
  misc_RNA (1)...(19): siRNA sense strand
caagacaguugggugaagu

SEQ ID NO: 199738 - RNA, 19 nt, Homo sapiens
  misc_RNA (1)...(19): siRNA sense strand
gaagauguucgagacuuug

SEQ ID NO: 199739 - RNA, 19 nt, Homo sapiens
  misc_RNA (1)...(19): siRNA sense strand
gucagauucucagcuuaua

SEQ ID NO: 199740 - RNA, 19 nt, Homo sapiens
  misc_RNA (1)...(19): siRNA sense strand
uaacaucugcaaagagugu

SEQ ID NO: 199741 - RNA, 19 nt, Homo sapiens
  misc_RNA (1)...(19): siRNA sense strand
cggagcugcuuccaauuug

SEQ ID NO: 199742 - RNA, 19 nt, Homo sapiens
  misc_RNA (1)...(19): siRNA sense strand
gaagacaaguacagauacc

SEQ ID NO: 199743 - RNA, 19 nt, Homo sapiens
  misc_RNA (1)...(19): siRNA sense strand
ccauggauauccugcagau

SEQ ID NO: 199744 - RNA, 19 nt, Homo sapiens
  misc_RNA (1)...(19): siRNA sense strand
ggcaucauuucccugugua

SEQ ID NO: 199745 - RNA, 19 nt, Homo sapiens
  misc_RNA (1)...(19): siRNA sense strand
uggauauccugcagauuau

SEQ ID NO: 199746 - RNA, 19 nt, Homo sapiens
  misc_RNA (1)...(19): siRNA sense strand
ggaagacaaguacagauac

SEQ ID NO: 199747 - RNA, 19 nt, Homo sapiens
  misc_RNA (1)...(19): siRNA sense strand
ugcaaagaguguccaauca

SEQ ID NO: 199748 - RNA, 19 nt, Homo sapiens
  misc_RNA (1)...(19): siRNA sense strand
guggauaugugucugaacu

SEQ ID NO: 199749 - RNA, 19 nt, Homo sapiens
  misc_RNA (1)...(19): siRNA sense strand
acuggcugcugaauguuua

SEQ ID NO: 199750 - RNA, 19 nt, Homo sapiens
  misc_RNA (1)...(19): siRNA sense strand
acuaucccaugguggaaua

SEQ ID NO: 199751 - RNA, 19 nt, Homo sapiens
  misc_RNA (1)...(19): siRNA sense strand
ccggagcugcuuccaauuu

SEQ ID NO: 199752 - RNA, 19 nt, Homo sapiens
  misc_RNA (1)...(19): siRNA sense strand
ccaaauuccaagacaguug

SEQ ID NO: 199753 - RNA, 19 nt, Homo sapiens
  misc_RNA (1)...(19): siRNA sense strand
cagaaacugccaagcauca

SEQ ID NO: 199754 - RNA, 19 nt, Homo sapiens
  misc_RNA (1)...(19): siRNA sense strand
uaugacaucugccaaagcu

SEQ ID NO: 199755 - RNA, 19 nt, Homo sapiens
  misc_RNA (1)...(19): siRNA sense strand
aaugucagauucucagcuu

SEQ ID NO: 199756 - RNA, 19 nt, Homo sapiens
  misc_RNA (1)...(19): siRNA sense strand
ucgagacuuugccaaggua

SEQ ID NO: 199757 - RNA, 19 nt, Homo sapiens
  misc_RNA (1)...(19): siRNA sense strand
gcaaaaggccauaaaaugc

SEQ ID NO: 199758 - RNA, 19 nt, Homo sapiens
  misc_RNA (1)...(19): siRNA sense strand
cugcaugauucuauccaaa

SEQ ID NO: 199759 - RNA, 19 nt, Homo sapiens
  misc_RNA (1)...(19): siRNA sense strand
uaaagcacauuuggaagac

SEQ ID NO: 199760 - RNA, 19 nt, Homo sapiens
  misc_RNA (1)...(19): siRNA sense strand
acaggagucuaaagcacuu

SEQ ID NO: 199761 - RNA, 19 nt, Homo sapiens
  misc_RNA (1)...(19): siRNA sense strand
acagauaccuuuucaagca

SEQ ID NO: 199762 - RNA, 19 nt, Homo sapiens
  misc_RNA (1)...(19): siRNA sense strand
aagcacauuuggaagacaa

SEQ ID NO: 199763 - RNA, 19 nt, Homo sapiens
  misc_RNA (1)...(19): siRNA sense strand
gcuaauaauaagccagaga

SEQ ID NO: 199764 - RNA, 19 nt, Homo sapiens
  misc_RNA (1)...(19): siRNA sense strand
caagagcacaacaauuugg

SEQ ID NO: 199765 - RNA, 19 nt, Homo sapiens
  misc_RNA (1)...(19): siRNA sense strand
ccugucagcugcaugugau

SEQ ID NO: 199766 - RNA, 19 nt, Homo sapiens
  misc_RNA (1)...(19): siRNA sense strand
gcugcugaauguuuaugau

SEQ ID NO: 199767 - RNA, 19 nt, Homo sapiens
  misc_RNA (1)...(19): siRNA sense strand
acagagcucuaccagucuu

SEQ ID NO: 199768 - RNA, 19 nt, Homo sapiens
  misc_RNA (1)...(19): siRNA sense strand
acaguugggugaaguugca

SEQ ID NO: 199769 - RNA, 19 nt, Homo sapiens
  misc_RNA (1)...(19): siRNA sense strand
guuugaccacuauuuauga

SEQ ID NO: 199770 - RNA, 19 nt, Homo sapiens
  misc_RNA (1)...(19): siRNA sense strand
gcuuauaggacugccauga

SEQ ID NO: 199771 - RNA, 19 nt, Homo sapiens
  misc_RNA (1)...(19): siRNA sense strand
caucaggccaaauguaaca

SEQ ID NO: 199772 - RNA, 19 nt, Homo sapiens
  misc_RNA (1)...(19): siRNA sense strand
gauucuauccaaauuccaa

SEQ ID NO: 199773 - RNA, 19 nt, Homo sapiens
  misc_RNA (1)...(19): siRNA sense strand
ggcaaguucaacaggauuu

SEQ ID NO: 199774 - RNA, 19 nt, Homo sapiens
  misc_RNA (1)...(19): siRNA sense strand
gaacuggcugcugaauguu

SEQ ID NO: 199775 - RNA, 19 nt, Homo sapiens
  misc_RNA (1)...(19): siRNA sense strand
cugcugaauguuuaugaua

SEQ ID NO: 199776 - RNA, 19 nt, Homo sapiens
  misc_RNA (1)...(19): siRNA sense strand
aagcaucaggccaaaugua

SEQ ID NO: 199777 - RNA, 19 nt, Homo sapiens
  misc_RNA (1)...(19): siRNA sense strand
uggcaucauuucccugugu

SEQ ID NO: 199778 - RNA, 19 nt, Homo sapiens
  misc_RNA (1)...(19): siRNA sense strand
ccaugaaacuccgaagacu

SEQ ID NO: 199779 - RNA, 19 nt, Homo sapiens
  misc_RNA (1)...(19): siRNA sense strand
auaauaagccagagaucga

SEQ ID NO: 199780 - RNA, 19 nt, Homo sapiens
  misc_RNA (1)...(19): siRNA sense strand
cuaauaauaagccagagau

SEQ ID NO: 199781 - RNA, 19 nt, Homo sapiens
  misc_RNA (1)...(19): siRNA sense strand
ugggugaaguugcauccuu

SEQ ID NO: 199782 - RNA, 19 nt, Homo sapiens
  misc_RNA (1)...(19): siRNA sense strand
caucauuucccuguguaaa

SEQ ID NO: 199783 - RNA, 19 nt, Homo sapiens
  misc_RNA (1)...(19): siRNA sense strand
gcguggauaugugucugaa

SEQ ID NO: 199784 - RNA, 19 nt, Homo sapiens
  misc_RNA (1)...(19): siRNA sense strand
gcacuaucccaugguggaa

SEQ ID NO: 199785 - RNA, 19 nt, Homo sapiens
  misc_RNA (1)...(19): siRNA sense strand
gagccugucagcugcaugu

SEQ ID NO: 199786 - RNA, 19 nt, Homo sapiens
  misc_RNA (1)...(19): siRNA sense strand
guacagauaccuuuucaag

SEQ ID NO: 199787 - RNA, 19 nt, Homo sapiens
  misc_RNA (1)...(19): siRNA sense strand
gucccucucugcguggaua

SEQ ID NO: 199788 - RNA, 19 nt, Homo sapiens
  misc_RNA (1)...(19): siRNA sense strand
ggagcugcuuccaauuugc

SEQ ID NO: 199789 - RNA, 19 nt, Homo sapiens
  misc_RNA (1)...(19): siRNA sense strand
uuagcugaccugaauaaug

SEQ ID NO: 199790 - RNA, 19 nt, Homo sapiens
  misc_RNA (1)...(19): siRNA sense strand
guggcaaguucaacaggau

SEQ ID NO: 199791 - RNA, 19 nt, Homo sapiens
  misc_RNA (1)...(19): siRNA sense strand
acaacaauuuggucaacgu

SEQ ID NO: 199792 - RNA, 19 nt, Homo sapiens
  misc_RNA (1)...(19): siRNA sense strand
gacuacaucaggagaagau

SEQ ID NO: 199793 - RNA, 19 nt, Homo sapiens
  misc_RNA (1)...(19): siRNA sense strand
uaauaagccagagaucgaa

SEQ ID NO: 199794 - RNA, 19 nt, Homo sapiens
  misc_RNA (1)...(19): siRNA sense strand
ugucagauucucagcuuau

SEQ ID NO: 199795 - RNA, 19 nt, Homo sapiens
  misc_RNA (1)...(19): siRNA sense strand
ggauauccugcagauuauu

SEQ ID NO: 199796 - RNA, 19 nt, Homo sapiens
  misc_RNA (1)...(19): siRNA sense strand
agcaucaggccaaauguaa

SEQ ID NO: 199797 - RNA, 19 nt, Homo sapiens
  misc_RNA (1)...(19): siRNA sense strand
gcccuuugcuuggaucucu

SEQ ID NO: 199798 - RNA, 19 nt, Homo sapiens
  misc_RNA (1)...(19): siRNA sense strand
gcugaauguuuaugauacg

SEQ ID NO: 199799 - RNA, 19 nt, Homo sapiens
  misc_RNA (1)...(19): siRNA sense strand
agacuuugccaagguacua

SEQ ID NO: 199800 - RNA, 19 nt, Homo sapiens
  misc_RNA (1)...(19): siRNA sense strand
caagcaaguggcaaguuca

SEQ ID NO: 199801 - RNA, 19 nt, Homo sapiens
  misc_RNA (1)...(19): siRNA sense strand
agacaaguacagauaccuu

SEQ ID NO: 199802 - RNA, 19 nt, Homo sapiens
  misc_RNA (1)...(19): siRNA sense strand
gcaucauuucccuguguaa

SEQ ID NO: 199803 - RNA, 19 nt, Homo sapiens
  misc_RNA (1)...(19): siRNA sense strand
cugcaaagaguguccaauc

SEQ ID NO: 199804 - RNA, 19 nt, Homo sapiens
  misc_RNA (1)...(19): siRNA sense strand
cuuauaggacugccaugaa

SEQ ID NO: 199805 - RNA, 19 nt, Homo sapiens
  misc_RNA (1)...(19): siRNA sense strand
caaagaguguccaaucauu

SEQ ID NO: 199806 - RNA, 19 nt, Homo sapiens
  misc_RNA (1)...(19): siRNA sense strand
uagcugaccugaauaaugu

SEQ ID NO: 199807 - RNA, 19 nt, Homo sapiens
  misc_RNA (1)...(19): siRNA sense strand
gcaugauucuauccaaauu

SEQ ID NO: 199808 - RNA, 19 nt, Homo sapiens
  misc_RNA (1)...(19): siRNA sense strand
ugaacuggcugcugaaugu

SEQ ID NO: 199809 - RNA, 19 nt, Homo sapiens
  misc_RNA (1)...(19): siRNA sense strand
gauauccugcagauuauua

SEQ ID NO: 199810 - RNA, 19 nt, Homo sapiens
  misc_RNA (1)...(19): siRNA sense strand
gagaagauguucgagacuu

SEQ ID NO: 199811 - RNA, 19 nt, Homo sapiens
  misc_RNA (1)...(19): siRNA sense strand
gcacuuuaauuaugacauc

SEQ ID NO: 199812 - RNA, 19 nt, Homo sapiens
  misc_RNA (1)...(19): siRNA sense strand
guaaagcacauuuggaaga

SEQ ID NO: 199813 - RNA, 19 nt, Homo sapiens
  misc_RNA (1)...(19): siRNA sense strand
gaauauugcacuccgacua

SEQ ID NO: 199814 - RNA, 19 nt, Homo sapiens
  misc_RNA (1)...(19): siRNA sense strand
uuauaggacugccaugaaa

SEQ ID NO: 199815 - RNA, 19 nt, Homo sapiens
  misc_RNA (1)...(19): siRNA sense strand
gggugaaguugcauccuuu

SEQ ID NO: 199816 - RNA, 19 nt, Homo sapiens
  misc_RNA (1)...(19): siRNA sense strand
gcaagagcacaacaauuug

SEQ ID NO: 199817 - RNA, 19 nt, Homo sapiens
  misc_RNA (1)...(19): siRNA sense strand
gcacaacaauuuggucaac

SEQ ID NO: 199818 - RNA, 19 nt, Homo sapiens
  misc_RNA (1)...(19): siRNA sense strand
agcaagagcacaacaauuu

SEQ ID NO: 199819 - RNA, 19 nt, Homo sapiens
  misc_RNA (1)...(19): siRNA sense strand
agaagauguucgagacuuu

SEQ ID NO: 199820 - RNA, 19 nt, Homo sapiens
  misc_RNA (1)...(19): siRNA sense strand
gagcaagagcacaacaauu

SEQ ID NO: 199821 - RNA, 19 nt, Homo sapiens
  misc_RNA (1)...(19): siRNA sense strand
ucaagcaaguggcaaguuc

SEQ ID NO: 199822 - RNA, 19 nt, Homo sapiens
  misc_RNA (1)...(19): siRNA sense strand
ccacgagacucaaacaacu

SEQ ID NO: 199823 - RNA, 19 nt, Homo sapiens
  misc_RNA (1)...(19): siRNA sense strand
cagcacaaccucaagcaaa

SEQ ID NO: 199824 - RNA, 19 nt, Homo sapiens
  misc_RNA (1)...(19): siRNA sense strand
gcaaagaguguccaaucau

SEQ ID NO: 199825 - RNA, 19 nt, Homo sapiens
  misc_RNA (1)...(19): siRNA sense strand
auggauauccugcagauua

SEQ ID NO: 199826 - RNA, 19 nt, Homo sapiens
  misc_RNA (1)...(19): siRNA sense strand
uguaacaucugcaaagagu

SEQ ID NO: 199827 - RNA, 19 nt, Homo sapiens
  misc_RNA (1)...(19): siRNA sense strand
guccggagcugcuuccaau

SEQ ID NO: 199828 - RNA, 19 nt, Homo sapiens
  misc_RNA (1)...(19): siRNA sense strand
gcaaguggcaaguucaaca

SEQ ID NO: 199829 - RNA, 19 nt, Homo sapiens
  misc_RNA (1)...(19): siRNA sense strand
gcuuccaauuugcuaauaa

SEQ ID NO: 199830 - RNA, 19 nt, Homo sapiens
  misc_RNA (1)...(19): siRNA sense strand
uggaagacaaguacagaua

SEQ ID NO: 199831 - RNA, 19 nt, Homo sapiens
  misc_RNA (1)...(19): siRNA sense strand
ggauccguguccugucuuu

SEQ ID NO: 199832 - RNA, 19 nt, Homo sapiens
  misc_RNA (1)...(19): siRNA sense strand
gucuuuagcugaccugaau

SEQ ID NO: 199833 - RNA, 19 nt, Homo sapiens
  misc_RNA (1)...(19): siRNA sense strand
gacaaguacagauaccuuu

SEQ ID NO: 199834 - RNA, 19 nt, Homo sapiens
  misc_RNA (1)...(19): siRNA sense strand
ccaagcaucaggccaaaug

SEQ ID NO: 199835 - RNA, 19 nt, Homo sapiens
  misc_RNA (1)...(19): siRNA sense strand
ggagcaagagcacaacaau

SEQ ID NO: 199836 - RNA, 19 nt, Homo sapiens
  misc_RNA (1)...(19): siRNA sense strand
guguaaagcacauuuggaa

SEQ ID NO: 199837 - RNA, 19 nt, Homo sapiens
  misc_RNA (1)...(19): siRNA sense strand
caagacaguugggugaagu

SEQ ID NO: 199838 - RNA, 19 nt, Homo sapiens
  misc_RNA (1)...(19): siRNA sense strand
gaagauguucgagacuuug

SEQ ID NO: 199839 - RNA, 19 nt, Homo sapiens
  misc_RNA (1)...(19): siRNA sense strand
gucagauucucagcuuaua

SEQ ID NO: 199840 - RNA, 19 nt, Homo sapiens
  misc_RNA (1)...(19): siRNA sense strand
uaacaucugcaaagagugu

SEQ ID NO: 199841 - RNA, 19 nt, Homo sapiens
  misc_RNA (1)...(19): siRNA sense strand
cggagcugcuuccaauuug

SEQ ID NO: 199842 - RNA, 19 nt, Homo sapiens
  misc_RNA (1)...(19): siRNA sense strand
gaagacaaguacagauacc

SEQ ID NO: 199843 - RNA, 19 nt, Homo sapiens
  misc_RNA (1)...(19): siRNA sense strand
ccauggauauccugcagau

SEQ ID NO: 199844 - RNA, 19 nt, Homo sapiens
  misc_RNA (1)...(19): siRNA sense strand
ggcaucauuucccugugua

SEQ ID NO: 199845 - RNA, 19 nt, Homo sapiens
  misc_RNA (1)...(19): siRNA sense strand
uggauauccugcagauuau

SEQ ID NO: 199846 - RNA, 19 nt, Homo sapiens
  misc_RNA (1)...(19): siRNA sense strand
ggaagacaaguacagauac

SEQ ID NO: 199847 - RNA, 19 nt, Homo sapiens
  misc_RNA (1)...(19): siRNA sense strand
ugcaaagaguguccaauca

SEQ ID NO: 199848 - RNA, 19 nt, Homo sapiens
  misc_RNA (1)...(19): siRNA sense strand
guggauaugugucugaacu

SEQ ID NO: 199849 - RNA, 19 nt, Homo sapiens
  misc_RNA (1)...(19): siRNA sense strand
acuggcugcugaauguuua

SEQ ID NO: 199850 - RNA, 19 nt, Homo sapiens
  misc_RNA (1)...(19): siRNA sense strand
acuaucccaugguggaaua

SEQ ID NO: 199851 - RNA, 19 nt, Homo sapiens
  misc_RNA (1)...(19): siRNA sense strand
ccggagcugcuuccaauuu

SEQ ID NO: 199852 - RNA, 19 nt, Homo sapiens
  misc_RNA (1)...(19): siRNA sense strand
ccaaauuccaagacaguug

SEQ ID NO: 199853 - RNA, 19 nt, Homo sapiens
  misc_RNA (1)...(19): siRNA sense strand
cagaaacugccaagcauca

SEQ ID NO: 199854 - RNA, 19 nt, Homo sapiens
  misc_RNA (1)...(19): siRNA sense strand
uaugacaucugccaaagcu

SEQ ID NO: 199855 - RNA, 19 nt, Homo sapiens
  misc_RNA (1)...(19): siRNA sense strand
aaugucagauucucagcuu

SEQ ID NO: 199856 - RNA, 19 nt, Homo sapiens
  misc_RNA (1)...(19): siRNA sense strand
ucgagacuuugccaaggua

SEQ ID NO: 199857 - RNA, 19 nt, Homo sapiens
  misc_RNA (1)...(19): siRNA sense strand
gcaaaaggccauaaaaugc

SEQ ID NO: 199858 - RNA, 19 nt, Homo sapiens
  misc_RNA (1)...(19): siRNA sense strand
cugcaugauucuauccaaa

SEQ ID NO: 199859 - RNA, 19 nt, Homo sapiens
  misc_RNA (1)...(19): siRNA sense strand
uaaagcacauuuggaagac

SEQ ID NO: 199860 - RNA, 19 nt, Homo sapiens
  misc_RNA (1)...(19): siRNA sense strand
acaggagucuaaagcacuu

SEQ ID NO: 199861 - RNA, 19 nt, Homo sapiens
  misc_RNA (1)...(19): siRNA sense strand
acagauaccuuuucaagca

SEQ ID NO: 199862 - RNA, 19 nt, Homo sapiens
  misc_RNA (1)...(19): siRNA sense strand
aagcacauuuggaagacaa

SEQ ID NO: 199863 - RNA, 19 nt, Homo sapiens
  misc_RNA (1)...(19): siRNA sense strand
gcuaauaauaagccagaga

SEQ ID NO: 199864 - RNA, 19 nt, Homo sapiens
  misc_RNA (1)...(19): siRNA sense strand
caagagcacaacaauuugg

SEQ ID NO: 199865 - RNA, 19 nt, Homo sapiens
  misc_RNA (1)...(19): siRNA sense strand
ccugucagcugcaugugau

SEQ ID NO: 199866 - RNA, 19 nt, Homo sapiens
  misc_RNA (1)...(19): siRNA sense strand
gcugcugaauguuuaugau

SEQ ID NO: 199867 - RNA, 19 nt, Homo sapiens
  misc_RNA (1)...(19): siRNA sense strand
acagagcucuaccagucuu

SEQ ID NO: 199868 - RNA, 19 nt, Homo sapiens
  misc_RNA (1)...(19): siRNA sense strand
acaguugggugaaguugca

SEQ ID NO: 199869 - RNA, 19 nt, Homo sapiens
  misc_RNA (1)...(19): siRNA sense strand
guuugaccacuauuuauga

SEQ ID NO: 199870 - RNA, 19 nt, Homo sapiens
  misc_RNA (1)...(19): siRNA sense strand
gcuuauaggacugccauga

SEQ ID NO: 199871 - RNA, 19 nt, Homo sapiens
  misc_RNA (1)...(19): siRNA sense strand
caucaggccaaauguaaca

SEQ ID NO: 199872 - RNA, 19 nt, Homo sapiens
  misc_RNA (1)...(19): siRNA sense strand
gauucuauccaaauuccaa

SEQ ID NO: 199873 - RNA, 19 nt, Homo sapiens
  misc_RNA (1)...(19): siRNA sense strand
ggcaaguucaacaggauuu

SEQ ID NO: 199874 - RNA, 19 nt, Homo sapiens
  misc_RNA (1)...(19): siRNA sense strand
gaacuggcugcugaauguu

SEQ ID NO: 199875 - RNA, 19 nt, Homo sapiens
  misc_RNA (1)...(19): siRNA sense strand
cugcugaauguuuaugaua

SEQ ID NO: 199876 - RNA, 19 nt, Homo sapiens
  misc_RNA (1)...(19): siRNA sense strand
aagcaucaggccaaaugua

SEQ ID NO: 199877 - RNA, 19 nt, Homo sapiens
  misc_RNA (1)...(19): siRNA sense strand
uggcaucauuucccugugu

SEQ ID NO: 199878 - RNA, 19 nt, Homo sapiens
  misc_RNA (1)...(19): siRNA sense strand
ccaugaaacuccgaagacu

SEQ ID NO: 199879 - RNA, 19 nt, Homo sapiens
  misc_RNA (1)...(19): siRNA sense strand
auaauaagccagagaucga

SEQ ID NO: 199880 - RNA, 19 nt, Homo sapiens
  misc_RNA (1)...(19): siRNA sense strand
cuaauaauaagccagagau

SEQ ID NO: 199881 - RNA, 19 nt, Homo sapiens
  misc_RNA (1)...(19): siRNA sense strand
ugggugaaguugcauccuu

SEQ ID NO: 199882 - RNA, 19 nt, Homo sapiens
  misc_RNA (1)...(19): siRNA sense strand
caucauuucccuguguaaa

SEQ ID NO: 199883 - RNA, 19 nt, Homo sapiens
  misc_RNA (1)...(19): siRNA sense strand
gcguggauaugugucugaa

SEQ ID NO: 199884 - RNA, 19 nt, Homo sapiens
  misc_RNA (1)...(19): siRNA sense strand
gcacuaucccaugguggaa

SEQ ID NO: 199885 - RNA, 19 nt, Homo sapiens
  misc_RNA (1)...(19): siRNA sense strand
gagccugucagcugcaugu

SEQ ID NO: 199886 - RNA, 19 nt, Homo sapiens
  misc_RNA (1)...(19): siRNA sense strand
guacagauaccuuuucaag

SEQ ID NO: 199887 - RNA, 19 nt, Homo sapiens
  misc_RNA (1)...(19): siRNA sense strand
gucccucucugcguggaua

SEQ ID NO: 199888 - RNA, 19 nt, Homo sapiens
  misc_RNA (1)...(19): siRNA sense strand
ggagcugcuuccaauuugc

SEQ ID NO: 199889 - RNA, 19 nt, Homo sapiens
  misc_RNA (1)...(19): siRNA sense strand
uuagcugaccugaauaaug

SEQ ID NO: 199890 - RNA, 19 nt, Homo sapiens
  misc_RNA (1)...(19): siRNA sense strand
guggcaaguucaacaggau

SEQ ID NO: 199891 - RNA, 19 nt, Homo sapiens
  misc_RNA (1)...(19): siRNA sense strand
acaacaauuuggucaacgu

SEQ ID NO: 199892 - RNA, 19 nt, Homo sapiens
  misc_RNA (1)...(19): siRNA sense strand
gacuacaucaggagaagau

SEQ ID NO: 199893 - RNA, 19 nt, Homo sapiens
  misc_RNA (1)...(19): siRNA sense strand
uaauaagccagagaucgaa

SEQ ID NO: 199894 - RNA, 19 nt, Homo sapiens
  misc_RNA (1)...(19): siRNA sense strand
ugucagauucucagcuuau

SEQ ID NO: 199895 - RNA, 19 nt, Homo sapiens
  misc_RNA (1)...(19): siRNA sense strand
ggauauccugcagauuauu

SEQ ID NO: 199896 - RNA, 19 nt, Homo sapiens
  misc_RNA (1)...(19): siRNA sense strand
agcaucaggccaaauguaa

SEQ ID NO: 199897 - RNA, 19 nt, Homo sapiens
  misc_RNA (1)...(19): siRNA sense strand
gcccuuugcuuggaucucu

SEQ ID NO: 199898 - RNA, 19 nt, Homo sapiens
  misc_RNA (1)...(19): siRNA sense strand
gcugaauguuuaugauacg

SEQ ID NO: 199899 - RNA, 19 nt, Homo sapiens
  misc_RNA (1)...(19): siRNA sense strand
agacuuugccaagguacua

SEQ ID NO: 199900 - RNA, 19 nt, Homo sapiens
  misc_RNA (1)...(19): siRNA sense strand
caagcaaguggcaaguuca

SEQ ID NO: 199901 - RNA, 19 nt, Homo sapiens
  misc_RNA (1)...(19): siRNA sense strand
agacaaguacagauaccuu

SEQ ID NO: 199902 - RNA, 19 nt, Homo sapiens
  misc_RNA (1)...(19): siRNA sense strand
gcaucauuucccuguguaa

SEQ ID NO: 199903 - RNA, 19 nt, Homo sapiens
  misc_RNA (1)...(19): siRNA sense strand
cugcaaagaguguccaauc

SEQ ID NO: 199904 - RNA, 19 nt, Homo sapiens
  misc_RNA (1)...(19): siRNA sense strand
cuuauaggacugccaugaa

SEQ ID NO: 199905 - RNA, 19 nt, Homo sapiens
  misc_RNA (1)...(19): siRNA sense strand
caaagaguguccaaucauu

SEQ ID NO: 199906 - RNA, 19 nt, Homo sapiens
  misc_RNA (1)...(19): siRNA sense strand
uagcugaccugaauaaugu

SEQ ID NO: 199907 - RNA, 19 nt, Homo sapiens
  misc_RNA (1)...(19): siRNA sense strand
gcaugauucuauccaaauu

SEQ ID NO: 199908 - RNA, 19 nt, Homo sapiens
  misc_RNA (1)...(19): siRNA sense strand
ugaacuggcugcugaaugu

SEQ ID NO: 199909 - RNA, 19 nt, Homo sapiens
  misc_RNA (1)...(19): siRNA sense strand
gauauccugcagauuauua

SEQ ID NO: 199910 - RNA, 19 nt, Homo sapiens
  misc_RNA (1)...(19): siRNA sense strand
gagaagauguucgagacuu

SEQ ID NO: 199911 - RNA, 19 nt, Homo sapiens
  misc_RNA (1)...(19): siRNA sense strand
gcacuuuaauuaugacauc

SEQ ID NO: 199912 - RNA, 19 nt, Homo sapiens
  misc_RNA (1)...(19): siRNA sense strand
guaaagcacauuuggaaga

SEQ ID NO: 199913 - RNA, 19 nt, Homo sapiens
  misc_RNA (1)...(19): siRNA sense strand
gaauauugcacuccgacua

SEQ ID NO: 199914 - RNA, 19 nt, Homo sapiens
  misc_RNA (1)...(19): siRNA sense strand
uuauaggacugccaugaaa

SEQ ID NO: 199915 - RNA, 19 nt, Homo sapiens
  misc_RNA (1)...(19): siRNA sense strand
gggugaaguugcauccuuu

SEQ ID NO: 199916 - RNA, 19 nt, Homo sapiens
  misc_RNA (1)...(19): siRNA sense strand
gcaagagcacaacaauuug

SEQ ID NO: 199917 - RNA, 19 nt, Homo sapiens
  misc_RNA (1)...(19): siRNA sense strand
gcacaacaauuuggucaac

SEQ ID NO: 199918 - RNA, 19 nt, Homo sapiens
  misc_RNA (1)...(19): siRNA sense strand
agcaagagcacaacaauuu

SEQ ID NO: 199919 - RNA, 19 nt, Homo sapiens
  misc_RNA (1)...(19): siRNA sense strand
agaagauguucgagacuuu

SEQ ID NO: 199920 - RNA, 19 nt, Homo sapiens
  misc_RNA (1)...(19): siRNA sense strand
gagcaagagcacaacaauu

SEQ ID NO: 199921 - RNA, 19 nt, Homo sapiens
  misc_RNA (1)...(19): siRNA sense strand
ucaagcaaguggcaaguuc

SEQ ID NO: 199922 - RNA, 19 nt, Homo sapiens
  misc_RNA (1)...(19): siRNA sense strand
ccacgagacucaaacaacu

SEQ ID NO: 199923 - RNA, 19 nt, Homo sapiens
  misc_RNA (1)...(19): siRNA sense strand
cagcacaaccucaagcaaa

SEQ ID NO: 199924 - RNA, 19 nt, Homo sapiens
  misc_RNA (1)...(19): siRNA sense strand
gcaaagaguguccaaucau

SEQ ID NO: 199925 - RNA, 19 nt, Homo sapiens
  misc_RNA (1)...(19): siRNA sense strand
auggauauccugcagauua

SEQ ID NO: 199926 - RNA, 19 nt, Homo sapiens
  misc_RNA (1)...(19): siRNA sense strand
uguaacaucugcaaagagu

SEQ ID NO: 199927 - RNA, 19 nt, Homo sapiens
  misc_RNA (1)...(19): siRNA sense strand
guccggagcugcuuccaau

SEQ ID NO: 199928 - RNA, 19 nt, Homo sapiens
  misc_RNA (1)...(19): siRNA sense strand
gcaaguggcaaguucaaca

SEQ ID NO: 199929 - RNA, 19 nt, Homo sapiens
  misc_RNA (1)...(19): siRNA sense strand
gcuuccaauuugcuaauaa

SEQ ID NO: 199930 - RNA, 19 nt, Homo sapiens
  misc_RNA (1)...(19): siRNA sense strand
uggaagacaaguacagaua

SEQ ID NO: 199931 - RNA, 19 nt, Homo sapiens
  misc_RNA (1)...(19): siRNA sense strand
ggauccguguccugucuuu

SEQ ID NO: 199932 - RNA, 19 nt, Homo sapiens
  misc_RNA (1)...(19): siRNA sense strand
gucuuuagcugaccugaau

SEQ ID NO: 199933 - RNA, 19 nt, Homo sapiens
  misc_RNA (1)...(19): siRNA sense strand
gacaaguacagauaccuuu

SEQ ID NO: 199934 - RNA, 19 nt, Homo sapiens
  misc_RNA (1)...(19): siRNA sense strand
ccaagcaucaggccaaaug

SEQ ID NO: 199935 - RNA, 19 nt, Homo sapiens
  misc_RNA (1)...(19): siRNA sense strand
ggagcaagagcacaacaau

SEQ ID NO: 199936 - RNA, 19 nt, Homo sapiens
  misc_RNA (1)...(19): siRNA sense strand
guguaaagcacauuuggaa

SEQ ID NO: 199937 - RNA, 19 nt, Homo sapiens
  misc_RNA (1)...(19): siRNA sense strand
caagacaguugggugaagu

SEQ ID NO: 199938 - RNA, 19 nt, Homo sapiens
  misc_RNA (1)...(19): siRNA sense strand
gaagauguucgagacuuug

SEQ ID NO: 199939 - RNA, 19 nt, Homo sapiens
  misc_RNA (1)...(19): siRNA sense strand
gucagauucucagcuuaua

SEQ ID NO: 199940 - RNA, 19 nt, Homo sapiens
  misc_RNA (1)...(19): siRNA sense strand
uaacaucugcaaagagugu

SEQ ID NO: 199941 - RNA, 19 nt, Homo sapiens
  misc_RNA (1)...(19): siRNA sense strand
cggagcugcuuccaauuug

SEQ ID NO: 199942 - RNA, 19 nt, Homo sapiens
  misc_RNA (1)...(19): siRNA sense strand
gaagacaaguacagauacc

SEQ ID NO: 199943 - RNA, 19 nt, Homo sapiens
  misc_RNA (1)...(19): siRNA sense strand
ccauggauauccugcagau

SEQ ID NO: 199944 - RNA, 19 nt, Homo sapiens
  misc_RNA (1)...(19): siRNA sense strand
ggcaucauuucccugugua

SEQ ID NO: 199945 - RNA, 19 nt, Homo sapiens
  misc_RNA (1)...(19): siRNA sense strand
uggauauccugcagauuau

SEQ ID NO: 199946 - RNA, 19 nt, Homo sapiens
  misc_RNA (1)...(19): siRNA sense strand
ggaagacaaguacagauac

SEQ ID NO: 199947 - RNA, 19 nt, Homo sapiens
  misc_RNA (1)...(19): siRNA sense strand
ugcaaagaguguccaauca

SEQ ID NO: 199948 - RNA, 19 nt, Homo sapiens
  misc_RNA (1)...(19): siRNA sense strand
guggauaugugucugaacu

SEQ ID NO: 199949 - RNA, 19 nt, Homo sapiens
  misc_RNA (1)...(19): siRNA sense strand
acuggcugcugaauguuua

SEQ ID NO: 199950 - RNA, 19 nt, Homo sapiens
  misc_RNA (1)...(19): siRNA sense strand
acuaucccaugguggaaua

SEQ ID NO: 199951 - RNA, 19 nt, Homo sapiens
  misc_RNA (1)...(19): siRNA sense strand
ccggagcugcuuccaauuu

SEQ ID NO: 199952 - RNA, 19 nt, Homo sapiens
  misc_RNA (1)...(19): siRNA sense strand
ccaaauuccaagacaguug

SEQ ID NO: 199953 - RNA, 19 nt, Homo sapiens
  misc_RNA (1)...(19): siRNA sense strand
cagaaacugccaagcauca

SEQ ID NO: 199954 - RNA, 19 nt, Homo sapiens
  misc_RNA (1)...(19): siRNA sense strand
uaugacaucugccaaagcu

SEQ ID NO: 199955 - RNA, 19 nt, Homo sapiens
  misc_RNA (1)...(19): siRNA sense strand
aaugucagauucucagcuu

SEQ ID NO: 199956 - RNA, 19 nt, Homo sapiens
  misc_RNA (1)...(19): siRNA sense strand
ucgagacuuugccaaggua

SEQ ID NO: 199957 - RNA, 19 nt, Homo sapiens
  misc_RNA (1)...(19): siRNA sense strand
gcaaaaggccauaaaaugc

SEQ ID NO: 199958 - RNA, 19 nt, Homo sapiens
  misc_RNA (1)...(19): siRNA sense strand
cugcaugauucuauccaaa

SEQ ID NO: 199959 - RNA, 19 nt, Homo sapiens
  misc_RNA (1)...(19): siRNA sense strand
uaaagcacauuuggaagac

SEQ ID NO: 199960 - RNA, 19 nt, Homo sapiens
  misc_RNA (1)...(19): siRNA sense strand
acaggagucuaaagcacuu

SEQ ID NO: 199961 - RNA, 19 nt, Homo sapiens
  misc_RNA (1)...(19): siRNA sense strand
acagauaccuuuucaagca

SEQ ID NO: 199962 - RNA, 19 nt, Homo sapiens
  misc_RNA (1)...(19): siRNA sense strand
aagcacauuuggaagacaa

SEQ ID NO: 199963 - RNA, 19 nt, Homo sapiens
  misc_RNA (1)...(19): siRNA sense strand
gcuaauaauaagccagaga

SEQ ID NO: 199964 - RNA, 19 nt, Homo sapiens
  misc_RNA (1)...(19): siRNA sense strand
caagagcacaacaauuugg

SEQ ID NO: 199965 - RNA, 19 nt, Homo sapiens
  misc_RNA (1)...(19): siRNA sense strand
ccugucagcugcaugugau

SEQ ID NO: 199966 - RNA, 19 nt, Homo sapiens
  misc_RNA (1)...(19): siRNA sense strand
gcugcugaauguuuaugau

SEQ ID NO: 199967 - RNA, 19 nt, Homo sapiens
  misc_RNA (1)...(19): siRNA sense strand
acagagcucuaccagucuu

SEQ ID NO: 199968 - RNA, 19 nt, Homo sapiens
  misc_RNA (1)...(19): siRNA sense strand
acaguugggugaaguugca

SEQ ID NO: 199969 - RNA, 19 nt, Homo sapiens
  misc_RNA (1)...(19): siRNA sense strand
guuugaccacuauuuauga

SEQ ID NO: 199970 - RNA, 19 nt, Homo sapiens
  misc_RNA (1)...(19): siRNA sense strand
gcuuauaggacugccauga

SEQ ID NO: 199971 - RNA, 19 nt, Homo sapiens
  misc_RNA (1)...(19): siRNA sense strand
caucaggccaaauguaaca

SEQ ID NO: 199972 - RNA, 19 nt, Homo sapiens
  misc_RNA (1)...(19): siRNA sense strand
gauucuauccaaauuccaa

SEQ ID NO: 199973 - RNA, 19 nt, Homo sapiens
  misc_RNA (1)...(19): siRNA sense strand
ggcaaguucaacaggauuu

SEQ ID NO: 199974 - RNA, 19 nt, Homo sapiens
  misc_RNA (1)...(19): siRNA sense strand
gaacuggcugcugaauguu

SEQ ID NO: 199975 - RNA, 19 nt, Homo sapiens
  misc_RNA (1)...(19): siRNA sense strand
cugcugaauguuuaugaua

SEQ ID NO: 199976 - RNA, 19 nt, Homo sapiens
  misc_RNA (1)...(19): siRNA sense strand
aagcaucaggccaaaugua

SEQ ID NO: 199977 - RNA, 19 nt, Homo sapiens
  misc_RNA (1)...(19): siRNA sense strand
uggcaucauuucccugugu

SEQ ID NO: 199978 - RNA, 19 nt, Homo sapiens
  misc_RNA (1)...(19): siRNA sense strand
ccaugaaacuccgaagacu

SEQ ID NO: 199979 - RNA, 19 nt, Homo sapiens
  misc_RNA (1)...(19): siRNA sense strand
auaauaagccagagaucga

SEQ ID NO: 199980 - RNA, 19 nt, Homo sapiens
  misc_RNA (1)...(19): siRNA sense strand
cuaauaauaagccagagau

SEQ ID NO: 199981 - RNA, 19 nt, Homo sapiens
  misc_RNA (1)...(19): siRNA sense strand
ugggugaaguugcauccuu

SEQ ID NO: 199982 - RNA, 19 nt, Homo sapiens
  misc_RNA (1)...(19): siRNA sense strand
caucauuucccuguguaaa

SEQ ID NO: 199983 - RNA, 19 nt, Homo sapiens
  misc_RNA (1)...(19): siRNA sense strand
gcguggauaugugucugaa

SEQ ID NO: 199984 - RNA, 19 nt, Homo sapiens
  misc_RNA (1)...(19): siRNA sense strand
gcacuaucccaugguggaa

SEQ ID NO: 199985 - RNA, 19 nt, Homo sapiens
  misc_RNA (1)...(19): siRNA sense strand
gagccugucagcugcaugu

SEQ ID NO: 199986 - RNA, 19 nt, Homo sapiens
  misc_RNA (1)...(19): siRNA sense strand
guacagauaccuuuucaag

SEQ ID NO: 199987 - RNA, 19 nt, Homo sapiens
  misc_RNA (1)...(19): siRNA sense strand
gucccucucugcguggaua

SEQ ID NO: 199988 - RNA, 19 nt, Homo sapiens
  misc_RNA (1)...(19): siRNA sense strand
ggagcugcuuccaauuugc

SEQ ID NO: 199989 - RNA, 19 nt, Homo sapiens
  misc_RNA (1)...(19): siRNA sense strand
uuagcugaccugaauaaug

SEQ ID NO: 199990 - RNA, 19 nt, Homo sapiens
  misc_RNA (1)...(19): siRNA sense strand
guggcaaguucaacaggau

SEQ ID NO: 199991 - RNA, 19 nt, Homo sapiens
  misc_RNA (1)...(19): siRNA sense strand
acaacaauuuggucaacgu

SEQ ID NO: 199992 - RNA, 19 nt, Homo sapiens
  misc_RNA (1)...(19): siRNA sense strand
gacuacaucaggagaagau

SEQ ID NO: 199993 - RNA, 19 nt, Homo sapiens
  misc_RNA (1)...(19): siRNA sense strand
uaauaagccagagaucgaa

SEQ ID NO: 199994 - RNA, 19 nt, Homo sapiens
  misc_RNA (1)...(19): siRNA sense strand
ugucagauucucagcuuau

SEQ ID NO: 199995 - RNA, 19 nt, Homo sapiens
  misc_RNA (1)...(19): siRNA sense strand
ggauauccugcagauuauu

SEQ ID NO: 199996 - RNA, 19 nt, Homo sapiens
  misc_RNA (1)...(19): siRNA sense strand
agcaucaggccaaauguaa

SEQ ID NO: 199997 - RNA, 19 nt, Homo sapiens
  misc_RNA (1)...(19): siRNA sense strand
gcccuuugcuuggaucucu

SEQ ID NO: 199998 - RNA, 19 nt, Homo sapiens
  misc_RNA (1)...(19): siRNA sense strand
gcugaauguuuaugauacg

SEQ ID NO: 199999 - RNA, 19 nt, Homo sapiens
  misc_RNA (1)...(19): siRNA sense strand
agacuuugccaagguacua

SEQ ID NO: 200000 - RNA, 19 nt, Homo sapiens
  misc_RNA (1)...(19): siRNA sense strand
caagcaaguggcaaguuca

SEQ ID NO: 200001 - RNA, 19 nt, Homo sapiens
  misc_RNA (1)...(19): siRNA sense strand
agacaaguacagauaccuu

SEQ ID NO: 200002 - RNA, 19 nt, Homo sapiens
  misc_RNA (1)...(19): siRNA sense strand
gcaucauuucccuguguaa

SEQ ID NO: 200003 - RNA, 19 nt, Homo sapiens
  misc_RNA (1)...(19): siRNA sense strand
cugcaaagaguguccaauc

SEQ ID NO: 200004 - RNA, 19 nt, Homo sapiens
  misc_RNA (1)...(19): siRNA sense strand
cuuauaggacugccaugaa

SEQ ID NO: 200005 - RNA, 19 nt, Homo sapiens
  misc_RNA (1)...(19): siRNA sense strand
caaagaguguccaaucauu

SEQ ID NO: 200006 - RNA, 19 nt, Homo sapiens
  misc_RNA (1)...(19): siRNA sense strand
uagcugaccugaauaaugu

SEQ ID NO: 200007 - RNA, 19 nt, Homo sapiens
  misc_RNA (1)...(19): siRNA sense strand
gcaugauucuauccaaauu

SEQ ID NO: 200008 - RNA, 19 nt, Homo sapiens
  misc_RNA (1)...(19): siRNA sense strand
ugaacuggcugcugaaugu

SEQ ID NO: 200009 - RNA, 19 nt, Homo sapiens
  misc_RNA (1)...(19): siRNA sense strand
gauauccugcagauuauua

SEQ ID NO: 200010 - RNA, 19 nt, Homo sapiens
  misc_RNA (1)...(19): siRNA sense strand
gagaagauguucgagacuu

SEQ ID NO: 200011 - RNA, 19 nt, Homo sapiens
  misc_RNA (1)...(19): siRNA sense strand
gcacuuuaauuaugacauc

SEQ ID NO: 200012 - RNA, 19 nt, Homo sapiens
  misc_RNA (1)...(19): siRNA sense strand
guaaagcacauuuggaaga

SEQ ID NO: 200013 - RNA, 19 nt, Homo sapiens
  misc_RNA (1)...(19): siRNA sense strand
gaauauugcacuccgacua

SEQ ID NO: 200014 - RNA, 19 nt, Homo sapiens
  misc_RNA (1)...(19): siRNA sense strand
uuauaggacugccaugaaa

SEQ ID NO: 200015 - RNA, 19 nt, Homo sapiens
  misc_RNA (1)...(19): siRNA sense strand
gggugaaguugcauccuuu

SEQ ID NO: 200016 - RNA, 19 nt, Homo sapiens
  misc_RNA (1)...(19): siRNA sense strand
gcaagagcacaacaauuug

SEQ ID NO: 200017 - RNA, 19 nt, Homo sapiens
  misc_RNA (1)...(19): siRNA sense strand
gcacaacaauuuggucaac

SEQ ID NO: 200018 - RNA, 19 nt, Homo sapiens
  misc_RNA (1)...(19): siRNA sense strand
agcaagagcacaacaauuu

SEQ ID NO: 200019 - RNA, 19 nt, Homo sapiens
  misc_RNA (1)...(19): siRNA sense strand
agaagauguucgagacuuu

SEQ ID NO: 200020 - RNA, 19 nt, Homo sapiens
  misc_RNA (1)...(19): siRNA sense strand
gagcaagagcacaacaauu

SEQ ID NO: 200021 - RNA, 19 nt, Homo sapiens
  misc_RNA (1)...(19): siRNA sense strand
ucaagcaaguggcaaguuc

SEQ ID NO: 200022 - RNA, 19 nt, Homo sapiens
  misc_RNA (1)...(19): siRNA sense strand
ccacgagacucaaacaacu

SEQ ID NO: 200023 - RNA, 19 nt, Homo sapiens
  misc_RNA (1)...(19): siRNA sense strand
cagcacaaccucaagcaaa

SEQ ID NO: 200024 - RNA, 19 nt, Homo sapiens
  misc_RNA (1)...(19): siRNA sense strand
gcaaagaguguccaaucau

SEQ ID NO: 200025 - RNA, 19 nt, Homo sapiens
  misc_RNA (1)...(19): siRNA sense strand
auggauauccugcagauua

SEQ ID NO: 200026 - RNA, 19 nt, Homo sapiens
  misc_RNA (1)...(19): siRNA sense strand
uguaacaucugcaaagagu

SEQ ID NO: 200027 - RNA, 19 nt, Homo sapiens
  misc_RNA (1)...(19): siRNA sense strand
guccggagcugcuuccaau

SEQ ID NO: 200028 - RNA, 19 nt, Homo sapiens
  misc_RNA (1)...(19): siRNA sense strand
gcaaguggcaaguucaaca

SEQ ID NO: 200029 - RNA, 19 nt, Homo sapiens
  misc_RNA (1)...(19): siRNA sense strand
gcuuccaauuugcuaauaa

SEQ ID NO: 200030 - RNA, 19 nt, Homo sapiens
  misc_RNA (1)...(19): siRNA sense strand
uggaagacaaguacagaua

SEQ ID NO: 200031 - RNA, 19 nt, Homo sapiens
  misc_RNA (1)...(19): siRNA sense strand
ggauccguguccugucuuu

SEQ ID NO: 200032 - RNA, 19 nt, Homo sapiens
  misc_RNA (1)...(19): siRNA sense strand
gucuuuagcugaccugaau

SEQ ID NO: 200033 - RNA, 19 nt, Homo sapiens
  misc_RNA (1)...(19): siRNA sense strand
gacaaguacagauaccuuu

SEQ ID NO: 200034 - RNA, 19 nt, Homo sapiens
  misc_RNA (1)...(19): siRNA sense strand
ccaagcaucaggccaaaug

SEQ ID NO: 200035 - RNA, 19 nt, Homo sapiens
  misc_RNA (1)...(19): siRNA sense strand
ggagcaagagcacaacaau

SEQ ID NO: 200036 - RNA, 19 nt, Homo sapiens
  misc_RNA (1)...(19): siRNA sense strand
guguaaagcacauuuggaa

SEQ ID NO: 200037 - RNA, 19 nt, Homo sapiens
  misc_RNA (1)...(19): siRNA sense strand
caagacaguugggugaagu

SEQ ID NO: 200038 - RNA, 19 nt, Homo sapiens
  misc_RNA (1)...(19): siRNA sense strand
gaagauguucgagacuuug

SEQ ID NO: 200039 - RNA, 19 nt, Homo sapiens
  misc_RNA (1)...(19): siRNA sense strand
gucagauucucagcuuaua

SEQ ID NO: 200040 - RNA, 19 nt, Homo sapiens
  misc_RNA (1)...(19): siRNA sense strand
uaacaucugcaaagagugu

SEQ ID NO: 200041 - RNA, 19 nt, Homo sapiens
  misc_RNA (1)...(19): siRNA sense strand
cggagcugcuuccaauuug

SEQ ID NO: 200042 - RNA, 19 nt, Homo sapiens
  misc_RNA (1)...(19): siRNA sense strand
gaagacaaguacagauacc

SEQ ID NO: 200043 - RNA, 19 nt, Homo sapiens
  misc_RNA (1)...(19): siRNA sense strand
ccauggauauccugcagau

SEQ ID NO: 200044 - RNA, 19 nt, Homo sapiens
  misc_RNA (1)...(19): siRNA sense strand
ggcaucauuucccugugua

SEQ ID NO: 200045 - RNA, 19 nt, Homo sapiens
  misc_RNA (1)...(19): siRNA sense strand
uggauauccugcagauuau

SEQ ID NO: 200046 - RNA, 19 nt, Homo sapiens
  misc_RNA (1)...(19): siRNA sense strand
ggaagacaaguacagauac

SEQ ID NO: 200047 - RNA, 19 nt, Homo sapiens
  misc_RNA (1)...(19): siRNA sense strand
ugcaaagaguguccaauca

SEQ ID NO: 200048 - RNA, 19 nt, Homo sapiens
  misc_RNA (1)...(19): siRNA sense strand
guggauaugugucugaacu

SEQ ID NO: 200049 - RNA, 19 nt, Homo sapiens
  misc_RNA (1)...(19): siRNA sense strand
acuggcugcugaauguuua

SEQ ID NO: 200050 - RNA, 19 nt, Homo sapiens
  misc_RNA (1)...(19): siRNA sense strand
acuaucccaugguggaaua

SEQ ID NO: 200051 - RNA, 19 nt, Homo sapiens
  misc_RNA (1)...(19): siRNA sense strand
ccggagcugcuuccaauuu

SEQ ID NO: 200052 - RNA, 19 nt, Homo sapiens
  misc_RNA (1)...(19): siRNA sense strand
ccaaauuccaagacaguug

SEQ ID NO: 200053 - RNA, 19 nt, Homo sapiens
  misc_RNA (1)...(19): siRNA sense strand
cagaaacugccaagcauca

SEQ ID NO: 200054 - RNA, 19 nt, Homo sapiens
  misc_RNA (1)...(19): siRNA sense strand
uaugacaucugccaaagcu

SEQ ID NO: 200055 - RNA, 19 nt, Homo sapiens
  misc_RNA (1)...(19): siRNA sense strand
aaugucagauucucagcuu

SEQ ID NO: 200056 - RNA, 19 nt, Homo sapiens
  misc_RNA (1)...(19): siRNA sense strand
ucgagacuuugccaaggua

SEQ ID NO: 200057 - RNA, 19 nt, Homo sapiens
  misc_RNA (1)...(19): siRNA sense strand
gcaaaaggccauaaaaugc

SEQ ID NO: 200058 - RNA, 19 nt, Homo sapiens
  misc_RNA (1)...(19): siRNA sense strand
cugcaugauucuauccaaa

SEQ ID NO: 200059 - RNA, 19 nt, Homo sapiens
  misc_RNA (1)...(19): siRNA sense strand
uaaagcacauuuggaagac

SEQ ID NO: 200060 - RNA, 19 nt, Homo sapiens
  misc_RNA (1)...(19): siRNA sense strand
acaggagucuaaagcacuu

SEQ ID NO: 200061 - RNA, 19 nt, Homo sapiens
  misc_RNA (1)...(19): siRNA sense strand
acagauaccuuuucaagca

SEQ ID NO: 200062 - RNA, 19 nt, Homo sapiens
  misc_RNA (1)...(19): siRNA sense strand
aagcacauuuggaagacaa

SEQ ID NO: 200063 - RNA, 19 nt, Homo sapiens
  misc_RNA (1)...(19): siRNA sense strand
gcuaauaauaagccagaga

SEQ ID NO: 200064 - RNA, 19 nt, Homo sapiens
  misc_RNA (1)...(19): siRNA sense strand
caagagcacaacaauuugg

SEQ ID NO: 200065 - RNA, 19 nt, Homo sapiens
  misc_RNA (1)...(19): siRNA sense strand
ccugucagcugcaugugau

SEQ ID NO: 200066 - RNA, 19 nt, Homo sapiens
  misc_RNA (1)...(19): siRNA sense strand
gcugcugaauguuuaugau

SEQ ID NO: 200067 - RNA, 19 nt, Homo sapiens
  misc_RNA (1)...(19): siRNA sense strand
acagagcucuaccagucuu

SEQ ID NO: 200068 - RNA, 19 nt, Homo sapiens
  misc_RNA (1)...(19): siRNA sense strand
acaguugggugaaguugca

SEQ ID NO: 200069 - RNA, 19 nt, Homo sapiens
  misc_RNA (1)...(19): siRNA sense strand
guuugaccacuauuuauga

SEQ ID NO: 200070 - RNA, 19 nt, Homo sapiens
  misc_RNA (1)...(19): siRNA sense strand
gcuuauaggacugccauga

SEQ ID NO: 200071 - RNA, 19 nt, Homo sapiens
  misc_RNA (1)...(19): siRNA sense strand
caucaggccaaauguaaca

SEQ ID NO: 200072 - RNA, 19 nt, Homo sapiens
  misc_RNA (1)...(19): siRNA sense strand
gauucuauccaaauuccaa

SEQ ID NO: 200073 - RNA, 19 nt, Homo sapiens
  misc_RNA (1)...(19): siRNA sense strand
ggcaaguucaacaggauuu

SEQ ID NO: 200074 - RNA, 19 nt, Homo sapiens
  misc_RNA (1)...(19): siRNA sense strand
gaacuggcugcugaauguu

SEQ ID NO: 200075 - RNA, 19 nt, Homo sapiens
  misc_RNA (1)...(19): siRNA sense strand
cugcugaauguuuaugaua

SEQ ID NO: 200076 - RNA, 19 nt, Homo sapiens
  misc_RNA (1)...(19): siRNA sense strand
aagcaucaggccaaaugua

SEQ ID NO: 200077 - RNA, 19 nt, Homo sapiens
  misc_RNA (1)...(19): siRNA sense strand
uggcaucauuucccugugu

SEQ ID NO: 200078 - RNA, 19 nt, Homo sapiens
  misc_RNA (1)...(19): siRNA sense strand
ccaugaaacuccgaagacu

SEQ ID NO: 200079 - RNA, 19 nt, Homo sapiens
  misc_RNA (1)...(19): siRNA sense strand
auaauaagccagagaucga

SEQ ID NO: 200080 - RNA, 19 nt, Homo sapiens
  misc_RNA (1)...(19): siRNA sense strand
cuaauaauaagccagagau

SEQ ID NO: 200081 - RNA, 19 nt, Homo sapiens
  misc_RNA (1)...(19): siRNA sense strand
ugggugaaguugcauccuu

SEQ ID NO: 200082 - RNA, 19 nt, Homo sapiens
  misc_RNA (1)...(19): siRNA sense strand
caucauuucccuguguaaa

SEQ ID NO: 200083 - RNA, 19 nt, Homo sapiens
  misc_RNA (1)...(19): siRNA sense strand
gcguggauaugugucugaa

SEQ ID NO: 200084 - RNA, 19 nt, Homo sapiens
  misc_RNA (1)...(19): siRNA sense strand
gcacuaucccaugguggaa

SEQ ID NO: 200085 - RNA, 19 nt, Homo sapiens
  misc_RNA (1)...(19): siRNA sense strand
gagccugucagcugcaugu

SEQ ID NO: 200086 - RNA, 19 nt, Homo sapiens
  misc_RNA (1)...(19): siRNA sense strand
guacagauaccuuuucaag

SEQ ID NO: 200087 - RNA, 19 nt, Homo sapiens
  misc_RNA (1)...(19): siRNA sense strand
gucccucucugcguggaua

SEQ ID NO: 200088 - RNA, 19 nt, Homo sapiens
  misc_RNA (1)...(19): siRNA sense strand
ggagcugcuuccaauuugc

SEQ ID NO: 200089 - RNA, 19 nt, Homo sapiens
  misc_RNA (1)...(19): siRNA sense strand
uuagcugaccugaauaaug

SEQ ID NO: 200090 - RNA, 19 nt, Homo sapiens
  misc_RNA (1)...(19): siRNA sense strand
guggcaaguucaacaggau

SEQ ID NO: 200091 - RNA, 19 nt, Homo sapiens
  misc_RNA (1)...(19): siRNA sense strand
acaacaauuuggucaacgu

SEQ ID NO: 200092 - RNA, 19 nt, Homo sapiens
  misc_RNA (1)...(19): siRNA sense strand
gacuacaucaggagaagau

SEQ ID NO: 200093 - RNA, 19 nt, Homo sapiens
  misc_RNA (1)...(19): siRNA sense strand
uaauaagccagagaucgaa

SEQ ID NO: 200094 - RNA, 19 nt, Homo sapiens
  misc_RNA (1)...(19): siRNA sense strand
ugucagauucucagcuuau

SEQ ID NO: 200095 - RNA, 19 nt, Homo sapiens
  misc_RNA (1)...(19): siRNA sense strand
ggauauccugcagauuauu

SEQ ID NO: 200096 - RNA, 19 nt, Homo sapiens
  misc_RNA (1)...(19): siRNA sense strand
agcaucaggccaaauguaa

SEQ ID NO: 200097 - RNA, 19 nt, Homo sapiens
  misc_RNA (1)...(19): siRNA sense strand
gcccuuugcuuggaucucu

SEQ ID NO: 200098 - RNA, 19 nt, Homo sapiens
  misc_RNA (1)...(19): siRNA sense strand
gcugaauguuuaugauacg

SEQ ID NO: 200099 - RNA, 19 nt, Homo sapiens
  misc_RNA (1)...(19): siRNA sense strand
agacuuugccaagguacua

SEQ ID NO: 200100 - RNA, 19 nt, Homo sapiens
  misc_RNA (1)...(19): siRNA sense strand
caagcaaguggcaaguuca

SEQ ID NO: 200101 - RNA, 19 nt, Homo sapiens
  misc_RNA (1)...(19): siRNA sense strand
agacaaguacagauaccuu

SEQ ID NO: 200102 - RNA, 19 nt, Homo sapiens
  misc_RNA (1)...(19): siRNA sense strand
gcaucauuucccuguguaa

SEQ ID NO: 200103 - RNA, 19 nt, Homo sapiens
  misc_RNA (1)...(19): siRNA sense strand
cugcaaagaguguccaauc

SEQ ID NO: 200104 - RNA, 19 nt, Homo sapiens
  misc_RNA (1)...(19): siRNA sense strand
cuuauaggacugccaugaa

SEQ ID NO: 200105 - RNA, 19 nt, Homo sapiens
  misc_RNA (1)...(19): siRNA sense strand
caaagaguguccaaucauu

SEQ ID NO: 200106 - RNA, 19 nt, Homo sapiens
  misc_RNA (1)...(19): siRNA sense strand
uagcugaccugaauaaugu

SEQ ID NO: 200107 - RNA, 19 nt, Homo sapiens
  misc_RNA (1)...(19): siRNA sense strand
gcaugauucuauccaaauu

SEQ ID NO: 200108 - RNA, 19 nt, Homo sapiens
  misc_RNA (1)...(19): siRNA sense strand
ugaacuggcugcugaaugu

SEQ ID NO: 200109 - RNA, 19 nt, Homo sapiens
  misc_RNA (1)...(19): siRNA sense strand
gauauccugcagauuauua

SEQ ID NO: 200110 - RNA, 19 nt, Homo sapiens
  misc_RNA (1)...(19): siRNA sense strand
gagaagauguucgagacuu

SEQ ID NO: 200111 - RNA, 19 nt, Homo sapiens
  misc_RNA (1)...(19): siRNA sense strand
gcacuuuaauuaugacauc

SEQ ID NO: 200112 - RNA, 19 nt, Homo sapiens
  misc_RNA (1)...(19): siRNA sense strand
guaaagcacauuuggaaga

SEQ ID NO: 200113 - RNA, 19 nt, Homo sapiens
  misc_RNA (1)...(19): siRNA sense strand
gaauauugcacuccgacua

SEQ ID NO: 200114 - RNA, 19 nt, Homo sapiens
  misc_RNA (1)...(19): siRNA sense strand
uuauaggacugccaugaaa

SEQ ID NO: 200115 - RNA, 19 nt, Homo sapiens
  misc_RNA (1)...(19): siRNA sense strand
gggugaaguugcauccuuu

SEQ ID NO: 200116 - RNA, 19 nt, Homo sapiens
  misc_RNA (1)...(19): siRNA sense strand
gcaagagcacaacaauuug

SEQ ID NO: 200117 - RNA, 19 nt, Homo sapiens
  misc_RNA (1)...(19): siRNA sense strand
gcacaacaauuuggucaac

SEQ ID NO: 200118 - RNA, 19 nt, Homo sapiens
  misc_RNA (1)...(19): siRNA sense strand
agcaagagcacaacaauuu

SEQ ID NO: 200119 - RNA, 19 nt, Homo sapiens
  misc_RNA (1)...(19): siRNA sense strand
agaagauguucgagacuuu

SEQ ID NO: 200120 - RNA, 19 nt, Homo sapiens
  misc_RNA (1)...(19): siRNA sense strand
gagcaagagcacaacaauu

SEQ ID NO: 200121 - RNA, 19 nt, Homo sapiens
  misc_RNA (1)...(19): siRNA sense strand
ucaagcaaguggcaaguuc

SEQ ID NO: 200122 - RNA, 19 nt, Homo sapiens
  misc_RNA (1)...(19): siRNA sense strand
ccacgagacucaaacaacu

SEQ ID NO: 200123 - RNA, 19 nt, Homo sapiens
  misc_RNA (1)...(19): siRNA sense strand
cagcacaaccucaagcaaa

SEQ ID NO: 200124 - RNA, 19 nt, Homo sapiens
  misc_RNA (1)...(19): siRNA sense strand
gcaaagaguguccaaucau

SEQ ID NO: 200125 - RNA, 19 nt, Homo sapiens
  misc_RNA (1)...(19): siRNA sense strand
auggauauccugcagauua

SEQ ID NO: 200126 - RNA, 19 nt, Homo sapiens
  misc_RNA (1)...(19): siRNA sense strand
uguaacaucugcaaagagu

SEQ ID NO: 200127 - RNA, 19 nt, Homo sapiens
  misc_RNA (1)...(19): siRNA sense strand
guccggagcugcuuccaau

SEQ ID NO: 200128 - RNA, 19 nt, Homo sapiens
  misc_RNA (1)...(19): siRNA sense strand
gcaaguggcaaguucaaca

SEQ ID NO: 200129 - RNA, 19 nt, Homo sapiens
  misc_RNA (1)...(19): siRNA sense strand
gcuuccaauuugcuaauaa

SEQ ID NO: 200130 - RNA, 19 nt, Homo sapiens
  misc_RNA (1)...(19): siRNA sense strand
uggaagacaaguacagaua

SEQ ID NO: 200131 - RNA, 19 nt, Homo sapiens
  misc_RNA (1)...(19): siRNA sense strand
ggauccguguccugucuuu

SEQ ID NO: 200132 - RNA, 19 nt, Homo sapiens
  misc_RNA (1)...(19): siRNA sense strand
gucuuuagcugaccugaau

SEQ ID NO: 200133 - RNA, 19 nt, Homo sapiens
  misc_RNA (1)...(19): siRNA sense strand
gacaaguacagauaccuuu

SEQ ID NO: 200134 - RNA, 19 nt, Homo sapiens
  misc_RNA (1)...(19): siRNA sense strand
ccaagcaucaggccaaaug

SEQ ID NO: 200135 - RNA, 19 nt, Homo sapiens
  misc_RNA (1)...(19): siRNA sense strand
ggagcaagagcacaacaau

SEQ ID NO: 200136 - RNA, 19 nt, Homo sapiens
  misc_RNA (1)...(19): siRNA sense strand
guguaaagcacauuuggaa

SEQ ID NO: 200137 - RNA, 19 nt, Homo sapiens
  misc_RNA (1)...(19): siRNA sense strand
caagacaguugggugaagu

SEQ ID NO: 200138 - RNA, 19 nt, Homo sapiens
  misc_RNA (1)...(19): siRNA sense strand
gaagauguucgagacuuug

SEQ ID NO: 200139 - RNA, 19 nt, Homo sapiens
  misc_RNA (1)...(19): siRNA sense strand
gucagauucucagcuuaua

SEQ ID NO: 200140 - RNA, 19 nt, Homo sapiens
  misc_RNA (1)...(19): siRNA sense strand
uaacaucugcaaagagugu

SEQ ID NO: 200141 - RNA, 19 nt, Homo sapiens
  misc_RNA (1)...(19): siRNA sense strand
cggagcugcuuccaauuug

SEQ ID NO: 200142 - RNA, 19 nt, Homo sapiens
  misc_RNA (1)...(19): siRNA sense strand
gaagacaaguacagauacc

SEQ ID NO: 200143 - RNA, 19 nt, Homo sapiens
  misc_RNA (1)...(19): siRNA sense strand
ccauggauauccugcagau

SEQ ID NO: 200144 - RNA, 19 nt, Homo sapiens
  misc_RNA (1)...(19): siRNA sense strand
ggcaucauuucccugugua

SEQ ID NO: 200145 - RNA, 19 nt, Homo sapiens
  misc_RNA (1)...(19): siRNA sense strand
uggauauccugcagauuau

SEQ ID NO: 200146 - RNA, 19 nt, Homo sapiens
  misc_RNA (1)...(19): siRNA sense strand
ggaagacaaguacagauac

SEQ ID NO: 200147 - RNA, 19 nt, Homo sapiens
  misc_RNA (1)...(19): siRNA sense strand
ugcaaagaguguccaauca

SEQ ID NO: 200148 - RNA, 19 nt, Homo sapiens
  misc_RNA (1)...(19): siRNA sense strand
guggauaugugucugaacu

SEQ ID NO: 200149 - RNA, 19 nt, Homo sapiens
  misc_RNA (1)...(19): siRNA sense strand
acuggcugcugaauguuua

SEQ ID NO: 200150 - RNA, 19 nt, Homo sapiens
  misc_RNA (1)...(19): siRNA sense strand
acuaucccaugguggaaua

SEQ ID NO: 200151 - RNA, 19 nt, Homo sapiens
  misc_RNA (1)...(19): siRNA sense strand
ccggagcugcuuccaauuu

SEQ ID NO: 200152 - RNA, 19 nt, Homo sapiens
  misc_RNA (1)...(19): siRNA sense strand
ccaaauuccaagacaguug

SEQ ID NO: 200153 - RNA, 19 nt, Homo sapiens
  misc_RNA (1)...(19): siRNA sense strand
cagaaacugccaagcauca

SEQ ID NO: 200154 - RNA, 19 nt, Homo sapiens
  misc_RNA (1)...(19): siRNA sense strand
uaugacaucugccaaagcu

SEQ ID NO: 200155 - RNA, 19 nt, Homo sapiens
  misc_RNA (1)...(19): siRNA sense strand
aaugucagauucucagcuu

SEQ ID NO: 200156 - RNA, 19 nt, Homo sapiens
  misc_RNA (1)...(19): siRNA sense strand
ucgagacuuugccaaggua

SEQ ID NO: 200157 - RNA, 19 nt, Homo sapiens
  misc_RNA (1)...(19): siRNA sense strand
gcaaaaggccauaaaaugc

SEQ ID NO: 200158 - RNA, 19 nt, Homo sapiens
  misc_RNA (1)...(19): siRNA sense strand
cugcaugauucuauccaaa

SEQ ID NO: 200159 - RNA, 19 nt, Homo sapiens
  misc_RNA (1)...(19): siRNA sense strand
uaaagcacauuuggaagac

SEQ ID NO: 200160 - RNA, 19 nt, Homo sapiens
  misc_RNA (1)...(19): siRNA sense strand
acaggagucuaaagcacuu

SEQ ID NO: 200161 - RNA, 19 nt, Homo sapiens
  misc_RNA (1)...(19): siRNA sense strand
acagauaccuuuucaagca

SEQ ID NO: 200162 - RNA, 19 nt, Homo sapiens
  misc_RNA (1)...(19): siRNA sense strand
aagcacauuuggaagacaa

SEQ ID NO: 200163 - RNA, 19 nt, Homo sapiens
  misc_RNA (1)...(19): siRNA sense strand
gcuaauaauaagccagaga

SEQ ID NO: 200164 - RNA, 19 nt, Homo sapiens
  misc_RNA (1)...(19): siRNA sense strand
caagagcacaacaauuugg

SEQ ID NO: 200165 - RNA, 19 nt, Homo sapiens
  misc_RNA (1)...(19): siRNA sense strand
ccugucagcugcaugugau

SEQ ID NO: 200166 - RNA, 19 nt, Homo sapiens
  misc_RNA (1)...(19): siRNA sense strand
gcugcugaauguuuaugau

SEQ ID NO: 200167 - RNA, 19 nt, Homo sapiens
  misc_RNA (1)...(19): siRNA sense strand
acagagcucuaccagucuu

SEQ ID NO: 200168 - RNA, 19 nt, Homo sapiens
  misc_RNA (1)...(19): siRNA sense strand
acaguugggugaaguugca

SEQ ID NO: 200169 - RNA, 19 nt, Homo sapiens
  misc_RNA (1)...(19): siRNA sense strand
guuugaccacuauuuauga

SEQ ID NO: 200170 - RNA, 19 nt, Homo sapiens
  misc_RNA (1)...(19): siRNA sense strand
gcuuauaggacugccauga

SEQ ID NO: 200171 - RNA, 19 nt, Homo sapiens
  misc_RNA (1)...(19): siRNA sense strand
caucaggccaaauguaaca

SEQ ID NO: 200172 - RNA, 19 nt, Homo sapiens
  misc_RNA (1)...(19): siRNA sense strand
gauucuauccaaauuccaa

SEQ ID NO: 200173 - RNA, 19 nt, Homo sapiens
  misc_RNA (1)...(19): siRNA sense strand
ggcaaguucaacaggauuu

SEQ ID NO: 200174 - RNA, 19 nt, Homo sapiens
  misc_RNA (1)...(19): siRNA sense strand
gaacuggcugcugaauguu

SEQ ID NO: 200175 - RNA, 19 nt, Homo sapiens
  misc_RNA (1)...(19): siRNA sense strand
cugcugaauguuuaugaua

SEQ ID NO: 200176 - RNA, 19 nt, Homo sapiens
  misc_RNA (1)...(19): siRNA sense strand
aagcaucaggccaaaugua

SEQ ID NO: 200177 - RNA, 19 nt, Homo sapiens
  misc_RNA (1)...(19): siRNA sense strand
uggcaucauuucccugugu

SEQ ID NO: 200178 - RNA, 19 nt, Homo sapiens
  misc_RNA (1)...(19): siRNA sense strand
ccaugaaacuccgaagacu

SEQ ID NO: 200179 - RNA, 19 nt, Homo sapiens
  misc_RNA (1)...(19): siRNA sense strand
auaauaagccagagaucga

SEQ ID NO: 200180 - RNA, 19 nt, Homo sapiens
  misc_RNA (1)...(19): siRNA sense strand
cuaauaauaagccagagau

SEQ ID NO: 200181 - RNA, 19 nt, Homo sapiens
  misc_RNA (1)...(19): siRNA sense strand
ugggugaaguugcauccuu

SEQ ID NO: 200182 - RNA, 19 nt, Homo sapiens
  misc_RNA (1)...(19): siRNA sense strand
caucauuucccuguguaaa

SEQ ID NO: 200183 - RNA, 19 nt, Homo sapiens
  misc_RNA (1)...(19): siRNA sense strand
gcguggauaugugucugaa

SEQ ID NO: 200184 - RNA, 19 nt, Homo sapiens
  misc_RNA (1)...(19): siRNA sense strand
gcacuaucccaugguggaa

SEQ ID NO: 200185 - RNA, 19 nt, Homo sapiens
  misc_RNA (1)...(19): siRNA sense strand
gagccugucagcugcaugu

SEQ ID NO: 200186 - RNA, 19 nt, Homo sapiens
  misc_RNA (1)...(19): siRNA sense strand
guacagauaccuuuucaag

SEQ ID NO: 200187 - RNA, 19 nt, Homo sapiens
  misc_RNA (1)...(19): siRNA sense strand
gucccucucugcguggaua

SEQ ID NO: 200188 - RNA, 19 nt, Homo sapiens
  misc_RNA (1)...(19): siRNA sense strand
ggagcugcuuccaauuugc

SEQ ID NO: 200189 - RNA, 19 nt, Homo sapiens
  misc_RNA (1)...(19): siRNA sense strand
uuagcugaccugaauaaug

SEQ ID NO: 200190 - RNA, 19 nt, Homo sapiens
  misc_RNA (1)...(19): siRNA sense strand
guggcaaguucaacaggau

SEQ ID NO: 200191 - RNA, 19 nt, Homo sapiens
  misc_RNA (1)...(19): siRNA sense strand
acaacaauuuggucaacgu

SEQ ID NO: 200192 - RNA, 19 nt, Homo sapiens
  misc_RNA (1)...(19): siRNA sense strand
gacuacaucaggagaagau

SEQ ID NO: 200193 - RNA, 19 nt, Homo sapiens
  misc_RNA (1)...(19): siRNA sense strand
uaauaagccagagaucgaa

SEQ ID NO: 200194 - RNA, 19 nt, Homo sapiens
  misc_RNA (1)...(19): siRNA sense strand
ugucagauucucagcuuau

SEQ ID NO: 200195 - RNA, 19 nt, Homo sapiens
  misc_RNA (1)...(19): siRNA sense strand
ggauauccugcagauuauu

SEQ ID NO: 200196 - RNA, 19 nt, Homo sapiens
  misc_RNA (1)...(19): siRNA sense strand
agcaucaggccaaauguaa

SEQ ID NO: 200197 - RNA, 19 nt, Homo sapiens
  misc_RNA (1)...(19): siRNA sense strand
gcccuuugcuuggaucucu

SEQ ID NO: 200198 - RNA, 19 nt, Homo sapiens
  misc_RNA (1)...(19): siRNA sense strand
gcugaauguuuaugauacg

SEQ ID NO: 200199 - RNA, 19 nt, Homo sapiens
  misc_RNA (1)...(19): siRNA sense strand
agacuuugccaagguacua

SEQ ID NO: 200200 - RNA, 19 nt, Homo sapiens
  misc_RNA (1)...(19): siRNA sense strand
caagcaaguggcaaguuca

SEQ ID NO: 200201 - RNA, 19 nt, Homo sapiens
  misc_RNA (1)...(19): siRNA sense strand
agacaaguacagauaccuu

SEQ ID NO: 200202 - RNA, 19 nt, Homo sapiens
  misc_RNA (1)...(19): siRNA sense strand
gcaucauuucccuguguaa

SEQ ID NO: 200203 - RNA, 19 nt, Homo sapiens
  misc_RNA (1)...(19): siRNA sense strand
cugcaaagaguguccaauc

SEQ ID NO: 200204 - RNA, 19 nt, Homo sapiens
  misc_RNA (1)...(19): siRNA sense strand
cuuauaggacugccaugaa

SEQ ID NO: 200205 - RNA, 19 nt, Homo sapiens
  misc_RNA (1)...(19): siRNA sense strand
caaagaguguccaaucauu

SEQ ID NO: 200206 - RNA, 19 nt, Homo sapiens
  misc_RNA (1)...(19): siRNA sense strand
uagcugaccugaauaaugu

SEQ ID NO: 200207 - RNA, 19 nt, Homo sapiens
  misc_RNA (1)...(19): siRNA sense strand
gcaugauucuauccaaauu

SEQ ID NO: 200208 - RNA, 19 nt, Homo sapiens
  misc_RNA (1)...(19): siRNA sense strand
ugaacuggcugcugaaugu

SEQ ID NO: 200209 - RNA, 19 nt, Homo sapiens
  misc_RNA (1)...(19): siRNA sense strand
gauauccugcagauuauua

SEQ ID NO: 200210 - RNA, 19 nt, Homo sapiens
  misc_RNA (1)...(19): siRNA sense strand
gagaagauguucgagacuu

SEQ ID NO: 200211 - RNA, 19 nt, Homo sapiens
  misc_RNA (1)...(19): siRNA sense strand
gcacuuuaauuaugacauc

SEQ ID NO: 200212 - RNA, 19 nt, Homo sapiens
  misc_RNA (1)...(19): siRNA sense strand
guaaagcacauuuggaaga

SEQ ID NO: 200213 - RNA, 19 nt, Homo sapiens
  misc_RNA (1)...(19): siRNA sense strand
gaauauugcacuccgacua

SEQ ID NO: 200214 - RNA, 19 nt, Homo sapiens
  misc_RNA (1)...(19): siRNA sense strand
uuauaggacugccaugaaa

SEQ ID NO: 200215 - RNA, 19 nt, Homo sapiens
  misc_RNA (1)...(19): siRNA sense strand
gggugaaguugcauccuuu

SEQ ID NO: 200216 - RNA, 19 nt, Homo sapiens
  misc_RNA (1)...(19): siRNA sense strand
gcaagagcacaacaauuug

SEQ ID NO: 200217 - RNA, 19 nt, Homo sapiens
  misc_RNA (1)...(19): siRNA sense strand
gcacaacaauuuggucaac

SEQ ID NO: 200218 - RNA, 19 nt, Homo sapiens
  misc_RNA (1)...(19): siRNA sense strand
agcaagagcacaacaauuu

SEQ ID NO: 200219 - RNA, 19 nt, Homo sapiens
  misc_RNA (1)...(19): siRNA sense strand
agaagauguucgagacuuu

SEQ ID NO: 200220 - RNA, 19 nt, Homo sapiens
  misc_RNA (1)...(19): siRNA sense strand
gagcaagagcacaacaauu

SEQ ID NO: 200221 - RNA, 19 nt, Homo sapiens
  misc_RNA (1)...(19): siRNA sense strand
ucaagcaaguggcaaguuc

SEQ ID NO: 200222 - RNA, 19 nt, Homo sapiens
  misc_RNA (1)...(19): siRNA sense strand
ccacgagacucaaacaacu

SEQ ID NO: 200223 - RNA, 19 nt, Homo sapiens
  misc_RNA (1)...(19): siRNA sense strand
cagcacaaccucaagcaaa

SEQ ID NO: 200224 - RNA, 19 nt, Homo sapiens
  misc_RNA (1)...(19): siRNA sense strand
gcaaagaguguccaaucau

SEQ ID NO: 200225 - RNA, 19 nt, Homo sapiens
  misc_RNA (1)...(19): siRNA sense strand
auggauauccugcagauua

SEQ ID NO: 200226 - RNA, 19 nt, Homo sapiens
  misc_RNA (1)...(19): siRNA sense strand
uguaacaucugcaaagagu

SEQ ID NO: 200227 - RNA, 19 nt, Homo sapiens
  misc_RNA (1)...(19): siRNA sense strand
guccggagcugcuuccaau

SEQ ID NO: 200228 - RNA, 19 nt, Homo sapiens
  misc_RNA (1)...(19): siRNA sense strand
gcaaguggcaaguucaaca

SEQ ID NO: 200229 - RNA, 19 nt, Homo sapiens
  misc_RNA (1)...(19): siRNA sense strand
gcuuccaauuugcuaauaa

SEQ ID NO: 200230 - RNA, 19 nt, Homo sapiens
  misc_RNA (1)...(19): siRNA sense strand
uggaagacaaguacagaua

SEQ ID NO: 200231 - RNA, 19 nt, Homo sapiens
  misc_RNA (1)...(19): siRNA sense strand
ggauccguguccugucuuu

SEQ ID NO: 200232 - RNA, 19 nt, Homo sapiens
  misc_RNA (1)...(19): siRNA sense strand
gucuuuagcugaccugaau

SEQ ID NO: 200233 - RNA, 19 nt, Homo sapiens
  misc_RNA (1)...(19): siRNA sense strand
gacaaguacagauaccuuu

SEQ ID NO: 200234 - RNA, 19 nt, Homo sapiens
  misc_RNA (1)...(19): siRNA sense strand
ccaagcaucaggccaaaug

SEQ ID NO: 200235 - RNA, 19 nt, Homo sapiens
  misc_RNA (1)...(19): siRNA sense strand
ggagcaagagcacaacaau

SEQ ID NO: 200236 - RNA, 19 nt, Homo sapiens
  misc_RNA (1)...(19): siRNA sense strand
guguaaagcacauuuggaa

SEQ ID NO: 200237 - RNA, 19 nt, Homo sapiens
  misc_RNA (1)...(19): siRNA sense strand
caagacaguugggugaagu

SEQ ID NO: 200238 - RNA, 19 nt, Homo sapiens
  misc_RNA (1)...(19): siRNA sense strand
gaagauguucgagacuuug

SEQ ID NO: 200239 - RNA, 19 nt, Homo sapiens
  misc_RNA (1)...(19): siRNA sense strand
gucagauucucagcuuaua

SEQ ID NO: 200240 - RNA, 19 nt, Homo sapiens
  misc_RNA (1)...(19): siRNA sense strand
uaacaucugcaaagagugu

SEQ ID NO: 200241 - RNA, 19 nt, Homo sapiens
  misc_RNA (1)...(19): siRNA sense strand
cggagcugcuuccaauuug

SEQ ID NO: 200242 - RNA, 19 nt, Homo sapiens
  misc_RNA (1)...(19): siRNA sense strand
gaagacaaguacagauacc

SEQ ID NO: 200243 - RNA, 19 nt, Homo sapiens
  misc_RNA (1)...(19): siRNA sense strand
ccauggauauccugcagau

SEQ ID NO: 200244 - RNA, 19 nt, Homo sapiens
  misc_RNA (1)...(19): siRNA sense strand
ggcaucauuucccugugua

SEQ ID NO: 200245 - RNA, 19 nt, Homo sapiens
  misc_RNA (1)...(19): siRNA sense strand
uggauauccugcagauuau

SEQ ID NO: 200246 - RNA, 19 nt, Homo sapiens
  misc_RNA (1)...(19): siRNA sense strand
ggaagacaaguacagauac

SEQ ID NO: 200247 - RNA, 19 nt, Homo sapiens
  misc_RNA (1)...(19): siRNA sense strand
ugcaaagaguguccaauca

SEQ ID NO: 200248 - RNA, 19 nt, Homo sapiens
  misc_RNA (1)...(19): siRNA sense strand
guggauaugugucugaacu

SEQ ID NO: 200249 - RNA, 19 nt, Homo sapiens
  misc_RNA (1)...(19): siRNA sense strand
acuggcugcugaauguuua

SEQ ID NO: 200250 - RNA, 19 nt, Homo sapiens
  misc_RNA (1)...(19): siRNA sense strand
acuaucccaugguggaaua

SEQ ID NO: 200251 - RNA, 19 nt, Homo sapiens
  misc_RNA (1)...(19): siRNA sense strand
ccggagcugcuuccaauuu

SEQ ID NO: 200252 - RNA, 19 nt, Homo sapiens
  misc_RNA (1)...(19): siRNA sense strand
ccaaauuccaagacaguug

SEQ ID NO: 200253 - RNA, 19 nt, Homo sapiens
  misc_RNA (1)...(19): siRNA sense strand
cagaaacugccaagcauca

SEQ ID NO: 200254 - RNA, 19 nt, Homo sapiens
  misc_RNA (1)...(19): siRNA sense strand
uaugacaucugccaaagcu

SEQ ID NO: 200255 - RNA, 19 nt, Homo sapiens
  misc_RNA (1)...(19): siRNA sense strand
aaugucagauucucagcuu

SEQ ID NO: 200256 - RNA, 19 nt, Homo sapiens
  misc_RNA (1)...(19): siRNA sense strand
ucgagacuuugccaaggua

SEQ ID NO: 200257 - RNA, 19 nt, Homo sapiens
  misc_RNA (1)...(19): siRNA sense strand
gcaaaaggccauaaaaugc

SEQ ID NO: 200258 - RNA, 19 nt, Homo sapiens
  misc_RNA (1)...(19): siRNA sense strand
cugcaugauucuauccaaa

SEQ ID NO: 200259 - RNA, 19 nt, Homo sapiens
  misc_RNA (1)...(19): siRNA sense strand
uaaagcacauuuggaagac

SEQ ID NO: 200260 - RNA, 19 nt, Homo sapiens
  misc_RNA (1)...(19): siRNA sense strand
acaggagucuaaagcacuu

SEQ ID NO: 200261 - RNA, 19 nt, Homo sapiens
  misc_RNA (1)...(19): siRNA sense strand
acagauaccuuuucaagca

SEQ ID NO: 200262 - RNA, 19 nt, Homo sapiens
  misc_RNA (1)...(19): siRNA sense strand
aagcacauuuggaagacaa

SEQ ID NO: 200263 - RNA, 19 nt, Homo sapiens
  misc_RNA (1)...(19): siRNA sense strand
gcuaauaauaagccagaga

SEQ ID NO: 200264 - RNA, 19 nt, Homo sapiens
  misc_RNA (1)...(19): siRNA sense strand
caagagcacaacaauuugg

SEQ ID NO: 200265 - RNA, 19 nt, Homo sapiens
  misc_RNA (1)...(19): siRNA sense strand
ccugucagcugcaugugau

SEQ ID NO: 200266 - RNA, 19 nt, Homo sapiens
  misc_RNA (1)...(19): siRNA sense strand
gcugcugaauguuuaugau

SEQ ID NO: 200267 - RNA, 19 nt, Homo sapiens
  misc_RNA (1)...(19): siRNA sense strand
acagagcucuaccagucuu

SEQ ID NO: 200268 - RNA, 19 nt, Homo sapiens
  misc_RNA (1)...(19): siRNA sense strand
acaguugggugaaguugca

SEQ ID NO: 200269 - RNA, 19 nt, Homo sapiens
  misc_RNA (1)...(19): siRNA sense strand
guuugaccacuauuuauga

SEQ ID NO: 200270 - RNA, 19 nt, Homo sapiens
  misc_RNA (1)...(19): siRNA sense strand
gcuuauaggacugccauga

SEQ ID NO: 200271 - RNA, 19 nt, Homo sapiens
  misc_RNA (1)...(19): siRNA sense strand
caucaggccaaauguaaca

SEQ ID NO: 200272 - RNA, 19 nt, Homo sapiens
  misc_RNA (1)...(19): siRNA sense strand
gauucuauccaaauuccaa

SEQ ID NO: 200273 - RNA, 19 nt, Homo sapiens
  misc_RNA (1)...(19): siRNA sense strand
ggcaaguucaacaggauuu

SEQ ID NO: 200274 - RNA, 19 nt, Homo sapiens
  misc_RNA (1)...(19): siRNA sense strand
gaacuggcugcugaauguu

SEQ ID NO: 200275 - RNA, 19 nt, Homo sapiens
  misc_RNA (1)...(19): siRNA sense strand
cugcugaauguuuaugaua

SEQ ID NO: 200276 - RNA, 19 nt, Homo sapiens
  misc_RNA (1)...(19): siRNA sense strand
aagcaucaggccaaaugua

SEQ ID NO: 200277 - RNA, 19 nt, Homo sapiens
  misc_RNA (1)...(19): siRNA sense strand
uggcaucauuucccugugu

SEQ ID NO: 200278 - RNA, 19 nt, Homo sapiens
  misc_RNA (1)...(19): siRNA sense strand
ccaugaaacuccgaagacu

SEQ ID NO: 200279 - RNA, 19 nt, Homo sapiens
  misc_RNA (1)...(19): siRNA sense strand
auaauaagccagagaucga

SEQ ID NO: 200280 - RNA, 19 nt, Homo sapiens
  misc_RNA (1)...(19): siRNA sense strand
cuaauaauaagccagagau

SEQ ID NO: 200281 - RNA, 19 nt, Homo sapiens
  misc_RNA (1)...(19): siRNA sense strand
ugggugaaguugcauccuu

SEQ ID NO: 200282 - RNA, 19 nt, Homo sapiens
  misc_RNA (1)...(19): siRNA sense strand
caucauuucccuguguaaa

SEQ ID NO: 200283 - RNA, 19 nt, Homo sapiens
  misc_RNA (1)...(19): siRNA sense strand
gcguggauaugugucugaa

SEQ ID NO: 200284 - RNA, 19 nt, Homo sapiens
  misc_RNA (1)...(19): siRNA sense strand
gcacuaucccaugguggaa

SEQ ID NO: 200285 - RNA, 19 nt, Homo sapiens
  misc_RNA (1)...(19): siRNA sense strand
gagccugucagcugcaugu

SEQ ID NO: 200286 - RNA, 19 nt, Homo sapiens
  misc_RNA (1)...(19): siRNA sense strand
guacagauaccuuuucaag

SEQ ID NO: 200287 - RNA, 19 nt, Homo sapiens
  misc_RNA (1)...(19): siRNA sense strand
gucccucucugcguggaua

SEQ ID NO: 200288 - RNA, 19 nt, Homo sapiens
  misc_RNA (1)...(19): siRNA sense strand
ggagcugcuuccaauuugc

SEQ ID NO: 200289 - RNA, 19 nt, Homo sapiens
  misc_RNA (1)...(19): siRNA sense strand
uuagcugaccugaauaaug

SEQ ID NO: 200290 - RNA, 19 nt, Homo sapiens
  misc_RNA (1)...(19): siRNA sense strand
guggcaaguucaacaggau

SEQ ID NO: 200291 - RNA, 19 nt, Homo sapiens
  misc_RNA (1)...(19): siRNA sense strand
acaacaauuuggucaacgu

SEQ ID NO: 200292 - RNA, 19 nt, Homo sapiens
  misc_RNA (1)...(19): siRNA sense strand
gacuacaucaggagaagau

SEQ ID NO: 200293 - RNA, 19 nt, Homo sapiens
  misc_RNA (1)...(19): siRNA sense strand
uaauaagccagagaucgaa

SEQ ID NO: 200294 - RNA, 19 nt, Homo sapiens
  misc_RNA (1)...(19): siRNA sense strand
ugucagauucucagcuuau

SEQ ID NO: 200295 - RNA, 19 nt, Homo sapiens
  misc_RNA (1)...(19): siRNA sense strand
ggauauccugcagauuauu

SEQ ID NO: 200296 - RNA, 19 nt, Homo sapiens
  misc_RNA (1)...(19): siRNA sense strand
agcaucaggccaaauguaa

SEQ ID NO: 200297 - RNA, 19 nt, Homo sapiens
  misc_RNA (1)...(19): siRNA sense strand
gcccuuugcuuggaucucu

SEQ ID NO: 200298 - RNA, 19 nt, Homo sapiens
  misc_RNA (1)...(19): siRNA sense strand
gcugaauguuuaugauacg

SEQ ID NO: 200299 - RNA, 19 nt, Homo sapiens
  misc_RNA (1)...(19): siRNA sense strand
agacuuugccaagguacua

SEQ ID NO: 200300 - RNA, 19 nt, Homo sapiens
  misc_RNA (1)...(19): siRNA sense strand
caagcaaguggcaaguuca

SEQ ID NO: 200301 - RNA, 19 nt, Homo sapiens
  misc_RNA (1)...(19): siRNA sense strand
agacaaguacagauaccuu

SEQ ID NO: 200302 - RNA, 19 nt, Homo sapiens
  misc_RNA (1)...(19): siRNA sense strand
gcaucauuucccuguguaa

SEQ ID NO: 200303 - RNA, 19 nt, Homo sapiens
  misc_RNA (1)...(19): siRNA sense strand
cugcaaagaguguccaauc

SEQ ID NO: 200304 - RNA, 19 nt, Homo sapiens
  misc_RNA (1)...(19): siRNA sense strand
cuuauaggacugccaugaa

SEQ ID NO: 200305 - RNA, 19 nt, Homo sapiens
  misc_RNA (1)...(19): siRNA sense strand
caaagaguguccaaucauu

SEQ ID NO: 200306 - RNA, 19 nt, Homo sapiens
  misc_RNA (1)...(19): siRNA sense strand
uagcugaccugaauaaugu

SEQ ID NO: 200307 - RNA, 19 nt, Homo sapiens
  misc_RNA (1)...(19): siRNA sense strand
gcaugauucuauccaaauu

SEQ ID NO: 200308 - RNA, 19 nt, Homo sapiens
  misc_RNA (1)...(19): siRNA sense strand
ugaacuggcugcugaaugu

SEQ ID NO: 200309 - RNA, 19 nt, Homo sapiens
  misc_RNA (1)...(19): siRNA sense strand
gauauccugcagauuauua

SEQ ID NO: 200310 - RNA, 19 nt, Homo sapiens
  misc_RNA (1)...(19): siRNA sense strand
gagaagauguucgagacuu

SEQ ID NO: 200311 - RNA, 19 nt, Homo sapiens
  misc_RNA (1)...(19): siRNA sense strand
gcacuuuaauuaugacauc

SEQ ID NO: 200312 - RNA, 19 nt, Homo sapiens
  misc_RNA (1)...(19): siRNA sense strand
guaaagcacauuuggaaga

SEQ ID NO: 200313 - RNA, 19 nt, Homo sapiens
  misc_RNA (1)...(19): siRNA sense strand
gaauauugcacuccgacua

SEQ ID NO: 200314 - RNA, 19 nt, Homo sapiens
  misc_RNA (1)...(19): siRNA sense strand
uuauaggacugccaugaaa

SEQ ID NO: 200315 - RNA, 19 nt, Homo sapiens
  misc_RNA (1)...(19): siRNA sense strand
gggugaaguugcauccuuu

SEQ ID NO: 200316 - RNA, 19 nt, Homo sapiens
  misc_RNA (1)...(19): siRNA sense strand
gcaagagcacaacaauuug

SEQ ID NO: 200317 - RNA, 19 nt, Homo sapiens
  misc_RNA (1)...(19): siRNA sense strand
gcacaacaauuuggucaac

SEQ ID NO: 200318 - RNA, 19 nt, Homo sapiens
  misc_RNA (1)...(19): siRNA sense strand
agcaagagcacaacaauuu

SEQ ID NO: 200319 - RNA, 19 nt, Homo sapiens
  misc_RNA (1)...(19): siRNA sense strand
agaagauguucgagacuuu

SEQ ID NO: 200320 - RNA, 19 nt, Homo sapiens
  misc_RNA (1)...(19): siRNA sense strand
gagcaagagcacaacaauu

SEQ ID NO: 200321 - RNA, 19 nt, Homo sapiens
  misc_RNA (1)...(19): siRNA sense strand
ucaagcaaguggcaaguuc

SEQ ID NO: 200322 - RNA, 19 nt, Homo sapiens
  misc_RNA (1)...(19): siRNA sense strand
ccacgagacucaaacaacu

SEQ ID NO: 200323 - RNA, 19 nt, Homo sapiens
  misc_RNA (1)...(19): siRNA sense strand
cagcacaaccucaagcaaa

SEQ ID NO: 200324 - RNA, 19 nt, Homo sapiens
  misc_RNA (1)...(19): siRNA sense strand
gcaaagaguguccaaucau

SEQ ID NO: 200325 - RNA, 19 nt, Homo sapiens
  misc_RNA (1)...(19): siRNA sense strand
auggauauccugcagauua

SEQ ID NO: 200326 - RNA, 19 nt, Homo sapiens
  misc_RNA (1)...(19): siRNA sense strand
uguaacaucugcaaagagu

SEQ ID NO: 200327 - RNA, 19 nt, Homo sapiens
  misc_RNA (1)...(19): siRNA sense strand
guccggagcugcuuccaau

SEQ ID NO: 200328 - RNA, 19 nt, Homo sapiens
  misc_RNA (1)...(19): siRNA sense strand
gcaaguggcaaguucaaca

SEQ ID NO: 200329 - RNA, 19 nt, Homo sapiens
  misc_RNA (1)...(19): siRNA sense strand
gcuuccaauuugcuaauaa

SEQ ID NO: 200330 - RNA, 19 nt, Homo sapiens
  misc_RNA (1)...(19): siRNA sense strand
uggaagacaaguacagaua

SEQ ID NO: 200331 - RNA, 19 nt, Homo sapiens
  misc_RNA (1)...(19): siRNA sense strand
ggauccguguccugucuuu

SEQ ID NO: 200332 - RNA, 19 nt, Homo sapiens
  misc_RNA (1)...(19): siRNA sense strand
gucuuuagcugaccugaau

SEQ ID NO: 200333 - RNA, 19 nt, Homo sapiens
  misc_RNA (1)...(19): siRNA sense strand
gacaaguacagauaccuuu

SEQ ID NO: 200334 - RNA, 19 nt, Homo sapiens
  misc_RNA (1)...(19): siRNA sense strand
ccaagcaucaggccaaaug

SEQ ID NO: 200335 - RNA, 19 nt, Homo sapiens
  misc_RNA (1)...(19): siRNA sense strand
ggagcaagagcacaacaau

SEQ ID NO: 200336 - RNA, 19 nt, Homo sapiens
  misc_RNA (1)...(19): siRNA sense strand
guguaaagcacauuuggaa

SEQ ID NO: 200337 - RNA, 19 nt, Homo sapiens
  misc_RNA (1)...(19): siRNA sense strand
caagacaguugggugaagu

SEQ ID NO: 200338 - RNA, 19 nt, Homo sapiens
  misc_RNA (1)...(19): siRNA sense strand
gaagauguucgagacuuug

SEQ ID NO: 200339 - RNA, 19 nt, Homo sapiens
  misc_RNA (1)...(19): siRNA sense strand
gucagauucucagcuuaua

SEQ ID NO: 200340 - RNA, 19 nt, Homo sapiens
  misc_RNA (1)...(19): siRNA sense strand
uaacaucugcaaagagugu

SEQ ID NO: 200341 - RNA, 19 nt, Homo sapiens
  misc_RNA (1)...(19): siRNA sense strand
cggagcugcuuccaauuug

SEQ ID NO: 200342 - RNA, 19 nt, Homo sapiens
  misc_RNA (1)...(19): siRNA sense strand
gaagacaaguacagauacc

SEQ ID NO: 200343 - RNA, 19 nt, Homo sapiens
  misc_RNA (1)...(19): siRNA sense strand
ccauggauauccugcagau

SEQ ID NO: 200344 - RNA, 19 nt, Homo sapiens
  misc_RNA (1)...(19): siRNA sense strand
ggcaucauuucccugugua

SEQ ID NO: 200345 - RNA, 19 nt, Homo sapiens
  misc_RNA (1)...(19): siRNA sense strand
uggauauccugcagauuau

SEQ ID NO: 200346 - RNA, 19 nt, Homo sapiens
  misc_RNA (1)...(19): siRNA sense strand
ggaagacaaguacagauac

SEQ ID NO: 200347 - RNA, 19 nt, Homo sapiens
  misc_RNA (1)...(19): siRNA sense strand
ugcaaagaguguccaauca

SEQ ID NO: 200348 - RNA, 19 nt, Homo sapiens
  misc_RNA (1)...(19): siRNA sense strand
guggauaugugucugaacu

SEQ ID NO: 200349 - RNA, 19 nt, Homo sapiens
  misc_RNA (1)...(19): siRNA sense strand
acuggcugcugaauguuua

SEQ ID NO: 200350 - RNA, 19 nt, Homo sapiens
  misc_RNA (1)...(19): siRNA sense strand
acuaucccaugguggaaua

SEQ ID NO: 200351 - RNA, 19 nt, Homo sapiens
  misc_RNA (1)...(19): siRNA sense strand
ccggagcugcuuccaauuu

SEQ ID NO: 200352 - RNA, 19 nt, Homo sapiens
  misc_RNA (1)...(19): siRNA sense strand
ccaaauuccaagacaguug

SEQ ID NO: 200353 - RNA, 19 nt, Homo sapiens
  misc_RNA (1)...(19): siRNA sense strand
cagaaacugccaagcauca

SEQ ID NO: 200354 - RNA, 19 nt, Homo sapiens
  misc_RNA (1)...(19): siRNA sense strand
uaugacaucugccaaagcu

SEQ ID NO: 200355 - RNA, 19 nt, Homo sapiens
  misc_RNA (1)...(19): siRNA sense strand
aaugucagauucucagcuu

SEQ ID NO: 200356 - RNA, 19 nt, Homo sapiens
  misc_RNA (1)...(19): siRNA sense strand
ucgagacuuugccaaggua

SEQ ID NO: 200357 - RNA, 19 nt, Homo sapiens
  misc_RNA (1)...(19): siRNA sense strand
gcaaaaggccauaaaaugc

SEQ ID NO: 200358 - RNA, 19 nt, Homo sapiens
  misc_RNA (1)...(19): siRNA sense strand
cugcaugauucuauccaaa

SEQ ID NO: 200359 - RNA, 19 nt, Homo sapiens
  misc_RNA (1)...(19): siRNA sense strand
uaaagcacauuuggaagac

SEQ ID NO: 200360 - RNA, 19 nt, Homo sapiens
  misc_RNA (1)...(19): siRNA sense strand
acaggagucuaaagcacuu

SEQ ID NO: 200361 - RNA, 19 nt, Homo sapiens
  misc_RNA (1)...(19): siRNA sense strand
acagauaccuuuucaagca

SEQ ID NO: 200362 - RNA, 19 nt, Homo sapiens
  misc_RNA (1)...(19): siRNA sense strand
aagcacauuuggaagacaa

SEQ ID NO: 200363 - RNA, 19 nt, Homo sapiens
  misc_RNA (1)...(19): siRNA sense strand
gcuaauaauaagccagaga

SEQ ID NO: 200364 - RNA, 19 nt, Homo sapiens
  misc_RNA (1)...(19): siRNA sense strand
caagagcacaacaauuugg

SEQ ID NO: 200365 - RNA, 19 nt, Homo sapiens
  misc_RNA (1)...(19): siRNA sense strand
ccugucagcugcaugugau

SEQ ID NO: 200366 - RNA, 19 nt, Homo sapiens
  misc_RNA (1)...(19): siRNA sense strand
gcugcugaauguuuaugau

SEQ ID NO: 200367 - RNA, 19 nt, Homo sapiens
  misc_RNA (1)...(19): siRNA sense strand
acagagcucuaccagucuu

SEQ ID NO: 200368 - RNA, 19 nt, Homo sapiens
  misc_RNA (1)...(19): siRNA sense strand
acaguugggugaaguugca

SEQ ID NO: 200369 - RNA, 19 nt, Homo sapiens
  misc_RNA (1)...(19): siRNA sense strand
guuugaccacuauuuauga

SEQ ID NO: 200370 - RNA, 19 nt, Homo sapiens
  misc_RNA (1)...(19): siRNA sense strand
gcuuauaggacugccauga

SEQ ID NO: 200371 - RNA, 19 nt, Homo sapiens
  misc_RNA (1)...(19): siRNA sense strand
caucaggccaaauguaaca

SEQ ID NO: 200372 - RNA, 19 nt, Homo sapiens
  misc_RNA (1)...(19): siRNA sense strand
gauucuauccaaauuccaa

SEQ ID NO: 200373 - RNA, 19 nt, Homo sapiens
  misc_RNA (1)...(19): siRNA sense strand
ggcaaguucaacaggauuu

SEQ ID NO: 200374 - RNA, 19 nt, Homo sapiens
  misc_RNA (1)...(19): siRNA sense strand
gaacuggcugcugaauguu

SEQ ID NO: 200375 - RNA, 19 nt, Homo sapiens
  misc_RNA (1)...(19): siRNA sense strand
cugcugaauguuuaugaua

SEQ ID NO: 200376 - RNA, 19 nt, Homo sapiens
  misc_RNA (1)...(19): siRNA sense strand
aagcaucaggccaaaugua

SEQ ID NO: 200377 - RNA, 19 nt, Homo sapiens
  misc_RNA (1)...(19): siRNA sense strand
uggcaucauuucccugugu

SEQ ID NO: 200378 - RNA, 19 nt, Homo sapiens
  misc_RNA (1)...(19): siRNA sense strand
ccaugaaacuccgaagacu

SEQ ID NO: 200379 - RNA, 19 nt, Homo sapiens
  misc_RNA (1)...(19): siRNA sense strand
auaauaagccagagaucga

SEQ ID NO: 200380 - RNA, 19 nt, Homo sapiens
  misc_RNA (1)...(19): siRNA sense strand
cuaauaauaagccagagau

SEQ ID NO: 200381 - RNA, 19 nt, Homo sapiens
  misc_RNA (1)...(19): siRNA sense strand
ugggugaaguugcauccuu

SEQ ID NO: 200382 - RNA, 19 nt, Homo sapiens
  misc_RNA (1)...(19): siRNA sense strand
caucauuucccuguguaaa

SEQ ID NO: 200383 - RNA, 19 nt, Homo sapiens
  misc_RNA (1)...(19): siRNA sense strand
gcguggauaugugucugaa

SEQ ID NO: 200384 - RNA, 19 nt, Homo sapiens
  misc_RNA (1)...(19): siRNA sense strand
gcacuaucccaugguggaa

SEQ ID NO: 200385 - RNA, 19 nt, Homo sapiens
  misc_RNA (1)...(19): siRNA sense strand
gagccugucagcugcaugu

SEQ ID NO: 200386 - RNA, 19 nt, Homo sapiens
  misc_RNA (1)...(19): siRNA sense strand
guacagauaccuuuucaag

SEQ ID NO: 200387 - RNA, 19 nt, Homo sapiens
  misc_RNA (1)...(19): siRNA sense strand
gucccucucugcguggaua

SEQ ID NO: 200388 - RNA, 19 nt, Homo sapiens
  misc_RNA (1)...(19): siRNA sense strand
ggagcugcuuccaauuugc

SEQ ID NO: 200389 - RNA, 19 nt, Homo sapiens
  misc_RNA (1)...(19): siRNA sense strand
uuagcugaccugaauaaug

SEQ ID NO: 200390 - RNA, 19 nt, Homo sapiens
  misc_RNA (1)...(19): siRNA sense strand
guggcaaguucaacaggau

SEQ ID NO: 200391 - RNA, 19 nt, Homo sapiens
  misc_RNA (1)...(19): siRNA sense strand
acaacaauuuggucaacgu

SEQ ID NO: 200392 - RNA, 19 nt, Homo sapiens
  misc_RNA (1)...(19): siRNA sense strand
gacuacaucaggagaagau

SEQ ID NO: 200393 - RNA, 19 nt, Homo sapiens
  misc_RNA (1)...(19): siRNA sense strand
uaauaagccagagaucgaa

SEQ ID NO: 200394 - RNA, 19 nt, Homo sapiens
  misc_RNA (1)...(19): siRNA sense strand
ugucagauucucagcuuau

SEQ ID NO: 200395 - RNA, 19 nt, Homo sapiens
  misc_RNA (1)...(19): siRNA sense strand
ggauauccugcagauuauu

SEQ ID NO: 200396 - RNA, 19 nt, Homo sapiens
  misc_RNA (1)...(19): siRNA sense strand
agcaucaggccaaauguaa

SEQ ID NO: 200397 - RNA, 19 nt, Homo sapiens
  misc_RNA (1)...(19): siRNA sense strand
gcccuuugcuuggaucucu

SEQ ID NO: 200398 - RNA, 19 nt, Homo sapiens
  misc_RNA (1)...(19): siRNA sense strand
gcugaauguuuaugauacg

SEQ ID NO: 200399 - RNA, 19 nt, Homo sapiens
  misc_RNA (1)...(19): siRNA sense strand
agacuuugccaagguacua

SEQ ID NO: 200400 - RNA, 19 nt, Homo sapiens
  misc_RNA (1)...(19): siRNA sense strand
caagcaaguggcaaguuca

SEQ ID NO: 200401 - RNA, 19 nt, Homo sapiens
  misc_RNA (1)...(19): siRNA sense strand
agacaaguacagauaccuu

SEQ ID NO: 200402 - RNA, 19 nt, Homo sapiens
  misc_RNA (1)...(19): siRNA sense strand
gcaucauuucccuguguaa

SEQ ID NO: 200403 - RNA, 19 nt, Homo sapiens
  misc_RNA (1)...(19): siRNA sense strand
cugcaaagaguguccaauc

SEQ ID NO: 200404 - RNA, 19 nt, Homo sapiens
  misc_RNA (1)...(19): siRNA sense strand
cuuauaggacugccaugaa

SEQ ID NO: 200405 - RNA, 19 nt, Homo sapiens
  misc_RNA (1)...(19): siRNA sense strand
caaagaguguccaaucauu

SEQ ID NO: 200406 - RNA, 19 nt, Homo sapiens
  misc_RNA (1)...(19): siRNA sense strand
uagcugaccugaauaaugu

SEQ ID NO: 200407 - RNA, 19 nt, Homo sapiens
  misc_RNA (1)...(19): siRNA sense strand
gcaugauucuauccaaauu

SEQ ID NO: 200408 - RNA, 19 nt, Homo sapiens
  misc_RNA (1)...(19): siRNA sense strand
ugaacuggcugcugaaugu

SEQ ID NO: 200409 - RNA, 19 nt, Homo sapiens
  misc_RNA (1)...(19): siRNA sense strand
gauauccugcagauuauua

SEQ ID NO: 200410 - RNA, 19 nt, Homo sapiens
  misc_RNA (1)...(19): siRNA sense strand
gagaagauguucgagacuu

SEQ ID NO: 200411 - RNA, 19 nt, Homo sapiens
  misc_RNA (1)...(19): siRNA sense strand
gcacuuuaauuaugacauc

SEQ ID NO: 200412 - RNA, 19 nt, Homo sapiens
  misc_RNA (1)...(19): siRNA sense strand
guaaagcacauuuggaaga

SEQ ID NO: 200413 - RNA, 19 nt, Homo sapiens
  misc_RNA (1)...(19): siRNA sense strand
gaauauugcacuccgacua

SEQ ID NO: 200414 - RNA, 19 nt, Homo sapiens
  misc_RNA (1)...(19): siRNA sense strand
uuauaggacugccaugaaa

SEQ ID NO: 200415 - RNA, 19 nt, Homo sapiens
  misc_RNA (1)...(19): siRNA sense strand
gggugaaguugcauccuuu

SEQ ID NO: 200416 - RNA, 19 nt, Homo sapiens
  misc_RNA (1)...(19): siRNA sense strand
gcaagagcacaacaauuug

SEQ ID NO: 200417 - RNA, 19 nt, Homo sapiens
  misc_RNA (1)...(19): siRNA sense strand
gcacaacaauuuggucaac

SEQ ID NO: 200418 - RNA, 19 nt, Homo sapiens
  misc_RNA (1)...(19): siRNA sense strand
agcaagagcacaacaauuu

SEQ ID NO: 200419 - RNA, 19 nt, Homo sapiens
  misc_RNA (1)...(19): siRNA sense strand
agaagauguucgagacuuu

SEQ ID NO: 200420 - RNA, 19 nt, Homo sapiens
  misc_RNA (1)...(19): siRNA sense strand
gagcaagagcacaacaauu

SEQ ID NO: 200421 - RNA, 19 nt, Homo sapiens
  misc_RNA (1)...(19): siRNA sense strand
ucaagcaaguggcaaguuc

SEQ ID NO: 200422 - RNA, 19 nt, Homo sapiens
  misc_RNA (1)...(19): siRNA sense strand
ccacgagacucaaacaacu

SEQ ID NO: 200423 - RNA, 19 nt, Homo sapiens
  misc_RNA (1)...(19): siRNA sense strand
cagcacaaccucaagcaaa

SEQ ID NO: 200424 - RNA, 19 nt, Homo sapiens
  misc_RNA (1)...(19): siRNA sense strand
gcaaagaguguccaaucau

SEQ ID NO: 200425 - RNA, 19 nt, Homo sapiens
  misc_RNA (1)...(19): siRNA sense strand
auggauauccugcagauua

SEQ ID NO: 200426 - RNA, 19 nt, Homo sapiens
  misc_RNA (1)...(19): siRNA sense strand
uguaacaucugcaaagagu

SEQ ID NO: 200427 - RNA, 19 nt, Homo sapiens
  misc_RNA (1)...(19): siRNA sense strand
guccggagcugcuuccaau

SEQ ID NO: 200428 - RNA, 19 nt, Homo sapiens
  misc_RNA (1)...(19): siRNA sense strand
gcaaguggcaaguucaaca

SEQ ID NO: 200429 - RNA, 19 nt, Homo sapiens
  misc_RNA (1)...(19): siRNA sense strand
gcuuccaauuugcuaauaa

SEQ ID NO: 200430 - RNA, 19 nt, Homo sapiens
  misc_RNA (1)...(19): siRNA sense strand
uggaagacaaguacagaua

SEQ ID NO: 200431 - RNA, 19 nt, Homo sapiens
  misc_RNA (1)...(19): siRNA sense strand
ggauccguguccugucuuu

SEQ ID NO: 200432 - RNA, 19 nt, Homo sapiens
  misc_RNA (1)...(19): siRNA sense strand
gucuuuagcugaccugaau

SEQ ID NO: 200433 - RNA, 19 nt, Homo sapiens
  misc_RNA (1)...(19): siRNA sense strand
gacaaguacagauaccuuu

SEQ ID NO: 200434 - RNA, 19 nt, Homo sapiens
  misc_RNA (1)...(19): siRNA sense strand
ccaagcaucaggccaaaug

SEQ ID NO: 200435 - RNA, 19 nt, Homo sapiens
  misc_RNA (1)...(19): siRNA sense strand
ggagcaagagcacaacaau

SEQ ID NO: 200436 - RNA, 19 nt, Homo sapiens
  misc_RNA (1)...(19): siRNA sense strand
guguaaagcacauuuggaa

SEQ ID NO: 200437 - RNA, 19 nt, Homo sapiens
  misc_RNA (1)...(19): siRNA sense strand
caagacaguugggugaagu

SEQ ID NO: 200438 - RNA, 19 nt, Homo sapiens
  misc_RNA (1)...(19): siRNA sense strand
gaagauguucgagacuuug

SEQ ID NO: 200439 - RNA, 19 nt, Homo sapiens
  misc_RNA (1)...(19): siRNA sense strand
gucagauucucagcuuaua

SEQ ID NO: 200440 - RNA, 19 nt, Homo sapiens
  misc_RNA (1)...(19): siRNA sense strand
uaacaucugcaaagagugu

SEQ ID NO: 200441 - RNA, 19 nt, Homo sapiens
  misc_RNA (1)...(19): siRNA sense strand
cggagcugcuuccaauuug

SEQ ID NO: 200442 - RNA, 19 nt, Homo sapiens
  misc_RNA (1)...(19): siRNA sense strand
gaagacaaguacagauacc

SEQ ID NO: 200443 - RNA, 19 nt, Homo sapiens
  misc_RNA (1)...(19): siRNA sense strand
ccauggauauccugcagau

SEQ ID NO: 200444 - RNA, 19 nt, Homo sapiens
  misc_RNA (1)...(19): siRNA sense strand
ggcaucauuucccugugua

SEQ ID NO: 200445 - RNA, 19 nt, Homo sapiens
  misc_RNA (1)...(19): siRNA sense strand
uggauauccugcagauuau

SEQ ID NO: 200446 - RNA, 19 nt, Homo sapiens
  misc_RNA (1)...(19): siRNA sense strand
ggaagacaaguacagauac

SEQ ID NO: 200447 - RNA, 19 nt, Homo sapiens
  misc_RNA (1)...(19): siRNA sense strand
ugcaaagaguguccaauca

SEQ ID NO: 200448 - RNA, 19 nt, Homo sapiens
  misc_RNA (1)...(19): siRNA sense strand
guggauaugugucugaacu

SEQ ID NO: 200449 - RNA, 19 nt, Homo sapiens
  misc_RNA (1)...(19): siRNA sense strand
acuggcugcugaauguuua

SEQ ID NO: 200450 - RNA, 19 nt, Homo sapiens
  misc_RNA (1)...(19): siRNA sense strand
acuaucccaugguggaaua

SEQ ID NO: 200451 - RNA, 19 nt, Homo sapiens
  misc_RNA (1)...(19): siRNA sense strand
ccggagcugcuuccaauuu

SEQ ID NO: 200452 - RNA, 19 nt, Homo sapiens
  misc_RNA (1)...(19): siRNA sense strand
ccaaauuccaagacaguug

SEQ ID NO: 200453 - RNA, 19 nt, Homo sapiens
  misc_RNA (1)...(19): siRNA sense strand
cagaaacugccaagcauca

SEQ ID NO: 200454 - RNA, 19 nt, Homo sapiens
  misc_RNA (1)...(19): siRNA sense strand
uaugacaucugccaaagcu

SEQ ID NO: 200455 - RNA, 19 nt, Homo sapiens
  misc_RNA (1)...(19): siRNA sense strand
aaugucagauucucagcuu

SEQ ID NO: 200456 - RNA, 19 nt, Homo sapiens
  misc_RNA (1)...(19): siRNA sense strand
ucgagacuuugccaaggua

SEQ ID NO: 200457 - RNA, 19 nt, Homo sapiens
  misc_RNA (1)...(19): siRNA sense strand
gcaaaaggccauaaaaugc

SEQ ID NO: 200458 - RNA, 19 nt, Homo sapiens
  misc_RNA (1)...(19): siRNA sense strand
cugcaugauucuauccaaa

SEQ ID NO: 200459 - RNA, 19 nt, Homo sapiens
  misc_RNA (1)...(19): siRNA sense strand
uaaagcacauuuggaagac

SEQ ID NO: 200460 - RNA, 19 nt, Homo sapiens
  misc_RNA (1)...(19): siRNA sense strand
acaggagucuaaagcacuu

SEQ ID NO: 200461 - RNA, 19 nt, Homo sapiens
  misc_RNA (1)...(19): siRNA sense strand
acagauaccuuuucaagca

SEQ ID NO: 200462 - RNA, 19 nt, Homo sapiens
  misc_RNA (1)...(19): siRNA sense strand
aagcacauuuggaagacaa

SEQ ID NO: 200463 - RNA, 19 nt, Homo sapiens
  misc_RNA (1)...(19): siRNA sense strand
gcuaauaauaagccagaga

SEQ ID NO: 200464 - RNA, 19 nt, Homo sapiens
  misc_RNA (1)...(19): siRNA sense strand
caagagcacaacaauuugg

SEQ ID NO: 200465 - RNA, 19 nt, Homo sapiens
  misc_RNA (1)...(19): siRNA sense strand
ccugucagcugcaugugau

SEQ ID NO: 200466 - RNA, 19 nt, Homo sapiens
  misc_RNA (1)...(19): siRNA sense strand
gcugcugaauguuuaugau

SEQ ID NO: 200467 - RNA, 19 nt, Homo sapiens
  misc_RNA (1)...(19): siRNA sense strand
acagagcucuaccagucuu

SEQ ID NO: 200468 - RNA, 19 nt, Homo sapiens
  misc_RNA (1)...(19): siRNA sense strand
acaguugggugaaguugca

SEQ ID NO: 200469 - RNA, 19 nt, Homo sapiens
  misc_RNA (1)...(19): siRNA sense strand
guuugaccacuauuuauga

SEQ ID NO: 200470 - RNA, 19 nt, Homo sapiens
  misc_RNA (1)...(19): siRNA sense strand
gcuuauaggacugccauga

SEQ ID NO: 200471 - RNA, 19 nt, Homo sapiens
  misc_RNA (1)...(19): siRNA sense strand
caucaggccaaauguaaca

SEQ ID NO: 200472 - RNA, 19 nt, Homo sapiens
  misc_RNA (1)...(19): siRNA sense strand
gauucuauccaaauuccaa

SEQ ID NO: 200473 - RNA, 19 nt, Homo sapiens
  misc_RNA (1)...(19): siRNA sense strand
ggcaaguucaacaggauuu

SEQ ID NO: 200474 - RNA, 19 nt, Homo sapiens
  misc_RNA (1)...(19): siRNA sense strand
gaacuggcugcugaauguu

SEQ ID NO: 200475 - RNA, 19 nt, Homo sapiens
  misc_RNA (1)...(19): siRNA sense strand
cugcugaauguuuaugaua

SEQ ID NO: 200476 - RNA, 19 nt, Homo sapiens
  misc_RNA (1)...(19): siRNA sense strand
aagcaucaggccaaaugua

SEQ ID NO: 200477 - RNA, 19 nt, Homo sapiens
  misc_RNA (1)...(19): siRNA sense strand
uggcaucauuucccugugu

SEQ ID NO: 200478 - RNA, 19 nt, Homo sapiens
  misc_RNA (1)...(19): siRNA sense strand
ccaugaaacuccgaagacu

SEQ ID NO: 200479 - RNA, 19 nt, Homo sapiens
  misc_RNA (1)...(19): siRNA sense strand
auaauaagccagagaucga

SEQ ID NO: 200480 - RNA, 19 nt, Homo sapiens
  misc_RNA (1)...(19): siRNA sense strand
cuaauaauaagccagagau

SEQ ID NO: 200481 - RNA, 19 nt, Homo sapiens
  misc_RNA (1)...(19): siRNA sense strand
ugggugaaguugcauccuu

SEQ ID NO: 200482 - RNA, 19 nt, Homo sapiens
  misc_RNA (1)...(19): siRNA sense strand
caucauuucccuguguaaa

SEQ ID NO: 200483 - RNA, 19 nt, Homo sapiens
  misc_RNA (1)...(19): siRNA sense strand
gcguggauaugugucugaa

SEQ ID NO: 200484 - RNA, 19 nt, Homo sapiens
  misc_RNA (1)...(19): siRNA sense strand
gcacuaucccaugguggaa

SEQ ID NO: 200485 - RNA, 19 nt, Homo sapiens
  misc_RNA (1)...(19): siRNA sense strand
gagccugucagcugcaugu

SEQ ID NO: 200486 - RNA, 19 nt, Homo sapiens
  misc_RNA (1)...(19): siRNA sense strand
guacagauaccuuuucaag

SEQ ID NO: 200487 - RNA, 19 nt, Homo sapiens
  misc_RNA (1)...(19): siRNA sense strand
gucccucucugcguggaua

SEQ ID NO: 200488 - RNA, 19 nt, Homo sapiens
  misc_RNA (1)...(19): siRNA sense strand
ggagcugcuuccaauuugc

SEQ ID NO: 200489 - RNA, 19 nt, Homo sapiens
  misc_RNA (1)...(19): siRNA sense strand
uuagcugaccugaauaaug

SEQ ID NO: 200490 - RNA, 19 nt, Homo sapiens
  misc_RNA (1)...(19): siRNA sense strand
guggcaaguucaacaggau

SEQ ID NO: 200491 - RNA, 19 nt, Homo sapiens
  misc_RNA (1)...(19): siRNA sense strand
acaacaauuuggucaacgu

SEQ ID NO: 200492 - RNA, 19 nt, Homo sapiens
  misc_RNA (1)...(19): siRNA sense strand
gacuacaucaggagaagau

SEQ ID NO: 200493 - RNA, 19 nt, Homo sapiens
  misc_RNA (1)...(19): siRNA sense strand
uaauaagccagagaucgaa

SEQ ID NO: 200494 - RNA, 19 nt, Homo sapiens
  misc_RNA (1)...(19): siRNA sense strand
ugucagauucucagcuuau

SEQ ID NO: 200495 - RNA, 19 nt, Homo sapiens
  misc_RNA (1)...(19): siRNA sense strand
ggauauccugcagauuauu

SEQ ID NO: 200496 - RNA, 19 nt, Homo sapiens
  misc_RNA (1)...(19): siRNA sense strand
agcaucaggccaaauguaa

SEQ ID NO: 200497 - RNA, 19 nt, Homo sapiens
  misc_RNA (1)...(19): siRNA sense strand
gcccuuugcuuggaucucu

SEQ ID NO: 200498 - RNA, 19 nt, Homo sapiens
  misc_RNA (1)...(19): siRNA sense strand
gcugaauguuuaugauacg

SEQ ID NO: 200499 - RNA, 19 nt, Homo sapiens
  misc_RNA (1)...(19): siRNA sense strand
agacuuugccaagguacua

SEQ ID NO: 200500 - RNA, 19 nt, Homo sapiens
  misc_RNA (1)...(19): siRNA sense strand
caagcaaguggcaaguuca

SEQ ID NO: 200501 - RNA, 19 nt, Homo sapiens
  misc_RNA (1)...(19): siRNA sense strand
agacaaguacagauaccuu

SEQ ID NO: 200502 - RNA, 19 nt, Homo sapiens
  misc_RNA (1)...(19): siRNA sense strand
gcaucauuucccuguguaa

SEQ ID NO: 200503 - RNA, 19 nt, Homo sapiens
  misc_RNA (1)...(19): siRNA sense strand
cugcaaagaguguccaauc

SEQ ID NO: 200504 - RNA, 19 nt, Homo sapiens
  misc_RNA (1)...(19): siRNA sense strand
cuuauaggacugccaugaa

SEQ ID NO: 200505 - RNA, 19 nt, Homo sapiens
  misc_RNA (1)...(19): siRNA sense strand
caaagaguguccaaucauu

SEQ ID NO: 200506 - RNA, 19 nt, Homo sapiens
  misc_RNA (1)...(19): siRNA sense strand
uagcugaccugaauaaugu

SEQ ID NO: 200507 - RNA, 19 nt, Homo sapiens
  misc_RNA (1)...(19): siRNA sense strand
gcaugauucuauccaaauu

SEQ ID NO: 200508 - RNA, 19 nt, Homo sapiens
  misc_RNA (1)...(19): siRNA sense strand
ugaacuggcugcugaaugu

SEQ ID NO: 200509 - RNA, 19 nt, Homo sapiens
  misc_RNA (1)...(19): siRNA sense strand
gauauccugcagauuauua

SEQ ID NO: 200510 - RNA, 19 nt, Homo sapiens
  misc_RNA (1)...(19): siRNA sense strand
gagaagauguucgagacuu

SEQ ID NO: 200511 - RNA, 19 nt, Homo sapiens
  misc_RNA (1)...(19): siRNA sense strand
gcacuuuaauuaugacauc

SEQ ID NO: 200512 - RNA, 19 nt, Homo sapiens
  misc_RNA (1)...(19): siRNA sense strand
guaaagcacauuuggaaga

SEQ ID NO: 200513 - RNA, 19 nt, Homo sapiens
  misc_RNA (1)...(19): siRNA sense strand
gaauauugcacuccgacua

SEQ ID NO: 200514 - RNA, 19 nt, Homo sapiens
  misc_RNA (1)...(19): siRNA sense strand
uuauaggacugccaugaaa

SEQ ID NO: 200515 - RNA, 19 nt, Homo sapiens
  misc_RNA (1)...(19): siRNA sense strand
gggugaaguugcauccuuu

SEQ ID NO: 200516 - RNA, 19 nt, Homo sapiens
  misc_RNA (1)...(19): siRNA sense strand
gcaagagcacaacaauuug

SEQ ID NO: 200517 - RNA, 19 nt, Homo sapiens
  misc_RNA (1)...(19): siRNA sense strand
gcacaacaauuuggucaac

SEQ ID NO: 200518 - RNA, 19 nt, Homo sapiens
  misc_RNA (1)...(19): siRNA sense strand
agcaagagcacaacaauuu

SEQ ID NO: 200519 - RNA, 19 nt, Homo sapiens
  misc_RNA (1)...(19): siRNA sense strand
agaagauguucgagacuuu

SEQ ID NO: 200520 - RNA, 19 nt, Homo sapiens
  misc_RNA (1)...(19): siRNA sense strand
gagcaagagcacaacaauu

SEQ ID NO: 200521 - RNA, 19 nt, Homo sapiens
  misc_RNA (1)...(19): siRNA sense strand
ucaagcaaguggcaaguuc

SEQ ID NO: 200522 - RNA, 19 nt, Homo sapiens
  misc_RNA (1)...(19): siRNA sense strand
ccacgagacucaaacaacu

SEQ ID NO: 200523 - RNA, 19 nt, Homo sapiens
  misc_RNA (1)...(19): siRNA sense strand
cagcacaaccucaagcaaa

SEQ ID NO: 200524 - RNA, 19 nt, Homo sapiens
  misc_RNA (1)...(19): siRNA sense strand
gcaaagaguguccaaucau

SEQ ID NO: 200525 - RNA, 19 nt, Homo sapiens
  misc_RNA (1)...(19): siRNA sense strand
auggauauccugcagauua

SEQ ID NO: 200526 - RNA, 19 nt, Homo sapiens
  misc_RNA (1)...(19): siRNA sense strand
uguaacaucugcaaagagu

SEQ ID NO: 200527 - RNA, 19 nt, Homo sapiens
  misc_RNA (1)...(19): siRNA sense strand
guccggagcugcuuccaau

SEQ ID NO: 200528 - RNA, 19 nt, Homo sapiens
  misc_RNA (1)...(19): siRNA sense strand
gcaaguggcaaguucaaca

SEQ ID NO: 200529 - RNA, 19 nt, Homo sapiens
  misc_RNA (1)...(19): siRNA sense strand
gcuuccaauuugcuaauaa

SEQ ID NO: 200530 - RNA, 19 nt, Homo sapiens
  misc_RNA (1)...(19): siRNA sense strand
uggaagacaaguacagaua

SEQ ID NO: 200531 - RNA, 19 nt, Homo sapiens
  misc_RNA (1)...(19): siRNA sense strand
ggauccguguccugucuuu

SEQ ID NO: 200532 - RNA, 19 nt, Homo sapiens
  misc_RNA (1)...(19): siRNA sense strand
gucuuuagcugaccugaau

SEQ ID NO: 200533 - RNA, 19 nt, Homo sapiens
  misc_RNA (1)...(19): siRNA sense strand
gacaaguacagauaccuuu

SEQ ID NO: 200534 - RNA, 19 nt, Homo sapiens
  misc_RNA (1)...(19): siRNA sense strand
ccaagcaucaggccaaaug

SEQ ID NO: 200535 - RNA, 19 nt, Homo sapiens
  misc_RNA (1)...(19): siRNA sense strand
ggagcaagagcacaacaau

SEQ ID NO: 200536 - RNA, 19 nt, Homo sapiens
  misc_RNA (1)...(19): siRNA sense strand
guguaaagcacauuuggaa

SEQ ID NO: 200537 - RNA, 19 nt, Homo sapiens
  misc_RNA (1)...(19): siRNA sense strand
caagacaguugggugaagu

SEQ ID NO: 200538 - RNA, 19 nt, Homo sapiens
  misc_RNA (1)...(19): siRNA sense strand
gaagauguucgagacuuug

SEQ ID NO: 200539 - RNA, 19 nt, Homo sapiens
  misc_RNA (1)...(19): siRNA sense strand
gucagauucucagcuuaua

SEQ ID NO: 200540 - RNA, 19 nt, Homo sapiens
  misc_RNA (1)...(19): siRNA sense strand
uaacaucugcaaagagugu

SEQ ID NO: 200541 - RNA, 19 nt, Homo sapiens
  misc_RNA (1)...(19): siRNA sense strand
cggagcugcuuccaauuug

SEQ ID NO: 200542 - RNA, 19 nt, Homo sapiens
  misc_RNA (1)...(19): siRNA sense strand
gaagacaaguacagauacc

SEQ ID NO: 200543 - RNA, 19 nt, Homo sapiens
  misc_RNA (1)...(19): siRNA sense strand
ccauggauauccugcagau

SEQ ID NO: 200544 - RNA, 19 nt, Homo sapiens
  misc_RNA (1)...(19): siRNA sense strand
ggcaucauuucccugugua

SEQ ID NO: 200545 - RNA, 19 nt, Homo sapiens
  misc_RNA (1)...(19): siRNA sense strand
uggauauccugcagauuau

SEQ ID NO: 200546 - RNA, 19 nt, Homo sapiens
  misc_RNA (1)...(19): siRNA sense strand
ggaagacaaguacagauac

SEQ ID NO: 200547 - RNA, 19 nt, Homo sapiens
  misc_RNA (1)...(19): siRNA sense strand
ugcaaagaguguccaauca

SEQ ID NO: 200548 - RNA, 19 nt, Homo sapiens
  misc_RNA (1)...(19): siRNA sense strand
guggauaugugucugaacu

SEQ ID NO: 200549 - RNA, 19 nt, Homo sapiens
  misc_RNA (1)...(19): siRNA sense strand
acuggcugcugaauguuua

SEQ ID NO: 200550 - RNA, 19 nt, Homo sapiens
  misc_RNA (1)...(19): siRNA sense strand
acuaucccaugguggaaua

SEQ ID NO: 200551 - RNA, 19 nt, Homo sapiens
  misc_RNA (1)...(19): siRNA sense strand
ccggagcugcuuccaauuu

SEQ ID NO: 200552 - RNA, 19 nt, Homo sapiens
  misc_RNA (1)...(19): siRNA sense strand
ccaaauuccaagacaguug

SEQ ID NO: 200553 - RNA, 19 nt, Homo sapiens
  misc_RNA (1)...(19): siRNA sense strand
cagaaacugccaagcauca

SEQ ID NO: 200554 - RNA, 19 nt, Homo sapiens
  misc_RNA (1)...(19): siRNA sense strand
uaugacaucugccaaagcu

SEQ ID NO: 200555 - RNA, 19 nt, Homo sapiens
  misc_RNA (1)...(19): siRNA sense strand
aaugucagauucucagcuu

SEQ ID NO: 200556 - RNA, 19 nt, Homo sapiens
  misc_RNA (1)...(19): siRNA sense strand
ucgagacuuugccaaggua

SEQ ID NO: 200557 - RNA, 19 nt, Homo sapiens
  misc_RNA (1)...(19): siRNA sense strand
gcaaaaggccauaaaaugc

SEQ ID NO: 200558 - RNA, 19 nt, Homo sapiens
  misc_RNA (1)...(19): siRNA sense strand
cugcaugauucuauccaaa

SEQ ID NO: 200559 - RNA, 19 nt, Homo sapiens
  misc_RNA (1)...(19): siRNA sense strand
uaaagcacauuuggaagac

SEQ ID NO: 200560 - RNA, 19 nt, Homo sapiens
  misc_RNA (1)...(19): siRNA sense strand
acaggagucuaaagcacuu

SEQ ID NO: 200561 - RNA, 19 nt, Homo sapiens
  misc_RNA (1)...(19): siRNA sense strand
acagauaccuuuucaagca

SEQ ID NO: 200562 - RNA, 19 nt, Homo sapiens
  misc_RNA (1)...(19): siRNA sense strand
aagcacauuuggaagacaa

SEQ ID NO: 200563 - RNA, 19 nt, Homo sapiens
  misc_RNA (1)...(19): siRNA sense strand
gcuaauaauaagccagaga

SEQ ID NO: 200564 - RNA, 19 nt, Homo sapiens
  misc_RNA (1)...(19): siRNA sense strand
caagagcacaacaauuugg

SEQ ID NO: 200565 - RNA, 19 nt, Homo sapiens
  misc_RNA (1)...(19): siRNA sense strand
ccugucagcugcaugugau

SEQ ID NO: 200566 - RNA, 19 nt, Homo sapiens
  misc_RNA (1)...(19): siRNA sense strand
gcugcugaauguuuaugau

SEQ ID NO: 200567 - RNA, 19 nt, Homo sapiens
  misc_RNA (1)...(19): siRNA sense strand
acagagcucuaccagucuu

SEQ ID NO: 200568 - RNA, 19 nt, Homo sapiens
  misc_RNA (1)...(19): siRNA sense strand
acaguugggugaaguugca

SEQ ID NO: 200569 - RNA, 19 nt, Homo sapiens
  misc_RNA (1)...(19): siRNA sense strand
guuugaccacuauuuauga

SEQ ID NO: 200570 - RNA, 19 nt, Homo sapiens
  misc_RNA (1)...(19): siRNA sense strand
gcuuauaggacugccauga

SEQ ID NO: 200571 - RNA, 19 nt, Homo sapiens
  misc_RNA (1)...(19): siRNA sense strand
caucaggccaaauguaaca

SEQ ID NO: 200572 - RNA, 19 nt, Homo sapiens
  misc_RNA (1)...(19): siRNA sense strand
gauucuauccaaauuccaa

SEQ ID NO: 200573 - RNA, 19 nt, Homo sapiens
  misc_RNA (1)...(19): siRNA sense strand
ggcaaguucaacaggauuu

SEQ ID NO: 200574 - RNA, 19 nt, Homo sapiens
  misc_RNA (1)...(19): siRNA sense strand
gaacuggcugcugaauguu

SEQ ID NO: 200575 - RNA, 19 nt, Homo sapiens
  misc_RNA (1)...(19): siRNA sense strand
cugcugaauguuuaugaua

SEQ ID NO: 200576 - RNA, 19 nt, Homo sapiens
  misc_RNA (1)...(19): siRNA sense strand
aagcaucaggccaaaugua

SEQ ID NO: 200577 - RNA, 19 nt, Homo sapiens
  misc_RNA (1)...(19): siRNA sense strand
uggcaucauuucccugugu

SEQ ID NO: 200578 - RNA, 19 nt, Homo sapiens
  misc_RNA (1)...(19): siRNA sense strand
ccaugaaacuccgaagacu

SEQ ID NO: 200579 - RNA, 19 nt, Homo sapiens
  misc_RNA (1)...(19): siRNA sense strand
auaauaagccagagaucga

SEQ ID NO: 200580 - RNA, 19 nt, Homo sapiens
  misc_RNA (1)...(19): siRNA sense strand
cuaauaauaagccagagau

SEQ ID NO: 200581 - RNA, 19 nt, Homo sapiens
  misc_RNA (1)...(19): siRNA sense strand
ugggugaaguugcauccuu

SEQ ID NO: 200582 - RNA, 19 nt, Homo sapiens
  misc_RNA (1)...(19): siRNA sense strand
caucauuucccuguguaaa

SEQ ID NO: 200583 - RNA, 19 nt, Homo sapiens
  misc_RNA (1)...(19): siRNA sense strand
gcguggauaugugucugaa

SEQ ID NO: 200584 - RNA, 19 nt, Homo sapiens
  misc_RNA (1)...(19): siRNA sense strand
gcacuaucccaugguggaa

SEQ ID NO: 200585 - RNA, 19 nt, Homo sapiens
  misc_RNA (1)...(19): siRNA sense strand
gagccugucagcugcaugu

SEQ ID NO: 200586 - RNA, 19 nt, Homo sapiens
  misc_RNA (1)...(19): siRNA sense strand
guacagauaccuuuucaag

SEQ ID NO: 200587 - RNA, 19 nt, Homo sapiens
  misc_RNA (1)...(19): siRNA sense strand
gucccucucugcguggaua

SEQ ID NO: 200588 - RNA, 19 nt, Homo sapiens
  misc_RNA (1)...(19): siRNA sense strand
ggagcugcuuccaauuugc

SEQ ID NO: 200589 - RNA, 19 nt, Homo sapiens
  misc_RNA (1)...(19): siRNA sense strand
uuagcugaccugaauaaug

SEQ ID NO: 200590 - RNA, 19 nt, Homo sapiens
  misc_RNA (1)...(19): siRNA sense strand
guggcaaguucaacaggau

SEQ ID NO: 200591 - RNA, 19 nt, Homo sapiens
  misc_RNA (1)...(19): siRNA sense strand
acaacaauuuggucaacgu

SEQ ID NO: 200592 - RNA, 19 nt, Homo sapiens
  misc_RNA (1)...(19): siRNA sense strand
gacuacaucaggagaagau

SEQ ID NO: 200593 - RNA, 19 nt, Homo sapiens
  misc_RNA (1)...(19): siRNA sense strand
uaauaagccagagaucgaa

SEQ ID NO: 200594 - RNA, 19 nt, Homo sapiens
  misc_RNA (1)...(19): siRNA sense strand
ugucagauucucagcuuau

SEQ ID NO: 200595 - RNA, 19 nt, Homo sapiens
  misc_RNA (1)...(19): siRNA sense strand
ggauauccugcagauuauu

SEQ ID NO: 200596 - RNA, 19 nt, Homo sapiens
  misc_RNA (1)...(19): siRNA sense strand
agcaucaggccaaauguaa

SEQ ID NO: 200597 - RNA, 19 nt, Homo sapiens
  misc_RNA (1)...(19): siRNA sense strand
gcccuuugcuuggaucucu

SEQ ID NO: 200598 - RNA, 19 nt, Homo sapiens
  misc_RNA (1)...(19): siRNA sense strand
gcugaauguuuaugauacg

SEQ ID NO: 200599 - RNA, 19 nt, Homo sapiens
  misc_RNA (1)...(19): siRNA sense strand
agacuuugccaagguacua

SEQ ID NO: 200600 - RNA, 19 nt, Homo sapiens
  misc_RNA (1)...(19): siRNA sense strand
caagcaaguggcaaguuca

SEQ ID NO: 200601 - RNA, 19 nt, Homo sapiens
  misc_RNA (1)...(19): siRNA sense strand
agacaaguacagauaccuu

SEQ ID NO: 200602 - RNA, 19 nt, Homo sapiens
  misc_RNA (1)...(19): siRNA sense strand
gcaucauuucccuguguaa

SEQ ID NO: 200603 - RNA, 19 nt, Homo sapiens
  misc_RNA (1)...(19): siRNA sense strand
cugcaaagaguguccaauc

SEQ ID NO: 200604 - RNA, 19 nt, Homo sapiens
  misc_RNA (1)...(19): siRNA sense strand
cuuauaggacugccaugaa

SEQ ID NO: 200605 - RNA, 19 nt, Homo sapiens
  misc_RNA (1)...(19): siRNA sense strand
caaagaguguccaaucauu

SEQ ID NO: 200606 - RNA, 19 nt, Homo sapiens
  misc_RNA (1)...(19): siRNA sense strand
uagcugaccugaauaaugu

SEQ ID NO: 200607 - RNA, 19 nt, Homo sapiens
  misc_RNA (1)...(19): siRNA sense strand
gcaugauucuauccaaauu

SEQ ID NO: 200608 - RNA, 19 nt, Homo sapiens
  misc_RNA (1)...(19): siRNA sense strand
ugaacuggcugcugaaugu

SEQ ID NO: 200609 - RNA, 19 nt, Homo sapiens
  misc_RNA (1)...(19): siRNA sense strand
gauauccugcagauuauua

SEQ ID NO: 200610 - RNA, 19 nt, Homo sapiens
  misc_RNA (1)...(19): siRNA sense strand
gagaagauguucgagacuu

SEQ ID NO: 200611 - RNA, 19 nt, Homo sapiens
  misc_RNA (1)...(19): siRNA sense strand
gcacuuuaauuaugacauc

SEQ ID NO: 200612 - RNA, 19 nt, Homo sapiens
  misc_RNA (1)...(19): siRNA sense strand
guaaagcacauuuggaaga

SEQ ID NO: 200613 - RNA, 19 nt, Homo sapiens
  misc_RNA (1)...(19): siRNA sense strand
gaauauugcacuccgacua

SEQ ID NO: 200614 - RNA, 19 nt, Homo sapiens
  misc_RNA (1)...(19): siRNA sense strand
uuauaggacugccaugaaa

SEQ ID NO: 200615 - RNA, 19 nt, Homo sapiens
  misc_RNA (1)...(19): siRNA sense strand
gggugaaguugcauccuuu

SEQ ID NO: 200616 - RNA, 19 nt, Homo sapiens
  misc_RNA (1)...(19): siRNA sense strand
gcaagagcacaacaauuug

SEQ ID NO: 200617 - RNA, 19 nt, Homo sapiens
  misc_RNA (1)...(19): siRNA sense strand
gcacaacaauuuggucaac

SEQ ID NO: 200618 - RNA, 19 nt, Homo sapiens
  misc_RNA (1)...(19): siRNA sense strand
agcaagagcacaacaauuu

SEQ ID NO: 200619 - RNA, 19 nt, Homo sapiens
  misc_RNA (1)...(19): siRNA sense strand
agaagauguucgagacuuu

SEQ ID NO: 200620 - RNA, 19 nt, Homo sapiens
  misc_RNA (1)...(19): siRNA sense strand
gagcaagagcacaacaauu

SEQ ID NO: 200621 - RNA, 19 nt, Homo sapiens
  misc_RNA (1)...(19): siRNA sense strand
ucaagcaaguggcaaguuc

SEQ ID NO: 200622 - RNA, 19 nt, Homo sapiens
  misc_RNA (1)...(19): siRNA sense strand
ccacgagacucaaacaacu

SEQ ID NO: 200623 - RNA, 19 nt, Homo sapiens
  misc_RNA (1)...(19): siRNA sense strand
cagcacaaccucaagcaaa

SEQ ID NO: 200624 - RNA, 19 nt, Homo sapiens
  misc_RNA (1)...(19): siRNA sense strand
gcaaagaguguccaaucau

SEQ ID NO: 200625 - RNA, 19 nt, Homo sapiens
  misc_RNA (1)...(19): siRNA sense strand
auggauauccugcagauua

SEQ ID NO: 200626 - RNA, 19 nt, Homo sapiens
  misc_RNA (1)...(19): siRNA sense strand
uguaacaucugcaaagagu

SEQ ID NO: 200627 - RNA, 19 nt, Homo sapiens
  misc_RNA (1)...(19): siRNA sense strand
guccggagcugcuuccaau

SEQ ID NO: 200628 - RNA, 19 nt, Homo sapiens
  misc_RNA (1)...(19): siRNA sense strand
gcaaguggcaaguucaaca

SEQ ID NO: 200629 - RNA, 19 nt, Homo sapiens
  misc_RNA (1)...(19): siRNA sense strand
gcuuccaauuugcuaauaa

SEQ ID NO: 200630 - RNA, 19 nt, Homo sapiens
  misc_RNA (1)...(19): siRNA sense strand
uggaagacaaguacagaua

SEQ ID NO: 200631 - RNA, 19 nt, Homo sapiens
  misc_RNA (1)...(19): siRNA sense strand
ggauccguguccugucuuu

SEQ ID NO: 200632 - RNA, 19 nt, Homo sapiens
  misc_RNA (1)...(19): siRNA sense strand
gucuuuagcugaccugaau

SEQ ID NO: 200633 - RNA, 19 nt, Homo sapiens
  misc_RNA (1)...(19): siRNA sense strand
gacaaguacagauaccuuu

SEQ ID NO: 200634 - RNA, 19 nt, Homo sapiens
  misc_RNA (1)...(19): siRNA sense strand
ccaagcaucaggccaaaug

SEQ ID NO: 200635 - RNA, 19 nt, Homo sapiens
  misc_RNA (1)...(19): siRNA sense strand
ggagcaagagcacaacaau

SEQ ID NO: 200636 - RNA, 19 nt, Homo sapiens
  misc_RNA (1)...(19): siRNA sense strand
guguaaagcacauuuggaa

SEQ ID NO: 200637 - RNA, 19 nt, Homo sapiens
  misc_RNA (1)...(19): siRNA sense strand
caagacaguugggugaagu

SEQ ID NO: 200638 - RNA, 19 nt, Homo sapiens
  misc_RNA (1)...(19): siRNA sense strand
gaagauguucgagacuuug

SEQ ID NO: 200639 - RNA, 19 nt, Homo sapiens
  misc_RNA (1)...(19): siRNA sense strand
gucagauucucagcuuaua

SEQ ID NO: 200640 - RNA, 19 nt, Homo sapiens
  misc_RNA (1)...(19): siRNA sense strand
uaacaucugcaaagagugu

SEQ ID NO: 200641 - RNA, 19 nt, Homo sapiens
  misc_RNA (1)...(19): siRNA sense strand
cggagcugcuuccaauuug

SEQ ID NO: 200642 - RNA, 19 nt, Homo sapiens
  misc_RNA (1)...(19): siRNA sense strand
gaagacaaguacagauacc

SEQ ID NO: 200643 - RNA, 19 nt, Homo sapiens
  misc_RNA (1)...(19): siRNA sense strand
ccauggauauccugcagau

SEQ ID NO: 200644 - RNA, 19 nt, Homo sapiens
  misc_RNA (1)...(19): siRNA sense strand
ggcaucauuucccugugua

SEQ ID NO: 200645 - RNA, 19 nt, Homo sapiens
  misc_RNA (1)...(19): siRNA sense strand
uggauauccugcagauuau

SEQ ID NO: 200646 - RNA, 19 nt, Homo sapiens
  misc_RNA (1)...(19): siRNA sense strand
ggaagacaaguacagauac

SEQ ID NO: 200647 - RNA, 19 nt, Homo sapiens
  misc_RNA (1)...(19): siRNA sense strand
ugcaaagaguguccaauca

SEQ ID NO: 200648 - RNA, 19 nt, Homo sapiens
  misc_RNA (1)...(19): siRNA sense strand
guggauaugugucugaacu

SEQ ID NO: 200649 - RNA, 19 nt, Homo sapiens
  misc_RNA (1)...(19): siRNA sense strand
acuggcugcugaauguuua

SEQ ID NO: 200650 - RNA, 19 nt, Homo sapiens
  misc_RNA (1)...(19): siRNA sense strand
acuaucccaugguggaaua

SEQ ID NO: 200651 - RNA, 19 nt, Homo sapiens
  misc_RNA (1)...(19): siRNA sense strand
ccggagcugcuuccaauuu

SEQ ID NO: 200652 - RNA, 19 nt, Homo sapiens
  misc_RNA (1)...(19): siRNA sense strand
ccaaauuccaagacaguug

SEQ ID NO: 200653 - RNA, 19 nt, Homo sapiens
  misc_RNA (1)...(19): siRNA sense strand
cagaaacugccaagcauca

SEQ ID NO: 200654 - RNA, 19 nt, Homo sapiens
  misc_RNA (1)...(19): siRNA sense strand
uaugacaucugccaaagcu

SEQ ID NO: 200655 - RNA, 19 nt, Homo sapiens
  misc_RNA (1)...(19): siRNA sense strand
aaugucagauucucagcuu

SEQ ID NO: 200656 - RNA, 19 nt, Homo sapiens
  misc_RNA (1)...(19): siRNA sense strand
ucgagacuuugccaaggua

SEQ ID NO: 200657 - RNA, 19 nt, Homo sapiens
  misc_RNA (1)...(19): siRNA sense strand
gcaaaaggccauaaaaugc

SEQ ID NO: 200658 - RNA, 19 nt, Homo sapiens
  misc_RNA (1)...(19): siRNA sense strand
cugcaugauucuauccaaa

SEQ ID NO: 200659 - RNA, 19 nt, Homo sapiens
  misc_RNA (1)...(19): siRNA sense strand
uaaagcacauuuggaagac

SEQ ID NO: 200660 - RNA, 19 nt, Homo sapiens
  misc_RNA (1)...(19): siRNA sense strand
acaggagucuaaagcacuu

SEQ ID NO: 200661 - RNA, 19 nt, Homo sapiens
  misc_RNA (1)...(19): siRNA sense strand
acagauaccuuuucaagca

SEQ ID NO: 200662 - RNA, 19 nt, Homo sapiens
  misc_RNA (1)...(19): siRNA sense strand
aagcacauuuggaagacaa

SEQ ID NO: 200663 - RNA, 19 nt, Homo sapiens
  misc_RNA (1)...(19): siRNA sense strand
gcuaauaauaagccagaga

SEQ ID NO: 200664 - RNA, 19 nt, Homo sapiens
  misc_RNA (1)...(19): siRNA sense strand
caagagcacaacaauuugg

SEQ ID NO: 200665 - RNA, 19 nt, Homo sapiens
  misc_RNA (1)...(19): siRNA sense strand
ccugucagcugcaugugau

SEQ ID NO: 200666 - RNA, 19 nt, Homo sapiens
  misc_RNA (1)...(19): siRNA sense strand
gcugcugaauguuuaugau

SEQ ID NO: 200667 - RNA, 19 nt, Homo sapiens
  misc_RNA (1)...(19): siRNA sense strand
acagagcucuaccagucuu

SEQ ID NO: 200668 - RNA, 19 nt, Homo sapiens
  misc_RNA (1)...(19): siRNA sense strand
acaguugggugaaguugca

SEQ ID NO: 200669 - RNA, 19 nt, Homo sapiens
  misc_RNA (1)...(19): siRNA sense strand
guuugaccacuauuuauga

SEQ ID NO: 200670 - RNA, 19 nt, Homo sapiens
  misc_RNA (1)...(19): siRNA sense strand
gcuuauaggacugccauga

SEQ ID NO: 200671 - RNA, 19 nt, Homo sapiens
  misc_RNA (1)...(19): siRNA sense strand
caucaggccaaauguaaca

SEQ ID NO: 200672 - RNA, 19 nt, Homo sapiens
  misc_RNA (1)...(19): siRNA sense strand
gauucuauccaaauuccaa

SEQ ID NO: 200673 - RNA, 19 nt, Homo sapiens
  misc_RNA (1)...(19): siRNA sense strand
ggcaaguucaacaggauuu

SEQ ID NO: 200674 - RNA, 19 nt, Homo sapiens
  misc_RNA (1)...(19): siRNA sense strand
gaacuggcugcugaauguu

SEQ ID NO: 200675 - RNA, 19 nt, Homo sapiens
  misc_RNA (1)...(19): siRNA sense strand
cugcugaauguuuaugaua

SEQ ID NO: 200676 - RNA, 19 nt, Homo sapiens
  misc_RNA (1)...(19): siRNA sense strand
aagcaucaggccaaaugua

SEQ ID NO: 200677 - RNA, 19 nt, Homo sapiens
  misc_RNA (1)...(19): siRNA sense strand
uggcaucauuucccugugu

SEQ ID NO: 200678 - RNA, 19 nt, Homo sapiens
  misc_RNA (1)...(19): siRNA sense strand
ccaugaaacuccgaagacu

SEQ ID NO: 200679 - RNA, 19 nt, Homo sapiens
  misc_RNA (1)...(19): siRNA sense strand
auaauaagccagagaucga

SEQ ID NO: 200680 - RNA, 19 nt, Homo sapiens
  misc_RNA (1)...(19): siRNA sense strand
cuaauaauaagccagagau

SEQ ID NO: 200681 - RNA, 19 nt, Homo sapiens
  misc_RNA (1)...(19): siRNA sense strand
ugggugaaguugcauccuu

SEQ ID NO: 200682 - RNA, 19 nt, Homo sapiens
  misc_RNA (1)...(19): siRNA sense strand
caucauuucccuguguaaa

SEQ ID NO: 200683 - RNA, 19 nt, Homo sapiens
  misc_RNA (1)...(19): siRNA sense strand
gcguggauaugugucugaa

SEQ ID NO: 200684 - RNA, 19 nt, Homo sapiens
  misc_RNA (1)...(19): siRNA sense strand
gcacuaucccaugguggaa

SEQ ID NO: 200685 - RNA, 19 nt, Homo sapiens
  misc_RNA (1)...(19): siRNA sense strand
gagccugucagcugcaugu

SEQ ID NO: 200686 - RNA, 19 nt, Homo sapiens
  misc_RNA (1)...(19): siRNA sense strand
guacagauaccuuuucaag

SEQ ID NO: 200687 - RNA, 19 nt, Homo sapiens
  misc_RNA (1)...(19): siRNA sense strand
gucccucucugcguggaua

SEQ ID NO: 200688 - RNA, 19 nt, Homo sapiens
  misc_RNA (1)...(19): siRNA sense strand
ggagcugcuuccaauuugc

SEQ ID NO: 200689 - RNA, 19 nt, Homo sapiens
  misc_RNA (1)...(19): siRNA sense strand
uuagcugaccugaauaaug

SEQ ID NO: 200690 - RNA, 19 nt, Homo sapiens
  misc_RNA (1)...(19): siRNA sense strand
guggcaaguucaacaggau

SEQ ID NO: 200691 - RNA, 19 nt, Homo sapiens
  misc_RNA (1)...(19): siRNA sense strand
acaacaauuuggucaacgu

SEQ ID NO: 200692 - RNA, 19 nt, Homo sapiens
  misc_RNA (1)...(19): siRNA sense strand
gacuacaucaggagaagau

SEQ ID NO: 200693 - RNA, 19 nt, Homo sapiens
  misc_RNA (1)...(19): siRNA sense strand
uaauaagccagagaucgaa

SEQ ID NO: 200694 - RNA, 19 nt, Homo sapiens
  misc_RNA (1)...(19): siRNA sense strand
ugucagauucucagcuuau

SEQ ID NO: 200695 - RNA, 19 nt, Homo sapiens
  misc_RNA (1)...(19): siRNA sense strand
ggauauccugcagauuauu

SEQ ID NO: 200696 - RNA, 19 nt, Homo sapiens
  misc_RNA (1)...(19): siRNA sense strand
agcaucaggccaaauguaa

SEQ ID NO: 200697 - RNA, 19 nt, Homo sapiens
  misc_RNA (1)...(19): siRNA sense strand
gcccuuugcuuggaucucu

SEQ ID NO: 200698 - RNA, 19 nt, Homo sapiens
  misc_RNA (1)...(19): siRNA sense strand
gcugaauguuuaugauacg

SEQ ID NO: 200699 - RNA, 19 nt, Homo sapiens
  misc_RNA (1)...(19): siRNA sense strand
agacuuugccaagguacua

SEQ ID NO: 200700 - RNA, 19 nt, Homo sapiens
  misc_RNA (1)...(19): siRNA sense strand
caagcaaguggcaaguuca

SEQ ID NO: 200701 - RNA, 19 nt, Homo sapiens
  misc_RNA (1)...(19): siRNA sense strand
agacaaguacagauaccuu

SEQ ID NO: 200702 - RNA, 19 nt, Homo sapiens
  misc_RNA (1)...(19): siRNA sense strand
gcaucauuucccuguguaa

SEQ ID NO: 200703 - RNA, 19 nt, Homo sapiens
  misc_RNA (1)...(19): siRNA sense strand
cugcaaagaguguccaauc

SEQ ID NO: 200704 - RNA, 19 nt, Homo sapiens
  misc_RNA (1)...(19): siRNA sense strand
cuuauaggacugccaugaa

SEQ ID NO: 200705 - RNA, 19 nt, Homo sapiens
  misc_RNA (1)...(19): siRNA sense strand
caaagaguguccaaucauu

SEQ ID NO: 200706 - RNA, 19 nt, Homo sapiens
  misc_RNA (1)...(19): siRNA sense strand
uagcugaccugaauaaugu

SEQ ID NO: 200707 - RNA, 19 nt, Homo sapiens
  misc_RNA (1)...(19): siRNA sense strand
gcaugauucuauccaaauu

SEQ ID NO: 200708 - RNA, 19 nt, Homo sapiens
  misc_RNA (1)...(19): siRNA sense strand
ugaacuggcugcugaaugu

SEQ ID NO: 200709 - RNA, 19 nt, Homo sapiens
  misc_RNA (1)...(19): siRNA sense strand
gauauccugcagauuauua

SEQ ID NO: 200710 - RNA, 19 nt, Homo sapiens
  misc_RNA (1)...(19): siRNA sense strand
gagaagauguucgagacuu

SEQ ID NO: 200711 - RNA, 19 nt, Homo sapiens
  misc_RNA (1)...(19): siRNA sense strand
gcacuuuaauuaugacauc

SEQ ID NO: 200712 - RNA, 19 nt, Homo sapiens
  misc_RNA (1)...(19): siRNA sense strand
guaaagcacauuuggaaga

SEQ ID NO: 200713 - RNA, 19 nt, Homo sapiens
  misc_RNA (1)...(19): siRNA sense strand
gaauauugcacuccgacua

SEQ ID NO: 200714 - RNA, 19 nt, Homo sapiens
  misc_RNA (1)...(19): siRNA sense strand
uuauaggacugccaugaaa

SEQ ID NO: 200715 - RNA, 19 nt, Homo sapiens
  misc_RNA (1)...(19): siRNA sense strand
gggugaaguugcauccuuu

SEQ ID NO: 200716 - RNA, 19 nt, Homo sapiens
  misc_RNA (1)...(19): siRNA sense strand
gcaagagcacaacaauuug

SEQ ID NO: 200717 - RNA, 19 nt, Homo sapiens
  misc_RNA (1)...(19): siRNA sense strand
gcacaacaauuuggucaac

SEQ ID NO: 200718 - RNA, 19 nt, Homo sapiens
  misc_RNA (1)...(19): siRNA sense strand
agcaagagcacaacaauuu

SEQ ID NO: 200719 - RNA, 19 nt, Homo sapiens
  misc_RNA (1)...(19): siRNA sense strand
agaagauguucgagacuuu

SEQ ID NO: 200720 - RNA, 19 nt, Homo sapiens
  misc_RNA (1)...(19): siRNA sense strand
gagcaagagcacaacaauu

SEQ ID NO: 200721 - RNA, 19 nt, Homo sapiens
  misc_RNA (1)...(19): siRNA sense strand
ucaagcaaguggcaaguuc

SEQ ID NO: 200722 - RNA, 19 nt, Homo sapiens
  misc_RNA (1)...(19): siRNA sense strand
ccacgagacucaaacaacu

SEQ ID NO: 200723 - RNA, 19 nt, Homo sapiens
  misc_RNA (1)...(19): siRNA sense strand
cagcacaaccucaagcaaa

SEQ ID NO: 200724 - RNA, 19 nt, Homo sapiens
  misc_RNA (1)...(19): siRNA sense strand
gcaaagaguguccaaucau

SEQ ID NO: 200725 - RNA, 19 nt, Homo sapiens
  misc_RNA (1)...(19): siRNA sense strand
auggauauccugcagauua

SEQ ID NO: 200726 - RNA, 19 nt, Homo sapiens
  misc_RNA (1)...(19): siRNA sense strand
uguaacaucugcaaagagu

SEQ ID NO: 200727 - RNA, 19 nt, Homo sapiens
  misc_RNA (1)...(19): siRNA sense strand
guccggagcugcuuccaau

SEQ ID NO: 200728 - RNA, 19 nt, Homo sapiens
  misc_RNA (1)...(19): siRNA sense strand
gcaaguggcaaguucaaca

SEQ ID NO: 200729 - RNA, 19 nt, Homo sapiens
  misc_RNA (1)...(19): siRNA sense strand
gcuuccaauuugcuaauaa

SEQ ID NO: 200730 - RNA, 19 nt, Homo sapiens
  misc_RNA (1)...(19): siRNA sense strand
uggaagacaaguacagaua

SEQ ID NO: 200731 - RNA, 19 nt, Homo sapiens
  misc_RNA (1)...(19): siRNA sense strand
ggauccguguccugucuuu

SEQ ID NO: 200732 - RNA, 19 nt, Homo sapiens
  misc_RNA (1)...(19): siRNA sense strand
gucuuuagcugaccugaau

SEQ ID NO: 200733 - RNA, 19 nt, Homo sapiens
  misc_RNA (1)...(19): siRNA sense strand
gacaaguacagauaccuuu

SEQ ID NO: 200734 - RNA, 19 nt, Homo sapiens
  misc_RNA (1)...(19): siRNA sense strand
ccaagcaucaggccaaaug

SEQ ID NO: 200735 - RNA, 19 nt, Homo sapiens
  misc_RNA (1)...(19): siRNA sense strand
ggagcaagagcacaacaau

SEQ ID NO: 200736 - RNA, 19 nt, Homo sapiens
  misc_RNA (1)...(19): siRNA sense strand
guguaaagcacauuuggaa

SEQ ID NO: 200737 - RNA, 19 nt, Homo sapiens
  misc_RNA (1)...(19): siRNA sense strand
caagacaguugggugaagu

SEQ ID NO: 200738 - RNA, 19 nt, Homo sapiens
  misc_RNA (1)...(19): siRNA sense strand
gaagauguucgagacuuug

SEQ ID NO: 200739 - RNA, 19 nt, Homo sapiens
  misc_RNA (1)...(19): siRNA sense strand
gucagauucucagcuuaua

SEQ ID NO: 200740 - RNA, 19 nt, Homo sapiens
  misc_RNA (1)...(19): siRNA sense strand
uaacaucugcaaagagugu

SEQ ID NO: 200741 - RNA, 19 nt, Homo sapiens
  misc_RNA (1)...(19): siRNA sense strand
cggagcugcuuccaauuug

SEQ ID NO: 200742 - RNA, 19 nt, Homo sapiens
  misc_RNA (1)...(19): siRNA sense strand
gaagacaaguacagauacc

SEQ ID NO: 200743 - RNA, 19 nt, Homo sapiens
  misc_RNA (1)...(19): siRNA sense strand
ccauggauauccugcagau

SEQ ID NO: 200744 - RNA, 19 nt, Homo sapiens
  misc_RNA (1)...(19): siRNA sense strand
ggcaucauuucccugugua

SEQ ID NO: 200745 - RNA, 19 nt, Homo sapiens
  misc_RNA (1)...(19): siRNA sense strand
uggauauccugcagauuau

SEQ ID NO: 200746 - RNA, 19 nt, Homo sapiens
  misc_RNA (1)...(19): siRNA sense strand
ggaagacaaguacagauac

SEQ ID NO: 200747 - RNA, 19 nt, Homo sapiens
  misc_RNA (1)...(19): siRNA sense strand
ugcaaagaguguccaauca

SEQ ID NO: 200748 - RNA, 19 nt, Homo sapiens
  misc_RNA (1)...(19): siRNA sense strand
guggauaugugucugaacu

SEQ ID NO: 200749 - RNA, 19 nt, Homo sapiens
  misc_RNA (1)...(19): siRNA sense strand
acuggcugcugaauguuua

SEQ ID NO: 200750 - RNA, 19 nt, Homo sapiens
  misc_RNA (1)...(19): siRNA sense strand
acuaucccaugguggaaua

SEQ ID NO: 200751 - RNA, 19 nt, Homo sapiens
  misc_RNA (1)...(19): siRNA sense strand
ccggagcugcuuccaauuu

SEQ ID NO: 200752 - RNA, 19 nt, Homo sapiens
  misc_RNA (1)...(19): siRNA sense strand
ccaaauuccaagacaguug

SEQ ID NO: 200753 - RNA, 19 nt, Homo sapiens
  misc_RNA (1)...(19): siRNA sense strand
cagaaacugccaagcauca

SEQ ID NO: 200754 - RNA, 19 nt, Homo sapiens
  misc_RNA (1)...(19): siRNA sense strand
uaugacaucugccaaagcu

SEQ ID NO: 200755 - RNA, 19 nt, Homo sapiens
  misc_RNA (1)...(19): siRNA sense strand
aaugucagauucucagcuu

SEQ ID NO: 200756 - RNA, 19 nt, Homo sapiens
  misc_RNA (1)...(19): siRNA sense strand
ucgagacuuugccaaggua

SEQ ID NO: 200757 - RNA, 19 nt, Homo sapiens
  misc_RNA (1)...(19): siRNA sense strand
gcaaaaggccauaaaaugc

SEQ ID NO: 200758 - RNA, 19 nt, Homo sapiens
  misc_RNA (1)...(19): siRNA sense strand
cugcaugauucuauccaaa

SEQ ID NO: 200759 - RNA, 19 nt, Homo sapiens
  misc_RNA (1)...(19): siRNA sense strand
uaaagcacauuuggaagac

SEQ ID NO: 200760 - RNA, 19 nt, Homo sapiens
  misc_RNA (1)...(19): siRNA sense strand
acaggagucuaaagcacuu

SEQ ID NO: 200761 - RNA, 19 nt, Homo sapiens
  misc_RNA (1)...(19): siRNA sense strand
acagauaccuuuucaagca

SEQ ID NO: 200762 - RNA, 19 nt, Homo sapiens
  misc_RNA (1)...(19): siRNA sense strand
aagcacauuuggaagacaa

SEQ ID NO: 200763 - RNA, 19 nt, Homo sapiens
  misc_RNA (1)...(19): siRNA sense strand
gcuaauaauaagccagaga

SEQ ID NO: 200764 - RNA, 19 nt, Homo sapiens
  misc_RNA (1)...(19): siRNA sense strand
caagagcacaacaauuugg

SEQ ID NO: 200765 - RNA, 19 nt, Homo sapiens
  misc_RNA (1)...(19): siRNA sense strand
ccugucagcugcaugugau

SEQ ID NO: 200766 - RNA, 19 nt, Homo sapiens
  misc_RNA (1)...(19): siRNA sense strand
gcugcugaauguuuaugau

SEQ ID NO: 200767 - RNA, 19 nt, Homo sapiens
  misc_RNA (1)...(19): siRNA sense strand
acagagcucuaccagucuu

SEQ ID NO: 200768 - RNA, 19 nt, Homo sapiens
  misc_RNA (1)...(19): siRNA sense strand
acaguugggugaaguugca

SEQ ID NO: 200769 - RNA, 19 nt, Homo sapiens
  misc_RNA (1)...(19): siRNA sense strand
guuugaccacuauuuauga

SEQ ID NO: 200770 - RNA, 19 nt, Homo sapiens
  misc_RNA (1)...(19): siRNA sense strand
gcuuauaggacugccauga

SEQ ID NO: 200771 - RNA, 19 nt, Homo sapiens
  misc_RNA (1)...(19): siRNA sense strand
caucaggccaaauguaaca

SEQ ID NO: 200772 - RNA, 19 nt, Homo sapiens
  misc_RNA (1)...(19): siRNA sense strand
gauucuauccaaauuccaa

SEQ ID NO: 200773 - RNA, 19 nt, Homo sapiens
  misc_RNA (1)...(19): siRNA sense strand
ggcaaguucaacaggauuu

SEQ ID NO: 200774 - RNA, 19 nt, Homo sapiens
  misc_RNA (1)...(19): siRNA sense strand
gaacuggcugcugaauguu

SEQ ID NO: 200775 - RNA, 19 nt, Homo sapiens
  misc_RNA (1)...(19): siRNA sense strand
cugcugaauguuuaugaua

SEQ ID NO: 200776 - RNA, 19 nt, Homo sapiens
  misc_RNA (1)...(19): siRNA sense strand
aagcaucaggccaaaugua

SEQ ID NO: 200777 - RNA, 19 nt, Homo sapiens
  misc_RNA (1)...(19): siRNA sense strand
uggcaucauuucccugugu

SEQ ID NO: 200778 - RNA, 19 nt, Homo sapiens
  misc_RNA (1)...(19): siRNA sense strand
ccaugaaacuccgaagacu

SEQ ID NO: 200779 - RNA, 19 nt, Homo sapiens
  misc_RNA (1)...(19): siRNA sense strand
auaauaagccagagaucga

SEQ ID NO: 200780 - RNA, 19 nt, Homo sapiens
  misc_RNA (1)...(19): siRNA sense strand
cuaauaauaagccagagau

SEQ ID NO: 200781 - RNA, 19 nt, Homo sapiens
  misc_RNA (1)...(19): siRNA sense strand
ugggugaaguugcauccuu

SEQ ID NO: 200782 - RNA, 19 nt, Homo sapiens
  misc_RNA (1)...(19): siRNA sense strand
caucauuucccuguguaaa

SEQ ID NO: 200783 - RNA, 19 nt, Homo sapiens
  misc_RNA (1)...(19): siRNA sense strand
gcguggauaugugucugaa

SEQ ID NO: 200784 - RNA, 19 nt, Homo sapiens
  misc_RNA (1)...(19): siRNA sense strand
gcacuaucccaugguggaa

SEQ ID NO: 200785 - RNA, 19 nt, Homo sapiens
  misc_RNA (1)...(19): siRNA sense strand
gagccugucagcugcaugu

SEQ ID NO: 200786 - RNA, 19 nt, Homo sapiens
  misc_RNA (1)...(19): siRNA sense strand
guacagauaccuuuucaag

SEQ ID NO: 200787 - RNA, 19 nt, Homo sapiens
  misc_RNA (1)...(19): siRNA sense strand
gucccucucugcguggaua

SEQ ID NO: 200788 - RNA, 19 nt, Homo sapiens
  misc_RNA (1)...(19): siRNA sense strand
ggagcugcuuccaauuugc

SEQ ID NO: 200789 - RNA, 19 nt, Homo sapiens
  misc_RNA (1)...(19): siRNA sense strand
uuagcugaccugaauaaug

SEQ ID NO: 200790 - RNA, 19 nt, Homo sapiens
  misc_RNA (1)...(19): siRNA sense strand
guggcaaguucaacaggau

SEQ ID NO: 200791 - RNA, 19 nt, Homo sapiens
  misc_RNA (1)...(19): siRNA sense strand
acaacaauuuggucaacgu

SEQ ID NO: 200792 - RNA, 19 nt, Homo sapiens
  misc_RNA (1)...(19): siRNA sense strand
gacuacaucaggagaagau

SEQ ID NO: 200793 - RNA, 19 nt, Homo sapiens
  misc_RNA (1)...(19): siRNA sense strand
uaauaagccagagaucgaa

SEQ ID NO: 200794 - RNA, 19 nt, Homo sapiens
  misc_RNA (1)...(19): siRNA sense strand
ugucagauucucagcuuau

SEQ ID NO: 200795 - RNA, 19 nt, Homo sapiens
  misc_RNA (1)...(19): siRNA sense strand
ggauauccugcagauuauu

SEQ ID NO: 200796 - RNA, 19 nt, Homo sapiens
  misc_RNA (1)...(19): siRNA sense strand
agcaucaggccaaauguaa

SEQ ID NO: 200797 - RNA, 19 nt, Homo sapiens
  misc_RNA (1)...(19): siRNA sense strand
gcccuuugcuuggaucucu

SEQ ID NO: 200798 - RNA, 19 nt, Homo sapiens
  misc_RNA (1)...(19): siRNA sense strand
gcugaauguuuaugauacg

SEQ ID NO: 200799 - RNA, 19 nt, Homo sapiens
  misc_RNA (1)...(19): siRNA sense strand
agacuuugccaagguacua

SEQ ID NO: 200800 - RNA, 19 nt, Homo sapiens
  misc_RNA (1)...(19): siRNA sense strand
caagcaaguggcaaguuca

SEQ ID NO: 200801 - RNA, 19 nt, Homo sapiens
  misc_RNA (1)...(19): siRNA sense strand
agacaaguacagauaccuu

SEQ ID NO: 200802 - RNA, 19 nt, Homo sapiens
  misc_RNA (1)...(19): siRNA sense strand
gcaucauuucccuguguaa

SEQ ID NO: 200803 - RNA, 19 nt, Homo sapiens
  misc_RNA (1)...(19): siRNA sense strand
cugcaaagaguguccaauc

SEQ ID NO: 200804 - RNA, 19 nt, Homo sapiens
  misc_RNA (1)...(19): siRNA sense strand
cuuauaggacugccaugaa

SEQ ID NO: 200805 - RNA, 19 nt, Homo sapiens
  misc_RNA (1)...(19): siRNA sense strand
caaagaguguccaaucauu

SEQ ID NO: 200806 - RNA, 19 nt, Homo sapiens
  misc_RNA (1)...(19): siRNA sense strand
uagcugaccugaauaaugu

SEQ ID NO: 200807 - RNA, 19 nt, Homo sapiens
  misc_RNA (1)...(19): siRNA sense strand
gcaugauucuauccaaauu

SEQ ID NO: 200808 - RNA, 19 nt, Homo sapiens
  misc_RNA (1)...(19): siRNA sense strand
ugaacuggcugcugaaugu

SEQ ID NO: 200809 - RNA, 19 nt, Homo sapiens
  misc_RNA (1)...(19): siRNA sense strand
gauauccugcagauuauua

SEQ ID NO: 200810 - RNA, 19 nt, Homo sapiens
  misc_RNA (1)...(19): siRNA sense strand
gagaagauguucgagacuu

SEQ ID NO: 200811 - RNA, 19 nt, Homo sapiens
  misc_RNA (1)...(19): siRNA sense strand
gcacuuuaauuaugacauc

SEQ ID NO: 200812 - RNA, 19 nt, Homo sapiens
  misc_RNA (1)...(19): siRNA sense strand
guaaagcacauuuggaaga

SEQ ID NO: 200813 - RNA, 19 nt, Homo sapiens
  misc_RNA (1)...(19): siRNA sense strand
gaauauugcacuccgacua

SEQ ID NO: 200814 - RNA, 19 nt, Homo sapiens
  misc_RNA (1)...(19): siRNA sense strand
uuauaggacugccaugaaa

SEQ ID NO: 200815 - RNA, 19 nt, Homo sapiens
  misc_RNA (1)...(19): siRNA sense strand
gggugaaguugcauccuuu

SEQ ID NO: 200816 - RNA, 19 nt, Homo sapiens
  misc_RNA (1)...(19): siRNA sense strand
gcaagagcacaacaauuug

SEQ ID NO: 200817 - RNA, 19 nt, Homo sapiens
  misc_RNA (1)...(19): siRNA sense strand
gcacaacaauuuggucaac

SEQ ID NO: 200818 - RNA, 19 nt, Homo sapiens
  misc_RNA (1)...(19): siRNA sense strand
agcaagagcacaacaauuu

SEQ ID NO: 200819 - RNA, 19 nt, Homo sapiens
  misc_RNA (1)...(19): siRNA sense strand
agaagauguucgagacuuu

SEQ ID NO: 200820 - RNA, 19 nt, Homo sapiens
  misc_RNA (1)...(19): siRNA sense strand
gagcaagagcacaacaauu

SEQ ID NO: 200821 - RNA, 19 nt, Homo sapiens
  misc_RNA (1)...(19): siRNA sense strand
ucaagcaaguggcaaguuc

SEQ ID NO: 200822 - RNA, 19 nt, Homo sapiens
  misc_RNA (1)...(19): siRNA sense strand
ccacgagacucaaacaacu

SEQ ID NO: 200823 - RNA, 19 nt, Homo sapiens
  misc_RNA (1)...(19): siRNA sense strand
cagcacaaccucaagcaaa

SEQ ID NO: 200824 - RNA, 19 nt, Homo sapiens
  misc_RNA (1)...(19): siRNA sense strand
gcaaagaguguccaaucau

SEQ ID NO: 200825 - RNA, 19 nt, Homo sapiens
  misc_RNA (1)...(19): siRNA sense strand
auggauauccugcagauua

SEQ ID NO: 200826 - RNA, 19 nt, Homo sapiens
  misc_RNA (1)...(19): siRNA sense strand
uguaacaucugcaaagagu

SEQ ID NO: 200827 - RNA, 19 nt, Homo sapiens
  misc_RNA (1)...(19): siRNA sense strand
guccggagcugcuuccaau

SEQ ID NO: 200828 - RNA, 19 nt, Homo sapiens
  misc_RNA (1)...(19): siRNA sense strand
gcaaguggcaaguucaaca

SEQ ID NO: 200829 - RNA, 19 nt, Homo sapiens
  misc_RNA (1)...(19): siRNA sense strand
gcuuccaauuugcuaauaa

SEQ ID NO: 200830 - RNA, 19 nt, Homo sapiens
  misc_RNA (1)...(19): siRNA sense strand
uggaagacaaguacagaua

SEQ ID NO: 200831 - RNA, 19 nt, Homo sapiens
  misc_RNA (1)...(19): siRNA sense strand
ggauccguguccugucuuu

SEQ ID NO: 200832 - RNA, 19 nt, Homo sapiens
  misc_RNA (1)...(19): siRNA sense strand
gucuuuagcugaccugaau

SEQ ID NO: 200833 - RNA, 19 nt, Homo sapiens
  misc_RNA (1)...(19): siRNA sense strand
gacaaguacagauaccuuu

SEQ ID NO: 200834 - RNA, 19 nt, Homo sapiens
  misc_RNA (1)...(19): siRNA sense strand
ccaagcaucaggccaaaug

SEQ ID NO: 200835 - RNA, 19 nt, Homo sapiens
  misc_RNA (1)...(19): siRNA sense strand
ggagcaagagcacaacaau

SEQ ID NO: 200836 - RNA, 19 nt, Homo sapiens
  misc_RNA (1)...(19): siRNA sense strand
guguaaagcacauuuggaa

SEQ ID NO: 200837 - RNA, 19 nt, Homo sapiens
  misc_RNA (1)...(19): siRNA sense strand
caagacaguugggugaagu

SEQ ID NO: 200838 - RNA, 19 nt, Homo sapiens
  misc_RNA (1)...(19): siRNA sense strand
gaagauguucgagacuuug

SEQ ID NO: 200839 - RNA, 19 nt, Homo sapiens
  misc_RNA (1)...(19): siRNA sense strand
gucagauucucagcuuaua

SEQ ID NO: 200840 - RNA, 19 nt, Homo sapiens
  misc_RNA (1)...(19): siRNA sense strand
uaacaucugcaaagagugu

SEQ ID NO: 200841 - RNA, 19 nt, Homo sapiens
  misc_RNA (1)...(19): siRNA sense strand
cggagcugcuuccaauuug

SEQ ID NO: 200842 - RNA, 19 nt, Homo sapiens
  misc_RNA (1)...(19): siRNA sense strand
gaagacaaguacagauacc

SEQ ID NO: 200843 - RNA, 19 nt, Homo sapiens
  misc_RNA (1)...(19): siRNA sense strand
ccauggauauccugcagau

SEQ ID NO: 200844 - RNA, 19 nt, Homo sapiens
  misc_RNA (1)...(19): siRNA sense strand
ggcaucauuucccugugua

SEQ ID NO: 200845 - RNA, 19 nt, Homo sapiens
  misc_RNA (1)...(19): siRNA sense strand
uggauauccugcagauuau

SEQ ID NO: 200846 - RNA, 19 nt, Homo sapiens
  misc_RNA (1)...(19): siRNA sense strand
ggaagacaaguacagauac

SEQ ID NO: 200847 - RNA, 19 nt, Homo sapiens
  misc_RNA (1)...(19): siRNA sense strand
ugcaaagaguguccaauca

SEQ ID NO: 200848 - RNA, 19 nt, Homo sapiens
  misc_RNA (1)...(19): siRNA sense strand
guggauaugugucugaacu

SEQ ID NO: 200849 - RNA, 19 nt, Homo sapiens
  misc_RNA (1)...(19): siRNA sense strand
acuggcugcugaauguuua

SEQ ID NO: 200850 - RNA, 19 nt, Homo sapiens
  misc_RNA (1)...(19): siRNA sense strand
acuaucccaugguggaaua

SEQ ID NO: 200851 - RNA, 19 nt, Homo sapiens
  misc_RNA (1)...(19): siRNA sense strand
ccggagcugcuuccaauuu

SEQ ID NO: 200852 - RNA, 19 nt, Homo sapiens
  misc_RNA (1)...(19): siRNA sense strand
ccaaauuccaagacaguug

SEQ ID NO: 200853 - RNA, 19 nt, Homo sapiens
  misc_RNA (1)...(19): siRNA sense strand
cagaaacugccaagcauca

SEQ ID NO: 200854 - RNA, 19 nt, Homo sapiens
  misc_RNA (1)...(19): siRNA sense strand
uaugacaucugccaaagcu

SEQ ID NO: 200855 - RNA, 19 nt, Homo sapiens
  misc_RNA (1)...(19): siRNA sense strand
aaugucagauucucagcuu

SEQ ID NO: 200856 - RNA, 19 nt, Homo sapiens
  misc_RNA (1)...(19): siRNA sense strand
ucgagacuuugccaaggua

SEQ ID NO: 200857 - RNA, 19 nt, Homo sapiens
  misc_RNA (1)...(19): siRNA sense strand
gcaaaaggccauaaaaugc

SEQ ID NO: 200858 - RNA, 19 nt, Homo sapiens
  misc_RNA (1)...(19): siRNA sense strand
cugcaugauucuauccaaa

SEQ ID NO: 200859 - RNA, 19 nt, Homo sapiens
  misc_RNA (1)...(19): siRNA sense strand
uaaagcacauuuggaagac

SEQ ID NO: 200860 - RNA, 19 nt, Homo sapiens
  misc_RNA (1)...(19): siRNA sense strand
acaggagucuaaagcacuu

SEQ ID NO: 200861 - RNA, 19 nt, Homo sapiens
  misc_RNA (1)...(19): siRNA sense strand
acagauaccuuuucaagca

SEQ ID NO: 200862 - RNA, 19 nt, Homo sapiens
  misc_RNA (1)...(19): siRNA sense strand
aagcacauuuggaagacaa

SEQ ID NO: 200863 - RNA, 19 nt, Homo sapiens
  misc_RNA (1)...(19): siRNA sense strand
gcuaauaauaagccagaga

SEQ ID NO: 200864 - RNA, 19 nt, Homo sapiens
  misc_RNA (1)...(19): siRNA sense strand
caagagcacaacaauuugg

SEQ ID NO: 200865 - RNA, 19 nt, Homo sapiens
  misc_RNA (1)...(19): siRNA sense strand
ccugucagcugcaugugau

SEQ ID NO: 200866 - RNA, 19 nt, Homo sapiens
  misc_RNA (1)...(19): siRNA sense strand
gcugcugaauguuuaugau

SEQ ID NO: 200867 - RNA, 19 nt, Homo sapiens
  misc_RNA (1)...(19): siRNA sense strand
acagagcucuaccagucuu

SEQ ID NO: 200868 - RNA, 19 nt, Homo sapiens
  misc_RNA (1)...(19): siRNA sense strand
acaguugggugaaguugca

SEQ ID NO: 200869 - RNA, 19 nt, Homo sapiens
  misc_RNA (1)...(19): siRNA sense strand
guuugaccacuauuuauga

SEQ ID NO: 200870 - RNA, 19 nt, Homo sapiens
  misc_RNA (1)...(19): siRNA sense strand
gcuuauaggacugccauga

SEQ ID NO: 200871 - RNA, 19 nt, Homo sapiens
  misc_RNA (1)...(19): siRNA sense strand
caucaggccaaauguaaca

SEQ ID NO: 200872 - RNA, 19 nt, Homo sapiens
  misc_RNA (1)...(19): siRNA sense strand
gauucuauccaaauuccaa

SEQ ID NO: 200873 - RNA, 19 nt, Homo sapiens
  misc_RNA (1)...(19): siRNA sense strand
ggcaaguucaacaggauuu

SEQ ID NO: 200874 - RNA, 19 nt, Homo sapiens
  misc_RNA (1)...(19): siRNA sense strand
gaacuggcugcugaauguu

SEQ ID NO: 200875 - RNA, 19 nt, Homo sapiens
  misc_RNA (1)...(19): siRNA sense strand
cugcugaauguuuaugaua

SEQ ID NO: 200876 - RNA, 19 nt, Homo sapiens
  misc_RNA (1)...(19): siRNA sense strand
aagcaucaggccaaaugua

SEQ ID NO: 200877 - RNA, 19 nt, Homo sapiens
  misc_RNA (1)...(19): siRNA sense strand
uggcaucauuucccugugu

SEQ ID NO: 200878 - RNA, 19 nt, Homo sapiens
  misc_RNA (1)...(19): siRNA sense strand
ccaugaaacuccgaagacu

SEQ ID NO: 200879 - RNA, 19 nt, Homo sapiens
  misc_RNA (1)...(19): siRNA sense strand
auaauaagccagagaucga

SEQ ID NO: 200880 - RNA, 19 nt, Homo sapiens
  misc_RNA (1)...(19): siRNA sense strand
cuaauaauaagccagagau

SEQ ID NO: 200881 - RNA, 19 nt, Homo sapiens
  misc_RNA (1)...(19): siRNA sense strand
ugggugaaguugcauccuu

SEQ ID NO: 200882 - RNA, 19 nt, Homo sapiens
  misc_RNA (1)...(19): siRNA sense strand
caucauuucccuguguaaa

SEQ ID NO: 200883 - RNA, 19 nt, Homo sapiens
  misc_RNA (1)...(19): siRNA sense strand
gcguggauaugugucugaa

SEQ ID NO: 200884 - RNA, 19 nt, Homo sapiens
  misc_RNA (1)...(19): siRNA sense strand
gcacuaucccaugguggaa

SEQ ID NO: 200885 - RNA, 19 nt, Homo sapiens
  misc_RNA (1)...(19): siRNA sense strand
gagccugucagcugcaugu

SEQ ID NO: 200886 - RNA, 19 nt, Homo sapiens
  misc_RNA (1)...(19): siRNA sense strand
guacagauaccuuuucaag

SEQ ID NO: 200887 - RNA, 19 nt, Homo sapiens
  misc_RNA (1)...(19): siRNA sense strand
gucccucucugcguggaua

SEQ ID NO: 200888 - RNA, 19 nt, Homo sapiens
  misc_RNA (1)...(19): siRNA sense strand
ggagcugcuuccaauuugc

SEQ ID NO: 200889 - RNA, 19 nt, Homo sapiens
  misc_RNA (1)...(19): siRNA sense strand
uuagcugaccugaauaaug

SEQ ID NO: 200890 - RNA, 19 nt, Homo sapiens
  misc_RNA (1)...(19): siRNA sense strand
guggcaaguucaacaggau

SEQ ID NO: 200891 - RNA, 19 nt, Homo sapiens
  misc_RNA (1)...(19): siRNA sense strand
acaacaauuuggucaacgu

SEQ ID NO: 200892 - RNA, 19 nt, Homo sapiens
  misc_RNA (1)...(19): siRNA sense strand
gacuacaucaggagaagau

SEQ ID NO: 200893 - RNA, 19 nt, Homo sapiens
  misc_RNA (1)...(19): siRNA sense strand
uaauaagccagagaucgaa

SEQ ID NO: 200894 - RNA, 19 nt, Homo sapiens
  misc_RNA (1)...(19): siRNA sense strand
ugucagauucucagcuuau

SEQ ID NO: 200895 - RNA, 19 nt, Homo sapiens
  misc_RNA (1)...(19): siRNA sense strand
ggauauccugcagauuauu

SEQ ID NO: 200896 - RNA, 19 nt, Homo sapiens
  misc_RNA (1)...(19): siRNA sense strand
agcaucaggccaaauguaa

SEQ ID NO: 200897 - RNA, 19 nt, Homo sapiens
  misc_RNA (1)...(19): siRNA sense strand
gcccuuugcuuggaucucu

SEQ ID NO: 200898 - RNA, 19 nt, Homo sapiens
  misc_RNA (1)...(19): siRNA sense strand
gcugaauguuuaugauacg

SEQ ID NO: 200899 - RNA, 19 nt, Homo sapiens
  misc_RNA (1)...(19): siRNA sense strand
agacuuugccaagguacua

SEQ ID NO: 200900 - RNA, 19 nt, Homo sapiens
  misc_RNA (1)...(19): siRNA sense strand
caagcaaguggcaaguuca

SEQ ID NO: 200901 - RNA, 19 nt, Homo sapiens
  misc_RNA (1)...(19): siRNA sense strand
agacaaguacagauaccuu

SEQ ID NO: 200902 - RNA, 19 nt, Homo sapiens
  misc_RNA (1)...(19): siRNA sense strand
gcaucauuucccuguguaa

SEQ ID NO: 200903 - RNA, 19 nt, Homo sapiens
  misc_RNA (1)...(19): siRNA sense strand
cugcaaagaguguccaauc

SEQ ID NO: 200904 - RNA, 19 nt, Homo sapiens
  misc_RNA (1)...(19): siRNA sense strand
cuuauaggacugccaugaa

SEQ ID NO: 200905 - RNA, 19 nt, Homo sapiens
  misc_RNA (1)...(19): siRNA sense strand
caaagaguguccaaucauu

SEQ ID NO: 200906 - RNA, 19 nt, Homo sapiens
  misc_RNA (1)...(19): siRNA sense strand
uagcugaccugaauaaugu

SEQ ID NO: 200907 - RNA, 19 nt, Homo sapiens
  misc_RNA (1)...(19): siRNA sense strand
gcaugauucuauccaaauu

SEQ ID NO: 200908 - RNA, 19 nt, Homo sapiens
  misc_RNA (1)...(19): siRNA sense strand
ugaacuggcugcugaaugu

SEQ ID NO: 200909 - RNA, 19 nt, Homo sapiens
  misc_RNA (1)...(19): siRNA sense strand
gauauccugcagauuauua

SEQ ID NO: 200910 - RNA, 19 nt, Homo sapiens
  misc_RNA (1)...(19): siRNA sense strand
gagaagauguucgagacuu

SEQ ID NO: 200911 - RNA, 19 nt, Homo sapiens
  misc_RNA (1)...(19): siRNA sense strand
gcacuuuaauuaugacauc

SEQ ID NO: 200912 - RNA, 19 nt, Homo sapiens
  misc_RNA (1)...(19): siRNA sense strand
guaaagcacauuuggaaga

SEQ ID NO: 200913 - RNA, 19 nt, Homo sapiens
  misc_RNA (1)...(19): siRNA sense strand
gaauauugcacuccgacua

SEQ ID NO: 200914 - RNA, 19 nt, Homo sapiens
  misc_RNA (1)...(19): siRNA sense strand
uuauaggacugccaugaaa

SEQ ID NO: 200915 - RNA, 19 nt, Homo sapiens
  misc_RNA (1)...(19): siRNA sense strand
gggugaaguugcauccuuu

SEQ ID NO: 200916 - RNA, 19 nt, Homo sapiens
  misc_RNA (1)...(19): siRNA sense strand
gcaagagcacaacaauuug

SEQ ID NO: 200917 - RNA, 19 nt, Homo sapiens
  misc_RNA (1)...(19): siRNA sense strand
gcacaacaauuuggucaac

SEQ ID NO: 200918 - RNA, 19 nt, Homo sapiens
  misc_RNA (1)...(19): siRNA sense strand
agcaagagcacaacaauuu

SEQ ID NO: 200919 - RNA, 19 nt, Homo sapiens
  misc_RNA (1)...(19): siRNA sense strand
agaagauguucgagacuuu

SEQ ID NO: 200920 - RNA, 19 nt, Homo sapiens
  misc_RNA (1)...(19): siRNA sense strand
gagcaagagcacaacaauu

SEQ ID NO: 200921 - RNA, 19 nt, Homo sapiens
  misc_RNA (1)...(19): siRNA sense strand
ucaagcaaguggcaaguuc

SEQ ID NO: 200922 - RNA, 19 nt, Homo sapiens
  misc_RNA (1)...(19): siRNA sense strand
ccacgagacucaaacaacu

SEQ ID NO: 200923 - RNA, 19 nt, Homo sapiens
  misc_RNA (1)...(19): siRNA sense strand
cagcacaaccucaagcaaa

SEQ ID NO: 200924 - RNA, 19 nt, Homo sapiens
  misc_RNA (1)...(19): siRNA sense strand
gcaaagaguguccaaucau

SEQ ID NO: 200925 - RNA, 19 nt, Homo sapiens
  misc_RNA (1)...(19): siRNA sense strand
auggauauccugcagauua

SEQ ID NO: 200926 - RNA, 19 nt, Homo sapiens
  misc_RNA (1)...(19): siRNA sense strand
uguaacaucugcaaagagu

SEQ ID NO: 200927 - RNA, 19 nt, Homo sapiens
  misc_RNA (1)...(19): siRNA sense strand
guccggagcugcuuccaau

SEQ ID NO: 200928 - RNA, 19 nt, Homo sapiens
  misc_RNA (1)...(19): siRNA sense strand
gcaaguggcaaguucaaca

SEQ ID NO: 200929 - RNA, 19 nt, Homo sapiens
  misc_RNA (1)...(19): siRNA sense strand
gcuuccaauuugcuaauaa

SEQ ID NO: 200930 - RNA, 19 nt, Homo sapiens
  misc_RNA (1)...(19): siRNA sense strand
uggaagacaaguacagaua

SEQ ID NO: 200931 - RNA, 19 nt, Homo sapiens
  misc_RNA (1)...(19): siRNA sense strand
ggauccguguccugucuuu

SEQ ID NO: 200932 - RNA, 19 nt, Homo sapiens
  misc_RNA (1)...(19): siRNA sense strand
gucuuuagcugaccugaau

SEQ ID NO: 200933 - RNA, 19 nt, Homo sapiens
  misc_RNA (1)...(19): siRNA sense strand
gacaaguacagauaccuuu

SEQ ID NO: 200934 - RNA, 19 nt, Homo sapiens
  misc_RNA (1)...(19): siRNA sense strand
ccaagcaucaggccaaaug

SEQ ID NO: 200935 - RNA, 19 nt, Homo sapiens
  misc_RNA (1)...(19): siRNA sense strand
ggagcaagagcacaacaau

SEQ ID NO: 200936 - RNA, 19 nt, Homo sapiens
  misc_RNA (1)...(19): siRNA sense strand
guguaaagcacauuuggaa

SEQ ID NO: 200937 - RNA, 19 nt, Homo sapiens
  misc_RNA (1)...(19): siRNA sense strand
caagacaguugggugaagu

SEQ ID NO: 200938 - RNA, 19 nt, Homo sapiens
  misc_RNA (1)...(19): siRNA sense strand
gaagauguucgagacuuug

SEQ ID NO: 200939 - RNA, 19 nt, Homo sapiens
  misc_RNA (1)...(19): siRNA sense strand
gucagauucucagcuuaua

SEQ ID NO: 200940 - RNA, 19 nt, Homo sapiens
  misc_RNA (1)...(19): siRNA sense strand
uaacaucugcaaagagugu

SEQ ID NO: 200941 - RNA, 19 nt, Homo sapiens
  misc_RNA (1)...(19): siRNA sense strand
cggagcugcuuccaauuug

SEQ ID NO: 200942 - RNA, 19 nt, Homo sapiens
  misc_RNA (1)...(19): siRNA sense strand
gaagacaaguacagauacc

SEQ ID NO: 200943 - RNA, 19 nt, Homo sapiens
  misc_RNA (1)...(19): siRNA sense strand
ccauggauauccugcagau

SEQ ID NO: 200944 - RNA, 19 nt, Homo sapiens
  misc_RNA (1)...(19): siRNA sense strand
ggcaucauuucccugugua

SEQ ID NO: 200945 - RNA, 19 nt, Homo sapiens
  misc_RNA (1)...(19): siRNA sense strand
uggauauccugcagauuau

SEQ ID NO: 200946 - RNA, 19 nt, Homo sapiens
  misc_RNA (1)...(19): siRNA sense strand
ggaagacaaguacagauac

SEQ ID NO: 200947 - RNA, 19 nt, Homo sapiens
  misc_RNA (1)...(19): siRNA sense strand
ugcaaagaguguccaauca

SEQ ID NO: 200948 - RNA, 19 nt, Homo sapiens
  misc_RNA (1)...(19): siRNA sense strand
guggauaugugucugaacu

SEQ ID NO: 200949 - RNA, 19 nt, Homo sapiens
  misc_RNA (1)...(19): siRNA sense strand
acuggcugcugaauguuua

SEQ ID NO: 200950 - RNA, 19 nt, Homo sapiens
  misc_RNA (1)...(19): siRNA sense strand
acuaucccaugguggaaua

SEQ ID NO: 200951 - RNA, 19 nt, Homo sapiens
  misc_RNA (1)...(19): siRNA sense strand
ccggagcugcuuccaauuu

SEQ ID NO: 200952 - RNA, 19 nt, Homo sapiens
  misc_RNA (1)...(19): siRNA sense strand
ccaaauuccaagacaguug

SEQ ID NO: 200953 - RNA, 19 nt, Homo sapiens
  misc_RNA (1)...(19): siRNA sense strand
cagaaacugccaagcauca

SEQ ID NO: 200954 - RNA, 19 nt, Homo sapiens
  misc_RNA (1)...(19): siRNA sense strand
uaugacaucugccaaagcu

SEQ ID NO: 200955 - RNA, 19 nt, Homo sapiens
  misc_RNA (1)...(19): siRNA sense strand
aaugucagauucucagcuu

SEQ ID NO: 200956 - RNA, 19 nt, Homo sapiens
  misc_RNA (1)...(19): siRNA sense strand
ucgagacuuugccaaggua

SEQ ID NO: 200957 - RNA, 19 nt, Homo sapiens
  misc_RNA (1)...(19): siRNA sense strand
gcaaaaggccauaaaaugc

SEQ ID NO: 200958 - RNA, 19 nt, Homo sapiens
  misc_RNA (1)...(19): siRNA sense strand
cugcaugauucuauccaaa

SEQ ID NO: 200959 - RNA, 19 nt, Homo sapiens
  misc_RNA (1)...(19): siRNA sense strand
uaaagcacauuuggaagac

SEQ ID NO: 200960 - RNA, 19 nt, Homo sapiens
  misc_RNA (1)...(19): siRNA sense strand
acaggagucuaaagcacuu

SEQ ID NO: 200961 - RNA, 19 nt, Homo sapiens
  misc_RNA (1)...(19): siRNA sense strand
acagauaccuuuucaagca

SEQ ID NO: 200962 - RNA, 19 nt, Homo sapiens
  misc_RNA (1)...(19): siRNA sense strand
aagcacauuuggaagacaa

SEQ ID NO: 200963 - RNA, 19 nt, Homo sapiens
  misc_RNA (1)...(19): siRNA sense strand
gcuaauaauaagccagaga

SEQ ID NO: 200964 - RNA, 19 nt, Homo sapiens
  misc_RNA (1)...(19): siRNA sense strand
caagagcacaacaauuugg

SEQ ID NO: 200965 - RNA, 19 nt, Homo sapiens
  misc_RNA (1)...(19): siRNA sense strand
ccugucagcugcaugugau

SEQ ID NO: 200966 - RNA, 19 nt, Homo sapiens
  misc_RNA (1)...(19): siRNA sense strand
gcugcugaauguuuaugau

SEQ ID NO: 200967 - RNA, 19 nt, Homo sapiens
  misc_RNA (1)...(19): siRNA sense strand
acagagcucuaccagucuu

SEQ ID NO: 200968 - RNA, 19 nt, Homo sapiens
  misc_RNA (1)...(19): siRNA sense strand
acaguugggugaaguugca

SEQ ID NO: 200969 - RNA, 19 nt, Homo sapiens
  misc_RNA (1)...(19): siRNA sense strand
guuugaccacuauuuauga

SEQ ID NO: 200970 - RNA, 19 nt, Homo sapiens
  misc_RNA (1)...(19): siRNA sense strand
gcuuauaggacugccauga

SEQ ID NO: 200971 - RNA, 19 nt, Homo sapiens
  misc_RNA (1)...(19): siRNA sense strand
caucaggccaaauguaaca

SEQ ID NO: 200972 - RNA, 19 nt, Homo sapiens
  misc_RNA (1)...(19): siRNA sense strand
gauucuauccaaauuccaa

SEQ ID NO: 200973 - RNA, 19 nt, Homo sapiens
  misc_RNA (1)...(19): siRNA sense strand
ggcaaguucaacaggauuu

SEQ ID NO: 200974 - RNA, 19 nt, Homo sapiens
  misc_RNA (1)...(19): siRNA sense strand
gaacuggcugcugaauguu

SEQ ID NO: 200975 - RNA, 19 nt, Homo sapiens
  misc_RNA (1)...(19): siRNA sense strand
cugcugaauguuuaugaua

SEQ ID NO: 200976 - RNA, 19 nt, Homo sapiens
  misc_RNA (1)...(19): siRNA sense strand
aagcaucaggccaaaugua

SEQ ID NO: 200977 - RNA, 19 nt, Homo sapiens
  misc_RNA (1)...(19): siRNA sense strand
uggcaucauuucccugugu

SEQ ID NO: 200978 - RNA, 19 nt, Homo sapiens
  misc_RNA (1)...(19): siRNA sense strand
ccaugaaacuccgaagacu

SEQ ID NO: 200979 - RNA, 19 nt, Homo sapiens
  misc_RNA (1)...(19): siRNA sense strand
auaauaagccagagaucga

SEQ ID NO: 200980 - RNA, 19 nt, Homo sapiens
  misc_RNA (1)...(19): siRNA sense strand
cuaauaauaagccagagau

SEQ ID NO: 200981 - RNA, 19 nt, Homo sapiens
  misc_RNA (1)...(19): siRNA sense strand
ugggugaaguugcauccuu

SEQ ID NO: 200982 - RNA, 19 nt, Homo sapiens
  misc_RNA (1)...(19): siRNA sense strand
caucauuucccuguguaaa

SEQ ID NO: 200983 - RNA, 19 nt, Homo sapiens
  misc_RNA (1)...(19): siRNA sense strand
gcguggauaugugucugaa

SEQ ID NO: 200984 - RNA, 19 nt, Homo sapiens
  misc_RNA (1)...(19): siRNA sense strand
gcacuaucccaugguggaa

SEQ ID NO: 200985 - RNA, 19 nt, Homo sapiens
  misc_RNA (1)...(19): siRNA sense strand
gagccugucagcugcaugu

SEQ ID NO: 200986 - RNA, 19 nt, Homo sapiens
  misc_RNA (1)...(19): siRNA sense strand
guacagauaccuuuucaag

SEQ ID NO: 200987 - RNA, 19 nt, Homo sapiens
  misc_RNA (1)...(19): siRNA sense strand
gucccucucugcguggaua

SEQ ID NO: 200988 - RNA, 19 nt, Homo sapiens
  misc_RNA (1)...(19): siRNA sense strand
ggagcugcuuccaauuugc

SEQ ID NO: 200989 - RNA, 19 nt, Homo sapiens
  misc_RNA (1)...(19): siRNA sense strand
uuagcugaccugaauaaug

SEQ ID NO: 200990 - RNA, 19 nt, Homo sapiens
  misc_RNA (1)...(19): siRNA sense strand
guggcaaguucaacaggau

SEQ ID NO: 200991 - RNA, 19 nt, Homo sapiens
  misc_RNA (1)...(19): siRNA sense strand
acaacaauuuggucaacgu

SEQ ID NO: 200992 - RNA, 19 nt, Homo sapiens
  misc_RNA (1)...(19): siRNA sense strand
gacuacaucaggagaagau

SEQ ID NO: 200993 - RNA, 19 nt, Homo sapiens
  misc_RNA (1)...(19): siRNA sense strand
uaauaagccagagaucgaa

SEQ ID NO: 200994 - RNA, 19 nt, Homo sapiens
  misc_RNA (1)...(19): siRNA sense strand
ugucagauucucagcuuau

SEQ ID NO: 200995 - RNA, 19 nt, Homo sapiens
  misc_RNA (1)...(19): siRNA sense strand
ggauauccugcagauuauu

SEQ ID NO: 200996 - RNA, 19 nt, Homo sapiens
  misc_RNA (1)...(19): siRNA sense strand
agcaucaggccaaauguaa

SEQ ID NO: 200997 - RNA, 19 nt, Homo sapiens
  misc_RNA (1)...(19): siRNA sense strand
gcccuuugcuuggaucucu

SEQ ID NO: 200998 - RNA, 19 nt, Homo sapiens
  misc_RNA (1)...(19): siRNA sense strand
gcugaauguuuaugauacg

SEQ ID NO: 200999 - RNA, 19 nt, Homo sapiens
  misc_RNA (1)...(19): siRNA sense strand
agacuuugccaagguacua

SEQ ID NO: 201000 - RNA, 19 nt, Homo sapiens
  misc_RNA (1)...(19): siRNA sense strand
caagcaaguggcaaguuca

SEQ ID NO: 201001 - RNA, 19 nt, Homo sapiens
  misc_RNA (1)...(19): siRNA sense strand
agacaaguacagauaccuu

SEQ ID NO: 201002 - RNA, 19 nt, Homo sapiens
  misc_RNA (1)...(19): siRNA sense strand
gcaucauuucccuguguaa

SEQ ID NO: 201003 - RNA, 19 nt, Homo sapiens
  misc_RNA (1)...(19): siRNA sense strand
cugcaaagaguguccaauc

SEQ ID NO: 201004 - RNA, 19 nt, Homo sapiens
  misc_RNA (1)...(19): siRNA sense strand
cuuauaggacugccaugaa

SEQ ID NO: 201005 - RNA, 19 nt, Homo sapiens
  misc_RNA (1)...(19): siRNA sense strand
caaagaguguccaaucauu

SEQ ID NO: 201006 - RNA, 19 nt, Homo sapiens
  misc_RNA (1)...(19): siRNA sense strand
uagcugaccugaauaaugu

SEQ ID NO: 201007 - RNA, 19 nt, Homo sapiens
  misc_RNA (1)...(19): siRNA sense strand
gcaugauucuauccaaauu

SEQ ID NO: 201008 - RNA, 19 nt, Homo sapiens
  misc_RNA (1)...(19): siRNA sense strand
ugaacuggcugcugaaugu

SEQ ID NO: 201009 - RNA, 19 nt, Homo sapiens
  misc_RNA (1)...(19): siRNA sense strand
gauauccugcagauuauua

SEQ ID NO: 201010 - RNA, 19 nt, Homo sapiens
  misc_RNA (1)...(19): siRNA sense strand
gagaagauguucgagacuu

SEQ ID NO: 201011 - RNA, 19 nt, Homo sapiens
  misc_RNA (1)...(19): siRNA sense strand
gcacuuuaauuaugacauc

SEQ ID NO: 201012 - RNA, 19 nt, Homo sapiens
  misc_RNA (1)...(19): siRNA sense strand
guaaagcacauuuggaaga

SEQ ID NO: 201013 - RNA, 19 nt, Homo sapiens
  misc_RNA (1)...(19): siRNA sense strand
gaauauugcacuccgacua

SEQ ID NO: 201014 - RNA, 19 nt, Homo sapiens
  misc_RNA (1)...(19): siRNA sense strand
uuauaggacugccaugaaa

SEQ ID NO: 201015 - RNA, 19 nt, Homo sapiens
  misc_RNA (1)...(19): siRNA sense strand
gggugaaguugcauccuuu

SEQ ID NO: 201016 - RNA, 19 nt, Homo sapiens
  misc_RNA (1)...(19): siRNA sense strand
gcaagagcacaacaauuug

SEQ ID NO: 201017 - RNA, 19 nt, Homo sapiens
  misc_RNA (1)...(19): siRNA sense strand
gcacaacaauuuggucaac

SEQ ID NO: 201018 - RNA, 19 nt, Homo sapiens
  misc_RNA (1)...(19): siRNA sense strand
agcaagagcacaacaauuu

SEQ ID NO: 201019 - RNA, 19 nt, Homo sapiens
  misc_RNA (1)...(19): siRNA sense strand
agaagauguucgagacuuu

SEQ ID NO: 201020 - RNA, 19 nt, Homo sapiens
  misc_RNA (1)...(19): siRNA sense strand
gagcaagagcacaacaauu

SEQ ID NO: 201021 - RNA, 19 nt, Homo sapiens
  misc_RNA (1)...(19): siRNA sense strand
ucaagcaaguggcaaguuc

SEQ ID NO: 201022 - RNA, 19 nt, Homo sapiens
  misc_RNA (1)...(19): siRNA sense strand
ccacgagacucaaacaacu

SEQ ID NO: 201023 - RNA, 19 nt, Homo sapiens
  misc_RNA (1)...(19): siRNA sense strand
cagcacaaccucaagcaaa

SEQ ID NO: 201024 - RNA, 19 nt, Homo sapiens
  misc_RNA (1)...(19): siRNA sense strand
gcaaagaguguccaaucau

SEQ ID NO: 201025 - RNA, 19 nt, Homo sapiens
  misc_RNA (1)...(19): siRNA sense strand
auggauauccugcagauua

SEQ ID NO: 201026 - RNA, 19 nt, Homo sapiens
  misc_RNA (1)...(19): siRNA sense strand
uguaacaucugcaaagagu

SEQ ID NO: 201027 - RNA, 19 nt, Homo sapiens
  misc_RNA (1)...(19): siRNA sense strand
guccggagcugcuuccaau

SEQ ID NO: 201028 - RNA, 19 nt, Homo sapiens
  misc_RNA (1)...(19): siRNA sense strand
gcaaguggcaaguucaaca

SEQ ID NO: 201029 - RNA, 19 nt, Homo sapiens
  misc_RNA (1)...(19): siRNA sense strand
gcuuccaauuugcuaauaa

SEQ ID NO: 201030 - RNA, 19 nt, Homo sapiens
  misc_RNA (1)...(19): siRNA sense strand
uggaagacaaguacagaua

SEQ ID NO: 201031 - RNA, 19 nt, Homo sapiens
  misc_RNA (1)...(19): siRNA sense strand
ggauccguguccugucuuu

SEQ ID NO: 201032 - RNA, 19 nt, Homo sapiens
  misc_RNA (1)...(19): siRNA sense strand
gucuuuagcugaccugaau

SEQ ID NO: 201033 - RNA, 19 nt, Homo sapiens
  misc_RNA (1)...(19): siRNA sense strand
gacaaguacagauaccuuu

SEQ ID NO: 201034 - RNA, 19 nt, Homo sapiens
  misc_RNA (1)...(19): siRNA sense strand
ccaagcaucaggccaaaug

SEQ ID NO: 201035 - RNA, 19 nt, Homo sapiens
  misc_RNA (1)...(19): siRNA sense strand
ggagcaagagcacaacaau

SEQ ID NO: 201036 - RNA, 19 nt, Homo sapiens
  misc_RNA (1)...(19): siRNA sense strand
guguaaagcacauuuggaa

SEQ ID NO: 201037 - RNA, 19 nt, Homo sapiens
  misc_RNA (1)...(19): siRNA sense strand
caagacaguugggugaagu

SEQ ID NO: 201038 - RNA, 19 nt, Homo sapiens
  misc_RNA (1)...(19): siRNA sense strand
gaagauguucgagacuuug

SEQ ID NO: 201039 - RNA, 19 nt, Homo sapiens
  misc_RNA (1)...(19): siRNA sense strand
gucagauucucagcuuaua

SEQ ID NO: 201040 - RNA, 19 nt, Homo sapiens
  misc_RNA (1)...(19): siRNA sense strand
uaacaucugcaaagagugu

SEQ ID NO: 201041 - RNA, 19 nt, Homo sapiens
  misc_RNA (1)...(19): siRNA sense strand
cggagcugcuuccaauuug

SEQ ID NO: 201042 - RNA, 19 nt, Homo sapiens
  misc_RNA (1)...(19): siRNA sense strand
gaagacaaguacagauacc

SEQ ID NO: 201043 - RNA, 19 nt, Homo sapiens
  misc_RNA (1)...(19): siRNA sense strand
ccauggauauccugcagau

SEQ ID NO: 201044 - RNA, 19 nt, Homo sapiens
  misc_RNA (1)...(19): siRNA sense strand
ggcaucauuucccugugua

SEQ ID NO: 201045 - RNA, 19 nt, Homo sapiens
  misc_RNA (1)...(19): siRNA sense strand
uggauauccugcagauuau

SEQ ID NO: 201046 - RNA, 19 nt, Homo sapiens
  misc_RNA (1)...(19): siRNA sense strand
ggaagacaaguacagauac

SEQ ID NO: 201047 - RNA, 19 nt, Homo sapiens
  misc_RNA (1)...(19): siRNA sense strand
ugcaaagaguguccaauca

SEQ ID NO: 201048 - RNA, 19 nt, Homo sapiens
  misc_RNA (1)...(19): siRNA sense strand
guggauaugugucugaacu

SEQ ID NO: 201049 - RNA, 19 nt, Homo sapiens
  misc_RNA (1)...(19): siRNA sense strand
acuggcugcugaauguuua

SEQ ID NO: 201050 - RNA, 19 nt, Homo sapiens
  misc_RNA (1)...(19): siRNA sense strand
acuaucccaugguggaaua

SEQ ID NO: 201051 - RNA, 19 nt, Homo sapiens
  misc_RNA (1)...(19): siRNA sense strand
ccggagcugcuuccaauuu

SEQ ID NO: 201052 - RNA, 19 nt, Homo sapiens
  misc_RNA (1)...(19): siRNA sense strand
ccaaauuccaagacaguug

SEQ ID NO: 201053 - RNA, 19 nt, Homo sapiens
  misc_RNA (1)...(19): siRNA sense strand
cagaaacugccaagcauca

SEQ ID NO: 201054 - RNA, 19 nt, Homo sapiens
  misc_RNA (1)...(19): siRNA sense strand
uaugacaucugccaaagcu

SEQ ID NO: 201055 - RNA, 19 nt, Homo sapiens
  misc_RNA (1)...(19): siRNA sense strand
aaugucagauucucagcuu

SEQ ID NO: 201056 - RNA, 19 nt, Homo sapiens
  misc_RNA (1)...(19): siRNA sense strand
ucgagacuuugccaaggua

SEQ ID NO: 201057 - RNA, 19 nt, Homo sapiens
  misc_RNA (1)...(19): siRNA sense strand
gcaaaaggccauaaaaugc

SEQ ID NO: 201058 - RNA, 19 nt, Homo sapiens
  misc_RNA (1)...(19): siRNA sense strand
cugcaugauucuauccaaa

SEQ ID NO: 201059 - RNA, 19 nt, Homo sapiens
  misc_RNA (1)...(19): siRNA sense strand
uaaagcacauuuggaagac

SEQ ID NO: 201060 - RNA, 19 nt, Homo sapiens
  misc_RNA (1)...(19): siRNA sense strand
acaggagucuaaagcacuu

SEQ ID NO: 201061 - RNA, 19 nt, Homo sapiens
  misc_RNA (1)...(19): siRNA sense strand
acagauaccuuuucaagca

SEQ ID NO: 201062 - RNA, 19 nt, Homo sapiens
  misc_RNA (1)...(19): siRNA sense strand
aagcacauuuggaagacaa

SEQ ID NO: 201063 - RNA, 19 nt, Homo sapiens
  misc_RNA (1)...(19): siRNA sense strand
gcuaauaauaagccagaga

SEQ ID NO: 201064 - RNA, 19 nt, Homo sapiens
  misc_RNA (1)...(19): siRNA sense strand
caagagcacaacaauuugg

SEQ ID NO: 201065 - RNA, 19 nt, Homo sapiens
  misc_RNA (1)...(19): siRNA sense strand
ccugucagcugcaugugau

SEQ ID NO: 201066 - RNA, 19 nt, Homo sapiens
  misc_RNA (1)...(19): siRNA sense strand
gcugcugaauguuuaugau

SEQ ID NO: 201067 - RNA, 19 nt, Homo sapiens
  misc_RNA (1)...(19): siRNA sense strand
acagagcucuaccagucuu

SEQ ID NO: 201068 - RNA, 19 nt, Homo sapiens
  misc_RNA (1)...(19): siRNA sense strand
acaguugggugaaguugca

SEQ ID NO: 201069 - RNA, 19 nt, Homo sapiens
  misc_RNA (1)...(19): siRNA sense strand
guuugaccacuauuuauga

SEQ ID NO: 201070 - RNA, 19 nt, Homo sapiens
  misc_RNA (1)...(19): siRNA sense strand
gcuuauaggacugccauga

SEQ ID NO: 201071 - RNA, 19 nt, Homo sapiens
  misc_RNA (1)...(19): siRNA sense strand
caucaggccaaauguaaca

SEQ ID NO: 201072 - RNA, 19 nt, Homo sapiens
  misc_RNA (1)...(19): siRNA sense strand
gauucuauccaaauuccaa

SEQ ID NO: 201073 - RNA, 19 nt, Homo sapiens
  misc_RNA (1)...(19): siRNA sense strand
ggcaaguucaacaggauuu

SEQ ID NO: 201074 - RNA, 19 nt, Homo sapiens
  misc_RNA (1)...(19): siRNA sense strand
gaacuggcugcugaauguu

SEQ ID NO: 201075 - RNA, 19 nt, Homo sapiens
  misc_RNA (1)...(19): siRNA sense strand
cugcugaauguuuaugaua

SEQ ID NO: 201076 - RNA, 19 nt, Homo sapiens
  misc_RNA (1)...(19): siRNA sense strand
aagcaucaggccaaaugua

SEQ ID NO: 201077 - RNA, 19 nt, Homo sapiens
  misc_RNA (1)...(19): siRNA sense strand
uggcaucauuucccugugu

SEQ ID NO: 201078 - RNA, 19 nt, Homo sapiens
  misc_RNA (1)...(19): siRNA sense strand
ccaugaaacuccgaagacu

SEQ ID NO: 201079 - RNA, 19 nt, Homo sapiens
  misc_RNA (1)...(19): siRNA sense strand
auaauaagccagagaucga

SEQ ID NO: 201080 - RNA, 19 nt, Homo sapiens
  misc_RNA (1)...(19): siRNA sense strand
cuaauaauaagccagagau

SEQ ID NO: 201081 - RNA, 19 nt, Homo sapiens
  misc_RNA (1)...(19): siRNA sense strand
ugggugaaguugcauccuu

SEQ ID NO: 201082 - RNA, 19 nt, Homo sapiens
  misc_RNA (1)...(19): siRNA sense strand
caucauuucccuguguaaa

SEQ ID NO: 201083 - RNA, 19 nt, Homo sapiens
  misc_RNA (1)...(19): siRNA sense strand
gcguggauaugugucugaa

SEQ ID NO: 201084 - RNA, 19 nt, Homo sapiens
  misc_RNA (1)...(19): siRNA sense strand
gcacuaucccaugguggaa

SEQ ID NO: 201085 - RNA, 19 nt, Homo sapiens
  misc_RNA (1)...(19): siRNA sense strand
gagccugucagcugcaugu

SEQ ID NO: 201086 - RNA, 19 nt, Homo sapiens
  misc_RNA (1)...(19): siRNA sense strand
guacagauaccuuuucaag

SEQ ID NO: 201087 - RNA, 19 nt, Homo sapiens
  misc_RNA (1)...(19): siRNA sense strand
gucccucucugcguggaua

SEQ ID NO: 201088 - RNA, 19 nt, Homo sapiens
  misc_RNA (1)...(19): siRNA sense strand
ggagcugcuuccaauuugc

SEQ ID NO: 201089 - RNA, 19 nt, Homo sapiens
  misc_RNA (1)...(19): siRNA sense strand
uuagcugaccugaauaaug

SEQ ID NO: 201090 - RNA, 19 nt, Homo sapiens
  misc_RNA (1)...(19): siRNA sense strand
guggcaaguucaacaggau

SEQ ID NO: 201091 - RNA, 19 nt, Homo sapiens
  misc_RNA (1)...(19): siRNA sense strand
acaacaauuuggucaacgu

SEQ ID NO: 201092 - RNA, 19 nt, Homo sapiens
  misc_RNA (1)...(19): siRNA sense strand
gacuacaucaggagaagau

SEQ ID NO: 201093 - RNA, 19 nt, Homo sapiens
  misc_RNA (1)...(19): siRNA sense strand
uaauaagccagagaucgaa

SEQ ID NO: 201094 - RNA, 19 nt, Homo sapiens
  misc_RNA (1)...(19): siRNA sense strand
ugucagauucucagcuuau

SEQ ID NO: 201095 - RNA, 19 nt, Homo sapiens
  misc_RNA (1)...(19): siRNA sense strand
ggauauccugcagauuauu

SEQ ID NO: 201096 - RNA, 19 nt, Homo sapiens
  misc_RNA (1)...(19): siRNA sense strand
agcaucaggccaaauguaa

SEQ ID NO: 201097 - RNA, 19 nt, Homo sapiens
  misc_RNA (1)...(19): siRNA sense strand
gcccuuugcuuggaucucu

SEQ ID NO: 201098 - RNA, 19 nt, Homo sapiens
  misc_RNA (1)...(19): siRNA sense strand
gcugaauguuuaugauacg

SEQ ID NO: 201099 - RNA, 19 nt, Homo sapiens
  misc_RNA (1)...(19): siRNA sense strand
agacuuugccaagguacua

SEQ ID NO: 201100 - RNA, 19 nt, Homo sapiens
  misc_RNA (1)...(19): siRNA sense strand
caagcaaguggcaaguuca

SEQ ID NO: 201101 - RNA, 19 nt, Homo sapiens
  misc_RNA (1)...(19): siRNA sense strand
agacaaguacagauaccuu

SEQ ID NO: 201102 - RNA, 19 nt, Homo sapiens
  misc_RNA (1)...(19): siRNA sense strand
gcaucauuucccuguguaa

SEQ ID NO: 201103 - RNA, 19 nt, Homo sapiens
  misc_RNA (1)...(19): siRNA sense strand
cugcaaagaguguccaauc

SEQ ID NO: 201104 - RNA, 19 nt, Homo sapiens
  misc_RNA (1)...(19): siRNA sense strand
cuuauaggacugccaugaa

SEQ ID NO: 201105 - RNA, 19 nt, Homo sapiens
  misc_RNA (1)...(19): siRNA sense strand
caaagaguguccaaucauu

SEQ ID NO: 201106 - RNA, 19 nt, Homo sapiens
  misc_RNA (1)...(19): siRNA sense strand
uagcugaccugaauaaugu

SEQ ID NO: 201107 - RNA, 19 nt, Homo sapiens
  misc_RNA (1)...(19): siRNA sense strand
gcaugauucuauccaaauu

SEQ ID NO: 201108 - RNA, 19 nt, Homo sapiens
  misc_RNA (1)...(19): siRNA sense strand
ugaacuggcugcugaaugu

SEQ ID NO: 201109 - RNA, 19 nt, Homo sapiens
  misc_RNA (1)...(19): siRNA sense strand
gauauccugcagauuauua

SEQ ID NO: 201110 - RNA, 19 nt, Homo sapiens
  misc_RNA (1)...(19): siRNA sense strand
gagaagauguucgagacuu

SEQ ID NO: 201111 - RNA, 19 nt, Homo sapiens
  misc_RNA (1)...(19): siRNA sense strand
gcacuuuaauuaugacauc

SEQ ID NO: 201112 - RNA, 19 nt, Homo sapiens
  misc_RNA (1)...(19): siRNA sense strand
guaaagcacauuuggaaga

SEQ ID NO: 201113 - RNA, 19 nt, Homo sapiens
  misc_RNA (1)...(19): siRNA sense strand
gaauauugcacuccgacua

SEQ ID NO: 201114 - RNA, 19 nt, Homo sapiens
  misc_RNA (1)...(19): siRNA sense strand
uuauaggacugccaugaaa

SEQ ID NO: 201115 - RNA, 19 nt, Homo sapiens
  misc_RNA (1)...(19): siRNA sense strand
gggugaaguugcauccuuu

SEQ ID NO: 201116 - RNA, 19 nt, Homo sapiens
  misc_RNA (1)...(19): siRNA sense strand
gcaagagcacaacaauuug

SEQ ID NO: 201117 - RNA, 19 nt, Homo sapiens
  misc_RNA (1)...(19): siRNA sense strand
gcacaacaauuuggucaac

SEQ ID NO: 201118 - RNA, 19 nt, Homo sapiens
  misc_RNA (1)...(19): siRNA sense strand
agcaagagcacaacaauuu

SEQ ID NO: 201119 - RNA, 19 nt, Homo sapiens
  misc_RNA (1)...(19): siRNA sense strand
agaagauguucgagacuuu

SEQ ID NO: 201120 - RNA, 19 nt, Homo sapiens
  misc_RNA (1)...(19): siRNA sense strand
gagcaagagcacaacaauu

SEQ ID NO: 201121 - RNA, 19 nt, Homo sapiens
  misc_RNA (1)...(19): siRNA sense strand
ucaagcaaguggcaaguuc

SEQ ID NO: 201122 - RNA, 19 nt, Homo sapiens
  misc_RNA (1)...(19): siRNA sense strand
ccacgagacucaaacaacu

SEQ ID NO: 201123 - RNA, 19 nt, Homo sapiens
  misc_RNA (1)...(19): siRNA sense strand
cagcacaaccucaagcaaa

SEQ ID NO: 201124 - RNA, 19 nt, Homo sapiens
  misc_RNA (1)...(19): siRNA sense strand
gcaaagaguguccaaucau

SEQ ID NO: 201125 - RNA, 19 nt, Homo sapiens
  misc_RNA (1)...(19): siRNA sense strand
auggauauccugcagauua

SEQ ID NO: 201126 - RNA, 19 nt, Homo sapiens
  misc_RNA (1)...(19): siRNA sense strand
uguaacaucugcaaagagu

SEQ ID NO: 201127 - RNA, 19 nt, Homo sapiens
  misc_RNA (1)...(19): siRNA sense strand
guccggagcugcuuccaau

SEQ ID NO: 201128 - RNA, 19 nt, Homo sapiens
  misc_RNA (1)...(19): siRNA sense strand
gcaaguggcaaguucaaca

SEQ ID NO: 201129 - RNA, 19 nt, Homo sapiens
  misc_RNA (1)...(19): siRNA sense strand
gcuuccaauuugcuaauaa

SEQ ID NO: 201130 - RNA, 19 nt, Homo sapiens
  misc_RNA (1)...(19): siRNA sense strand
uggaagacaaguacagaua

SEQ ID NO: 201131 - RNA, 19 nt, Homo sapiens
  misc_RNA (1)...(19): siRNA sense strand
ggauccguguccugucuuu

SEQ ID NO: 201132 - RNA, 19 nt, Homo sapiens
  misc_RNA (1)...(19): siRNA sense strand
gucuuuagcugaccugaau

SEQ ID NO: 201133 - RNA, 19 nt, Homo sapiens
  misc_RNA (1)...(19): siRNA sense strand
gacaaguacagauaccuuu

SEQ ID NO: 201134 - RNA, 19 nt, Homo sapiens
  misc_RNA (1)...(19): siRNA sense strand
ccaagcaucaggccaaaug

SEQ ID NO: 201135 - RNA, 19 nt, Homo sapiens
  misc_RNA (1)...(19): siRNA sense strand
ggagcaagagcacaacaau

SEQ ID NO: 201136 - RNA, 19 nt, Homo sapiens
  misc_RNA (1)...(19): siRNA sense strand
guguaaagcacauuuggaa

SEQ ID NO: 201137 - RNA, 19 nt, Homo sapiens
  misc_RNA (1)...(19): siRNA sense strand
caagacaguugggugaagu

SEQ ID NO: 201138 - RNA, 19 nt, Homo sapiens
  misc_RNA (1)...(19): siRNA sense strand
gaagauguucgagacuuug

SEQ ID NO: 201139 - RNA, 19 nt, Homo sapiens
  misc_RNA (1)...(19): siRNA sense strand
gucagauucucagcuuaua

SEQ ID NO: 201140 - RNA, 19 nt, Homo sapiens
  misc_RNA (1)...(19): siRNA sense strand
uaacaucugcaaagagugu

SEQ ID NO: 201141 - RNA, 19 nt, Homo sapiens
  misc_RNA (1)...(19): siRNA sense strand
cggagcugcuuccaauuug

SEQ ID NO: 201142 - RNA, 19 nt, Homo sapiens
  misc_RNA (1)...(19): siRNA sense strand
gaagacaaguacagauacc

SEQ ID NO: 201143 - RNA, 19 nt, Homo sapiens
  misc_RNA (1)...(19): siRNA sense strand
ccauggauauccugcagau

SEQ ID NO: 201144 - RNA, 19 nt, Homo sapiens
  misc_RNA (1)...(19): siRNA sense strand
ggcaucauuucccugugua

SEQ ID NO: 201145 - RNA, 19 nt, Homo sapiens
  misc_RNA (1)...(19): siRNA sense strand
uggauauccugcagauuau

SEQ ID NO: 201146 - RNA, 19 nt, Homo sapiens
  misc_RNA (1)...(19): siRNA sense strand
ggaagacaaguacagauac

SEQ ID NO: 201147 - RNA, 19 nt, Homo sapiens
  misc_RNA (1)...(19): siRNA sense strand
ugcaaagaguguccaauca

SEQ ID NO: 201148 - RNA, 19 nt, Homo sapiens
  misc_RNA (1)...(19): siRNA sense strand
guggauaugugucugaacu

SEQ ID NO: 201149 - RNA, 19 nt, Homo sapiens
  misc_RNA (1)...(19): siRNA sense strand
acuggcugcugaauguuua

SEQ ID NO: 201150 - RNA, 19 nt, Homo sapiens
  misc_RNA (1)...(19): siRNA sense strand
acuaucccaugguggaaua

SEQ ID NO: 201151 - RNA, 19 nt, Homo sapiens
  misc_RNA (1)...(19): siRNA sense strand
ccggagcugcuuccaauuu

SEQ ID NO: 201152 - RNA, 19 nt, Homo sapiens
  misc_RNA (1)...(19): siRNA sense strand
ccaaauuccaagacaguug

SEQ ID NO: 201153 - RNA, 19 nt, Homo sapiens
  misc_RNA (1)...(19): siRNA sense strand
cagaaacugccaagcauca

SEQ ID NO: 201154 - RNA, 19 nt, Homo sapiens
  misc_RNA (1)...(19): siRNA sense strand
uaugacaucugccaaagcu

SEQ ID NO: 201155 - RNA, 19 nt, Homo sapiens
  misc_RNA (1)...(19): siRNA sense strand
aaugucagauucucagcuu

SEQ ID NO: 201156 - RNA, 19 nt, Homo sapiens
  misc_RNA (1)...(19): siRNA sense strand
ucgagacuuugccaaggua

SEQ ID NO: 201157 - RNA, 19 nt, Homo sapiens
  misc_RNA (1)...(19): siRNA sense strand
gcaaaaggccauaaaaugc

SEQ ID NO: 201158 - RNA, 19 nt, Homo sapiens
  misc_RNA (1)...(19): siRNA sense strand
cugcaugauucuauccaaa

SEQ ID NO: 201159 - RNA, 19 nt, Homo sapiens
  misc_RNA (1)...(19): siRNA sense strand
uaaagcacauuuggaagac

SEQ ID NO: 201160 - RNA, 19 nt, Homo sapiens
  misc_RNA (1)...(19): siRNA sense strand
acaggagucuaaagcacuu

SEQ ID NO: 201161 - RNA, 19 nt, Homo sapiens
  misc_RNA (1)...(19): siRNA sense strand
acagauaccuuuucaagca

SEQ ID NO: 201162 - RNA, 19 nt, Homo sapiens
  misc_RNA (1)...(19): siRNA sense strand
aagcacauuuggaagacaa

SEQ ID NO: 201163 - RNA, 19 nt, Homo sapiens
  misc_RNA (1)...(19): siRNA sense strand
gcuaauaauaagccagaga

SEQ ID NO: 201164 - RNA, 19 nt, Homo sapiens
  misc_RNA (1)...(19): siRNA sense strand
caagagcacaacaauuugg

SEQ ID NO: 201165 - RNA, 19 nt, Homo sapiens
  misc_RNA (1)...(19): siRNA sense strand
ccugucagcugcaugugau

SEQ ID NO: 201166 - RNA, 19 nt, Homo sapiens
  misc_RNA (1)...(19): siRNA sense strand
gcugcugaauguuuaugau

SEQ ID NO: 201167 - RNA, 19 nt, Homo sapiens
  misc_RNA (1)...(19): siRNA sense strand
acagagcucuaccagucuu

SEQ ID NO: 201168 - RNA, 19 nt, Homo sapiens
  misc_RNA (1)...(19): siRNA sense strand
acaguugggugaaguugca

SEQ ID NO: 201169 - RNA, 19 nt, Homo sapiens
  misc_RNA (1)...(19): siRNA sense strand
guuugaccacuauuuauga

SEQ ID NO: 201170 - RNA, 19 nt, Homo sapiens
  misc_RNA (1)...(19): siRNA sense strand
gcuuauaggacugccauga

SEQ ID NO: 201171 - RNA, 19 nt, Homo sapiens
  misc_RNA (1)...(19): siRNA sense strand
caucaggccaaauguaaca

SEQ ID NO: 201172 - RNA, 19 nt, Homo sapiens
  misc_RNA (1)...(19): siRNA sense strand
gauucuauccaaauuccaa

SEQ ID NO: 201173 - RNA, 19 nt, Homo sapiens
  misc_RNA (1)...(19): siRNA sense strand
ggcaaguucaacaggauuu

SEQ ID NO: 201174 - RNA, 19 nt, Homo sapiens
  misc_RNA (1)...(19): siRNA sense strand
gaacuggcugcugaauguu

SEQ ID NO: 201175 - RNA, 19 nt, Homo sapiens
  misc_RNA (1)...(19): siRNA sense strand
cugcugaauguuuaugaua

SEQ ID NO: 201176 - RNA, 19 nt, Homo sapiens
  misc_RNA (1)...(19): siRNA sense strand
aagcaucaggccaaaugua

SEQ ID NO: 201177 - RNA, 19 nt, Homo sapiens
  misc_RNA (1)...(19): siRNA sense strand
uggcaucauuucccugugu

SEQ ID NO: 201178 - RNA, 19 nt, Homo sapiens
  misc_RNA (1)...(19): siRNA sense strand
ccaugaaacuccgaagacu

SEQ ID NO: 201179 - RNA, 19 nt, Homo sapiens
  misc_RNA (1)...(19): siRNA sense strand
auaauaagccagagaucga

SEQ ID NO: 201180 - RNA, 19 nt, Homo sapiens
  misc_RNA (1)...(19): siRNA sense strand
cuaauaauaagccagagau

SEQ ID NO: 201181 - RNA, 19 nt, Homo sapiens
  misc_RNA (1)...(19): siRNA sense strand
ugggugaaguugcauccuu

SEQ ID NO: 201182 - RNA, 19 nt, Homo sapiens
  misc_RNA (1)...(19): siRNA sense strand
caucauuucccuguguaaa

SEQ ID NO: 201183 - RNA, 19 nt, Homo sapiens
  misc_RNA (1)...(19): siRNA sense strand
gcguggauaugugucugaa

SEQ ID NO: 201184 - RNA, 19 nt, Homo sapiens
  misc_RNA (1)...(19): siRNA sense strand
gcacuaucccaugguggaa

SEQ ID NO: 201185 - RNA, 19 nt, Homo sapiens
  misc_RNA (1)...(19): siRNA sense strand
gagccugucagcugcaugu

SEQ ID NO: 201186 - RNA, 19 nt, Homo sapiens
  misc_RNA (1)...(19): siRNA sense strand
guacagauaccuuuucaag

SEQ ID NO: 201187 - RNA, 19 nt, Homo sapiens
  misc_RNA (1)...(19): siRNA sense strand
gucccucucugcguggaua

SEQ ID NO: 201188 - RNA, 19 nt, Homo sapiens
  misc_RNA (1)...(19): siRNA sense strand
ggagcugcuuccaauuugc

SEQ ID NO: 201189 - RNA, 19 nt, Homo sapiens
  misc_RNA (1)...(19): siRNA sense strand
uuagcugaccugaauaaug

SEQ ID NO: 201190 - RNA, 19 nt, Homo sapiens
  misc_RNA (1)...(19): siRNA sense strand
guggcaaguucaacaggau

SEQ ID NO: 201191 - RNA, 19 nt, Homo sapiens
  misc_RNA (1)...(19): siRNA sense strand
acaacaauuuggucaacgu

SEQ ID NO: 201192 - RNA, 19 nt, Homo sapiens
  misc_RNA (1)...(19): siRNA sense strand
gacuacaucaggagaagau

SEQ ID NO: 201193 - RNA, 19 nt, Homo sapiens
  misc_RNA (1)...(19): siRNA sense strand
uaauaagccagagaucgaa

SEQ ID NO: 201194 - RNA, 19 nt, Homo sapiens
  misc_RNA (1)...(19): siRNA sense strand
ugucagauucucagcuuau

SEQ ID NO: 201195 - RNA, 19 nt, Homo sapiens
  misc_RNA (1)...(19): siRNA sense strand
ggauauccugcagauuauu

SEQ ID NO: 201196 - RNA, 19 nt, Homo sapiens
  misc_RNA (1)...(19): siRNA sense strand
agcaucaggccaaauguaa

SEQ ID NO: 201197 - RNA, 19 nt, Homo sapiens
  misc_RNA (1)...(19): siRNA sense strand
gcccuuugcuuggaucucu

SEQ ID NO: 201198 - RNA, 19 nt, Homo sapiens
  misc_RNA (1)...(19): siRNA sense strand
gcugaauguuuaugauacg

SEQ ID NO: 201199 - RNA, 19 nt, Homo sapiens
  misc_RNA (1)...(19): siRNA sense strand
agacuuugccaagguacua

SEQ ID NO: 201200 - RNA, 19 nt, Homo sapiens
  misc_RNA (1)...(19): siRNA sense strand
caagcaaguggcaaguuca

SEQ ID NO: 201201 - RNA, 19 nt, Homo sapiens
  misc_RNA (1)...(19): siRNA sense strand
agacaaguacagauaccuu

SEQ ID NO: 201202 - RNA, 19 nt, Homo sapiens
  misc_RNA (1)...(19): siRNA sense strand
gcaucauuucccuguguaa

SEQ ID NO: 201203 - RNA, 19 nt, Homo sapiens
  misc_RNA (1)...(19): siRNA sense strand
cugcaaagaguguccaauc

SEQ ID NO: 201204 - RNA, 19 nt, Homo sapiens
  misc_RNA (1)...(19): siRNA sense strand
cuuauaggacugccaugaa

SEQ ID NO: 201205 - RNA, 19 nt, Homo sapiens
  misc_RNA (1)...(19): siRNA sense strand
caaagaguguccaaucauu

SEQ ID NO: 201206 - RNA, 19 nt, Homo sapiens
  misc_RNA (1)...(19): siRNA sense strand
uagcugaccugaauaaugu

SEQ ID NO: 201207 - RNA, 19 nt, Homo sapiens
  misc_RNA (1)...(19): siRNA sense strand
gcaugauucuauccaaauu

SEQ ID NO: 201208 - RNA, 19 nt, Homo sapiens
  misc_RNA (1)...(19): siRNA sense strand
ugaacuggcugcugaaugu

SEQ ID NO: 201209 - RNA, 19 nt, Homo sapiens
  misc_RNA (1)...(19): siRNA sense strand
gauauccugcagauuauua

SEQ ID NO: 201210 - RNA, 19 nt, Homo sapiens
  misc_RNA (1)...(19): siRNA sense strand
gagaagauguucgagacuu

SEQ ID NO: 201211 - RNA, 19 nt, Homo sapiens
  misc_RNA (1)...(19): siRNA sense strand
gcacuuuaauuaugacauc

SEQ ID NO: 201212 - RNA, 19 nt, Homo sapiens
  misc_RNA (1)...(19): siRNA sense strand
guaaagcacauuuggaaga

SEQ ID NO: 201213 - RNA, 19 nt, Homo sapiens
  misc_RNA (1)...(19): siRNA sense strand
gaauauugcacuccgacua

SEQ ID NO: 201214 - RNA, 19 nt, Homo sapiens
  misc_RNA (1)...(19): siRNA sense strand
uuauaggacugccaugaaa

SEQ ID NO: 201215 - RNA, 19 nt, Homo sapiens
  misc_RNA (1)...(19): siRNA sense strand
gggugaaguugcauccuuu

SEQ ID NO: 201216 - RNA, 19 nt, Homo sapiens
  misc_RNA (1)...(19): siRNA sense strand
gcaagagcacaacaauuug

SEQ ID NO: 201217 - RNA, 19 nt, Homo sapiens
  misc_RNA (1)...(19): siRNA sense strand
gcacaacaauuuggucaac

SEQ ID NO: 201218 - RNA, 19 nt, Homo sapiens
  misc_RNA (1)...(19): siRNA sense strand
agcaagagcacaacaauuu

SEQ ID NO: 201219 - RNA, 19 nt, Homo sapiens
  misc_RNA (1)...(19): siRNA sense strand
agaagauguucgagacuuu

SEQ ID NO: 201220 - RNA, 19 nt, Homo sapiens
  misc_RNA (1)...(19): siRNA sense strand
gagcaagagcacaacaauu

SEQ ID NO: 201221 - RNA, 19 nt, Homo sapiens
  misc_RNA (1)...(19): siRNA sense strand
ucaagcaaguggcaaguuc

SEQ ID NO: 201222 - RNA, 19 nt, Homo sapiens
  misc_RNA (1)...(19): siRNA sense strand
ccacgagacucaaacaacu

SEQ ID NO: 201223 - RNA, 19 nt, Homo sapiens
  misc_RNA (1)...(19): siRNA sense strand
cagcacaaccucaagcaaa

SEQ ID NO: 201224 - RNA, 19 nt, Homo sapiens
  misc_RNA (1)...(19): siRNA sense strand
gcaaagaguguccaaucau

SEQ ID NO: 201225 - RNA, 19 nt, Homo sapiens
  misc_RNA (1)...(19): siRNA sense strand
auggauauccugcagauua

SEQ ID NO: 201226 - RNA, 19 nt, Homo sapiens
  misc_RNA (1)...(19): siRNA sense strand
uguaacaucugcaaagagu

SEQ ID NO: 201227 - RNA, 19 nt, Homo sapiens
  misc_RNA (1)...(19): siRNA sense strand
guccggagcugcuuccaau

SEQ ID NO: 201228 - RNA, 19 nt, Homo sapiens
  misc_RNA (1)...(19): siRNA sense strand
gcaaguggcaaguucaaca

SEQ ID NO: 201229 - RNA, 19 nt, Homo sapiens
  misc_RNA (1)...(19): siRNA sense strand
gcuuccaauuugcuaauaa

SEQ ID NO: 201230 - RNA, 19 nt, Homo sapiens
  misc_RNA (1)...(19): siRNA sense strand
uggaagacaaguacagaua

SEQ ID NO: 201231 - RNA, 19 nt, Homo sapiens
  misc_RNA (1)...(19): siRNA sense strand
ggauccguguccugucuuu

SEQ ID NO: 201232 - RNA, 19 nt, Homo sapiens
  misc_RNA (1)...(19): siRNA sense strand
gucuuuagcugaccugaau

SEQ ID NO: 201233 - RNA, 19 nt, Homo sapiens
  misc_RNA (1)...(19): siRNA sense strand
gacaaguacagauaccuuu

SEQ ID NO: 201234 - RNA, 19 nt, Homo sapiens
  misc_RNA (1)...(19): siRNA sense strand
ccaagcaucaggccaaaug

SEQ ID NO: 201235 - RNA, 19 nt, Homo sapiens
  misc_RNA (1)...(19): siRNA sense strand
ggagcaagagcacaacaau

SEQ ID NO: 201236 - RNA, 19 nt, Homo sapiens
  misc_RNA (1)...(19): siRNA sense strand
guguaaagcacauuuggaa

SEQ ID NO: 201237 - RNA, 19 nt, Homo sapiens
  misc_RNA (1)...(19): siRNA sense strand
caagacaguugggugaagu

SEQ ID NO: 201238 - RNA, 19 nt, Homo sapiens
  misc_RNA (1)...(19): siRNA sense strand
gaagauguucgagacuuug

SEQ ID NO: 201239 - RNA, 19 nt, Homo sapiens
  misc_RNA (1)...(19): siRNA sense strand
gucagauucucagcuuaua

SEQ ID NO: 201240 - RNA, 19 nt, Homo sapiens
  misc_RNA (1)...(19): siRNA sense strand
uaacaucugcaaagagugu

SEQ ID NO: 201241 - RNA, 19 nt, Homo sapiens
  misc_RNA (1)...(19): siRNA sense strand
cggagcugcuuccaauuug

SEQ ID NO: 201242 - RNA, 19 nt, Homo sapiens
  misc_RNA (1)...(19): siRNA sense strand
gaagacaaguacagauacc

SEQ ID NO: 201243 - RNA, 19 nt, Homo sapiens
  misc_RNA (1)...(19): siRNA sense strand
ccauggauauccugcagau

SEQ ID NO: 201244 - RNA, 19 nt, Homo sapiens
  misc_RNA (1)...(19): siRNA sense strand
ggcaucauuucccugugua

SEQ ID NO: 201245 - RNA, 19 nt, Homo sapiens
  misc_RNA (1)...(19): siRNA sense strand
uggauauccugcagauuau

SEQ ID NO: 201246 - RNA, 19 nt, Homo sapiens
  misc_RNA (1)...(19): siRNA sense strand
ggaagacaaguacagauac

SEQ ID NO: 201247 - RNA, 19 nt, Homo sapiens
  misc_RNA (1)...(19): siRNA sense strand
ugcaaagaguguccaauca

SEQ ID NO: 201248 - RNA, 19 nt, Homo sapiens
  misc_RNA (1)...(19): siRNA sense strand
guggauaugugucugaacu

SEQ ID NO: 201249 - RNA, 19 nt, Homo sapiens
  misc_RNA (1)...(19): siRNA sense strand
acuggcugcugaauguuua

SEQ ID NO: 201250 - RNA, 19 nt, Homo sapiens
  misc_RNA (1)...(19): siRNA sense strand
acuaucccaugguggaaua

SEQ ID NO: 201251 - RNA, 19 nt, Homo sapiens
  misc_RNA (1)...(19): siRNA sense strand
ccggagcugcuuccaauuu

SEQ ID NO: 201252 - RNA, 19 nt, Homo sapiens
  misc_RNA (1)...(19): siRNA sense strand
ccaaauuccaagacaguug

SEQ ID NO: 201253 - RNA, 19 nt, Homo sapiens
  misc_RNA (1)...(19): siRNA sense strand
cagaaacugccaagcauca

SEQ ID NO: 201254 - RNA, 19 nt, Homo sapiens
  misc_RNA (1)...(19): siRNA sense strand
uaugacaucugccaaagcu

SEQ ID NO: 201255 - RNA, 19 nt, Homo sapiens
  misc_RNA (1)...(19): siRNA sense strand
aaugucagauucucagcuu

SEQ ID NO: 201256 - RNA, 19 nt, Homo sapiens
  misc_RNA (1)...(19): siRNA sense strand
ucgagacuuugccaaggua

SEQ ID NO: 201257 - RNA, 19 nt, Homo sapiens
  misc_RNA (1)...(19): siRNA sense strand
gcaaaaggccauaaaaugc

SEQ ID NO: 201258 - RNA, 19 nt, Homo sapiens
  misc_RNA (1)...(19): siRNA sense strand
cugcaugauucuauccaaa

SEQ ID NO: 201259 - RNA, 19 nt, Homo sapiens
  misc_RNA (1)...(19): siRNA sense strand
uaaagcacauuuggaagac

SEQ ID NO: 201260 - RNA, 19 nt, Homo sapiens
  misc_RNA (1)...(19): siRNA sense strand
acaggagucuaaagcacuu

SEQ ID NO: 201261 - RNA, 19 nt, Homo sapiens
  misc_RNA (1)...(19): siRNA sense strand
acagauaccuuuucaagca

SEQ ID NO: 201262 - RNA, 19 nt, Homo sapiens
  misc_RNA (1)...(19): siRNA sense strand
aagcacauuuggaagacaa

SEQ ID NO: 201263 - RNA, 19 nt, Homo sapiens
  misc_RNA (1)...(19): siRNA sense strand
gcuaauaauaagccagaga

SEQ ID NO: 201264 - RNA, 19 nt, Homo sapiens
  misc_RNA (1)...(19): siRNA sense strand
caagagcacaacaauuugg

SEQ ID NO: 201265 - RNA, 19 nt, Homo sapiens
  misc_RNA (1)...(19): siRNA sense strand
ccugucagcugcaugugau

SEQ ID NO: 201266 - RNA, 19 nt, Homo sapiens
  misc_RNA (1)...(19): siRNA sense strand
gcugcugaauguuuaugau

SEQ ID NO: 201267 - RNA, 19 nt, Homo sapiens
  misc_RNA (1)...(19): siRNA sense strand
acagagcucuaccagucuu

SEQ ID NO: 201268 - RNA, 19 nt, Homo sapiens
  misc_RNA (1)...(19): siRNA sense strand
acaguugggugaaguugca

SEQ ID NO: 201269 - RNA, 19 nt, Homo sapiens
  misc_RNA (1)...(19): siRNA sense strand
guuugaccacuauuuauga

SEQ ID NO: 201270 - RNA, 19 nt, Homo sapiens
  misc_RNA (1)...(19): siRNA sense strand
gcuuauaggacugccauga

SEQ ID NO: 201271 - RNA, 19 nt, Homo sapiens
  misc_RNA (1)...(19): siRNA sense strand
caucaggccaaauguaaca

SEQ ID NO: 201272 - RNA, 19 nt, Homo sapiens
  misc_RNA (1)...(19): siRNA sense strand
gauucuauccaaauuccaa

SEQ ID NO: 201273 - RNA, 19 nt, Homo sapiens
  misc_RNA (1)...(19): siRNA sense strand
ggcaaguucaacaggauuu

SEQ ID NO: 201274 - RNA, 19 nt, Homo sapiens
  misc_RNA (1)...(19): siRNA sense strand
gaacuggcugcugaauguu

SEQ ID NO: 201275 - RNA, 19 nt, Homo sapiens
  misc_RNA (1)...(19): siRNA sense strand
cugcugaauguuuaugaua

SEQ ID NO: 201276 - RNA, 19 nt, Homo sapiens
  misc_RNA (1)...(19): siRNA sense strand
aagcaucaggccaaaugua

SEQ ID NO: 201277 - RNA, 19 nt, Homo sapiens
  misc_RNA (1)...(19): siRNA sense strand
uggcaucauuucccugugu

SEQ ID NO: 201278 - RNA, 19 nt, Homo sapiens
  misc_RNA (1)...(19): siRNA sense strand
ccaugaaacuccgaagacu

SEQ ID NO: 201279 - RNA, 19 nt, Homo sapiens
  misc_RNA (1)...(19): siRNA sense strand
auaauaagccagagaucga

SEQ ID NO: 201280 - RNA, 19 nt, Homo sapiens
  misc_RNA (1)...(19): siRNA sense strand
cuaauaauaagccagagau

SEQ ID NO: 201281 - RNA, 19 nt, Homo sapiens
  misc_RNA (1)...(19): siRNA sense strand
ugggugaaguugcauccuu

SEQ ID NO: 201282 - RNA, 19 nt, Homo sapiens
  misc_RNA (1)...(19): siRNA sense strand
caucauuucccuguguaaa

SEQ ID NO: 201283 - RNA, 19 nt, Homo sapiens
  misc_RNA (1)...(19): siRNA sense strand
gcguggauaugugucugaa

SEQ ID NO: 201284 - RNA, 19 nt, Homo sapiens
  misc_RNA (1)...(19): siRNA sense strand
gcacuaucccaugguggaa

SEQ ID NO: 201285 - RNA, 19 nt, Homo sapiens
  misc_RNA (1)...(19): siRNA sense strand
gagccugucagcugcaugu

SEQ ID NO: 201286 - RNA, 19 nt, Homo sapiens
  misc_RNA (1)...(19): siRNA sense strand
guacagauaccuuuucaag

SEQ ID NO: 201287 - RNA, 19 nt, Homo sapiens
  misc_RNA (1)...(19): siRNA sense strand
gucccucucugcguggaua

SEQ ID NO: 201288 - RNA, 19 nt, Homo sapiens
  misc_RNA (1)...(19): siRNA sense strand
ggagcugcuuccaauuugc

SEQ ID NO: 201289 - RNA, 19 nt, Homo sapiens
  misc_RNA (1)...(19): siRNA sense strand
uuagcugaccugaauaaug

SEQ ID NO: 201290 - RNA, 19 nt, Homo sapiens
  misc_RNA (1)...(19): siRNA sense strand
guggcaaguucaacaggau

SEQ ID NO: 201291 - RNA, 19 nt, Homo sapiens
  misc_RNA (1)...(19): siRNA sense strand
acaacaauuuggucaacgu

SEQ ID NO: 201292 - RNA, 19 nt, Homo sapiens
  misc_RNA (1)...(19): siRNA sense strand
gacuacaucaggagaagau

SEQ ID NO: 201293 - RNA, 19 nt, Homo sapiens
  misc_RNA (1)...(19): siRNA sense strand
uaauaagccagagaucgaa

SEQ ID NO: 201294 - RNA, 19 nt, Homo sapiens
  misc_RNA (1)...(19): siRNA sense strand
ugucagauucucagcuuau

SEQ ID NO: 201295 - RNA, 19 nt, Homo sapiens
  misc_RNA (1)...(19): siRNA sense strand
ggauauccugcagauuauu

SEQ ID NO: 201296 - RNA, 19 nt, Homo sapiens
  misc_RNA (1)...(19): siRNA sense strand
agcaucaggccaaauguaa

SEQ ID NO: 201297 - RNA, 19 nt, Homo sapiens
  misc_RNA (1)...(19): siRNA sense strand
gcccuuugcuuggaucucu

SEQ ID NO: 201298 - RNA, 19 nt, Homo sapiens
  misc_RNA (1)...(19): siRNA sense strand
gcugaauguuuaugauacg

SEQ ID NO: 201299 - RNA, 19 nt, Homo sapiens
  misc_RNA (1)...(19): siRNA sense strand
agacuuugccaagguacua

SEQ ID NO: 201300 - RNA, 19 nt, Homo sapiens
  misc_RNA (1)...(19): siRNA sense strand
caagcaaguggcaaguuca

SEQ ID NO: 201301 - RNA, 19 nt, Homo sapiens
  misc_RNA (1)...(19): siRNA sense strand
agacaaguacagauaccuu

SEQ ID NO: 201302 - RNA, 19 nt, Homo sapiens
  misc_RNA (1)...(19): siRNA sense strand
gcaucauuucccuguguaa

SEQ ID NO: 201303 - RNA, 19 nt, Homo sapiens
  misc_RNA (1)...(19): siRNA sense strand
cugcaaagaguguccaauc

SEQ ID NO: 201304 - RNA, 19 nt, Homo sapiens
  misc_RNA (1)...(19): siRNA sense strand
cuuauaggacugccaugaa

SEQ ID NO: 201305 - RNA, 19 nt, Homo sapiens
  misc_RNA (1)...(19): siRNA sense strand
caaagaguguccaaucauu

SEQ ID NO: 201306 - RNA, 19 nt, Homo sapiens
  misc_RNA (1)...(19): siRNA sense strand
uagcugaccugaauaaugu

SEQ ID NO: 201307 - RNA, 19 nt, Homo sapiens
  misc_RNA (1)...(19): siRNA sense strand
gcaugauucuauccaaauu

SEQ ID NO: 201308 - RNA, 19 nt, Homo sapiens
  misc_RNA (1)...(19): siRNA sense strand
ugaacuggcugcugaaugu

SEQ ID NO: 201309 - RNA, 19 nt, Homo sapiens
  misc_RNA (1)...(19): siRNA sense strand
gauauccugcagauuauua

SEQ ID NO: 201310 - RNA, 19 nt, Homo sapiens
  misc_RNA (1)...(19): siRNA sense strand
gagaagauguucgagacuu

SEQ ID NO: 201311 - RNA, 19 nt, Homo sapiens
  misc_RNA (1)...(19): siRNA sense strand
gcacuuuaauuaugacauc

SEQ ID NO: 201312 - RNA, 19 nt, Homo sapiens
  misc_RNA (1)...(19): siRNA sense strand
guaaagcacauuuggaaga

SEQ ID NO: 201313 - RNA, 19 nt, Homo sapiens
  misc_RNA (1)...(19): siRNA sense strand
gaauauugcacuccgacua

SEQ ID NO: 201314 - RNA, 19 nt, Homo sapiens
  misc_RNA (1)...(19): siRNA sense strand
uuauaggacugccaugaaa

SEQ ID NO: 201315 - RNA, 19 nt, Homo sapiens
  misc_RNA (1)...(19): siRNA sense strand
gggugaaguugcauccuuu

SEQ ID NO: 201316 - RNA, 19 nt, Homo sapiens
  misc_RNA (1)...(19): siRNA sense strand
gcaagagcacaacaauuug

SEQ ID NO: 201317 - RNA, 19 nt, Homo sapiens
  misc_RNA (1)...(19): siRNA sense strand
gcacaacaauuuggucaac

SEQ ID NO: 201318 - RNA, 19 nt, Homo sapiens
  misc_RNA (1)...(19): siRNA sense strand
agcaagagcacaacaauuu

SEQ ID NO: 201319 - RNA, 19 nt, Homo sapiens
  misc_RNA (1)...(19): siRNA sense strand
agaagauguucgagacuuu

SEQ ID NO: 201320 - RNA, 19 nt, Homo sapiens
  misc_RNA (1)...(19): siRNA sense strand
gagcaagagcacaacaauu

SEQ ID NO: 201321 - RNA, 19 nt, Homo sapiens
  misc_RNA (1)...(19): siRNA sense strand
ucaagcaaguggcaaguuc

SEQ ID NO: 201322 - RNA, 19 nt, Homo sapiens
  misc_RNA (1)...(19): siRNA sense strand
ccacgagacucaaacaacu

SEQ ID NO: 201323 - RNA, 19 nt, Homo sapiens
  misc_RNA (1)...(19): siRNA sense strand
cagcacaaccucaagcaaa

SEQ ID NO: 201324 - RNA, 19 nt, Homo sapiens
  misc_RNA (1)...(19): siRNA sense strand
gcaaagaguguccaaucau

SEQ ID NO: 201325 - RNA, 19 nt, Homo sapiens
  misc_RNA (1)...(19): siRNA sense strand
auggauauccugcagauua

SEQ ID NO: 201326 - RNA, 19 nt, Homo sapiens
  misc_RNA (1)...(19): siRNA sense strand
uguaacaucugcaaagagu

SEQ ID NO: 201327 - RNA, 19 nt, Homo sapiens
  misc_RNA (1)...(19): siRNA sense strand
guccggagcugcuuccaau

SEQ ID NO: 201328 - RNA, 19 nt, Homo sapiens
  misc_RNA (1)...(19): siRNA sense strand
gcaaguggcaaguucaaca

SEQ ID NO: 201329 - RNA, 19 nt, Homo sapiens
  misc_RNA (1)...(19): siRNA sense strand
gcuuccaauuugcuaauaa

SEQ ID NO: 201330 - RNA, 19 nt, Homo sapiens
  misc_RNA (1)...(19): siRNA sense strand
uggaagacaaguacagaua

SEQ ID NO: 201331 - RNA, 19 nt, Homo sapiens
  misc_RNA (1)...(19): siRNA sense strand
ggauccguguccugucuuu

SEQ ID NO: 201332 - RNA, 19 nt, Homo sapiens
  misc_RNA (1)...(19): siRNA sense strand
gucuuuagcugaccugaau

SEQ ID NO: 201333 - RNA, 19 nt, Homo sapiens
  misc_RNA (1)...(19): siRNA sense strand
gacaaguacagauaccuuu

SEQ ID NO: 201334 - RNA, 19 nt, Homo sapiens
  misc_RNA (1)...(19): siRNA sense strand
ccaagcaucaggccaaaug

SEQ ID NO: 201335 - RNA, 19 nt, Homo sapiens
  misc_RNA (1)...(19): siRNA sense strand
ggagcaagagcacaacaau

SEQ ID NO: 201336 - RNA, 19 nt, Homo sapiens
  misc_RNA (1)...(19): siRNA sense strand
guguaaagcacauuuggaa

SEQ ID NO: 201337 - RNA, 19 nt, Homo sapiens
  misc_RNA (1)...(19): siRNA sense strand
caagacaguugggugaagu

SEQ ID NO: 201338 - RNA, 19 nt, Homo sapiens
  misc_RNA (1)...(19): siRNA sense strand
gaagauguucgagacuuug

SEQ ID NO: 201339 - RNA, 19 nt, Homo sapiens
  misc_RNA (1)...(19): siRNA sense strand
gucagauucucagcuuaua

SEQ ID NO: 201340 - RNA, 19 nt, Homo sapiens
  misc_RNA (1)...(19): siRNA sense strand
uaacaucugcaaagagugu

SEQ ID NO: 201341 - RNA, 19 nt, Homo sapiens
  misc_RNA (1)...(19): siRNA sense strand
cggagcugcuuccaauuug

SEQ ID NO: 201342 - RNA, 19 nt, Homo sapiens
  misc_RNA (1)...(19): siRNA sense strand
gaagacaaguacagauacc

SEQ ID NO: 201343 - RNA, 19 nt, Homo sapiens
  misc_RNA (1)...(19): siRNA sense strand
ccauggauauccugcagau

SEQ ID NO: 201344 - RNA, 19 nt, Homo sapiens
  misc_RNA (1)...(19): siRNA sense strand
ggcaucauuucccugugua

SEQ ID NO: 201345 - RNA, 19 nt, Homo sapiens
  misc_RNA (1)...(19): siRNA sense strand
uggauauccugcagauuau

SEQ ID NO: 201346 - RNA, 19 nt, Homo sapiens
  misc_RNA (1)...(19): siRNA sense strand
ggaagacaaguacagauac

SEQ ID NO: 201347 - RNA, 19 nt, Homo sapiens
  misc_RNA (1)...(19): siRNA sense strand
ugcaaagaguguccaauca

SEQ ID NO: 201348 - RNA, 19 nt, Homo sapiens
  misc_RNA (1)...(19): siRNA sense strand
guggauaugugucugaacu

SEQ ID NO: 201349 - RNA, 19 nt, Homo sapiens
  misc_RNA (1)...(19): siRNA sense strand
acuggcugcugaauguuua

SEQ ID NO: 201350 - RNA, 19 nt, Homo sapiens
  misc_RNA (1)...(19): siRNA sense strand
acuaucccaugguggaaua

SEQ ID NO: 201351 - RNA, 19 nt, Homo sapiens
  misc_RNA (1)...(19): siRNA sense strand
ccggagcugcuuccaauuu

SEQ ID NO: 201352 - RNA, 19 nt, Homo sapiens
  misc_RNA (1)...(19): siRNA sense strand
ccaaauuccaagacaguug

SEQ ID NO: 201353 - RNA, 19 nt, Homo sapiens
  misc_RNA (1)...(19): siRNA sense strand
cagaaacugccaagcauca

SEQ ID NO: 201354 - RNA, 19 nt, Homo sapiens
  misc_RNA (1)...(19): siRNA sense strand
uaugacaucugccaaagcu

SEQ ID NO: 201355 - RNA, 19 nt, Homo sapiens
  misc_RNA (1)...(19): siRNA sense strand
aaugucagauucucagcuu

SEQ ID NO: 201356 - RNA, 19 nt, Homo sapiens
  misc_RNA (1)...(19): siRNA sense strand
ucgagacuuugccaaggua

SEQ ID NO: 201357 - RNA, 19 nt, Homo sapiens
  misc_RNA (1)...(19): siRNA sense strand
gcaaaaggccauaaaaugc

SEQ ID NO: 201358 - RNA, 19 nt, Homo sapiens
  misc_RNA (1)...(19): siRNA sense strand
cugcaugauucuauccaaa

SEQ ID NO: 201359 - RNA, 19 nt, Homo sapiens
  misc_RNA (1)...(19): siRNA sense strand
uaaagcacauuuggaagac

SEQ ID NO: 201360 - RNA, 19 nt, Homo sapiens
  misc_RNA (1)...(19): siRNA sense strand
acaggagucuaaagcacuu

SEQ ID NO: 201361 - RNA, 19 nt, Homo sapiens
  misc_RNA (1)...(19): siRNA sense strand
acagauaccuuuucaagca

SEQ ID NO: 201362 - RNA, 19 nt, Homo sapiens
  misc_RNA (1)...(19): siRNA sense strand
aagcacauuuggaagacaa

SEQ ID NO: 201363 - RNA, 19 nt, Homo sapiens
  misc_RNA (1)...(19): siRNA sense strand
gcuaauaauaagccagaga

SEQ ID NO: 201364 - RNA, 19 nt, Homo sapiens
  misc_RNA (1)...(19): siRNA sense strand
caagagcacaacaauuugg

SEQ ID NO: 201365 - RNA, 19 nt, Homo sapiens
  misc_RNA (1)...(19): siRNA sense strand
ccugucagcugcaugugau

SEQ ID NO: 201366 - RNA, 19 nt, Homo sapiens
  misc_RNA (1)...(19): siRNA sense strand
gcugcugaauguuuaugau

SEQ ID NO: 201367 - RNA, 19 nt, Homo sapiens
  misc_RNA (1)...(19): siRNA sense strand
acagagcucuaccagucuu

SEQ ID NO: 201368 - RNA, 19 nt, Homo sapiens
  misc_RNA (1)...(19): siRNA sense strand
acaguugggugaaguugca

SEQ ID NO: 201369 - RNA, 19 nt, Homo sapiens
  misc_RNA (1)...(19): siRNA sense strand
guuugaccacuauuuauga

SEQ ID NO: 201370 - RNA, 19 nt, Homo sapiens
  misc_RNA (1)...(19): siRNA sense strand
gcuuauaggacugccauga

SEQ ID NO: 201371 - RNA, 19 nt, Homo sapiens
  misc_RNA (1)...(19): siRNA sense strand
caucaggccaaauguaaca

SEQ ID NO: 201372 - RNA, 19 nt, Homo sapiens
  misc_RNA (1)...(19): siRNA sense strand
gauucuauccaaauuccaa

SEQ ID NO: 201373 - RNA, 19 nt, Homo sapiens
  misc_RNA (1)...(19): siRNA sense strand
ggcaaguucaacaggauuu

SEQ ID NO: 201374 - RNA, 19 nt, Homo sapiens
  misc_RNA (1)...(19): siRNA sense strand
gaacuggcugcugaauguu

SEQ ID NO: 201375 - RNA, 19 nt, Homo sapiens
  misc_RNA (1)...(19): siRNA sense strand
cugcugaauguuuaugaua

SEQ ID NO: 201376 - RNA, 19 nt, Homo sapiens
  misc_RNA (1)...(19): siRNA sense strand
aagcaucaggccaaaugua

SEQ ID NO: 201377 - RNA, 19 nt, Homo sapiens
  misc_RNA (1)...(19): siRNA sense strand
uggcaucauuucccugugu

SEQ ID NO: 201378 - RNA, 19 nt, Homo sapiens
  misc_RNA (1)...(19): siRNA sense strand
ccaugaaacuccgaagacu

SEQ ID NO: 201379 - RNA, 19 nt, Homo sapiens
  misc_RNA (1)...(19): siRNA sense strand
auaauaagccagagaucga

SEQ ID NO: 201380 - RNA, 19 nt, Homo sapiens
  misc_RNA (1)...(19): siRNA sense strand
cuaauaauaagccagagau

SEQ ID NO: 201381 - RNA, 19 nt, Homo sapiens
  misc_RNA (1)...(19): siRNA sense strand
ugggugaaguugcauccuu

SEQ ID NO: 201382 - RNA, 19 nt, Homo sapiens
  misc_RNA (1)...(19): siRNA sense strand
caucauuucccuguguaaa

SEQ ID NO: 201383 - RNA, 19 nt, Homo sapiens
  misc_RNA (1)...(19): siRNA sense strand
gcguggauaugugucugaa

SEQ ID NO: 201384 - RNA, 19 nt, Homo sapiens
  misc_RNA (1)...(19): siRNA sense strand
gcacuaucccaugguggaa

SEQ ID NO: 201385 - RNA, 19 nt, Homo sapiens
  misc_RNA (1)...(19): siRNA sense strand
gagccugucagcugcaugu

SEQ ID NO: 201386 - RNA, 19 nt, Homo sapiens
  misc_RNA (1)...(19): siRNA sense strand
guacagauaccuuuucaag

SEQ ID NO: 201387 - RNA, 19 nt, Homo sapiens
  misc_RNA (1)...(19): siRNA sense strand
gucccucucugcguggaua

SEQ ID NO: 201388 - RNA, 19 nt, Homo sapiens
  misc_RNA (1)...(19): siRNA sense strand
ggagcugcuuccaauuugc

SEQ ID NO: 201389 - RNA, 19 nt, Homo sapiens
  misc_RNA (1)...(19): siRNA sense strand
uuagcugaccugaauaaug

SEQ ID NO: 201390 - RNA, 19 nt, Homo sapiens
  misc_RNA (1)...(19): siRNA sense strand
guggcaaguucaacaggau

SEQ ID NO: 201391 - RNA, 19 nt, Homo sapiens
  misc_RNA (1)...(19): siRNA sense strand
acaacaauuuggucaacgu

SEQ ID NO: 201392 - RNA, 19 nt, Homo sapiens
  misc_RNA (1)...(19): siRNA sense strand
gacuacaucaggagaagau

SEQ ID NO: 201393 - RNA, 19 nt, Homo sapiens
  misc_RNA (1)...(19): siRNA sense strand
uaauaagccagagaucgaa

SEQ ID NO: 201394 - RNA, 19 nt, Homo sapiens
  misc_RNA (1)...(19): siRNA sense strand
ugucagauucucagcuuau

SEQ ID NO: 201395 - RNA, 19 nt, Homo sapiens
  misc_RNA (1)...(19): siRNA sense strand
ggauauccugcagauuauu

SEQ ID NO: 201396 - RNA, 19 nt, Homo sapiens
  misc_RNA (1)...(19): siRNA sense strand
agcaucaggccaaauguaa

SEQ ID NO: 201397 - RNA, 19 nt, Homo sapiens
  misc_RNA (1)...(19): siRNA sense strand
gcccuuugcuuggaucucu

SEQ ID NO: 201398 - RNA, 19 nt, Homo sapiens
  misc_RNA (1)...(19): siRNA sense strand
gcugaauguuuaugauacg

SEQ ID NO: 201399 - RNA, 19 nt, Homo sapiens
  misc_RNA (1)...(19): siRNA sense strand
agacuuugccaagguacua

SEQ ID NO: 201400 - RNA, 19 nt, Homo sapiens
  misc_RNA (1)...(19): siRNA sense strand
caagcaaguggcaaguuca

SEQ ID NO: 201401 - RNA, 19 nt, Homo sapiens
  misc_RNA (1)...(19): siRNA sense strand
agacaaguacagauaccuu

SEQ ID NO: 201402 - RNA, 19 nt, Homo sapiens
  misc_RNA (1)...(19): siRNA sense strand
gcaucauuucccuguguaa

SEQ ID NO: 201403 - RNA, 19 nt, Homo sapiens
  misc_RNA (1)...(19): siRNA sense strand
cugcaaagaguguccaauc

SEQ ID NO: 201404 - RNA, 19 nt, Homo sapiens
  misc_RNA (1)...(19): siRNA sense strand
cuuauaggacugccaugaa

SEQ ID NO: 201405 - RNA, 19 nt, Homo sapiens
  misc_RNA (1)...(19): siRNA sense strand
caaagaguguccaaucauu

SEQ ID NO: 201406 - RNA, 19 nt, Homo sapiens
  misc_RNA (1)...(19): siRNA sense strand
uagcugaccugaauaaugu

SEQ ID NO: 201407 - RNA, 19 nt, Homo sapiens
  misc_RNA (1)...(19): siRNA sense strand
gcaugauucuauccaaauu

SEQ ID NO: 201408 - RNA, 19 nt, Homo sapiens
  misc_RNA (1)...(19): siRNA sense strand
ugaacuggcugcugaaugu

SEQ ID NO: 201409 - RNA, 19 nt, Homo sapiens
  misc_RNA (1)...(19): siRNA sense strand
gauauccugcagauuauua

SEQ ID NO: 201410 - RNA, 19 nt, Homo sapiens
  misc_RNA (1)...(19): siRNA sense strand
gagaagauguucgagacuu

SEQ ID NO: 201411 - RNA, 19 nt, Homo sapiens
  misc_RNA (1)...(19): siRNA sense strand
gcacuuuaauuaugacauc

SEQ ID NO: 201412 - RNA, 19 nt, Homo sapiens
  misc_RNA (1)...(19): siRNA sense strand
guaaagcacauuuggaaga

SEQ ID NO: 201413 - RNA, 19 nt, Homo sapiens
  misc_RNA (1)...(19): siRNA sense strand
gaauauugcacuccgacua

SEQ ID NO: 201414 - RNA, 19 nt, Homo sapiens
  misc_RNA (1)...(19): siRNA sense strand
uuauaggacugccaugaaa

SEQ ID NO: 201415 - RNA, 19 nt, Homo sapiens
  misc_RNA (1)...(19): siRNA sense strand
gggugaaguugcauccuuu

SEQ ID NO: 201416 - RNA, 19 nt, Homo sapiens
  misc_RNA (1)...(19): siRNA sense strand
gcaagagcacaacaauuug

SEQ ID NO: 201417 - RNA, 19 nt, Homo sapiens
  misc_RNA (1)...(19): siRNA sense strand
gcacaacaauuuggucaac

SEQ ID NO: 201418 - RNA, 19 nt, Homo sapiens
  misc_RNA (1)...(19): siRNA sense strand
agcaagagcacaacaauuu

SEQ ID NO: 201419 - RNA, 19 nt, Homo sapiens
  misc_RNA (1)...(19): siRNA sense strand
agaagauguucgagacuuu

SEQ ID NO: 201420 - RNA, 19 nt, Homo sapiens
  misc_RNA (1)...(19): siRNA sense strand
gagcaagagcacaacaauu

SEQ ID NO: 201421 - RNA, 19 nt, Homo sapiens
  misc_RNA (1)...(19): siRNA sense strand
ucaagcaaguggcaaguuc

SEQ ID NO: 201422 - RNA, 19 nt, Homo sapiens
  misc_RNA (1)...(19): siRNA sense strand
ccacgagacucaaacaacu

SEQ ID NO: 201423 - RNA, 19 nt, Homo sapiens
  misc_RNA (1)...(19): siRNA sense strand
cagcacaaccucaagcaaa

SEQ ID NO: 201424 - RNA, 19 nt, Homo sapiens
  misc_RNA (1)...(19): siRNA sense strand
gcaaagaguguccaaucau

SEQ ID NO: 201425 - RNA, 19 nt, Homo sapiens
  misc_RNA (1)...(19): siRNA sense strand
auggauauccugcagauua

SEQ ID NO: 201426 - RNA, 19 nt, Homo sapiens
  misc_RNA (1)...(19): siRNA sense strand
uguaacaucugcaaagagu

SEQ ID NO: 201427 - RNA, 19 nt, Homo sapiens
  misc_RNA (1)...(19): siRNA sense strand
guccggagcugcuuccaau

SEQ ID NO: 201428 - RNA, 19 nt, Homo sapiens
  misc_RNA (1)...(19): siRNA sense strand
gcaaguggcaaguucaaca

SEQ ID NO: 201429 - RNA, 19 nt, Homo sapiens
  misc_RNA (1)...(19): siRNA sense strand
gcuuccaauuugcuaauaa

SEQ ID NO: 201430 - RNA, 19 nt, Homo sapiens
  misc_RNA (1)...(19): siRNA sense strand
uggaagacaaguacagaua

SEQ ID NO: 201431 - RNA, 19 nt, Homo sapiens
  misc_RNA (1)...(19): siRNA sense strand
ggauccguguccugucuuu

SEQ ID NO: 201432 - RNA, 19 nt, Homo sapiens
  misc_RNA (1)...(19): siRNA sense strand
gucuuuagcugaccugaau

SEQ ID NO: 201433 - RNA, 19 nt, Homo sapiens
  misc_RNA (1)...(19): siRNA sense strand
gacaaguacagauaccuuu

SEQ ID NO: 201434 - RNA, 19 nt, Homo sapiens
  misc_RNA (1)...(19): siRNA sense strand
ccaagcaucaggccaaaug

SEQ ID NO: 201435 - RNA, 19 nt, Homo sapiens
  misc_RNA (1)...(19): siRNA sense strand
ggagcaagagcacaacaau

SEQ ID NO: 201436 - RNA, 19 nt, Homo sapiens
  misc_RNA (1)...(19): siRNA sense strand
guguaaagcacauuuggaa

SEQ ID NO: 201437 - RNA, 19 nt, Homo sapiens
  misc_RNA (1)...(19): siRNA sense strand
caagacaguugggugaagu

SEQ ID NO: 201438 - RNA, 19 nt, Homo sapiens
  misc_RNA (1)...(19): siRNA sense strand
gaagauguucgagacuuug

SEQ ID NO: 201439 - RNA, 19 nt, Homo sapiens
  misc_RNA (1)...(19): siRNA sense strand
gucagauucucagcuuaua

SEQ ID NO: 201440 - RNA, 19 nt, Homo sapiens
  misc_RNA (1)...(19): siRNA sense strand
uaacaucugcaaagagugu

SEQ ID NO: 201441 - RNA, 19 nt, Homo sapiens
  misc_RNA (1)...(19): siRNA sense strand
cggagcugcuuccaauuug

SEQ ID NO: 201442 - RNA, 19 nt, Homo sapiens
  misc_RNA (1)...(19): siRNA sense strand
gaagacaaguacagauacc

SEQ ID NO: 201443 - RNA, 19 nt, Homo sapiens
  misc_RNA (1)...(19): siRNA sense strand
ccauggauauccugcagau

SEQ ID NO: 201444 - RNA, 19 nt, Homo sapiens
  misc_RNA (1)...(19): siRNA sense strand
ggcaucauuucccugugua

SEQ ID NO: 201445 - RNA, 19 nt, Homo sapiens
  misc_RNA (1)...(19): siRNA sense strand
uggauauccugcagauuau

SEQ ID NO: 201446 - RNA, 19 nt, Homo sapiens
  misc_RNA (1)...(19): siRNA sense strand
ggaagacaaguacagauac

SEQ ID NO: 201447 - RNA, 19 nt, Homo sapiens
  misc_RNA (1)...(19): siRNA sense strand
ugcaaagaguguccaauca

SEQ ID NO: 201448 - RNA, 19 nt, Homo sapiens
  misc_RNA (1)...(19): siRNA sense strand
guggauaugugucugaacu

SEQ ID NO: 201449 - RNA, 19 nt, Homo sapiens
  misc_RNA (1)...(19): siRNA sense strand
acuggcugcugaauguuua

SEQ ID NO: 201450 - RNA, 19 nt, Homo sapiens
  misc_RNA (1)...(19): siRNA sense strand
acuaucccaugguggaaua

SEQ ID NO: 201451 - RNA, 19 nt, Homo sapiens
  misc_RNA (1)...(19): siRNA sense strand
ccggagcugcuuccaauuu

SEQ ID NO: 201452 - RNA, 19 nt, Homo sapiens
  misc_RNA (1)...(19): siRNA sense strand
ccaaauuccaagacaguug

SEQ ID NO: 201453 - RNA, 19 nt, Homo sapiens
  misc_RNA (1)...(19): siRNA sense strand
cagaaacugccaagcauca

SEQ ID NO: 201454 - RNA, 19 nt, Homo sapiens
  misc_RNA (1)...(19): siRNA sense strand
uaugacaucugccaaagcu

SEQ ID NO: 201455 - RNA, 19 nt, Homo sapiens
  misc_RNA (1)...(19): siRNA sense strand
aaugucagauucucagcuu

SEQ ID NO: 201456 - RNA, 19 nt, Homo sapiens
  misc_RNA (1)...(19): siRNA sense strand
ucgagacuuugccaaggua

SEQ ID NO: 201457 - RNA, 19 nt, Homo sapiens
  misc_RNA (1)...(19): siRNA sense strand
gcaaaaggccauaaaaugc

SEQ ID NO: 201458 - RNA, 19 nt, Homo sapiens
  misc_RNA (1)...(19): siRNA sense strand
cugcaugauucuauccaaa

SEQ ID NO: 201459 - RNA, 19 nt, Homo sapiens
  misc_RNA (1)...(19): siRNA sense strand
uaaagcacauuuggaagac

SEQ ID NO: 201460 - RNA, 19 nt, Homo sapiens
  misc_RNA (1)...(19): siRNA sense strand
acaggagucuaaagcacuu

SEQ ID NO: 201461 - RNA, 19 nt, Homo sapiens
  misc_RNA (1)...(19): siRNA sense strand
acagauaccuuuucaagca

SEQ ID NO: 201462 - RNA, 19 nt, Homo sapiens
  misc_RNA (1)...(19): siRNA sense strand
aagcacauuuggaagacaa

SEQ ID NO: 201463 - RNA, 19 nt, Homo sapiens
  misc_RNA (1)...(19): siRNA sense strand
gcuaauaauaagccagaga

SEQ ID NO: 201464 - RNA, 19 nt, Homo sapiens
  misc_RNA (1)...(19): siRNA sense strand
caagagcacaacaauuugg

SEQ ID NO: 201465 - RNA, 19 nt, Homo sapiens
  misc_RNA (1)...(19): siRNA sense strand
ccugucagcugcaugugau

SEQ ID NO: 201466 - RNA, 19 nt, Homo sapiens
  misc_RNA (1)...(19): siRNA sense strand
gcugcugaauguuuaugau

SEQ ID NO: 201467 - RNA, 19 nt, Homo sapiens
  misc_RNA (1)...(19): siRNA sense strand
acagagcucuaccagucuu

SEQ ID NO: 201468 - RNA, 19 nt, Homo sapiens
  misc_RNA (1)...(19): siRNA sense strand
acaguugggugaaguugca

SEQ ID NO: 201469 - RNA, 19 nt, Homo sapiens
  misc_RNA (1)...(19): siRNA sense strand
guuugaccacuauuuauga

SEQ ID NO: 201470 - RNA, 19 nt, Homo sapiens
  misc_RNA (1)...(19): siRNA sense strand
gcuuauaggacugccauga

SEQ ID NO: 201471 - RNA, 19 nt, Homo sapiens
  misc_RNA (1)...(19): siRNA sense strand
caucaggccaaauguaaca

SEQ ID NO: 201472 - RNA, 19 nt, Homo sapiens
  misc_RNA (1)...(19): siRNA sense strand
gauucuauccaaauuccaa

SEQ ID NO: 201473 - RNA, 19 nt, Homo sapiens
  misc_RNA (1)...(19): siRNA sense strand
ggcaaguucaacaggauuu

SEQ ID NO: 201474 - RNA, 19 nt, Homo sapiens
  misc_RNA (1)...(19): siRNA sense strand
gaacuggcugcugaauguu

SEQ ID NO: 201475 - RNA, 19 nt, Homo sapiens
  misc_RNA (1)...(19): siRNA sense strand
cugcugaauguuuaugaua

SEQ ID NO: 201476 - RNA, 19 nt, Homo sapiens
  misc_RNA (1)...(19): siRNA sense strand
aagcaucaggccaaaugua

SEQ ID NO: 201477 - RNA, 19 nt, Homo sapiens
  misc_RNA (1)...(19): siRNA sense strand
uggcaucauuucccugugu

SEQ ID NO: 201478 - RNA, 19 nt, Homo sapiens
  misc_RNA (1)...(19): siRNA sense strand
ccaugaaacuccgaagacu

SEQ ID NO: 201479 - RNA, 19 nt, Homo sapiens
  misc_RNA (1)...(19): siRNA sense strand
auaauaagccagagaucga

SEQ ID NO: 201480 - RNA, 19 nt, Homo sapiens
  misc_RNA (1)...(19): siRNA sense strand
cuaauaauaagccagagau

SEQ ID NO: 201481 - RNA, 19 nt, Homo sapiens
  misc_RNA (1)...(19): siRNA sense strand
ugggugaaguugcauccuu

SEQ ID NO: 201482 - RNA, 19 nt, Homo sapiens
  misc_RNA (1)...(19): siRNA sense strand
caucauuucccuguguaaa

SEQ ID NO: 201483 - RNA, 19 nt, Homo sapiens
  misc_RNA (1)...(19): siRNA sense strand
gcguggauaugugucugaa

SEQ ID NO: 201484 - RNA, 19 nt, Homo sapiens
  misc_RNA (1)...(19): siRNA sense strand
gcacuaucccaugguggaa

SEQ ID NO: 201485 - RNA, 19 nt, Homo sapiens
  misc_RNA (1)...(19): siRNA sense strand
gagccugucagcugcaugu

SEQ ID NO: 201486 - RNA, 19 nt, Homo sapiens
  misc_RNA (1)...(19): siRNA sense strand
guacagauaccuuuucaag

SEQ ID NO: 201487 - RNA, 19 nt, Homo sapiens
  misc_RNA (1)...(19): siRNA sense strand
gucccucucugcguggaua

SEQ ID NO: 201488 - RNA, 19 nt, Homo sapiens
  misc_RNA (1)...(19): siRNA sense strand
ggagcugcuuccaauuugc

SEQ ID NO: 201489 - RNA, 19 nt, Homo sapiens
  misc_RNA (1)...(19): siRNA sense strand
uuagcugaccugaauaaug

SEQ ID NO: 201490 - RNA, 19 nt, Homo sapiens
  misc_RNA (1)...(19): siRNA sense strand
guggcaaguucaacaggau

SEQ ID NO: 201491 - RNA, 19 nt, Homo sapiens
  misc_RNA (1)...(19): siRNA sense strand
acaacaauuuggucaacgu

SEQ ID NO: 201492 - RNA, 19 nt, Homo sapiens
  misc_RNA (1)...(19): siRNA sense strand
gacuacaucaggagaagau

SEQ ID NO: 201493 - RNA, 19 nt, Homo sapiens
  misc_RNA (1)...(19): siRNA sense strand
uaauaagccagagaucgaa

SEQ ID NO: 201494 - RNA, 19 nt, Homo sapiens
  misc_RNA (1)...(19): siRNA sense strand
ugucagauucucagcuuau

SEQ ID NO: 201495 - RNA, 19 nt, Homo sapiens
  misc_RNA (1)...(19): siRNA sense strand
ggauauccugcagauuauu

SEQ ID NO: 201496 - RNA, 19 nt, Homo sapiens
  misc_RNA (1)...(19): siRNA sense strand
agcaucaggccaaauguaa

SEQ ID NO: 201497 - RNA, 19 nt, Homo sapiens
  misc_RNA (1)...(19): siRNA sense strand
gcccuuugcuuggaucucu

SEQ ID NO: 201498 - RNA, 19 nt, Homo sapiens
  misc_RNA (1)...(19): siRNA sense strand
gcugaauguuuaugauacg

SEQ ID NO: 201499 - RNA, 19 nt, Homo sapiens
  misc_RNA (1)...(19): siRNA sense strand
agacuuugccaagguacua

SEQ ID NO: 201500 - RNA, 19 nt, Homo sapiens
  misc_RNA (1)...(19): siRNA sense strand
caagcaaguggcaaguuca

SEQ ID NO: 201501 - RNA, 19 nt, Homo sapiens
  misc_RNA (1)...(19): siRNA sense strand
agacaaguacagauaccuu

SEQ ID NO: 201502 - RNA, 19 nt, Homo sapiens
  misc_RNA (1)...(19): siRNA sense strand
gcaucauuucccuguguaa

SEQ ID NO: 201503 - RNA, 19 nt, Homo sapiens
  misc_RNA (1)...(19): siRNA sense strand
cugcaaagaguguccaauc

SEQ ID NO: 201504 - RNA, 19 nt, Homo sapiens
  misc_RNA (1)...(19): siRNA sense strand
cuuauaggacugccaugaa

SEQ ID NO: 201505 - RNA, 19 nt, Homo sapiens
  misc_RNA (1)...(19): siRNA sense strand
caaagaguguccaaucauu

SEQ ID NO: 201506 - RNA, 19 nt, Homo sapiens
  misc_RNA (1)...(19): siRNA sense strand
uagcugaccugaauaaugu

SEQ ID NO: 201507 - RNA, 19 nt, Homo sapiens
  misc_RNA (1)...(19): siRNA sense strand
gcaugauucuauccaaauu

SEQ ID NO: 201508 - RNA, 19 nt, Homo sapiens
  misc_RNA (1)...(19): siRNA sense strand
ugaacuggcugcugaaugu

SEQ ID NO: 201509 - RNA, 19 nt, Homo sapiens
  misc_RNA (1)...(19): siRNA sense strand
gauauccugcagauuauua

SEQ ID NO: 201510 - RNA, 19 nt, Homo sapiens
  misc_RNA (1)...(19): siRNA sense strand
gagaagauguucgagacuu

SEQ ID NO: 201511 - RNA, 19 nt, Homo sapiens
  misc_RNA (1)...(19): siRNA sense strand
gcacuuuaauuaugacauc

SEQ ID NO: 201512 - RNA, 19 nt, Homo sapiens
  misc_RNA (1)...(19): siRNA sense strand
guaaagcacauuuggaaga

SEQ ID NO: 201513 - RNA, 19 nt, Homo sapiens
  misc_RNA (1)...(19): siRNA sense strand
gaauauugcacuccgacua

SEQ ID NO: 201514 - RNA, 19 nt, Homo sapiens
  misc_RNA (1)...(19): siRNA sense strand
uuauaggacugccaugaaa

SEQ ID NO: 201515 - RNA, 19 nt, Homo sapiens
  misc_RNA (1)...(19): siRNA sense strand
gggugaaguugcauccuuu

SEQ ID NO: 201516 - RNA, 19 nt, Homo sapiens
  misc_RNA (1)...(19): siRNA sense strand
gcaagagcacaacaauuug

SEQ ID NO: 201517 - RNA, 19 nt, Homo sapiens
  misc_RNA (1)...(19): siRNA sense strand
gcacaacaauuuggucaac

SEQ ID NO: 201518 - RNA, 19 nt, Homo sapiens
  misc_RNA (1)...(19): siRNA sense strand
agcaagagcacaacaauuu

SEQ ID NO: 201519 - RNA, 19 nt, Homo sapiens
  misc_RNA (1)...(19): siRNA sense strand
agaagauguucgagacuuu

SEQ ID NO: 201520 - RNA, 19 nt, Homo sapiens
  misc_RNA (1)...(19): siRNA sense strand
gagcaagagcacaacaauu

SEQ ID NO: 201521 - RNA, 19 nt, Homo sapiens
  misc_RNA (1)...(19): siRNA sense strand
ucaagcaaguggcaaguuc

SEQ ID NO: 201522 - RNA, 19 nt, Homo sapiens
  misc_RNA (1)...(19): siRNA sense strand
ccacgagacucaaacaacu

SEQ ID NO: 201523 - RNA, 19 nt, Homo sapiens
  misc_RNA (1)...(19): siRNA sense strand
cagcacaaccucaagcaaa

SEQ ID NO: 201524 - RNA, 19 nt, Homo sapiens
  misc_RNA (1)...(19): siRNA sense strand
gcaaagaguguccaaucau

SEQ ID NO: 201525 - RNA, 19 nt, Homo sapiens
  misc_RNA (1)...(19): siRNA sense strand
auggauauccugcagauua

SEQ ID NO: 201526 - RNA, 19 nt, Homo sapiens
  misc_RNA (1)...(19): siRNA sense strand
uguaacaucugcaaagagu

SEQ ID NO: 201527 - RNA, 19 nt, Homo sapiens
  misc_RNA (1)...(19): siRNA sense strand
guccggagcugcuuccaau

SEQ ID NO: 201528 - RNA, 19 nt, Homo sapiens
  misc_RNA (1)...(19): siRNA sense strand
gcaaguggcaaguucaaca

SEQ ID NO: 201529 - RNA, 19 nt, Homo sapiens
  misc_RNA (1)...(19): siRNA sense strand
gcuuccaauuugcuaauaa

SEQ ID NO: 201530 - RNA, 19 nt, Homo sapiens
  misc_RNA (1)...(19): siRNA sense strand
uggaagacaaguacagaua

SEQ ID NO: 201531 - RNA, 19 nt, Homo sapiens
  misc_RNA (1)...(19): siRNA sense strand
ggauccguguccugucuuu

SEQ ID NO: 201532 - RNA, 19 nt, Homo sapiens
  misc_RNA (1)...(19): siRNA sense strand
gucuuuagcugaccugaau

SEQ ID NO: 201533 - RNA, 19 nt, Homo sapiens
  misc_RNA (1)...(19): siRNA sense strand
gacaaguacagauaccuuu

SEQ ID NO: 201534 - RNA, 19 nt, Homo sapiens
  misc_RNA (1)...(19): siRNA sense strand
ccaagcaucaggccaaaug

SEQ ID NO: 201535 - RNA, 19 nt, Homo sapiens
  misc_RNA (1)...(19): siRNA sense strand
ggagcaagagcacaacaau

SEQ ID NO: 201536 - RNA, 19 nt, Homo sapiens
  misc_RNA (1)...(19): siRNA sense strand
guguaaagcacauuuggaa

SEQ ID NO: 201537 - RNA, 19 nt, Homo sapiens
  misc_RNA (1)...(19): siRNA sense strand
caagacaguugggugaagu

SEQ ID NO: 201538 - RNA, 19 nt, Homo sapiens
  misc_RNA (1)...(19): siRNA sense strand
gaagauguucgagacuuug

SEQ ID NO: 201539 - RNA, 19 nt, Homo sapiens
  misc_RNA (1)...(19): siRNA sense strand
gucagauucucagcuuaua

SEQ ID NO: 201540 - RNA, 19 nt, Homo sapiens
  misc_RNA (1)...(19): siRNA sense strand
uaacaucugcaaagagugu

SEQ ID NO: 201541 - RNA, 19 nt, Homo sapiens
  misc_RNA (1)...(19): siRNA sense strand
cggagcugcuuccaauuug

SEQ ID NO: 201542 - RNA, 19 nt, Homo sapiens
  misc_RNA (1)...(19): siRNA sense strand
gaagacaaguacagauacc

SEQ ID NO: 201543 - RNA, 19 nt, Homo sapiens
  misc_RNA (1)...(19): siRNA sense strand
ccauggauauccugcagau

SEQ ID NO: 201544 - RNA, 19 nt, Homo sapiens
  misc_RNA (1)...(19): siRNA sense strand
ggcaucauuucccugugua

SEQ ID NO: 201545 - RNA, 19 nt, Homo sapiens
  misc_RNA (1)...(19): siRNA sense strand
uggauauccugcagauuau

SEQ ID NO: 201546 - RNA, 19 nt, Homo sapiens
  misc_RNA (1)...(19): siRNA sense strand
ggaagacaaguacagauac

SEQ ID NO: 201547 - RNA, 19 nt, Homo sapiens
  misc_RNA (1)...(19): siRNA sense strand
ugcaaagaguguccaauca

SEQ ID NO: 201548 - RNA, 19 nt, Homo sapiens
  misc_RNA (1)...(19): siRNA sense strand
guggauaugugucugaacu

SEQ ID NO: 201549 - RNA, 19 nt, Homo sapiens
  misc_RNA (1)...(19): siRNA sense strand
acuggcugcugaauguuua

SEQ ID NO: 201550 - RNA, 19 nt, Homo sapiens
  misc_RNA (1)...(19): siRNA sense strand
acuaucccaugguggaaua

SEQ ID NO: 201551 - RNA, 19 nt, Homo sapiens
  misc_RNA (1)...(19): siRNA sense strand
ccggagcugcuuccaauuu

SEQ ID NO: 201552 - RNA, 19 nt, Homo sapiens
  misc_RNA (1)...(19): siRNA sense strand
ccaaauuccaagacaguug

SEQ ID NO: 201553 - RNA, 19 nt, Homo sapiens
  misc_RNA (1)...(19): siRNA sense strand
cagaaacugccaagcauca

SEQ ID NO: 201554 - RNA, 19 nt, Homo sapiens
  misc_RNA (1)...(19): siRNA sense strand
uaugacaucugccaaagcu

SEQ ID NO: 201555 - RNA, 19 nt, Homo sapiens
  misc_RNA (1)...(19): siRNA sense strand
aaugucagauucucagcuu

SEQ ID NO: 201556 - RNA, 19 nt, Homo sapiens
  misc_RNA (1)...(19): siRNA sense strand
ucgagacuuugccaaggua

SEQ ID NO: 201557 - RNA, 19 nt, Homo sapiens
  misc_RNA (1)...(19): siRNA sense strand
gcaaaaggccauaaaaugc

SEQ ID NO: 201558 - RNA, 19 nt, Homo sapiens
  misc_RNA (1)...(19): siRNA sense strand
cugcaugauucuauccaaa

SEQ ID NO: 201559 - RNA, 19 nt, Homo sapiens
  misc_RNA (1)...(19): siRNA sense strand
uaaagcacauuuggaagac

SEQ ID NO: 201560 - RNA, 19 nt, Homo sapiens
  misc_RNA (1)...(19): siRNA sense strand
acaggagucuaaagcacuu

SEQ ID NO: 201561 - RNA, 19 nt, Homo sapiens
  misc_RNA (1)...(19): siRNA sense strand
acagauaccuuuucaagca

SEQ ID NO: 201562 - RNA, 19 nt, Homo sapiens
  misc_RNA (1)...(19): siRNA sense strand
aagcacauuuggaagacaa

SEQ ID NO: 201563 - RNA, 19 nt, Homo sapiens
  misc_RNA (1)...(19): siRNA sense strand
gcuaauaauaagccagaga

SEQ ID NO: 201564 - RNA, 19 nt, Homo sapiens
  misc_RNA (1)...(19): siRNA sense strand
caagagcacaacaauuugg

SEQ ID NO: 201565 - RNA, 19 nt, Homo sapiens
  misc_RNA (1)...(19): siRNA sense strand
ccugucagcugcaugugau

SEQ ID NO: 201566 - RNA, 19 nt, Homo sapiens
  misc_RNA (1)...(19): siRNA sense strand
gcugcugaauguuuaugau

SEQ ID NO: 201567 - RNA, 19 nt, Homo sapiens
  misc_RNA (1)...(19): siRNA sense strand
acagagcucuaccagucuu

SEQ ID NO: 201568 - RNA, 19 nt, Homo sapiens
  misc_RNA (1)...(19): siRNA sense strand
acaguugggugaaguugca

SEQ ID NO: 201569 - RNA, 19 nt, Homo sapiens
  misc_RNA (1)...(19): siRNA sense strand
guuugaccacuauuuauga

SEQ ID NO: 201570 - RNA, 19 nt, Homo sapiens
  misc_RNA (1)...(19): siRNA sense strand
gcuuauaggacugccauga

SEQ ID NO: 201571 - RNA, 19 nt, Homo sapiens
  misc_RNA (1)...(19): siRNA sense strand
caucaggccaaauguaaca

SEQ ID NO: 201572 - RNA, 19 nt, Homo sapiens
  misc_RNA (1)...(19): siRNA sense strand
gauucuauccaaauuccaa

SEQ ID NO: 201573 - RNA, 19 nt, Homo sapiens
  misc_RNA (1)...(19): siRNA sense strand
ggcaaguucaacaggauuu

SEQ ID NO: 201574 - RNA, 19 nt, Homo sapiens
  misc_RNA (1)...(19): siRNA sense strand
gaacuggcugcugaauguu

SEQ ID NO: 201575 - RNA, 19 nt, Homo sapiens
  misc_RNA (1)...(19): siRNA sense strand
cugcugaauguuuaugaua

SEQ ID NO: 201576 - RNA, 19 nt, Homo sapiens
  misc_RNA (1)...(19): siRNA sense strand
aagcaucaggccaaaugua

SEQ ID NO: 201577 - RNA, 19 nt, Homo sapiens
  misc_RNA (1)...(19): siRNA sense strand
uggcaucauuucccugugu

SEQ ID NO: 201578 - RNA, 19 nt, Homo sapiens
  misc_RNA (1)...(19): siRNA sense strand
ccaugaaacuccgaagacu

SEQ ID NO: 201579 - RNA, 19 nt, Homo sapiens
  misc_RNA (1)...(19): siRNA sense strand
auaauaagccagagaucga

SEQ ID NO: 201580 - RNA, 19 nt, Homo sapiens
  misc_RNA (1)...(19): siRNA sense strand
cuaauaauaagccagagau

SEQ ID NO: 201581 - RNA, 19 nt, Homo sapiens
  misc_RNA (1)...(19): siRNA sense strand
ugggugaaguugcauccuu

SEQ ID NO: 201582 - RNA, 19 nt, Homo sapiens
  misc_RNA (1)...(19): siRNA sense strand
caucauuucccuguguaaa

SEQ ID NO: 201583 - RNA, 19 nt, Homo sapiens
  misc_RNA (1)...(19): siRNA sense strand
gcguggauaugugucugaa

SEQ ID NO: 201584 - RNA, 19 nt, Homo sapiens
  misc_RNA (1)...(19): siRNA sense strand
gcacuaucccaugguggaa

SEQ ID NO: 201585 - RNA, 19 nt, Homo sapiens
  misc_RNA (1)...(19): siRNA sense strand
gagccugucagcugcaugu

SEQ ID NO: 201586 - RNA, 19 nt, Homo sapiens
  misc_RNA (1)...(19): siRNA sense strand
guacagauaccuuuucaag

SEQ ID NO: 201587 - RNA, 19 nt, Homo sapiens
  misc_RNA (1)...(19): siRNA sense strand
gucccucucugcguggaua

SEQ ID NO: 201588 - RNA, 19 nt, Homo sapiens
  misc_RNA (1)...(19): siRNA sense strand
ggagcugcuuccaauuugc

SEQ ID NO: 201589 - RNA, 19 nt, Homo sapiens
  misc_RNA (1)...(19): siRNA sense strand
uuagcugaccugaauaaug

SEQ ID NO: 201590 - RNA, 19 nt, Homo sapiens
  misc_RNA (1)...(19): siRNA sense strand
guggcaaguucaacaggau

SEQ ID NO: 201591 - RNA, 19 nt, Homo sapiens
  misc_RNA (1)...(19): siRNA sense strand
acaacaauuuggucaacgu

SEQ ID NO: 201592 - RNA, 19 nt, Homo sapiens
  misc_RNA (1)...(19): siRNA sense strand
gacuacaucaggagaagau

SEQ ID NO: 201593 - RNA, 19 nt, Homo sapiens
  misc_RNA (1)...(19): siRNA sense strand
uaauaagccagagaucgaa

SEQ ID NO: 201594 - RNA, 19 nt, Homo sapiens
  misc_RNA (1)...(19): siRNA sense strand
ugucagauucucagcuuau

SEQ ID NO: 201595 - RNA, 19 nt, Homo sapiens
  misc_RNA (1)...(19): siRNA sense strand
ggauauccugcagauuauu

SEQ ID NO: 201596 - RNA, 19 nt, Homo sapiens
  misc_RNA (1)...(19): siRNA sense strand
agcaucaggccaaauguaa

SEQ ID NO: 201597 - RNA, 19 nt, Homo sapiens
  misc_RNA (1)...(19): siRNA sense strand
gcccuuugcuuggaucucu

SEQ ID NO: 201598 - RNA, 19 nt, Homo sapiens
  misc_RNA (1)...(19): siRNA sense strand
gcugaauguuuaugauacg

SEQ ID NO: 201599 - RNA, 19 nt, Homo sapiens
  misc_RNA (1)...(19): siRNA sense strand
agacuuugccaagguacua

SEQ ID NO: 201600 - RNA, 19 nt, Homo sapiens
  misc_RNA (1)...(19): siRNA sense strand
caagcaaguggcaaguuca

SEQ ID NO: 201601 - RNA, 19 nt, Homo sapiens
  misc_RNA (1)...(19): siRNA sense strand
agacaaguacagauaccuu

SEQ ID NO: 201602 - RNA, 19 nt, Homo sapiens
  misc_RNA (1)...(19): siRNA sense strand
gcaucauuucccuguguaa

SEQ ID NO: 201603 - RNA, 19 nt, Homo sapiens
  misc_RNA (1)...(19): siRNA sense strand
cugcaaagaguguccaauc

SEQ ID NO: 201604 - RNA, 19 nt, Homo sapiens
  misc_RNA (1)...(19): siRNA sense strand
cuuauaggacugccaugaa

SEQ ID NO: 201605 - RNA, 19 nt, Homo sapiens
  misc_RNA (1)...(19): siRNA sense strand
caaagaguguccaaucauu

SEQ ID NO: 201606 - RNA, 19 nt, Homo sapiens
  misc_RNA (1)...(19): siRNA sense strand
uagcugaccugaauaaugu

SEQ ID NO: 201607 - RNA, 19 nt, Homo sapiens
  misc_RNA (1)...(19): siRNA sense strand
gcaugauucuauccaaauu

SEQ ID NO: 201608 - RNA, 19 nt, Homo sapiens
  misc_RNA (1)...(19): siRNA sense strand
ugaacuggcugcugaaugu

SEQ ID NO: 201609 - RNA, 19 nt, Homo sapiens
  misc_RNA (1)...(19): siRNA sense strand
gauauccugcagauuauua

SEQ ID NO: 201610 - RNA, 19 nt, Homo sapiens
  misc_RNA (1)...(19): siRNA sense strand
gagaagauguucgagacuu

SEQ ID NO: 201611 - RNA, 19 nt, Homo sapiens
  misc_RNA (1)...(19): siRNA sense strand
gcacuuuaauuaugacauc

SEQ ID NO: 201612 - RNA, 19 nt, Homo sapiens
  misc_RNA (1)...(19): siRNA sense strand
guaaagcacauuuggaaga

SEQ ID NO: 201613 - RNA, 19 nt, Homo sapiens
  misc_RNA (1)...(19): siRNA sense strand
gaauauugcacuccgacua

SEQ ID NO: 201614 - RNA, 19 nt, Homo sapiens
  misc_RNA (1)...(19): siRNA sense strand
uuauaggacugccaugaaa

SEQ ID NO: 201615 - RNA, 19 nt, Homo sapiens
  misc_RNA (1)...(19): siRNA sense strand
gggugaaguugcauccuuu

SEQ ID NO: 201616 - RNA, 19 nt, Homo sapiens
  misc_RNA (1)...(19): siRNA sense strand
gcaagagcacaacaauuug

SEQ ID NO: 201617 - RNA, 19 nt, Homo sapiens
  misc_RNA (1)...(19): siRNA sense strand
gcacaacaauuuggucaac

SEQ ID NO: 201618 - RNA, 19 nt, Homo sapiens
  misc_RNA (1)...(19): siRNA sense strand
agcaagagcacaacaauuu

SEQ ID NO: 201619 - RNA, 19 nt, Homo sapiens
  misc_RNA (1)...(19): siRNA sense strand
agaagauguucgagacuuu

SEQ ID NO: 201620 - RNA, 19 nt, Homo sapiens
  misc_RNA (1)...(19): siRNA sense strand
gagcaagagcacaacaauu

SEQ ID NO: 201621 - RNA, 19 nt, Homo sapiens
  misc_RNA (1)...(19): siRNA sense strand
ucaagcaaguggcaaguuc

SEQ ID NO: 201622 - RNA, 19 nt, Homo sapiens
  misc_RNA (1)...(19): siRNA sense strand
ccacgagacucaaacaacu

SEQ ID NO: 201623 - RNA, 19 nt, Homo sapiens
  misc_RNA (1)...(19): siRNA sense strand
cagcacaaccucaagcaaa

SEQ ID NO: 201624 - RNA, 19 nt, Homo sapiens
  misc_RNA (1)...(19): siRNA sense strand
gcaaagaguguccaaucau

SEQ ID NO: 201625 - RNA, 19 nt, Homo sapiens
  misc_RNA (1)...(19): siRNA sense strand
auggauauccugcagauua

SEQ ID NO: 201626 - RNA, 19 nt, Homo sapiens
  misc_RNA (1)...(19): siRNA sense strand
uguaacaucugcaaagagu

SEQ ID NO: 201627 - RNA, 19 nt, Homo sapiens
  misc_RNA (1)...(19): siRNA sense strand
guccggagcugcuuccaau

SEQ ID NO: 201628 - RNA, 19 nt, Homo sapiens
  misc_RNA (1)...(19): siRNA sense strand
gcaaguggcaaguucaaca

SEQ ID NO: 201629 - RNA, 19 nt, Homo sapiens
  misc_RNA (1)...(19): siRNA sense strand
gcuuccaauuugcuaauaa

SEQ ID NO: 201630 - RNA, 19 nt, Homo sapiens
  misc_RNA (1)...(19): siRNA sense strand
uggaagacaaguacagaua

SEQ ID NO: 201631 - RNA, 19 nt, Homo sapiens
  misc_RNA (1)...(19): siRNA sense strand
ggauccguguccugucuuu

SEQ ID NO: 201632 - RNA, 19 nt, Homo sapiens
  misc_RNA (1)...(19): siRNA sense strand
gucuuuagcugaccugaau

SEQ ID NO: 201633 - RNA, 19 nt, Homo sapiens
  misc_RNA (1)...(19): siRNA sense strand
gacaaguacagauaccuuu

SEQ ID NO: 201634 - RNA, 19 nt, Homo sapiens
  misc_RNA (1)...(19): siRNA sense strand
ccaagcaucaggccaaaug

SEQ ID NO: 201635 - RNA, 19 nt, Homo sapiens
  misc_RNA (1)...(19): siRNA sense strand
ggagcaagagcacaacaau

SEQ ID NO: 201636 - RNA, 19 nt, Homo sapiens
  misc_RNA (1)...(19): siRNA sense strand
guguaaagcacauuuggaa

SEQ ID NO: 201637 - RNA, 19 nt, Homo sapiens
  misc_RNA (1)...(19): siRNA sense strand
caagacaguugggugaagu

SEQ ID NO: 201638 - RNA, 19 nt, Homo sapiens
  misc_RNA (1)...(19): siRNA sense strand
gaagauguucgagacuuug

SEQ ID NO: 201639 - RNA, 19 nt, Homo sapiens
  misc_RNA (1)...(19): siRNA sense strand
gucagauucucagcuuaua

SEQ ID NO: 201640 - RNA, 19 nt, Homo sapiens
  misc_RNA (1)...(19): siRNA sense strand
uaacaucugcaaagagugu

SEQ ID NO: 201641 - RNA, 19 nt, Homo sapiens
  misc_RNA (1)...(19): siRNA sense strand
cggagcugcuuccaauuug

SEQ ID NO: 201642 - RNA, 19 nt, Homo sapiens
  misc_RNA (1)...(19): siRNA sense strand
gaagacaaguacagauacc

SEQ ID NO: 201643 - RNA, 19 nt, Homo sapiens
  misc_RNA (1)...(19): siRNA sense strand
ccauggauauccugcagau

SEQ ID NO: 201644 - RNA, 19 nt, Homo sapiens
  misc_RNA (1)...(19): siRNA sense strand
ggcaucauuucccugugua

SEQ ID NO: 201645 - RNA, 19 nt, Homo sapiens
  misc_RNA (1)...(19): siRNA sense strand
uggauauccugcagauuau

SEQ ID NO: 201646 - RNA, 19 nt, Homo sapiens
  misc_RNA (1)...(19): siRNA sense strand
ggaagacaaguacagauac

SEQ ID NO: 201647 - RNA, 19 nt, Homo sapiens
  misc_RNA (1)...(19): siRNA sense strand
ugcaaagaguguccaauca

SEQ ID NO: 201648 - RNA, 19 nt, Homo sapiens
  misc_RNA (1)...(19): siRNA sense strand
guggauaugugucugaacu

SEQ ID NO: 201649 - RNA, 19 nt, Homo sapiens
  misc_RNA (1)...(19): siRNA sense strand
acuggcugcugaauguuua

SEQ ID NO: 201650 - RNA, 19 nt, Homo sapiens
  misc_RNA (1)...(19): siRNA sense strand
acuaucccaugguggaaua

SEQ ID NO: 201651 - RNA, 19 nt, Homo sapiens
  misc_RNA (1)...(19): siRNA sense strand
ccggagcugcuuccaauuu

SEQ ID NO: 201652 - RNA, 19 nt, Homo sapiens
  misc_RNA (1)...(19): siRNA sense strand
ccaaauuccaagacaguug

SEQ ID NO: 201653 - RNA, 19 nt, Homo sapiens
  misc_RNA (1)...(19): siRNA sense strand
cagaaacugccaagcauca

SEQ ID NO: 201654 - RNA, 19 nt, Homo sapiens
  misc_RNA (1)...(19): siRNA sense strand
uaugacaucugccaaagcu

SEQ ID NO: 201655 - RNA, 19 nt, Homo sapiens
  misc_RNA (1)...(19): siRNA sense strand
aaugucagauucucagcuu

SEQ ID NO: 201656 - RNA, 19 nt, Homo sapiens
  misc_RNA (1)...(19): siRNA sense strand
ucgagacuuugccaaggua

SEQ ID NO: 201657 - RNA, 19 nt, Homo sapiens
  misc_RNA (1)...(19): siRNA sense strand
gcaaaaggccauaaaaugc

SEQ ID NO: 201658 - RNA, 19 nt, Homo sapiens
  misc_RNA (1)...(19): siRNA sense strand
cugcaugauucuauccaaa

SEQ ID NO: 201659 - RNA, 19 nt, Homo sapiens
  misc_RNA (1)...(19): siRNA sense strand
uaaagcacauuuggaagac

SEQ ID NO: 201660 - RNA, 19 nt, Homo sapiens
  misc_RNA (1)...(19): siRNA sense strand
acaggagucuaaagcacuu

SEQ ID NO: 201661 - RNA, 19 nt, Homo sapiens
  misc_RNA (1)...(19): siRNA sense strand
acagauaccuuuucaagca

SEQ ID NO: 201662 - RNA, 19 nt, Homo sapiens
  misc_RNA (1)...(19): siRNA sense strand
aagcacauuuggaagacaa

SEQ ID NO: 201663 - RNA, 19 nt, Homo sapiens
  misc_RNA (1)...(19): siRNA sense strand
gcuaauaauaagccagaga

SEQ ID NO: 201664 - RNA, 19 nt, Homo sapiens
  misc_RNA (1)...(19): siRNA sense strand
caagagcacaacaauuugg

SEQ ID NO: 201665 - RNA, 19 nt, Homo sapiens
  misc_RNA (1)...(19): siRNA sense strand
ccugucagcugcaugugau

SEQ ID NO: 201666 - RNA, 19 nt, Homo sapiens
  misc_RNA (1)...(19): siRNA sense strand
gcugcugaauguuuaugau

SEQ ID NO: 201667 - RNA, 19 nt, Homo sapiens
  misc_RNA (1)...(19): siRNA sense strand
acagagcucuaccagucuu

SEQ ID NO: 201668 - RNA, 19 nt, Homo sapiens
  misc_RNA (1)...(19): siRNA sense strand
acaguugggugaaguugca

SEQ ID NO: 201669 - RNA, 19 nt, Homo sapiens
  misc_RNA (1)...(19): siRNA sense strand
guuugaccacuauuuauga

SEQ ID NO: 201670 - RNA, 19 nt, Homo sapiens
  misc_RNA (1)...(19): siRNA sense strand
gcuuauaggacugccauga

SEQ ID NO: 201671 - RNA, 19 nt, Homo sapiens
  misc_RNA (1)...(19): siRNA sense strand
caucaggccaaauguaaca

SEQ ID NO: 201672 - RNA, 19 nt, Homo sapiens
  misc_RNA (1)...(19): siRNA sense strand
gauucuauccaaauuccaa

SEQ ID NO: 201673 - RNA, 19 nt, Homo sapiens
  misc_RNA (1)...(19): siRNA sense strand
ggcaaguucaacaggauuu

SEQ ID NO: 201674 - RNA, 19 nt, Homo sapiens
  misc_RNA (1)...(19): siRNA sense strand
gaacuggcugcugaauguu

SEQ ID NO: 201675 - RNA, 19 nt, Homo sapiens
  misc_RNA (1)...(19): siRNA sense strand
cugcugaauguuuaugaua

SEQ ID NO: 201676 - RNA, 19 nt, Homo sapiens
  misc_RNA (1)...(19): siRNA sense strand
aagcaucaggccaaaugua

SEQ ID NO: 201677 - RNA, 19 nt, Homo sapiens
  misc_RNA (1)...(19): siRNA sense strand
uggcaucauuucccugugu

SEQ ID NO: 201678 - RNA, 19 nt, Homo sapiens
  misc_RNA (1)...(19): siRNA sense strand
ccaugaaacuccgaagacu

SEQ ID NO: 201679 - RNA, 19 nt, Homo sapiens
  misc_RNA (1)...(19): siRNA sense strand
auaauaagccagagaucga

SEQ ID NO: 201680 - RNA, 19 nt, Homo sapiens
  misc_RNA (1)...(19): siRNA sense strand
cuaauaauaagccagagau

SEQ ID NO: 201681 - RNA, 19 nt, Homo sapiens
  misc_RNA (1)...(19): siRNA sense strand
ugggugaaguugcauccuu

SEQ ID NO: 201682 - RNA, 19 nt, Homo sapiens
  misc_RNA (1)...(19): siRNA sense strand
caucauuucccuguguaaa

SEQ ID NO: 201683 - RNA, 19 nt, Homo sapiens
  misc_RNA (1)...(19): siRNA sense strand
gcguggauaugugucugaa

SEQ ID NO: 201684 - RNA, 19 nt, Homo sapiens
  misc_RNA (1)...(19): siRNA sense strand
gcacuaucccaugguggaa

SEQ ID NO: 201685 - RNA, 19 nt, Homo sapiens
  misc_RNA (1)...(19): siRNA sense strand
gagccugucagcugcaugu

SEQ ID NO: 201686 - RNA, 19 nt, Homo sapiens
  misc_RNA (1)...(19): siRNA sense strand
guacagauaccuuuucaag

SEQ ID NO: 201687 - RNA, 19 nt, Homo sapiens
  misc_RNA (1)...(19): siRNA sense strand
gucccucucugcguggaua

SEQ ID NO: 201688 - RNA, 19 nt, Homo sapiens
  misc_RNA (1)...(19): siRNA sense strand
ggagcugcuuccaauuugc

SEQ ID NO: 201689 - RNA, 19 nt, Homo sapiens
  misc_RNA (1)...(19): siRNA sense strand
uuagcugaccugaauaaug

SEQ ID NO: 201690 - RNA, 19 nt, Homo sapiens
  misc_RNA (1)...(19): siRNA sense strand
guggcaaguucaacaggau

SEQ ID NO: 201691 - RNA, 19 nt, Homo sapiens
  misc_RNA (1)...(19): siRNA sense strand
acaacaauuuggucaacgu

SEQ ID NO: 201692 - RNA, 19 nt, Homo sapiens
  misc_RNA (1)...(19): siRNA sense strand
gacuacaucaggagaagau

SEQ ID NO: 201693 - RNA, 19 nt, Homo sapiens
  misc_RNA (1)...(19): siRNA sense strand
uaauaagccagagaucgaa

SEQ ID NO: 201694 - RNA, 19 nt, Homo sapiens
  misc_RNA (1)...(19): siRNA sense strand
ugucagauucucagcuuau

SEQ ID NO: 201695 - RNA, 19 nt, Homo sapiens
  misc_RNA (1)...(19): siRNA sense strand
ggauauccugcagauuauu

SEQ ID NO: 201696 - RNA, 19 nt, Homo sapiens
  misc_RNA (1)...(19): siRNA sense strand
agcaucaggccaaauguaa

SEQ ID NO: 201697 - RNA, 19 nt, Homo sapiens
  misc_RNA (1)...(19): siRNA sense strand
gcccuuugcuuggaucucu

SEQ ID NO: 201698 - RNA, 19 nt, Homo sapiens
  misc_RNA (1)...(19): siRNA sense strand
gcugaauguuuaugauacg

SEQ ID NO: 201699 - RNA, 19 nt, Homo sapiens
  misc_RNA (1)...(19): siRNA sense strand
agacuuugccaagguacua

SEQ ID NO: 201700 - RNA, 19 nt, Homo sapiens
  misc_RNA (1)...(19): siRNA sense strand
caagcaaguggcaaguuca

SEQ ID NO: 201701 - RNA, 19 nt, Homo sapiens
  misc_RNA (1)...(19): siRNA sense strand
agacaaguacagauaccuu

SEQ ID NO: 201702 - RNA, 19 nt, Homo sapiens
  misc_RNA (1)...(19): siRNA sense strand
gcaucauuucccuguguaa

SEQ ID NO: 201703 - RNA, 19 nt, Homo sapiens
  misc_RNA (1)...(19): siRNA sense strand
cugcaaagaguguccaauc

SEQ ID NO: 201704 - RNA, 19 nt, Homo sapiens
  misc_RNA (1)...(19): siRNA sense strand
cuuauaggacugccaugaa

SEQ ID NO: 201705 - RNA, 19 nt, Homo sapiens
  misc_RNA (1)...(19): siRNA sense strand
caaagaguguccaaucauu

SEQ ID NO: 201706 - RNA, 19 nt, Homo sapiens
  misc_RNA (1)...(19): siRNA sense strand
uagcugaccugaauaaugu

SEQ ID NO: 201707 - RNA, 19 nt, Homo sapiens
  misc_RNA (1)...(19): siRNA sense strand
gcaugauucuauccaaauu

SEQ ID NO: 201708 - RNA, 19 nt, Homo sapiens
  misc_RNA (1)...(19): siRNA sense strand
ugaacuggcugcugaaugu

SEQ ID NO: 201709 - RNA, 19 nt, Homo sapiens
  misc_RNA (1)...(19): siRNA sense strand
gauauccugcagauuauua

SEQ ID NO: 201710 - RNA, 19 nt, Homo sapiens
  misc_RNA (1)...(19): siRNA sense strand
gagaagauguucgagacuu

SEQ ID NO: 201711 - RNA, 19 nt, Homo sapiens
  misc_RNA (1)...(19): siRNA sense strand
gcacuuuaauuaugacauc

SEQ ID NO: 201712 - RNA, 19 nt, Homo sapiens
  misc_RNA (1)...(19): siRNA sense strand
guaaagcacauuuggaaga

SEQ ID NO: 201713 - RNA, 19 nt, Homo sapiens
  misc_RNA (1)...(19): siRNA sense strand
gaauauugcacuccgacua

SEQ ID NO: 201714 - RNA, 19 nt, Homo sapiens
  misc_RNA (1)...(19): siRNA sense strand
uuauaggacugccaugaaa

SEQ ID NO: 201715 - RNA, 19 nt, Homo sapiens
  misc_RNA (1)...(19): siRNA sense strand
gggugaaguugcauccuuu

SEQ ID NO: 201716 - RNA, 19 nt, Homo sapiens
  misc_RNA (1)...(19): siRNA sense strand
gcaagagcacaacaauuug

SEQ ID NO: 201717 - RNA, 19 nt, Homo sapiens
  misc_RNA (1)...(19): siRNA sense strand
gcacaacaauuuggucaac

SEQ ID NO: 201718 - RNA, 19 nt, Homo sapiens
  misc_RNA (1)...(19): siRNA sense strand
agcaagagcacaacaauuu

SEQ ID NO: 201719 - RNA, 19 nt, Homo sapiens
  misc_RNA (1)...(19): siRNA sense strand
agaagauguucgagacuuu

SEQ ID NO: 201720 - RNA, 19 nt, Homo sapiens
  misc_RNA (1)...(19): siRNA sense strand
gagcaagagcacaacaauu

SEQ ID NO: 201721 - RNA, 19 nt, Homo sapiens
  misc_RNA (1)...(19): siRNA sense strand
ucaagcaaguggcaaguuc

SEQ ID NO: 201722 - RNA, 19 nt, Homo sapiens
  misc_RNA (1)...(19): siRNA sense strand
ccacgagacucaaacaacu

SEQ ID NO: 201723 - RNA, 19 nt, Homo sapiens
  misc_RNA (1)...(19): siRNA sense strand
cagcacaaccucaagcaaa

SEQ ID NO: 201724 - RNA, 19 nt, Homo sapiens
  misc_RNA (1)...(19): siRNA sense strand
gcaaagaguguccaaucau

SEQ ID NO: 201725 - RNA, 19 nt, Homo sapiens
  misc_RNA (1)...(19): siRNA sense strand
auggauauccugcagauua

SEQ ID NO: 201726 - RNA, 19 nt, Homo sapiens
  misc_RNA (1)...(19): siRNA sense strand
uguaacaucugcaaagagu

SEQ ID NO: 201727 - RNA, 19 nt, Homo sapiens
  misc_RNA (1)...(19): siRNA sense strand
guccggagcugcuuccaau

SEQ ID NO: 201728 - RNA, 19 nt, Homo sapiens
  misc_RNA (1)...(19): siRNA sense strand
gcaaguggcaaguucaaca

SEQ ID NO: 201729 - RNA, 19 nt, Homo sapiens
  misc_RNA (1)...(19): siRNA sense strand
gcuuccaauuugcuaauaa

SEQ ID NO: 201730 - RNA, 19 nt, Homo sapiens
  misc_RNA (1)...(19): siRNA sense strand
uggaagacaaguacagaua

SEQ ID NO: 201731 - RNA, 19 nt, Homo sapiens
  misc_RNA (1)...(19): siRNA sense strand
ggauccguguccugucuuu

SEQ ID NO: 201732 - RNA, 19 nt, Homo sapiens
  misc_RNA (1)...(19): siRNA sense strand
gucuuuagcugaccugaau

SEQ ID NO: 201733 - RNA, 19 nt, Homo sapiens
  misc_RNA (1)...(19): siRNA sense strand
gacaaguacagauaccuuu

SEQ ID NO: 201734 - RNA, 19 nt, Homo sapiens
  misc_RNA (1)...(19): siRNA sense strand
ccaagcaucaggccaaaug

SEQ ID NO: 201735 - RNA, 19 nt, Homo sapiens
  misc_RNA (1)...(19): siRNA sense strand
ggagcaagagcacaacaau

SEQ ID NO: 201736 - RNA, 19 nt, Homo sapiens
  misc_RNA (1)...(19): siRNA sense strand
guguaaagcacauuuggaa

SEQ ID NO: 201737 - RNA, 19 nt, Homo sapiens
  misc_RNA (1)...(19): siRNA sense strand
caagacaguugggugaagu

SEQ ID NO: 201738 - RNA, 19 nt, Homo sapiens
  misc_RNA (1)...(19): siRNA sense strand
gaagauguucgagacuuug

SEQ ID NO: 201739 - RNA, 19 nt, Homo sapiens
  misc_RNA (1)...(19): siRNA sense strand
gucagauucucagcuuaua

SEQ ID NO: 201740 - RNA, 19 nt, Homo sapiens
  misc_RNA (1)...(19): siRNA sense strand
uaacaucugcaaagagugu

SEQ ID NO: 201741 - RNA, 19 nt, Homo sapiens
  misc_RNA (1)...(19): siRNA sense strand
cggagcugcuuccaauuug

SEQ ID NO: 201742 - RNA, 19 nt, Homo sapiens
  misc_RNA (1)...(19): siRNA sense strand
gaagacaaguacagauacc

SEQ ID NO: 201743 - RNA, 19 nt, Homo sapiens
  misc_RNA (1)...(19): siRNA sense strand
ccauggauauccugcagau

SEQ ID NO: 201744 - RNA, 19 nt, Homo sapiens
  misc_RNA (1)...(19): siRNA sense strand
ggcaucauuucccugugua

SEQ ID NO: 201745 - RNA, 19 nt, Homo sapiens
  misc_RNA (1)...(19): siRNA sense strand
uggauauccugcagauuau

SEQ ID NO: 201746 - RNA, 19 nt, Homo sapiens
  misc_RNA (1)...(19): siRNA sense strand
ggaagacaaguacagauac

SEQ ID NO: 201747 - RNA, 19 nt, Homo sapiens
  misc_RNA (1)...(19): siRNA sense strand
ugcaaagaguguccaauca

SEQ ID NO: 201748 - RNA, 19 nt, Homo sapiens
  misc_RNA (1)...(19): siRNA sense strand
guggauaugugucugaacu

SEQ ID NO: 201749 - RNA, 19 nt, Homo sapiens
  misc_RNA (1)...(19): siRNA sense strand
acuggcugcugaauguuua

SEQ ID NO: 201750 - RNA, 19 nt, Homo sapiens
  misc_RNA (1)...(19): siRNA sense strand
acuaucccaugguggaaua

SEQ ID NO: 201751 - RNA, 19 nt, Homo sapiens
  misc_RNA (1)...(19): siRNA sense strand
ccggagcugcuuccaauuu

SEQ ID NO: 201752 - RNA, 19 nt, Homo sapiens
  misc_RNA (1)...(19): siRNA sense strand
ccaaauuccaagacaguug

SEQ ID NO: 201753 - RNA, 19 nt, Homo sapiens
  misc_RNA (1)...(19): siRNA sense strand
cagaaacugccaagcauca

SEQ ID NO: 201754 - RNA, 19 nt, Homo sapiens
  misc_RNA (1)...(19): siRNA sense strand
uaugacaucugccaaagcu

SEQ ID NO: 201755 - RNA, 19 nt, Homo sapiens
  misc_RNA (1)...(19): siRNA sense strand
aaugucagauucucagcuu

SEQ ID NO: 201756 - RNA, 19 nt, Homo sapiens
  misc_RNA (1)...(19): siRNA sense strand
ucgagacuuugccaaggua

SEQ ID NO: 201757 - RNA, 19 nt, Homo sapiens
  misc_RNA (1)...(19): siRNA sense strand
gcaaaaggccauaaaaugc

SEQ ID NO: 201758 - RNA, 19 nt, Homo sapiens
  misc_RNA (1)...(19): siRNA sense strand
cugcaugauucuauccaaa

SEQ ID NO: 201759 - RNA, 19 nt, Homo sapiens
  misc_RNA (1)...(19): siRNA sense strand
uaaagcacauuuggaagac

SEQ ID NO: 201760 - RNA, 19 nt, Homo sapiens
  misc_RNA (1)...(19): siRNA sense strand
acaggagucuaaagcacuu

SEQ ID NO: 201761 - RNA, 19 nt, Homo sapiens
  misc_RNA (1)...(19): siRNA sense strand
acagauaccuuuucaagca

SEQ ID NO: 201762 - RNA, 19 nt, Homo sapiens
  misc_RNA (1)...(19): siRNA sense strand
aagcacauuuggaagacaa

SEQ ID NO: 201763 - RNA, 19 nt, Homo sapiens
  misc_RNA (1)...(19): siRNA sense strand
gcuaauaauaagccagaga

SEQ ID NO: 201764 - RNA, 19 nt, Homo sapiens
  misc_RNA (1)...(19): siRNA sense strand
caagagcacaacaauuugg

SEQ ID NO: 201765 - RNA, 19 nt, Homo sapiens
  misc_RNA (1)...(19): siRNA sense strand
ccugucagcugcaugugau

SEQ ID NO: 201766 - RNA, 19 nt, Homo sapiens
  misc_RNA (1)...(19): siRNA sense strand
gcugcugaauguuuaugau

SEQ ID NO: 201767 - RNA, 19 nt, Homo sapiens
  misc_RNA (1)...(19): siRNA sense strand
acagagcucuaccagucuu

SEQ ID NO: 201768 - RNA, 19 nt, Homo sapiens
  misc_RNA (1)...(19): siRNA sense strand
acaguugggugaaguugca

SEQ ID NO: 201769 - RNA, 19 nt, Homo sapiens
  misc_RNA (1)...(19): siRNA sense strand
guuugaccacuauuuauga

SEQ ID NO: 201770 - RNA, 19 nt, Homo sapiens
  misc_RNA (1)...(19): siRNA sense strand
gcuuauaggacugccauga

SEQ ID NO: 201771 - RNA, 19 nt, Homo sapiens
  misc_RNA (1)...(19): siRNA sense strand
caucaggccaaauguaaca

SEQ ID NO: 201772 - RNA, 19 nt, Homo sapiens
  misc_RNA (1)...(19): siRNA sense strand
gauucuauccaaauuccaa

SEQ ID NO: 201773 - RNA, 19 nt, Homo sapiens
  misc_RNA (1)...(19): siRNA sense strand
ggcaaguucaacaggauuu

SEQ ID NO: 201774 - RNA, 19 nt, Homo sapiens
  misc_RNA (1)...(19): siRNA sense strand
gaacuggcugcugaauguu

SEQ ID NO: 201775 - RNA, 19 nt, Homo sapiens
  misc_RNA (1)...(19): siRNA sense strand
cugcugaauguuuaugaua

SEQ ID NO: 201776 - RNA, 19 nt, Homo sapiens
  misc_RNA (1)...(19): siRNA sense strand
aagcaucaggccaaaugua

SEQ ID NO: 201777 - RNA, 19 nt, Homo sapiens
  misc_RNA (1)...(19): siRNA sense strand
uggcaucauuucccugugu

SEQ ID NO: 201778 - RNA, 19 nt, Homo sapiens
  misc_RNA (1)...(19): siRNA sense strand
ccaugaaacuccgaagacu

SEQ ID NO: 201779 - RNA, 19 nt, Homo sapiens
  misc_RNA (1)...(19): siRNA sense strand
auaauaagccagagaucga

SEQ ID NO: 201780 - RNA, 19 nt, Homo sapiens
  misc_RNA (1)...(19): siRNA sense strand
cuaauaauaagccagagau

SEQ ID NO: 201781 - RNA, 19 nt, Homo sapiens
  misc_RNA (1)...(19): siRNA sense strand
ugggugaaguugcauccuu

SEQ ID NO: 201782 - RNA, 19 nt, Homo sapiens
  misc_RNA (1)...(19): siRNA sense strand
caucauuucccuguguaaa

SEQ ID NO: 201783 - RNA, 19 nt, Homo sapiens
  misc_RNA (1)...(19): siRNA sense strand
gcguggauaugugucugaa

SEQ ID NO: 201784 - RNA, 19 nt, Homo sapiens
  misc_RNA (1)...(19): siRNA sense strand
gcacuaucccaugguggaa

SEQ ID NO: 201785 - RNA, 19 nt, Homo sapiens
  misc_RNA (1)...(19): siRNA sense strand
gagccugucagcugcaugu

SEQ ID NO: 201786 - RNA, 19 nt, Homo sapiens
  misc_RNA (1)...(19): siRNA sense strand
guacagauaccuuuucaag

SEQ ID NO: 201787 - RNA, 19 nt, Homo sapiens
  misc_RNA (1)...(19): siRNA sense strand
gucccucucugcguggaua

SEQ ID NO: 201788 - RNA, 19 nt, Homo sapiens
  misc_RNA (1)...(19): siRNA sense strand
ggagcugcuuccaauuugc

SEQ ID NO: 201789 - RNA, 19 nt, Homo sapiens
  misc_RNA (1)...(19): siRNA sense strand
uuagcugaccugaauaaug

SEQ ID NO: 201790 - RNA, 19 nt, Homo sapiens
  misc_RNA (1)...(19): siRNA sense strand
guggcaaguucaacaggau

SEQ ID NO: 201791 - RNA, 19 nt, Homo sapiens
  misc_RNA (1)...(19): siRNA sense strand
acaacaauuuggucaacgu

SEQ ID NO: 201792 - RNA, 19 nt, Homo sapiens
  misc_RNA (1)...(19): siRNA sense strand
gacuacaucaggagaagau

SEQ ID NO: 201793 - RNA, 19 nt, Homo sapiens
  misc_RNA (1)...(19): siRNA sense strand
uaauaagccagagaucgaa

SEQ ID NO: 201794 - RNA, 19 nt, Homo sapiens
  misc_RNA (1)...(19): siRNA sense strand
ugucagauucucagcuuau

SEQ ID NO: 201795 - RNA, 19 nt, Homo sapiens
  misc_RNA (1)...(19): siRNA sense strand
ggauauccugcagauuauu

SEQ ID NO: 201796 - RNA, 19 nt, Homo sapiens
  misc_RNA (1)...(19): siRNA sense strand
agcaucaggccaaauguaa

SEQ ID NO: 201797 - RNA, 19 nt, Homo sapiens
  misc_RNA (1)...(19): siRNA sense strand
gcccuuugcuuggaucucu

SEQ ID NO: 201798 - RNA, 19 nt, Homo sapiens
  misc_RNA (1)...(19): siRNA sense strand
gcugaauguuuaugauacg

SEQ ID NO: 201799 - RNA, 19 nt, Homo sapiens
  misc_RNA (1)...(19): siRNA sense strand
agacuuugccaagguacua

SEQ ID NO: 201800 - RNA, 19 nt, Homo sapiens
  misc_RNA (1)...(19): siRNA sense strand
caagcaaguggcaaguuca

SEQ ID NO: 201801 - RNA, 19 nt, Homo sapiens
  misc_RNA (1)...(19): siRNA sense strand
agacaaguacagauaccuu

SEQ ID NO: 201802 - RNA, 19 nt, Homo sapiens
  misc_RNA (1)...(19): siRNA sense strand
gcaucauuucccuguguaa

SEQ ID NO: 201803 - RNA, 19 nt, Homo sapiens
  misc_RNA (1)...(19): siRNA sense strand
cugcaaagaguguccaauc

SEQ ID NO: 201804 - RNA, 19 nt, Homo sapiens
  misc_RNA (1)...(19): siRNA sense strand
cuuauaggacugccaugaa

SEQ ID NO: 201805 - RNA, 19 nt, Homo sapiens
  misc_RNA (1)...(19): siRNA sense strand
caaagaguguccaaucauu

SEQ ID NO: 201806 - RNA, 19 nt, Homo sapiens
  misc_RNA (1)...(19): siRNA sense strand
uagcugaccugaauaaugu

SEQ ID NO: 201807 - RNA, 19 nt, Homo sapiens
  misc_RNA (1)...(19): siRNA sense strand
gcaugauucuauccaaauu

SEQ ID NO: 201808 - RNA, 19 nt, Homo sapiens
  misc_RNA (1)...(19): siRNA sense strand
ugaacuggcugcugaaugu

SEQ ID NO: 201809 - RNA, 19 nt, Homo sapiens
  misc_RNA (1)...(19): siRNA sense strand
gauauccugcagauuauua

SEQ ID NO: 201810 - RNA, 19 nt, Homo sapiens
  misc_RNA (1)...(19): siRNA sense strand
gagaagauguucgagacuu

SEQ ID NO: 201811 - RNA, 19 nt, Homo sapiens
  misc_RNA (1)...(19): siRNA sense strand
gcacuuuaauuaugacauc

SEQ ID NO: 201812 - RNA, 19 nt, Homo sapiens
  misc_RNA (1)...(19): siRNA sense strand
guaaagcacauuuggaaga

SEQ ID NO: 201813 - RNA, 19 nt, Homo sapiens
  misc_RNA (1)...(19): siRNA sense strand
gaauauugcacuccgacua

SEQ ID NO: 201814 - RNA, 19 nt, Homo sapiens
  misc_RNA (1)...(19): siRNA sense strand
uuauaggacugccaugaaa

SEQ ID NO: 201815 - RNA, 19 nt, Homo sapiens
  misc_RNA (1)...(19): siRNA sense strand
gggugaaguugcauccuuu

SEQ ID NO: 201816 - RNA, 19 nt, Homo sapiens
  misc_RNA (1)...(19): siRNA sense strand
gcaagagcacaacaauuug

SEQ ID NO: 201817 - RNA, 19 nt, Homo sapiens
  misc_RNA (1)...(19): siRNA sense strand
gcacaacaauuuggucaac

SEQ ID NO: 201818 - RNA, 19 nt, Homo sapiens
  misc_RNA (1)...(19): siRNA sense strand
agcaagagcacaacaauuu

SEQ ID NO: 201819 - RNA, 19 nt, Homo sapiens
  misc_RNA (1)...(19): siRNA sense strand
agaagauguucgagacuuu

SEQ ID NO: 201820 - RNA, 19 nt, Homo sapiens
  misc_RNA (1)...(19): siRNA sense strand
gagcaagagcacaacaauu

SEQ ID NO: 201821 - RNA, 19 nt, Homo sapiens
  misc_RNA (1)...(19): siRNA sense strand
ucaagcaaguggcaaguuc

SEQ ID NO: 201822 - RNA, 19 nt, Homo sapiens
  misc_RNA (1)...(19): siRNA sense strand
ccacgagacucaaacaacu

SEQ ID NO: 201823 - RNA, 19 nt, Homo sapiens
  misc_RNA (1)...(19): siRNA sense strand
cagcacaaccucaagcaaa

SEQ ID NO: 201824 - RNA, 19 nt, Homo sapiens
  misc_RNA (1)...(19): siRNA sense strand
gcaaagaguguccaaucau

SEQ ID NO: 201825 - RNA, 19 nt, Homo sapiens
  misc_RNA (1)...(19): siRNA sense strand
auggauauccugcagauua

SEQ ID NO: 201826 - RNA, 19 nt, Homo sapiens
  misc_RNA (1)...(19): siRNA sense strand
uguaacaucugcaaagagu

SEQ ID NO: 201827 - RNA, 19 nt, Homo sapiens
  misc_RNA (1)...(19): siRNA sense strand
guccggagcugcuuccaau

SEQ ID NO: 201828 - RNA, 19 nt, Homo sapiens
  misc_RNA (1)...(19): siRNA sense strand
gcaaguggcaaguucaaca

SEQ ID NO: 201829 - RNA, 19 nt, Homo sapiens
  misc_RNA (1)...(19): siRNA sense strand
gcuuccaauuugcuaauaa

SEQ ID NO: 201830 - RNA, 19 nt, Homo sapiens
  misc_RNA (1)...(19): siRNA sense strand
uggaagacaaguacagaua

SEQ ID NO: 201831 - RNA, 19 nt, Homo sapiens
  misc_RNA (1)...(19): siRNA sense strand
ggauccguguccugucuuu

SEQ ID NO: 201832 - RNA, 19 nt, Homo sapiens
  misc_RNA (1)...(19): siRNA sense strand
gucuuuagcugaccugaau

SEQ ID NO: 201833 - RNA, 19 nt, Homo sapiens
  misc_RNA (1)...(19): siRNA sense strand
gacaaguacagauaccuuu

SEQ ID NO: 201834 - RNA, 19 nt, Homo sapiens
  misc_RNA (1)...(19): siRNA sense strand
ccaagcaucaggccaaaug

SEQ ID NO: 201835 - RNA, 19 nt, Homo sapiens
  misc_RNA (1)...(19): siRNA sense strand
ggagcaagagcacaacaau

SEQ ID NO: 201836 - RNA, 19 nt, Homo sapiens
  misc_RNA (1)...(19): siRNA sense strand
guguaaagcacauuuggaa

SEQ ID NO: 201837 - RNA, 19 nt, Homo sapiens
  misc_RNA (1)...(19): siRNA sense strand
caagacaguugggugaagu

SEQ ID NO: 201838 - RNA, 19 nt, Homo sapiens
  misc_RNA (1)...(19): siRNA sense strand
gaagauguucgagacuuug

SEQ ID NO: 201839 - RNA, 19 nt, Homo sapiens
  misc_RNA (1)...(19): siRNA sense strand
gucagauucucagcuuaua

SEQ ID NO: 201840 - RNA, 19 nt, Homo sapiens
  misc_RNA (1)...(19): siRNA sense strand
uaacaucugcaaagagugu

SEQ ID NO: 201841 - RNA, 19 nt, Homo sapiens
  misc_RNA (1)...(19): siRNA sense strand
cggagcugcuuccaauuug

SEQ ID NO: 201842 - RNA, 19 nt, Homo sapiens
  misc_RNA (1)...(19): siRNA sense strand
gaagacaaguacagauacc

SEQ ID NO: 201843 - RNA, 19 nt, Homo sapiens
  misc_RNA (1)...(19): siRNA sense strand
ccauggauauccugcagau

SEQ ID NO: 201844 - RNA, 19 nt, Homo sapiens
  misc_RNA (1)...(19): siRNA sense strand
ggcaucauuucccugugua

SEQ ID NO: 201845 - RNA, 19 nt, Homo sapiens
  misc_RNA (1)...(19): siRNA sense strand
uggauauccugcagauuau

SEQ ID NO: 201846 - RNA, 19 nt, Homo sapiens
  misc_RNA (1)...(19): siRNA sense strand
ggaagacaaguacagauac

SEQ ID NO: 201847 - RNA, 19 nt, Homo sapiens
  misc_RNA (1)...(19): siRNA sense strand
ugcaaagaguguccaauca

SEQ ID NO: 201848 - RNA, 19 nt, Homo sapiens
  misc_RNA (1)...(19): siRNA sense strand
guggauaugugucugaacu

SEQ ID NO: 201849 - RNA, 19 nt, Homo sapiens
  misc_RNA (1)...(19): siRNA sense strand
acuggcugcugaauguuua

SEQ ID NO: 201850 - RNA, 19 nt, Homo sapiens
  misc_RNA (1)...(19): siRNA sense strand
acuaucccaugguggaaua

SEQ ID NO: 201851 - RNA, 19 nt, Homo sapiens
  misc_RNA (1)...(19): siRNA sense strand
ccggagcugcuuccaauuu

SEQ ID NO: 201852 - RNA, 19 nt, Homo sapiens
  misc_RNA (1)...(19): siRNA sense strand
ccaaauuccaagacaguug

SEQ ID NO: 201853 - RNA, 19 nt, Homo sapiens
  misc_RNA (1)...(19): siRNA sense strand
cagaaacugccaagcauca

SEQ ID NO: 201854 - RNA, 19 nt, Homo sapiens
  misc_RNA (1)...(19): siRNA sense strand
uaugacaucugccaaagcu

SEQ ID NO: 201855 - RNA, 19 nt, Homo sapiens
  misc_RNA (1)...(19): siRNA sense strand
aaugucagauucucagcuu

SEQ ID NO: 201856 - RNA, 19 nt, Homo sapiens
  misc_RNA (1)...(19): siRNA sense strand
ucgagacuuugccaaggua

SEQ ID NO: 201857 - RNA, 19 nt, Homo sapiens
  misc_RNA (1)...(19): siRNA sense strand
gcaaaaggccauaaaaugc

SEQ ID NO: 201858 - RNA, 19 nt, Homo sapiens
  misc_RNA (1)...(19): siRNA sense strand
cugcaugauucuauccaaa

SEQ ID NO: 201859 - RNA, 19 nt, Homo sapiens
  misc_RNA (1)...(19): siRNA sense strand
uaaagcacauuuggaagac

SEQ ID NO: 201860 - RNA, 19 nt, Homo sapiens
  misc_RNA (1)...(19): siRNA sense strand
acaggagucuaaagcacuu

SEQ ID NO: 201861 - RNA, 19 nt, Homo sapiens
  misc_RNA (1)...(19): siRNA sense strand
acagauaccuuuucaagca

SEQ ID NO: 201862 - RNA, 19 nt, Homo sapiens
  misc_RNA (1)...(19): siRNA sense strand
aagcacauuuggaagacaa

SEQ ID NO: 201863 - RNA, 19 nt, Homo sapiens
  misc_RNA (1)...(19): siRNA sense strand
gcuaauaauaagccagaga

SEQ ID NO: 201864 - RNA, 19 nt, Homo sapiens
  misc_RNA (1)...(19): siRNA sense strand
caagagcacaacaauuugg

SEQ ID NO: 201865 - RNA, 19 nt, Homo sapiens
  misc_RNA (1)...(19): siRNA sense strand
ccugucagcugcaugugau

SEQ ID NO: 201866 - RNA, 19 nt, Homo sapiens
  misc_RNA (1)...(19): siRNA sense strand
gcugcugaauguuuaugau

SEQ ID NO: 201867 - RNA, 19 nt, Homo sapiens
  misc_RNA (1)...(19): siRNA sense strand
acagagcucuaccagucuu

SEQ ID NO: 201868 - RNA, 19 nt, Homo sapiens
  misc_RNA (1)...(19): siRNA sense strand
acaguugggugaaguugca

SEQ ID NO: 201869 - RNA, 19 nt, Homo sapiens
  misc_RNA (1)...(19): siRNA sense strand
guuugaccacuauuuauga

SEQ ID NO: 201870 - RNA, 19 nt, Homo sapiens
  misc_RNA (1)...(19): siRNA sense strand
gcuuauaggacugccauga

SEQ ID NO: 201871 - RNA, 19 nt, Homo sapiens
  misc_RNA (1)...(19): siRNA sense strand
caucaggccaaauguaaca

SEQ ID NO: 201872 - RNA, 19 nt, Homo sapiens
  misc_RNA (1)...(19): siRNA sense strand
gauucuauccaaauuccaa

SEQ ID NO: 201873 - RNA, 19 nt, Homo sapiens
  misc_RNA (1)...(19): siRNA sense strand
ggcaaguucaacaggauuu

SEQ ID NO: 201874 - RNA, 19 nt, Homo sapiens
  misc_RNA (1)...(19): siRNA sense strand
gaacuggcugcugaauguu

SEQ ID NO: 201875 - RNA, 19 nt, Homo sapiens
  misc_RNA (1)...(19): siRNA sense strand
cugcugaauguuuaugaua

SEQ ID NO: 201876 - RNA, 19 nt, Homo sapiens
  misc_RNA (1)...(19): siRNA sense strand
aagcaucaggccaaaugua

SEQ ID NO: 201877 - RNA, 19 nt, Homo sapiens
  misc_RNA (1)...(19): siRNA sense strand
uggcaucauuucccugugu

SEQ ID NO: 201878 - RNA, 19 nt, Homo sapiens
  misc_RNA (1)...(19): siRNA sense strand
ccaugaaacuccgaagacu

SEQ ID NO: 201879 - RNA, 19 nt, Homo sapiens
  misc_RNA (1)...(19): siRNA sense strand
auaauaagccagagaucga

SEQ ID NO: 201880 - RNA, 19 nt, Homo sapiens
  misc_RNA (1)...(19): siRNA sense strand
cuaauaauaagccagagau

SEQ ID NO: 201881 - RNA, 19 nt, Homo sapiens
  misc_RNA (1)...(19): siRNA sense strand
ugggugaaguugcauccuu

SEQ ID NO: 201882 - RNA, 19 nt, Homo sapiens
  misc_RNA (1)...(19): siRNA sense strand
caucauuucccuguguaaa

SEQ ID NO: 201883 - RNA, 19 nt, Homo sapiens
  misc_RNA (1)...(19): siRNA sense strand
gcguggauaugugucugaa

SEQ ID NO: 201884 - RNA, 19 nt, Homo sapiens
  misc_RNA (1)...(19): siRNA sense strand
gcacuaucccaugguggaa

SEQ ID NO: 201885 - RNA, 19 nt, Homo sapiens
  misc_RNA (1)...(19): siRNA sense strand
gagccugucagcugcaugu

SEQ ID NO: 201886 - RNA, 19 nt, Homo sapiens
  misc_RNA (1)...(19): siRNA sense strand
guacagauaccuuuucaag

SEQ ID NO: 201887 - RNA, 19 nt, Homo sapiens
  misc_RNA (1)...(19): siRNA sense strand
gucccucucugcguggaua

SEQ ID NO: 201888 - RNA, 19 nt, Homo sapiens
  misc_RNA (1)...(19): siRNA sense strand
ggagcugcuuccaauuugc

SEQ ID NO: 201889 - RNA, 19 nt, Homo sapiens
  misc_RNA (1)...(19): siRNA sense strand
uuagcugaccugaauaaug

SEQ ID NO: 201890 - RNA, 19 nt, Homo sapiens
  misc_RNA (1)...(19): siRNA sense strand
guggcaaguucaacaggau

SEQ ID NO: 201891 - RNA, 19 nt, Homo sapiens
  misc_RNA (1)...(19): siRNA sense strand
acaacaauuuggucaacgu

SEQ ID NO: 201892 - RNA, 19 nt, Homo sapiens
  misc_RNA (1)...(19): siRNA sense strand
gacuacaucaggagaagau

SEQ ID NO: 201893 - RNA, 19 nt, Homo sapiens
  misc_RNA (1)...(19): siRNA sense strand
uaauaagccagagaucgaa

SEQ ID NO: 201894 - RNA, 19 nt, Homo sapiens
  misc_RNA (1)...(19): siRNA sense strand
ugucagauucucagcuuau

SEQ ID NO: 201895 - RNA, 19 nt, Homo sapiens
  misc_RNA (1)...(19): siRNA sense strand
ggauauccugcagauuauu

SEQ ID NO: 201896 - RNA, 19 nt, Homo sapiens
  misc_RNA (1)...(19): siRNA sense strand
agcaucaggccaaauguaa

SEQ ID NO: 201897 - RNA, 19 nt, Homo sapiens
  misc_RNA (1)...(19): siRNA sense strand
gcccuuugcuuggaucucu

SEQ ID NO: 201898 - RNA, 19 nt, Homo sapiens
  misc_RNA (1)...(19): siRNA sense strand
gcugaauguuuaugauacg

SEQ ID NO: 201899 - RNA, 19 nt, Homo sapiens
  misc_RNA (1)...(19): siRNA sense strand
agacuuugccaagguacua

SEQ ID NO: 201900 - RNA, 19 nt, Homo sapiens
  misc_RNA (1)...(19): siRNA sense strand
caagcaaguggcaaguuca

SEQ ID NO: 201901 - RNA, 19 nt, Homo sapiens
  misc_RNA (1)...(19): siRNA sense strand
agacaaguacagauaccuu

SEQ ID NO: 201902 - RNA, 19 nt, Homo sapiens
  misc_RNA (1)...(19): siRNA sense strand
gcaucauuucccuguguaa

SEQ ID NO: 201903 - RNA, 19 nt, Homo sapiens
  misc_RNA (1)...(19): siRNA sense strand
cugcaaagaguguccaauc

SEQ ID NO: 201904 - RNA, 19 nt, Homo sapiens
  misc_RNA (1)...(19): siRNA sense strand
cuuauaggacugccaugaa

SEQ ID NO: 201905 - RNA, 19 nt, Homo sapiens
  misc_RNA (1)...(19): siRNA sense strand
caaagaguguccaaucauu

SEQ ID NO: 201906 - RNA, 19 nt, Homo sapiens
  misc_RNA (1)...(19): siRNA sense strand
uagcugaccugaauaaugu

SEQ ID NO: 201907 - RNA, 19 nt, Homo sapiens
  misc_RNA (1)...(19): siRNA sense strand
gcaugauucuauccaaauu

SEQ ID NO: 201908 - RNA, 19 nt, Homo sapiens
  misc_RNA (1)...(19): siRNA sense strand
ugaacuggcugcugaaugu

SEQ ID NO: 201909 - RNA, 19 nt, Homo sapiens
  misc_RNA (1)...(19): siRNA sense strand
gauauccugcagauuauua

SEQ ID NO: 201910 - RNA, 19 nt, Homo sapiens
  misc_RNA (1)...(19): siRNA sense strand
gagaagauguucgagacuu

SEQ ID NO: 201911 - RNA, 19 nt, Homo sapiens
  misc_RNA (1)...(19): siRNA sense strand
gcacuuuaauuaugacauc

SEQ ID NO: 201912 - RNA, 19 nt, Homo sapiens
  misc_RNA (1)...(19): siRNA sense strand
guaaagcacauuuggaaga

SEQ ID NO: 201913 - RNA, 19 nt, Homo sapiens
  misc_RNA (1)...(19): siRNA sense strand
gaauauugcacuccgacua

SEQ ID NO: 201914 - RNA, 19 nt, Homo sapiens
  misc_RNA (1)...(19): siRNA sense strand
uuauaggacugccaugaaa

SEQ ID NO: 201915 - RNA, 19 nt, Homo sapiens
  misc_RNA (1)...(19): siRNA sense strand
gggugaaguugcauccuuu

SEQ ID NO: 201916 - RNA, 19 nt, Homo sapiens
  misc_RNA (1)...(19): siRNA sense strand
gcaagagcacaacaauuug

SEQ ID NO: 201917 - RNA, 19 nt, Homo sapiens
  misc_RNA (1)...(19): siRNA sense strand
gcacaacaauuuggucaac

SEQ ID NO: 201918 - RNA, 19 nt, Homo sapiens
  misc_RNA (1)...(19): siRNA sense strand
agcaagagcacaacaauuu

SEQ ID NO: 201919 - RNA, 19 nt, Homo sapiens
  misc_RNA (1)...(19): siRNA sense strand
agaagauguucgagacuuu

SEQ ID NO: 201920 - RNA, 19 nt, Homo sapiens
  misc_RNA (1)...(19): siRNA sense strand
gagcaagagcacaacaauu

SEQ ID NO: 201921 - RNA, 19 nt, Homo sapiens
  misc_RNA (1)...(19): siRNA sense strand
ucaagcaaguggcaaguuc

SEQ ID NO: 201922 - RNA, 19 nt, Homo sapiens
  misc_RNA (1)...(19): siRNA sense strand
ccacgagacucaaacaacu

SEQ ID NO: 201923 - RNA, 19 nt, Homo sapiens
  misc_RNA (1)...(19): siRNA sense strand
cagcacaaccucaagcaaa

SEQ ID NO: 201924 - RNA, 19 nt, Homo sapiens
  misc_RNA (1)...(19): siRNA sense strand
gcaaagaguguccaaucau

SEQ ID NO: 201925 - RNA, 19 nt, Homo sapiens
  misc_RNA (1)...(19): siRNA sense strand
auggauauccugcagauua

SEQ ID NO: 201926 - RNA, 19 nt, Homo sapiens
  misc_RNA (1)...(19): siRNA sense strand
uguaacaucugcaaagagu

SEQ ID NO: 201927 - RNA, 19 nt, Homo sapiens
  misc_RNA (1)...(19): siRNA sense strand
guccggagcugcuuccaau

SEQ ID NO: 201928 - RNA, 19 nt, Homo sapiens
  misc_RNA (1)...(19): siRNA sense strand
gcaaguggcaaguucaaca

SEQ ID NO: 201929 - RNA, 19 nt, Homo sapiens
  misc_RNA (1)...(19): siRNA sense strand
gcuuccaauuugcuaauaa

SEQ ID NO: 201930 - RNA, 19 nt, Homo sapiens
  misc_RNA (1)...(19): siRNA sense strand
uggaagacaaguacagaua

SEQ ID NO: 201931 - RNA, 19 nt, Homo sapiens
  misc_RNA (1)...(19): siRNA sense strand
ggauccguguccugucuuu

SEQ ID NO: 201932 - RNA, 19 nt, Homo sapiens
  misc_RNA (1)...(19): siRNA sense strand
gucuuuagcugaccugaau

SEQ ID NO: 201933 - RNA, 19 nt, Homo sapiens
  misc_RNA (1)...(19): siRNA sense strand
gacaaguacagauaccuuu

SEQ ID NO: 201934 - RNA, 19 nt, Homo sapiens
  misc_RNA (1)...(19): siRNA sense strand
ccaagcaucaggccaaaug

SEQ ID NO: 201935 - RNA, 19 nt, Homo sapiens
  misc_RNA (1)...(19): siRNA sense strand
ggagcaagagcacaacaau

SEQ ID NO: 201936 - RNA, 19 nt, Homo sapiens
  misc_RNA (1)...(19): siRNA sense strand
guguaaagcacauuuggaa

SEQ ID NO: 201937 - RNA, 19 nt, Homo sapiens
  misc_RNA (1)...(19): siRNA sense strand
caagacaguugggugaagu

SEQ ID NO: 201938 - RNA, 19 nt, Homo sapiens
  misc_RNA (1)...(19): siRNA sense strand
gaagauguucgagacuuug

SEQ ID NO: 201939 - RNA, 19 nt, Homo sapiens
  misc_RNA (1)...(19): siRNA sense strand
gucagauucucagcuuaua

SEQ ID NO: 201940 - RNA, 19 nt, Homo sapiens
  misc_RNA (1)...(19): siRNA sense strand
uaacaucugcaaagagugu

SEQ ID NO: 201941 - RNA, 19 nt, Homo sapiens
  misc_RNA (1)...(19): siRNA sense strand
cggagcugcuuccaauuug

SEQ ID NO: 201942 - RNA, 19 nt, Homo sapiens
  misc_RNA (1)...(19): siRNA sense strand
gaagacaaguacagauacc

SEQ ID NO: 201943 - RNA, 19 nt, Homo sapiens
  misc_RNA (1)...(19): siRNA sense strand
ccauggauauccugcagau

SEQ ID NO: 201944 - RNA, 19 nt, Homo sapiens
  misc_RNA (1)...(19): siRNA sense strand
ggcaucauuucccugugua

SEQ ID NO: 201945 - RNA, 19 nt, Homo sapiens
  misc_RNA (1)...(19): siRNA sense strand
uggauauccugcagauuau

SEQ ID NO: 201946 - RNA, 19 nt, Homo sapiens
  misc_RNA (1)...(19): siRNA sense strand
ggaagacaaguacagauac

SEQ ID NO: 201947 - RNA, 19 nt, Homo sapiens
  misc_RNA (1)...(19): siRNA sense strand
ugcaaagaguguccaauca

SEQ ID NO: 201948 - RNA, 19 nt, Homo sapiens
  misc_RNA (1)...(19): siRNA sense strand
guggauaugugucugaacu

SEQ ID NO: 201949 - RNA, 19 nt, Homo sapiens
  misc_RNA (1)...(19): siRNA sense strand
acuggcugcugaauguuua

SEQ ID NO: 201950 - RNA, 19 nt, Homo sapiens
  misc_RNA (1)...(19): siRNA sense strand
acuaucccaugguggaaua

SEQ ID NO: 201951 - RNA, 19 nt, Homo sapiens
  misc_RNA (1)...(19): siRNA sense strand
ccggagcugcuuccaauuu

SEQ ID NO: 201952 - RNA, 19 nt, Homo sapiens
  misc_RNA (1)...(19): siRNA sense strand
ccaaauuccaagacaguug

SEQ ID NO: 201953 - RNA, 19 nt, Homo sapiens
  misc_RNA (1)...(19): siRNA sense strand
cagaaacugccaagcauca

SEQ ID NO: 201954 - RNA, 19 nt, Homo sapiens
  misc_RNA (1)...(19): siRNA sense strand
uaugacaucugccaaagcu

SEQ ID NO: 201955 - RNA, 19 nt, Homo sapiens
  misc_RNA (1)...(19): siRNA sense strand
aaugucagauucucagcuu

SEQ ID NO: 201956 - RNA, 19 nt, Homo sapiens
  misc_RNA (1)...(19): siRNA sense strand
ucgagacuuugccaaggua

SEQ ID NO: 201957 - RNA, 19 nt, Homo sapiens
  misc_RNA (1)...(19): siRNA sense strand
gcaaaaggccauaaaaugc

SEQ ID NO: 201958 - RNA, 19 nt, Homo sapiens
  misc_RNA (1)...(19): siRNA sense strand
cugcaugauucuauccaaa

SEQ ID NO: 201959 - RNA, 19 nt, Homo sapiens
  misc_RNA (1)...(19): siRNA sense strand
uaaagcacauuuggaagac

SEQ ID NO: 201960 - RNA, 19 nt, Homo sapiens
  misc_RNA (1)...(19): siRNA sense strand
acaggagucuaaagcacuu

SEQ ID NO: 201961 - RNA, 19 nt, Homo sapiens
  misc_RNA (1)...(19): siRNA sense strand
acagauaccuuuucaagca

SEQ ID NO: 201962 - RNA, 19 nt, Homo sapiens
  misc_RNA (1)...(19): siRNA sense strand
aagcacauuuggaagacaa

SEQ ID NO: 201963 - RNA, 19 nt, Homo sapiens
  misc_RNA (1)...(19): siRNA sense strand
gcuaauaauaagccagaga

SEQ ID NO: 201964 - RNA, 19 nt, Homo sapiens
  misc_RNA (1)...(19): siRNA sense strand
caagagcacaacaauuugg

SEQ ID NO: 201965 - RNA, 19 nt, Homo sapiens
  misc_RNA (1)...(19): siRNA sense strand
ccugucagcugcaugugau

SEQ ID NO: 201966 - RNA, 19 nt, Homo sapiens
  misc_RNA (1)...(19): siRNA sense strand
gcugcugaauguuuaugau

SEQ ID NO: 201967 - RNA, 19 nt, Homo sapiens
  misc_RNA (1)...(19): siRNA sense strand
acagagcucuaccagucuu

SEQ ID NO: 201968 - RNA, 19 nt, Homo sapiens
  misc_RNA (1)...(19): siRNA sense strand
acaguugggugaaguugca

SEQ ID NO: 201969 - RNA, 19 nt, Homo sapiens
  misc_RNA (1)...(19): siRNA sense strand
guuugaccacuauuuauga

SEQ ID NO: 201970 - RNA, 19 nt, Homo sapiens
  misc_RNA (1)...(19): siRNA sense strand
gcuuauaggacugccauga

SEQ ID NO: 201971 - RNA, 19 nt, Homo sapiens
  misc_RNA (1)...(19): siRNA sense strand
caucaggccaaauguaaca

SEQ ID NO: 201972 - RNA, 19 nt, Homo sapiens
  misc_RNA (1)...(19): siRNA sense strand
gauucuauccaaauuccaa

SEQ ID NO: 201973 - RNA, 19 nt, Homo sapiens
  misc_RNA (1)...(19): siRNA sense strand
ggcaaguucaacaggauuu

SEQ ID NO: 201974 - RNA, 19 nt, Homo sapiens
  misc_RNA (1)...(19): siRNA sense strand
gaacuggcugcugaauguu

SEQ ID NO: 201975 - RNA, 19 nt, Homo sapiens
  misc_RNA (1)...(19): siRNA sense strand
cugcugaauguuuaugaua

SEQ ID NO: 201976 - RNA, 19 nt, Homo sapiens
  misc_RNA (1)...(19): siRNA sense strand
aagcaucaggccaaaugua

SEQ ID NO: 201977 - RNA, 19 nt, Homo sapiens
  misc_RNA (1)...(19): siRNA sense strand
uggcaucauuucccugugu

SEQ ID NO: 201978 - RNA, 19 nt, Homo sapiens
  misc_RNA (1)...(19): siRNA sense strand
ccaugaaacuccgaagacu

SEQ ID NO: 201979 - RNA, 19 nt, Homo sapiens
  misc_RNA (1)...(19): siRNA sense strand
auaauaagccagagaucga

SEQ ID NO: 201980 - RNA, 19 nt, Homo sapiens
  misc_RNA (1)...(19): siRNA sense strand
cuaauaauaagccagagau

SEQ ID NO: 201981 - RNA, 19 nt, Homo sapiens
  misc_RNA (1)...(19): siRNA sense strand
ugggugaaguugcauccuu

SEQ ID NO: 201982 - RNA, 19 nt, Homo sapiens
  misc_RNA (1)...(19): siRNA sense strand
caucauuucccuguguaaa

SEQ ID NO: 201983 - RNA, 19 nt, Homo sapiens
  misc_RNA (1)...(19): siRNA sense strand
gcguggauaugugucugaa

SEQ ID NO: 201984 - RNA, 19 nt, Homo sapiens
  misc_RNA (1)...(19): siRNA sense strand
gcacuaucccaugguggaa

SEQ ID NO: 201985 - RNA, 19 nt, Homo sapiens
  misc_RNA (1)...(19): siRNA sense strand
gagccugucagcugcaugu

SEQ ID NO: 201986 - RNA, 19 nt, Homo sapiens
  misc_RNA (1)...(19): siRNA sense strand
guacagauaccuuuucaag

SEQ ID NO: 201987 - RNA, 19 nt, Homo sapiens
  misc_RNA (1)...(19): siRNA sense strand
gucccucucugcguggaua

SEQ ID NO: 201988 - RNA, 19 nt, Homo sapiens
  misc_RNA (1)...(19): siRNA sense strand
ggagcugcuuccaauuugc

SEQ ID NO: 201989 - RNA, 19 nt, Homo sapiens
  misc_RNA (1)...(19): siRNA sense strand
uuagcugaccugaauaaug

SEQ ID NO: 201990 - RNA, 19 nt, Homo sapiens
  misc_RNA (1)...(19): siRNA sense strand
guggcaaguucaacaggau

SEQ ID NO: 201991 - RNA, 19 nt, Homo sapiens
  misc_RNA (1)...(19): siRNA sense strand
acaacaauuuggucaacgu

SEQ ID NO: 201992 - RNA, 19 nt, Homo sapiens
  misc_RNA (1)...(19): siRNA sense strand
gacuacaucaggagaagau

SEQ ID NO: 201993 - RNA, 19 nt, Homo sapiens
  misc_RNA (1)...(19): siRNA sense strand
uaauaagccagagaucgaa

SEQ ID NO: 201994 - RNA, 19 nt, Homo sapiens
  misc_RNA (1)...(19): siRNA sense strand
ugucagauucucagcuuau

SEQ ID NO: 201995 - RNA, 19 nt, Homo sapiens
  misc_RNA (1)...(19): siRNA sense strand
ggauauccugcagauuauu

SEQ ID NO: 201996 - RNA, 19 nt, Homo sapiens
  misc_RNA (1)...(19): siRNA sense strand
agcaucaggccaaauguaa

SEQ ID NO: 201997 - RNA, 19 nt, Homo sapiens
  misc_RNA (1)...(19): siRNA sense strand
gcccuuugcuuggaucucu

SEQ ID NO: 201998 - RNA, 19 nt, Homo sapiens
  misc_RNA (1)...(19): siRNA sense strand
gcugaauguuuaugauacg

SEQ ID NO: 201999 - RNA, 19 nt, Homo sapiens
  misc_RNA (1)...(19): siRNA sense strand
agacuuugccaagguacua

SEQ ID NO: 202000 - RNA, 19 nt, Homo sapiens
  misc_RNA (1)...(19): siRNA sense strand
caagcaaguggcaaguuca

SEQ ID NO: 202001 - RNA, 19 nt, Homo sapiens
  misc_RNA (1)...(19): siRNA sense strand
agacaaguacagauaccuu

SEQ ID NO: 202002 - RNA, 19 nt, Homo sapiens
  misc_RNA (1)...(19): siRNA sense strand
gcaucauuucccuguguaa

SEQ ID NO: 202003 - RNA, 19 nt, Homo sapiens
  misc_RNA (1)...(19): siRNA sense strand
cugcaaagaguguccaauc

SEQ ID NO: 202004 - RNA, 19 nt, Homo sapiens
  misc_RNA (1)...(19): siRNA sense strand
cuuauaggacugccaugaa

SEQ ID NO: 202005 - RNA, 19 nt, Homo sapiens
  misc_RNA (1)...(19): siRNA sense strand
caaagaguguccaaucauu

SEQ ID NO: 202006 - RNA, 19 nt, Homo sapiens
  misc_RNA (1)...(19): siRNA sense strand
uagcugaccugaauaaugu

SEQ ID NO: 202007 - RNA, 19 nt, Homo sapiens
  misc_RNA (1)...(19): siRNA sense strand
gcaugauucuauccaaauu

SEQ ID NO: 202008 - RNA, 19 nt, Homo sapiens
  misc_RNA (1)...(19): siRNA sense strand
ugaacuggcugcugaaugu

SEQ ID NO: 202009 - RNA, 19 nt, Homo sapiens
  misc_RNA (1)...(19): siRNA sense strand
gauauccugcagauuauua

SEQ ID NO: 202010 - RNA, 19 nt, Homo sapiens
  misc_RNA (1)...(19): siRNA sense strand
gagaagauguucgagacuu

SEQ ID NO: 202011 - RNA, 19 nt, Homo sapiens
  misc_RNA (1)...(19): siRNA sense strand
gcacuuuaauuaugacauc

SEQ ID NO: 202012 - RNA, 19 nt, Homo sapiens
  misc_RNA (1)...(19): siRNA sense strand
guaaagcacauuuggaaga

SEQ ID NO: 202013 - RNA, 19 nt, Homo sapiens
  misc_RNA (1)...(19): siRNA sense strand
gaauauugcacuccgacua

SEQ ID NO: 202014 - RNA, 19 nt, Homo sapiens
  misc_RNA (1)...(19): siRNA sense strand
uuauaggacugccaugaaa

SEQ ID NO: 202015 - RNA, 19 nt, Homo sapiens
  misc_RNA (1)...(19): siRNA sense strand
gggugaaguugcauccuuu

SEQ ID NO: 202016 - RNA, 19 nt, Homo sapiens
  misc_RNA (1)...(19): siRNA sense strand
gcaagagcacaacaauuug

SEQ ID NO: 202017 - RNA, 19 nt, Homo sapiens
  misc_RNA (1)...(19): siRNA sense strand
gcacaacaauuuggucaac

SEQ ID NO: 202018 - RNA, 19 nt, Homo sapiens
  misc_RNA (1)...(19): siRNA sense strand
agcaagagcacaacaauuu

SEQ ID NO: 202019 - RNA, 19 nt, Homo sapiens
  misc_RNA (1)...(19): siRNA sense strand
agaagauguucgagacuuu

SEQ ID NO: 202020 - RNA, 19 nt, Homo sapiens
  misc_RNA (1)...(19): siRNA sense strand
gagcaagagcacaacaauu

SEQ ID NO: 202021 - RNA, 19 nt, Homo sapiens
  misc_RNA (1)...(19): siRNA sense strand
ucaagcaaguggcaaguuc

SEQ ID NO: 202022 - RNA, 19 nt, Homo sapiens
  misc_RNA (1)...(19): siRNA sense strand
ccacgagacucaaacaacu

SEQ ID NO: 202023 - RNA, 19 nt, Homo sapiens
  misc_RNA (1)...(19): siRNA sense strand
cagcacaaccucaagcaaa

SEQ ID NO: 202024 - RNA, 19 nt, Homo sapiens
  misc_RNA (1)...(19): siRNA sense strand
gcaaagaguguccaaucau

SEQ ID NO: 202025 - RNA, 19 nt, Homo sapiens
  misc_RNA (1)...(19): siRNA sense strand
auggauauccugcagauua

SEQ ID NO: 202026 - RNA, 19 nt, Homo sapiens
  misc_RNA (1)...(19): siRNA sense strand
uguaacaucugcaaagagu

SEQ ID NO: 202027 - RNA, 19 nt, Homo sapiens
  misc_RNA (1)...(19): siRNA sense strand
guccggagcugcuuccaau

SEQ ID NO: 202028 - RNA, 19 nt, Homo sapiens
  misc_RNA (1)...(19): siRNA sense strand
gcaaguggcaaguucaaca

SEQ ID NO: 202029 - RNA, 19 nt, Homo sapiens
  misc_RNA (1)...(19): siRNA sense strand
gcuuccaauuugcuaauaa

SEQ ID NO: 202030 - RNA, 19 nt, Homo sapiens
  misc_RNA (1)...(19): siRNA sense strand
uggaagacaaguacagaua

SEQ ID NO: 202031 - RNA, 19 nt, Homo sapiens
  misc_RNA (1)...(19): siRNA sense strand
ggauccguguccugucuuu

SEQ ID NO: 202032 - RNA, 19 nt, Homo sapiens
  misc_RNA (1)...(19): siRNA sense strand
gucuuuagcugaccugaau

SEQ ID NO: 202033 - RNA, 19 nt, Homo sapiens
  misc_RNA (1)...(19): siRNA sense strand
gacaaguacagauaccuuu

SEQ ID NO: 202034 - RNA, 19 nt, Homo sapiens
  misc_RNA (1)...(19): siRNA sense strand
ccaagcaucaggccaaaug

SEQ ID NO: 202035 - RNA, 19 nt, Homo sapiens
  misc_RNA (1)...(19): siRNA sense strand
ggagcaagagcacaacaau

SEQ ID NO: 202036 - RNA, 19 nt, Homo sapiens
  misc_RNA (1)...(19): siRNA sense strand
guguaaagcacauuuggaa

SEQ ID NO: 202037 - RNA, 19 nt, Homo sapiens
  misc_RNA (1)...(19): siRNA sense strand
caagacaguugggugaagu

SEQ ID NO: 202038 - RNA, 19 nt, Homo sapiens
  misc_RNA (1)...(19): siRNA sense strand
gaagauguucgagacuuug

SEQ ID NO: 202039 - RNA, 19 nt, Homo sapiens
  misc_RNA (1)...(19): siRNA sense strand
gucagauucucagcuuaua

SEQ ID NO: 202040 - RNA, 19 nt, Homo sapiens
  misc_RNA (1)...(19): siRNA sense strand
uaacaucugcaaagagugu

SEQ ID NO: 202041 - RNA, 19 nt, Homo sapiens
  misc_RNA (1)...(19): siRNA sense strand
cggagcugcuuccaauuug

SEQ ID NO: 202042 - RNA, 19 nt, Homo sapiens
  misc_RNA (1)...(19): siRNA sense strand
gaagacaaguacagauacc

SEQ ID NO: 202043 - RNA, 19 nt, Homo sapiens
  misc_RNA (1)...(19): siRNA sense strand
ccauggauauccugcagau

SEQ ID NO: 202044 - RNA, 19 nt, Homo sapiens
  misc_RNA (1)...(19): siRNA sense strand
ggcaucauuucccugugua

SEQ ID NO: 202045 - RNA, 19 nt, Homo sapiens
  misc_RNA (1)...(19): siRNA sense strand
uggauauccugcagauuau

SEQ ID NO: 202046 - RNA, 19 nt, Homo sapiens
  misc_RNA (1)...(19): siRNA sense strand
ggaagacaaguacagauac

SEQ ID NO: 202047 - RNA, 19 nt, Homo sapiens
  misc_RNA (1)...(19): siRNA sense strand
ugcaaagaguguccaauca

SEQ ID NO: 202048 - RNA, 19 nt, Homo sapiens
  misc_RNA (1)...(19): siRNA sense strand
guggauaugugucugaacu

SEQ ID NO: 202049 - RNA, 19 nt, Homo sapiens
  misc_RNA (1)...(19): siRNA sense strand
acuggcugcugaauguuua

SEQ ID NO: 202050 - RNA, 19 nt, Homo sapiens
  misc_RNA (1)...(19): siRNA sense strand
acuaucccaugguggaaua

SEQ ID NO: 202051 - RNA, 19 nt, Homo sapiens
  misc_RNA (1)...(19): siRNA sense strand
ccggagcugcuuccaauuu

SEQ ID NO: 202052 - RNA, 19 nt, Homo sapiens
  misc_RNA (1)...(19): siRNA sense strand
ccaaauuccaagacaguug

SEQ ID NO: 202053 - RNA, 19 nt, Homo sapiens
  misc_RNA (1)...(19): siRNA sense strand
cagaaacugccaagcauca

SEQ ID NO: 202054 - RNA, 19 nt, Homo sapiens
  misc_RNA (1)...(19): siRNA sense strand
uaugacaucugccaaagcu

SEQ ID NO: 202055 - RNA, 19 nt, Homo sapiens
  misc_RNA (1)...(19): siRNA sense strand
aaugucagauucucagcuu

SEQ ID NO: 202056 - RNA, 19 nt, Homo sapiens
  misc_RNA (1)...(19): siRNA sense strand
ucgagacuuugccaaggua

SEQ ID NO: 202057 - RNA, 19 nt, Homo sapiens
  misc_RNA (1)...(19): siRNA sense strand
gcaaaaggccauaaaaugc

SEQ ID NO: 202058 - RNA, 19 nt, Homo sapiens
  misc_RNA (1)...(19): siRNA sense strand
cugcaugauucuauccaaa

SEQ ID NO: 202059 - RNA, 19 nt, Homo sapiens
  misc_RNA (1)...(19): siRNA sense strand
uaaagcacauuuggaagac

SEQ ID NO: 202060 - RNA, 19 nt, Homo sapiens
  misc_RNA (1)...(19): siRNA sense strand
acaggagucuaaagcacuu

SEQ ID NO: 202061 - RNA, 19 nt, Homo sapiens
  misc_RNA (1)...(19): siRNA sense strand
acagauaccuuuucaagca

SEQ ID NO: 202062 - RNA, 19 nt, Homo sapiens
  misc_RNA (1)...(19): siRNA sense strand
aagcacauuuggaagacaa

SEQ ID NO: 202063 - RNA, 19 nt, Homo sapiens
  misc_RNA (1)...(19): siRNA sense strand
gcuaauaauaagccagaga

SEQ ID NO: 202064 - RNA, 19 nt, Homo sapiens
  misc_RNA (1)...(19): siRNA sense strand
caagagcacaacaauuugg

SEQ ID NO: 202065 - RNA, 19 nt, Homo sapiens
  misc_RNA (1)...(19): siRNA sense strand
ccugucagcugcaugugau

SEQ ID NO: 202066 - RNA, 19 nt, Homo sapiens
  misc_RNA (1)...(19): siRNA sense strand
gcugcugaauguuuaugau

SEQ ID NO: 202067 - RNA, 19 nt, Homo sapiens
  misc_RNA (1)...(19): siRNA sense strand
acagagcucuaccagucuu

SEQ ID NO: 202068 - RNA, 19 nt, Homo sapiens
  misc_RNA (1)...(19): siRNA sense strand
acaguugggugaaguugca

SEQ ID NO: 202069 - RNA, 19 nt, Homo sapiens
  misc_RNA (1)...(19): siRNA sense strand
guuugaccacuauuuauga

SEQ ID NO: 202070 - RNA, 19 nt, Homo sapiens
  misc_RNA (1)...(19): siRNA sense strand
gcuuauaggacugccauga

SEQ ID NO: 202071 - RNA, 19 nt, Homo sapiens
  misc_RNA (1)...(19): siRNA sense strand
caucaggccaaauguaaca

SEQ ID NO: 202072 - RNA, 19 nt, Homo sapiens
  misc_RNA (1)...(19): siRNA sense strand
gauucuauccaaauuccaa

SEQ ID NO: 202073 - RNA, 19 nt, Homo sapiens
  misc_RNA (1)...(19): siRNA sense strand
ggcaaguucaacaggauuu

SEQ ID NO: 202074 - RNA, 19 nt, Homo sapiens
  misc_RNA (1)...(19): siRNA sense strand
gaacuggcugcugaauguu

SEQ ID NO: 202075 - RNA, 19 nt, Homo sapiens
  misc_RNA (1)...(19): siRNA sense strand
cugcugaauguuuaugaua

SEQ ID NO: 202076 - RNA, 19 nt, Homo sapiens
  misc_RNA (1)...(19): siRNA sense strand
aagcaucaggccaaaugua

SEQ ID NO: 202077 - RNA, 19 nt, Homo sapiens
  misc_RNA (1)...(19): siRNA sense strand
uggcaucauuucccugugu

SEQ ID NO: 202078 - RNA, 19 nt, Homo sapiens
  misc_RNA (1)...(19): siRNA sense strand
ccaugaaacuccgaagacu

SEQ ID NO: 202079 - RNA, 19 nt, Homo sapiens
  misc_RNA (1)...(19): siRNA sense strand
auaauaagccagagaucga

SEQ ID NO: 202080 - RNA, 19 nt, Homo sapiens
  misc_RNA (1)...(19): siRNA sense strand
cuaauaauaagccagagau

SEQ ID NO: 202081 - RNA, 19 nt, Homo sapiens
  misc_RNA (1)...(19): siRNA sense strand
ugggugaaguugcauccuu

SEQ ID NO: 202082 - RNA, 19 nt, Homo sapiens
  misc_RNA (1)...(19): siRNA sense strand
caucauuucccuguguaaa

SEQ ID NO: 202083 - RNA, 19 nt, Homo sapiens
  misc_RNA (1)...(19): siRNA sense strand
gcguggauaugugucugaa

SEQ ID NO: 202084 - RNA, 19 nt, Homo sapiens
  misc_RNA (1)...(19): siRNA sense strand
gcacuaucccaugguggaa

SEQ ID NO: 202085 - RNA, 19 nt, Homo sapiens
  misc_RNA (1)...(19): siRNA sense strand
gagccugucagcugcaugu

SEQ ID NO: 202086 - RNA, 19 nt, Homo sapiens
  misc_RNA (1)...(19): siRNA sense strand
guacagauaccuuuucaag

SEQ ID NO: 202087 - RNA, 19 nt, Homo sapiens
  misc_RNA (1)...(19): siRNA sense strand
gucccucucugcguggaua

SEQ ID NO: 202088 - RNA, 19 nt, Homo sapiens
  misc_RNA (1)...(19): siRNA sense strand
ggagcugcuuccaauuugc

SEQ ID NO: 202089 - RNA, 19 nt, Homo sapiens
  misc_RNA (1)...(19): siRNA sense strand
uuagcugaccugaauaaug

SEQ ID NO: 202090 - RNA, 19 nt, Homo sapiens
  misc_RNA (1)...(19): siRNA sense strand
guggcaaguucaacaggau

SEQ ID NO: 202091 - RNA, 19 nt, Homo sapiens
  misc_RNA (1)...(19): siRNA sense strand
acaacaauuuggucaacgu

SEQ ID NO: 202092 - RNA, 19 nt, Homo sapiens
  misc_RNA (1)...(19): siRNA sense strand
gacuacaucaggagaagau

SEQ ID NO: 202093 - RNA, 19 nt, Homo sapiens
  misc_RNA (1)...(19): siRNA sense strand
uaauaagccagagaucgaa

SEQ ID NO: 202094 - RNA, 19 nt, Homo sapiens
  misc_RNA (1)...(19): siRNA sense strand
ugucagauucucagcuuau

SEQ ID NO: 202095 - RNA, 19 nt, Homo sapiens
  misc_RNA (1)...(19): siRNA sense strand
ggauauccugcagauuauu

SEQ ID NO: 202096 - RNA, 19 nt, Homo sapiens
  misc_RNA (1)...(19): siRNA sense strand
agcaucaggccaaauguaa

SEQ ID NO: 202097 - RNA, 19 nt, Homo sapiens
  misc_RNA (1)...(19): siRNA sense strand
gcccuuugcuuggaucucu

SEQ ID NO: 202098 - RNA, 19 nt, Homo sapiens
  misc_RNA (1)...(19): siRNA sense strand
gcugaauguuuaugauacg

SEQ ID NO: 202099 - RNA, 19 nt, Homo sapiens
  misc_RNA (1)...(19): siRNA sense strand
agacuuugccaagguacua

SEQ ID NO: 202100 - RNA, 19 nt, Homo sapiens
  misc_RNA (1)...(19): siRNA sense strand
caagcaaguggcaaguuca

SEQ ID NO: 202101 - RNA, 19 nt, Homo sapiens
  misc_RNA (1)...(19): siRNA sense strand
agacaaguacagauaccuu

SEQ ID NO: 202102 - RNA, 19 nt, Homo sapiens
  misc_RNA (1)...(19): siRNA sense strand
gcaucauuucccuguguaa

SEQ ID NO: 202103 - RNA, 19 nt, Homo sapiens
  misc_RNA (1)...(19): siRNA sense strand
cugcaaagaguguccaauc

SEQ ID NO: 202104 - RNA, 19 nt, Homo sapiens
  misc_RNA (1)...(19): siRNA sense strand
cuuauaggacugccaugaa

SEQ ID NO: 202105 - RNA, 19 nt, Homo sapiens
  misc_RNA (1)...(19): siRNA sense strand
caaagaguguccaaucauu

SEQ ID NO: 202106 - RNA, 19 nt, Homo sapiens
  misc_RNA (1)...(19): siRNA sense strand
uagcugaccugaauaaugu

SEQ ID NO: 202107 - RNA, 19 nt, Homo sapiens
  misc_RNA (1)...(19): siRNA sense strand
gcaugauucuauccaaauu

SEQ ID NO: 202108 - RNA, 19 nt, Homo sapiens
  misc_RNA (1)...(19): siRNA sense strand
ugaacuggcugcugaaugu

SEQ ID NO: 202109 - RNA, 19 nt, Homo sapiens
  misc_RNA (1)...(19): siRNA sense strand
gauauccugcagauuauua

SEQ ID NO: 202110 - RNA, 19 nt, Homo sapiens
  misc_RNA (1)...(19): siRNA sense strand
gagaagauguucgagacuu

SEQ ID NO: 202111 - RNA, 19 nt, Homo sapiens
  misc_RNA (1)...(19): siRNA sense strand
gcacuuuaauuaugacauc

SEQ ID NO: 202112 - RNA, 19 nt, Homo sapiens
  misc_RNA (1)...(19): siRNA sense strand
guaaagcacauuuggaaga

SEQ ID NO: 202113 - RNA, 19 nt, Homo sapiens
  misc_RNA (1)...(19): siRNA sense strand
gaauauugcacuccgacua

SEQ ID NO: 202114 - RNA, 19 nt, Homo sapiens
  misc_RNA (1)...(19): siRNA sense strand
uuauaggacugccaugaaa

SEQ ID NO: 202115 - RNA, 19 nt, Homo sapiens
  misc_RNA (1)...(19): siRNA sense strand
gggugaaguugcauccuuu

SEQ ID NO: 202116 - RNA, 19 nt, Homo sapiens
  misc_RNA (1)...(19): siRNA sense strand
gcaagagcacaacaauuug

SEQ ID NO: 202117 - RNA, 19 nt, Homo sapiens
  misc_RNA (1)...(19): siRNA sense strand
gcacaacaauuuggucaac

SEQ ID NO: 202118 - RNA, 19 nt, Homo sapiens
  misc_RNA (1)...(19): siRNA sense strand
agcaagagcacaacaauuu

SEQ ID NO: 202119 - RNA, 19 nt, Homo sapiens
  misc_RNA (1)...(19): siRNA sense strand
agaagauguucgagacuuu

SEQ ID NO: 202120 - RNA, 19 nt, Homo sapiens
  misc_RNA (1)...(19): siRNA sense strand
gagcaagagcacaacaauu

SEQ ID NO: 202121 - RNA, 19 nt, Homo sapiens
  misc_RNA (1)...(19): siRNA sense strand
ucaagcaaguggcaaguuc

SEQ ID NO: 202122 - RNA, 19 nt, Homo sapiens
  misc_RNA (1)...(19): siRNA sense strand
ccacgagacucaaacaacu

SEQ ID NO: 202123 - RNA, 19 nt, Homo sapiens
  misc_RNA (1)...(19): siRNA sense strand
cagcacaaccucaagcaaa

SEQ ID NO: 202124 - RNA, 19 nt, Homo sapiens
  misc_RNA (1)...(19): siRNA sense strand
gcaaagaguguccaaucau

SEQ ID NO: 202125 - RNA, 19 nt, Homo sapiens
  misc_RNA (1)...(19): siRNA sense strand
auggauauccugcagauua

SEQ ID NO: 202126 - RNA, 19 nt, Homo sapiens
  misc_RNA (1)...(19): siRNA sense strand
uguaacaucugcaaagagu

SEQ ID NO: 202127 - RNA, 19 nt, Homo sapiens
  misc_RNA (1)...(19): siRNA sense strand
guccggagcugcuuccaau

SEQ ID NO: 202128 - RNA, 19 nt, Homo sapiens
  misc_RNA (1)...(19): siRNA sense strand
gcaaguggcaaguucaaca

SEQ ID NO: 202129 - RNA, 19 nt, Homo sapiens
  misc_RNA (1)...(19): siRNA sense strand
gcuuccaauuugcuaauaa

SEQ ID NO: 202130 - RNA, 19 nt, Homo sapiens
  misc_RNA (1)...(19): siRNA sense strand
uggaagacaaguacagaua

SEQ ID NO: 202131 - RNA, 19 nt, Homo sapiens
  misc_RNA (1)...(19): siRNA sense strand
ggauccguguccugucuuu

SEQ ID NO: 202132 - RNA, 19 nt, Homo sapiens
  misc_RNA (1)...(19): siRNA sense strand
gucuuuagcugaccugaau

SEQ ID NO: 202133 - RNA, 19 nt, Homo sapiens
  misc_RNA (1)...(19): siRNA sense strand
gacaaguacagauaccuuu

SEQ ID NO: 202134 - RNA, 19 nt, Homo sapiens
  misc_RNA (1)...(19): siRNA sense strand
ccaagcaucaggccaaaug

SEQ ID NO: 202135 - RNA, 19 nt, Homo sapiens
  misc_RNA (1)...(19): siRNA sense strand
ggagcaagagcacaacaau

SEQ ID NO: 202136 - RNA, 19 nt, Homo sapiens
  misc_RNA (1)...(19): siRNA sense strand
guguaaagcacauuuggaa

SEQ ID NO: 202137 - RNA, 19 nt, Homo sapiens
  misc_RNA (1)...(19): siRNA sense strand
caagacaguugggugaagu

SEQ ID NO: 202138 - RNA, 19 nt, Homo sapiens
  misc_RNA (1)...(19): siRNA sense strand
gaagauguucgagacuuug

SEQ ID NO: 202139 - RNA, 19 nt, Homo sapiens
  misc_RNA (1)...(19): siRNA sense strand
gucagauucucagcuuaua

SEQ ID NO: 202140 - RNA, 19 nt, Homo sapiens
  misc_RNA (1)...(19): siRNA sense strand
uaacaucugcaaagagugu

SEQ ID NO: 202141 - RNA, 19 nt, Homo sapiens
  misc_RNA (1)...(19): siRNA sense strand
cggagcugcuuccaauuug

SEQ ID NO: 202142 - RNA, 19 nt, Homo sapiens
  misc_RNA (1)...(19): siRNA sense strand
gaagacaaguacagauacc

SEQ ID NO: 202143 - RNA, 19 nt, Homo sapiens
  misc_RNA (1)...(19): siRNA sense strand
ccauggauauccugcagau

SEQ ID NO: 202144 - RNA, 19 nt, Homo sapiens
  misc_RNA (1)...(19): siRNA sense strand
ggcaucauuucccugugua

SEQ ID NO: 202145 - RNA, 19 nt, Homo sapiens
  misc_RNA (1)...(19): siRNA sense strand
uggauauccugcagauuau

SEQ ID NO: 202146 - RNA, 19 nt, Homo sapiens
  misc_RNA (1)...(19): siRNA sense strand
ggaagacaaguacagauac

SEQ ID NO: 202147 - RNA, 19 nt, Homo sapiens
  misc_RNA (1)...(19): siRNA sense strand
ugcaaagaguguccaauca

SEQ ID NO: 202148 - RNA, 19 nt, Homo sapiens
  misc_RNA (1)...(19): siRNA sense strand
guggauaugugucugaacu

SEQ ID NO: 202149 - RNA, 19 nt, Homo sapiens
  misc_RNA (1)...(19): siRNA sense strand
acuggcugcugaauguuua

SEQ ID NO: 202150 - RNA, 19 nt, Homo sapiens
  misc_RNA (1)...(19): siRNA sense strand
acuaucccaugguggaaua

SEQ ID NO: 202151 - RNA, 19 nt, Homo sapiens
  misc_RNA (1)...(19): siRNA sense strand
ccggagcugcuuccaauuu

SEQ ID NO: 202152 - RNA, 19 nt, Homo sapiens
  misc_RNA (1)...(19): siRNA sense strand
ccaaauuccaagacaguug

SEQ ID NO: 202153 - RNA, 19 nt, Homo sapiens
  misc_RNA (1)...(19): siRNA sense strand
cagaaacugccaagcauca

SEQ ID NO: 202154 - RNA, 19 nt, Homo sapiens
  misc_RNA (1)...(19): siRNA sense strand
uaugacaucugccaaagcu

SEQ ID NO: 202155 - RNA, 19 nt, Homo sapiens
  misc_RNA (1)...(19): siRNA sense strand
aaugucagauucucagcuu

SEQ ID NO: 202156 - RNA, 19 nt, Homo sapiens
  misc_RNA (1)...(19): siRNA sense strand
ucgagacuuugccaaggua

SEQ ID NO: 202157 - RNA, 19 nt, Homo sapiens
  misc_RNA (1)...(19): siRNA sense strand
gcaaaaggccauaaaaugc

SEQ ID NO: 202158 - RNA, 19 nt, Homo sapiens
  misc_RNA (1)...(19): siRNA sense strand
cugcaugauucuauccaaa

SEQ ID NO: 202159 - RNA, 19 nt, Homo sapiens
  misc_RNA (1)...(19): siRNA sense strand
uaaagcacauuuggaagac

SEQ ID NO: 202160 - RNA, 19 nt, Homo sapiens
  misc_RNA (1)...(19): siRNA sense strand
acaggagucuaaagcacuu

SEQ ID NO: 202161 - RNA, 19 nt, Homo sapiens
  misc_RNA (1)...(19): siRNA sense strand
acagauaccuuuucaagca

SEQ ID NO: 202162 - RNA, 19 nt, Homo sapiens
  misc_RNA (1)...(19): siRNA sense strand
aagcacauuuggaagacaa

SEQ ID NO: 202163 - RNA, 19 nt, Homo sapiens
  misc_RNA (1)...(19): siRNA sense strand
gcuaauaauaagccagaga

SEQ ID NO: 202164 - RNA, 19 nt, Homo sapiens
  misc_RNA (1)...(19): siRNA sense strand
caagagcacaacaauuugg

SEQ ID NO: 202165 - RNA, 19 nt, Homo sapiens
  misc_RNA (1)...(19): siRNA sense strand
ccugucagcugcaugugau

SEQ ID NO: 202166 - RNA, 19 nt, Homo sapiens
  misc_RNA (1)...(19): siRNA sense strand
gcugcugaauguuuaugau

SEQ ID NO: 202167 - RNA, 19 nt, Homo sapiens
  misc_RNA (1)...(19): siRNA sense strand
acagagcucuaccagucuu

SEQ ID NO: 202168 - RNA, 19 nt, Homo sapiens
  misc_RNA (1)...(19): siRNA sense strand
acaguugggugaaguugca

SEQ ID NO: 202169 - RNA, 19 nt, Homo sapiens
  misc_RNA (1)...(19): siRNA sense strand
guuugaccacuauuuauga

SEQ ID NO: 202170 - RNA, 19 nt, Homo sapiens
  misc_RNA (1)...(19): siRNA sense strand
gcuuauaggacugccauga

SEQ ID NO: 202171 - RNA, 19 nt, Homo sapiens
  misc_RNA (1)...(19): siRNA sense strand
caucaggccaaauguaaca

SEQ ID NO: 202172 - RNA, 19 nt, Homo sapiens
  misc_RNA (1)...(19): siRNA sense strand
gauucuauccaaauuccaa

SEQ ID NO: 202173 - RNA, 19 nt, Homo sapiens
  misc_RNA (1)...(19): siRNA sense strand
ggcaaguucaacaggauuu

SEQ ID NO: 202174 - RNA, 19 nt, Homo sapiens
  misc_RNA (1)...(19): siRNA sense strand
gaacuggcugcugaauguu

SEQ ID NO: 202175 - RNA, 19 nt, Homo sapiens
  misc_RNA (1)...(19): siRNA sense strand
cugcugaauguuuaugaua

SEQ ID NO: 202176 - RNA, 19 nt, Homo sapiens
  misc_RNA (1)...(19): siRNA sense strand
aagcaucaggccaaaugua

SEQ ID NO: 202177 - RNA, 19 nt, Homo sapiens
  misc_RNA (1)...(19): siRNA sense strand
uggcaucauuucccugugu

SEQ ID NO: 202178 - RNA, 19 nt, Homo sapiens
  misc_RNA (1)...(19): siRNA sense strand
ccaugaaacuccgaagacu

SEQ ID NO: 202179 - RNA, 19 nt, Homo sapiens
  misc_RNA (1)...(19): siRNA sense strand
auaauaagccagagaucga

SEQ ID NO: 202180 - RNA, 19 nt, Homo sapiens
  misc_RNA (1)...(19): siRNA sense strand
cuaauaauaagccagagau

SEQ ID NO: 202181 - RNA, 19 nt, Homo sapiens
  misc_RNA (1)...(19): siRNA sense strand
ugggugaaguugcauccuu

SEQ ID NO: 202182 - RNA, 19 nt, Homo sapiens
  misc_RNA (1)...(19): siRNA sense strand
caucauuucccuguguaaa

SEQ ID NO: 202183 - RNA, 19 nt, Homo sapiens
  misc_RNA (1)...(19): siRNA sense strand
gcguggauaugugucugaa

SEQ ID NO: 202184 - RNA, 19 nt, Homo sapiens
  misc_RNA (1)...(19): siRNA sense strand
gcacuaucccaugguggaa

SEQ ID NO: 202185 - RNA, 19 nt, Homo sapiens
  misc_RNA (1)...(19): siRNA sense strand
gagccugucagcugcaugu

SEQ ID NO: 202186 - RNA, 19 nt, Homo sapiens
  misc_RNA (1)...(19): siRNA sense strand
guacagauaccuuuucaag

SEQ ID NO: 202187 - RNA, 19 nt, Homo sapiens
  misc_RNA (1)...(19): siRNA sense strand
gucccucucugcguggaua

SEQ ID NO: 202188 - RNA, 19 nt, Homo sapiens
  misc_RNA (1)...(19): siRNA sense strand
ggagcugcuuccaauuugc

SEQ ID NO: 202189 - RNA, 19 nt, Homo sapiens
  misc_RNA (1)...(19): siRNA sense strand
uuagcugaccugaauaaug

SEQ ID NO: 202190 - RNA, 19 nt, Homo sapiens
  misc_RNA (1)...(19): siRNA sense strand
guggcaaguucaacaggau

SEQ ID NO: 202191 - RNA, 19 nt, Homo sapiens
  misc_RNA (1)...(19): siRNA sense strand
acaacaauuuggucaacgu

SEQ ID NO: 202192 - RNA, 19 nt, Homo sapiens
  misc_RNA (1)...(19): siRNA sense strand
gacuacaucaggagaagau

SEQ ID NO: 202193 - RNA, 19 nt, Homo sapiens
  misc_RNA (1)...(19): siRNA sense strand
uaauaagccagagaucgaa

SEQ ID NO: 202194 - RNA, 19 nt, Homo sapiens
  misc_RNA (1)...(19): siRNA sense strand
ugucagauucucagcuuau

SEQ ID NO: 202195 - RNA, 19 nt, Homo sapiens
  misc_RNA (1)...(19): siRNA sense strand
ggauauccugcagauuauu

SEQ ID NO: 202196 - RNA, 19 nt, Homo sapiens
  misc_RNA (1)...(19): siRNA sense strand
agcaucaggccaaauguaa

SEQ ID NO: 202197 - RNA, 19 nt, Homo sapiens
  misc_RNA (1)...(19): siRNA sense strand
gcccuuugcuuggaucucu

SEQ ID NO: 202198 - RNA, 19 nt, Homo sapiens
  misc_RNA (1)...(19): siRNA sense strand
gcugaauguuuaugauacg

SEQ ID NO: 202199 - RNA, 19 nt, Homo sapiens
  misc_RNA (1)...(19): siRNA sense strand
agacuuugccaagguacua

SEQ ID NO: 202200 - RNA, 19 nt, Homo sapiens
  misc_RNA (1)...(19): siRNA sense strand
caagcaaguggcaaguuca

SEQ ID NO: 202201 - RNA, 19 nt, Homo sapiens
  misc_RNA (1)...(19): siRNA sense strand
agacaaguacagauaccuu

SEQ ID NO: 202202 - RNA, 19 nt, Homo sapiens
  misc_RNA (1)...(19): siRNA sense strand
gcaucauuucccuguguaa

SEQ ID NO: 202203 - RNA, 19 nt, Homo sapiens
  misc_RNA (1)...(19): siRNA sense strand
cugcaaagaguguccaauc

SEQ ID NO: 202204 - RNA, 19 nt, Homo sapiens
  misc_RNA (1)...(19): siRNA sense strand
cuuauaggacugccaugaa

SEQ ID NO: 202205 - RNA, 19 nt, Homo sapiens
  misc_RNA (1)...(19): siRNA sense strand
caaagaguguccaaucauu

SEQ ID NO: 202206 - RNA, 19 nt, Homo sapiens
  misc_RNA (1)...(19): siRNA sense strand
uagcugaccugaauaaugu

SEQ ID NO: 202207 - RNA, 19 nt, Homo sapiens
  misc_RNA (1)...(19): siRNA sense strand
gcaugauucuauccaaauu

SEQ ID NO: 202208 - RNA, 19 nt, Homo sapiens
  misc_RNA (1)...(19): siRNA sense strand
ugaacuggcugcugaaugu

SEQ ID NO: 202209 - RNA, 19 nt, Homo sapiens
  misc_RNA (1)...(19): siRNA sense strand
gauauccugcagauuauua

SEQ ID NO: 202210 - RNA, 19 nt, Homo sapiens
  misc_RNA (1)...(19): siRNA sense strand
gagaagauguucgagacuu

SEQ ID NO: 202211 - RNA, 19 nt, Homo sapiens
  misc_RNA (1)...(19): siRNA sense strand
gcacuuuaauuaugacauc

SEQ ID NO: 202212 - RNA, 19 nt, Homo sapiens
  misc_RNA (1)...(19): siRNA sense strand
guaaagcacauuuggaaga

SEQ ID NO: 202213 - RNA, 19 nt, Homo sapiens
  misc_RNA (1)...(19): siRNA sense strand
gaauauugcacuccgacua

SEQ ID NO: 202214 - RNA, 19 nt, Homo sapiens
  misc_RNA (1)...(19): siRNA sense strand
uuauaggacugccaugaaa

SEQ ID NO: 202215 - RNA, 19 nt, Homo sapiens
  misc_RNA (1)...(19): siRNA sense strand
gggugaaguugcauccuuu

SEQ ID NO: 202216 - RNA, 19 nt, Homo sapiens
  misc_RNA (1)...(19): siRNA sense strand
gcaagagcacaacaauuug

SEQ ID NO: 202217 - RNA, 19 nt, Homo sapiens
  misc_RNA (1)...(19): siRNA sense strand
gcacaacaauuuggucaac

SEQ ID NO: 202218 - RNA, 19 nt, Homo sapiens
  misc_RNA (1)...(19): siRNA sense strand
agcaagagcacaacaauuu

SEQ ID NO: 202219 - RNA, 19 nt, Homo sapiens
  misc_RNA (1)...(19): siRNA sense strand
agaagauguucgagacuuu

SEQ ID NO: 202220 - RNA, 19 nt, Homo sapiens
  misc_RNA (1)...(19): siRNA sense strand
gagcaagagcacaacaauu

SEQ ID NO: 202221 - RNA, 19 nt, Homo sapiens
  misc_RNA (1)...(19): siRNA sense strand
ucaagcaaguggcaaguuc

SEQ ID NO: 202222 - RNA, 19 nt, Homo sapiens
  misc_RNA (1)...(19): siRNA sense strand
ccacgagacucaaacaacu

SEQ ID NO: 202223 - RNA, 19 nt, Homo sapiens
  misc_RNA (1)...(19): siRNA sense strand
cagcacaaccucaagcaaa

SEQ ID NO: 202224 - RNA, 19 nt, Homo sapiens
  misc_RNA (1)...(19): siRNA sense strand
gcaaagaguguccaaucau

SEQ ID NO: 202225 - RNA, 19 nt, Homo sapiens
  misc_RNA (1)...(19): siRNA sense strand
auggauauccugcagauua

SEQ ID NO: 202226 - RNA, 19 nt, Homo sapiens
  misc_RNA (1)...(19): siRNA sense strand
uguaacaucugcaaagagu

SEQ ID NO: 202227 - RNA, 19 nt, Homo sapiens
  misc_RNA (1)...(19): siRNA sense strand
guccggagcugcuuccaau

SEQ ID NO: 202228 - RNA, 19 nt, Homo sapiens
  misc_RNA (1)...(19): siRNA sense strand
gcaaguggcaaguucaaca

SEQ ID NO: 202229 - RNA, 19 nt, Homo sapiens
  misc_RNA (1)...(19): siRNA sense strand
gcuuccaauuugcuaauaa

SEQ ID NO: 202230 - RNA, 19 nt, Homo sapiens
  misc_RNA (1)...(19): siRNA sense strand
uggaagacaaguacagaua

SEQ ID NO: 202231 - RNA, 19 nt, Homo sapiens
  misc_RNA (1)...(19): siRNA sense strand
ggauccguguccugucuuu

SEQ ID NO: 202232 - RNA, 19 nt, Homo sapiens
  misc_RNA (1)...(19): siRNA sense strand
gucuuuagcugaccugaau

SEQ ID NO: 202233 - RNA, 19 nt, Homo sapiens
  misc_RNA (1)...(19): siRNA sense strand
gacaaguacagauaccuuu

SEQ ID NO: 202234 - RNA, 19 nt, Homo sapiens
  misc_RNA (1)...(19): siRNA sense strand
ccaagcaucaggccaaaug

SEQ ID NO: 202235 - RNA, 19 nt, Homo sapiens
  misc_RNA (1)...(19): siRNA sense strand
ggagcaagagcacaacaau

SEQ ID NO: 202236 - RNA, 19 nt, Homo sapiens
  misc_RNA (1)...(19): siRNA sense strand
guguaaagcacauuuggaa

SEQ ID NO: 202237 - RNA, 19 nt, Homo sapiens
  misc_RNA (1)...(19): siRNA sense strand
caagacaguugggugaagu

SEQ ID NO: 202238 - RNA, 19 nt, Homo sapiens
  misc_RNA (1)...(19): siRNA sense strand
gaagauguucgagacuuug

SEQ ID NO: 202239 - RNA, 19 nt, Homo sapiens
  misc_RNA (1)...(19): siRNA sense strand
gucagauucucagcuuaua

SEQ ID NO: 202240 - RNA, 19 nt, Homo sapiens
  misc_RNA (1)...(19): siRNA sense strand
uaacaucugcaaagagugu

SEQ ID NO: 202241 - RNA, 19 nt, Homo sapiens
  misc_RNA (1)...(19): siRNA sense strand
cggagcugcuuccaauuug

SEQ ID NO: 202242 - RNA, 19 nt, Homo sapiens
  misc_RNA (1)...(19): siRNA sense strand
gaagacaaguacagauacc

SEQ ID NO: 202243 - RNA, 19 nt, Homo sapiens
  misc_RNA (1)...(19): siRNA sense strand
ccauggauauccugcagau

SEQ ID NO: 202244 - RNA, 19 nt, Homo sapiens
  misc_RNA (1)...(19): siRNA sense strand
ggcaucauuucccugugua

SEQ ID NO: 202245 - RNA, 19 nt, Homo sapiens
  misc_RNA (1)...(19): siRNA sense strand
uggauauccugcagauuau

SEQ ID NO: 202246 - RNA, 19 nt, Homo sapiens
  misc_RNA (1)...(19): siRNA sense strand
ggaagacaaguacagauac

SEQ ID NO: 202247 - RNA, 19 nt, Homo sapiens
  misc_RNA (1)...(19): siRNA sense strand
ugcaaagaguguccaauca

SEQ ID NO: 202248 - RNA, 19 nt, Homo sapiens
  misc_RNA (1)...(19): siRNA sense strand
guggauaugugucugaacu

SEQ ID NO: 202249 - RNA, 19 nt, Homo sapiens
  misc_RNA (1)...(19): siRNA sense strand
acuggcugcugaauguuua

SEQ ID NO: 202250 - RNA, 19 nt, Homo sapiens
  misc_RNA (1)...(19): siRNA sense strand
acuaucccaugguggaaua

SEQ ID NO: 202251 - RNA, 19 nt, Homo sapiens
  misc_RNA (1)...(19): siRNA sense strand
ccggagcugcuuccaauuu

SEQ ID NO: 202252 - RNA, 19 nt, Homo sapiens
  misc_RNA (1)...(19): siRNA sense strand
ccaaauuccaagacaguug

SEQ ID NO: 202253 - RNA, 19 nt, Homo sapiens
  misc_RNA (1)...(19): siRNA sense strand
cagaaacugccaagcauca

SEQ ID NO: 202254 - RNA, 19 nt, Homo sapiens
  misc_RNA (1)...(19): siRNA sense strand
uaugacaucugccaaagcu

SEQ ID NO: 202255 - RNA, 19 nt, Homo sapiens
  misc_RNA (1)...(19): siRNA sense strand
aaugucagauucucagcuu

SEQ ID NO: 202256 - RNA, 19 nt, Homo sapiens
  misc_RNA (1)...(19): siRNA sense strand
ucgagacuuugccaaggua

SEQ ID NO: 202257 - RNA, 19 nt, Homo sapiens
  misc_RNA (1)...(19): siRNA sense strand
gcaaaaggccauaaaaugc

SEQ ID NO: 202258 - RNA, 19 nt, Homo sapiens
  misc_RNA (1)...(19): siRNA sense strand
cugcaugauucuauccaaa

SEQ ID NO: 202259 - RNA, 19 nt, Homo sapiens
  misc_RNA (1)...(19): siRNA sense strand
uaaagcacauuuggaagac

SEQ ID NO: 202260 - RNA, 19 nt, Homo sapiens
  misc_RNA (1)...(19): siRNA sense strand
acaggagucuaaagcacuu

SEQ ID NO: 202261 - RNA, 19 nt, Homo sapiens
  misc_RNA (1)...(19): siRNA sense strand
acagauaccuuuucaagca

SEQ ID NO: 202262 - RNA, 19 nt, Homo sapiens
  misc_RNA (1)...(19): siRNA sense strand
aagcacauuuggaagacaa

SEQ ID NO: 202263 - RNA, 19 nt, Homo sapiens
  misc_RNA (1)...(19): siRNA sense strand
gcuaauaauaagccagaga

SEQ ID NO: 202264 - RNA, 19 nt, Homo sapiens
  misc_RNA (1)...(19): siRNA sense strand
caagagcacaacaauuugg

SEQ ID NO: 202265 - RNA, 19 nt, Homo sapiens
  misc_RNA (1)...(19): siRNA sense strand
ccugucagcugcaugugau

SEQ ID NO: 202266 - RNA, 19 nt, Homo sapiens
  misc_RNA (1)...(19): siRNA sense strand
gcugcugaauguuuaugau

SEQ ID NO: 202267 - RNA, 19 nt, Homo sapiens
  misc_RNA (1)...(19): siRNA sense strand
acagagcucuaccagucuu

SEQ ID NO: 202268 - RNA, 19 nt, Homo sapiens
  misc_RNA (1)...(19): siRNA sense strand
acaguugggugaaguugca

SEQ ID NO: 202269 - RNA, 19 nt, Homo sapiens
  misc_RNA (1)...(19): siRNA sense strand
guuugaccacuauuuauga

SEQ ID NO: 202270 - RNA, 19 nt, Homo sapiens
  misc_RNA (1)...(19): siRNA sense strand
gcuuauaggacugccauga

SEQ ID NO: 202271 - RNA, 19 nt, Homo sapiens
  misc_RNA (1)...(19): siRNA sense strand
caucaggccaaauguaaca

SEQ ID NO: 202272 - RNA, 19 nt, Homo sapiens
  misc_RNA (1)...(19): siRNA sense strand
gauucuauccaaauuccaa

SEQ ID NO: 202273 - RNA, 19 nt, Homo sapiens
  misc_RNA (1)...(19): siRNA sense strand
ggcaaguucaacaggauuu

SEQ ID NO: 202274 - RNA, 19 nt, Homo sapiens
  misc_RNA (1)...(19): siRNA sense strand
gaacuggcugcugaauguu

SEQ ID NO: 202275 - RNA, 19 nt, Homo sapiens
  misc_RNA (1)...(19): siRNA sense strand
cugcugaauguuuaugaua

SEQ ID NO: 202276 - RNA, 19 nt, Homo sapiens
  misc_RNA (1)...(19): siRNA sense strand
aagcaucaggccaaaugua

SEQ ID NO: 202277 - RNA, 19 nt, Homo sapiens
  misc_RNA (1)...(19): siRNA sense strand
uggcaucauuucccugugu

SEQ ID NO: 202278 - RNA, 19 nt, Homo sapiens
  misc_RNA (1)...(19): siRNA sense strand
ccaugaaacuccgaagacu

SEQ ID NO: 202279 - RNA, 19 nt, Homo sapiens
  misc_RNA (1)...(19): siRNA sense strand
auaauaagccagagaucga

SEQ ID NO: 202280 - RNA, 19 nt, Homo sapiens
  misc_RNA (1)...(19): siRNA sense strand
cuaauaauaagccagagau

SEQ ID NO: 202281 - RNA, 19 nt, Homo sapiens
  misc_RNA (1)...(19): siRNA sense strand
ugggugaaguugcauccuu

SEQ ID NO: 202282 - RNA, 19 nt, Homo sapiens
  misc_RNA (1)...(19): siRNA sense strand
caucauuucccuguguaaa

SEQ ID NO: 202283 - RNA, 19 nt, Homo sapiens
  misc_RNA (1)...(19): siRNA sense strand
gcguggauaugugucugaa

SEQ ID NO: 202284 - RNA, 19 nt, Homo sapiens
  misc_RNA (1)...(19): siRNA sense strand
gcacuaucccaugguggaa

SEQ ID NO: 202285 - RNA, 19 nt, Homo sapiens
  misc_RNA (1)...(19): siRNA sense strand
gagccugucagcugcaugu

SEQ ID NO: 202286 - RNA, 19 nt, Homo sapiens
  misc_RNA (1)...(19): siRNA sense strand
guacagauaccuuuucaag

SEQ ID NO: 202287 - RNA, 19 nt, Homo sapiens
  misc_RNA (1)...(19): siRNA sense strand
gucccucucugcguggaua

SEQ ID NO: 202288 - RNA, 19 nt, Homo sapiens
  misc_RNA (1)...(19): siRNA sense strand
ggagcugcuuccaauuugc

SEQ ID NO: 202289 - RNA, 19 nt, Homo sapiens
  misc_RNA (1)...(19): siRNA sense strand
uuagcugaccugaauaaug

SEQ ID NO: 202290 - RNA, 19 nt, Homo sapiens
  misc_RNA (1)...(19): siRNA sense strand
guggcaaguucaacaggau

SEQ ID NO: 202291 - RNA, 19 nt, Homo sapiens
  misc_RNA (1)...(19): siRNA sense strand
acaacaauuuggucaacgu

SEQ ID NO: 202292 - RNA, 19 nt, Homo sapiens
  misc_RNA (1)...(19): siRNA sense strand
gacuacaucaggagaagau

SEQ ID NO: 202293 - RNA, 19 nt, Homo sapiens
  misc_RNA (1)...(19): siRNA sense strand
uaauaagccagagaucgaa

SEQ ID NO: 202294 - RNA, 19 nt, Homo sapiens
  misc_RNA (1)...(19): siRNA sense strand
ugucagauucucagcuuau

SEQ ID NO: 202295 - RNA, 19 nt, Homo sapiens
  misc_RNA (1)...(19): siRNA sense strand
ggauauccugcagauuauu

SEQ ID NO: 202296 - RNA, 19 nt, Homo sapiens
  misc_RNA (1)...(19): siRNA sense strand
agcaucaggccaaauguaa

SEQ ID NO: 202297 - RNA, 19 nt, Homo sapiens
  misc_RNA (1)...(19): siRNA sense strand
gcccuuugcuuggaucucu

SEQ ID NO: 202298 - RNA, 19 nt, Homo sapiens
  misc_RNA (1)...(19): siRNA sense strand
gcugaauguuuaugauacg

SEQ ID NO: 202299 - RNA, 19 nt, Homo sapiens
  misc_RNA (1)...(19): siRNA sense strand
agacuuugccaagguacua

SEQ ID NO: 202300 - RNA, 19 nt, Homo sapiens
  misc_RNA (1)...(19): siRNA sense strand
caagcaaguggcaaguuca

SEQ ID NO: 202301 - RNA, 19 nt, Homo sapiens
  misc_RNA (1)...(19): siRNA sense strand
agacaaguacagauaccuu

SEQ ID NO: 202302 - RNA, 19 nt, Homo sapiens
  misc_RNA (1)...(19): siRNA sense strand
gcaucauuucccuguguaa

SEQ ID NO: 202303 - RNA, 19 nt, Homo sapiens
  misc_RNA (1)...(19): siRNA sense strand
cugcaaagaguguccaauc

SEQ ID NO: 202304 - RNA, 19 nt, Homo sapiens
  misc_RNA (1)...(19): siRNA sense strand
cuuauaggacugccaugaa

SEQ ID NO: 202305 - RNA, 19 nt, Homo sapiens
  misc_RNA (1)...(19): siRNA sense strand
caaagaguguccaaucauu

SEQ ID NO: 202306 - RNA, 19 nt, Homo sapiens
  misc_RNA (1)...(19): siRNA sense strand
uagcugaccugaauaaugu

SEQ ID NO: 202307 - RNA, 19 nt, Homo sapiens
  misc_RNA (1)...(19): siRNA sense strand
gcaugauucuauccaaauu

SEQ ID NO: 202308 - RNA, 19 nt, Homo sapiens
  misc_RNA (1)...(19): siRNA sense strand
ugaacuggcugcugaaugu

SEQ ID NO: 202309 - RNA, 19 nt, Homo sapiens
  misc_RNA (1)...(19): siRNA sense strand
gauauccugcagauuauua

SEQ ID NO: 202310 - RNA, 19 nt, Homo sapiens
  misc_RNA (1)...(19): siRNA sense strand
gagaagauguucgagacuu

SEQ ID NO: 202311 - RNA, 19 nt, Homo sapiens
  misc_RNA (1)...(19): siRNA sense strand
gcacuuuaauuaugacauc

SEQ ID NO: 202312 - RNA, 19 nt, Homo sapiens
  misc_RNA (1)...(19): siRNA sense strand
guaaagcacauuuggaaga

SEQ ID NO: 202313 - RNA, 19 nt, Homo sapiens
  misc_RNA (1)...(19): siRNA sense strand
gaauauugcacuccgacua

SEQ ID NO: 202314 - RNA, 19 nt, Homo sapiens
  misc_RNA (1)...(19): siRNA sense strand
uuauaggacugccaugaaa

SEQ ID NO: 202315 - RNA, 19 nt, Homo sapiens
  misc_RNA (1)...(19): siRNA sense strand
gggugaaguugcauccuuu

SEQ ID NO: 202316 - RNA, 19 nt, Homo sapiens
  misc_RNA (1)...(19): siRNA sense strand
gcaagagcacaacaauuug

SEQ ID NO: 202317 - RNA, 19 nt, Homo sapiens
  misc_RNA (1)...(19): siRNA sense strand
gcacaacaauuuggucaac

SEQ ID NO: 202318 - RNA, 19 nt, Homo sapiens
  misc_RNA (1)...(19): siRNA sense strand
agcaagagcacaacaauuu

SEQ ID NO: 202319 - RNA, 19 nt, Homo sapiens
  misc_RNA (1)...(19): siRNA sense strand
agaagauguucgagacuuu

SEQ ID NO: 202320 - RNA, 19 nt, Homo sapiens
  misc_RNA (1)...(19): siRNA sense strand
gagcaagagcacaacaauu

SEQ ID NO: 202321 - RNA, 19 nt, Homo sapiens
  misc_RNA (1)...(19): siRNA sense strand
ucaagcaaguggcaaguuc

SEQ ID NO: 202322 - RNA, 19 nt, Homo sapiens
  misc_RNA (1)...(19): siRNA sense strand
ccacgagacucaaacaacu

SEQ ID NO: 202323 - RNA, 19 nt, Homo sapiens
  misc_RNA (1)...(19): siRNA sense strand
cagcacaaccucaagcaaa

SEQ ID NO: 202324 - RNA, 19 nt, Homo sapiens
  misc_RNA (1)...(19): siRNA sense strand
gcaaagaguguccaaucau

SEQ ID NO: 202325 - RNA, 19 nt, Homo sapiens
  misc_RNA (1)...(19): siRNA sense strand
auggauauccugcagauua

SEQ ID NO: 202326 - RNA, 19 nt, Homo sapiens
  misc_RNA (1)...(19): siRNA sense strand
uguaacaucugcaaagagu

SEQ ID NO: 202327 - RNA, 19 nt, Homo sapiens
  misc_RNA (1)...(19): siRNA sense strand
guccggagcugcuuccaau

SEQ ID NO: 202328 - RNA, 19 nt, Homo sapiens
  misc_RNA (1)...(19): siRNA sense strand
gcaaguggcaaguucaaca

SEQ ID NO: 202329 - RNA, 19 nt, Homo sapiens
  misc_RNA (1)...(19): siRNA sense strand
gcuuccaauuugcuaauaa

SEQ ID NO: 202330 - RNA, 19 nt, Homo sapiens
  misc_RNA (1)...(19): siRNA sense strand
uggaagacaaguacagaua

SEQ ID NO: 202331 - RNA, 19 nt, Homo sapiens
  misc_RNA (1)...(19): siRNA sense strand
ggauccguguccugucuuu

SEQ ID NO: 202332 - RNA, 19 nt, Homo sapiens
  misc_RNA (1)...(19): siRNA sense strand
gucuuuagcugaccugaau

SEQ ID NO: 202333 - RNA, 19 nt, Homo sapiens
  misc_RNA (1)...(19): siRNA sense strand
gacaaguacagauaccuuu

SEQ ID NO: 202334 - RNA, 19 nt, Homo sapiens
  misc_RNA (1)...(19): siRNA sense strand
ccaagcaucaggccaaaug

SEQ ID NO: 202335 - RNA, 19 nt, Homo sapiens
  misc_RNA (1)...(19): siRNA sense strand
ggagcaagagcacaacaau

SEQ ID NO: 202336 - RNA, 19 nt, Homo sapiens
  misc_RNA (1)...(19): siRNA sense strand
guguaaagcacauuuggaa

SEQ ID NO: 202337 - RNA, 19 nt, Homo sapiens
  misc_RNA (1)...(19): siRNA sense strand
caagacaguugggugaagu

SEQ ID NO: 202338 - RNA, 19 nt, Homo sapiens
  misc_RNA (1)...(19): siRNA sense strand
gaagauguucgagacuuug

SEQ ID NO: 202339 - RNA, 19 nt, Homo sapiens
  misc_RNA (1)...(19): siRNA sense strand
gucagauucucagcuuaua

SEQ ID NO: 202340 - RNA, 19 nt, Homo sapiens
  misc_RNA (1)...(19): siRNA sense strand
uaacaucugcaaagagugu

SEQ ID NO: 202341 - RNA, 19 nt, Homo sapiens
  misc_RNA (1)...(19): siRNA sense strand
cggagcugcuuccaauuug

SEQ ID NO: 202342 - RNA, 19 nt, Homo sapiens
  misc_RNA (1)...(19): siRNA sense strand
gaagacaaguacagauacc

SEQ ID NO: 202343 - RNA, 19 nt, Homo sapiens
  misc_RNA (1)...(19): siRNA sense strand
ccauggauauccugcagau

SEQ ID NO: 202344 - RNA, 19 nt, Homo sapiens
  misc_RNA (1)...(19): siRNA sense strand
ggcaucauuucccugugua

SEQ ID NO: 202345 - RNA, 19 nt, Homo sapiens
  misc_RNA (1)...(19): siRNA sense strand
uggauauccugcagauuau

SEQ ID NO: 202346 - RNA, 19 nt, Homo sapiens
  misc_RNA (1)...(19): siRNA sense strand
ggaagacaaguacagauac

SEQ ID NO: 202347 - RNA, 19 nt, Homo sapiens
  misc_RNA (1)...(19): siRNA sense strand
ugcaaagaguguccaauca

SEQ ID NO: 202348 - RNA, 19 nt, Homo sapiens
  misc_RNA (1)...(19): siRNA sense strand
guggauaugugucugaacu

SEQ ID NO: 202349 - RNA, 19 nt, Homo sapiens
  misc_RNA (1)...(19): siRNA sense strand
acuggcugcugaauguuua

SEQ ID NO: 202350 - RNA, 19 nt, Homo sapiens
  misc_RNA (1)...(19): siRNA sense strand
acuaucccaugguggaaua

SEQ ID NO: 202351 - RNA, 19 nt, Homo sapiens
  misc_RNA (1)...(19): siRNA sense strand
ccggagcugcuuccaauuu

SEQ ID NO: 202352 - RNA, 19 nt, Homo sapiens
  misc_RNA (1)...(19): siRNA sense strand
ccaaauuccaagacaguug

SEQ ID NO: 202353 - RNA, 19 nt, Homo sapiens
  misc_RNA (1)...(19): siRNA sense strand
cagaaacugccaagcauca

SEQ ID NO: 202354 - RNA, 19 nt, Homo sapiens
  misc_RNA (1)...(19): siRNA sense strand
uaugacaucugccaaagcu

SEQ ID NO: 202355 - RNA, 19 nt, Homo sapiens
  misc_RNA (1)...(19): siRNA sense strand
aaugucagauucucagcuu

SEQ ID NO: 202356 - RNA, 19 nt, Homo sapiens
  misc_RNA (1)...(19): siRNA sense strand
ucgagacuuugccaaggua

SEQ ID NO: 202357 - RNA, 19 nt, Homo sapiens
  misc_RNA (1)...(19): siRNA sense strand
gcaaaaggccauaaaaugc

SEQ ID NO: 202358 - RNA, 19 nt, Homo sapiens
  misc_RNA (1)...(19): siRNA sense strand
cugcaugauucuauccaaa

SEQ ID NO: 202359 - RNA, 19 nt, Homo sapiens
  misc_RNA (1)...(19): siRNA sense strand
uaaagcacauuuggaagac

SEQ ID NO: 202360 - RNA, 19 nt, Homo sapiens
  misc_RNA (1)...(19): siRNA sense strand
acaggagucuaaagcacuu

SEQ ID NO: 202361 - RNA, 19 nt, Homo sapiens
  misc_RNA (1)...(19): siRNA sense strand
acagauaccuuuucaagca

SEQ ID NO: 202362 - RNA, 19 nt, Homo sapiens
  misc_RNA (1)...(19): siRNA sense strand
aagcacauuuggaagacaa

SEQ ID NO: 202363 - RNA, 19 nt, Homo sapiens
  misc_RNA (1)...(19): siRNA sense strand
gcuaauaauaagccagaga

SEQ ID NO: 202364 - RNA, 19 nt, Homo sapiens
  misc_RNA (1)...(19): siRNA sense strand
caagagcacaacaauuugg

SEQ ID NO: 202365 - RNA, 19 nt, Homo sapiens
  misc_RNA (1)...(19): siRNA sense strand
ccugucagcugcaugugau

SEQ ID NO: 202366 - RNA, 19 nt, Homo sapiens
  misc_RNA (1)...(19): siRNA sense strand
gcugcugaauguuuaugau

SEQ ID NO: 202367 - RNA, 19 nt, Homo sapiens
  misc_RNA (1)...(19): siRNA sense strand
acagagcucuaccagucuu

SEQ ID NO: 202368 - RNA, 19 nt, Homo sapiens
  misc_RNA (1)...(19): siRNA sense strand
acaguugggugaaguugca

SEQ ID NO: 202369 - RNA, 19 nt, Homo sapiens
  misc_RNA (1)...(19): siRNA sense strand
guuugaccacuauuuauga

SEQ ID NO: 202370 - RNA, 19 nt, Homo sapiens
  misc_RNA (1)...(19): siRNA sense strand
gcuuauaggacugccauga

SEQ ID NO: 202371 - RNA, 19 nt, Homo sapiens
  misc_RNA (1)...(19): siRNA sense strand
caucaggccaaauguaaca

SEQ ID NO: 202372 - RNA, 19 nt, Homo sapiens
  misc_RNA (1)...(19): siRNA sense strand
gauucuauccaaauuccaa

SEQ ID NO: 202373 - RNA, 19 nt, Homo sapiens
  misc_RNA (1)...(19): siRNA sense strand
ggcaaguucaacaggauuu

SEQ ID NO: 202374 - RNA, 19 nt, Homo sapiens
  misc_RNA (1)...(19): siRNA sense strand
gaacuggcugcugaauguu

SEQ ID NO: 202375 - RNA, 19 nt, Homo sapiens
  misc_RNA (1)...(19): siRNA sense strand
cugcugaauguuuaugaua

SEQ ID NO: 202376 - RNA, 19 nt, Homo sapiens
  misc_RNA (1)...(19): siRNA sense strand
aagcaucaggccaaaugua

SEQ ID NO: 202377 - RNA, 19 nt, Homo sapiens
  misc_RNA (1)...(19): siRNA sense strand
uggcaucauuucccugugu

SEQ ID NO: 202378 - RNA, 19 nt, Homo sapiens
  misc_RNA (1)...(19): siRNA sense strand
ccaugaaacuccgaagacu

SEQ ID NO: 202379 - RNA, 19 nt, Homo sapiens
  misc_RNA (1)...(19): siRNA sense strand
auaauaagccagagaucga

SEQ ID NO: 202380 - RNA, 19 nt, Homo sapiens
  misc_RNA (1)...(19): siRNA sense strand
cuaauaauaagccagagau

SEQ ID NO: 202381 - RNA, 19 nt, Homo sapiens
  misc_RNA (1)...(19): siRNA sense strand
ugggugaaguugcauccuu

SEQ ID NO: 202382 - RNA, 19 nt, Homo sapiens
  misc_RNA (1)...(19): siRNA sense strand
caucauuucccuguguaaa

SEQ ID NO: 202383 - RNA, 19 nt, Homo sapiens
  misc_RNA (1)...(19): siRNA sense strand
gcguggauaugugucugaa

SEQ ID NO: 202384 - RNA, 19 nt, Homo sapiens
  misc_RNA (1)...(19): siRNA sense strand
gcacuaucccaugguggaa

SEQ ID NO: 202385 - RNA, 19 nt, Homo sapiens
  misc_RNA (1)...(19): siRNA sense strand
gagccugucagcugcaugu

SEQ ID NO: 202386 - RNA, 19 nt, Homo sapiens
  misc_RNA (1)...(19): siRNA sense strand
guacagauaccuuuucaag

SEQ ID NO: 202387 - RNA, 19 nt, Homo sapiens
  misc_RNA (1)...(19): siRNA sense strand
gucccucucugcguggaua

SEQ ID NO: 202388 - RNA, 19 nt, Homo sapiens
  misc_RNA (1)...(19): siRNA sense strand
ggagcugcuuccaauuugc

SEQ ID NO: 202389 - RNA, 19 nt, Homo sapiens
  misc_RNA (1)...(19): siRNA sense strand
uuagcugaccugaauaaug

SEQ ID NO: 202390 - RNA, 19 nt, Homo sapiens
  misc_RNA (1)...(19): siRNA sense strand
guggcaaguucaacaggau

SEQ ID NO: 202391 - RNA, 19 nt, Homo sapiens
  misc_RNA (1)...(19): siRNA sense strand
acaacaauuuggucaacgu

SEQ ID NO: 202392 - RNA, 19 nt, Homo sapiens
  misc_RNA (1)...(19): siRNA sense strand
gacuacaucaggagaagau

SEQ ID NO: 202393 - RNA, 19 nt, Homo sapiens
  misc_RNA (1)...(19): siRNA sense strand
uaauaagccagagaucgaa

SEQ ID NO: 202394 - RNA, 19 nt, Homo sapiens
  misc_RNA (1)...(19): siRNA sense strand
ugucagauucucagcuuau

SEQ ID NO: 202395 - RNA, 19 nt, Homo sapiens
  misc_RNA (1)...(19): siRNA sense strand
ggauauccugcagauuauu

SEQ ID NO: 202396 - RNA, 19 nt, Homo sapiens
  misc_RNA (1)...(19): siRNA sense strand
agcaucaggccaaauguaa

SEQ ID NO: 202397 - RNA, 19 nt, Homo sapiens
  misc_RNA (1)...(19): siRNA sense strand
gcccuuugcuuggaucucu

SEQ ID NO: 202398 - RNA, 19 nt, Homo sapiens
  misc_RNA (1)...(19): siRNA sense strand
gcugaauguuuaugauacg

SEQ ID NO: 202399 - RNA, 19 nt, Homo sapiens
  misc_RNA (1)...(19): siRNA sense strand
agacuuugccaagguacua

SEQ ID NO: 202400 - RNA, 19 nt, Homo sapiens
  misc_RNA (1)...(19): siRNA sense strand
caagcaaguggcaaguuca

SEQ ID NO: 202401 - RNA, 19 nt, Homo sapiens
  misc_RNA (1)...(19): siRNA sense strand
agacaaguacagauaccuu

SEQ ID NO: 202402 - RNA, 19 nt, Homo sapiens
  misc_RNA (1)...(19): siRNA sense strand
gcaucauuucccuguguaa

SEQ ID NO: 202403 - RNA, 19 nt, Homo sapiens
  misc_RNA (1)...(19): siRNA sense strand
cugcaaagaguguccaauc

SEQ ID NO: 202404 - RNA, 19 nt, Homo sapiens
  misc_RNA (1)...(19): siRNA sense strand
cuuauaggacugccaugaa

SEQ ID NO: 202405 - RNA, 19 nt, Homo sapiens
  misc_RNA (1)...(19): siRNA sense strand
caaagaguguccaaucauu

SEQ ID NO: 202406 - RNA, 19 nt, Homo sapiens
  misc_RNA (1)...(19): siRNA sense strand
uagcugaccugaauaaugu

SEQ ID NO: 202407 - RNA, 19 nt, Homo sapiens
  misc_RNA (1)...(19): siRNA sense strand
gcaugauucuauccaaauu

SEQ ID NO: 202408 - RNA, 19 nt, Homo sapiens
  misc_RNA (1)...(19): siRNA sense strand
ugaacuggcugcugaaugu

SEQ ID NO: 202409 - RNA, 19 nt, Homo sapiens
  misc_RNA (1)...(19): siRNA sense strand
gauauccugcagauuauua

SEQ ID NO: 202410 - RNA, 19 nt, Homo sapiens
  misc_RNA (1)...(19): siRNA sense strand
gagaagauguucgagacuu

SEQ ID NO: 202411 - RNA, 19 nt, Homo sapiens
  misc_RNA (1)...(19): siRNA sense strand
gcacuuuaauuaugacauc

SEQ ID NO: 202412 - RNA, 19 nt, Homo sapiens
  misc_RNA (1)...(19): siRNA sense strand
guaaagcacauuuggaaga

SEQ ID NO: 202413 - RNA, 19 nt, Homo sapiens
  misc_RNA (1)...(19): siRNA sense strand
gaauauugcacuccgacua

SEQ ID NO: 202414 - RNA, 19 nt, Homo sapiens
  misc_RNA (1)...(19): siRNA sense strand
uuauaggacugccaugaaa

SEQ ID NO: 202415 - RNA, 19 nt, Homo sapiens
  misc_RNA (1)...(19): siRNA sense strand
gggugaaguugcauccuuu

SEQ ID NO: 202416 - RNA, 19 nt, Homo sapiens
  misc_RNA (1)...(19): siRNA sense strand
gcaagagcacaacaauuug

SEQ ID NO: 202417 - RNA, 19 nt, Homo sapiens
  misc_RNA (1)...(19): siRNA sense strand
gcacaacaauuuggucaac

SEQ ID NO: 202418 - RNA, 19 nt, Homo sapiens
  misc_RNA (1)...(19): siRNA sense strand
agcaagagcacaacaauuu

SEQ ID NO: 202419 - RNA, 19 nt, Homo sapiens
  misc_RNA (1)...(19): siRNA sense strand
agaagauguucgagacuuu

SEQ ID NO: 202420 - RNA, 19 nt, Homo sapiens
  misc_RNA (1)...(19): siRNA sense strand
gagcaagagcacaacaauu

SEQ ID NO: 202421 - RNA, 19 nt, Homo sapiens
  misc_RNA (1)...(19): siRNA sense strand
ucaagcaaguggcaaguuc

SEQ ID NO: 202422 - RNA, 19 nt, Homo sapiens
  misc_RNA (1)...(19): siRNA sense strand
ccacgagacucaaacaacu

SEQ ID NO: 202423 - RNA, 19 nt, Homo sapiens
  misc_RNA (1)...(19): siRNA sense strand
cagcacaaccucaagcaaa

SEQ ID NO: 202424 - RNA, 19 nt, Homo sapiens
  misc_RNA (1)...(19): siRNA sense strand
gcaaagaguguccaaucau

SEQ ID NO: 202425 - RNA, 19 nt, Homo sapiens
  misc_RNA (1)...(19): siRNA sense strand
auggauauccugcagauua

SEQ ID NO: 202426 - RNA, 19 nt, Homo sapiens
  misc_RNA (1)...(19): siRNA sense strand
uguaacaucugcaaagagu

SEQ ID NO: 202427 - RNA, 19 nt, Homo sapiens
  misc_RNA (1)...(19): siRNA sense strand
guccggagcugcuuccaau

SEQ ID NO: 202428 - RNA, 19 nt, Homo sapiens
  misc_RNA (1)...(19): siRNA sense strand
gcaaguggcaaguucaaca

SEQ ID NO: 202429 - RNA, 19 nt, Homo sapiens
  misc_RNA (1)...(19): siRNA sense strand
gcuuccaauuugcuaauaa

SEQ ID NO: 202430 - RNA, 19 nt, Homo sapiens
  misc_RNA (1)...(19): siRNA sense strand
uggaagacaaguacagaua

SEQ ID NO: 202431 - RNA, 19 nt, Homo sapiens
  misc_RNA (1)...(19): siRNA sense strand
ggauccguguccugucuuu

SEQ ID NO: 202432 - RNA, 19 nt, Homo sapiens
  misc_RNA (1)...(19): siRNA sense strand
gucuuuagcugaccugaau

SEQ ID NO: 202433 - RNA, 19 nt, Homo sapiens
  misc_RNA (1)...(19): siRNA sense strand
gacaaguacagauaccuuu

SEQ ID NO: 202434 - RNA, 19 nt, Homo sapiens
  misc_RNA (1)...(19): siRNA sense strand
ccaagcaucaggccaaaug

SEQ ID NO: 202435 - RNA, 19 nt, Homo sapiens
  misc_RNA (1)...(19): siRNA sense strand
ggagcaagagcacaacaau

SEQ ID NO: 202436 - RNA, 19 nt, Homo sapiens
  misc_RNA (1)...(19): siRNA sense strand
guguaaagcacauuuggaa

SEQ ID NO: 202437 - RNA, 19 nt, Homo sapiens
  misc_RNA (1)...(19): siRNA sense strand
caagacaguugggugaagu

SEQ ID NO: 202438 - RNA, 19 nt, Homo sapiens
  misc_RNA (1)...(19): siRNA sense strand
gaagauguucgagacuuug

SEQ ID NO: 202439 - RNA, 19 nt, Homo sapiens
  misc_RNA (1)...(19): siRNA sense strand
gucagauucucagcuuaua

SEQ ID NO: 202440 - RNA, 19 nt, Homo sapiens
  misc_RNA (1)...(19): siRNA sense strand
uaacaucugcaaagagugu

SEQ ID NO: 202441 - RNA, 19 nt, Homo sapiens
  misc_RNA (1)...(19): siRNA sense strand
cggagcugcuuccaauuug

SEQ ID NO: 202442 - RNA, 19 nt, Homo sapiens
  misc_RNA (1)...(19): siRNA sense strand
gaagacaaguacagauacc

SEQ ID NO: 202443 - RNA, 19 nt, Homo sapiens
  misc_RNA (1)...(19): siRNA sense strand
ccauggauauccugcagau

SEQ ID NO: 202444 - RNA, 19 nt, Homo sapiens
  misc_RNA (1)...(19): siRNA sense strand
ggcaucauuucccugugua

SEQ ID NO: 202445 - RNA, 19 nt, Homo sapiens
  misc_RNA (1)...(19): siRNA sense strand
uggauauccugcagauuau

SEQ ID NO: 202446 - RNA, 19 nt, Homo sapiens
  misc_RNA (1)...(19): siRNA sense strand
ggaagacaaguacagauac

SEQ ID NO: 202447 - RNA, 19 nt, Homo sapiens
  misc_RNA (1)...(19): siRNA sense strand
ugcaaagaguguccaauca

SEQ ID NO: 202448 - RNA, 19 nt, Homo sapiens
  misc_RNA (1)...(19): siRNA sense strand
guggauaugugucugaacu

SEQ ID NO: 202449 - RNA, 19 nt, Homo sapiens
  misc_RNA (1)...(19): siRNA sense strand
acuggcugcugaauguuua

SEQ ID NO: 202450 - RNA, 19 nt, Homo sapiens
  misc_RNA (1)...(19): siRNA sense strand
acuaucccaugguggaaua

SEQ ID NO: 202451 - RNA, 19 nt, Homo sapiens
  misc_RNA (1)...(19): siRNA sense strand
ccggagcugcuuccaauuu

SEQ ID NO: 202452 - RNA, 19 nt, Homo sapiens
  misc_RNA (1)...(19): siRNA sense strand
ccaaauuccaagacaguug

SEQ ID NO: 202453 - RNA, 19 nt, Homo sapiens
  misc_RNA (1)...(19): siRNA sense strand
cagaaacugccaagcauca

SEQ ID NO: 202454 - RNA, 19 nt, Homo sapiens
  misc_RNA (1)...(19): siRNA sense strand
uaugacaucugccaaagcu

SEQ ID NO: 202455 - RNA, 19 nt, Homo sapiens
  misc_RNA (1)...(19): siRNA sense strand
aaugucagauucucagcuu

SEQ ID NO: 202456 - RNA, 19 nt, Homo sapiens
  misc_RNA (1)...(19): siRNA sense strand
ucgagacuuugccaaggua

SEQ ID NO: 202457 - RNA, 19 nt, Homo sapiens
  misc_RNA (1)...(19): siRNA sense strand
gcaaaaggccauaaaaugc

SEQ ID NO: 202458 - RNA, 19 nt, Homo sapiens
  misc_RNA (1)...(19): siRNA sense strand
cugcaugauucuauccaaa

SEQ ID NO: 202459 - RNA, 19 nt, Homo sapiens
  misc_RNA (1)...(19): siRNA sense strand
uaaagcacauuuggaagac

SEQ ID NO: 202460 - RNA, 19 nt, Homo sapiens
  misc_RNA (1)...(19): siRNA sense strand
acaggagucuaaagcacuu

SEQ ID NO: 202461 - RNA, 19 nt, Homo sapiens
  misc_RNA (1)...(19): siRNA sense strand
acagauaccuuuucaagca

SEQ ID NO: 202462 - RNA, 19 nt, Homo sapiens
  misc_RNA (1)...(19): siRNA sense strand
aagcacauuuggaagacaa

SEQ ID NO: 202463 - RNA, 19 nt, Homo sapiens
  misc_RNA (1)...(19): siRNA sense strand
gcuaauaauaagccagaga

SEQ ID NO: 202464 - RNA, 19 nt, Homo sapiens
  misc_RNA (1)...(19): siRNA sense strand
caagagcacaacaauuugg

SEQ ID NO: 202465 - RNA, 19 nt, Homo sapiens
  misc_RNA (1)...(19): siRNA sense strand
ccugucagcugcaugugau

SEQ ID NO: 202466 - RNA, 19 nt, Homo sapiens
  misc_RNA (1)...(19): siRNA sense strand
gcugcugaauguuuaugau

SEQ ID NO: 202467 - RNA, 19 nt, Homo sapiens
  misc_RNA (1)...(19): siRNA sense strand
acagagcucuaccagucuu

SEQ ID NO: 202468 - RNA, 19 nt, Homo sapiens
  misc_RNA (1)...(19): siRNA sense strand
acaguugggugaaguugca

SEQ ID NO: 202469 - RNA, 19 nt, Homo sapiens
  misc_RNA (1)...(19): siRNA sense strand
guuugaccacuauuuauga

SEQ ID NO: 202470 - RNA, 19 nt, Homo sapiens
  misc_RNA (1)...(19): siRNA sense strand
gcuuauaggacugccauga

SEQ ID NO: 202471 - RNA, 19 nt, Homo sapiens
  misc_RNA (1)...(19): siRNA sense strand
caucaggccaaauguaaca

SEQ ID NO: 202472 - RNA, 19 nt, Homo sapiens
  misc_RNA (1)...(19): siRNA sense strand
gauucuauccaaauuccaa

SEQ ID NO: 202473 - RNA, 19 nt, Homo sapiens
  misc_RNA (1)...(19): siRNA sense strand
ggcaaguucaacaggauuu

SEQ ID NO: 202474 - RNA, 19 nt, Homo sapiens
  misc_RNA (1)...(19): siRNA sense strand
gaacuggcugcugaauguu

SEQ ID NO: 202475 - RNA, 19 nt, Homo sapiens
  misc_RNA (1)...(19): siRNA sense strand
cugcugaauguuuaugaua

SEQ ID NO: 202476 - RNA, 19 nt, Homo sapiens
  misc_RNA (1)...(19): siRNA sense strand
aagcaucaggccaaaugua

SEQ ID NO: 202477 - RNA, 19 nt, Homo sapiens
  misc_RNA (1)...(19): siRNA sense strand
uggcaucauuucccugugu

SEQ ID NO: 202478 - RNA, 19 nt, Homo sapiens
  misc_RNA (1)...(19): siRNA sense strand
ccaugaaacuccgaagacu

SEQ ID NO: 202479 - RNA, 19 nt, Homo sapiens
  misc_RNA (1)...(19): siRNA sense strand
auaauaagccagagaucga

SEQ ID NO: 202480 - RNA, 19 nt, Homo sapiens
  misc_RNA (1)...(19): siRNA sense strand
cuaauaauaagccagagau

SEQ ID NO: 202481 - RNA, 19 nt, Homo sapiens
  misc_RNA (1)...(19): siRNA sense strand
ugggugaaguugcauccuu

SEQ ID NO: 202482 - RNA, 19 nt, Homo sapiens
  misc_RNA (1)...(19): siRNA sense strand
caucauuucccuguguaaa

SEQ ID NO: 202483 - RNA, 19 nt, Homo sapiens
  misc_RNA (1)...(19): siRNA sense strand
gcguggauaugugucugaa

SEQ ID NO: 202484 - RNA, 19 nt, Homo sapiens
  misc_RNA (1)...(19): siRNA sense strand
gcacuaucccaugguggaa

SEQ ID NO: 202485 - RNA, 19 nt, Homo sapiens
  misc_RNA (1)...(19): siRNA sense strand
gagccugucagcugcaugu

SEQ ID NO: 202486 - RNA, 19 nt, Homo sapiens
  misc_RNA (1)...(19): siRNA sense strand
guacagauaccuuuucaag

SEQ ID NO: 202487 - RNA, 19 nt, Homo sapiens
  misc_RNA (1)...(19): siRNA sense strand
gucccucucugcguggaua

SEQ ID NO: 202488 - RNA, 19 nt, Homo sapiens
  misc_RNA (1)...(19): siRNA sense strand
ggagcugcuuccaauuugc

SEQ ID NO: 202489 - RNA, 19 nt, Homo sapiens
  misc_RNA (1)...(19): siRNA sense strand
uuagcugaccugaauaaug

SEQ ID NO: 202490 - RNA, 19 nt, Homo sapiens
  misc_RNA (1)...(19): siRNA sense strand
guggcaaguucaacaggau

SEQ ID NO: 202491 - RNA, 19 nt, Homo sapiens
  misc_RNA (1)...(19): siRNA sense strand
acaacaauuuggucaacgu

SEQ ID NO: 202492 - RNA, 19 nt, Homo sapiens
  misc_RNA (1)...(19): siRNA sense strand
gacuacaucaggagaagau

SEQ ID NO: 202493 - RNA, 19 nt, Homo sapiens
  misc_RNA (1)...(19): siRNA sense strand
uaauaagccagagaucgaa

SEQ ID NO: 202494 - RNA, 19 nt, Homo sapiens
  misc_RNA (1)...(19): siRNA sense strand
ugucagauucucagcuuau

SEQ ID NO: 202495 - RNA, 19 nt, Homo sapiens
  misc_RNA (1)...(19): siRNA sense strand
ggauauccugcagauuauu

SEQ ID NO: 202496 - RNA, 19 nt, Homo sapiens
  misc_RNA (1)...(19): siRNA sense strand
agcaucaggccaaauguaa

SEQ ID NO: 202497 - RNA, 19 nt, Homo sapiens
  misc_RNA (1)...(19): siRNA sense strand
gcccuuugcuuggaucucu

SEQ ID NO: 202498 - RNA, 19 nt, Homo sapiens
  misc_RNA (1)...(19): siRNA sense strand
gcugaauguuuaugauacg

SEQ ID NO: 202499 - RNA, 19 nt, Homo sapiens
  misc_RNA (1)...(19): siRNA sense strand
agacuuugccaagguacua

SEQ ID NO: 202500 - RNA, 19 nt, Homo sapiens
  misc_RNA (1)...(19): siRNA sense strand
caagcaaguggcaaguuca

SEQ ID NO: 202501 - RNA, 19 nt, Homo sapiens
  misc_RNA (1)...(19): siRNA sense strand
agacaaguacagauaccuu

SEQ ID NO: 202502 - RNA, 19 nt, Homo sapiens
  misc_RNA (1)...(19): siRNA sense strand
gcaucauuucccuguguaa

SEQ ID NO: 202503 - RNA, 19 nt, Homo sapiens
  misc_RNA (1)...(19): siRNA sense strand
cugcaaagaguguccaauc

SEQ ID NO: 202504 - RNA, 19 nt, Homo sapiens
  misc_RNA (1)...(19): siRNA sense strand
cuuauaggacugccaugaa

SEQ ID NO: 202505 - RNA, 19 nt, Homo sapiens
  misc_RNA (1)...(19): siRNA sense strand
caaagaguguccaaucauu

SEQ ID NO: 202506 - RNA, 19 nt, Homo sapiens
  misc_RNA (1)...(19): siRNA sense strand
uagcugaccugaauaaugu

SEQ ID NO: 202507 - RNA, 19 nt, Homo sapiens
  misc_RNA (1)...(19): siRNA sense strand
gcaugauucuauccaaauu

SEQ ID NO: 202508 - RNA, 19 nt, Homo sapiens
  misc_RNA (1)...(19): siRNA sense strand
ugaacuggcugcugaaugu

SEQ ID NO: 202509 - RNA, 19 nt, Homo sapiens
  misc_RNA (1)...(19): siRNA sense strand
gauauccugcagauuauua

SEQ ID NO: 202510 - RNA, 19 nt, Homo sapiens
  misc_RNA (1)...(19): siRNA sense strand
gagaagauguucgagacuu

SEQ ID NO: 202511 - RNA, 19 nt, Homo sapiens
  misc_RNA (1)...(19): siRNA sense strand
gcacuuuaauuaugacauc

SEQ ID NO: 202512 - RNA, 19 nt, Homo sapiens
  misc_RNA (1)...(19): siRNA sense strand
guaaagcacauuuggaaga

SEQ ID NO: 202513 - RNA, 19 nt, Homo sapiens
  misc_RNA (1)...(19): siRNA sense strand
gaauauugcacuccgacua

SEQ ID NO: 202514 - RNA, 19 nt, Homo sapiens
  misc_RNA (1)...(19): siRNA sense strand
uuauaggacugccaugaaa

SEQ ID NO: 202515 - RNA, 19 nt, Homo sapiens
  misc_RNA (1)...(19): siRNA sense strand
gggugaaguugcauccuuu

SEQ ID NO: 202516 - RNA, 19 nt, Homo sapiens
  misc_RNA (1)...(19): siRNA sense strand
gcaagagcacaacaauuug

SEQ ID NO: 202517 - RNA, 19 nt, Homo sapiens
  misc_RNA (1)...(19): siRNA sense strand
gcacaacaauuuggucaac

SEQ ID NO: 202518 - RNA, 19 nt, Homo sapiens
  misc_RNA (1)...(19): siRNA sense strand
agcaagagcacaacaauuu

SEQ ID NO: 202519 - RNA, 19 nt, Homo sapiens
  misc_RNA (1)...(19): siRNA sense strand
agaagauguucgagacuuu

SEQ ID NO: 202520 - RNA, 19 nt, Homo sapiens
  misc_RNA (1)...(19): siRNA sense strand
gagcaagagcacaacaauu

SEQ ID NO: 202521 - RNA, 19 nt, Homo sapiens
  misc_RNA (1)...(19): siRNA sense strand
ucaagcaaguggcaaguuc

SEQ ID NO: 202522 - RNA, 19 nt, Homo sapiens
  misc_RNA (1)...(19): siRNA sense strand
ccacgagacucaaacaacu

SEQ ID NO: 202523 - RNA, 19 nt, Homo sapiens
  misc_RNA (1)...(19): siRNA sense strand
cagcacaaccucaagcaaa

SEQ ID NO: 202524 - RNA, 19 nt, Homo sapiens
  misc_RNA (1)...(19): siRNA sense strand
gcaaagaguguccaaucau

SEQ ID NO: 202525 - RNA, 19 nt, Homo sapiens
  misc_RNA (1)...(19): siRNA sense strand
auggauauccugcagauua

SEQ ID NO: 202526 - RNA, 19 nt, Homo sapiens
  misc_RNA (1)...(19): siRNA sense strand
uguaacaucugcaaagagu

SEQ ID NO: 202527 - RNA, 19 nt, Homo sapiens
  misc_RNA (1)...(19): siRNA sense strand
guccggagcugcuuccaau

SEQ ID NO: 202528 - RNA, 19 nt, Homo sapiens
  misc_RNA (1)...(19): siRNA sense strand
gcaaguggcaaguucaaca

SEQ ID NO: 202529 - RNA, 19 nt, Homo sapiens
  misc_RNA (1)...(19): siRNA sense strand
gcuuccaauuugcuaauaa

SEQ ID NO: 202530 - RNA, 19 nt, Homo sapiens
  misc_RNA (1)...(19): siRNA sense strand
uggaagacaaguacagaua

SEQ ID NO: 202531 - RNA, 19 nt, Homo sapiens
  misc_RNA (1)...(19): siRNA sense strand
ggauccguguccugucuuu

SEQ ID NO: 202532 - RNA, 19 nt, Homo sapiens
  misc_RNA (1)...(19): siRNA sense strand
gucuuuagcugaccugaau

SEQ ID NO: 202533 - RNA, 19 nt, Homo sapiens
  misc_RNA (1)...(19): siRNA sense strand
gacaaguacagauaccuuu

SEQ ID NO: 202534 - RNA, 19 nt, Homo sapiens
  misc_RNA (1)...(19): siRNA sense strand
ccaagcaucaggccaaaug

SEQ ID NO: 202535 - RNA, 19 nt, Homo sapiens
  misc_RNA (1)...(19): siRNA sense strand
ggagcaagagcacaacaau

SEQ ID NO: 202536 - RNA, 19 nt, Homo sapiens
  misc_RNA (1)...(19): siRNA sense strand
guguaaagcacauuuggaa

SEQ ID NO: 202537 - RNA, 19 nt, Homo sapiens
  misc_RNA (1)...(19): siRNA sense strand
caagacaguugggugaagu

SEQ ID NO: 202538 - RNA, 19 nt, Homo sapiens
  misc_RNA (1)...(19): siRNA sense strand
gaagauguucgagacuuug

SEQ ID NO: 202539 - RNA, 19 nt, Homo sapiens
  misc_RNA (1)...(19): siRNA sense strand
gucagauucucagcuuaua

SEQ ID NO: 202540 - RNA, 19 nt, Homo sapiens
  misc_RNA (1)...(19): siRNA sense strand
uaacaucugcaaagagugu

SEQ ID NO: 202541 - RNA, 19 nt, Homo sapiens
  misc_RNA (1)...(19): siRNA sense strand
cggagcugcuuccaauuug

SEQ ID NO: 202542 - RNA, 19 nt, Homo sapiens
  misc_RNA (1)...(19): siRNA sense strand
gaagacaaguacagauacc

SEQ ID NO: 202543 - RNA, 19 nt, Homo sapiens
  misc_RNA (1)...(19): siRNA sense strand
ccauggauauccugcagau

SEQ ID NO: 202544 - RNA, 19 nt, Homo sapiens
  misc_RNA (1)...(19): siRNA sense strand
ggcaucauuucccugugua

SEQ ID NO: 202545 - RNA, 19 nt, Homo sapiens
  misc_RNA (1)...(19): siRNA sense strand
uggauauccugcagauuau

SEQ ID NO: 202546 - RNA, 19 nt, Homo sapiens
  misc_RNA (1)...(19): siRNA sense strand
ggaagacaaguacagauac

SEQ ID NO: 202547 - RNA, 19 nt, Homo sapiens
  misc_RNA (1)...(19): siRNA sense strand
ugcaaagaguguccaauca

SEQ ID NO: 202548 - RNA, 19 nt, Homo sapiens
  misc_RNA (1)...(19): siRNA sense strand
guggauaugugucugaacu

SEQ ID NO: 202549 - RNA, 19 nt, Homo sapiens
  misc_RNA (1)...(19): siRNA sense strand
acuggcugcugaauguuua

SEQ ID NO: 202550 - RNA, 19 nt, Homo sapiens
  misc_RNA (1)...(19): siRNA sense strand
acuaucccaugguggaaua

SEQ ID NO: 202551 - RNA, 19 nt, Homo sapiens
  misc_RNA (1)...(19): siRNA sense strand
ccggagcugcuuccaauuu

SEQ ID NO: 202552 - RNA, 19 nt, Homo sapiens
  misc_RNA (1)...(19): siRNA sense strand
ccaaauuccaagacaguug

SEQ ID NO: 202553 - RNA, 19 nt, Homo sapiens
  misc_RNA (1)...(19): siRNA sense strand
cagaaacugccaagcauca

SEQ ID NO: 202554 - RNA, 19 nt, Homo sapiens
  misc_RNA (1)...(19): siRNA sense strand
uaugacaucugccaaagcu

SEQ ID NO: 202555 - RNA, 19 nt, Homo sapiens
  misc_RNA (1)...(19): siRNA sense strand
aaugucagauucucagcuu

SEQ ID NO: 202556 - RNA, 19 nt, Homo sapiens
  misc_RNA (1)...(19): siRNA sense strand
ucgagacuuugccaaggua

SEQ ID NO: 202557 - RNA, 19 nt, Homo sapiens
  misc_RNA (1)...(19): siRNA sense strand
gcaaaaggccauaaaaugc

SEQ ID NO: 202558 - RNA, 19 nt, Homo sapiens
  misc_RNA (1)...(19): siRNA sense strand
cugcaugauucuauccaaa

SEQ ID NO: 202559 - RNA, 19 nt, Homo sapiens
  misc_RNA (1)...(19): siRNA sense strand
uaaagcacauuuggaagac

SEQ ID NO: 202560 - RNA, 19 nt, Homo sapiens
  misc_RNA (1)...(19): siRNA sense strand
acaggagucuaaagcacuu

SEQ ID NO: 202561 - RNA, 19 nt, Homo sapiens
  misc_RNA (1)...(19): siRNA sense strand
acagauaccuuuucaagca

SEQ ID NO: 202562 - RNA, 19 nt, Homo sapiens
  misc_RNA (1)...(19): siRNA sense strand
aagcacauuuggaagacaa

SEQ ID NO: 202563 - RNA, 19 nt, Homo sapiens
  misc_RNA (1)...(19): siRNA sense strand
gcuaauaauaagccagaga

SEQ ID NO: 202564 - RNA, 19 nt, Homo sapiens
  misc_RNA (1)...(19): siRNA sense strand
caagagcacaacaauuugg

SEQ ID NO: 202565 - RNA, 19 nt, Homo sapiens
  misc_RNA (1)...(19): siRNA sense strand
ccugucagcugcaugugau

SEQ ID NO: 202566 - RNA, 19 nt, Homo sapiens
  misc_RNA (1)...(19): siRNA sense strand
gcugcugaauguuuaugau

SEQ ID NO: 202567 - RNA, 19 nt, Homo sapiens
  misc_RNA (1)...(19): siRNA sense strand
acagagcucuaccagucuu

SEQ ID NO: 202568 - RNA, 19 nt, Homo sapiens
  misc_RNA (1)...(19): siRNA sense strand
acaguugggugaaguugca

SEQ ID NO: 202569 - RNA, 19 nt, Homo sapiens
  misc_RNA (1)...(19): siRNA sense strand
guuugaccacuauuuauga

SEQ ID NO: 202570 - RNA, 19 nt, Homo sapiens
  misc_RNA (1)...(19): siRNA sense strand
gcuuauaggacugccauga

SEQ ID NO: 202571 - RNA, 19 nt, Homo sapiens
  misc_RNA (1)...(19): siRNA sense strand
caucaggccaaauguaaca

SEQ ID NO: 202572 - RNA, 19 nt, Homo sapiens
  misc_RNA (1)...(19): siRNA sense strand
gauucuauccaaauuccaa

SEQ ID NO: 202573 - RNA, 19 nt, Homo sapiens
  misc_RNA (1)...(19): siRNA sense strand
ggcaaguucaacaggauuu

SEQ ID NO: 202574 - RNA, 19 nt, Homo sapiens
  misc_RNA (1)...(19): siRNA sense strand
gaacuggcugcugaauguu

SEQ ID NO: 202575 - RNA, 19 nt, Homo sapiens
  misc_RNA (1)...(19): siRNA sense strand
cugcugaauguuuaugaua

SEQ ID NO: 202576 - RNA, 19 nt, Homo sapiens
  misc_RNA (1)...(19): siRNA sense strand
aagcaucaggccaaaugua

SEQ ID NO: 202577 - RNA, 19 nt, Homo sapiens
  misc_RNA (1)...(19): siRNA sense strand
uggcaucauuucccugugu

SEQ ID NO: 202578 - RNA, 19 nt, Homo sapiens
  misc_RNA (1)...(19): siRNA sense strand
ccaugaaacuccgaagacu

SEQ ID NO: 202579 - RNA, 19 nt, Homo sapiens
  misc_RNA (1)...(19): siRNA sense strand
auaauaagccagagaucga

SEQ ID NO: 202580 - RNA, 19 nt, Homo sapiens
  misc_RNA (1)...(19): siRNA sense strand
cuaauaauaagccagagau

SEQ ID NO: 202581 - RNA, 19 nt, Homo sapiens
  misc_RNA (1)...(19): siRNA sense strand
ugggugaaguugcauccuu

SEQ ID NO: 202582 - RNA, 19 nt, Homo sapiens
  misc_RNA (1)...(19): siRNA sense strand
caucauuucccuguguaaa

SEQ ID NO: 202583 - RNA, 19 nt, Homo sapiens
  misc_RNA (1)...(19): siRNA sense strand
gcguggauaugugucugaa

SEQ ID NO: 202584 - RNA, 19 nt, Homo sapiens
  misc_RNA (1)...(19): siRNA sense strand
gcacuaucccaugguggaa

SEQ ID NO: 202585 - RNA, 19 nt, Homo sapiens
  misc_RNA (1)...(19): siRNA sense strand
gagccugucagcugcaugu

SEQ ID NO: 202586 - RNA, 19 nt, Homo sapiens
  misc_RNA (1)...(19): siRNA sense strand
guacagauaccuuuucaag

SEQ ID NO: 202587 - RNA, 19 nt, Homo sapiens
  misc_RNA (1)...(19): siRNA sense strand
gucccucucugcguggaua

SEQ ID NO: 202588 - RNA, 19 nt, Homo sapiens
  misc_RNA (1)...(19): siRNA sense strand
ggagcugcuuccaauuugc

SEQ ID NO: 202589 - RNA, 19 nt, Homo sapiens
  misc_RNA (1)...(19): siRNA sense strand
uuagcugaccugaauaaug

SEQ ID NO: 202590 - RNA, 19 nt, Homo sapiens
  misc_RNA (1)...(19): siRNA sense strand
guggcaaguucaacaggau

SEQ ID NO: 202591 - RNA, 19 nt, Homo sapiens
  misc_RNA (1)...(19): siRNA sense strand
acaacaauuuggucaacgu

SEQ ID NO: 202592 - RNA, 19 nt, Homo sapiens
  misc_RNA (1)...(19): siRNA sense strand
gacuacaucaggagaagau

SEQ ID NO: 202593 - RNA, 19 nt, Homo sapiens
  misc_RNA (1)...(19): siRNA sense strand
uaauaagccagagaucgaa

SEQ ID NO: 202594 - RNA, 19 nt, Homo sapiens
  misc_RNA (1)...(19): siRNA sense strand
ugucagauucucagcuuau

SEQ ID NO: 202595 - RNA, 19 nt, Homo sapiens
  misc_RNA (1)...(19): siRNA sense strand
ggauauccugcagauuauu

SEQ ID NO: 202596 - RNA, 19 nt, Homo sapiens
  misc_RNA (1)...(19): siRNA sense strand
agcaucaggccaaauguaa

SEQ ID NO: 202597 - RNA, 19 nt, Homo sapiens
  misc_RNA (1)...(19): siRNA sense strand
gcccuuugcuuggaucucu

SEQ ID NO: 202598 - RNA, 19 nt, Homo sapiens
  misc_RNA (1)...(19): siRNA sense strand
gcugaauguuuaugauacg

SEQ ID NO: 202599 - RNA, 19 nt, Homo sapiens
  misc_RNA (1)...(19): siRNA sense strand
agacuuugccaagguacua

SEQ ID NO: 202600 - RNA, 19 nt, Homo sapiens
  misc_RNA (1)...(19): siRNA sense strand
caagcaaguggcaaguuca

SEQ ID NO: 202601 - RNA, 19 nt, Homo sapiens
  misc_RNA (1)...(19): siRNA sense strand
agacaaguacagauaccuu

SEQ ID NO: 202602 - RNA, 19 nt, Homo sapiens
  misc_RNA (1)...(19): siRNA sense strand
gcaucauuucccuguguaa

SEQ ID NO: 202603 - RNA, 19 nt, Homo sapiens
  misc_RNA (1)...(19): siRNA sense strand
cugcaaagaguguccaauc

SEQ ID NO: 202604 - RNA, 19 nt, Homo sapiens
  misc_RNA (1)...(19): siRNA sense strand
cuuauaggacugccaugaa

SEQ ID NO: 202605 - RNA, 19 nt, Homo sapiens
  misc_RNA (1)...(19): siRNA sense strand
caaagaguguccaaucauu

SEQ ID NO: 202606 - RNA, 19 nt, Homo sapiens
  misc_RNA (1)...(19): siRNA sense strand
uagcugaccugaauaaugu

SEQ ID NO: 202607 - RNA, 19 nt, Homo sapiens
  misc_RNA (1)...(19): siRNA sense strand
gcaugauucuauccaaauu

SEQ ID NO: 202608 - RNA, 19 nt, Homo sapiens
  misc_RNA (1)...(19): siRNA sense strand
ugaacuggcugcugaaugu

SEQ ID NO: 202609 - RNA, 19 nt, Homo sapiens
  misc_RNA (1)...(19): siRNA sense strand
gauauccugcagauuauua

SEQ ID NO: 202610 - RNA, 19 nt, Homo sapiens
  misc_RNA (1)...(19): siRNA sense strand
gagaagauguucgagacuu

SEQ ID NO: 202611 - RNA, 19 nt, Homo sapiens
  misc_RNA (1)...(19): siRNA sense strand
gcacuuuaauuaugacauc

SEQ ID NO: 202612 - RNA, 19 nt, Homo sapiens
  misc_RNA (1)...(19): siRNA sense strand
guaaagcacauuuggaaga

SEQ ID NO: 202613 - RNA, 19 nt, Homo sapiens
  misc_RNA (1)...(19): siRNA sense strand
gaauauugcacuccgacua

SEQ ID NO: 202614 - RNA, 19 nt, Homo sapiens
  misc_RNA (1)...(19): siRNA sense strand
uuauaggacugccaugaaa

SEQ ID NO: 202615 - RNA, 19 nt, Homo sapiens
  misc_RNA (1)...(19): siRNA sense strand
gggugaaguugcauccuuu

SEQ ID NO: 202616 - RNA, 19 nt, Homo sapiens
  misc_RNA (1)...(19): siRNA sense strand
gcaagagcacaacaauuug

SEQ ID NO: 202617 - RNA, 19 nt, Homo sapiens
  misc_RNA (1)...(19): siRNA sense strand
gcacaacaauuuggucaac

SEQ ID NO: 202618 - RNA, 19 nt, Homo sapiens
  misc_RNA (1)...(19): siRNA sense strand
agcaagagcacaacaauuu

SEQ ID NO: 202619 - RNA, 19 nt, Homo sapiens
  misc_RNA (1)...(19): siRNA sense strand
agaagauguucgagacuuu

SEQ ID NO: 202620 - RNA, 19 nt, Homo sapiens
  misc_RNA (1)...(19): siRNA sense strand
gagcaagagcacaacaauu

SEQ ID NO: 202621 - RNA, 19 nt, Homo sapiens
  misc_RNA (1)...(19): siRNA sense strand
ucaagcaaguggcaaguuc

SEQ ID NO: 202622 - RNA, 19 nt, Homo sapiens
  misc_RNA (1)...(19): siRNA sense strand
ccacgagacucaaacaacu

SEQ ID NO: 202623 - RNA, 19 nt, Homo sapiens
  misc_RNA (1)...(19): siRNA sense strand
cagcacaaccucaagcaaa

SEQ ID NO: 202624 - RNA, 19 nt, Homo sapiens
  misc_RNA (1)...(19): siRNA sense strand
gcaaagaguguccaaucau

SEQ ID NO: 202625 - RNA, 19 nt, Homo sapiens
  misc_RNA (1)...(19): siRNA sense strand
auggauauccugcagauua

SEQ ID NO: 202626 - RNA, 19 nt, Homo sapiens
  misc_RNA (1)...(19): siRNA sense strand
uguaacaucugcaaagagu

SEQ ID NO: 202627 - RNA, 19 nt, Homo sapiens
  misc_RNA (1)...(19): siRNA sense strand
guccggagcugcuuccaau

SEQ ID NO: 202628 - RNA, 19 nt, Homo sapiens
  misc_RNA (1)...(19): siRNA sense strand
gcaaguggcaaguucaaca

SEQ ID NO: 202629 - RNA, 19 nt, Homo sapiens
  misc_RNA (1)...(19): siRNA sense strand
gcuuccaauuugcuaauaa

SEQ ID NO: 202630 - RNA, 19 nt, Homo sapiens
  misc_RNA (1)...(19): siRNA sense strand
uggaagacaaguacagaua

SEQ ID NO: 202631 - RNA, 19 nt, Homo sapiens
  misc_RNA (1)...(19): siRNA sense strand
ggauccguguccugucuuu

SEQ ID NO: 202632 - RNA, 19 nt, Homo sapiens
  misc_RNA (1)...(19): siRNA sense strand
gucuuuagcugaccugaau

SEQ ID NO: 202633 - RNA, 19 nt, Homo sapiens
  misc_RNA (1)...(19): siRNA sense strand
gacaaguacagauaccuuu

SEQ ID NO: 202634 - RNA, 19 nt, Homo sapiens
  misc_RNA (1)...(19): siRNA sense strand
ccaagcaucaggccaaaug

SEQ ID NO: 202635 - RNA, 19 nt, Homo sapiens
  misc_RNA (1)...(19): siRNA sense strand
ggagcaagagcacaacaau

SEQ ID NO: 202636 - RNA, 19 nt, Homo sapiens
  misc_RNA (1)...(19): siRNA sense strand
guguaaagcacauuuggaa

SEQ ID NO: 202637 - RNA, 19 nt, Homo sapiens
  misc_RNA (1)...(19): siRNA sense strand
caagacaguugggugaagu

SEQ ID NO: 202638 - RNA, 19 nt, Homo sapiens
  misc_RNA (1)...(19): siRNA sense strand
gaagauguucgagacuuug

SEQ ID NO: 202639 - RNA, 19 nt, Homo sapiens
  misc_RNA (1)...(19): siRNA sense strand
gucagauucucagcuuaua

SEQ ID NO: 202640 - RNA, 19 nt, Homo sapiens
  misc_RNA (1)...(19): siRNA sense strand
uaacaucugcaaagagugu

SEQ ID NO: 202641 - RNA, 19 nt, Homo sapiens
  misc_RNA (1)...(19): siRNA sense strand
cggagcugcuuccaauuug

SEQ ID NO: 202642 - RNA, 19 nt, Homo sapiens
  misc_RNA (1)...(19): siRNA sense strand
gaagacaaguacagauacc

SEQ ID NO: 202643 - RNA, 19 nt, Homo sapiens
  misc_RNA (1)...(19): siRNA sense strand
ccauggauauccugcagau

SEQ ID NO: 202644 - RNA, 19 nt, Homo sapiens
  misc_RNA (1)...(19): siRNA sense strand
ggcaucauuucccugugua

SEQ ID NO: 202645 - RNA, 19 nt, Homo sapiens
  misc_RNA (1)...(19): siRNA sense strand
uggauauccugcagauuau

SEQ ID NO: 202646 - RNA, 19 nt, Homo sapiens
  misc_RNA (1)...(19): siRNA sense strand
ggaagacaaguacagauac

SEQ ID NO: 202647 - RNA, 19 nt, Homo sapiens
  misc_RNA (1)...(19): siRNA sense strand
ugcaaagaguguccaauca

SEQ ID NO: 202648 - RNA, 19 nt, Homo sapiens
  misc_RNA (1)...(19): siRNA sense strand
guggauaugugucugaacu

SEQ ID NO: 202649 - RNA, 19 nt, Homo sapiens
  misc_RNA (1)...(19): siRNA sense strand
acuggcugcugaauguuua

SEQ ID NO: 202650 - RNA, 19 nt, Homo sapiens
  misc_RNA (1)...(19): siRNA sense strand
acuaucccaugguggaaua

SEQ ID NO: 202651 - RNA, 19 nt, Homo sapiens
  misc_RNA (1)...(19): siRNA sense strand
ccggagcugcuuccaauuu

SEQ ID NO: 202652 - RNA, 19 nt, Homo sapiens
  misc_RNA (1)...(19): siRNA sense strand
ccaaauuccaagacaguug

SEQ ID NO: 202653 - RNA, 19 nt, Homo sapiens
  misc_RNA (1)...(19): siRNA sense strand
cagaaacugccaagcauca

SEQ ID NO: 202654 - RNA, 19 nt, Homo sapiens
  misc_RNA (1)...(19): siRNA sense strand
uaugacaucugccaaagcu

SEQ ID NO: 202655 - RNA, 19 nt, Homo sapiens
  misc_RNA (1)...(19): siRNA sense strand
aaugucagauucucagcuu

SEQ ID NO: 202656 - RNA, 19 nt, Homo sapiens
  misc_RNA (1)...(19): siRNA sense strand
ucgagacuuugccaaggua

SEQ ID NO: 202657 - RNA, 19 nt, Homo sapiens
  misc_RNA (1)...(19): siRNA sense strand
gcaaaaggccauaaaaugc

SEQ ID NO: 202658 - RNA, 19 nt, Homo sapiens
  misc_RNA (1)...(19): siRNA sense strand
cugcaugauucuauccaaa

SEQ ID NO: 202659 - RNA, 19 nt, Homo sapiens
  misc_RNA (1)...(19): siRNA sense strand
uaaagcacauuuggaagac

SEQ ID NO: 202660 - RNA, 19 nt, Homo sapiens
  misc_RNA (1)...(19): siRNA sense strand
acaggagucuaaagcacuu

SEQ ID NO: 202661 - RNA, 19 nt, Homo sapiens
  misc_RNA (1)...(19): siRNA sense strand
acagauaccuuuucaagca

SEQ ID NO: 202662 - RNA, 19 nt, Homo sapiens
  misc_RNA (1)...(19): siRNA sense strand
aagcacauuuggaagacaa

SEQ ID NO: 202663 - RNA, 19 nt, Homo sapiens
  misc_RNA (1)...(19): siRNA sense strand
gcuaauaauaagccagaga

SEQ ID NO: 202664 - RNA, 19 nt, Homo sapiens
  misc_RNA (1)...(19): siRNA sense strand
caagagcacaacaauuugg

SEQ ID NO: 202665 - RNA, 19 nt, Homo sapiens
  misc_RNA (1)...(19): siRNA sense strand
ccugucagcugcaugugau

SEQ ID NO: 202666 - RNA, 19 nt, Homo sapiens
  misc_RNA (1)...(19): siRNA sense strand
gcugcugaauguuuaugau

SEQ ID NO: 202667 - RNA, 19 nt, Homo sapiens
  misc_RNA (1)...(19): siRNA sense strand
acagagcucuaccagucuu

SEQ ID NO: 202668 - RNA, 19 nt, Homo sapiens
  misc_RNA (1)...(19): siRNA sense strand
acaguugggugaaguugca

SEQ ID NO: 202669 - RNA, 19 nt, Homo sapiens
  misc_RNA (1)...(19): siRNA sense strand
guuugaccacuauuuauga

SEQ ID NO: 202670 - RNA, 19 nt, Homo sapiens
  misc_RNA (1)...(19): siRNA sense strand
gcuuauaggacugccauga

SEQ ID NO: 202671 - RNA, 19 nt, Homo sapiens
  misc_RNA (1)...(19): siRNA sense strand
caucaggccaaauguaaca

SEQ ID NO: 202672 - RNA, 19 nt, Homo sapiens
  misc_RNA (1)...(19): siRNA sense strand
gauucuauccaaauuccaa

SEQ ID NO: 202673 - RNA, 19 nt, Homo sapiens
  misc_RNA (1)...(19): siRNA sense strand
ggcaaguucaacaggauuu

SEQ ID NO: 202674 - RNA, 19 nt, Homo sapiens
  misc_RNA (1)...(19): siRNA sense strand
gaacuggcugcugaauguu

SEQ ID NO: 202675 - RNA, 19 nt, Homo sapiens
  misc_RNA (1)...(19): siRNA sense strand
cugcugaauguuuaugaua

SEQ ID NO: 202676 - RNA, 19 nt, Homo sapiens
  misc_RNA (1)...(19): siRNA sense strand
aagcaucaggccaaaugua

SEQ ID NO: 202677 - RNA, 19 nt, Homo sapiens
  misc_RNA (1)...(19): siRNA sense strand
uggcaucauuucccugugu

SEQ ID NO: 202678 - RNA, 19 nt, Homo sapiens
  misc_RNA (1)...(19): siRNA sense strand
ccaugaaacuccgaagacu

SEQ ID NO: 202679 - RNA, 19 nt, Homo sapiens
  misc_RNA (1)...(19): siRNA sense strand
auaauaagccagagaucga

SEQ ID NO: 202680 - RNA, 19 nt, Homo sapiens
  misc_RNA (1)...(19): siRNA sense strand
cuaauaauaagccagagau

SEQ ID NO: 202681 - RNA, 19 nt, Homo sapiens
  misc_RNA (1)...(19): siRNA sense strand
ugggugaaguugcauccuu

SEQ ID NO: 202682 - RNA, 19 nt, Homo sapiens
  misc_RNA (1)...(19): siRNA sense strand
caucauuucccuguguaaa

SEQ ID NO: 202683 - RNA, 19 nt, Homo sapiens
  misc_RNA (1)...(19): siRNA sense strand
gcguggauaugugucugaa

SEQ ID NO: 202684 - RNA, 19 nt, Homo sapiens
  misc_RNA (1)...(19): siRNA sense strand
gcacuaucccaugguggaa

SEQ ID NO: 202685 - RNA, 19 nt, Homo sapiens
  misc_RNA (1)...(19): siRNA sense strand
gagccugucagcugcaugu

SEQ ID NO: 202686 - RNA, 19 nt, Homo sapiens
  misc_RNA (1)...(19): siRNA sense strand
guacagauaccuuuucaag

SEQ ID NO: 202687 - RNA, 19 nt, Homo sapiens
  misc_RNA (1)...(19): siRNA sense strand
gucccucucugcguggaua

SEQ ID NO: 202688 - RNA, 19 nt, Homo sapiens
  misc_RNA (1)...(19): siRNA sense strand
ggagcugcuuccaauuugc

SEQ ID NO: 202689 - RNA, 19 nt, Homo sapiens
  misc_RNA (1)...(19): siRNA sense strand
uuagcugaccugaauaaug

SEQ ID NO: 202690 - RNA, 19 nt, Homo sapiens
  misc_RNA (1)...(19): siRNA sense strand
guggcaaguucaacaggau

SEQ ID NO: 202691 - RNA, 19 nt, Homo sapiens
  misc_RNA (1)...(19): siRNA sense strand
acaacaauuuggucaacgu

SEQ ID NO: 202692 - RNA, 19 nt, Homo sapiens
  misc_RNA (1)...(19): siRNA sense strand
gacuacaucaggagaagau

SEQ ID NO: 202693 - RNA, 19 nt, Homo sapiens
  misc_RNA (1)...(19): siRNA sense strand
uaauaagccagagaucgaa

SEQ ID NO: 202694 - RNA, 19 nt, Homo sapiens
  misc_RNA (1)...(19): siRNA sense strand
ugucagauucucagcuuau

SEQ ID NO: 202695 - RNA, 19 nt, Homo sapiens
  misc_RNA (1)...(19): siRNA sense strand
ggauauccugcagauuauu

SEQ ID NO: 202696 - RNA, 19 nt, Homo sapiens
  misc_RNA (1)...(19): siRNA sense strand
agcaucaggccaaauguaa

SEQ ID NO: 202697 - RNA, 19 nt, Homo sapiens
  misc_RNA (1)...(19): siRNA sense strand
gcccuuugcuuggaucucu

SEQ ID NO: 202698 - RNA, 19 nt, Homo sapiens
  misc_RNA (1)...(19): siRNA sense strand
gcugaauguuuaugauacg

SEQ ID NO: 202699 - RNA, 19 nt, Homo sapiens
  misc_RNA (1)...(19): siRNA sense strand
agacuuugccaagguacua

SEQ ID NO: 202700 - RNA, 19 nt, Homo sapiens
  misc_RNA (1)...(19): siRNA sense strand
caagcaaguggcaaguuca

SEQ ID NO: 202701 - RNA, 19 nt, Homo sapiens
  misc_RNA (1)...(19): siRNA sense strand
agacaaguacagauaccuu

SEQ ID NO: 202702 - RNA, 19 nt, Homo sapiens
  misc_RNA (1)...(19): siRNA sense strand
gcaucauuucccuguguaa

SEQ ID NO: 202703 - RNA, 19 nt, Homo sapiens
  misc_RNA (1)...(19): siRNA sense strand
cugcaaagaguguccaauc

SEQ ID NO: 202704 - RNA, 19 nt, Homo sapiens
  misc_RNA (1)...(19): siRNA sense strand
cuuauaggacugccaugaa

SEQ ID NO: 202705 - RNA, 19 nt, Homo sapiens
  misc_RNA (1)...(19): siRNA sense strand
caaagaguguccaaucauu

SEQ ID NO: 202706 - RNA, 19 nt, Homo sapiens
  misc_RNA (1)...(19): siRNA sense strand
uagcugaccugaauaaugu

SEQ ID NO: 202707 - RNA, 19 nt, Homo sapiens
  misc_RNA (1)...(19): siRNA sense strand
gcaugauucuauccaaauu

SEQ ID NO: 202708 - RNA, 19 nt, Homo sapiens
  misc_RNA (1)...(19): siRNA sense strand
ugaacuggcugcugaaugu

SEQ ID NO: 202709 - RNA, 19 nt, Homo sapiens
  misc_RNA (1)...(19): siRNA sense strand
gauauccugcagauuauua

SEQ ID NO: 202710 - RNA, 19 nt, Homo sapiens
  misc_RNA (1)...(19): siRNA sense strand
gagaagauguucgagacuu

SEQ ID NO: 202711 - RNA, 19 nt, Homo sapiens
  misc_RNA (1)...(19): siRNA sense strand
gcacuuuaauuaugacauc

SEQ ID NO: 202712 - RNA, 19 nt, Homo sapiens
  misc_RNA (1)...(19): siRNA sense strand
guaaagcacauuuggaaga

SEQ ID NO: 202713 - RNA, 19 nt, Homo sapiens
  misc_RNA (1)...(19): siRNA sense strand
gaauauugcacuccgacua

SEQ ID NO: 202714 - RNA, 19 nt, Homo sapiens
  misc_RNA (1)...(19): siRNA sense strand
uuauaggacugccaugaaa

SEQ ID NO: 202715 - RNA, 19 nt, Homo sapiens
  misc_RNA (1)...(19): siRNA sense strand
gggugaaguugcauccuuu

SEQ ID NO: 202716 - RNA, 19 nt, Homo sapiens
  misc_RNA (1)...(19): siRNA sense strand
gcaagagcacaacaauuug

SEQ ID NO: 202717 - RNA, 19 nt, Homo sapiens
  misc_RNA (1)...(19): siRNA sense strand
gcacaacaauuuggucaac

SEQ ID NO: 202718 - RNA, 19 nt, Homo sapiens
  misc_RNA (1)...(19): siRNA sense strand
agcaagagcacaacaauuu

SEQ ID NO: 202719 - RNA, 19 nt, Homo sapiens
  misc_RNA (1)...(19): siRNA sense strand
agaagauguucgagacuuu

SEQ ID NO: 202720 - RNA, 19 nt, Homo sapiens
  misc_RNA (1)...(19): siRNA sense strand
gagcaagagcacaacaauu

SEQ ID NO: 202721 - RNA, 19 nt, Homo sapiens
  misc_RNA (1)...(19): siRNA sense strand
ucaagcaaguggcaaguuc

SEQ ID NO: 202722 - RNA, 19 nt, Homo sapiens
  misc_RNA (1)...(19): siRNA sense strand
ccacgagacucaaacaacu

SEQ ID NO: 202723 - RNA, 19 nt, Homo sapiens
  misc_RNA (1)...(19): siRNA sense strand
cagcacaaccucaagcaaa

SEQ ID NO: 202724 - RNA, 19 nt, Homo sapiens
  misc_RNA (1)...(19): siRNA sense strand
gcaaagaguguccaaucau

SEQ ID NO: 202725 - RNA, 19 nt, Homo sapiens
  misc_RNA (1)...(19): siRNA sense strand
auggauauccugcagauua

SEQ ID NO: 202726 - RNA, 19 nt, Homo sapiens
  misc_RNA (1)...(19): siRNA sense strand
uguaacaucugcaaagagu

SEQ ID NO: 202727 - RNA, 19 nt, Homo sapiens
  misc_RNA (1)...(19): siRNA sense strand
guccggagcugcuuccaau

SEQ ID NO: 202728 - RNA, 19 nt, Homo sapiens
  misc_RNA (1)...(19): siRNA sense strand
gcaaguggcaaguucaaca

SEQ ID NO: 202729 - RNA, 19 nt, Homo sapiens
  misc_RNA (1)...(19): siRNA sense strand
gcuuccaauuugcuaauaa

SEQ ID NO: 202730 - RNA, 19 nt, Homo sapiens
  misc_RNA (1)...(19): siRNA sense strand
uggaagacaaguacagaua

SEQ ID NO: 202731 - RNA, 19 nt, Homo sapiens
  misc_RNA (1)...(19): siRNA sense strand
ggauccguguccugucuuu

SEQ ID NO: 202732 - RNA, 19 nt, Homo sapiens
  misc_RNA (1)...(19): siRNA sense strand
gucuuuagcugaccugaau

SEQ ID NO: 202733 - RNA, 19 nt, Homo sapiens
  misc_RNA (1)...(19): siRNA sense strand
gacaaguacagauaccuuu

SEQ ID NO: 202734 - RNA, 19 nt, Homo sapiens
  misc_RNA (1)...(19): siRNA sense strand
ccaagcaucaggccaaaug

SEQ ID NO: 202735 - RNA, 19 nt, Homo sapiens
  misc_RNA (1)...(19): siRNA sense strand
ggagcaagagcacaacaau

SEQ ID NO: 202736 - RNA, 19 nt, Homo sapiens
  misc_RNA (1)...(19): siRNA sense strand
guguaaagcacauuuggaa

SEQ ID NO: 202737 - RNA, 19 nt, Homo sapiens
  misc_RNA (1)...(19): siRNA sense strand
caagacaguugggugaagu

SEQ ID NO: 202738 - RNA, 19 nt, Homo sapiens
  misc_RNA (1)...(19): siRNA sense strand
gaagauguucgagacuuug

SEQ ID NO: 202739 - RNA, 19 nt, Homo sapiens
  misc_RNA (1)...(19): siRNA sense strand
gucagauucucagcuuaua

SEQ ID NO: 202740 - RNA, 19 nt, Homo sapiens
  misc_RNA (1)...(19): siRNA sense strand
uaacaucugcaaagagugu

SEQ ID NO: 202741 - RNA, 19 nt, Homo sapiens
  misc_RNA (1)...(19): siRNA sense strand
cggagcugcuuccaauuug

SEQ ID NO: 202742 - RNA, 19 nt, Homo sapiens
  misc_RNA (1)...(19): siRNA sense strand
gaagacaaguacagauacc

SEQ ID NO: 202743 - RNA, 19 nt, Homo sapiens
  misc_RNA (1)...(19): siRNA sense strand
ccauggauauccugcagau

SEQ ID NO: 202744 - RNA, 19 nt, Homo sapiens
  misc_RNA (1)...(19): siRNA sense strand
ggcaucauuucccugugua

SEQ ID NO: 202745 - RNA, 19 nt, Homo sapiens
  misc_RNA (1)...(19): siRNA sense strand
uggauauccugcagauuau

SEQ ID NO: 202746 - RNA, 19 nt, Homo sapiens
  misc_RNA (1)...(19): siRNA sense strand
ggaagacaaguacagauac

SEQ ID NO: 202747 - RNA, 19 nt, Homo sapiens
  misc_RNA (1)...(19): siRNA sense strand
ugcaaagaguguccaauca

SEQ ID NO: 202748 - RNA, 19 nt, Homo sapiens
  misc_RNA (1)...(19): siRNA sense strand
guggauaugugucugaacu

SEQ ID NO: 202749 - RNA, 19 nt, Homo sapiens
  misc_RNA (1)...(19): siRNA sense strand
acuggcugcugaauguuua

SEQ ID NO: 202750 - RNA, 19 nt, Homo sapiens
  misc_RNA (1)...(19): siRNA sense strand
acuaucccaugguggaaua

SEQ ID NO: 202751 - RNA, 19 nt, Homo sapiens
  misc_RNA (1)...(19): siRNA sense strand
ccggagcugcuuccaauuu

SEQ ID NO: 202752 - RNA, 19 nt, Homo sapiens
  misc_RNA (1)...(19): siRNA sense strand
ccaaauuccaagacaguug

SEQ ID NO: 202753 - RNA, 19 nt, Homo sapiens
  misc_RNA (1)...(19): siRNA sense strand
cagaaacugccaagcauca

SEQ ID NO: 202754 - RNA, 19 nt, Homo sapiens
  misc_RNA (1)...(19): siRNA sense strand
uaugacaucugccaaagcu

SEQ ID NO: 202755 - RNA, 19 nt, Homo sapiens
  misc_RNA (1)...(19): siRNA sense strand
aaugucagauucucagcuu

SEQ ID NO: 202756 - RNA, 19 nt, Homo sapiens
  misc_RNA (1)...(19): siRNA sense strand
ucgagacuuugccaaggua

SEQ ID NO: 202757 - RNA, 19 nt, Homo sapiens
  misc_RNA (1)...(19): siRNA sense strand
gcaaaaggccauaaaaugc

SEQ ID NO: 202758 - RNA, 19 nt, Homo sapiens
  misc_RNA (1)...(19): siRNA sense strand
cugcaugauucuauccaaa

SEQ ID NO: 202759 - RNA, 19 nt, Homo sapiens
  misc_RNA (1)...(19): siRNA sense strand
uaaagcacauuuggaagac

SEQ ID NO: 202760 - RNA, 19 nt, Homo sapiens
  misc_RNA (1)...(19): siRNA sense strand
acaggagucuaaagcacuu

SEQ ID NO: 202761 - RNA, 19 nt, Homo sapiens
  misc_RNA (1)...(19): siRNA sense strand
acagauaccuuuucaagca

SEQ ID NO: 202762 - RNA, 19 nt, Homo sapiens
  misc_RNA (1)...(19): siRNA sense strand
aagcacauuuggaagacaa

SEQ ID NO: 202763 - RNA, 19 nt, Homo sapiens
  misc_RNA (1)...(19): siRNA sense strand
gcuaauaauaagccagaga

SEQ ID NO: 202764 - RNA, 19 nt, Homo sapiens
  misc_RNA (1)...(19): siRNA sense strand
caagagcacaacaauuugg

SEQ ID NO: 202765 - RNA, 19 nt, Homo sapiens
  misc_RNA (1)...(19): siRNA sense strand
ccugucagcugcaugugau

SEQ ID NO: 202766 - RNA, 19 nt, Homo sapiens
  misc_RNA (1)...(19): siRNA sense strand
gcugcugaauguuuaugau

SEQ ID NO: 202767 - RNA, 19 nt, Homo sapiens
  misc_RNA (1)...(19): siRNA sense strand
acagagcucuaccagucuu

SEQ ID NO: 202768 - RNA, 19 nt, Homo sapiens
  misc_RNA (1)...(19): siRNA sense strand
acaguugggugaaguugca

SEQ ID NO: 202769 - RNA, 19 nt, Homo sapiens
  misc_RNA (1)...(19): siRNA sense strand
guuugaccacuauuuauga

SEQ ID NO: 202770 - RNA, 19 nt, Homo sapiens
  misc_RNA (1)...(19): siRNA sense strand
gcuuauaggacugccauga

SEQ ID NO: 202771 - RNA, 19 nt, Homo sapiens
  misc_RNA (1)...(19): siRNA sense strand
caucaggccaaauguaaca

SEQ ID NO: 202772 - RNA, 19 nt, Homo sapiens
  misc_RNA (1)...(19): siRNA sense strand
gauucuauccaaauuccaa

SEQ ID NO: 202773 - RNA, 19 nt, Homo sapiens
  misc_RNA (1)...(19): siRNA sense strand
ggcaaguucaacaggauuu

SEQ ID NO: 202774 - RNA, 19 nt, Homo sapiens
  misc_RNA (1)...(19): siRNA sense strand
gaacuggcugcugaauguu

SEQ ID NO: 202775 - RNA, 19 nt, Homo sapiens
  misc_RNA (1)...(19): siRNA sense strand
cugcugaauguuuaugaua

SEQ ID NO: 202776 - RNA, 19 nt, Homo sapiens
  misc_RNA (1)...(19): siRNA sense strand
aagcaucaggccaaaugua

SEQ ID NO: 202777 - RNA, 19 nt, Homo sapiens
  misc_RNA (1)...(19): siRNA sense strand
uggcaucauuucccugugu

SEQ ID NO: 202778 - RNA, 19 nt, Homo sapiens
  misc_RNA (1)...(19): siRNA sense strand
ccaugaaacuccgaagacu

SEQ ID NO: 202779 - RNA, 19 nt, Homo sapiens
  misc_RNA (1)...(19): siRNA sense strand
auaauaagccagagaucga

SEQ ID NO: 202780 - RNA, 19 nt, Homo sapiens
  misc_RNA (1)...(19): siRNA sense strand
cuaauaauaagccagagau

SEQ ID NO: 202781 - RNA, 19 nt, Homo sapiens
  misc_RNA (1)...(19): siRNA sense strand
ugggugaaguugcauccuu

SEQ ID NO: 202782 - RNA, 19 nt, Homo sapiens
  misc_RNA (1)...(19): siRNA sense strand
caucauuucccuguguaaa

SEQ ID NO: 202783 - RNA, 19 nt, Homo sapiens
  misc_RNA (1)...(19): siRNA sense strand
gcguggauaugugucugaa

SEQ ID NO: 202784 - RNA, 19 nt, Homo sapiens
  misc_RNA (1)...(19): siRNA sense strand
gcacuaucccaugguggaa

SEQ ID NO: 202785 - RNA, 19 nt, Homo sapiens
  misc_RNA (1)...(19): siRNA sense strand
gagccugucagcugcaugu

SEQ ID NO: 202786 - RNA, 19 nt, Homo sapiens
  misc_RNA (1)...(19): siRNA sense strand
guacagauaccuuuucaag

SEQ ID NO: 202787 - RNA, 19 nt, Homo sapiens
  misc_RNA (1)...(19): siRNA sense strand
gucccucucugcguggaua

SEQ ID NO: 202788 - RNA, 19 nt, Homo sapiens
  misc_RNA (1)...(19): siRNA sense strand
ggagcugcuuccaauuugc

SEQ ID NO: 202789 - RNA, 19 nt, Homo sapiens
  misc_RNA (1)...(19): siRNA sense strand
uuagcugaccugaauaaug

SEQ ID NO: 202790 - RNA, 19 nt, Homo sapiens
  misc_RNA (1)...(19): siRNA sense strand
guggcaaguucaacaggau

SEQ ID NO: 202791 - RNA, 19 nt, Homo sapiens
  misc_RNA (1)...(19): siRNA sense strand
acaacaauuuggucaacgu

SEQ ID NO: 202792 - RNA, 19 nt, Homo sapiens
  misc_RNA (1)...(19): siRNA sense strand
gacuacaucaggagaagau

SEQ ID NO: 202793 - RNA, 19 nt, Homo sapiens
  misc_RNA (1)...(19): siRNA sense strand
uaauaagccagagaucgaa

SEQ ID NO: 202794 - RNA, 19 nt, Homo sapiens
  misc_RNA (1)...(19): siRNA sense strand
ugucagauucucagcuuau

SEQ ID NO: 202795 - RNA, 19 nt, Homo sapiens
  misc_RNA (1)...(19): siRNA sense strand
ggauauccugcagauuauu

SEQ ID NO: 202796 - RNA, 19 nt, Homo sapiens
  misc_RNA (1)...(19): siRNA sense strand
agcaucaggccaaauguaa

SEQ ID NO: 202797 - RNA, 19 nt, Homo sapiens
  misc_RNA (1)...(19): siRNA sense strand
gcccuuugcuuggaucucu

SEQ ID NO: 202798 - RNA, 19 nt, Homo sapiens
  misc_RNA (1)...(19): siRNA sense strand
gcugaauguuuaugauacg

SEQ ID NO: 202799 - RNA, 19 nt, Homo sapiens
  misc_RNA (1)...(19): siRNA sense strand
agacuuugccaagguacua

SEQ ID NO: 202800 - RNA, 19 nt, Homo sapiens
  misc_RNA (1)...(19): siRNA sense strand
caagcaaguggcaaguuca

SEQ ID NO: 202801 - RNA, 19 nt, Homo sapiens
  misc_RNA (1)...(19): siRNA sense strand
agacaaguacagauaccuu

SEQ ID NO: 202802 - RNA, 19 nt, Homo sapiens
  misc_RNA (1)...(19): siRNA sense strand
gcaucauuucccuguguaa

SEQ ID NO: 202803 - RNA, 19 nt, Homo sapiens
  misc_RNA (1)...(19): siRNA sense strand
cugcaaagaguguccaauc

SEQ ID NO: 202804 - RNA, 19 nt, Homo sapiens
  misc_RNA (1)...(19): siRNA sense strand
cuuauaggacugccaugaa

SEQ ID NO: 202805 - RNA, 19 nt, Homo sapiens
  misc_RNA (1)...(19): siRNA sense strand
caaagaguguccaaucauu

SEQ ID NO: 202806 - RNA, 19 nt, Homo sapiens
  misc_RNA (1)...(19): siRNA sense strand
uagcugaccugaauaaugu

SEQ ID NO: 202807 - RNA, 19 nt, Homo sapiens
  misc_RNA (1)...(19): siRNA sense strand
gcaugauucuauccaaauu

SEQ ID NO: 202808 - RNA, 19 nt, Homo sapiens
  misc_RNA (1)...(19): siRNA sense strand
ugaacuggcugcugaaugu

SEQ ID NO: 202809 - RNA, 19 nt, Homo sapiens
  misc_RNA (1)...(19): siRNA sense strand
gauauccugcagauuauua

SEQ ID NO: 202810 - RNA, 19 nt, Homo sapiens
  misc_RNA (1)...(19): siRNA sense strand
gagaagauguucgagacuu

SEQ ID NO: 202811 - RNA, 19 nt, Homo sapiens
  misc_RNA (1)...(19): siRNA sense strand
gcacuuuaauuaugacauc

SEQ ID NO: 202812 - RNA, 19 nt, Homo sapiens
  misc_RNA (1)...(19): siRNA sense strand
guaaagcacauuuggaaga

SEQ ID NO: 202813 - RNA, 19 nt, Homo sapiens
  misc_RNA (1)...(19): siRNA sense strand
gaauauugcacuccgacua

SEQ ID NO: 202814 - RNA, 19 nt, Homo sapiens
  misc_RNA (1)...(19): siRNA sense strand
uuauaggacugccaugaaa

SEQ ID NO: 202815 - RNA, 19 nt, Homo sapiens
  misc_RNA (1)...(19): siRNA sense strand
gggugaaguugcauccuuu

SEQ ID NO: 202816 - RNA, 19 nt, Homo sapiens
  misc_RNA (1)...(19): siRNA sense strand
gcaagagcacaacaauuug

SEQ ID NO: 202817 - RNA, 19 nt, Homo sapiens
  misc_RNA (1)...(19): siRNA sense strand
gcacaacaauuuggucaac

SEQ ID NO: 202818 - RNA, 19 nt, Homo sapiens
  misc_RNA (1)...(19): siRNA sense strand
agcaagagcacaacaauuu

SEQ ID NO: 202819 - RNA, 19 nt, Homo sapiens
  misc_RNA (1)...(19): siRNA sense strand
agaagauguucgagacuuu

SEQ ID NO: 202820 - RNA, 19 nt, Homo sapiens
  misc_RNA (1)...(19): siRNA sense strand
gagcaagagcacaacaauu

SEQ ID NO: 202821 - RNA, 19 nt, Homo sapiens
  misc_RNA (1)...(19): siRNA sense strand
ucaagcaaguggcaaguuc

SEQ ID NO: 202822 - RNA, 19 nt, Homo sapiens
  misc_RNA (1)...(19): siRNA sense strand
ccacgagacucaaacaacu

SEQ ID NO: 202823 - RNA, 19 nt, Homo sapiens
  misc_RNA (1)...(19): siRNA sense strand
cagcacaaccucaagcaaa

SEQ ID NO: 202824 - RNA, 19 nt, Homo sapiens
  misc_RNA (1)...(19): siRNA sense strand
gcaaagaguguccaaucau

SEQ ID NO: 202825 - RNA, 19 nt, Homo sapiens
  misc_RNA (1)...(19): siRNA sense strand
auggauauccugcagauua

SEQ ID NO: 202826 - RNA, 19 nt, Homo sapiens
  misc_RNA (1)...(19): siRNA sense strand
uguaacaucugcaaagagu

SEQ ID NO: 202827 - RNA, 19 nt, Homo sapiens
  misc_RNA (1)...(19): siRNA sense strand
guccggagcugcuuccaau

SEQ ID NO: 202828 - RNA, 19 nt, Homo sapiens
  misc_RNA (1)...(19): siRNA sense strand
gcaaguggcaaguucaaca

SEQ ID NO: 202829 - RNA, 19 nt, Homo sapiens
  misc_RNA (1)...(19): siRNA sense strand
gcuuccaauuugcuaauaa

SEQ ID NO: 202830 - RNA, 19 nt, Homo sapiens
  misc_RNA (1)...(19): siRNA sense strand
uggaagacaaguacagaua

SEQ ID NO: 202831 - RNA, 19 nt, Homo sapiens
  misc_RNA (1)...(19): siRNA sense strand
ggauccguguccugucuuu

SEQ ID NO: 202832 - RNA, 19 nt, Homo sapiens
  misc_RNA (1)...(19): siRNA sense strand
gucuuuagcugaccugaau

SEQ ID NO: 202833 - RNA, 19 nt, Homo sapiens
  misc_RNA (1)...(19): siRNA sense strand
gacaaguacagauaccuuu

SEQ ID NO: 202834 - RNA, 19 nt, Homo sapiens
  misc_RNA (1)...(19): siRNA sense strand
ccaagcaucaggccaaaug

SEQ ID NO: 202835 - RNA, 19 nt, Homo sapiens
  misc_RNA (1)...(19): siRNA sense strand
ggagcaagagcacaacaau

SEQ ID NO: 202836 - RNA, 19 nt, Homo sapiens
  misc_RNA (1)...(19): siRNA sense strand
guguaaagcacauuuggaa

SEQ ID NO: 202837 - RNA, 19 nt, Homo sapiens
  misc_RNA (1)...(19): siRNA sense strand
caagacaguugggugaagu

SEQ ID NO: 202838 - RNA, 19 nt, Homo sapiens
  misc_RNA (1)...(19): siRNA sense strand
gaagauguucgagacuuug

SEQ ID NO: 202839 - RNA, 19 nt, Homo sapiens
  misc_RNA (1)...(19): siRNA sense strand
gucagauucucagcuuaua

SEQ ID NO: 202840 - RNA, 19 nt, Homo sapiens
  misc_RNA (1)...(19): siRNA sense strand
uaacaucugcaaagagugu

SEQ ID NO: 202841 - RNA, 19 nt, Homo sapiens
  misc_RNA (1)...(19): siRNA sense strand
cggagcugcuuccaauuug

SEQ ID NO: 202842 - RNA, 19 nt, Homo sapiens
  misc_RNA (1)...(19): siRNA sense strand
gaagacaaguacagauacc

SEQ ID NO: 202843 - RNA, 19 nt, Homo sapiens
  misc_RNA (1)...(19): siRNA sense strand
ccauggauauccugcagau

SEQ ID NO: 202844 - RNA, 19 nt, Homo sapiens
  misc_RNA (1)...(19): siRNA sense strand
ggcaucauuucccugugua

SEQ ID NO: 202845 - RNA, 19 nt, Homo sapiens
  misc_RNA (1)...(19): siRNA sense strand
uggauauccugcagauuau

SEQ ID NO: 202846 - RNA, 19 nt, Homo sapiens
  misc_RNA (1)...(19): siRNA sense strand
ggaagacaaguacagauac

SEQ ID NO: 202847 - RNA, 19 nt, Homo sapiens
  misc_RNA (1)...(19): siRNA sense strand
ugcaaagaguguccaauca

SEQ ID NO: 202848 - RNA, 19 nt, Homo sapiens
  misc_RNA (1)...(19): siRNA sense strand
guggauaugugucugaacu

SEQ ID NO: 202849 - RNA, 19 nt, Homo sapiens
  misc_RNA (1)...(19): siRNA sense strand
acuggcugcugaauguuua

SEQ ID NO: 202850 - RNA, 19 nt, Homo sapiens
  misc_RNA (1)...(19): siRNA sense strand
acuaucccaugguggaaua

SEQ ID NO: 202851 - RNA, 19 nt, Homo sapiens
  misc_RNA (1)...(19): siRNA sense strand
ccggagcugcuuccaauuu

SEQ ID NO: 202852 - RNA, 19 nt, Homo sapiens
  misc_RNA (1)...(19): siRNA sense strand
ccaaauuccaagacaguug

SEQ ID NO: 202853 - RNA, 19 nt, Homo sapiens
  misc_RNA (1)...(19): siRNA sense strand
cagaaacugccaagcauca

SEQ ID NO: 202854 - RNA, 19 nt, Homo sapiens
  misc_RNA (1)...(19): siRNA sense strand
uaugacaucugccaaagcu

SEQ ID NO: 202855 - RNA, 19 nt, Homo sapiens
  misc_RNA (1)...(19): siRNA sense strand
aaugucagauucucagcuu

SEQ ID NO: 202856 - RNA, 19 nt, Homo sapiens
  misc_RNA (1)...(19): siRNA sense strand
ucgagacuuugccaaggua

SEQ ID NO: 202857 - RNA, 19 nt, Homo sapiens
  misc_RNA (1)...(19): siRNA sense strand
gcaaaaggccauaaaaugc

SEQ ID NO: 202858 - RNA, 19 nt, Homo sapiens
  misc_RNA (1)...(19): siRNA sense strand
cugcaugauucuauccaaa

SEQ ID NO: 202859 - RNA, 19 nt, Homo sapiens
  misc_RNA (1)...(19): siRNA sense strand
uaaagcacauuuggaagac

SEQ ID NO: 202860 - RNA, 19 nt, Homo sapiens
  misc_RNA (1)...(19): siRNA sense strand
acaggagucuaaagcacuu

SEQ ID NO: 202861 - RNA, 19 nt, Homo sapiens
  misc_RNA (1)...(19): siRNA sense strand
acagauaccuuuucaagca

SEQ ID NO: 202862 - RNA, 19 nt, Homo sapiens
  misc_RNA (1)...(19): siRNA sense strand
aagcacauuuggaagacaa

SEQ ID NO: 202863 - RNA, 19 nt, Homo sapiens
  misc_RNA (1)...(19): siRNA sense strand
gcuaauaauaagccagaga

SEQ ID NO: 202864 - RNA, 19 nt, Homo sapiens
  misc_RNA (1)...(19): siRNA sense strand
caagagcacaacaauuugg

SEQ ID NO: 202865 - RNA, 19 nt, Homo sapiens
  misc_RNA (1)...(19): siRNA sense strand
ccugucagcugcaugugau

SEQ ID NO: 202866 - RNA, 19 nt, Homo sapiens
  misc_RNA (1)...(19): siRNA sense strand
gcugcugaauguuuaugau

SEQ ID NO: 202867 - RNA, 19 nt, Homo sapiens
  misc_RNA (1)...(19): siRNA sense strand
acagagcucuaccagucuu

SEQ ID NO: 202868 - RNA, 19 nt, Homo sapiens
  misc_RNA (1)...(19): siRNA sense strand
acaguugggugaaguugca

SEQ ID NO: 202869 - RNA, 19 nt, Homo sapiens
  misc_RNA (1)...(19): siRNA sense strand
guuugaccacuauuuauga

SEQ ID NO: 202870 - RNA, 19 nt, Homo sapiens
  misc_RNA (1)...(19): siRNA sense strand
gcuuauaggacugccauga

SEQ ID NO: 202871 - RNA, 19 nt, Homo sapiens
  misc_RNA (1)...(19): siRNA sense strand
caucaggccaaauguaaca

SEQ ID NO: 202872 - RNA, 19 nt, Homo sapiens
  misc_RNA (1)...(19): siRNA sense strand
gauucuauccaaauuccaa

SEQ ID NO: 202873 - RNA, 19 nt, Homo sapiens
  misc_RNA (1)...(19): siRNA sense strand
ggcaaguucaacaggauuu

SEQ ID NO: 202874 - RNA, 19 nt, Homo sapiens
  misc_RNA (1)...(19): siRNA sense strand
gaacuggcugcugaauguu

SEQ ID NO: 202875 - RNA, 19 nt, Homo sapiens
  misc_RNA (1)...(19): siRNA sense strand
cugcugaauguuuaugaua

SEQ ID NO: 202876 - RNA, 19 nt, Homo sapiens
  misc_RNA (1)...(19): siRNA sense strand
aagcaucaggccaaaugua

SEQ ID NO: 202877 - RNA, 19 nt, Homo sapiens
  misc_RNA (1)...(19): siRNA sense strand
uggcaucauuucccugugu

SEQ ID NO: 202878 - RNA, 19 nt, Homo sapiens
  misc_RNA (1)...(19): siRNA sense strand
ccaugaaacuccgaagacu

SEQ ID NO: 202879 - RNA, 19 nt, Homo sapiens
  misc_RNA (1)...(19): siRNA sense strand
auaauaagccagagaucga

SEQ ID NO: 202880 - RNA, 19 nt, Homo sapiens
  misc_RNA (1)...(19): siRNA sense strand
cuaauaauaagccagagau

SEQ ID NO: 202881 - RNA, 19 nt, Homo sapiens
  misc_RNA (1)...(19): siRNA sense strand
ugggugaaguugcauccuu

SEQ ID NO: 202882 - RNA, 19 nt, Homo sapiens
  misc_RNA (1)...(19): siRNA sense strand
caucauuucccuguguaaa

SEQ ID NO: 202883 - RNA, 19 nt, Homo sapiens
  misc_RNA (1)...(19): siRNA sense strand
gcguggauaugugucugaa

SEQ ID NO: 202884 - RNA, 19 nt, Homo sapiens
  misc_RNA (1)...(19): siRNA sense strand
gcacuaucccaugguggaa

SEQ ID NO: 202885 - RNA, 19 nt, Homo sapiens
  misc_RNA (1)...(19): siRNA sense strand
gagccugucagcugcaugu

SEQ ID NO: 202886 - RNA, 19 nt, Homo sapiens
  misc_RNA (1)...(19): siRNA sense strand
guacagauaccuuuucaag

SEQ ID NO: 202887 - RNA, 19 nt, Homo sapiens
  misc_RNA (1)...(19): siRNA sense strand
gucccucucugcguggaua

SEQ ID NO: 202888 - RNA, 19 nt, Homo sapiens
  misc_RNA (1)...(19): siRNA sense strand
ggagcugcuuccaauuugc

SEQ ID NO: 202889 - RNA, 19 nt, Homo sapiens
  misc_RNA (1)...(19): siRNA sense strand
uuagcugaccugaauaaug

SEQ ID NO: 202890 - RNA, 19 nt, Homo sapiens
  misc_RNA (1)...(19): siRNA sense strand
guggcaaguucaacaggau

SEQ ID NO: 202891 - RNA, 19 nt, Homo sapiens
  misc_RNA (1)...(19): siRNA sense strand
acaacaauuuggucaacgu

SEQ ID NO: 202892 - RNA, 19 nt, Homo sapiens
  misc_RNA (1)...(19): siRNA sense strand
gacuacaucaggagaagau

SEQ ID NO: 202893 - RNA, 19 nt, Homo sapiens
  misc_RNA (1)...(19): siRNA sense strand
uaauaagccagagaucgaa

SEQ ID NO: 202894 - RNA, 19 nt, Homo sapiens
  misc_RNA (1)...(19): siRNA sense strand
ugucagauucucagcuuau

SEQ ID NO: 202895 - RNA, 19 nt, Homo sapiens
  misc_RNA (1)...(19): siRNA sense strand
ggauauccugcagauuauu

SEQ ID NO: 202896 - RNA, 19 nt, Homo sapiens
  misc_RNA (1)...(19): siRNA sense strand
agcaucaggccaaauguaa

SEQ ID NO: 202897 - RNA, 19 nt, Homo sapiens
  misc_RNA (1)...(19): siRNA sense strand
gcccuuugcuuggaucucu

SEQ ID NO: 202898 - RNA, 19 nt, Homo sapiens
  misc_RNA (1)...(19): siRNA sense strand
gcugaauguuuaugauacg

SEQ ID NO: 202899 - RNA, 19 nt, Homo sapiens
  misc_RNA (1)...(19): siRNA sense strand
agacuuugccaagguacua

SEQ ID NO: 202900 - RNA, 19 nt, Homo sapiens
  misc_RNA (1)...(19): siRNA sense strand
caagcaaguggcaaguuca

SEQ ID NO: 202901 - RNA, 19 nt, Homo sapiens
  misc_RNA (1)...(19): siRNA sense strand
agacaaguacagauaccuu

SEQ ID NO: 202902 - RNA, 19 nt, Homo sapiens
  misc_RNA (1)...(19): siRNA sense strand
gcaucauuucccuguguaa

SEQ ID NO: 202903 - RNA, 19 nt, Homo sapiens
  misc_RNA (1)...(19): siRNA sense strand
cugcaaagaguguccaauc

SEQ ID NO: 202904 - RNA, 19 nt, Homo sapiens
  misc_RNA (1)...(19): siRNA sense strand
cuuauaggacugccaugaa

SEQ ID NO: 202905 - RNA, 19 nt, Homo sapiens
  misc_RNA (1)...(19): siRNA sense strand
caaagaguguccaaucauu

SEQ ID NO: 202906 - RNA, 19 nt, Homo sapiens
  misc_RNA (1)...(19): siRNA sense strand
uagcugaccugaauaaugu

SEQ ID NO: 202907 - RNA, 19 nt, Homo sapiens
  misc_RNA (1)...(19): siRNA sense strand
gcaugauucuauccaaauu

SEQ ID NO: 202908 - RNA, 19 nt, Homo sapiens
  misc_RNA (1)...(19): siRNA sense strand
ugaacuggcugcugaaugu

SEQ ID NO: 202909 - RNA, 19 nt, Homo sapiens
  misc_RNA (1)...(19): siRNA sense strand
gauauccugcagauuauua

SEQ ID NO: 202910 - RNA, 19 nt, Homo sapiens
  misc_RNA (1)...(19): siRNA sense strand
gagaagauguucgagacuu

SEQ ID NO: 202911 - RNA, 19 nt, Homo sapiens
  misc_RNA (1)...(19): siRNA sense strand
gcacuuuaauuaugacauc

SEQ ID NO: 202912 - RNA, 19 nt, Homo sapiens
  misc_RNA (1)...(19): siRNA sense strand
guaaagcacauuuggaaga

SEQ ID NO: 202913 - RNA, 19 nt, Homo sapiens
  misc_RNA (1)...(19): siRNA sense strand
gaauauugcacuccgacua

SEQ ID NO: 202914 - RNA, 19 nt, Homo sapiens
  misc_RNA (1)...(19): siRNA sense strand
uuauaggacugccaugaaa

SEQ ID NO: 202915 - RNA, 19 nt, Homo sapiens
  misc_RNA (1)...(19): siRNA sense strand
gggugaaguugcauccuuu

SEQ ID NO: 202916 - RNA, 19 nt, Homo sapiens
  misc_RNA (1)...(19): siRNA sense strand
gcaagagcacaacaauuug

SEQ ID NO: 202917 - RNA, 19 nt, Homo sapiens
  misc_RNA (1)...(19): siRNA sense strand
gcacaacaauuuggucaac

SEQ ID NO: 202918 - RNA, 19 nt, Homo sapiens
  misc_RNA (1)...(19): siRNA sense strand
agcaagagcacaacaauuu

SEQ ID NO: 202919 - RNA, 19 nt, Homo sapiens
  misc_RNA (1)...(19): siRNA sense strand
agaagauguucgagacuuu

SEQ ID NO: 202920 - RNA, 19 nt, Homo sapiens
  misc_RNA (1)...(19): siRNA sense strand
gagcaagagcacaacaauu

SEQ ID NO: 202921 - RNA, 19 nt, Homo sapiens
  misc_RNA (1)...(19): siRNA sense strand
ucaagcaaguggcaaguuc

SEQ ID NO: 202922 - RNA, 19 nt, Homo sapiens
  misc_RNA (1)...(19): siRNA sense strand
ccacgagacucaaacaacu

SEQ ID NO: 202923 - RNA, 19 nt, Homo sapiens
  misc_RNA (1)...(19): siRNA sense strand
cagcacaaccucaagcaaa

SEQ ID NO: 202924 - RNA, 19 nt, Homo sapiens
  misc_RNA (1)...(19): siRNA sense strand
gcaaagaguguccaaucau

SEQ ID NO: 202925 - RNA, 19 nt, Homo sapiens
  misc_RNA (1)...(19): siRNA sense strand
auggauauccugcagauua

SEQ ID NO: 202926 - RNA, 19 nt, Homo sapiens
  misc_RNA (1)...(19): siRNA sense strand
uguaacaucugcaaagagu

SEQ ID NO: 202927 - RNA, 19 nt, Homo sapiens
  misc_RNA (1)...(19): siRNA sense strand
guccggagcugcuuccaau

SEQ ID NO: 202928 - RNA, 19 nt, Homo sapiens
  misc_RNA (1)...(19): siRNA sense strand
gcaaguggcaaguucaaca

SEQ ID NO: 202929 - RNA, 19 nt, Homo sapiens
  misc_RNA (1)...(19): siRNA sense strand
gcuuccaauuugcuaauaa

SEQ ID NO: 202930 - RNA, 19 nt, Homo sapiens
  misc_RNA (1)...(19): siRNA sense strand
uggaagacaaguacagaua

SEQ ID NO: 202931 - RNA, 19 nt, Homo sapiens
  misc_RNA (1)...(19): siRNA sense strand
ggauccguguccugucuuu

SEQ ID NO: 202932 - RNA, 19 nt, Homo sapiens
  misc_RNA (1)...(19): siRNA sense strand
gucuuuagcugaccugaau

SEQ ID NO: 202933 - RNA, 19 nt, Homo sapiens
  misc_RNA (1)...(19): siRNA sense strand
gacaaguacagauaccuuu

SEQ ID NO: 202934 - RNA, 19 nt, Homo sapiens
  misc_RNA (1)...(19): siRNA sense strand
ccaagcaucaggccaaaug

SEQ ID NO: 202935 - RNA, 19 nt, Homo sapiens
  misc_RNA (1)...(19): siRNA sense strand
ggagcaagagcacaacaau

SEQ ID NO: 202936 - RNA, 19 nt, Homo sapiens
  misc_RNA (1)...(19): siRNA sense strand
guguaaagcacauuuggaa

SEQ ID NO: 202937 - RNA, 19 nt, Homo sapiens
  misc_RNA (1)...(19): siRNA sense strand
caagacaguugggugaagu

SEQ ID NO: 202938 - RNA, 19 nt, Homo sapiens
  misc_RNA (1)...(19): siRNA sense strand
gaagauguucgagacuuug

SEQ ID NO: 202939 - RNA, 19 nt, Homo sapiens
  misc_RNA (1)...(19): siRNA sense strand
gucagauucucagcuuaua

SEQ ID NO: 202940 - RNA, 19 nt, Homo sapiens
  misc_RNA (1)...(19): siRNA sense strand
uaacaucugcaaagagugu

SEQ ID NO: 202941 - RNA, 19 nt, Homo sapiens
  misc_RNA (1)...(19): siRNA sense strand
cggagcugcuuccaauuug

SEQ ID NO: 202942 - RNA, 19 nt, Homo sapiens
  misc_RNA (1)...(19): siRNA sense strand
gaagacaaguacagauacc

SEQ ID NO: 202943 - RNA, 19 nt, Homo sapiens
  misc_RNA (1)...(19): siRNA sense strand
ccauggauauccugcagau

SEQ ID NO: 202944 - RNA, 19 nt, Homo sapiens
  misc_RNA (1)...(19): siRNA sense strand
ggcaucauuucccugugua

SEQ ID NO: 202945 - RNA, 19 nt, Homo sapiens
  misc_RNA (1)...(19): siRNA sense strand
uggauauccugcagauuau

SEQ ID NO: 202946 - RNA, 19 nt, Homo sapiens
  misc_RNA (1)...(19): siRNA sense strand
ggaagacaaguacagauac

SEQ ID NO: 202947 - RNA, 19 nt, Homo sapiens
  misc_RNA (1)...(19): siRNA sense strand
ugcaaagaguguccaauca

SEQ ID NO: 202948 - RNA, 19 nt, Homo sapiens
  misc_RNA (1)...(19): siRNA sense strand
guggauaugugucugaacu

SEQ ID NO: 202949 - RNA, 19 nt, Homo sapiens
  misc_RNA (1)...(19): siRNA sense strand
acuggcugcugaauguuua

SEQ ID NO: 202950 - RNA, 19 nt, Homo sapiens
  misc_RNA (1)...(19): siRNA sense strand
acuaucccaugguggaaua

SEQ ID NO: 202951 - RNA, 19 nt, Homo sapiens
  misc_RNA (1)...(19): siRNA sense strand
ccggagcugcuuccaauuu

SEQ ID NO: 202952 - RNA, 19 nt, Homo sapiens
  misc_RNA (1)...(19): siRNA sense strand
ccaaauuccaagacaguug

SEQ ID NO: 202953 - RNA, 19 nt, Homo sapiens
  misc_RNA (1)...(19): siRNA sense strand
cagaaacugccaagcauca

SEQ ID NO: 202954 - RNA, 19 nt, Homo sapiens
  misc_RNA (1)...(19): siRNA sense strand
uaugacaucugccaaagcu

SEQ ID NO: 202955 - RNA, 19 nt, Homo sapiens
  misc_RNA (1)...(19): siRNA sense strand
aaugucagauucucagcuu

SEQ ID NO: 202956 - RNA, 19 nt, Homo sapiens
  misc_RNA (1)...(19): siRNA sense strand
ucgagacuuugccaaggua

SEQ ID NO: 202957 - RNA, 19 nt, Homo sapiens
  misc_RNA (1)...(19): siRNA sense strand
gcaaaaggccauaaaaugc

SEQ ID NO: 202958 - RNA, 19 nt, Homo sapiens
  misc_RNA (1)...(19): siRNA sense strand
cugcaugauucuauccaaa

SEQ ID NO: 202959 - RNA, 19 nt, Homo sapiens
  misc_RNA (1)...(19): siRNA sense strand
uaaagcacauuuggaagac

SEQ ID NO: 202960 - RNA, 19 nt, Homo sapiens
  misc_RNA (1)...(19): siRNA sense strand
acaggagucuaaagcacuu

SEQ ID NO: 202961 - RNA, 19 nt, Homo sapiens
  misc_RNA (1)...(19): siRNA sense strand
acagauaccuuuucaagca

SEQ ID NO: 202962 - RNA, 19 nt, Homo sapiens
  misc_RNA (1)...(19): siRNA sense strand
aagcacauuuggaagacaa

SEQ ID NO: 202963 - RNA, 19 nt, Homo sapiens
  misc_RNA (1)...(19): siRNA sense strand
gcuaauaauaagccagaga

SEQ ID NO: 202964 - RNA, 19 nt, Homo sapiens
  misc_RNA (1)...(19): siRNA sense strand
caagagcacaacaauuugg

SEQ ID NO: 202965 - RNA, 19 nt, Homo sapiens
  misc_RNA (1)...(19): siRNA sense strand
ccugucagcugcaugugau

SEQ ID NO: 202966 - RNA, 19 nt, Homo sapiens
  misc_RNA (1)...(19): siRNA sense strand
gcugcugaauguuuaugau

SEQ ID NO: 202967 - RNA, 19 nt, Homo sapiens
  misc_RNA (1)...(19): siRNA sense strand
acagagcucuaccagucuu

SEQ ID NO: 202968 - RNA, 19 nt, Homo sapiens
  misc_RNA (1)...(19): siRNA sense strand
acaguugggugaaguugca

SEQ ID NO: 202969 - RNA, 19 nt, Homo sapiens
  misc_RNA (1)...(19): siRNA sense strand
guuugaccacuauuuauga

SEQ ID NO: 202970 - RNA, 19 nt, Homo sapiens
  misc_RNA (1)...(19): siRNA sense strand
gcuuauaggacugccauga

SEQ ID NO: 202971 - RNA, 19 nt, Homo sapiens
  misc_RNA (1)...(19): siRNA sense strand
caucaggccaaauguaaca

SEQ ID NO: 202972 - RNA, 19 nt, Homo sapiens
  misc_RNA (1)...(19): siRNA sense strand
gauucuauccaaauuccaa

SEQ ID NO: 202973 - RNA, 19 nt, Homo sapiens
  misc_RNA (1)...(19): siRNA sense strand
ggcaaguucaacaggauuu

SEQ ID NO: 202974 - RNA, 19 nt, Homo sapiens
  misc_RNA (1)...(19): siRNA sense strand
gaacuggcugcugaauguu

SEQ ID NO: 202975 - RNA, 19 nt, Homo sapiens
  misc_RNA (1)...(19): siRNA sense strand
cugcugaauguuuaugaua

SEQ ID NO: 202976 - RNA, 19 nt, Homo sapiens
  misc_RNA (1)...(19): siRNA sense strand
aagcaucaggccaaaugua

SEQ ID NO: 202977 - RNA, 19 nt, Homo sapiens
  misc_RNA (1)...(19): siRNA sense strand
uggcaucauuucccugugu

SEQ ID NO: 202978 - RNA, 19 nt, Homo sapiens
  misc_RNA (1)...(19): siRNA sense strand
ccaugaaacuccgaagacu

SEQ ID NO: 202979 - RNA, 19 nt, Homo sapiens
  misc_RNA (1)...(19): siRNA sense strand
auaauaagccagagaucga

SEQ ID NO: 202980 - RNA, 19 nt, Homo sapiens
  misc_RNA (1)...(19): siRNA sense strand
cuaauaauaagccagagau

SEQ ID NO: 202981 - RNA, 19 nt, Homo sapiens
  misc_RNA (1)...(19): siRNA sense strand
ugggugaaguugcauccuu

SEQ ID NO: 202982 - RNA, 19 nt, Homo sapiens
  misc_RNA (1)...(19): siRNA sense strand
caucauuucccuguguaaa

SEQ ID NO: 202983 - RNA, 19 nt, Homo sapiens
  misc_RNA (1)...(19): siRNA sense strand
gcguggauaugugucugaa

SEQ ID NO: 202984 - RNA, 19 nt, Homo sapiens
  misc_RNA (1)...(19): siRNA sense strand
gcacuaucccaugguggaa

SEQ ID NO: 202985 - RNA, 19 nt, Homo sapiens
  misc_RNA (1)...(19): siRNA sense strand
gagccugucagcugcaugu

SEQ ID NO: 202986 - RNA, 19 nt, Homo sapiens
  misc_RNA (1)...(19): siRNA sense strand
guacagauaccuuuucaag

SEQ ID NO: 202987 - RNA, 19 nt, Homo sapiens
  misc_RNA (1)...(19): siRNA sense strand
gucccucucugcguggaua

SEQ ID NO: 202988 - RNA, 19 nt, Homo sapiens
  misc_RNA (1)...(19): siRNA sense strand
ggagcugcuuccaauuugc

SEQ ID NO: 202989 - RNA, 19 nt, Homo sapiens
  misc_RNA (1)...(19): siRNA sense strand
uuagcugaccugaauaaug

SEQ ID NO: 202990 - RNA, 19 nt, Homo sapiens
  misc_RNA (1)...(19): siRNA sense strand
guggcaaguucaacaggau

SEQ ID NO: 202991 - RNA, 19 nt, Homo sapiens
  misc_RNA (1)...(19): siRNA sense strand
acaacaauuuggucaacgu

SEQ ID NO: 202992 - RNA, 19 nt, Homo sapiens
  misc_RNA (1)...(19): siRNA sense strand
gacuacaucaggagaagau

SEQ ID NO: 202993 - RNA, 19 nt, Homo sapiens
  misc_RNA (1)...(19): siRNA sense strand
uaauaagccagagaucgaa

SEQ ID NO: 202994 - RNA, 19 nt, Homo sapiens
  misc_RNA (1)...(19): siRNA sense strand
ugucagauucucagcuuau

SEQ ID NO: 202995 - RNA, 19 nt, Homo sapiens
  misc_RNA (1)...(19): siRNA sense strand
ggauauccugcagauuauu

SEQ ID NO: 202996 - RNA, 19 nt, Homo sapiens
  misc_RNA (1)...(19): siRNA sense strand
agcaucaggccaaauguaa

SEQ ID NO: 202997 - RNA, 19 nt, Homo sapiens
  misc_RNA (1)...(19): siRNA sense strand
gcccuuugcuuggaucucu

SEQ ID NO: 202998 - RNA, 19 nt, Homo sapiens
  misc_RNA (1)...(19): siRNA sense strand
gcugaauguuuaugauacg

SEQ ID NO: 202999 - RNA, 19 nt, Homo sapiens
  misc_RNA (1)...(19): siRNA sense strand
agacuuugccaagguacua

SEQ ID NO: 203000 - RNA, 19 nt, Homo sapiens
  misc_RNA (1)...(19): siRNA sense strand
caagcaaguggcaaguuca

SEQ ID NO: 203001 - RNA, 19 nt, Homo sapiens
  misc_RNA (1)...(19): siRNA sense strand
agacaaguacagauaccuu

SEQ ID NO: 203002 - RNA, 19 nt, Homo sapiens
  misc_RNA (1)...(19): siRNA sense strand
gcaucauuucccuguguaa

SEQ ID NO: 203003 - RNA, 19 nt, Homo sapiens
  misc_RNA (1)...(19): siRNA sense strand
cugcaaagaguguccaauc

SEQ ID NO: 203004 - RNA, 19 nt, Homo sapiens
  misc_RNA (1)...(19): siRNA sense strand
cuuauaggacugccaugaa

SEQ ID NO: 203005 - RNA, 19 nt, Homo sapiens
  misc_RNA (1)...(19): siRNA sense strand
caaagaguguccaaucauu

SEQ ID NO: 203006 - RNA, 19 nt, Homo sapiens
  misc_RNA (1)...(19): siRNA sense strand
uagcugaccugaauaaugu

SEQ ID NO: 203007 - RNA, 19 nt, Homo sapiens
  misc_RNA (1)...(19): siRNA sense strand
gcaugauucuauccaaauu

SEQ ID NO: 203008 - RNA, 19 nt, Homo sapiens
  misc_RNA (1)...(19): siRNA sense strand
ugaacuggcugcugaaugu

SEQ ID NO: 203009 - RNA, 19 nt, Homo sapiens
  misc_RNA (1)...(19): siRNA sense strand
gauauccugcagauuauua

SEQ ID NO: 203010 - RNA, 19 nt, Homo sapiens
  misc_RNA (1)...(19): siRNA sense strand
gagaagauguucgagacuu

SEQ ID NO: 203011 - RNA, 19 nt, Homo sapiens
  misc_RNA (1)...(19): siRNA sense strand
gcacuuuaauuaugacauc

SEQ ID NO: 203012 - RNA, 19 nt, Homo sapiens
  misc_RNA (1)...(19): siRNA sense strand
guaaagcacauuuggaaga

SEQ ID NO: 203013 - RNA, 19 nt, Homo sapiens
  misc_RNA (1)...(19): siRNA sense strand
gaauauugcacuccgacua

SEQ ID NO: 203014 - RNA, 19 nt, Homo sapiens
  misc_RNA (1)...(19): siRNA sense strand
uuauaggacugccaugaaa

SEQ ID NO: 203015 - RNA, 19 nt, Homo sapiens
  misc_RNA (1)...(19): siRNA sense strand
gggugaaguugcauccuuu

SEQ ID NO: 203016 - RNA, 19 nt, Homo sapiens
  misc_RNA (1)...(19): siRNA sense strand
gcaagagcacaacaauuug

SEQ ID NO: 203017 - RNA, 19 nt, Homo sapiens
  misc_RNA (1)...(19): siRNA sense strand
gcacaacaauuuggucaac

SEQ ID NO: 203018 - RNA, 19 nt, Homo sapiens
  misc_RNA (1)...(19): siRNA sense strand
agcaagagcacaacaauuu

SEQ ID NO: 203019 - RNA, 19 nt, Homo sapiens
  misc_RNA (1)...(19): siRNA sense strand
agaagauguucgagacuuu

SEQ ID NO: 203020 - RNA, 19 nt, Homo sapiens
  misc_RNA (1)...(19): siRNA sense strand
gagcaagagcacaacaauu

SEQ ID NO: 203021 - RNA, 19 nt, Homo sapiens
  misc_RNA (1)...(19): siRNA sense strand
ucaagcaaguggcaaguuc

SEQ ID NO: 203022 - RNA, 19 nt, Homo sapiens
  misc_RNA (1)...(19): siRNA sense strand
ccacgagacucaaacaacu

SEQ ID NO: 203023 - RNA, 19 nt, Homo sapiens
  misc_RNA (1)...(19): siRNA sense strand
cagcacaaccucaagcaaa

SEQ ID NO: 203024 - RNA, 19 nt, Homo sapiens
  misc_RNA (1)...(19): siRNA sense strand
gcaaagaguguccaaucau

SEQ ID NO: 203025 - RNA, 19 nt, Homo sapiens
  misc_RNA (1)...(19): siRNA sense strand
auggauauccugcagauua

SEQ ID NO: 203026 - RNA, 19 nt, Homo sapiens
  misc_RNA (1)...(19): siRNA sense strand
uguaacaucugcaaagagu

SEQ ID NO: 203027 - RNA, 19 nt, Homo sapiens
  misc_RNA (1)...(19): siRNA sense strand
guccggagcugcuuccaau

SEQ ID NO: 203028 - RNA, 19 nt, Homo sapiens
  misc_RNA (1)...(19): siRNA sense strand
gcaaguggcaaguucaaca

SEQ ID NO: 203029 - RNA, 19 nt, Homo sapiens
  misc_RNA (1)...(19): siRNA sense strand
gcuuccaauuugcuaauaa

SEQ ID NO: 203030 - RNA, 19 nt, Homo sapiens
  misc_RNA (1)...(19): siRNA sense strand
uggaagacaaguacagaua

SEQ ID NO: 203031 - RNA, 19 nt, Homo sapiens
  misc_RNA (1)...(19): siRNA sense strand
ggauccguguccugucuuu

SEQ ID NO: 203032 - RNA, 19 nt, Homo sapiens
  misc_RNA (1)...(19): siRNA sense strand
gucuuuagcugaccugaau

SEQ ID NO: 203033 - RNA, 19 nt, Homo sapiens
  misc_RNA (1)...(19): siRNA sense strand
gacaaguacagauaccuuu

SEQ ID NO: 203034 - RNA, 19 nt, Homo sapiens
  misc_RNA (1)...(19): siRNA sense strand
ccaagcaucaggccaaaug

SEQ ID NO: 203035 - RNA, 19 nt, Homo sapiens
  misc_RNA (1)...(19): siRNA sense strand
ggagcaagagcacaacaau

SEQ ID NO: 203036 - RNA, 19 nt, Homo sapiens
  misc_RNA (1)...(19): siRNA sense strand
guguaaagcacauuuggaa

SEQ ID NO: 203037 - RNA, 19 nt, Homo sapiens
  misc_RNA (1)...(19): siRNA sense strand
caagacaguugggugaagu

SEQ ID NO: 203038 - RNA, 19 nt, Homo sapiens
  misc_RNA (1)...(19): siRNA sense strand
gaagauguucgagacuuug

SEQ ID NO: 203039 - RNA, 19 nt, Homo sapiens
  misc_RNA (1)...(19): siRNA sense strand
gucagauucucagcuuaua

SEQ ID NO: 203040 - RNA, 19 nt, Homo sapiens
  misc_RNA (1)...(19): siRNA sense strand
uaacaucugcaaagagugu

SEQ ID NO: 203041 - RNA, 19 nt, Homo sapiens
  misc_RNA (1)...(19): siRNA sense strand
cggagcugcuuccaauuug

SEQ ID NO: 203042 - RNA, 19 nt, Homo sapiens
  misc_RNA (1)...(19): siRNA sense strand
gaagacaaguacagauacc

SEQ ID NO: 203043 - RNA, 19 nt, Homo sapiens
  misc_RNA (1)...(19): siRNA sense strand
ccauggauauccugcagau

SEQ ID NO: 203044 - RNA, 19 nt, Homo sapiens
  misc_RNA (1)...(19): siRNA sense strand
ggcaucauuucccugugua

SEQ ID NO: 203045 - RNA, 19 nt, Homo sapiens
  misc_RNA (1)...(19): siRNA sense strand
uggauauccugcagauuau

SEQ ID NO: 203046 - RNA, 19 nt, Homo sapiens
  misc_RNA (1)...(19): siRNA sense strand
ggaagacaaguacagauac

SEQ ID NO: 203047 - RNA, 19 nt, Homo sapiens
  misc_RNA (1)...(19): siRNA sense strand
ugcaaagaguguccaauca

SEQ ID NO: 203048 - RNA, 19 nt, Homo sapiens
  misc_RNA (1)...(19): siRNA sense strand
guggauaugugucugaacu

SEQ ID NO: 203049 - RNA, 19 nt, Homo sapiens
  misc_RNA (1)...(19): siRNA sense strand
acuggcugcugaauguuua

SEQ ID NO: 203050 - RNA, 19 nt, Homo sapiens
  misc_RNA (1)...(19): siRNA sense strand
acuaucccaugguggaaua

SEQ ID NO: 203051 - RNA, 19 nt, Homo sapiens
  misc_RNA (1)...(19): siRNA sense strand
ccggagcugcuuccaauuu

SEQ ID NO: 203052 - RNA, 19 nt, Homo sapiens
  misc_RNA (1)...(19): siRNA sense strand
ccaaauuccaagacaguug

SEQ ID NO: 203053 - RNA, 19 nt, Homo sapiens
  misc_RNA (1)...(19): siRNA sense strand
cagaaacugccaagcauca

SEQ ID NO: 203054 - RNA, 19 nt, Homo sapiens
  misc_RNA (1)...(19): siRNA sense strand
uaugacaucugccaaagcu

SEQ ID NO: 203055 - RNA, 19 nt, Homo sapiens
  misc_RNA (1)...(19): siRNA sense strand
aaugucagauucucagcuu

SEQ ID NO: 203056 - RNA, 19 nt, Homo sapiens
  misc_RNA (1)...(19): siRNA sense strand
ucgagacuuugccaaggua

SEQ ID NO: 203057 - RNA, 19 nt, Homo sapiens
  misc_RNA (1)...(19): siRNA sense strand
gcaaaaggccauaaaaugc

SEQ ID NO: 203058 - RNA, 19 nt, Homo sapiens
  misc_RNA (1)...(19): siRNA sense strand
cugcaugauucuauccaaa

SEQ ID NO: 203059 - RNA, 19 nt, Homo sapiens
  misc_RNA (1)...(19): siRNA sense strand
uaaagcacauuuggaagac

SEQ ID NO: 203060 - RNA, 19 nt, Homo sapiens
  misc_RNA (1)...(19): siRNA sense strand
acaggagucuaaagcacuu

SEQ ID NO: 203061 - RNA, 19 nt, Homo sapiens
  misc_RNA (1)...(19): siRNA sense strand
acagauaccuuuucaagca

SEQ ID NO: 203062 - RNA, 19 nt, Homo sapiens
  misc_RNA (1)...(19): siRNA sense strand
aagcacauuuggaagacaa

SEQ ID NO: 203063 - RNA, 19 nt, Homo sapiens
  misc_RNA (1)...(19): siRNA sense strand
gcuaauaauaagccagaga

SEQ ID NO: 203064 - RNA, 19 nt, Homo sapiens
  misc_RNA (1)...(19): siRNA sense strand
caagagcacaacaauuugg

SEQ ID NO: 203065 - RNA, 19 nt, Homo sapiens
  misc_RNA (1)...(19): siRNA sense strand
ccugucagcugcaugugau

SEQ ID NO: 203066 - RNA, 19 nt, Homo sapiens
  misc_RNA (1)...(19): siRNA sense strand
gcugcugaauguuuaugau

SEQ ID NO: 203067 - RNA, 19 nt, Homo sapiens
  misc_RNA (1)...(19): siRNA sense strand
acagagcucuaccagucuu

SEQ ID NO: 203068 - RNA, 19 nt, Homo sapiens
  misc_RNA (1)...(19): siRNA sense strand
acaguugggugaaguugca

SEQ ID NO: 203069 - RNA, 19 nt, Homo sapiens
  misc_RNA (1)...(19): siRNA sense strand
guuugaccacuauuuauga

SEQ ID NO: 203070 - RNA, 19 nt, Homo sapiens
  misc_RNA (1)...(19): siRNA sense strand
gcuuauaggacugccauga

SEQ ID NO: 203071 - RNA, 19 nt, Homo sapiens
  misc_RNA (1)...(19): siRNA sense strand
caucaggccaaauguaaca

SEQ ID NO: 203072 - RNA, 19 nt, Homo sapiens
  misc_RNA (1)...(19): siRNA sense strand
gauucuauccaaauuccaa

SEQ ID NO: 203073 - RNA, 19 nt, Homo sapiens
  misc_RNA (1)...(19): siRNA sense strand
ggcaaguucaacaggauuu

SEQ ID NO: 203074 - RNA, 19 nt, Homo sapiens
  misc_RNA (1)...(19): siRNA sense strand
gaacuggcugcugaauguu

SEQ ID NO: 203075 - RNA, 19 nt, Homo sapiens
  misc_RNA (1)...(19): siRNA sense strand
cugcugaauguuuaugaua

SEQ ID NO: 203076 - RNA, 19 nt, Homo sapiens
  misc_RNA (1)...(19): siRNA sense strand
aagcaucaggccaaaugua

SEQ ID NO: 203077 - RNA, 19 nt, Homo sapiens
  misc_RNA (1)...(19): siRNA sense strand
uggcaucauuucccugugu

SEQ ID NO: 203078 - RNA, 19 nt, Homo sapiens
  misc_RNA (1)...(19): siRNA sense strand
ccaugaaacuccgaagacu

SEQ ID NO: 203079 - RNA, 19 nt, Homo sapiens
  misc_RNA (1)...(19): siRNA sense strand
auaauaagccagagaucga

SEQ ID NO: 203080 - RNA, 19 nt, Homo sapiens
  misc_RNA (1)...(19): siRNA sense strand
cuaauaauaagccagagau

SEQ ID NO: 203081 - RNA, 19 nt, Homo sapiens
  misc_RNA (1)...(19): siRNA sense strand
ugggugaaguugcauccuu

SEQ ID NO: 203082 - RNA, 19 nt, Homo sapiens
  misc_RNA (1)...(19): siRNA sense strand
caucauuucccuguguaaa

SEQ ID NO: 203083 - RNA, 19 nt, Homo sapiens
  misc_RNA (1)...(19): siRNA sense strand
gcguggauaugugucugaa

SEQ ID NO: 203084 - RNA, 19 nt, Homo sapiens
  misc_RNA (1)...(19): siRNA sense strand
gcacuaucccaugguggaa

SEQ ID NO: 203085 - RNA, 19 nt, Homo sapiens
  misc_RNA (1)...(19): siRNA sense strand
gagccugucagcugcaugu

SEQ ID NO: 203086 - RNA, 19 nt, Homo sapiens
  misc_RNA (1)...(19): siRNA sense strand
guacagauaccuuuucaag

SEQ ID NO: 203087 - RNA, 19 nt, Homo sapiens
  misc_RNA (1)...(19): siRNA sense strand
gucccucucugcguggaua

SEQ ID NO: 203088 - RNA, 19 nt, Homo sapiens
  misc_RNA (1)...(19): siRNA sense strand
ggagcugcuuccaauuugc

SEQ ID NO: 203089 - RNA, 19 nt, Homo sapiens
  misc_RNA (1)...(19): siRNA sense strand
uuagcugaccugaauaaug

SEQ ID NO: 203090 - RNA, 19 nt, Homo sapiens
  misc_RNA (1)...(19): siRNA sense strand
guggcaaguucaacaggau

SEQ ID NO: 203091 - RNA, 19 nt, Homo sapiens
  misc_RNA (1)...(19): siRNA sense strand
acaacaauuuggucaacgu

SEQ ID NO: 203092 - RNA, 19 nt, Homo sapiens
  misc_RNA (1)...(19): siRNA sense strand
gacuacaucaggagaagau

SEQ ID NO: 203093 - RNA, 19 nt, Homo sapiens
  misc_RNA (1)...(19): siRNA sense strand
uaauaagccagagaucgaa

SEQ ID NO: 203094 - RNA, 19 nt, Homo sapiens
  misc_RNA (1)...(19): siRNA sense strand
ugucagauucucagcuuau

SEQ ID NO: 203095 - RNA, 19 nt, Homo sapiens
  misc_RNA (1)...(19): siRNA sense strand
ggauauccugcagauuauu

SEQ ID NO: 203096 - RNA, 19 nt, Homo sapiens
  misc_RNA (1)...(19): siRNA sense strand
agcaucaggccaaauguaa

SEQ ID NO: 203097 - RNA, 19 nt, Homo sapiens
  misc_RNA (1)...(19): siRNA sense strand
gcccuuugcuuggaucucu

SEQ ID NO: 203098 - RNA, 19 nt, Homo sapiens
  misc_RNA (1)...(19): siRNA sense strand
gcugaauguuuaugauacg

SEQ ID NO: 203099 - RNA, 19 nt, Homo sapiens
  misc_RNA (1)...(19): siRNA sense strand
agacuuugccaagguacua

SEQ ID NO: 203100 - RNA, 19 nt, Homo sapiens
  misc_RNA (1)...(19): siRNA sense strand
caagcaaguggcaaguuca

SEQ ID NO: 203101 - RNA, 19 nt, Homo sapiens
  misc_RNA (1)...(19): siRNA sense strand
agacaaguacagauaccuu

SEQ ID NO: 203102 - RNA, 19 nt, Homo sapiens
  misc_RNA (1)...(19): siRNA sense strand
gcaucauuucccuguguaa

SEQ ID NO: 203103 - RNA, 19 nt, Homo sapiens
  misc_RNA (1)...(19): siRNA sense strand
cugcaaagaguguccaauc

SEQ ID NO: 203104 - RNA, 19 nt, Homo sapiens
  misc_RNA (1)...(19): siRNA sense strand
cuuauaggacugccaugaa

SEQ ID NO: 203105 - RNA, 19 nt, Homo sapiens
  misc_RNA (1)...(19): siRNA sense strand
caaagaguguccaaucauu

SEQ ID NO: 203106 - RNA, 19 nt, Homo sapiens
  misc_RNA (1)...(19): siRNA sense strand
uagcugaccugaauaaugu

SEQ ID NO: 203107 - RNA, 19 nt, Homo sapiens
  misc_RNA (1)...(19): siRNA sense strand
gcaugauucuauccaaauu

SEQ ID NO: 203108 - RNA, 19 nt, Homo sapiens
  misc_RNA (1)...(19): siRNA sense strand
ugaacuggcugcugaaugu

SEQ ID NO: 203109 - RNA, 19 nt, Homo sapiens
  misc_RNA (1)...(19): siRNA sense strand
gauauccugcagauuauua

SEQ ID NO: 203110 - RNA, 19 nt, Homo sapiens
  misc_RNA (1)...(19): siRNA sense strand
gagaagauguucgagacuu

SEQ ID NO: 203111 - RNA, 19 nt, Homo sapiens
  misc_RNA (1)...(19): siRNA sense strand
gcacuuuaauuaugacauc

SEQ ID NO: 203112 - RNA, 19 nt, Homo sapiens
  misc_RNA (1)...(19): siRNA sense strand
guaaagcacauuuggaaga

SEQ ID NO: 203113 - RNA, 19 nt, Homo sapiens
  misc_RNA (1)...(19): siRNA sense strand
gaauauugcacuccgacua

SEQ ID NO: 203114 - RNA, 19 nt, Homo sapiens
  misc_RNA (1)...(19): siRNA sense strand
uuauaggacugccaugaaa

SEQ ID NO: 203115 - RNA, 19 nt, Homo sapiens
  misc_RNA (1)...(19): siRNA sense strand
gggugaaguugcauccuuu

SEQ ID NO: 203116 - RNA, 19 nt, Homo sapiens
  misc_RNA (1)...(19): siRNA sense strand
gcaagagcacaacaauuug

SEQ ID NO: 203117 - RNA, 19 nt, Homo sapiens
  misc_RNA (1)...(19): siRNA sense strand
gcacaacaauuuggucaac

SEQ ID NO: 203118 - RNA, 19 nt, Homo sapiens
  misc_RNA (1)...(19): siRNA sense strand
agcaagagcacaacaauuu

SEQ ID NO: 203119 - RNA, 19 nt, Homo sapiens
  misc_RNA (1)...(19): siRNA sense strand
agaagauguucgagacuuu

SEQ ID NO: 203120 - RNA, 19 nt, Homo sapiens
  misc_RNA (1)...(19): siRNA sense strand
gagcaagagcacaacaauu

SEQ ID NO: 203121 - RNA, 19 nt, Homo sapiens
  misc_RNA (1)...(19): siRNA sense strand
ucaagcaaguggcaaguuc

SEQ ID NO: 203122 - RNA, 19 nt, Homo sapiens
  misc_RNA (1)...(19): siRNA sense strand
ccacgagacucaaacaacu

SEQ ID NO: 203123 - RNA, 19 nt, Homo sapiens
  misc_RNA (1)...(19): siRNA sense strand
cagcacaaccucaagcaaa

SEQ ID NO: 203124 - RNA, 19 nt, Homo sapiens
  misc_RNA (1)...(19): siRNA sense strand
gcaaagaguguccaaucau

SEQ ID NO: 203125 - RNA, 19 nt, Homo sapiens
  misc_RNA (1)...(19): siRNA sense strand
auggauauccugcagauua

SEQ ID NO: 203126 - RNA, 19 nt, Homo sapiens
  misc_RNA (1)...(19): siRNA sense strand
uguaacaucugcaaagagu

SEQ ID NO: 203127 - RNA, 19 nt, Homo sapiens
  misc_RNA (1)...(19): siRNA sense strand
guccggagcugcuuccaau

SEQ ID NO: 203128 - RNA, 19 nt, Homo sapiens
  misc_RNA (1)...(19): siRNA sense strand
gcaaguggcaaguucaaca

SEQ ID NO: 203129 - RNA, 19 nt, Homo sapiens
  misc_RNA (1)...(19): siRNA sense strand
gcuuccaauuugcuaauaa

SEQ ID NO: 203130 - RNA, 19 nt, Homo sapiens
  misc_RNA (1)...(19): siRNA sense strand
uggaagacaaguacagaua

SEQ ID NO: 203131 - RNA, 19 nt, Homo sapiens
  misc_RNA (1)...(19): siRNA sense strand
ggauccguguccugucuuu

SEQ ID NO: 203132 - RNA, 19 nt, Homo sapiens
  misc_RNA (1)...(19): siRNA sense strand
gucuuuagcugaccugaau

SEQ ID NO: 203133 - RNA, 19 nt, Homo sapiens
  misc_RNA (1)...(19): siRNA sense strand
gacaaguacagauaccuuu

SEQ ID NO: 203134 - RNA, 19 nt, Homo sapiens
  misc_RNA (1)...(19): siRNA sense strand
ccaagcaucaggccaaaug

SEQ ID NO: 203135 - RNA, 19 nt, Homo sapiens
  misc_RNA (1)...(19): siRNA sense strand
ggagcaagagcacaacaau

SEQ ID NO: 203136 - RNA, 19 nt, Homo sapiens
  misc_RNA (1)...(19): siRNA sense strand
guguaaagcacauuuggaa

SEQ ID NO: 203137 - RNA, 19 nt, Homo sapiens
  misc_RNA (1)...(19): siRNA sense strand
caagacaguugggugaagu

SEQ ID NO: 203138 - RNA, 19 nt, Homo sapiens
  misc_RNA (1)...(19): siRNA sense strand
gaagauguucgagacuuug

SEQ ID NO: 203139 - RNA, 19 nt, Homo sapiens
  misc_RNA (1)...(19): siRNA sense strand
gucagauucucagcuuaua

SEQ ID NO: 203140 - RNA, 19 nt, Homo sapiens
  misc_RNA (1)...(19): siRNA sense strand
uaacaucugcaaagagugu

SEQ ID NO: 203141 - RNA, 19 nt, Homo sapiens
  misc_RNA (1)...(19): siRNA sense strand
cggagcugcuuccaauuug

SEQ ID NO: 203142 - RNA, 19 nt, Homo sapiens
  misc_RNA (1)...(19): siRNA sense strand
gaagacaaguacagauacc

SEQ ID NO: 203143 - RNA, 19 nt, Homo sapiens
  misc_RNA (1)...(19): siRNA sense strand
ccauggauauccugcagau

SEQ ID NO: 203144 - RNA, 19 nt, Homo sapiens
  misc_RNA (1)...(19): siRNA sense strand
ggcaucauuucccugugua

SEQ ID NO: 203145 - RNA, 19 nt, Homo sapiens
  misc_RNA (1)...(19): siRNA sense strand
uggauauccugcagauuau

SEQ ID NO: 203146 - RNA, 19 nt, Homo sapiens
  misc_RNA (1)...(19): siRNA sense strand
ggaagacaaguacagauac

SEQ ID NO: 203147 - RNA, 19 nt, Homo sapiens
  misc_RNA (1)...(19): siRNA sense strand
ugcaaagaguguccaauca

SEQ ID NO: 203148 - RNA, 19 nt, Homo sapiens
  misc_RNA (1)...(19): siRNA sense strand
guggauaugugucugaacu

SEQ ID NO: 203149 - RNA, 19 nt, Homo sapiens
  misc_RNA (1)...(19): siRNA sense strand
acuggcugcugaauguuua

SEQ ID NO: 203150 - RNA, 19 nt, Homo sapiens
  misc_RNA (1)...(19): siRNA sense strand
acuaucccaugguggaaua

SEQ ID NO: 203151 - RNA, 19 nt, Homo sapiens
  misc_RNA (1)...(19): siRNA sense strand
ccggagcugcuuccaauuu

SEQ ID NO: 203152 - RNA, 19 nt, Homo sapiens
  misc_RNA (1)...(19): siRNA sense strand
ccaaauuccaagacaguug

SEQ ID NO: 203153 - RNA, 19 nt, Homo sapiens
  misc_RNA (1)...(19): siRNA sense strand
cagaaacugccaagcauca

SEQ ID NO: 203154 - RNA, 19 nt, Homo sapiens
  misc_RNA (1)...(19): siRNA sense strand
uaugacaucugccaaagcu

SEQ ID NO: 203155 - RNA, 19 nt, Homo sapiens
  misc_RNA (1)...(19): siRNA sense strand
aaugucagauucucagcuu

SEQ ID NO: 203156 - RNA, 19 nt, Homo sapiens
  misc_RNA (1)...(19): siRNA sense strand
ucgagacuuugccaaggua

SEQ ID NO: 203157 - RNA, 19 nt, Homo sapiens
  misc_RNA (1)...(19): siRNA sense strand
gcaaaaggccauaaaaugc

SEQ ID NO: 203158 - RNA, 19 nt, Homo sapiens
  misc_RNA (1)...(19): siRNA sense strand
cugcaugauucuauccaaa

SEQ ID NO: 203159 - RNA, 19 nt, Homo sapiens
  misc_RNA (1)...(19): siRNA sense strand
uaaagcacauuuggaagac

SEQ ID NO: 203160 - RNA, 19 nt, Homo sapiens
  misc_RNA (1)...(19): siRNA sense strand
acaggagucuaaagcacuu

SEQ ID NO: 203161 - RNA, 19 nt, Homo sapiens
  misc_RNA (1)...(19): siRNA sense strand
acagauaccuuuucaagca

SEQ ID NO: 203162 - RNA, 19 nt, Homo sapiens
  misc_RNA (1)...(19): siRNA sense strand
aagcacauuuggaagacaa

SEQ ID NO: 203163 - RNA, 19 nt, Homo sapiens
  misc_RNA (1)...(19): siRNA sense strand
gcuaauaauaagccagaga

SEQ ID NO: 203164 - RNA, 19 nt, Homo sapiens
  misc_RNA (1)...(19): siRNA sense strand
caagagcacaacaauuugg

SEQ ID NO: 203165 - RNA, 19 nt, Homo sapiens
  misc_RNA (1)...(19): siRNA sense strand
ccugucagcugcaugugau

SEQ ID NO: 203166 - RNA, 19 nt, Homo sapiens
  misc_RNA (1)...(19): siRNA sense strand
gcugcugaauguuuaugau

SEQ ID NO: 203167 - RNA, 19 nt, Homo sapiens
  misc_RNA (1)...(19): siRNA sense strand
acagagcucuaccagucuu

SEQ ID NO: 203168 - RNA, 19 nt, Homo sapiens
  misc_RNA (1)...(19): siRNA sense strand
acaguugggugaaguugca

SEQ ID NO: 203169 - RNA, 19 nt, Homo sapiens
  misc_RNA (1)...(19): siRNA sense strand
guuugaccacuauuuauga

SEQ ID NO: 203170 - RNA, 19 nt, Homo sapiens
  misc_RNA (1)...(19): siRNA sense strand
gcuuauaggacugccauga

SEQ ID NO: 203171 - RNA, 19 nt, Homo sapiens
  misc_RNA (1)...(19): siRNA sense strand
caucaggccaaauguaaca

SEQ ID NO: 203172 - RNA, 19 nt, Homo sapiens
  misc_RNA (1)...(19): siRNA sense strand
gauucuauccaaauuccaa

SEQ ID NO: 203173 - RNA, 19 nt, Homo sapiens
  misc_RNA (1)...(19): siRNA sense strand
ggcaaguucaacaggauuu

SEQ ID NO: 203174 - RNA, 19 nt, Homo sapiens
  misc_RNA (1)...(19): siRNA sense strand
gaacuggcugcugaauguu

SEQ ID NO: 203175 - RNA, 19 nt, Homo sapiens
  misc_RNA (1)...(19): siRNA sense strand
cugcugaauguuuaugaua

SEQ ID NO: 203176 - RNA, 19 nt, Homo sapiens
  misc_RNA (1)...(19): siRNA sense strand
aagcaucaggccaaaugua

SEQ ID NO: 203177 - RNA, 19 nt, Homo sapiens
  misc_RNA (1)...(19): siRNA sense strand
uggcaucauuucccugugu

SEQ ID NO: 203178 - RNA, 19 nt, Homo sapiens
  misc_RNA (1)...(19): siRNA sense strand
ccaugaaacuccgaagacu

SEQ ID NO: 203179 - RNA, 19 nt, Homo sapiens
  misc_RNA (1)...(19): siRNA sense strand
auaauaagccagagaucga

SEQ ID NO: 203180 - RNA, 19 nt, Homo sapiens
  misc_RNA (1)...(19): siRNA sense strand
cuaauaauaagccagagau

SEQ ID NO: 203181 - RNA, 19 nt, Homo sapiens
  misc_RNA (1)...(19): siRNA sense strand
ugggugaaguugcauccuu

SEQ ID NO: 203182 - RNA, 19 nt, Homo sapiens
  misc_RNA (1)...(19): siRNA sense strand
caucauuucccuguguaaa

SEQ ID NO: 203183 - RNA, 19 nt, Homo sapiens
  misc_RNA (1)...(19): siRNA sense strand
gcguggauaugugucugaa

SEQ ID NO: 203184 - RNA, 19 nt, Homo sapiens
  misc_RNA (1)...(19): siRNA sense strand
gcacuaucccaugguggaa

SEQ ID NO: 203185 - RNA, 19 nt, Homo sapiens
  misc_RNA (1)...(19): siRNA sense strand
gagccugucagcugcaugu

SEQ ID NO: 203186 - RNA, 19 nt, Homo sapiens
  misc_RNA (1)...(19): siRNA sense strand
guacagauaccuuuucaag

SEQ ID NO: 203187 - RNA, 19 nt, Homo sapiens
  misc_RNA (1)...(19): siRNA sense strand
gucccucucugcguggaua

SEQ ID NO: 203188 - RNA, 19 nt, Homo sapiens
  misc_RNA (1)...(19): siRNA sense strand
ggagcugcuuccaauuugc

SEQ ID NO: 203189 - RNA, 19 nt, Homo sapiens
  misc_RNA (1)...(19): siRNA sense strand
uuagcugaccugaauaaug

SEQ ID NO: 203190 - RNA, 19 nt, Homo sapiens
  misc_RNA (1)...(19): siRNA sense strand
guggcaaguucaacaggau

SEQ ID NO: 203191 - RNA, 19 nt, Homo sapiens
  misc_RNA (1)...(19): siRNA sense strand
acaacaauuuggucaacgu

SEQ ID NO: 203192 - RNA, 19 nt, Homo sapiens
  misc_RNA (1)...(19): siRNA sense strand
gacuacaucaggagaagau

SEQ ID NO: 203193 - RNA, 19 nt, Homo sapiens
  misc_RNA (1)...(19): siRNA sense strand
uaauaagccagagaucgaa

SEQ ID NO: 203194 - RNA, 19 nt, Homo sapiens
  misc_RNA (1)...(19): siRNA sense strand
ugucagauucucagcuuau

SEQ ID NO: 203195 - RNA, 19 nt, Homo sapiens
  misc_RNA (1)...(19): siRNA sense strand
ggauauccugcagauuauu

SEQ ID NO: 203196 - RNA, 19 nt, Homo sapiens
  misc_RNA (1)...(19): siRNA sense strand
agcaucaggccaaauguaa

SEQ ID NO: 203197 - RNA, 19 nt, Homo sapiens
  misc_RNA (1)...(19): siRNA sense strand
gcccuuugcuuggaucucu

SEQ ID NO: 203198 - RNA, 19 nt, Homo sapiens
  misc_RNA (1)...(19): siRNA sense strand
gcugaauguuuaugauacg

SEQ ID NO: 203199 - RNA, 19 nt, Homo sapiens
  misc_RNA (1)...(19): siRNA sense strand
agacuuugccaagguacua

SEQ ID NO: 203200 - RNA, 19 nt, Homo sapiens
  misc_RNA (1)...(19): siRNA sense strand
caagcaaguggcaaguuca

SEQ ID NO: 203201 - RNA, 19 nt, Homo sapiens
  misc_RNA (1)...(19): siRNA sense strand
agacaaguacagauaccuu

SEQ ID NO: 203202 - RNA, 19 nt, Homo sapiens
  misc_RNA (1)...(19): siRNA sense strand
gcaucauuucccuguguaa

SEQ ID NO: 203203 - RNA, 19 nt, Homo sapiens
  misc_RNA (1)...(19): siRNA sense strand
cugcaaagaguguccaauc

SEQ ID NO: 203204 - RNA, 19 nt, Homo sapiens
  misc_RNA (1)...(19): siRNA sense strand
cuuauaggacugccaugaa

SEQ ID NO: 203205 - RNA, 19 nt, Homo sapiens
  misc_RNA (1)...(19): siRNA sense strand
caaagaguguccaaucauu

SEQ ID NO: 203206 - RNA, 19 nt, Homo sapiens
  misc_RNA (1)...(19): siRNA sense strand
uagcugaccugaauaaugu

SEQ ID NO: 203207 - RNA, 19 nt, Homo sapiens
  misc_RNA (1)...(19): siRNA sense strand
gcaugauucuauccaaauu

SEQ ID NO: 203208 - RNA, 19 nt, Homo sapiens
  misc_RNA (1)...(19): siRNA sense strand
ugaacuggcugcugaaugu

SEQ ID NO: 203209 - RNA, 19 nt, Homo sapiens
  misc_RNA (1)...(19): siRNA sense strand
gauauccugcagauuauua

SEQ ID NO: 203210 - RNA, 19 nt, Homo sapiens
  misc_RNA (1)...(19): siRNA sense strand
gagaagauguucgagacuu

SEQ ID NO: 203211 - RNA, 19 nt, Homo sapiens
  misc_RNA (1)...(19): siRNA sense strand
gcacuuuaauuaugacauc

SEQ ID NO: 203212 - RNA, 19 nt, Homo sapiens
  misc_RNA (1)...(19): siRNA sense strand
guaaagcacauuuggaaga

SEQ ID NO: 203213 - RNA, 19 nt, Homo sapiens
  misc_RNA (1)...(19): siRNA sense strand
gaauauugcacuccgacua

SEQ ID NO: 203214 - RNA, 19 nt, Homo sapiens
  misc_RNA (1)...(19): siRNA sense strand
uuauaggacugccaugaaa

SEQ ID NO: 203215 - RNA, 19 nt, Homo sapiens
  misc_RNA (1)...(19): siRNA sense strand
gggugaaguugcauccuuu

SEQ ID NO: 203216 - RNA, 19 nt, Homo sapiens
  misc_RNA (1)...(19): siRNA sense strand
gcaagagcacaacaauuug

SEQ ID NO: 203217 - RNA, 19 nt, Homo sapiens
  misc_RNA (1)...(19): siRNA sense strand
gcacaacaauuuggucaac

SEQ ID NO: 203218 - RNA, 19 nt, Homo sapiens
  misc_RNA (1)...(19): siRNA sense strand
agcaagagcacaacaauuu

SEQ ID NO: 203219 - RNA, 19 nt, Homo sapiens
  misc_RNA (1)...(19): siRNA sense strand
agaagauguucgagacuuu

SEQ ID NO: 203220 - RNA, 19 nt, Homo sapiens
  misc_RNA (1)...(19): siRNA sense strand
gagcaagagcacaacaauu

SEQ ID NO: 203221 - RNA, 19 nt, Homo sapiens
  misc_RNA (1)...(19): siRNA sense strand
ucaagcaaguggcaaguuc

SEQ ID NO: 203222 - RNA, 19 nt, Homo sapiens
  misc_RNA (1)...(19): siRNA sense strand
ccacgagacucaaacaacu

SEQ ID NO: 203223 - RNA, 19 nt, Homo sapiens
  misc_RNA (1)...(19): siRNA sense strand
cagcacaaccucaagcaaa

SEQ ID NO: 203224 - RNA, 19 nt, Homo sapiens
  misc_RNA (1)...(19): siRNA sense strand
gcaaagaguguccaaucau

SEQ ID NO: 203225 - RNA, 19 nt, Homo sapiens
  misc_RNA (1)...(19): siRNA sense strand
auggauauccugcagauua

SEQ ID NO: 203226 - RNA, 19 nt, Homo sapiens
  misc_RNA (1)...(19): siRNA sense strand
uguaacaucugcaaagagu

SEQ ID NO: 203227 - RNA, 19 nt, Homo sapiens
  misc_RNA (1)...(19): siRNA sense strand
guccggagcugcuuccaau

SEQ ID NO: 203228 - RNA, 19 nt, Homo sapiens
  misc_RNA (1)...(19): siRNA sense strand
gcaaguggcaaguucaaca

SEQ ID NO: 203229 - RNA, 19 nt, Homo sapiens
  misc_RNA (1)...(19): siRNA sense strand
gcuuccaauuugcuaauaa

SEQ ID NO: 203230 - RNA, 19 nt, Homo sapiens
  misc_RNA (1)...(19): siRNA sense strand
uggaagacaaguacagaua

SEQ ID NO: 203231 - RNA, 19 nt, Homo sapiens
  misc_RNA (1)...(19): siRNA sense strand
ggauccguguccugucuuu

SEQ ID NO: 203232 - RNA, 19 nt, Homo sapiens
  misc_RNA (1)...(19): siRNA sense strand
gucuuuagcugaccugaau

SEQ ID NO: 203233 - RNA, 19 nt, Homo sapiens
  misc_RNA (1)...(19): siRNA sense strand
gacaaguacagauaccuuu

SEQ ID NO: 203234 - RNA, 19 nt, Homo sapiens
  misc_RNA (1)...(19): siRNA sense strand
ccaagcaucaggccaaaug

SEQ ID NO: 203235 - RNA, 19 nt, Homo sapiens
  misc_RNA (1)...(19): siRNA sense strand
ggagcaagagcacaacaau

SEQ ID NO: 203236 - RNA, 19 nt, Homo sapiens
  misc_RNA (1)...(19): siRNA sense strand
guguaaagcacauuuggaa

SEQ ID NO: 203237 - RNA, 19 nt, Homo sapiens
  misc_RNA (1)...(19): siRNA sense strand
caagacaguugggugaagu

SEQ ID NO: 203238 - RNA, 19 nt, Homo sapiens
  misc_RNA (1)...(19): siRNA sense strand
gaagauguucgagacuuug

SEQ ID NO: 203239 - RNA, 19 nt, Homo sapiens
  misc_RNA (1)...(19): siRNA sense strand
gucagauucucagcuuaua

SEQ ID NO: 203240 - RNA, 19 nt, Homo sapiens
  misc_RNA (1)...(19): siRNA sense strand
uaacaucugcaaagagugu

SEQ ID NO: 203241 - RNA, 19 nt, Homo sapiens
  misc_RNA (1)...(19): siRNA sense strand
cggagcugcuuccaauuug

SEQ ID NO: 203242 - RNA, 19 nt, Homo sapiens
  misc_RNA (1)...(19): siRNA sense strand
gaagacaaguacagauacc

SEQ ID NO: 203243 - RNA, 19 nt, Homo sapiens
  misc_RNA (1)...(19): siRNA sense strand
ccauggauauccugcagau

SEQ ID NO: 203244 - RNA, 19 nt, Homo sapiens
  misc_RNA (1)...(19): siRNA sense strand
ggcaucauuucccugugua

SEQ ID NO: 203245 - RNA, 19 nt, Homo sapiens
  misc_RNA (1)...(19): siRNA sense strand
uggauauccugcagauuau

SEQ ID NO: 203246 - RNA, 19 nt, Homo sapiens
  misc_RNA (1)...(19): siRNA sense strand
ggaagacaaguacagauac

SEQ ID NO: 203247 - RNA, 19 nt, Homo sapiens
  misc_RNA (1)...(19): siRNA sense strand
ugcaaagaguguccaauca

SEQ ID NO: 203248 - RNA, 19 nt, Homo sapiens
  misc_RNA (1)...(19): siRNA sense strand
guggauaugugucugaacu

SEQ ID NO: 203249 - RNA, 19 nt, Homo sapiens
  misc_RNA (1)...(19): siRNA sense strand
acuggcugcugaauguuua

SEQ ID NO: 203250 - RNA, 19 nt, Homo sapiens
  misc_RNA (1)...(19): siRNA sense strand
acuaucccaugguggaaua

SEQ ID NO: 203251 - RNA, 19 nt, Homo sapiens
  misc_RNA (1)...(19): siRNA sense strand
ccggagcugcuuccaauuu

SEQ ID NO: 203252 - RNA, 19 nt, Homo sapiens
  misc_RNA (1)...(19): siRNA sense strand
ccaaauuccaagacaguug

SEQ ID NO: 203253 - RNA, 19 nt, Homo sapiens
  misc_RNA (1)...(19): siRNA sense strand
cagaaacugccaagcauca

SEQ ID NO: 203254 - RNA, 19 nt, Homo sapiens
  misc_RNA (1)...(19): siRNA sense strand
uaugacaucugccaaagcu

SEQ ID NO: 203255 - RNA, 19 nt, Homo sapiens
  misc_RNA (1)...(19): siRNA sense strand
aaugucagauucucagcuu

SEQ ID NO: 203256 - RNA, 19 nt, Homo sapiens
  misc_RNA (1)...(19): siRNA sense strand
ucgagacuuugccaaggua

SEQ ID NO: 203257 - RNA, 19 nt, Homo sapiens
  misc_RNA (1)...(19): siRNA sense strand
gcaaaaggccauaaaaugc

SEQ ID NO: 203258 - RNA, 19 nt, Homo sapiens
  misc_RNA (1)...(19): siRNA sense strand
cugcaugauucuauccaaa

SEQ ID NO: 203259 - RNA, 19 nt, Homo sapiens
  misc_RNA (1)...(19): siRNA sense strand
uaaagcacauuuggaagac

SEQ ID NO: 203260 - RNA, 19 nt, Homo sapiens
  misc_RNA (1)...(19): siRNA sense strand
acaggagucuaaagcacuu

SEQ ID NO: 203261 - RNA, 19 nt, Homo sapiens
  misc_RNA (1)...(19): siRNA sense strand
acagauaccuuuucaagca

SEQ ID NO: 203262 - RNA, 19 nt, Homo sapiens
  misc_RNA (1)...(19): siRNA sense strand
aagcacauuuggaagacaa

SEQ ID NO: 203263 - RNA, 19 nt, Homo sapiens
  misc_RNA (1)...(19): siRNA sense strand
gcuaauaauaagccagaga

SEQ ID NO: 203264 - RNA, 19 nt, Homo sapiens
  misc_RNA (1)...(19): siRNA sense strand
caagagcacaacaauuugg

SEQ ID NO: 203265 - RNA, 19 nt, Homo sapiens
  misc_RNA (1)...(19): siRNA sense strand
ccugucagcugcaugugau

SEQ ID NO: 203266 - RNA, 19 nt, Homo sapiens
  misc_RNA (1)...(19): siRNA sense strand
gcugcugaauguuuaugau

SEQ ID NO: 203267 - RNA, 19 nt, Homo sapiens
  misc_RNA (1)...(19): siRNA sense strand
acagagcucuaccagucuu

SEQ ID NO: 203268 - RNA, 19 nt, Homo sapiens
  misc_RNA (1)...(19): siRNA sense strand
acaguugggugaaguugca

SEQ ID NO: 203269 - RNA, 19 nt, Homo sapiens
  misc_RNA (1)...(19): siRNA sense strand
guuugaccacuauuuauga

SEQ ID NO: 203270 - RNA, 19 nt, Homo sapiens
  misc_RNA (1)...(19): siRNA sense strand
gcuuauaggacugccauga

SEQ ID NO: 203271 - RNA, 19 nt, Homo sapiens
  misc_RNA (1)...(19): siRNA sense strand
caucaggccaaauguaaca

SEQ ID NO: 203272 - RNA, 19 nt, Homo sapiens
  misc_RNA (1)...(19): siRNA sense strand
gauucuauccaaauuccaa

SEQ ID NO: 203273 - RNA, 19 nt, Homo sapiens
  misc_RNA (1)...(19): siRNA sense strand
ggcaaguucaacaggauuu

SEQ ID NO: 203274 - RNA, 19 nt, Homo sapiens
  misc_RNA (1)...(19): siRNA sense strand
gaacuggcugcugaauguu

SEQ ID NO: 203275 - RNA, 19 nt, Homo sapiens
  misc_RNA (1)...(19): siRNA sense strand
cugcugaauguuuaugaua

SEQ ID NO: 203276 - RNA, 19 nt, Homo sapiens
  misc_RNA (1)...(19): siRNA sense strand
aagcaucaggccaaaugua

SEQ ID NO: 203277 - RNA, 19 nt, Homo sapiens
  misc_RNA (1)...(19): siRNA sense strand
uggcaucauuucccugugu

SEQ ID NO: 203278 - RNA, 19 nt, Homo sapiens
  misc_RNA (1)...(19): siRNA sense strand
ccaugaaacuccgaagacu

SEQ ID NO: 203279 - RNA, 19 nt, Homo sapiens
  misc_RNA (1)...(19): siRNA sense strand
auaauaagccagagaucga

SEQ ID NO: 203280 - RNA, 19 nt, Homo sapiens
  misc_RNA (1)...(19): siRNA sense strand
cuaauaauaagccagagau

SEQ ID NO: 203281 - RNA, 19 nt, Homo sapiens
  misc_RNA (1)...(19): siRNA sense strand
ugggugaaguugcauccuu

SEQ ID NO: 203282 - RNA, 19 nt, Homo sapiens
  misc_RNA (1)...(19): siRNA sense strand
caucauuucccuguguaaa

SEQ ID NO: 203283 - RNA, 19 nt, Homo sapiens
  misc_RNA (1)...(19): siRNA sense strand
gcguggauaugugucugaa

SEQ ID NO: 203284 - RNA, 19 nt, Homo sapiens
  misc_RNA (1)...(19): siRNA sense strand
gcacuaucccaugguggaa

SEQ ID NO: 203285 - RNA, 19 nt, Homo sapiens
  misc_RNA (1)...(19): siRNA sense strand
gagccugucagcugcaugu

SEQ ID NO: 203286 - RNA, 19 nt, Homo sapiens
  misc_RNA (1)...(19): siRNA sense strand
guacagauaccuuuucaag

SEQ ID NO: 203287 - RNA, 19 nt, Homo sapiens
  misc_RNA (1)...(19): siRNA sense strand
gucccucucugcguggaua

SEQ ID NO: 203288 - RNA, 19 nt, Homo sapiens
  misc_RNA (1)...(19): siRNA sense strand
ggagcugcuuccaauuugc

SEQ ID NO: 203289 - RNA, 19 nt, Homo sapiens
  misc_RNA (1)...(19): siRNA sense strand
uuagcugaccugaauaaug

SEQ ID NO: 203290 - RNA, 19 nt, Homo sapiens
  misc_RNA (1)...(19): siRNA sense strand
guggcaaguucaacaggau

SEQ ID NO: 203291 - RNA, 19 nt, Homo sapiens
  misc_RNA (1)...(19): siRNA sense strand
acaacaauuuggucaacgu

SEQ ID NO: 203292 - RNA, 19 nt, Homo sapiens
  misc_RNA (1)...(19): siRNA sense strand
gacuacaucaggagaagau

SEQ ID NO: 203293 - RNA, 19 nt, Homo sapiens
  misc_RNA (1)...(19): siRNA sense strand
uaauaagccagagaucgaa

SEQ ID NO: 203294 - RNA, 19 nt, Homo sapiens
  misc_RNA (1)...(19): siRNA sense strand
ugucagauucucagcuuau

SEQ ID NO: 203295 - RNA, 19 nt, Homo sapiens
  misc_RNA (1)...(19): siRNA sense strand
ggauauccugcagauuauu

SEQ ID NO: 203296 - RNA, 19 nt, Homo sapiens
  misc_RNA (1)...(19): siRNA sense strand
agcaucaggccaaauguaa

SEQ ID NO: 203297 - RNA, 19 nt, Homo sapiens
  misc_RNA (1)...(19): siRNA sense strand
gcccuuugcuuggaucucu

SEQ ID NO: 203298 - RNA, 19 nt, Homo sapiens
  misc_RNA (1)...(19): siRNA sense strand
gcugaauguuuaugauacg

SEQ ID NO: 203299 - RNA, 19 nt, Homo sapiens
  misc_RNA (1)...(19): siRNA sense strand
agacuuugccaagguacua

SEQ ID NO: 203300 - RNA, 19 nt, Homo sapiens
  misc_RNA (1)...(19): siRNA sense strand
caagcaaguggcaaguuca

SEQ ID NO: 203301 - RNA, 19 nt, Homo sapiens
  misc_RNA (1)...(19): siRNA sense strand
agacaaguacagauaccuu

SEQ ID NO: 203302 - RNA, 19 nt, Homo sapiens
  misc_RNA (1)...(19): siRNA sense strand
gcaucauuucccuguguaa

SEQ ID NO: 203303 - RNA, 19 nt, Homo sapiens
  misc_RNA (1)...(19): siRNA sense strand
cugcaaagaguguccaauc

SEQ ID NO: 203304 - RNA, 19 nt, Homo sapiens
  misc_RNA (1)...(19): siRNA sense strand
cuuauaggacugccaugaa

SEQ ID NO: 203305 - RNA, 19 nt, Homo sapiens
  misc_RNA (1)...(19): siRNA sense strand
caaagaguguccaaucauu

SEQ ID NO: 203306 - RNA, 19 nt, Homo sapiens
  misc_RNA (1)...(19): siRNA sense strand
uagcugaccugaauaaugu

SEQ ID NO: 203307 - RNA, 19 nt, Homo sapiens
  misc_RNA (1)...(19): siRNA sense strand
gcaugauucuauccaaauu

SEQ ID NO: 203308 - RNA, 19 nt, Homo sapiens
  misc_RNA (1)...(19): siRNA sense strand
ugaacuggcugcugaaugu

SEQ ID NO: 203309 - RNA, 19 nt, Homo sapiens
  misc_RNA (1)...(19): siRNA sense strand
gauauccugcagauuauua

SEQ ID NO: 203310 - RNA, 19 nt, Homo sapiens
  misc_RNA (1)...(19): siRNA sense strand
gagaagauguucgagacuu

SEQ ID NO: 203311 - RNA, 19 nt, Homo sapiens
  misc_RNA (1)...(19): siRNA sense strand
gcacuuuaauuaugacauc

SEQ ID NO: 203312 - RNA, 19 nt, Homo sapiens
  misc_RNA (1)...(19): siRNA sense strand
guaaagcacauuuggaaga

SEQ ID NO: 203313 - RNA, 19 nt, Homo sapiens
  misc_RNA (1)...(19): siRNA sense strand
gaauauugcacuccgacua

SEQ ID NO: 203314 - RNA, 19 nt, Homo sapiens
  misc_RNA (1)...(19): siRNA sense strand
uuauaggacugccaugaaa

SEQ ID NO: 203315 - RNA, 19 nt, Homo sapiens
  misc_RNA (1)...(19): siRNA sense strand
gggugaaguugcauccuuu

SEQ ID NO: 203316 - RNA, 19 nt, Homo sapiens
  misc_RNA (1)...(19): siRNA sense strand
gcaagagcacaacaauuug

SEQ ID NO: 203317 - RNA, 19 nt, Homo sapiens
  misc_RNA (1)...(19): siRNA sense strand
gcacaacaauuuggucaac

SEQ ID NO: 203318 - RNA, 19 nt, Homo sapiens
  misc_RNA (1)...(19): siRNA sense strand
agcaagagcacaacaauuu

SEQ ID NO: 203319 - RNA, 19 nt, Homo sapiens
  misc_RNA (1)...(19): siRNA sense strand
agaagauguucgagacuuu

SEQ ID NO: 203320 - RNA, 19 nt, Homo sapiens
  misc_RNA (1)...(19): siRNA sense strand
gagcaagagcacaacaauu

SEQ ID NO: 203321 - RNA, 19 nt, Homo sapiens
  misc_RNA (1)...(19): siRNA sense strand
ucaagcaaguggcaaguuc

SEQ ID NO: 203322 - RNA, 19 nt, Homo sapiens
  misc_RNA (1)...(19): siRNA sense strand
ccacgagacucaaacaacu

SEQ ID NO: 203323 - RNA, 19 nt, Homo sapiens
  misc_RNA (1)...(19): siRNA sense strand
cagcacaaccucaagcaaa

SEQ ID NO: 203324 - RNA, 19 nt, Homo sapiens
  misc_RNA (1)...(19): siRNA sense strand
gcaaagaguguccaaucau

SEQ ID NO: 203325 - RNA, 19 nt, Homo sapiens
  misc_RNA (1)...(19): siRNA sense strand
auggauauccugcagauua

SEQ ID NO: 203326 - RNA, 19 nt, Homo sapiens
  misc_RNA (1)...(19): siRNA sense strand
uguaacaucugcaaagagu

SEQ ID NO: 203327 - RNA, 19 nt, Homo sapiens
  misc_RNA (1)...(19): siRNA sense strand
guccggagcugcuuccaau

SEQ ID NO: 203328 - RNA, 19 nt, Homo sapiens
  misc_RNA (1)...(19): siRNA sense strand
gcaaguggcaaguucaaca

SEQ ID NO: 203329 - RNA, 19 nt, Homo sapiens
  misc_RNA (1)...(19): siRNA sense strand
gcuuccaauuugcuaauaa

SEQ ID NO: 203330 - RNA, 19 nt, Homo sapiens
  misc_RNA (1)...(19): siRNA sense strand
uggaagacaaguacagaua

SEQ ID NO: 203331 - RNA, 19 nt, Homo sapiens
  misc_RNA (1)...(19): siRNA sense strand
ggauccguguccugucuuu

SEQ ID NO: 203332 - RNA, 19 nt, Homo sapiens
  misc_RNA (1)...(19): siRNA sense strand
gucuuuagcugaccugaau

SEQ ID NO: 203333 - RNA, 19 nt, Homo sapiens
  misc_RNA (1)...(19): siRNA sense strand
gacaaguacagauaccuuu

SEQ ID NO: 203334 - RNA, 19 nt, Homo sapiens
  misc_RNA (1)...(19): siRNA sense strand
ccaagcaucaggccaaaug

SEQ ID NO: 203335 - RNA, 19 nt, Homo sapiens
  misc_RNA (1)...(19): siRNA sense strand
ggagcaagagcacaacaau

SEQ ID NO: 203336 - RNA, 19 nt, Homo sapiens
  misc_RNA (1)...(19): siRNA sense strand
guguaaagcacauuuggaa

SEQ ID NO: 203337 - RNA, 19 nt, Homo sapiens
  misc_RNA (1)...(19): siRNA sense strand
caagacaguugggugaagu

SEQ ID NO: 203338 - RNA, 19 nt, Homo sapiens
  misc_RNA (1)...(19): siRNA sense strand
gaagauguucgagacuuug

SEQ ID NO: 203339 - RNA, 19 nt, Homo sapiens
  misc_RNA (1)...(19): siRNA sense strand
gucagauucucagcuuaua

SEQ ID NO: 203340 - RNA, 19 nt, Homo sapiens
  misc_RNA (1)...(19): siRNA sense strand
uaacaucugcaaagagugu

SEQ ID NO: 203341 - RNA, 19 nt, Homo sapiens
  misc_RNA (1)...(19): siRNA sense strand
cggagcugcuuccaauuug

SEQ ID NO: 203342 - RNA, 19 nt, Homo sapiens
  misc_RNA (1)...(19): siRNA sense strand
gaagacaaguacagauacc

SEQ ID NO: 203343 - RNA, 19 nt, Homo sapiens
  misc_RNA (1)...(19): siRNA sense strand
ccauggauauccugcagau

SEQ ID NO: 203344 - RNA, 19 nt, Homo sapiens
  misc_RNA (1)...(19): siRNA sense strand
ggcaucauuucccugugua

SEQ ID NO: 203345 - RNA, 19 nt, Homo sapiens
  misc_RNA (1)...(19): siRNA sense strand
uggauauccugcagauuau

SEQ ID NO: 203346 - RNA, 19 nt, Homo sapiens
  misc_RNA (1)...(19): siRNA sense strand
ggaagacaaguacagauac

SEQ ID NO: 203347 - RNA, 19 nt, Homo sapiens
  misc_RNA (1)...(19): siRNA sense strand
ugcaaagaguguccaauca

SEQ ID NO: 203348 - RNA, 19 nt, Homo sapiens
  misc_RNA (1)...(19): siRNA sense strand
guggauaugugucugaacu

SEQ ID NO: 203349 - RNA, 19 nt, Homo sapiens
  misc_RNA (1)...(19): siRNA sense strand
acuggcugcugaauguuua

SEQ ID NO: 203350 - RNA, 19 nt, Homo sapiens
  misc_RNA (1)...(19): siRNA sense strand
acuaucccaugguggaaua

SEQ ID NO: 203351 - RNA, 19 nt, Homo sapiens
  misc_RNA (1)...(19): siRNA sense strand
ccggagcugcuuccaauuu

SEQ ID NO: 203352 - RNA, 19 nt, Homo sapiens
  misc_RNA (1)...(19): siRNA sense strand
ccaaauuccaagacaguug

SEQ ID NO: 203353 - RNA, 19 nt, Homo sapiens
  misc_RNA (1)...(19): siRNA sense strand
cagaaacugccaagcauca

SEQ ID NO: 203354 - RNA, 19 nt, Homo sapiens
  misc_RNA (1)...(19): siRNA sense strand
uaugacaucugccaaagcu

SEQ ID NO: 203355 - RNA, 19 nt, Homo sapiens
  misc_RNA (1)...(19): siRNA sense strand
aaugucagauucucagcuu

SEQ ID NO: 203356 - RNA, 19 nt, Homo sapiens
  misc_RNA (1)...(19): siRNA sense strand
ucgagacuuugccaaggua

SEQ ID NO: 203357 - RNA, 19 nt, Homo sapiens
  misc_RNA (1)...(19): siRNA sense strand
gcaaaaggccauaaaaugc

SEQ ID NO: 203358 - RNA, 19 nt, Homo sapiens
  misc_RNA (1)...(19): siRNA sense strand
cugcaugauucuauccaaa

SEQ ID NO: 203359 - RNA, 19 nt, Homo sapiens
  misc_RNA (1)...(19): siRNA sense strand
uaaagcacauuuggaagac

SEQ ID NO: 203360 - RNA, 19 nt, Homo sapiens
  misc_RNA (1)...(19): siRNA sense strand
acaggagucuaaagcacuu

SEQ ID NO: 203361 - RNA, 19 nt, Homo sapiens
  misc_RNA (1)...(19): siRNA sense strand
acagauaccuuuucaagca

SEQ ID NO: 203362 - RNA, 19 nt, Homo sapiens
  misc_RNA (1)...(19): siRNA sense strand
aagcacauuuggaagacaa

SEQ ID NO: 203363 - RNA, 19 nt, Homo sapiens
  misc_RNA (1)...(19): siRNA sense strand
gcuaauaauaagccagaga

SEQ ID NO: 203364 - RNA, 19 nt, Homo sapiens
  misc_RNA (1)...(19): siRNA sense strand
caagagcacaacaauuugg

SEQ ID NO: 203365 - RNA, 19 nt, Homo sapiens
  misc_RNA (1)...(19): siRNA sense strand
ccugucagcugcaugugau

SEQ ID NO: 203366 - RNA, 19 nt, Homo sapiens
  misc_RNA (1)...(19): siRNA sense strand
gcugcugaauguuuaugau

SEQ ID NO: 203367 - RNA, 19 nt, Homo sapiens
  misc_RNA (1)...(19): siRNA sense strand
acagagcucuaccagucuu

SEQ ID NO: 203368 - RNA, 19 nt, Homo sapiens
  misc_RNA (1)...(19): siRNA sense strand
acaguugggugaaguugca

SEQ ID NO: 203369 - RNA, 19 nt, Homo sapiens
  misc_RNA (1)...(19): siRNA sense strand
guuugaccacuauuuauga

SEQ ID NO: 203370 - RNA, 19 nt, Homo sapiens
  misc_RNA (1)...(19): siRNA sense strand
gcuuauaggacugccauga

SEQ ID NO: 203371 - RNA, 19 nt, Homo sapiens
  misc_RNA (1)...(19): siRNA sense strand
caucaggccaaauguaaca

SEQ ID NO: 203372 - RNA, 19 nt, Homo sapiens
  misc_RNA (1)...(19): siRNA sense strand
gauucuauccaaauuccaa

SEQ ID NO: 203373 - RNA, 19 nt, Homo sapiens
  misc_RNA (1)...(19): siRNA sense strand
ggcaaguucaacaggauuu

SEQ ID NO: 203374 - RNA, 19 nt, Homo sapiens
  misc_RNA (1)...(19): siRNA sense strand
gaacuggcugcugaauguu

SEQ ID NO: 203375 - RNA, 19 nt, Homo sapiens
  misc_RNA (1)...(19): siRNA sense strand
cugcugaauguuuaugaua

SEQ ID NO: 203376 - RNA, 19 nt, Homo sapiens
  misc_RNA (1)...(19): siRNA sense strand
aagcaucaggccaaaugua

SEQ ID NO: 203377 - RNA, 19 nt, Homo sapiens
  misc_RNA (1)...(19): siRNA sense strand
uggcaucauuucccugugu

SEQ ID NO: 203378 - RNA, 19 nt, Homo sapiens
  misc_RNA (1)...(19): siRNA sense strand
ccaugaaacuccgaagacu

SEQ ID NO: 203379 - RNA, 19 nt, Homo sapiens
  misc_RNA (1)...(19): siRNA sense strand
auaauaagccagagaucga

SEQ ID NO: 203380 - RNA, 19 nt, Homo sapiens
  misc_RNA (1)...(19): siRNA sense strand
cuaauaauaagccagagau

SEQ ID NO: 203381 - RNA, 19 nt, Homo sapiens
  misc_RNA (1)...(19): siRNA sense strand
ugggugaaguugcauccuu

SEQ ID NO: 203382 - RNA, 19 nt, Homo sapiens
  misc_RNA (1)...(19): siRNA sense strand
caucauuucccuguguaaa

SEQ ID NO: 203383 - RNA, 19 nt, Homo sapiens
  misc_RNA (1)...(19): siRNA sense strand
gcguggauaugugucugaa

SEQ ID NO: 203384 - RNA, 19 nt, Homo sapiens
  misc_RNA (1)...(19): siRNA sense strand
gcacuaucccaugguggaa

SEQ ID NO: 203385 - RNA, 19 nt, Homo sapiens
  misc_RNA (1)...(19): siRNA sense strand
gagccugucagcugcaugu

SEQ ID NO: 203386 - RNA, 19 nt, Homo sapiens
  misc_RNA (1)...(19): siRNA sense strand
guacagauaccuuuucaag

SEQ ID NO: 203387 - RNA, 19 nt, Homo sapiens
  misc_RNA (1)...(19): siRNA sense strand
gucccucucugcguggaua

SEQ ID NO: 203388 - RNA, 19 nt, Homo sapiens
  misc_RNA (1)...(19): siRNA sense strand
ggagcugcuuccaauuugc

SEQ ID NO: 203389 - RNA, 19 nt, Homo sapiens
  misc_RNA (1)...(19): siRNA sense strand
uuagcugaccugaauaaug

SEQ ID NO: 203390 - RNA, 19 nt, Homo sapiens
  misc_RNA (1)...(19): siRNA sense strand
guggcaaguucaacaggau

SEQ ID NO: 203391 - RNA, 19 nt, Homo sapiens
  misc_RNA (1)...(19): siRNA sense strand
acaacaauuuggucaacgu

SEQ ID NO: 203392 - RNA, 19 nt, Homo sapiens
  misc_RNA (1)...(19): siRNA sense strand
gacuacaucaggagaagau

SEQ ID NO: 203393 - RNA, 19 nt, Homo sapiens
  misc_RNA (1)...(19): siRNA sense strand
uaauaagccagagaucgaa

SEQ ID NO: 203394 - RNA, 19 nt, Homo sapiens
  misc_RNA (1)...(19): siRNA sense strand
ugucagauucucagcuuau

SEQ ID NO: 203395 - RNA, 19 nt, Homo sapiens
  misc_RNA (1)...(19): siRNA sense strand
ggauauccugcagauuauu

SEQ ID NO: 203396 - RNA, 19 nt, Homo sapiens
  misc_RNA (1)...(19): siRNA sense strand
agcaucaggccaaauguaa

SEQ ID NO: 203397 - RNA, 19 nt, Homo sapiens
  misc_RNA (1)...(19): siRNA sense strand
gcccuuugcuuggaucucu

SEQ ID NO: 203398 - RNA, 19 nt, Homo sapiens
  misc_RNA (1)...(19): siRNA sense strand
gcugaauguuuaugauacg

SEQ ID NO: 203399 - RNA, 19 nt, Homo sapiens
  misc_RNA (1)...(19): siRNA sense strand
agacuuugccaagguacua

SEQ ID NO: 203400 - RNA, 19 nt, Homo sapiens
  misc_RNA (1)...(19): siRNA sense strand
caagcaaguggcaaguuca

SEQ ID NO: 203401 - RNA, 19 nt, Homo sapiens
  misc_RNA (1)...(19): siRNA sense strand
agacaaguacagauaccuu

SEQ ID NO: 203402 - RNA, 19 nt, Homo sapiens
  misc_RNA (1)...(19): siRNA sense strand
gcaucauuucccuguguaa

SEQ ID NO: 203403 - RNA, 19 nt, Homo sapiens
  misc_RNA (1)...(19): siRNA sense strand
cugcaaagaguguccaauc

SEQ ID NO: 203404 - RNA, 19 nt, Homo sapiens
  misc_RNA (1)...(19): siRNA sense strand
cuuauaggacugccaugaa

SEQ ID NO: 203405 - RNA, 19 nt, Homo sapiens
  misc_RNA (1)...(19): siRNA sense strand
caaagaguguccaaucauu

SEQ ID NO: 203406 - RNA, 19 nt, Homo sapiens
  misc_RNA (1)...(19): siRNA sense strand
uagcugaccugaauaaugu

SEQ ID NO: 203407 - RNA, 19 nt, Homo sapiens
  misc_RNA (1)...(19): siRNA sense strand
gcaugauucuauccaaauu

SEQ ID NO: 203408 - RNA, 19 nt, Homo sapiens
  misc_RNA (1)...(19): siRNA sense strand
ugaacuggcugcugaaugu

SEQ ID NO: 203409 - RNA, 19 nt, Homo sapiens
  misc_RNA (1)...(19): siRNA sense strand
gauauccugcagauuauua

SEQ ID NO: 203410 - RNA, 19 nt, Homo sapiens
  misc_RNA (1)...(19): siRNA sense strand
gagaagauguucgagacuu

SEQ ID NO: 203411 - RNA, 19 nt, Homo sapiens
  misc_RNA (1)...(19): siRNA sense strand
gcacuuuaauuaugacauc

SEQ ID NO: 203412 - RNA, 19 nt, Homo sapiens
  misc_RNA (1)...(19): siRNA sense strand
guaaagcacauuuggaaga

SEQ ID NO: 203413 - RNA, 19 nt, Homo sapiens
  misc_RNA (1)...(19): siRNA sense strand
gaauauugcacuccgacua

SEQ ID NO: 203414 - RNA, 19 nt, Homo sapiens
  misc_RNA (1)...(19): siRNA sense strand
uuauaggacugccaugaaa

SEQ ID NO: 203415 - RNA, 19 nt, Homo sapiens
  misc_RNA (1)...(19): siRNA sense strand
gggugaaguugcauccuuu

SEQ ID NO: 203416 - RNA, 19 nt, Homo sapiens
  misc_RNA (1)...(19): siRNA sense strand
gcaagagcacaacaauuug

SEQ ID NO: 203417 - RNA, 19 nt, Homo sapiens
  misc_RNA (1)...(19): siRNA sense strand
gcacaacaauuuggucaac

SEQ ID NO: 203418 - RNA, 19 nt, Homo sapiens
  misc_RNA (1)...(19): siRNA sense strand
agcaagagcacaacaauuu

SEQ ID NO: 203419 - RNA, 19 nt, Homo sapiens
  misc_RNA (1)...(19): siRNA sense strand
agaagauguucgagacuuu

SEQ ID NO: 203420 - RNA, 19 nt, Homo sapiens
  misc_RNA (1)...(19): siRNA sense strand
gagcaagagcacaacaauu

SEQ ID NO: 203421 - RNA, 19 nt, Homo sapiens
  misc_RNA (1)...(19): siRNA sense strand
ucaagcaaguggcaaguuc

SEQ ID NO: 203422 - RNA, 19 nt, Homo sapiens
  misc_RNA (1)...(19): siRNA sense strand
ccacgagacucaaacaacu

SEQ ID NO: 203423 - RNA, 19 nt, Homo sapiens
  misc_RNA (1)...(19): siRNA sense strand
cagcacaaccucaagcaaa

SEQ ID NO: 203424 - RNA, 19 nt, Homo sapiens
  misc_RNA (1)...(19): siRNA sense strand
gcaaagaguguccaaucau

SEQ ID NO: 203425 - RNA, 19 nt, Homo sapiens
  misc_RNA (1)...(19): siRNA sense strand
auggauauccugcagauua

SEQ ID NO: 203426 - RNA, 19 nt, Homo sapiens
  misc_RNA (1)...(19): siRNA sense strand
uguaacaucugcaaagagu

SEQ ID NO: 203427 - RNA, 19 nt, Homo sapiens
  misc_RNA (1)...(19): siRNA sense strand
guccggagcugcuuccaau

SEQ ID NO: 203428 - RNA, 19 nt, Homo sapiens
  misc_RNA (1)...(19): siRNA sense strand
gcaaguggcaaguucaaca

SEQ ID NO: 203429 - RNA, 19 nt, Homo sapiens
  misc_RNA (1)...(19): siRNA sense strand
gcuuccaauuugcuaauaa

SEQ ID NO: 203430 - RNA, 19 nt, Homo sapiens
  misc_RNA (1)...(19): siRNA sense strand
uggaagacaaguacagaua

SEQ ID NO: 203431 - RNA, 19 nt, Homo sapiens
  misc_RNA (1)...(19): siRNA sense strand
ggauccguguccugucuuu

SEQ ID NO: 203432 - RNA, 19 nt, Homo sapiens
  misc_RNA (1)...(19): siRNA sense strand
gucuuuagcugaccugaau

SEQ ID NO: 203433 - RNA, 19 nt, Homo sapiens
  misc_RNA (1)...(19): siRNA sense strand
gacaaguacagauaccuuu

SEQ ID NO: 203434 - RNA, 19 nt, Homo sapiens
  misc_RNA (1)...(19): siRNA sense strand
ccaagcaucaggccaaaug

SEQ ID NO: 203435 - RNA, 19 nt, Homo sapiens
  misc_RNA (1)...(19): siRNA sense strand
ggagcaagagcacaacaau

SEQ ID NO: 203436 - RNA, 19 nt, Homo sapiens
  misc_RNA (1)...(19): siRNA sense strand
guguaaagcacauuuggaa

SEQ ID NO: 203437 - RNA, 19 nt, Homo sapiens
  misc_RNA (1)...(19): siRNA sense strand
caagacaguugggugaagu

SEQ ID NO: 203438 - RNA, 19 nt, Homo sapiens
  misc_RNA (1)...(19): siRNA sense strand
gaagauguucgagacuuug

SEQ ID NO: 203439 - RNA, 19 nt, Homo sapiens
  misc_RNA (1)...(19): siRNA sense strand
gucagauucucagcuuaua

SEQ ID NO: 203440 - RNA, 19 nt, Homo sapiens
  misc_RNA (1)...(19): siRNA sense strand
uaacaucugcaaagagugu

SEQ ID NO: 203441 - RNA, 19 nt, Homo sapiens
  misc_RNA (1)...(19): siRNA sense strand
cggagcugcuuccaauuug

SEQ ID NO: 203442 - RNA, 19 nt, Homo sapiens
  misc_RNA (1)...(19): siRNA sense strand
gaagacaaguacagauacc

SEQ ID NO: 203443 - RNA, 19 nt, Homo sapiens
  misc_RNA (1)...(19): siRNA sense strand
ccauggauauccugcagau

SEQ ID NO: 203444 - RNA, 19 nt, Homo sapiens
  misc_RNA (1)...(19): siRNA sense strand
ggcaucauuucccugugua

SEQ ID NO: 203445 - RNA, 19 nt, Homo sapiens
  misc_RNA (1)...(19): siRNA sense strand
uggauauccugcagauuau

SEQ ID NO: 203446 - RNA, 19 nt, Homo sapiens
  misc_RNA (1)...(19): siRNA sense strand
ggaagacaaguacagauac

SEQ ID NO: 203447 - RNA, 19 nt, Homo sapiens
  misc_RNA (1)...(19): siRNA sense strand
ugcaaagaguguccaauca

SEQ ID NO: 203448 - RNA, 19 nt, Homo sapiens
  misc_RNA (1)...(19): siRNA sense strand
guggauaugugucugaacu

SEQ ID NO: 203449 - RNA, 19 nt, Homo sapiens
  misc_RNA (1)...(19): siRNA sense strand
acuggcugcugaauguuua

SEQ ID NO: 203450 - RNA, 19 nt, Homo sapiens
  misc_RNA (1)...(19): siRNA sense strand
acuaucccaugguggaaua

SEQ ID NO: 203451 - RNA, 19 nt, Homo sapiens
  misc_RNA (1)...(19): siRNA sense strand
ccggagcugcuuccaauuu

SEQ ID NO: 203452 - RNA, 19 nt, Homo sapiens
  misc_RNA (1)...(19): siRNA sense strand
ccaaauuccaagacaguug

SEQ ID NO: 203453 - RNA, 19 nt, Homo sapiens
  misc_RNA (1)...(19): siRNA sense strand
cagaaacugccaagcauca

SEQ ID NO: 203454 - RNA, 19 nt, Homo sapiens
  misc_RNA (1)...(19): siRNA sense strand
uaugacaucugccaaagcu

SEQ ID NO: 203455 - RNA, 19 nt, Homo sapiens
  misc_RNA (1)...(19): siRNA sense strand
aaugucagauucucagcuu

SEQ ID NO: 203456 - RNA, 19 nt, Homo sapiens
  misc_RNA (1)...(19): siRNA sense strand
ucgagacuuugccaaggua

SEQ ID NO: 203457 - RNA, 19 nt, Homo sapiens
  misc_RNA (1)...(19): siRNA sense strand
gcaaaaggccauaaaaugc

SEQ ID NO: 203458 - RNA, 19 nt, Homo sapiens
  misc_RNA (1)...(19): siRNA sense strand
cugcaugauucuauccaaa

SEQ ID NO: 203459 - RNA, 19 nt, Homo sapiens
  misc_RNA (1)...(19): siRNA sense strand
uaaagcacauuuggaagac

SEQ ID NO: 203460 - RNA, 19 nt, Homo sapiens
  misc_RNA (1)...(19): siRNA sense strand
acaggagucuaaagcacuu

SEQ ID NO: 203461 - RNA, 19 nt, Homo sapiens
  misc_RNA (1)...(19): siRNA sense strand
acagauaccuuuucaagca

SEQ ID NO: 203462 - RNA, 19 nt, Homo sapiens
  misc_RNA (1)...(19): siRNA sense strand
aagcacauuuggaagacaa

SEQ ID NO: 203463 - RNA, 19 nt, Homo sapiens
  misc_RNA (1)...(19): siRNA sense strand
gcuaauaauaagccagaga

SEQ ID NO: 203464 - RNA, 19 nt, Homo sapiens
  misc_RNA (1)...(19): siRNA sense strand
caagagcacaacaauuugg

SEQ ID NO: 203465 - RNA, 19 nt, Homo sapiens
  misc_RNA (1)...(19): siRNA sense strand
ccugucagcugcaugugau

SEQ ID NO: 203466 - RNA, 19 nt, Homo sapiens
  misc_RNA (1)...(19): siRNA sense strand
gcugcugaauguuuaugau

SEQ ID NO: 203467 - RNA, 19 nt, Homo sapiens
  misc_RNA (1)...(19): siRNA sense strand
acagagcucuaccagucuu

SEQ ID NO: 203468 - RNA, 19 nt, Homo sapiens
  misc_RNA (1)...(19): siRNA sense strand
acaguugggugaaguugca

SEQ ID NO: 203469 - RNA, 19 nt, Homo sapiens
  misc_RNA (1)...(19): siRNA sense strand
guuugaccacuauuuauga

SEQ ID NO: 203470 - RNA, 19 nt, Homo sapiens
  misc_RNA (1)...(19): siRNA sense strand
gcuuauaggacugccauga

SEQ ID NO: 203471 - RNA, 19 nt, Homo sapiens
  misc_RNA (1)...(19): siRNA sense strand
caucaggccaaauguaaca

SEQ ID NO: 203472 - RNA, 19 nt, Homo sapiens
  misc_RNA (1)...(19): siRNA sense strand
gauucuauccaaauuccaa

SEQ ID NO: 203473 - RNA, 19 nt, Homo sapiens
  misc_RNA (1)...(19): siRNA sense strand
ggcaaguucaacaggauuu

SEQ ID NO: 203474 - RNA, 19 nt, Homo sapiens
  misc_RNA (1)...(19): siRNA sense strand
gaacuggcugcugaauguu

SEQ ID NO: 203475 - RNA, 19 nt, Homo sapiens
  misc_RNA (1)...(19): siRNA sense strand
cugcugaauguuuaugaua

SEQ ID NO: 203476 - RNA, 19 nt, Homo sapiens
  misc_RNA (1)...(19): siRNA sense strand
aagcaucaggccaaaugua

SEQ ID NO: 203477 - RNA, 19 nt, Homo sapiens
  misc_RNA (1)...(19): siRNA sense strand
uggcaucauuucccugugu

SEQ ID NO: 203478 - RNA, 19 nt, Homo sapiens
  misc_RNA (1)...(19): siRNA sense strand
ccaugaaacuccgaagacu

SEQ ID NO: 203479 - RNA, 19 nt, Homo sapiens
  misc_RNA (1)...(19): siRNA sense strand
auaauaagccagagaucga

SEQ ID NO: 203480 - RNA, 19 nt, Homo sapiens
  misc_RNA (1)...(19): siRNA sense strand
cuaauaauaagccagagau

SEQ ID NO: 203481 - RNA, 19 nt, Homo sapiens
  misc_RNA (1)...(19): siRNA sense strand
ugggugaaguugcauccuu

SEQ ID NO: 203482 - RNA, 19 nt, Homo sapiens
  misc_RNA (1)...(19): siRNA sense strand
caucauuucccuguguaaa

SEQ ID NO: 203483 - RNA, 19 nt, Homo sapiens
  misc_RNA (1)...(19): siRNA sense strand
gcguggauaugugucugaa

SEQ ID NO: 203484 - RNA, 19 nt, Homo sapiens
  misc_RNA (1)...(19): siRNA sense strand
gcacuaucccaugguggaa

SEQ ID NO: 203485 - RNA, 19 nt, Homo sapiens
  misc_RNA (1)...(19): siRNA sense strand
gagccugucagcugcaugu

SEQ ID NO: 203486 - RNA, 19 nt, Homo sapiens
  misc_RNA (1)...(19): siRNA sense strand
guacagauaccuuuucaag

SEQ ID NO: 203487 - RNA, 19 nt, Homo sapiens
  misc_RNA (1)...(19): siRNA sense strand
gucccucucugcguggaua

SEQ ID NO: 203488 - RNA, 19 nt, Homo sapiens
  misc_RNA (1)...(19): siRNA sense strand
ggagcugcuuccaauuugc

SEQ ID NO: 203489 - RNA, 19 nt, Homo sapiens
  misc_RNA (1)...(19): siRNA sense strand
uuagcugaccugaauaaug

SEQ ID NO: 203490 - RNA, 19 nt, Homo sapiens
  misc_RNA (1)...(19): siRNA sense strand
guggcaaguucaacaggau

SEQ ID NO: 203491 - RNA, 19 nt, Homo sapiens
  misc_RNA (1)...(19): siRNA sense strand
acaacaauuuggucaacgu

SEQ ID NO: 203492 - RNA, 19 nt, Homo sapiens
  misc_RNA (1)...(19): siRNA sense strand
gacuacaucaggagaagau

SEQ ID NO: 203493 - RNA, 19 nt, Homo sapiens
  misc_RNA (1)...(19): siRNA sense strand
uaauaagccagagaucgaa

SEQ ID NO: 203494 - RNA, 19 nt, Homo sapiens
  misc_RNA (1)...(19): siRNA sense strand
ugucagauucucagcuuau

SEQ ID NO: 203495 - RNA, 19 nt, Homo sapiens
  misc_RNA (1)...(19): siRNA sense strand
ggauauccugcagauuauu

SEQ ID NO: 203496 - RNA, 19 nt, Homo sapiens
  misc_RNA (1)...(19): siRNA sense strand
agcaucaggccaaauguaa

SEQ ID NO: 203497 - RNA, 19 nt, Homo sapiens
  misc_RNA (1)...(19): siRNA sense strand
gcccuuugcuuggaucucu

SEQ ID NO: 203498 - RNA, 19 nt, Homo sapiens
  misc_RNA (1)...(19): siRNA sense strand
gcugaauguuuaugauacg

SEQ ID NO: 203499 - RNA, 19 nt, Homo sapiens
  misc_RNA (1)...(19): siRNA sense strand
agacuuugccaagguacua

SEQ ID NO: 203500 - RNA, 19 nt, Homo sapiens
  misc_RNA (1)...(19): siRNA sense strand
caagcaaguggcaaguuca

SEQ ID NO: 203501 - RNA, 19 nt, Homo sapiens
  misc_RNA (1)...(19): siRNA sense strand
agacaaguacagauaccuu

SEQ ID NO: 203502 - RNA, 19 nt, Homo sapiens
  misc_RNA (1)...(19): siRNA sense strand
gcaucauuucccuguguaa

SEQ ID NO: 203503 - RNA, 19 nt, Homo sapiens
  misc_RNA (1)...(19): siRNA sense strand
cugcaaagaguguccaauc

SEQ ID NO: 203504 - RNA, 19 nt, Homo sapiens
  misc_RNA (1)...(19): siRNA sense strand
cuuauaggacugccaugaa

SEQ ID NO: 203505 - RNA, 19 nt, Homo sapiens
  misc_RNA (1)...(19): siRNA sense strand
caaagaguguccaaucauu

SEQ ID NO: 203506 - RNA, 19 nt, Homo sapiens
  misc_RNA (1)...(19): siRNA sense strand
uagcugaccugaauaaugu

SEQ ID NO: 203507 - RNA, 19 nt, Homo sapiens
  misc_RNA (1)...(19): siRNA sense strand
gcaugauucuauccaaauu

SEQ ID NO: 203508 - RNA, 19 nt, Homo sapiens
  misc_RNA (1)...(19): siRNA sense strand
ugaacuggcugcugaaugu

SEQ ID NO: 203509 - RNA, 19 nt, Homo sapiens
  misc_RNA (1)...(19): siRNA sense strand
gauauccugcagauuauua

SEQ ID NO: 203510 - RNA, 19 nt, Homo sapiens
  misc_RNA (1)...(19): siRNA sense strand
gagaagauguucgagacuu

SEQ ID NO: 203511 - RNA, 19 nt, Homo sapiens
  misc_RNA (1)...(19): siRNA sense strand
gcacuuuaauuaugacauc

SEQ ID NO: 203512 - RNA, 19 nt, Homo sapiens
  misc_RNA (1)...(19): siRNA sense strand
guaaagcacauuuggaaga

SEQ ID NO: 203513 - RNA, 19 nt, Homo sapiens
  misc_RNA (1)...(19): siRNA sense strand
gaauauugcacuccgacua

SEQ ID NO: 203514 - RNA, 19 nt, Homo sapiens
  misc_RNA (1)...(19): siRNA sense strand
uuauaggacugccaugaaa

SEQ ID NO: 203515 - RNA, 19 nt, Homo sapiens
  misc_RNA (1)...(19): siRNA sense strand
gggugaaguugcauccuuu

SEQ ID NO: 203516 - RNA, 19 nt, Homo sapiens
  misc_RNA (1)...(19): siRNA sense strand
gcaagagcacaacaauuug

SEQ ID NO: 203517 - RNA, 19 nt, Homo sapiens
  misc_RNA (1)...(19): siRNA sense strand
gcacaacaauuuggucaac

SEQ ID NO: 203518 - RNA, 19 nt, Homo sapiens
  misc_RNA (1)...(19): siRNA sense strand
agcaagagcacaacaauuu

SEQ ID NO: 203519 - RNA, 19 nt, Homo sapiens
  misc_RNA (1)...(19): siRNA sense strand
agaagauguucgagacuuu

SEQ ID NO: 203520 - RNA, 19 nt, Homo sapiens
  misc_RNA (1)...(19): siRNA sense strand
gagcaagagcacaacaauu

SEQ ID NO: 203521 - RNA, 19 nt, Homo sapiens
  misc_RNA (1)...(19): siRNA sense strand
ucaagcaaguggcaaguuc

SEQ ID NO: 203522 - RNA, 19 nt, Homo sapiens
  misc_RNA (1)...(19): siRNA sense strand
ccacgagacucaaacaacu

SEQ ID NO: 203523 - RNA, 19 nt, Homo sapiens
  misc_RNA (1)...(19): siRNA sense strand
cagcacaaccucaagcaaa

SEQ ID NO: 203524 - RNA, 19 nt, Homo sapiens
  misc_RNA (1)...(19): siRNA sense strand
gcaaagaguguccaaucau

SEQ ID NO: 203525 - RNA, 19 nt, Homo sapiens
  misc_RNA (1)...(19): siRNA sense strand
auggauauccugcagauua

SEQ ID NO: 203526 - RNA, 19 nt, Homo sapiens
  misc_RNA (1)...(19): siRNA sense strand
uguaacaucugcaaagagu

SEQ ID NO: 203527 - RNA, 19 nt, Homo sapiens
  misc_RNA (1)...(19): siRNA sense strand
guccggagcugcuuccaau

SEQ ID NO: 203528 - RNA, 19 nt, Homo sapiens
  misc_RNA (1)...(19): siRNA sense strand
gcaaguggcaaguucaaca

SEQ ID NO: 203529 - RNA, 19 nt, Homo sapiens
  misc_RNA (1)...(19): siRNA sense strand
gcuuccaauuugcuaauaa

SEQ ID NO: 203530 - RNA, 19 nt, Homo sapiens
  misc_RNA (1)...(19): siRNA sense strand
uggaagacaaguacagaua

SEQ ID NO: 203531 - RNA, 19 nt, Homo sapiens
  misc_RNA (1)...(19): siRNA sense strand
ggauccguguccugucuuu

SEQ ID NO: 203532 - RNA, 19 nt, Homo sapiens
  misc_RNA (1)...(19): siRNA sense strand
gucuuuagcugaccugaau

SEQ ID NO: 203533 - RNA, 19 nt, Homo sapiens
  misc_RNA (1)...(19): siRNA sense strand
gacaaguacagauaccuuu

SEQ ID NO: 203534 - RNA, 19 nt, Homo sapiens
  misc_RNA (1)...(19): siRNA sense strand
ccaagcaucaggccaaaug

SEQ ID NO: 203535 - RNA, 19 nt, Homo sapiens
  misc_RNA (1)...(19): siRNA sense strand
ggagcaagagcacaacaau

SEQ ID NO: 203536 - RNA, 19 nt, Homo sapiens
  misc_RNA (1)...(19): siRNA sense strand
guguaaagcacauuuggaa

SEQ ID NO: 203537 - RNA, 19 nt, Homo sapiens
  misc_RNA (1)...(19): siRNA sense strand
caagacaguugggugaagu

SEQ ID NO: 203538 - RNA, 19 nt, Homo sapiens
  misc_RNA (1)...(19): siRNA sense strand
gaagauguucgagacuuug

SEQ ID NO: 203539 - RNA, 19 nt, Homo sapiens
  misc_RNA (1)...(19): siRNA sense strand
gucagauucucagcuuaua

SEQ ID NO: 203540 - RNA, 19 nt, Homo sapiens
  misc_RNA (1)...(19): siRNA sense strand
uaacaucugcaaagagugu

SEQ ID NO: 203541 - RNA, 19 nt, Homo sapiens
  misc_RNA (1)...(19): siRNA sense strand
cggagcugcuuccaauuug

SEQ ID NO: 203542 - RNA, 19 nt, Homo sapiens
  misc_RNA (1)...(19): siRNA sense strand
gaagacaaguacagauacc

SEQ ID NO: 203543 - RNA, 19 nt, Homo sapiens
  misc_RNA (1)...(19): siRNA sense strand
ccauggauauccugcagau

SEQ ID NO: 203544 - RNA, 19 nt, Homo sapiens
  misc_RNA (1)...(19): siRNA sense strand
ggcaucauuucccugugua

SEQ ID NO: 203545 - RNA, 19 nt, Homo sapiens
  misc_RNA (1)...(19): siRNA sense strand
uggauauccugcagauuau

SEQ ID NO: 203546 - RNA, 19 nt, Homo sapiens
  misc_RNA (1)...(19): siRNA sense strand
ggaagacaaguacagauac

SEQ ID NO: 203547 - RNA, 19 nt, Homo sapiens
  misc_RNA (1)...(19): siRNA sense strand
ugcaaagaguguccaauca

SEQ ID NO: 203548 - RNA, 19 nt, Homo sapiens
  misc_RNA (1)...(19): siRNA sense strand
guggauaugugucugaacu

SEQ ID NO: 203549 - RNA, 19 nt, Homo sapiens
  misc_RNA (1)...(19): siRNA sense strand
acuggcugcugaauguuua

SEQ ID NO: 203550 - RNA, 19 nt, Homo sapiens
  misc_RNA (1)...(19): siRNA sense strand
acuaucccaugguggaaua

SEQ ID NO: 203551 - RNA, 19 nt, Homo sapiens
  misc_RNA (1)...(19): siRNA sense strand
ccggagcugcuuccaauuu

SEQ ID NO: 203552 - RNA, 19 nt, Homo sapiens
  misc_RNA (1)...(19): siRNA sense strand
ccaaauuccaagacaguug

SEQ ID NO: 203553 - RNA, 19 nt, Homo sapiens
  misc_RNA (1)...(19): siRNA sense strand
cagaaacugccaagcauca

SEQ ID NO: 203554 - RNA, 19 nt, Homo sapiens
  misc_RNA (1)...(19): siRNA sense strand
uaugacaucugccaaagcu

SEQ ID NO: 203555 - RNA, 19 nt, Homo sapiens
  misc_RNA (1)...(19): siRNA sense strand
aaugucagauucucagcuu

SEQ ID NO: 203556 - RNA, 19 nt, Homo sapiens
  misc_RNA (1)...(19): siRNA sense strand
ucgagacuuugccaaggua

SEQ ID NO: 203557 - RNA, 19 nt, Homo sapiens
  misc_RNA (1)...(19): siRNA sense strand
gcaaaaggccauaaaaugc

SEQ ID NO: 203558 - RNA, 19 nt, Homo sapiens
  misc_RNA (1)...(19): siRNA sense strand
cugcaugauucuauccaaa

SEQ ID NO: 203559 - RNA, 19 nt, Homo sapiens
  misc_RNA (1)...(19): siRNA sense strand
uaaagcacauuuggaagac

SEQ ID NO: 203560 - RNA, 19 nt, Homo sapiens
  misc_RNA (1)...(19): siRNA sense strand
acaggagucuaaagcacuu

SEQ ID NO: 203561 - RNA, 19 nt, Homo sapiens
  misc_RNA (1)...(19): siRNA sense strand
acagauaccuuuucaagca

SEQ ID NO: 203562 - RNA, 19 nt, Homo sapiens
  misc_RNA (1)...(19): siRNA sense strand
aagcacauuuggaagacaa

SEQ ID NO: 203563 - RNA, 19 nt, Homo sapiens
  misc_RNA (1)...(19): siRNA sense strand
gcuaauaauaagccagaga

SEQ ID NO: 203564 - RNA, 19 nt, Homo sapiens
  misc_RNA (1)...(19): siRNA sense strand
caagagcacaacaauuugg

SEQ ID NO: 203565 - RNA, 19 nt, Homo sapiens
  misc_RNA (1)...(19): siRNA sense strand
ccugucagcugcaugugau

SEQ ID NO: 203566 - RNA, 19 nt, Homo sapiens
  misc_RNA (1)...(19): siRNA sense strand
gcugcugaauguuuaugau

SEQ ID NO: 203567 - RNA, 19 nt, Homo sapiens
  misc_RNA (1)...(19): siRNA sense strand
acagagcucuaccagucuu

SEQ ID NO: 203568 - RNA, 19 nt, Homo sapiens
  misc_RNA (1)...(19): siRNA sense strand
acaguugggugaaguugca

SEQ ID NO: 203569 - RNA, 19 nt, Homo sapiens
  misc_RNA (1)...(19): siRNA sense strand
guuugaccacuauuuauga

SEQ ID NO: 203570 - RNA, 19 nt, Homo sapiens
  misc_RNA (1)...(19): siRNA sense strand
gcuuauaggacugccauga

SEQ ID NO: 203571 - RNA, 19 nt, Homo sapiens
  misc_RNA (1)...(19): siRNA sense strand
caucaggccaaauguaaca

SEQ ID NO: 203572 - RNA, 19 nt, Homo sapiens
  misc_RNA (1)...(19): siRNA sense strand
gauucuauccaaauuccaa

SEQ ID NO: 203573 - RNA, 19 nt, Homo sapiens
  misc_RNA (1)...(19): siRNA sense strand
ggcaaguucaacaggauuu

SEQ ID NO: 203574 - RNA, 19 nt, Homo sapiens
  misc_RNA (1)...(19): siRNA sense strand
gaacuggcugcugaauguu

SEQ ID NO: 203575 - RNA, 19 nt, Homo sapiens
  misc_RNA (1)...(19): siRNA sense strand
cugcugaauguuuaugaua

SEQ ID NO: 203576 - RNA, 19 nt, Homo sapiens
  misc_RNA (1)...(19): siRNA sense strand
aagcaucaggccaaaugua

SEQ ID NO: 203577 - RNA, 19 nt, Homo sapiens
  misc_RNA (1)...(19): siRNA sense strand
uggcaucauuucccugugu

SEQ ID NO: 203578 - RNA, 19 nt, Homo sapiens
  misc_RNA (1)...(19): siRNA sense strand
ccaugaaacuccgaagacu

SEQ ID NO: 203579 - RNA, 19 nt, Homo sapiens
  misc_RNA (1)...(19): siRNA sense strand
auaauaagccagagaucga

SEQ ID NO: 203580 - RNA, 19 nt, Homo sapiens
  misc_RNA (1)...(19): siRNA sense strand
cuaauaauaagccagagau

SEQ ID NO: 203581 - RNA, 19 nt, Homo sapiens
  misc_RNA (1)...(19): siRNA sense strand
ugggugaaguugcauccuu

SEQ ID NO: 203582 - RNA, 19 nt, Homo sapiens
  misc_RNA (1)...(19): siRNA sense strand
caucauuucccuguguaaa

SEQ ID NO: 203583 - RNA, 19 nt, Homo sapiens
  misc_RNA (1)...(19): siRNA sense strand
gcguggauaugugucugaa

SEQ ID NO: 203584 - RNA, 19 nt, Homo sapiens
  misc_RNA (1)...(19): siRNA sense strand
gcacuaucccaugguggaa

SEQ ID NO: 203585 - RNA, 19 nt, Homo sapiens
  misc_RNA (1)...(19): siRNA sense strand
gagccugucagcugcaugu

SEQ ID NO: 203586 - RNA, 19 nt, Homo sapiens
  misc_RNA (1)...(19): siRNA sense strand
guacagauaccuuuucaag

SEQ ID NO: 203587 - RNA, 19 nt, Homo sapiens
  misc_RNA (1)...(19): siRNA sense strand
gucccucucugcguggaua

SEQ ID NO: 203588 - RNA, 19 nt, Homo sapiens
  misc_RNA (1)...(19): siRNA sense strand
ggagcugcuuccaauuugc

SEQ ID NO: 203589 - RNA, 19 nt, Homo sapiens
  misc_RNA (1)...(19): siRNA sense strand
uuagcugaccugaauaaug

SEQ ID NO: 203590 - RNA, 19 nt, Homo sapiens
  misc_RNA (1)...(19): siRNA sense strand
guggcaaguucaacaggau

SEQ ID NO: 203591 - RNA, 19 nt, Homo sapiens
  misc_RNA (1)...(19): siRNA sense strand
acaacaauuuggucaacgu

SEQ ID NO: 203592 - RNA, 19 nt, Homo sapiens
  misc_RNA (1)...(19): siRNA sense strand
gacuacaucaggagaagau

SEQ ID NO: 203593 - RNA, 19 nt, Homo sapiens
  misc_RNA (1)...(19): siRNA sense strand
uaauaagccagagaucgaa

SEQ ID NO: 203594 - RNA, 19 nt, Homo sapiens
  misc_RNA (1)...(19): siRNA sense strand
ugucagauucucagcuuau

SEQ ID NO: 203595 - RNA, 19 nt, Homo sapiens
  misc_RNA (1)...(19): siRNA sense strand
ggauauccugcagauuauu

SEQ ID NO: 203596 - RNA, 19 nt, Homo sapiens
  misc_RNA (1)...(19): siRNA sense strand
agcaucaggccaaauguaa

SEQ ID NO: 203597 - RNA, 19 nt, Homo sapiens
  misc_RNA (1)...(19): siRNA sense strand
gcccuuugcuuggaucucu

SEQ ID NO: 203598 - RNA, 19 nt, Homo sapiens
  misc_RNA (1)...(19): siRNA sense strand
gcugaauguuuaugauacg

SEQ ID NO: 203599 - RNA, 19 nt, Homo sapiens
  misc_RNA (1)...(19): siRNA sense strand
agacuuugccaagguacua

SEQ ID NO: 203600 - RNA, 19 nt, Homo sapiens
  misc_RNA (1)...(19): siRNA sense strand
caagcaaguggcaaguuca

SEQ ID NO: 203601 - RNA, 19 nt, Homo sapiens
  misc_RNA (1)...(19): siRNA sense strand
agacaaguacagauaccuu

SEQ ID NO: 203602 - RNA, 19 nt, Homo sapiens
  misc_RNA (1)...(19): siRNA sense strand
gcaucauuucccuguguaa

SEQ ID NO: 203603 - RNA, 19 nt, Homo sapiens
  misc_RNA (1)...(19): siRNA sense strand
cugcaaagaguguccaauc

SEQ ID NO: 203604 - RNA, 19 nt, Homo sapiens
  misc_RNA (1)...(19): siRNA sense strand
cuuauaggacugccaugaa

SEQ ID NO: 203605 - RNA, 19 nt, Homo sapiens
  misc_RNA (1)...(19): siRNA sense strand
caaagaguguccaaucauu

SEQ ID NO: 203606 - RNA, 19 nt, Homo sapiens
  misc_RNA (1)...(19): siRNA sense strand
uagcugaccugaauaaugu

SEQ ID NO: 203607 - RNA, 19 nt, Homo sapiens
  misc_RNA (1)...(19): siRNA sense strand
gcaugauucuauccaaauu

SEQ ID NO: 203608 - RNA, 19 nt, Homo sapiens
  misc_RNA (1)...(19): siRNA sense strand
ugaacuggcugcugaaugu

SEQ ID NO: 203609 - RNA, 19 nt, Homo sapiens
  misc_RNA (1)...(19): siRNA sense strand
gauauccugcagauuauua

SEQ ID NO: 203610 - RNA, 19 nt, Homo sapiens
  misc_RNA (1)...(19): siRNA sense strand
gagaagauguucgagacuu

SEQ ID NO: 203611 - RNA, 19 nt, Homo sapiens
  misc_RNA (1)...(19): siRNA sense strand
gcacuuuaauuaugacauc

SEQ ID NO: 203612 - RNA, 19 nt, Homo sapiens
  misc_RNA (1)...(19): siRNA sense strand
guaaagcacauuuggaaga

SEQ ID NO: 203613 - RNA, 19 nt, Homo sapiens
  misc_RNA (1)...(19): siRNA sense strand
gaauauugcacuccgacua

SEQ ID NO: 203614 - RNA, 19 nt, Homo sapiens
  misc_RNA (1)...(19): siRNA sense strand
uuauaggacugccaugaaa

SEQ ID NO: 203615 - RNA, 19 nt, Homo sapiens
  misc_RNA (1)...(19): siRNA sense strand
gggugaaguugcauccuuu

SEQ ID NO: 203616 - RNA, 19 nt, Homo sapiens
  misc_RNA (1)...(19): siRNA sense strand
gcaagagcacaacaauuug

SEQ ID NO: 203617 - RNA, 19 nt, Homo sapiens
  misc_RNA (1)...(19): siRNA sense strand
gcacaacaauuuggucaac

SEQ ID NO: 203618 - RNA, 19 nt, Homo sapiens
  misc_RNA (1)...(19): siRNA sense strand
agcaagagcacaacaauuu

SEQ ID NO: 203619 - RNA, 19 nt, Homo sapiens
  misc_RNA (1)...(19): siRNA sense strand
agaagauguucgagacuuu

SEQ ID NO: 203620 - RNA, 19 nt, Homo sapiens
  misc_RNA (1)...(19): siRNA sense strand
gagcaagagcacaacaauu

SEQ ID NO: 203621 - RNA, 19 nt, Homo sapiens
  misc_RNA (1)...(19): siRNA sense strand
ucaagcaaguggcaaguuc

SEQ ID NO: 203622 - RNA, 19 nt, Homo sapiens
  misc_RNA (1)...(19): siRNA sense strand
ccacgagacucaaacaacu

SEQ ID NO: 203623 - RNA, 19 nt, Homo sapiens
  misc_RNA (1)...(19): siRNA sense strand
cagcacaaccucaagcaaa

SEQ ID NO: 203624 - RNA, 19 nt, Homo sapiens
  misc_RNA (1)...(19): siRNA sense strand
gcaaagaguguccaaucau

SEQ ID NO: 203625 - RNA, 19 nt, Homo sapiens
  misc_RNA (1)...(19): siRNA sense strand
auggauauccugcagauua

SEQ ID NO: 203626 - RNA, 19 nt, Homo sapiens
  misc_RNA (1)...(19): siRNA sense strand
uguaacaucugcaaagagu

SEQ ID NO: 203627 - RNA, 19 nt, Homo sapiens
  misc_RNA (1)...(19): siRNA sense strand
guccggagcugcuuccaau

SEQ ID NO: 203628 - RNA, 19 nt, Homo sapiens
  misc_RNA (1)...(19): siRNA sense strand
gcaaguggcaaguucaaca

SEQ ID NO: 203629 - RNA, 19 nt, Homo sapiens
  misc_RNA (1)...(19): siRNA sense strand
gcuuccaauuugcuaauaa

SEQ ID NO: 203630 - RNA, 19 nt, Homo sapiens
  misc_RNA (1)...(19): siRNA sense strand
uggaagacaaguacagaua

SEQ ID NO: 203631 - RNA, 19 nt, Homo sapiens
  misc_RNA (1)...(19): siRNA sense strand
ggauccguguccugucuuu

SEQ ID NO: 203632 - RNA, 19 nt, Homo sapiens
  misc_RNA (1)...(19): siRNA sense strand
gucuuuagcugaccugaau

SEQ ID NO: 203633 - RNA, 19 nt, Homo sapiens
  misc_RNA (1)...(19): siRNA sense strand
gacaaguacagauaccuuu

SEQ ID NO: 203634 - RNA, 19 nt, Homo sapiens
  misc_RNA (1)...(19): siRNA sense strand
ccaagcaucaggccaaaug

SEQ ID NO: 203635 - RNA, 19 nt, Homo sapiens
  misc_RNA (1)...(19): siRNA sense strand
ggagcaagagcacaacaau

SEQ ID NO: 203636 - RNA, 19 nt, Homo sapiens
  misc_RNA (1)...(19): siRNA sense strand
guguaaagcacauuuggaa

SEQ ID NO: 203637 - RNA, 19 nt, Homo sapiens
  misc_RNA (1)...(19): siRNA sense strand
caagacaguugggugaagu

SEQ ID NO: 203638 - RNA, 19 nt, Homo sapiens
  misc_RNA (1)...(19): siRNA sense strand
gaagauguucgagacuuug

SEQ ID NO: 203639 - RNA, 19 nt, Homo sapiens
  misc_RNA (1)...(19): siRNA sense strand
gucagauucucagcuuaua

SEQ ID NO: 203640 - RNA, 19 nt, Homo sapiens
  misc_RNA (1)...(19): siRNA sense strand
uaacaucugcaaagagugu

SEQ ID NO: 203641 - RNA, 19 nt, Homo sapiens
  misc_RNA (1)...(19): siRNA sense strand
cggagcugcuuccaauuug

SEQ ID NO: 203642 - RNA, 19 nt, Homo sapiens
  misc_RNA (1)...(19): siRNA sense strand
gaagacaaguacagauacc

SEQ ID NO: 203643 - RNA, 19 nt, Homo sapiens
  misc_RNA (1)...(19): siRNA sense strand
ccauggauauccugcagau

SEQ ID NO: 203644 - RNA, 19 nt, Homo sapiens
  misc_RNA (1)...(19): siRNA sense strand
ggcaucauuucccugugua

SEQ ID NO: 203645 - RNA, 19 nt, Homo sapiens
  misc_RNA (1)...(19): siRNA sense strand
uggauauccugcagauuau

SEQ ID NO: 203646 - RNA, 19 nt, Homo sapiens
  misc_RNA (1)...(19): siRNA sense strand
ggaagacaaguacagauac

SEQ ID NO: 203647 - RNA, 19 nt, Homo sapiens
  misc_RNA (1)...(19): siRNA sense strand
ugcaaagaguguccaauca

SEQ ID NO: 203648 - RNA, 19 nt, Homo sapiens
  misc_RNA (1)...(19): siRNA sense strand
guggauaugugucugaacu

SEQ ID NO: 203649 - RNA, 19 nt, Homo sapiens
  misc_RNA (1)...(19): siRNA sense strand
acuggcugcugaauguuua

SEQ ID NO: 203650 - RNA, 19 nt, Homo sapiens
  misc_RNA (1)...(19): siRNA sense strand
acuaucccaugguggaaua

SEQ ID NO: 203651 - RNA, 19 nt, Homo sapiens
  misc_RNA (1)...(19): siRNA sense strand
ccggagcugcuuccaauuu

SEQ ID NO: 203652 - RNA, 19 nt, Homo sapiens
  misc_RNA (1)...(19): siRNA sense strand
ccaaauuccaagacaguug

SEQ ID NO: 203653 - RNA, 19 nt, Homo sapiens
  misc_RNA (1)...(19): siRNA sense strand
cagaaacugccaagcauca

SEQ ID NO: 203654 - RNA, 19 nt, Homo sapiens
  misc_RNA (1)...(19): siRNA sense strand
uaugacaucugccaaagcu

SEQ ID NO: 203655 - RNA, 19 nt, Homo sapiens
  misc_RNA (1)...(19): siRNA sense strand
aaugucagauucucagcuu

SEQ ID NO: 203656 - RNA, 19 nt, Homo sapiens
  misc_RNA (1)...(19): siRNA sense strand
ucgagacuuugccaaggua

SEQ ID NO: 203657 - RNA, 19 nt, Homo sapiens
  misc_RNA (1)...(19): siRNA sense strand
gcaaaaggccauaaaaugc

SEQ ID NO: 203658 - RNA, 19 nt, Homo sapiens
  misc_RNA (1)...(19): siRNA sense strand
cugcaugauucuauccaaa

SEQ ID NO: 203659 - RNA, 19 nt, Homo sapiens
  misc_RNA (1)...(19): siRNA sense strand
uaaagcacauuuggaagac

SEQ ID NO: 203660 - RNA, 19 nt, Homo sapiens
  misc_RNA (1)...(19): siRNA sense strand
acaggagucuaaagcacuu

SEQ ID NO: 203661 - RNA, 19 nt, Homo sapiens
  misc_RNA (1)...(19): siRNA sense strand
acagauaccuuuucaagca

SEQ ID NO: 203662 - RNA, 19 nt, Homo sapiens
  misc_RNA (1)...(19): siRNA sense strand
aagcacauuuggaagacaa

SEQ ID NO: 203663 - RNA, 19 nt, Homo sapiens
  misc_RNA (1)...(19): siRNA sense strand
gcuaauaauaagccagaga

SEQ ID NO: 203664 - RNA, 19 nt, Homo sapiens
  misc_RNA (1)...(19): siRNA sense strand
caagagcacaacaauuugg

SEQ ID NO: 203665 - RNA, 19 nt, Homo sapiens
  misc_RNA (1)...(19): siRNA sense strand
ccugucagcugcaugugau

SEQ ID NO: 203666 - RNA, 19 nt, Homo sapiens
  misc_RNA (1)...(19): siRNA sense strand
gcugcugaauguuuaugau

SEQ ID NO: 203667 - RNA, 19 nt, Homo sapiens
  misc_RNA (1)...(19): siRNA sense strand
acagagcucuaccagucuu

SEQ ID NO: 203668 - RNA, 19 nt, Homo sapiens
  misc_RNA (1)...(19): siRNA sense strand
acaguugggugaaguugca

SEQ ID NO: 203669 - RNA, 19 nt, Homo sapiens
  misc_RNA (1)...(19): siRNA sense strand
guuugaccacuauuuauga

SEQ ID NO: 203670 - RNA, 19 nt, Homo sapiens
  misc_RNA (1)...(19): siRNA sense strand
gcuuauaggacugccauga

SEQ ID NO: 203671 - RNA, 19 nt, Homo sapiens
  misc_RNA (1)...(19): siRNA sense strand
caucaggccaaauguaaca

SEQ ID NO: 203672 - RNA, 19 nt, Homo sapiens
  misc_RNA (1)...(19): siRNA sense strand
gauucuauccaaauuccaa

SEQ ID NO: 203673 - RNA, 19 nt, Homo sapiens
  misc_RNA (1)...(19): siRNA sense strand
ggcaaguucaacaggauuu

SEQ ID NO: 203674 - RNA, 19 nt, Homo sapiens
  misc_RNA (1)...(19): siRNA sense strand
gaacuggcugcugaauguu

SEQ ID NO: 203675 - RNA, 19 nt, Homo sapiens
  misc_RNA (1)...(19): siRNA sense strand
cugcugaauguuuaugaua

SEQ ID NO: 203676 - RNA, 19 nt, Homo sapiens
  misc_RNA (1)...(19): siRNA sense strand
aagcaucaggccaaaugua

SEQ ID NO: 203677 - RNA, 19 nt, Homo sapiens
  misc_RNA (1)...(19): siRNA sense strand
uggcaucauuucccugugu

SEQ ID NO: 203678 - RNA, 19 nt, Homo sapiens
  misc_RNA (1)...(19): siRNA sense strand
ccaugaaacuccgaagacu

SEQ ID NO: 203679 - RNA, 19 nt, Homo sapiens
  misc_RNA (1)...(19): siRNA sense strand
auaauaagccagagaucga

SEQ ID NO: 203680 - RNA, 19 nt, Homo sapiens
  misc_RNA (1)...(19): siRNA sense strand
cuaauaauaagccagagau

SEQ ID NO: 203681 - RNA, 19 nt, Homo sapiens
  misc_RNA (1)...(19): siRNA sense strand
ugggugaaguugcauccuu

SEQ ID NO: 203682 - RNA, 19 nt, Homo sapiens
  misc_RNA (1)...(19): siRNA sense strand
caucauuucccuguguaaa

SEQ ID NO: 203683 - RNA, 19 nt, Homo sapiens
  misc_RNA (1)...(19): siRNA sense strand
gcguggauaugugucugaa

SEQ ID NO: 203684 - RNA, 19 nt, Homo sapiens
  misc_RNA (1)...(19): siRNA sense strand
gcacuaucccaugguggaa

SEQ ID NO: 203685 - RNA, 19 nt, Homo sapiens
  misc_RNA (1)...(19): siRNA sense strand
gagccugucagcugcaugu

SEQ ID NO: 203686 - RNA, 19 nt, Homo sapiens
  misc_RNA (1)...(19): siRNA sense strand
guacagauaccuuuucaag

SEQ ID NO: 203687 - RNA, 19 nt, Homo sapiens
  misc_RNA (1)...(19): siRNA sense strand
gucccucucugcguggaua

SEQ ID NO: 203688 - RNA, 19 nt, Homo sapiens
  misc_RNA (1)...(19): siRNA sense strand
ggagcugcuuccaauuugc

SEQ ID NO: 203689 - RNA, 19 nt, Homo sapiens
  misc_RNA (1)...(19): siRNA sense strand
uuagcugaccugaauaaug

SEQ ID NO: 203690 - RNA, 19 nt, Homo sapiens
  misc_RNA (1)...(19): siRNA sense strand
guggcaaguucaacaggau

SEQ ID NO: 203691 - RNA, 19 nt, Homo sapiens
  misc_RNA (1)...(19): siRNA sense strand
acaacaauuuggucaacgu

SEQ ID NO: 203692 - RNA, 19 nt, Homo sapiens
  misc_RNA (1)...(19): siRNA sense strand
gacuacaucaggagaagau

SEQ ID NO: 203693 - RNA, 19 nt, Homo sapiens
  misc_RNA (1)...(19): siRNA sense strand
uaauaagccagagaucgaa

SEQ ID NO: 203694 - RNA, 19 nt, Homo sapiens
  misc_RNA (1)...(19): siRNA sense strand
ugucagauucucagcuuau

SEQ ID NO: 203695 - RNA, 19 nt, Homo sapiens
  misc_RNA (1)...(19): siRNA sense strand
ggauauccugcagauuauu

SEQ ID NO: 203696 - RNA, 19 nt, Homo sapiens
  misc_RNA (1)...(19): siRNA sense strand
agcaucaggccaaauguaa

SEQ ID NO: 203697 - RNA, 19 nt, Homo sapiens
  misc_RNA (1)...(19): siRNA sense strand
gcccuuugcuuggaucucu

SEQ ID NO: 203698 - RNA, 19 nt, Homo sapiens
  misc_RNA (1)...(19): siRNA sense strand
gcugaauguuuaugauacg

SEQ ID NO: 203699 - RNA, 19 nt, Homo sapiens
  misc_RNA (1)...(19): siRNA sense strand
agacuuugccaagguacua

SEQ ID NO: 203700 - RNA, 19 nt, Homo sapiens
  misc_RNA (1)...(19): siRNA sense strand
caagcaaguggcaaguuca

SEQ ID NO: 203701 - RNA, 19 nt, Homo sapiens
  misc_RNA (1)...(19): siRNA sense strand
agacaaguacagauaccuu

SEQ ID NO: 203702 - RNA, 19 nt, Homo sapiens
  misc_RNA (1)...(19): siRNA sense strand
gcaucauuucccuguguaa

SEQ ID NO: 203703 - RNA, 19 nt, Homo sapiens
  misc_RNA (1)...(19): siRNA sense strand
cugcaaagaguguccaauc

SEQ ID NO: 203704 - RNA, 19 nt, Homo sapiens
  misc_RNA (1)...(19): siRNA sense strand
cuuauaggacugccaugaa

SEQ ID NO: 203705 - RNA, 19 nt, Homo sapiens
  misc_RNA (1)...(19): siRNA sense strand
caaagaguguccaaucauu

SEQ ID NO: 203706 - RNA, 19 nt, Homo sapiens
  misc_RNA (1)...(19): siRNA sense strand
uagcugaccugaauaaugu

SEQ ID NO: 203707 - RNA, 19 nt, Homo sapiens
  misc_RNA (1)...(19): siRNA sense strand
gcaugauucuauccaaauu

SEQ ID NO: 203708 - RNA, 19 nt, Homo sapiens
  misc_RNA (1)...(19): siRNA sense strand
ugaacuggcugcugaaugu

SEQ ID NO: 203709 - RNA, 19 nt, Homo sapiens
  misc_RNA (1)...(19): siRNA sense strand
gauauccugcagauuauua

SEQ ID NO: 203710 - RNA, 19 nt, Homo sapiens
  misc_RNA (1)...(19): siRNA sense strand
gagaagauguucgagacuu

SEQ ID NO: 203711 - RNA, 19 nt, Homo sapiens
  misc_RNA (1)...(19): siRNA sense strand
gcacuuuaauuaugacauc

SEQ ID NO: 203712 - RNA, 19 nt, Homo sapiens
  misc_RNA (1)...(19): siRNA sense strand
guaaagcacauuuggaaga

SEQ ID NO: 203713 - RNA, 19 nt, Homo sapiens
  misc_RNA (1)...(19): siRNA sense strand
gaauauugcacuccgacua

SEQ ID NO: 203714 - RNA, 19 nt, Homo sapiens
  misc_RNA (1)...(19): siRNA sense strand
uuauaggacugccaugaaa

SEQ ID NO: 203715 - RNA, 19 nt, Homo sapiens
  misc_RNA (1)...(19): siRNA sense strand
gggugaaguugcauccuuu

SEQ ID NO: 203716 - RNA, 19 nt, Homo sapiens
  misc_RNA (1)...(19): siRNA sense strand
gcaagagcacaacaauuug

SEQ ID NO: 203717 - RNA, 19 nt, Homo sapiens
  misc_RNA (1)...(19): siRNA sense strand
gcacaacaauuuggucaac

SEQ ID NO: 203718 - RNA, 19 nt, Homo sapiens
  misc_RNA (1)...(19): siRNA sense strand
agcaagagcacaacaauuu

SEQ ID NO: 203719 - RNA, 19 nt, Homo sapiens
  misc_RNA (1)...(19): siRNA sense strand
agaagauguucgagacuuu

SEQ ID NO: 203720 - RNA, 19 nt, Homo sapiens
  misc_RNA (1)...(19): siRNA sense strand
gagcaagagcacaacaauu

SEQ ID NO: 203721 - RNA, 19 nt, Homo sapiens
  misc_RNA (1)...(19): siRNA sense strand
ucaagcaaguggcaaguuc

SEQ ID NO: 203722 - RNA, 19 nt, Homo sapiens
  misc_RNA (1)...(19): siRNA sense strand
ccacgagacucaaacaacu

SEQ ID NO: 203723 - RNA, 19 nt, Homo sapiens
  misc_RNA (1)...(19): siRNA sense strand
cagcacaaccucaagcaaa

SEQ ID NO: 203724 - RNA, 19 nt, Homo sapiens
  misc_RNA (1)...(19): siRNA sense strand
gcaaagaguguccaaucau

SEQ ID NO: 203725 - RNA, 19 nt, Homo sapiens
  misc_RNA (1)...(19): siRNA sense strand
auggauauccugcagauua

SEQ ID NO: 203726 - RNA, 19 nt, Homo sapiens
  misc_RNA (1)...(19): siRNA sense strand
uguaacaucugcaaagagu

SEQ ID NO: 203727 - RNA, 19 nt, Homo sapiens
  misc_RNA (1)...(19): siRNA sense strand
guccggagcugcuuccaau

SEQ ID NO: 203728 - RNA, 19 nt, Homo sapiens
  misc_RNA (1)...(19): siRNA sense strand
gcaaguggcaaguucaaca

SEQ ID NO: 203729 - RNA, 19 nt, Homo sapiens
  misc_RNA (1)...(19): siRNA sense strand
gcuuccaauuugcuaauaa

SEQ ID NO: 203730 - RNA, 19 nt, Homo sapiens
  misc_RNA (1)...(19): siRNA sense strand
uggaagacaaguacagaua

SEQ ID NO: 203731 - RNA, 19 nt, Homo sapiens
  misc_RNA (1)...(19): siRNA sense strand
ggauccguguccugucuuu

SEQ ID NO: 203732 - RNA, 19 nt, Homo sapiens
  misc_RNA (1)...(19): siRNA sense strand
gucuuuagcugaccugaau

SEQ ID NO: 203733 - RNA, 19 nt, Homo sapiens
  misc_RNA (1)...(19): siRNA sense strand
gacaaguacagauaccuuu

SEQ ID NO: 203734 - RNA, 19 nt, Homo sapiens
  misc_RNA (1)...(19): siRNA sense strand
ccaagcaucaggccaaaug

SEQ ID NO: 203735 - RNA, 19 nt, Homo sapiens
  misc_RNA (1)...(19): siRNA sense strand
ggagcaagagcacaacaau

SEQ ID NO: 203736 - RNA, 19 nt, Homo sapiens
  misc_RNA (1)...(19): siRNA sense strand
guguaaagcacauuuggaa

SEQ ID NO: 203737 - RNA, 19 nt, Homo sapiens
  misc_RNA (1)...(19): siRNA sense strand
caagacaguugggugaagu

SEQ ID NO: 203738 - RNA, 19 nt, Homo sapiens
  misc_RNA (1)...(19): siRNA sense strand
gaagauguucgagacuuug

SEQ ID NO: 203739 - RNA, 19 nt, Homo sapiens
  misc_RNA (1)...(19): siRNA sense strand
gucagauucucagcuuaua

SEQ ID NO: 203740 - RNA, 19 nt, Homo sapiens
  misc_RNA (1)...(19): siRNA sense strand
uaacaucugcaaagagugu

SEQ ID NO: 203741 - RNA, 19 nt, Homo sapiens
  misc_RNA (1)...(19): siRNA sense strand
cggagcugcuuccaauuug

SEQ ID NO: 203742 - RNA, 19 nt, Homo sapiens
  misc_RNA (1)...(19): siRNA sense strand
gaagacaaguacagauacc

SEQ ID NO: 203743 - RNA, 19 nt, Homo sapiens
  misc_RNA (1)...(19): siRNA sense strand
ccauggauauccugcagau

SEQ ID NO: 203744 - RNA, 19 nt, Homo sapiens
  misc_RNA (1)...(19): siRNA sense strand
ggcaucauuucccugugua

SEQ ID NO: 203745 - RNA, 19 nt, Homo sapiens
  misc_RNA (1)...(19): siRNA sense strand
uggauauccugcagauuau

SEQ ID NO: 203746 - RNA, 19 nt, Homo sapiens
  misc_RNA (1)...(19): siRNA sense strand
ggaagacaaguacagauac

SEQ ID NO: 203747 - RNA, 19 nt, Homo sapiens
  misc_RNA (1)...(19): siRNA sense strand
ugcaaagaguguccaauca

SEQ ID NO: 203748 - RNA, 19 nt, Homo sapiens
  misc_RNA (1)...(19): siRNA sense strand
guggauaugugucugaacu

SEQ ID NO: 203749 - RNA, 19 nt, Homo sapiens
  misc_RNA (1)...(19): siRNA sense strand
acuggcugcugaauguuua

SEQ ID NO: 203750 - RNA, 19 nt, Homo sapiens
  misc_RNA (1)...(19): siRNA sense strand
acuaucccaugguggaaua

SEQ ID NO: 203751 - RNA, 19 nt, Homo sapiens
  misc_RNA (1)...(19): siRNA sense strand
ccggagcugcuuccaauuu

SEQ ID NO: 203752 - RNA, 19 nt, Homo sapiens
  misc_RNA (1)...(19): siRNA sense strand
ccaaauuccaagacaguug

SEQ ID NO: 203753 - RNA, 19 nt, Homo sapiens
  misc_RNA (1)...(19): siRNA sense strand
cagaaacugccaagcauca

SEQ ID NO: 203754 - RNA, 19 nt, Homo sapiens
  misc_RNA (1)...(19): siRNA sense strand
uaugacaucugccaaagcu

SEQ ID NO: 203755 - RNA, 19 nt, Homo sapiens
  misc_RNA (1)...(19): siRNA sense strand
aaugucagauucucagcuu

SEQ ID NO: 203756 - RNA, 19 nt, Homo sapiens
  misc_RNA (1)...(19): siRNA sense strand
ucgagacuuugccaaggua

SEQ ID NO: 203757 - RNA, 19 nt, Homo sapiens
  misc_RNA (1)...(19): siRNA sense strand
gcaaaaggccauaaaaugc

SEQ ID NO: 203758 - RNA, 19 nt, Homo sapiens
  misc_RNA (1)...(19): siRNA sense strand
cugcaugauucuauccaaa

SEQ ID NO: 203759 - RNA, 19 nt, Homo sapiens
  misc_RNA (1)...(19): siRNA sense strand
uaaagcacauuuggaagac

SEQ ID NO: 203760 - RNA, 19 nt, Homo sapiens
  misc_RNA (1)...(19): siRNA sense strand
acaggagucuaaagcacuu

SEQ ID NO: 203761 - RNA, 19 nt, Homo sapiens
  misc_RNA (1)...(19): siRNA sense strand
acagauaccuuuucaagca

SEQ ID NO: 203762 - RNA, 19 nt, Homo sapiens
  misc_RNA (1)...(19): siRNA sense strand
aagcacauuuggaagacaa

SEQ ID NO: 203763 - RNA, 19 nt, Homo sapiens
  misc_RNA (1)...(19): siRNA sense strand
gcuaauaauaagccagaga

SEQ ID NO: 203764 - RNA, 19 nt, Homo sapiens
  misc_RNA (1)...(19): siRNA sense strand
caagagcacaacaauuugg

SEQ ID NO: 203765 - RNA, 19 nt, Homo sapiens
  misc_RNA (1)...(19): siRNA sense strand
ccugucagcugcaugugau

SEQ ID NO: 203766 - RNA, 19 nt, Homo sapiens
  misc_RNA (1)...(19): siRNA sense strand
gcugcugaauguuuaugau

SEQ ID NO: 203767 - RNA, 19 nt, Homo sapiens
  misc_RNA (1)...(19): siRNA sense strand
acagagcucuaccagucuu

SEQ ID NO: 203768 - RNA, 19 nt, Homo sapiens
  misc_RNA (1)...(19): siRNA sense strand
acaguugggugaaguugca

SEQ ID NO: 203769 - RNA, 19 nt, Homo sapiens
  misc_RNA (1)...(19): siRNA sense strand
guuugaccacuauuuauga

SEQ ID NO: 203770 - RNA, 19 nt, Homo sapiens
  misc_RNA (1)...(19): siRNA sense strand
gcuuauaggacugccauga

SEQ ID NO: 203771 - RNA, 19 nt, Homo sapiens
  misc_RNA (1)...(19): siRNA sense strand
caucaggccaaauguaaca

SEQ ID NO: 203772 - RNA, 19 nt, Homo sapiens
  misc_RNA (1)...(19): siRNA sense strand
gauucuauccaaauuccaa

SEQ ID NO: 203773 - RNA, 19 nt, Homo sapiens
  misc_RNA (1)...(19): siRNA sense strand
ggcaaguucaacaggauuu

SEQ ID NO: 203774 - RNA, 19 nt, Homo sapiens
  misc_RNA (1)...(19): siRNA sense strand
gaacuggcugcugaauguu

SEQ ID NO: 203775 - RNA, 19 nt, Homo sapiens
  misc_RNA (1)...(19): siRNA sense strand
cugcugaauguuuaugaua

SEQ ID NO: 203776 - RNA, 19 nt, Homo sapiens
  misc_RNA (1)...(19): siRNA sense strand
aagcaucaggccaaaugua

SEQ ID NO: 203777 - RNA, 19 nt, Homo sapiens
  misc_RNA (1)...(19): siRNA sense strand
uggcaucauuucccugugu

SEQ ID NO: 203778 - RNA, 19 nt, Homo sapiens
  misc_RNA (1)...(19): siRNA sense strand
ccaugaaacuccgaagacu

SEQ ID NO: 203779 - RNA, 19 nt, Homo sapiens
  misc_RNA (1)...(19): siRNA sense strand
auaauaagccagagaucga

SEQ ID NO: 203780 - RNA, 19 nt, Homo sapiens
  misc_RNA (1)...(19): siRNA sense strand
cuaauaauaagccagagau

SEQ ID NO: 203781 - RNA, 19 nt, Homo sapiens
  misc_RNA (1)...(19): siRNA sense strand
ugggugaaguugcauccuu

SEQ ID NO: 203782 - RNA, 19 nt, Homo sapiens
  misc_RNA (1)...(19): siRNA sense strand
caucauuucccuguguaaa

SEQ ID NO: 203783 - RNA, 19 nt, Homo sapiens
  misc_RNA (1)...(19): siRNA sense strand
gcguggauaugugucugaa

SEQ ID NO: 203784 - RNA, 19 nt, Homo sapiens
  misc_RNA (1)...(19): siRNA sense strand
gcacuaucccaugguggaa

SEQ ID NO: 203785 - RNA, 19 nt, Homo sapiens
  misc_RNA (1)...(19): siRNA sense strand
gagccugucagcugcaugu

SEQ ID NO: 203786 - RNA, 19 nt, Homo sapiens
  misc_RNA (1)...(19): siRNA sense strand
guacagauaccuuuucaag

SEQ ID NO: 203787 - RNA, 19 nt, Homo sapiens
  misc_RNA (1)...(19): siRNA sense strand
gucccucucugcguggaua

SEQ ID NO: 203788 - RNA, 19 nt, Homo sapiens
  misc_RNA (1)...(19): siRNA sense strand
ggagcugcuuccaauuugc

SEQ ID NO: 203789 - RNA, 19 nt, Homo sapiens
  misc_RNA (1)...(19): siRNA sense strand
uuagcugaccugaauaaug

SEQ ID NO: 203790 - RNA, 19 nt, Homo sapiens
  misc_RNA (1)...(19): siRNA sense strand
guggcaaguucaacaggau

SEQ ID NO: 203791 - RNA, 19 nt, Homo sapiens
  misc_RNA (1)...(19): siRNA sense strand
acaacaauuuggucaacgu

SEQ ID NO: 203792 - RNA, 19 nt, Homo sapiens
  misc_RNA (1)...(19): siRNA sense strand
gacuacaucaggagaagau

SEQ ID NO: 203793 - RNA, 19 nt, Homo sapiens
  misc_RNA (1)...(19): siRNA sense strand
uaauaagccagagaucgaa

SEQ ID NO: 203794 - RNA, 19 nt, Homo sapiens
  misc_RNA (1)...(19): siRNA sense strand
ugucagauucucagcuuau

SEQ ID NO: 203795 - RNA, 19 nt, Homo sapiens
  misc_RNA (1)...(19): siRNA sense strand
ggauauccugcagauuauu

SEQ ID NO: 203796 - RNA, 19 nt, Homo sapiens
  misc_RNA (1)...(19): siRNA sense strand
agcaucaggccaaauguaa

SEQ ID NO: 203797 - RNA, 19 nt, Homo sapiens
  misc_RNA (1)...(19): siRNA sense strand
gcccuuugcuuggaucucu

SEQ ID NO: 203798 - RNA, 19 nt, Homo sapiens
  misc_RNA (1)...(19): siRNA sense strand
gcugaauguuuaugauacg

SEQ ID NO: 203799 - RNA, 19 nt, Homo sapiens
  misc_RNA (1)...(19): siRNA sense strand
agacuuugccaagguacua

SEQ ID NO: 203800 - RNA, 19 nt, Homo sapiens
  misc_RNA (1)...(19): siRNA sense strand
caagcaaguggcaaguuca

SEQ ID NO: 203801 - RNA, 19 nt, Homo sapiens
  misc_RNA (1)...(19): siRNA sense strand
agacaaguacagauaccuu

SEQ ID NO: 203802 - RNA, 19 nt, Homo sapiens
  misc_RNA (1)...(19): siRNA sense strand
gcaucauuucccuguguaa

SEQ ID NO: 203803 - RNA, 19 nt, Homo sapiens
  misc_RNA (1)...(19): siRNA sense strand
cugcaaagaguguccaauc

SEQ ID NO: 203804 - RNA, 19 nt, Homo sapiens
  misc_RNA (1)...(19): siRNA sense strand
cuuauaggacugccaugaa

SEQ ID NO: 203805 - RNA, 19 nt, Homo sapiens
  misc_RNA (1)...(19): siRNA sense strand
caaagaguguccaaucauu

SEQ ID NO: 203806 - RNA, 19 nt, Homo sapiens
  misc_RNA (1)...(19): siRNA sense strand
uagcugaccugaauaaugu

SEQ ID NO: 203807 - RNA, 19 nt, Homo sapiens
  misc_RNA (1)...(19): siRNA sense strand
gcaugauucuauccaaauu

SEQ ID NO: 203808 - RNA, 19 nt, Homo sapiens
  misc_RNA (1)...(19): siRNA sense strand
ugaacuggcugcugaaugu

SEQ ID NO: 203809 - RNA, 19 nt, Homo sapiens
  misc_RNA (1)...(19): siRNA sense strand
gauauccugcagauuauua

SEQ ID NO: 203810 - RNA, 19 nt, Homo sapiens
  misc_RNA (1)...(19): siRNA sense strand
gagaagauguucgagacuu

SEQ ID NO: 203811 - RNA, 19 nt, Homo sapiens
  misc_RNA (1)...(19): siRNA sense strand
gcacuuuaauuaugacauc

SEQ ID NO: 203812 - RNA, 19 nt, Homo sapiens
  misc_RNA (1)...(19): siRNA sense strand
guaaagcacauuuggaaga

SEQ ID NO: 203813 - RNA, 19 nt, Homo sapiens
  misc_RNA (1)...(19): siRNA sense strand
gaauauugcacuccgacua

SEQ ID NO: 203814 - RNA, 19 nt, Homo sapiens
  misc_RNA (1)...(19): siRNA sense strand
uuauaggacugccaugaaa

SEQ ID NO: 203815 - RNA, 19 nt, Homo sapiens
  misc_RNA (1)...(19): siRNA sense strand
gggugaaguugcauccuuu

SEQ ID NO: 203816 - RNA, 19 nt, Homo sapiens
  misc_RNA (1)...(19): siRNA sense strand
gcaagagcacaacaauuug

SEQ ID NO: 203817 - RNA, 19 nt, Homo sapiens
  misc_RNA (1)...(19): siRNA sense strand
gcacaacaauuuggucaac

SEQ ID NO: 203818 - RNA, 19 nt, Homo sapiens
  misc_RNA (1)...(19): siRNA sense strand
agcaagagcacaacaauuu

SEQ ID NO: 203819 - RNA, 19 nt, Homo sapiens
  misc_RNA (1)...(19): siRNA sense strand
agaagauguucgagacuuu

SEQ ID NO: 203820 - RNA, 19 nt, Homo sapiens
  misc_RNA (1)...(19): siRNA sense strand
gagcaagagcacaacaauu

SEQ ID NO: 203821 - RNA, 19 nt, Homo sapiens
  misc_RNA (1)...(19): siRNA sense strand
ucaagcaaguggcaaguuc

SEQ ID NO: 203822 - RNA, 19 nt, Homo sapiens
  misc_RNA (1)...(19): siRNA sense strand
ccacgagacucaaacaacu

SEQ ID NO: 203823 - RNA, 19 nt, Homo sapiens
  misc_RNA (1)...(19): siRNA sense strand
cagcacaaccucaagcaaa

SEQ ID NO: 203824 - RNA, 19 nt, Homo sapiens
  misc_RNA (1)...(19): siRNA sense strand
gcaaagaguguccaaucau

SEQ ID NO: 203825 - RNA, 19 nt, Homo sapiens
  misc_RNA (1)...(19): siRNA sense strand
auggauauccugcagauua

SEQ ID NO: 203826 - RNA, 19 nt, Homo sapiens
  misc_RNA (1)...(19): siRNA sense strand
uguaacaucugcaaagagu

SEQ ID NO: 203827 - RNA, 19 nt, Homo sapiens
  misc_RNA (1)...(19): siRNA sense strand
guccggagcugcuuccaau

SEQ ID NO: 203828 - RNA, 19 nt, Homo sapiens
  misc_RNA (1)...(19): siRNA sense strand
gcaaguggcaaguucaaca

SEQ ID NO: 203829 - RNA, 19 nt, Homo sapiens
  misc_RNA (1)...(19): siRNA sense strand
gcuuccaauuugcuaauaa

SEQ ID NO: 203830 - RNA, 19 nt, Homo sapiens
  misc_RNA (1)...(19): siRNA sense strand
uggaagacaaguacagaua

SEQ ID NO: 203831 - RNA, 19 nt, Homo sapiens
  misc_RNA (1)...(19): siRNA sense strand
ggauccguguccugucuuu

SEQ ID NO: 203832 - RNA, 19 nt, Homo sapiens
  misc_RNA (1)...(19): siRNA sense strand
gucuuuagcugaccugaau

SEQ ID NO: 203833 - RNA, 19 nt, Homo sapiens
  misc_RNA (1)...(19): siRNA sense strand
gacaaguacagauaccuuu

SEQ ID NO: 203834 - RNA, 19 nt, Homo sapiens
  misc_RNA (1)...(19): siRNA sense strand
ccaagcaucaggccaaaug

SEQ ID NO: 203835 - RNA, 19 nt, Homo sapiens
  misc_RNA (1)...(19): siRNA sense strand
ggagcaagagcacaacaau

SEQ ID NO: 203836 - RNA, 19 nt, Homo sapiens
  misc_RNA (1)...(19): siRNA sense strand
guguaaagcacauuuggaa

SEQ ID NO: 203837 - RNA, 19 nt, Homo sapiens
  misc_RNA (1)...(19): siRNA sense strand
caagacaguugggugaagu

SEQ ID NO: 203838 - RNA, 19 nt, Homo sapiens
  misc_RNA (1)...(19): siRNA sense strand
gaagauguucgagacuuug

SEQ ID NO: 203839 - RNA, 19 nt, Homo sapiens
  misc_RNA (1)...(19): siRNA sense strand
gucagauucucagcuuaua

SEQ ID NO: 203840 - RNA, 19 nt, Homo sapiens
  misc_RNA (1)...(19): siRNA sense strand
uaacaucugcaaagagugu

SEQ ID NO: 203841 - RNA, 19 nt, Homo sapiens
  misc_RNA (1)...(19): siRNA sense strand
cggagcugcuuccaauuug

SEQ ID NO: 203842 - RNA, 19 nt, Homo sapiens
  misc_RNA (1)...(19): siRNA sense strand
gaagacaaguacagauacc

SEQ ID NO: 203843 - RNA, 19 nt, Homo sapiens
  misc_RNA (1)...(19): siRNA sense strand
ccauggauauccugcagau

SEQ ID NO: 203844 - RNA, 19 nt, Homo sapiens
  misc_RNA (1)...(19): siRNA sense strand
ggcaucauuucccugugua

SEQ ID NO: 203845 - RNA, 19 nt, Homo sapiens
  misc_RNA (1)...(19): siRNA sense strand
uggauauccugcagauuau

SEQ ID NO: 203846 - RNA, 19 nt, Homo sapiens
  misc_RNA (1)...(19): siRNA sense strand
ggaagacaaguacagauac

SEQ ID NO: 203847 - RNA, 19 nt, Homo sapiens
  misc_RNA (1)...(19): siRNA sense strand
ugcaaagaguguccaauca

SEQ ID NO: 203848 - RNA, 19 nt, Homo sapiens
  misc_RNA (1)...(19): siRNA sense strand
guggauaugugucugaacu

SEQ ID NO: 203849 - RNA, 19 nt, Homo sapiens
  misc_RNA (1)...(19): siRNA sense strand
acuggcugcugaauguuua

SEQ ID NO: 203850 - RNA, 19 nt, Homo sapiens
  misc_RNA (1)...(19): siRNA sense strand
acuaucccaugguggaaua

SEQ ID NO: 203851 - RNA, 19 nt, Homo sapiens
  misc_RNA (1)...(19): siRNA sense strand
ccggagcugcuuccaauuu

SEQ ID NO: 203852 - RNA, 19 nt, Homo sapiens
  misc_RNA (1)...(19): siRNA sense strand
ccaaauuccaagacaguug

SEQ ID NO: 203853 - RNA, 19 nt, Homo sapiens
  misc_RNA (1)...(19): siRNA sense strand
cagaaacugccaagcauca

SEQ ID NO: 203854 - RNA, 19 nt, Homo sapiens
  misc_RNA (1)...(19): siRNA sense strand
uaugacaucugccaaagcu

SEQ ID NO: 203855 - RNA, 19 nt, Homo sapiens
  misc_RNA (1)...(19): siRNA sense strand
aaugucagauucucagcuu

SEQ ID NO: 203856 - RNA, 19 nt, Homo sapiens
  misc_RNA (1)...(19): siRNA sense strand
ucgagacuuugccaaggua

SEQ ID NO: 203857 - RNA, 19 nt, Homo sapiens
  misc_RNA (1)...(19): siRNA sense strand
gcaaaaggccauaaaaugc

SEQ ID NO: 203858 - RNA, 19 nt, Homo sapiens
  misc_RNA (1)...(19): siRNA sense strand
cugcaugauucuauccaaa

SEQ ID NO: 203859 - RNA, 19 nt, Homo sapiens
  misc_RNA (1)...(19): siRNA sense strand
uaaagcacauuuggaagac

SEQ ID NO: 203860 - RNA, 19 nt, Homo sapiens
  misc_RNA (1)...(19): siRNA sense strand
acaggagucuaaagcacuu

SEQ ID NO: 203861 - RNA, 19 nt, Homo sapiens
  misc_RNA (1)...(19): siRNA sense strand
acagauaccuuuucaagca

SEQ ID NO: 203862 - RNA, 19 nt, Homo sapiens
  misc_RNA (1)...(19): siRNA sense strand
aagcacauuuggaagacaa

SEQ ID NO: 203863 - RNA, 19 nt, Homo sapiens
  misc_RNA (1)...(19): siRNA sense strand
gcuaauaauaagccagaga

SEQ ID NO: 203864 - RNA, 19 nt, Homo sapiens
  misc_RNA (1)...(19): siRNA sense strand
caagagcacaacaauuugg

SEQ ID NO: 203865 - RNA, 19 nt, Homo sapiens
  misc_RNA (1)...(19): siRNA sense strand
ccugucagcugcaugugau

SEQ ID NO: 203866 - RNA, 19 nt, Homo sapiens
  misc_RNA (1)...(19): siRNA sense strand
gcugcugaauguuuaugau

SEQ ID NO: 203867 - RNA, 19 nt, Homo sapiens
  misc_RNA (1)...(19): siRNA sense strand
acagagcucuaccagucuu

SEQ ID NO: 203868 - RNA, 19 nt, Homo sapiens
  misc_RNA (1)...(19): siRNA sense strand
acaguugggugaaguugca

SEQ ID NO: 203869 - RNA, 19 nt, Homo sapiens
  misc_RNA (1)...(19): siRNA sense strand
guuugaccacuauuuauga

SEQ ID NO: 203870 - RNA, 19 nt, Homo sapiens
  misc_RNA (1)...(19): siRNA sense strand
gcuuauaggacugccauga

SEQ ID NO: 203871 - RNA, 19 nt, Homo sapiens
  misc_RNA (1)...(19): siRNA sense strand
caucaggccaaauguaaca

SEQ ID NO: 203872 - RNA, 19 nt, Homo sapiens
  misc_RNA (1)...(19): siRNA sense strand
gauucuauccaaauuccaa

SEQ ID NO: 203873 - RNA, 19 nt, Homo sapiens
  misc_RNA (1)...(19): siRNA sense strand
ggcaaguucaacaggauuu

SEQ ID NO: 203874 - RNA, 19 nt, Homo sapiens
  misc_RNA (1)...(19): siRNA sense strand
gaacuggcugcugaauguu

SEQ ID NO: 203875 - RNA, 19 nt, Homo sapiens
  misc_RNA (1)...(19): siRNA sense strand
cugcugaauguuuaugaua

SEQ ID NO: 203876 - RNA, 19 nt, Homo sapiens
  misc_RNA (1)...(19): siRNA sense strand
aagcaucaggccaaaugua

SEQ ID NO: 203877 - RNA, 19 nt, Homo sapiens
  misc_RNA (1)...(19): siRNA sense strand
uggcaucauuucccugugu

SEQ ID NO: 203878 - RNA, 19 nt, Homo sapiens
  misc_RNA (1)...(19): siRNA sense strand
ccaugaaacuccgaagacu

SEQ ID NO: 203879 - RNA, 19 nt, Homo sapiens
  misc_RNA (1)...(19): siRNA sense strand
auaauaagccagagaucga

SEQ ID NO: 203880 - RNA, 19 nt, Homo sapiens
  misc_RNA (1)...(19): siRNA sense strand
cuaauaauaagccagagau

SEQ ID NO: 203881 - RNA, 19 nt, Homo sapiens
  misc_RNA (1)...(19): siRNA sense strand
ugggugaaguugcauccuu

SEQ ID NO: 203882 - RNA, 19 nt, Homo sapiens
  misc_RNA (1)...(19): siRNA sense strand
caucauuucccuguguaaa

SEQ ID NO: 203883 - RNA, 19 nt, Homo sapiens
  misc_RNA (1)...(19): siRNA sense strand
gcguggauaugugucugaa

SEQ ID NO: 203884 - RNA, 19 nt, Homo sapiens
  misc_RNA (1)...(19): siRNA sense strand
gcacuaucccaugguggaa

SEQ ID NO: 203885 - RNA, 19 nt, Homo sapiens
  misc_RNA (1)...(19): siRNA sense strand
gagccugucagcugcaugu

SEQ ID NO: 203886 - RNA, 19 nt, Homo sapiens
  misc_RNA (1)...(19): siRNA sense strand
guacagauaccuuuucaag

SEQ ID NO: 203887 - RNA, 19 nt, Homo sapiens
  misc_RNA (1)...(19): siRNA sense strand
gucccucucugcguggaua

SEQ ID NO: 203888 - RNA, 19 nt, Homo sapiens
  misc_RNA (1)...(19): siRNA sense strand
ggagcugcuuccaauuugc

SEQ ID NO: 203889 - RNA, 19 nt, Homo sapiens
  misc_RNA (1)...(19): siRNA sense strand
uuagcugaccugaauaaug

SEQ ID NO: 203890 - RNA, 19 nt, Homo sapiens
  misc_RNA (1)...(19): siRNA sense strand
guggcaaguucaacaggau

SEQ ID NO: 203891 - RNA, 19 nt, Homo sapiens
  misc_RNA (1)...(19): siRNA sense strand
acaacaauuuggucaacgu

SEQ ID NO: 203892 - RNA, 19 nt, Homo sapiens
  misc_RNA (1)...(19): siRNA sense strand
gacuacaucaggagaagau

SEQ ID NO: 203893 - RNA, 19 nt, Homo sapiens
  misc_RNA (1)...(19): siRNA sense strand
uaauaagccagagaucgaa

SEQ ID NO: 203894 - RNA, 19 nt, Homo sapiens
  misc_RNA (1)...(19): siRNA sense strand
ugucagauucucagcuuau

SEQ ID NO: 203895 - RNA, 19 nt, Homo sapiens
  misc_RNA (1)...(19): siRNA sense strand
ggauauccugcagauuauu

SEQ ID NO: 203896 - RNA, 19 nt, Homo sapiens
  misc_RNA (1)...(19): siRNA sense strand
agcaucaggccaaauguaa

SEQ ID NO: 203897 - RNA, 19 nt, Homo sapiens
  misc_RNA (1)...(19): siRNA sense strand
gcccuuugcuuggaucucu

SEQ ID NO: 203898 - RNA, 19 nt, Homo sapiens
  misc_RNA (1)...(19): siRNA sense strand
gcugaauguuuaugauacg

SEQ ID NO: 203899 - RNA, 19 nt, Homo sapiens
  misc_RNA (1)...(19): siRNA sense strand
agacuuugccaagguacua

SEQ ID NO: 203900 - RNA, 19 nt, Homo sapiens
  misc_RNA (1)...(19): siRNA sense strand
caagcaaguggcaaguuca

SEQ ID NO: 203901 - RNA, 19 nt, Homo sapiens
  misc_RNA (1)...(19): siRNA sense strand
agacaaguacagauaccuu

SEQ ID NO: 203902 - RNA, 19 nt, Homo sapiens
  misc_RNA (1)...(19): siRNA sense strand
gcaucauuucccuguguaa

SEQ ID NO: 203903 - RNA, 19 nt, Homo sapiens
  misc_RNA (1)...(19): siRNA sense strand
cugcaaagaguguccaauc

SEQ ID NO: 203904 - RNA, 19 nt, Homo sapiens
  misc_RNA (1)...(19): siRNA sense strand
cuuauaggacugccaugaa

SEQ ID NO: 203905 - RNA, 19 nt, Homo sapiens
  misc_RNA (1)...(19): siRNA sense strand
caaagaguguccaaucauu

SEQ ID NO: 203906 - RNA, 19 nt, Homo sapiens
  misc_RNA (1)...(19): siRNA sense strand
uagcugaccugaauaaugu

SEQ ID NO: 203907 - RNA, 19 nt, Homo sapiens
  misc_RNA (1)...(19): siRNA sense strand
gcaugauucuauccaaauu

SEQ ID NO: 203908 - RNA, 19 nt, Homo sapiens
  misc_RNA (1)...(19): siRNA sense strand
ugaacuggcugcugaaugu

SEQ ID NO: 203909 - RNA, 19 nt, Homo sapiens
  misc_RNA (1)...(19): siRNA sense strand
gauauccugcagauuauua

SEQ ID NO: 203910 - RNA, 19 nt, Homo sapiens
  misc_RNA (1)...(19): siRNA sense strand
gagaagauguucgagacuu

SEQ ID NO: 203911 - RNA, 19 nt, Homo sapiens
  misc_RNA (1)...(19): siRNA sense strand
gcacuuuaauuaugacauc

SEQ ID NO: 203912 - RNA, 19 nt, Homo sapiens
  misc_RNA (1)...(19): siRNA sense strand
guaaagcacauuuggaaga

SEQ ID NO: 203913 - RNA, 19 nt, Homo sapiens
  misc_RNA (1)...(19): siRNA sense strand
gaauauugcacuccgacua

SEQ ID NO: 203914 - RNA, 19 nt, Homo sapiens
  misc_RNA (1)...(19): siRNA sense strand
uuauaggacugccaugaaa

SEQ ID NO: 203915 - RNA, 19 nt, Homo sapiens
  misc_RNA (1)...(19): siRNA sense strand
gggugaaguugcauccuuu

SEQ ID NO: 203916 - RNA, 19 nt, Homo sapiens
  misc_RNA (1)...(19): siRNA sense strand
gcaagagcacaacaauuug

SEQ ID NO: 203917 - RNA, 19 nt, Homo sapiens
  misc_RNA (1)...(19): siRNA sense strand
gcacaacaauuuggucaac

SEQ ID NO: 203918 - RNA, 19 nt, Homo sapiens
  misc_RNA (1)...(19): siRNA sense strand
agcaagagcacaacaauuu

SEQ ID NO: 203919 - RNA, 19 nt, Homo sapiens
  misc_RNA (1)...(19): siRNA sense strand
agaagauguucgagacuuu

SEQ ID NO: 203920 - RNA, 19 nt, Homo sapiens
  misc_RNA (1)...(19): siRNA sense strand
gagcaagagcacaacaauu

SEQ ID NO: 203921 - RNA, 19 nt, Homo sapiens
  misc_RNA (1)...(19): siRNA sense strand
ucaagcaaguggcaaguuc

SEQ ID NO: 203922 - RNA, 19 nt, Homo sapiens
  misc_RNA (1)...(19): siRNA sense strand
ccacgagacucaaacaacu

SEQ ID NO: 203923 - RNA, 19 nt, Homo sapiens
  misc_RNA (1)...(19): siRNA sense strand
cagcacaaccucaagcaaa

SEQ ID NO: 203924 - RNA, 19 nt, Homo sapiens
  misc_RNA (1)...(19): siRNA sense strand
gcaaagaguguccaaucau

SEQ ID NO: 203925 - RNA, 19 nt, Homo sapiens
  misc_RNA (1)...(19): siRNA sense strand
auggauauccugcagauua

SEQ ID NO: 203926 - RNA, 19 nt, Homo sapiens
  misc_RNA (1)...(19): siRNA sense strand
uguaacaucugcaaagagu

SEQ ID NO: 203927 - RNA, 19 nt, Homo sapiens
  misc_RNA (1)...(19): siRNA sense strand
guccggagcugcuuccaau

SEQ ID NO: 203928 - RNA, 19 nt, Homo sapiens
  misc_RNA (1)...(19): siRNA sense strand
gcaaguggcaaguucaaca

SEQ ID NO: 203929 - RNA, 19 nt, Homo sapiens
  misc_RNA (1)...(19): siRNA sense strand
gcuuccaauuugcuaauaa

SEQ ID NO: 203930 - RNA, 19 nt, Homo sapiens
  misc_RNA (1)...(19): siRNA sense strand
uggaagacaaguacagaua

SEQ ID NO: 203931 - RNA, 19 nt, Homo sapiens
  misc_RNA (1)...(19): siRNA sense strand
ggauccguguccugucuuu

SEQ ID NO: 203932 - RNA, 19 nt, Homo sapiens
  misc_RNA (1)...(19): siRNA sense strand
gucuuuagcugaccugaau

SEQ ID NO: 203933 - RNA, 19 nt, Homo sapiens
  misc_RNA (1)...(19): siRNA sense strand
gacaaguacagauaccuuu

SEQ ID NO: 203934 - RNA, 19 nt, Homo sapiens
  misc_RNA (1)...(19): siRNA sense strand
ccaagcaucaggccaaaug

SEQ ID NO: 203935 - RNA, 19 nt, Homo sapiens
  misc_RNA (1)...(19): siRNA sense strand
ggagcaagagcacaacaau

SEQ ID NO: 203936 - RNA, 19 nt, Homo sapiens
  misc_RNA (1)...(19): siRNA sense strand
guguaaagcacauuuggaa

SEQ ID NO: 203937 - RNA, 19 nt, Homo sapiens
  misc_RNA (1)...(19): siRNA sense strand
caagacaguugggugaagu

SEQ ID NO: 203938 - RNA, 19 nt, Homo sapiens
  misc_RNA (1)...(19): siRNA sense strand
gaagauguucgagacuuug

SEQ ID NO: 203939 - RNA, 19 nt, Homo sapiens
  misc_RNA (1)...(19): siRNA sense strand
gucagauucucagcuuaua

SEQ ID NO: 203940 - RNA, 19 nt, Homo sapiens
  misc_RNA (1)...(19): siRNA sense strand
uaacaucugcaaagagugu

SEQ ID NO: 203941 - RNA, 19 nt, Homo sapiens
  misc_RNA (1)...(19): siRNA sense strand
cggagcugcuuccaauuug

SEQ ID NO: 203942 - RNA, 19 nt, Homo sapiens
  misc_RNA (1)...(19): siRNA sense strand
gaagacaaguacagauacc

SEQ ID NO: 203943 - RNA, 19 nt, Homo sapiens
  misc_RNA (1)...(19): siRNA sense strand
ccauggauauccugcagau

SEQ ID NO: 203944 - RNA, 19 nt, Homo sapiens
  misc_RNA (1)...(19): siRNA sense strand
ggcaucauuucccugugua

SEQ ID NO: 203945 - RNA, 19 nt, Homo sapiens
  misc_RNA (1)...(19): siRNA sense strand
uggauauccugcagauuau

SEQ ID NO: 203946 - RNA, 19 nt, Homo sapiens
  misc_RNA (1)...(19): siRNA sense strand
ggaagacaaguacagauac

SEQ ID NO: 203947 - RNA, 19 nt, Homo sapiens
  misc_RNA (1)...(19): siRNA sense strand
ugcaaagaguguccaauca

SEQ ID NO: 203948 - RNA, 19 nt, Homo sapiens
  misc_RNA (1)...(19): siRNA sense strand
guggauaugugucugaacu

SEQ ID NO: 203949 - RNA, 19 nt, Homo sapiens
  misc_RNA (1)...(19): siRNA sense strand
acuggcugcugaauguuua

SEQ ID NO: 203950 - RNA, 19 nt, Homo sapiens
  misc_RNA (1)...(19): siRNA sense strand
acuaucccaugguggaaua

SEQ ID NO: 203951 - RNA, 19 nt, Homo sapiens
  misc_RNA (1)...(19): siRNA sense strand
ccggagcugcuuccaauuu

SEQ ID NO: 203952 - RNA, 19 nt, Homo sapiens
  misc_RNA (1)...(19): siRNA sense strand
ccaaauuccaagacaguug

SEQ ID NO: 203953 - RNA, 19 nt, Homo sapiens
  misc_RNA (1)...(19): siRNA sense strand
cagaaacugccaagcauca

SEQ ID NO: 203954 - RNA, 19 nt, Homo sapiens
  misc_RNA (1)...(19): siRNA sense strand
uaugacaucugccaaagcu

SEQ ID NO: 203955 - RNA, 19 nt, Homo sapiens
  misc_RNA (1)...(19): siRNA sense strand
aaugucagauucucagcuu

SEQ ID NO: 203956 - RNA, 19 nt, Homo sapiens
  misc_RNA (1)...(19): siRNA sense strand
ucgagacuuugccaaggua

SEQ ID NO: 203957 - RNA, 19 nt, Homo sapiens
  misc_RNA (1)...(19): siRNA sense strand
gcaaaaggccauaaaaugc

SEQ ID NO: 203958 - RNA, 19 nt, Homo sapiens
  misc_RNA (1)...(19): siRNA sense strand
cugcaugauucuauccaaa

SEQ ID NO: 203959 - RNA, 19 nt, Homo sapiens
  misc_RNA (1)...(19): siRNA sense strand
uaaagcacauuuggaagac

SEQ ID NO: 203960 - RNA, 19 nt, Homo sapiens
  misc_RNA (1)...(19): siRNA sense strand
acaggagucuaaagcacuu

SEQ ID NO: 203961 - RNA, 19 nt, Homo sapiens
  misc_RNA (1)...(19): siRNA sense strand
acagauaccuuuucaagca

SEQ ID NO: 203962 - RNA, 19 nt, Homo sapiens
  misc_RNA (1)...(19): siRNA sense strand
aagcacauuuggaagacaa

SEQ ID NO: 203963 - RNA, 19 nt, Homo sapiens
  misc_RNA (1)...(19): siRNA sense strand
gcuaauaauaagccagaga

SEQ ID NO: 203964 - RNA, 19 nt, Homo sapiens
  misc_RNA (1)...(19): siRNA sense strand
caagagcacaacaauuugg

SEQ ID NO: 203965 - RNA, 19 nt, Homo sapiens
  misc_RNA (1)...(19): siRNA sense strand
ccugucagcugcaugugau

SEQ ID NO: 203966 - RNA, 19 nt, Homo sapiens
  misc_RNA (1)...(19): siRNA sense strand
gcugcugaauguuuaugau

SEQ ID NO: 203967 - RNA, 19 nt, Homo sapiens
  misc_RNA (1)...(19): siRNA sense strand
acagagcucuaccagucuu

SEQ ID NO: 203968 - RNA, 19 nt, Homo sapiens
  misc_RNA (1)...(19): siRNA sense strand
acaguugggugaaguugca

SEQ ID NO: 203969 - RNA, 19 nt, Homo sapiens
  misc_RNA (1)...(19): siRNA sense strand
guuugaccacuauuuauga

SEQ ID NO: 203970 - RNA, 19 nt, Homo sapiens
  misc_RNA (1)...(19): siRNA sense strand
gcuuauaggacugccauga

SEQ ID NO: 203971 - RNA, 19 nt, Homo sapiens
  misc_RNA (1)...(19): siRNA sense strand
caucaggccaaauguaaca

SEQ ID NO: 203972 - RNA, 19 nt, Homo sapiens
  misc_RNA (1)...(19): siRNA sense strand
gauucuauccaaauuccaa

SEQ ID NO: 203973 - RNA, 19 nt, Homo sapiens
  misc_RNA (1)...(19): siRNA sense strand
ggcaaguucaacaggauuu

SEQ ID NO: 203974 - RNA, 19 nt, Homo sapiens
  misc_RNA (1)...(19): siRNA sense strand
gaacuggcugcugaauguu

SEQ ID NO: 203975 - RNA, 19 nt, Homo sapiens
  misc_RNA (1)...(19): siRNA sense strand
cugcugaauguuuaugaua

SEQ ID NO: 203976 - RNA, 19 nt, Homo sapiens
  misc_RNA (1)...(19): siRNA sense strand
aagcaucaggccaaaugua

SEQ ID NO: 203977 - RNA, 19 nt, Homo sapiens
  misc_RNA (1)...(19): siRNA sense strand
uggcaucauuucccugugu

SEQ ID NO: 203978 - RNA, 19 nt, Homo sapiens
  misc_RNA (1)...(19): siRNA sense strand
ccaugaaacuccgaagacu

SEQ ID NO: 203979 - RNA, 19 nt, Homo sapiens
  misc_RNA (1)...(19): siRNA sense strand
auaauaagccagagaucga

SEQ ID NO: 203980 - RNA, 19 nt, Homo sapiens
  misc_RNA (1)...(19): siRNA sense strand
cuaauaauaagccagagau

SEQ ID NO: 203981 - RNA, 19 nt, Homo sapiens
  misc_RNA (1)...(19): siRNA sense strand
ugggugaaguugcauccuu

SEQ ID NO: 203982 - RNA, 19 nt, Homo sapiens
  misc_RNA (1)...(19): siRNA sense strand
caucauuucccuguguaaa

SEQ ID NO: 203983 - RNA, 19 nt, Homo sapiens
  misc_RNA (1)...(19): siRNA sense strand
gcguggauaugugucugaa

SEQ ID NO: 203984 - RNA, 19 nt, Homo sapiens
  misc_RNA (1)...(19): siRNA sense strand
gcacuaucccaugguggaa

SEQ ID NO: 203985 - RNA, 19 nt, Homo sapiens
  misc_RNA (1)...(19): siRNA sense strand
gagccugucagcugcaugu

SEQ ID NO: 203986 - RNA, 19 nt, Homo sapiens
  misc_RNA (1)...(19): siRNA sense strand
guacagauaccuuuucaag

SEQ ID NO: 203987 - RNA, 19 nt, Homo sapiens
  misc_RNA (1)...(19): siRNA sense strand
gucccucucugcguggaua

SEQ ID NO: 203988 - RNA, 19 nt, Homo sapiens
  misc_RNA (1)...(19): siRNA sense strand
ggagcugcuuccaauuugc

SEQ ID NO: 203989 - RNA, 19 nt, Homo sapiens
  misc_RNA (1)...(19): siRNA sense strand
uuagcugaccugaauaaug

SEQ ID NO: 203990 - RNA, 19 nt, Homo sapiens
  misc_RNA (1)...(19): siRNA sense strand
guggcaaguucaacaggau

SEQ ID NO: 203991 - RNA, 19 nt, Homo sapiens
  misc_RNA (1)...(19): siRNA sense strand
acaacaauuuggucaacgu

SEQ ID NO: 203992 - RNA, 19 nt, Homo sapiens
  misc_RNA (1)...(19): siRNA sense strand
gacuacaucaggagaagau

SEQ ID NO: 203993 - RNA, 19 nt, Homo sapiens
  misc_RNA (1)...(19): siRNA sense strand
uaauaagccagagaucgaa

SEQ ID NO: 203994 - RNA, 19 nt, Homo sapiens
  misc_RNA (1)...(19): siRNA sense strand
ugucagauucucagcuuau

SEQ ID NO: 203995 - RNA, 19 nt, Homo sapiens
  misc_RNA (1)...(19): siRNA sense strand
ggauauccugcagauuauu

SEQ ID NO: 203996 - RNA, 19 nt, Homo sapiens
  misc_RNA (1)...(19): siRNA sense strand
agcaucaggccaaauguaa

SEQ ID NO: 203997 - RNA, 19 nt, Homo sapiens
  misc_RNA (1)...(19): siRNA sense strand
gcccuuugcuuggaucucu

SEQ ID NO: 203998 - RNA, 19 nt, Homo sapiens
  misc_RNA (1)...(19): siRNA sense strand
gcugaauguuuaugauacg

SEQ ID NO: 203999 - RNA, 19 nt, Homo sapiens
  misc_RNA (1)...(19): siRNA sense strand
agacuuugccaagguacua

SEQ ID NO: 204000 - RNA, 19 nt, Homo sapiens
  misc_RNA (1)...(19): siRNA sense strand
caagcaaguggcaaguuca

SEQ ID NO: 204001 - RNA, 19 nt, Homo sapiens
  misc_RNA (1)...(19): siRNA sense strand
agacaaguacagauaccuu

SEQ ID NO: 204002 - RNA, 19 nt, Homo sapiens
  misc_RNA (1)...(19): siRNA sense strand
gcaucauuucccuguguaa

SEQ ID NO: 204003 - RNA, 19 nt, Homo sapiens
  misc_RNA (1)...(19): siRNA sense strand
cugcaaagaguguccaauc

SEQ ID NO: 204004 - RNA, 19 nt, Homo sapiens
  misc_RNA (1)...(19): siRNA sense strand
cuuauaggacugccaugaa

SEQ ID NO: 204005 - RNA, 19 nt, Homo sapiens
  misc_RNA (1)...(19): siRNA sense strand
caaagaguguccaaucauu

SEQ ID NO: 204006 - RNA, 19 nt, Homo sapiens
  misc_RNA (1)...(19): siRNA sense strand
uagcugaccugaauaaugu

SEQ ID NO: 204007 - RNA, 19 nt, Homo sapiens
  misc_RNA (1)...(19): siRNA sense strand
gcaugauucuauccaaauu

SEQ ID NO: 204008 - RNA, 19 nt, Homo sapiens
  misc_RNA (1)...(19): siRNA sense strand
ugaacuggcugcugaaugu

SEQ ID NO: 204009 - RNA, 19 nt, Homo sapiens
  misc_RNA (1)...(19): siRNA sense strand
gauauccugcagauuauua

SEQ ID NO: 204010 - RNA, 19 nt, Homo sapiens
  misc_RNA (1)...(19): siRNA sense strand
gagaagauguucgagacuu

SEQ ID NO: 204011 - RNA, 19 nt, Homo sapiens
  misc_RNA (1)...(19): siRNA sense strand
gcacuuuaauuaugacauc

SEQ ID NO: 204012 - RNA, 19 nt, Homo sapiens
  misc_RNA (1)...(19): siRNA sense strand
guaaagcacauuuggaaga

SEQ ID NO: 204013 - RNA, 19 nt, Homo sapiens
  misc_RNA (1)...(19): siRNA sense strand
gaauauugcacuccgacua

SEQ ID NO: 204014 - RNA, 19 nt, Homo sapiens
  misc_RNA (1)...(19): siRNA sense strand
uuauaggacugccaugaaa

SEQ ID NO: 204015 - RNA, 19 nt, Homo sapiens
  misc_RNA (1)...(19): siRNA sense strand
gggugaaguugcauccuuu

SEQ ID NO: 204016 - RNA, 19 nt, Homo sapiens
  misc_RNA (1)...(19): siRNA sense strand
gcaagagcacaacaauuug

SEQ ID NO: 204017 - RNA, 19 nt, Homo sapiens
  misc_RNA (1)...(19): siRNA sense strand
gcacaacaauuuggucaac

SEQ ID NO: 204018 - RNA, 19 nt, Homo sapiens
  misc_RNA (1)...(19): siRNA sense strand
agcaagagcacaacaauuu

SEQ ID NO: 204019 - RNA, 19 nt, Homo sapiens
  misc_RNA (1)...(19): siRNA sense strand
agaagauguucgagacuuu

SEQ ID NO: 204020 - RNA, 19 nt, Homo sapiens
  misc_RNA (1)...(19): siRNA sense strand
gagcaagagcacaacaauu

SEQ ID NO: 204021 - RNA, 19 nt, Homo sapiens
  misc_RNA (1)...(19): siRNA sense strand
ucaagcaaguggcaaguuc

SEQ ID NO: 204022 - RNA, 19 nt, Homo sapiens
  misc_RNA (1)...(19): siRNA sense strand
ccacgagacucaaacaacu

SEQ ID NO: 204023 - RNA, 19 nt, Homo sapiens
  misc_RNA (1)...(19): siRNA sense strand
cagcacaaccucaagcaaa

SEQ ID NO: 204024 - RNA, 19 nt, Homo sapiens
  misc_RNA (1)...(19): siRNA sense strand
gcaaagaguguccaaucau

SEQ ID NO: 204025 - RNA, 19 nt, Homo sapiens
  misc_RNA (1)...(19): siRNA sense strand
auggauauccugcagauua

SEQ ID NO: 204026 - RNA, 19 nt, Homo sapiens
  misc_RNA (1)...(19): siRNA sense strand
uguaacaucugcaaagagu

SEQ ID NO: 204027 - RNA, 19 nt, Homo sapiens
  misc_RNA (1)...(19): siRNA sense strand
guccggagcugcuuccaau

SEQ ID NO: 204028 - RNA, 19 nt, Homo sapiens
  misc_RNA (1)...(19): siRNA sense strand
gcaaguggcaaguucaaca

SEQ ID NO: 204029 - RNA, 19 nt, Homo sapiens
  misc_RNA (1)...(19): siRNA sense strand
gcuuccaauuugcuaauaa

SEQ ID NO: 204030 - RNA, 19 nt, Homo sapiens
  misc_RNA (1)...(19): siRNA sense strand
uggaagacaaguacagaua

SEQ ID NO: 204031 - RNA, 19 nt, Homo sapiens
  misc_RNA (1)...(19): siRNA sense strand
ggauccguguccugucuuu

SEQ ID NO: 204032 - RNA, 19 nt, Homo sapiens
  misc_RNA (1)...(19): siRNA sense strand
gucuuuagcugaccugaau

SEQ ID NO: 204033 - RNA, 19 nt, Homo sapiens
  misc_RNA (1)...(19): siRNA sense strand
gacaaguacagauaccuuu

SEQ ID NO: 204034 - RNA, 19 nt, Homo sapiens
  misc_RNA (1)...(19): siRNA sense strand
ccaagcaucaggccaaaug

SEQ ID NO: 204035 - RNA, 19 nt, Homo sapiens
  misc_RNA (1)...(19): siRNA sense strand
ggagcaagagcacaacaau

SEQ ID NO: 204036 - RNA, 19 nt, Homo sapiens
  misc_RNA (1)...(19): siRNA sense strand
guguaaagcacauuuggaa

SEQ ID NO: 204037 - RNA, 19 nt, Homo sapiens
  misc_RNA (1)...(19): siRNA sense strand
caagacaguugggugaagu

SEQ ID NO: 204038 - RNA, 19 nt, Homo sapiens
  misc_RNA (1)...(19): siRNA sense strand
gaagauguucgagacuuug

SEQ ID NO: 204039 - RNA, 19 nt, Homo sapiens
  misc_RNA (1)...(19): siRNA sense strand
gucagauucucagcuuaua

SEQ ID NO: 204040 - RNA, 19 nt, Homo sapiens
  misc_RNA (1)...(19): siRNA sense strand
uaacaucugcaaagagugu

SEQ ID NO: 204041 - RNA, 19 nt, Homo sapiens
  misc_RNA (1)...(19): siRNA sense strand
cggagcugcuuccaauuug

SEQ ID NO: 204042 - RNA, 19 nt, Homo sapiens
  misc_RNA (1)...(19): siRNA sense strand
gaagacaaguacagauacc

SEQ ID NO: 204043 - RNA, 19 nt, Homo sapiens
  misc_RNA (1)...(19): siRNA sense strand
ccauggauauccugcagau

SEQ ID NO: 204044 - RNA, 19 nt, Homo sapiens
  misc_RNA (1)...(19): siRNA sense strand
ggcaucauuucccugugua

SEQ ID NO: 204045 - RNA, 19 nt, Homo sapiens
  misc_RNA (1)...(19): siRNA sense strand
uggauauccugcagauuau

SEQ ID NO: 204046 - RNA, 19 nt, Homo sapiens
  misc_RNA (1)...(19): siRNA sense strand
ggaagacaaguacagauac

SEQ ID NO: 204047 - RNA, 19 nt, Homo sapiens
  misc_RNA (1)...(19): siRNA sense strand
ugcaaagaguguccaauca

SEQ ID NO: 204048 - RNA, 19 nt, Homo sapiens
  misc_RNA (1)...(19): siRNA sense strand
guggauaugugucugaacu

SEQ ID NO: 204049 - RNA, 19 nt, Homo sapiens
  misc_RNA (1)...(19): siRNA sense strand
acuggcugcugaauguuua

SEQ ID NO: 204050 - RNA, 19 nt, Homo sapiens
  misc_RNA (1)...(19): siRNA sense strand
acuaucccaugguggaaua

SEQ ID NO: 204051 - RNA, 19 nt, Homo sapiens
  misc_RNA (1)...(19): siRNA sense strand
ccggagcugcuuccaauuu

SEQ ID NO: 204052 - RNA, 19 nt, Homo sapiens
  misc_RNA (1)...(19): siRNA sense strand
ccaaauuccaagacaguug

SEQ ID NO: 204053 - RNA, 19 nt, Homo sapiens
  misc_RNA (1)...(19): siRNA sense strand
cagaaacugccaagcauca

SEQ ID NO: 204054 - RNA, 19 nt, Homo sapiens
  misc_RNA (1)...(19): siRNA sense strand
uaugacaucugccaaagcu

SEQ ID NO: 204055 - RNA, 19 nt, Homo sapiens
  misc_RNA (1)...(19): siRNA sense strand
aaugucagauucucagcuu

SEQ ID NO: 204056 - RNA, 19 nt, Homo sapiens
  misc_RNA (1)...(19): siRNA sense strand
ucgagacuuugccaaggua

SEQ ID NO: 204057 - RNA, 19 nt, Homo sapiens
  misc_RNA (1)...(19): siRNA sense strand
gcaaaaggccauaaaaugc

SEQ ID NO: 204058 - RNA, 19 nt, Homo sapiens
  misc_RNA (1)...(19): siRNA sense strand
cugcaugauucuauccaaa

SEQ ID NO: 204059 - RNA, 19 nt, Homo sapiens
  misc_RNA (1)...(19): siRNA sense strand
uaaagcacauuuggaagac

SEQ ID NO: 204060 - RNA, 19 nt, Homo sapiens
  misc_RNA (1)...(19): siRNA sense strand
acaggagucuaaagcacuu

SEQ ID NO: 204061 - RNA, 19 nt, Homo sapiens
  misc_RNA (1)...(19): siRNA sense strand
acagauaccuuuucaagca

SEQ ID NO: 204062 - RNA, 19 nt, Homo sapiens
  misc_RNA (1)...(19): siRNA sense strand
aagcacauuuggaagacaa

SEQ ID NO: 204063 - RNA, 19 nt, Homo sapiens
  misc_RNA (1)...(19): siRNA sense strand
gcuaauaauaagccagaga

SEQ ID NO: 204064 - RNA, 19 nt, Homo sapiens
  misc_RNA (1)...(19): siRNA sense strand
caagagcacaacaauuugg

SEQ ID NO: 204065 - RNA, 19 nt, Homo sapiens
  misc_RNA (1)...(19): siRNA sense strand
ccugucagcugcaugugau

SEQ ID NO: 204066 - RNA, 19 nt, Homo sapiens
  misc_RNA (1)...(19): siRNA sense strand
gcugcugaauguuuaugau

SEQ ID NO: 204067 - RNA, 19 nt, Homo sapiens
  misc_RNA (1)...(19): siRNA sense strand
acagagcucuaccagucuu

SEQ ID NO: 204068 - RNA, 19 nt, Homo sapiens
  misc_RNA (1)...(19): siRNA sense strand
acaguugggugaaguugca

SEQ ID NO: 204069 - RNA, 19 nt, Homo sapiens
  misc_RNA (1)...(19): siRNA sense strand
guuugaccacuauuuauga

SEQ ID NO: 204070 - RNA, 19 nt, Homo sapiens
  misc_RNA (1)...(19): siRNA sense strand
gcuuauaggacugccauga

SEQ ID NO: 204071 - RNA, 19 nt, Homo sapiens
  misc_RNA (1)...(19): siRNA sense strand
caucaggccaaauguaaca

SEQ ID NO: 204072 - RNA, 19 nt, Homo sapiens
  misc_RNA (1)...(19): siRNA sense strand
gauucuauccaaauuccaa

SEQ ID NO: 204073 - RNA, 19 nt, Homo sapiens
  misc_RNA (1)...(19): siRNA sense strand
ggcaaguucaacaggauuu

SEQ ID NO: 204074 - RNA, 19 nt, Homo sapiens
  misc_RNA (1)...(19): siRNA sense strand
gaacuggcugcugaauguu

SEQ ID NO: 204075 - RNA, 19 nt, Homo sapiens
  misc_RNA (1)...(19): siRNA sense strand
cugcugaauguuuaugaua

SEQ ID NO: 204076 - RNA, 19 nt, Homo sapiens
  misc_RNA (1)...(19): siRNA sense strand
aagcaucaggccaaaugua

SEQ ID NO: 204077 - RNA, 19 nt, Homo sapiens
  misc_RNA (1)...(19): siRNA sense strand
uggcaucauuucccugugu

SEQ ID NO: 204078 - RNA, 19 nt, Homo sapiens
  misc_RNA (1)...(19): siRNA sense strand
ccaugaaacuccgaagacu

SEQ ID NO: 204079 - RNA, 19 nt, Homo sapiens
  misc_RNA (1)...(19): siRNA sense strand
auaauaagccagagaucga

SEQ ID NO: 204080 - RNA, 19 nt, Homo sapiens
  misc_RNA (1)...(19): siRNA sense strand
cuaauaauaagccagagau

SEQ ID NO: 204081 - RNA, 19 nt, Homo sapiens
  misc_RNA (1)...(19): siRNA sense strand
ugggugaaguugcauccuu

SEQ ID NO: 204082 - RNA, 19 nt, Homo sapiens
  misc_RNA (1)...(19): siRNA sense strand
caucauuucccuguguaaa

SEQ ID NO: 204083 - RNA, 19 nt, Homo sapiens
  misc_RNA (1)...(19): siRNA sense strand
gcguggauaugugucugaa

SEQ ID NO: 204084 - RNA, 19 nt, Homo sapiens
  misc_RNA (1)...(19): siRNA sense strand
gcacuaucccaugguggaa

SEQ ID NO: 204085 - RNA, 19 nt, Homo sapiens
  misc_RNA (1)...(19): siRNA sense strand
gagccugucagcugcaugu

SEQ ID NO: 204086 - RNA, 19 nt, Homo sapiens
  misc_RNA (1)...(19): siRNA sense strand
guacagauaccuuuucaag

SEQ ID NO: 204087 - RNA, 19 nt, Homo sapiens
  misc_RNA (1)...(19): siRNA sense strand
gucccucucugcguggaua

SEQ ID NO: 204088 - RNA, 19 nt, Homo sapiens
  misc_RNA (1)...(19): siRNA sense strand
ggagcugcuuccaauuugc

SEQ ID NO: 204089 - RNA, 19 nt, Homo sapiens
  misc_RNA (1)...(19): siRNA sense strand
uuagcugaccugaauaaug

SEQ ID NO: 204090 - RNA, 19 nt, Homo sapiens
  misc_RNA (1)...(19): siRNA sense strand
guggcaaguucaacaggau

SEQ ID NO: 204091 - RNA, 19 nt, Homo sapiens
  misc_RNA (1)...(19): siRNA sense strand
acaacaauuuggucaacgu

SEQ ID NO: 204092 - RNA, 19 nt, Homo sapiens
  misc_RNA (1)...(19): siRNA sense strand
gacuacaucaggagaagau

SEQ ID NO: 204093 - RNA, 19 nt, Homo sapiens
  misc_RNA (1)...(19): siRNA sense strand
uaauaagccagagaucgaa

SEQ ID NO: 204094 - RNA, 19 nt, Homo sapiens
  misc_RNA (1)...(19): siRNA sense strand
ugucagauucucagcuuau

SEQ ID NO: 204095 - RNA, 19 nt, Homo sapiens
  misc_RNA (1)...(19): siRNA sense strand
ggauauccugcagauuauu

SEQ ID NO: 204096 - RNA, 19 nt, Homo sapiens
  misc_RNA (1)...(19): siRNA sense strand
agcaucaggccaaauguaa

SEQ ID NO: 204097 - RNA, 19 nt, Homo sapiens
  misc_RNA (1)...(19): siRNA sense strand
gcccuuugcuuggaucucu

SEQ ID NO: 204098 - RNA, 19 nt, Homo sapiens
  misc_RNA (1)...(19): siRNA sense strand
gcugaauguuuaugauacg

SEQ ID NO: 204099 - RNA, 19 nt, Homo sapiens
  misc_RNA (1)...(19): siRNA sense strand
agacuuugccaagguacua

SEQ ID NO: 204100 - RNA, 19 nt, Homo sapiens
  misc_RNA (1)...(19): siRNA sense strand
caagcaaguggcaaguuca

SEQ ID NO: 204101 - RNA, 19 nt, Homo sapiens
  misc_RNA (1)...(19): siRNA sense strand
agacaaguacagauaccuu

SEQ ID NO: 204102 - RNA, 19 nt, Homo sapiens
  misc_RNA (1)...(19): siRNA sense strand
gcaucauuucccuguguaa

SEQ ID NO: 204103 - RNA, 19 nt, Homo sapiens
  misc_RNA (1)...(19): siRNA sense strand
cugcaaagaguguccaauc

SEQ ID NO: 204104 - RNA, 19 nt, Homo sapiens
  misc_RNA (1)...(19): siRNA sense strand
cuuauaggacugccaugaa

SEQ ID NO: 204105 - RNA, 19 nt, Homo sapiens
  misc_RNA (1)...(19): siRNA sense strand
caaagaguguccaaucauu

SEQ ID NO: 204106 - RNA, 19 nt, Homo sapiens
  misc_RNA (1)...(19): siRNA sense strand
uagcugaccugaauaaugu

SEQ ID NO: 204107 - RNA, 19 nt, Homo sapiens
  misc_RNA (1)...(19): siRNA sense strand
gcaugauucuauccaaauu

SEQ ID NO: 204108 - RNA, 19 nt, Homo sapiens
  misc_RNA (1)...(19): siRNA sense strand
ugaacuggcugcugaaugu

SEQ ID NO: 204109 - RNA, 19 nt, Homo sapiens
  misc_RNA (1)...(19): siRNA sense strand
gauauccugcagauuauua

SEQ ID NO: 204110 - RNA, 19 nt, Homo sapiens
  misc_RNA (1)...(19): siRNA sense strand
gagaagauguucgagacuu

SEQ ID NO: 204111 - RNA, 19 nt, Homo sapiens
  misc_RNA (1)...(19): siRNA sense strand
gcacuuuaauuaugacauc

SEQ ID NO: 204112 - RNA, 19 nt, Homo sapiens
  misc_RNA (1)...(19): siRNA sense strand
guaaagcacauuuggaaga

SEQ ID NO: 204113 - RNA, 19 nt, Homo sapiens
  misc_RNA (1)...(19): siRNA sense strand
gaauauugcacuccgacua

SEQ ID NO: 204114 - RNA, 19 nt, Homo sapiens
  misc_RNA (1)...(19): siRNA sense strand
uuauaggacugccaugaaa

SEQ ID NO: 204115 - RNA, 19 nt, Homo sapiens
  misc_RNA (1)...(19): siRNA sense strand
gggugaaguugcauccuuu

SEQ ID NO: 204116 - RNA, 19 nt, Homo sapiens
  misc_RNA (1)...(19): siRNA sense strand
gcaagagcacaacaauuug

SEQ ID NO: 204117 - RNA, 19 nt, Homo sapiens
  misc_RNA (1)...(19): siRNA sense strand
gcacaacaauuuggucaac

SEQ ID NO: 204118 - RNA, 19 nt, Homo sapiens
  misc_RNA (1)...(19): siRNA sense strand
agcaagagcacaacaauuu

SEQ ID NO: 204119 - RNA, 19 nt, Homo sapiens
  misc_RNA (1)...(19): siRNA sense strand
agaagauguucgagacuuu

SEQ ID NO: 204120 - RNA, 19 nt, Homo sapiens
  misc_RNA (1)...(19): siRNA sense strand
gagcaagagcacaacaauu

SEQ ID NO: 204121 - RNA, 19 nt, Homo sapiens
  misc_RNA (1)...(19): siRNA sense strand
ucaagcaaguggcaaguuc

SEQ ID NO: 204122 - RNA, 19 nt, Homo sapiens
  misc_RNA (1)...(19): siRNA sense strand
ccacgagacucaaacaacu

SEQ ID NO: 204123 - RNA, 19 nt, Homo sapiens
  misc_RNA (1)...(19): siRNA sense strand
cagcacaaccucaagcaaa

SEQ ID NO: 204124 - RNA, 19 nt, Homo sapiens
  misc_RNA (1)...(19): siRNA sense strand
gcaaagaguguccaaucau

SEQ ID NO: 204125 - RNA, 19 nt, Homo sapiens
  misc_RNA (1)...(19): siRNA sense strand
auggauauccugcagauua

SEQ ID NO: 204126 - RNA, 19 nt, Homo sapiens
  misc_RNA (1)...(19): siRNA sense strand
uguaacaucugcaaagagu

SEQ ID NO: 204127 - RNA, 19 nt, Homo sapiens
  misc_RNA (1)...(19): siRNA sense strand
guccggagcugcuuccaau

SEQ ID NO: 204128 - RNA, 19 nt, Homo sapiens
  misc_RNA (1)...(19): siRNA sense strand
gcaaguggcaaguucaaca

SEQ ID NO: 204129 - RNA, 19 nt, Homo sapiens
  misc_RNA (1)...(19): siRNA sense strand
gcuuccaauuugcuaauaa

SEQ ID NO: 204130 - RNA, 19 nt, Homo sapiens
  misc_RNA (1)...(19): siRNA sense strand
uggaagacaaguacagaua

SEQ ID NO: 204131 - RNA, 19 nt, Homo sapiens
  misc_RNA (1)...(19): siRNA sense strand
ggauccguguccugucuuu

SEQ ID NO: 204132 - RNA, 19 nt, Homo sapiens
  misc_RNA (1)...(19): siRNA sense strand
gucuuuagcugaccugaau

SEQ ID NO: 204133 - RNA, 19 nt, Homo sapiens
  misc_RNA (1)...(19): siRNA sense strand
gacaaguacagauaccuuu

SEQ ID NO: 204134 - RNA, 19 nt, Homo sapiens
  misc_RNA (1)...(19): siRNA sense strand
ccaagcaucaggccaaaug

SEQ ID NO: 204135 - RNA, 19 nt, Homo sapiens
  misc_RNA (1)...(19): siRNA sense strand
ggagcaagagcacaacaau

SEQ ID NO: 204136 - RNA, 19 nt, Homo sapiens
  misc_RNA (1)...(19): siRNA sense strand
guguaaagcacauuuggaa

SEQ ID NO: 204137 - RNA, 19 nt, Homo sapiens
  misc_RNA (1)...(19): siRNA sense strand
caagacaguugggugaagu

SEQ ID NO: 204138 - RNA, 19 nt, Homo sapiens
  misc_RNA (1)...(19): siRNA sense strand
gaagauguucgagacuuug

SEQ ID NO: 204139 - RNA, 19 nt, Homo sapiens
  misc_RNA (1)...(19): siRNA sense strand
gucagauucucagcuuaua

SEQ ID NO: 204140 - RNA, 19 nt, Homo sapiens
  misc_RNA (1)...(19): siRNA sense strand
uaacaucugcaaagagugu

SEQ ID NO: 204141 - RNA, 19 nt, Homo sapiens
  misc_RNA (1)...(19): siRNA sense strand
cggagcugcuuccaauuug

SEQ ID NO: 204142 - RNA, 19 nt, Homo sapiens
  misc_RNA (1)...(19): siRNA sense strand
gaagacaaguacagauacc

SEQ ID NO: 204143 - RNA, 19 nt, Homo sapiens
  misc_RNA (1)...(19): siRNA sense strand
ccauggauauccugcagau

SEQ ID NO: 204144 - RNA, 19 nt, Homo sapiens
  misc_RNA (1)...(19): siRNA sense strand
ggcaucauuucccugugua

SEQ ID NO: 204145 - RNA, 19 nt, Homo sapiens
  misc_RNA (1)...(19): siRNA sense strand
uggauauccugcagauuau

SEQ ID NO: 204146 - RNA, 19 nt, Homo sapiens
  misc_RNA (1)...(19): siRNA sense strand
ggaagacaaguacagauac

SEQ ID NO: 204147 - RNA, 19 nt, Homo sapiens
  misc_RNA (1)...(19): siRNA sense strand
ugcaaagaguguccaauca

SEQ ID NO: 204148 - RNA, 19 nt, Homo sapiens
  misc_RNA (1)...(19): siRNA sense strand
guggauaugugucugaacu

SEQ ID NO: 204149 - RNA, 19 nt, Homo sapiens
  misc_RNA (1)...(19): siRNA sense strand
acuggcugcugaauguuua

SEQ ID NO: 204150 - RNA, 19 nt, Homo sapiens
  misc_RNA (1)...(19): siRNA sense strand
acuaucccaugguggaaua

SEQ ID NO: 204151 - RNA, 19 nt, Homo sapiens
  misc_RNA (1)...(19): siRNA sense strand
ccggagcugcuuccaauuu

SEQ ID NO: 204152 - RNA, 19 nt, Homo sapiens
  misc_RNA (1)...(19): siRNA sense strand
ccaaauuccaagacaguug

SEQ ID NO: 204153 - RNA, 19 nt, Homo sapiens
  misc_RNA (1)...(19): siRNA sense strand
cagaaacugccaagcauca

SEQ ID NO: 204154 - RNA, 19 nt, Homo sapiens
  misc_RNA (1)...(19): siRNA sense strand
uaugacaucugccaaagcu

SEQ ID NO: 204155 - RNA, 19 nt, Homo sapiens
  misc_RNA (1)...(19): siRNA sense strand
aaugucagauucucagcuu

SEQ ID NO: 204156 - RNA, 19 nt, Homo sapiens
  misc_RNA (1)...(19): siRNA sense strand
ucgagacuuugccaaggua

SEQ ID NO: 204157 - RNA, 19 nt, Homo sapiens
  misc_RNA (1)...(19): siRNA sense strand
gcaaaaggccauaaaaugc

SEQ ID NO: 204158 - RNA, 19 nt, Homo sapiens
  misc_RNA (1)...(19): siRNA sense strand
cugcaugauucuauccaaa

SEQ ID NO: 204159 - RNA, 19 nt, Homo sapiens
  misc_RNA (1)...(19): siRNA sense strand
uaaagcacauuuggaagac

SEQ ID NO: 204160 - RNA, 19 nt, Homo sapiens
  misc_RNA (1)...(19): siRNA sense strand
acaggagucuaaagcacuu

SEQ ID NO: 204161 - RNA, 19 nt, Homo sapiens
  misc_RNA (1)...(19): siRNA sense strand
acagauaccuuuucaagca

SEQ ID NO: 204162 - RNA, 19 nt, Homo sapiens
  misc_RNA (1)...(19): siRNA sense strand
aagcacauuuggaagacaa

SEQ ID NO: 204163 - RNA, 19 nt, Homo sapiens
  misc_RNA (1)...(19): siRNA sense strand
gcuaauaauaagccagaga

SEQ ID NO: 204164 - RNA, 19 nt, Homo sapiens
  misc_RNA (1)...(19): siRNA sense strand
caagagcacaacaauuugg

SEQ ID NO: 204165 - RNA, 19 nt, Homo sapiens
  misc_RNA (1)...(19): siRNA sense strand
ccugucagcugcaugugau

SEQ ID NO: 204166 - RNA, 19 nt, Homo sapiens
  misc_RNA (1)...(19): siRNA sense strand
gcugcugaauguuuaugau

SEQ ID NO: 204167 - RNA, 19 nt, Homo sapiens
  misc_RNA (1)...(19): siRNA sense strand
acagagcucuaccagucuu

SEQ ID NO: 204168 - RNA, 19 nt, Homo sapiens
  misc_RNA (1)...(19): siRNA sense strand
acaguugggugaaguugca

SEQ ID NO: 204169 - RNA, 19 nt, Homo sapiens
  misc_RNA (1)...(19): siRNA sense strand
guuugaccacuauuuauga

SEQ ID NO: 204170 - RNA, 19 nt, Homo sapiens
  misc_RNA (1)...(19): siRNA sense strand
gcuuauaggacugccauga

SEQ ID NO: 204171 - RNA, 19 nt, Homo sapiens
  misc_RNA (1)...(19): siRNA sense strand
caucaggccaaauguaaca

SEQ ID NO: 204172 - RNA, 19 nt, Homo sapiens
  misc_RNA (1)...(19): siRNA sense strand
gauucuauccaaauuccaa

SEQ ID NO: 204173 - RNA, 19 nt, Homo sapiens
  misc_RNA (1)...(19): siRNA sense strand
ggcaaguucaacaggauuu

SEQ ID NO: 204174 - RNA, 19 nt, Homo sapiens
  misc_RNA (1)...(19): siRNA sense strand
gaacuggcugcugaauguu

SEQ ID NO: 204175 - RNA, 19 nt, Homo sapiens
  misc_RNA (1)...(19): siRNA sense strand
cugcugaauguuuaugaua

SEQ ID NO: 204176 - RNA, 19 nt, Homo sapiens
  misc_RNA (1)...(19): siRNA sense strand
aagcaucaggccaaaugua

SEQ ID NO: 204177 - RNA, 19 nt, Homo sapiens
  misc_RNA (1)...(19): siRNA sense strand
uggcaucauuucccugugu

SEQ ID NO: 204178 - RNA, 19 nt, Homo sapiens
  misc_RNA (1)...(19): siRNA sense strand
ccaugaaacuccgaagacu

SEQ ID NO: 204179 - RNA, 19 nt, Homo sapiens
  misc_RNA (1)...(19): siRNA sense strand
auaauaagccagagaucga

SEQ ID NO: 204180 - RNA, 19 nt, Homo sapiens
  misc_RNA (1)...(19): siRNA sense strand
cuaauaauaagccagagau

SEQ ID NO: 204181 - RNA, 19 nt, Homo sapiens
  misc_RNA (1)...(19): siRNA sense strand
ugggugaaguugcauccuu

SEQ ID NO: 204182 - RNA, 19 nt, Homo sapiens
  misc_RNA (1)...(19): siRNA sense strand
caucauuucccuguguaaa

SEQ ID NO: 204183 - RNA, 19 nt, Homo sapiens
  misc_RNA (1)...(19): siRNA sense strand
gcguggauaugugucugaa

SEQ ID NO: 204184 - RNA, 19 nt, Homo sapiens
  misc_RNA (1)...(19): siRNA sense strand
gcacuaucccaugguggaa

SEQ ID NO: 204185 - RNA, 19 nt, Homo sapiens
  misc_RNA (1)...(19): siRNA sense strand
gagccugucagcugcaugu

SEQ ID NO: 204186 - RNA, 19 nt, Homo sapiens
  misc_RNA (1)...(19): siRNA sense strand
guacagauaccuuuucaag

SEQ ID NO: 204187 - RNA, 19 nt, Homo sapiens
  misc_RNA (1)...(19): siRNA sense strand
gucccucucugcguggaua

SEQ ID NO: 204188 - RNA, 19 nt, Homo sapiens
  misc_RNA (1)...(19): siRNA sense strand
ggagcugcuuccaauuugc

SEQ ID NO: 204189 - RNA, 19 nt, Homo sapiens
  misc_RNA (1)...(19): siRNA sense strand
uuagcugaccugaauaaug

SEQ ID NO: 204190 - RNA, 19 nt, Homo sapiens
  misc_RNA (1)...(19): siRNA sense strand
guggcaaguucaacaggau

SEQ ID NO: 204191 - RNA, 19 nt, Homo sapiens
  misc_RNA (1)...(19): siRNA sense strand
acaacaauuuggucaacgu

SEQ ID NO: 204192 - RNA, 19 nt, Homo sapiens
  misc_RNA (1)...(19): siRNA sense strand
gacuacaucaggagaagau

SEQ ID NO: 204193 - RNA, 19 nt, Homo sapiens
  misc_RNA (1)...(19): siRNA sense strand
uaauaagccagagaucgaa

SEQ ID NO: 204194 - RNA, 19 nt, Homo sapiens
  misc_RNA (1)...(19): siRNA sense strand
ugucagauucucagcuuau

SEQ ID NO: 204195 - RNA, 19 nt, Homo sapiens
  misc_RNA (1)...(19): siRNA sense strand
ggauauccugcagauuauu

SEQ ID NO: 204196 - RNA, 19 nt, Homo sapiens
  misc_RNA (1)...(19): siRNA sense strand
agcaucaggccaaauguaa

SEQ ID NO: 204197 - RNA, 19 nt, Homo sapiens
  misc_RNA (1)...(19): siRNA sense strand
gcccuuugcuuggaucucu

SEQ ID NO: 204198 - RNA, 19 nt, Homo sapiens
  misc_RNA (1)...(19): siRNA sense strand
gcugaauguuuaugauacg

SEQ ID NO: 204199 - RNA, 19 nt, Homo sapiens
  misc_RNA (1)...(19): siRNA sense strand
agacuuugccaagguacua

SEQ ID NO: 204200 - RNA, 19 nt, Homo sapiens
  misc_RNA (1)...(19): siRNA sense strand
caagcaaguggcaaguuca

SEQ ID NO: 204201 - RNA, 19 nt, Homo sapiens
  misc_RNA (1)...(19): siRNA sense strand
agacaaguacagauaccuu

SEQ ID NO: 204202 - RNA, 19 nt, Homo sapiens
  misc_RNA (1)...(19): siRNA sense strand
gcaucauuucccuguguaa

SEQ ID NO: 204203 - RNA, 19 nt, Homo sapiens
  misc_RNA (1)...(19): siRNA sense strand
cugcaaagaguguccaauc

SEQ ID NO: 204204 - RNA, 19 nt, Homo sapiens
  misc_RNA (1)...(19): siRNA sense strand
cuuauaggacugccaugaa

SEQ ID NO: 204205 - RNA, 19 nt, Homo sapiens
  misc_RNA (1)...(19): siRNA sense strand
caaagaguguccaaucauu

SEQ ID NO: 204206 - RNA, 19 nt, Homo sapiens
  misc_RNA (1)...(19): siRNA sense strand
uagcugaccugaauaaugu

SEQ ID NO: 204207 - RNA, 19 nt, Homo sapiens
  misc_RNA (1)...(19): siRNA sense strand
gcaugauucuauccaaauu

SEQ ID NO: 204208 - RNA, 19 nt, Homo sapiens
  misc_RNA (1)...(19): siRNA sense strand
ugaacuggcugcugaaugu

SEQ ID NO: 204209 - RNA, 19 nt, Homo sapiens
  misc_RNA (1)...(19): siRNA sense strand
gauauccugcagauuauua

SEQ ID NO: 204210 - RNA, 19 nt, Homo sapiens
  misc_RNA (1)...(19): siRNA sense strand
gagaagauguucgagacuu

SEQ ID NO: 204211 - RNA, 19 nt, Homo sapiens
  misc_RNA (1)...(19): siRNA sense strand
gcacuuuaauuaugacauc

SEQ ID NO: 204212 - RNA, 19 nt, Homo sapiens
  misc_RNA (1)...(19): siRNA sense strand
guaaagcacauuuggaaga

SEQ ID NO: 204213 - RNA, 19 nt, Homo sapiens
  misc_RNA (1)...(19): siRNA sense strand
gaauauugcacuccgacua

SEQ ID NO: 204214 - RNA, 19 nt, Homo sapiens
  misc_RNA (1)...(19): siRNA sense strand
uuauaggacugccaugaaa

SEQ ID NO: 204215 - RNA, 19 nt, Homo sapiens
  misc_RNA (1)...(19): siRNA sense strand
gggugaaguugcauccuuu

SEQ ID NO: 204216 - RNA, 19 nt, Homo sapiens
  misc_RNA (1)...(19): siRNA sense strand
gcaagagcacaacaauuug

SEQ ID NO: 204217 - RNA, 19 nt, Homo sapiens
  misc_RNA (1)...(19): siRNA sense strand
gcacaacaauuuggucaac

SEQ ID NO: 204218 - RNA, 19 nt, Homo sapiens
  misc_RNA (1)...(19): siRNA sense strand
agcaagagcacaacaauuu

SEQ ID NO: 204219 - RNA, 19 nt, Homo sapiens
  misc_RNA (1)...(19): siRNA sense strand
agaagauguucgagacuuu

SEQ ID NO: 204220 - RNA, 19 nt, Homo sapiens
  misc_RNA (1)...(19): siRNA sense strand
gagcaagagcacaacaauu

SEQ ID NO: 204221 - RNA, 19 nt, Homo sapiens
  misc_RNA (1)...(19): siRNA sense strand
ucaagcaaguggcaaguuc

SEQ ID NO: 204222 - RNA, 19 nt, Homo sapiens
  misc_RNA (1)...(19): siRNA sense strand
ccacgagacucaaacaacu

SEQ ID NO: 204223 - RNA, 19 nt, Homo sapiens
  misc_RNA (1)...(19): siRNA sense strand
cagcacaaccucaagcaaa

SEQ ID NO: 204224 - RNA, 19 nt, Homo sapiens
  misc_RNA (1)...(19): siRNA sense strand
gcaaagaguguccaaucau

SEQ ID NO: 204225 - RNA, 19 nt, Homo sapiens
  misc_RNA (1)...(19): siRNA sense strand
auggauauccugcagauua

SEQ ID NO: 204226 - RNA, 19 nt, Homo sapiens
  misc_RNA (1)...(19): siRNA sense strand
uguaacaucugcaaagagu

SEQ ID NO: 204227 - RNA, 19 nt, Homo sapiens
  misc_RNA (1)...(19): siRNA sense strand
guccggagcugcuuccaau

SEQ ID NO: 204228 - RNA, 19 nt, Homo sapiens
  misc_RNA (1)...(19): siRNA sense strand
gcaaguggcaaguucaaca

SEQ ID NO: 204229 - RNA, 19 nt, Homo sapiens
  misc_RNA (1)...(19): siRNA sense strand
gcuuccaauuugcuaauaa

SEQ ID NO: 204230 - RNA, 19 nt, Homo sapiens
  misc_RNA (1)...(19): siRNA sense strand
uggaagacaaguacagaua

SEQ ID NO: 204231 - RNA, 19 nt, Homo sapiens
  misc_RNA (1)...(19): siRNA sense strand
ggauccguguccugucuuu

SEQ ID NO: 204232 - RNA, 19 nt, Homo sapiens
  misc_RNA (1)...(19): siRNA sense strand
gucuuuagcugaccugaau

SEQ ID NO: 204233 - RNA, 19 nt, Homo sapiens
  misc_RNA (1)...(19): siRNA sense strand
gacaaguacagauaccuuu

SEQ ID NO: 204234 - RNA, 19 nt, Homo sapiens
  misc_RNA (1)...(19): siRNA sense strand
ccaagcaucaggccaaaug

SEQ ID NO: 204235 - RNA, 19 nt, Homo sapiens
  misc_RNA (1)...(19): siRNA sense strand
ggagcaagagcacaacaau

SEQ ID NO: 204236 - RNA, 19 nt, Homo sapiens
  misc_RNA (1)...(19): siRNA sense strand
guguaaagcacauuuggaa

SEQ ID NO: 204237 - RNA, 19 nt, Homo sapiens
  misc_RNA (1)...(19): siRNA sense strand
caagacaguugggugaagu

SEQ ID NO: 204238 - RNA, 19 nt, Homo sapiens
  misc_RNA (1)...(19): siRNA sense strand
gaagauguucgagacuuug

SEQ ID NO: 204239 - RNA, 19 nt, Homo sapiens
  misc_RNA (1)...(19): siRNA sense strand
gucagauucucagcuuaua

SEQ ID NO: 204240 - RNA, 19 nt, Homo sapiens
  misc_RNA (1)...(19): siRNA sense strand
uaacaucugcaaagagugu

SEQ ID NO: 204241 - RNA, 19 nt, Homo sapiens
  misc_RNA (1)...(19): siRNA sense strand
cggagcugcuuccaauuug

SEQ ID NO: 204242 - RNA, 19 nt, Homo sapiens
  misc_RNA (1)...(19): siRNA sense strand
gaagacaaguacagauacc

SEQ ID NO: 204243 - RNA, 19 nt, Homo sapiens
  misc_RNA (1)...(19): siRNA sense strand
ccauggauauccugcagau

SEQ ID NO: 204244 - RNA, 19 nt, Homo sapiens
  misc_RNA (1)...(19): siRNA sense strand
ggcaucauuucccugugua

SEQ ID NO: 204245 - RNA, 19 nt, Homo sapiens
  misc_RNA (1)...(19): siRNA sense strand
uggauauccugcagauuau

SEQ ID NO: 204246 - RNA, 19 nt, Homo sapiens
  misc_RNA (1)...(19): siRNA sense strand
ggaagacaaguacagauac

SEQ ID NO: 204247 - RNA, 19 nt, Homo sapiens
  misc_RNA (1)...(19): siRNA sense strand
ugcaaagaguguccaauca

SEQ ID NO: 204248 - RNA, 19 nt, Homo sapiens
  misc_RNA (1)...(19): siRNA sense strand
guggauaugugucugaacu

SEQ ID NO: 204249 - RNA, 19 nt, Homo sapiens
  misc_RNA (1)...(19): siRNA sense strand
acuggcugcugaauguuua

SEQ ID NO: 204250 - RNA, 19 nt, Homo sapiens
  misc_RNA (1)...(19): siRNA sense strand
acuaucccaugguggaaua

SEQ ID NO: 204251 - RNA, 19 nt, Homo sapiens
  misc_RNA (1)...(19): siRNA sense strand
ccggagcugcuuccaauuu

SEQ ID NO: 204252 - RNA, 19 nt, Homo sapiens
  misc_RNA (1)...(19): siRNA sense strand
ccaaauuccaagacaguug

SEQ ID NO: 204253 - RNA, 19 nt, Homo sapiens
  misc_RNA (1)...(19): siRNA sense strand
cagaaacugccaagcauca

SEQ ID NO: 204254 - RNA, 19 nt, Homo sapiens
  misc_RNA (1)...(19): siRNA sense strand
uaugacaucugccaaagcu

SEQ ID NO: 204255 - RNA, 19 nt, Homo sapiens
  misc_RNA (1)...(19): siRNA sense strand
aaugucagauucucagcuu

SEQ ID NO: 204256 - RNA, 19 nt, Homo sapiens
  misc_RNA (1)...(19): siRNA sense strand
ucgagacuuugccaaggua

SEQ ID NO: 204257 - RNA, 19 nt, Homo sapiens
  misc_RNA (1)...(19): siRNA sense strand
gcaaaaggccauaaaaugc

SEQ ID NO: 204258 - RNA, 19 nt, Homo sapiens
  misc_RNA (1)...(19): siRNA sense strand
cugcaugauucuauccaaa

SEQ ID NO: 204259 - RNA, 19 nt, Homo sapiens
  misc_RNA (1)...(19): siRNA sense strand
uaaagcacauuuggaagac

SEQ ID NO: 204260 - RNA, 19 nt, Homo sapiens
  misc_RNA (1)...(19): siRNA sense strand
acaggagucuaaagcacuu

SEQ ID NO: 204261 - RNA, 19 nt, Homo sapiens
  misc_RNA (1)...(19): siRNA sense strand
acagauaccuuuucaagca

SEQ ID NO: 204262 - RNA, 19 nt, Homo sapiens
  misc_RNA (1)...(19): siRNA sense strand
aagcacauuuggaagacaa

SEQ ID NO: 204263 - RNA, 19 nt, Homo sapiens
  misc_RNA (1)...(19): siRNA sense strand
gcuaauaauaagccagaga

SEQ ID NO: 204264 - RNA, 19 nt, Homo sapiens
  misc_RNA (1)...(19): siRNA sense strand
caagagcacaacaauuugg

SEQ ID NO: 204265 - RNA, 19 nt, Homo sapiens
  misc_RNA (1)...(19): siRNA sense strand
ccugucagcugcaugugau

SEQ ID NO: 204266 - RNA, 19 nt, Homo sapiens
  misc_RNA (1)...(19): siRNA sense strand
gcugcugaauguuuaugau

SEQ ID NO: 204267 - RNA, 19 nt, Homo sapiens
  misc_RNA (1)...(19): siRNA sense strand
acagagcucuaccagucuu

SEQ ID NO: 204268 - RNA, 19 nt, Homo sapiens
  misc_RNA (1)...(19): siRNA sense strand
acaguugggugaaguugca

SEQ ID NO: 204269 - RNA, 19 nt, Homo sapiens
  misc_RNA (1)...(19): siRNA sense strand
guuugaccacuauuuauga

SEQ ID NO: 204270 - RNA, 19 nt, Homo sapiens
  misc_RNA (1)...(19): siRNA sense strand
gcuuauaggacugccauga

SEQ ID NO: 204271 - RNA, 19 nt, Homo sapiens
  misc_RNA (1)...(19): siRNA sense strand
caucaggccaaauguaaca

SEQ ID NO: 204272 - RNA, 19 nt, Homo sapiens
  misc_RNA (1)...(19): siRNA sense strand
gauucuauccaaauuccaa

SEQ ID NO: 204273 - RNA, 19 nt, Homo sapiens
  misc_RNA (1)...(19): siRNA sense strand
ggcaaguucaacaggauuu

SEQ ID NO: 204274 - RNA, 19 nt, Homo sapiens
  misc_RNA (1)...(19): siRNA sense strand
gaacuggcugcugaauguu

SEQ ID NO: 204275 - RNA, 19 nt, Homo sapiens
  misc_RNA (1)...(19): siRNA sense strand
cugcugaauguuuaugaua

SEQ ID NO: 204276 - RNA, 19 nt, Homo sapiens
  misc_RNA (1)...(19): siRNA sense strand
aagcaucaggccaaaugua

SEQ ID NO: 204277 - RNA, 19 nt, Homo sapiens
  misc_RNA (1)...(19): siRNA sense strand
uggcaucauuucccugugu

SEQ ID NO: 204278 - RNA, 19 nt, Homo sapiens
  misc_RNA (1)...(19): siRNA sense strand
ccaugaaacuccgaagacu

SEQ ID NO: 204279 - RNA, 19 nt, Homo sapiens
  misc_RNA (1)...(19): siRNA sense strand
auaauaagccagagaucga

SEQ ID NO: 204280 - RNA, 19 nt, Homo sapiens
  misc_RNA (1)...(19): siRNA sense strand
cuaauaauaagccagagau

SEQ ID NO: 204281 - RNA, 19 nt, Homo sapiens
  misc_RNA (1)...(19): siRNA sense strand
ugggugaaguugcauccuu

SEQ ID NO: 204282 - RNA, 19 nt, Homo sapiens
  misc_RNA (1)...(19): siRNA sense strand
caucauuucccuguguaaa

SEQ ID NO: 204283 - RNA, 19 nt, Homo sapiens
  misc_RNA (1)...(19): siRNA sense strand
gcguggauaugugucugaa

SEQ ID NO: 204284 - RNA, 19 nt, Homo sapiens
  misc_RNA (1)...(19): siRNA sense strand
gcacuaucccaugguggaa

SEQ ID NO: 204285 - RNA, 19 nt, Homo sapiens
  misc_RNA (1)...(19): siRNA sense strand
gagccugucagcugcaugu

SEQ ID NO: 204286 - RNA, 19 nt, Homo sapiens
  misc_RNA (1)...(19): siRNA sense strand
guacagauaccuuuucaag

SEQ ID NO: 204287 - RNA, 19 nt, Homo sapiens
  misc_RNA (1)...(19): siRNA sense strand
gucccucucugcguggaua

SEQ ID NO: 204288 - RNA, 19 nt, Homo sapiens
  misc_RNA (1)...(19): siRNA sense strand
ggagcugcuuccaauuugc

SEQ ID NO: 204289 - RNA, 19 nt, Homo sapiens
  misc_RNA (1)...(19): siRNA sense strand
uuagcugaccugaauaaug

SEQ ID NO: 204290 - RNA, 19 nt, Homo sapiens
  misc_RNA (1)...(19): siRNA sense strand
guggcaaguucaacaggau

SEQ ID NO: 204291 - RNA, 19 nt, Homo sapiens
  misc_RNA (1)...(19): siRNA sense strand
acaacaauuuggucaacgu

SEQ ID NO: 204292 - RNA, 19 nt, Homo sapiens
  misc_RNA (1)...(19): siRNA sense strand
gacuacaucaggagaagau

SEQ ID NO: 204293 - RNA, 19 nt, Homo sapiens
  misc_RNA (1)...(19): siRNA sense strand
uaauaagccagagaucgaa

SEQ ID NO: 204294 - RNA, 19 nt, Homo sapiens
  misc_RNA (1)...(19): siRNA sense strand
ugucagauucucagcuuau

SEQ ID NO: 204295 - RNA, 19 nt, Homo sapiens
  misc_RNA (1)...(19): siRNA sense strand
ggauauccugcagauuauu

SEQ ID NO: 204296 - RNA, 19 nt, Homo sapiens
  misc_RNA (1)...(19): siRNA sense strand
agcaucaggccaaauguaa

SEQ ID NO: 204297 - RNA, 19 nt, Homo sapiens
  misc_RNA (1)...(19): siRNA sense strand
gcccuuugcuuggaucucu

SEQ ID NO: 204298 - RNA, 19 nt, Homo sapiens
  misc_RNA (1)...(19): siRNA sense strand
gcugaauguuuaugauacg

SEQ ID NO: 204299 - RNA, 19 nt, Homo sapiens
  misc_RNA (1)...(19): siRNA sense strand
agacuuugccaagguacua

SEQ ID NO: 204300 - RNA, 19 nt, Homo sapiens
  misc_RNA (1)...(19): siRNA sense strand
caagcaaguggcaaguuca

SEQ ID NO: 204301 - RNA, 19 nt, Homo sapiens
  misc_RNA (1)...(19): siRNA sense strand
agacaaguacagauaccuu

SEQ ID NO: 204302 - RNA, 19 nt, Homo sapiens
  misc_RNA (1)...(19): siRNA sense strand
gcaucauuucccuguguaa

SEQ ID NO: 204303 - RNA, 19 nt, Homo sapiens
  misc_RNA (1)...(19): siRNA sense strand
cugcaaagaguguccaauc

SEQ ID NO: 204304 - RNA, 19 nt, Homo sapiens
  misc_RNA (1)...(19): siRNA sense strand
cuuauaggacugccaugaa

SEQ ID NO: 204305 - RNA, 19 nt, Homo sapiens
  misc_RNA (1)...(19): siRNA sense strand
caaagaguguccaaucauu

SEQ ID NO: 204306 - RNA, 19 nt, Homo sapiens
  misc_RNA (1)...(19): siRNA sense strand
uagcugaccugaauaaugu

SEQ ID NO: 204307 - RNA, 19 nt, Homo sapiens
  misc_RNA (1)...(19): siRNA sense strand
gcaugauucuauccaaauu

SEQ ID NO: 204308 - RNA, 19 nt, Homo sapiens
  misc_RNA (1)...(19): siRNA sense strand
ugaacuggcugcugaaugu

SEQ ID NO: 204309 - RNA, 19 nt, Homo sapiens
  misc_RNA (1)...(19): siRNA sense strand
gauauccugcagauuauua

SEQ ID NO: 204310 - RNA, 19 nt, Homo sapiens
  misc_RNA (1)...(19): siRNA sense strand
gagaagauguucgagacuu

SEQ ID NO: 204311 - RNA, 19 nt, Homo sapiens
  misc_RNA (1)...(19): siRNA sense strand
gcacuuuaauuaugacauc

SEQ ID NO: 204312 - RNA, 19 nt, Homo sapiens
  misc_RNA (1)...(19): siRNA sense strand
guaaagcacauuuggaaga

SEQ ID NO: 204313 - RNA, 19 nt, Homo sapiens
  misc_RNA (1)...(19): siRNA sense strand
gaauauugcacuccgacua

SEQ ID NO: 204314 - RNA, 19 nt, Homo sapiens
  misc_RNA (1)...(19): siRNA sense strand
uuauaggacugccaugaaa

SEQ ID NO: 204315 - RNA, 19 nt, Homo sapiens
  misc_RNA (1)...(19): siRNA sense strand
gggugaaguugcauccuuu

SEQ ID NO: 204316 - RNA, 19 nt, Homo sapiens
  misc_RNA (1)...(19): siRNA sense strand
gcaagagcacaacaauuug

SEQ ID NO: 204317 - RNA, 19 nt, Homo sapiens
  misc_RNA (1)...(19): siRNA sense strand
gcacaacaauuuggucaac

SEQ ID NO: 204318 - RNA, 19 nt, Homo sapiens
  misc_RNA (1)...(19): siRNA sense strand
agcaagagcacaacaauuu

SEQ ID NO: 204319 - RNA, 19 nt, Homo sapiens
  misc_RNA (1)...(19): siRNA sense strand
agaagauguucgagacuuu

SEQ ID NO: 204320 - RNA, 19 nt, Homo sapiens
  misc_RNA (1)...(19): siRNA sense strand
gagcaagagcacaacaauu

SEQ ID NO: 204321 - RNA, 19 nt, Homo sapiens
  misc_RNA (1)...(19): siRNA sense strand
ucaagcaaguggcaaguuc

SEQ ID NO: 204322 - RNA, 19 nt, Homo sapiens
  misc_RNA (1)...(19): siRNA sense strand
ccacgagacucaaacaacu

SEQ ID NO: 204323 - RNA, 19 nt, Homo sapiens
  misc_RNA (1)...(19): siRNA sense strand
cagcacaaccucaagcaaa

SEQ ID NO: 204324 - RNA, 19 nt, Homo sapiens
  misc_RNA (1)...(19): siRNA sense strand
gcaaagaguguccaaucau

SEQ ID NO: 204325 - RNA, 19 nt, Homo sapiens
  misc_RNA (1)...(19): siRNA sense strand
auggauauccugcagauua

SEQ ID NO: 204326 - RNA, 19 nt, Homo sapiens
  misc_RNA (1)...(19): siRNA sense strand
uguaacaucugcaaagagu

SEQ ID NO: 204327 - RNA, 19 nt, Homo sapiens
  misc_RNA (1)...(19): siRNA sense strand
guccggagcugcuuccaau

SEQ ID NO: 204328 - RNA, 19 nt, Homo sapiens
  misc_RNA (1)...(19): siRNA sense strand
gcaaguggcaaguucaaca

SEQ ID NO: 204329 - RNA, 19 nt, Homo sapiens
  misc_RNA (1)...(19): siRNA sense strand
gcuuccaauuugcuaauaa

SEQ ID NO: 204330 - RNA, 19 nt, Homo sapiens
  misc_RNA (1)...(19): siRNA sense strand
uggaagacaaguacagaua

SEQ ID NO: 204331 - RNA, 19 nt, Homo sapiens
  misc_RNA (1)...(19): siRNA sense strand
ggauccguguccugucuuu

SEQ ID NO: 204332 - RNA, 19 nt, Homo sapiens
  misc_RNA (1)...(19): siRNA sense strand
gucuuuagcugaccugaau

SEQ ID NO: 204333 - RNA, 19 nt, Homo sapiens
  misc_RNA (1)...(19): siRNA sense strand
gacaaguacagauaccuuu

SEQ ID NO: 204334 - RNA, 19 nt, Homo sapiens
  misc_RNA (1)...(19): siRNA sense strand
ccaagcaucaggccaaaug

SEQ ID NO: 204335 - RNA, 19 nt, Homo sapiens
  misc_RNA (1)...(19): siRNA sense strand
ggagcaagagcacaacaau

SEQ ID NO: 204336 - RNA, 19 nt, Homo sapiens
  misc_RNA (1)...(19): siRNA sense strand
guguaaagcacauuuggaa

SEQ ID NO: 204337 - RNA, 19 nt, Homo sapiens
  misc_RNA (1)...(19): siRNA sense strand
caagacaguugggugaagu

SEQ ID NO: 204338 - RNA, 19 nt, Homo sapiens
  misc_RNA (1)...(19): siRNA sense strand
gaagauguucgagacuuug

SEQ ID NO: 204339 - RNA, 19 nt, Homo sapiens
  misc_RNA (1)...(19): siRNA sense strand
gucagauucucagcuuaua

SEQ ID NO: 204340 - RNA, 19 nt, Homo sapiens
  misc_RNA (1)...(19): siRNA sense strand
uaacaucugcaaagagugu

SEQ ID NO: 204341 - RNA, 19 nt, Homo sapiens
  misc_RNA (1)...(19): siRNA sense strand
cggagcugcuuccaauuug

SEQ ID NO: 204342 - RNA, 19 nt, Homo sapiens
  misc_RNA (1)...(19): siRNA sense strand
gaagacaaguacagauacc

SEQ ID NO: 204343 - RNA, 19 nt, Homo sapiens
  misc_RNA (1)...(19): siRNA sense strand
ccauggauauccugcagau

SEQ ID NO: 204344 - RNA, 19 nt, Homo sapiens
  misc_RNA (1)...(19): siRNA sense strand
ggcaucauuucccugugua

SEQ ID NO: 204345 - RNA, 19 nt, Homo sapiens
  misc_RNA (1)...(19): siRNA sense strand
uggauauccugcagauuau

SEQ ID NO: 204346 - RNA, 19 nt, Homo sapiens
  misc_RNA (1)...(19): siRNA sense strand
ggaagacaaguacagauac

SEQ ID NO: 204347 - RNA, 19 nt, Homo sapiens
  misc_RNA (1)...(19): siRNA sense strand
ugcaaagaguguccaauca

SEQ ID NO: 204348 - RNA, 19 nt, Homo sapiens
  misc_RNA (1)...(19): siRNA sense strand
guggauaugugucugaacu

SEQ ID NO: 204349 - RNA, 19 nt, Homo sapiens
  misc_RNA (1)...(19): siRNA sense strand
acuggcugcugaauguuua

SEQ ID NO: 204350 - RNA, 19 nt, Homo sapiens
  misc_RNA (1)...(19): siRNA sense strand
acuaucccaugguggaaua

SEQ ID NO: 204351 - RNA, 19 nt, Homo sapiens
  misc_RNA (1)...(19): siRNA sense strand
ccggagcugcuuccaauuu

SEQ ID NO: 204352 - RNA, 19 nt, Homo sapiens
  misc_RNA (1)...(19): siRNA sense strand
ccaaauuccaagacaguug

SEQ ID NO: 204353 - RNA, 19 nt, Homo sapiens
  misc_RNA (1)...(19): siRNA sense strand
cagaaacugccaagcauca

SEQ ID NO: 204354 - RNA, 19 nt, Homo sapiens
  misc_RNA (1)...(19): siRNA sense strand
uaugacaucugccaaagcu

SEQ ID NO: 204355 - RNA, 19 nt, Homo sapiens
  misc_RNA (1)...(19): siRNA sense strand
aaugucagauucucagcuu

SEQ ID NO: 204356 - RNA, 19 nt, Homo sapiens
  misc_RNA (1)...(19): siRNA sense strand
ucgagacuuugccaaggua

SEQ ID NO: 204357 - RNA, 19 nt, Homo sapiens
  misc_RNA (1)...(19): siRNA sense strand
gcaaaaggccauaaaaugc

SEQ ID NO: 204358 - RNA, 19 nt, Homo sapiens
  misc_RNA (1)...(19): siRNA sense strand
cugcaugauucuauccaaa

SEQ ID NO: 204359 - RNA, 19 nt, Homo sapiens
  misc_RNA (1)...(19): siRNA sense strand
uaaagcacauuuggaagac

SEQ ID NO: 204360 - RNA, 19 nt, Homo sapiens
  misc_RNA (1)...(19): siRNA sense strand
acaggagucuaaagcacuu

SEQ ID NO: 204361 - RNA, 19 nt, Homo sapiens
  misc_RNA (1)...(19): siRNA sense strand
acagauaccuuuucaagca

SEQ ID NO: 204362 - RNA, 19 nt, Homo sapiens
  misc_RNA (1)...(19): siRNA sense strand
aagcacauuuggaagacaa

SEQ ID NO: 204363 - RNA, 19 nt, Homo sapiens
  misc_RNA (1)...(19): siRNA sense strand
gcuaauaauaagccagaga

SEQ ID NO: 204364 - RNA, 19 nt, Homo sapiens
  misc_RNA (1)...(19): siRNA sense strand
caagagcacaacaauuugg

SEQ ID NO: 204365 - RNA, 19 nt, Homo sapiens
  misc_RNA (1)...(19): siRNA sense strand
ccugucagcugcaugugau

SEQ ID NO: 204366 - RNA, 19 nt, Homo sapiens
  misc_RNA (1)...(19): siRNA sense strand
gcugcugaauguuuaugau

SEQ ID NO: 204367 - RNA, 19 nt, Homo sapiens
  misc_RNA (1)...(19): siRNA sense strand
acagagcucuaccagucuu

SEQ ID NO: 204368 - RNA, 19 nt, Homo sapiens
  misc_RNA (1)...(19): siRNA sense strand
acaguugggugaaguugca

SEQ ID NO: 204369 - RNA, 19 nt, Homo sapiens
  misc_RNA (1)...(19): siRNA sense strand
guuugaccacuauuuauga

SEQ ID NO: 204370 - RNA, 19 nt, Homo sapiens
  misc_RNA (1)...(19): siRNA sense strand
gcuuauaggacugccauga

SEQ ID NO: 204371 - RNA, 19 nt, Homo sapiens
  misc_RNA (1)...(19): siRNA sense strand
caucaggccaaauguaaca

SEQ ID NO: 204372 - RNA, 19 nt, Homo sapiens
  misc_RNA (1)...(19): siRNA sense strand
gauucuauccaaauuccaa

SEQ ID NO: 204373 - RNA, 19 nt, Homo sapiens
  misc_RNA (1)...(19): siRNA sense strand
ggcaaguucaacaggauuu

SEQ ID NO: 204374 - RNA, 19 nt, Homo sapiens
  misc_RNA (1)...(19): siRNA sense strand
gaacuggcugcugaauguu

SEQ ID NO: 204375 - RNA, 19 nt, Homo sapiens
  misc_RNA (1)...(19): siRNA sense strand
cugcugaauguuuaugaua

SEQ ID NO: 204376 - RNA, 19 nt, Homo sapiens
  misc_RNA (1)...(19): siRNA sense strand
aagcaucaggccaaaugua

SEQ ID NO: 204377 - RNA, 19 nt, Homo sapiens
  misc_RNA (1)...(19): siRNA sense strand
uggcaucauuucccugugu

SEQ ID NO: 204378 - RNA, 19 nt, Homo sapiens
  misc_RNA (1)...(19): siRNA sense strand
ccaugaaacuccgaagacu

SEQ ID NO: 204379 - RNA, 19 nt, Homo sapiens
  misc_RNA (1)...(19): siRNA sense strand
auaauaagccagagaucga

SEQ ID NO: 204380 - RNA, 19 nt, Homo sapiens
  misc_RNA (1)...(19): siRNA sense strand
cuaauaauaagccagagau

SEQ ID NO: 204381 - RNA, 19 nt, Homo sapiens
  misc_RNA (1)...(19): siRNA sense strand
ugggugaaguugcauccuu

SEQ ID NO: 204382 - RNA, 19 nt, Homo sapiens
  misc_RNA (1)...(19): siRNA sense strand
caucauuucccuguguaaa

SEQ ID NO: 204383 - RNA, 19 nt, Homo sapiens
  misc_RNA (1)...(19): siRNA sense strand
gcguggauaugugucugaa

SEQ ID NO: 204384 - RNA, 19 nt, Homo sapiens
  misc_RNA (1)...(19): siRNA sense strand
gcacuaucccaugguggaa

SEQ ID NO: 204385 - RNA, 19 nt, Homo sapiens
  misc_RNA (1)...(19): siRNA sense strand
gagccugucagcugcaugu

SEQ ID NO: 204386 - RNA, 19 nt, Homo sapiens
  misc_RNA (1)...(19): siRNA sense strand
guacagauaccuuuucaag

SEQ ID NO: 204387 - RNA, 19 nt, Homo sapiens
  misc_RNA (1)...(19): siRNA sense strand
gucccucucugcguggaua

SEQ ID NO: 204388 - RNA, 19 nt, Homo sapiens
  misc_RNA (1)...(19): siRNA sense strand
ggagcugcuuccaauuugc

SEQ ID NO: 204389 - RNA, 19 nt, Homo sapiens
  misc_RNA (1)...(19): siRNA sense strand
uuagcugaccugaauaaug

SEQ ID NO: 204390 - RNA, 19 nt, Homo sapiens
  misc_RNA (1)...(19): siRNA sense strand
guggcaaguucaacaggau

SEQ ID NO: 204391 - RNA, 19 nt, Homo sapiens
  misc_RNA (1)...(19): siRNA sense strand
acaacaauuuggucaacgu

SEQ ID NO: 204392 - RNA, 19 nt, Homo sapiens
  misc_RNA (1)...(19): siRNA sense strand
gacuacaucaggagaagau

SEQ ID NO: 204393 - RNA, 19 nt, Homo sapiens
  misc_RNA (1)...(19): siRNA sense strand
uaauaagccagagaucgaa

SEQ ID NO: 204394 - RNA, 19 nt, Homo sapiens
  misc_RNA (1)...(19): siRNA sense strand
ugucagauucucagcuuau

SEQ ID NO: 204395 - RNA, 19 nt, Homo sapiens
  misc_RNA (1)...(19): siRNA sense strand
ggauauccugcagauuauu

SEQ ID NO: 204396 - RNA, 19 nt, Homo sapiens
  misc_RNA (1)...(19): siRNA sense strand
agcaucaggccaaauguaa

SEQ ID NO: 204397 - RNA, 19 nt, Homo sapiens
  misc_RNA (1)...(19): siRNA sense strand
gcccuuugcuuggaucucu

SEQ ID NO: 204398 - RNA, 19 nt, Homo sapiens
  misc_RNA (1)...(19): siRNA sense strand
gcugaauguuuaugauacg

SEQ ID NO: 204399 - RNA, 19 nt, Homo sapiens
  misc_RNA (1)...(19): siRNA sense strand
agacuuugccaagguacua

SEQ ID NO: 204400 - RNA, 19 nt, Homo sapiens
  misc_RNA (1)...(19): siRNA sense strand
caagcaaguggcaaguuca

SEQ ID NO: 204401 - RNA, 19 nt, Homo sapiens
  misc_RNA (1)...(19): siRNA sense strand
agacaaguacagauaccuu

SEQ ID NO: 204402 - RNA, 19 nt, Homo sapiens
  misc_RNA (1)...(19): siRNA sense strand
gcaucauuucccuguguaa

SEQ ID NO: 204403 - RNA, 19 nt, Homo sapiens
  misc_RNA (1)...(19): siRNA sense strand
cugcaaagaguguccaauc

SEQ ID NO: 204404 - RNA, 19 nt, Homo sapiens
  misc_RNA (1)...(19): siRNA sense strand
cuuauaggacugccaugaa

SEQ ID NO: 204405 - RNA, 19 nt, Homo sapiens
  misc_RNA (1)...(19): siRNA sense strand
caaagaguguccaaucauu

SEQ ID NO: 204406 - RNA, 19 nt, Homo sapiens
  misc_RNA (1)...(19): siRNA sense strand
uagcugaccugaauaaugu

SEQ ID NO: 204407 - RNA, 19 nt, Homo sapiens
  misc_RNA (1)...(19): siRNA sense strand
gcaugauucuauccaaauu

SEQ ID NO: 204408 - RNA, 19 nt, Homo sapiens
  misc_RNA (1)...(19): siRNA sense strand
ugaacuggcugcugaaugu

SEQ ID NO: 204409 - RNA, 19 nt, Homo sapiens
  misc_RNA (1)...(19): siRNA sense strand
gauauccugcagauuauua

SEQ ID NO: 204410 - RNA, 19 nt, Homo sapiens
  misc_RNA (1)...(19): siRNA sense strand
gagaagauguucgagacuu

SEQ ID NO: 204411 - RNA, 19 nt, Homo sapiens
  misc_RNA (1)...(19): siRNA sense strand
gcacuuuaauuaugacauc

SEQ ID NO: 204412 - RNA, 19 nt, Homo sapiens
  misc_RNA (1)...(19): siRNA sense strand
guaaagcacauuuggaaga

SEQ ID NO: 204413 - RNA, 19 nt, Homo sapiens
  misc_RNA (1)...(19): siRNA sense strand
gaauauugcacuccgacua

SEQ ID NO: 204414 - RNA, 19 nt, Homo sapiens
  misc_RNA (1)...(19): siRNA sense strand
uuauaggacugccaugaaa

SEQ ID NO: 204415 - RNA, 19 nt, Homo sapiens
  misc_RNA (1)...(19): siRNA sense strand
gggugaaguugcauccuuu

SEQ ID NO: 204416 - RNA, 19 nt, Homo sapiens
  misc_RNA (1)...(19): siRNA sense strand
gcaagagcacaacaauuug

SEQ ID NO: 204417 - RNA, 19 nt, Homo sapiens
  misc_RNA (1)...(19): siRNA sense strand
gcacaacaauuuggucaac

SEQ ID NO: 204418 - RNA, 19 nt, Homo sapiens
  misc_RNA (1)...(19): siRNA sense strand
agcaagagcacaacaauuu

SEQ ID NO: 204419 - RNA, 19 nt, Homo sapiens
  misc_RNA (1)...(19): siRNA sense strand
agaagauguucgagacuuu

SEQ ID NO: 204420 - RNA, 19 nt, Homo sapiens
  misc_RNA (1)...(19): siRNA sense strand
gagcaagagcacaacaauu

SEQ ID NO: 204421 - RNA, 19 nt, Homo sapiens
  misc_RNA (1)...(19): siRNA sense strand
ucaagcaaguggcaaguuc

SEQ ID NO: 204422 - RNA, 19 nt, Homo sapiens
  misc_RNA (1)...(19): siRNA sense strand
ccacgagacucaaacaacu

SEQ ID NO: 204423 - RNA, 19 nt, Homo sapiens
  misc_RNA (1)...(19): siRNA sense strand
cagcacaaccucaagcaaa

SEQ ID NO: 204424 - RNA, 19 nt, Homo sapiens
  misc_RNA (1)...(19): siRNA sense strand
gcaaagaguguccaaucau

SEQ ID NO: 204425 - RNA, 19 nt, Homo sapiens
  misc_RNA (1)...(19): siRNA sense strand
auggauauccugcagauua

SEQ ID NO: 204426 - RNA, 19 nt, Homo sapiens
  misc_RNA (1)...(19): siRNA sense strand
uguaacaucugcaaagagu

SEQ ID NO: 204427 - RNA, 19 nt, Homo sapiens
  misc_RNA (1)...(19): siRNA sense strand
guccggagcugcuuccaau

SEQ ID NO: 204428 - RNA, 19 nt, Homo sapiens
  misc_RNA (1)...(19): siRNA sense strand
gcaaguggcaaguucaaca

SEQ ID NO: 204429 - RNA, 19 nt, Homo sapiens
  misc_RNA (1)...(19): siRNA sense strand
gcuuccaauuugcuaauaa

SEQ ID NO: 204430 - RNA, 19 nt, Homo sapiens
  misc_RNA (1)...(19): siRNA sense strand
uggaagacaaguacagaua

SEQ ID NO: 204431 - RNA, 19 nt, Homo sapiens
  misc_RNA (1)...(19): siRNA sense strand
ggauccguguccugucuuu

SEQ ID NO: 204432 - RNA, 19 nt, Homo sapiens
  misc_RNA (1)...(19): siRNA sense strand
gucuuuagcugaccugaau

SEQ ID NO: 204433 - RNA, 19 nt, Homo sapiens
  misc_RNA (1)...(19): siRNA sense strand
gacaaguacagauaccuuu

SEQ ID NO: 204434 - RNA, 19 nt, Homo sapiens
  misc_RNA (1)...(19): siRNA sense strand
ccaagcaucaggccaaaug

SEQ ID NO: 204435 - RNA, 19 nt, Homo sapiens
  misc_RNA (1)...(19): siRNA sense strand
ggagcaagagcacaacaau

SEQ ID NO: 204436 - RNA, 19 nt, Homo sapiens
  misc_RNA (1)...(19): siRNA sense strand
guguaaagcacauuuggaa

SEQ ID NO: 204437 - RNA, 19 nt, Homo sapiens
  misc_RNA (1)...(19): siRNA sense strand
caagacaguugggugaagu

SEQ ID NO: 204438 - RNA, 19 nt, Homo sapiens
  misc_RNA (1)...(19): siRNA sense strand
gaagauguucgagacuuug

SEQ ID NO: 204439 - RNA, 19 nt, Homo sapiens
  misc_RNA (1)...(19): siRNA sense strand
gucagauucucagcuuaua

SEQ ID NO: 204440 - RNA, 19 nt, Homo sapiens
  misc_RNA (1)...(19): siRNA sense strand
uaacaucugcaaagagugu

SEQ ID NO: 204441 - RNA, 19 nt, Homo sapiens
  misc_RNA (1)...(19): siRNA sense strand
cggagcugcuuccaauuug

SEQ ID NO: 204442 - RNA, 19 nt, Homo sapiens
  misc_RNA (1)...(19): siRNA sense strand
gaagacaaguacagauacc

SEQ ID NO: 204443 - RNA, 19 nt, Homo sapiens
  misc_RNA (1)...(19): siRNA sense strand
ccauggauauccugcagau

SEQ ID NO: 204444 - RNA, 19 nt, Homo sapiens
  misc_RNA (1)...(19): siRNA sense strand
ggcaucauuucccugugua

SEQ ID NO: 204445 - RNA, 19 nt, Homo sapiens
  misc_RNA (1)...(19): siRNA sense strand
uggauauccugcagauuau

SEQ ID NO: 204446 - RNA, 19 nt, Homo sapiens
  misc_RNA (1)...(19): siRNA sense strand
ggaagacaaguacagauac

SEQ ID NO: 204447 - RNA, 19 nt, Homo sapiens
  misc_RNA (1)...(19): siRNA sense strand
ugcaaagaguguccaauca

SEQ ID NO: 204448 - RNA, 19 nt, Homo sapiens
  misc_RNA (1)...(19): siRNA sense strand
guggauaugugucugaacu

SEQ ID NO: 204449 - RNA, 19 nt, Homo sapiens
  misc_RNA (1)...(19): siRNA sense strand
acuggcugcugaauguuua

SEQ ID NO: 204450 - RNA, 19 nt, Homo sapiens
  misc_RNA (1)...(19): siRNA sense strand
acuaucccaugguggaaua

SEQ ID NO: 204451 - RNA, 19 nt, Homo sapiens
  misc_RNA (1)...(19): siRNA sense strand
ccggagcugcuuccaauuu

SEQ ID NO: 204452 - RNA, 19 nt, Homo sapiens
  misc_RNA (1)...(19): siRNA sense strand
ccaaauuccaagacaguug

SEQ ID NO: 204453 - RNA, 19 nt, Homo sapiens
  misc_RNA (1)...(19): siRNA sense strand
cagaaacugccaagcauca

SEQ ID NO: 204454 - RNA, 19 nt, Homo sapiens
  misc_RNA (1)...(19): siRNA sense strand
uaugacaucugccaaagcu

SEQ ID NO: 204455 - RNA, 19 nt, Homo sapiens
  misc_RNA (1)...(19): siRNA sense strand
aaugucagauucucagcuu

SEQ ID NO: 204456 - RNA, 19 nt, Homo sapiens
  misc_RNA (1)...(19): siRNA sense strand
ucgagacuuugccaaggua

SEQ ID NO: 204457 - RNA, 19 nt, Homo sapiens
  misc_RNA (1)...(19): siRNA sense strand
gcaaaaggccauaaaaugc

SEQ ID NO: 204458 - RNA, 19 nt, Homo sapiens
  misc_RNA (1)...(19): siRNA sense strand
cugcaugauucuauccaaa

SEQ ID NO: 204459 - RNA, 19 nt, Homo sapiens
  misc_RNA (1)...(19): siRNA sense strand
uaaagcacauuuggaagac

SEQ ID NO: 204460 - RNA, 19 nt, Homo sapiens
  misc_RNA (1)...(19): siRNA sense strand
acaggagucuaaagcacuu

SEQ ID NO: 204461 - RNA, 19 nt, Homo sapiens
  misc_RNA (1)...(19): siRNA sense strand
acagauaccuuuucaagca

SEQ ID NO: 204462 - RNA, 19 nt, Homo sapiens
  misc_RNA (1)...(19): siRNA sense strand
aagcacauuuggaagacaa

SEQ ID NO: 204463 - RNA, 19 nt, Homo sapiens
  misc_RNA (1)...(19): siRNA sense strand
gcuaauaauaagccagaga

SEQ ID NO: 204464 - RNA, 19 nt, Homo sapiens
  misc_RNA (1)...(19): siRNA sense strand
caagagcacaacaauuugg

SEQ ID NO: 204465 - RNA, 19 nt, Homo sapiens
  misc_RNA (1)...(19): siRNA sense strand
ccugucagcugcaugugau

SEQ ID NO: 204466 - RNA, 19 nt, Homo sapiens
  misc_RNA (1)...(19): siRNA sense strand
gcugcugaauguuuaugau

SEQ ID NO: 204467 - RNA, 19 nt, Homo sapiens
  misc_RNA (1)...(19): siRNA sense strand
acagagcucuaccagucuu

SEQ ID NO: 204468 - RNA, 19 nt, Homo sapiens
  misc_RNA (1)...(19): siRNA sense strand
acaguugggugaaguugca

SEQ ID NO: 204469 - RNA, 19 nt, Homo sapiens
  misc_RNA (1)...(19): siRNA sense strand
guuugaccacuauuuauga

SEQ ID NO: 204470 - RNA, 19 nt, Homo sapiens
  misc_RNA (1)...(19): siRNA sense strand
gcuuauaggacugccauga

SEQ ID NO: 204471 - RNA, 19 nt, Homo sapiens
  misc_RNA (1)...(19): siRNA sense strand
caucaggccaaauguaaca

SEQ ID NO: 204472 - RNA, 19 nt, Homo sapiens
  misc_RNA (1)...(19): siRNA sense strand
gauucuauccaaauuccaa

SEQ ID NO: 204473 - RNA, 19 nt, Homo sapiens
  misc_RNA (1)...(19): siRNA sense strand
ggcaaguucaacaggauuu

SEQ ID NO: 204474 - RNA, 19 nt, Homo sapiens
  misc_RNA (1)...(19): siRNA sense strand
gaacuggcugcugaauguu

SEQ ID NO: 204475 - RNA, 19 nt, Homo sapiens
  misc_RNA (1)...(19): siRNA sense strand
cugcugaauguuuaugaua

SEQ ID NO: 204476 - RNA, 19 nt, Homo sapiens
  misc_RNA (1)...(19): siRNA sense strand
aagcaucaggccaaaugua

SEQ ID NO: 204477 - RNA, 19 nt, Homo sapiens
  misc_RNA (1)...(19): siRNA sense strand
uggcaucauuucccugugu

SEQ ID NO: 204478 - RNA, 19 nt, Homo sapiens
  misc_RNA (1)...(19): siRNA sense strand
ccaugaaacuccgaagacu

SEQ ID NO: 204479 - RNA, 19 nt, Homo sapiens
  misc_RNA (1)...(19): siRNA sense strand
auaauaagccagagaucga

SEQ ID NO: 204480 - RNA, 19 nt, Homo sapiens
  misc_RNA (1)...(19): siRNA sense strand
cuaauaauaagccagagau

SEQ ID NO: 204481 - RNA, 19 nt, Homo sapiens
  misc_RNA (1)...(19): siRNA sense strand
ugggugaaguugcauccuu

SEQ ID NO: 204482 - RNA, 19 nt, Homo sapiens
  misc_RNA (1)...(19): siRNA sense strand
caucauuucccuguguaaa

SEQ ID NO: 204483 - RNA, 19 nt, Homo sapiens
  misc_RNA (1)...(19): siRNA sense strand
gcguggauaugugucugaa

SEQ ID NO: 204484 - RNA, 19 nt, Homo sapiens
  misc_RNA (1)...(19): siRNA sense strand
gcacuaucccaugguggaa

SEQ ID NO: 204485 - RNA, 19 nt, Homo sapiens
  misc_RNA (1)...(19): siRNA sense strand
gagccugucagcugcaugu

SEQ ID NO: 204486 - RNA, 19 nt, Homo sapiens
  misc_RNA (1)...(19): siRNA sense strand
guacagauaccuuuucaag

SEQ ID NO: 204487 - RNA, 19 nt, Homo sapiens
  misc_RNA (1)...(19): siRNA sense strand
gucccucucugcguggaua

SEQ ID NO: 204488 - RNA, 19 nt, Homo sapiens
  misc_RNA (1)...(19): siRNA sense strand
ggagcugcuuccaauuugc

SEQ ID NO: 204489 - RNA, 19 nt, Homo sapiens
  misc_RNA (1)...(19): siRNA sense strand
uuagcugaccugaauaaug

SEQ ID NO: 204490 - RNA, 19 nt, Homo sapiens
  misc_RNA (1)...(19): siRNA sense strand
guggcaaguucaacaggau

SEQ ID NO: 204491 - RNA, 19 nt, Homo sapiens
  misc_RNA (1)...(19): siRNA sense strand
acaacaauuuggucaacgu

SEQ ID NO: 204492 - RNA, 19 nt, Homo sapiens
  misc_RNA (1)...(19): siRNA sense strand
gacuacaucaggagaagau

SEQ ID NO: 204493 - RNA, 19 nt, Homo sapiens
  misc_RNA (1)...(19): siRNA sense strand
uaauaagccagagaucgaa

SEQ ID NO: 204494 - RNA, 19 nt, Homo sapiens
  misc_RNA (1)...(19): siRNA sense strand
ugucagauucucagcuuau

SEQ ID NO: 204495 - RNA, 19 nt, Homo sapiens
  misc_RNA (1)...(19): siRNA sense strand
ggauauccugcagauuauu

SEQ ID NO: 204496 - RNA, 19 nt, Homo sapiens
  misc_RNA (1)...(19): siRNA sense strand
agcaucaggccaaauguaa

SEQ ID NO: 204497 - RNA, 19 nt, Homo sapiens
  misc_RNA (1)...(19): siRNA sense strand
gcccuuugcuuggaucucu

SEQ ID NO: 204498 - RNA, 19 nt, Homo sapiens
  misc_RNA (1)...(19): siRNA sense strand
gcugaauguuuaugauacg

SEQ ID NO: 204499 - RNA, 19 nt, Homo sapiens
  misc_RNA (1)...(19): siRNA sense strand
agacuuugccaagguacua

SEQ ID NO: 204500 - RNA, 19 nt, Homo sapiens
  misc_RNA (1)...(19): siRNA sense strand
caagcaaguggcaaguuca

SEQ ID NO: 204501 - RNA, 19 nt, Homo sapiens
  misc_RNA (1)...(19): siRNA sense strand
agacaaguacagauaccuu

SEQ ID NO: 204502 - RNA, 19 nt, Homo sapiens
  misc_RNA (1)...(19): siRNA sense strand
gcaucauuucccuguguaa

SEQ ID NO: 204503 - RNA, 19 nt, Homo sapiens
  misc_RNA (1)...(19): siRNA sense strand
cugcaaagaguguccaauc

SEQ ID NO: 204504 - RNA, 19 nt, Homo sapiens
  misc_RNA (1)...(19): siRNA sense strand
cuuauaggacugccaugaa

SEQ ID NO: 204505 - RNA, 19 nt, Homo sapiens
  misc_RNA (1)...(19): siRNA sense strand
caaagaguguccaaucauu

SEQ ID NO: 204506 - RNA, 19 nt, Homo sapiens
  misc_RNA (1)...(19): siRNA sense strand
uagcugaccugaauaaugu

SEQ ID NO: 204507 - RNA, 19 nt, Homo sapiens
  misc_RNA (1)...(19): siRNA sense strand
gcaugauucuauccaaauu

SEQ ID NO: 204508 - RNA, 19 nt, Homo sapiens
  misc_RNA (1)...(19): siRNA sense strand
ugaacuggcugcugaaugu

SEQ ID NO: 204509 - RNA, 19 nt, Homo sapiens
  misc_RNA (1)...(19): siRNA sense strand
gauauccugcagauuauua

SEQ ID NO: 204510 - RNA, 19 nt, Homo sapiens
  misc_RNA (1)...(19): siRNA sense strand
gagaagauguucgagacuu

SEQ ID NO: 204511 - RNA, 19 nt, Homo sapiens
  misc_RNA (1)...(19): siRNA sense strand
gcacuuuaauuaugacauc

SEQ ID NO: 204512 - RNA, 19 nt, Homo sapiens
  misc_RNA (1)...(19): siRNA sense strand
guaaagcacauuuggaaga

SEQ ID NO: 204513 - RNA, 19 nt, Homo sapiens
  misc_RNA (1)...(19): siRNA sense strand
gaauauugcacuccgacua

SEQ ID NO: 204514 - RNA, 19 nt, Homo sapiens
  misc_RNA (1)...(19): siRNA sense strand
uuauaggacugccaugaaa

SEQ ID NO: 204515 - RNA, 19 nt, Homo sapiens
  misc_RNA (1)...(19): siRNA sense strand
gggugaaguugcauccuuu

SEQ ID NO: 204516 - RNA, 19 nt, Homo sapiens
  misc_RNA (1)...(19): siRNA sense strand
gcaagagcacaacaauuug

SEQ ID NO: 204517 - RNA, 19 nt, Homo sapiens
  misc_RNA (1)...(19): siRNA sense strand
gcacaacaauuuggucaac

SEQ ID NO: 204518 - RNA, 19 nt, Homo sapiens
  misc_RNA (1)...(19): siRNA sense strand
agcaagagcacaacaauuu

SEQ ID NO: 204519 - RNA, 19 nt, Homo sapiens
  misc_RNA (1)...(19): siRNA sense strand
agaagauguucgagacuuu

SEQ ID NO: 204520 - RNA, 19 nt, Homo sapiens
  misc_RNA (1)...(19): siRNA sense strand
gagcaagagcacaacaauu

SEQ ID NO: 204521 - RNA, 19 nt, Homo sapiens
  misc_RNA (1)...(19): siRNA sense strand
ucaagcaaguggcaaguuc

SEQ ID NO: 204522 - RNA, 19 nt, Homo sapiens
  misc_RNA (1)...(19): siRNA sense strand
ccacgagacucaaacaacu

SEQ ID NO: 204523 - RNA, 19 nt, Homo sapiens
  misc_RNA (1)...(19): siRNA sense strand
cagcacaaccucaagcaaa

SEQ ID NO: 204524 - RNA, 19 nt, Homo sapiens
  misc_RNA (1)...(19): siRNA sense strand
gcaaagaguguccaaucau

SEQ ID NO: 204525 - RNA, 19 nt, Homo sapiens
  misc_RNA (1)...(19): siRNA sense strand
auggauauccugcagauua

SEQ ID NO: 204526 - RNA, 19 nt, Homo sapiens
  misc_RNA (1)...(19): siRNA sense strand
uguaacaucugcaaagagu

SEQ ID NO: 204527 - RNA, 19 nt, Homo sapiens
  misc_RNA (1)...(19): siRNA sense strand
guccggagcugcuuccaau

SEQ ID NO: 204528 - RNA, 19 nt, Homo sapiens
  misc_RNA (1)...(19): siRNA sense strand
gcaaguggcaaguucaaca

SEQ ID NO: 204529 - RNA, 19 nt, Homo sapiens
  misc_RNA (1)...(19): siRNA sense strand
gcuuccaauuugcuaauaa

SEQ ID NO: 204530 - RNA, 19 nt, Homo sapiens
  misc_RNA (1)...(19): siRNA sense strand
uggaagacaaguacagaua

SEQ ID NO: 204531 - RNA, 19 nt, Homo sapiens
  misc_RNA (1)...(19): siRNA sense strand
ggauccguguccugucuuu

SEQ ID NO: 204532 - RNA, 19 nt, Homo sapiens
  misc_RNA (1)...(19): siRNA sense strand
gucuuuagcugaccugaau

SEQ ID NO: 204533 - RNA, 19 nt, Homo sapiens
  misc_RNA (1)...(19): siRNA sense strand
gacaaguacagauaccuuu

SEQ ID NO: 204534 - RNA, 19 nt, Homo sapiens
  misc_RNA (1)...(19): siRNA sense strand
ccaagcaucaggccaaaug

SEQ ID NO: 204535 - RNA, 19 nt, Homo sapiens
  misc_RNA (1)...(19): siRNA sense strand
ggagcaagagcacaacaau

SEQ ID NO: 204536 - RNA, 19 nt, Homo sapiens
  misc_RNA (1)...(19): siRNA sense strand
guguaaagcacauuuggaa

SEQ ID NO: 204537 - RNA, 19 nt, Homo sapiens
  misc_RNA (1)...(19): siRNA sense strand
caagacaguugggugaagu

SEQ ID NO: 204538 - RNA, 19 nt, Homo sapiens
  misc_RNA (1)...(19): siRNA sense strand
gaagauguucgagacuuug

SEQ ID NO: 204539 - RNA, 19 nt, Homo sapiens
  misc_RNA (1)...(19): siRNA sense strand
gucagauucucagcuuaua

SEQ ID NO: 204540 - RNA, 19 nt, Homo sapiens
  misc_RNA (1)...(19): siRNA sense strand
uaacaucugcaaagagugu

SEQ ID NO: 204541 - RNA, 19 nt, Homo sapiens
  misc_RNA (1)...(19): siRNA sense strand
cggagcugcuuccaauuug

SEQ ID NO: 204542 - RNA, 19 nt, Homo sapiens
  misc_RNA (1)...(19): siRNA sense strand
gaagacaaguacagauacc

SEQ ID NO: 204543 - RNA, 19 nt, Homo sapiens
  misc_RNA (1)...(19): siRNA sense strand
ccauggauauccugcagau

SEQ ID NO: 204544 - RNA, 19 nt, Homo sapiens
  misc_RNA (1)...(19): siRNA sense strand
ggcaucauuucccugugua

SEQ ID NO: 204545 - RNA, 19 nt, Homo sapiens
  misc_RNA (1)...(19): siRNA sense strand
uggauauccugcagauuau

SEQ ID NO: 204546 - RNA, 19 nt, Homo sapiens
  misc_RNA (1)...(19): siRNA sense strand
ggaagacaaguacagauac

SEQ ID NO: 204547 - RNA, 19 nt, Homo sapiens
  misc_RNA (1)...(19): siRNA sense strand
ugcaaagaguguccaauca

SEQ ID NO: 204548 - RNA, 19 nt, Homo sapiens
  misc_RNA (1)...(19): siRNA sense strand
guggauaugugucugaacu

SEQ ID NO: 204549 - RNA, 19 nt, Homo sapiens
  misc_RNA (1)...(19): siRNA sense strand
acuggcugcugaauguuua

SEQ ID NO: 204550 - RNA, 19 nt, Homo sapiens
  misc_RNA (1)...(19): siRNA sense strand
acuaucccaugguggaaua

SEQ ID NO: 204551 - RNA, 19 nt, Homo sapiens
  misc_RNA (1)...(19): siRNA sense strand
ccggagcugcuuccaauuu

SEQ ID NO: 204552 - RNA, 19 nt, Homo sapiens
  misc_RNA (1)...(19): siRNA sense strand
ccaaauuccaagacaguug

SEQ ID NO: 204553 - RNA, 19 nt, Homo sapiens
  misc_RNA (1)...(19): siRNA sense strand
cagaaacugccaagcauca

SEQ ID NO: 204554 - RNA, 19 nt, Homo sapiens
  misc_RNA (1)...(19): siRNA sense strand
uaugacaucugccaaagcu

SEQ ID NO: 204555 - RNA, 19 nt, Homo sapiens
  misc_RNA (1)...(19): siRNA sense strand
aaugucagauucucagcuu

SEQ ID NO: 204556 - RNA, 19 nt, Homo sapiens
  misc_RNA (1)...(19): siRNA sense strand
ucgagacuuugccaaggua

SEQ ID NO: 204557 - RNA, 19 nt, Homo sapiens
  misc_RNA (1)...(19): siRNA sense strand
gcaaaaggccauaaaaugc

SEQ ID NO: 204558 - RNA, 19 nt, Homo sapiens
  misc_RNA (1)...(19): siRNA sense strand
cugcaugauucuauccaaa

SEQ ID NO: 204559 - RNA, 19 nt, Homo sapiens
  misc_RNA (1)...(19): siRNA sense strand
uaaagcacauuuggaagac

SEQ ID NO: 204560 - RNA, 19 nt, Homo sapiens
  misc_RNA (1)...(19): siRNA sense strand
acaggagucuaaagcacuu

SEQ ID NO: 204561 - RNA, 19 nt, Homo sapiens
  misc_RNA (1)...(19): siRNA sense strand
acagauaccuuuucaagca

SEQ ID NO: 204562 - RNA, 19 nt, Homo sapiens
  misc_RNA (1)...(19): siRNA sense strand
aagcacauuuggaagacaa

SEQ ID NO: 204563 - RNA, 19 nt, Homo sapiens
  misc_RNA (1)...(19): siRNA sense strand
gcuaauaauaagccagaga

SEQ ID NO: 204564 - RNA, 19 nt, Homo sapiens
  misc_RNA (1)...(19): siRNA sense strand
caagagcacaacaauuugg

SEQ ID NO: 204565 - RNA, 19 nt, Homo sapiens
  misc_RNA (1)...(19): siRNA sense strand
ccugucagcugcaugugau

SEQ ID NO: 204566 - RNA, 19 nt, Homo sapiens
  misc_RNA (1)...(19): siRNA sense strand
gcugcugaauguuuaugau

SEQ ID NO: 204567 - RNA, 19 nt, Homo sapiens
  misc_RNA (1)...(19): siRNA sense strand
acagagcucuaccagucuu

SEQ ID NO: 204568 - RNA, 19 nt, Homo sapiens
  misc_RNA (1)...(19): siRNA sense strand
acaguugggugaaguugca

SEQ ID NO: 204569 - RNA, 19 nt, Homo sapiens
  misc_RNA (1)...(19): siRNA sense strand
guuugaccacuauuuauga

SEQ ID NO: 204570 - RNA, 19 nt, Homo sapiens
  misc_RNA (1)...(19): siRNA sense strand
gcuuauaggacugccauga

SEQ ID NO: 204571 - RNA, 19 nt, Homo sapiens
  misc_RNA (1)...(19): siRNA sense strand
caucaggccaaauguaaca

SEQ ID NO: 204572 - RNA, 19 nt, Homo sapiens
  misc_RNA (1)...(19): siRNA sense strand
gauucuauccaaauuccaa

SEQ ID NO: 204573 - RNA, 19 nt, Homo sapiens
  misc_RNA (1)...(19): siRNA sense strand
ggcaaguucaacaggauuu

SEQ ID NO: 204574 - RNA, 19 nt, Homo sapiens
  misc_RNA (1)...(19): siRNA sense strand
gaacuggcugcugaauguu

SEQ ID NO: 204575 - RNA, 19 nt, Homo sapiens
  misc_RNA (1)...(19): siRNA sense strand
cugcugaauguuuaugaua

SEQ ID NO: 204576 - RNA, 19 nt, Homo sapiens
  misc_RNA (1)...(19): siRNA sense strand
aagcaucaggccaaaugua

SEQ ID NO: 204577 - RNA, 19 nt, Homo sapiens
  misc_RNA (1)...(19): siRNA sense strand
uggcaucauuucccugugu

SEQ ID NO: 204578 - RNA, 19 nt, Homo sapiens
  misc_RNA (1)...(19): siRNA sense strand
ccaugaaacuccgaagacu

SEQ ID NO: 204579 - RNA, 19 nt, Homo sapiens
  misc_RNA (1)...(19): siRNA sense strand
auaauaagccagagaucga

SEQ ID NO: 204580 - RNA, 19 nt, Homo sapiens
  misc_RNA (1)...(19): siRNA sense strand
cuaauaauaagccagagau

SEQ ID NO: 204581 - RNA, 19 nt, Homo sapiens
  misc_RNA (1)...(19): siRNA sense strand
ugggugaaguugcauccuu

SEQ ID NO: 204582 - RNA, 19 nt, Homo sapiens
  misc_RNA (1)...(19): siRNA sense strand
caucauuucccuguguaaa

SEQ ID NO: 204583 - RNA, 19 nt, Homo sapiens
  misc_RNA (1)...(19): siRNA sense strand
gcguggauaugugucugaa

SEQ ID NO: 204584 - RNA, 19 nt, Homo sapiens
  misc_RNA (1)...(19): siRNA sense strand
gcacuaucccaugguggaa

SEQ ID NO: 204585 - RNA, 19 nt, Homo sapiens
  misc_RNA (1)...(19): siRNA sense strand
gagccugucagcugcaugu

SEQ ID NO: 204586 - RNA, 19 nt, Homo sapiens
  misc_RNA (1)...(19): siRNA sense strand
guacagauaccuuuucaag

SEQ ID NO: 204587 - RNA, 19 nt, Homo sapiens
  misc_RNA (1)...(19): siRNA sense strand
gucccucucugcguggaua

SEQ ID NO: 204588 - RNA, 19 nt, Homo sapiens
  misc_RNA (1)...(19): siRNA sense strand
ggagcugcuuccaauuugc

SEQ ID NO: 204589 - RNA, 19 nt, Homo sapiens
  misc_RNA (1)...(19): siRNA sense strand
uuagcugaccugaauaaug

SEQ ID NO: 204590 - RNA, 19 nt, Homo sapiens
  misc_RNA (1)...(19): siRNA sense strand
guggcaaguucaacaggau

SEQ ID NO: 204591 - RNA, 19 nt, Homo sapiens
  misc_RNA (1)...(19): siRNA sense strand
acaacaauuuggucaacgu

SEQ ID NO: 204592 - RNA, 19 nt, Homo sapiens
  misc_RNA (1)...(19): siRNA sense strand
gacuacaucaggagaagau

SEQ ID NO: 204593 - RNA, 19 nt, Homo sapiens
  misc_RNA (1)...(19): siRNA sense strand
uaauaagccagagaucgaa

SEQ ID NO: 204594 - RNA, 19 nt, Homo sapiens
  misc_RNA (1)...(19): siRNA sense strand
ugucagauucucagcuuau

SEQ ID NO: 204595 - RNA, 19 nt, Homo sapiens
  misc_RNA (1)...(19): siRNA sense strand
ggauauccugcagauuauu

SEQ ID NO: 204596 - RNA, 19 nt, Homo sapiens
  misc_RNA (1)...(19): siRNA sense strand
agcaucaggccaaauguaa

SEQ ID NO: 204597 - RNA, 19 nt, Homo sapiens
  misc_RNA (1)...(19): siRNA sense strand
gcccuuugcuuggaucucu

SEQ ID NO: 204598 - RNA, 19 nt, Homo sapiens
  misc_RNA (1)...(19): siRNA sense strand
gcugaauguuuaugauacg

SEQ ID NO: 204599 - RNA, 19 nt, Homo sapiens
  misc_RNA (1)...(19): siRNA sense strand
agacuuugccaagguacua

SEQ ID NO: 204600 - RNA, 19 nt, Homo sapiens
  misc_RNA (1)...(19): siRNA sense strand
caagcaaguggcaaguuca

SEQ ID NO: 204601 - RNA, 19 nt, Homo sapiens
  misc_RNA (1)...(19): siRNA sense strand
agacaaguacagauaccuu

SEQ ID NO: 204602 - RNA, 19 nt, Homo sapiens
  misc_RNA (1)...(19): siRNA sense strand
gcaucauuucccuguguaa

SEQ ID NO: 204603 - RNA, 19 nt, Homo sapiens
  misc_RNA (1)...(19): siRNA sense strand
cugcaaagaguguccaauc

SEQ ID NO: 204604 - RNA, 19 nt, Homo sapiens
  misc_RNA (1)...(19): siRNA sense strand
cuuauaggacugccaugaa

SEQ ID NO: 204605 - RNA, 19 nt, Homo sapiens
  misc_RNA (1)...(19): siRNA sense strand
caaagaguguccaaucauu

SEQ ID NO: 204606 - RNA, 19 nt, Homo sapiens
  misc_RNA (1)...(19): siRNA sense strand
uagcugaccugaauaaugu

SEQ ID NO: 204607 - RNA, 19 nt, Homo sapiens
  misc_RNA (1)...(19): siRNA sense strand
gcaugauucuauccaaauu

SEQ ID NO: 204608 - RNA, 19 nt, Homo sapiens
  misc_RNA (1)...(19): siRNA sense strand
ugaacuggcugcugaaugu

SEQ ID NO: 204609 - RNA, 19 nt, Homo sapiens
  misc_RNA (1)...(19): siRNA sense strand
gauauccugcagauuauua

SEQ ID NO: 204610 - RNA, 19 nt, Homo sapiens
  misc_RNA (1)...(19): siRNA sense strand
gagaagauguucgagacuu

SEQ ID NO: 204611 - RNA, 19 nt, Homo sapiens
  misc_RNA (1)...(19): siRNA sense strand
gcacuuuaauuaugacauc

SEQ ID NO: 204612 - RNA, 19 nt, Homo sapiens
  misc_RNA (1)...(19): siRNA sense strand
guaaagcacauuuggaaga

SEQ ID NO: 204613 - RNA, 19 nt, Homo sapiens
  misc_RNA (1)...(19): siRNA sense strand
gaauauugcacuccgacua

SEQ ID NO: 204614 - RNA, 19 nt, Homo sapiens
  misc_RNA (1)...(19): siRNA sense strand
uuauaggacugccaugaaa

SEQ ID NO: 204615 - RNA, 19 nt, Homo sapiens
  misc_RNA (1)...(19): siRNA sense strand
gggugaaguugcauccuuu

SEQ ID NO: 204616 - RNA, 19 nt, Homo sapiens
  misc_RNA (1)...(19): siRNA sense strand
gcaagagcacaacaauuug

SEQ ID NO: 204617 - RNA, 19 nt, Homo sapiens
  misc_RNA (1)...(19): siRNA sense strand
gcacaacaauuuggucaac

SEQ ID NO: 204618 - RNA, 19 nt, Homo sapiens
  misc_RNA (1)...(19): siRNA sense strand
agcaagagcacaacaauuu

SEQ ID NO: 204619 - RNA, 19 nt, Homo sapiens
  misc_RNA (1)...(19): siRNA sense strand
agaagauguucgagacuuu

SEQ ID NO: 204620 - RNA, 19 nt, Homo sapiens
  misc_RNA (1)...(19): siRNA sense strand
gagcaagagcacaacaauu

SEQ ID NO: 204621 - RNA, 19 nt, Homo sapiens
  misc_RNA (1)...(19): siRNA sense strand
ucaagcaaguggcaaguuc

SEQ ID NO: 204622 - RNA, 19 nt, Homo sapiens
  misc_RNA (1)...(19): siRNA sense strand
ccacgagacucaaacaacu

SEQ ID NO: 204623 - RNA, 19 nt, Homo sapiens
  misc_RNA (1)...(19): siRNA sense strand
cagcacaaccucaagcaaa

SEQ ID NO: 204624 - RNA, 19 nt, Homo sapiens
  misc_RNA (1)...(19): siRNA sense strand
gcaaagaguguccaaucau

SEQ ID NO: 204625 - RNA, 19 nt, Homo sapiens
  misc_RNA (1)...(19): siRNA sense strand
auggauauccugcagauua

SEQ ID NO: 204626 - RNA, 19 nt, Homo sapiens
  misc_RNA (1)...(19): siRNA sense strand
uguaacaucugcaaagagu

SEQ ID NO: 204627 - RNA, 19 nt, Homo sapiens
  misc_RNA (1)...(19): siRNA sense strand
guccggagcugcuuccaau

SEQ ID NO: 204628 - RNA, 19 nt, Homo sapiens
  misc_RNA (1)...(19): siRNA sense strand
gcaaguggcaaguucaaca

SEQ ID NO: 204629 - RNA, 19 nt, Homo sapiens
  misc_RNA (1)...(19): siRNA sense strand
gcuuccaauuugcuaauaa

SEQ ID NO: 204630 - RNA, 19 nt, Homo sapiens
  misc_RNA (1)...(19): siRNA sense strand
uggaagacaaguacagaua

SEQ ID NO: 204631 - RNA, 19 nt, Homo sapiens
  misc_RNA (1)...(19): siRNA sense strand
ggauccguguccugucuuu

SEQ ID NO: 204632 - RNA, 19 nt, Homo sapiens
  misc_RNA (1)...(19): siRNA sense strand
gucuuuagcugaccugaau

SEQ ID NO: 204633 - RNA, 19 nt, Homo sapiens
  misc_RNA (1)...(19): siRNA sense strand
gacaaguacagauaccuuu

SEQ ID NO: 204634 - RNA, 19 nt, Homo sapiens
  misc_RNA (1)...(19): siRNA sense strand
ccaagcaucaggccaaaug

SEQ ID NO: 204635 - RNA, 19 nt, Homo sapiens
  misc_RNA (1)...(19): siRNA sense strand
ggagcaagagcacaacaau

SEQ ID NO: 204636 - RNA, 19 nt, Homo sapiens
  misc_RNA (1)...(19): siRNA sense strand
guguaaagcacauuuggaa

SEQ ID NO: 204637 - RNA, 19 nt, Homo sapiens
  misc_RNA (1)...(19): siRNA sense strand
caagacaguugggugaagu

SEQ ID NO: 204638 - RNA, 19 nt, Homo sapiens
  misc_RNA (1)...(19): siRNA sense strand
gaagauguucgagacuuug

SEQ ID NO: 204639 - RNA, 19 nt, Homo sapiens
  misc_RNA (1)...(19): siRNA sense strand
gucagauucucagcuuaua

SEQ ID NO: 204640 - RNA, 19 nt, Homo sapiens
  misc_RNA (1)...(19): siRNA sense strand
uaacaucugcaaagagugu

SEQ ID NO: 204641 - RNA, 19 nt, Homo sapiens
  misc_RNA (1)...(19): siRNA sense strand
cggagcugcuuccaauuug

SEQ ID NO: 204642 - RNA, 19 nt, Homo sapiens
  misc_RNA (1)...(19): siRNA sense strand
gaagacaaguacagauacc

SEQ ID NO: 204643 - RNA, 19 nt, Homo sapiens
  misc_RNA (1)...(19): siRNA sense strand
ccauggauauccugcagau

SEQ ID NO: 204644 - RNA, 19 nt, Homo sapiens
  misc_RNA (1)...(19): siRNA sense strand
ggcaucauuucccugugua

SEQ ID NO: 204645 - RNA, 19 nt, Homo sapiens
  misc_RNA (1)...(19): siRNA sense strand
uggauauccugcagauuau

SEQ ID NO: 204646 - RNA, 19 nt, Homo sapiens
  misc_RNA (1)...(19): siRNA sense strand
ggaagacaaguacagauac

SEQ ID NO: 204647 - RNA, 19 nt, Homo sapiens
  misc_RNA (1)...(19): siRNA sense strand
ugcaaagaguguccaauca

SEQ ID NO: 204648 - RNA, 19 nt, Homo sapiens
  misc_RNA (1)...(19): siRNA sense strand
guggauaugugucugaacu

SEQ ID NO: 204649 - RNA, 19 nt, Homo sapiens
  misc_RNA (1)...(19): siRNA sense strand
acuggcugcugaauguuua

SEQ ID NO: 204650 - RNA, 19 nt, Homo sapiens
  misc_RNA (1)...(19): siRNA sense strand
acuaucccaugguggaaua

SEQ ID NO: 204651 - RNA, 19 nt, Homo sapiens
  misc_RNA (1)...(19): siRNA sense strand
ccggagcugcuuccaauuu

SEQ ID NO: 204652 - RNA, 19 nt, Homo sapiens
  misc_RNA (1)...(19): siRNA sense strand
ccaaauuccaagacaguug

SEQ ID NO: 204653 - RNA, 19 nt, Homo sapiens
  misc_RNA (1)...(19): siRNA sense strand
cagaaacugccaagcauca

SEQ ID NO: 204654 - RNA, 19 nt, Homo sapiens
  misc_RNA (1)...(19): siRNA sense strand
uaugacaucugccaaagcu

SEQ ID NO: 204655 - RNA, 19 nt, Homo sapiens
  misc_RNA (1)...(19): siRNA sense strand
aaugucagauucucagcuu

SEQ ID NO: 204656 - RNA, 19 nt, Homo sapiens
  misc_RNA (1)...(19): siRNA sense strand
ucgagacuuugccaaggua

SEQ ID NO: 204657 - RNA, 19 nt, Homo sapiens
  misc_RNA (1)...(19): siRNA sense strand
gcaaaaggccauaaaaugc

SEQ ID NO: 204658 - RNA, 19 nt, Homo sapiens
  misc_RNA (1)...(19): siRNA sense strand
cugcaugauucuauccaaa

SEQ ID NO: 204659 - RNA, 19 nt, Homo sapiens
  misc_RNA (1)...(19): siRNA sense strand
uaaagcacauuuggaagac

SEQ ID NO: 204660 - RNA, 19 nt, Homo sapiens
  misc_RNA (1)...(19): siRNA sense strand
acaggagucuaaagcacuu

SEQ ID NO: 204661 - RNA, 19 nt, Homo sapiens
  misc_RNA (1)...(19): siRNA sense strand
acagauaccuuuucaagca

SEQ ID NO: 204662 - RNA, 19 nt, Homo sapiens
  misc_RNA (1)...(19): siRNA sense strand
aagcacauuuggaagacaa

SEQ ID NO: 204663 - RNA, 19 nt, Homo sapiens
  misc_RNA (1)...(19): siRNA sense strand
gcuaauaauaagccagaga

SEQ ID NO: 204664 - RNA, 19 nt, Homo sapiens
  misc_RNA (1)...(19): siRNA sense strand
caagagcacaacaauuugg

SEQ ID NO: 204665 - RNA, 19 nt, Homo sapiens
  misc_RNA (1)...(19): siRNA sense strand
ccugucagcugcaugugau

SEQ ID NO: 204666 - RNA, 19 nt, Homo sapiens
  misc_RNA (1)...(19): siRNA sense strand
gcugcugaauguuuaugau

SEQ ID NO: 204667 - RNA, 19 nt, Homo sapiens
  misc_RNA (1)...(19): siRNA sense strand
acagagcucuaccagucuu

SEQ ID NO: 204668 - RNA, 19 nt, Homo sapiens
  misc_RNA (1)...(19): siRNA sense strand
acaguugggugaaguugca

SEQ ID NO: 204669 - RNA, 19 nt, Homo sapiens
  misc_RNA (1)...(19): siRNA sense strand
guuugaccacuauuuauga

SEQ ID NO: 204670 - RNA, 19 nt, Homo sapiens
  misc_RNA (1)...(19): siRNA sense strand
gcuuauaggacugccauga

SEQ ID NO: 204671 - RNA, 19 nt, Homo sapiens
  misc_RNA (1)...(19): siRNA sense strand
caucaggccaaauguaaca

SEQ ID NO: 204672 - RNA, 19 nt, Homo sapiens
  misc_RNA (1)...(19): siRNA sense strand
gauucuauccaaauuccaa

SEQ ID NO: 204673 - RNA, 19 nt, Homo sapiens
  misc_RNA (1)...(19): siRNA sense strand
ggcaaguucaacaggauuu

SEQ ID NO: 204674 - RNA, 19 nt, Homo sapiens
  misc_RNA (1)...(19): siRNA sense strand
gaacuggcugcugaauguu

SEQ ID NO: 204675 - RNA, 19 nt, Homo sapiens
  misc_RNA (1)...(19): siRNA sense strand
cugcugaauguuuaugaua

SEQ ID NO: 204676 - RNA, 19 nt, Homo sapiens
  misc_RNA (1)...(19): siRNA sense strand
aagcaucaggccaaaugua

SEQ ID NO: 204677 - RNA, 19 nt, Homo sapiens
  misc_RNA (1)...(19): siRNA sense strand
uggcaucauuucccugugu

SEQ ID NO: 204678 - RNA, 19 nt, Homo sapiens
  misc_RNA (1)...(19): siRNA sense strand
ccaugaaacuccgaagacu

SEQ ID NO: 204679 - RNA, 19 nt, Homo sapiens
  misc_RNA (1)...(19): siRNA sense strand
auaauaagccagagaucga

SEQ ID NO: 204680 - RNA, 19 nt, Homo sapiens
  misc_RNA (1)...(19): siRNA sense strand
cuaauaauaagccagagau

SEQ ID NO: 204681 - RNA, 19 nt, Homo sapiens
  misc_RNA (1)...(19): siRNA sense strand
ugggugaaguugcauccuu

SEQ ID NO: 204682 - RNA, 19 nt, Homo sapiens
  misc_RNA (1)...(19): siRNA sense strand
caucauuucccuguguaaa

SEQ ID NO: 204683 - RNA, 19 nt, Homo sapiens
  misc_RNA (1)...(19): siRNA sense strand
gcguggauaugugucugaa

SEQ ID NO: 204684 - RNA, 19 nt, Homo sapiens
  misc_RNA (1)...(19): siRNA sense strand
gcacuaucccaugguggaa

SEQ ID NO: 204685 - RNA, 19 nt, Homo sapiens
  misc_RNA (1)...(19): siRNA sense strand
gagccugucagcugcaugu

SEQ ID NO: 204686 - RNA, 19 nt, Homo sapiens
  misc_RNA (1)...(19): siRNA sense strand
guacagauaccuuuucaag

SEQ ID NO: 204687 - RNA, 19 nt, Homo sapiens
  misc_RNA (1)...(19): siRNA sense strand
gucccucucugcguggaua

SEQ ID NO: 204688 - RNA, 19 nt, Homo sapiens
  misc_RNA (1)...(19): siRNA sense strand
ggagcugcuuccaauuugc

SEQ ID NO: 204689 - RNA, 19 nt, Homo sapiens
  misc_RNA (1)...(19): siRNA sense strand
uuagcugaccugaauaaug

SEQ ID NO: 204690 - RNA, 19 nt, Homo sapiens
  misc_RNA (1)...(19): siRNA sense strand
guggcaaguucaacaggau

SEQ ID NO: 204691 - RNA, 19 nt, Homo sapiens
  misc_RNA (1)...(19): siRNA sense strand
acaacaauuuggucaacgu

SEQ ID NO: 204692 - RNA, 19 nt, Homo sapiens
  misc_RNA (1)...(19): siRNA sense strand
gacuacaucaggagaagau

SEQ ID NO: 204693 - RNA, 19 nt, Homo sapiens
  misc_RNA (1)...(19): siRNA sense strand
uaauaagccagagaucgaa

SEQ ID NO: 204694 - RNA, 19 nt, Homo sapiens
  misc_RNA (1)...(19): siRNA sense strand
ugucagauucucagcuuau

SEQ ID NO: 204695 - RNA, 19 nt, Homo sapiens
  misc_RNA (1)...(19): siRNA sense strand
ggauauccugcagauuauu

SEQ ID NO: 204696 - RNA, 19 nt, Homo sapiens
  misc_RNA (1)...(19): siRNA sense strand
agcaucaggccaaauguaa

SEQ ID NO: 204697 - RNA, 19 nt, Homo sapiens
  misc_RNA (1)...(19): siRNA sense strand
gcccuuugcuuggaucucu

SEQ ID NO: 204698 - RNA, 19 nt, Homo sapiens
  misc_RNA (1)...(19): siRNA sense strand
gcugaauguuuaugauacg

SEQ ID NO: 204699 - RNA, 19 nt, Homo sapiens
  misc_RNA (1)...(19): siRNA sense strand
agacuuugccaagguacua

SEQ ID NO: 204700 - RNA, 19 nt, Homo sapiens
  misc_RNA (1)...(19): siRNA sense strand
caagcaaguggcaaguuca

SEQ ID NO: 204701 - RNA, 19 nt, Homo sapiens
  misc_RNA (1)...(19): siRNA sense strand
agacaaguacagauaccuu

SEQ ID NO: 204702 - RNA, 19 nt, Homo sapiens
  misc_RNA (1)...(19): siRNA sense strand
gcaucauuucccuguguaa

SEQ ID NO: 204703 - RNA, 19 nt, Homo sapiens
  misc_RNA (1)...(19): siRNA sense strand
cugcaaagaguguccaauc

SEQ ID NO: 204704 - RNA, 19 nt, Homo sapiens
  misc_RNA (1)...(19): siRNA sense strand
cuuauaggacugccaugaa

SEQ ID NO: 204705 - RNA, 19 nt, Homo sapiens
  misc_RNA (1)...(19): siRNA sense strand
caaagaguguccaaucauu

SEQ ID NO: 204706 - RNA, 19 nt, Homo sapiens
  misc_RNA (1)...(19): siRNA sense strand
uagcugaccugaauaaugu

SEQ ID NO: 204707 - RNA, 19 nt, Homo sapiens
  misc_RNA (1)...(19): siRNA sense strand
gcaugauucuauccaaauu

SEQ ID NO: 204708 - RNA, 19 nt, Homo sapiens
  misc_RNA (1)...(19): siRNA sense strand
ugaacuggcugcugaaugu

SEQ ID NO: 204709 - RNA, 19 nt, Homo sapiens
  misc_RNA (1)...(19): siRNA sense strand
gauauccugcagauuauua

SEQ ID NO: 204710 - RNA, 19 nt, Homo sapiens
  misc_RNA (1)...(19): siRNA sense strand
gagaagauguucgagacuu

SEQ ID NO: 204711 - RNA, 19 nt, Homo sapiens
  misc_RNA (1)...(19): siRNA sense strand
gcacuuuaauuaugacauc

SEQ ID NO: 204712 - RNA, 19 nt, Homo sapiens
  misc_RNA (1)...(19): siRNA sense strand
guaaagcacauuuggaaga

SEQ ID NO: 204713 - RNA, 19 nt, Homo sapiens
  misc_RNA (1)...(19): siRNA sense strand
gaauauugcacuccgacua

SEQ ID NO: 204714 - RNA, 19 nt, Homo sapiens
  misc_RNA (1)...(19): siRNA sense strand
uuauaggacugccaugaaa

SEQ ID NO: 204715 - RNA, 19 nt, Homo sapiens
  misc_RNA (1)...(19): siRNA sense strand
gggugaaguugcauccuuu

SEQ ID NO: 204716 - RNA, 19 nt, Homo sapiens
  misc_RNA (1)...(19): siRNA sense strand
gcaagagcacaacaauuug

SEQ ID NO: 204717 - RNA, 19 nt, Homo sapiens
  misc_RNA (1)...(19): siRNA sense strand
gcacaacaauuuggucaac

SEQ ID NO: 204718 - RNA, 19 nt, Homo sapiens
  misc_RNA (1)...(19): siRNA sense strand
agcaagagcacaacaauuu

SEQ ID NO: 204719 - RNA, 19 nt, Homo sapiens
  misc_RNA (1)...(19): siRNA sense strand
agaagauguucgagacuuu

SEQ ID NO: 204720 - RNA, 19 nt, Homo sapiens
  misc_RNA (1)...(19): siRNA sense strand
gagcaagagcacaacaauu

SEQ ID NO: 204721 - RNA, 19 nt, Homo sapiens
  misc_RNA (1)...(19): siRNA sense strand
ucaagcaaguggcaaguuc

SEQ ID NO: 204722 - RNA, 19 nt, Homo sapiens
  misc_RNA (1)...(19): siRNA sense strand
ccacgagacucaaacaacu

SEQ ID NO: 204723 - RNA, 19 nt, Homo sapiens
  misc_RNA (1)...(19): siRNA sense strand
cagcacaaccucaagcaaa

SEQ ID NO: 204724 - RNA, 19 nt, Homo sapiens
  misc_RNA (1)...(19): siRNA sense strand
gcaaagaguguccaaucau

SEQ ID NO: 204725 - RNA, 19 nt, Homo sapiens
  misc_RNA (1)...(19): siRNA sense strand
auggauauccugcagauua

SEQ ID NO: 204726 - RNA, 19 nt, Homo sapiens
  misc_RNA (1)...(19): siRNA sense strand
uguaacaucugcaaagagu

SEQ ID NO: 204727 - RNA, 19 nt, Homo sapiens
  misc_RNA (1)...(19): siRNA sense strand
guccggagcugcuuccaau

SEQ ID NO: 204728 - RNA, 19 nt, Homo sapiens
  misc_RNA (1)...(19): siRNA sense strand
gcaaguggcaaguucaaca

SEQ ID NO: 204729 - RNA, 19 nt, Homo sapiens
  misc_RNA (1)...(19): siRNA sense strand
gcuuccaauuugcuaauaa

SEQ ID NO: 204730 - RNA, 19 nt, Homo sapiens
  misc_RNA (1)...(19): siRNA sense strand
uggaagacaaguacagaua

SEQ ID NO: 204731 - RNA, 19 nt, Homo sapiens
  misc_RNA (1)...(19): siRNA sense strand
ggauccguguccugucuuu

SEQ ID NO: 204732 - RNA, 19 nt, Homo sapiens
  misc_RNA (1)...(19): siRNA sense strand
gucuuuagcugaccugaau

SEQ ID NO: 204733 - RNA, 19 nt, Homo sapiens
  misc_RNA (1)...(19): siRNA sense strand
gacaaguacagauaccuuu

SEQ ID NO: 204734 - RNA, 19 nt, Homo sapiens
  misc_RNA (1)...(19): siRNA sense strand
ccaagcaucaggccaaaug

SEQ ID NO: 204735 - RNA, 19 nt, Homo sapiens
  misc_RNA (1)...(19): siRNA sense strand
ggagcaagagcacaacaau

SEQ ID NO: 204736 - RNA, 19 nt, Homo sapiens
  misc_RNA (1)...(19): siRNA sense strand
guguaaagcacauuuggaa

SEQ ID NO: 204737 - RNA, 19 nt, Homo sapiens
  misc_RNA (1)...(19): siRNA sense strand
caagacaguugggugaagu

SEQ ID NO: 204738 - RNA, 19 nt, Homo sapiens
  misc_RNA (1)...(19): siRNA sense strand
gaagauguucgagacuuug

SEQ ID NO: 204739 - RNA, 19 nt, Homo sapiens
  misc_RNA (1)...(19): siRNA sense strand
gucagauucucagcuuaua

SEQ ID NO: 204740 - RNA, 19 nt, Homo sapiens
  misc_RNA (1)...(19): siRNA sense strand
uaacaucugcaaagagugu

SEQ ID NO: 204741 - RNA, 19 nt, Homo sapiens
  misc_RNA (1)...(19): siRNA sense strand
cggagcugcuuccaauuug

SEQ ID NO: 204742 - RNA, 19 nt, Homo sapiens
  misc_RNA (1)...(19): siRNA sense strand
gaagacaaguacagauacc

SEQ ID NO: 204743 - RNA, 19 nt, Homo sapiens
  misc_RNA (1)...(19): siRNA sense strand
ccauggauauccugcagau

SEQ ID NO: 204744 - RNA, 19 nt, Homo sapiens
  misc_RNA (1)...(19): siRNA sense strand
ggcaucauuucccugugua

SEQ ID NO: 204745 - RNA, 19 nt, Homo sapiens
  misc_RNA (1)...(19): siRNA sense strand
uggauauccugcagauuau

SEQ ID NO: 204746 - RNA, 19 nt, Homo sapiens
  misc_RNA (1)...(19): siRNA sense strand
ggaagacaaguacagauac

SEQ ID NO: 204747 - RNA, 19 nt, Homo sapiens
  misc_RNA (1)...(19): siRNA sense strand
ugcaaagaguguccaauca

SEQ ID NO: 204748 - RNA, 19 nt, Homo sapiens
  misc_RNA (1)...(19): siRNA sense strand
guggauaugugucugaacu

SEQ ID NO: 204749 - RNA, 19 nt, Homo sapiens
  misc_RNA (1)...(19): siRNA sense strand
acuggcugcugaauguuua

SEQ ID NO: 204750 - RNA, 19 nt, Homo sapiens
  misc_RNA (1)...(19): siRNA sense strand
acuaucccaugguggaaua

SEQ ID NO: 204751 - RNA, 19 nt, Homo sapiens
  misc_RNA (1)...(19): siRNA sense strand
ccggagcugcuuccaauuu

SEQ ID NO: 204752 - RNA, 19 nt, Homo sapiens
  misc_RNA (1)...(19): siRNA sense strand
ccaaauuccaagacaguug

SEQ ID NO: 204753 - RNA, 19 nt, Homo sapiens
  misc_RNA (1)...(19): siRNA sense strand
cagaaacugccaagcauca

SEQ ID NO: 204754 - RNA, 19 nt, Homo sapiens
  misc_RNA (1)...(19): siRNA sense strand
uaugacaucugccaaagcu

SEQ ID NO: 204755 - RNA, 19 nt, Homo sapiens
  misc_RNA (1)...(19): siRNA sense strand
aaugucagauucucagcuu

SEQ ID NO: 204756 - RNA, 19 nt, Homo sapiens
  misc_RNA (1)...(19): siRNA sense strand
ucgagacuuugccaaggua

SEQ ID NO: 204757 - RNA, 19 nt, Homo sapiens
  misc_RNA (1)...(19): siRNA sense strand
gcaaaaggccauaaaaugc

SEQ ID NO: 204758 - RNA, 19 nt, Homo sapiens
  misc_RNA (1)...(19): siRNA sense strand
cugcaugauucuauccaaa

SEQ ID NO: 204759 - RNA, 19 nt, Homo sapiens
  misc_RNA (1)...(19): siRNA sense strand
uaaagcacauuuggaagac

SEQ ID NO: 204760 - RNA, 19 nt, Homo sapiens
  misc_RNA (1)...(19): siRNA sense strand
acaggagucuaaagcacuu

SEQ ID NO: 204761 - RNA, 19 nt, Homo sapiens
  misc_RNA (1)...(19): siRNA sense strand
acagauaccuuuucaagca

SEQ ID NO: 204762 - RNA, 19 nt, Homo sapiens
  misc_RNA (1)...(19): siRNA sense strand
aagcacauuuggaagacaa

SEQ ID NO: 204763 - RNA, 19 nt, Homo sapiens
  misc_RNA (1)...(19): siRNA sense strand
gcuaauaauaagccagaga

SEQ ID NO: 204764 - RNA, 19 nt, Homo sapiens
  misc_RNA (1)...(19): siRNA sense strand
caagagcacaacaauuugg

SEQ ID NO: 204765 - RNA, 19 nt, Homo sapiens
  misc_RNA (1)...(19): siRNA sense strand
ccugucagcugcaugugau

SEQ ID NO: 204766 - RNA, 19 nt, Homo sapiens
  misc_RNA (1)...(19): siRNA sense strand
gcugcugaauguuuaugau

SEQ ID NO: 204767 - RNA, 19 nt, Homo sapiens
  misc_RNA (1)...(19): siRNA sense strand
acagagcucuaccagucuu

SEQ ID NO: 204768 - RNA, 19 nt, Homo sapiens
  misc_RNA (1)...(19): siRNA sense strand
acaguugggugaaguugca

SEQ ID NO: 204769 - RNA, 19 nt, Homo sapiens
  misc_RNA (1)...(19): siRNA sense strand
guuugaccacuauuuauga

SEQ ID NO: 204770 - RNA, 19 nt, Homo sapiens
  misc_RNA (1)...(19): siRNA sense strand
gcuuauaggacugccauga

SEQ ID NO: 204771 - RNA, 19 nt, Homo sapiens
  misc_RNA (1)...(19): siRNA sense strand
caucaggccaaauguaaca

SEQ ID NO: 204772 - RNA, 19 nt, Homo sapiens
  misc_RNA (1)...(19): siRNA sense strand
gauucuauccaaauuccaa

SEQ ID NO: 204773 - RNA, 19 nt, Homo sapiens
  misc_RNA (1)...(19): siRNA sense strand
ggcaaguucaacaggauuu

SEQ ID NO: 204774 - RNA, 19 nt, Homo sapiens
  misc_RNA (1)...(19): siRNA sense strand
gaacuggcugcugaauguu

SEQ ID NO: 204775 - RNA, 19 nt, Homo sapiens
  misc_RNA (1)...(19): siRNA sense strand
cugcugaauguuuaugaua

SEQ ID NO: 204776 - RNA, 19 nt, Homo sapiens
  misc_RNA (1)...(19): siRNA sense strand
aagcaucaggccaaaugua

SEQ ID NO: 204777 - RNA, 19 nt, Homo sapiens
  misc_RNA (1)...(19): siRNA sense strand
uggcaucauuucccugugu

SEQ ID NO: 204778 - RNA, 19 nt, Homo sapiens
  misc_RNA (1)...(19): siRNA sense strand
ccaugaaacuccgaagacu

SEQ ID NO: 204779 - RNA, 19 nt, Homo sapiens
  misc_RNA (1)...(19): siRNA sense strand
auaauaagccagagaucga

SEQ ID NO: 204780 - RNA, 19 nt, Homo sapiens
  misc_RNA (1)...(19): siRNA sense strand
cuaauaauaagccagagau

SEQ ID NO: 204781 - RNA, 19 nt, Homo sapiens
  misc_RNA (1)...(19): siRNA sense strand
ugggugaaguugcauccuu

SEQ ID NO: 204782 - RNA, 19 nt, Homo sapiens
  misc_RNA (1)...(19): siRNA sense strand
caucauuucccuguguaaa

SEQ ID NO: 204783 - RNA, 19 nt, Homo sapiens
  misc_RNA (1)...(19): siRNA sense strand
gcguggauaugugucugaa

SEQ ID NO: 204784 - RNA, 19 nt, Homo sapiens
  misc_RNA (1)...(19): siRNA sense strand
gcacuaucccaugguggaa

SEQ ID NO: 204785 - RNA, 19 nt, Homo sapiens
  misc_RNA (1)...(19): siRNA sense strand
gagccugucagcugcaugu

SEQ ID NO: 204786 - RNA, 19 nt, Homo sapiens
  misc_RNA (1)...(19): siRNA sense strand
guacagauaccuuuucaag

SEQ ID NO: 204787 - RNA, 19 nt, Homo sapiens
  misc_RNA (1)...(19): siRNA sense strand
gucccucucugcguggaua

SEQ ID NO: 204788 - RNA, 19 nt, Homo sapiens
  misc_RNA (1)...(19): siRNA sense strand
ggagcugcuuccaauuugc

SEQ ID NO: 204789 - RNA, 19 nt, Homo sapiens
  misc_RNA (1)...(19): siRNA sense strand
uuagcugaccugaauaaug

SEQ ID NO: 204790 - RNA, 19 nt, Homo sapiens
  misc_RNA (1)...(19): siRNA sense strand
guggcaaguucaacaggau

SEQ ID NO: 204791 - RNA, 19 nt, Homo sapiens
  misc_RNA (1)...(19): siRNA sense strand
acaacaauuuggucaacgu

SEQ ID NO: 204792 - RNA, 19 nt, Homo sapiens
  misc_RNA (1)...(19): siRNA sense strand
gacuacaucaggagaagau

SEQ ID NO: 204793 - RNA, 19 nt, Homo sapiens
  misc_RNA (1)...(19): siRNA sense strand
uaauaagccagagaucgaa

SEQ ID NO: 204794 - RNA, 19 nt, Homo sapiens
  misc_RNA (1)...(19): siRNA sense strand
ugucagauucucagcuuau

SEQ ID NO: 204795 - RNA, 19 nt, Homo sapiens
  misc_RNA (1)...(19): siRNA sense strand
ggauauccugcagauuauu

SEQ ID NO: 204796 - RNA, 19 nt, Homo sapiens
  misc_RNA (1)...(19): siRNA sense strand
agcaucaggccaaauguaa

SEQ ID NO: 204797 - RNA, 19 nt, Homo sapiens
  misc_RNA (1)...(19): siRNA sense strand
gcccuuugcuuggaucucu

SEQ ID NO: 204798 - RNA, 19 nt, Homo sapiens
  misc_RNA (1)...(19): siRNA sense strand
gcugaauguuuaugauacg

SEQ ID NO: 204799 - RNA, 19 nt, Homo sapiens
  misc_RNA (1)...(19): siRNA sense strand
agacuuugccaagguacua

SEQ ID NO: 204800 - RNA, 19 nt, Homo sapiens
  misc_RNA (1)...(19): siRNA sense strand
caagcaaguggcaaguuca

SEQ ID NO: 204801 - RNA, 19 nt, Homo sapiens
  misc_RNA (1)...(19): siRNA sense strand
agacaaguacagauaccuu

SEQ ID NO: 204802 - RNA, 19 nt, Homo sapiens
  misc_RNA (1)...(19): siRNA sense strand
gcaucauuucccuguguaa

SEQ ID NO: 204803 - RNA, 19 nt, Homo sapiens
  misc_RNA (1)...(19): siRNA sense strand
cugcaaagaguguccaauc

SEQ ID NO: 204804 - RNA, 19 nt, Homo sapiens
  misc_RNA (1)...(19): siRNA sense strand
cuuauaggacugccaugaa

SEQ ID NO: 204805 - RNA, 19 nt, Homo sapiens
  misc_RNA (1)...(19): siRNA sense strand
caaagaguguccaaucauu

SEQ ID NO: 204806 - RNA, 19 nt, Homo sapiens
  misc_RNA (1)...(19): siRNA sense strand
uagcugaccugaauaaugu

SEQ ID NO: 204807 - RNA, 19 nt, Homo sapiens
  misc_RNA (1)...(19): siRNA sense strand
gcaugauucuauccaaauu

SEQ ID NO: 204808 - RNA, 19 nt, Homo sapiens
  misc_RNA (1)...(19): siRNA sense strand
ugaacuggcugcugaaugu

SEQ ID NO: 204809 - RNA, 19 nt, Homo sapiens
  misc_RNA (1)...(19): siRNA sense strand
gauauccugcagauuauua

SEQ ID NO: 204810 - RNA, 19 nt, Homo sapiens
  misc_RNA (1)...(19): siRNA sense strand
gagaagauguucgagacuu

SEQ ID NO: 204811 - RNA, 19 nt, Homo sapiens
  misc_RNA (1)...(19): siRNA sense strand
gcacuuuaauuaugacauc

SEQ ID NO: 204812 - RNA, 19 nt, Homo sapiens
  misc_RNA (1)...(19): siRNA sense strand
guaaagcacauuuggaaga

SEQ ID NO: 204813 - RNA, 19 nt, Homo sapiens
  misc_RNA (1)...(19): siRNA sense strand
gaauauugcacuccgacua

SEQ ID NO: 204814 - RNA, 19 nt, Homo sapiens
  misc_RNA (1)...(19): siRNA sense strand
uuauaggacugccaugaaa

SEQ ID NO: 204815 - RNA, 19 nt, Homo sapiens
  misc_RNA (1)...(19): siRNA sense strand
gggugaaguugcauccuuu

SEQ ID NO: 204816 - RNA, 19 nt, Homo sapiens
  misc_RNA (1)...(19): siRNA sense strand
gcaagagcacaacaauuug

SEQ ID NO: 204817 - RNA, 19 nt, Homo sapiens
  misc_RNA (1)...(19): siRNA sense strand
gcacaacaauuuggucaac

SEQ ID NO: 204818 - RNA, 19 nt, Homo sapiens
  misc_RNA (1)...(19): siRNA sense strand
agcaagagcacaacaauuu

SEQ ID NO: 204819 - RNA, 19 nt, Homo sapiens
  misc_RNA (1)...(19): siRNA sense strand
agaagauguucgagacuuu

SEQ ID NO: 204820 - RNA, 19 nt, Homo sapiens
  misc_RNA (1)...(19): siRNA sense strand
gagcaagagcacaacaauu

SEQ ID NO: 204821 - RNA, 19 nt, Homo sapiens
  misc_RNA (1)...(19): siRNA sense strand
ucaagcaaguggcaaguuc

SEQ ID NO: 204822 - RNA, 19 nt, Homo sapiens
  misc_RNA (1)...(19): siRNA sense strand
ccacgagacucaaacaacu

SEQ ID NO: 204823 - RNA, 19 nt, Homo sapiens
  misc_RNA (1)...(19): siRNA sense strand
cagcacaaccucaagcaaa

SEQ ID NO: 204824 - RNA, 19 nt, Homo sapiens
  misc_RNA (1)...(19): siRNA sense strand
gcaaagaguguccaaucau

SEQ ID NO: 204825 - RNA, 19 nt, Homo sapiens
  misc_RNA (1)...(19): siRNA sense strand
auggauauccugcagauua

SEQ ID NO: 204826 - RNA, 19 nt, Homo sapiens
  misc_RNA (1)...(19): siRNA sense strand
uguaacaucugcaaagagu

SEQ ID NO: 204827 - RNA, 19 nt, Homo sapiens
  misc_RNA (1)...(19): siRNA sense strand
guccggagcugcuuccaau

SEQ ID NO: 204828 - RNA, 19 nt, Homo sapiens
  misc_RNA (1)...(19): siRNA sense strand
gcaaguggcaaguucaaca

SEQ ID NO: 204829 - RNA, 19 nt, Homo sapiens
  misc_RNA (1)...(19): siRNA sense strand
gcuuccaauuugcuaauaa

SEQ ID NO: 204830 - RNA, 19 nt, Homo sapiens
  misc_RNA (1)...(19): siRNA sense strand
uggaagacaaguacagaua

SEQ ID NO: 204831 - RNA, 19 nt, Homo sapiens
  misc_RNA (1)...(19): siRNA sense strand
ggauccguguccugucuuu

SEQ ID NO: 204832 - RNA, 19 nt, Homo sapiens
  misc_RNA (1)...(19): siRNA sense strand
gucuuuagcugaccugaau

SEQ ID NO: 204833 - RNA, 19 nt, Homo sapiens
  misc_RNA (1)...(19): siRNA sense strand
gacaaguacagauaccuuu

SEQ ID NO: 204834 - RNA, 19 nt, Homo sapiens
  misc_RNA (1)...(19): siRNA sense strand
ccaagcaucaggccaaaug

SEQ ID NO: 204835 - RNA, 19 nt, Homo sapiens
  misc_RNA (1)...(19): siRNA sense strand
ggagcaagagcacaacaau

SEQ ID NO: 204836 - RNA, 19 nt, Homo sapiens
  misc_RNA (1)...(19): siRNA sense strand
guguaaagcacauuuggaa

SEQ ID NO: 204837 - RNA, 19 nt, Homo sapiens
  misc_RNA (1)...(19): siRNA sense strand
caagacaguugggugaagu

SEQ ID NO: 204838 - RNA, 19 nt, Homo sapiens
  misc_RNA (1)...(19): siRNA sense strand
gaagauguucgagacuuug

SEQ ID NO: 204839 - RNA, 19 nt, Homo sapiens
  misc_RNA (1)...(19): siRNA sense strand
gucagauucucagcuuaua

SEQ ID NO: 204840 - RNA, 19 nt, Homo sapiens
  misc_RNA (1)...(19): siRNA sense strand
uaacaucugcaaagagugu

SEQ ID NO: 204841 - RNA, 19 nt, Homo sapiens
  misc_RNA (1)...(19): siRNA sense strand
cggagcugcuuccaauuug

SEQ ID NO: 204842 - RNA, 19 nt, Homo sapiens
  misc_RNA (1)...(19): siRNA sense strand
gaagacaaguacagauacc

SEQ ID NO: 204843 - RNA, 19 nt, Homo sapiens
  misc_RNA (1)...(19): siRNA sense strand
ccauggauauccugcagau

SEQ ID NO: 204844 - RNA, 19 nt, Homo sapiens
  misc_RNA (1)...(19): siRNA sense strand
ggcaucauuucccugugua

SEQ ID NO: 204845 - RNA, 19 nt, Homo sapiens
  misc_RNA (1)...(19): siRNA sense strand
uggauauccugcagauuau

SEQ ID NO: 204846 - RNA, 19 nt, Homo sapiens
  misc_RNA (1)...(19): siRNA sense strand
ggaagacaaguacagauac

SEQ ID NO: 204847 - RNA, 19 nt, Homo sapiens
  misc_RNA (1)...(19): siRNA sense strand
ugcaaagaguguccaauca

SEQ ID NO: 204848 - RNA, 19 nt, Homo sapiens
  misc_RNA (1)...(19): siRNA sense strand
guggauaugugucugaacu

SEQ ID NO: 204849 - RNA, 19 nt, Homo sapiens
  misc_RNA (1)...(19): siRNA sense strand
acuggcugcugaauguuua

SEQ ID NO: 204850 - RNA, 19 nt, Homo sapiens
  misc_RNA (1)...(19): siRNA sense strand
acuaucccaugguggaaua

SEQ ID NO: 204851 - RNA, 19 nt, Homo sapiens
  misc_RNA (1)...(19): siRNA sense strand
ccggagcugcuuccaauuu

SEQ ID NO: 204852 - RNA, 19 nt, Homo sapiens
  misc_RNA (1)...(19): siRNA sense strand
ccaaauuccaagacaguug

SEQ ID NO: 204853 - RNA, 19 nt, Homo sapiens
  misc_RNA (1)...(19): siRNA sense strand
cagaaacugccaagcauca

SEQ ID NO: 204854 - RNA, 19 nt, Homo sapiens
  misc_RNA (1)...(19): siRNA sense strand
uaugacaucugccaaagcu

SEQ ID NO: 204855 - RNA, 19 nt, Homo sapiens
  misc_RNA (1)...(19): siRNA sense strand
aaugucagauucucagcuu

SEQ ID NO: 204856 - RNA, 19 nt, Homo sapiens
  misc_RNA (1)...(19): siRNA sense strand
ucgagacuuugccaaggua

SEQ ID NO: 204857 - RNA, 19 nt, Homo sapiens
  misc_RNA (1)...(19): siRNA sense strand
gcaaaaggccauaaaaugc

SEQ ID NO: 204858 - RNA, 19 nt, Homo sapiens
  misc_RNA (1)...(19): siRNA sense strand
cugcaugauucuauccaaa

SEQ ID NO: 204859 - RNA, 19 nt, Homo sapiens
  misc_RNA (1)...(19): siRNA sense strand
uaaagcacauuuggaagac

SEQ ID NO: 204860 - RNA, 19 nt, Homo sapiens
  misc_RNA (1)...(19): siRNA sense strand
acaggagucuaaagcacuu

SEQ ID NO: 204861 - RNA, 19 nt, Homo sapiens
  misc_RNA (1)...(19): siRNA sense strand
acagauaccuuuucaagca

SEQ ID NO: 204862 - RNA, 19 nt, Homo sapiens
  misc_RNA (1)...(19): siRNA sense strand
aagcacauuuggaagacaa

SEQ ID NO: 204863 - RNA, 19 nt, Homo sapiens
  misc_RNA (1)...(19): siRNA sense strand
gcuaauaauaagccagaga

SEQ ID NO: 204864 - RNA, 19 nt, Homo sapiens
  misc_RNA (1)...(19): siRNA sense strand
caagagcacaacaauuugg

SEQ ID NO: 204865 - RNA, 19 nt, Homo sapiens
  misc_RNA (1)...(19): siRNA sense strand
ccugucagcugcaugugau

SEQ ID NO: 204866 - RNA, 19 nt, Homo sapiens
  misc_RNA (1)...(19): siRNA sense strand
gcugcugaauguuuaugau

SEQ ID NO: 204867 - RNA, 19 nt, Homo sapiens
  misc_RNA (1)...(19): siRNA sense strand
acagagcucuaccagucuu

SEQ ID NO: 204868 - RNA, 19 nt, Homo sapiens
  misc_RNA (1)...(19): siRNA sense strand
acaguugggugaaguugca

SEQ ID NO: 204869 - RNA, 19 nt, Homo sapiens
  misc_RNA (1)...(19): siRNA sense strand
guuugaccacuauuuauga

SEQ ID NO: 204870 - RNA, 19 nt, Homo sapiens
  misc_RNA (1)...(19): siRNA sense strand
gcuuauaggacugccauga

SEQ ID NO: 204871 - RNA, 19 nt, Homo sapiens
  misc_RNA (1)...(19): siRNA sense strand
caucaggccaaauguaaca

SEQ ID NO: 204872 - RNA, 19 nt, Homo sapiens
  misc_RNA (1)...(19): siRNA sense strand
gauucuauccaaauuccaa

SEQ ID NO: 204873 - RNA, 19 nt, Homo sapiens
  misc_RNA (1)...(19): siRNA sense strand
ggcaaguucaacaggauuu

SEQ ID NO: 204874 - RNA, 19 nt, Homo sapiens
  misc_RNA (1)...(19): siRNA sense strand
gaacuggcugcugaauguu

SEQ ID NO: 204875 - RNA, 19 nt, Homo sapiens
  misc_RNA (1)...(19): siRNA sense strand
cugcugaauguuuaugaua

SEQ ID NO: 204876 - RNA, 19 nt, Homo sapiens
  misc_RNA (1)...(19): siRNA sense strand
aagcaucaggccaaaugua

SEQ ID NO: 204877 - RNA, 19 nt, Homo sapiens
  misc_RNA (1)...(19): siRNA sense strand
uggcaucauuucccugugu

SEQ ID NO: 204878 - RNA, 19 nt, Homo sapiens
  misc_RNA (1)...(19): siRNA sense strand
ccaugaaacuccgaagacu

SEQ ID NO: 204879 - RNA, 19 nt, Homo sapiens
  misc_RNA (1)...(19): siRNA sense strand
auaauaagccagagaucga

SEQ ID NO: 204880 - RNA, 19 nt, Homo sapiens
  misc_RNA (1)...(19): siRNA sense strand
cuaauaauaagccagagau

SEQ ID NO: 204881 - RNA, 19 nt, Homo sapiens
  misc_RNA (1)...(19): siRNA sense strand
ugggugaaguugcauccuu

SEQ ID NO: 204882 - RNA, 19 nt, Homo sapiens
  misc_RNA (1)...(19): siRNA sense strand
caucauuucccuguguaaa

SEQ ID NO: 204883 - RNA, 19 nt, Homo sapiens
  misc_RNA (1)...(19): siRNA sense strand
gcguggauaugugucugaa

SEQ ID NO: 204884 - RNA, 19 nt, Homo sapiens
  misc_RNA (1)...(19): siRNA sense strand
gcacuaucccaugguggaa

SEQ ID NO: 204885 - RNA, 19 nt, Homo sapiens
  misc_RNA (1)...(19): siRNA sense strand
gagccugucagcugcaugu

SEQ ID NO: 204886 - RNA, 19 nt, Homo sapiens
  misc_RNA (1)...(19): siRNA sense strand
guacagauaccuuuucaag

SEQ ID NO: 204887 - RNA, 19 nt, Homo sapiens
  misc_RNA (1)...(19): siRNA sense strand
gucccucucugcguggaua

SEQ ID NO: 204888 - RNA, 19 nt, Homo sapiens
  misc_RNA (1)...(19): siRNA sense strand
ggagcugcuuccaauuugc

SEQ ID NO: 204889 - RNA, 19 nt, Homo sapiens
  misc_RNA (1)...(19): siRNA sense strand
uuagcugaccugaauaaug

SEQ ID NO: 204890 - RNA, 19 nt, Homo sapiens
  misc_RNA (1)...(19): siRNA sense strand
guggcaaguucaacaggau

SEQ ID NO: 204891 - RNA, 19 nt, Homo sapiens
  misc_RNA (1)...(19): siRNA sense strand
acaacaauuuggucaacgu

SEQ ID NO: 204892 - RNA, 19 nt, Homo sapiens
  misc_RNA (1)...(19): siRNA sense strand
gacuacaucaggagaagau

SEQ ID NO: 204893 - RNA, 19 nt, Homo sapiens
  misc_RNA (1)...(19): siRNA sense strand
uaauaagccagagaucgaa

SEQ ID NO: 204894 - RNA, 19 nt, Homo sapiens
  misc_RNA (1)...(19): siRNA sense strand
ugucagauucucagcuuau

SEQ ID NO: 204895 - RNA, 19 nt, Homo sapiens
  misc_RNA (1)...(19): siRNA sense strand
ggauauccugcagauuauu

SEQ ID NO: 204896 - RNA, 19 nt, Homo sapiens
  misc_RNA (1)...(19): siRNA sense strand
agcaucaggccaaauguaa

SEQ ID NO: 204897 - RNA, 19 nt, Homo sapiens
  misc_RNA (1)...(19): siRNA sense strand
gcccuuugcuuggaucucu

SEQ ID NO: 204898 - RNA, 19 nt, Homo sapiens
  misc_RNA (1)...(19): siRNA sense strand
gcugaauguuuaugauacg

SEQ ID NO: 204899 - RNA, 19 nt, Homo sapiens
  misc_RNA (1)...(19): siRNA sense strand
agacuuugccaagguacua

SEQ ID NO: 204900 - RNA, 19 nt, Homo sapiens
  misc_RNA (1)...(19): siRNA sense strand
caagcaaguggcaaguuca

SEQ ID NO: 204901 - RNA, 19 nt, Homo sapiens
  misc_RNA (1)...(19): siRNA sense strand
agacaaguacagauaccuu

SEQ ID NO: 204902 - RNA, 19 nt, Homo sapiens
  misc_RNA (1)...(19): siRNA sense strand
gcaucauuucccuguguaa

SEQ ID NO: 204903 - RNA, 19 nt, Homo sapiens
  misc_RNA (1)...(19): siRNA sense strand
cugcaaagaguguccaauc

SEQ ID NO: 204904 - RNA, 19 nt, Homo sapiens
  misc_RNA (1)...(19): siRNA sense strand
cuuauaggacugccaugaa

SEQ ID NO: 204905 - RNA, 19 nt, Homo sapiens
  misc_RNA (1)...(19): siRNA sense strand
caaagaguguccaaucauu

SEQ ID NO: 204906 - RNA, 19 nt, Homo sapiens
  misc_RNA (1)...(19): siRNA sense strand
uagcugaccugaauaaugu

SEQ ID NO: 204907 - RNA, 19 nt, Homo sapiens
  misc_RNA (1)...(19): siRNA sense strand
gcaugauucuauccaaauu

SEQ ID NO: 204908 - RNA, 19 nt, Homo sapiens
  misc_RNA (1)...(19): siRNA sense strand
ugaacuggcugcugaaugu

SEQ ID NO: 204909 - RNA, 19 nt, Homo sapiens
  misc_RNA (1)...(19): siRNA sense strand
gauauccugcagauuauua

SEQ ID NO: 204910 - RNA, 19 nt, Homo sapiens
  misc_RNA (1)...(19): siRNA sense strand
gagaagauguucgagacuu

SEQ ID NO: 204911 - RNA, 19 nt, Homo sapiens
  misc_RNA (1)...(19): siRNA sense strand
gcacuuuaauuaugacauc

SEQ ID NO: 204912 - RNA, 19 nt, Homo sapiens
  misc_RNA (1)...(19): siRNA sense strand
guaaagcacauuuggaaga

SEQ ID NO: 204913 - RNA, 19 nt, Homo sapiens
  misc_RNA (1)...(19): siRNA sense strand
gaauauugcacuccgacua

SEQ ID NO: 204914 - RNA, 19 nt, Homo sapiens
  misc_RNA (1)...(19): siRNA sense strand
uuauaggacugccaugaaa

SEQ ID NO: 204915 - RNA, 19 nt, Homo sapiens
  misc_RNA (1)...(19): siRNA sense strand
gggugaaguugcauccuuu

SEQ ID NO: 204916 - RNA, 19 nt, Homo sapiens
  misc_RNA (1)...(19): siRNA sense strand
gcaagagcacaacaauuug

SEQ ID NO: 204917 - RNA, 19 nt, Homo sapiens
  misc_RNA (1)...(19): siRNA sense strand
gcacaacaauuuggucaac

SEQ ID NO: 204918 - RNA, 19 nt, Homo sapiens
  misc_RNA (1)...(19): siRNA sense strand
agcaagagcacaacaauuu

SEQ ID NO: 204919 - RNA, 19 nt, Homo sapiens
  misc_RNA (1)...(19): siRNA sense strand
agaagauguucgagacuuu

SEQ ID NO: 204920 - RNA, 19 nt, Homo sapiens
  misc_RNA (1)...(19): siRNA sense strand
gagcaagagcacaacaauu

SEQ ID NO: 204921 - RNA, 19 nt, Homo sapiens
  misc_RNA (1)...(19): siRNA sense strand
ucaagcaaguggcaaguuc

SEQ ID NO: 204922 - RNA, 19 nt, Homo sapiens
  misc_RNA (1)...(19): siRNA sense strand
ccacgagacucaaacaacu

SEQ ID NO: 204923 - RNA, 19 nt, Homo sapiens
  misc_RNA (1)...(19): siRNA sense strand
cagcacaaccucaagcaaa

SEQ ID NO: 204924 - RNA, 19 nt, Homo sapiens
  misc_RNA (1)...(19): siRNA sense strand
gcaaagaguguccaaucau

SEQ ID NO: 204925 - RNA, 19 nt, Homo sapiens
  misc_RNA (1)...(19): siRNA sense strand
auggauauccugcagauua

SEQ ID NO: 204926 - RNA, 19 nt, Homo sapiens
  misc_RNA (1)...(19): siRNA sense strand
uguaacaucugcaaagagu

SEQ ID NO: 204927 - RNA, 19 nt, Homo sapiens
  misc_RNA (1)...(19): siRNA sense strand
guccggagcugcuuccaau

SEQ ID NO: 204928 - RNA, 19 nt, Homo sapiens
  misc_RNA (1)...(19): siRNA sense strand
gcaaguggcaaguucaaca

SEQ ID NO: 204929 - RNA, 19 nt, Homo sapiens
  misc_RNA (1)...(19): siRNA sense strand
gcuuccaauuugcuaauaa

SEQ ID NO: 204930 - RNA, 19 nt, Homo sapiens
  misc_RNA (1)...(19): siRNA sense strand
uggaagacaaguacagaua

SEQ ID NO: 204931 - RNA, 19 nt, Homo sapiens
  misc_RNA (1)...(19): siRNA sense strand
ggauccguguccugucuuu

SEQ ID NO: 204932 - RNA, 19 nt, Homo sapiens
  misc_RNA (1)...(19): siRNA sense strand
gucuuuagcugaccugaau

SEQ ID NO: 204933 - RNA, 19 nt, Homo sapiens
  misc_RNA (1)...(19): siRNA sense strand
gacaaguacagauaccuuu

SEQ ID NO: 204934 - RNA, 19 nt, Homo sapiens
  misc_RNA (1)...(19): siRNA sense strand
ccaagcaucaggccaaaug

SEQ ID NO: 204935 - RNA, 19 nt, Homo sapiens
  misc_RNA (1)...(19): siRNA sense strand
ggagcaagagcacaacaau

SEQ ID NO: 204936 - RNA, 19 nt, Homo sapiens
  misc_RNA (1)...(19): siRNA sense strand
guguaaagcacauuuggaa

SEQ ID NO: 204937 - RNA, 19 nt, Homo sapiens
  misc_RNA (1)...(19): siRNA sense strand
caagacaguugggugaagu

SEQ ID NO: 204938 - RNA, 19 nt, Homo sapiens
  misc_RNA (1)...(19): siRNA sense strand
gaagauguucgagacuuug

SEQ ID NO: 204939 - RNA, 19 nt, Homo sapiens
  misc_RNA (1)...(19): siRNA sense strand
gucagauucucagcuuaua

SEQ ID NO: 204940 - RNA, 19 nt, Homo sapiens
  misc_RNA (1)...(19): siRNA sense strand
uaacaucugcaaagagugu

SEQ ID NO: 204941 - RNA, 19 nt, Homo sapiens
  misc_RNA (1)...(19): siRNA sense strand
cggagcugcuuccaauuug

SEQ ID NO: 204942 - RNA, 19 nt, Homo sapiens
  misc_RNA (1)...(19): siRNA sense strand
gaagacaaguacagauacc

SEQ ID NO: 204943 - RNA, 19 nt, Homo sapiens
  misc_RNA (1)...(19): siRNA sense strand
ccauggauauccugcagau

SEQ ID NO: 204944 - RNA, 19 nt, Homo sapiens
  misc_RNA (1)...(19): siRNA sense strand
ggcaucauuucccugugua

SEQ ID NO: 204945 - RNA, 19 nt, Homo sapiens
  misc_RNA (1)...(19): siRNA sense strand
uggauauccugcagauuau

SEQ ID NO: 204946 - RNA, 19 nt, Homo sapiens
  misc_RNA (1)...(19): siRNA sense strand
ggaagacaaguacagauac

SEQ ID NO: 204947 - RNA, 19 nt, Homo sapiens
  misc_RNA (1)...(19): siRNA sense strand
ugcaaagaguguccaauca

SEQ ID NO: 204948 - RNA, 19 nt, Homo sapiens
  misc_RNA (1)...(19): siRNA sense strand
guggauaugugucugaacu

SEQ ID NO: 204949 - RNA, 19 nt, Homo sapiens
  misc_RNA (1)...(19): siRNA sense strand
acuggcugcugaauguuua

SEQ ID NO: 204950 - RNA, 19 nt, Homo sapiens
  misc_RNA (1)...(19): siRNA sense strand
acuaucccaugguggaaua

SEQ ID NO: 204951 - RNA, 19 nt, Homo sapiens
  misc_RNA (1)...(19): siRNA sense strand
ccggagcugcuuccaauuu

SEQ ID NO: 204952 - RNA, 19 nt, Homo sapiens
  misc_RNA (1)...(19): siRNA sense strand
ccaaauuccaagacaguug

SEQ ID NO: 204953 - RNA, 19 nt, Homo sapiens
  misc_RNA (1)...(19): siRNA sense strand
cagaaacugccaagcauca

SEQ ID NO: 204954 - RNA, 19 nt, Homo sapiens
  misc_RNA (1)...(19): siRNA sense strand
uaugacaucugccaaagcu

SEQ ID NO: 204955 - RNA, 19 nt, Homo sapiens
  misc_RNA (1)...(19): siRNA sense strand
aaugucagauucucagcuu

SEQ ID NO: 204956 - RNA, 19 nt, Homo sapiens
  misc_RNA (1)...(19): siRNA sense strand
ucgagacuuugccaaggua

SEQ ID NO: 204957 - RNA, 19 nt, Homo sapiens
  misc_RNA (1)...(19): siRNA sense strand
gcaaaaggccauaaaaugc

SEQ ID NO: 204958 - RNA, 19 nt, Homo sapiens
  misc_RNA (1)...(19): siRNA sense strand
cugcaugauucuauccaaa

SEQ ID NO: 204959 - RNA, 19 nt, Homo sapiens
  misc_RNA (1)...(19): siRNA sense strand
uaaagcacauuuggaagac

SEQ ID NO: 204960 - RNA, 19 nt, Homo sapiens
  misc_RNA (1)...(19): siRNA sense strand
acaggagucuaaagcacuu

SEQ ID NO: 204961 - RNA, 19 nt, Homo sapiens
  misc_RNA (1)...(19): siRNA sense strand
acagauaccuuuucaagca

SEQ ID NO: 204962 - RNA, 19 nt, Homo sapiens
  misc_RNA (1)...(19): siRNA sense strand
aagcacauuuggaagacaa

SEQ ID NO: 204963 - RNA, 19 nt, Homo sapiens
  misc_RNA (1)...(19): siRNA sense strand
gcuaauaauaagccagaga

SEQ ID NO: 204964 - RNA, 19 nt, Homo sapiens
  misc_RNA (1)...(19): siRNA sense strand
caagagcacaacaauuugg

SEQ ID NO: 204965 - RNA, 19 nt, Homo sapiens
  misc_RNA (1)...(19): siRNA sense strand
ccugucagcugcaugugau

SEQ ID NO: 204966 - RNA, 19 nt, Homo sapiens
  misc_RNA (1)...(19): siRNA sense strand
gcugcugaauguuuaugau

SEQ ID NO: 204967 - RNA, 19 nt, Homo sapiens
  misc_RNA (1)...(19): siRNA sense strand
acagagcucuaccagucuu

SEQ ID NO: 204968 - RNA, 19 nt, Homo sapiens
  misc_RNA (1)...(19): siRNA sense strand
acaguugggugaaguugca

SEQ ID NO: 204969 - RNA, 19 nt, Homo sapiens
  misc_RNA (1)...(19): siRNA sense strand
guuugaccacuauuuauga

SEQ ID NO: 204970 - RNA, 19 nt, Homo sapiens
  misc_RNA (1)...(19): siRNA sense strand
gcuuauaggacugccauga

SEQ ID NO: 204971 - RNA, 19 nt, Homo sapiens
  misc_RNA (1)...(19): siRNA sense strand
caucaggccaaauguaaca

SEQ ID NO: 204972 - RNA, 19 nt, Homo sapiens
  misc_RNA (1)...(19): siRNA sense strand
gauucuauccaaauuccaa

SEQ ID NO: 204973 - RNA, 19 nt, Homo sapiens
  misc_RNA (1)...(19): siRNA sense strand
ggcaaguucaacaggauuu

SEQ ID NO: 204974 - RNA, 19 nt, Homo sapiens
  misc_RNA (1)...(19): siRNA sense strand
gaacuggcugcugaauguu

SEQ ID NO: 204975 - RNA, 19 nt, Homo sapiens
  misc_RNA (1)...(19): siRNA sense strand
cugcugaauguuuaugaua

SEQ ID NO: 204976 - RNA, 19 nt, Homo sapiens
  misc_RNA (1)...(19): siRNA sense strand
aagcaucaggccaaaugua

SEQ ID NO: 204977 - RNA, 19 nt, Homo sapiens
  misc_RNA (1)...(19): siRNA sense strand
uggcaucauuucccugugu

SEQ ID NO: 204978 - RNA, 19 nt, Homo sapiens
  misc_RNA (1)...(19): siRNA sense strand
ccaugaaacuccgaagacu

SEQ ID NO: 204979 - RNA, 19 nt, Homo sapiens
  misc_RNA (1)...(19): siRNA sense strand
auaauaagccagagaucga

SEQ ID NO: 204980 - RNA, 19 nt, Homo sapiens
  misc_RNA (1)...(19): siRNA sense strand
cuaauaauaagccagagau

SEQ ID NO: 204981 - RNA, 19 nt, Homo sapiens
  misc_RNA (1)...(19): siRNA sense strand
ugggugaaguugcauccuu

SEQ ID NO: 204982 - RNA, 19 nt, Homo sapiens
  misc_RNA (1)...(19): siRNA sense strand
caucauuucccuguguaaa

SEQ ID NO: 204983 - RNA, 19 nt, Homo sapiens
  misc_RNA (1)...(19): siRNA sense strand
gcguggauaugugucugaa

SEQ ID NO: 204984 - RNA, 19 nt, Homo sapiens
  misc_RNA (1)...(19): siRNA sense strand
gcacuaucccaugguggaa

SEQ ID NO: 204985 - RNA, 19 nt, Homo sapiens
  misc_RNA (1)...(19): siRNA sense strand
gagccugucagcugcaugu

SEQ ID NO: 204986 - RNA, 19 nt, Homo sapiens
  misc_RNA (1)...(19): siRNA sense strand
guacagauaccuuuucaag

SEQ ID NO: 204987 - RNA, 19 nt, Homo sapiens
  misc_RNA (1)...(19): siRNA sense strand
gucccucucugcguggaua

SEQ ID NO: 204988 - RNA, 19 nt, Homo sapiens
  misc_RNA (1)...(19): siRNA sense strand
ggagcugcuuccaauuugc

SEQ ID NO: 204989 - RNA, 19 nt, Homo sapiens
  misc_RNA (1)...(19): siRNA sense strand
uuagcugaccugaauaaug

SEQ ID NO: 204990 - RNA, 19 nt, Homo sapiens
  misc_RNA (1)...(19): siRNA sense strand
guggcaaguucaacaggau

SEQ ID NO: 204991 - RNA, 19 nt, Homo sapiens
  misc_RNA (1)...(19): siRNA sense strand
acaacaauuuggucaacgu

SEQ ID NO: 204992 - RNA, 19 nt, Homo sapiens
  misc_RNA (1)...(19): siRNA sense strand
gacuacaucaggagaagau

SEQ ID NO: 204993 - RNA, 19 nt, Homo sapiens
  misc_RNA (1)...(19): siRNA sense strand
uaauaagccagagaucgaa

SEQ ID NO: 204994 - RNA, 19 nt, Homo sapiens
  misc_RNA (1)...(19): siRNA sense strand
ugucagauucucagcuuau

SEQ ID NO: 204995 - RNA, 19 nt, Homo sapiens
  misc_RNA (1)...(19): siRNA sense strand
ggauauccugcagauuauu

SEQ ID NO: 204996 - RNA, 19 nt, Homo sapiens
  misc_RNA (1)...(19): siRNA sense strand
agcaucaggccaaauguaa

SEQ ID NO: 204997 - RNA, 19 nt, Homo sapiens
  misc_RNA (1)...(19): siRNA sense strand
gcccuuugcuuggaucucu

SEQ ID NO: 204998 - RNA, 19 nt, Homo sapiens
  misc_RNA (1)...(19): siRNA sense strand
gcugaauguuuaugauacg

SEQ ID NO: 204999 - RNA, 19 nt, Homo sapiens
  misc_RNA (1)...(19): siRNA sense strand
agacuuugccaagguacua

SEQ ID NO: 205000 - RNA, 19 nt, Homo sapiens
  misc_RNA (1)...(19): siRNA sense strand
caagcaaguggcaaguuca

SEQ ID NO: 205001 - RNA, 19 nt, Homo sapiens
  misc_RNA (1)...(19): siRNA sense strand
agacaaguacagauaccuu

SEQ ID NO: 205002 - RNA, 19 nt, Homo sapiens
  misc_RNA (1)...(19): siRNA sense strand
gcaucauuucccuguguaa

SEQ ID NO: 205003 - RNA, 19 nt, Homo sapiens
  misc_RNA (1)...(19): siRNA sense strand
cugcaaagaguguccaauc

SEQ ID NO: 205004 - RNA, 19 nt, Homo sapiens
  misc_RNA (1)...(19): siRNA sense strand
cuuauaggacugccaugaa

SEQ ID NO: 205005 - RNA, 19 nt, Homo sapiens
  misc_RNA (1)...(19): siRNA sense strand
caaagaguguccaaucauu

SEQ ID NO: 205006 - RNA, 19 nt, Homo sapiens
  misc_RNA (1)...(19): siRNA sense strand
uagcugaccugaauaaugu

SEQ ID NO: 205007 - RNA, 19 nt, Homo sapiens
  misc_RNA (1)...(19): siRNA sense strand
gcaugauucuauccaaauu

SEQ ID NO: 205008 - RNA, 19 nt, Homo sapiens
  misc_RNA (1)...(19): siRNA sense strand
ugaacuggcugcugaaugu

SEQ ID NO: 205009 - RNA, 19 nt, Homo sapiens
  misc_RNA (1)...(19): siRNA sense strand
gauauccugcagauuauua

SEQ ID NO: 205010 - RNA, 19 nt, Homo sapiens
  misc_RNA (1)...(19): siRNA sense strand
gagaagauguucgagacuu

SEQ ID NO: 205011 - RNA, 19 nt, Homo sapiens
  misc_RNA (1)...(19): siRNA sense strand
gcacuuuaauuaugacauc

SEQ ID NO: 205012 - RNA, 19 nt, Homo sapiens
  misc_RNA (1)...(19): siRNA sense strand
guaaagcacauuuggaaga

SEQ ID NO: 205013 - RNA, 19 nt, Homo sapiens
  misc_RNA (1)...(19): siRNA sense strand
gaauauugcacuccgacua

SEQ ID NO: 205014 - RNA, 19 nt, Homo sapiens
  misc_RNA (1)...(19): siRNA sense strand
uuauaggacugccaugaaa

SEQ ID NO: 205015 - RNA, 19 nt, Homo sapiens
  misc_RNA (1)...(19): siRNA sense strand
gggugaaguugcauccuuu

SEQ ID NO: 205016 - RNA, 19 nt, Homo sapiens
  misc_RNA (1)...(19): siRNA sense strand
gcaagagcacaacaauuug

SEQ ID NO: 205017 - RNA, 19 nt, Homo sapiens
  misc_RNA (1)...(19): siRNA sense strand
gcacaacaauuuggucaac

SEQ ID NO: 205018 - RNA, 19 nt, Homo sapiens
  misc_RNA (1)...(19): siRNA sense strand
agcaagagcacaacaauuu

SEQ ID NO: 205019 - RNA, 19 nt, Homo sapiens
  misc_RNA (1)...(19): siRNA sense strand
agaagauguucgagacuuu

SEQ ID NO: 205020 - RNA, 19 nt, Homo sapiens
  misc_RNA (1)...(19): siRNA sense strand
gagcaagagcacaacaauu

SEQ ID NO: 205021 - RNA, 19 nt, Homo sapiens
  misc_RNA (1)...(19): siRNA sense strand
ucaagcaaguggcaaguuc

SEQ ID NO: 205022 - RNA, 19 nt, Homo sapiens
  misc_RNA (1)...(19): siRNA sense strand
ccacgagacucaaacaacu

SEQ ID NO: 205023 - RNA, 19 nt, Homo sapiens
  misc_RNA (1)...(19): siRNA sense strand
cagcacaaccucaagcaaa

SEQ ID NO: 205024 - RNA, 19 nt, Homo sapiens
  misc_RNA (1)...(19): siRNA sense strand
gcaaagaguguccaaucau

SEQ ID NO: 205025 - RNA, 19 nt, Homo sapiens
  misc_RNA (1)...(19): siRNA sense strand
auggauauccugcagauua

SEQ ID NO: 205026 - RNA, 19 nt, Homo sapiens
  misc_RNA (1)...(19): siRNA sense strand
uguaacaucugcaaagagu

SEQ ID NO: 205027 - RNA, 19 nt, Homo sapiens
  misc_RNA (1)...(19): siRNA sense strand
guccggagcugcuuccaau

SEQ ID NO: 205028 - RNA, 19 nt, Homo sapiens
  misc_RNA (1)...(19): siRNA sense strand
gcaaguggcaaguucaaca

SEQ ID NO: 205029 - RNA, 19 nt, Homo sapiens
  misc_RNA (1)...(19): siRNA sense strand
gcuuccaauuugcuaauaa

SEQ ID NO: 205030 - RNA, 19 nt, Homo sapiens
  misc_RNA (1)...(19): siRNA sense strand
uggaagacaaguacagaua

SEQ ID NO: 205031 - RNA, 19 nt, Homo sapiens
  misc_RNA (1)...(19): siRNA sense strand
ggauccguguccugucuuu

SEQ ID NO: 205032 - RNA, 19 nt, Homo sapiens
  misc_RNA (1)...(19): siRNA sense strand
gucuuuagcugaccugaau

SEQ ID NO: 205033 - RNA, 19 nt, Homo sapiens
  misc_RNA (1)...(19): siRNA sense strand
gacaaguacagauaccuuu

SEQ ID NO: 205034 - RNA, 19 nt, Homo sapiens
  misc_RNA (1)...(19): siRNA sense strand
ccaagcaucaggccaaaug

SEQ ID NO: 205035 - RNA, 19 nt, Homo sapiens
  misc_RNA (1)...(19): siRNA sense strand
ggagcaagagcacaacaau

SEQ ID NO: 205036 - RNA, 19 nt, Homo sapiens
  misc_RNA (1)...(19): siRNA sense strand
guguaaagcacauuuggaa

SEQ ID NO: 205037 - RNA, 19 nt, Homo sapiens
  misc_RNA (1)...(19): siRNA sense strand
caagacaguugggugaagu

SEQ ID NO: 205038 - RNA, 19 nt, Homo sapiens
  misc_RNA (1)...(19): siRNA sense strand
gaagauguucgagacuuug

SEQ ID NO: 205039 - RNA, 19 nt, Homo sapiens
  misc_RNA (1)...(19): siRNA sense strand
gucagauucucagcuuaua

SEQ ID NO: 205040 - RNA, 19 nt, Homo sapiens
  misc_RNA (1)...(19): siRNA sense strand
uaacaucugcaaagagugu

SEQ ID NO: 205041 - RNA, 19 nt, Homo sapiens
  misc_RNA (1)...(19): siRNA sense strand
cggagcugcuuccaauuug

SEQ ID NO: 205042 - RNA, 19 nt, Homo sapiens
  misc_RNA (1)...(19): siRNA sense strand
gaagacaaguacagauacc

SEQ ID NO: 205043 - RNA, 19 nt, Homo sapiens
  misc_RNA (1)...(19): siRNA sense strand
ccauggauauccugcagau

SEQ ID NO: 205044 - RNA, 19 nt, Homo sapiens
  misc_RNA (1)...(19): siRNA sense strand
ggcaucauuucccugugua

SEQ ID NO: 205045 - RNA, 19 nt, Homo sapiens
  misc_RNA (1)...(19): siRNA sense strand
uggauauccugcagauuau

SEQ ID NO: 205046 - RNA, 19 nt, Homo sapiens
  misc_RNA (1)...(19): siRNA sense strand
ggaagacaaguacagauac

SEQ ID NO: 205047 - RNA, 19 nt, Homo sapiens
  misc_RNA (1)...(19): siRNA sense strand
ugcaaagaguguccaauca

SEQ ID NO: 205048 - RNA, 19 nt, Homo sapiens
  misc_RNA (1)...(19): siRNA sense strand
guggauaugugucugaacu

SEQ ID NO: 205049 - RNA, 19 nt, Homo sapiens
  misc_RNA (1)...(19): siRNA sense strand
acuggcugcugaauguuua

SEQ ID NO: 205050 - RNA, 19 nt, Homo sapiens
  misc_RNA (1)...(19): siRNA sense strand
acuaucccaugguggaaua

SEQ ID NO: 205051 - RNA, 19 nt, Homo sapiens
  misc_RNA (1)...(19): siRNA sense strand
ccggagcugcuuccaauuu

SEQ ID NO: 205052 - RNA, 19 nt, Homo sapiens
  misc_RNA (1)...(19): siRNA sense strand
ccaaauuccaagacaguug

SEQ ID NO: 205053 - RNA, 19 nt, Homo sapiens
  misc_RNA (1)...(19): siRNA sense strand
cagaaacugccaagcauca

SEQ ID NO: 205054 - RNA, 19 nt, Homo sapiens
  misc_RNA (1)...(19): siRNA sense strand
uaugacaucugccaaagcu

SEQ ID NO: 205055 - RNA, 19 nt, Homo sapiens
  misc_RNA (1)...(19): siRNA sense strand
aaugucagauucucagcuu

SEQ ID NO: 205056 - RNA, 19 nt, Homo sapiens
  misc_RNA (1)...(19): siRNA sense strand
ucgagacuuugccaaggua

SEQ ID NO: 205057 - RNA, 19 nt, Homo sapiens
  misc_RNA (1)...(19): siRNA sense strand
gcaaaaggccauaaaaugc

SEQ ID NO: 205058 - RNA, 19 nt, Homo sapiens
  misc_RNA (1)...(19): siRNA sense strand
cugcaugauucuauccaaa

SEQ ID NO: 205059 - RNA, 19 nt, Homo sapiens
  misc_RNA (1)...(19): siRNA sense strand
uaaagcacauuuggaagac

SEQ ID NO: 205060 - RNA, 19 nt, Homo sapiens
  misc_RNA (1)...(19): siRNA sense strand
acaggagucuaaagcacuu

SEQ ID NO: 205061 - RNA, 19 nt, Homo sapiens
  misc_RNA (1)...(19): siRNA sense strand
acagauaccuuuucaagca

SEQ ID NO: 205062 - RNA, 19 nt, Homo sapiens
  misc_RNA (1)...(19): siRNA sense strand
aagcacauuuggaagacaa

SEQ ID NO: 205063 - RNA, 19 nt, Homo sapiens
  misc_RNA (1)...(19): siRNA sense strand
gcuaauaauaagccagaga

SEQ ID NO: 205064 - RNA, 19 nt, Homo sapiens
  misc_RNA (1)...(19): siRNA sense strand
caagagcacaacaauuugg

SEQ ID NO: 205065 - RNA, 19 nt, Homo sapiens
  misc_RNA (1)...(19): siRNA sense strand
ccugucagcugcaugugau

SEQ ID NO: 205066 - RNA, 19 nt, Homo sapiens
  misc_RNA (1)...(19): siRNA sense strand
gcugcugaauguuuaugau

SEQ ID NO: 205067 - RNA, 19 nt, Homo sapiens
  misc_RNA (1)...(19): siRNA sense strand
acagagcucuaccagucuu

SEQ ID NO: 205068 - RNA, 19 nt, Homo sapiens
  misc_RNA (1)...(19): siRNA sense strand
acaguugggugaaguugca

SEQ ID NO: 205069 - RNA, 19 nt, Homo sapiens
  misc_RNA (1)...(19): siRNA sense strand
guuugaccacuauuuauga

SEQ ID NO: 205070 - RNA, 19 nt, Homo sapiens
  misc_RNA (1)...(19): siRNA sense strand
gcuuauaggacugccauga

SEQ ID NO: 205071 - RNA, 19 nt, Homo sapiens
  misc_RNA (1)...(19): siRNA sense strand
caucaggccaaauguaaca

SEQ ID NO: 205072 - RNA, 19 nt, Homo sapiens
  misc_RNA (1)...(19): siRNA sense strand
gauucuauccaaauuccaa

SEQ ID NO: 205073 - RNA, 19 nt, Homo sapiens
  misc_RNA (1)...(19): siRNA sense strand
ggcaaguucaacaggauuu

SEQ ID NO: 205074 - RNA, 19 nt, Homo sapiens
  misc_RNA (1)...(19): siRNA sense strand
gaacuggcugcugaauguu

SEQ ID NO: 205075 - RNA, 19 nt, Homo sapiens
  misc_RNA (1)...(19): siRNA sense strand
cugcugaauguuuaugaua

SEQ ID NO: 205076 - RNA, 19 nt, Homo sapiens
  misc_RNA (1)...(19): siRNA sense strand
aagcaucaggccaaaugua

SEQ ID NO: 205077 - RNA, 19 nt, Homo sapiens
  misc_RNA (1)...(19): siRNA sense strand
uggcaucauuucccugugu

SEQ ID NO: 205078 - RNA, 19 nt, Homo sapiens
  misc_RNA (1)...(19): siRNA sense strand
ccaugaaacuccgaagacu

SEQ ID NO: 205079 - RNA, 19 nt, Homo sapiens
  misc_RNA (1)...(19): siRNA sense strand
auaauaagccagagaucga

SEQ ID NO: 205080 - RNA, 19 nt, Homo sapiens
  misc_RNA (1)...(19): siRNA sense strand
cuaauaauaagccagagau

SEQ ID NO: 205081 - RNA, 19 nt, Homo sapiens
  misc_RNA (1)...(19): siRNA sense strand
ugggugaaguugcauccuu

SEQ ID NO: 205082 - RNA, 19 nt, Homo sapiens
  misc_RNA (1)...(19): siRNA sense strand
caucauuucccuguguaaa

SEQ ID NO: 205083 - RNA, 19 nt, Homo sapiens
  misc_RNA (1)...(19): siRNA sense strand
gcguggauaugugucugaa

SEQ ID NO: 205084 - RNA, 19 nt, Homo sapiens
  misc_RNA (1)...(19): siRNA sense strand
gcacuaucccaugguggaa

SEQ ID NO: 205085 - RNA, 19 nt, Homo sapiens
  misc_RNA (1)...(19): siRNA sense strand
gagccugucagcugcaugu

SEQ ID NO: 205086 - RNA, 19 nt, Homo sapiens
  misc_RNA (1)...(19): siRNA sense strand
guacagauaccuuuucaag

SEQ ID NO: 205087 - RNA, 19 nt, Homo sapiens
  misc_RNA (1)...(19): siRNA sense strand
gucccucucugcguggaua

SEQ ID NO: 205088 - RNA, 19 nt, Homo sapiens
  misc_RNA (1)...(19): siRNA sense strand
ggagcugcuuccaauuugc

SEQ ID NO: 205089 - RNA, 19 nt, Homo sapiens
  misc_RNA (1)...(19): siRNA sense strand
uuagcugaccugaauaaug

SEQ ID NO: 205090 - RNA, 19 nt, Homo sapiens
  misc_RNA (1)...(19): siRNA sense strand
guggcaaguucaacaggau

SEQ ID NO: 205091 - RNA, 19 nt, Homo sapiens
  misc_RNA (1)...(19): siRNA sense strand
acaacaauuuggucaacgu

SEQ ID NO: 205092 - RNA, 19 nt, Homo sapiens
  misc_RNA (1)...(19): siRNA sense strand
gacuacaucaggagaagau

SEQ ID NO: 205093 - RNA, 19 nt, Homo sapiens
  misc_RNA (1)...(19): siRNA sense strand
uaauaagccagagaucgaa

SEQ ID NO: 205094 - RNA, 19 nt, Homo sapiens
  misc_RNA (1)...(19): siRNA sense strand
ugucagauucucagcuuau

SEQ ID NO: 205095 - RNA, 19 nt, Homo sapiens
  misc_RNA (1)...(19): siRNA sense strand
ggauauccugcagauuauu

SEQ ID NO: 205096 - RNA, 19 nt, Homo sapiens
  misc_RNA (1)...(19): siRNA sense strand
agcaucaggccaaauguaa

SEQ ID NO: 205097 - RNA, 19 nt, Homo sapiens
  misc_RNA (1)...(19): siRNA sense strand
gcccuuugcuuggaucucu

SEQ ID NO: 205098 - RNA, 19 nt, Homo sapiens
  misc_RNA (1)...(19): siRNA sense strand
gcugaauguuuaugauacg

SEQ ID NO: 205099 - RNA, 19 nt, Homo sapiens
  misc_RNA (1)...(19): siRNA sense strand
agacuuugccaagguacua

SEQ ID NO: 205100 - RNA, 19 nt, Homo sapiens
  misc_RNA (1)...(19): siRNA sense strand
caagcaaguggcaaguuca

SEQ ID NO: 205101 - RNA, 19 nt, Homo sapiens
  misc_RNA (1)...(19): siRNA sense strand
agacaaguacagauaccuu

SEQ ID NO: 205102 - RNA, 19 nt, Homo sapiens
  misc_RNA (1)...(19): siRNA sense strand
gcaucauuucccuguguaa

SEQ ID NO: 205103 - RNA, 19 nt, Homo sapiens
  misc_RNA (1)...(19): siRNA sense strand
cugcaaagaguguccaauc

SEQ ID NO: 205104 - RNA, 19 nt, Homo sapiens
  misc_RNA (1)...(19): siRNA sense strand
cuuauaggacugccaugaa

SEQ ID NO: 205105 - RNA, 19 nt, Homo sapiens
  misc_RNA (1)...(19): siRNA sense strand
caaagaguguccaaucauu

SEQ ID NO: 205106 - RNA, 19 nt, Homo sapiens
  misc_RNA (1)...(19): siRNA sense strand
uagcugaccugaauaaugu

SEQ ID NO: 205107 - RNA, 19 nt, Homo sapiens
  misc_RNA (1)...(19): siRNA sense strand
gcaugauucuauccaaauu

SEQ ID NO: 205108 - RNA, 19 nt, Homo sapiens
  misc_RNA (1)...(19): siRNA sense strand
ugaacuggcugcugaaugu

SEQ ID NO: 205109 - RNA, 19 nt, Homo sapiens
  misc_RNA (1)...(19): siRNA sense strand
gauauccugcagauuauua

SEQ ID NO: 205110 - RNA, 19 nt, Homo sapiens
  misc_RNA (1)...(19): siRNA sense strand
gagaagauguucgagacuu

SEQ ID NO: 205111 - RNA, 19 nt, Homo sapiens
  misc_RNA (1)...(19): siRNA sense strand
gcacuuuaauuaugacauc

SEQ ID NO: 205112 - RNA, 19 nt, Homo sapiens
  misc_RNA (1)...(19): siRNA sense strand
guaaagcacauuuggaaga

SEQ ID NO: 205113 - RNA, 19 nt, Homo sapiens
  misc_RNA (1)...(19): siRNA sense strand
gaauauugcacuccgacua

SEQ ID NO: 205114 - RNA, 19 nt, Homo sapiens
  misc_RNA (1)...(19): siRNA sense strand
uuauaggacugccaugaaa

SEQ ID NO: 205115 - RNA, 19 nt, Homo sapiens
  misc_RNA (1)...(19): siRNA sense strand
gggugaaguugcauccuuu

SEQ ID NO: 205116 - RNA, 19 nt, Homo sapiens
  misc_RNA (1)...(19): siRNA sense strand
gcaagagcacaacaauuug

SEQ ID NO: 205117 - RNA, 19 nt, Homo sapiens
  misc_RNA (1)...(19): siRNA sense strand
gcacaacaauuuggucaac

SEQ ID NO: 205118 - RNA, 19 nt, Homo sapiens
  misc_RNA (1)...(19): siRNA sense strand
agcaagagcacaacaauuu

SEQ ID NO: 205119 - RNA, 19 nt, Homo sapiens
  misc_RNA (1)...(19): siRNA sense strand
agaagauguucgagacuuu

SEQ ID NO: 205120 - RNA, 19 nt, Homo sapiens
  misc_RNA (1)...(19): siRNA sense strand
gagcaagagcacaacaauu

SEQ ID NO: 205121 - RNA, 19 nt, Homo sapiens
  misc_RNA (1)...(19): siRNA sense strand
ucaagcaaguggcaaguuc

SEQ ID NO: 205122 - RNA, 19 nt, Homo sapiens
  misc_RNA (1)...(19): siRNA sense strand
ccacgagacucaaacaacu

SEQ ID NO: 205123 - RNA, 19 nt, Homo sapiens
  misc_RNA (1)...(19): siRNA sense strand
cagcacaaccucaagcaaa

SEQ ID NO: 205124 - RNA, 19 nt, Homo sapiens
  misc_RNA (1)...(19): siRNA sense strand
gcaaagaguguccaaucau

SEQ ID NO: 205125 - RNA, 19 nt, Homo sapiens
  misc_RNA (1)...(19): siRNA sense strand
auggauauccugcagauua

SEQ ID NO: 205126 - RNA, 19 nt, Homo sapiens
  misc_RNA (1)...(19): siRNA sense strand
uguaacaucugcaaagagu

SEQ ID NO: 205127 - RNA, 19 nt, Homo sapiens
  misc_RNA (1)...(19): siRNA sense strand
guccggagcugcuuccaau

SEQ ID NO: 205128 - RNA, 19 nt, Homo sapiens
  misc_RNA (1)...(19): siRNA sense strand
gcaaguggcaaguucaaca

SEQ ID NO: 205129 - RNA, 19 nt, Homo sapiens
  misc_RNA (1)...(19): siRNA sense strand
gcuuccaauuugcuaauaa

SEQ ID NO: 205130 - RNA, 19 nt, Homo sapiens
  misc_RNA (1)...(19): siRNA sense strand
uggaagacaaguacagaua

SEQ ID NO: 205131 - RNA, 19 nt, Homo sapiens
  misc_RNA (1)...(19): siRNA sense strand
ggauccguguccugucuuu

SEQ ID NO: 205132 - RNA, 19 nt, Homo sapiens
  misc_RNA (1)...(19): siRNA sense strand
gucuuuagcugaccugaau

SEQ ID NO: 205133 - RNA, 19 nt, Homo sapiens
  misc_RNA (1)...(19): siRNA sense strand
gacaaguacagauaccuuu

SEQ ID NO: 205134 - RNA, 19 nt, Homo sapiens
  misc_RNA (1)...(19): siRNA sense strand
ccaagcaucaggccaaaug

SEQ ID NO: 205135 - RNA, 19 nt, Homo sapiens
  misc_RNA (1)...(19): siRNA sense strand
ggagcaagagcacaacaau

SEQ ID NO: 205136 - RNA, 19 nt, Homo sapiens
  misc_RNA (1)...(19): siRNA sense strand
guguaaagcacauuuggaa

SEQ ID NO: 205137 - RNA, 19 nt, Homo sapiens
  misc_RNA (1)...(19): siRNA sense strand
caagacaguugggugaagu

SEQ ID NO: 205138 - RNA, 19 nt, Homo sapiens
  misc_RNA (1)...(19): siRNA sense strand
gaagauguucgagacuuug

SEQ ID NO: 205139 - RNA, 19 nt, Homo sapiens
  misc_RNA (1)...(19): siRNA sense strand
gucagauucucagcuuaua

SEQ ID NO: 205140 - RNA, 19 nt, Homo sapiens
  misc_RNA (1)...(19): siRNA sense strand
uaacaucugcaaagagugu

SEQ ID NO: 205141 - RNA, 19 nt, Homo sapiens
  misc_RNA (1)...(19): siRNA sense strand
cggagcugcuuccaauuug

SEQ ID NO: 205142 - RNA, 19 nt, Homo sapiens
  misc_RNA (1)...(19): siRNA sense strand
gaagacaaguacagauacc

SEQ ID NO: 205143 - RNA, 19 nt, Homo sapiens
  misc_RNA (1)...(19): siRNA sense strand
ccauggauauccugcagau

SEQ ID NO: 205144 - RNA, 19 nt, Homo sapiens
  misc_RNA (1)...(19): siRNA sense strand
ggcaucauuucccugugua

SEQ ID NO: 205145 - RNA, 19 nt, Homo sapiens
  misc_RNA (1)...(19): siRNA sense strand
uggauauccugcagauuau

SEQ ID NO: 205146 - RNA, 19 nt, Homo sapiens
  misc_RNA (1)...(19): siRNA sense strand
ggaagacaaguacagauac

SEQ ID NO: 205147 - RNA, 19 nt, Homo sapiens
  misc_RNA (1)...(19): siRNA sense strand
ugcaaagaguguccaauca

SEQ ID NO: 205148 - RNA, 19 nt, Homo sapiens
  misc_RNA (1)...(19): siRNA sense strand
guggauaugugucugaacu

SEQ ID NO: 205149 - RNA, 19 nt, Homo sapiens
  misc_RNA (1)...(19): siRNA sense strand
acuggcugcugaauguuua

SEQ ID NO: 205150 - RNA, 19 nt, Homo sapiens
  misc_RNA (1)...(19): siRNA sense strand
acuaucccaugguggaaua

SEQ ID NO: 205151 - RNA, 19 nt, Homo sapiens
  misc_RNA (1)...(19): siRNA sense strand
ccggagcugcuuccaauuu

SEQ ID NO: 205152 - RNA, 19 nt, Homo sapiens
  misc_RNA (1)...(19): siRNA sense strand
ccaaauuccaagacaguug

SEQ ID NO: 205153 - RNA, 19 nt, Homo sapiens
  misc_RNA (1)...(19): siRNA sense strand
cagaaacugccaagcauca

SEQ ID NO: 205154 - RNA, 19 nt, Homo sapiens
  misc_RNA (1)...(19): siRNA sense strand
uaugacaucugccaaagcu

SEQ ID NO: 205155 - RNA, 19 nt, Homo sapiens
  misc_RNA (1)...(19): siRNA sense strand
aaugucagauucucagcuu

SEQ ID NO: 205156 - RNA, 19 nt, Homo sapiens
  misc_RNA (1)...(19): siRNA sense strand
ucgagacuuugccaaggua

SEQ ID NO: 205157 - RNA, 19 nt, Homo sapiens
  misc_RNA (1)...(19): siRNA sense strand
gcaaaaggccauaaaaugc

SEQ ID NO: 205158 - RNA, 19 nt, Homo sapiens
  misc_RNA (1)...(19): siRNA sense strand
cugcaugauucuauccaaa

SEQ ID NO: 205159 - RNA, 19 nt, Homo sapiens
  misc_RNA (1)...(19): siRNA sense strand
uaaagcacauuuggaagac

SEQ ID NO: 205160 - RNA, 19 nt, Homo sapiens
  misc_RNA (1)...(19): siRNA sense strand
acaggagucuaaagcacuu

SEQ ID NO: 205161 - RNA, 19 nt, Homo sapiens
  misc_RNA (1)...(19): siRNA sense strand
acagauaccuuuucaagca

SEQ ID NO: 205162 - RNA, 19 nt, Homo sapiens
  misc_RNA (1)...(19): siRNA sense strand
aagcacauuuggaagacaa

SEQ ID NO: 205163 - RNA, 19 nt, Homo sapiens
  misc_RNA (1)...(19): siRNA sense strand
gcuaauaauaagccagaga

SEQ ID NO: 205164 - RNA, 19 nt, Homo sapiens
  misc_RNA (1)...(19): siRNA sense strand
caagagcacaacaauuugg

SEQ ID NO: 205165 - RNA, 19 nt, Homo sapiens
  misc_RNA (1)...(19): siRNA sense strand
ccugucagcugcaugugau

SEQ ID NO: 205166 - RNA, 19 nt, Homo sapiens
  misc_RNA (1)...(19): siRNA sense strand
gcugcugaauguuuaugau

SEQ ID NO: 205167 - RNA, 19 nt, Homo sapiens
  misc_RNA (1)...(19): siRNA sense strand
acagagcucuaccagucuu

SEQ ID NO: 205168 - RNA, 19 nt, Homo sapiens
  misc_RNA (1)...(19): siRNA sense strand
acaguugggugaaguugca

SEQ ID NO: 205169 - RNA, 19 nt, Homo sapiens
  misc_RNA (1)...(19): siRNA sense strand
guuugaccacuauuuauga

SEQ ID NO: 205170 - RNA, 19 nt, Homo sapiens
  misc_RNA (1)...(19): siRNA sense strand
gcuuauaggacugccauga

SEQ ID NO: 205171 - RNA, 19 nt, Homo sapiens
  misc_RNA (1)...(19): siRNA sense strand
caucaggccaaauguaaca

SEQ ID NO: 205172 - RNA, 19 nt, Homo sapiens
  misc_RNA (1)...(19): siRNA sense strand
gauucuauccaaauuccaa

SEQ ID NO: 205173 - RNA, 19 nt, Homo sapiens
  misc_RNA (1)...(19): siRNA sense strand
ggcaaguucaacaggauuu

SEQ ID NO: 205174 - RNA, 19 nt, Homo sapiens
  misc_RNA (1)...(19): siRNA sense strand
gaacuggcugcugaauguu

SEQ ID NO: 205175 - RNA, 19 nt, Homo sapiens
  misc_RNA (1)...(19): siRNA sense strand
cugcugaauguuuaugaua

SEQ ID NO: 205176 - RNA, 19 nt, Homo sapiens
  misc_RNA (1)...(19): siRNA sense strand
aagcaucaggccaaaugua

SEQ ID NO: 205177 - RNA, 19 nt, Homo sapiens
  misc_RNA (1)...(19): siRNA sense strand
uggcaucauuucccugugu

SEQ ID NO: 205178 - RNA, 19 nt, Homo sapiens
  misc_RNA (1)...(19): siRNA sense strand
ccaugaaacuccgaagacu

SEQ ID NO: 205179 - RNA, 19 nt, Homo sapiens
  misc_RNA (1)...(19): siRNA sense strand
auaauaagccagagaucga

SEQ ID NO: 205180 - RNA, 19 nt, Homo sapiens
  misc_RNA (1)...(19): siRNA sense strand
cuaauaauaagccagagau

SEQ ID NO: 205181 - RNA, 19 nt, Homo sapiens
  misc_RNA (1)...(19): siRNA sense strand
ugggugaaguugcauccuu

SEQ ID NO: 205182 - RNA, 19 nt, Homo sapiens
  misc_RNA (1)...(19): siRNA sense strand
caucauuucccuguguaaa

SEQ ID NO: 205183 - RNA, 19 nt, Homo sapiens
  misc_RNA (1)...(19): siRNA sense strand
gcguggauaugugucugaa

SEQ ID NO: 205184 - RNA, 19 nt, Homo sapiens
  misc_RNA (1)...(19): siRNA sense strand
gcacuaucccaugguggaa

SEQ ID NO: 205185 - RNA, 19 nt, Homo sapiens
  misc_RNA (1)...(19): siRNA sense strand
gagccugucagcugcaugu

SEQ ID NO: 205186 - RNA, 19 nt, Homo sapiens
  misc_RNA (1)...(19): siRNA sense strand
guacagauaccuuuucaag

SEQ ID NO: 205187 - RNA, 19 nt, Homo sapiens
  misc_RNA (1)...(19): siRNA sense strand
gucccucucugcguggaua

SEQ ID NO: 205188 - RNA, 19 nt, Homo sapiens
  misc_RNA (1)...(19): siRNA sense strand
ggagcugcuuccaauuugc

SEQ ID NO: 205189 - RNA, 19 nt, Homo sapiens
  misc_RNA (1)...(19): siRNA sense strand
uuagcugaccugaauaaug

SEQ ID NO: 205190 - RNA, 19 nt, Homo sapiens
  misc_RNA (1)...(19): siRNA sense strand
guggcaaguucaacaggau

SEQ ID NO: 205191 - RNA, 19 nt, Homo sapiens
  misc_RNA (1)...(19): siRNA sense strand
acaacaauuuggucaacgu

SEQ ID NO: 205192 - RNA, 19 nt, Homo sapiens
  misc_RNA (1)...(19): siRNA sense strand
gacuacaucaggagaagau

SEQ ID NO: 205193 - RNA, 19 nt, Homo sapiens
  misc_RNA (1)...(19): siRNA sense strand
uaauaagccagagaucgaa

SEQ ID NO: 205194 - RNA, 19 nt, Homo sapiens
  misc_RNA (1)...(19): siRNA sense strand
ugucagauucucagcuuau

SEQ ID NO: 205195 - RNA, 19 nt, Homo sapiens
  misc_RNA (1)...(19): siRNA sense strand
ggauauccugcagauuauu

SEQ ID NO: 205196 - RNA, 19 nt, Homo sapiens
  misc_RNA (1)...(19): siRNA sense strand
agcaucaggccaaauguaa

SEQ ID NO: 205197 - RNA, 19 nt, Homo sapiens
  misc_RNA (1)...(19): siRNA sense strand
gcccuuugcuuggaucucu

SEQ ID NO: 205198 - RNA, 19 nt, Homo sapiens
  misc_RNA (1)...(19): siRNA sense strand
gcugaauguuuaugauacg

SEQ ID NO: 205199 - RNA, 19 nt, Homo sapiens
  misc_RNA (1)...(19): siRNA sense strand
agacuuugccaagguacua

SEQ ID NO: 205200 - RNA, 19 nt, Homo sapiens
  misc_RNA (1)...(19): siRNA sense strand
caagcaaguggcaaguuca

SEQ ID NO: 205201 - RNA, 19 nt, Homo sapiens
  misc_RNA (1)...(19): siRNA sense strand
agacaaguacagauaccuu

SEQ ID NO: 205202 - RNA, 19 nt, Homo sapiens
  misc_RNA (1)...(19): siRNA sense strand
gcaucauuucccuguguaa

SEQ ID NO: 205203 - RNA, 19 nt, Homo sapiens
  misc_RNA (1)...(19): siRNA sense strand
cugcaaagaguguccaauc

SEQ ID NO: 205204 - RNA, 19 nt, Homo sapiens
  misc_RNA (1)...(19): siRNA sense strand
cuuauaggacugccaugaa

SEQ ID NO: 205205 - RNA, 19 nt, Homo sapiens
  misc_RNA (1)...(19): siRNA sense strand
caaagaguguccaaucauu

SEQ ID NO: 205206 - RNA, 19 nt, Homo sapiens
  misc_RNA (1)...(19): siRNA sense strand
uagcugaccugaauaaugu

SEQ ID NO: 205207 - RNA, 19 nt, Homo sapiens
  misc_RNA (1)...(19): siRNA sense strand
gcaugauucuauccaaauu

SEQ ID NO: 205208 - RNA, 19 nt, Homo sapiens
  misc_RNA (1)...(19): siRNA sense strand
ugaacuggcugcugaaugu

SEQ ID NO: 205209 - RNA, 19 nt, Homo sapiens
  misc_RNA (1)...(19): siRNA sense strand
gauauccugcagauuauua

SEQ ID NO: 205210 - RNA, 19 nt, Homo sapiens
  misc_RNA (1)...(19): siRNA sense strand
gagaagauguucgagacuu

SEQ ID NO: 205211 - RNA, 19 nt, Homo sapiens
  misc_RNA (1)...(19): siRNA sense strand
gcacuuuaauuaugacauc

SEQ ID NO: 205212 - RNA, 19 nt, Homo sapiens
  misc_RNA (1)...(19): siRNA sense strand
guaaagcacauuuggaaga

SEQ ID NO: 205213 - RNA, 19 nt, Homo sapiens
  misc_RNA (1)...(19): siRNA sense strand
gaauauugcacuccgacua

SEQ ID NO: 205214 - RNA, 19 nt, Homo sapiens
  misc_RNA (1)...(19): siRNA sense strand
uuauaggacugccaugaaa

SEQ ID NO: 205215 - RNA, 19 nt, Homo sapiens
  misc_RNA (1)...(19): siRNA sense strand
gggugaaguugcauccuuu

SEQ ID NO: 205216 - RNA, 19 nt, Homo sapiens
  misc_RNA (1)...(19): siRNA sense strand
gcaagagcacaacaauuug

SEQ ID NO: 205217 - RNA, 19 nt, Homo sapiens
  misc_RNA (1)...(19): siRNA sense strand
gcacaacaauuuggucaac

SEQ ID NO: 205218 - RNA, 19 nt, Homo sapiens
  misc_RNA (1)...(19): siRNA sense strand
agcaagagcacaacaauuu

SEQ ID NO: 205219 - RNA, 19 nt, Homo sapiens
  misc_RNA (1)...(19): siRNA sense strand
agaagauguucgagacuuu

SEQ ID NO: 205220 - RNA, 19 nt, Homo sapiens
  misc_RNA (1)...(19): siRNA sense strand
gagcaagagcacaacaauu

SEQ ID NO: 205221 - RNA, 19 nt, Homo sapiens
  misc_RNA (1)...(19): siRNA sense strand
ucaagcaaguggcaaguuc

SEQ ID NO: 205222 - RNA, 19 nt, Homo sapiens
  misc_RNA (1)...(19): siRNA sense strand
ccacgagacucaaacaacu

SEQ ID NO: 205223 - RNA, 19 nt, Homo sapiens
  misc_RNA (1)...(19): siRNA sense strand
cagcacaaccucaagcaaa

SEQ ID NO: 205224 - RNA, 19 nt, Homo sapiens
  misc_RNA (1)...(19): siRNA sense strand
gcaaagaguguccaaucau

SEQ ID NO: 205225 - RNA, 19 nt, Homo sapiens
  misc_RNA (1)...(19): siRNA sense strand
auggauauccugcagauua

SEQ ID NO: 205226 - RNA, 19 nt, Homo sapiens
  misc_RNA (1)...(19): siRNA sense strand
uguaacaucugcaaagagu

SEQ ID NO: 205227 - RNA, 19 nt, Homo sapiens
  misc_RNA (1)...(19): siRNA sense strand
guccggagcugcuuccaau

SEQ ID NO: 205228 - RNA, 19 nt, Homo sapiens
  misc_RNA (1)...(19): siRNA sense strand
gcaaguggcaaguucaaca

SEQ ID NO: 205229 - RNA, 19 nt, Homo sapiens
  misc_RNA (1)...(19): siRNA sense strand
gcuuccaauuugcuaauaa

SEQ ID NO: 205230 - RNA, 19 nt, Homo sapiens
  misc_RNA (1)...(19): siRNA sense strand
uggaagacaaguacagaua

SEQ ID NO: 205231 - RNA, 19 nt, Homo sapiens
  misc_RNA (1)...(19): siRNA sense strand
ggauccguguccugucuuu

SEQ ID NO: 205232 - RNA, 19 nt, Homo sapiens
  misc_RNA (1)...(19): siRNA sense strand
gucuuuagcugaccugaau

SEQ ID NO: 205233 - RNA, 19 nt, Homo sapiens
  misc_RNA (1)...(19): siRNA sense strand
gacaaguacagauaccuuu

SEQ ID NO: 205234 - RNA, 19 nt, Homo sapiens
  misc_RNA (1)...(19): siRNA sense strand
ccaagcaucaggccaaaug

SEQ ID NO: 205235 - RNA, 19 nt, Homo sapiens
  misc_RNA (1)...(19): siRNA sense strand
ggagcaagagcacaacaau

SEQ ID NO: 205236 - RNA, 19 nt, Homo sapiens
  misc_RNA (1)...(19): siRNA sense strand
guguaaagcacauuuggaa

SEQ ID NO: 205237 - RNA, 19 nt, Homo sapiens
  misc_RNA (1)...(19): siRNA sense strand
caagacaguugggugaagu

SEQ ID NO: 205238 - RNA, 19 nt, Homo sapiens
  misc_RNA (1)...(19): siRNA sense strand
gaagauguucgagacuuug

SEQ ID NO: 205239 - RNA, 19 nt, Homo sapiens
  misc_RNA (1)...(19): siRNA sense strand
gucagauucucagcuuaua

SEQ ID NO: 205240 - RNA, 19 nt, Homo sapiens
  misc_RNA (1)...(19): siRNA sense strand
uaacaucugcaaagagugu

SEQ ID NO: 205241 - RNA, 19 nt, Homo sapiens
  misc_RNA (1)...(19): siRNA sense strand
cggagcugcuuccaauuug

SEQ ID NO: 205242 - RNA, 19 nt, Homo sapiens
  misc_RNA (1)...(19): siRNA sense strand
gaagacaaguacagauacc

SEQ ID NO: 205243 - RNA, 19 nt, Homo sapiens
  misc_RNA (1)...(19): siRNA sense strand
ccauggauauccugcagau

SEQ ID NO: 205244 - RNA, 19 nt, Homo sapiens
  misc_RNA (1)...(19): siRNA sense strand
ggcaucauuucccugugua

SEQ ID NO: 205245 - RNA, 19 nt, Homo sapiens
  misc_RNA (1)...(19): siRNA sense strand
uggauauccugcagauuau

SEQ ID NO: 205246 - RNA, 19 nt, Homo sapiens
  misc_RNA (1)...(19): siRNA sense strand
ggaagacaaguacagauac

SEQ ID NO: 205247 - RNA, 19 nt, Homo sapiens
  misc_RNA (1)...(19): siRNA sense strand
ugcaaagaguguccaauca

SEQ ID NO: 205248 - RNA, 19 nt, Homo sapiens
  misc_RNA (1)...(19): siRNA sense strand
guggauaugugucugaacu

SEQ ID NO: 205249 - RNA, 19 nt, Homo sapiens
  misc_RNA (1)...(19): siRNA sense strand
acuggcugcugaauguuua

SEQ ID NO: 205250 - RNA, 19 nt, Homo sapiens
  misc_RNA (1)...(19): siRNA sense strand
acuaucccaugguggaaua

SEQ ID NO: 205251 - RNA, 19 nt, Homo sapiens
  misc_RNA (1)...(19): siRNA sense strand
ccggagcugcuuccaauuu

SEQ ID NO: 205252 - RNA, 19 nt, Homo sapiens
  misc_RNA (1)...(19): siRNA sense strand
ccaaauuccaagacaguug

SEQ ID NO: 205253 - RNA, 19 nt, Homo sapiens
  misc_RNA (1)...(19): siRNA sense strand
cagaaacugccaagcauca

SEQ ID NO: 205254 - RNA, 19 nt, Homo sapiens
  misc_RNA (1)...(19): siRNA sense strand
uaugacaucugccaaagcu

SEQ ID NO: 205255 - RNA, 19 nt, Homo sapiens
  misc_RNA (1)...(19): siRNA sense strand
aaugucagauucucagcuu

SEQ ID NO: 205256 - RNA, 19 nt, Homo sapiens
  misc_RNA (1)...(19): siRNA sense strand
ucgagacuuugccaaggua

SEQ ID NO: 205257 - RNA, 19 nt, Homo sapiens
  misc_RNA (1)...(19): siRNA sense strand
gcaaaaggccauaaaaugc

SEQ ID NO: 205258 - RNA, 19 nt, Homo sapiens
  misc_RNA (1)...(19): siRNA sense strand
cugcaugauucuauccaaa

SEQ ID NO: 205259 - RNA, 19 nt, Homo sapiens
  misc_RNA (1)...(19): siRNA sense strand
uaaagcacauuuggaagac

SEQ ID NO: 205260 - RNA, 19 nt, Homo sapiens
  misc_RNA (1)...(19): siRNA sense strand
acaggagucuaaagcacuu

SEQ ID NO: 205261 - RNA, 19 nt, Homo sapiens
  misc_RNA (1)...(19): siRNA sense strand
acagauaccuuuucaagca

SEQ ID NO: 205262 - RNA, 19 nt, Homo sapiens
  misc_RNA (1)...(19): siRNA sense strand
aagcacauuuggaagacaa

SEQ ID NO: 205263 - RNA, 19 nt, Homo sapiens
  misc_RNA (1)...(19): siRNA sense strand
gcuaauaauaagccagaga

SEQ ID NO: 205264 - RNA, 19 nt, Homo sapiens
  misc_RNA (1)...(19): siRNA sense strand
caagagcacaacaauuugg

SEQ ID NO: 205265 - RNA, 19 nt, Homo sapiens
  misc_RNA (1)...(19): siRNA sense strand
ccugucagcugcaugugau

SEQ ID NO: 205266 - RNA, 19 nt, Homo sapiens
  misc_RNA (1)...(19): siRNA sense strand
gcugcugaauguuuaugau

SEQ ID NO: 205267 - RNA, 19 nt, Homo sapiens
  misc_RNA (1)...(19): siRNA sense strand
acagagcucuaccagucuu

SEQ ID NO: 205268 - RNA, 19 nt, Homo sapiens
  misc_RNA (1)...(19): siRNA sense strand
acaguugggugaaguugca

SEQ ID NO: 205269 - RNA, 19 nt, Homo sapiens
  misc_RNA (1)...(19): siRNA sense strand
guuugaccacuauuuauga

SEQ ID NO: 205270 - RNA, 19 nt, Homo sapiens
  misc_RNA (1)...(19): siRNA sense strand
gcuuauaggacugccauga

SEQ ID NO: 205271 - RNA, 19 nt, Homo sapiens
  misc_RNA (1)...(19): siRNA sense strand
caucaggccaaauguaaca

SEQ ID NO: 205272 - RNA, 19 nt, Homo sapiens
  misc_RNA (1)...(19): siRNA sense strand
gauucuauccaaauuccaa

SEQ ID NO: 205273 - RNA, 19 nt, Homo sapiens
  misc_RNA (1)...(19): siRNA sense strand
ggcaaguucaacaggauuu

SEQ ID NO: 205274 - RNA, 19 nt, Homo sapiens
  misc_RNA (1)...(19): siRNA sense strand
gaacuggcugcugaauguu

SEQ ID NO: 205275 - RNA, 19 nt, Homo sapiens
  misc_RNA (1)...(19): siRNA sense strand
cugcugaauguuuaugaua

SEQ ID NO: 205276 - RNA, 19 nt, Homo sapiens
  misc_RNA (1)...(19): siRNA sense strand
aagcaucaggccaaaugua

SEQ ID NO: 205277 - RNA, 19 nt, Homo sapiens
  misc_RNA (1)...(19): siRNA sense strand
uggcaucauuucccugugu

SEQ ID NO: 205278 - RNA, 19 nt, Homo sapiens
  misc_RNA (1)...(19): siRNA sense strand
ccaugaaacuccgaagacu

SEQ ID NO: 205279 - RNA, 19 nt, Homo sapiens
  misc_RNA (1)...(19): siRNA sense strand
auaauaagccagagaucga

SEQ ID NO: 205280 - RNA, 19 nt, Homo sapiens
  misc_RNA (1)...(19): siRNA sense strand
cuaauaauaagccagagau

SEQ ID NO: 205281 - RNA, 19 nt, Homo sapiens
  misc_RNA (1)...(19): siRNA sense strand
ugggugaaguugcauccuu

SEQ ID NO: 205282 - RNA, 19 nt, Homo sapiens
  misc_RNA (1)...(19): siRNA sense strand
caucauuucccuguguaaa

SEQ ID NO: 205283 - RNA, 19 nt, Homo sapiens
  misc_RNA (1)...(19): siRNA sense strand
gcguggauaugugucugaa

SEQ ID NO: 205284 - RNA, 19 nt, Homo sapiens
  misc_RNA (1)...(19): siRNA sense strand
gcacuaucccaugguggaa

SEQ ID NO: 205285 - RNA, 19 nt, Homo sapiens
  misc_RNA (1)...(19): siRNA sense strand
gagccugucagcugcaugu

SEQ ID NO: 205286 - RNA, 19 nt, Homo sapiens
  misc_RNA (1)...(19): siRNA sense strand
guacagauaccuuuucaag

SEQ ID NO: 205287 - RNA, 19 nt, Homo sapiens
  misc_RNA (1)...(19): siRNA sense strand
gucccucucugcguggaua

SEQ ID NO: 205288 - RNA, 19 nt, Homo sapiens
  misc_RNA (1)...(19): siRNA sense strand
ggagcugcuuccaauuugc

SEQ ID NO: 205289 - RNA, 19 nt, Homo sapiens
  misc_RNA (1)...(19): siRNA sense strand
uuagcugaccugaauaaug

SEQ ID NO: 205290 - RNA, 19 nt, Homo sapiens
  misc_RNA (1)...(19): siRNA sense strand
guggcaaguucaacaggau

SEQ ID NO: 205291 - RNA, 19 nt, Homo sapiens
  misc_RNA (1)...(19): siRNA sense strand
acaacaauuuggucaacgu

SEQ ID NO: 205292 - RNA, 19 nt, Homo sapiens
  misc_RNA (1)...(19): siRNA sense strand
gacuacaucaggagaagau

SEQ ID NO: 205293 - RNA, 19 nt, Homo sapiens
  misc_RNA (1)...(19): siRNA sense strand
uaauaagccagagaucgaa

SEQ ID NO: 205294 - RNA, 19 nt, Homo sapiens
  misc_RNA (1)...(19): siRNA sense strand
ugucagauucucagcuuau

SEQ ID NO: 205295 - RNA, 19 nt, Homo sapiens
  misc_RNA (1)...(19): siRNA sense strand
ggauauccugcagauuauu

SEQ ID NO: 205296 - RNA, 19 nt, Homo sapiens
  misc_RNA (1)...(19): siRNA sense strand
agcaucaggccaaauguaa

SEQ ID NO: 205297 - RNA, 19 nt, Homo sapiens
  misc_RNA (1)...(19): siRNA sense strand
gcccuuugcuuggaucucu

SEQ ID NO: 205298 - RNA, 19 nt, Homo sapiens
  misc_RNA (1)...(19): siRNA sense strand
gcugaauguuuaugauacg

SEQ ID NO: 205299 - RNA, 19 nt, Homo sapiens
  misc_RNA (1)...(19): siRNA sense strand
agacuuugccaagguacua

SEQ ID NO: 205300 - RNA, 19 nt, Homo sapiens
  misc_RNA (1)...(19): siRNA sense strand
caagcaaguggcaaguuca

SEQ ID NO: 205301 - RNA, 19 nt, Homo sapiens
  misc_RNA (1)...(19): siRNA sense strand
agacaaguacagauaccuu

SEQ ID NO: 205302 - RNA, 19 nt, Homo sapiens
  misc_RNA (1)...(19): siRNA sense strand
gcaucauuucccuguguaa

SEQ ID NO: 205303 - RNA, 19 nt, Homo sapiens
  misc_RNA (1)...(19): siRNA sense strand
cugcaaagaguguccaauc

SEQ ID NO: 205304 - RNA, 19 nt, Homo sapiens
  misc_RNA (1)...(19): siRNA sense strand
cuuauaggacugccaugaa

SEQ ID NO: 205305 - RNA, 19 nt, Homo sapiens
  misc_RNA (1)...(19): siRNA sense strand
caaagaguguccaaucauu

SEQ ID NO: 205306 - RNA, 19 nt, Homo sapiens
  misc_RNA (1)...(19): siRNA sense strand
uagcugaccugaauaaugu

SEQ ID NO: 205307 - RNA, 19 nt, Homo sapiens
  misc_RNA (1)...(19): siRNA sense strand
gcaugauucuauccaaauu

SEQ ID NO: 205308 - RNA, 19 nt, Homo sapiens
  misc_RNA (1)...(19): siRNA sense strand
ugaacuggcugcugaaugu

SEQ ID NO: 205309 - RNA, 19 nt, Homo sapiens
  misc_RNA (1)...(19): siRNA sense strand
gauauccugcagauuauua

SEQ ID NO: 205310 - RNA, 19 nt, Homo sapiens
  misc_RNA (1)...(19): siRNA sense strand
gagaagauguucgagacuu

SEQ ID NO: 205311 - RNA, 19 nt, Homo sapiens
  misc_RNA (1)...(19): siRNA sense strand
gcacuuuaauuaugacauc

SEQ ID NO: 205312 - RNA, 19 nt, Homo sapiens
  misc_RNA (1)...(19): siRNA sense strand
guaaagcacauuuggaaga

SEQ ID NO: 205313 - RNA, 19 nt, Homo sapiens
  misc_RNA (1)...(19): siRNA sense strand
gaauauugcacuccgacua

SEQ ID NO: 205314 - RNA, 19 nt, Homo sapiens
  misc_RNA (1)...(19): siRNA sense strand
uuauaggacugccaugaaa

SEQ ID NO: 205315 - RNA, 19 nt, Homo sapiens
  misc_RNA (1)...(19): siRNA sense strand
gggugaaguugcauccuuu

SEQ ID NO: 205316 - RNA, 19 nt, Homo sapiens
  misc_RNA (1)...(19): siRNA sense strand
gcaagagcacaacaauuug

SEQ ID NO: 205317 - RNA, 19 nt, Homo sapiens
  misc_RNA (1)...(19): siRNA sense strand
gcacaacaauuuggucaac

SEQ ID NO: 205318 - RNA, 19 nt, Homo sapiens
  misc_RNA (1)...(19): siRNA sense strand
agcaagagcacaacaauuu

SEQ ID NO: 205319 - RNA, 19 nt, Homo sapiens
  misc_RNA (1)...(19): siRNA sense strand
agaagauguucgagacuuu

SEQ ID NO: 205320 - RNA, 19 nt, Homo sapiens
  misc_RNA (1)...(19): siRNA sense strand
gagcaagagcacaacaauu

SEQ ID NO: 205321 - RNA, 19 nt, Homo sapiens
  misc_RNA (1)...(19): siRNA sense strand
ucaagcaaguggcaaguuc

SEQ ID NO: 205322 - RNA, 19 nt, Homo sapiens
  misc_RNA (1)...(19): siRNA sense strand
ccacgagacucaaacaacu

SEQ ID NO: 205323 - RNA, 19 nt, Homo sapiens
  misc_RNA (1)...(19): siRNA sense strand
cagcacaaccucaagcaaa

SEQ ID NO: 205324 - RNA, 19 nt, Homo sapiens
  misc_RNA (1)...(19): siRNA sense strand
gcaaagaguguccaaucau

SEQ ID NO: 205325 - RNA, 19 nt, Homo sapiens
  misc_RNA (1)...(19): siRNA sense strand
auggauauccugcagauua

SEQ ID NO: 205326 - RNA, 19 nt, Homo sapiens
  misc_RNA (1)...(19): siRNA sense strand
uguaacaucugcaaagagu

SEQ ID NO: 205327 - RNA, 19 nt, Homo sapiens
  misc_RNA (1)...(19): siRNA sense strand
guccggagcugcuuccaau

SEQ ID NO: 205328 - RNA, 19 nt, Homo sapiens
  misc_RNA (1)...(19): siRNA sense strand
gcaaguggcaaguucaaca

SEQ ID NO: 205329 - RNA, 19 nt, Homo sapiens
  misc_RNA (1)...(19): siRNA sense strand
gcuuccaauuugcuaauaa

SEQ ID NO: 205330 - RNA, 19 nt, Homo sapiens
  misc_RNA (1)...(19): siRNA sense strand
uggaagacaaguacagaua

SEQ ID NO: 205331 - RNA, 19 nt, Homo sapiens
  misc_RNA (1)...(19): siRNA sense strand
ggauccguguccugucuuu

SEQ ID NO: 205332 - RNA, 19 nt, Homo sapiens
  misc_RNA (1)...(19): siRNA sense strand
gucuuuagcugaccugaau

SEQ ID NO: 205333 - RNA, 19 nt, Homo sapiens
  misc_RNA (1)...(19): siRNA sense strand
gacaaguacagauaccuuu

SEQ ID NO: 205334 - RNA, 19 nt, Homo sapiens
  misc_RNA (1)...(19): siRNA sense strand
ccaagcaucaggccaaaug

SEQ ID NO: 205335 - RNA, 19 nt, Homo sapiens
  misc_RNA (1)...(19): siRNA sense strand
ggagcaagagcacaacaau

SEQ ID NO: 205336 - RNA, 19 nt, Homo sapiens
  misc_RNA (1)...(19): siRNA sense strand
guguaaagcacauuuggaa

SEQ ID NO: 205337 - RNA, 19 nt, Homo sapiens
  misc_RNA (1)...(19): siRNA sense strand
caagacaguugggugaagu

SEQ ID NO: 205338 - RNA, 19 nt, Homo sapiens
  misc_RNA (1)...(19): siRNA sense strand
gaagauguucgagacuuug

SEQ ID NO: 205339 - RNA, 19 nt, Homo sapiens
  misc_RNA (1)...(19): siRNA sense strand
gucagauucucagcuuaua

SEQ ID NO: 205340 - RNA, 19 nt, Homo sapiens
  misc_RNA (1)...(19): siRNA sense strand
uaacaucugcaaagagugu

SEQ ID NO: 205341 - RNA, 19 nt, Homo sapiens
  misc_RNA (1)...(19): siRNA sense strand
cggagcugcuuccaauuug

SEQ ID NO: 205342 - RNA, 19 nt, Homo sapiens
  misc_RNA (1)...(19): siRNA sense strand
gaagacaaguacagauacc

SEQ ID NO: 205343 - RNA, 19 nt, Homo sapiens
  misc_RNA (1)...(19): siRNA sense strand
ccauggauauccugcagau

SEQ ID NO: 205344 - RNA, 19 nt, Homo sapiens
  misc_RNA (1)...(19): siRNA sense strand
ggcaucauuucccugugua

SEQ ID NO: 205345 - RNA, 19 nt, Homo sapiens
  misc_RNA (1)...(19): siRNA sense strand
uggauauccugcagauuau

SEQ ID NO: 205346 - RNA, 19 nt, Homo sapiens
  misc_RNA (1)...(19): siRNA sense strand
ggaagacaaguacagauac

SEQ ID NO: 205347 - RNA, 19 nt, Homo sapiens
  misc_RNA (1)...(19): siRNA sense strand
ugcaaagaguguccaauca

SEQ ID NO: 205348 - RNA, 19 nt, Homo sapiens
  misc_RNA (1)...(19): siRNA sense strand
guggauaugugucugaacu

SEQ ID NO: 205349 - RNA, 19 nt, Homo sapiens
  misc_RNA (1)...(19): siRNA sense strand
acuggcugcugaauguuua

SEQ ID NO: 205350 - RNA, 19 nt, Homo sapiens
  misc_RNA (1)...(19): siRNA sense strand
acuaucccaugguggaaua

SEQ ID NO: 205351 - RNA, 19 nt, Homo sapiens
  misc_RNA (1)...(19): siRNA sense strand
ccggagcugcuuccaauuu

SEQ ID NO: 205352 - RNA, 19 nt, Homo sapiens
  misc_RNA (1)...(19): siRNA sense strand
ccaaauuccaagacaguug

SEQ ID NO: 205353 - RNA, 19 nt, Homo sapiens
  misc_RNA (1)...(19): siRNA sense strand
cagaaacugccaagcauca

SEQ ID NO: 205354 - RNA, 19 nt, Homo sapiens
  misc_RNA (1)...(19): siRNA sense strand
uaugacaucugccaaagcu

SEQ ID NO: 205355 - RNA, 19 nt, Homo sapiens
  misc_RNA (1)...(19): siRNA sense strand
aaugucagauucucagcuu

SEQ ID NO: 205356 - RNA, 19 nt, Homo sapiens
  misc_RNA (1)...(19): siRNA sense strand
ucgagacuuugccaaggua

SEQ ID NO: 205357 - RNA, 19 nt, Homo sapiens
  misc_RNA (1)...(19): siRNA sense strand
gcaaaaggccauaaaaugc

SEQ ID NO: 205358 - RNA, 19 nt, Homo sapiens
  misc_RNA (1)...(19): siRNA sense strand
cugcaugauucuauccaaa

SEQ ID NO: 205359 - RNA, 19 nt, Homo sapiens
  misc_RNA (1)...(19): siRNA sense strand
uaaagcacauuuggaagac

SEQ ID NO: 205360 - RNA, 19 nt, Homo sapiens
  misc_RNA (1)...(19): siRNA sense strand
acaggagucuaaagcacuu

SEQ ID NO: 205361 - RNA, 19 nt, Homo sapiens
  misc_RNA (1)...(19): siRNA sense strand
acagauaccuuuucaagca

SEQ ID NO: 205362 - RNA, 19 nt, Homo sapiens
  misc_RNA (1)...(19): siRNA sense strand
aagcacauuuggaagacaa

SEQ ID NO: 205363 - RNA, 19 nt, Homo sapiens
  misc_RNA (1)...(19): siRNA sense strand
gcuaauaauaagccagaga

SEQ ID NO: 205364 - RNA, 19 nt, Homo sapiens
  misc_RNA (1)...(19): siRNA sense strand
caagagcacaacaauuugg

SEQ ID NO: 205365 - RNA, 19 nt, Homo sapiens
  misc_RNA (1)...(19): siRNA sense strand
ccugucagcugcaugugau

SEQ ID NO: 205366 - RNA, 19 nt, Homo sapiens
  misc_RNA (1)...(19): siRNA sense strand
gcugcugaauguuuaugau

SEQ ID NO: 205367 - RNA, 19 nt, Homo sapiens
  misc_RNA (1)...(19): siRNA sense strand
acagagcucuaccagucuu

SEQ ID NO: 205368 - RNA, 19 nt, Homo sapiens
  misc_RNA (1)...(19): siRNA sense strand
acaguugggugaaguugca

SEQ ID NO: 205369 - RNA, 19 nt, Homo sapiens
  misc_RNA (1)...(19): siRNA sense strand
guuugaccacuauuuauga

SEQ ID NO: 205370 - RNA, 19 nt, Homo sapiens
  misc_RNA (1)...(19): siRNA sense strand
gcuuauaggacugccauga

SEQ ID NO: 205371 - RNA, 19 nt, Homo sapiens
  misc_RNA (1)...(19): siRNA sense strand
caucaggccaaauguaaca

SEQ ID NO: 205372 - RNA, 19 nt, Homo sapiens
  misc_RNA (1)...(19): siRNA sense strand
gauucuauccaaauuccaa

SEQ ID NO: 205373 - RNA, 19 nt, Homo sapiens
  misc_RNA (1)...(19): siRNA sense strand
ggcaaguucaacaggauuu

SEQ ID NO: 205374 - RNA, 19 nt, Homo sapiens
  misc_RNA (1)...(19): siRNA sense strand
gaacuggcugcugaauguu

SEQ ID NO: 205375 - RNA, 19 nt, Homo sapiens
  misc_RNA (1)...(19): siRNA sense strand
cugcugaauguuuaugaua

SEQ ID NO: 205376 - RNA, 19 nt, Homo sapiens
  misc_RNA (1)...(19): siRNA sense strand
aagcaucaggccaaaugua

SEQ ID NO: 205377 - RNA, 19 nt, Homo sapiens
  misc_RNA (1)...(19): siRNA sense strand
uggcaucauuucccugugu

SEQ ID NO: 205378 - RNA, 19 nt, Homo sapiens
  misc_RNA (1)...(19): siRNA sense strand
ccaugaaacuccgaagacu

SEQ ID NO: 205379 - RNA, 19 nt, Homo sapiens
  misc_RNA (1)...(19): siRNA sense strand
auaauaagccagagaucga

SEQ ID NO: 205380 - RNA, 19 nt, Homo sapiens
  misc_RNA (1)...(19): siRNA sense strand
cuaauaauaagccagagau

SEQ ID NO: 205381 - RNA, 19 nt, Homo sapiens
  misc_RNA (1)...(19): siRNA sense strand
ugggugaaguugcauccuu

SEQ ID NO: 205382 - RNA, 19 nt, Homo sapiens
  misc_RNA (1)...(19): siRNA sense strand
caucauuucccuguguaaa

SEQ ID NO: 205383 - RNA, 19 nt, Homo sapiens
  misc_RNA (1)...(19): siRNA sense strand
gcguggauaugugucugaa

SEQ ID NO: 205384 - RNA, 19 nt, Homo sapiens
  misc_RNA (1)...(19): siRNA sense strand
gcacuaucccaugguggaa

SEQ ID NO: 205385 - RNA, 19 nt, Homo sapiens
  misc_RNA (1)...(19): siRNA sense strand
gagccugucagcugcaugu

SEQ ID NO: 205386 - RNA, 19 nt, Homo sapiens
  misc_RNA (1)...(19): siRNA sense strand
guacagauaccuuuucaag

SEQ ID NO: 205387 - RNA, 19 nt, Homo sapiens
  misc_RNA (1)...(19): siRNA sense strand
gucccucucugcguggaua

SEQ ID NO: 205388 - RNA, 19 nt, Homo sapiens
  misc_RNA (1)...(19): siRNA sense strand
ggagcugcuuccaauuugc

SEQ ID NO: 205389 - RNA, 19 nt, Homo sapiens
  misc_RNA (1)...(19): siRNA sense strand
uuagcugaccugaauaaug

SEQ ID NO: 205390 - RNA, 19 nt, Homo sapiens
  misc_RNA (1)...(19): siRNA sense strand
guggcaaguucaacaggau

SEQ ID NO: 205391 - RNA, 19 nt, Homo sapiens
  misc_RNA (1)...(19): siRNA sense strand
acaacaauuuggucaacgu

SEQ ID NO: 205392 - RNA, 19 nt, Homo sapiens
  misc_RNA (1)...(19): siRNA sense strand
gacuacaucaggagaagau

SEQ ID NO: 205393 - RNA, 19 nt, Homo sapiens
  misc_RNA (1)...(19): siRNA sense strand
uaauaagccagagaucgaa

SEQ ID NO: 205394 - RNA, 19 nt, Homo sapiens
  misc_RNA (1)...(19): siRNA sense strand
ugucagauucucagcuuau

SEQ ID NO: 205395 - RNA, 19 nt, Homo sapiens
  misc_RNA (1)...(19): siRNA sense strand
ggauauccugcagauuauu

SEQ ID NO: 205396 - RNA, 19 nt, Homo sapiens
  misc_RNA (1)...(19): siRNA sense strand
agcaucaggccaaauguaa

SEQ ID NO: 205397 - RNA, 19 nt, Homo sapiens
  misc_RNA (1)...(19): siRNA sense strand
gcccuuugcuuggaucucu

SEQ ID NO: 205398 - RNA, 19 nt, Homo sapiens
  misc_RNA (1)...(19): siRNA sense strand
gcugaauguuuaugauacg

SEQ ID NO: 205399 - RNA, 19 nt, Homo sapiens
  misc_RNA (1)...(19): siRNA sense strand
agacuuugccaagguacua

SEQ ID NO: 205400 - RNA, 19 nt, Homo sapiens
  misc_RNA (1)...(19): siRNA sense strand
caagcaaguggcaaguuca

SEQ ID NO: 205401 - RNA, 19 nt, Homo sapiens
  misc_RNA (1)...(19): siRNA sense strand
agacaaguacagauaccuu

SEQ ID NO: 205402 - RNA, 19 nt, Homo sapiens
  misc_RNA (1)...(19): siRNA sense strand
gcaucauuucccuguguaa

SEQ ID NO: 205403 - RNA, 19 nt, Homo sapiens
  misc_RNA (1)...(19): siRNA sense strand
cugcaaagaguguccaauc

SEQ ID NO: 205404 - RNA, 19 nt, Homo sapiens
  misc_RNA (1)...(19): siRNA sense strand
cuuauaggacugccaugaa

SEQ ID NO: 205405 - RNA, 19 nt, Homo sapiens
  misc_RNA (1)...(19): siRNA sense strand
caaagaguguccaaucauu

SEQ ID NO: 205406 - RNA, 19 nt, Homo sapiens
  misc_RNA (1)...(19): siRNA sense strand
uagcugaccugaauaaugu

SEQ ID NO: 205407 - RNA, 19 nt, Homo sapiens
  misc_RNA (1)...(19): siRNA sense strand
gcaugauucuauccaaauu

SEQ ID NO: 205408 - RNA, 19 nt, Homo sapiens
  misc_RNA (1)...(19): siRNA sense strand
ugaacuggcugcugaaugu

SEQ ID NO: 205409 - RNA, 19 nt, Homo sapiens
  misc_RNA (1)...(19): siRNA sense strand
gauauccugcagauuauua

SEQ ID NO: 205410 - RNA, 19 nt, Homo sapiens
  misc_RNA (1)...(19): siRNA sense strand
gagaagauguucgagacuu

SEQ ID NO: 205411 - RNA, 19 nt, Homo sapiens
  misc_RNA (1)...(19): siRNA sense strand
gcacuuuaauuaugacauc

SEQ ID NO: 205412 - RNA, 19 nt, Homo sapiens
  misc_RNA (1)...(19): siRNA sense strand
guaaagcacauuuggaaga

SEQ ID NO: 205413 - RNA, 19 nt, Homo sapiens
  misc_RNA (1)...(19): siRNA sense strand
gaauauugcacuccgacua

SEQ ID NO: 205414 - RNA, 19 nt, Homo sapiens
  misc_RNA (1)...(19): siRNA sense strand
uuauaggacugccaugaaa

SEQ ID NO: 205415 - RNA, 19 nt, Homo sapiens
  misc_RNA (1)...(19): siRNA sense strand
gggugaaguugcauccuuu

SEQ ID NO: 205416 - RNA, 19 nt, Homo sapiens
  misc_RNA (1)...(19): siRNA sense strand
gcaagagcacaacaauuug

SEQ ID NO: 205417 - RNA, 19 nt, Homo sapiens
  misc_RNA (1)...(19): siRNA sense strand
gcacaacaauuuggucaac

SEQ ID NO: 205418 - RNA, 19 nt, Homo sapiens
  misc_RNA (1)...(19): siRNA sense strand
agcaagagcacaacaauuu

SEQ ID NO: 205419 - RNA, 19 nt, Homo sapiens
  misc_RNA (1)...(19): siRNA sense strand
agaagauguucgagacuuu

SEQ ID NO: 205420 - RNA, 19 nt, Homo sapiens
  misc_RNA (1)...(19): siRNA sense strand
gagcaagagcacaacaauu

SEQ ID NO: 205421 - RNA, 19 nt, Homo sapiens
  misc_RNA (1)...(19): siRNA sense strand
ucaagcaaguggcaaguuc

SEQ ID NO: 205422 - RNA, 19 nt, Homo sapiens
  misc_RNA (1)...(19): siRNA sense strand
ccacgagacucaaacaacu

SEQ ID NO: 205423 - RNA, 19 nt, Homo sapiens
  misc_RNA (1)...(19): siRNA sense strand
cagcacaaccucaagcaaa

SEQ ID NO: 205424 - RNA, 19 nt, Homo sapiens
  misc_RNA (1)...(19): siRNA sense strand
gcaaagaguguccaaucau

SEQ ID NO: 205425 - RNA, 19 nt, Homo sapiens
  misc_RNA (1)...(19): siRNA sense strand
auggauauccugcagauua

SEQ ID NO: 205426 - RNA, 19 nt, Homo sapiens
  misc_RNA (1)...(19): siRNA sense strand
uguaacaucugcaaagagu

SEQ ID NO: 205427 - RNA, 19 nt, Homo sapiens
  misc_RNA (1)...(19): siRNA sense strand
guccggagcugcuuccaau

SEQ ID NO: 205428 - RNA, 19 nt, Homo sapiens
  misc_RNA (1)...(19): siRNA sense strand
gcaaguggcaaguucaaca

SEQ ID NO: 205429 - RNA, 19 nt, Homo sapiens
  misc_RNA (1)...(19): siRNA sense strand
gcuuccaauuugcuaauaa

SEQ ID NO: 205430 - RNA, 19 nt, Homo sapiens
  misc_RNA (1)...(19): siRNA sense strand
uggaagacaaguacagaua

SEQ ID NO: 205431 - RNA, 19 nt, Homo sapiens
  misc_RNA (1)...(19): siRNA sense strand
ggauccguguccugucuuu

SEQ ID NO: 205432 - RNA, 19 nt, Homo sapiens
  misc_RNA (1)...(19): siRNA sense strand
gucuuuagcugaccugaau

SEQ ID NO: 205433 - RNA, 19 nt, Homo sapiens
  misc_RNA (1)...(19): siRNA sense strand
gacaaguacagauaccuuu

SEQ ID NO: 205434 - RNA, 19 nt, Homo sapiens
  misc_RNA (1)...(19): siRNA sense strand
ccaagcaucaggccaaaug

SEQ ID NO: 205435 - RNA, 19 nt, Homo sapiens
  misc_RNA (1)...(19): siRNA sense strand
ggagcaagagcacaacaau

SEQ ID NO: 205436 - RNA, 19 nt, Homo sapiens
  misc_RNA (1)...(19): siRNA sense strand
guguaaagcacauuuggaa

SEQ ID NO: 205437 - RNA, 19 nt, Homo sapiens
  misc_RNA (1)...(19): siRNA sense strand
caagacaguugggugaagu

SEQ ID NO: 205438 - RNA, 19 nt, Homo sapiens
  misc_RNA (1)...(19): siRNA sense strand
gaagauguucgagacuuug

SEQ ID NO: 205439 - RNA, 19 nt, Homo sapiens
  misc_RNA (1)...(19): siRNA sense strand
gucagauucucagcuuaua

SEQ ID NO: 205440 - RNA, 19 nt, Homo sapiens
  misc_RNA (1)...(19): siRNA sense strand
uaacaucugcaaagagugu

SEQ ID NO: 205441 - RNA, 19 nt, Homo sapiens
  misc_RNA (1)...(19): siRNA sense strand
cggagcugcuuccaauuug

SEQ ID NO: 205442 - RNA, 19 nt, Homo sapiens
  misc_RNA (1)...(19): siRNA sense strand
gaagacaaguacagauacc

SEQ ID NO: 205443 - RNA, 19 nt, Homo sapiens
  misc_RNA (1)...(19): siRNA sense strand
ccauggauauccugcagau

SEQ ID NO: 205444 - RNA, 19 nt, Homo sapiens
  misc_RNA (1)...(19): siRNA sense strand
ggcaucauuucccugugua

SEQ ID NO: 205445 - RNA, 19 nt, Homo sapiens
  misc_RNA (1)...(19): siRNA sense strand
uggauauccugcagauuau

SEQ ID NO: 205446 - RNA, 19 nt, Homo sapiens
  misc_RNA (1)...(19): siRNA sense strand
ggaagacaaguacagauac

SEQ ID NO: 205447 - RNA, 19 nt, Homo sapiens
  misc_RNA (1)...(19): siRNA sense strand
ugcaaagaguguccaauca

SEQ ID NO: 205448 - RNA, 19 nt, Homo sapiens
  misc_RNA (1)...(19): siRNA sense strand
guggauaugugucugaacu

SEQ ID NO: 205449 - RNA, 19 nt, Homo sapiens
  misc_RNA (1)...(19): siRNA sense strand
acuggcugcugaauguuua

SEQ ID NO: 205450 - RNA, 19 nt, Homo sapiens
  misc_RNA (1)...(19): siRNA sense strand
acuaucccaugguggaaua

SEQ ID NO: 205451 - RNA, 19 nt, Homo sapiens
  misc_RNA (1)...(19): siRNA sense strand
ccggagcugcuuccaauuu

SEQ ID NO: 205452 - RNA, 19 nt, Homo sapiens
  misc_RNA (1)...(19): siRNA sense strand
ccaaauuccaagacaguug

SEQ ID NO: 205453 - RNA, 19 nt, Homo sapiens
  misc_RNA (1)...(19): siRNA sense strand
cagaaacugccaagcauca

SEQ ID NO: 205454 - RNA, 19 nt, Homo sapiens
  misc_RNA (1)...(19): siRNA sense strand
uaugacaucugccaaagcu

SEQ ID NO: 205455 - RNA, 19 nt, Homo sapiens
  misc_RNA (1)...(19): siRNA sense strand
aaugucagauucucagcuu

SEQ ID NO: 205456 - RNA, 19 nt, Homo sapiens
  misc_RNA (1)...(19): siRNA sense strand
ucgagacuuugccaaggua

SEQ ID NO: 205457 - RNA, 19 nt, Homo sapiens
  misc_RNA (1)...(19): siRNA sense strand
gcaaaaggccauaaaaugc

SEQ ID NO: 205458 - RNA, 19 nt, Homo sapiens
  misc_RNA (1)...(19): siRNA sense strand
cugcaugauucuauccaaa

SEQ ID NO: 205459 - RNA, 19 nt, Homo sapiens
  misc_RNA (1)...(19): siRNA sense strand
uaaagcacauuuggaagac

SEQ ID NO: 205460 - RNA, 19 nt, Homo sapiens
  misc_RNA (1)...(19): siRNA sense strand
acaggagucuaaagcacuu

SEQ ID NO: 205461 - RNA, 19 nt, Homo sapiens
  misc_RNA (1)...(19): siRNA sense strand
acagauaccuuuucaagca

SEQ ID NO: 205462 - RNA, 19 nt, Homo sapiens
  misc_RNA (1)...(19): siRNA sense strand
aagcacauuuggaagacaa

SEQ ID NO: 205463 - RNA, 19 nt, Homo sapiens
  misc_RNA (1)...(19): siRNA sense strand
gcuaauaauaagccagaga

SEQ ID NO: 205464 - RNA, 19 nt, Homo sapiens
  misc_RNA (1)...(19): siRNA sense strand
caagagcacaacaauuugg

SEQ ID NO: 205465 - RNA, 19 nt, Homo sapiens
  misc_RNA (1)...(19): siRNA sense strand
ccugucagcugcaugugau

SEQ ID NO: 205466 - RNA, 19 nt, Homo sapiens
  misc_RNA (1)...(19): siRNA sense strand
gcugcugaauguuuaugau

SEQ ID NO: 205467 - RNA, 19 nt, Homo sapiens
  misc_RNA (1)...(19): siRNA sense strand
acagagcucuaccagucuu

SEQ ID NO: 205468 - RNA, 19 nt, Homo sapiens
  misc_RNA (1)...(19): siRNA sense strand
acaguugggugaaguugca

SEQ ID NO: 205469 - RNA, 19 nt, Homo sapiens
  misc_RNA (1)...(19): siRNA sense strand
guuugaccacuauuuauga

SEQ ID NO: 205470 - RNA, 19 nt, Homo sapiens
  misc_RNA (1)...(19): siRNA sense strand
gcuuauaggacugccauga

SEQ ID NO: 205471 - RNA, 19 nt, Homo sapiens
  misc_RNA (1)...(19): siRNA sense strand
caucaggccaaauguaaca

SEQ ID NO: 205472 - RNA, 19 nt, Homo sapiens
  misc_RNA (1)...(19): siRNA sense strand
gauucuauccaaauuccaa

SEQ ID NO: 205473 - RNA, 19 nt, Homo sapiens
  misc_RNA (1)...(19): siRNA sense strand
ggcaaguucaacaggauuu

SEQ ID NO: 205474 - RNA, 19 nt, Homo sapiens
  misc_RNA (1)...(19): siRNA sense strand
gaacuggcugcugaauguu

SEQ ID NO: 205475 - RNA, 19 nt, Homo sapiens
  misc_RNA (1)...(19): siRNA sense strand
cugcugaauguuuaugaua

SEQ ID NO: 205476 - RNA, 19 nt, Homo sapiens
  misc_RNA (1)...(19): siRNA sense strand
aagcaucaggccaaaugua

SEQ ID NO: 205477 - RNA, 19 nt, Homo sapiens
  misc_RNA (1)...(19): siRNA sense strand
uggcaucauuucccugugu

SEQ ID NO: 205478 - RNA, 19 nt, Homo sapiens
  misc_RNA (1)...(19): siRNA sense strand
ccaugaaacuccgaagacu

SEQ ID NO: 205479 - RNA, 19 nt, Homo sapiens
  misc_RNA (1)...(19): siRNA sense strand
auaauaagccagagaucga

SEQ ID NO: 205480 - RNA, 19 nt, Homo sapiens
  misc_RNA (1)...(19): siRNA sense strand
cuaauaauaagccagagau

SEQ ID NO: 205481 - RNA, 19 nt, Homo sapiens
  misc_RNA (1)...(19): siRNA sense strand
ugggugaaguugcauccuu

SEQ ID NO: 205482 - RNA, 19 nt, Homo sapiens
  misc_RNA (1)...(19): siRNA sense strand
caucauuucccuguguaaa

SEQ ID NO: 205483 - RNA, 19 nt, Homo sapiens
  misc_RNA (1)...(19): siRNA sense strand
gcguggauaugugucugaa

SEQ ID NO: 205484 - RNA, 19 nt, Homo sapiens
  misc_RNA (1)...(19): siRNA sense strand
gcacuaucccaugguggaa

SEQ ID NO: 205485 - RNA, 19 nt, Homo sapiens
  misc_RNA (1)...(19): siRNA sense strand
gagccugucagcugcaugu

SEQ ID NO: 205486 - RNA, 19 nt, Homo sapiens
  misc_RNA (1)...(19): siRNA sense strand
guacagauaccuuuucaag

SEQ ID NO: 205487 - RNA, 19 nt, Homo sapiens
  misc_RNA (1)...(19): siRNA sense strand
gucccucucugcguggaua

SEQ ID NO: 205488 - RNA, 19 nt, Homo sapiens
  misc_RNA (1)...(19): siRNA sense strand
ggagcugcuuccaauuugc

SEQ ID NO: 205489 - RNA, 19 nt, Homo sapiens
  misc_RNA (1)...(19): siRNA sense strand
uuagcugaccugaauaaug

SEQ ID NO: 205490 - RNA, 19 nt, Homo sapiens
  misc_RNA (1)...(19): siRNA sense strand
guggcaaguucaacaggau

SEQ ID NO: 205491 - RNA, 19 nt, Homo sapiens
  misc_RNA (1)...(19): siRNA sense strand
acaacaauuuggucaacgu

SEQ ID NO: 205492 - RNA, 19 nt, Homo sapiens
  misc_RNA (1)...(19): siRNA sense strand
gacuacaucaggagaagau

SEQ ID NO: 205493 - RNA, 19 nt, Homo sapiens
  misc_RNA (1)...(19): siRNA sense strand
uaauaagccagagaucgaa

SEQ ID NO: 205494 - RNA, 19 nt, Homo sapiens
  misc_RNA (1)...(19): siRNA sense strand
ugucagauucucagcuuau

SEQ ID NO: 205495 - RNA, 19 nt, Homo sapiens
  misc_RNA (1)...(19): siRNA sense strand
ggauauccugcagauuauu

SEQ ID NO: 205496 - RNA, 19 nt, Homo sapiens
  misc_RNA (1)...(19): siRNA sense strand
agcaucaggccaaauguaa

SEQ ID NO: 205497 - RNA, 19 nt, Homo sapiens
  misc_RNA (1)...(19): siRNA sense strand
gcccuuugcuuggaucucu

SEQ ID NO: 205498 - RNA, 19 nt, Homo sapiens
  misc_RNA (1)...(19): siRNA sense strand
gcugaauguuuaugauacg

SEQ ID NO: 205499 - RNA, 19 nt, Homo sapiens
  misc_RNA (1)...(19): siRNA sense strand
agacuuugccaagguacua

SEQ ID NO: 205500 - RNA, 19 nt, Homo sapiens
  misc_RNA (1)...(19): siRNA sense strand
caagcaaguggcaaguuca

SEQ ID NO: 205501 - RNA, 19 nt, Homo sapiens
  misc_RNA (1)...(19): siRNA sense strand
agacaaguacagauaccuu

SEQ ID NO: 205502 - RNA, 19 nt, Homo sapiens
  misc_RNA (1)...(19): siRNA sense strand
gcaucauuucccuguguaa

SEQ ID NO: 205503 - RNA, 19 nt, Homo sapiens
  misc_RNA (1)...(19): siRNA sense strand
cugcaaagaguguccaauc

SEQ ID NO: 205504 - RNA, 19 nt, Homo sapiens
  misc_RNA (1)...(19): siRNA sense strand
cuuauaggacugccaugaa

SEQ ID NO: 205505 - RNA, 19 nt, Homo sapiens
  misc_RNA (1)...(19): siRNA sense strand
caaagaguguccaaucauu

SEQ ID NO: 205506 - RNA, 19 nt, Homo sapiens
  misc_RNA (1)...(19): siRNA sense strand
uagcugaccugaauaaugu

SEQ ID NO: 205507 - RNA, 19 nt, Homo sapiens
  misc_RNA (1)...(19): siRNA sense strand
gcaugauucuauccaaauu

SEQ ID NO: 205508 - RNA, 19 nt, Homo sapiens
  misc_RNA (1)...(19): siRNA sense strand
ugaacuggcugcugaaugu

SEQ ID NO: 205509 - RNA, 19 nt, Homo sapiens
  misc_RNA (1)...(19): siRNA sense strand
gauauccugcagauuauua

SEQ ID NO: 205510 - RNA, 19 nt, Homo sapiens
  misc_RNA (1)...(19): siRNA sense strand
gagaagauguucgagacuu

SEQ ID NO: 205511 - RNA, 19 nt, Homo sapiens
  misc_RNA (1)...(19): siRNA sense strand
gcacuuuaauuaugacauc

SEQ ID NO: 205512 - RNA, 19 nt, Homo sapiens
  misc_RNA (1)...(19): siRNA sense strand
guaaagcacauuuggaaga

SEQ ID NO: 205513 - RNA, 19 nt, Homo sapiens
  misc_RNA (1)...(19): siRNA sense strand
gaauauugcacuccgacua

SEQ ID NO: 205514 - RNA, 19 nt, Homo sapiens
  misc_RNA (1)...(19): siRNA sense strand
uuauaggacugccaugaaa

SEQ ID NO: 205515 - RNA, 19 nt, Homo sapiens
  misc_RNA (1)...(19): siRNA sense strand
gggugaaguugcauccuuu

SEQ ID NO: 205516 - RNA, 19 nt, Homo sapiens
  misc_RNA (1)...(19): siRNA sense strand
gcaagagcacaacaauuug

SEQ ID NO: 205517 - RNA, 19 nt, Homo sapiens
  misc_RNA (1)...(19): siRNA sense strand
gcacaacaauuuggucaac

SEQ ID NO: 205518 - RNA, 19 nt, Homo sapiens
  misc_RNA (1)...(19): siRNA sense strand
agcaagagcacaacaauuu

SEQ ID NO: 205519 - RNA, 19 nt, Homo sapiens
  misc_RNA (1)...(19): siRNA sense strand
agaagauguucgagacuuu

SEQ ID NO: 205520 - RNA, 19 nt, Homo sapiens
  misc_RNA (1)...(19): siRNA sense strand
gagcaagagcacaacaauu

SEQ ID NO: 205521 - RNA, 19 nt, Homo sapiens
  misc_RNA (1)...(19): siRNA sense strand
ucaagcaaguggcaaguuc

SEQ ID NO: 205522 - RNA, 19 nt, Homo sapiens
  misc_RNA (1)...(19): siRNA sense strand
ccacgagacucaaacaacu

SEQ ID NO: 205523 - RNA, 19 nt, Homo sapiens
  misc_RNA (1)...(19): siRNA sense strand
cagcacaaccucaagcaaa

SEQ ID NO: 205524 - RNA, 19 nt, Homo sapiens
  misc_RNA (1)...(19): siRNA sense strand
gcaaagaguguccaaucau

SEQ ID NO: 205525 - RNA, 19 nt, Homo sapiens
  misc_RNA (1)...(19): siRNA sense strand
auggauauccugcagauua

SEQ ID NO: 205526 - RNA, 19 nt, Homo sapiens
  misc_RNA (1)...(19): siRNA sense strand
uguaacaucugcaaagagu

SEQ ID NO: 205527 - RNA, 19 nt, Homo sapiens
  misc_RNA (1)...(19): siRNA sense strand
guccggagcugcuuccaau

SEQ ID NO: 205528 - RNA, 19 nt, Homo sapiens
  misc_RNA (1)...(19): siRNA sense strand
gcaaguggcaaguucaaca

SEQ ID NO: 205529 - RNA, 19 nt, Homo sapiens
  misc_RNA (1)...(19): siRNA sense strand
gcuuccaauuugcuaauaa

SEQ ID NO: 205530 - RNA, 19 nt, Homo sapiens
  misc_RNA (1)...(19): siRNA sense strand
uggaagacaaguacagaua

SEQ ID NO: 205531 - RNA, 19 nt, Homo sapiens
  misc_RNA (1)...(19): siRNA sense strand
ggauccguguccugucuuu

SEQ ID NO: 205532 - RNA, 19 nt, Homo sapiens
  misc_RNA (1)...(19): siRNA sense strand
gucuuuagcugaccugaau

SEQ ID NO: 205533 - RNA, 19 nt, Homo sapiens
  misc_RNA (1)...(19): siRNA sense strand
gacaaguacagauaccuuu

SEQ ID NO: 205534 - RNA, 19 nt, Homo sapiens
  misc_RNA (1)...(19): siRNA sense strand
ccaagcaucaggccaaaug

SEQ ID NO: 205535 - RNA, 19 nt, Homo sapiens
  misc_RNA (1)...(19): siRNA sense strand
ggagcaagagcacaacaau

SEQ ID NO: 205536 - RNA, 19 nt, Homo sapiens
  misc_RNA (1)...(19): siRNA sense strand
guguaaagcacauuuggaa

SEQ ID NO: 205537 - RNA, 19 nt, Homo sapiens
  misc_RNA (1)...(19): siRNA sense strand
caagacaguugggugaagu

SEQ ID NO: 205538 - RNA, 19 nt, Homo sapiens
  misc_RNA (1)...(19): siRNA sense strand
gaagauguucgagacuuug

SEQ ID NO: 205539 - RNA, 19 nt, Homo sapiens
  misc_RNA (1)...(19): siRNA sense strand
gucagauucucagcuuaua

SEQ ID NO: 205540 - RNA, 19 nt, Homo sapiens
  misc_RNA (1)...(19): siRNA sense strand
uaacaucugcaaagagugu

SEQ ID NO: 205541 - RNA, 19 nt, Homo sapiens
  misc_RNA (1)...(19): siRNA sense strand
cggagcugcuuccaauuug

SEQ ID NO: 205542 - RNA, 19 nt, Homo sapiens
  misc_RNA (1)...(19): siRNA sense strand
gaagacaaguacagauacc

SEQ ID NO: 205543 - RNA, 19 nt, Homo sapiens
  misc_RNA (1)...(19): siRNA sense strand
ccauggauauccugcagau

SEQ ID NO: 205544 - RNA, 19 nt, Homo sapiens
  misc_RNA (1)...(19): siRNA sense strand
ggcaucauuucccugugua

SEQ ID NO: 205545 - RNA, 19 nt, Homo sapiens
  misc_RNA (1)...(19): siRNA sense strand
uggauauccugcagauuau

SEQ ID NO: 205546 - RNA, 19 nt, Homo sapiens
  misc_RNA (1)...(19): siRNA sense strand
ggaagacaaguacagauac

SEQ ID NO: 205547 - RNA, 19 nt, Homo sapiens
  misc_RNA (1)...(19): siRNA sense strand
ugcaaagaguguccaauca

SEQ ID NO: 205548 - RNA, 19 nt, Homo sapiens
  misc_RNA (1)...(19): siRNA sense strand
guggauaugugucugaacu

SEQ ID NO: 205549 - RNA, 19 nt, Homo sapiens
  misc_RNA (1)...(19): siRNA sense strand
acuggcugcugaauguuua

SEQ ID NO: 205550 - RNA, 19 nt, Homo sapiens
  misc_RNA (1)...(19): siRNA sense strand
acuaucccaugguggaaua

SEQ ID NO: 205551 - RNA, 19 nt, Homo sapiens
  misc_RNA (1)...(19): siRNA sense strand
ccggagcugcuuccaauuu

SEQ ID NO: 205552 - RNA, 19 nt, Homo sapiens
  misc_RNA (1)...(19): siRNA sense strand
ccaaauuccaagacaguug

SEQ ID NO: 205553 - RNA, 19 nt, Homo sapiens
  misc_RNA (1)...(19): siRNA sense strand
cagaaacugccaagcauca

SEQ ID NO: 205554 - RNA, 19 nt, Homo sapiens
  misc_RNA (1)...(19): siRNA sense strand
uaugacaucugccaaagcu

SEQ ID NO: 205555 - RNA, 19 nt, Homo sapiens
  misc_RNA (1)...(19): siRNA sense strand
aaugucagauucucagcuu

SEQ ID NO: 205556 - RNA, 19 nt, Homo sapiens
  misc_RNA (1)...(19): siRNA sense strand
ucgagacuuugccaaggua

SEQ ID NO: 205557 - RNA, 19 nt, Homo sapiens
  misc_RNA (1)...(19): siRNA sense strand
gcaaaaggccauaaaaugc

SEQ ID NO: 205558 - RNA, 19 nt, Homo sapiens
  misc_RNA (1)...(19): siRNA sense strand
cugcaugauucuauccaaa

SEQ ID NO: 205559 - RNA, 19 nt, Homo sapiens
  misc_RNA (1)...(19): siRNA sense strand
uaaagcacauuuggaagac

SEQ ID NO: 205560 - RNA, 19 nt, Homo sapiens
  misc_RNA (1)...(19): siRNA sense strand
acaggagucuaaagcacuu

SEQ ID NO: 205561 - RNA, 19 nt, Homo sapiens
  misc_RNA (1)...(19): siRNA sense strand
acagauaccuuuucaagca

SEQ ID NO: 205562 - RNA, 19 nt, Homo sapiens
  misc_RNA (1)...(19): siRNA sense strand
aagcacauuuggaagacaa

SEQ ID NO: 205563 - RNA, 19 nt, Homo sapiens
  misc_RNA (1)...(19): siRNA sense strand
gcuaauaauaagccagaga

SEQ ID NO: 205564 - RNA, 19 nt, Homo sapiens
  misc_RNA (1)...(19): siRNA sense strand
caagagcacaacaauuugg

SEQ ID NO: 205565 - RNA, 19 nt, Homo sapiens
  misc_RNA (1)...(19): siRNA sense strand
ccugucagcugcaugugau

SEQ ID NO: 205566 - RNA, 19 nt, Homo sapiens
  misc_RNA (1)...(19): siRNA sense strand
gcugcugaauguuuaugau

SEQ ID NO: 205567 - RNA, 19 nt, Homo sapiens
  misc_RNA (1)...(19): siRNA sense strand
acagagcucuaccagucuu

SEQ ID NO: 205568 - RNA, 19 nt, Homo sapiens
  misc_RNA (1)...(19): siRNA sense strand
acaguugggugaaguugca

SEQ ID NO: 205569 - RNA, 19 nt, Homo sapiens
  misc_RNA (1)...(19): siRNA sense strand
guuugaccacuauuuauga

SEQ ID NO: 205570 - RNA, 19 nt, Homo sapiens
  misc_RNA (1)...(19): siRNA sense strand
gcuuauaggacugccauga

SEQ ID NO: 205571 - RNA, 19 nt, Homo sapiens
  misc_RNA (1)...(19): siRNA sense strand
caucaggccaaauguaaca

SEQ ID NO: 205572 - RNA, 19 nt, Homo sapiens
  misc_RNA (1)...(19): siRNA sense strand
gauucuauccaaauuccaa

SEQ ID NO: 205573 - RNA, 19 nt, Homo sapiens
  misc_RNA (1)...(19): siRNA sense strand
ggcaaguucaacaggauuu

SEQ ID NO: 205574 - RNA, 19 nt, Homo sapiens
  misc_RNA (1)...(19): siRNA sense strand
gaacuggcugcugaauguu

SEQ ID NO: 205575 - RNA, 19 nt, Homo sapiens
  misc_RNA (1)...(19): siRNA sense strand
cugcugaauguuuaugaua

SEQ ID NO: 205576 - RNA, 19 nt, Homo sapiens
  misc_RNA (1)...(19): siRNA sense strand
aagcaucaggccaaaugua

SEQ ID NO: 205577 - RNA, 19 nt, Homo sapiens
  misc_RNA (1)...(19): siRNA sense strand
uggcaucauuucccugugu

SEQ ID NO: 205578 - RNA, 19 nt, Homo sapiens
  misc_RNA (1)...(19): siRNA sense strand
ccaugaaacuccgaagacu

SEQ ID NO: 205579 - RNA, 19 nt, Homo sapiens
  misc_RNA (1)...(19): siRNA sense strand
auaauaagccagagaucga

SEQ ID NO: 205580 - RNA, 19 nt, Homo sapiens
  misc_RNA (1)...(19): siRNA sense strand
cuaauaauaagccagagau

SEQ ID NO: 205581 - RNA, 19 nt, Homo sapiens
  misc_RNA (1)...(19): siRNA sense strand
ugggugaaguugcauccuu

SEQ ID NO: 205582 - RNA, 19 nt, Homo sapiens
  misc_RNA (1)...(19): siRNA sense strand
caucauuucccuguguaaa

SEQ ID NO: 205583 - RNA, 19 nt, Homo sapiens
  misc_RNA (1)...(19): siRNA sense strand
gcguggauaugugucugaa

SEQ ID NO: 205584 - RNA, 19 nt, Homo sapiens
  misc_RNA (1)...(19): siRNA sense strand
gcacuaucccaugguggaa

SEQ ID NO: 205585 - RNA, 19 nt, Homo sapiens
  misc_RNA (1)...(19): siRNA sense strand
gagccugucagcugcaugu

SEQ ID NO: 205586 - RNA, 19 nt, Homo sapiens
  misc_RNA (1)...(19): siRNA sense strand
guacagauaccuuuucaag

SEQ ID NO: 205587 - RNA, 19 nt, Homo sapiens
  misc_RNA (1)...(19): siRNA sense strand
gucccucucugcguggaua

SEQ ID NO: 205588 - RNA, 19 nt, Homo sapiens
  misc_RNA (1)...(19): siRNA sense strand
ggagcugcuuccaauuugc

SEQ ID NO: 205589 - RNA, 19 nt, Homo sapiens
  misc_RNA (1)...(19): siRNA sense strand
uuagcugaccugaauaaug

SEQ ID NO: 205590 - RNA, 19 nt, Homo sapiens
  misc_RNA (1)...(19): siRNA sense strand
guggcaaguucaacaggau

SEQ ID NO: 205591 - RNA, 19 nt, Homo sapiens
  misc_RNA (1)...(19): siRNA sense strand
acaacaauuuggucaacgu

SEQ ID NO: 205592 - RNA, 19 nt, Homo sapiens
  misc_RNA (1)...(19): siRNA sense strand
gacuacaucaggagaagau

SEQ ID NO: 205593 - RNA, 19 nt, Homo sapiens
  misc_RNA (1)...(19): siRNA sense strand
uaauaagccagagaucgaa

SEQ ID NO: 205594 - RNA, 19 nt, Homo sapiens
  misc_RNA (1)...(19): siRNA sense strand
ugucagauucucagcuuau

SEQ ID NO: 205595 - RNA, 19 nt, Homo sapiens
  misc_RNA (1)...(19): siRNA sense strand
ggauauccugcagauuauu

SEQ ID NO: 205596 - RNA, 19 nt, Homo sapiens
  misc_RNA (1)...(19): siRNA sense strand
agcaucaggccaaauguaa

SEQ ID NO: 205597 - RNA, 19 nt, Homo sapiens
  misc_RNA (1)...(19): siRNA sense strand
gcccuuugcuuggaucucu

SEQ ID NO: 205598 - RNA, 19 nt, Homo sapiens
  misc_RNA (1)...(19): siRNA sense strand
gcugaauguuuaugauacg

SEQ ID NO: 205599 - RNA, 19 nt, Homo sapiens
  misc_RNA (1)...(19): siRNA sense strand
agacuuugccaagguacua

SEQ ID NO: 205600 - RNA, 19 nt, Homo sapiens
  misc_RNA (1)...(19): siRNA sense strand
caagcaaguggcaaguuca

SEQ ID NO: 205601 - RNA, 19 nt, Homo sapiens
  misc_RNA (1)...(19): siRNA sense strand
agacaaguacagauaccuu

SEQ ID NO: 205602 - RNA, 19 nt, Homo sapiens
  misc_RNA (1)...(19): siRNA sense strand
gcaucauuucccuguguaa

SEQ ID NO: 205603 - RNA, 19 nt, Homo sapiens
  misc_RNA (1)...(19): siRNA sense strand
cugcaaagaguguccaauc

SEQ ID NO: 205604 - RNA, 19 nt, Homo sapiens
  misc_RNA (1)...(19): siRNA sense strand
cuuauaggacugccaugaa

SEQ ID NO: 205605 - RNA, 19 nt, Homo sapiens
  misc_RNA (1)...(19): siRNA sense strand
caaagaguguccaaucauu

SEQ ID NO: 205606 - RNA, 19 nt, Homo sapiens
  misc_RNA (1)...(19): siRNA sense strand
uagcugaccugaauaaugu

SEQ ID NO: 205607 - RNA, 19 nt, Homo sapiens
  misc_RNA (1)...(19): siRNA sense strand
gcaugauucuauccaaauu

SEQ ID NO: 205608 - RNA, 19 nt, Homo sapiens
  misc_RNA (1)...(19): siRNA sense strand
ugaacuggcugcugaaugu

SEQ ID NO: 205609 - RNA, 19 nt, Homo sapiens
  misc_RNA (1)...(19): siRNA sense strand
gauauccugcagauuauua

SEQ ID NO: 205610 - RNA, 19 nt, Homo sapiens
  misc_RNA (1)...(19): siRNA sense strand
gagaagauguucgagacuu

SEQ ID NO: 205611 - RNA, 19 nt, Homo sapiens
  misc_RNA (1)...(19): siRNA sense strand
gcacuuuaauuaugacauc

SEQ ID NO: 205612 - RNA, 19 nt, Homo sapiens
  misc_RNA (1)...(19): siRNA sense strand
guaaagcacauuuggaaga

SEQ ID NO: 205613 - RNA, 19 nt, Homo sapiens
  misc_RNA (1)...(19): siRNA sense strand
gaauauugcacuccgacua

SEQ ID NO: 205614 - RNA, 19 nt, Homo sapiens
  misc_RNA (1)...(19): siRNA sense strand
uuauaggacugccaugaaa

SEQ ID NO: 205615 - RNA, 19 nt, Homo sapiens
  misc_RNA (1)...(19): siRNA sense strand
gggugaaguugcauccuuu

SEQ ID NO: 205616 - RNA, 19 nt, Homo sapiens
  misc_RNA (1)...(19): siRNA sense strand
gcaagagcacaacaauuug

SEQ ID NO: 205617 - RNA, 19 nt, Homo sapiens
  misc_RNA (1)...(19): siRNA sense strand
gcacaacaauuuggucaac

SEQ ID NO: 205618 - RNA, 19 nt, Homo sapiens
  misc_RNA (1)...(19): siRNA sense strand
agcaagagcacaacaauuu

SEQ ID NO: 205619 - RNA, 19 nt, Homo sapiens
  misc_RNA (1)...(19): siRNA sense strand
agaagauguucgagacuuu

SEQ ID NO: 205620 - RNA, 19 nt, Homo sapiens
  misc_RNA (1)...(19): siRNA sense strand
gagcaagagcacaacaauu

SEQ ID NO: 205621 - RNA, 19 nt, Homo sapiens
  misc_RNA (1)...(19): siRNA sense strand
ucaagcaaguggcaaguuc

SEQ ID NO: 205622 - RNA, 19 nt, Homo sapiens
  misc_RNA (1)...(19): siRNA sense strand
ccacgagacucaaacaacu

SEQ ID NO: 205623 - RNA, 19 nt, Homo sapiens
  misc_RNA (1)...(19): siRNA sense strand
cagcacaaccucaagcaaa

SEQ ID NO: 205624 - RNA, 19 nt, Homo sapiens
  misc_RNA (1)...(19): siRNA sense strand
gcaaagaguguccaaucau

SEQ ID NO: 205625 - RNA, 19 nt, Homo sapiens
  misc_RNA (1)...(19): siRNA sense strand
auggauauccugcagauua

SEQ ID NO: 205626 - RNA, 19 nt, Homo sapiens
  misc_RNA (1)...(19): siRNA sense strand
uguaacaucugcaaagagu

SEQ ID NO: 205627 - RNA, 19 nt, Homo sapiens
  misc_RNA (1)...(19): siRNA sense strand
guccggagcugcuuccaau

SEQ ID NO: 205628 - RNA, 19 nt, Homo sapiens
  misc_RNA (1)...(19): siRNA sense strand
gcaaguggcaaguucaaca

SEQ ID NO: 205629 - RNA, 19 nt, Homo sapiens
  misc_RNA (1)...(19): siRNA sense strand
gcuuccaauuugcuaauaa

SEQ ID NO: 205630 - RNA, 19 nt, Homo sapiens
  misc_RNA (1)...(19): siRNA sense strand
uggaagacaaguacagaua

SEQ ID NO: 205631 - RNA, 19 nt, Homo sapiens
  misc_RNA (1)...(19): siRNA sense strand
ggauccguguccugucuuu

SEQ ID NO: 205632 - RNA, 19 nt, Homo sapiens
  misc_RNA (1)...(19): siRNA sense strand
gucuuuagcugaccugaau

SEQ ID NO: 205633 - RNA, 19 nt, Homo sapiens
  misc_RNA (1)...(19): siRNA sense strand
gacaaguacagauaccuuu

SEQ ID NO: 205634 - RNA, 19 nt, Homo sapiens
  misc_RNA (1)...(19): siRNA sense strand
ccaagcaucaggccaaaug

SEQ ID NO: 205635 - RNA, 19 nt, Homo sapiens
  misc_RNA (1)...(19): siRNA sense strand
ggagcaagagcacaacaau

SEQ ID NO: 205636 - RNA, 19 nt, Homo sapiens
  misc_RNA (1)...(19): siRNA sense strand
guguaaagcacauuuggaa

SEQ ID NO: 205637 - RNA, 19 nt, Homo sapiens
  misc_RNA (1)...(19): siRNA sense strand
caagacaguugggugaagu

SEQ ID NO: 205638 - RNA, 19 nt, Homo sapiens
  misc_RNA (1)...(19): siRNA sense strand
gaagauguucgagacuuug

SEQ ID NO: 205639 - RNA, 19 nt, Homo sapiens
  misc_RNA (1)...(19): siRNA sense strand
gucagauucucagcuuaua

SEQ ID NO: 205640 - RNA, 19 nt, Homo sapiens
  misc_RNA (1)...(19): siRNA sense strand
uaacaucugcaaagagugu

SEQ ID NO: 205641 - RNA, 19 nt, Homo sapiens
  misc_RNA (1)...(19): siRNA sense strand
cggagcugcuuccaauuug

SEQ ID NO: 205642 - RNA, 19 nt, Homo sapiens
  misc_RNA (1)...(19): siRNA sense strand
gaagacaaguacagauacc

SEQ ID NO: 205643 - RNA, 19 nt, Homo sapiens
  misc_RNA (1)...(19): siRNA sense strand
ccauggauauccugcagau

SEQ ID NO: 205644 - RNA, 19 nt, Homo sapiens
  misc_RNA (1)...(19): siRNA sense strand
ggcaucauuucccugugua

SEQ ID NO: 205645 - RNA, 19 nt, Homo sapiens
  misc_RNA (1)...(19): siRNA sense strand
uggauauccugcagauuau

SEQ ID NO: 205646 - RNA, 19 nt, Homo sapiens
  misc_RNA (1)...(19): siRNA sense strand
ggaagacaaguacagauac

SEQ ID NO: 205647 - RNA, 19 nt, Homo sapiens
  misc_RNA (1)...(19): siRNA sense strand
ugcaaagaguguccaauca

SEQ ID NO: 205648 - RNA, 19 nt, Homo sapiens
  misc_RNA (1)...(19): siRNA sense strand
guggauaugugucugaacu

SEQ ID NO: 205649 - RNA, 19 nt, Homo sapiens
  misc_RNA (1)...(19): siRNA sense strand
acuggcugcugaauguuua

SEQ ID NO: 205650 - RNA, 19 nt, Homo sapiens
  misc_RNA (1)...(19): siRNA sense strand
acuaucccaugguggaaua

SEQ ID NO: 205651 - RNA, 19 nt, Homo sapiens
  misc_RNA (1)...(19): siRNA sense strand
ccggagcugcuuccaauuu

SEQ ID NO: 205652 - RNA, 19 nt, Homo sapiens
  misc_RNA (1)...(19): siRNA sense strand
ccaaauuccaagacaguug

SEQ ID NO: 205653 - RNA, 19 nt, Homo sapiens
  misc_RNA (1)...(19): siRNA sense strand
cagaaacugccaagcauca

SEQ ID NO: 205654 - RNA, 19 nt, Homo sapiens
  misc_RNA (1)...(19): siRNA sense strand
uaugacaucugccaaagcu

SEQ ID NO: 205655 - RNA, 19 nt, Homo sapiens
  misc_RNA (1)...(19): siRNA sense strand
aaugucagauucucagcuu

SEQ ID NO: 205656 - RNA, 19 nt, Homo sapiens
  misc_RNA (1)...(19): siRNA sense strand
ucgagacuuugccaaggua

SEQ ID NO: 205657 - RNA, 19 nt, Homo sapiens
  misc_RNA (1)...(19): siRNA sense strand
gcaaaaggccauaaaaugc

SEQ ID NO: 205658 - RNA, 19 nt, Homo sapiens
  misc_RNA (1)...(19): siRNA sense strand
cugcaugauucuauccaaa

SEQ ID NO: 205659 - RNA, 19 nt, Homo sapiens
  misc_RNA (1)...(19): siRNA sense strand
uaaagcacauuuggaagac

SEQ ID NO: 205660 - RNA, 19 nt, Homo sapiens
  misc_RNA (1)...(19): siRNA sense strand
acaggagucuaaagcacuu

SEQ ID NO: 205661 - RNA, 19 nt, Homo sapiens
  misc_RNA (1)...(19): siRNA sense strand
acagauaccuuuucaagca

SEQ ID NO: 205662 - RNA, 19 nt, Homo sapiens
  misc_RNA (1)...(19): siRNA sense strand
aagcacauuuggaagacaa

SEQ ID NO: 205663 - RNA, 19 nt, Homo sapiens
  misc_RNA (1)...(19): siRNA sense strand
gcuaauaauaagccagaga

SEQ ID NO: 205664 - RNA, 19 nt, Homo sapiens
  misc_RNA (1)...(19): siRNA sense strand
caagagcacaacaauuugg

SEQ ID NO: 205665 - RNA, 19 nt, Homo sapiens
  misc_RNA (1)...(19): siRNA sense strand
ccugucagcugcaugugau

SEQ ID NO: 205666 - RNA, 19 nt, Homo sapiens
  misc_RNA (1)...(19): siRNA sense strand
gcugcugaauguuuaugau

SEQ ID NO: 205667 - RNA, 19 nt, Homo sapiens
  misc_RNA (1)...(19): siRNA sense strand
acagagcucuaccagucuu

SEQ ID NO: 205668 - RNA, 19 nt, Homo sapiens
  misc_RNA (1)...(19): siRNA sense strand
acaguugggugaaguugca

SEQ ID NO: 205669 - RNA, 19 nt, Homo sapiens
  misc_RNA (1)...(19): siRNA sense strand
guuugaccacuauuuauga

SEQ ID NO: 205670 - RNA, 19 nt, Homo sapiens
  misc_RNA (1)...(19): siRNA sense strand
gcuuauaggacugccauga

SEQ ID NO: 205671 - RNA, 19 nt, Homo sapiens
  misc_RNA (1)...(19): siRNA sense strand
caucaggccaaauguaaca

SEQ ID NO: 205672 - RNA, 19 nt, Homo sapiens
  misc_RNA (1)...(19): siRNA sense strand
gauucuauccaaauuccaa

SEQ ID NO: 205673 - RNA, 19 nt, Homo sapiens
  misc_RNA (1)...(19): siRNA sense strand
ggcaaguucaacaggauuu

SEQ ID NO: 205674 - RNA, 19 nt, Homo sapiens
  misc_RNA (1)...(19): siRNA sense strand
gaacuggcugcugaauguu

SEQ ID NO: 205675 - RNA, 19 nt, Homo sapiens
  misc_RNA (1)...(19): siRNA sense strand
cugcugaauguuuaugaua

SEQ ID NO: 205676 - RNA, 19 nt, Homo sapiens
  misc_RNA (1)...(19): siRNA sense strand
aagcaucaggccaaaugua

SEQ ID NO: 205677 - RNA, 19 nt, Homo sapiens
  misc_RNA (1)...(19): siRNA sense strand
uggcaucauuucccugugu

SEQ ID NO: 205678 - RNA, 19 nt, Homo sapiens
  misc_RNA (1)...(19): siRNA sense strand
ccaugaaacuccgaagacu

SEQ ID NO: 205679 - RNA, 19 nt, Homo sapiens
  misc_RNA (1)...(19): siRNA sense strand
auaauaagccagagaucga

SEQ ID NO: 205680 - RNA, 19 nt, Homo sapiens
  misc_RNA (1)...(19): siRNA sense strand
cuaauaauaagccagagau

SEQ ID NO: 205681 - RNA, 19 nt, Homo sapiens
  misc_RNA (1)...(19): siRNA sense strand
ugggugaaguugcauccuu

SEQ ID NO: 205682 - RNA, 19 nt, Homo sapiens
  misc_RNA (1)...(19): siRNA sense strand
caucauuucccuguguaaa

SEQ ID NO: 205683 - RNA, 19 nt, Homo sapiens
  misc_RNA (1)...(19): siRNA sense strand
gcguggauaugugucugaa

SEQ ID NO: 205684 - RNA, 19 nt, Homo sapiens
  misc_RNA (1)...(19): siRNA sense strand
gcacuaucccaugguggaa

SEQ ID NO: 205685 - RNA, 19 nt, Homo sapiens
  misc_RNA (1)...(19): siRNA sense strand
gagccugucagcugcaugu

SEQ ID NO: 205686 - RNA, 19 nt, Homo sapiens
  misc_RNA (1)...(19): siRNA sense strand
guacagauaccuuuucaag

SEQ ID NO: 205687 - RNA, 19 nt, Homo sapiens
  misc_RNA (1)...(19): siRNA sense strand
gucccucucugcguggaua

SEQ ID NO: 205688 - RNA, 19 nt, Homo sapiens
  misc_RNA (1)...(19): siRNA sense strand
ggagcugcuuccaauuugc

SEQ ID NO: 205689 - RNA, 19 nt, Homo sapiens
  misc_RNA (1)...(19): siRNA sense strand
uuagcugaccugaauaaug

SEQ ID NO: 205690 - RNA, 19 nt, Homo sapiens
  misc_RNA (1)...(19): siRNA sense strand
guggcaaguucaacaggau

SEQ ID NO: 205691 - RNA, 19 nt, Homo sapiens
  misc_RNA (1)...(19): siRNA sense strand
acaacaauuuggucaacgu

SEQ ID NO: 205692 - RNA, 19 nt, Homo sapiens
  misc_RNA (1)...(19): siRNA sense strand
gacuacaucaggagaagau

SEQ ID NO: 205693 - RNA, 19 nt, Homo sapiens
  misc_RNA (1)...(19): siRNA sense strand
uaauaagccagagaucgaa

SEQ ID NO: 205694 - RNA, 19 nt, Homo sapiens
  misc_RNA (1)...(19): siRNA sense strand
ugucagauucucagcuuau

SEQ ID NO: 205695 - RNA, 19 nt, Homo sapiens
  misc_RNA (1)...(19): siRNA sense strand
ggauauccugcagauuauu

SEQ ID NO: 205696 - RNA, 19 nt, Homo sapiens
  misc_RNA (1)...(19): siRNA sense strand
agcaucaggccaaauguaa

SEQ ID NO: 205697 - RNA, 19 nt, Homo sapiens
  misc_RNA (1)...(19): siRNA sense strand
gcccuuugcuuggaucucu

SEQ ID NO: 205698 - RNA, 19 nt, Homo sapiens
  misc_RNA (1)...(19): siRNA sense strand
gcugaauguuuaugauacg

SEQ ID NO: 205699 - RNA, 19 nt, Homo sapiens
  misc_RNA (1)...(19): siRNA sense strand
agacuuugccaagguacua

SEQ ID NO: 205700 - RNA, 19 nt, Homo sapiens
  misc_RNA (1)...(19): siRNA sense strand
caagcaaguggcaaguuca

SEQ ID NO: 205701 - RNA, 19 nt, Homo sapiens
  misc_RNA (1)...(19): siRNA sense strand
agacaaguacagauaccuu

SEQ ID NO: 205702 - RNA, 19 nt, Homo sapiens
  misc_RNA (1)...(19): siRNA sense strand
gcaucauuucccuguguaa

SEQ ID NO: 205703 - RNA, 19 nt, Homo sapiens
  misc_RNA (1)...(19): siRNA sense strand
cugcaaagaguguccaauc

SEQ ID NO: 205704 - RNA, 19 nt, Homo sapiens
  misc_RNA (1)...(19): siRNA sense strand
cuuauaggacugccaugaa

SEQ ID NO: 205705 - RNA, 19 nt, Homo sapiens
  misc_RNA (1)...(19): siRNA sense strand
caaagaguguccaaucauu

SEQ ID NO: 205706 - RNA, 19 nt, Homo sapiens
  misc_RNA (1)...(19): siRNA sense strand
uagcugaccugaauaaugu

SEQ ID NO: 205707 - RNA, 19 nt, Homo sapiens
  misc_RNA (1)...(19): siRNA sense strand
gcaugauucuauccaaauu

SEQ ID NO: 205708 - RNA, 19 nt, Homo sapiens
  misc_RNA (1)...(19): siRNA sense strand
ugaacuggcugcugaaugu

SEQ ID NO: 205709 - RNA, 19 nt, Homo sapiens
  misc_RNA (1)...(19): siRNA sense strand
gauauccugcagauuauua

SEQ ID NO: 205710 - RNA, 19 nt, Homo sapiens
  misc_RNA (1)...(19): siRNA sense strand
gagaagauguucgagacuu

SEQ ID NO: 205711 - RNA, 19 nt, Homo sapiens
  misc_RNA (1)...(19): siRNA sense strand
gcacuuuaauuaugacauc

SEQ ID NO: 205712 - RNA, 19 nt, Homo sapiens
  misc_RNA (1)...(19): siRNA sense strand
guaaagcacauuuggaaga

SEQ ID NO: 205713 - RNA, 19 nt, Homo sapiens
  misc_RNA (1)...(19): siRNA sense strand
gaauauugcacuccgacua

SEQ ID NO: 205714 - RNA, 19 nt, Homo sapiens
  misc_RNA (1)...(19): siRNA sense strand
uuauaggacugccaugaaa

SEQ ID NO: 205715 - RNA, 19 nt, Homo sapiens
  misc_RNA (1)...(19): siRNA sense strand
gggugaaguugcauccuuu

SEQ ID NO: 205716 - RNA, 19 nt, Homo sapiens
  misc_RNA (1)...(19): siRNA sense strand
gcaagagcacaacaauuug

SEQ ID NO: 205717 - RNA, 19 nt, Homo sapiens
  misc_RNA (1)...(19): siRNA sense strand
gcacaacaauuuggucaac

SEQ ID NO: 205718 - RNA, 19 nt, Homo sapiens
  misc_RNA (1)...(19): siRNA sense strand
agcaagagcacaacaauuu

SEQ ID NO: 205719 - RNA, 19 nt, Homo sapiens
  misc_RNA (1)...(19): siRNA sense strand
agaagauguucgagacuuu

SEQ ID NO: 205720 - RNA, 19 nt, Homo sapiens
  misc_RNA (1)...(19): siRNA sense strand
gagcaagagcacaacaauu

SEQ ID NO: 205721 - RNA, 19 nt, Homo sapiens
  misc_RNA (1)...(19): siRNA sense strand
ucaagcaaguggcaaguuc

SEQ ID NO: 205722 - RNA, 19 nt, Homo sapiens
  misc_RNA (1)...(19): siRNA sense strand
ccacgagacucaaacaacu

SEQ ID NO: 205723 - RNA, 19 nt, Homo sapiens
  misc_RNA (1)...(19): siRNA sense strand
cagcacaaccucaagcaaa

SEQ ID NO: 205724 - RNA, 19 nt, Homo sapiens
  misc_RNA (1)...(19): siRNA sense strand
gcaaagaguguccaaucau

SEQ ID NO: 205725 - RNA, 19 nt, Homo sapiens
  misc_RNA (1)...(19): siRNA sense strand
auggauauccugcagauua

SEQ ID NO: 205726 - RNA, 19 nt, Homo sapiens
  misc_RNA (1)...(19): siRNA sense strand
uguaacaucugcaaagagu

SEQ ID NO: 205727 - RNA, 19 nt, Homo sapiens
  misc_RNA (1)...(19): siRNA sense strand
guccggagcugcuuccaau

SEQ ID NO: 205728 - RNA, 19 nt, Homo sapiens
  misc_RNA (1)...(19): siRNA sense strand
gcaaguggcaaguucaaca

SEQ ID NO: 205729 - RNA, 19 nt, Homo sapiens
  misc_RNA (1)...(19): siRNA sense strand
gcuuccaauuugcuaauaa

SEQ ID NO: 205730 - RNA, 19 nt, Homo sapiens
  misc_RNA (1)...(19): siRNA sense strand
uggaagacaaguacagaua

SEQ ID NO: 205731 - RNA, 19 nt, Homo sapiens
  misc_RNA (1)...(19): siRNA sense strand
ggauccguguccugucuuu

SEQ ID NO: 205732 - RNA, 19 nt, Homo sapiens
  misc_RNA (1)...(19): siRNA sense strand
gucuuuagcugaccugaau

SEQ ID NO: 205733 - RNA, 19 nt, Homo sapiens
  misc_RNA (1)...(19): siRNA sense strand
gacaaguacagauaccuuu

SEQ ID NO: 205734 - RNA, 19 nt, Homo sapiens
  misc_RNA (1)...(19): siRNA sense strand
ccaagcaucaggccaaaug

SEQ ID NO: 205735 - RNA, 19 nt, Homo sapiens
  misc_RNA (1)...(19): siRNA sense strand
ggagcaagagcacaacaau

SEQ ID NO: 205736 - RNA, 19 nt, Homo sapiens
  misc_RNA (1)...(19): siRNA sense strand
guguaaagcacauuuggaa

SEQ ID NO: 205737 - RNA, 19 nt, Homo sapiens
  misc_RNA (1)...(19): siRNA sense strand
caagacaguugggugaagu

SEQ ID NO: 205738 - RNA, 19 nt, Homo sapiens
  misc_RNA (1)...(19): siRNA sense strand
gaagauguucgagacuuug

SEQ ID NO: 205739 - RNA, 19 nt, Homo sapiens
  misc_RNA (1)...(19): siRNA sense strand
gucagauucucagcuuaua

SEQ ID NO: 205740 - RNA, 19 nt, Homo sapiens
  misc_RNA (1)...(19): siRNA sense strand
uaacaucugcaaagagugu

SEQ ID NO: 205741 - RNA, 19 nt, Homo sapiens
  misc_RNA (1)...(19): siRNA sense strand
cggagcugcuuccaauuug

SEQ ID NO: 205742 - RNA, 19 nt, Homo sapiens
  misc_RNA (1)...(19): siRNA sense strand
gaagacaaguacagauacc

SEQ ID NO: 205743 - RNA, 19 nt, Homo sapiens
  misc_RNA (1)...(19): siRNA sense strand
ccauggauauccugcagau

SEQ ID NO: 205744 - RNA, 19 nt, Homo sapiens
  misc_RNA (1)...(19): siRNA sense strand
ggcaucauuucccugugua

SEQ ID NO: 205745 - RNA, 19 nt, Homo sapiens
  misc_RNA (1)...(19): siRNA sense strand
uggauauccugcagauuau

SEQ ID NO: 205746 - RNA, 19 nt, Homo sapiens
  misc_RNA (1)...(19): siRNA sense strand
ggaagacaaguacagauac

SEQ ID NO: 205747 - RNA, 19 nt, Homo sapiens
  misc_RNA (1)...(19): siRNA sense strand
ugcaaagaguguccaauca

SEQ ID NO: 205748 - RNA, 19 nt, Homo sapiens
  misc_RNA (1)...(19): siRNA sense strand
guggauaugugucugaacu

SEQ ID NO: 205749 - RNA, 19 nt, Homo sapiens
  misc_RNA (1)...(19): siRNA sense strand
acuggcugcugaauguuua

SEQ ID NO: 205750 - RNA, 19 nt, Homo sapiens
  misc_RNA (1)...(19): siRNA sense strand
acuaucccaugguggaaua

SEQ ID NO: 205751 - RNA, 19 nt, Homo sapiens
  misc_RNA (1)...(19): siRNA sense strand
ccggagcugcuuccaauuu

SEQ ID NO: 205752 - RNA, 19 nt, Homo sapiens
  misc_RNA (1)...(19): siRNA sense strand
ccaaauuccaagacaguug

SEQ ID NO: 205753 - RNA, 19 nt, Homo sapiens
  misc_RNA (1)...(19): siRNA sense strand
cagaaacugccaagcauca

SEQ ID NO: 205754 - RNA, 19 nt, Homo sapiens
  misc_RNA (1)...(19): siRNA sense strand
uaugacaucugccaaagcu

SEQ ID NO: 205755 - RNA, 19 nt, Homo sapiens
  misc_RNA (1)...(19): siRNA sense strand
aaugucagauucucagcuu

SEQ ID NO: 205756 - RNA, 19 nt, Homo sapiens
  misc_RNA (1)...(19): siRNA sense strand
ucgagacuuugccaaggua

SEQ ID NO: 205757 - RNA, 19 nt, Homo sapiens
  misc_RNA (1)...(19): siRNA sense strand
gcaaaaggccauaaaaugc

SEQ ID NO: 205758 - RNA, 19 nt, Homo sapiens
  misc_RNA (1)...(19): siRNA sense strand
cugcaugauucuauccaaa

SEQ ID NO: 205759 - RNA, 19 nt, Homo sapiens
  misc_RNA (1)...(19): siRNA sense strand
uaaagcacauuuggaagac

SEQ ID NO: 205760 - RNA, 19 nt, Homo sapiens
  misc_RNA (1)...(19): siRNA sense strand
acaggagucuaaagcacuu

SEQ ID NO: 205761 - RNA, 19 nt, Homo sapiens
  misc_RNA (1)...(19): siRNA sense strand
acagauaccuuuucaagca

SEQ ID NO: 205762 - RNA, 19 nt, Homo sapiens
  misc_RNA (1)...(19): siRNA sense strand
aagcacauuuggaagacaa

SEQ ID NO: 205763 - RNA, 19 nt, Homo sapiens
  misc_RNA (1)...(19): siRNA sense strand
gcuaauaauaagccagaga

SEQ ID NO: 205764 - RNA, 19 nt, Homo sapiens
  misc_RNA (1)...(19): siRNA sense strand
caagagcacaacaauuugg

SEQ ID NO: 205765 - RNA, 19 nt, Homo sapiens
  misc_RNA (1)...(19): siRNA sense strand
ccugucagcugcaugugau

SEQ ID NO: 205766 - RNA, 19 nt, Homo sapiens
  misc_RNA (1)...(19): siRNA sense strand
gcugcugaauguuuaugau

SEQ ID NO: 205767 - RNA, 19 nt, Homo sapiens
  misc_RNA (1)...(19): siRNA sense strand
acagagcucuaccagucuu

SEQ ID NO: 205768 - RNA, 19 nt, Homo sapiens
  misc_RNA (1)...(19): siRNA sense strand
acaguugggugaaguugca

SEQ ID NO: 205769 - RNA, 19 nt, Homo sapiens
  misc_RNA (1)...(19): siRNA sense strand
guuugaccacuauuuauga

SEQ ID NO: 205770 - RNA, 19 nt, Homo sapiens
  misc_RNA (1)...(19): siRNA sense strand
gcuuauaggacugccauga

SEQ ID NO: 205771 - RNA, 19 nt, Homo sapiens
  misc_RNA (1)...(19): siRNA sense strand
caucaggccaaauguaaca

SEQ ID NO: 205772 - RNA, 19 nt, Homo sapiens
  misc_RNA (1)...(19): siRNA sense strand
gauucuauccaaauuccaa

SEQ ID NO: 205773 - RNA, 19 nt, Homo sapiens
  misc_RNA (1)...(19): siRNA sense strand
ggcaaguucaacaggauuu

SEQ ID NO: 205774 - RNA, 19 nt, Homo sapiens
  misc_RNA (1)...(19): siRNA sense strand
gaacuggcugcugaauguu

SEQ ID NO: 205775 - RNA, 19 nt, Homo sapiens
  misc_RNA (1)...(19): siRNA sense strand
cugcugaauguuuaugaua

SEQ ID NO: 205776 - RNA, 19 nt, Homo sapiens
  misc_RNA (1)...(19): siRNA sense strand
aagcaucaggccaaaugua

SEQ ID NO: 205777 - RNA, 19 nt, Homo sapiens
  misc_RNA (1)...(19): siRNA sense strand
uggcaucauuucccugugu

SEQ ID NO: 205778 - RNA, 19 nt, Homo sapiens
  misc_RNA (1)...(19): siRNA sense strand
ccaugaaacuccgaagacu

SEQ ID NO: 205779 - RNA, 19 nt, Homo sapiens
  misc_RNA (1)...(19): siRNA sense strand
auaauaagccagagaucga

SEQ ID NO: 205780 - RNA, 19 nt, Homo sapiens
  misc_RNA (1)...(19): siRNA sense strand
cuaauaauaagccagagau

SEQ ID NO: 205781 - RNA, 19 nt, Homo sapiens
  misc_RNA (1)...(19): siRNA sense strand
ugggugaaguugcauccuu

SEQ ID NO: 205782 - RNA, 19 nt, Homo sapiens
  misc_RNA (1)...(19): siRNA sense strand
caucauuucccuguguaaa

SEQ ID NO: 205783 - RNA, 19 nt, Homo sapiens
  misc_RNA (1)...(19): siRNA sense strand
gcguggauaugugucugaa

SEQ ID NO: 205784 - RNA, 19 nt, Homo sapiens
  misc_RNA (1)...(19): siRNA sense strand
gcacuaucccaugguggaa

SEQ ID NO: 205785 - RNA, 19 nt, Homo sapiens
  misc_RNA (1)...(19): siRNA sense strand
gagccugucagcugcaugu

SEQ ID NO: 205786 - RNA, 19 nt, Homo sapiens
  misc_RNA (1)...(19): siRNA sense strand
guacagauaccuuuucaag

SEQ ID NO: 205787 - RNA, 19 nt, Homo sapiens
  misc_RNA (1)...(19): siRNA sense strand
gucccucucugcguggaua

SEQ ID NO: 205788 - RNA, 19 nt, Homo sapiens
  misc_RNA (1)...(19): siRNA sense strand
ggagcugcuuccaauuugc

SEQ ID NO: 205789 - RNA, 19 nt, Homo sapiens
  misc_RNA (1)...(19): siRNA sense strand
uuagcugaccugaauaaug

SEQ ID NO: 205790 - RNA, 19 nt, Homo sapiens
  misc_RNA (1)...(19): siRNA sense strand
guggcaaguucaacaggau

SEQ ID NO: 205791 - RNA, 19 nt, Homo sapiens
  misc_RNA (1)...(19): siRNA sense strand
acaacaauuuggucaacgu

SEQ ID NO: 205792 - RNA, 19 nt, Homo sapiens
  misc_RNA (1)...(19): siRNA sense strand
gacuacaucaggagaagau

SEQ ID NO: 205793 - RNA, 19 nt, Homo sapiens
  misc_RNA (1)...(19): siRNA sense strand
uaauaagccagagaucgaa

SEQ ID NO: 205794 - RNA, 19 nt, Homo sapiens
  misc_RNA (1)...(19): siRNA sense strand
ugucagauucucagcuuau

SEQ ID NO: 205795 - RNA, 19 nt, Homo sapiens
  misc_RNA (1)...(19): siRNA sense strand
ggauauccugcagauuauu

SEQ ID NO: 205796 - RNA, 19 nt, Homo sapiens
  misc_RNA (1)...(19): siRNA sense strand
agcaucaggccaaauguaa

SEQ ID NO: 205797 - RNA, 19 nt, Homo sapiens
  misc_RNA (1)...(19): siRNA sense strand
gcccuuugcuuggaucucu

SEQ ID NO: 205798 - RNA, 19 nt, Homo sapiens
  misc_RNA (1)...(19): siRNA sense strand
gcugaauguuuaugauacg

SEQ ID NO: 205799 - RNA, 19 nt, Homo sapiens
  misc_RNA (1)...(19): siRNA sense strand
agacuuugccaagguacua

SEQ ID NO: 205800 - RNA, 19 nt, Homo sapiens
  misc_RNA (1)...(19): siRNA sense strand
caagcaaguggcaaguuca

SEQ ID NO: 205801 - RNA, 19 nt, Homo sapiens
  misc_RNA (1)...(19): siRNA sense strand
agacaaguacagauaccuu

SEQ ID NO: 205802 - RNA, 19 nt, Homo sapiens
  misc_RNA (1)...(19): siRNA sense strand
gcaucauuucccuguguaa

SEQ ID NO: 205803 - RNA, 19 nt, Homo sapiens
  misc_RNA (1)...(19): siRNA sense strand
cugcaaagaguguccaauc

SEQ ID NO: 205804 - RNA, 19 nt, Homo sapiens
  misc_RNA (1)...(19): siRNA sense strand
cuuauaggacugccaugaa

SEQ ID NO: 205805 - RNA, 19 nt, Homo sapiens
  misc_RNA (1)...(19): siRNA sense strand
caaagaguguccaaucauu

SEQ ID NO: 205806 - RNA, 19 nt, Homo sapiens
  misc_RNA (1)...(19): siRNA sense strand
uagcugaccugaauaaugu

SEQ ID NO: 205807 - RNA, 19 nt, Homo sapiens
  misc_RNA (1)...(19): siRNA sense strand
gcaugauucuauccaaauu

SEQ ID NO: 205808 - RNA, 19 nt, Homo sapiens
  misc_RNA (1)...(19): siRNA sense strand
ugaacuggcugcugaaugu

SEQ ID NO: 205809 - RNA, 19 nt, Homo sapiens
  misc_RNA (1)...(19): siRNA sense strand
gauauccugcagauuauua

SEQ ID NO: 205810 - RNA, 19 nt, Homo sapiens
  misc_RNA (1)...(19): siRNA sense strand
gagaagauguucgagacuu

SEQ ID NO: 205811 - RNA, 19 nt, Homo sapiens
  misc_RNA (1)...(19): siRNA sense strand
gcacuuuaauuaugacauc

SEQ ID NO: 205812 - RNA, 19 nt, Homo sapiens
  misc_RNA (1)...(19): siRNA sense strand
guaaagcacauuuggaaga

SEQ ID NO: 205813 - RNA, 19 nt, Homo sapiens
  misc_RNA (1)...(19): siRNA sense strand
gaauauugcacuccgacua

SEQ ID NO: 205814 - RNA, 19 nt, Homo sapiens
  misc_RNA (1)...(19): siRNA sense strand
uuauaggacugccaugaaa

SEQ ID NO: 205815 - RNA, 19 nt, Homo sapiens
  misc_RNA (1)...(19): siRNA sense strand
gggugaaguugcauccuuu

SEQ ID NO: 205816 - RNA, 19 nt, Homo sapiens
  misc_RNA (1)...(19): siRNA sense strand
gcaagagcacaacaauuug

SEQ ID NO: 205817 - RNA, 19 nt, Homo sapiens
  misc_RNA (1)...(19): siRNA sense strand
gcacaacaauuuggucaac

SEQ ID NO: 205818 - RNA, 19 nt, Homo sapiens
  misc_RNA (1)...(19): siRNA sense strand
agcaagagcacaacaauuu

SEQ ID NO: 205819 - RNA, 19 nt, Homo sapiens
  misc_RNA (1)...(19): siRNA sense strand
agaagauguucgagacuuu

SEQ ID NO: 205820 - RNA, 19 nt, Homo sapiens
  misc_RNA (1)...(19): siRNA sense strand
gagcaagagcacaacaauu

SEQ ID NO: 205821 - RNA, 19 nt, Homo sapiens
  misc_RNA (1)...(19): siRNA sense strand
ucaagcaaguggcaaguuc

SEQ ID NO: 205822 - RNA, 19 nt, Homo sapiens
  misc_RNA (1)...(19): siRNA sense strand
ccacgagacucaaacaacu

SEQ ID NO: 205823 - RNA, 19 nt, Homo sapiens
  misc_RNA (1)...(19): siRNA sense strand
cagcacaaccucaagcaaa

SEQ ID NO: 205824 - RNA, 19 nt, Homo sapiens
  misc_RNA (1)...(19): siRNA sense strand
gcaaagaguguccaaucau

SEQ ID NO: 205825 - RNA, 19 nt, Homo sapiens
  misc_RNA (1)...(19): siRNA sense strand
auggauauccugcagauua

SEQ ID NO: 205826 - RNA, 19 nt, Homo sapiens
  misc_RNA (1)...(19): siRNA sense strand
uguaacaucugcaaagagu

SEQ ID NO: 205827 - RNA, 19 nt, Homo sapiens
  misc_RNA (1)...(19): siRNA sense strand
guccggagcugcuuccaau

SEQ ID NO: 205828 - RNA, 19 nt, Homo sapiens
  misc_RNA (1)...(19): siRNA sense strand
gcaaguggcaaguucaaca

SEQ ID NO: 205829 - RNA, 19 nt, Homo sapiens
  misc_RNA (1)...(19): siRNA sense strand
gcuuccaauuugcuaauaa

SEQ ID NO: 205830 - RNA, 19 nt, Homo sapiens
  misc_RNA (1)...(19): siRNA sense strand
uggaagacaaguacagaua

SEQ ID NO: 205831 - RNA, 19 nt, Homo sapiens
  misc_RNA (1)...(19): siRNA sense strand
ggauccguguccugucuuu

SEQ ID NO: 205832 - RNA, 19 nt, Homo sapiens
  misc_RNA (1)...(19): siRNA sense strand
gucuuuagcugaccugaau

SEQ ID NO: 205833 - RNA, 19 nt, Homo sapiens
  misc_RNA (1)...(19): siRNA sense strand
gacaaguacagauaccuuu

SEQ ID NO: 205834 - RNA, 19 nt, Homo sapiens
  misc_RNA (1)...(19): siRNA sense strand
ccaagcaucaggccaaaug

SEQ ID NO: 205835 - RNA, 19 nt, Homo sapiens
  misc_RNA (1)...(19): siRNA sense strand
ggagcaagagcacaacaau

SEQ ID NO: 205836 - RNA, 19 nt, Homo sapiens
  misc_RNA (1)...(19): siRNA sense strand
guguaaagcacauuuggaa

SEQ ID NO: 205837 - RNA, 19 nt, Homo sapiens
  misc_RNA (1)...(19): siRNA sense strand
caagacaguugggugaagu

SEQ ID NO: 205838 - RNA, 19 nt, Homo sapiens
  misc_RNA (1)...(19): siRNA sense strand
gaagauguucgagacuuug

SEQ ID NO: 205839 - RNA, 19 nt, Homo sapiens
  misc_RNA (1)...(19): siRNA sense strand
gucagauucucagcuuaua

SEQ ID NO: 205840 - RNA, 19 nt, Homo sapiens
  misc_RNA (1)...(19): siRNA sense strand
uaacaucugcaaagagugu

SEQ ID NO: 205841 - RNA, 19 nt, Homo sapiens
  misc_RNA (1)...(19): siRNA sense strand
cggagcugcuuccaauuug

SEQ ID NO: 205842 - RNA, 19 nt, Homo sapiens
  misc_RNA (1)...(19): siRNA sense strand
gaagacaaguacagauacc

SEQ ID NO: 205843 - RNA, 19 nt, Homo sapiens
  misc_RNA (1)...(19): siRNA sense strand
ccauggauauccugcagau

SEQ ID NO: 205844 - RNA, 19 nt, Homo sapiens
  misc_RNA (1)...(19): siRNA sense strand
ggcaucauuucccugugua

SEQ ID NO: 205845 - RNA, 19 nt, Homo sapiens
  misc_RNA (1)...(19): siRNA sense strand
uggauauccugcagauuau

SEQ ID NO: 205846 - RNA, 19 nt, Homo sapiens
  misc_RNA (1)...(19): siRNA sense strand
ggaagacaaguacagauac

SEQ ID NO: 205847 - RNA, 19 nt, Homo sapiens
  misc_RNA (1)...(19): siRNA sense strand
ugcaaagaguguccaauca

SEQ ID NO: 205848 - RNA, 19 nt, Homo sapiens
  misc_RNA (1)...(19): siRNA sense strand
guggauaugugucugaacu

SEQ ID NO: 205849 - RNA, 19 nt, Homo sapiens
  misc_RNA (1)...(19): siRNA sense strand
acuggcugcugaauguuua

SEQ ID NO: 205850 - RNA, 19 nt, Homo sapiens
  misc_RNA (1)...(19): siRNA sense strand
acuaucccaugguggaaua

SEQ ID NO: 205851 - RNA, 19 nt, Homo sapiens
  misc_RNA (1)...(19): siRNA sense strand
ccggagcugcuuccaauuu

SEQ ID NO: 205852 - RNA, 19 nt, Homo sapiens
  misc_RNA (1)...(19): siRNA sense strand
ccaaauuccaagacaguug

SEQ ID NO: 205853 - RNA, 19 nt, Homo sapiens
  misc_RNA (1)...(19): siRNA sense strand
cagaaacugccaagcauca

SEQ ID NO: 205854 - RNA, 19 nt, Homo sapiens
  misc_RNA (1)...(19): siRNA sense strand
uaugacaucugccaaagcu

SEQ ID NO: 205855 - RNA, 19 nt, Homo sapiens
  misc_RNA (1)...(19): siRNA sense strand
aaugucagauucucagcuu

SEQ ID NO: 205856 - RNA, 19 nt, Homo sapiens
  misc_RNA (1)...(19): siRNA sense strand
ucgagacuuugccaaggua

SEQ ID NO: 205857 - RNA, 19 nt, Homo sapiens
  misc_RNA (1)...(19): siRNA sense strand
gcaaaaggccauaaaaugc

SEQ ID NO: 205858 - RNA, 19 nt, Homo sapiens
  misc_RNA (1)...(19): siRNA sense strand
cugcaugauucuauccaaa

SEQ ID NO: 205859 - RNA, 19 nt, Homo sapiens
  misc_RNA (1)...(19): siRNA sense strand
uaaagcacauuuggaagac

SEQ ID NO: 205860 - RNA, 19 nt, Homo sapiens
  misc_RNA (1)...(19): siRNA sense strand
acaggagucuaaagcacuu

SEQ ID NO: 205861 - RNA, 19 nt, Homo sapiens
  misc_RNA (1)...(19): siRNA sense strand
acagauaccuuuucaagca

SEQ ID NO: 205862 - RNA, 19 nt, Homo sapiens
  misc_RNA (1)...(19): siRNA sense strand
aagcacauuuggaagacaa

SEQ ID NO: 205863 - RNA, 19 nt, Homo sapiens
  misc_RNA (1)...(19): siRNA sense strand
gcuaauaauaagccagaga

SEQ ID NO: 205864 - RNA, 19 nt, Homo sapiens
  misc_RNA (1)...(19): siRNA sense strand
caagagcacaacaauuugg

SEQ ID NO: 205865 - RNA, 19 nt, Homo sapiens
  misc_RNA (1)...(19): siRNA sense strand
ccugucagcugcaugugau

SEQ ID NO: 205866 - RNA, 19 nt, Homo sapiens
  misc_RNA (1)...(19): siRNA sense strand
gcugcugaauguuuaugau

SEQ ID NO: 205867 - RNA, 19 nt, Homo sapiens
  misc_RNA (1)...(19): siRNA sense strand
acagagcucuaccagucuu

SEQ ID NO: 205868 - RNA, 19 nt, Homo sapiens
  misc_RNA (1)...(19): siRNA sense strand
acaguugggugaaguugca

SEQ ID NO: 205869 - RNA, 19 nt, Homo sapiens
  misc_RNA (1)...(19): siRNA sense strand
guuugaccacuauuuauga

SEQ ID NO: 205870 - RNA, 19 nt, Homo sapiens
  misc_RNA (1)...(19): siRNA sense strand
gcuuauaggacugccauga

SEQ ID NO: 205871 - RNA, 19 nt, Homo sapiens
  misc_RNA (1)...(19): siRNA sense strand
caucaggccaaauguaaca

SEQ ID NO: 205872 - RNA, 19 nt, Homo sapiens
  misc_RNA (1)...(19): siRNA sense strand
gauucuauccaaauuccaa

SEQ ID NO: 205873 - RNA, 19 nt, Homo sapiens
  misc_RNA (1)...(19): siRNA sense strand
ggcaaguucaacaggauuu

SEQ ID NO: 205874 - RNA, 19 nt, Homo sapiens
  misc_RNA (1)...(19): siRNA sense strand
gaacuggcugcugaauguu

SEQ ID NO: 205875 - RNA, 19 nt, Homo sapiens
  misc_RNA (1)...(19): siRNA sense strand
cugcugaauguuuaugaua

SEQ ID NO: 205876 - RNA, 19 nt, Homo sapiens
  misc_RNA (1)...(19): siRNA sense strand
aagcaucaggccaaaugua

SEQ ID NO: 205877 - RNA, 19 nt, Homo sapiens
  misc_RNA (1)...(19): siRNA sense strand
uggcaucauuucccugugu

SEQ ID NO: 205878 - RNA, 19 nt, Homo sapiens
  misc_RNA (1)...(19): siRNA sense strand
ccaugaaacuccgaagacu

SEQ ID NO: 205879 - RNA, 19 nt, Homo sapiens
  misc_RNA (1)...(19): siRNA sense strand
auaauaagccagagaucga

SEQ ID NO: 205880 - RNA, 19 nt, Homo sapiens
  misc_RNA (1)...(19): siRNA sense strand
cuaauaauaagccagagau

SEQ ID NO: 205881 - RNA, 19 nt, Homo sapiens
  misc_RNA (1)...(19): siRNA sense strand
ugggugaaguugcauccuu

SEQ ID NO: 205882 - RNA, 19 nt, Homo sapiens
  misc_RNA (1)...(19): siRNA sense strand
caucauuucccuguguaaa

SEQ ID NO: 205883 - RNA, 19 nt, Homo sapiens
  misc_RNA (1)...(19): siRNA sense strand
gcguggauaugugucugaa

SEQ ID NO: 205884 - RNA, 19 nt, Homo sapiens
  misc_RNA (1)...(19): siRNA sense strand
gcacuaucccaugguggaa

SEQ ID NO: 205885 - RNA, 19 nt, Homo sapiens
  misc_RNA (1)...(19): siRNA sense strand
gagccugucagcugcaugu

SEQ ID NO: 205886 - RNA, 19 nt, Homo sapiens
  misc_RNA (1)...(19): siRNA sense strand
guacagauaccuuuucaag

SEQ ID NO: 205887 - RNA, 19 nt, Homo sapiens
  misc_RNA (1)...(19): siRNA sense strand
gucccucucugcguggaua

SEQ ID NO: 205888 - RNA, 19 nt, Homo sapiens
  misc_RNA (1)...(19): siRNA sense strand
ggagcugcuuccaauuugc

SEQ ID NO: 205889 - RNA, 19 nt, Homo sapiens
  misc_RNA (1)...(19): siRNA sense strand
uuagcugaccugaauaaug

SEQ ID NO: 205890 - RNA, 19 nt, Homo sapiens
  misc_RNA (1)...(19): siRNA sense strand
guggcaaguucaacaggau

SEQ ID NO: 205891 - RNA, 19 nt, Homo sapiens
  misc_RNA (1)...(19): siRNA sense strand
acaacaauuuggucaacgu

SEQ ID NO: 205892 - RNA, 19 nt, Homo sapiens
  misc_RNA (1)...(19): siRNA sense strand
gacuacaucaggagaagau

SEQ ID NO: 205893 - RNA, 19 nt, Homo sapiens
  misc_RNA (1)...(19): siRNA sense strand
uaauaagccagagaucgaa

SEQ ID NO: 205894 - RNA, 19 nt, Homo sapiens
  misc_RNA (1)...(19): siRNA sense strand
ugucagauucucagcuuau

SEQ ID NO: 205895 - RNA, 19 nt, Homo sapiens
  misc_RNA (1)...(19): siRNA sense strand
ggauauccugcagauuauu

SEQ ID NO: 205896 - RNA, 19 nt, Homo sapiens
  misc_RNA (1)...(19): siRNA sense strand
agcaucaggccaaauguaa

SEQ ID NO: 205897 - RNA, 19 nt, Homo sapiens
  misc_RNA (1)...(19): siRNA sense strand
gcccuuugcuuggaucucu

SEQ ID NO: 205898 - RNA, 19 nt, Homo sapiens
  misc_RNA (1)...(19): siRNA sense strand
gcugaauguuuaugauacg

SEQ ID NO: 205899 - RNA, 19 nt, Homo sapiens
  misc_RNA (1)...(19): siRNA sense strand
agacuuugccaagguacua

SEQ ID NO: 205900 - RNA, 19 nt, Homo sapiens
  misc_RNA (1)...(19): siRNA sense strand
caagcaaguggcaaguuca

SEQ ID NO: 205901 - RNA, 19 nt, Homo sapiens
  misc_RNA (1)...(19): siRNA sense strand
agacaaguacagauaccuu

SEQ ID NO: 205902 - RNA, 19 nt, Homo sapiens
  misc_RNA (1)...(19): siRNA sense strand
gcaucauuucccuguguaa

SEQ ID NO: 205903 - RNA, 19 nt, Homo sapiens
  misc_RNA (1)...(19): siRNA sense strand
cugcaaagaguguccaauc

SEQ ID NO: 205904 - RNA, 19 nt, Homo sapiens
  misc_RNA (1)...(19): siRNA sense strand
cuuauaggacugccaugaa

SEQ ID NO: 205905 - RNA, 19 nt, Homo sapiens
  misc_RNA (1)...(19): siRNA sense strand
caaagaguguccaaucauu

SEQ ID NO: 205906 - RNA, 19 nt, Homo sapiens
  misc_RNA (1)...(19): siRNA sense strand
uagcugaccugaauaaugu

SEQ ID NO: 205907 - RNA, 19 nt, Homo sapiens
  misc_RNA (1)...(19): siRNA sense strand
gcaugauucuauccaaauu

SEQ ID NO: 205908 - RNA, 19 nt, Homo sapiens
  misc_RNA (1)...(19): siRNA sense strand
ugaacuggcugcugaaugu

SEQ ID NO: 205909 - RNA, 19 nt, Homo sapiens
  misc_RNA (1)...(19): siRNA sense strand
gauauccugcagauuauua

SEQ ID NO: 205910 - RNA, 19 nt, Homo sapiens
  misc_RNA (1)...(19): siRNA sense strand
gagaagauguucgagacuu

SEQ ID NO: 205911 - RNA, 19 nt, Homo sapiens
  misc_RNA (1)...(19): siRNA sense strand
gcacuuuaauuaugacauc

SEQ ID NO: 205912 - RNA, 19 nt, Homo sapiens
  misc_RNA (1)...(19): siRNA sense strand
guaaagcacauuuggaaga

SEQ ID NO: 205913 - RNA, 19 nt, Homo sapiens
  misc_RNA (1)...(19): siRNA sense strand
gaauauugcacuccgacua

SEQ ID NO: 205914 - RNA, 19 nt, Homo sapiens
  misc_RNA (1)...(19): siRNA sense strand
uuauaggacugccaugaaa

SEQ ID NO: 205915 - RNA, 19 nt, Homo sapiens
  misc_RNA (1)...(19): siRNA sense strand
gggugaaguugcauccuuu

SEQ ID NO: 205916 - RNA, 19 nt, Homo sapiens
  misc_RNA (1)...(19): siRNA sense strand
gcaagagcacaacaauuug

SEQ ID NO: 205917 - RNA, 19 nt, Homo sapiens
  misc_RNA (1)...(19): siRNA sense strand
gcacaacaauuuggucaac

SEQ ID NO: 205918 - RNA, 19 nt, Homo sapiens
  misc_RNA (1)...(19): siRNA sense strand
agcaagagcacaacaauuu

SEQ ID NO: 205919 - RNA, 19 nt, Homo sapiens
  misc_RNA (1)...(19): siRNA sense strand
agaagauguucgagacuuu

SEQ ID NO: 205920 - RNA, 19 nt, Homo sapiens
  misc_RNA (1)...(19): siRNA sense strand
gagcaagagcacaacaauu

SEQ ID NO: 205921 - RNA, 19 nt, Homo sapiens
  misc_RNA (1)...(19): siRNA sense strand
ucaagcaaguggcaaguuc

SEQ ID NO: 205922 - RNA, 19 nt, Homo sapiens
  misc_RNA (1)...(19): siRNA sense strand
ccacgagacucaaacaacu

SEQ ID NO: 205923 - RNA, 19 nt, Homo sapiens
  misc_RNA (1)...(19): siRNA sense strand
cagcacaaccucaagcaaa

SEQ ID NO: 205924 - RNA, 19 nt, Homo sapiens
  misc_RNA (1)...(19): siRNA sense strand
gcaaagaguguccaaucau

SEQ ID NO: 205925 - RNA, 19 nt, Homo sapiens
  misc_RNA (1)...(19): siRNA sense strand
auggauauccugcagauua

SEQ ID NO: 205926 - RNA, 19 nt, Homo sapiens
  misc_RNA (1)...(19): siRNA sense strand
uguaacaucugcaaagagu

SEQ ID NO: 205927 - RNA, 19 nt, Homo sapiens
  misc_RNA (1)...(19): siRNA sense strand
guccggagcugcuuccaau

SEQ ID NO: 205928 - RNA, 19 nt, Homo sapiens
  misc_RNA (1)...(19): siRNA sense strand
gcaaguggcaaguucaaca

SEQ ID NO: 205929 - RNA, 19 nt, Homo sapiens
  misc_RNA (1)...(19): siRNA sense strand
gcuuccaauuugcuaauaa

SEQ ID NO: 205930 - RNA, 19 nt, Homo sapiens
  misc_RNA (1)...(19): siRNA sense strand
uggaagacaaguacagaua

SEQ ID NO: 205931 - RNA, 19 nt, Homo sapiens
  misc_RNA (1)...(19): siRNA sense strand
ggauccguguccugucuuu

SEQ ID NO: 205932 - RNA, 19 nt, Homo sapiens
  misc_RNA (1)...(19): siRNA sense strand
gucuuuagcugaccugaau

SEQ ID NO: 205933 - RNA, 19 nt, Homo sapiens
  misc_RNA (1)...(19): siRNA sense strand
gacaaguacagauaccuuu

SEQ ID NO: 205934 - RNA, 19 nt, Homo sapiens
  misc_RNA (1)...(19): siRNA sense strand
ccaagcaucaggccaaaug

SEQ ID NO: 205935 - RNA, 19 nt, Homo sapiens
  misc_RNA (1)...(19): siRNA sense strand
ggagcaagagcacaacaau

SEQ ID NO: 205936 - RNA, 19 nt, Homo sapiens
  misc_RNA (1)...(19): siRNA sense strand
guguaaagcacauuuggaa

SEQ ID NO: 205937 - RNA, 19 nt, Homo sapiens
  misc_RNA (1)...(19): siRNA sense strand
caagacaguugggugaagu

SEQ ID NO: 205938 - RNA, 19 nt, Homo sapiens
  misc_RNA (1)...(19): siRNA sense strand
gaagauguucgagacuuug

SEQ ID NO: 205939 - RNA, 19 nt, Homo sapiens
  misc_RNA (1)...(19): siRNA sense strand
gucagauucucagcuuaua

SEQ ID NO: 205940 - RNA, 19 nt, Homo sapiens
  misc_RNA (1)...(19): siRNA sense strand
uaacaucugcaaagagugu

SEQ ID NO: 205941 - RNA, 19 nt, Homo sapiens
  misc_RNA (1)...(19): siRNA sense strand
cggagcugcuuccaauuug

SEQ ID NO: 205942 - RNA, 19 nt, Homo sapiens
  misc_RNA (1)...(19): siRNA sense strand
gaagacaaguacagauacc

SEQ ID NO: 205943 - RNA, 19 nt, Homo sapiens
  misc_RNA (1)...(19): siRNA sense strand
ccauggauauccugcagau

SEQ ID NO: 205944 - RNA, 19 nt, Homo sapiens
  misc_RNA (1)...(19): siRNA sense strand
ggcaucauuucccugugua

SEQ ID NO: 205945 - RNA, 19 nt, Homo sapiens
  misc_RNA (1)...(19): siRNA sense strand
uggauauccugcagauuau

SEQ ID NO: 205946 - RNA, 19 nt, Homo sapiens
  misc_RNA (1)...(19): siRNA sense strand
ggaagacaaguacagauac

SEQ ID NO: 205947 - RNA, 19 nt, Homo sapiens
  misc_RNA (1)...(19): siRNA sense strand
ugcaaagaguguccaauca

SEQ ID NO: 205948 - RNA, 19 nt, Homo sapiens
  misc_RNA (1)...(19): siRNA sense strand
guggauaugugucugaacu

SEQ ID NO: 205949 - RNA, 19 nt, Homo sapiens
  misc_RNA (1)...(19): siRNA sense strand
acuggcugcugaauguuua

SEQ ID NO: 205950 - RNA, 19 nt, Homo sapiens
  misc_RNA (1)...(19): siRNA sense strand
acuaucccaugguggaaua

SEQ ID NO: 205951 - RNA, 19 nt, Homo sapiens
  misc_RNA (1)...(19): siRNA sense strand
ccggagcugcuuccaauuu

SEQ ID NO: 205952 - RNA, 19 nt, Homo sapiens
  misc_RNA (1)...(19): siRNA sense strand
ccaaauuccaagacaguug

SEQ ID NO: 205953 - RNA, 19 nt, Homo sapiens
  misc_RNA (1)...(19): siRNA sense strand
cagaaacugccaagcauca

SEQ ID NO: 205954 - RNA, 19 nt, Homo sapiens
  misc_RNA (1)...(19): siRNA sense strand
uaugacaucugccaaagcu

SEQ ID NO: 205955 - RNA, 19 nt, Homo sapiens
  misc_RNA (1)...(19): siRNA sense strand
aaugucagauucucagcuu

SEQ ID NO: 205956 - RNA, 19 nt, Homo sapiens
  misc_RNA (1)...(19): siRNA sense strand
ucgagacuuugccaaggua

SEQ ID NO: 205957 - RNA, 19 nt, Homo sapiens
  misc_RNA (1)...(19): siRNA sense strand
gcaaaaggccauaaaaugc

SEQ ID NO: 205958 - RNA, 19 nt, Homo sapiens
  misc_RNA (1)...(19): siRNA sense strand
cugcaugauucuauccaaa

SEQ ID NO: 205959 - RNA, 19 nt, Homo sapiens
  misc_RNA (1)...(19): siRNA sense strand
uaaagcacauuuggaagac

SEQ ID NO: 205960 - RNA, 19 nt, Homo sapiens
  misc_RNA (1)...(19): siRNA sense strand
acaggagucuaaagcacuu

SEQ ID NO: 205961 - RNA, 19 nt, Homo sapiens
  misc_RNA (1)...(19): siRNA sense strand
acagauaccuuuucaagca

SEQ ID NO: 205962 - RNA, 19 nt, Homo sapiens
  misc_RNA (1)...(19): siRNA sense strand
aagcacauuuggaagacaa

SEQ ID NO: 205963 - RNA, 19 nt, Homo sapiens
  misc_RNA (1)...(19): siRNA sense strand
gcuaauaauaagccagaga

SEQ ID NO: 205964 - RNA, 19 nt, Homo sapiens
  misc_RNA (1)...(19): siRNA sense strand
caagagcacaacaauuugg

SEQ ID NO: 205965 - RNA, 19 nt, Homo sapiens
  misc_RNA (1)...(19): siRNA sense strand
ccugucagcugcaugugau

SEQ ID NO: 205966 - RNA, 19 nt, Homo sapiens
  misc_RNA (1)...(19): siRNA sense strand
gcugcugaauguuuaugau

SEQ ID NO: 205967 - RNA, 19 nt, Homo sapiens
  misc_RNA (1)...(19): siRNA sense strand
acagagcucuaccagucuu

SEQ ID NO: 205968 - RNA, 19 nt, Homo sapiens
  misc_RNA (1)...(19): siRNA sense strand
acaguugggugaaguugca

SEQ ID NO: 205969 - RNA, 19 nt, Homo sapiens
  misc_RNA (1)...(19): siRNA sense strand
guuugaccacuauuuauga

SEQ ID NO: 205970 - RNA, 19 nt, Homo sapiens
  misc_RNA (1)...(19): siRNA sense strand
gcuuauaggacugccauga

SEQ ID NO: 205971 - RNA, 19 nt, Homo sapiens
  misc_RNA (1)...(19): siRNA sense strand
caucaggccaaauguaaca

SEQ ID NO: 205972 - RNA, 19 nt, Homo sapiens
  misc_RNA (1)...(19): siRNA sense strand
gauucuauccaaauuccaa

SEQ ID NO: 205973 - RNA, 19 nt, Homo sapiens
  misc_RNA (1)...(19): siRNA sense strand
ggcaaguucaacaggauuu

SEQ ID NO: 205974 - RNA, 19 nt, Homo sapiens
  misc_RNA (1)...(19): siRNA sense strand
gaacuggcugcugaauguu

SEQ ID NO: 205975 - RNA, 19 nt, Homo sapiens
  misc_RNA (1)...(19): siRNA sense strand
cugcugaauguuuaugaua

SEQ ID NO: 205976 - RNA, 19 nt, Homo sapiens
  misc_RNA (1)...(19): siRNA sense strand
aagcaucaggccaaaugua

SEQ ID NO: 205977 - RNA, 19 nt, Homo sapiens
  misc_RNA (1)...(19): siRNA sense strand
uggcaucauuucccugugu

SEQ ID NO: 205978 - RNA, 19 nt, Homo sapiens
  misc_RNA (1)...(19): siRNA sense strand
ccaugaaacuccgaagacu

SEQ ID NO: 205979 - RNA, 19 nt, Homo sapiens
  misc_RNA (1)...(19): siRNA sense strand
auaauaagccagagaucga

SEQ ID NO: 205980 - RNA, 19 nt, Homo sapiens
  misc_RNA (1)...(19): siRNA sense strand
cuaauaauaagccagagau

SEQ ID NO: 205981 - RNA, 19 nt, Homo sapiens
  misc_RNA (1)...(19): siRNA sense strand
ugggugaaguugcauccuu

SEQ ID NO: 205982 - RNA, 19 nt, Homo sapiens
  misc_RNA (1)...(19): siRNA sense strand
caucauuucccuguguaaa

SEQ ID NO: 205983 - RNA, 19 nt, Homo sapiens
  misc_RNA (1)...(19): siRNA sense strand
gcguggauaugugucugaa

SEQ ID NO: 205984 - RNA, 19 nt, Homo sapiens
  misc_RNA (1)...(19): siRNA sense strand
gcacuaucccaugguggaa

SEQ ID NO: 205985 - RNA, 19 nt, Homo sapiens
  misc_RNA (1)...(19): siRNA sense strand
gagccugucagcugcaugu

SEQ ID NO: 205986 - RNA, 19 nt, Homo sapiens
  misc_RNA (1)...(19): siRNA sense strand
guacagauaccuuuucaag

SEQ ID NO: 205987 - RNA, 19 nt, Homo sapiens
  misc_RNA (1)...(19): siRNA sense strand
gucccucucugcguggaua

SEQ ID NO: 205988 - RNA, 19 nt, Homo sapiens
  misc_RNA (1)...(19): siRNA sense strand
ggagcugcuuccaauuugc

SEQ ID NO: 205989 - RNA, 19 nt, Homo sapiens
  misc_RNA (1)...(19): siRNA sense strand
uuagcugaccugaauaaug

SEQ ID NO: 205990 - RNA, 19 nt, Homo sapiens
  misc_RNA (1)...(19): siRNA sense strand
guggcaaguucaacaggau

SEQ ID NO: 205991 - RNA, 19 nt, Homo sapiens
  misc_RNA (1)...(19): siRNA sense strand
acaacaauuuggucaacgu

SEQ ID NO: 205992 - RNA, 19 nt, Homo sapiens
  misc_RNA (1)...(19): siRNA sense strand
gacuacaucaggagaagau

SEQ ID NO: 205993 - RNA, 19 nt, Homo sapiens
  misc_RNA (1)...(19): siRNA sense strand
uaauaagccagagaucgaa

SEQ ID NO: 205994 - RNA, 19 nt, Homo sapiens
  misc_RNA (1)...(19): siRNA sense strand
ugucagauucucagcuuau

SEQ ID NO: 205995 - RNA, 19 nt, Homo sapiens
  misc_RNA (1)...(19): siRNA sense strand
ggauauccugcagauuauu

SEQ ID NO: 205996 - RNA, 19 nt, Homo sapiens
  misc_RNA (1)...(19): siRNA sense strand
agcaucaggccaaauguaa

SEQ ID NO: 205997 - RNA, 19 nt, Homo sapiens
  misc_RNA (1)...(19): siRNA sense strand
gcccuuugcuuggaucucu

SEQ ID NO: 205998 - RNA, 19 nt, Homo sapiens
  misc_RNA (1)...(19): siRNA sense strand
gcugaauguuuaugauacg

SEQ ID NO: 205999 - RNA, 19 nt, Homo sapiens
  misc_RNA (1)...(19): siRNA sense strand
agacuuugccaagguacua

SEQ ID NO: 206000 - RNA, 19 nt, Homo sapiens
  misc_RNA (1)...(19): siRNA sense strand
caagcaaguggcaaguuca

SEQ ID NO: 206001 - RNA, 19 nt, Homo sapiens
  misc_RNA (1)...(19): siRNA sense strand
agacaaguacagauaccuu

SEQ ID NO: 206002 - RNA, 19 nt, Homo sapiens
  misc_RNA (1)...(19): siRNA sense strand
gcaucauuucccuguguaa

SEQ ID NO: 206003 - RNA, 19 nt, Homo sapiens
  misc_RNA (1)...(19): siRNA sense strand
cugcaaagaguguccaauc

SEQ ID NO: 206004 - RNA, 19 nt, Homo sapiens
  misc_RNA (1)...(19): siRNA sense strand
cuuauaggacugccaugaa

SEQ ID NO: 206005 - RNA, 19 nt, Homo sapiens
  misc_RNA (1)...(19): siRNA sense strand
caaagaguguccaaucauu

SEQ ID NO: 206006 - RNA, 19 nt, Homo sapiens
  misc_RNA (1)...(19): siRNA sense strand
uagcugaccugaauaaugu

SEQ ID NO: 206007 - RNA, 19 nt, Homo sapiens
  misc_RNA (1)...(19): siRNA sense strand
gcaugauucuauccaaauu

SEQ ID NO: 206008 - RNA, 19 nt, Homo sapiens
  misc_RNA (1)...(19): siRNA sense strand
ugaacuggcugcugaaugu

SEQ ID NO: 206009 - RNA, 19 nt, Homo sapiens
  misc_RNA (1)...(19): siRNA sense strand
gauauccugcagauuauua

SEQ ID NO: 206010 - RNA, 19 nt, Homo sapiens
  misc_RNA (1)...(19): siRNA sense strand
gagaagauguucgagacuu

SEQ ID NO: 206011 - RNA, 19 nt, Homo sapiens
  misc_RNA (1)...(19): siRNA sense strand
gcacuuuaauuaugacauc

SEQ ID NO: 206012 - RNA, 19 nt, Homo sapiens
  misc_RNA (1)...(19): siRNA sense strand
guaaagcacauuuggaaga

SEQ ID NO: 206013 - RNA, 19 nt, Homo sapiens
  misc_RNA (1)...(19): siRNA sense strand
gaauauugcacuccgacua

SEQ ID NO: 206014 - RNA, 19 nt, Homo sapiens
  misc_RNA (1)...(19): siRNA sense strand
uuauaggacugccaugaaa

SEQ ID NO: 206015 - RNA, 19 nt, Homo sapiens
  misc_RNA (1)...(19): siRNA sense strand
gggugaaguugcauccuuu

SEQ ID NO: 206016 - RNA, 19 nt, Homo sapiens
  misc_RNA (1)...(19): siRNA sense strand
gcaagagcacaacaauuug

SEQ ID NO: 206017 - RNA, 19 nt, Homo sapiens
  misc_RNA (1)...(19): siRNA sense strand
gcacaacaauuuggucaac

SEQ ID NO: 206018 - RNA, 19 nt, Homo sapiens
  misc_RNA (1)...(19): siRNA sense strand
agcaagagcacaacaauuu

SEQ ID NO: 206019 - RNA, 19 nt, Homo sapiens
  misc_RNA (1)...(19): siRNA sense strand
agaagauguucgagacuuu

SEQ ID NO: 206020 - RNA, 19 nt, Homo sapiens
  misc_RNA (1)...(19): siRNA sense strand
gagcaagagcacaacaauu

SEQ ID NO: 206021 - RNA, 19 nt, Homo sapiens
  misc_RNA (1)...(19): siRNA sense strand
ucaagcaaguggcaaguuc

SEQ ID NO: 206022 - RNA, 19 nt, Homo sapiens
  misc_RNA (1)...(19): siRNA sense strand
ccacgagacucaaacaacu

SEQ ID NO: 206023 - RNA, 19 nt, Homo sapiens
  misc_RNA (1)...(19): siRNA sense strand
cagcacaaccucaagcaaa

SEQ ID NO: 206024 - RNA, 19 nt, Homo sapiens
  misc_RNA (1)...(19): siRNA sense strand
gcaaagaguguccaaucau

SEQ ID NO: 206025 - RNA, 19 nt, Homo sapiens
  misc_RNA (1)...(19): siRNA sense strand
auggauauccugcagauua

SEQ ID NO: 206026 - RNA, 19 nt, Homo sapiens
  misc_RNA (1)...(19): siRNA sense strand
uguaacaucugcaaagagu

SEQ ID NO: 206027 - RNA, 19 nt, Homo sapiens
  misc_RNA (1)...(19): siRNA sense strand
guccggagcugcuuccaau

SEQ ID NO: 206028 - RNA, 19 nt, Homo sapiens
  misc_RNA (1)...(19): siRNA sense strand
gcaaguggcaaguucaaca

SEQ ID NO: 206029 - RNA, 19 nt, Homo sapiens
  misc_RNA (1)...(19): siRNA sense strand
gcuuccaauuugcuaauaa

SEQ ID NO: 206030 - RNA, 19 nt, Homo sapiens
  misc_RNA (1)...(19): siRNA sense strand
uggaagacaaguacagaua

SEQ ID NO: 206031 - RNA, 19 nt, Homo sapiens
  misc_RNA (1)...(19): siRNA sense strand
ggauccguguccugucuuu

SEQ ID NO: 206032 - RNA, 19 nt, Homo sapiens
  misc_RNA (1)...(19): siRNA sense strand
gucuuuagcugaccugaau

SEQ ID NO: 206033 - RNA, 19 nt, Homo sapiens
  misc_RNA (1)...(19): siRNA sense strand
gacaaguacagauaccuuu

SEQ ID NO: 206034 - RNA, 19 nt, Homo sapiens
  misc_RNA (1)...(19): siRNA sense strand
ccaagcaucaggccaaaug

SEQ ID NO: 206035 - RNA, 19 nt, Homo sapiens
  misc_RNA (1)...(19): siRNA sense strand
ggagcaagagcacaacaau

SEQ ID NO: 206036 - RNA, 19 nt, Homo sapiens
  misc_RNA (1)...(19): siRNA sense strand
guguaaagcacauuuggaa

SEQ ID NO: 206037 - RNA, 19 nt, Homo sapiens
  misc_RNA (1)...(19): siRNA sense strand
caagacaguugggugaagu

SEQ ID NO: 206038 - RNA, 19 nt, Homo sapiens
  misc_RNA (1)...(19): siRNA sense strand
gaagauguucgagacuuug

SEQ ID NO: 206039 - RNA, 19 nt, Homo sapiens
  misc_RNA (1)...(19): siRNA sense strand
gucagauucucagcuuaua

SEQ ID NO: 206040 - RNA, 19 nt, Homo sapiens
  misc_RNA (1)...(19): siRNA sense strand
uaacaucugcaaagagugu

SEQ ID NO: 206041 - RNA, 19 nt, Homo sapiens
  misc_RNA (1)...(19): siRNA sense strand
cggagcugcuuccaauuug

SEQ ID NO: 206042 - RNA, 19 nt, Homo sapiens
  misc_RNA (1)...(19): siRNA sense strand
gaagacaaguacagauacc

SEQ ID NO: 206043 - RNA, 19 nt, Homo sapiens
  misc_RNA (1)...(19): siRNA sense strand
ccauggauauccugcagau

SEQ ID NO: 206044 - RNA, 19 nt, Homo sapiens
  misc_RNA (1)...(19): siRNA sense strand
ggcaucauuucccugugua

SEQ ID NO: 206045 - RNA, 19 nt, Homo sapiens
  misc_RNA (1)...(19): siRNA sense strand
uggauauccugcagauuau

SEQ ID NO: 206046 - RNA, 19 nt, Homo sapiens
  misc_RNA (1)...(19): siRNA sense strand
ggaagacaaguacagauac

SEQ ID NO: 206047 - RNA, 19 nt, Homo sapiens
  misc_RNA (1)...(19): siRNA sense strand
ugcaaagaguguccaauca

SEQ ID NO: 206048 - RNA, 19 nt, Homo sapiens
  misc_RNA (1)...(19): siRNA sense strand
guggauaugugucugaacu

SEQ ID NO: 206049 - RNA, 19 nt, Homo sapiens
  misc_RNA (1)...(19): siRNA sense strand
acuggcugcugaauguuua

SEQ ID NO: 206050 - RNA, 19 nt, Homo sapiens
  misc_RNA (1)...(19): siRNA sense strand
acuaucccaugguggaaua

SEQ ID NO: 206051 - RNA, 19 nt, Homo sapiens
  misc_RNA (1)...(19): siRNA sense strand
ccggagcugcuuccaauuu

SEQ ID NO: 206052 - RNA, 19 nt, Homo sapiens
  misc_RNA (1)...(19): siRNA sense strand
ccaaauuccaagacaguug

SEQ ID NO: 206053 - RNA, 19 nt, Homo sapiens
  misc_RNA (1)...(19): siRNA sense strand
cagaaacugccaagcauca

SEQ ID NO: 206054 - RNA, 19 nt, Homo sapiens
  misc_RNA (1)...(19): siRNA sense strand
uaugacaucugccaaagcu

SEQ ID NO: 206055 - RNA, 19 nt, Homo sapiens
  misc_RNA (1)...(19): siRNA sense strand
aaugucagauucucagcuu

SEQ ID NO: 206056 - RNA, 19 nt, Homo sapiens
  misc_RNA (1)...(19): siRNA sense strand
ucgagacuuugccaaggua

SEQ ID NO: 206057 - RNA, 19 nt, Homo sapiens
  misc_RNA (1)...(19): siRNA sense strand
gcaaaaggccauaaaaugc

SEQ ID NO: 206058 - RNA, 19 nt, Homo sapiens
  misc_RNA (1)...(19): siRNA sense strand
cugcaugauucuauccaaa

SEQ ID NO: 206059 - RNA, 19 nt, Homo sapiens
  misc_RNA (1)...(19): siRNA sense strand
uaaagcacauuuggaagac

SEQ ID NO: 206060 - RNA, 19 nt, Homo sapiens
  misc_RNA (1)...(19): siRNA sense strand
acaggagucuaaagcacuu

SEQ ID NO: 206061 - RNA, 19 nt, Homo sapiens
  misc_RNA (1)...(19): siRNA sense strand
acagauaccuuuucaagca

SEQ ID NO: 206062 - RNA, 19 nt, Homo sapiens
  misc_RNA (1)...(19): siRNA sense strand
aagcacauuuggaagacaa

SEQ ID NO: 206063 - RNA, 19 nt, Homo sapiens
  misc_RNA (1)...(19): siRNA sense strand
gcuaauaauaagccagaga

SEQ ID NO: 206064 - RNA, 19 nt, Homo sapiens
  misc_RNA (1)...(19): siRNA sense strand
caagagcacaacaauuugg

SEQ ID NO: 206065 - RNA, 19 nt, Homo sapiens
  misc_RNA (1)...(19): siRNA sense strand
ccugucagcugcaugugau

SEQ ID NO: 206066 - RNA, 19 nt, Homo sapiens
  misc_RNA (1)...(19): siRNA sense strand
gcugcugaauguuuaugau

SEQ ID NO: 206067 - RNA, 19 nt, Homo sapiens
  misc_RNA (1)...(19): siRNA sense strand
acagagcucuaccagucuu

SEQ ID NO: 206068 - RNA, 19 nt, Homo sapiens
  misc_RNA (1)...(19): siRNA sense strand
acaguugggugaaguugca

SEQ ID NO: 206069 - RNA, 19 nt, Homo sapiens
  misc_RNA (1)...(19): siRNA sense strand
guuugaccacuauuuauga

SEQ ID NO: 206070 - RNA, 19 nt, Homo sapiens
  misc_RNA (1)...(19): siRNA sense strand
gcuuauaggacugccauga

SEQ ID NO: 206071 - RNA, 19 nt, Homo sapiens
  misc_RNA (1)...(19): siRNA sense strand
caucaggccaaauguaaca

SEQ ID NO: 206072 - RNA, 19 nt, Homo sapiens
  misc_RNA (1)...(19): siRNA sense strand
gauucuauccaaauuccaa

SEQ ID NO: 206073 - RNA, 19 nt, Homo sapiens
  misc_RNA (1)...(19): siRNA sense strand
ggcaaguucaacaggauuu

SEQ ID NO: 206074 - RNA, 19 nt, Homo sapiens
  misc_RNA (1)...(19): siRNA sense strand
gaacuggcugcugaauguu

SEQ ID NO: 206075 - RNA, 19 nt, Homo sapiens
  misc_RNA (1)...(19): siRNA sense strand
cugcugaauguuuaugaua

SEQ ID NO: 206076 - RNA, 19 nt, Homo sapiens
  misc_RNA (1)...(19): siRNA sense strand
aagcaucaggccaaaugua

SEQ ID NO: 206077 - RNA, 19 nt, Homo sapiens
  misc_RNA (1)...(19): siRNA sense strand
uggcaucauuucccugugu

SEQ ID NO: 206078 - RNA, 19 nt, Homo sapiens
  misc_RNA (1)...(19): siRNA sense strand
ccaugaaacuccgaagacu

SEQ ID NO: 206079 - RNA, 19 nt, Homo sapiens
  misc_RNA (1)...(19): siRNA sense strand
auaauaagccagagaucga

SEQ ID NO: 206080 - RNA, 19 nt, Homo sapiens
  misc_RNA (1)...(19): siRNA sense strand
cuaauaauaagccagagau

SEQ ID NO: 206081 - RNA, 19 nt, Homo sapiens
  misc_RNA (1)...(19): siRNA sense strand
ugggugaaguugcauccuu

SEQ ID NO: 206082 - RNA, 19 nt, Homo sapiens
  misc_RNA (1)...(19): siRNA sense strand
caucauuucccuguguaaa

SEQ ID NO: 206083 - RNA, 19 nt, Homo sapiens
  misc_RNA (1)...(19): siRNA sense strand
gcguggauaugugucugaa

SEQ ID NO: 206084 - RNA, 19 nt, Homo sapiens
  misc_RNA (1)...(19): siRNA sense strand
gcacuaucccaugguggaa

SEQ ID NO: 206085 - RNA, 19 nt, Homo sapiens
  misc_RNA (1)...(19): siRNA sense strand
gagccugucagcugcaugu

SEQ ID NO: 206086 - RNA, 19 nt, Homo sapiens
  misc_RNA (1)...(19): siRNA sense strand
guacagauaccuuuucaag

SEQ ID NO: 206087 - RNA, 19 nt, Homo sapiens
  misc_RNA (1)...(19): siRNA sense strand
gucccucucugcguggaua

SEQ ID NO: 206088 - RNA, 19 nt, Homo sapiens
  misc_RNA (1)...(19): siRNA sense strand
ggagcugcuuccaauuugc

SEQ ID NO: 206089 - RNA, 19 nt, Homo sapiens
  misc_RNA (1)...(19): siRNA sense strand
uuagcugaccugaauaaug

SEQ ID NO: 206090 - RNA, 19 nt, Homo sapiens
  misc_RNA (1)...(19): siRNA sense strand
guggcaaguucaacaggau

SEQ ID NO: 206091 - RNA, 19 nt, Homo sapiens
  misc_RNA (1)...(19): siRNA sense strand
acaacaauuuggucaacgu

SEQ ID NO: 206092 - RNA, 19 nt, Homo sapiens
  misc_RNA (1)...(19): siRNA sense strand
gacuacaucaggagaagau

SEQ ID NO: 206093 - RNA, 19 nt, Homo sapiens
  misc_RNA (1)...(19): siRNA sense strand
uaauaagccagagaucgaa

SEQ ID NO: 206094 - RNA, 19 nt, Homo sapiens
  misc_RNA (1)...(19): siRNA sense strand
ugucagauucucagcuuau

SEQ ID NO: 206095 - RNA, 19 nt, Homo sapiens
  misc_RNA (1)...(19): siRNA sense strand
ggauauccugcagauuauu

SEQ ID NO: 206096 - RNA, 19 nt, Homo sapiens
  misc_RNA (1)...(19): siRNA sense strand
agcaucaggccaaauguaa

SEQ ID NO: 206097 - RNA, 19 nt, Homo sapiens
  misc_RNA (1)...(19): siRNA sense strand
gcccuuugcuuggaucucu

SEQ ID NO: 206098 - RNA, 19 nt, Homo sapiens
  misc_RNA (1)...(19): siRNA sense strand
gcugaauguuuaugauacg

SEQ ID NO: 206099 - RNA, 19 nt, Homo sapiens
  misc_RNA (1)...(19): siRNA sense strand
agacuuugccaagguacua

SEQ ID NO: 206100 - RNA, 19 nt, Homo sapiens
  misc_RNA (1)...(19): siRNA sense strand
caagcaaguggcaaguuca

SEQ ID NO: 206101 - RNA, 19 nt, Homo sapiens
  misc_RNA (1)...(19): siRNA sense strand
agacaaguacagauaccuu

SEQ ID NO: 206102 - RNA, 19 nt, Homo sapiens
  misc_RNA (1)...(19): siRNA sense strand
gcaucauuucccuguguaa

SEQ ID NO: 206103 - RNA, 19 nt, Homo sapiens
  misc_RNA (1)...(19): siRNA sense strand
cugcaaagaguguccaauc

SEQ ID NO: 206104 - RNA, 19 nt, Homo sapiens
  misc_RNA (1)...(19): siRNA sense strand
cuuauaggacugccaugaa

SEQ ID NO: 206105 - RNA, 19 nt, Homo sapiens
  misc_RNA (1)...(19): siRNA sense strand
caaagaguguccaaucauu

SEQ ID NO: 206106 - RNA, 19 nt, Homo sapiens
  misc_RNA (1)...(19): siRNA sense strand
uagcugaccugaauaaugu

SEQ ID NO: 206107 - RNA, 19 nt, Homo sapiens
  misc_RNA (1)...(19): siRNA sense strand
gcaugauucuauccaaauu

SEQ ID NO: 206108 - RNA, 19 nt, Homo sapiens
  misc_RNA (1)...(19): siRNA sense strand
ugaacuggcugcugaaugu

SEQ ID NO: 206109 - RNA, 19 nt, Homo sapiens
  misc_RNA (1)...(19): siRNA sense strand
gauauccugcagauuauua

SEQ ID NO: 206110 - RNA, 19 nt, Homo sapiens
  misc_RNA (1)...(19): siRNA sense strand
gagaagauguucgagacuu

SEQ ID NO: 206111 - RNA, 19 nt, Homo sapiens
  misc_RNA (1)...(19): siRNA sense strand
gcacuuuaauuaugacauc

SEQ ID NO: 206112 - RNA, 19 nt, Homo sapiens
  misc_RNA (1)...(19): siRNA sense strand
guaaagcacauuuggaaga

SEQ ID NO: 206113 - RNA, 19 nt, Homo sapiens
  misc_RNA (1)...(19): siRNA sense strand
gaauauugcacuccgacua

SEQ ID NO: 206114 - RNA, 19 nt, Homo sapiens
  misc_RNA (1)...(19): siRNA sense strand
uuauaggacugccaugaaa

SEQ ID NO: 206115 - RNA, 19 nt, Homo sapiens
  misc_RNA (1)...(19): siRNA sense strand
gggugaaguugcauccuuu

SEQ ID NO: 206116 - RNA, 19 nt, Homo sapiens
  misc_RNA (1)...(19): siRNA sense strand
gcaagagcacaacaauuug

SEQ ID NO: 206117 - RNA, 19 nt, Homo sapiens
  misc_RNA (1)...(19): siRNA sense strand
gcacaacaauuuggucaac

SEQ ID NO: 206118 - RNA, 19 nt, Homo sapiens
  misc_RNA (1)...(19): siRNA sense strand
agcaagagcacaacaauuu

SEQ ID NO: 206119 - RNA, 19 nt, Homo sapiens
  misc_RNA (1)...(19): siRNA sense strand
agaagauguucgagacuuu

SEQ ID NO: 206120 - RNA, 19 nt, Homo sapiens
  misc_RNA (1)...(19): siRNA sense strand
gagcaagagcacaacaauu

SEQ ID NO: 206121 - RNA, 19 nt, Homo sapiens
  misc_RNA (1)...(19): siRNA sense strand
ucaagcaaguggcaaguuc

SEQ ID NO: 206122 - RNA, 19 nt, Homo sapiens
  misc_RNA (1)...(19): siRNA sense strand
ccacgagacucaaacaacu

SEQ ID NO: 206123 - RNA, 19 nt, Homo sapiens
  misc_RNA (1)...(19): siRNA sense strand
cagcacaaccucaagcaaa

SEQ ID NO: 206124 - RNA, 19 nt, Homo sapiens
  misc_RNA (1)...(19): siRNA sense strand
gcaaagaguguccaaucau

SEQ ID NO: 206125 - RNA, 19 nt, Homo sapiens
  misc_RNA (1)...(19): siRNA sense strand
auggauauccugcagauua

SEQ ID NO: 206126 - RNA, 19 nt, Homo sapiens
  misc_RNA (1)...(19): siRNA sense strand
uguaacaucugcaaagagu

SEQ ID NO: 206127 - RNA, 19 nt, Homo sapiens
  misc_RNA (1)...(19): siRNA sense strand
guccggagcugcuuccaau

SEQ ID NO: 206128 - RNA, 19 nt, Homo sapiens
  misc_RNA (1)...(19): siRNA sense strand
gcaaguggcaaguucaaca

SEQ ID NO: 206129 - RNA, 19 nt, Homo sapiens
  misc_RNA (1)...(19): siRNA sense strand
gcuuccaauuugcuaauaa

SEQ ID NO: 206130 - RNA, 19 nt, Homo sapiens
  misc_RNA (1)...(19): siRNA sense strand
uggaagacaaguacagaua

SEQ ID NO: 206131 - RNA, 19 nt, Homo sapiens
  misc_RNA (1)...(19): siRNA sense strand
ggauccguguccugucuuu

SEQ ID NO: 206132 - RNA, 19 nt, Homo sapiens
  misc_RNA (1)...(19): siRNA sense strand
gucuuuagcugaccugaau

SEQ ID NO: 206133 - RNA, 19 nt, Homo sapiens
  misc_RNA (1)...(19): siRNA sense strand
gacaaguacagauaccuuu

SEQ ID NO: 206134 - RNA, 19 nt, Homo sapiens
  misc_RNA (1)...(19): siRNA sense strand
ccaagcaucaggccaaaug

SEQ ID NO: 206135 - RNA, 19 nt, Homo sapiens
  misc_RNA (1)...(19): siRNA sense strand
ggagcaagagcacaacaau

SEQ ID NO: 206136 - RNA, 19 nt, Homo sapiens
  misc_RNA (1)...(19): siRNA sense strand
guguaaagcacauuuggaa

SEQ ID NO: 206137 - RNA, 19 nt, Homo sapiens
  misc_RNA (1)...(19): siRNA sense strand
caagacaguugggugaagu

SEQ ID NO: 206138 - RNA, 19 nt, Homo sapiens
  misc_RNA (1)...(19): siRNA sense strand
gaagauguucgagacuuug

SEQ ID NO: 206139 - RNA, 19 nt, Homo sapiens
  misc_RNA (1)...(19): siRNA sense strand
gucagauucucagcuuaua

SEQ ID NO: 206140 - RNA, 19 nt, Homo sapiens
  misc_RNA (1)...(19): siRNA sense strand
uaacaucugcaaagagugu

SEQ ID NO: 206141 - RNA, 19 nt, Homo sapiens
  misc_RNA (1)...(19): siRNA sense strand
cggagcugcuuccaauuug

SEQ ID NO: 206142 - RNA, 19 nt, Homo sapiens
  misc_RNA (1)...(19): siRNA sense strand
gaagacaaguacagauacc

SEQ ID NO: 206143 - RNA, 19 nt, Homo sapiens
  misc_RNA (1)...(19): siRNA sense strand
ccauggauauccugcagau

SEQ ID NO: 206144 - RNA, 19 nt, Homo sapiens
  misc_RNA (1)...(19): siRNA sense strand
ggcaucauuucccugugua

SEQ ID NO: 206145 - RNA, 19 nt, Homo sapiens
  misc_RNA (1)...(19): siRNA sense strand
uggauauccugcagauuau

SEQ ID NO: 206146 - RNA, 19 nt, Homo sapiens
  misc_RNA (1)...(19): siRNA sense strand
ggaagacaaguacagauac

SEQ ID NO: 206147 - RNA, 19 nt, Homo sapiens
  misc_RNA (1)...(19): siRNA sense strand
ugcaaagaguguccaauca

SEQ ID NO: 206148 - RNA, 19 nt, Homo sapiens
  misc_RNA (1)...(19): siRNA sense strand
guggauaugugucugaacu

SEQ ID NO: 206149 - RNA, 19 nt, Homo sapiens
  misc_RNA (1)...(19): siRNA sense strand
acuggcugcugaauguuua

SEQ ID NO: 206150 - RNA, 19 nt, Homo sapiens
  misc_RNA (1)...(19): siRNA sense strand
acuaucccaugguggaaua

SEQ ID NO: 206151 - RNA, 19 nt, Homo sapiens
  misc_RNA (1)...(19): siRNA sense strand
ccggagcugcuuccaauuu

SEQ ID NO: 206152 - RNA, 19 nt, Homo sapiens
  misc_RNA (1)...(19): siRNA sense strand
ccaaauuccaagacaguug

SEQ ID NO: 206153 - RNA, 19 nt, Homo sapiens
  misc_RNA (1)...(19): siRNA sense strand
cagaaacugccaagcauca

SEQ ID NO: 206154 - RNA, 19 nt, Homo sapiens
  misc_RNA (1)...(19): siRNA sense strand
uaugacaucugccaaagcu

SEQ ID NO: 206155 - RNA, 19 nt, Homo sapiens
  misc_RNA (1)...(19): siRNA sense strand
aaugucagauucucagcuu

SEQ ID NO: 206156 - RNA, 19 nt, Homo sapiens
  misc_RNA (1)...(19): siRNA sense strand
ucgagacuuugccaaggua

SEQ ID NO: 206157 - RNA, 19 nt, Homo sapiens
  misc_RNA (1)...(19): siRNA sense strand
gcaaaaggccauaaaaugc

SEQ ID NO: 206158 - RNA, 19 nt, Homo sapiens
  misc_RNA (1)...(19): siRNA sense strand
cugcaugauucuauccaaa

SEQ ID NO: 206159 - RNA, 19 nt, Homo sapiens
  misc_RNA (1)...(19): siRNA sense strand
uaaagcacauuuggaagac

SEQ ID NO: 206160 - RNA, 19 nt, Homo sapiens
  misc_RNA (1)...(19): siRNA sense strand
acaggagucuaaagcacuu

SEQ ID NO: 206161 - RNA, 19 nt, Homo sapiens
  misc_RNA (1)...(19): siRNA sense strand
acagauaccuuuucaagca

SEQ ID NO: 206162 - RNA, 19 nt, Homo sapiens
  misc_RNA (1)...(19): siRNA sense strand
aagcacauuuggaagacaa

SEQ ID NO: 206163 - RNA, 19 nt, Homo sapiens
  misc_RNA (1)...(19): siRNA sense strand
gcuaauaauaagccagaga

SEQ ID NO: 206164 - RNA, 19 nt, Homo sapiens
  misc_RNA (1)...(19): siRNA sense strand
caagagcacaacaauuugg

SEQ ID NO: 206165 - RNA, 19 nt, Homo sapiens
  misc_RNA (1)...(19): siRNA sense strand
ccugucagcugcaugugau

SEQ ID NO: 206166 - RNA, 19 nt, Homo sapiens
  misc_RNA (1)...(19): siRNA sense strand
gcugcugaauguuuaugau

SEQ ID NO: 206167 - RNA, 19 nt, Homo sapiens
  misc_RNA (1)...(19): siRNA sense strand
acagagcucuaccagucuu

SEQ ID NO: 206168 - RNA, 19 nt, Homo sapiens
  misc_RNA (1)...(19): siRNA sense strand
acaguugggugaaguugca

SEQ ID NO: 206169 - RNA, 19 nt, Homo sapiens
  misc_RNA (1)...(19): siRNA sense strand
guuugaccacuauuuauga

SEQ ID NO: 206170 - RNA, 19 nt, Homo sapiens
  misc_RNA (1)...(19): siRNA sense strand
gcuuauaggacugccauga

SEQ ID NO: 206171 - RNA, 19 nt, Homo sapiens
  misc_RNA (1)...(19): siRNA sense strand
caucaggccaaauguaaca

SEQ ID NO: 206172 - RNA, 19 nt, Homo sapiens
  misc_RNA (1)...(19): siRNA sense strand
gauucuauccaaauuccaa

SEQ ID NO: 206173 - RNA, 19 nt, Homo sapiens
  misc_RNA (1)...(19): siRNA sense strand
ggcaaguucaacaggauuu

SEQ ID NO: 206174 - RNA, 19 nt, Homo sapiens
  misc_RNA (1)...(19): siRNA sense strand
gaacuggcugcugaauguu

SEQ ID NO: 206175 - RNA, 19 nt, Homo sapiens
  misc_RNA (1)...(19): siRNA sense strand
cugcugaauguuuaugaua

SEQ ID NO: 206176 - RNA, 19 nt, Homo sapiens
  misc_RNA (1)...(19): siRNA sense strand
aagcaucaggccaaaugua

SEQ ID NO: 206177 - RNA, 19 nt, Homo sapiens
  misc_RNA (1)...(19): siRNA sense strand
uggcaucauuucccugugu

SEQ ID NO: 206178 - RNA, 19 nt, Homo sapiens
  misc_RNA (1)...(19): siRNA sense strand
ccaugaaacuccgaagacu

SEQ ID NO: 206179 - RNA, 19 nt, Homo sapiens
  misc_RNA (1)...(19): siRNA sense strand
auaauaagccagagaucga

SEQ ID NO: 206180 - RNA, 19 nt, Homo sapiens
  misc_RNA (1)...(19): siRNA sense strand
cuaauaauaagccagagau

SEQ ID NO: 206181 - RNA, 19 nt, Homo sapiens
  misc_RNA (1)...(19): siRNA sense strand
ugggugaaguugcauccuu

SEQ ID NO: 206182 - RNA, 19 nt, Homo sapiens
  misc_RNA (1)...(19): siRNA sense strand
caucauuucccuguguaaa

SEQ ID NO: 206183 - RNA, 19 nt, Homo sapiens
  misc_RNA (1)...(19): siRNA sense strand
gcguggauaugugucugaa

SEQ ID NO: 206184 - RNA, 19 nt, Homo sapiens
  misc_RNA (1)...(19): siRNA sense strand
gcacuaucccaugguggaa

SEQ ID NO: 206185 - RNA, 19 nt, Homo sapiens
  misc_RNA (1)...(19): siRNA sense strand
gagccugucagcugcaugu

SEQ ID NO: 206186 - RNA, 19 nt, Homo sapiens
  misc_RNA (1)...(19): siRNA sense strand
guacagauaccuuuucaag

SEQ ID NO: 206187 - RNA, 19 nt, Homo sapiens
  misc_RNA (1)...(19): siRNA sense strand
gucccucucugcguggaua

SEQ ID NO: 206188 - RNA, 19 nt, Homo sapiens
  misc_RNA (1)...(19): siRNA sense strand
ggagcugcuuccaauuugc

SEQ ID NO: 206189 - RNA, 19 nt, Homo sapiens
  misc_RNA (1)...(19): siRNA sense strand
uuagcugaccugaauaaug

SEQ ID NO: 206190 - RNA, 19 nt, Homo sapiens
  misc_RNA (1)...(19): siRNA sense strand
guggcaaguucaacaggau

SEQ ID NO: 206191 - RNA, 19 nt, Homo sapiens
  misc_RNA (1)...(19): siRNA sense strand
acaacaauuuggucaacgu

SEQ ID NO: 206192 - RNA, 19 nt, Homo sapiens
  misc_RNA (1)...(19): siRNA sense strand
gacuacaucaggagaagau

SEQ ID NO: 206193 - RNA, 19 nt, Homo sapiens
  misc_RNA (1)...(19): siRNA sense strand
uaauaagccagagaucgaa

SEQ ID NO: 206194 - RNA, 19 nt, Homo sapiens
  misc_RNA (1)...(19): siRNA sense strand
ugucagauucucagcuuau

SEQ ID NO: 206195 - RNA, 19 nt, Homo sapiens
  misc_RNA (1)...(19): siRNA sense strand
ggauauccugcagauuauu

SEQ ID NO: 206196 - RNA, 19 nt, Homo sapiens
  misc_RNA (1)...(19): siRNA sense strand
agcaucaggccaaauguaa

SEQ ID NO: 206197 - RNA, 19 nt, Homo sapiens
  misc_RNA (1)...(19): siRNA sense strand
gcccuuugcuuggaucucu

SEQ ID NO: 206198 - RNA, 19 nt, Homo sapiens
  misc_RNA (1)...(19): siRNA sense strand
gcugaauguuuaugauacg

SEQ ID NO: 206199 - RNA, 19 nt, Homo sapiens
  misc_RNA (1)...(19): siRNA sense strand
agacuuugccaagguacua

SEQ ID NO: 206200 - RNA, 19 nt, Homo sapiens
  misc_RNA (1)...(19): siRNA sense strand
caagcaaguggcaaguuca

SEQ ID NO: 206201 - RNA, 19 nt, Homo sapiens
  misc_RNA (1)...(19): siRNA sense strand
agacaaguacagauaccuu

SEQ ID NO: 206202 - RNA, 19 nt, Homo sapiens
  misc_RNA (1)...(19): siRNA sense strand
gcaucauuucccuguguaa

SEQ ID NO: 206203 - RNA, 19 nt, Homo sapiens
  misc_RNA (1)...(19): siRNA sense strand
cugcaaagaguguccaauc

SEQ ID NO: 206204 - RNA, 19 nt, Homo sapiens
  misc_RNA (1)...(19): siRNA sense strand
cuuauaggacugccaugaa

SEQ ID NO: 206205 - RNA, 19 nt, Homo sapiens
  misc_RNA (1)...(19): siRNA sense strand
caaagaguguccaaucauu

SEQ ID NO: 206206 - RNA, 19 nt, Homo sapiens
  misc_RNA (1)...(19): siRNA sense strand
uagcugaccugaauaaugu

SEQ ID NO: 206207 - RNA, 19 nt, Homo sapiens
  misc_RNA (1)...(19): siRNA sense strand
gcaugauucuauccaaauu

SEQ ID NO: 206208 - RNA, 19 nt, Homo sapiens
  misc_RNA (1)...(19): siRNA sense strand
ugaacuggcugcugaaugu

SEQ ID NO: 206209 - RNA, 19 nt, Homo sapiens
  misc_RNA (1)...(19): siRNA sense strand
gauauccugcagauuauua

SEQ ID NO: 206210 - RNA, 19 nt, Homo sapiens
  misc_RNA (1)...(19): siRNA sense strand
gagaagauguucgagacuu

SEQ ID NO: 206211 - RNA, 19 nt, Homo sapiens
  misc_RNA (1)...(19): siRNA sense strand
gcacuuuaauuaugacauc

SEQ ID NO: 206212 - RNA, 19 nt, Homo sapiens
  misc_RNA (1)...(19): siRNA sense strand
guaaagcacauuuggaaga

SEQ ID NO: 206213 - RNA, 19 nt, Homo sapiens
  misc_RNA (1)...(19): siRNA sense strand
gaauauugcacuccgacua

SEQ ID NO: 206214 - RNA, 19 nt, Homo sapiens
  misc_RNA (1)...(19): siRNA sense strand
uuauaggacugccaugaaa

SEQ ID NO: 206215 - RNA, 19 nt, Homo sapiens
  misc_RNA (1)...(19): siRNA sense strand
gggugaaguugcauccuuu

SEQ ID NO: 206216 - RNA, 19 nt, Homo sapiens
  misc_RNA (1)...(19): siRNA sense strand
gcaagagcacaacaauuug

SEQ ID NO: 206217 - RNA, 19 nt, Homo sapiens
  misc_RNA (1)...(19): siRNA sense strand
gcacaacaauuuggucaac

SEQ ID NO: 206218 - RNA, 19 nt, Homo sapiens
  misc_RNA (1)...(19): siRNA sense strand
agcaagagcacaacaauuu

SEQ ID NO: 206219 - RNA, 19 nt, Homo sapiens
  misc_RNA (1)...(19): siRNA sense strand
agaagauguucgagacuuu

SEQ ID NO: 206220 - RNA, 19 nt, Homo sapiens
  misc_RNA (1)...(19): siRNA sense strand
gagcaagagcacaacaauu

SEQ ID NO: 206221 - RNA, 19 nt, Homo sapiens
  misc_RNA (1)...(19): siRNA sense strand
ucaagcaaguggcaaguuc

SEQ ID NO: 206222 - RNA, 19 nt, Homo sapiens
  misc_RNA (1)...(19): siRNA sense strand
ccacgagacucaaacaacu

SEQ ID NO: 206223 - RNA, 19 nt, Homo sapiens
  misc_RNA (1)...(19): siRNA sense strand
cagcacaaccucaagcaaa

SEQ ID NO: 206224 - RNA, 19 nt, Homo sapiens
  misc_RNA (1)...(19): siRNA sense strand
gcaaagaguguccaaucau

SEQ ID NO: 206225 - RNA, 19 nt, Homo sapiens
  misc_RNA (1)...(19): siRNA sense strand
auggauauccugcagauua

SEQ ID NO: 206226 - RNA, 19 nt, Homo sapiens
  misc_RNA (1)...(19): siRNA sense strand
uguaacaucugcaaagagu

SEQ ID NO: 206227 - RNA, 19 nt, Homo sapiens
  misc_RNA (1)...(19): siRNA sense strand
guccggagcugcuuccaau

SEQ ID NO: 206228 - RNA, 19 nt, Homo sapiens
  misc_RNA (1)...(19): siRNA sense strand
gcaaguggcaaguucaaca

SEQ ID NO: 206229 - RNA, 19 nt, Homo sapiens
  misc_RNA (1)...(19): siRNA sense strand
gcuuccaauuugcuaauaa

SEQ ID NO: 206230 - RNA, 19 nt, Homo sapiens
  misc_RNA (1)...(19): siRNA sense strand
uggaagacaaguacagaua

SEQ ID NO: 206231 - RNA, 19 nt, Homo sapiens
  misc_RNA (1)...(19): siRNA sense strand
ggauccguguccugucuuu

SEQ ID NO: 206232 - RNA, 19 nt, Homo sapiens
  misc_RNA (1)...(19): siRNA sense strand
gucuuuagcugaccugaau

SEQ ID NO: 206233 - RNA, 19 nt, Homo sapiens
  misc_RNA (1)...(19): siRNA sense strand
gacaaguacagauaccuuu

SEQ ID NO: 206234 - RNA, 19 nt, Homo sapiens
  misc_RNA (1)...(19): siRNA sense strand
ccaagcaucaggccaaaug

SEQ ID NO: 206235 - RNA, 19 nt, Homo sapiens
  misc_RNA (1)...(19): siRNA sense strand
ggagcaagagcacaacaau

SEQ ID NO: 206236 - RNA, 19 nt, Homo sapiens
  misc_RNA (1)...(19): siRNA sense strand
guguaaagcacauuuggaa

SEQ ID NO: 206237 - RNA, 19 nt, Homo sapiens
  misc_RNA (1)...(19): siRNA sense strand
caagacaguugggugaagu

SEQ ID NO: 206238 - RNA, 19 nt, Homo sapiens
  misc_RNA (1)...(19): siRNA sense strand
gaagauguucgagacuuug

SEQ ID NO: 206239 - RNA, 19 nt, Homo sapiens
  misc_RNA (1)...(19): siRNA sense strand
gucagauucucagcuuaua

SEQ ID NO: 206240 - RNA, 19 nt, Homo sapiens
  misc_RNA (1)...(19): siRNA sense strand
uaacaucugcaaagagugu

SEQ ID NO: 206241 - RNA, 19 nt, Homo sapiens
  misc_RNA (1)...(19): siRNA sense strand
cggagcugcuuccaauuug

SEQ ID NO: 206242 - RNA, 19 nt, Homo sapiens
  misc_RNA (1)...(19): siRNA sense strand
gaagacaaguacagauacc

SEQ ID NO: 206243 - RNA, 19 nt, Homo sapiens
  misc_RNA (1)...(19): siRNA sense strand
ccauggauauccugcagau

SEQ ID NO: 206244 - RNA, 19 nt, Homo sapiens
  misc_RNA (1)...(19): siRNA sense strand
ggcaucauuucccugugua

SEQ ID NO: 206245 - RNA, 19 nt, Homo sapiens
  misc_RNA (1)...(19): siRNA sense strand
uggauauccugcagauuau

SEQ ID NO: 206246 - RNA, 19 nt, Homo sapiens
  misc_RNA (1)...(19): siRNA sense strand
ggaagacaaguacagauac

SEQ ID NO: 206247 - RNA, 19 nt, Homo sapiens
  misc_RNA (1)...(19): siRNA sense strand
ugcaaagaguguccaauca

SEQ ID NO: 206248 - RNA, 19 nt, Homo sapiens
  misc_RNA (1)...(19): siRNA sense strand
guggauaugugucugaacu

SEQ ID NO: 206249 - RNA, 19 nt, Homo sapiens
  misc_RNA (1)...(19): siRNA sense strand
acuggcugcugaauguuua

SEQ ID NO: 206250 - RNA, 19 nt, Homo sapiens
  misc_RNA (1)...(19): siRNA sense strand
acuaucccaugguggaaua

SEQ ID NO: 206251 - RNA, 19 nt, Homo sapiens
  misc_RNA (1)...(19): siRNA sense strand
ccggagcugcuuccaauuu

SEQ ID NO: 206252 - RNA, 19 nt, Homo sapiens
  misc_RNA (1)...(19): siRNA sense strand
ccaaauuccaagacaguug

SEQ ID NO: 206253 - RNA, 19 nt, Homo sapiens
  misc_RNA (1)...(19): siRNA sense strand
cagaaacugccaagcauca

SEQ ID NO: 206254 - RNA, 19 nt, Homo sapiens
  misc_RNA (1)...(19): siRNA sense strand
uaugacaucugccaaagcu

SEQ ID NO: 206255 - RNA, 19 nt, Homo sapiens
  misc_RNA (1)...(19): siRNA sense strand
aaugucagauucucagcuu

SEQ ID NO: 206256 - RNA, 19 nt, Homo sapiens
  misc_RNA (1)...(19): siRNA sense strand
ucgagacuuugccaaggua

SEQ ID NO: 206257 - RNA, 19 nt, Homo sapiens
  misc_RNA (1)...(19): siRNA sense strand
gcaaaaggccauaaaaugc

SEQ ID NO: 206258 - RNA, 19 nt, Homo sapiens
  misc_RNA (1)...(19): siRNA sense strand
cugcaugauucuauccaaa

SEQ ID NO: 206259 - RNA, 19 nt, Homo sapiens
  misc_RNA (1)...(19): siRNA sense strand
uaaagcacauuuggaagac

SEQ ID NO: 206260 - RNA, 19 nt, Homo sapiens
  misc_RNA (1)...(19): siRNA sense strand
acaggagucuaaagcacuu

SEQ ID NO: 206261 - RNA, 19 nt, Homo sapiens
  misc_RNA (1)...(19): siRNA sense strand
acagauaccuuuucaagca

SEQ ID NO: 206262 - RNA, 19 nt, Homo sapiens
  misc_RNA (1)...(19): siRNA sense strand
aagcacauuuggaagacaa

SEQ ID NO: 206263 - RNA, 19 nt, Homo sapiens
  misc_RNA (1)...(19): siRNA sense strand
gcuaauaauaagccagaga

SEQ ID NO: 206264 - RNA, 19 nt, Homo sapiens
  misc_RNA (1)...(19): siRNA sense strand
caagagcacaacaauuugg

SEQ ID NO: 206265 - RNA, 19 nt, Homo sapiens
  misc_RNA (1)...(19): siRNA sense strand
ccugucagcugcaugugau

SEQ ID NO: 206266 - RNA, 19 nt, Homo sapiens
  misc_RNA (1)...(19): siRNA sense strand
gcugcugaauguuuaugau

SEQ ID NO: 206267 - RNA, 19 nt, Homo sapiens
  misc_RNA (1)...(19): siRNA sense strand
acagagcucuaccagucuu

SEQ ID NO: 206268 - RNA, 19 nt, Homo sapiens
  misc_RNA (1)...(19): siRNA sense strand
acaguugggugaaguugca

SEQ ID NO: 206269 - RNA, 19 nt, Homo sapiens
  misc_RNA (1)...(19): siRNA sense strand
guuugaccacuauuuauga

SEQ ID NO: 206270 - RNA, 19 nt, Homo sapiens
  misc_RNA (1)...(19): siRNA sense strand
gcuuauaggacugccauga

SEQ ID NO: 206271 - RNA, 19 nt, Homo sapiens
  misc_RNA (1)...(19): siRNA sense strand
caucaggccaaauguaaca

SEQ ID NO: 206272 - RNA, 19 nt, Homo sapiens
  misc_RNA (1)...(19): siRNA sense strand
gauucuauccaaauuccaa

SEQ ID NO: 206273 - RNA, 19 nt, Homo sapiens
  misc_RNA (1)...(19): siRNA sense strand
ggcaaguucaacaggauuu

SEQ ID NO: 206274 - RNA, 19 nt, Homo sapiens
  misc_RNA (1)...(19): siRNA sense strand
gaacuggcugcugaauguu

SEQ ID NO: 206275 - RNA, 19 nt, Homo sapiens
  misc_RNA (1)...(19): siRNA sense strand
cugcugaauguuuaugaua

SEQ ID NO: 206276 - RNA, 19 nt, Homo sapiens
  misc_RNA (1)...(19): siRNA sense strand
aagcaucaggccaaaugua

SEQ ID NO: 206277 - RNA, 19 nt, Homo sapiens
  misc_RNA (1)...(19): siRNA sense strand
uggcaucauuucccugugu

SEQ ID NO: 206278 - RNA, 19 nt, Homo sapiens
  misc_RNA (1)...(19): siRNA sense strand
ccaugaaacuccgaagacu

SEQ ID NO: 206279 - RNA, 19 nt, Homo sapiens
  misc_RNA (1)...(19): siRNA sense strand
auaauaagccagagaucga

SEQ ID NO: 206280 - RNA, 19 nt, Homo sapiens
  misc_RNA (1)...(19): siRNA sense strand
cuaauaauaagccagagau

SEQ ID NO: 206281 - RNA, 19 nt, Homo sapiens
  misc_RNA (1)...(19): siRNA sense strand
ugggugaaguugcauccuu

SEQ ID NO: 206282 - RNA, 19 nt, Homo sapiens
  misc_RNA (1)...(19): siRNA sense strand
caucauuucccuguguaaa

SEQ ID NO: 206283 - RNA, 19 nt, Homo sapiens
  misc_RNA (1)...(19): siRNA sense strand
gcguggauaugugucugaa

SEQ ID NO: 206284 - RNA, 19 nt, Homo sapiens
  misc_RNA (1)...(19): siRNA sense strand
gcacuaucccaugguggaa

SEQ ID NO: 206285 - RNA, 19 nt, Homo sapiens
  misc_RNA (1)...(19): siRNA sense strand
gagccugucagcugcaugu

SEQ ID NO: 206286 - RNA, 19 nt, Homo sapiens
  misc_RNA (1)...(19): siRNA sense strand
guacagauaccuuuucaag

SEQ ID NO: 206287 - RNA, 19 nt, Homo sapiens
  misc_RNA (1)...(19): siRNA sense strand
gucccucucugcguggaua

SEQ ID NO: 206288 - RNA, 19 nt, Homo sapiens
  misc_RNA (1)...(19): siRNA sense strand
ggagcugcuuccaauuugc

SEQ ID NO: 206289 - RNA, 19 nt, Homo sapiens
  misc_RNA (1)...(19): siRNA sense strand
uuagcugaccugaauaaug

SEQ ID NO: 206290 - RNA, 19 nt, Homo sapiens
  misc_RNA (1)...(19): siRNA sense strand
guggcaaguucaacaggau

SEQ ID NO: 206291 - RNA, 19 nt, Homo sapiens
  misc_RNA (1)...(19): siRNA sense strand
acaacaauuuggucaacgu

SEQ ID NO: 206292 - RNA, 19 nt, Homo sapiens
  misc_RNA (1)...(19): siRNA sense strand
gacuacaucaggagaagau

SEQ ID NO: 206293 - RNA, 19 nt, Homo sapiens
  misc_RNA (1)...(19): siRNA sense strand
uaauaagccagagaucgaa

SEQ ID NO: 206294 - RNA, 19 nt, Homo sapiens
  misc_RNA (1)...(19): siRNA sense strand
ugucagauucucagcuuau

SEQ ID NO: 206295 - RNA, 19 nt, Homo sapiens
  misc_RNA (1)...(19): siRNA sense strand
ggauauccugcagauuauu

SEQ ID NO: 206296 - RNA, 19 nt, Homo sapiens
  misc_RNA (1)...(19): siRNA sense strand
agcaucaggccaaauguaa

SEQ ID NO: 206297 - RNA, 19 nt, Homo sapiens
  misc_RNA (1)...(19): siRNA sense strand
gcccuuugcuuggaucucu

SEQ ID NO: 206298 - RNA, 19 nt, Homo sapiens
  misc_RNA (1)...(19): siRNA sense strand
gcugaauguuuaugauacg

SEQ ID NO: 206299 - RNA, 19 nt, Homo sapiens
  misc_RNA (1)...(19): siRNA sense strand
agacuuugccaagguacua

SEQ ID NO: 206300 - RNA, 19 nt, Homo sapiens
  misc_RNA (1)...(19): siRNA sense strand
caagcaaguggcaaguuca

SEQ ID NO: 206301 - RNA, 19 nt, Homo sapiens
  misc_RNA (1)...(19): siRNA sense strand
agacaaguacagauaccuu

SEQ ID NO: 206302 - RNA, 19 nt, Homo sapiens
  misc_RNA (1)...(19): siRNA sense strand
gcaucauuucccuguguaa

SEQ ID NO: 206303 - RNA, 19 nt, Homo sapiens
  misc_RNA (1)...(19): siRNA sense strand
cugcaaagaguguccaauc

SEQ ID NO: 206304 - RNA, 19 nt, Homo sapiens
  misc_RNA (1)...(19): siRNA sense strand
cuuauaggacugccaugaa

SEQ ID NO: 206305 - RNA, 19 nt, Homo sapiens
  misc_RNA (1)...(19): siRNA sense strand
caaagaguguccaaucauu

SEQ ID NO: 206306 - RNA, 19 nt, Homo sapiens
  misc_RNA (1)...(19): siRNA sense strand
uagcugaccugaauaaugu

SEQ ID NO: 206307 - RNA, 19 nt, Homo sapiens
  misc_RNA (1)...(19): siRNA sense strand
gcaugauucuauccaaauu

SEQ ID NO: 206308 - RNA, 19 nt, Homo sapiens
  misc_RNA (1)...(19): siRNA sense strand
ugaacuggcugcugaaugu

SEQ ID NO: 206309 - RNA, 19 nt, Homo sapiens
  misc_RNA (1)...(19): siRNA sense strand
gauauccugcagauuauua

SEQ ID NO: 206310 - RNA, 19 nt, Homo sapiens
  misc_RNA (1)...(19): siRNA sense strand
gagaagauguucgagacuu

SEQ ID NO: 206311 - RNA, 19 nt, Homo sapiens
  misc_RNA (1)...(19): siRNA sense strand
gcacuuuaauuaugacauc

SEQ ID NO: 206312 - RNA, 19 nt, Homo sapiens
  misc_RNA (1)...(19): siRNA sense strand
guaaagcacauuuggaaga

SEQ ID NO: 206313 - RNA, 19 nt, Homo sapiens
  misc_RNA (1)...(19): siRNA sense strand
gaauauugcacuccgacua

SEQ ID NO: 206314 - RNA, 19 nt, Homo sapiens
  misc_RNA (1)...(19): siRNA sense strand
uuauaggacugccaugaaa

SEQ ID NO: 206315 - RNA, 19 nt, Homo sapiens
  misc_RNA (1)...(19): siRNA sense strand
gggugaaguugcauccuuu

SEQ ID NO: 206316 - RNA, 19 nt, Homo sapiens
  misc_RNA (1)...(19): siRNA sense strand
gcaagagcacaacaauuug

SEQ ID NO: 206317 - RNA, 19 nt, Homo sapiens
  misc_RNA (1)...(19): siRNA sense strand
gcacaacaauuuggucaac

SEQ ID NO: 206318 - RNA, 19 nt, Homo sapiens
  misc_RNA (1)...(19): siRNA sense strand
agcaagagcacaacaauuu

SEQ ID NO: 206319 - RNA, 19 nt, Homo sapiens
  misc_RNA (1)...(19): siRNA sense strand
agaagauguucgagacuuu

SEQ ID NO: 206320 - RNA, 19 nt, Homo sapiens
  misc_RNA (1)...(19): siRNA sense strand
gagcaagagcacaacaauu

SEQ ID NO: 206321 - RNA, 19 nt, Homo sapiens
  misc_RNA (1)...(19): siRNA sense strand
ucaagcaaguggcaaguuc

SEQ ID NO: 206322 - RNA, 19 nt, Homo sapiens
  misc_RNA (1)...(19): siRNA sense strand
ccacgagacucaaacaacu

SEQ ID NO: 206323 - RNA, 19 nt, Homo sapiens
  misc_RNA (1)...(19): siRNA sense strand
cagcacaaccucaagcaaa

SEQ ID NO: 206324 - RNA, 19 nt, Homo sapiens
  misc_RNA (1)...(19): siRNA sense strand
gcaaagaguguccaaucau

SEQ ID NO: 206325 - RNA, 19 nt, Homo sapiens
  misc_RNA (1)...(19): siRNA sense strand
auggauauccugcagauua

SEQ ID NO: 206326 - RNA, 19 nt, Homo sapiens
  misc_RNA (1)...(19): siRNA sense strand
uguaacaucugcaaagagu

SEQ ID NO: 206327 - RNA, 19 nt, Homo sapiens
  misc_RNA (1)...(19): siRNA sense strand
guccggagcugcuuccaau

SEQ ID NO: 206328 - RNA, 19 nt, Homo sapiens
  misc_RNA (1)...(19): siRNA sense strand
gcaaguggcaaguucaaca

SEQ ID NO: 206329 - RNA, 19 nt, Homo sapiens
  misc_RNA (1)...(19): siRNA sense strand
gcuuccaauuugcuaauaa

SEQ ID NO: 206330 - RNA, 19 nt, Homo sapiens
  misc_RNA (1)...(19): siRNA sense strand
uggaagacaaguacagaua

SEQ ID NO: 206331 - RNA, 19 nt, Homo sapiens
  misc_RNA (1)...(19): siRNA sense strand
ggauccguguccugucuuu

SEQ ID NO: 206332 - RNA, 19 nt, Homo sapiens
  misc_RNA (1)...(19): siRNA sense strand
gucuuuagcugaccugaau

SEQ ID NO: 206333 - RNA, 19 nt, Homo sapiens
  misc_RNA (1)...(19): siRNA sense strand
gacaaguacagauaccuuu

SEQ ID NO: 206334 - RNA, 19 nt, Homo sapiens
  misc_RNA (1)...(19): siRNA sense strand
ccaagcaucaggccaaaug

SEQ ID NO: 206335 - RNA, 19 nt, Homo sapiens
  misc_RNA (1)...(19): siRNA sense strand
ggagcaagagcacaacaau

SEQ ID NO: 206336 - RNA, 19 nt, Homo sapiens
  misc_RNA (1)...(19): siRNA sense strand
guguaaagcacauuuggaa

SEQ ID NO: 206337 - RNA, 19 nt, Homo sapiens
  misc_RNA (1)...(19): siRNA sense strand
caagacaguugggugaagu

SEQ ID NO: 206338 - RNA, 19 nt, Homo sapiens
  misc_RNA (1)...(19): siRNA sense strand
gaagauguucgagacuuug

SEQ ID NO: 206339 - RNA, 19 nt, Homo sapiens
  misc_RNA (1)...(19): siRNA sense strand
gucagauucucagcuuaua

SEQ ID NO: 206340 - RNA, 19 nt, Homo sapiens
  misc_RNA (1)...(19): siRNA sense strand
uaacaucugcaaagagugu

SEQ ID NO: 206341 - RNA, 19 nt, Homo sapiens
  misc_RNA (1)...(19): siRNA sense strand
cggagcugcuuccaauuug

SEQ ID NO: 206342 - RNA, 19 nt, Homo sapiens
  misc_RNA (1)...(19): siRNA sense strand
gaagacaaguacagauacc

SEQ ID NO: 206343 - RNA, 19 nt, Homo sapiens
  misc_RNA (1)...(19): siRNA sense strand
ccauggauauccugcagau

SEQ ID NO: 206344 - RNA, 19 nt, Homo sapiens
  misc_RNA (1)...(19): siRNA sense strand
ggcaucauuucccugugua

SEQ ID NO: 206345 - RNA, 19 nt, Homo sapiens
  misc_RNA (1)...(19): siRNA sense strand
uggauauccugcagauuau

SEQ ID NO: 206346 - RNA, 19 nt, Homo sapiens
  misc_RNA (1)...(19): siRNA sense strand
ggaagacaaguacagauac

SEQ ID NO: 206347 - RNA, 19 nt, Homo sapiens
  misc_RNA (1)...(19): siRNA sense strand
ugcaaagaguguccaauca

SEQ ID NO: 206348 - RNA, 19 nt, Homo sapiens
  misc_RNA (1)...(19): siRNA sense strand
guggauaugugucugaacu

SEQ ID NO: 206349 - RNA, 19 nt, Homo sapiens
  misc_RNA (1)...(19): siRNA sense strand
acuggcugcugaauguuua

SEQ ID NO: 206350 - RNA, 19 nt, Homo sapiens
  misc_RNA (1)...(19): siRNA sense strand
acuaucccaugguggaaua

SEQ ID NO: 206351 - RNA, 19 nt, Homo sapiens
  misc_RNA (1)...(19): siRNA sense strand
ccggagcugcuuccaauuu

SEQ ID NO: 206352 - RNA, 19 nt, Homo sapiens
  misc_RNA (1)...(19): siRNA sense strand
ccaaauuccaagacaguug

SEQ ID NO: 206353 - RNA, 19 nt, Homo sapiens
  misc_RNA (1)...(19): siRNA sense strand
cagaaacugccaagcauca

SEQ ID NO: 206354 - RNA, 19 nt, Homo sapiens
  misc_RNA (1)...(19): siRNA sense strand
uaugacaucugccaaagcu

SEQ ID NO: 206355 - RNA, 19 nt, Homo sapiens
  misc_RNA (1)...(19): siRNA sense strand
aaugucagauucucagcuu

SEQ ID NO: 206356 - RNA, 19 nt, Homo sapiens
  misc_RNA (1)...(19): siRNA sense strand
ucgagacuuugccaaggua

SEQ ID NO: 206357 - RNA, 19 nt, Homo sapiens
  misc_RNA (1)...(19): siRNA sense strand
gcaaaaggccauaaaaugc

SEQ ID NO: 206358 - RNA, 19 nt, Homo sapiens
  misc_RNA (1)...(19): siRNA sense strand
cugcaugauucuauccaaa

SEQ ID NO: 206359 - RNA, 19 nt, Homo sapiens
  misc_RNA (1)...(19): siRNA sense strand
uaaagcacauuuggaagac

SEQ ID NO: 206360 - RNA, 19 nt, Homo sapiens
  misc_RNA (1)...(19): siRNA sense strand
acaggagucuaaagcacuu

SEQ ID NO: 206361 - RNA, 19 nt, Homo sapiens
  misc_RNA (1)...(19): siRNA sense strand
acagauaccuuuucaagca

SEQ ID NO: 206362 - RNA, 19 nt, Homo sapiens
  misc_RNA (1)...(19): siRNA sense strand
aagcacauuuggaagacaa

SEQ ID NO: 206363 - RNA, 19 nt, Homo sapiens
  misc_RNA (1)...(19): siRNA sense strand
gcuaauaauaagccagaga

SEQ ID NO: 206364 - RNA, 19 nt, Homo sapiens
  misc_RNA (1)...(19): siRNA sense strand
caagagcacaacaauuugg

SEQ ID NO: 206365 - RNA, 19 nt, Homo sapiens
  misc_RNA (1)...(19): siRNA sense strand
ccugucagcugcaugugau

SEQ ID NO: 206366 - RNA, 19 nt, Homo sapiens
  misc_RNA (1)...(19): siRNA sense strand
gcugcugaauguuuaugau

SEQ ID NO: 206367 - RNA, 19 nt, Homo sapiens
  misc_RNA (1)...(19): siRNA sense strand
acagagcucuaccagucuu

SEQ ID NO: 206368 - RNA, 19 nt, Homo sapiens
  misc_RNA (1)...(19): siRNA sense strand
acaguugggugaaguugca

SEQ ID NO: 206369 - RNA, 19 nt, Homo sapiens
  misc_RNA (1)...(19): siRNA sense strand
guuugaccacuauuuauga

SEQ ID NO: 206370 - RNA, 19 nt, Homo sapiens
  misc_RNA (1)...(19): siRNA sense strand
gcuuauaggacugccauga

SEQ ID NO: 206371 - RNA, 19 nt, Homo sapiens
  misc_RNA (1)...(19): siRNA sense strand
caucaggccaaauguaaca

SEQ ID NO: 206372 - RNA, 19 nt, Homo sapiens
  misc_RNA (1)...(19): siRNA sense strand
gauucuauccaaauuccaa

SEQ ID NO: 206373 - RNA, 19 nt, Homo sapiens
  misc_RNA (1)...(19): siRNA sense strand
ggcaaguucaacaggauuu

SEQ ID NO: 206374 - RNA, 19 nt, Homo sapiens
  misc_RNA (1)...(19): siRNA sense strand
gaacuggcugcugaauguu

SEQ ID NO: 206375 - RNA, 19 nt, Homo sapiens
  misc_RNA (1)...(19): siRNA sense strand
cugcugaauguuuaugaua

SEQ ID NO: 206376 - RNA, 19 nt, Homo sapiens
  misc_RNA (1)...(19): siRNA sense strand
aagcaucaggccaaaugua

SEQ ID NO: 206377 - RNA, 19 nt, Homo sapiens
  misc_RNA (1)...(19): siRNA sense strand
uggcaucauuucccugugu

SEQ ID NO: 206378 - RNA, 19 nt, Homo sapiens
  misc_RNA (1)...(19): siRNA sense strand
ccaugaaacuccgaagacu

SEQ ID NO: 206379 - RNA, 19 nt, Homo sapiens
  misc_RNA (1)...(19): siRNA sense strand
auaauaagccagagaucga

SEQ ID NO: 206380 - RNA, 19 nt, Homo sapiens
  misc_RNA (1)...(19): siRNA sense strand
cuaauaauaagccagagau

SEQ ID NO: 206381 - RNA, 19 nt, Homo sapiens
  misc_RNA (1)...(19): siRNA sense strand
ugggugaaguugcauccuu

SEQ ID NO: 206382 - RNA, 19 nt, Homo sapiens
  misc_RNA (1)...(19): siRNA sense strand
caucauuucccuguguaaa

SEQ ID NO: 206383 - RNA, 19 nt, Homo sapiens
  misc_RNA (1)...(19): siRNA sense strand
gcguggauaugugucugaa

SEQ ID NO: 206384 - RNA, 19 nt, Homo sapiens
  misc_RNA (1)...(19): siRNA sense strand
gcacuaucccaugguggaa

SEQ ID NO: 206385 - RNA, 19 nt, Homo sapiens
  misc_RNA (1)...(19): siRNA sense strand
gagccugucagcugcaugu

SEQ ID NO: 206386 - RNA, 19 nt, Homo sapiens
  misc_RNA (1)...(19): siRNA sense strand
guacagauaccuuuucaag

SEQ ID NO: 206387 - RNA, 19 nt, Homo sapiens
  misc_RNA (1)...(19): siRNA sense strand
gucccucucugcguggaua

SEQ ID NO: 206388 - RNA, 19 nt, Homo sapiens
  misc_RNA (1)...(19): siRNA sense strand
ggagcugcuuccaauuugc

SEQ ID NO: 206389 - RNA, 19 nt, Homo sapiens
  misc_RNA (1)...(19): siRNA sense strand
uuagcugaccugaauaaug

SEQ ID NO: 206390 - RNA, 19 nt, Homo sapiens
  misc_RNA (1)...(19): siRNA sense strand
guggcaaguucaacaggau

SEQ ID NO: 206391 - RNA, 19 nt, Homo sapiens
  misc_RNA (1)...(19): siRNA sense strand
acaacaauuuggucaacgu

SEQ ID NO: 206392 - RNA, 19 nt, Homo sapiens
  misc_RNA (1)...(19): siRNA sense strand
gacuacaucaggagaagau

SEQ ID NO: 206393 - RNA, 19 nt, Homo sapiens
  misc_RNA (1)...(19): siRNA sense strand
uaauaagccagagaucgaa

SEQ ID NO: 206394 - RNA, 19 nt, Homo sapiens
  misc_RNA (1)...(19): siRNA sense strand
ugucagauucucagcuuau

SEQ ID NO: 206395 - RNA, 19 nt, Homo sapiens
  misc_RNA (1)...(19): siRNA sense strand
ggauauccugcagauuauu

SEQ ID NO: 206396 - RNA, 19 nt, Homo sapiens
  misc_RNA (1)...(19): siRNA sense strand
agcaucaggccaaauguaa

SEQ ID NO: 206397 - RNA, 19 nt, Homo sapiens
  misc_RNA (1)...(19): siRNA sense strand
gcccuuugcuuggaucucu

SEQ ID NO: 206398 - RNA, 19 nt, Homo sapiens
  misc_RNA (1)...(19): siRNA sense strand
gcugaauguuuaugauacg

SEQ ID NO: 206399 - RNA, 19 nt, Homo sapiens
  misc_RNA (1)...(19): siRNA sense strand
agacuuugccaagguacua

SEQ ID NO: 206400 - RNA, 19 nt, Homo sapiens
  misc_RNA (1)...(19): siRNA sense strand
caagcaaguggcaaguuca

SEQ ID NO: 206401 - RNA, 19 nt, Homo sapiens
  misc_RNA (1)...(19): siRNA sense strand
agacaaguacagauaccuu

SEQ ID NO: 206402 - RNA, 19 nt, Homo sapiens
  misc_RNA (1)...(19): siRNA sense strand
gcaucauuucccuguguaa

SEQ ID NO: 206403 - RNA, 19 nt, Homo sapiens
  misc_RNA (1)...(19): siRNA sense strand
cugcaaagaguguccaauc

SEQ ID NO: 206404 - RNA, 19 nt, Homo sapiens
  misc_RNA (1)...(19): siRNA sense strand
cuuauaggacugccaugaa

SEQ ID NO: 206405 - RNA, 19 nt, Homo sapiens
  misc_RNA (1)...(19): siRNA sense strand
caaagaguguccaaucauu

SEQ ID NO: 206406 - RNA, 19 nt, Homo sapiens
  misc_RNA (1)...(19): siRNA sense strand
uagcugaccugaauaaugu

SEQ ID NO: 206407 - RNA, 19 nt, Homo sapiens
  misc_RNA (1)...(19): siRNA sense strand
gcaugauucuauccaaauu

SEQ ID NO: 206408 - RNA, 19 nt, Homo sapiens
  misc_RNA (1)...(19): siRNA sense strand
ugaacuggcugcugaaugu

SEQ ID NO: 206409 - RNA, 19 nt, Homo sapiens
  misc_RNA (1)...(19): siRNA sense strand
gauauccugcagauuauua

SEQ ID NO: 206410 - RNA, 19 nt, Homo sapiens
  misc_RNA (1)...(19): siRNA sense strand
gagaagauguucgagacuu

SEQ ID NO: 206411 - RNA, 19 nt, Homo sapiens
  misc_RNA (1)...(19): siRNA sense strand
gcacuuuaauuaugacauc

SEQ ID NO: 206412 - RNA, 19 nt, Homo sapiens
  misc_RNA (1)...(19): siRNA sense strand
guaaagcacauuuggaaga

SEQ ID NO: 206413 - RNA, 19 nt, Homo sapiens
  misc_RNA (1)...(19): siRNA sense strand
gaauauugcacuccgacua

SEQ ID NO: 206414 - RNA, 19 nt, Homo sapiens
  misc_RNA (1)...(19): siRNA sense strand
uuauaggacugccaugaaa

SEQ ID NO: 206415 - RNA, 19 nt, Homo sapiens
  misc_RNA (1)...(19): siRNA sense strand
gggugaaguugcauccuuu

SEQ ID NO: 206416 - RNA, 19 nt, Homo sapiens
  misc_RNA (1)...(19): siRNA sense strand
gcaagagcacaacaauuug

SEQ ID NO: 206417 - RNA, 19 nt, Homo sapiens
  misc_RNA (1)...(19): siRNA sense strand
gcacaacaauuuggucaac

SEQ ID NO: 206418 - RNA, 19 nt, Homo sapiens
  misc_RNA (1)...(19): siRNA sense strand
agcaagagcacaacaauuu

SEQ ID NO: 206419 - RNA, 19 nt, Homo sapiens
  misc_RNA (1)...(19): siRNA sense strand
agaagauguucgagacuuu

SEQ ID NO: 206420 - RNA, 19 nt, Homo sapiens
  misc_RNA (1)...(19): siRNA sense strand
gagcaagagcacaacaauu

SEQ ID NO: 206421 - RNA, 19 nt, Homo sapiens
  misc_RNA (1)...(19): siRNA sense strand
ucaagcaaguggcaaguuc

SEQ ID NO: 206422 - RNA, 19 nt, Homo sapiens
  misc_RNA (1)...(19): siRNA sense strand
ccacgagacucaaacaacu

SEQ ID NO: 206423 - RNA, 19 nt, Homo sapiens
  misc_RNA (1)...(19): siRNA sense strand
cagcacaaccucaagcaaa

SEQ ID NO: 206424 - RNA, 19 nt, Homo sapiens
  misc_RNA (1)...(19): siRNA sense strand
gcaaagaguguccaaucau

SEQ ID NO: 206425 - RNA, 19 nt, Homo sapiens
  misc_RNA (1)...(19): siRNA sense strand
auggauauccugcagauua

SEQ ID NO: 206426 - RNA, 19 nt, Homo sapiens
  misc_RNA (1)...(19): siRNA sense strand
uguaacaucugcaaagagu

SEQ ID NO: 206427 - RNA, 19 nt, Homo sapiens
  misc_RNA (1)...(19): siRNA sense strand
guccggagcugcuuccaau

SEQ ID NO: 206428 - RNA, 19 nt, Homo sapiens
  misc_RNA (1)...(19): siRNA sense strand
gcaaguggcaaguucaaca

SEQ ID NO: 206429 - RNA, 19 nt, Homo sapiens
  misc_RNA (1)...(19): siRNA sense strand
gcuuccaauuugcuaauaa

SEQ ID NO: 206430 - RNA, 19 nt, Homo sapiens
  misc_RNA (1)...(19): siRNA sense strand
uggaagacaaguacagaua

SEQ ID NO: 206431 - RNA, 19 nt, Homo sapiens
  misc_RNA (1)...(19): siRNA sense strand
ggauccguguccugucuuu

SEQ ID NO: 206432 - RNA, 19 nt, Homo sapiens
  misc_RNA (1)...(19): siRNA sense strand
gucuuuagcugaccugaau

SEQ ID NO: 206433 - RNA, 19 nt, Homo sapiens
  misc_RNA (1)...(19): siRNA sense strand
gacaaguacagauaccuuu

SEQ ID NO: 206434 - RNA, 19 nt, Homo sapiens
  misc_RNA (1)...(19): siRNA sense strand
ccaagcaucaggccaaaug

SEQ ID NO: 206435 - RNA, 19 nt, Homo sapiens
  misc_RNA (1)...(19): siRNA sense strand
ggagcaagagcacaacaau

SEQ ID NO: 206436 - RNA, 19 nt, Homo sapiens
  misc_RNA (1)...(19): siRNA sense strand
guguaaagcacauuuggaa

SEQ ID NO: 206437 - RNA, 19 nt, Homo sapiens
  misc_RNA (1)...(19): siRNA sense strand
caagacaguugggugaagu

SEQ ID NO: 206438 - RNA, 19 nt, Homo sapiens
  misc_RNA (1)...(19): siRNA sense strand
gaagauguucgagacuuug

SEQ ID NO: 206439 - RNA, 19 nt, Homo sapiens
  misc_RNA (1)...(19): siRNA sense strand
gucagauucucagcuuaua

SEQ ID NO: 206440 - RNA, 19 nt, Homo sapiens
  misc_RNA (1)...(19): siRNA sense strand
uaacaucugcaaagagugu

SEQ ID NO: 206441 - RNA, 19 nt, Homo sapiens
  misc_RNA (1)...(19): siRNA sense strand
cggagcugcuuccaauuug

SEQ ID NO: 206442 - RNA, 19 nt, Homo sapiens
  misc_RNA (1)...(19): siRNA sense strand
gaagacaaguacagauacc

SEQ ID NO: 206443 - RNA, 19 nt, Homo sapiens
  misc_RNA (1)...(19): siRNA sense strand
ccauggauauccugcagau

SEQ ID NO: 206444 - RNA, 19 nt, Homo sapiens
  misc_RNA (1)...(19): siRNA sense strand
ggcaucauuucccugugua

SEQ ID NO: 206445 - RNA, 19 nt, Homo sapiens
  misc_RNA (1)...(19): siRNA sense strand
uggauauccugcagauuau

SEQ ID NO: 206446 - RNA, 19 nt, Homo sapiens
  misc_RNA (1)...(19): siRNA sense strand
ggaagacaaguacagauac

SEQ ID NO: 206447 - RNA, 19 nt, Homo sapiens
  misc_RNA (1)...(19): siRNA sense strand
ugcaaagaguguccaauca

SEQ ID NO: 206448 - RNA, 19 nt, Homo sapiens
  misc_RNA (1)...(19): siRNA sense strand
guggauaugugucugaacu

SEQ ID NO: 206449 - RNA, 19 nt, Homo sapiens
  misc_RNA (1)...(19): siRNA sense strand
acuggcugcugaauguuua

SEQ ID NO: 206450 - RNA, 19 nt, Homo sapiens
  misc_RNA (1)...(19): siRNA sense strand
acuaucccaugguggaaua

SEQ ID NO: 206451 - RNA, 19 nt, Homo sapiens
  misc_RNA (1)...(19): siRNA sense strand
ccggagcugcuuccaauuu

SEQ ID NO: 206452 - RNA, 19 nt, Homo sapiens
  misc_RNA (1)...(19): siRNA sense strand
ccaaauuccaagacaguug

SEQ ID NO: 206453 - RNA, 19 nt, Homo sapiens
  misc_RNA (1)...(19): siRNA sense strand
cagaaacugccaagcauca

SEQ ID NO: 206454 - RNA, 19 nt, Homo sapiens
  misc_RNA (1)...(19): siRNA sense strand
uaugacaucugccaaagcu

SEQ ID NO: 206455 - RNA, 19 nt, Homo sapiens
  misc_RNA (1)...(19): siRNA sense strand
aaugucagauucucagcuu

SEQ ID NO: 206456 - RNA, 19 nt, Homo sapiens
  misc_RNA (1)...(19): siRNA sense strand
ucgagacuuugccaaggua

SEQ ID NO: 206457 - RNA, 19 nt, Homo sapiens
  misc_RNA (1)...(19): siRNA sense strand
gcaaaaggccauaaaaugc

SEQ ID NO: 206458 - RNA, 19 nt, Homo sapiens
  misc_RNA (1)...(19): siRNA sense strand
cugcaugauucuauccaaa

SEQ ID NO: 206459 - RNA, 19 nt, Homo sapiens
  misc_RNA (1)...(19): siRNA sense strand
uaaagcacauuuggaagac

SEQ ID NO: 206460 - RNA, 19 nt, Homo sapiens
  misc_RNA (1)...(19): siRNA sense strand
acaggagucuaaagcacuu

SEQ ID NO: 206461 - RNA, 19 nt, Homo sapiens
  misc_RNA (1)...(19): siRNA sense strand
acagauaccuuuucaagca

SEQ ID NO: 206462 - RNA, 19 nt, Homo sapiens
  misc_RNA (1)...(19): siRNA sense strand
aagcacauuuggaagacaa

SEQ ID NO: 206463 - RNA, 19 nt, Homo sapiens
  misc_RNA (1)...(19): siRNA sense strand
gcuaauaauaagccagaga

SEQ ID NO: 206464 - RNA, 19 nt, Homo sapiens
  misc_RNA (1)...(19): siRNA sense strand
caagagcacaacaauuugg

SEQ ID NO: 206465 - RNA, 19 nt, Homo sapiens
  misc_RNA (1)...(19): siRNA sense strand
ccugucagcugcaugugau

SEQ ID NO: 206466 - RNA, 19 nt, Homo sapiens
  misc_RNA (1)...(19): siRNA sense strand
gcugcugaauguuuaugau

SEQ ID NO: 206467 - RNA, 19 nt, Homo sapiens
  misc_RNA (1)...(19): siRNA sense strand
acagagcucuaccagucuu

SEQ ID NO: 206468 - RNA, 19 nt, Homo sapiens
  misc_RNA (1)...(19): siRNA sense strand
acaguugggugaaguugca

SEQ ID NO: 206469 - RNA, 19 nt, Homo sapiens
  misc_RNA (1)...(19): siRNA sense strand
guuugaccacuauuuauga

SEQ ID NO: 206470 - RNA, 19 nt, Homo sapiens
  misc_RNA (1)...(19): siRNA sense strand
gcuuauaggacugccauga

SEQ ID NO: 206471 - RNA, 19 nt, Homo sapiens
  misc_RNA (1)...(19): siRNA sense strand
caucaggccaaauguaaca

SEQ ID NO: 206472 - RNA, 19 nt, Homo sapiens
  misc_RNA (1)...(19): siRNA sense strand
gauucuauccaaauuccaa

SEQ ID NO: 206473 - RNA, 19 nt, Homo sapiens
  misc_RNA (1)...(19): siRNA sense strand
ggcaaguucaacaggauuu

SEQ ID NO: 206474 - RNA, 19 nt, Homo sapiens
  misc_RNA (1)...(19): siRNA sense strand
gaacuggcugcugaauguu

SEQ ID NO: 206475 - RNA, 19 nt, Homo sapiens
  misc_RNA (1)...(19): siRNA sense strand
cugcugaauguuuaugaua

SEQ ID NO: 206476 - RNA, 19 nt, Homo sapiens
  misc_RNA (1)...(19): siRNA sense strand
aagcaucaggccaaaugua

SEQ ID NO: 206477 - RNA, 19 nt, Homo sapiens
  misc_RNA (1)...(19): siRNA sense strand
uggcaucauuucccugugu

SEQ ID NO: 206478 - RNA, 19 nt, Homo sapiens
  misc_RNA (1)...(19): siRNA sense strand
ccaugaaacuccgaagacu

SEQ ID NO: 206479 - RNA, 19 nt, Homo sapiens
  misc_RNA (1)...(19): siRNA sense strand
auaauaagccagagaucga

SEQ ID NO: 206480 - RNA, 19 nt, Homo sapiens
  misc_RNA (1)...(19): siRNA sense strand
cuaauaauaagccagagau

SEQ ID NO: 206481 - RNA, 19 nt, Homo sapiens
  misc_RNA (1)...(19): siRNA sense strand
ugggugaaguugcauccuu

SEQ ID NO: 206482 - RNA, 19 nt, Homo sapiens
  misc_RNA (1)...(19): siRNA sense strand
caucauuucccuguguaaa

SEQ ID NO: 206483 - RNA, 19 nt, Homo sapiens
  misc_RNA (1)...(19): siRNA sense strand
gcguggauaugugucugaa

SEQ ID NO: 206484 - RNA, 19 nt, Homo sapiens
  misc_RNA (1)...(19): siRNA sense strand
gcacuaucccaugguggaa

SEQ ID NO: 206485 - RNA, 19 nt, Homo sapiens
  misc_RNA (1)...(19): siRNA sense strand
gagccugucagcugcaugu

SEQ ID NO: 206486 - RNA, 19 nt, Homo sapiens
  misc_RNA (1)...(19): siRNA sense strand
guacagauaccuuuucaag

SEQ ID NO: 206487 - RNA, 19 nt, Homo sapiens
  misc_RNA (1)...(19): siRNA sense strand
gucccucucugcguggaua

SEQ ID NO: 206488 - RNA, 19 nt, Homo sapiens
  misc_RNA (1)...(19): siRNA sense strand
ggagcugcuuccaauuugc

SEQ ID NO: 206489 - RNA, 19 nt, Homo sapiens
  misc_RNA (1)...(19): siRNA sense strand
uuagcugaccugaauaaug

SEQ ID NO: 206490 - RNA, 19 nt, Homo sapiens
  misc_RNA (1)...(19): siRNA sense strand
guggcaaguucaacaggau

SEQ ID NO: 206491 - RNA, 19 nt, Homo sapiens
  misc_RNA (1)...(19): siRNA sense strand
acaacaauuuggucaacgu

SEQ ID NO: 206492 - RNA, 19 nt, Homo sapiens
  misc_RNA (1)...(19): siRNA sense strand
gacuacaucaggagaagau

SEQ ID NO: 206493 - RNA, 19 nt, Homo sapiens
  misc_RNA (1)...(19): siRNA sense strand
uaauaagccagagaucgaa

SEQ ID NO: 206494 - RNA, 19 nt, Homo sapiens
  misc_RNA (1)...(19): siRNA sense strand
ugucagauucucagcuuau

SEQ ID NO: 206495 - RNA, 19 nt, Homo sapiens
  misc_RNA (1)...(19): siRNA sense strand
ggauauccugcagauuauu

SEQ ID NO: 206496 - RNA, 19 nt, Homo sapiens
  misc_RNA (1)...(19): siRNA sense strand
agcaucaggccaaauguaa

SEQ ID NO: 206497 - RNA, 19 nt, Homo sapiens
  misc_RNA (1)...(19): siRNA sense strand
gcccuuugcuuggaucucu

SEQ ID NO: 206498 - RNA, 19 nt, Homo sapiens
  misc_RNA (1)...(19): siRNA sense strand
gcugaauguuuaugauacg

SEQ ID NO: 206499 - RNA, 19 nt, Homo sapiens
  misc_RNA (1)...(19): siRNA sense strand
agacuuugccaagguacua

SEQ ID NO: 206500 - RNA, 19 nt, Homo sapiens
  misc_RNA (1)...(19): siRNA sense strand
caagcaaguggcaaguuca

SEQ ID NO: 206501 - RNA, 19 nt, Homo sapiens
  misc_RNA (1)...(19): siRNA sense strand
agacaaguacagauaccuu

SEQ ID NO: 206502 - RNA, 19 nt, Homo sapiens
  misc_RNA (1)...(19): siRNA sense strand
gcaucauuucccuguguaa

SEQ ID NO: 206503 - RNA, 19 nt, Homo sapiens
  misc_RNA (1)...(19): siRNA sense strand
cugcaaagaguguccaauc

SEQ ID NO: 206504 - RNA, 19 nt, Homo sapiens
  misc_RNA (1)...(19): siRNA sense strand
cuuauaggacugccaugaa

SEQ ID NO: 206505 - RNA, 19 nt, Homo sapiens
  misc_RNA (1)...(19): siRNA sense strand
caaagaguguccaaucauu

SEQ ID NO: 206506 - RNA, 19 nt, Homo sapiens
  misc_RNA (1)...(19): siRNA sense strand
uagcugaccugaauaaugu

SEQ ID NO: 206507 - RNA, 19 nt, Homo sapiens
  misc_RNA (1)...(19): siRNA sense strand
gcaugauucuauccaaauu

SEQ ID NO: 206508 - RNA, 19 nt, Homo sapiens
  misc_RNA (1)...(19): siRNA sense strand
ugaacuggcugcugaaugu

SEQ ID NO: 206509 - RNA, 19 nt, Homo sapiens
  misc_RNA (1)...(19): siRNA sense strand
gauauccugcagauuauua

SEQ ID NO: 206510 - RNA, 19 nt, Homo sapiens
  misc_RNA (1)...(19): siRNA sense strand
gagaagauguucgagacuu

SEQ ID NO: 206511 - RNA, 19 nt, Homo sapiens
  misc_RNA (1)...(19): siRNA sense strand
gcacuuuaauuaugacauc

SEQ ID NO: 206512 - RNA, 19 nt, Homo sapiens
  misc_RNA (1)...(19): siRNA sense strand
guaaagcacauuuggaaga

SEQ ID NO: 206513 - RNA, 19 nt, Homo sapiens
  misc_RNA (1)...(19): siRNA sense strand
gaauauugcacuccgacua

SEQ ID NO: 206514 - RNA, 19 nt, Homo sapiens
  misc_RNA (1)...(19): siRNA sense strand
uuauaggacugccaugaaa

SEQ ID NO: 206515 - RNA, 19 nt, Homo sapiens
  misc_RNA (1)...(19): siRNA sense strand
gggugaaguugcauccuuu

SEQ ID NO: 206516 - RNA, 19 nt, Homo sapiens
  misc_RNA (1)...(19): siRNA sense strand
gcaagagcacaacaauuug

SEQ ID NO: 206517 - RNA, 19 nt, Homo sapiens
  misc_RNA (1)...(19): siRNA sense strand
gcacaacaauuuggucaac

SEQ ID NO: 206518 - RNA, 19 nt, Homo sapiens
  misc_RNA (1)...(19): siRNA sense strand
agcaagagcacaacaauuu

SEQ ID NO: 206519 - RNA, 19 nt, Homo sapiens
  misc_RNA (1)...(19): siRNA sense strand
agaagauguucgagacuuu

SEQ ID NO: 206520 - RNA, 19 nt, Homo sapiens
  misc_RNA (1)...(19): siRNA sense strand
gagcaagagcacaacaauu

SEQ ID NO: 206521 - RNA, 19 nt, Homo sapiens
  misc_RNA (1)...(19): siRNA sense strand
ucaagcaaguggcaaguuc

SEQ ID NO: 206522 - RNA, 19 nt, Homo sapiens
  misc_RNA (1)...(19): siRNA sense strand
ccacgagacucaaacaacu

SEQ ID NO: 206523 - RNA, 19 nt, Homo sapiens
  misc_RNA (1)...(19): siRNA sense strand
cagcacaaccucaagcaaa

SEQ ID NO: 206524 - RNA, 19 nt, Homo sapiens
  misc_RNA (1)...(19): siRNA sense strand
gcaaagaguguccaaucau

SEQ ID NO: 206525 - RNA, 19 nt, Homo sapiens
  misc_RNA (1)...(19): siRNA sense strand
auggauauccugcagauua

SEQ ID NO: 206526 - RNA, 19 nt, Homo sapiens
  misc_RNA (1)...(19): siRNA sense strand
uguaacaucugcaaagagu

SEQ ID NO: 206527 - RNA, 19 nt, Homo sapiens
  misc_RNA (1)...(19): siRNA sense strand
guccggagcugcuuccaau

SEQ ID NO: 206528 - RNA, 19 nt, Homo sapiens
  misc_RNA (1)...(19): siRNA sense strand
gcaaguggcaaguucaaca

SEQ ID NO: 206529 - RNA, 19 nt, Homo sapiens
  misc_RNA (1)...(19): siRNA sense strand
gcuuccaauuugcuaauaa

SEQ ID NO: 206530 - RNA, 19 nt, Homo sapiens
  misc_RNA (1)...(19): siRNA sense strand
uggaagacaaguacagaua

SEQ ID NO: 206531 - RNA, 19 nt, Homo sapiens
  misc_RNA (1)...(19): siRNA sense strand
ggauccguguccugucuuu

SEQ ID NO: 206532 - RNA, 19 nt, Homo sapiens
  misc_RNA (1)...(19): siRNA sense strand
gucuuuagcugaccugaau

SEQ ID NO: 206533 - RNA, 19 nt, Homo sapiens
  misc_RNA (1)...(19): siRNA sense strand
gacaaguacagauaccuuu

SEQ ID NO: 206534 - RNA, 19 nt, Homo sapiens
  misc_RNA (1)...(19): siRNA sense strand
ccaagcaucaggccaaaug

SEQ ID NO: 206535 - RNA, 19 nt, Homo sapiens
  misc_RNA (1)...(19): siRNA sense strand
ggagcaagagcacaacaau

SEQ ID NO: 206536 - RNA, 19 nt, Homo sapiens
  misc_RNA (1)...(19): siRNA sense strand
guguaaagcacauuuggaa

SEQ ID NO: 206537 - RNA, 19 nt, Homo sapiens
  misc_RNA (1)...(19): siRNA sense strand
caagacaguugggugaagu

SEQ ID NO: 206538 - RNA, 19 nt, Homo sapiens
  misc_RNA (1)...(19): siRNA sense strand
gaagauguucgagacuuug

SEQ ID NO: 206539 - RNA, 19 nt, Homo sapiens
  misc_RNA (1)...(19): siRNA sense strand
gucagauucucagcuuaua

SEQ ID NO: 206540 - RNA, 19 nt, Homo sapiens
  misc_RNA (1)...(19): siRNA sense strand
uaacaucugcaaagagugu

SEQ ID NO: 206541 - RNA, 19 nt, Homo sapiens
  misc_RNA (1)...(19): siRNA sense strand
cggagcugcuuccaauuug

SEQ ID NO: 206542 - RNA, 19 nt, Homo sapiens
  misc_RNA (1)...(19): siRNA sense strand
gaagacaaguacagauacc

SEQ ID NO: 206543 - RNA, 19 nt, Homo sapiens
  misc_RNA (1)...(19): siRNA sense strand
ccauggauauccugcagau

SEQ ID NO: 206544 - RNA, 19 nt, Homo sapiens
  misc_RNA (1)...(19): siRNA sense strand
ggcaucauuucccugugua

SEQ ID NO: 206545 - RNA, 19 nt, Homo sapiens
  misc_RNA (1)...(19): siRNA sense strand
uggauauccugcagauuau

SEQ ID NO: 206546 - RNA, 19 nt, Homo sapiens
  misc_RNA (1)...(19): siRNA sense strand
ggaagacaaguacagauac

SEQ ID NO: 206547 - RNA, 19 nt, Homo sapiens
  misc_RNA (1)...(19): siRNA sense strand
ugcaaagaguguccaauca

SEQ ID NO: 206548 - RNA, 19 nt, Homo sapiens
  misc_RNA (1)...(19): siRNA sense strand
guggauaugugucugaacu

SEQ ID NO: 206549 - RNA, 19 nt, Homo sapiens
  misc_RNA (1)...(19): siRNA sense strand
acuggcugcugaauguuua

SEQ ID NO: 206550 - RNA, 19 nt, Homo sapiens
  misc_RNA (1)...(19): siRNA sense strand
acuaucccaugguggaaua

SEQ ID NO: 206551 - RNA, 19 nt, Homo sapiens
  misc_RNA (1)...(19): siRNA sense strand
ccggagcugcuuccaauuu

SEQ ID NO: 206552 - RNA, 19 nt, Homo sapiens
  misc_RNA (1)...(19): siRNA sense strand
ccaaauuccaagacaguug

SEQ ID NO: 206553 - RNA, 19 nt, Homo sapiens
  misc_RNA (1)...(19): siRNA sense strand
cagaaacugccaagcauca

SEQ ID NO: 206554 - RNA, 19 nt, Homo sapiens
  misc_RNA (1)...(19): siRNA sense strand
uaugacaucugccaaagcu

SEQ ID NO: 206555 - RNA, 19 nt, Homo sapiens
  misc_RNA (1)...(19): siRNA sense strand
aaugucagauucucagcuu

SEQ ID NO: 206556 - RNA, 19 nt, Homo sapiens
  misc_RNA (1)...(19): siRNA sense strand
ucgagacuuugccaaggua

SEQ ID NO: 206557 - RNA, 19 nt, Homo sapiens
  misc_RNA (1)...(19): siRNA sense strand
gcaaaaggccauaaaaugc

SEQ ID NO: 206558 - RNA, 19 nt, Homo sapiens
  misc_RNA (1)...(19): siRNA sense strand
cugcaugauucuauccaaa

SEQ ID NO: 206559 - RNA, 19 nt, Homo sapiens
  misc_RNA (1)...(19): siRNA sense strand
uaaagcacauuuggaagac

SEQ ID NO: 206560 - RNA, 19 nt, Homo sapiens
  misc_RNA (1)...(19): siRNA sense strand
acaggagucuaaagcacuu

SEQ ID NO: 206561 - RNA, 19 nt, Homo sapiens
  misc_RNA (1)...(19): siRNA sense strand
acagauaccuuuucaagca

SEQ ID NO: 206562 - RNA, 19 nt, Homo sapiens
  misc_RNA (1)...(19): siRNA sense strand
aagcacauuuggaagacaa

SEQ ID NO: 206563 - RNA, 19 nt, Homo sapiens
  misc_RNA (1)...(19): siRNA sense strand
gcuaauaauaagccagaga

SEQ ID NO: 206564 - RNA, 19 nt, Homo sapiens
  misc_RNA (1)...(19): siRNA sense strand
caagagcacaacaauuugg

SEQ ID NO: 206565 - RNA, 19 nt, Homo sapiens
  misc_RNA (1)...(19): siRNA sense strand
ccugucagcugcaugugau

SEQ ID NO: 206566 - RNA, 19 nt, Homo sapiens
  misc_RNA (1)...(19): siRNA sense strand
gcugcugaauguuuaugau

SEQ ID NO: 206567 - RNA, 19 nt, Homo sapiens
  misc_RNA (1)...(19): siRNA sense strand
acagagcucuaccagucuu

SEQ ID NO: 206568 - RNA, 19 nt, Homo sapiens
  misc_RNA (1)...(19): siRNA sense strand
acaguugggugaaguugca

SEQ ID NO: 206569 - RNA, 19 nt, Homo sapiens
  misc_RNA (1)...(19): siRNA sense strand
guuugaccacuauuuauga

SEQ ID NO: 206570 - RNA, 19 nt, Homo sapiens
  misc_RNA (1)...(19): siRNA sense strand
gcuuauaggacugccauga

SEQ ID NO: 206571 - RNA, 19 nt, Homo sapiens
  misc_RNA (1)...(19): siRNA sense strand
caucaggccaaauguaaca

SEQ ID NO: 206572 - RNA, 19 nt, Homo sapiens
  misc_RNA (1)...(19): siRNA sense strand
gauucuauccaaauuccaa

SEQ ID NO: 206573 - RNA, 19 nt, Homo sapiens
  misc_RNA (1)...(19): siRNA sense strand
ggcaaguucaacaggauuu

SEQ ID NO: 206574 - RNA, 19 nt, Homo sapiens
  misc_RNA (1)...(19): siRNA sense strand
gaacuggcugcugaauguu

SEQ ID NO: 206575 - RNA, 19 nt, Homo sapiens
  misc_RNA (1)...(19): siRNA sense strand
cugcugaauguuuaugaua

SEQ ID NO: 206576 - RNA, 19 nt, Homo sapiens
  misc_RNA (1)...(19): siRNA sense strand
aagcaucaggccaaaugua

SEQ ID NO: 206577 - RNA, 19 nt, Homo sapiens
  misc_RNA (1)...(19): siRNA sense strand
uggcaucauuucccugugu

SEQ ID NO: 206578 - RNA, 19 nt, Homo sapiens
  misc_RNA (1)...(19): siRNA sense strand
ccaugaaacuccgaagacu

SEQ ID NO: 206579 - RNA, 19 nt, Homo sapiens
  misc_RNA (1)...(19): siRNA sense strand
auaauaagccagagaucga

SEQ ID NO: 206580 - RNA, 19 nt, Homo sapiens
  misc_RNA (1)...(19): siRNA sense strand
cuaauaauaagccagagau

SEQ ID NO: 206581 - RNA, 19 nt, Homo sapiens
  misc_RNA (1)...(19): siRNA sense strand
ugggugaaguugcauccuu

SEQ ID NO: 206582 - RNA, 19 nt, Homo sapiens
  misc_RNA (1)...(19): siRNA sense strand
caucauuucccuguguaaa

SEQ ID NO: 206583 - RNA, 19 nt, Homo sapiens
  misc_RNA (1)...(19): siRNA sense strand
gcguggauaugugucugaa

SEQ ID NO: 206584 - RNA, 19 nt, Homo sapiens
  misc_RNA (1)...(19): siRNA sense strand
gcacuaucccaugguggaa

SEQ ID NO: 206585 - RNA, 19 nt, Homo sapiens
  misc_RNA (1)...(19): siRNA sense strand
gagccugucagcugcaugu

SEQ ID NO: 206586 - RNA, 19 nt, Homo sapiens
  misc_RNA (1)...(19): siRNA sense strand
guacagauaccuuuucaag

SEQ ID NO: 206587 - RNA, 19 nt, Homo sapiens
  misc_RNA (1)...(19): siRNA sense strand
gucccucucugcguggaua

SEQ ID NO: 206588 - RNA, 19 nt, Homo sapiens
  misc_RNA (1)...(19): siRNA sense strand
ggagcugcuuccaauuugc

SEQ ID NO: 206589 - RNA, 19 nt, Homo sapiens
  misc_RNA (1)...(19): siRNA sense strand
uuagcugaccugaauaaug

SEQ ID NO: 206590 - RNA, 19 nt, Homo sapiens
  misc_RNA (1)...(19): siRNA sense strand
guggcaaguucaacaggau

SEQ ID NO: 206591 - RNA, 19 nt, Homo sapiens
  misc_RNA (1)...(19): siRNA sense strand
acaacaauuuggucaacgu

SEQ ID NO: 206592 - RNA, 19 nt, Homo sapiens
  misc_RNA (1)...(19): siRNA sense strand
gacuacaucaggagaagau

SEQ ID NO: 206593 - RNA, 19 nt, Homo sapiens
  misc_RNA (1)...(19): siRNA sense strand
uaauaagccagagaucgaa

SEQ ID NO: 206594 - RNA, 19 nt, Homo sapiens
  misc_RNA (1)...(19): siRNA sense strand
ugucagauucucagcuuau

SEQ ID NO: 206595 - RNA, 19 nt, Homo sapiens
  misc_RNA (1)...(19): siRNA sense strand
ggauauccugcagauuauu

SEQ ID NO: 206596 - RNA, 19 nt, Homo sapiens
  misc_RNA (1)...(19): siRNA sense strand
agcaucaggccaaauguaa

SEQ ID NO: 206597 - RNA, 19 nt, Homo sapiens
  misc_RNA (1)...(19): siRNA sense strand
gcccuuugcuuggaucucu

SEQ ID NO: 206598 - RNA, 19 nt, Homo sapiens
  misc_RNA (1)...(19): siRNA sense strand
gcugaauguuuaugauacg

SEQ ID NO: 206599 - RNA, 19 nt, Homo sapiens
  misc_RNA (1)...(19): siRNA sense strand
agacuuugccaagguacua

SEQ ID NO: 206600 - RNA, 19 nt, Homo sapiens
  misc_RNA (1)...(19): siRNA sense strand
caagcaaguggcaaguuca

SEQ ID NO: 206601 - RNA, 19 nt, Homo sapiens
  misc_RNA (1)...(19): siRNA sense strand
agacaaguacagauaccuu

SEQ ID NO: 206602 - RNA, 19 nt, Homo sapiens
  misc_RNA (1)...(19): siRNA sense strand
gcaucauuucccuguguaa

SEQ ID NO: 206603 - RNA, 19 nt, Homo sapiens
  misc_RNA (1)...(19): siRNA sense strand
cugcaaagaguguccaauc

SEQ ID NO: 206604 - RNA, 19 nt, Homo sapiens
  misc_RNA (1)...(19): siRNA sense strand
cuuauaggacugccaugaa

SEQ ID NO: 206605 - RNA, 19 nt, Homo sapiens
  misc_RNA (1)...(19): siRNA sense strand
caaagaguguccaaucauu

SEQ ID NO: 206606 - RNA, 19 nt, Homo sapiens
  misc_RNA (1)...(19): siRNA sense strand
uagcugaccugaauaaugu

SEQ ID NO: 206607 - RNA, 19 nt, Homo sapiens
  misc_RNA (1)...(19): siRNA sense strand
gcaugauucuauccaaauu

SEQ ID NO: 206608 - RNA, 19 nt, Homo sapiens
  misc_RNA (1)...(19): siRNA sense strand
ugaacuggcugcugaaugu

SEQ ID NO: 206609 - RNA, 19 nt, Homo sapiens
  misc_RNA (1)...(19): siRNA sense strand
gauauccugcagauuauua

SEQ ID NO: 206610 - RNA, 19 nt, Homo sapiens
  misc_RNA (1)...(19): siRNA sense strand
gagaagauguucgagacuu

SEQ ID NO: 206611 - RNA, 19 nt, Homo sapiens
  misc_RNA (1)...(19): siRNA sense strand
gcacuuuaauuaugacauc

SEQ ID NO: 206612 - RNA, 19 nt, Homo sapiens
  misc_RNA (1)...(19): siRNA sense strand
guaaagcacauuuggaaga

SEQ ID NO: 206613 - RNA, 19 nt, Homo sapiens
  misc_RNA (1)...(19): siRNA sense strand
gaauauugcacuccgacua

SEQ ID NO: 206614 - RNA, 19 nt, Homo sapiens
  misc_RNA (1)...(19): siRNA sense strand
uuauaggacugccaugaaa

SEQ ID NO: 206615 - RNA, 19 nt, Homo sapiens
  misc_RNA (1)...(19): siRNA sense strand
gggugaaguugcauccuuu

SEQ ID NO: 206616 - RNA, 19 nt, Homo sapiens
  misc_RNA (1)...(19): siRNA sense strand
gcaagagcacaacaauuug

SEQ ID NO: 206617 - RNA, 19 nt, Homo sapiens
  misc_RNA (1)...(19): siRNA sense strand
gcacaacaauuuggucaac

SEQ ID NO: 206618 - RNA, 19 nt, Homo sapiens
  misc_RNA (1)...(19): siRNA sense strand
agcaagagcacaacaauuu

SEQ ID NO: 206619 - RNA, 19 nt, Homo sapiens
  misc_RNA (1)...(19): siRNA sense strand
agaagauguucgagacuuu

SEQ ID NO: 206620 - RNA, 19 nt, Homo sapiens
  misc_RNA (1)...(19): siRNA sense strand
gagcaagagcacaacaauu

SEQ ID NO: 206621 - RNA, 19 nt, Homo sapiens
  misc_RNA (1)...(19): siRNA sense strand
ucaagcaaguggcaaguuc

SEQ ID NO: 206622 - RNA, 19 nt, Homo sapiens
  misc_RNA (1)...(19): siRNA sense strand
ccacgagacucaaacaacu

SEQ ID NO: 206623 - RNA, 19 nt, Homo sapiens
  misc_RNA (1)...(19): siRNA sense strand
cagcacaaccucaagcaaa

SEQ ID NO: 206624 - RNA, 19 nt, Homo sapiens
  misc_RNA (1)...(19): siRNA sense strand
gcaaagaguguccaaucau

SEQ ID NO: 206625 - RNA, 19 nt, Homo sapiens
  misc_RNA (1)...(19): siRNA sense strand
auggauauccugcagauua

SEQ ID NO: 206626 - RNA, 19 nt, Homo sapiens
  misc_RNA (1)...(19): siRNA sense strand
uguaacaucugcaaagagu

SEQ ID NO: 206627 - RNA, 19 nt, Homo sapiens
  misc_RNA (1)...(19): siRNA sense strand
guccggagcugcuuccaau

SEQ ID NO: 206628 - RNA, 19 nt, Homo sapiens
  misc_RNA (1)...(19): siRNA sense strand
gcaaguggcaaguucaaca

SEQ ID NO: 206629 - RNA, 19 nt, Homo sapiens
  misc_RNA (1)...(19): siRNA sense strand
gcuuccaauuugcuaauaa

SEQ ID NO: 206630 - RNA, 19 nt, Homo sapiens
  misc_RNA (1)...(19): siRNA sense strand
uggaagacaaguacagaua

SEQ ID NO: 206631 - RNA, 19 nt, Homo sapiens
  misc_RNA (1)...(19): siRNA sense strand
ggauccguguccugucuuu

SEQ ID NO: 206632 - RNA, 19 nt, Homo sapiens
  misc_RNA (1)...(19): siRNA sense strand
gucuuuagcugaccugaau

SEQ ID NO: 206633 - RNA, 19 nt, Homo sapiens
  misc_RNA (1)...(19): siRNA sense strand
gacaaguacagauaccuuu

SEQ ID NO: 206634 - RNA, 19 nt, Homo sapiens
  misc_RNA (1)...(19): siRNA sense strand
ccaagcaucaggccaaaug

SEQ ID NO: 206635 - RNA, 19 nt, Homo sapiens
  misc_RNA (1)...(19): siRNA sense strand
ggagcaagagcacaacaau

SEQ ID NO: 206636 - RNA, 19 nt, Homo sapiens
  misc_RNA (1)...(19): siRNA sense strand
guguaaagcacauuuggaa

SEQ ID NO: 206637 - RNA, 19 nt, Homo sapiens
  misc_RNA (1)...(19): siRNA sense strand
caagacaguugggugaagu

SEQ ID NO: 206638 - RNA, 19 nt, Homo sapiens
  misc_RNA (1)...(19): siRNA sense strand
gaagauguucgagacuuug

SEQ ID NO: 206639 - RNA, 19 nt, Homo sapiens
  misc_RNA (1)...(19): siRNA sense strand
gucagauucucagcuuaua

SEQ ID NO: 206640 - RNA, 19 nt, Homo sapiens
  misc_RNA (1)...(19): siRNA sense strand
uaacaucugcaaagagugu

SEQ ID NO: 206641 - RNA, 19 nt, Homo sapiens
  misc_RNA (1)...(19): siRNA sense strand
cggagcugcuuccaauuug

SEQ ID NO: 206642 - RNA, 19 nt, Homo sapiens
  misc_RNA (1)...(19): siRNA sense strand
gaagacaaguacagauacc

SEQ ID NO: 206643 - RNA, 19 nt, Homo sapiens
  misc_RNA (1)...(19): siRNA sense strand
ccauggauauccugcagau

SEQ ID NO: 206644 - RNA, 19 nt, Homo sapiens
  misc_RNA (1)...(19): siRNA sense strand
ggcaucauuucccugugua

SEQ ID NO: 206645 - RNA, 19 nt, Homo sapiens
  misc_RNA (1)...(19): siRNA sense strand
uggauauccugcagauuau

SEQ ID NO: 206646 - RNA, 19 nt, Homo sapiens
  misc_RNA (1)...(19): siRNA sense strand
ggaagacaaguacagauac

SEQ ID NO: 206647 - RNA, 19 nt, Homo sapiens
  misc_RNA (1)...(19): siRNA sense strand
ugcaaagaguguccaauca

SEQ ID NO: 206648 - RNA, 19 nt, Homo sapiens
  misc_RNA (1)...(19): siRNA sense strand
guggauaugugucugaacu

SEQ ID NO: 206649 - RNA, 19 nt, Homo sapiens
  misc_RNA (1)...(19): siRNA sense strand
acuggcugcugaauguuua

SEQ ID NO: 206650 - RNA, 19 nt, Homo sapiens
  misc_RNA (1)...(19): siRNA sense strand
acuaucccaugguggaaua

SEQ ID NO: 206651 - RNA, 19 nt, Homo sapiens
  misc_RNA (1)...(19): siRNA sense strand
ccggagcugcuuccaauuu

SEQ ID NO: 206652 - RNA, 19 nt, Homo sapiens
  misc_RNA (1)...(19): siRNA sense strand
ccaaauuccaagacaguug

SEQ ID NO: 206653 - RNA, 19 nt, Homo sapiens
  misc_RNA (1)...(19): siRNA sense strand
cagaaacugccaagcauca

SEQ ID NO: 206654 - RNA, 19 nt, Homo sapiens
  misc_RNA (1)...(19): siRNA sense strand
uaugacaucugccaaagcu

SEQ ID NO: 206655 - RNA, 19 nt, Homo sapiens
  misc_RNA (1)...(19): siRNA sense strand
aaugucagauucucagcuu

SEQ ID NO: 206656 - RNA, 19 nt, Homo sapiens
  misc_RNA (1)...(19): siRNA sense strand
ucgagacuuugccaaggua

SEQ ID NO: 206657 - RNA, 19 nt, Homo sapiens
  misc_RNA (1)...(19): siRNA sense strand
gcaaaaggccauaaaaugc

SEQ ID NO: 206658 - RNA, 19 nt, Homo sapiens
  misc_RNA (1)...(19): siRNA sense strand
cugcaugauucuauccaaa

SEQ ID NO: 206659 - RNA, 19 nt, Homo sapiens
  misc_RNA (1)...(19): siRNA sense strand
uaaagcacauuuggaagac

SEQ ID NO: 206660 - RNA, 19 nt, Homo sapiens
  misc_RNA (1)...(19): siRNA sense strand
acaggagucuaaagcacuu

SEQ ID NO: 206661 - RNA, 19 nt, Homo sapiens
  misc_RNA (1)...(19): siRNA sense strand
acagauaccuuuucaagca

SEQ ID NO: 206662 - RNA, 19 nt, Homo sapiens
  misc_RNA (1)...(19): siRNA sense strand
aagcacauuuggaagacaa

SEQ ID NO: 206663 - RNA, 19 nt, Homo sapiens
  misc_RNA (1)...(19): siRNA sense strand
gcuaauaauaagccagaga

SEQ ID NO: 206664 - RNA, 19 nt, Homo sapiens
  misc_RNA (1)...(19): siRNA sense strand
caagagcacaacaauuugg

SEQ ID NO: 206665 - RNA, 19 nt, Homo sapiens
  misc_RNA (1)...(19): siRNA sense strand
ccugucagcugcaugugau

SEQ ID NO: 206666 - RNA, 19 nt, Homo sapiens
  misc_RNA (1)...(19): siRNA sense strand
gcugcugaauguuuaugau

SEQ ID NO: 206667 - RNA, 19 nt, Homo sapiens
  misc_RNA (1)...(19): siRNA sense strand
acagagcucuaccagucuu

SEQ ID NO: 206668 - RNA, 19 nt, Homo sapiens
  misc_RNA (1)...(19): siRNA sense strand
acaguugggugaaguugca

SEQ ID NO: 206669 - RNA, 19 nt, Homo sapiens
  misc_RNA (1)...(19): siRNA sense strand
guuugaccacuauuuauga

SEQ ID NO: 206670 - RNA, 19 nt, Homo sapiens
  misc_RNA (1)...(19): siRNA sense strand
gcuuauaggacugccauga

SEQ ID NO: 206671 - RNA, 19 nt, Homo sapiens
  misc_RNA (1)...(19): siRNA sense strand
caucaggccaaauguaaca

SEQ ID NO: 206672 - RNA, 19 nt, Homo sapiens
  misc_RNA (1)...(19): siRNA sense strand
gauucuauccaaauuccaa

SEQ ID NO: 206673 - RNA, 19 nt, Homo sapiens
  misc_RNA (1)...(19): siRNA sense strand
ggcaaguucaacaggauuu

SEQ ID NO: 206674 - RNA, 19 nt, Homo sapiens
  misc_RNA (1)...(19): siRNA sense strand
gaacuggcugcugaauguu

SEQ ID NO: 206675 - RNA, 19 nt, Homo sapiens
  misc_RNA (1)...(19): siRNA sense strand
cugcugaauguuuaugaua

SEQ ID NO: 206676 - RNA, 19 nt, Homo sapiens
  misc_RNA (1)...(19): siRNA sense strand
aagcaucaggccaaaugua

SEQ ID NO: 206677 - RNA, 19 nt, Homo sapiens
  misc_RNA (1)...(19): siRNA sense strand
uggcaucauuucccugugu

SEQ ID NO: 206678 - RNA, 19 nt, Homo sapiens
  misc_RNA (1)...(19): siRNA sense strand
ccaugaaacuccgaagacu

SEQ ID NO: 206679 - RNA, 19 nt, Homo sapiens
  misc_RNA (1)...(19): siRNA sense strand
auaauaagccagagaucga

SEQ ID NO: 206680 - RNA, 19 nt, Homo sapiens
  misc_RNA (1)...(19): siRNA sense strand
cuaauaauaagccagagau

SEQ ID NO: 206681 - RNA, 19 nt, Homo sapiens
  misc_RNA (1)...(19): siRNA sense strand
ugggugaaguugcauccuu

SEQ ID NO: 206682 - RNA, 19 nt, Homo sapiens
  misc_RNA (1)...(19): siRNA sense strand
caucauuucccuguguaaa

SEQ ID NO: 206683 - RNA, 19 nt, Homo sapiens
  misc_RNA (1)...(19): siRNA sense strand
gcguggauaugugucugaa

SEQ ID NO: 206684 - RNA, 19 nt, Homo sapiens
  misc_RNA (1)...(19): siRNA sense strand
gcacuaucccaugguggaa

SEQ ID NO: 206685 - RNA, 19 nt, Homo sapiens
  misc_RNA (1)...(19): siRNA sense strand
gagccugucagcugcaugu

SEQ ID NO: 206686 - RNA, 19 nt, Homo sapiens
  misc_RNA (1)...(19): siRNA sense strand
guacagauaccuuuucaag

SEQ ID NO: 206687 - RNA, 19 nt, Homo sapiens
  misc_RNA (1)...(19): siRNA sense strand
gucccucucugcguggaua

SEQ ID NO: 206688 - RNA, 19 nt, Homo sapiens
  misc_RNA (1)...(19): siRNA sense strand
ggagcugcuuccaauuugc

SEQ ID NO: 206689 - RNA, 19 nt, Homo sapiens
  misc_RNA (1)...(19): siRNA sense strand
uuagcugaccugaauaaug

SEQ ID NO: 206690 - RNA, 19 nt, Homo sapiens
  misc_RNA (1)...(19): siRNA sense strand
guggcaaguucaacaggau

SEQ ID NO: 206691 - RNA, 19 nt, Homo sapiens
  misc_RNA (1)...(19): siRNA sense strand
acaacaauuuggucaacgu

SEQ ID NO: 206692 - RNA, 19 nt, Homo sapiens
  misc_RNA (1)...(19): siRNA sense strand
gacuacaucaggagaagau

SEQ ID NO: 206693 - RNA, 19 nt, Homo sapiens
  misc_RNA (1)...(19): siRNA sense strand
uaauaagccagagaucgaa

SEQ ID NO: 206694 - RNA, 19 nt, Homo sapiens
  misc_RNA (1)...(19): siRNA sense strand
ugucagauucucagcuuau

SEQ ID NO: 206695 - RNA, 19 nt, Homo sapiens
  misc_RNA (1)...(19): siRNA sense strand
ggauauccugcagauuauu

SEQ ID NO: 206696 - RNA, 19 nt, Homo sapiens
  misc_RNA (1)...(19): siRNA sense strand
agcaucaggccaaauguaa

SEQ ID NO: 206697 - RNA, 19 nt, Homo sapiens
  misc_RNA (1)...(19): siRNA sense strand
gcccuuugcuuggaucucu

SEQ ID NO: 206698 - RNA, 19 nt, Homo sapiens
  misc_RNA (1)...(19): siRNA sense strand
gcugaauguuuaugauacg

SEQ ID NO: 206699 - RNA, 19 nt, Homo sapiens
  misc_RNA (1)...(19): siRNA sense strand
agacuuugccaagguacua

SEQ ID NO: 206700 - RNA, 19 nt, Homo sapiens
  misc_RNA (1)...(19): siRNA sense strand
caagcaaguggcaaguuca

SEQ ID NO: 206701 - RNA, 19 nt, Homo sapiens
  misc_RNA (1)...(19): siRNA sense strand
agacaaguacagauaccuu

SEQ ID NO: 206702 - RNA, 19 nt, Homo sapiens
  misc_RNA (1)...(19): siRNA sense strand
gcaucauuucccuguguaa

SEQ ID NO: 206703 - RNA, 19 nt, Homo sapiens
  misc_RNA (1)...(19): siRNA sense strand
cugcaaagaguguccaauc

SEQ ID NO: 206704 - RNA, 19 nt, Homo sapiens
  misc_RNA (1)...(19): siRNA sense strand
cuuauaggacugccaugaa

SEQ ID NO: 206705 - RNA, 19 nt, Homo sapiens
  misc_RNA (1)...(19): siRNA sense strand
caaagaguguccaaucauu

SEQ ID NO: 206706 - RNA, 19 nt, Homo sapiens
  misc_RNA (1)...(19): siRNA sense strand
uagcugaccugaauaaugu

SEQ ID NO: 206707 - RNA, 19 nt, Homo sapiens
  misc_RNA (1)...(19): siRNA sense strand
gcaugauucuauccaaauu

SEQ ID NO: 206708 - RNA, 19 nt, Homo sapiens
  misc_RNA (1)...(19): siRNA sense strand
ugaacuggcugcugaaugu

SEQ ID NO: 206709 - RNA, 19 nt, Homo sapiens
  misc_RNA (1)...(19): siRNA sense strand
gauauccugcagauuauua

SEQ ID NO: 206710 - RNA, 19 nt, Homo sapiens
  misc_RNA (1)...(19): siRNA sense strand
gagaagauguucgagacuu

SEQ ID NO: 206711 - RNA, 19 nt, Homo sapiens
  misc_RNA (1)...(19): siRNA sense strand
gcacuuuaauuaugacauc

SEQ ID NO: 206712 - RNA, 19 nt, Homo sapiens
  misc_RNA (1)...(19): siRNA sense strand
guaaagcacauuuggaaga

SEQ ID NO: 206713 - RNA, 19 nt, Homo sapiens
  misc_RNA (1)...(19): siRNA sense strand
gaauauugcacuccgacua

SEQ ID NO: 206714 - RNA, 19 nt, Homo sapiens
  misc_RNA (1)...(19): siRNA sense strand
uuauaggacugccaugaaa

SEQ ID NO: 206715 - RNA, 19 nt, Homo sapiens
  misc_RNA (1)...(19): siRNA sense strand
gggugaaguugcauccuuu

SEQ ID NO: 206716 - RNA, 19 nt, Homo sapiens
  misc_RNA (1)...(19): siRNA sense strand
gcaagagcacaacaauuug

SEQ ID NO: 206717 - RNA, 19 nt, Homo sapiens
  misc_RNA (1)...(19): siRNA sense strand
gcacaacaauuuggucaac

SEQ ID NO: 206718 - RNA, 19 nt, Homo sapiens
  misc_RNA (1)...(19): siRNA sense strand
agcaagagcacaacaauuu

SEQ ID NO: 206719 - RNA, 19 nt, Homo sapiens
  misc_RNA (1)...(19): siRNA sense strand
agaagauguucgagacuuu

SEQ ID NO: 206720 - RNA, 19 nt, Homo sapiens
  misc_RNA (1)...(19): siRNA sense strand
gagcaagagcacaacaauu

SEQ ID NO: 206721 - RNA, 19 nt, Homo sapiens
  misc_RNA (1)...(19): siRNA sense strand
ucaagcaaguggcaaguuc

SEQ ID NO: 206722 - RNA, 19 nt, Homo sapiens
  misc_RNA (1)...(19): siRNA sense strand
ccacgagacucaaacaacu

SEQ ID NO: 206723 - RNA, 19 nt, Homo sapiens
  misc_RNA (1)...(19): siRNA sense strand
cagcacaaccucaagcaaa

SEQ ID NO: 206724 - RNA, 19 nt, Homo sapiens
  misc_RNA (1)...(19): siRNA sense strand
gcaaagaguguccaaucau

SEQ ID NO: 206725 - RNA, 19 nt, Homo sapiens
  misc_RNA (1)...(19): siRNA sense strand
auggauauccugcagauua

SEQ ID NO: 206726 - RNA, 19 nt, Homo sapiens
  misc_RNA (1)...(19): siRNA sense strand
uguaacaucugcaaagagu

SEQ ID NO: 206727 - RNA, 19 nt, Homo sapiens
  misc_RNA (1)...(19): siRNA sense strand
guccggagcugcuuccaau

SEQ ID NO: 206728 - RNA, 19 nt, Homo sapiens
  misc_RNA (1)...(19): siRNA sense strand
gcaaguggcaaguucaaca

SEQ ID NO: 206729 - RNA, 19 nt, Homo sapiens
  misc_RNA (1)...(19): siRNA sense strand
gcuuccaauuugcuaauaa

SEQ ID NO: 206730 - RNA, 19 nt, Homo sapiens
  misc_RNA (1)...(19): siRNA sense strand
uggaagacaaguacagaua

SEQ ID NO: 206731 - RNA, 19 nt, Homo sapiens
  misc_RNA (1)...(19): siRNA sense strand
ggauccguguccugucuuu

SEQ ID NO: 206732 - RNA, 19 nt, Homo sapiens
  misc_RNA (1)...(19): siRNA sense strand
gucuuuagcugaccugaau

SEQ ID NO: 206733 - RNA, 19 nt, Homo sapiens
  misc_RNA (1)...(19): siRNA sense strand
gacaaguacagauaccuuu

SEQ ID NO: 206734 - RNA, 19 nt, Homo sapiens
  misc_RNA (1)...(19): siRNA sense strand
ccaagcaucaggccaaaug

SEQ ID NO: 206735 - RNA, 19 nt, Homo sapiens
  misc_RNA (1)...(19): siRNA sense strand
ggagcaagagcacaacaau

SEQ ID NO: 206736 - RNA, 19 nt, Homo sapiens
  misc_RNA (1)...(19): siRNA sense strand
guguaaagcacauuuggaa

SEQ ID NO: 206737 - RNA, 19 nt, Homo sapiens
  misc_RNA (1)...(19): siRNA sense strand
caagacaguugggugaagu

SEQ ID NO: 206738 - RNA, 19 nt, Homo sapiens
  misc_RNA (1)...(19): siRNA sense strand
gaagauguucgagacuuug

SEQ ID NO: 206739 - RNA, 19 nt, Homo sapiens
  misc_RNA (1)...(19): siRNA sense strand
gucagauucucagcuuaua

SEQ ID NO: 206740 - RNA, 19 nt, Homo sapiens
  misc_RNA (1)...(19): siRNA sense strand
uaacaucugcaaagagugu

SEQ ID NO: 206741 - RNA, 19 nt, Homo sapiens
  misc_RNA (1)...(19): siRNA sense strand
cggagcugcuuccaauuug

SEQ ID NO: 206742 - RNA, 19 nt, Homo sapiens
  misc_RNA (1)...(19): siRNA sense strand
gaagacaaguacagauacc

SEQ ID NO: 206743 - RNA, 19 nt, Homo sapiens
  misc_RNA (1)...(19): siRNA sense strand
ccauggauauccugcagau

SEQ ID NO: 206744 - RNA, 19 nt, Homo sapiens
  misc_RNA (1)...(19): siRNA sense strand
ggcaucauuucccugugua

SEQ ID NO: 206745 - RNA, 19 nt, Homo sapiens
  misc_RNA (1)...(19): siRNA sense strand
uggauauccugcagauuau

SEQ ID NO: 206746 - RNA, 19 nt, Homo sapiens
  misc_RNA (1)...(19): siRNA sense strand
ggaagacaaguacagauac

SEQ ID NO: 206747 - RNA, 19 nt, Homo sapiens
  misc_RNA (1)...(19): siRNA sense strand
ugcaaagaguguccaauca

SEQ ID NO: 206748 - RNA, 19 nt, Homo sapiens
  misc_RNA (1)...(19): siRNA sense strand
guggauaugugucugaacu

SEQ ID NO: 206749 - RNA, 19 nt, Homo sapiens
  misc_RNA (1)...(19): siRNA sense strand
acuggcugcugaauguuua

SEQ ID NO: 206750 - RNA, 19 nt, Homo sapiens
  misc_RNA (1)...(19): siRNA sense strand
acuaucccaugguggaaua

SEQ ID NO: 206751 - RNA, 19 nt, Homo sapiens
  misc_RNA (1)...(19): siRNA sense strand
ccggagcugcuuccaauuu

SEQ ID NO: 206752 - RNA, 19 nt, Homo sapiens
  misc_RNA (1)...(19): siRNA sense strand
ccaaauuccaagacaguug

SEQ ID NO: 206753 - RNA, 19 nt, Homo sapiens
  misc_RNA (1)...(19): siRNA sense strand
cagaaacugccaagcauca

SEQ ID NO: 206754 - RNA, 19 nt, Homo sapiens
  misc_RNA (1)...(19): siRNA sense strand
uaugacaucugccaaagcu

SEQ ID NO: 206755 - RNA, 19 nt, Homo sapiens
  misc_RNA (1)...(19): siRNA sense strand
aaugucagauucucagcuu

SEQ ID NO: 206756 - RNA, 19 nt, Homo sapiens
  misc_RNA (1)...(19): siRNA sense strand
ucgagacuuugccaaggua

SEQ ID NO: 206757 - RNA, 19 nt, Homo sapiens
  misc_RNA (1)...(19): siRNA sense strand
gcaaaaggccauaaaaugc

SEQ ID NO: 206758 - RNA, 19 nt, Homo sapiens
  misc_RNA (1)...(19): siRNA sense strand
cugcaugauucuauccaaa

SEQ ID NO: 206759 - RNA, 19 nt, Homo sapiens
  misc_RNA (1)...(19): siRNA sense strand
uaaagcacauuuggaagac

SEQ ID NO: 206760 - RNA, 19 nt, Homo sapiens
  misc_RNA (1)...(19): siRNA sense strand
acaggagucuaaagcacuu

SEQ ID NO: 206761 - RNA, 19 nt, Homo sapiens
  misc_RNA (1)...(19): siRNA sense strand
acagauaccuuuucaagca

SEQ ID NO: 206762 - RNA, 19 nt, Homo sapiens
  misc_RNA (1)...(19): siRNA sense strand
aagcacauuuggaagacaa

SEQ ID NO: 206763 - RNA, 19 nt, Homo sapiens
  misc_RNA (1)...(19): siRNA sense strand
gcuaauaauaagccagaga

SEQ ID NO: 206764 - RNA, 19 nt, Homo sapiens
  misc_RNA (1)...(19): siRNA sense strand
caagagcacaacaauuugg

SEQ ID NO: 206765 - RNA, 19 nt, Homo sapiens
  misc_RNA (1)...(19): siRNA sense strand
ccugucagcugcaugugau

SEQ ID NO: 206766 - RNA, 19 nt, Homo sapiens
  misc_RNA (1)...(19): siRNA sense strand
gcugcugaauguuuaugau

SEQ ID NO: 206767 - RNA, 19 nt, Homo sapiens
  misc_RNA (1)...(19): siRNA sense strand
acagagcucuaccagucuu

SEQ ID NO: 206768 - RNA, 19 nt, Homo sapiens
  misc_RNA (1)...(19): siRNA sense strand
acaguugggugaaguugca

SEQ ID NO: 206769 - RNA, 19 nt, Homo sapiens
  misc_RNA (1)...(19): siRNA sense strand
guuugaccacuauuuauga

SEQ ID NO: 206770 - RNA, 19 nt, Homo sapiens
  misc_RNA (1)...(19): siRNA sense strand
gcuuauaggacugccauga

SEQ ID NO: 206771 - RNA, 19 nt, Homo sapiens
  misc_RNA (1)...(19): siRNA sense strand
caucaggccaaauguaaca

SEQ ID NO: 206772 - RNA, 19 nt, Homo sapiens
  misc_RNA (1)...(19): siRNA sense strand
gauucuauccaaauuccaa

SEQ ID NO: 206773 - RNA, 19 nt, Homo sapiens
  misc_RNA (1)...(19): siRNA sense strand
ggcaaguucaacaggauuu

SEQ ID NO: 206774 - RNA, 19 nt, Homo sapiens
  misc_RNA (1)...(19): siRNA sense strand
gaacuggcugcugaauguu

SEQ ID NO: 206775 - RNA, 19 nt, Homo sapiens
  misc_RNA (1)...(19): siRNA sense strand
cugcugaauguuuaugaua

SEQ ID NO: 206776 - RNA, 19 nt, Homo sapiens
  misc_RNA (1)...(19): siRNA sense strand
aagcaucaggccaaaugua

SEQ ID NO: 206777 - RNA, 19 nt, Homo sapiens
  misc_RNA (1)...(19): siRNA sense strand
uggcaucauuucccugugu

SEQ ID NO: 206778 - RNA, 19 nt, Homo sapiens
  misc_RNA (1)...(19): siRNA sense strand
ccaugaaacuccgaagacu

SEQ ID NO: 206779 - RNA, 19 nt, Homo sapiens
  misc_RNA (1)...(19): siRNA sense strand
auaauaagccagagaucga

SEQ ID NO: 206780 - RNA, 19 nt, Homo sapiens
  misc_RNA (1)...(19): siRNA sense strand
cuaauaauaagccagagau

SEQ ID NO: 206781 - RNA, 19 nt, Homo sapiens
  misc_RNA (1)...(19): siRNA sense strand
ugggugaaguugcauccuu

SEQ ID NO: 206782 - RNA, 19 nt, Homo sapiens
  misc_RNA (1)...(19): siRNA sense strand
caucauuucccuguguaaa

SEQ ID NO: 206783 - RNA, 19 nt, Homo sapiens
  misc_RNA (1)...(19): siRNA sense strand
gcguggauaugugucugaa

SEQ ID NO: 206784 - RNA, 19 nt, Homo sapiens
  misc_RNA (1)...(19): siRNA sense strand
gcacuaucccaugguggaa

SEQ ID NO: 206785 - RNA, 19 nt, Homo sapiens
  misc_RNA (1)...(19): siRNA sense strand
gagccugucagcugcaugu

SEQ ID NO: 206786 - RNA, 19 nt, Homo sapiens
  misc_RNA (1)...(19): siRNA sense strand
guacagauaccuuuucaag

SEQ ID NO: 206787 - RNA, 19 nt, Homo sapiens
  misc_RNA (1)...(19): siRNA sense strand
gucccucucugcguggaua

SEQ ID NO: 206788 - RNA, 19 nt, Homo sapiens
  misc_RNA (1)...(19): siRNA sense strand
ggagcugcuuccaauuugc

SEQ ID NO: 206789 - RNA, 19 nt, Homo sapiens
  misc_RNA (1)...(19): siRNA sense strand
uuagcugaccugaauaaug

SEQ ID NO: 206790 - RNA, 19 nt, Homo sapiens
  misc_RNA (1)...(19): siRNA sense strand
guggcaaguucaacaggau

SEQ ID NO: 206791 - RNA, 19 nt, Homo sapiens
  misc_RNA (1)...(19): siRNA sense strand
acaacaauuuggucaacgu

SEQ ID NO: 206792 - RNA, 19 nt, Homo sapiens
  misc_RNA (1)...(19): siRNA sense strand
gacuacaucaggagaagau

SEQ ID NO: 206793 - RNA, 19 nt, Homo sapiens
  misc_RNA (1)...(19): siRNA sense strand
uaauaagccagagaucgaa

SEQ ID NO: 206794 - RNA, 19 nt, Homo sapiens
  misc_RNA (1)...(19): siRNA sense strand
ugucagauucucagcuuau

SEQ ID NO: 206795 - RNA, 19 nt, Homo sapiens
  misc_RNA (1)...(19): siRNA sense strand
ggauauccugcagauuauu

SEQ ID NO: 206796 - RNA, 19 nt, Homo sapiens
  misc_RNA (1)...(19): siRNA sense strand
agcaucaggccaaauguaa

SEQ ID NO: 206797 - RNA, 19 nt, Homo sapiens
  misc_RNA (1)...(19): siRNA sense strand
gcccuuugcuuggaucucu

SEQ ID NO: 206798 - RNA, 19 nt, Homo sapiens
  misc_RNA (1)...(19): siRNA sense strand
gcugaauguuuaugauacg

SEQ ID NO: 206799 - RNA, 19 nt, Homo sapiens
  misc_RNA (1)...(19): siRNA sense strand
agacuuugccaagguacua

SEQ ID NO: 206800 - RNA, 19 nt, Homo sapiens
  misc_RNA (1)...(19): siRNA sense strand
caagcaaguggcaaguuca

SEQ ID NO: 206801 - RNA, 19 nt, Homo sapiens
  misc_RNA (1)...(19): siRNA sense strand
agacaaguacagauaccuu

SEQ ID NO: 206802 - RNA, 19 nt, Homo sapiens
  misc_RNA (1)...(19): siRNA sense strand
gcaucauuucccuguguaa

SEQ ID NO: 206803 - RNA, 19 nt, Homo sapiens
  misc_RNA (1)...(19): siRNA sense strand
cugcaaagaguguccaauc

SEQ ID NO: 206804 - RNA, 19 nt, Homo sapiens
  misc_RNA (1)...(19): siRNA sense strand
cuuauaggacugccaugaa

SEQ ID NO: 206805 - RNA, 19 nt, Homo sapiens
  misc_RNA (1)...(19): siRNA sense strand
caaagaguguccaaucauu

SEQ ID NO: 206806 - RNA, 19 nt, Homo sapiens
  misc_RNA (1)...(19): siRNA sense strand
uagcugaccugaauaaugu

SEQ ID NO: 206807 - RNA, 19 nt, Homo sapiens
  misc_RNA (1)...(19): siRNA sense strand
gcaugauucuauccaaauu

SEQ ID NO: 206808 - RNA, 19 nt, Homo sapiens
  misc_RNA (1)...(19): siRNA sense strand
ugaacuggcugcugaaugu

SEQ ID NO: 206809 - RNA, 19 nt, Homo sapiens
  misc_RNA (1)...(19): siRNA sense strand
gauauccugcagauuauua

SEQ ID NO: 206810 - RNA, 19 nt, Homo sapiens
  misc_RNA (1)...(19): siRNA sense strand
gagaagauguucgagacuu

SEQ ID NO: 206811 - RNA, 19 nt, Homo sapiens
  misc_RNA (1)...(19): siRNA sense strand
gcacuuuaauuaugacauc

SEQ ID NO: 206812 - RNA, 19 nt, Homo sapiens
  misc_RNA (1)...(19): siRNA sense strand
guaaagcacauuuggaaga

SEQ ID NO: 206813 - RNA, 19 nt, Homo sapiens
  misc_RNA (1)...(19): siRNA sense strand
gaauauugcacuccgacua

SEQ ID NO: 206814 - RNA, 19 nt, Homo sapiens
  misc_RNA (1)...(19): siRNA sense strand
uuauaggacugccaugaaa

SEQ ID NO: 206815 - RNA, 19 nt, Homo sapiens
  misc_RNA (1)...(19): siRNA sense strand
gggugaaguugcauccuuu

SEQ ID NO: 206816 - RNA, 19 nt, Homo sapiens
  misc_RNA (1)...(19): siRNA sense strand
gcaagagcacaacaauuug

SEQ ID NO: 206817 - RNA, 19 nt, Homo sapiens
  misc_RNA (1)...(19): siRNA sense strand
gcacaacaauuuggucaac

SEQ ID NO: 206818 - RNA, 19 nt, Homo sapiens
  misc_RNA (1)...(19): siRNA sense strand
agcaagagcacaacaauuu

SEQ ID NO: 206819 - RNA, 19 nt, Homo sapiens
  misc_RNA (1)...(19): siRNA sense strand
agaagauguucgagacuuu

SEQ ID NO: 206820 - RNA, 19 nt, Homo sapiens
  misc_RNA (1)...(19): siRNA sense strand
gagcaagagcacaacaauu

SEQ ID NO: 206821 - RNA, 19 nt, Homo sapiens
  misc_RNA (1)...(19): siRNA sense strand
ucaagcaaguggcaaguuc

SEQ ID NO: 206822 - RNA, 19 nt, Homo sapiens
  misc_RNA (1)...(19): siRNA sense strand
ccacgagacucaaacaacu

SEQ ID NO: 206823 - RNA, 19 nt, Homo sapiens
  misc_RNA (1)...(19): siRNA sense strand
cagcacaaccucaagcaaa

SEQ ID NO: 206824 - RNA, 19 nt, Homo sapiens
  misc_RNA (1)...(19): siRNA sense strand
gcaaagaguguccaaucau

SEQ ID NO: 206825 - RNA, 19 nt, Homo sapiens
  misc_RNA (1)...(19): siRNA sense strand
auggauauccugcagauua

SEQ ID NO: 206826 - RNA, 19 nt, Homo sapiens
  misc_RNA (1)...(19): siRNA sense strand
uguaacaucugcaaagagu

SEQ ID NO: 206827 - RNA, 19 nt, Homo sapiens
  misc_RNA (1)...(19): siRNA sense strand
guccggagcugcuuccaau

SEQ ID NO: 206828 - RNA, 19 nt, Homo sapiens
  misc_RNA (1)...(19): siRNA sense strand
gcaaguggcaaguucaaca

SEQ ID NO: 206829 - RNA, 19 nt, Homo sapiens
  misc_RNA (1)...(19): siRNA sense strand
gcuuccaauuugcuaauaa

SEQ ID NO: 206830 - RNA, 19 nt, Homo sapiens
  misc_RNA (1)...(19): siRNA sense strand
uggaagacaaguacagaua

SEQ ID NO: 206831 - RNA, 19 nt, Homo sapiens
  misc_RNA (1)...(19): siRNA sense strand
ggauccguguccugucuuu

SEQ ID NO: 206832 - RNA, 19 nt, Homo sapiens
  misc_RNA (1)...(19): siRNA sense strand
gucuuuagcugaccugaau

SEQ ID NO: 206833 - RNA, 19 nt, Homo sapiens
  misc_RNA (1)...(19): siRNA sense strand
gacaaguacagauaccuuu

SEQ ID NO: 206834 - RNA, 19 nt, Homo sapiens
  misc_RNA (1)...(19): siRNA sense strand
ccaagcaucaggccaaaug

SEQ ID NO: 206835 - RNA, 19 nt, Homo sapiens
  misc_RNA (1)...(19): siRNA sense strand
ggagcaagagcacaacaau

SEQ ID NO: 206836 - RNA, 19 nt, Homo sapiens
  misc_RNA (1)...(19): siRNA sense strand
guguaaagcacauuuggaa

SEQ ID NO: 206837 - RNA, 19 nt, Homo sapiens
  misc_RNA (1)...(19): siRNA sense strand
caagacaguugggugaagu

SEQ ID NO: 206838 - RNA, 19 nt, Homo sapiens
  misc_RNA (1)...(19): siRNA sense strand
gaagauguucgagacuuug

SEQ ID NO: 206839 - RNA, 19 nt, Homo sapiens
  misc_RNA (1)...(19): siRNA sense strand
gucagauucucagcuuaua

SEQ ID NO: 206840 - RNA, 19 nt, Homo sapiens
  misc_RNA (1)...(19): siRNA sense strand
uaacaucugcaaagagugu

SEQ ID NO: 206841 - RNA, 19 nt, Homo sapiens
  misc_RNA (1)...(19): siRNA sense strand
cggagcugcuuccaauuug

SEQ ID NO: 206842 - RNA, 19 nt, Homo sapiens
  misc_RNA (1)...(19): siRNA sense strand
gaagacaaguacagauacc

SEQ ID NO: 206843 - RNA, 19 nt, Homo sapiens
  misc_RNA (1)...(19): siRNA sense strand
ccauggauauccugcagau

SEQ ID NO: 206844 - RNA, 19 nt, Homo sapiens
  misc_RNA (1)...(19): siRNA sense strand
ggcaucauuucccugugua

SEQ ID NO: 206845 - RNA, 19 nt, Homo sapiens
  misc_RNA (1)...(19): siRNA sense strand
uggauauccugcagauuau

SEQ ID NO: 206846 - RNA, 19 nt, Homo sapiens
  misc_RNA (1)...(19): siRNA sense strand
ggaagacaaguacagauac

SEQ ID NO: 206847 - RNA, 19 nt, Homo sapiens
  misc_RNA (1)...(19): siRNA sense strand
ugcaaagaguguccaauca

SEQ ID NO: 206848 - RNA, 19 nt, Homo sapiens
  misc_RNA (1)...(19): siRNA sense strand
guggauaugugucugaacu

SEQ ID NO: 206849 - RNA, 19 nt, Homo sapiens
  misc_RNA (1)...(19): siRNA sense strand
acuggcugcugaauguuua

SEQ ID NO: 206850 - RNA, 19 nt, Homo sapiens
  misc_RNA (1)...(19): siRNA sense strand
acuaucccaugguggaaua

SEQ ID NO: 206851 - RNA, 19 nt, Homo sapiens
  misc_RNA (1)...(19): siRNA sense strand
ccggagcugcuuccaauuu

SEQ ID NO: 206852 - RNA, 19 nt, Homo sapiens
  misc_RNA (1)...(19): siRNA sense strand
ccaaauuccaagacaguug

SEQ ID NO: 206853 - RNA, 19 nt, Homo sapiens
  misc_RNA (1)...(19): siRNA sense strand
cagaaacugccaagcauca

SEQ ID NO: 206854 - RNA, 19 nt, Homo sapiens
  misc_RNA (1)...(19): siRNA sense strand
uaugacaucugccaaagcu

SEQ ID NO: 206855 - RNA, 19 nt, Homo sapiens
  misc_RNA (1)...(19): siRNA sense strand
aaugucagauucucagcuu

SEQ ID NO: 206856 - RNA, 19 nt, Homo sapiens
  misc_RNA (1)...(19): siRNA sense strand
ucgagacuuugccaaggua

SEQ ID NO: 206857 - RNA, 19 nt, Homo sapiens
  misc_RNA (1)...(19): siRNA sense strand
gcaaaaggccauaaaaugc

SEQ ID NO: 206858 - RNA, 19 nt, Homo sapiens
  misc_RNA (1)...(19): siRNA sense strand
cugcaugauucuauccaaa

SEQ ID NO: 206859 - RNA, 19 nt, Homo sapiens
  misc_RNA (1)...(19): siRNA sense strand
uaaagcacauuuggaagac

SEQ ID NO: 206860 - RNA, 19 nt, Homo sapiens
  misc_RNA (1)...(19): siRNA sense strand
acaggagucuaaagcacuu

SEQ ID NO: 206861 - RNA, 19 nt, Homo sapiens
  misc_RNA (1)...(19): siRNA sense strand
acagauaccuuuucaagca

SEQ ID NO: 206862 - RNA, 19 nt, Homo sapiens
  misc_RNA (1)...(19): siRNA sense strand
aagcacauuuggaagacaa

SEQ ID NO: 206863 - RNA, 19 nt, Homo sapiens
  misc_RNA (1)...(19): siRNA sense strand
gcuaauaauaagccagaga

SEQ ID NO: 206864 - RNA, 19 nt, Homo sapiens
  misc_RNA (1)...(19): siRNA sense strand
caagagcacaacaauuugg

SEQ ID NO: 206865 - RNA, 19 nt, Homo sapiens
  misc_RNA (1)...(19): siRNA sense strand
ccugucagcugcaugugau

SEQ ID NO: 206866 - RNA, 19 nt, Homo sapiens
  misc_RNA (1)...(19): siRNA sense strand
gcugcugaauguuuaugau

SEQ ID NO: 206867 - RNA, 19 nt, Homo sapiens
  misc_RNA (1)...(19): siRNA sense strand
acagagcucuaccagucuu

SEQ ID NO: 206868 - RNA, 19 nt, Homo sapiens
  misc_RNA (1)...(19): siRNA sense strand
acaguugggugaaguugca

SEQ ID NO: 206869 - RNA, 19 nt, Homo sapiens
  misc_RNA (1)...(19): siRNA sense strand
guuugaccacuauuuauga

SEQ ID NO: 206870 - RNA, 19 nt, Homo sapiens
  misc_RNA (1)...(19): siRNA sense strand
gcuuauaggacugccauga

SEQ ID NO: 206871 - RNA, 19 nt, Homo sapiens
  misc_RNA (1)...(19): siRNA sense strand
caucaggccaaauguaaca

SEQ ID NO: 206872 - RNA, 19 nt, Homo sapiens
  misc_RNA (1)...(19): siRNA sense strand
gauucuauccaaauuccaa

SEQ ID NO: 206873 - RNA, 19 nt, Homo sapiens
  misc_RNA (1)...(19): siRNA sense strand
ggcaaguucaacaggauuu

SEQ ID NO: 206874 - RNA, 19 nt, Homo sapiens
  misc_RNA (1)...(19): siRNA sense strand
gaacuggcugcugaauguu

SEQ ID NO: 206875 - RNA, 19 nt, Homo sapiens
  misc_RNA (1)...(19): siRNA sense strand
cugcugaauguuuaugaua

SEQ ID NO: 206876 - RNA, 19 nt, Homo sapiens
  misc_RNA (1)...(19): siRNA sense strand
aagcaucaggccaaaugua

SEQ ID NO: 206877 - RNA, 19 nt, Homo sapiens
  misc_RNA (1)...(19): siRNA sense strand
uggcaucauuucccugugu

SEQ ID NO: 206878 - RNA, 19 nt, Homo sapiens
  misc_RNA (1)...(19): siRNA sense strand
ccaugaaacuccgaagacu

SEQ ID NO: 206879 - RNA, 19 nt, Homo sapiens
  misc_RNA (1)...(19): siRNA sense strand
auaauaagccagagaucga

SEQ ID NO: 206880 - RNA, 19 nt, Homo sapiens
  misc_RNA (1)...(19): siRNA sense strand
cuaauaauaagccagagau

SEQ ID NO: 206881 - RNA, 19 nt, Homo sapiens
  misc_RNA (1)...(19): siRNA sense strand
ugggugaaguugcauccuu

SEQ ID NO: 206882 - RNA, 19 nt, Homo sapiens
  misc_RNA (1)...(19): siRNA sense strand
caucauuucccuguguaaa

SEQ ID NO: 206883 - RNA, 19 nt, Homo sapiens
  misc_RNA (1)...(19): siRNA sense strand
gcguggauaugugucugaa

SEQ ID NO: 206884 - RNA, 19 nt, Homo sapiens
  misc_RNA (1)...(19): siRNA sense strand
gcacuaucccaugguggaa

SEQ ID NO: 206885 - RNA, 19 nt, Homo sapiens
  misc_RNA (1)...(19): siRNA sense strand
gagccugucagcugcaugu

SEQ ID NO: 206886 - RNA, 19 nt, Homo sapiens
  misc_RNA (1)...(19): siRNA sense strand
guacagauaccuuuucaag

SEQ ID NO: 206887 - RNA, 19 nt, Homo sapiens
  misc_RNA (1)...(19): siRNA sense strand
gucccucucugcguggaua

SEQ ID NO: 206888 - RNA, 19 nt, Homo sapiens
  misc_RNA (1)...(19): siRNA sense strand
ggagcugcuuccaauuugc

SEQ ID NO: 206889 - RNA, 19 nt, Homo sapiens
  misc_RNA (1)...(19): siRNA sense strand
uuagcugaccugaauaaug

SEQ ID NO: 206890 - RNA, 19 nt, Homo sapiens
  misc_RNA (1)...(19): siRNA sense strand
guggcaaguucaacaggau

SEQ ID NO: 206891 - RNA, 19 nt, Homo sapiens
  misc_RNA (1)...(19): siRNA sense strand
acaacaauuuggucaacgu

SEQ ID NO: 206892 - RNA, 19 nt, Homo sapiens
  misc_RNA (1)...(19): siRNA sense strand
gacuacaucaggagaagau

SEQ ID NO: 206893 - RNA, 19 nt, Homo sapiens
  misc_RNA (1)...(19): siRNA sense strand
uaauaagccagagaucgaa

SEQ ID NO: 206894 - RNA, 19 nt, Homo sapiens
  misc_RNA (1)...(19): siRNA sense strand
ugucagauucucagcuuau

SEQ ID NO: 206895 - RNA, 19 nt, Homo sapiens
  misc_RNA (1)...(19): siRNA sense strand
ggauauccugcagauuauu

SEQ ID NO: 206896 - RNA, 19 nt, Homo sapiens
  misc_RNA (1)...(19): siRNA sense strand
agcaucaggccaaauguaa

SEQ ID NO: 206897 - RNA, 19 nt, Homo sapiens
  misc_RNA (1)...(19): siRNA sense strand
gcccuuugcuuggaucucu

SEQ ID NO: 206898 - RNA, 19 nt, Homo sapiens
  misc_RNA (1)...(19): siRNA sense strand
gcugaauguuuaugauacg

SEQ ID NO: 206899 - RNA, 19 nt, Homo sapiens
  misc_RNA (1)...(19): siRNA sense strand
agacuuugccaagguacua

SEQ ID NO: 206900 - RNA, 19 nt, Homo sapiens
  misc_RNA (1)...(19): siRNA sense strand
caagcaaguggcaaguuca

SEQ ID NO: 206901 - RNA, 19 nt, Homo sapiens
  misc_RNA (1)...(19): siRNA sense strand
agacaaguacagauaccuu

SEQ ID NO: 206902 - RNA, 19 nt, Homo sapiens
  misc_RNA (1)...(19): siRNA sense strand
gcaucauuucccuguguaa

SEQ ID NO: 206903 - RNA, 19 nt, Homo sapiens
  misc_RNA (1)...(19): siRNA sense strand
cugcaaagaguguccaauc

SEQ ID NO: 206904 - RNA, 19 nt, Homo sapiens
  misc_RNA (1)...(19): siRNA sense strand
cuuauaggacugccaugaa

SEQ ID NO: 206905 - RNA, 19 nt, Homo sapiens
  misc_RNA (1)...(19): siRNA sense strand
caaagaguguccaaucauu

SEQ ID NO: 206906 - RNA, 19 nt, Homo sapiens
  misc_RNA (1)...(19): siRNA sense strand
uagcugaccugaauaaugu

SEQ ID NO: 206907 - RNA, 19 nt, Homo sapiens
  misc_RNA (1)...(19): siRNA sense strand
gcaugauucuauccaaauu

SEQ ID NO: 206908 - RNA, 19 nt, Homo sapiens
  misc_RNA (1)...(19): siRNA sense strand
ugaacuggcugcugaaugu

SEQ ID NO: 206909 - RNA, 19 nt, Homo sapiens
  misc_RNA (1)...(19): siRNA sense strand
gauauccugcagauuauua

SEQ ID NO: 206910 - RNA, 19 nt, Homo sapiens
  misc_RNA (1)...(19): siRNA sense strand
gagaagauguucgagacuu

SEQ ID NO: 206911 - RNA, 19 nt, Homo sapiens
  misc_RNA (1)...(19): siRNA sense strand
gcacuuuaauuaugacauc

SEQ ID NO: 206912 - RNA, 19 nt, Homo sapiens
  misc_RNA (1)...(19): siRNA sense strand
guaaagcacauuuggaaga

SEQ ID NO: 206913 - RNA, 19 nt, Homo sapiens
  misc_RNA (1)...(19): siRNA sense strand
gaauauugcacuccgacua

SEQ ID NO: 206914 - RNA, 19 nt, Homo sapiens
  misc_RNA (1)...(19): siRNA sense strand
uuauaggacugccaugaaa

SEQ ID NO: 206915 - RNA, 19 nt, Homo sapiens
  misc_RNA (1)...(19): siRNA sense strand
gggugaaguugcauccuuu

SEQ ID NO: 206916 - RNA, 19 nt, Homo sapiens
  misc_RNA (1)...(19): siRNA sense strand
gcaagagcacaacaauuug

SEQ ID NO: 206917 - RNA, 19 nt, Homo sapiens
  misc_RNA (1)...(19): siRNA sense strand
gcacaacaauuuggucaac

SEQ ID NO: 206918 - RNA, 19 nt, Homo sapiens
  misc_RNA (1)...(19): siRNA sense strand
agcaagagcacaacaauuu

SEQ ID NO: 206919 - RNA, 19 nt, Homo sapiens
  misc_RNA (1)...(19): siRNA sense strand
agaagauguucgagacuuu

SEQ ID NO: 206920 - RNA, 19 nt, Homo sapiens
  misc_RNA (1)...(19): siRNA sense strand
gagcaagagcacaacaauu

SEQ ID NO: 206921 - RNA, 19 nt, Homo sapiens
  misc_RNA (1)...(19): siRNA sense strand
ucaagcaaguggcaaguuc

SEQ ID NO: 206922 - RNA, 19 nt, Homo sapiens
  misc_RNA (1)...(19): siRNA sense strand
ccacgagacucaaacaacu

SEQ ID NO: 206923 - RNA, 19 nt, Homo sapiens
  misc_RNA (1)...(19): siRNA sense strand
cagcacaaccucaagcaaa

SEQ ID NO: 206924 - RNA, 19 nt, Homo sapiens
  misc_RNA (1)...(19): siRNA sense strand
gcaaagaguguccaaucau

SEQ ID NO: 206925 - RNA, 19 nt, Homo sapiens
  misc_RNA (1)...(19): siRNA sense strand
auggauauccugcagauua

SEQ ID NO: 206926 - RNA, 19 nt, Homo sapiens
  misc_RNA (1)...(19): siRNA sense strand
uguaacaucugcaaagagu

SEQ ID NO: 206927 - RNA, 19 nt, Homo sapiens
  misc_RNA (1)...(19): siRNA sense strand
guccggagcugcuuccaau

SEQ ID NO: 206928 - RNA, 19 nt, Homo sapiens
  misc_RNA (1)...(19): siRNA sense strand
gcaaguggcaaguucaaca

SEQ ID NO: 206929 - RNA, 19 nt, Homo sapiens
  misc_RNA (1)...(19): siRNA sense strand
gcuuccaauuugcuaauaa

SEQ ID NO: 206930 - RNA, 19 nt, Homo sapiens
  misc_RNA (1)...(19): siRNA sense strand
uggaagacaaguacagaua

SEQ ID NO: 206931 - RNA, 19 nt, Homo sapiens
  misc_RNA (1)...(19): siRNA sense strand
ggauccguguccugucuuu

SEQ ID NO: 206932 - RNA, 19 nt, Homo sapiens
  misc_RNA (1)...(19): siRNA sense strand
gucuuuagcugaccugaau

SEQ ID NO: 206933 - RNA, 19 nt, Homo sapiens
  misc_RNA (1)...(19): siRNA sense strand
gacaaguacagauaccuuu

SEQ ID NO: 206934 - RNA, 19 nt, Homo sapiens
  misc_RNA (1)...(19): siRNA sense strand
ccaagcaucaggccaaaug

SEQ ID NO: 206935 - RNA, 19 nt, Homo sapiens
  misc_RNA (1)...(19): siRNA sense strand
ggagcaagagcacaacaau

SEQ ID NO: 206936 - RNA, 19 nt, Homo sapiens
  misc_RNA (1)...(19): siRNA sense strand
guguaaagcacauuuggaa

SEQ ID NO: 206937 - RNA, 19 nt, Homo sapiens
  misc_RNA (1)...(19): siRNA sense strand
caagacaguugggugaagu

SEQ ID NO: 206938 - RNA, 19 nt, Homo sapiens
  misc_RNA (1)...(19): siRNA sense strand
gaagauguucgagacuuug

SEQ ID NO: 206939 - RNA, 19 nt, Homo sapiens
  misc_RNA (1)...(19): siRNA sense strand
gucagauucucagcuuaua

SEQ ID NO: 206940 - RNA, 19 nt, Homo sapiens
  misc_RNA (1)...(19): siRNA sense strand
uaacaucugcaaagagugu

SEQ ID NO: 206941 - RNA, 19 nt, Homo sapiens
  misc_RNA (1)...(19): siRNA sense strand
cggagcugcuuccaauuug

SEQ ID NO: 206942 - RNA, 19 nt, Homo sapiens
  misc_RNA (1)...(19): siRNA sense strand
gaagacaaguacagauacc

SEQ ID NO: 206943 - RNA, 19 nt, Homo sapiens
  misc_RNA (1)...(19): siRNA sense strand
ccauggauauccugcagau

SEQ ID NO: 206944 - RNA, 19 nt, Homo sapiens
  misc_RNA (1)...(19): siRNA sense strand
ggcaucauuucccugugua

SEQ ID NO: 206945 - RNA, 19 nt, Homo sapiens
  misc_RNA (1)...(19): siRNA sense strand
uggauauccugcagauuau

SEQ ID NO: 206946 - RNA, 19 nt, Homo sapiens
  misc_RNA (1)...(19): siRNA sense strand
ggaagacaaguacagauac

SEQ ID NO: 206947 - RNA, 19 nt, Homo sapiens
  misc_RNA (1)...(19): siRNA sense strand
ugcaaagaguguccaauca

SEQ ID NO: 206948 - RNA, 19 nt, Homo sapiens
  misc_RNA (1)...(19): siRNA sense strand
guggauaugugucugaacu

SEQ ID NO: 206949 - RNA, 19 nt, Homo sapiens
  misc_RNA (1)...(19): siRNA sense strand
acuggcugcugaauguuua

SEQ ID NO: 206950 - RNA, 19 nt, Homo sapiens
  misc_RNA (1)...(19): siRNA sense strand
acuaucccaugguggaaua

SEQ ID NO: 206951 - RNA, 19 nt, Homo sapiens
  misc_RNA (1)...(19): siRNA sense strand
ccggagcugcuuccaauuu

SEQ ID NO: 206952 - RNA, 19 nt, Homo sapiens
  misc_RNA (1)...(19): siRNA sense strand
ccaaauuccaagacaguug

SEQ ID NO: 206953 - RNA, 19 nt, Homo sapiens
  misc_RNA (1)...(19): siRNA sense strand
cagaaacugccaagcauca

SEQ ID NO: 206954 - RNA, 19 nt, Homo sapiens
  misc_RNA (1)...(19): siRNA sense strand
uaugacaucugccaaagcu

SEQ ID NO: 206955 - RNA, 19 nt, Homo sapiens
  misc_RNA (1)...(19): siRNA sense strand
aaugucagauucucagcuu

SEQ ID NO: 206956 - RNA, 19 nt, Homo sapiens
  misc_RNA (1)...(19): siRNA sense strand
ucgagacuuugccaaggua

SEQ ID NO: 206957 - RNA, 19 nt, Homo sapiens
  misc_RNA (1)...(19): siRNA sense strand
gcaaaaggccauaaaaugc

SEQ ID NO: 206958 - RNA, 19 nt, Homo sapiens
  misc_RNA (1)...(19): siRNA sense strand
cugcaugauucuauccaaa

SEQ ID NO: 206959 - RNA, 19 nt, Homo sapiens
  misc_RNA (1)...(19): siRNA sense strand
uaaagcacauuuggaagac

SEQ ID NO: 206960 - RNA, 19 nt, Homo sapiens
  misc_RNA (1)...(19): siRNA sense strand
acaggagucuaaagcacuu

SEQ ID NO: 206961 - RNA, 19 nt, Homo sapiens
  misc_RNA (1)...(19): siRNA sense strand
acagauaccuuuucaagca

SEQ ID NO: 206962 - RNA, 19 nt, Homo sapiens
  misc_RNA (1)...(19): siRNA sense strand
aagcacauuuggaagacaa

SEQ ID NO: 206963 - RNA, 19 nt, Homo sapiens
  misc_RNA (1)...(19): siRNA sense strand
gcuaauaauaagccagaga

SEQ ID NO: 206964 - RNA, 19 nt, Homo sapiens
  misc_RNA (1)...(19): siRNA sense strand
caagagcacaacaauuugg

SEQ ID NO: 206965 - RNA, 19 nt, Homo sapiens
  misc_RNA (1)...(19): siRNA sense strand
ccugucagcugcaugugau

SEQ ID NO: 206966 - RNA, 19 nt, Homo sapiens
  misc_RNA (1)...(19): siRNA sense strand
gcugcugaauguuuaugau

SEQ ID NO: 206967 - RNA, 19 nt, Homo sapiens
  misc_RNA (1)...(19): siRNA sense strand
acagagcucuaccagucuu

SEQ ID NO: 206968 - RNA, 19 nt, Homo sapiens
  misc_RNA (1)...(19): siRNA sense strand
acaguugggugaaguugca

SEQ ID NO: 206969 - RNA, 19 nt, Homo sapiens
  misc_RNA (1)...(19): siRNA sense strand
guuugaccacuauuuauga

SEQ ID NO: 206970 - RNA, 19 nt, Homo sapiens
  misc_RNA (1)...(19): siRNA sense strand
gcuuauaggacugccauga

SEQ ID NO: 206971 - RNA, 19 nt, Homo sapiens
  misc_RNA (1)...(19): siRNA sense strand
caucaggccaaauguaaca

SEQ ID NO: 206972 - RNA, 19 nt, Homo sapiens
  misc_RNA (1)...(19): siRNA sense strand
gauucuauccaaauuccaa

SEQ ID NO: 206973 - RNA, 19 nt, Homo sapiens
  misc_RNA (1)...(19): siRNA sense strand
ggcaaguucaacaggauuu

SEQ ID NO: 206974 - RNA, 19 nt, Homo sapiens
  misc_RNA (1)...(19): siRNA sense strand
gaacuggcugcugaauguu

SEQ ID NO: 206975 - RNA, 19 nt, Homo sapiens
  misc_RNA (1)...(19): siRNA sense strand
cugcugaauguuuaugaua

SEQ ID NO: 206976 - RNA, 19 nt, Homo sapiens
  misc_RNA (1)...(19): siRNA sense strand
aagcaucaggccaaaugua

SEQ ID NO: 206977 - RNA, 19 nt, Homo sapiens
  misc_RNA (1)...(19): siRNA sense strand
uggcaucauuucccugugu

SEQ ID NO: 206978 - RNA, 19 nt, Homo sapiens
  misc_RNA (1)...(19): siRNA sense strand
ccaugaaacuccgaagacu

SEQ ID NO: 206979 - RNA, 19 nt, Homo sapiens
  misc_RNA (1)...(19): siRNA sense strand
auaauaagccagagaucga

SEQ ID NO: 206980 - RNA, 19 nt, Homo sapiens
  misc_RNA (1)...(19): siRNA sense strand
cuaauaauaagccagagau

SEQ ID NO: 206981 - RNA, 19 nt, Homo sapiens
  misc_RNA (1)...(19): siRNA sense strand
ugggugaaguugcauccuu

SEQ ID NO: 206982 - RNA, 19 nt, Homo sapiens
  misc_RNA (1)...(19): siRNA sense strand
caucauuucccuguguaaa

SEQ ID NO: 206983 - RNA, 19 nt, Homo sapiens
  misc_RNA (1)...(19): siRNA sense strand
gcguggauaugugucugaa

SEQ ID NO: 206984 - RNA, 19 nt, Homo sapiens
  misc_RNA (1)...(19): siRNA sense strand
gcacuaucccaugguggaa

SEQ ID NO: 206985 - RNA, 19 nt, Homo sapiens
  misc_RNA (1)...(19): siRNA sense strand
gagccugucagcugcaugu

SEQ ID NO: 206986 - RNA, 19 nt, Homo sapiens
  misc_RNA (1)...(19): siRNA sense strand
guacagauaccuuuucaag

SEQ ID NO: 206987 - RNA, 19 nt, Homo sapiens
  misc_RNA (1)...(19): siRNA sense strand
gucccucucugcguggaua

SEQ ID NO: 206988 - RNA, 19 nt, Homo sapiens
  misc_RNA (1)...(19): siRNA sense strand
ggagcugcuuccaauuugc

SEQ ID NO: 206989 - RNA, 19 nt, Homo sapiens
  misc_RNA (1)...(19): siRNA sense strand
uuagcugaccugaauaaug

SEQ ID NO: 206990 - RNA, 19 nt, Homo sapiens
  misc_RNA (1)...(19): siRNA sense strand
guggcaaguucaacaggau

SEQ ID NO: 206991 - RNA, 19 nt, Homo sapiens
  misc_RNA (1)...(19): siRNA sense strand
acaacaauuuggucaacgu

SEQ ID NO: 206992 - RNA, 19 nt, Homo sapiens
  misc_RNA (1)...(19): siRNA sense strand
gacuacaucaggagaagau

SEQ ID NO: 206993 - RNA, 19 nt, Homo sapiens
  misc_RNA (1)...(19): siRNA sense strand
uaauaagccagagaucgaa

SEQ ID NO: 206994 - RNA, 19 nt, Homo sapiens
  misc_RNA (1)...(19): siRNA sense strand
ugucagauucucagcuuau

SEQ ID NO: 206995 - RNA, 19 nt, Homo sapiens
  misc_RNA (1)...(19): siRNA sense strand
ggauauccugcagauuauu

SEQ ID NO: 206996 - RNA, 19 nt, Homo sapiens
  misc_RNA (1)...(19): siRNA sense strand
agcaucaggccaaauguaa

SEQ ID NO: 206997 - RNA, 19 nt, Homo sapiens
  misc_RNA (1)...(19): siRNA sense strand
gcccuuugcuuggaucucu

SEQ ID NO: 206998 - RNA, 19 nt, Homo sapiens
  misc_RNA (1)...(19): siRNA sense strand
gcugaauguuuaugauacg

SEQ ID NO: 206999 - RNA, 19 nt, Homo sapiens
  misc_RNA (1)...(19): siRNA sense strand
agacuuugccaagguacua

SEQ ID NO: 207000 - RNA, 19 nt, Homo sapiens
  misc_RNA (1)...(19): siRNA sense strand
caagcaaguggcaaguuca

SEQ ID NO: 207001 - RNA, 19 nt, Homo sapiens
  misc_RNA (1)...(19): siRNA sense strand
agacaaguacagauaccuu

SEQ ID NO: 207002 - RNA, 19 nt, Homo sapiens
  misc_RNA (1)...(19): siRNA sense strand
gcaucauuucccuguguaa

SEQ ID NO: 207003 - RNA, 19 nt, Homo sapiens
  misc_RNA (1)...(19): siRNA sense strand
cugcaaagaguguccaauc

SEQ ID NO: 207004 - RNA, 19 nt, Homo sapiens
  misc_RNA (1)...(19): siRNA sense strand
cuuauaggacugccaugaa

SEQ ID NO: 207005 - RNA, 19 nt, Homo sapiens
  misc_RNA (1)...(19): siRNA sense strand
caaagaguguccaaucauu

SEQ ID NO: 207006 - RNA, 19 nt, Homo sapiens
  misc_RNA (1)...(19): siRNA sense strand
uagcugaccugaauaaugu

SEQ ID NO: 207007 - RNA, 19 nt, Homo sapiens
  misc_RNA (1)...(19): siRNA sense strand
gcaugauucuauccaaauu

SEQ ID NO: 207008 - RNA, 19 nt, Homo sapiens
  misc_RNA (1)...(19): siRNA sense strand
ugaacuggcugcugaaugu

SEQ ID NO: 207009 - RNA, 19 nt, Homo sapiens
  misc_RNA (1)...(19): siRNA sense strand
gauauccugcagauuauua

SEQ ID NO: 207010 - RNA, 19 nt, Homo sapiens
  misc_RNA (1)...(19): siRNA sense strand
gagaagauguucgagacuu

SEQ ID NO: 207011 - RNA, 19 nt, Homo sapiens
  misc_RNA (1)...(19): siRNA sense strand
gcacuuuaauuaugacauc

SEQ ID NO: 207012 - RNA, 19 nt, Homo sapiens
  misc_RNA (1)...(19): siRNA sense strand
guaaagcacauuuggaaga

SEQ ID NO: 207013 - RNA, 19 nt, Homo sapiens
  misc_RNA (1)...(19): siRNA sense strand
gaauauugcacuccgacua

SEQ ID NO: 207014 - RNA, 19 nt, Homo sapiens
  misc_RNA (1)...(19): siRNA sense strand
uuauaggacugccaugaaa

SEQ ID NO: 207015 - RNA, 19 nt, Homo sapiens
  misc_RNA (1)...(19): siRNA sense strand
gggugaaguugcauccuuu

SEQ ID NO: 207016 - RNA, 19 nt, Homo sapiens
  misc_RNA (1)...(19): siRNA sense strand
gcaagagcacaacaauuug

SEQ ID NO: 207017 - RNA, 19 nt, Homo sapiens
  misc_RNA (1)...(19): siRNA sense strand
gcacaacaauuuggucaac

SEQ ID NO: 207018 - RNA, 19 nt, Homo sapiens
  misc_RNA (1)...(19): siRNA sense strand
agcaagagcacaacaauuu

SEQ ID NO: 207019 - RNA, 19 nt, Homo sapiens
  misc_RNA (1)...(19): siRNA sense strand
agaagauguucgagacuuu

SEQ ID NO: 207020 - RNA, 19 nt, Homo sapiens
  misc_RNA (1)...(19): siRNA sense strand
gagcaagagcacaacaauu

SEQ ID NO: 207021 - RNA, 19 nt, Homo sapiens
  misc_RNA (1)...(19): siRNA sense strand
ucaagcaaguggcaaguuc

SEQ ID NO: 207022 - RNA, 19 nt, Homo sapiens
  misc_RNA (1)...(19): siRNA sense strand
ccacgagacucaaacaacu

SEQ ID NO: 207023 - RNA, 19 nt, Homo sapiens
  misc_RNA (1)...(19): siRNA sense strand
cagcacaaccucaagcaaa

SEQ ID NO: 207024 - RNA, 19 nt, Homo sapiens
  misc_RNA (1)...(19): siRNA sense strand
gcaaagaguguccaaucau

SEQ ID NO: 207025 - RNA, 19 nt, Homo sapiens
  misc_RNA (1)...(19): siRNA sense strand
auggauauccugcagauua

SEQ ID NO: 207026 - RNA, 19 nt, Homo sapiens
  misc_RNA (1)...(19): siRNA sense strand
uguaacaucugcaaagagu

SEQ ID NO: 207027 - RNA, 19 nt, Homo sapiens
  misc_RNA (1)...(19): siRNA sense strand
guccggagcugcuuccaau

SEQ ID NO: 207028 - RNA, 19 nt, Homo sapiens
  misc_RNA (1)...(19): siRNA sense strand
gcaaguggcaaguucaaca

SEQ ID NO: 207029 - RNA, 19 nt, Homo sapiens
  misc_RNA (1)...(19): siRNA sense strand
gcuuccaauuugcuaauaa

SEQ ID NO: 207030 - RNA, 19 nt, Homo sapiens
  misc_RNA (1)...(19): siRNA sense strand
uggaagacaaguacagaua

SEQ ID NO: 207031 - RNA, 19 nt, Homo sapiens
  misc_RNA (1)...(19): siRNA sense strand
ggauccguguccugucuuu

SEQ ID NO: 207032 - RNA, 19 nt, Homo sapiens
  misc_RNA (1)...(19): siRNA sense strand
gucuuuagcugaccugaau

SEQ ID NO: 207033 - RNA, 19 nt, Homo sapiens
  misc_RNA (1)...(19): siRNA sense strand
gacaaguacagauaccuuu

SEQ ID NO: 207034 - RNA, 19 nt, Homo sapiens
  misc_RNA (1)...(19): siRNA sense strand
ccaagcaucaggccaaaug

SEQ ID NO: 207035 - RNA, 19 nt, Homo sapiens
  misc_RNA (1)...(19): siRNA sense strand
ggagcaagagcacaacaau

SEQ ID NO: 207036 - RNA, 19 nt, Homo sapiens
  misc_RNA (1)...(19): siRNA sense strand
guguaaagcacauuuggaa

SEQ ID NO: 207037 - RNA, 19 nt, Homo sapiens
  misc_RNA (1)...(19): siRNA sense strand
caagacaguugggugaagu

SEQ ID NO: 207038 - RNA, 19 nt, Homo sapiens
  misc_RNA (1)...(19): siRNA sense strand
gaagauguucgagacuuug

SEQ ID NO: 207039 - RNA, 19 nt, Homo sapiens
  misc_RNA (1)...(19): siRNA sense strand
gucagauucucagcuuaua

SEQ ID NO: 207040 - RNA, 19 nt, Homo sapiens
  misc_RNA (1)...(19): siRNA sense strand
uaacaucugcaaagagugu

SEQ ID NO: 207041 - RNA, 19 nt, Homo sapiens
  misc_RNA (1)...(19): siRNA sense strand
cggagcugcuuccaauuug

SEQ ID NO: 207042 - RNA, 19 nt, Homo sapiens
  misc_RNA (1)...(19): siRNA sense strand
gaagacaaguacagauacc

SEQ ID NO: 207043 - RNA, 19 nt, Homo sapiens
  misc_RNA (1)...(19): siRNA sense strand
ccauggauauccugcagau

SEQ ID NO: 207044 - RNA, 19 nt, Homo sapiens
  misc_RNA (1)...(19): siRNA sense strand
ggcaucauuucccugugua

SEQ ID NO: 207045 - RNA, 19 nt, Homo sapiens
  misc_RNA (1)...(19): siRNA sense strand
uggauauccugcagauuau

SEQ ID NO: 207046 - RNA, 19 nt, Homo sapiens
  misc_RNA (1)...(19): siRNA sense strand
ggaagacaaguacagauac

SEQ ID NO: 207047 - RNA, 19 nt, Homo sapiens
  misc_RNA (1)...(19): siRNA sense strand
ugcaaagaguguccaauca

SEQ ID NO: 207048 - RNA, 19 nt, Homo sapiens
  misc_RNA (1)...(19): siRNA sense strand
guggauaugugucugaacu

SEQ ID NO: 207049 - RNA, 19 nt, Homo sapiens
  misc_RNA (1)...(19): siRNA sense strand
acuggcugcugaauguuua

SEQ ID NO: 207050 - RNA, 19 nt, Homo sapiens
  misc_RNA (1)...(19): siRNA sense strand
acuaucccaugguggaaua

SEQ ID NO: 207051 - RNA, 19 nt, Homo sapiens
  misc_RNA (1)...(19): siRNA sense strand
ccggagcugcuuccaauuu

SEQ ID NO: 207052 - RNA, 19 nt, Homo sapiens
  misc_RNA (1)...(19): siRNA sense strand
ccaaauuccaagacaguug

SEQ ID NO: 207053 - RNA, 19 nt, Homo sapiens
  misc_RNA (1)...(19): siRNA sense strand
cagaaacugccaagcauca

SEQ ID NO: 207054 - RNA, 19 nt, Homo sapiens
  misc_RNA (1)...(19): siRNA sense strand
uaugacaucugccaaagcu

SEQ ID NO: 207055 - RNA, 19 nt, Homo sapiens
  misc_RNA (1)...(19): siRNA sense strand
aaugucagauucucagcuu

SEQ ID NO: 207056 - RNA, 19 nt, Homo sapiens
  misc_RNA (1)...(19): siRNA sense strand
ucgagacuuugccaaggua

SEQ ID NO: 207057 - RNA, 19 nt, Homo sapiens
  misc_RNA (1)...(19): siRNA sense strand
gcaaaaggccauaaaaugc

SEQ ID NO: 207058 - RNA, 19 nt, Homo sapiens
  misc_RNA (1)...(19): siRNA sense strand
cugcaugauucuauccaaa

SEQ ID NO: 207059 - RNA, 19 nt, Homo sapiens
  misc_RNA (1)...(19): siRNA sense strand
uaaagcacauuuggaagac

SEQ ID NO: 207060 - RNA, 19 nt, Homo sapiens
  misc_RNA (1)...(19): siRNA sense strand
acaggagucuaaagcacuu

SEQ ID NO: 207061 - RNA, 19 nt, Homo sapiens
  misc_RNA (1)...(19): siRNA sense strand
acagauaccuuuucaagca

SEQ ID NO: 207062 - RNA, 19 nt, Homo sapiens
  misc_RNA (1)...(19): siRNA sense strand
aagcacauuuggaagacaa

SEQ ID NO: 207063 - RNA, 19 nt, Homo sapiens
  misc_RNA (1)...(19): siRNA sense strand
gcuaauaauaagccagaga

SEQ ID NO: 207064 - RNA, 19 nt, Homo sapiens
  misc_RNA (1)...(19): siRNA sense strand
caagagcacaacaauuugg

SEQ ID NO: 207065 - RNA, 19 nt, Homo sapiens
  misc_RNA (1)...(19): siRNA sense strand
ccugucagcugcaugugau

SEQ ID NO: 207066 - RNA, 19 nt, Homo sapiens
  misc_RNA (1)...(19): siRNA sense strand
gcugcugaauguuuaugau

SEQ ID NO: 207067 - RNA, 19 nt, Homo sapiens
  misc_RNA (1)...(19): siRNA sense strand
acagagcucuaccagucuu

SEQ ID NO: 207068 - RNA, 19 nt, Homo sapiens
  misc_RNA (1)...(19): siRNA sense strand
acaguugggugaaguugca

SEQ ID NO: 207069 - RNA, 19 nt, Homo sapiens
  misc_RNA (1)...(19): siRNA sense strand
guuugaccacuauuuauga

SEQ ID NO: 207070 - RNA, 19 nt, Homo sapiens
  misc_RNA (1)...(19): siRNA sense strand
gcuuauaggacugccauga

SEQ ID NO: 207071 - RNA, 19 nt, Homo sapiens
  misc_RNA (1)...(19): siRNA sense strand
caucaggccaaauguaaca

SEQ ID NO: 207072 - RNA, 19 nt, Homo sapiens
  misc_RNA (1)...(19): siRNA sense strand
gauucuauccaaauuccaa

SEQ ID NO: 207073 - RNA, 19 nt, Homo sapiens
  misc_RNA (1)...(19): siRNA sense strand
ggcaaguucaacaggauuu

SEQ ID NO: 207074 - RNA, 19 nt, Homo sapiens
  misc_RNA (1)...(19): siRNA sense strand
gaacuggcugcugaauguu

SEQ ID NO: 207075 - RNA, 19 nt, Homo sapiens
  misc_RNA (1)...(19): siRNA sense strand
cugcugaauguuuaugaua

SEQ ID NO: 207076 - RNA, 19 nt, Homo sapiens
  misc_RNA (1)...(19): siRNA sense strand
aagcaucaggccaaaugua

SEQ ID NO: 207077 - RNA, 19 nt, Homo sapiens
  misc_RNA (1)...(19): siRNA sense strand
uggcaucauuucccugugu

SEQ ID NO: 207078 - RNA, 19 nt, Homo sapiens
  misc_RNA (1)...(19): siRNA sense strand
ccaugaaacuccgaagacu

SEQ ID NO: 207079 - RNA, 19 nt, Homo sapiens
  misc_RNA (1)...(19): siRNA sense strand
auaauaagccagagaucga

SEQ ID NO: 207080 - RNA, 19 nt, Homo sapiens
  misc_RNA (1)...(19): siRNA sense strand
cuaauaauaagccagagau

SEQ ID NO: 207081 - RNA, 19 nt, Homo sapiens
  misc_RNA (1)...(19): siRNA sense strand
ugggugaaguugcauccuu

SEQ ID NO: 207082 - RNA, 19 nt, Homo sapiens
  misc_RNA (1)...(19): siRNA sense strand
caucauuucccuguguaaa

SEQ ID NO: 207083 - RNA, 19 nt, Homo sapiens
  misc_RNA (1)...(19): siRNA sense strand
gcguggauaugugucugaa

SEQ ID NO: 207084 - RNA, 19 nt, Homo sapiens
  misc_RNA (1)...(19): siRNA sense strand
gcacuaucccaugguggaa

SEQ ID NO: 207085 - RNA, 19 nt, Homo sapiens
  misc_RNA (1)...(19): siRNA sense strand
gagccugucagcugcaugu

SEQ ID NO: 207086 - RNA, 19 nt, Homo sapiens
  misc_RNA (1)...(19): siRNA sense strand
guacagauaccuuuucaag

SEQ ID NO: 207087 - RNA, 19 nt, Homo sapiens
  misc_RNA (1)...(19): siRNA sense strand
gucccucucugcguggaua

SEQ ID NO: 207088 - RNA, 19 nt, Homo sapiens
  misc_RNA (1)...(19): siRNA sense strand
ggagcugcuuccaauuugc

SEQ ID NO: 207089 - RNA, 19 nt, Homo sapiens
  misc_RNA (1)...(19): siRNA sense strand
uuagcugaccugaauaaug

SEQ ID NO: 207090 - RNA, 19 nt, Homo sapiens
  misc_RNA (1)...(19): siRNA sense strand
guggcaaguucaacaggau

SEQ ID NO: 207091 - RNA, 19 nt, Homo sapiens
  misc_RNA (1)...(19): siRNA sense strand
acaacaauuuggucaacgu

SEQ ID NO: 207092 - RNA, 19 nt, Homo sapiens
  misc_RNA (1)...(19): siRNA sense strand
gacuacaucaggagaagau

SEQ ID NO: 207093 - RNA, 19 nt, Homo sapiens
  misc_RNA (1)...(19): siRNA sense strand
uaauaagccagagaucgaa

SEQ ID NO: 207094 - RNA, 19 nt, Homo sapiens
  misc_RNA (1)...(19): siRNA sense strand
ugucagauucucagcuuau

SEQ ID NO: 207095 - RNA, 19 nt, Homo sapiens
  misc_RNA (1)...(19): siRNA sense strand
ggauauccugcagauuauu

SEQ ID NO: 207096 - RNA, 19 nt, Homo sapiens
  misc_RNA (1)...(19): siRNA sense strand
agcaucaggccaaauguaa

SEQ ID NO: 207097 - RNA, 19 nt, Homo sapiens
  misc_RNA (1)...(19): siRNA sense strand
gcccuuugcuuggaucucu

SEQ ID NO: 207098 - RNA, 19 nt, Homo sapiens
  misc_RNA (1)...(19): siRNA sense strand
gcugaauguuuaugauacg

SEQ ID NO: 207099 - RNA, 19 nt, Homo sapiens
  misc_RNA (1)...(19): siRNA sense strand
agacuuugccaagguacua

SEQ ID NO: 207100 - RNA, 19 nt, Homo sapiens
  misc_RNA (1)...(19): siRNA sense strand
caagcaaguggcaaguuca

SEQ ID NO: 207101 - RNA, 19 nt, Homo sapiens
  misc_RNA (1)...(19): siRNA sense strand
agacaaguacagauaccuu

SEQ ID NO: 207102 - RNA, 19 nt, Homo sapiens
  misc_RNA (1)...(19): siRNA sense strand
gcaucauuucccuguguaa

SEQ ID NO: 207103 - RNA, 19 nt, Homo sapiens
  misc_RNA (1)...(19): siRNA sense strand
cugcaaagaguguccaauc

SEQ ID NO: 207104 - RNA, 19 nt, Homo sapiens
  misc_RNA (1)...(19): siRNA sense strand
cuuauaggacugccaugaa

SEQ ID NO: 207105 - RNA, 19 nt, Homo sapiens
  misc_RNA (1)...(19): siRNA sense strand
caaagaguguccaaucauu

SEQ ID NO: 207106 - RNA, 19 nt, Homo sapiens
  misc_RNA (1)...(19): siRNA sense strand
uagcugaccugaauaaugu

SEQ ID NO: 207107 - RNA, 19 nt, Homo sapiens
  misc_RNA (1)...(19): siRNA sense strand
gcaugauucuauccaaauu

SEQ ID NO: 207108 - RNA, 19 nt, Homo sapiens
  misc_RNA (1)...(19): siRNA sense strand
ugaacuggcugcugaaugu

SEQ ID NO: 207109 - RNA, 19 nt, Homo sapiens
  misc_RNA (1)...(19): siRNA sense strand
gauauccugcagauuauua

SEQ ID NO: 207110 - RNA, 19 nt, Homo sapiens
  misc_RNA (1)...(19): siRNA sense strand
gagaagauguucgagacuu

SEQ ID NO: 207111 - RNA, 19 nt, Homo sapiens
  misc_RNA (1)...(19): siRNA sense strand
gcacuuuaauuaugacauc

SEQ ID NO: 207112 - RNA, 19 nt, Homo sapiens
  misc_RNA (1)...(19): siRNA sense strand
guaaagcacauuuggaaga

SEQ ID NO: 207113 - RNA, 19 nt, Homo sapiens
  misc_RNA (1)...(19): siRNA sense strand
gaauauugcacuccgacua

SEQ ID NO: 207114 - RNA, 19 nt, Homo sapiens
  misc_RNA (1)...(19): siRNA sense strand
uuauaggacugccaugaaa

SEQ ID NO: 207115 - RNA, 19 nt, Homo sapiens
  misc_RNA (1)...(19): siRNA sense strand
gggugaaguugcauccuuu

SEQ ID NO: 207116 - RNA, 19 nt, Homo sapiens
  misc_RNA (1)...(19): siRNA sense strand
gcaagagcacaacaauuug

SEQ ID NO: 207117 - RNA, 19 nt, Homo sapiens
  misc_RNA (1)...(19): siRNA sense strand
gcacaacaauuuggucaac

SEQ ID NO: 207118 - RNA, 19 nt, Homo sapiens
  misc_RNA (1)...(19): siRNA sense strand
agcaagagcacaacaauuu

SEQ ID NO: 207119 - RNA, 19 nt, Homo sapiens
  misc_RNA (1)...(19): siRNA sense strand
agaagauguucgagacuuu

SEQ ID NO: 207120 - RNA, 19 nt, Homo sapiens
  misc_RNA (1)...(19): siRNA sense strand
gagcaagagcacaacaauu

SEQ ID NO: 207121 - RNA, 19 nt, Homo sapiens
  misc_RNA (1)...(19): siRNA sense strand
ucaagcaaguggcaaguuc

SEQ ID NO: 207122 - RNA, 19 nt, Homo sapiens
  misc_RNA (1)...(19): siRNA sense strand
ccacgagacucaaacaacu

SEQ ID NO: 207123 - RNA, 19 nt, Homo sapiens
  misc_RNA (1)...(19): siRNA sense strand
cagcacaaccucaagcaaa

SEQ ID NO: 207124 - RNA, 19 nt, Homo sapiens
  misc_RNA (1)...(19): siRNA sense strand
gcaaagaguguccaaucau

SEQ ID NO: 207125 - RNA, 19 nt, Homo sapiens
  misc_RNA (1)...(19): siRNA sense strand
auggauauccugcagauua

SEQ ID NO: 207126 - RNA, 19 nt, Homo sapiens
  misc_RNA (1)...(19): siRNA sense strand
uguaacaucugcaaagagu

SEQ ID NO: 207127 - RNA, 19 nt, Homo sapiens
  misc_RNA (1)...(19): siRNA sense strand
guccggagcugcuuccaau

SEQ ID NO: 207128 - RNA, 19 nt, Homo sapiens
  misc_RNA (1)...(19): siRNA sense strand
gcaaguggcaaguucaaca

SEQ ID NO: 207129 - RNA, 19 nt, Homo sapiens
  misc_RNA (1)...(19): siRNA sense strand
gcuuccaauuugcuaauaa

SEQ ID NO: 207130 - RNA, 19 nt, Homo sapiens
  misc_RNA (1)...(19): siRNA sense strand
uggaagacaaguacagaua

SEQ ID NO: 207131 - RNA, 19 nt, Homo sapiens
  misc_RNA (1)...(19): siRNA sense strand
ggauccguguccugucuuu

SEQ ID NO: 207132 - RNA, 19 nt, Homo sapiens
  misc_RNA (1)...(19): siRNA sense strand
gucuuuagcugaccugaau

SEQ ID NO: 207133 - RNA, 19 nt, Homo sapiens
  misc_RNA (1)...(19): siRNA sense strand
gacaaguacagauaccuuu

SEQ ID NO: 207134 - RNA, 19 nt, Homo sapiens
  misc_RNA (1)...(19): siRNA sense strand
ccaagcaucaggccaaaug

SEQ ID NO: 207135 - RNA, 19 nt, Homo sapiens
  misc_RNA (1)...(19): siRNA sense strand
ggagcaagagcacaacaau

SEQ ID NO: 207136 - RNA, 19 nt, Homo sapiens
  misc_RNA (1)...(19): siRNA sense strand
guguaaagcacauuuggaa

SEQ ID NO: 207137 - RNA, 19 nt, Homo sapiens
  misc_RNA (1)...(19): siRNA sense strand
caagacaguugggugaagu

SEQ ID NO: 207138 - RNA, 19 nt, Homo sapiens
  misc_RNA (1)...(19): siRNA sense strand
gaagauguucgagacuuug

SEQ ID NO: 207139 - RNA, 19 nt, Homo sapiens
  misc_RNA (1)...(19): siRNA sense strand
gucagauucucagcuuaua

SEQ ID NO: 207140 - RNA, 19 nt, Homo sapiens
  misc_RNA (1)...(19): siRNA sense strand
uaacaucugcaaagagugu

SEQ ID NO: 207141 - RNA, 19 nt, Homo sapiens
  misc_RNA (1)...(19): siRNA sense strand
cggagcugcuuccaauuug

SEQ ID NO: 207142 - RNA, 19 nt, Homo sapiens
  misc_RNA (1)...(19): siRNA sense strand
gaagacaaguacagauacc

SEQ ID NO: 207143 - RNA, 19 nt, Homo sapiens
  misc_RNA (1)...(19): siRNA sense strand
ccauggauauccugcagau

SEQ ID NO: 207144 - RNA, 19 nt, Homo sapiens
  misc_RNA (1)...(19): siRNA sense strand
ggcaucauuucccugugua

SEQ ID NO: 207145 - RNA, 19 nt, Homo sapiens
  misc_RNA (1)...(19): siRNA sense strand
uggauauccugcagauuau

SEQ ID NO: 207146 - RNA, 19 nt, Homo sapiens
  misc_RNA (1)...(19): siRNA sense strand
ggaagacaaguacagauac

SEQ ID NO: 207147 - RNA, 19 nt, Homo sapiens
  misc_RNA (1)...(19): siRNA sense strand
ugcaaagaguguccaauca

SEQ ID NO: 207148 - RNA, 19 nt, Homo sapiens
  misc_RNA (1)...(19): siRNA sense strand
guggauaugugucugaacu

SEQ ID NO: 207149 - RNA, 19 nt, Homo sapiens
  misc_RNA (1)...(19): siRNA sense strand
acuggcugcugaauguuua

SEQ ID NO: 207150 - RNA, 19 nt, Homo sapiens
  misc_RNA (1)...(19): siRNA sense strand
acuaucccaugguggaaua

SEQ ID NO: 207151 - RNA, 19 nt, Homo sapiens
  misc_RNA (1)...(19): siRNA sense strand
ccggagcugcuuccaauuu

SEQ ID NO: 207152 - RNA, 19 nt, Homo sapiens
  misc_RNA (1)...(19): siRNA sense strand
ccaaauuccaagacaguug

SEQ ID NO: 207153 - RNA, 19 nt, Homo sapiens
  misc_RNA (1)...(19): siRNA sense strand
cagaaacugccaagcauca

SEQ ID NO: 207154 - RNA, 19 nt, Homo sapiens
  misc_RNA (1)...(19): siRNA sense strand
uaugacaucugccaaagcu

SEQ ID NO: 207155 - RNA, 19 nt, Homo sapiens
  misc_RNA (1)...(19): siRNA sense strand
aaugucagauucucagcuu

SEQ ID NO: 207156 - RNA, 19 nt, Homo sapiens
  misc_RNA (1)...(19): siRNA sense strand
ucgagacuuugccaaggua

SEQ ID NO: 207157 - RNA, 19 nt, Homo sapiens
  misc_RNA (1)...(19): siRNA sense strand
gcaaaaggccauaaaaugc

SEQ ID NO: 207158 - RNA, 19 nt, Homo sapiens
  misc_RNA (1)...(19): siRNA sense strand
cugcaugauucuauccaaa

SEQ ID NO: 207159 - RNA, 19 nt, Homo sapiens
  misc_RNA (1)...(19): siRNA sense strand
uaaagcacauuuggaagac

SEQ ID NO: 207160 - RNA, 19 nt, Homo sapiens
  misc_RNA (1)...(19): siRNA sense strand
acaggagucuaaagcacuu

SEQ ID NO: 207161 - RNA, 19 nt, Homo sapiens
  misc_RNA (1)...(19): siRNA sense strand
acagauaccuuuucaagca

SEQ ID NO: 207162 - RNA, 19 nt, Homo sapiens
  misc_RNA (1)...(19): siRNA sense strand
aagcacauuuggaagacaa

SEQ ID NO: 207163 - RNA, 19 nt, Homo sapiens
  misc_RNA (1)...(19): siRNA sense strand
gcuaauaauaagccagaga

SEQ ID NO: 207164 - RNA, 19 nt, Homo sapiens
  misc_RNA (1)...(19): siRNA sense strand
caagagcacaacaauuugg

SEQ ID NO: 207165 - RNA, 19 nt, Homo sapiens
  misc_RNA (1)...(19): siRNA sense strand
ccugucagcugcaugugau

SEQ ID NO: 207166 - RNA, 19 nt, Homo sapiens
  misc_RNA (1)...(19): siRNA sense strand
gcugcugaauguuuaugau

SEQ ID NO: 207167 - RNA, 19 nt, Homo sapiens
  misc_RNA (1)...(19): siRNA sense strand
acagagcucuaccagucuu

SEQ ID NO: 207168 - RNA, 19 nt, Homo sapiens
  misc_RNA (1)...(19): siRNA sense strand
acaguugggugaaguugca

SEQ ID NO: 207169 - RNA, 19 nt, Homo sapiens
  misc_RNA (1)...(19): siRNA sense strand
guuugaccacuauuuauga

SEQ ID NO: 207170 - RNA, 19 nt, Homo sapiens
  misc_RNA (1)...(19): siRNA sense strand
gcuuauaggacugccauga

SEQ ID NO: 207171 - RNA, 19 nt, Homo sapiens
  misc_RNA (1)...(19): siRNA sense strand
caucaggccaaauguaaca

SEQ ID NO: 207172 - RNA, 19 nt, Homo sapiens
  misc_RNA (1)...(19): siRNA sense strand
gauucuauccaaauuccaa

SEQ ID NO: 207173 - RNA, 19 nt, Homo sapiens
  misc_RNA (1)...(19): siRNA sense strand
ggcaaguucaacaggauuu

SEQ ID NO: 207174 - RNA, 19 nt, Homo sapiens
  misc_RNA (1)...(19): siRNA sense strand
gaacuggcugcugaauguu

SEQ ID NO: 207175 - RNA, 19 nt, Homo sapiens
  misc_RNA (1)...(19): siRNA sense strand
cugcugaauguuuaugaua

SEQ ID NO: 207176 - RNA, 19 nt, Homo sapiens
  misc_RNA (1)...(19): siRNA sense strand
aagcaucaggccaaaugua

SEQ ID NO: 207177 - RNA, 19 nt, Homo sapiens
  misc_RNA (1)...(19): siRNA sense strand
uggcaucauuucccugugu

SEQ ID NO: 207178 - RNA, 19 nt, Homo sapiens
  misc_RNA (1)...(19): siRNA sense strand
ccaugaaacuccgaagacu

SEQ ID NO: 207179 - RNA, 19 nt, Homo sapiens
  misc_RNA (1)...(19): siRNA sense strand
auaauaagccagagaucga

SEQ ID NO: 207180 - RNA, 19 nt, Homo sapiens
  misc_RNA (1)...(19): siRNA sense strand
cuaauaauaagccagagau

SEQ ID NO: 207181 - RNA, 19 nt, Homo sapiens
  misc_RNA (1)...(19): siRNA sense strand
ugggugaaguugcauccuu

SEQ ID NO: 207182 - RNA, 19 nt, Homo sapiens
  misc_RNA (1)...(19): siRNA sense strand
caucauuucccuguguaaa

SEQ ID NO: 207183 - RNA, 19 nt, Homo sapiens
  misc_RNA (1)...(19): siRNA sense strand
gcguggauaugugucugaa

SEQ ID NO: 207184 - RNA, 19 nt, Homo sapiens
  misc_RNA (1)...(19): siRNA sense strand
gcacuaucccaugguggaa

SEQ ID NO: 207185 - RNA, 19 nt, Homo sapiens
  misc_RNA (1)...(19): siRNA sense strand
gagccugucagcugcaugu

SEQ ID NO: 207186 - RNA, 19 nt, Homo sapiens
  misc_RNA (1)...(19): siRNA sense strand
guacagauaccuuuucaag

SEQ ID NO: 207187 - RNA, 19 nt, Homo sapiens
  misc_RNA (1)...(19): siRNA sense strand
gucccucucugcguggaua

SEQ ID NO: 207188 - RNA, 19 nt, Homo sapiens
  misc_RNA (1)...(19): siRNA sense strand
ggagcugcuuccaauuugc

SEQ ID NO: 207189 - RNA, 19 nt, Homo sapiens
  misc_RNA (1)...(19): siRNA sense strand
uuagcugaccugaauaaug

SEQ ID NO: 207190 - RNA, 19 nt, Homo sapiens
  misc_RNA (1)...(19): siRNA sense strand
guggcaaguucaacaggau

SEQ ID NO: 207191 - RNA, 19 nt, Homo sapiens
  misc_RNA (1)...(19): siRNA sense strand
acaacaauuuggucaacgu

SEQ ID NO: 207192 - RNA, 19 nt, Homo sapiens
  misc_RNA (1)...(19): siRNA sense strand
gacuacaucaggagaagau

SEQ ID NO: 207193 - RNA, 19 nt, Homo sapiens
  misc_RNA (1)...(19): siRNA sense strand
uaauaagccagagaucgaa

SEQ ID NO: 207194 - RNA, 19 nt, Homo sapiens
  misc_RNA (1)...(19): siRNA sense strand
ugucagauucucagcuuau

SEQ ID NO: 207195 - RNA, 19 nt, Homo sapiens
  misc_RNA (1)...(19): siRNA sense strand
ggauauccugcagauuauu

SEQ ID NO: 207196 - RNA, 19 nt, Homo sapiens
  misc_RNA (1)...(19): siRNA sense strand
agcaucaggccaaauguaa

SEQ ID NO: 207197 - RNA, 19 nt, Homo sapiens
  misc_RNA (1)...(19): siRNA sense strand
gcccuuugcuuggaucucu

SEQ ID NO: 207198 - RNA, 19 nt, Homo sapiens
  misc_RNA (1)...(19): siRNA sense strand
gcugaauguuuaugauacg

SEQ ID NO: 207199 - RNA, 19 nt, Homo sapiens
  misc_RNA (1)...(19): siRNA sense strand
agacuuugccaagguacua

SEQ ID NO: 207200 - RNA, 19 nt, Homo sapiens
  misc_RNA (1)...(19): siRNA sense strand
caagcaaguggcaaguuca

SEQ ID NO: 207201 - RNA, 19 nt, Homo sapiens
  misc_RNA (1)...(19): siRNA sense strand
agacaaguacagauaccuu

SEQ ID NO: 207202 - RNA, 19 nt, Homo sapiens
  misc_RNA (1)...(19): siRNA sense strand
gcaucauuucccuguguaa

SEQ ID NO: 207203 - RNA, 19 nt, Homo sapiens
  misc_RNA (1)...(19): siRNA sense strand
cugcaaagaguguccaauc

SEQ ID NO: 207204 - RNA, 19 nt, Homo sapiens
  misc_RNA (1)...(19): siRNA sense strand
cuuauaggacugccaugaa

SEQ ID NO: 207205 - RNA, 19 nt, Homo sapiens
  misc_RNA (1)...(19): siRNA sense strand
caaagaguguccaaucauu

SEQ ID NO: 207206 - RNA, 19 nt, Homo sapiens
  misc_RNA (1)...(19): siRNA sense strand
uagcugaccugaauaaugu

SEQ ID NO: 207207 - RNA, 19 nt, Homo sapiens
  misc_RNA (1)...(19): siRNA sense strand
gcaugauucuauccaaauu

SEQ ID NO: 207208 - RNA, 19 nt, Homo sapiens
  misc_RNA (1)...(19): siRNA sense strand
ugaacuggcugcugaaugu

SEQ ID NO: 207209 - RNA, 19 nt, Homo sapiens
  misc_RNA (1)...(19): siRNA sense strand
gauauccugcagauuauua

SEQ ID NO: 207210 - RNA, 19 nt, Homo sapiens
  misc_RNA (1)...(19): siRNA sense strand
gagaagauguucgagacuu

SEQ ID NO: 207211 - RNA, 19 nt, Homo sapiens
  misc_RNA (1)...(19): siRNA sense strand
gcacuuuaauuaugacauc

SEQ ID NO: 207212 - RNA, 19 nt, Homo sapiens
  misc_RNA (1)...(19): siRNA sense strand
guaaagcacauuuggaaga

SEQ ID NO: 207213 - RNA, 19 nt, Homo sapiens
  misc_RNA (1)...(19): siRNA sense strand
gaauauugcacuccgacua

SEQ ID NO: 207214 - RNA, 19 nt, Homo sapiens
  misc_RNA (1)...(19): siRNA sense strand
uuauaggacugccaugaaa

SEQ ID NO: 207215 - RNA, 19 nt, Homo sapiens
  misc_RNA (1)...(19): siRNA sense strand
gggugaaguugcauccuuu

SEQ ID NO: 207216 - RNA, 19 nt, Homo sapiens
  misc_RNA (1)...(19): siRNA sense strand
gcaagagcacaacaauuug

SEQ ID NO: 207217 - RNA, 19 nt, Homo sapiens
  misc_RNA (1)...(19): siRNA sense strand
gcacaacaauuuggucaac

SEQ ID NO: 207218 - RNA, 19 nt, Homo sapiens
  misc_RNA (1)...(19): siRNA sense strand
agcaagagcacaacaauuu

SEQ ID NO: 207219 - RNA, 19 nt, Homo sapiens
  misc_RNA (1)...(19): siRNA sense strand
agaagauguucgagacuuu

SEQ ID NO: 207220 - RNA, 19 nt, Homo sapiens
  misc_RNA (1)...(19): siRNA sense strand
gagcaagagcacaacaauu

SEQ ID NO: 207221 - RNA, 19 nt, Homo sapiens
  misc_RNA (1)...(19): siRNA sense strand
ucaagcaaguggcaaguuc

SEQ ID NO: 207222 - RNA, 19 nt, Homo sapiens
  misc_RNA (1)...(19): siRNA sense strand
ccacgagacucaaacaacu

SEQ ID NO: 207223 - RNA, 19 nt, Homo sapiens
  misc_RNA (1)...(19): siRNA sense strand
cagcacaaccucaagcaaa

SEQ ID NO: 207224 - RNA, 19 nt, Homo sapiens
  misc_RNA (1)...(19): siRNA sense strand
gcaaagaguguccaaucau

SEQ ID NO: 207225 - RNA, 19 nt, Homo sapiens
  misc_RNA (1)...(19): siRNA sense strand
auggauauccugcagauua

SEQ ID NO: 207226 - RNA, 19 nt, Homo sapiens
  misc_RNA (1)...(19): siRNA sense strand
uguaacaucugcaaagagu

SEQ ID NO: 207227 - RNA, 19 nt, Homo sapiens
  misc_RNA (1)...(19): siRNA sense strand
guccggagcugcuuccaau

SEQ ID NO: 207228 - RNA, 19 nt, Homo sapiens
  misc_RNA (1)...(19): siRNA sense strand
gcaaguggcaaguucaaca

SEQ ID NO: 207229 - RNA, 19 nt, Homo sapiens
  misc_RNA (1)...(19): siRNA sense strand
gcuuccaauuugcuaauaa

SEQ ID NO: 207230 - RNA, 19 nt, Homo sapiens
  misc_RNA (1)...(19): siRNA sense strand
uggaagacaaguacagaua

SEQ ID NO: 207231 - RNA, 19 nt, Homo sapiens
  misc_RNA (1)...(19): siRNA sense strand
ggauccguguccugucuuu

SEQ ID NO: 207232 - RNA, 19 nt, Homo sapiens
  misc_RNA (1)...(19): siRNA sense strand
gucuuuagcugaccugaau

SEQ ID NO: 207233 - RNA, 19 nt, Homo sapiens
  misc_RNA (1)...(19): siRNA sense strand
gacaaguacagauaccuuu

SEQ ID NO: 207234 - RNA, 19 nt, Homo sapiens
  misc_RNA (1)...(19): siRNA sense strand
ccaagcaucaggccaaaug

SEQ ID NO: 207235 - RNA, 19 nt, Homo sapiens
  misc_RNA (1)...(19): siRNA sense strand
ggagcaagagcacaacaau

SEQ ID NO: 207236 - RNA, 19 nt, Homo sapiens
  misc_RNA (1)...(19): siRNA sense strand
guguaaagcacauuuggaa

SEQ ID NO: 207237 - RNA, 19 nt, Homo sapiens
  misc_RNA (1)...(19): siRNA sense strand
caagacaguugggugaagu

SEQ ID NO: 207238 - RNA, 19 nt, Homo sapiens
  misc_RNA (1)...(19): siRNA sense strand
gaagauguucgagacuuug

SEQ ID NO: 207239 - RNA, 19 nt, Homo sapiens
  misc_RNA (1)...(19): siRNA sense strand
gucagauucucagcuuaua

SEQ ID NO: 207240 - RNA, 19 nt, Homo sapiens
  misc_RNA (1)...(19): siRNA sense strand
uaacaucugcaaagagugu

SEQ ID NO: 207241 - RNA, 19 nt, Homo sapiens
  misc_RNA (1)...(19): siRNA sense strand
cggagcugcuuccaauuug

SEQ ID NO: 207242 - RNA, 19 nt, Homo sapiens
  misc_RNA (1)...(19): siRNA sense strand
gaagacaaguacagauacc

SEQ ID NO: 207243 - RNA, 19 nt, Homo sapiens
  misc_RNA (1)...(19): siRNA sense strand
ccauggauauccugcagau

SEQ ID NO: 207244 - RNA, 19 nt, Homo sapiens
  misc_RNA (1)...(19): siRNA sense strand
ggcaucauuucccugugua

SEQ ID NO: 207245 - RNA, 19 nt, Homo sapiens
  misc_RNA (1)...(19): siRNA sense strand
uggauauccugcagauuau

SEQ ID NO: 207246 - RNA, 19 nt, Homo sapiens
  misc_RNA (1)...(19): siRNA sense strand
ggaagacaaguacagauac

SEQ ID NO: 207247 - RNA, 19 nt, Homo sapiens
  misc_RNA (1)...(19): siRNA sense strand
ugcaaagaguguccaauca

SEQ ID NO: 207248 - RNA, 19 nt, Homo sapiens
  misc_RNA (1)...(19): siRNA sense strand
guggauaugugucugaacu

SEQ ID NO: 207249 - RNA, 19 nt, Homo sapiens
  misc_RNA (1)...(19): siRNA sense strand
acuggcugcugaauguuua

SEQ ID NO: 207250 - RNA, 19 nt, Homo sapiens
  misc_RNA (1)...(19): siRNA sense strand
acuaucccaugguggaaua

SEQ ID NO: 207251 - RNA, 19 nt, Homo sapiens
  misc_RNA (1)...(19): siRNA sense strand
ccggagcugcuuccaauuu

SEQ ID NO: 207252 - RNA, 19 nt, Homo sapiens
  misc_RNA (1)...(19): siRNA sense strand
ccaaauuccaagacaguug

SEQ ID NO: 207253 - RNA, 19 nt, Homo sapiens
  misc_RNA (1)...(19): siRNA sense strand
cagaaacugccaagcauca

SEQ ID NO: 207254 - RNA, 19 nt, Homo sapiens
  misc_RNA (1)...(19): siRNA sense strand
uaugacaucugccaaagcu

SEQ ID NO: 207255 - RNA, 19 nt, Homo sapiens
  misc_RNA (1)...(19): siRNA sense strand
aaugucagauucucagcuu

SEQ ID NO: 207256 - RNA, 19 nt, Homo sapiens
  misc_RNA (1)...(19): siRNA sense strand
ucgagacuuugccaaggua

SEQ ID NO: 207257 - RNA, 19 nt, Homo sapiens
  misc_RNA (1)...(19): siRNA sense strand
gcaaaaggccauaaaaugc

SEQ ID NO: 207258 - RNA, 19 nt, Homo sapiens
  misc_RNA (1)...(19): siRNA sense strand
cugcaugauucuauccaaa

SEQ ID NO: 207259 - RNA, 19 nt, Homo sapiens
  misc_RNA (1)...(19): siRNA sense strand
uaaagcacauuuggaagac

SEQ ID NO: 207260 - RNA, 19 nt, Homo sapiens
  misc_RNA (1)...(19): siRNA sense strand
acaggagucuaaagcacuu

SEQ ID NO: 207261 - RNA, 19 nt, Homo sapiens
  misc_RNA (1)...(19): siRNA sense strand
acagauaccuuuucaagca

SEQ ID NO: 207262 - RNA, 19 nt, Homo sapiens
  misc_RNA (1)...(19): siRNA sense strand
aagcacauuuggaagacaa

SEQ ID NO: 207263 - RNA, 19 nt, Homo sapiens
  misc_RNA (1)...(19): siRNA sense strand
gcuaauaauaagccagaga

SEQ ID NO: 207264 - RNA, 19 nt, Homo sapiens
  misc_RNA (1)...(19): siRNA sense strand
caagagcacaacaauuugg

SEQ ID NO: 207265 - RNA, 19 nt, Homo sapiens
  misc_RNA (1)...(19): siRNA sense strand
ccugucagcugcaugugau

SEQ ID NO: 207266 - RNA, 19 nt, Homo sapiens
  misc_RNA (1)...(19): siRNA sense strand
gcugcugaauguuuaugau

SEQ ID NO: 207267 - RNA, 19 nt, Homo sapiens
  misc_RNA (1)...(19): siRNA sense strand
acagagcucuaccagucuu

SEQ ID NO: 207268 - RNA, 19 nt, Homo sapiens
  misc_RNA (1)...(19): siRNA sense strand
acaguugggugaaguugca

SEQ ID NO: 207269 - RNA, 19 nt, Homo sapiens
  misc_RNA (1)...(19): siRNA sense strand
guuugaccacuauuuauga

SEQ ID NO: 207270 - RNA, 19 nt, Homo sapiens
  misc_RNA (1)...(19): siRNA sense strand
gcuuauaggacugccauga

SEQ ID NO: 207271 - RNA, 19 nt, Homo sapiens
  misc_RNA (1)...(19): siRNA sense strand
caucaggccaaauguaaca

SEQ ID NO: 207272 - RNA, 19 nt, Homo sapiens
  misc_RNA (1)...(19): siRNA sense strand
gauucuauccaaauuccaa

SEQ ID NO: 207273 - RNA, 19 nt, Homo sapiens
  misc_RNA (1)...(19): siRNA sense strand
ggcaaguucaacaggauuu

SEQ ID NO: 207274 - RNA, 19 nt, Homo sapiens
  misc_RNA (1)...(19): siRNA sense strand
gaacuggcugcugaauguu

SEQ ID NO: 207275 - RNA, 19 nt, Homo sapiens
  misc_RNA (1)...(19): siRNA sense strand
cugcugaauguuuaugaua

SEQ ID NO: 207276 - RNA, 19 nt, Homo sapiens
  misc_RNA (1)...(19): siRNA sense strand
aagcaucaggccaaaugua

SEQ ID NO: 207277 - RNA, 19 nt, Homo sapiens
  misc_RNA (1)...(19): siRNA sense strand
uggcaucauuucccugugu

SEQ ID NO: 207278 - RNA, 19 nt, Homo sapiens
  misc_RNA (1)...(19): siRNA sense strand
ccaugaaacuccgaagacu

SEQ ID NO: 207279 - RNA, 19 nt, Homo sapiens
  misc_RNA (1)...(19): siRNA sense strand
auaauaagccagagaucga

SEQ ID NO: 207280 - RNA, 19 nt, Homo sapiens
  misc_RNA (1)...(19): siRNA sense strand
cuaauaauaagccagagau

SEQ ID NO: 207281 - RNA, 19 nt, Homo sapiens
  misc_RNA (1)...(19): siRNA sense strand
ugggugaaguugcauccuu

SEQ ID NO: 207282 - RNA, 19 nt, Homo sapiens
  misc_RNA (1)...(19): siRNA sense strand
caucauuucccuguguaaa

SEQ ID NO: 207283 - RNA, 19 nt, Homo sapiens
  misc_RNA (1)...(19): siRNA sense strand
gcguggauaugugucugaa

SEQ ID NO: 207284 - RNA, 19 nt, Homo sapiens
  misc_RNA (1)...(19): siRNA sense strand
gcacuaucccaugguggaa

SEQ ID NO: 207285 - RNA, 19 nt, Homo sapiens
  misc_RNA (1)...(19): siRNA sense strand
gagccugucagcugcaugu

SEQ ID NO: 207286 - RNA, 19 nt, Homo sapiens
  misc_RNA (1)...(19): siRNA sense strand
guacagauaccuuuucaag

SEQ ID NO: 207287 - RNA, 19 nt, Homo sapiens
  misc_RNA (1)...(19): siRNA sense strand
gucccucucugcguggaua

SEQ ID NO: 207288 - RNA, 19 nt, Homo sapiens
  misc_RNA (1)...(19): siRNA sense strand
ggagcugcuuccaauuugc

SEQ ID NO: 207289 - RNA, 19 nt, Homo sapiens
  misc_RNA (1)...(19): siRNA sense strand
uuagcugaccugaauaaug

SEQ ID NO: 207290 - RNA, 19 nt, Homo sapiens
  misc_RNA (1)...(19): siRNA sense strand
guggcaaguucaacaggau

SEQ ID NO: 207291 - RNA, 19 nt, Homo sapiens
  misc_RNA (1)...(19): siRNA sense strand
acaacaauuuggucaacgu

SEQ ID NO: 207292 - RNA, 19 nt, Homo sapiens
  misc_RNA (1)...(19): siRNA sense strand
gacuacaucaggagaagau

SEQ ID NO: 207293 - RNA, 19 nt, Homo sapiens
  misc_RNA (1)...(19): siRNA sense strand
uaauaagccagagaucgaa

SEQ ID NO: 207294 - RNA, 19 nt, Homo sapiens
  misc_RNA (1)...(19): siRNA sense strand
ugucagauucucagcuuau

SEQ ID NO: 207295 - RNA, 19 nt, Homo sapiens
  misc_RNA (1)...(19): siRNA sense strand
ggauauccugcagauuauu

SEQ ID NO: 207296 - RNA, 19 nt, Homo sapiens
  misc_RNA (1)...(19): siRNA sense strand
agcaucaggccaaauguaa

SEQ ID NO: 207297 - RNA, 19 nt, Homo sapiens
  misc_RNA (1)...(19): siRNA sense strand
gcccuuugcuuggaucucu

SEQ ID NO: 207298 - RNA, 19 nt, Homo sapiens
  misc_RNA (1)...(19): siRNA sense strand
gcugaauguuuaugauacg

SEQ ID NO: 207299 - RNA, 19 nt, Homo sapiens
  misc_RNA (1)...(19): siRNA sense strand
agacuuugccaagguacua

SEQ ID NO: 207300 - RNA, 19 nt, Homo sapiens
  misc_RNA (1)...(19): siRNA sense strand
caagcaaguggcaaguuca

SEQ ID NO: 207301 - RNA, 19 nt, Homo sapiens
  misc_RNA (1)...(19): siRNA sense strand
agacaaguacagauaccuu

SEQ ID NO: 207302 - RNA, 19 nt, Homo sapiens
  misc_RNA (1)...(19): siRNA sense strand
gcaucauuucccuguguaa

SEQ ID NO: 207303 - RNA, 19 nt, Homo sapiens
  misc_RNA (1)...(19): siRNA sense strand
cugcaaagaguguccaauc

SEQ ID NO: 207304 - RNA, 19 nt, Homo sapiens
  misc_RNA (1)...(19): siRNA sense strand
cuuauaggacugccaugaa

SEQ ID NO: 207305 - RNA, 19 nt, Homo sapiens
  misc_RNA (1)...(19): siRNA sense strand
caaagaguguccaaucauu

SEQ ID NO: 207306 - RNA, 19 nt, Homo sapiens
  misc_RNA (1)...(19): siRNA sense strand
uagcugaccugaauaaugu

SEQ ID NO: 207307 - RNA, 19 nt, Homo sapiens
  misc_RNA (1)...(19): siRNA sense strand
gcaugauucuauccaaauu

SEQ ID NO: 207308 - RNA, 19 nt, Homo sapiens
  misc_RNA (1)...(19): siRNA sense strand
ugaacuggcugcugaaugu

SEQ ID NO: 207309 - RNA, 19 nt, Homo sapiens
  misc_RNA (1)...(19): siRNA sense strand
gauauccugcagauuauua

SEQ ID NO: 207310 - RNA, 19 nt, Homo sapiens
  misc_RNA (1)...(19): siRNA sense strand
gagaagauguucgagacuu

SEQ ID NO: 207311 - RNA, 19 nt, Homo sapiens
  misc_RNA (1)...(19): siRNA sense strand
gcacuuuaauuaugacauc

SEQ ID NO: 207312 - RNA, 19 nt, Homo sapiens
  misc_RNA (1)...(19): siRNA sense strand
guaaagcacauuuggaaga

SEQ ID NO: 207313 - RNA, 19 nt, Homo sapiens
  misc_RNA (1)...(19): siRNA sense strand
gaauauugcacuccgacua

SEQ ID NO: 207314 - RNA, 19 nt, Homo sapiens
  misc_RNA (1)...(19): siRNA sense strand
uuauaggacugccaugaaa

SEQ ID NO: 207315 - RNA, 19 nt, Homo sapiens
  misc_RNA (1)...(19): siRNA sense strand
gggugaaguugcauccuuu

SEQ ID NO: 207316 - RNA, 19 nt, Homo sapiens
  misc_RNA (1)...(19): siRNA sense strand
gcaagagcacaacaauuug

SEQ ID NO: 207317 - RNA, 19 nt, Homo sapiens
  misc_RNA (1)...(19): siRNA sense strand
gcacaacaauuuggucaac

SEQ ID NO: 207318 - RNA, 19 nt, Homo sapiens
  misc_RNA (1)...(19): siRNA sense strand
agcaagagcacaacaauuu

SEQ ID NO: 207319 - RNA, 19 nt, Homo sapiens
  misc_RNA (1)...(19): siRNA sense strand
agaagauguucgagacuuu

SEQ ID NO: 207320 - RNA, 19 nt, Homo sapiens
  misc_RNA (1)...(19): siRNA sense strand
gagcaagagcacaacaauu

SEQ ID NO: 207321 - RNA, 19 nt, Homo sapiens
  misc_RNA (1)...(19): siRNA sense strand
ucaagcaaguggcaaguuc

SEQ ID NO: 207322 - RNA, 19 nt, Homo sapiens
  misc_RNA (1)...(19): siRNA sense strand
ccacgagacucaaacaacu

SEQ ID NO: 207323 - RNA, 19 nt, Homo sapiens
  misc_RNA (1)...(19): siRNA sense strand
cagcacaaccucaagcaaa

SEQ ID NO: 207324 - RNA, 19 nt, Homo sapiens
  misc_RNA (1)...(19): siRNA sense strand
gcaaagaguguccaaucau

SEQ ID NO: 207325 - RNA, 19 nt, Homo sapiens
  misc_RNA (1)...(19): siRNA sense strand
auggauauccugcagauua

SEQ ID NO: 207326 - RNA, 19 nt, Homo sapiens
  misc_RNA (1)...(19): siRNA sense strand
uguaacaucugcaaagagu

SEQ ID NO: 207327 - RNA, 19 nt, Homo sapiens
  misc_RNA (1)...(19): siRNA sense strand
guccggagcugcuuccaau

SEQ ID NO: 207328 - RNA, 19 nt, Homo sapiens
  misc_RNA (1)...(19): siRNA sense strand
gcaaguggcaaguucaaca

SEQ ID NO: 207329 - RNA, 19 nt, Homo sapiens
  misc_RNA (1)...(19): siRNA sense strand
gcuuccaauuugcuaauaa

SEQ ID NO: 207330 - RNA, 19 nt, Homo sapiens
  misc_RNA (1)...(19): siRNA sense strand
uggaagacaaguacagaua

SEQ ID NO: 207331 - RNA, 19 nt, Homo sapiens
  misc_RNA (1)...(19): siRNA sense strand
ggauccguguccugucuuu

SEQ ID NO: 207332 - RNA, 19 nt, Homo sapiens
  misc_RNA (1)...(19): siRNA sense strand
gucuuuagcugaccugaau

SEQ ID NO: 207333 - RNA, 19 nt, Homo sapiens
  misc_RNA (1)...(19): siRNA sense strand
gacaaguacagauaccuuu

SEQ ID NO: 207334 - RNA, 19 nt, Homo sapiens
  misc_RNA (1)...(19): siRNA sense strand
ccaagcaucaggccaaaug

SEQ ID NO: 207335 - RNA, 19 nt, Homo sapiens
  misc_RNA (1)...(19): siRNA sense strand
ggagcaagagcacaacaau

SEQ ID NO: 207336 - RNA, 19 nt, Homo sapiens
  misc_RNA (1)...(19): siRNA sense strand
guguaaagcacauuuggaa

SEQ ID NO: 207337 - RNA, 19 nt, Homo sapiens
  misc_RNA (1)...(19): siRNA sense strand
caagacaguugggugaagu

SEQ ID NO: 207338 - RNA, 19 nt, Homo sapiens
  misc_RNA (1)...(19): siRNA sense strand
gaagauguucgagacuuug

SEQ ID NO: 207339 - RNA, 19 nt, Homo sapiens
  misc_RNA (1)...(19): siRNA sense strand
gucagauucucagcuuaua

SEQ ID NO: 207340 - RNA, 19 nt, Homo sapiens
  misc_RNA (1)...(19): siRNA sense strand
uaacaucugcaaagagugu

SEQ ID NO: 207341 - RNA, 19 nt, Homo sapiens
  misc_RNA (1)...(19): siRNA sense strand
cggagcugcuuccaauuug

SEQ ID NO: 207342 - RNA, 19 nt, Homo sapiens
  misc_RNA (1)...(19): siRNA sense strand
gaagacaaguacagauacc

SEQ ID NO: 207343 - RNA, 19 nt, Homo sapiens
  misc_RNA (1)...(19): siRNA sense strand
ccauggauauccugcagau

SEQ ID NO: 207344 - RNA, 19 nt, Homo sapiens
  misc_RNA (1)...(19): siRNA sense strand
ggcaucauuucccugugua

SEQ ID NO: 207345 - RNA, 19 nt, Homo sapiens
  misc_RNA (1)...(19): siRNA sense strand
uggauauccugcagauuau

SEQ ID NO: 207346 - RNA, 19 nt, Homo sapiens
  misc_RNA (1)...(19): siRNA sense strand
ggaagacaaguacagauac

SEQ ID NO: 207347 - RNA, 19 nt, Homo sapiens
  misc_RNA (1)...(19): siRNA sense strand
ugcaaagaguguccaauca

SEQ ID NO: 207348 - RNA, 19 nt, Homo sapiens
  misc_RNA (1)...(19): siRNA sense strand
guggauaugugucugaacu

SEQ ID NO: 207349 - RNA, 19 nt, Homo sapiens
  misc_RNA (1)...(19): siRNA sense strand
acuggcugcugaauguuua

SEQ ID NO: 207350 - RNA, 19 nt, Homo sapiens
  misc_RNA (1)...(19): siRNA sense strand
acuaucccaugguggaaua

SEQ ID NO: 207351 - RNA, 19 nt, Homo sapiens
  misc_RNA (1)...(19): siRNA sense strand
ccggagcugcuuccaauuu

SEQ ID NO: 207352 - RNA, 19 nt, Homo sapiens
  misc_RNA (1)...(19): siRNA sense strand
ccaaauuccaagacaguug

SEQ ID NO: 207353 - RNA, 19 nt, Homo sapiens
  misc_RNA (1)...(19): siRNA sense strand
cagaaacugccaagcauca

SEQ ID NO: 207354 - RNA, 19 nt, Homo sapiens
  misc_RNA (1)...(19): siRNA sense strand
uaugacaucugccaaagcu

SEQ ID NO: 207355 - RNA, 19 nt, Homo sapiens
  misc_RNA (1)...(19): siRNA sense strand
aaugucagauucucagcuu

SEQ ID NO: 207356 - RNA, 19 nt, Homo sapiens
  misc_RNA (1)...(19): siRNA sense strand
ucgagacuuugccaaggua

SEQ ID NO: 207357 - RNA, 19 nt, Homo sapiens
  misc_RNA (1)...(19): siRNA sense strand
gcaaaaggccauaaaaugc

SEQ ID NO: 207358 - RNA, 19 nt, Homo sapiens
  misc_RNA (1)...(19): siRNA sense strand
cugcaugauucuauccaaa

SEQ ID NO: 207359 - RNA, 19 nt, Homo sapiens
  misc_RNA (1)...(19): siRNA sense strand
uaaagcacauuuggaagac

SEQ ID NO: 207360 - RNA, 19 nt, Homo sapiens
  misc_RNA (1)...(19): siRNA sense strand
acaggagucuaaagcacuu

SEQ ID NO: 207361 - RNA, 19 nt, Homo sapiens
  misc_RNA (1)...(19): siRNA sense strand
acagauaccuuuucaagca

SEQ ID NO: 207362 - RNA, 19 nt, Homo sapiens
  misc_RNA (1)...(19): siRNA sense strand
aagcacauuuggaagacaa

SEQ ID NO: 207363 - RNA, 19 nt, Homo sapiens
  misc_RNA (1)...(19): siRNA sense strand
gcuaauaauaagccagaga

SEQ ID NO: 207364 - RNA, 19 nt, Homo sapiens
  misc_RNA (1)...(19): siRNA sense strand
caagagcacaacaauuugg

SEQ ID NO: 207365 - RNA, 19 nt, Homo sapiens
  misc_RNA (1)...(19): siRNA sense strand
ccugucagcugcaugugau

SEQ ID NO: 207366 - RNA, 19 nt, Homo sapiens
  misc_RNA (1)...(19): siRNA sense strand
gcugcugaauguuuaugau

SEQ ID NO: 207367 - RNA, 19 nt, Homo sapiens
  misc_RNA (1)...(19): siRNA sense strand
acagagcucuaccagucuu

SEQ ID NO: 207368 - RNA, 19 nt, Homo sapiens
  misc_RNA (1)...(19): siRNA sense strand
acaguugggugaaguugca

SEQ ID NO: 207369 - RNA, 19 nt, Homo sapiens
  misc_RNA (1)...(19): siRNA sense strand
guuugaccacuauuuauga

SEQ ID NO: 207370 - RNA, 19 nt, Homo sapiens
  misc_RNA (1)...(19): siRNA sense strand
gcuuauaggacugccauga

SEQ ID NO: 207371 - RNA, 19 nt, Homo sapiens
  misc_RNA (1)...(19): siRNA sense strand
caucaggccaaauguaaca

SEQ ID NO: 207372 - RNA, 19 nt, Homo sapiens
  misc_RNA (1)...(19): siRNA sense strand
gauucuauccaaauuccaa

SEQ ID NO: 207373 - RNA, 19 nt, Homo sapiens
  misc_RNA (1)...(19): siRNA sense strand
ggcaaguucaacaggauuu

SEQ ID NO: 207374 - RNA, 19 nt, Homo sapiens
  misc_RNA (1)...(19): siRNA sense strand
gaacuggcugcugaauguu

SEQ ID NO: 207375 - RNA, 19 nt, Homo sapiens
  misc_RNA (1)...(19): siRNA sense strand
cugcugaauguuuaugaua

SEQ ID NO: 207376 - RNA, 19 nt, Homo sapiens
  misc_RNA (1)...(19): siRNA sense strand
aagcaucaggccaaaugua

SEQ ID NO: 207377 - RNA, 19 nt, Homo sapiens
  misc_RNA (1)...(19): siRNA sense strand
uggcaucauuucccugugu

SEQ ID NO: 207378 - RNA, 19 nt, Homo sapiens
  misc_RNA (1)...(19): siRNA sense strand
ccaugaaacuccgaagacu

SEQ ID NO: 207379 - RNA, 19 nt, Homo sapiens
  misc_RNA (1)...(19): siRNA sense strand
auaauaagccagagaucga

SEQ ID NO: 207380 - RNA, 19 nt, Homo sapiens
  misc_RNA (1)...(19): siRNA sense strand
cuaauaauaagccagagau

SEQ ID NO: 207381 - RNA, 19 nt, Homo sapiens
  misc_RNA (1)...(19): siRNA sense strand
ugggugaaguugcauccuu

SEQ ID NO: 207382 - RNA, 19 nt, Homo sapiens
  misc_RNA (1)...(19): siRNA sense strand
caucauuucccuguguaaa

SEQ ID NO: 207383 - RNA, 19 nt, Homo sapiens
  misc_RNA (1)...(19): siRNA sense strand
gcguggauaugugucugaa

SEQ ID NO: 207384 - RNA, 19 nt, Homo sapiens
  misc_RNA (1)...(19): siRNA sense strand
gcacuaucccaugguggaa

SEQ ID NO: 207385 - RNA, 19 nt, Homo sapiens
  misc_RNA (1)...(19): siRNA sense strand
gagccugucagcugcaugu

SEQ ID NO: 207386 - RNA, 19 nt, Homo sapiens
  misc_RNA (1)...(19): siRNA sense strand
guacagauaccuuuucaag

SEQ ID NO: 207387 - RNA, 19 nt, Homo sapiens
  misc_RNA (1)...(19): siRNA sense strand
gucccucucugcguggaua

SEQ ID NO: 207388 - RNA, 19 nt, Homo sapiens
  misc_RNA (1)...(19): siRNA sense strand
ggagcugcuuccaauuugc

SEQ ID NO: 207389 - RNA, 19 nt, Homo sapiens
  misc_RNA (1)...(19): siRNA sense strand
uuagcugaccugaauaaug

SEQ ID NO: 207390 - RNA, 19 nt, Homo sapiens
  misc_RNA (1)...(19): siRNA sense strand
guggcaaguucaacaggau

SEQ ID NO: 207391 - RNA, 19 nt, Homo sapiens
  misc_RNA (1)...(19): siRNA sense strand
acaacaauuuggucaacgu

SEQ ID NO: 207392 - RNA, 19 nt, Homo sapiens
  misc_RNA (1)...(19): siRNA sense strand
gacuacaucaggagaagau

SEQ ID NO: 207393 - RNA, 19 nt, Homo sapiens
  misc_RNA (1)...(19): siRNA sense strand
uaauaagccagagaucgaa

SEQ ID NO: 207394 - RNA, 19 nt, Homo sapiens
  misc_RNA (1)...(19): siRNA sense strand
ugucagauucucagcuuau

SEQ ID NO: 207395 - RNA, 19 nt, Homo sapiens
  misc_RNA (1)...(19): siRNA sense strand
ggauauccugcagauuauu

SEQ ID NO: 207396 - RNA, 19 nt, Homo sapiens
  misc_RNA (1)...(19): siRNA sense strand
agcaucaggccaaauguaa

SEQ ID NO: 207397 - RNA, 19 nt, Homo sapiens
  misc_RNA (1)...(19): siRNA sense strand
gcccuuugcuuggaucucu

SEQ ID NO: 207398 - RNA, 19 nt, Homo sapiens
  misc_RNA (1)...(19): siRNA sense strand
gcugaauguuuaugauacg

SEQ ID NO: 207399 - RNA, 19 nt, Homo sapiens
  misc_RNA (1)...(19): siRNA sense strand
agacuuugccaagguacua

SEQ ID NO: 207400 - RNA, 19 nt, Homo sapiens
  misc_RNA (1)...(19): siRNA sense strand
caagcaaguggcaaguuca

SEQ ID NO: 207401 - RNA, 19 nt, Homo sapiens
  misc_RNA (1)...(19): siRNA sense strand
agacaaguacagauaccuu

SEQ ID NO: 207402 - RNA, 19 nt, Homo sapiens
  misc_RNA (1)...(19): siRNA sense strand
gcaucauuucccuguguaa

SEQ ID NO: 207403 - RNA, 19 nt, Homo sapiens
  misc_RNA (1)...(19): siRNA sense strand
cugcaaagaguguccaauc

SEQ ID NO: 207404 - RNA, 19 nt, Homo sapiens
  misc_RNA (1)...(19): siRNA sense strand
cuuauaggacugccaugaa

SEQ ID NO: 207405 - RNA, 19 nt, Homo sapiens
  misc_RNA (1)...(19): siRNA sense strand
caaagaguguccaaucauu

SEQ ID NO: 207406 - RNA, 19 nt, Homo sapiens
  misc_RNA (1)...(19): siRNA sense strand
uagcugaccugaauaaugu

SEQ ID NO: 207407 - RNA, 19 nt, Homo sapiens
  misc_RNA (1)...(19): siRNA sense strand
gcaugauucuauccaaauu

SEQ ID NO: 207408 - RNA, 19 nt, Homo sapiens
  misc_RNA (1)...(19): siRNA sense strand
ugaacuggcugcugaaugu

SEQ ID NO: 207409 - RNA, 19 nt, Homo sapiens
  misc_RNA (1)...(19): siRNA sense strand
gauauccugcagauuauua

SEQ ID NO: 207410 - RNA, 19 nt, Homo sapiens
  misc_RNA (1)...(19): siRNA sense strand
gagaagauguucgagacuu

SEQ ID NO: 207411 - RNA, 19 nt, Homo sapiens
  misc_RNA (1)...(19): siRNA sense strand
gcacuuuaauuaugacauc

SEQ ID NO: 207412 - RNA, 19 nt, Homo sapiens
  misc_RNA (1)...(19): siRNA sense strand
guaaagcacauuuggaaga

SEQ ID NO: 207413 - RNA, 19 nt, Homo sapiens
  misc_RNA (1)...(19): siRNA sense strand
gaauauugcacuccgacua

SEQ ID NO: 207414 - RNA, 19 nt, Homo sapiens
  misc_RNA (1)...(19): siRNA sense strand
uuauaggacugccaugaaa

SEQ ID NO: 207415 - RNA, 19 nt, Homo sapiens
  misc_RNA (1)...(19): siRNA sense strand
gggugaaguugcauccuuu

SEQ ID NO: 207416 - RNA, 19 nt, Homo sapiens
  misc_RNA (1)...(19): siRNA sense strand
gcaagagcacaacaauuug

SEQ ID NO: 207417 - RNA, 19 nt, Homo sapiens
  misc_RNA (1)...(19): siRNA sense strand
gcacaacaauuuggucaac

SEQ ID NO: 207418 - RNA, 19 nt, Homo sapiens
  misc_RNA (1)...(19): siRNA sense strand
agcaagagcacaacaauuu

SEQ ID NO: 207419 - RNA, 19 nt, Homo sapiens
  misc_RNA (1)...(19): siRNA sense strand
agaagauguucgagacuuu

SEQ ID NO: 207420 - RNA, 19 nt, Homo sapiens
  misc_RNA (1)...(19): siRNA sense strand
gagcaagagcacaacaauu

SEQ ID NO: 207421 - RNA, 19 nt, Homo sapiens
  misc_RNA (1)...(19): siRNA sense strand
ucaagcaaguggcaaguuc

SEQ ID NO: 207422 - RNA, 19 nt, Homo sapiens
  misc_RNA (1)...(19): siRNA sense strand
ccacgagacucaaacaacu

SEQ ID NO: 207423 - RNA, 19 nt, Homo sapiens
  misc_RNA (1)...(19): siRNA sense strand
cagcacaaccucaagcaaa

SEQ ID NO: 207424 - RNA, 19 nt, Homo sapiens
  misc_RNA (1)...(19): siRNA sense strand
gcaaagaguguccaaucau

SEQ ID NO: 207425 - RNA, 19 nt, Homo sapiens
  misc_RNA (1)...(19): siRNA sense strand
auggauauccugcagauua

SEQ ID NO: 207426 - RNA, 19 nt, Homo sapiens
  misc_RNA (1)...(19): siRNA sense strand
uguaacaucugcaaagagu

SEQ ID NO: 207427 - RNA, 19 nt, Homo sapiens
  misc_RNA (1)...(19): siRNA sense strand
guccggagcugcuuccaau

SEQ ID NO: 207428 - RNA, 19 nt, Homo sapiens
  misc_RNA (1)...(19): siRNA sense strand
gcaaguggcaaguucaaca

SEQ ID NO: 207429 - RNA, 19 nt, Homo sapiens
  misc_RNA (1)...(19): siRNA sense strand
gcuuccaauuugcuaauaa

SEQ ID NO: 207430 - RNA, 19 nt, Homo sapiens
  misc_RNA (1)...(19): siRNA sense strand
uggaagacaaguacagaua

SEQ ID NO: 207431 - RNA, 19 nt, Homo sapiens
  misc_RNA (1)...(19): siRNA sense strand
ggauccguguccugucuuu

SEQ ID NO: 207432 - RNA, 19 nt, Homo sapiens
  misc_RNA (1)...(19): siRNA sense strand
gucuuuagcugaccugaau

SEQ ID NO: 207433 - RNA, 19 nt, Homo sapiens
  misc_RNA (1)...(19): siRNA sense strand
gacaaguacagauaccuuu

SEQ ID NO: 207434 - RNA, 19 nt, Homo sapiens
  misc_RNA (1)...(19): siRNA sense strand
ccaagcaucaggccaaaug

SEQ ID NO: 207435 - RNA, 19 nt, Homo sapiens
  misc_RNA (1)...(19): siRNA sense strand
ggagcaagagcacaacaau

SEQ ID NO: 207436 - RNA, 19 nt, Homo sapiens
  misc_RNA (1)...(19): siRNA sense strand
guguaaagcacauuuggaa

SEQ ID NO: 207437 - RNA, 19 nt, Homo sapiens
  misc_RNA (1)...(19): siRNA sense strand
caagacaguugggugaagu

SEQ ID NO: 207438 - RNA, 19 nt, Homo sapiens
  misc_RNA (1)...(19): siRNA sense strand
gaagauguucgagacuuug

SEQ ID NO: 207439 - RNA, 19 nt, Homo sapiens
  misc_RNA (1)...(19): siRNA sense strand
gucagauucucagcuuaua

SEQ ID NO: 207440 - RNA, 19 nt, Homo sapiens
  misc_RNA (1)...(19): siRNA sense strand
uaacaucugcaaagagugu

SEQ ID NO: 207441 - RNA, 19 nt, Homo sapiens
  misc_RNA (1)...(19): siRNA sense strand
cggagcugcuuccaauuug

SEQ ID NO: 207442 - RNA, 19 nt, Homo sapiens
  misc_RNA (1)...(19): siRNA sense strand
gaagacaaguacagauacc

SEQ ID NO: 207443 - RNA, 19 nt, Homo sapiens
  misc_RNA (1)...(19): siRNA sense strand
ccauggauauccugcagau

SEQ ID NO: 207444 - RNA, 19 nt, Homo sapiens
  misc_RNA (1)...(19): siRNA sense strand
ggcaucauuucccugugua

SEQ ID NO: 207445 - RNA, 19 nt, Homo sapiens
  misc_RNA (1)...(19): siRNA sense strand
uggauauccugcagauuau

SEQ ID NO: 207446 - RNA, 19 nt, Homo sapiens
  misc_RNA (1)...(19): siRNA sense strand
ggaagacaaguacagauac

SEQ ID NO: 207447 - RNA, 19 nt, Homo sapiens
  misc_RNA (1)...(19): siRNA sense strand
ugcaaagaguguccaauca

SEQ ID NO: 207448 - RNA, 19 nt, Homo sapiens
  misc_RNA (1)...(19): siRNA sense strand
guggauaugugucugaacu

SEQ ID NO: 207449 - RNA, 19 nt, Homo sapiens
  misc_RNA (1)...(19): siRNA sense strand
acuggcugcugaauguuua

SEQ ID NO: 207450 - RNA, 19 nt, Homo sapiens
  misc_RNA (1)...(19): siRNA sense strand
acuaucccaugguggaaua

SEQ ID NO: 207451 - RNA, 19 nt, Homo sapiens
  misc_RNA (1)...(19): siRNA sense strand
ccggagcugcuuccaauuu

SEQ ID NO: 207452 - RNA, 19 nt, Homo sapiens
  misc_RNA (1)...(19): siRNA sense strand
ccaaauuccaagacaguug

SEQ ID NO: 207453 - RNA, 19 nt, Homo sapiens
  misc_RNA (1)...(19): siRNA sense strand
cagaaacugccaagcauca

SEQ ID NO: 207454 - RNA, 19 nt, Homo sapiens
  misc_RNA (1)...(19): siRNA sense strand
uaugacaucugccaaagcu

SEQ ID NO: 207455 - RNA, 19 nt, Homo sapiens
  misc_RNA (1)...(19): siRNA sense strand
aaugucagauucucagcuu

SEQ ID NO: 207456 - RNA, 19 nt, Homo sapiens
  misc_RNA (1)...(19): siRNA sense strand
ucgagacuuugccaaggua

SEQ ID NO: 207457 - RNA, 19 nt, Homo sapiens
  misc_RNA (1)...(19): siRNA sense strand
gcaaaaggccauaaaaugc

SEQ ID NO: 207458 - RNA, 19 nt, Homo sapiens
  misc_RNA (1)...(19): siRNA sense strand
cugcaugauucuauccaaa

SEQ ID NO: 207459 - RNA, 19 nt, Homo sapiens
  misc_RNA (1)...(19): siRNA sense strand
uaaagcacauuuggaagac

SEQ ID NO: 207460 - RNA, 19 nt, Homo sapiens
  misc_RNA (1)...(19): siRNA sense strand
acaggagucuaaagcacuu

SEQ ID NO: 207461 - RNA, 19 nt, Homo sapiens
  misc_RNA (1)...(19): siRNA sense strand
acagauaccuuuucaagca

SEQ ID NO: 207462 - RNA, 19 nt, Homo sapiens
  misc_RNA (1)...(19): siRNA sense strand
aagcacauuuggaagacaa

SEQ ID NO: 207463 - RNA, 19 nt, Homo sapiens
  misc_RNA (1)...(19): siRNA sense strand
gcuaauaauaagccagaga

SEQ ID NO: 207464 - RNA, 19 nt, Homo sapiens
  misc_RNA (1)...(19): siRNA sense strand
caagagcacaacaauuugg

SEQ ID NO: 207465 - RNA, 19 nt, Homo sapiens
  misc_RNA (1)...(19): siRNA sense strand
ccugucagcugcaugugau

SEQ ID NO: 207466 - RNA, 19 nt, Homo sapiens
  misc_RNA (1)...(19): siRNA sense strand
gcugcugaauguuuaugau

SEQ ID NO: 207467 - RNA, 19 nt, Homo sapiens
  misc_RNA (1)...(19): siRNA sense strand
acagagcucuaccagucuu

SEQ ID NO: 207468 - RNA, 19 nt, Homo sapiens
  misc_RNA (1)...(19): siRNA sense strand
acaguugggugaaguugca

SEQ ID NO: 207469 - RNA, 19 nt, Homo sapiens
  misc_RNA (1)...(19): siRNA sense strand
guuugaccacuauuuauga

SEQ ID NO: 207470 - RNA, 19 nt, Homo sapiens
  misc_RNA (1)...(19): siRNA sense strand
gcuuauaggacugccauga

SEQ ID NO: 207471 - RNA, 19 nt, Homo sapiens
  misc_RNA (1)...(19): siRNA sense strand
caucaggccaaauguaaca

SEQ ID NO: 207472 - RNA, 19 nt, Homo sapiens
  misc_RNA (1)...(19): siRNA sense strand
gauucuauccaaauuccaa

SEQ ID NO: 207473 - RNA, 19 nt, Homo sapiens
  misc_RNA (1)...(19): siRNA sense strand
ggcaaguucaacaggauuu

SEQ ID NO: 207474 - RNA, 19 nt, Homo sapiens
  misc_RNA (1)...(19): siRNA sense strand
gaacuggcugcugaauguu

SEQ ID NO: 207475 - RNA, 19 nt, Homo sapiens
  misc_RNA (1)...(19): siRNA sense strand
cugcugaauguuuaugaua

SEQ ID NO: 207476 - RNA, 19 nt, Homo sapiens
  misc_RNA (1)...(19): siRNA sense strand
aagcaucaggccaaaugua

SEQ ID NO: 207477 - RNA, 19 nt, Homo sapiens
  misc_RNA (1)...(19): siRNA sense strand
uggcaucauuucccugugu

SEQ ID NO: 207478 - RNA, 19 nt, Homo sapiens
  misc_RNA (1)...(19): siRNA sense strand
ccaugaaacuccgaagacu

SEQ ID NO: 207479 - RNA, 19 nt, Homo sapiens
  misc_RNA (1)...(19): siRNA sense strand
auaauaagccagagaucga

SEQ ID NO: 207480 - RNA, 19 nt, Homo sapiens
  misc_RNA (1)...(19): siRNA sense strand
cuaauaauaagccagagau

SEQ ID NO: 207481 - RNA, 19 nt, Homo sapiens
  misc_RNA (1)...(19): siRNA sense strand
ugggugaaguugcauccuu

SEQ ID NO: 207482 - RNA, 19 nt, Homo sapiens
  misc_RNA (1)...(19): siRNA sense strand
caucauuucccuguguaaa

SEQ ID NO: 207483 - RNA, 19 nt, Homo sapiens
  misc_RNA (1)...(19): siRNA sense strand
gcguggauaugugucugaa

SEQ ID NO: 207484 - RNA, 19 nt, Homo sapiens
  misc_RNA (1)...(19): siRNA sense strand
gcacuaucccaugguggaa

SEQ ID NO: 207485 - RNA, 19 nt, Homo sapiens
  misc_RNA (1)...(19): siRNA sense strand
gagccugucagcugcaugu

SEQ ID NO: 207486 - RNA, 19 nt, Homo sapiens
  misc_RNA (1)...(19): siRNA sense strand
guacagauaccuuuucaag

SEQ ID NO: 207487 - RNA, 19 nt, Homo sapiens
  misc_RNA (1)...(19): siRNA sense strand
gucccucucugcguggaua

SEQ ID NO: 207488 - RNA, 19 nt, Homo sapiens
  misc_RNA (1)...(19): siRNA sense strand
ggagcugcuuccaauuugc

SEQ ID NO: 207489 - RNA, 19 nt, Homo sapiens
  misc_RNA (1)...(19): siRNA sense strand
uuagcugaccugaauaaug

SEQ ID NO: 207490 - RNA, 19 nt, Homo sapiens
  misc_RNA (1)...(19): siRNA sense strand
guggcaaguucaacaggau

SEQ ID NO: 207491 - RNA, 19 nt, Homo sapiens
  misc_RNA (1)...(19): siRNA sense strand
acaacaauuuggucaacgu

SEQ ID NO: 207492 - RNA, 19 nt, Homo sapiens
  misc_RNA (1)...(19): siRNA sense strand
gacuacaucaggagaagau

SEQ ID NO: 207493 - RNA, 19 nt, Homo sapiens
  misc_RNA (1)...(19): siRNA sense strand
uaauaagccagagaucgaa

SEQ ID NO: 207494 - RNA, 19 nt, Homo sapiens
  misc_RNA (1)...(19): siRNA sense strand
ugucagauucucagcuuau

SEQ ID NO: 207495 - RNA, 19 nt, Homo sapiens
  misc_RNA (1)...(19): siRNA sense strand
ggauauccugcagauuauu

SEQ ID NO: 207496 - RNA, 19 nt, Homo sapiens
  misc_RNA (1)...(19): siRNA sense strand
agcaucaggccaaauguaa

SEQ ID NO: 207497 - RNA, 19 nt, Homo sapiens
  misc_RNA (1)...(19): siRNA sense strand
gcccuuugcuuggaucucu

SEQ ID NO: 207498 - RNA, 19 nt, Homo sapiens
  misc_RNA (1)...(19): siRNA sense strand
gcugaauguuuaugauacg

SEQ ID NO: 207499 - RNA, 19 nt, Homo sapiens
  misc_RNA (1)...(19): siRNA sense strand
agacuuugccaagguacua

SEQ ID NO: 207500 - RNA, 19 nt, Homo sapiens
  misc_RNA (1)...(19): siRNA sense strand
caagcaaguggcaaguuca

SEQ ID NO: 207501 - RNA, 19 nt, Homo sapiens
  misc_RNA (1)...(19): siRNA sense strand
agacaaguacagauaccuu

SEQ ID NO: 207502 - RNA, 19 nt, Homo sapiens
  misc_RNA (1)...(19): siRNA sense strand
gcaucauuucccuguguaa

SEQ ID NO: 207503 - RNA, 19 nt, Homo sapiens
  misc_RNA (1)...(19): siRNA sense strand
cugcaaagaguguccaauc

SEQ ID NO: 207504 - RNA, 19 nt, Homo sapiens
  misc_RNA (1)...(19): siRNA sense strand
cuuauaggacugccaugaa

SEQ ID NO: 207505 - RNA, 19 nt, Homo sapiens
  misc_RNA (1)...(19): siRNA sense strand
caaagaguguccaaucauu

SEQ ID NO: 207506 - RNA, 19 nt, Homo sapiens
  misc_RNA (1)...(19): siRNA sense strand
uagcugaccugaauaaugu

SEQ ID NO: 207507 - RNA, 19 nt, Homo sapiens
  misc_RNA (1)...(19): siRNA sense strand
gcaugauucuauccaaauu

SEQ ID NO: 207508 - RNA, 19 nt, Homo sapiens
  misc_RNA (1)...(19): siRNA sense strand
ugaacuggcugcugaaugu

SEQ ID NO: 207509 - RNA, 19 nt, Homo sapiens
  misc_RNA (1)...(19): siRNA sense strand
gauauccugcagauuauua

SEQ ID NO: 207510 - RNA, 19 nt, Homo sapiens
  misc_RNA (1)...(19): siRNA sense strand
gagaagauguucgagacuu

SEQ ID NO: 207511 - RNA, 19 nt, Homo sapiens
  misc_RNA (1)...(19): siRNA sense strand
gcacuuuaauuaugacauc

SEQ ID NO: 207512 - RNA, 19 nt, Homo sapiens
  misc_RNA (1)...(19): siRNA sense strand
guaaagcacauuuggaaga

SEQ ID NO: 207513 - RNA, 19 nt, Homo sapiens
  misc_RNA (1)...(19): siRNA sense strand
gaauauugcacuccgacua

SEQ ID NO: 207514 - RNA, 19 nt, Homo sapiens
  misc_RNA (1)...(19): siRNA sense strand
uuauaggacugccaugaaa

SEQ ID NO: 207515 - RNA, 19 nt, Homo sapiens
  misc_RNA (1)...(19): siRNA sense strand
gggugaaguugcauccuuu

SEQ ID NO: 207516 - RNA, 19 nt, Homo sapiens
  misc_RNA (1)...(19): siRNA sense strand
gcaagagcacaacaauuug

SEQ ID NO: 207517 - RNA, 19 nt, Homo sapiens
  misc_RNA (1)...(19): siRNA sense strand
gcacaacaauuuggucaac

SEQ ID NO: 207518 - RNA, 19 nt, Homo sapiens
  misc_RNA (1)...(19): siRNA sense strand
agcaagagcacaacaauuu

SEQ ID NO: 207519 - RNA, 19 nt, Homo sapiens
  misc_RNA (1)...(19): siRNA sense strand
agaagauguucgagacuuu

SEQ ID NO: 207520 - RNA, 19 nt, Homo sapiens
  misc_RNA (1)...(19): siRNA sense strand
gagcaagagcacaacaauu

SEQ ID NO: 207521 - RNA, 19 nt, Homo sapiens
  misc_RNA (1)...(19): siRNA sense strand
ucaagcaaguggcaaguuc

SEQ ID NO: 207522 - RNA, 19 nt, Homo sapiens
  misc_RNA (1)...(19): siRNA sense strand
ccacgagacucaaacaacu

SEQ ID NO: 207523 - RNA, 19 nt, Homo sapiens
  misc_RNA (1)...(19): siRNA sense strand
cagcacaaccucaagcaaa

SEQ ID NO: 207524 - RNA, 19 nt, Homo sapiens
  misc_RNA (1)...(19): siRNA sense strand
gcaaagaguguccaaucau

SEQ ID NO: 207525 - RNA, 19 nt, Homo sapiens
  misc_RNA (1)...(19): siRNA sense strand
auggauauccugcagauua

SEQ ID NO: 207526 - RNA, 19 nt, Homo sapiens
  misc_RNA (1)...(19): siRNA sense strand
uguaacaucugcaaagagu

SEQ ID NO: 207527 - RNA, 19 nt, Homo sapiens
  misc_RNA (1)...(19): siRNA sense strand
guccggagcugcuuccaau

SEQ ID NO: 207528 - RNA, 19 nt, Homo sapiens
  misc_RNA (1)...(19): siRNA sense strand
gcaaguggcaaguucaaca

SEQ ID NO: 207529 - RNA, 19 nt, Homo sapiens
  misc_RNA (1)...(19): siRNA sense strand
gcuuccaauuugcuaauaa

SEQ ID NO: 207530 - RNA, 19 nt, Homo sapiens
  misc_RNA (1)...(19): siRNA sense strand
uggaagacaaguacagaua

SEQ ID NO: 207531 - RNA, 19 nt, Homo sapiens
  misc_RNA (1)...(19): siRNA sense strand
ggauccguguccugucuuu

SEQ ID NO: 207532 - RNA, 19 nt, Homo sapiens
  misc_RNA (1)...(19): siRNA sense strand
gucuuuagcugaccugaau

SEQ ID NO: 207533 - RNA, 19 nt, Homo sapiens
  misc_RNA (1)...(19): siRNA sense strand
gacaaguacagauaccuuu

SEQ ID NO: 207534 - RNA, 19 nt, Homo sapiens
  misc_RNA (1)...(19): siRNA sense strand
ccaagcaucaggccaaaug

SEQ ID NO: 207535 - RNA, 19 nt, Homo sapiens
  misc_RNA (1)...(19): siRNA sense strand
ggagcaagagcacaacaau

SEQ ID NO: 207536 - RNA, 19 nt, Homo sapiens
  misc_RNA (1)...(19): siRNA sense strand
guguaaagcacauuuggaa

SEQ ID NO: 207537 - RNA, 19 nt, Homo sapiens
  misc_RNA (1)...(19): siRNA sense strand
caagacaguugggugaagu

SEQ ID NO: 207538 - RNA, 19 nt, Homo sapiens
  misc_RNA (1)...(19): siRNA sense strand
gaagauguucgagacuuug

SEQ ID NO: 207539 - RNA, 19 nt, Homo sapiens
  misc_RNA (1)...(19): siRNA sense strand
gucagauucucagcuuaua

SEQ ID NO: 207540 - RNA, 19 nt, Homo sapiens
  misc_RNA (1)...(19): siRNA sense strand
uaacaucugcaaagagugu

SEQ ID NO: 207541 - RNA, 19 nt, Homo sapiens
  misc_RNA (1)...(19): siRNA sense strand
cggagcugcuuccaauuug

SEQ ID NO: 207542 - RNA, 19 nt, Homo sapiens
  misc_RNA (1)...(19): siRNA sense strand
gaagacaaguacagauacc

SEQ ID NO: 207543 - RNA, 19 nt, Homo sapiens
  misc_RNA (1)...(19): siRNA sense strand
ccauggauauccugcagau

SEQ ID NO: 207544 - RNA, 19 nt, Homo sapiens
  misc_RNA (1)...(19): siRNA sense strand
ggcaucauuucccugugua

SEQ ID NO: 207545 - RNA, 19 nt, Homo sapiens
  misc_RNA (1)...(19): siRNA sense strand
uggauauccugcagauuau

SEQ ID NO: 207546 - RNA, 19 nt, Homo sapiens
  misc_RNA (1)...(19): siRNA sense strand
ggaagacaaguacagauac

SEQ ID NO: 207547 - RNA, 19 nt, Homo sapiens
  misc_RNA (1)...(19): siRNA sense strand
ugcaaagaguguccaauca

SEQ ID NO: 207548 - RNA, 19 nt, Homo sapiens
  misc_RNA (1)...(19): siRNA sense strand
guggauaugugucugaacu

SEQ ID NO: 207549 - RNA, 19 nt, Homo sapiens
  misc_RNA (1)...(19): siRNA sense strand
acuggcugcugaauguuua

SEQ ID NO: 207550 - RNA, 19 nt, Homo sapiens
  misc_RNA (1)...(19): siRNA sense strand
acuaucccaugguggaaua

SEQ ID NO: 207551 - RNA, 19 nt, Homo sapiens
  misc_RNA (1)...(19): siRNA sense strand
ccggagcugcuuccaauuu

SEQ ID NO: 207552 - RNA, 19 nt, Homo sapiens
  misc_RNA (1)...(19): siRNA sense strand
ccaaauuccaagacaguug

SEQ ID NO: 207553 - RNA, 19 nt, Homo sapiens
  misc_RNA (1)...(19): siRNA sense strand
cagaaacugccaagcauca

SEQ ID NO: 207554 - RNA, 19 nt, Homo sapiens
  misc_RNA (1)...(19): siRNA sense strand
uaugacaucugccaaagcu

SEQ ID NO: 207555 - RNA, 19 nt, Homo sapiens
  misc_RNA (1)...(19): siRNA sense strand
aaugucagauucucagcuu

SEQ ID NO: 207556 - RNA, 19 nt, Homo sapiens
  misc_RNA (1)...(19): siRNA sense strand
ucgagacuuugccaaggua

SEQ ID NO: 207557 - RNA, 19 nt, Homo sapiens
  misc_RNA (1)...(19): siRNA sense strand
gcaaaaggccauaaaaugc

SEQ ID NO: 207558 - RNA, 19 nt, Homo sapiens
  misc_RNA (1)...(19): siRNA sense strand
cugcaugauucuauccaaa

SEQ ID NO: 207559 - RNA, 19 nt, Homo sapiens
  misc_RNA (1)...(19): siRNA sense strand
uaaagcacauuuggaagac

SEQ ID NO: 207560 - RNA, 19 nt, Homo sapiens
  misc_RNA (1)...(19): siRNA sense strand
acaggagucuaaagcacuu

SEQ ID NO: 207561 - RNA, 19 nt, Homo sapiens
  misc_RNA (1)...(19): siRNA sense strand
acagauaccuuuucaagca

SEQ ID NO: 207562 - RNA, 19 nt, Homo sapiens
  misc_RNA (1)...(19): siRNA sense strand
aagcacauuuggaagacaa

SEQ ID NO: 207563 - RNA, 19 nt, Homo sapiens
  misc_RNA (1)...(19): siRNA sense strand
gcuaauaauaagccagaga

SEQ ID NO: 207564 - RNA, 19 nt, Homo sapiens
  misc_RNA (1)...(19): siRNA sense strand
caagagcacaacaauuugg

SEQ ID NO: 207565 - RNA, 19 nt, Homo sapiens
  misc_RNA (1)...(19): siRNA sense strand
ccugucagcugcaugugau

SEQ ID NO: 207566 - RNA, 19 nt, Homo sapiens
  misc_RNA (1)...(19): siRNA sense strand
gcugcugaauguuuaugau

SEQ ID NO: 207567 - RNA, 19 nt, Homo sapiens
  misc_RNA (1)...(19): siRNA sense strand
acagagcucuaccagucuu

SEQ ID NO: 207568 - RNA, 19 nt, Homo sapiens
  misc_RNA (1)...(19): siRNA sense strand
acaguugggugaaguugca

SEQ ID NO: 207569 - RNA, 19 nt, Homo sapiens
  misc_RNA (1)...(19): siRNA sense strand
guuugaccacuauuuauga

SEQ ID NO: 207570 - RNA, 19 nt, Homo sapiens
  misc_RNA (1)...(19): siRNA sense strand
gcuuauaggacugccauga

SEQ ID NO: 207571 - RNA, 19 nt, Homo sapiens
  misc_RNA (1)...(19): siRNA sense strand
caucaggccaaauguaaca

SEQ ID NO: 207572 - RNA, 19 nt, Homo sapiens
  misc_RNA (1)...(19): siRNA sense strand
gauucuauccaaauuccaa

SEQ ID NO: 207573 - RNA, 19 nt, Homo sapiens
  misc_RNA (1)...(19): siRNA sense strand
ggcaaguucaacaggauuu

SEQ ID NO: 207574 - RNA, 19 nt, Homo sapiens
  misc_RNA (1)...(19): siRNA sense strand
gaacuggcugcugaauguu

SEQ ID NO: 207575 - RNA, 19 nt, Homo sapiens
  misc_RNA (1)...(19): siRNA sense strand
cugcugaauguuuaugaua

SEQ ID NO: 207576 - RNA, 19 nt, Homo sapiens
  misc_RNA (1)...(19): siRNA sense strand
aagcaucaggccaaaugua

SEQ ID NO: 207577 - RNA, 19 nt, Homo sapiens
  misc_RNA (1)...(19): siRNA sense strand
uggcaucauuucccugugu

SEQ ID NO: 207578 - RNA, 19 nt, Homo sapiens
  misc_RNA (1)...(19): siRNA sense strand
ccaugaaacuccgaagacu

SEQ ID NO: 207579 - RNA, 19 nt, Homo sapiens
  misc_RNA (1)...(19): siRNA sense strand
auaauaagccagagaucga

SEQ ID NO: 207580 - RNA, 19 nt, Homo sapiens
  misc_RNA (1)...(19): siRNA sense strand
cuaauaauaagccagagau

SEQ ID NO: 207581 - RNA, 19 nt, Homo sapiens
  misc_RNA (1)...(19): siRNA sense strand
ugggugaaguugcauccuu

SEQ ID NO: 207582 - RNA, 19 nt, Homo sapiens
  misc_RNA (1)...(19): siRNA sense strand
caucauuucccuguguaaa

SEQ ID NO: 207583 - RNA, 19 nt, Homo sapiens
  misc_RNA (1)...(19): siRNA sense strand
gcguggauaugugucugaa

SEQ ID NO: 207584 - RNA, 19 nt, Homo sapiens
  misc_RNA (1)...(19): siRNA sense strand
gcacuaucccaugguggaa

SEQ ID NO: 207585 - RNA, 19 nt, Homo sapiens
  misc_RNA (1)...(19): siRNA sense strand
gagccugucagcugcaugu

SEQ ID NO: 207586 - RNA, 19 nt, Homo sapiens
  misc_RNA (1)...(19): siRNA sense strand
guacagauaccuuuucaag

SEQ ID NO: 207587 - RNA, 19 nt, Homo sapiens
  misc_RNA (1)...(19): siRNA sense strand
gucccucucugcguggaua

SEQ ID NO: 207588 - RNA, 19 nt, Homo sapiens
  misc_RNA (1)...(19): siRNA sense strand
ggagcugcuuccaauuugc

SEQ ID NO: 207589 - RNA, 19 nt, Homo sapiens
  misc_RNA (1)...(19): siRNA sense strand
uuagcugaccugaauaaug

SEQ ID NO: 207590 - RNA, 19 nt, Homo sapiens
  misc_RNA (1)...(19): siRNA sense strand
guggcaaguucaacaggau

SEQ ID NO: 207591 - RNA, 19 nt, Homo sapiens
  misc_RNA (1)...(19): siRNA sense strand
acaacaauuuggucaacgu

SEQ ID NO: 207592 - RNA, 19 nt, Homo sapiens
  misc_RNA (1)...(19): siRNA sense strand
gacuacaucaggagaagau

SEQ ID NO: 207593 - RNA, 19 nt, Homo sapiens
  misc_RNA (1)...(19): siRNA sense strand
uaauaagccagagaucgaa

SEQ ID NO: 207594 - RNA, 19 nt, Homo sapiens
  misc_RNA (1)...(19): siRNA sense strand
ugucagauucucagcuuau

SEQ ID NO: 207595 - RNA, 19 nt, Homo sapiens
  misc_RNA (1)...(19): siRNA sense strand
ggauauccugcagauuauu

SEQ ID NO: 207596 - RNA, 19 nt, Homo sapiens
  misc_RNA (1)...(19): siRNA sense strand
agcaucaggccaaauguaa

SEQ ID NO: 207597 - RNA, 19 nt, Homo sapiens
  misc_RNA (1)...(19): siRNA sense strand
gcccuuugcuuggaucucu

SEQ ID NO: 207598 - RNA, 19 nt, Homo sapiens
  misc_RNA (1)...(19): siRNA sense strand
gcugaauguuuaugauacg

SEQ ID NO: 207599 - RNA, 19 nt, Homo sapiens
  misc_RNA (1)...(19): siRNA sense strand
agacuuugccaagguacua

SEQ ID NO: 207600 - RNA, 19 nt, Homo sapiens
  misc_RNA (1)...(19): siRNA sense strand
caagcaaguggcaaguuca

SEQ ID NO: 207601 - RNA, 19 nt, Homo sapiens
  misc_RNA (1)...(19): siRNA sense strand
agacaaguacagauaccuu

SEQ ID NO: 207602 - RNA, 19 nt, Homo sapiens
  misc_RNA (1)...(19): siRNA sense strand
gcaucauuucccuguguaa

SEQ ID NO: 207603 - RNA, 19 nt, Homo sapiens
  misc_RNA (1)...(19): siRNA sense strand
cugcaaagaguguccaauc

SEQ ID NO: 207604 - RNA, 19 nt, Homo sapiens
  misc_RNA (1)...(19): siRNA sense strand
cuuauaggacugccaugaa

SEQ ID NO: 207605 - RNA, 19 nt, Homo sapiens
  misc_RNA (1)...(19): siRNA sense strand
caaagaguguccaaucauu

SEQ ID NO: 207606 - RNA, 19 nt, Homo sapiens
  misc_RNA (1)...(19): siRNA sense strand
uagcugaccugaauaaugu

SEQ ID NO: 207607 - RNA, 19 nt, Homo sapiens
  misc_RNA (1)...(19): siRNA sense strand
gcaugauucuauccaaauu

SEQ ID NO: 207608 - RNA, 19 nt, Homo sapiens
  misc_RNA (1)...(19): siRNA sense strand
ugaacuggcugcugaaugu

SEQ ID NO: 207609 - RNA, 19 nt, Homo sapiens
  misc_RNA (1)...(19): siRNA sense strand
gauauccugcagauuauua

SEQ ID NO: 207610 - RNA, 19 nt, Homo sapiens
  misc_RNA (1)...(19): siRNA sense strand
gagaagauguucgagacuu

SEQ ID NO: 207611 - RNA, 19 nt, Homo sapiens
  misc_RNA (1)...(19): siRNA sense strand
gcacuuuaauuaugacauc

SEQ ID NO: 207612 - RNA, 19 nt, Homo sapiens
  misc_RNA (1)...(19): siRNA sense strand
guaaagcacauuuggaaga

SEQ ID NO: 207613 - RNA, 19 nt, Homo sapiens
  misc_RNA (1)...(19): siRNA sense strand
gaauauugcacuccgacua

SEQ ID NO: 207614 - RNA, 19 nt, Homo sapiens
  misc_RNA (1)...(19): siRNA sense strand
uuauaggacugccaugaaa

SEQ ID NO: 207615 - RNA, 19 nt, Homo sapiens
  misc_RNA (1)...(19): siRNA sense strand
gggugaaguugcauccuuu

SEQ ID NO: 207616 - RNA, 19 nt, Homo sapiens
  misc_RNA (1)...(19): siRNA sense strand
gcaagagcacaacaauuug

SEQ ID NO: 207617 - RNA, 19 nt, Homo sapiens
  misc_RNA (1)...(19): siRNA sense strand
gcacaacaauuuggucaac

SEQ ID NO: 207618 - RNA, 19 nt, Homo sapiens
  misc_RNA (1)...(19): siRNA sense strand
agcaagagcacaacaauuu

SEQ ID NO: 207619 - RNA, 19 nt, Homo sapiens
  misc_RNA (1)...(19): siRNA sense strand
agaagauguucgagacuuu

SEQ ID NO: 207620 - RNA, 19 nt, Homo sapiens
  misc_RNA (1)...(19): siRNA sense strand
gagcaagagcacaacaauu

SEQ ID NO: 207621 - RNA, 19 nt, Homo sapiens
  misc_RNA (1)...(19): siRNA sense strand
ucaagcaaguggcaaguuc

SEQ ID NO: 207622 - RNA, 19 nt, Homo sapiens
  misc_RNA (1)...(19): siRNA sense strand
ccacgagacucaaacaacu

SEQ ID NO: 207623 - RNA, 19 nt, Homo sapiens
  misc_RNA (1)...(19): siRNA sense strand
cagcacaaccucaagcaaa

SEQ ID NO: 207624 - RNA, 19 nt, Homo sapiens
  misc_RNA (1)...(19): siRNA sense strand
gcaaagaguguccaaucau

SEQ ID NO: 207625 - RNA, 19 nt, Homo sapiens
  misc_RNA (1)...(19): siRNA sense strand
auggauauccugcagauua

SEQ ID NO: 207626 - RNA, 19 nt, Homo sapiens
  misc_RNA (1)...(19): siRNA sense strand
uguaacaucugcaaagagu

SEQ ID NO: 207627 - RNA, 19 nt, Homo sapiens
  misc_RNA (1)...(19): siRNA sense strand
guccggagcugcuuccaau

SEQ ID NO: 207628 - RNA, 19 nt, Homo sapiens
  misc_RNA (1)...(19): siRNA sense strand
gcaaguggcaaguucaaca

SEQ ID NO: 207629 - RNA, 19 nt, Homo sapiens
  misc_RNA (1)...(19): siRNA sense strand
gcuuccaauuugcuaauaa

SEQ ID NO: 207630 - RNA, 19 nt, Homo sapiens
  misc_RNA (1)...(19): siRNA sense strand
uggaagacaaguacagaua

SEQ ID NO: 207631 - RNA, 19 nt, Homo sapiens
  misc_RNA (1)...(19): siRNA sense strand
ggauccguguccugucuuu

SEQ ID NO: 207632 - RNA, 19 nt, Homo sapiens
  misc_RNA (1)...(19): siRNA sense strand
gucuuuagcugaccugaau

SEQ ID NO: 207633 - RNA, 19 nt, Homo sapiens
  misc_RNA (1)...(19): siRNA sense strand
gacaaguacagauaccuuu

SEQ ID NO: 207634 - RNA, 19 nt, Homo sapiens
  misc_RNA (1)...(19): siRNA sense strand
ccaagcaucaggccaaaug

SEQ ID NO: 207635 - RNA, 19 nt, Homo sapiens
  misc_RNA (1)...(19): siRNA sense strand
ggagcaagagcacaacaau

SEQ ID NO: 207636 - RNA, 19 nt, Homo sapiens
  misc_RNA (1)...(19): siRNA sense strand
guguaaagcacauuuggaa

SEQ ID NO: 207637 - RNA, 19 nt, Homo sapiens
  misc_RNA (1)...(19): siRNA sense strand
caagacaguugggugaagu

SEQ ID NO: 207638 - RNA, 19 nt, Homo sapiens
  misc_RNA (1)...(19): siRNA sense strand
gaagauguucgagacuuug

SEQ ID NO: 207639 - RNA, 19 nt, Homo sapiens
  misc_RNA (1)...(19): siRNA sense strand
gucagauucucagcuuaua

SEQ ID NO: 207640 - RNA, 19 nt, Homo sapiens
  misc_RNA (1)...(19): siRNA sense strand
uaacaucugcaaagagugu

SEQ ID NO: 207641 - RNA, 19 nt, Homo sapiens
  misc_RNA (1)...(19): siRNA sense strand
cggagcugcuuccaauuug

SEQ ID NO: 207642 - RNA, 19 nt, Homo sapiens
  misc_RNA (1)...(19): siRNA sense strand
gaagacaaguacagauacc

SEQ ID NO: 207643 - RNA, 19 nt, Homo sapiens
  misc_RNA (1)...(19): siRNA sense strand
ccauggauauccugcagau

SEQ ID NO: 207644 - RNA, 19 nt, Homo sapiens
  misc_RNA (1)...(19): siRNA sense strand
ggcaucauuucccugugua

SEQ ID NO: 207645 - RNA, 19 nt, Homo sapiens
  misc_RNA (1)...(19): siRNA sense strand
uggauauccugcagauuau

SEQ ID NO: 207646 - RNA, 19 nt, Homo sapiens
  misc_RNA (1)...(19): siRNA sense strand
ggaagacaaguacagauac

SEQ ID NO: 207647 - RNA, 19 nt, Homo sapiens
  misc_RNA (1)...(19): siRNA sense strand
ugcaaagaguguccaauca

SEQ ID NO: 207648 - RNA, 19 nt, Homo sapiens
  misc_RNA (1)...(19): siRNA sense strand
guggauaugugucugaacu

SEQ ID NO: 207649 - RNA, 19 nt, Homo sapiens
  misc_RNA (1)...(19): siRNA sense strand
acuggcugcugaauguuua

SEQ ID NO: 207650 - RNA, 19 nt, Homo sapiens
  misc_RNA (1)...(19): siRNA sense strand
acuaucccaugguggaaua

SEQ ID NO: 207651 - RNA, 19 nt, Homo sapiens
  misc_RNA (1)...(19): siRNA sense strand
ccggagcugcuuccaauuu

SEQ ID NO: 207652 - RNA, 19 nt, Homo sapiens
  misc_RNA (1)...(19): siRNA sense strand
ccaaauuccaagacaguug

SEQ ID NO: 207653 - RNA, 19 nt, Homo sapiens
  misc_RNA (1)...(19): siRNA sense strand
cagaaacugccaagcauca

SEQ ID NO: 207654 - RNA, 19 nt, Homo sapiens
  misc_RNA (1)...(19): siRNA sense strand
uaugacaucugccaaagcu

SEQ ID NO: 207655 - RNA, 19 nt, Homo sapiens
  misc_RNA (1)...(19): siRNA sense strand
aaugucagauucucagcuu

SEQ ID NO: 207656 - RNA, 19 nt, Homo sapiens
  misc_RNA (1)...(19): siRNA sense strand
ucgagacuuugccaaggua

SEQ ID NO: 207657 - RNA, 19 nt, Homo sapiens
  misc_RNA (1)...(19): siRNA sense strand
gcaaaaggccauaaaaugc

SEQ ID NO: 207658 - RNA, 19 nt, Homo sapiens
  misc_RNA (1)...(19): siRNA sense strand
cugcaugauucuauccaaa

SEQ ID NO: 207659 - RNA, 19 nt, Homo sapiens
  misc_RNA (1)...(19): siRNA sense strand
uaaagcacauuuggaagac

SEQ ID NO: 207660 - RNA, 19 nt, Homo sapiens
  misc_RNA (1)...(19): siRNA sense strand
acaggagucuaaagcacuu

SEQ ID NO: 207661 - RNA, 19 nt, Homo sapiens
  misc_RNA (1)...(19): siRNA sense strand
acagauaccuuuucaagca

SEQ ID NO: 207662 - RNA, 19 nt, Homo sapiens
  misc_RNA (1)...(19): siRNA sense strand
aagcacauuuggaagacaa

SEQ ID NO: 207663 - RNA, 19 nt, Homo sapiens
  misc_RNA (1)...(19): siRNA sense strand
gcuaauaauaagccagaga

SEQ ID NO: 207664 - RNA, 19 nt, Homo sapiens
  misc_RNA (1)...(19): siRNA sense strand
caagagcacaacaauuugg

SEQ ID NO: 207665 - RNA, 19 nt, Homo sapiens
  misc_RNA (1)...(19): siRNA sense strand
ccugucagcugcaugugau

SEQ ID NO: 207666 - RNA, 19 nt, Homo sapiens
  misc_RNA (1)...(19): siRNA sense strand
gcugcugaauguuuaugau

SEQ ID NO: 207667 - RNA, 19 nt, Homo sapiens
  misc_RNA (1)...(19): siRNA sense strand
acagagcucuaccagucuu

SEQ ID NO: 207668 - RNA, 19 nt, Homo sapiens
  misc_RNA (1)...(19): siRNA sense strand
acaguugggugaaguugca

SEQ ID NO: 207669 - RNA, 19 nt, Homo sapiens
  misc_RNA (1)...(19): siRNA sense strand
guuugaccacuauuuauga

SEQ ID NO: 207670 - RNA, 19 nt, Homo sapiens
  misc_RNA (1)...(19): siRNA sense strand
gcuuauaggacugccauga

SEQ ID NO: 207671 - RNA, 19 nt, Homo sapiens
  misc_RNA (1)...(19): siRNA sense strand
caucaggccaaauguaaca

SEQ ID NO: 207672 - RNA, 19 nt, Homo sapiens
  misc_RNA (1)...(19): siRNA sense strand
gauucuauccaaauuccaa

SEQ ID NO: 207673 - RNA, 19 nt, Homo sapiens
  misc_RNA (1)...(19): siRNA sense strand
ggcaaguucaacaggauuu

SEQ ID NO: 207674 - RNA, 19 nt, Homo sapiens
  misc_RNA (1)...(19): siRNA sense strand
gaacuggcugcugaauguu

SEQ ID NO: 207675 - RNA, 19 nt, Homo sapiens
  misc_RNA (1)...(19): siRNA sense strand
cugcugaauguuuaugaua

SEQ ID NO: 207676 - RNA, 19 nt, Homo sapiens
  misc_RNA (1)...(19): siRNA sense strand
aagcaucaggccaaaugua

SEQ ID NO: 207677 - RNA, 19 nt, Homo sapiens
  misc_RNA (1)...(19): siRNA sense strand
uggcaucauuucccugugu

SEQ ID NO: 207678 - RNA, 19 nt, Homo sapiens
  misc_RNA (1)...(19): siRNA sense strand
ccaugaaacuccgaagacu

SEQ ID NO: 207679 - RNA, 19 nt, Homo sapiens
  misc_RNA (1)...(19): siRNA sense strand
auaauaagccagagaucga

SEQ ID NO: 207680 - RNA, 19 nt, Homo sapiens
  misc_RNA (1)...(19): siRNA sense strand
cuaauaauaagccagagau

SEQ ID NO: 207681 - RNA, 19 nt, Homo sapiens
  misc_RNA (1)...(19): siRNA sense strand
ugggugaaguugcauccuu

SEQ ID NO: 207682 - RNA, 19 nt, Homo sapiens
  misc_RNA (1)...(19): siRNA sense strand
caucauuucccuguguaaa

SEQ ID NO: 207683 - RNA, 19 nt, Homo sapiens
  misc_RNA (1)...(19): siRNA sense strand
gcguggauaugugucugaa

SEQ ID NO: 207684 - RNA, 19 nt, Homo sapiens
  misc_RNA (1)...(19): siRNA sense strand
gcacuaucccaugguggaa

SEQ ID NO: 207685 - RNA, 19 nt, Homo sapiens
  misc_RNA (1)...(19): siRNA sense strand
gagccugucagcugcaugu

SEQ ID NO: 207686 - RNA, 19 nt, Homo sapiens
  misc_RNA (1)...(19): siRNA sense strand
guacagauaccuuuucaag

SEQ ID NO: 207687 - RNA, 19 nt, Homo sapiens
  misc_RNA (1)...(19): siRNA sense strand
gucccucucugcguggaua

SEQ ID NO: 207688 - RNA, 19 nt, Homo sapiens
  misc_RNA (1)...(19): siRNA sense strand
ggagcugcuuccaauuugc

SEQ ID NO: 207689 - RNA, 19 nt, Homo sapiens
  misc_RNA (1)...(19): siRNA sense strand
uuagcugaccugaauaaug

SEQ ID NO: 207690 - RNA, 19 nt, Homo sapiens
  misc_RNA (1)...(19): siRNA sense strand
guggcaaguucaacaggau

SEQ ID NO: 207691 - RNA, 19 nt, Homo sapiens
  misc_RNA (1)...(19): siRNA sense strand
acaacaauuuggucaacgu

SEQ ID NO: 207692 - RNA, 19 nt, Homo sapiens
  misc_RNA (1)...(19): siRNA sense strand
gacuacaucaggagaagau

SEQ ID NO: 207693 - RNA, 19 nt, Homo sapiens
  misc_RNA (1)...(19): siRNA sense strand
uaauaagccagagaucgaa

SEQ ID NO: 207694 - RNA, 19 nt, Homo sapiens
  misc_RNA (1)...(19): siRNA sense strand
ugucagauucucagcuuau

SEQ ID NO: 207695 - RNA, 19 nt, Homo sapiens
  misc_RNA (1)...(19): siRNA sense strand
ggauauccugcagauuauu

SEQ ID NO: 207696 - RNA, 19 nt, Homo sapiens
  misc_RNA (1)...(19): siRNA sense strand
agcaucaggccaaauguaa

SEQ ID NO: 207697 - RNA, 19 nt, Homo sapiens
  misc_RNA (1)...(19): siRNA sense strand
gcccuuugcuuggaucucu

SEQ ID NO: 207698 - RNA, 19 nt, Homo sapiens
  misc_RNA (1)...(19): siRNA sense strand
gcugaauguuuaugauacg

SEQ ID NO: 207699 - RNA, 19 nt, Homo sapiens
  misc_RNA (1)...(19): siRNA sense strand
agacuuugccaagguacua

SEQ ID NO: 207700 - RNA, 19 nt, Homo sapiens
  misc_RNA (1)...(19): siRNA sense strand
caagcaaguggcaaguuca

SEQ ID NO: 207701 - RNA, 19 nt, Homo sapiens
  misc_RNA (1)...(19): siRNA sense strand
agacaaguacagauaccuu

SEQ ID NO: 207702 - RNA, 19 nt, Homo sapiens
  misc_RNA (1)...(19): siRNA sense strand
gcaucauuucccuguguaa

SEQ ID NO: 207703 - RNA, 19 nt, Homo sapiens
  misc_RNA (1)...(19): siRNA sense strand
cugcaaagaguguccaauc

SEQ ID NO: 207704 - RNA, 19 nt, Homo sapiens
  misc_RNA (1)...(19): siRNA sense strand
cuuauaggacugccaugaa

SEQ ID NO: 207705 - RNA, 19 nt, Homo sapiens
  misc_RNA (1)...(19): siRNA sense strand
caaagaguguccaaucauu

SEQ ID NO: 207706 - RNA, 19 nt, Homo sapiens
  misc_RNA (1)...(19): siRNA sense strand
uagcugaccugaauaaugu

SEQ ID NO: 207707 - RNA, 19 nt, Homo sapiens
  misc_RNA (1)...(19): siRNA sense strand
gcaugauucuauccaaauu

SEQ ID NO: 207708 - RNA, 19 nt, Homo sapiens
  misc_RNA (1)...(19): siRNA sense strand
ugaacuggcugcugaaugu

SEQ ID NO: 207709 - RNA, 19 nt, Homo sapiens
  misc_RNA (1)...(19): siRNA sense strand
gauauccugcagauuauua

SEQ ID NO: 207710 - RNA, 19 nt, Homo sapiens
  misc_RNA (1)...(19): siRNA sense strand
gagaagauguucgagacuu

SEQ ID NO: 207711 - RNA, 19 nt, Homo sapiens
  misc_RNA (1)...(19): siRNA sense strand
gcacuuuaauuaugacauc

SEQ ID NO: 207712 - RNA, 19 nt, Homo sapiens
  misc_RNA (1)...(19): siRNA sense strand
guaaagcacauuuggaaga

SEQ ID NO: 207713 - RNA, 19 nt, Homo sapiens
  misc_RNA (1)...(19): siRNA sense strand
gaauauugcacuccgacua

SEQ ID NO: 207714 - RNA, 19 nt, Homo sapiens
  misc_RNA (1)...(19): siRNA sense strand
uuauaggacugccaugaaa

SEQ ID NO: 207715 - RNA, 19 nt, Homo sapiens
  misc_RNA (1)...(19): siRNA sense strand
gggugaaguugcauccuuu

SEQ ID NO: 207716 - RNA, 19 nt, Homo sapiens
  misc_RNA (1)...(19): siRNA sense strand
gcaagagcacaacaauuug

SEQ ID NO: 207717 - RNA, 19 nt, Homo sapiens
  misc_RNA (1)...(19): siRNA sense strand
gcacaacaauuuggucaac

SEQ ID NO: 207718 - RNA, 19 nt, Homo sapiens
  misc_RNA (1)...(19): siRNA sense strand
agcaagagcacaacaauuu

SEQ ID NO: 207719 - RNA, 19 nt, Homo sapiens
  misc_RNA (1)...(19): siRNA sense strand
agaagauguucgagacuuu

SEQ ID NO: 207720 - RNA, 19 nt, Homo sapiens
  misc_RNA (1)...(19): siRNA sense strand
gagcaagagcacaacaauu

SEQ ID NO: 207721 - RNA, 19 nt, Homo sapiens
  misc_RNA (1)...(19): siRNA sense strand
ucaagcaaguggcaaguuc

SEQ ID NO: 207722 - RNA, 19 nt, Homo sapiens
  misc_RNA (1)...(19): siRNA sense strand
ccacgagacucaaacaacu

SEQ ID NO: 207723 - RNA, 19 nt, Homo sapiens
  misc_RNA (1)...(19): siRNA sense strand
cagcacaaccucaagcaaa

SEQ ID NO: 207724 - RNA, 19 nt, Homo sapiens
  misc_RNA (1)...(19): siRNA sense strand
gcaaagaguguccaaucau

SEQ ID NO: 207725 - RNA, 19 nt, Homo sapiens
  misc_RNA (1)...(19): siRNA sense strand
auggauauccugcagauua

SEQ ID NO: 207726 - RNA, 19 nt, Homo sapiens
  misc_RNA (1)...(19): siRNA sense strand
uguaacaucugcaaagagu

SEQ ID NO: 207727 - RNA, 19 nt, Homo sapiens
  misc_RNA (1)...(19): siRNA sense strand
guccggagcugcuuccaau

SEQ ID NO: 207728 - RNA, 19 nt, Homo sapiens
  misc_RNA (1)...(19): siRNA sense strand
gcaaguggcaaguucaaca

SEQ ID NO: 207729 - RNA, 19 nt, Homo sapiens
  misc_RNA (1)...(19): siRNA sense strand
gcuuccaauuugcuaauaa

SEQ ID NO: 207730 - RNA, 19 nt, Homo sapiens
  misc_RNA (1)...(19): siRNA sense strand
uggaagacaaguacagaua

SEQ ID NO: 207731 - RNA, 19 nt, Homo sapiens
  misc_RNA (1)...(19): siRNA sense strand
ggauccguguccugucuuu

SEQ ID NO: 207732 - RNA, 19 nt, Homo sapiens
  misc_RNA (1)...(19): siRNA sense strand
gucuuuagcugaccugaau

SEQ ID NO: 207733 - RNA, 19 nt, Homo sapiens
  misc_RNA (1)...(19): siRNA sense strand
gacaaguacagauaccuuu

SEQ ID NO: 207734 - RNA, 19 nt, Homo sapiens
  misc_RNA (1)...(19): siRNA sense strand
ccaagcaucaggccaaaug

SEQ ID NO: 207735 - RNA, 19 nt, Homo sapiens
  misc_RNA (1)...(19): siRNA sense strand
ggagcaagagcacaacaau

SEQ ID NO: 207736 - RNA, 19 nt, Homo sapiens
  misc_RNA (1)...(19): siRNA sense strand
guguaaagcacauuuggaa

SEQ ID NO: 207737 - RNA, 19 nt, Homo sapiens
  misc_RNA (1)...(19): siRNA sense strand
caagacaguugggugaagu

SEQ ID NO: 207738 - RNA, 19 nt, Homo sapiens
  misc_RNA (1)...(19): siRNA sense strand
gaagauguucgagacuuug

SEQ ID NO: 207739 - RNA, 19 nt, Homo sapiens
  misc_RNA (1)...(19): siRNA sense strand
gucagauucucagcuuaua

SEQ ID NO: 207740 - RNA, 19 nt, Homo sapiens
  misc_RNA (1)...(19): siRNA sense strand
uaacaucugcaaagagugu

SEQ ID NO: 207741 - RNA, 19 nt, Homo sapiens
  misc_RNA (1)...(19): siRNA sense strand
cggagcugcuuccaauuug

SEQ ID NO: 207742 - RNA, 19 nt, Homo sapiens
  misc_RNA (1)...(19): siRNA sense strand
gaagacaaguacagauacc

SEQ ID NO: 207743 - RNA, 19 nt, Homo sapiens
  misc_RNA (1)...(19): siRNA sense strand
ccauggauauccugcagau

SEQ ID NO: 207744 - RNA, 19 nt, Homo sapiens
  misc_RNA (1)...(19): siRNA sense strand
ggcaucauuucccugugua

SEQ ID NO: 207745 - RNA, 19 nt, Homo sapiens
  misc_RNA (1)...(19): siRNA sense strand
uggauauccugcagauuau

SEQ ID NO: 207746 - RNA, 19 nt, Homo sapiens
  misc_RNA (1)...(19): siRNA sense strand
ggaagacaaguacagauac

SEQ ID NO: 207747 - RNA, 19 nt, Homo sapiens
  misc_RNA (1)...(19): siRNA sense strand
ugcaaagaguguccaauca

SEQ ID NO: 207748 - RNA, 19 nt, Homo sapiens
  misc_RNA (1)...(19): siRNA sense strand
guggauaugugucugaacu

SEQ ID NO: 207749 - RNA, 19 nt, Homo sapiens
  misc_RNA (1)...(19): siRNA sense strand
acuggcugcugaauguuua

SEQ ID NO: 207750 - RNA, 19 nt, Homo sapiens
  misc_RNA (1)...(19): siRNA sense strand
acuaucccaugguggaaua

SEQ ID NO: 207751 - RNA, 19 nt, Homo sapiens
  misc_RNA (1)...(19): siRNA sense strand
ccggagcugcuuccaauuu

SEQ ID NO: 207752 - RNA, 19 nt, Homo sapiens
  misc_RNA (1)...(19): siRNA sense strand
ccaaauuccaagacaguug

SEQ ID NO: 207753 - RNA, 19 nt, Homo sapiens
  misc_RNA (1)...(19): siRNA sense strand
cagaaacugccaagcauca

SEQ ID NO: 207754 - RNA, 19 nt, Homo sapiens
  misc_RNA (1)...(19): siRNA sense strand
uaugacaucugccaaagcu

SEQ ID NO: 207755 - RNA, 19 nt, Homo sapiens
  misc_RNA (1)...(19): siRNA sense strand
aaugucagauucucagcuu

SEQ ID NO: 207756 - RNA, 19 nt, Homo sapiens
  misc_RNA (1)...(19): siRNA sense strand
ucgagacuuugccaaggua

SEQ ID NO: 207757 - RNA, 19 nt, Homo sapiens
  misc_RNA (1)...(19): siRNA sense strand
gcaaaaggccauaaaaugc

SEQ ID NO: 207758 - RNA, 19 nt, Homo sapiens
  misc_RNA (1)...(19): siRNA sense strand
cugcaugauucuauccaaa

SEQ ID NO: 207759 - RNA, 19 nt, Homo sapiens
  misc_RNA (1)...(19): siRNA sense strand
uaaagcacauuuggaagac

SEQ ID NO: 207760 - RNA, 19 nt, Homo sapiens
  misc_RNA (1)...(19): siRNA sense strand
acaggagucuaaagcacuu

SEQ ID NO: 207761 - RNA, 19 nt, Homo sapiens
  misc_RNA (1)...(19): siRNA sense strand
acagauaccuuuucaagca

SEQ ID NO: 207762 - RNA, 19 nt, Homo sapiens
  misc_RNA (1)...(19): siRNA sense strand
aagcacauuuggaagacaa

SEQ ID NO: 207763 - RNA, 19 nt, Homo sapiens
  misc_RNA (1)...(19): siRNA sense strand
gcuaauaauaagccagaga

SEQ ID NO: 207764 - RNA, 19 nt, Homo sapiens
  misc_RNA (1)...(19): siRNA sense strand
caagagcacaacaauuugg

SEQ ID NO: 207765 - RNA, 19 nt, Homo sapiens
  misc_RNA (1)...(19): siRNA sense strand
ccugucagcugcaugugau

SEQ ID NO: 207766 - RNA, 19 nt, Homo sapiens
  misc_RNA (1)...(19): siRNA sense strand
gcugcugaauguuuaugau

SEQ ID NO: 207767 - RNA, 19 nt, Homo sapiens
  misc_RNA (1)...(19): siRNA sense strand
acagagcucuaccagucuu

SEQ ID NO: 207768 - RNA, 19 nt, Homo sapiens
  misc_RNA (1)...(19): siRNA sense strand
acaguugggugaaguugca

SEQ ID NO: 207769 - RNA, 19 nt, Homo sapiens
  misc_RNA (1)...(19): siRNA sense strand
guuugaccacuauuuauga

SEQ ID NO: 207770 - RNA, 19 nt, Homo sapiens
  misc_RNA (1)...(19): siRNA sense strand
gcuuauaggacugccauga

SEQ ID NO: 207771 - RNA, 19 nt, Homo sapiens
  misc_RNA (1)...(19): siRNA sense strand
caucaggccaaauguaaca

SEQ ID NO: 207772 - RNA, 19 nt, Homo sapiens
  misc_RNA (1)...(19): siRNA sense strand
gauucuauccaaauuccaa

SEQ ID NO: 207773 - RNA, 19 nt, Homo sapiens
  misc_RNA (1)...(19): siRNA sense strand
ggcaaguucaacaggauuu

SEQ ID NO: 207774 - RNA, 19 nt, Homo sapiens
  misc_RNA (1)...(19): siRNA sense strand
gaacuggcugcugaauguu

SEQ ID NO: 207775 - RNA, 19 nt, Homo sapiens
  misc_RNA (1)...(19): siRNA sense strand
cugcugaauguuuaugaua

SEQ ID NO: 207776 - RNA, 19 nt, Homo sapiens
  misc_RNA (1)...(19): siRNA sense strand
aagcaucaggccaaaugua

SEQ ID NO: 207777 - RNA, 19 nt, Homo sapiens
  misc_RNA (1)...(19): siRNA sense strand
uggcaucauuucccugugu

SEQ ID NO: 207778 - RNA, 19 nt, Homo sapiens
  misc_RNA (1)...(19): siRNA sense strand
ccaugaaacuccgaagacu

SEQ ID NO: 207779 - RNA, 19 nt, Homo sapiens
  misc_RNA (1)...(19): siRNA sense strand
auaauaagccagagaucga

SEQ ID NO: 207780 - RNA, 19 nt, Homo sapiens
  misc_RNA (1)...(19): siRNA sense strand
cuaauaauaagccagagau

SEQ ID NO: 207781 - RNA, 19 nt, Homo sapiens
  misc_RNA (1)...(19): siRNA sense strand
ugggugaaguugcauccuu

SEQ ID NO: 207782 - RNA, 19 nt, Homo sapiens
  misc_RNA (1)...(19): siRNA sense strand
caucauuucccuguguaaa

SEQ ID NO: 207783 - RNA, 19 nt, Homo sapiens
  misc_RNA (1)...(19): siRNA sense strand
gcguggauaugugucugaa

SEQ ID NO: 207784 - RNA, 19 nt, Homo sapiens
  misc_RNA (1)...(19): siRNA sense strand
gcacuaucccaugguggaa

SEQ ID NO: 207785 - RNA, 19 nt, Homo sapiens
  misc_RNA (1)...(19): siRNA sense strand
gagccugucagcugcaugu

SEQ ID NO: 207786 - RNA, 19 nt, Homo sapiens
  misc_RNA (1)...(19): siRNA sense strand
guacagauaccuuuucaag

SEQ ID NO: 207787 - RNA, 19 nt, Homo sapiens
  misc_RNA (1)...(19): siRNA sense strand
gucccucucugcguggaua

SEQ ID NO: 207788 - RNA, 19 nt, Homo sapiens
  misc_RNA (1)...(19): siRNA sense strand
ggagcugcuuccaauuugc

SEQ ID NO: 207789 - RNA, 19 nt, Homo sapiens
  misc_RNA (1)...(19): siRNA sense strand
uuagcugaccugaauaaug

SEQ ID NO: 207790 - RNA, 19 nt, Homo sapiens
  misc_RNA (1)...(19): siRNA sense strand
guggcaaguucaacaggau

SEQ ID NO: 207791 - RNA, 19 nt, Homo sapiens
  misc_RNA (1)...(19): siRNA sense strand
acaacaauuuggucaacgu

SEQ ID NO: 207792 - RNA, 19 nt, Homo sapiens
  misc_RNA (1)...(19): siRNA sense strand
gacuacaucaggagaagau

SEQ ID NO: 207793 - RNA, 19 nt, Homo sapiens
  misc_RNA (1)...(19): siRNA sense strand
uaauaagccagagaucgaa

SEQ ID NO: 207794 - RNA, 19 nt, Homo sapiens
  misc_RNA (1)...(19): siRNA sense strand
ugucagauucucagcuuau

SEQ ID NO: 207795 - RNA, 19 nt, Homo sapiens
  misc_RNA (1)...(19): siRNA sense strand
ggauauccugcagauuauu

SEQ ID NO: 207796 - RNA, 19 nt, Homo sapiens
  misc_RNA (1)...(19): siRNA sense strand
agcaucaggccaaauguaa

SEQ ID NO: 207797 - RNA, 19 nt, Homo sapiens
  misc_RNA (1)...(19): siRNA sense strand
gcccuuugcuuggaucucu

SEQ ID NO: 207798 - RNA, 19 nt, Homo sapiens
  misc_RNA (1)...(19): siRNA sense strand
gcugaauguuuaugauacg

SEQ ID NO: 207799 - RNA, 19 nt, Homo sapiens
  misc_RNA (1)...(19): siRNA sense strand
agacuuugccaagguacua

SEQ ID NO: 207800 - RNA, 19 nt, Homo sapiens
  misc_RNA (1)...(19): siRNA sense strand
caagcaaguggcaaguuca

SEQ ID NO: 207801 - RNA, 19 nt, Homo sapiens
  misc_RNA (1)...(19): siRNA sense strand
agacaaguacagauaccuu

SEQ ID NO: 207802 - RNA, 19 nt, Homo sapiens
  misc_RNA (1)...(19): siRNA sense strand
gcaucauuucccuguguaa

SEQ ID NO: 207803 - RNA, 19 nt, Homo sapiens
  misc_RNA (1)...(19): siRNA sense strand
cugcaaagaguguccaauc

SEQ ID NO: 207804 - RNA, 19 nt, Homo sapiens
  misc_RNA (1)...(19): siRNA sense strand
cuuauaggacugccaugaa

SEQ ID NO: 207805 - RNA, 19 nt, Homo sapiens
  misc_RNA (1)...(19): siRNA sense strand
caaagaguguccaaucauu

SEQ ID NO: 207806 - RNA, 19 nt, Homo sapiens
  misc_RNA (1)...(19): siRNA sense strand
uagcugaccugaauaaugu

SEQ ID NO: 207807 - RNA, 19 nt, Homo sapiens
  misc_RNA (1)...(19): siRNA sense strand
gcaugauucuauccaaauu

SEQ ID NO: 207808 - RNA, 19 nt, Homo sapiens
  misc_RNA (1)...(19): siRNA sense strand
ugaacuggcugcugaaugu

SEQ ID NO: 207809 - RNA, 19 nt, Homo sapiens
  misc_RNA (1)...(19): siRNA sense strand
gauauccugcagauuauua

SEQ ID NO: 207810 - RNA, 19 nt, Homo sapiens
  misc_RNA (1)...(19): siRNA sense strand
gagaagauguucgagacuu

SEQ ID NO: 207811 - RNA, 19 nt, Homo sapiens
  misc_RNA (1)...(19): siRNA sense strand
gcacuuuaauuaugacauc

SEQ ID NO: 207812 - RNA, 19 nt, Homo sapiens
  misc_RNA (1)...(19): siRNA sense strand
guaaagcacauuuggaaga

SEQ ID NO: 207813 - RNA, 19 nt, Homo sapiens
  misc_RNA (1)...(19): siRNA sense strand
gaauauugcacuccgacua

SEQ ID NO: 207814 - RNA, 19 nt, Homo sapiens
  misc_RNA (1)...(19): siRNA sense strand
uuauaggacugccaugaaa

SEQ ID NO: 207815 - RNA, 19 nt, Homo sapiens
  misc_RNA (1)...(19): siRNA sense strand
gggugaaguugcauccuuu

SEQ ID NO: 207816 - RNA, 19 nt, Homo sapiens
  misc_RNA (1)...(19): siRNA sense strand
gcaagagcacaacaauuug

SEQ ID NO: 207817 - RNA, 19 nt, Homo sapiens
  misc_RNA (1)...(19): siRNA sense strand
gcacaacaauuuggucaac

SEQ ID NO: 207818 - RNA, 19 nt, Homo sapiens
  misc_RNA (1)...(19): siRNA sense strand
agcaagagcacaacaauuu

SEQ ID NO: 207819 - RNA, 19 nt, Homo sapiens
  misc_RNA (1)...(19): siRNA sense strand
agaagauguucgagacuuu

SEQ ID NO: 207820 - RNA, 19 nt, Homo sapiens
  misc_RNA (1)...(19): siRNA sense strand
gagcaagagcacaacaauu

SEQ ID NO: 207821 - RNA, 19 nt, Homo sapiens
  misc_RNA (1)...(19): siRNA sense strand
ucaagcaaguggcaaguuc

SEQ ID NO: 207822 - RNA, 19 nt, Homo sapiens
  misc_RNA (1)...(19): siRNA sense strand
ccacgagacucaaacaacu

SEQ ID NO: 207823 - RNA, 19 nt, Homo sapiens
  misc_RNA (1)...(19): siRNA sense strand
cagcacaaccucaagcaaa

SEQ ID NO: 207824 - RNA, 19 nt, Homo sapiens
  misc_RNA (1)...(19): siRNA sense strand
gcaaagaguguccaaucau

SEQ ID NO: 207825 - RNA, 19 nt, Homo sapiens
  misc_RNA (1)...(19): siRNA sense strand
auggauauccugcagauua

SEQ ID NO: 207826 - RNA, 19 nt, Homo sapiens
  misc_RNA (1)...(19): siRNA sense strand
uguaacaucugcaaagagu

SEQ ID NO: 207827 - RNA, 19 nt, Homo sapiens
  misc_RNA (1)...(19): siRNA sense strand
guccggagcugcuuccaau

SEQ ID NO: 207828 - RNA, 19 nt, Homo sapiens
  misc_RNA (1)...(19): siRNA sense strand
gcaaguggcaaguucaaca

SEQ ID NO: 207829 - RNA, 19 nt, Homo sapiens
  misc_RNA (1)...(19): siRNA sense strand
gcuuccaauuugcuaauaa

SEQ ID NO: 207830 - RNA, 19 nt, Homo sapiens
  misc_RNA (1)...(19): siRNA sense strand
uggaagacaaguacagaua

SEQ ID NO: 207831 - RNA, 19 nt, Homo sapiens
  misc_RNA (1)...(19): siRNA sense strand
ggauccguguccugucuuu

SEQ ID NO: 207832 - RNA, 19 nt, Homo sapiens
  misc_RNA (1)...(19): siRNA sense strand
gucuuuagcugaccugaau

SEQ ID NO: 207833 - RNA, 19 nt, Homo sapiens
  misc_RNA (1)...(19): siRNA sense strand
gacaaguacagauaccuuu

SEQ ID NO: 207834 - RNA, 19 nt, Homo sapiens
  misc_RNA (1)...(19): siRNA sense strand
ccaagcaucaggccaaaug

SEQ ID NO: 207835 - RNA, 19 nt, Homo sapiens
  misc_RNA (1)...(19): siRNA sense strand
ggagcaagagcacaacaau

SEQ ID NO: 207836 - RNA, 19 nt, Homo sapiens
  misc_RNA (1)...(19): siRNA sense strand
guguaaagcacauuuggaa

SEQ ID NO: 207837 - RNA, 19 nt, Homo sapiens
  misc_RNA (1)...(19): siRNA sense strand
caagacaguugggugaagu

SEQ ID NO: 207838 - RNA, 19 nt, Homo sapiens
  misc_RNA (1)...(19): siRNA sense strand
gaagauguucgagacuuug

SEQ ID NO: 207839 - RNA, 19 nt, Homo sapiens
  misc_RNA (1)...(19): siRNA sense strand
gucagauucucagcuuaua

SEQ ID NO: 207840 - RNA, 19 nt, Homo sapiens
  misc_RNA (1)...(19): siRNA sense strand
uaacaucugcaaagagugu

SEQ ID NO: 207841 - RNA, 19 nt, Homo sapiens
  misc_RNA (1)...(19): siRNA sense strand
cggagcugcuuccaauuug

SEQ ID NO: 207842 - RNA, 19 nt, Homo sapiens
  misc_RNA (1)...(19): siRNA sense strand
gaagacaaguacagauacc

SEQ ID NO: 207843 - RNA, 19 nt, Homo sapiens
  misc_RNA (1)...(19): siRNA sense strand
ccauggauauccugcagau

SEQ ID NO: 207844 - RNA, 19 nt, Homo sapiens
  misc_RNA (1)...(19): siRNA sense strand
ggcaucauuucccugugua

SEQ ID NO: 207845 - RNA, 19 nt, Homo sapiens
  misc_RNA (1)...(19): siRNA sense strand
uggauauccugcagauuau

SEQ ID NO: 207846 - RNA, 19 nt, Homo sapiens
  misc_RNA (1)...(19): siRNA sense strand
ggaagacaaguacagauac

SEQ ID NO: 207847 - RNA, 19 nt, Homo sapiens
  misc_RNA (1)...(19): siRNA sense strand
ugcaaagaguguccaauca

SEQ ID NO: 207848 - RNA, 19 nt, Homo sapiens
  misc_RNA (1)...(19): siRNA sense strand
guggauaugugucugaacu

SEQ ID NO: 207849 - RNA, 19 nt, Homo sapiens
  misc_RNA (1)...(19): siRNA sense strand
acuggcugcugaauguuua

SEQ ID NO: 207850 - RNA, 19 nt, Homo sapiens
  misc_RNA (1)...(19): siRNA sense strand
acuaucccaugguggaaua

SEQ ID NO: 207851 - RNA, 19 nt, Homo sapiens
  misc_RNA (1)...(19): siRNA sense strand
ccggagcugcuuccaauuu

SEQ ID NO: 207852 - RNA, 19 nt, Homo sapiens
  misc_RNA (1)...(19): siRNA sense strand
ccaaauuccaagacaguug

SEQ ID NO: 207853 - RNA, 19 nt, Homo sapiens
  misc_RNA (1)...(19): siRNA sense strand
cagaaacugccaagcauca

SEQ ID NO: 207854 - RNA, 19 nt, Homo sapiens
  misc_RNA (1)...(19): siRNA sense strand
uaugacaucugccaaagcu

SEQ ID NO: 207855 - RNA, 19 nt, Homo sapiens
  misc_RNA (1)...(19): siRNA sense strand
aaugucagauucucagcuu

SEQ ID NO: 207856 - RNA, 19 nt, Homo sapiens
  misc_RNA (1)...(19): siRNA sense strand
ucgagacuuugccaaggua

SEQ ID NO: 207857 - RNA, 19 nt, Homo sapiens
  misc_RNA (1)...(19): siRNA sense strand
gcaaaaggccauaaaaugc

SEQ ID NO: 207858 - RNA, 19 nt, Homo sapiens
  misc_RNA (1)...(19): siRNA sense strand
cugcaugauucuauccaaa

SEQ ID NO: 207859 - RNA, 19 nt, Homo sapiens
  misc_RNA (1)...(19): siRNA sense strand
uaaagcacauuuggaagac

SEQ ID NO: 207860 - RNA, 19 nt, Homo sapiens
  misc_RNA (1)...(19): siRNA sense strand
acaggagucuaaagcacuu

SEQ ID NO: 207861 - RNA, 19 nt, Homo sapiens
  misc_RNA (1)...(19): siRNA sense strand
acagauaccuuuucaagca

SEQ ID NO: 207862 - RNA, 19 nt, Homo sapiens
  misc_RNA (1)...(19): siRNA sense strand
aagcacauuuggaagacaa

SEQ ID NO: 207863 - RNA, 19 nt, Homo sapiens
  misc_RNA (1)...(19): siRNA sense strand
gcuaauaauaagccagaga

SEQ ID NO: 207864 - RNA, 19 nt, Homo sapiens
  misc_RNA (1)...(19): siRNA sense strand
caagagcacaacaauuugg

SEQ ID NO: 207865 - RNA, 19 nt, Homo sapiens
  misc_RNA (1)...(19): siRNA sense strand
ccugucagcugcaugugau

SEQ ID NO: 207866 - RNA, 19 nt, Homo sapiens
  misc_RNA (1)...(19): siRNA sense strand
gcugcugaauguuuaugau

SEQ ID NO: 207867 - RNA, 19 nt, Homo sapiens
  misc_RNA (1)...(19): siRNA sense strand
acagagcucuaccagucuu

SEQ ID NO: 207868 - RNA, 19 nt, Homo sapiens
  misc_RNA (1)...(19): siRNA sense strand
acaguugggugaaguugca

SEQ ID NO: 207869 - RNA, 19 nt, Homo sapiens
  misc_RNA (1)...(19): siRNA sense strand
guuugaccacuauuuauga

SEQ ID NO: 207870 - RNA, 19 nt, Homo sapiens
  misc_RNA (1)...(19): siRNA sense strand
gcuuauaggacugccauga

SEQ ID NO: 207871 - RNA, 19 nt, Homo sapiens
  misc_RNA (1)...(19): siRNA sense strand
caucaggccaaauguaaca

SEQ ID NO: 207872 - RNA, 19 nt, Homo sapiens
  misc_RNA (1)...(19): siRNA sense strand
gauucuauccaaauuccaa

SEQ ID NO: 207873 - RNA, 19 nt, Homo sapiens
  misc_RNA (1)...(19): siRNA sense strand
ggcaaguucaacaggauuu

SEQ ID NO: 207874 - RNA, 19 nt, Homo sapiens
  misc_RNA (1)...(19): siRNA sense strand
gaacuggcugcugaauguu

SEQ ID NO: 207875 - RNA, 19 nt, Homo sapiens
  misc_RNA (1)...(19): siRNA sense strand
cugcugaauguuuaugaua

SEQ ID NO: 207876 - RNA, 19 nt, Homo sapiens
  misc_RNA (1)...(19): siRNA sense strand
aagcaucaggccaaaugua

SEQ ID NO: 207877 - RNA, 19 nt, Homo sapiens
  misc_RNA (1)...(19): siRNA sense strand
uggcaucauuucccugugu

SEQ ID NO: 207878 - RNA, 19 nt, Homo sapiens
  misc_RNA (1)...(19): siRNA sense strand
ccaugaaacuccgaagacu

SEQ ID NO: 207879 - RNA, 19 nt, Homo sapiens
  misc_RNA (1)...(19): siRNA sense strand
auaauaagccagagaucga

SEQ ID NO: 207880 - RNA, 19 nt, Homo sapiens
  misc_RNA (1)...(19): siRNA sense strand
cuaauaauaagccagagau

SEQ ID NO: 207881 - RNA, 19 nt, Homo sapiens
  misc_RNA (1)...(19): siRNA sense strand
ugggugaaguugcauccuu

SEQ ID NO: 207882 - RNA, 19 nt, Homo sapiens
  misc_RNA (1)...(19): siRNA sense strand
caucauuucccuguguaaa

SEQ ID NO: 207883 - RNA, 19 nt, Homo sapiens
  misc_RNA (1)...(19): siRNA sense strand
gcguggauaugugucugaa

SEQ ID NO: 207884 - RNA, 19 nt, Homo sapiens
  misc_RNA (1)...(19): siRNA sense strand
gcacuaucccaugguggaa

SEQ ID NO: 207885 - RNA, 19 nt, Homo sapiens
  misc_RNA (1)...(19): siRNA sense strand
gagccugucagcugcaugu

SEQ ID NO: 207886 - RNA, 19 nt, Homo sapiens
  misc_RNA (1)...(19): siRNA sense strand
guacagauaccuuuucaag

SEQ ID NO: 207887 - RNA, 19 nt, Homo sapiens
  misc_RNA (1)...(19): siRNA sense strand
gucccucucugcguggaua

SEQ ID NO: 207888 - RNA, 19 nt, Homo sapiens
  misc_RNA (1)...(19): siRNA sense strand
ggagcugcuuccaauuugc

SEQ ID NO: 207889 - RNA, 19 nt, Homo sapiens
  misc_RNA (1)...(19): siRNA sense strand
uuagcugaccugaauaaug

SEQ ID NO: 207890 - RNA, 19 nt, Homo sapiens
  misc_RNA (1)...(19): siRNA sense strand
guggcaaguucaacaggau

SEQ ID NO: 207891 - RNA, 19 nt, Homo sapiens
  misc_RNA (1)...(19): siRNA sense strand
acaacaauuuggucaacgu

SEQ ID NO: 207892 - RNA, 19 nt, Homo sapiens
  misc_RNA (1)...(19): siRNA sense strand
gacuacaucaggagaagau

SEQ ID NO: 207893 - RNA, 19 nt, Homo sapiens
  misc_RNA (1)...(19): siRNA sense strand
uaauaagccagagaucgaa

SEQ ID NO: 207894 - RNA, 19 nt, Homo sapiens
  misc_RNA (1)...(19): siRNA sense strand
ugucagauucucagcuuau

SEQ ID NO: 207895 - RNA, 19 nt, Homo sapiens
  misc_RNA (1)...(19): siRNA sense strand
ggauauccugcagauuauu

SEQ ID NO: 207896 - RNA, 19 nt, Homo sapiens
  misc_RNA (1)...(19): siRNA sense strand
agcaucaggccaaauguaa

SEQ ID NO: 207897 - RNA, 19 nt, Homo sapiens
  misc_RNA (1)...(19): siRNA sense strand
gcccuuugcuuggaucucu

SEQ ID NO: 207898 - RNA, 19 nt, Homo sapiens
  misc_RNA (1)...(19): siRNA sense strand
gcugaauguuuaugauacg

SEQ ID NO: 207899 - RNA, 19 nt, Homo sapiens
  misc_RNA (1)...(19): siRNA sense strand
agacuuugccaagguacua

SEQ ID NO: 207900 - RNA, 19 nt, Homo sapiens
  misc_RNA (1)...(19): siRNA sense strand
caagcaaguggcaaguuca

SEQ ID NO: 207901 - RNA, 19 nt, Homo sapiens
  misc_RNA (1)...(19): siRNA sense strand
agacaaguacagauaccuu

SEQ ID NO: 207902 - RNA, 19 nt, Homo sapiens
  misc_RNA (1)...(19): siRNA sense strand
gcaucauuucccuguguaa

SEQ ID NO: 207903 - RNA, 19 nt, Homo sapiens
  misc_RNA (1)...(19): siRNA sense strand
cugcaaagaguguccaauc

SEQ ID NO: 207904 - RNA, 19 nt, Homo sapiens
  misc_RNA (1)...(19): siRNA sense strand
cuuauaggacugccaugaa

SEQ ID NO: 207905 - RNA, 19 nt, Homo sapiens
  misc_RNA (1)...(19): siRNA sense strand
caaagaguguccaaucauu

SEQ ID NO: 207906 - RNA, 19 nt, Homo sapiens
  misc_RNA (1)...(19): siRNA sense strand
uagcugaccugaauaaugu

SEQ ID NO: 207907 - RNA, 19 nt, Homo sapiens
  misc_RNA (1)...(19): siRNA sense strand
gcaugauucuauccaaauu

SEQ ID NO: 207908 - RNA, 19 nt, Homo sapiens
  misc_RNA (1)...(19): siRNA sense strand
ugaacuggcugcugaaugu

SEQ ID NO: 207909 - RNA, 19 nt, Homo sapiens
  misc_RNA (1)...(19): siRNA sense strand
gauauccugcagauuauua

SEQ ID NO: 207910 - RNA, 19 nt, Homo sapiens
  misc_RNA (1)...(19): siRNA sense strand
gagaagauguucgagacuu

SEQ ID NO: 207911 - RNA, 19 nt, Homo sapiens
  misc_RNA (1)...(19): siRNA sense strand
gcacuuuaauuaugacauc

SEQ ID NO: 207912 - RNA, 19 nt, Homo sapiens
  misc_RNA (1)...(19): siRNA sense strand
guaaagcacauuuggaaga

SEQ ID NO: 207913 - RNA, 19 nt, Homo sapiens
  misc_RNA (1)...(19): siRNA sense strand
gaauauugcacuccgacua

SEQ ID NO: 207914 - RNA, 19 nt, Homo sapiens
  misc_RNA (1)...(19): siRNA sense strand
uuauaggacugccaugaaa

SEQ ID NO: 207915 - RNA, 19 nt, Homo sapiens
  misc_RNA (1)...(19): siRNA sense strand
gggugaaguugcauccuuu

SEQ ID NO: 207916 - RNA, 19 nt, Homo sapiens
  misc_RNA (1)...(19): siRNA sense strand
gcaagagcacaacaauuug

SEQ ID NO: 207917 - RNA, 19 nt, Homo sapiens
  misc_RNA (1)...(19): siRNA sense strand
gcacaacaauuuggucaac

SEQ ID NO: 207918 - RNA, 19 nt, Homo sapiens
  misc_RNA (1)...(19): siRNA sense strand
agcaagagcacaacaauuu

SEQ ID NO: 207919 - RNA, 19 nt, Homo sapiens
  misc_RNA (1)...(19): siRNA sense strand
agaagauguucgagacuuu

SEQ ID NO: 207920 - RNA, 19 nt, Homo sapiens
  misc_RNA (1)...(19): siRNA sense strand
gagcaagagcacaacaauu

SEQ ID NO: 207921 - RNA, 19 nt, Homo sapiens
  misc_RNA (1)...(19): siRNA sense strand
ucaagcaaguggcaaguuc

SEQ ID NO: 207922 - RNA, 19 nt, Homo sapiens
  misc_RNA (1)...(19): siRNA sense strand
ccacgagacucaaacaacu

SEQ ID NO: 207923 - RNA, 19 nt, Homo sapiens
  misc_RNA (1)...(19): siRNA sense strand
cagcacaaccucaagcaaa

SEQ ID NO: 207924 - RNA, 19 nt, Homo sapiens
  misc_RNA (1)...(19): siRNA sense strand
gcaaagaguguccaaucau

SEQ ID NO: 207925 - RNA, 19 nt, Homo sapiens
  misc_RNA (1)...(19): siRNA sense strand
auggauauccugcagauua

SEQ ID NO: 207926 - RNA, 19 nt, Homo sapiens
  misc_RNA (1)...(19): siRNA sense strand
uguaacaucugcaaagagu

SEQ ID NO: 207927 - RNA, 19 nt, Homo sapiens
  misc_RNA (1)...(19): siRNA sense strand
guccggagcugcuuccaau

SEQ ID NO: 207928 - RNA, 19 nt, Homo sapiens
  misc_RNA (1)...(19): siRNA sense strand
gcaaguggcaaguucaaca

SEQ ID NO: 207929 - RNA, 19 nt, Homo sapiens
  misc_RNA (1)...(19): siRNA sense strand
gcuuccaauuugcuaauaa

SEQ ID NO: 207930 - RNA, 19 nt, Homo sapiens
  misc_RNA (1)...(19): siRNA sense strand
uggaagacaaguacagaua

SEQ ID NO: 207931 - RNA, 19 nt, Homo sapiens
  misc_RNA (1)...(19): siRNA sense strand
ggauccguguccugucuuu

SEQ ID NO: 207932 - RNA, 19 nt, Homo sapiens
  misc_RNA (1)...(19): siRNA sense strand
gucuuuagcugaccugaau

SEQ ID NO: 207933 - RNA, 19 nt, Homo sapiens
  misc_RNA (1)...(19): siRNA sense strand
gacaaguacagauaccuuu

SEQ ID NO: 207934 - RNA, 19 nt, Homo sapiens
  misc_RNA (1)...(19): siRNA sense strand
ccaagcaucaggccaaaug

SEQ ID NO: 207935 - RNA, 19 nt, Homo sapiens
  misc_RNA (1)...(19): siRNA sense strand
ggagcaagagcacaacaau

SEQ ID NO: 207936 - RNA, 19 nt, Homo sapiens
  misc_RNA (1)...(19): siRNA sense strand
guguaaagcacauuuggaa

SEQ ID NO: 207937 - RNA, 19 nt, Homo sapiens
  misc_RNA (1)...(19): siRNA sense strand
caagacaguugggugaagu

SEQ ID NO: 207938 - RNA, 19 nt, Homo sapiens
  misc_RNA (1)...(19): siRNA sense strand
gaagauguucgagacuuug

SEQ ID NO: 207939 - RNA, 19 nt, Homo sapiens
  misc_RNA (1)...(19): siRNA sense strand
gucagauucucagcuuaua

SEQ ID NO: 207940 - RNA, 19 nt, Homo sapiens
  misc_RNA (1)...(19): siRNA sense strand
uaacaucugcaaagagugu

SEQ ID NO: 207941 - RNA, 19 nt, Homo sapiens
  misc_RNA (1)...(19): siRNA sense strand
cggagcugcuuccaauuug

SEQ ID NO: 207942 - RNA, 19 nt, Homo sapiens
  misc_RNA (1)...(19): siRNA sense strand
gaagacaaguacagauacc

SEQ ID NO: 207943 - RNA, 19 nt, Homo sapiens
  misc_RNA (1)...(19): siRNA sense strand
ccauggauauccugcagau

SEQ ID NO: 207944 - RNA, 19 nt, Homo sapiens
  misc_RNA (1)...(19): siRNA sense strand
ggcaucauuucccugugua

SEQ ID NO: 207945 - RNA, 19 nt, Homo sapiens
  misc_RNA (1)...(19): siRNA sense strand
uggauauccugcagauuau

SEQ ID NO: 207946 - RNA, 19 nt, Homo sapiens
  misc_RNA (1)...(19): siRNA sense strand
ggaagacaaguacagauac

SEQ ID NO: 207947 - RNA, 19 nt, Homo sapiens
  misc_RNA (1)...(19): siRNA sense strand
ugcaaagaguguccaauca

SEQ ID NO: 207948 - RNA, 19 nt, Homo sapiens
  misc_RNA (1)...(19): siRNA sense strand
guggauaugugucugaacu

SEQ ID NO: 207949 - RNA, 19 nt, Homo sapiens
  misc_RNA (1)...(19): siRNA sense strand
acuggcugcugaauguuua

SEQ ID NO: 207950 - RNA, 19 nt, Homo sapiens
  misc_RNA (1)...(19): siRNA sense strand
acuaucccaugguggaaua

SEQ ID NO: 207951 - RNA, 19 nt, Homo sapiens
  misc_RNA (1)...(19): siRNA sense strand
ccggagcugcuuccaauuu

SEQ ID NO: 207952 - RNA, 19 nt, Homo sapiens
  misc_RNA (1)...(19): siRNA sense strand
ccaaauuccaagacaguug

SEQ ID NO: 207953 - RNA, 19 nt, Homo sapiens
  misc_RNA (1)...(19): siRNA sense strand
cagaaacugccaagcauca

SEQ ID NO: 207954 - RNA, 19 nt, Homo sapiens
  misc_RNA (1)...(19): siRNA sense strand
uaugacaucugccaaagcu

SEQ ID NO: 207955 - RNA, 19 nt, Homo sapiens
  misc_RNA (1)...(19): siRNA sense strand
aaugucagauucucagcuu

SEQ ID NO: 207956 - RNA, 19 nt, Homo sapiens
  misc_RNA (1)...(19): siRNA sense strand
ucgagacuuugccaaggua

SEQ ID NO: 207957 - RNA, 19 nt, Homo sapiens
  misc_RNA (1)...(19): siRNA sense strand
gcaaaaggccauaaaaugc

SEQ ID NO: 207958 - RNA, 19 nt, Homo sapiens
  misc_RNA (1)...(19): siRNA sense strand
cugcaugauucuauccaaa

SEQ ID NO: 207959 - RNA, 19 nt, Homo sapiens
  misc_RNA (1)...(19): siRNA sense strand
uaaagcacauuuggaagac

SEQ ID NO: 207960 - RNA, 19 nt, Homo sapiens
  misc_RNA (1)...(19): siRNA sense strand
acaggagucuaaagcacuu

SEQ ID NO: 207961 - RNA, 19 nt, Homo sapiens
  misc_RNA (1)...(19): siRNA sense strand
acagauaccuuuucaagca

SEQ ID NO: 207962 - RNA, 19 nt, Homo sapiens
  misc_RNA (1)...(19): siRNA sense strand
aagcacauuuggaagacaa

SEQ ID NO: 207963 - RNA, 19 nt, Homo sapiens
  misc_RNA (1)...(19): siRNA sense strand
gcuaauaauaagccagaga

SEQ ID NO: 207964 - RNA, 19 nt, Homo sapiens
  misc_RNA (1)...(19): siRNA sense strand
caagagcacaacaauuugg

SEQ ID NO: 207965 - RNA, 19 nt, Homo sapiens
  misc_RNA (1)...(19): siRNA sense strand
ccugucagcugcaugugau

SEQ ID NO: 207966 - RNA, 19 nt, Homo sapiens
  misc_RNA (1)...(19): siRNA sense strand
gcugcugaauguuuaugau

SEQ ID NO: 207967 - RNA, 19 nt, Homo sapiens
  misc_RNA (1)...(19): siRNA sense strand
acagagcucuaccagucuu

SEQ ID NO: 207968 - RNA, 19 nt, Homo sapiens
  misc_RNA (1)...(19): siRNA sense strand
acaguugggugaaguugca

SEQ ID NO: 207969 - RNA, 19 nt, Homo sapiens
  misc_RNA (1)...(19): siRNA sense strand
guuugaccacuauuuauga

SEQ ID NO: 207970 - RNA, 19 nt, Homo sapiens
  misc_RNA (1)...(19): siRNA sense strand
gcuuauaggacugccauga

SEQ ID NO: 207971 - RNA, 19 nt, Homo sapiens
  misc_RNA (1)...(19): siRNA sense strand
caucaggccaaauguaaca

SEQ ID NO: 207972 - RNA, 19 nt, Homo sapiens
  misc_RNA (1)...(19): siRNA sense strand
gauucuauccaaauuccaa

SEQ ID NO: 207973 - RNA, 19 nt, Homo sapiens
  misc_RNA (1)...(19): siRNA sense strand
ggcaaguucaacaggauuu

SEQ ID NO: 207974 - RNA, 19 nt, Homo sapiens
  misc_RNA (1)...(19): siRNA sense strand
gaacuggcugcugaauguu

SEQ ID NO: 207975 - RNA, 19 nt, Homo sapiens
  misc_RNA (1)...(19): siRNA sense strand
cugcugaauguuuaugaua

SEQ ID NO: 207976 - RNA, 19 nt, Homo sapiens
  misc_RNA (1)...(19): siRNA sense strand
aagcaucaggccaaaugua

SEQ ID NO: 207977 - RNA, 19 nt, Homo sapiens
  misc_RNA (1)...(19): siRNA sense strand
uggcaucauuucccugugu

SEQ ID NO: 207978 - RNA, 19 nt, Homo sapiens
  misc_RNA (1)...(19): siRNA sense strand
ccaugaaacuccgaagacu

SEQ ID NO: 207979 - RNA, 19 nt, Homo sapiens
  misc_RNA (1)...(19): siRNA sense strand
auaauaagccagagaucga

SEQ ID NO: 207980 - RNA, 19 nt, Homo sapiens
  misc_RNA (1)...(19): siRNA sense strand
cuaauaauaagccagagau

SEQ ID NO: 207981 - RNA, 19 nt, Homo sapiens
  misc_RNA (1)...(19): siRNA sense strand
ugggugaaguugcauccuu

SEQ ID NO: 207982 - RNA, 19 nt, Homo sapiens
  misc_RNA (1)...(19): siRNA sense strand
caucauuucccuguguaaa

SEQ ID NO: 207983 - RNA, 19 nt, Homo sapiens
  misc_RNA (1)...(19): siRNA sense strand
gcguggauaugugucugaa

SEQ ID NO: 207984 - RNA, 19 nt, Homo sapiens
  misc_RNA (1)...(19): siRNA sense strand
gcacuaucccaugguggaa

SEQ ID NO: 207985 - RNA, 19 nt, Homo sapiens
  misc_RNA (1)...(19): siRNA sense strand
gagccugucagcugcaugu

SEQ ID NO: 207986 - RNA, 19 nt, Homo sapiens
  misc_RNA (1)...(19): siRNA sense strand
guacagauaccuuuucaag

SEQ ID NO: 207987 - RNA, 19 nt, Homo sapiens
  misc_RNA (1)...(19): siRNA sense strand
gucccucucugcguggaua

SEQ ID NO: 207988 - RNA, 19 nt, Homo sapiens
  misc_RNA (1)...(19): siRNA sense strand
ggagcugcuuccaauuugc

SEQ ID NO: 207989 - RNA, 19 nt, Homo sapiens
  misc_RNA (1)...(19): siRNA sense strand
uuagcugaccugaauaaug

SEQ ID NO: 207990 - RNA, 19 nt, Homo sapiens
  misc_RNA (1)...(19): siRNA sense strand
guggcaaguucaacaggau

SEQ ID NO: 207991 - RNA, 19 nt, Homo sapiens
  misc_RNA (1)...(19): siRNA sense strand
acaacaauuuggucaacgu

SEQ ID NO: 207992 - RNA, 19 nt, Homo sapiens
  misc_RNA (1)...(19): siRNA sense strand
gacuacaucaggagaagau

SEQ ID NO: 207993 - RNA, 19 nt, Homo sapiens
  misc_RNA (1)...(19): siRNA sense strand
uaauaagccagagaucgaa

SEQ ID NO: 207994 - RNA, 19 nt, Homo sapiens
  misc_RNA (1)...(19): siRNA sense strand
ugucagauucucagcuuau

SEQ ID NO: 207995 - RNA, 19 nt, Homo sapiens
  misc_RNA (1)...(19): siRNA sense strand
ggauauccugcagauuauu

SEQ ID NO: 207996 - RNA, 19 nt, Homo sapiens
  misc_RNA (1)...(19): siRNA sense strand
agcaucaggccaaauguaa

SEQ ID NO: 207997 - RNA, 19 nt, Homo sapiens
  misc_RNA (1)...(19): siRNA sense strand
gcccuuugcuuggaucucu

SEQ ID NO: 207998 - RNA, 19 nt, Homo sapiens
  misc_RNA (1)...(19): siRNA sense strand
gcugaauguuuaugauacg

SEQ ID NO: 207999 - RNA, 19 nt, Homo sapiens
  misc_RNA (1)...(19): siRNA sense strand
agacuuugccaagguacua

SEQ ID NO: 208000 - RNA, 19 nt, Homo sapiens
  misc_RNA (1)...(19): siRNA sense strand
caagcaaguggcaaguuca

SEQ ID NO: 208001 - RNA, 19 nt, Homo sapiens
  misc_RNA (1)...(19): siRNA sense strand
agacaaguacagauaccuu

SEQ ID NO: 208002 - RNA, 19 nt, Homo sapiens
  misc_RNA (1)...(19): siRNA sense strand
gcaucauuucccuguguaa

SEQ ID NO: 208003 - RNA, 19 nt, Homo sapiens
  misc_RNA (1)...(19): siRNA sense strand
cugcaaagaguguccaauc

SEQ ID NO: 208004 - RNA, 19 nt, Homo sapiens
  misc_RNA (1)...(19): siRNA sense strand
cuuauaggacugccaugaa

SEQ ID NO: 208005 - RNA, 19 nt, Homo sapiens
  misc_RNA (1)...(19): siRNA sense strand
caaagaguguccaaucauu

SEQ ID NO: 208006 - RNA, 19 nt, Homo sapiens
  misc_RNA (1)...(19): siRNA sense strand
uagcugaccugaauaaugu

SEQ ID NO: 208007 - RNA, 19 nt, Homo sapiens
  misc_RNA (1)...(19): siRNA sense strand
gcaugauucuauccaaauu

SEQ ID NO: 208008 - RNA, 19 nt, Homo sapiens
  misc_RNA (1)...(19): siRNA sense strand
ugaacuggcugcugaaugu

SEQ ID NO: 208009 - RNA, 19 nt, Homo sapiens
  misc_RNA (1)...(19): siRNA sense strand
gauauccugcagauuauua

SEQ ID NO: 208010 - RNA, 19 nt, Homo sapiens
  misc_RNA (1)...(19): siRNA sense strand
gagaagauguucgagacuu

SEQ ID NO: 208011 - RNA, 19 nt, Homo sapiens
  misc_RNA (1)...(19): siRNA sense strand
gcacuuuaauuaugacauc

SEQ ID NO: 208012 - RNA, 19 nt, Homo sapiens
  misc_RNA (1)...(19): siRNA sense strand
guaaagcacauuuggaaga

SEQ ID NO: 208013 - RNA, 19 nt, Homo sapiens
  misc_RNA (1)...(19): siRNA sense strand
gaauauugcacuccgacua

SEQ ID NO: 208014 - RNA, 19 nt, Homo sapiens
  misc_RNA (1)...(19): siRNA sense strand
uuauaggacugccaugaaa

SEQ ID NO: 208015 - RNA, 19 nt, Homo sapiens
  misc_RNA (1)...(19): siRNA sense strand
gggugaaguugcauccuuu

SEQ ID NO: 208016 - RNA, 19 nt, Homo sapiens
  misc_RNA (1)...(19): siRNA sense strand
gcaagagcacaacaauuug

SEQ ID NO: 208017 - RNA, 19 nt, Homo sapiens
  misc_RNA (1)...(19): siRNA sense strand
gcacaacaauuuggucaac

SEQ ID NO: 208018 - RNA, 19 nt, Homo sapiens
  misc_RNA (1)...(19): siRNA sense strand
agcaagagcacaacaauuu

SEQ ID NO: 208019 - RNA, 19 nt, Homo sapiens
  misc_RNA (1)...(19): siRNA sense strand
agaagauguucgagacuuu

SEQ ID NO: 208020 - RNA, 19 nt, Homo sapiens
  misc_RNA (1)...(19): siRNA sense strand
gagcaagagcacaacaauu

SEQ ID NO: 208021 - RNA, 19 nt, Homo sapiens
  misc_RNA (1)...(19): siRNA sense strand
ucaagcaaguggcaaguuc

SEQ ID NO: 208022 - RNA, 19 nt, Homo sapiens
  misc_RNA (1)...(19): siRNA sense strand
ccacgagacucaaacaacu

SEQ ID NO: 208023 - RNA, 19 nt, Homo sapiens
  misc_RNA (1)...(19): siRNA sense strand
cagcacaaccucaagcaaa

SEQ ID NO: 208024 - RNA, 19 nt, Homo sapiens
  misc_RNA (1)...(19): siRNA sense strand
gcaaagaguguccaaucau

SEQ ID NO: 208025 - RNA, 19 nt, Homo sapiens
  misc_RNA (1)...(19): siRNA sense strand
auggauauccugcagauua

SEQ ID NO: 208026 - RNA, 19 nt, Homo sapiens
  misc_RNA (1)...(19): siRNA sense strand
uguaacaucugcaaagagu

SEQ ID NO: 208027 - RNA, 19 nt, Homo sapiens
  misc_RNA (1)...(19): siRNA sense strand
guccggagcugcuuccaau

SEQ ID NO: 208028 - RNA, 19 nt, Homo sapiens
  misc_RNA (1)...(19): siRNA sense strand
gcaaguggcaaguucaaca

SEQ ID NO: 208029 - RNA, 19 nt, Homo sapiens
  misc_RNA (1)...(19): siRNA sense strand
gcuuccaauuugcuaauaa

SEQ ID NO: 208030 - RNA, 19 nt, Homo sapiens
  misc_RNA (1)...(19): siRNA sense strand
uggaagacaaguacagaua

SEQ ID NO: 208031 - RNA, 19 nt, Homo sapiens
  misc_RNA (1)...(19): siRNA sense strand
ggauccguguccugucuuu

SEQ ID NO: 208032 - RNA, 19 nt, Homo sapiens
  misc_RNA (1)...(19): siRNA sense strand
gucuuuagcugaccugaau

SEQ ID NO: 208033 - RNA, 19 nt, Homo sapiens
  misc_RNA (1)...(19): siRNA sense strand
gacaaguacagauaccuuu

SEQ ID NO: 208034 - RNA, 19 nt, Homo sapiens
  misc_RNA (1)...(19): siRNA sense strand
ccaagcaucaggccaaaug

SEQ ID NO: 208035 - RNA, 19 nt, Homo sapiens
  misc_RNA (1)...(19): siRNA sense strand
ggagcaagagcacaacaau

SEQ ID NO: 208036 - RNA, 19 nt, Homo sapiens
  misc_RNA (1)...(19): siRNA sense strand
guguaaagcacauuuggaa

SEQ ID NO: 208037 - RNA, 19 nt, Homo sapiens
  misc_RNA (1)...(19): siRNA sense strand
caagacaguugggugaagu

SEQ ID NO: 208038 - RNA, 19 nt, Homo sapiens
  misc_RNA (1)...(19): siRNA sense strand
gaagauguucgagacuuug

SEQ ID NO: 208039 - RNA, 19 nt, Homo sapiens
  misc_RNA (1)...(19): siRNA sense strand
gucagauucucagcuuaua

SEQ ID NO: 208040 - RNA, 19 nt, Homo sapiens
  misc_RNA (1)...(19): siRNA sense strand
uaacaucugcaaagagugu

SEQ ID NO: 208041 - RNA, 19 nt, Homo sapiens
  misc_RNA (1)...(19): siRNA sense strand
cggagcugcuuccaauuug

SEQ ID NO: 208042 - RNA, 19 nt, Homo sapiens
  misc_RNA (1)...(19): siRNA sense strand
gaagacaaguacagauacc

SEQ ID NO: 208043 - RNA, 19 nt, Homo sapiens
  misc_RNA (1)...(19): siRNA sense strand
ccauggauauccugcagau

SEQ ID NO: 208044 - RNA, 19 nt, Homo sapiens
  misc_RNA (1)...(19): siRNA sense strand
ggcaucauuucccugugua

SEQ ID NO: 208045 - RNA, 19 nt, Homo sapiens
  misc_RNA (1)...(19): siRNA sense strand
uggauauccugcagauuau

SEQ ID NO: 208046 - RNA, 19 nt, Homo sapiens
  misc_RNA (1)...(19): siRNA sense strand
ggaagacaaguacagauac

SEQ ID NO: 208047 - RNA, 19 nt, Homo sapiens
  misc_RNA (1)...(19): siRNA sense strand
ugcaaagaguguccaauca

SEQ ID NO: 208048 - RNA, 19 nt, Homo sapiens
  misc_RNA (1)...(19): siRNA sense strand
guggauaugugucugaacu

SEQ ID NO: 208049 - RNA, 19 nt, Homo sapiens
  misc_RNA (1)...(19): siRNA sense strand
acuggcugcugaauguuua

SEQ ID NO: 208050 - RNA, 19 nt, Homo sapiens
  misc_RNA (1)...(19): siRNA sense strand
acuaucccaugguggaaua

SEQ ID NO: 208051 - RNA, 19 nt, Homo sapiens
  misc_RNA (1)...(19): siRNA sense strand
ccggagcugcuuccaauuu

SEQ ID NO: 208052 - RNA, 19 nt, Homo sapiens
  misc_RNA (1)...(19): siRNA sense strand
ccaaauuccaagacaguug

SEQ ID NO: 208053 - RNA, 19 nt, Homo sapiens
  misc_RNA (1)...(19): siRNA sense strand
cagaaacugccaagcauca

SEQ ID NO: 208054 - RNA, 19 nt, Homo sapiens
  misc_RNA (1)...(19): siRNA sense strand
uaugacaucugccaaagcu

SEQ ID NO: 208055 - RNA, 19 nt, Homo sapiens
  misc_RNA (1)...(19): siRNA sense strand
aaugucagauucucagcuu

SEQ ID NO: 208056 - RNA, 19 nt, Homo sapiens
  misc_RNA (1)...(19): siRNA sense strand
ucgagacuuugccaaggua

SEQ ID NO: 208057 - RNA, 19 nt, Homo sapiens
  misc_RNA (1)...(19): siRNA sense strand
gcaaaaggccauaaaaugc

SEQ ID NO: 208058 - RNA, 19 nt, Homo sapiens
  misc_RNA (1)...(19): siRNA sense strand
cugcaugauucuauccaaa

SEQ ID NO: 208059 - RNA, 19 nt, Homo sapiens
  misc_RNA (1)...(19): siRNA sense strand
uaaagcacauuuggaagac

SEQ ID NO: 208060 - RNA, 19 nt, Homo sapiens
  misc_RNA (1)...(19): siRNA sense strand
acaggagucuaaagcacuu

SEQ ID NO: 208061 - RNA, 19 nt, Homo sapiens
  misc_RNA (1)...(19): siRNA sense strand
acagauaccuuuucaagca

SEQ ID NO: 208062 - RNA, 19 nt, Homo sapiens
  misc_RNA (1)...(19): siRNA sense strand
aagcacauuuggaagacaa

SEQ ID NO: 208063 - RNA, 19 nt, Homo sapiens
  misc_RNA (1)...(19): siRNA sense strand
gcuaauaauaagccagaga

SEQ ID NO: 208064 - RNA, 19 nt, Homo sapiens
  misc_RNA (1)...(19): siRNA sense strand
caagagcacaacaauuugg

SEQ ID NO: 208065 - RNA, 19 nt, Homo sapiens
  misc_RNA (1)...(19): siRNA sense strand
ccugucagcugcaugugau

SEQ ID NO: 208066 - RNA, 19 nt, Homo sapiens
  misc_RNA (1)...(19): siRNA sense strand
gcugcugaauguuuaugau

SEQ ID NO: 208067 - RNA, 19 nt, Homo sapiens
  misc_RNA (1)...(19): siRNA sense strand
acagagcucuaccagucuu

SEQ ID NO: 208068 - RNA, 19 nt, Homo sapiens
  misc_RNA (1)...(19): siRNA sense strand
acaguugggugaaguugca

SEQ ID NO: 208069 - RNA, 19 nt, Homo sapiens
  misc_RNA (1)...(19): siRNA sense strand
guuugaccacuauuuauga

SEQ ID NO: 208070 - RNA, 19 nt, Homo sapiens
  misc_RNA (1)...(19): siRNA sense strand
gcuuauaggacugccauga

SEQ ID NO: 208071 - RNA, 19 nt, Homo sapiens
  misc_RNA (1)...(19): siRNA sense strand
caucaggccaaauguaaca

SEQ ID NO: 208072 - RNA, 19 nt, Homo sapiens
  misc_RNA (1)...(19): siRNA sense strand
gauucuauccaaauuccaa

SEQ ID NO: 208073 - RNA, 19 nt, Homo sapiens
  misc_RNA (1)...(19): siRNA sense strand
ggcaaguucaacaggauuu

SEQ ID NO: 208074 - RNA, 19 nt, Homo sapiens
  misc_RNA (1)...(19): siRNA sense strand
gaacuggcugcugaauguu

SEQ ID NO: 208075 - RNA, 19 nt, Homo sapiens
  misc_RNA (1)...(19): siRNA sense strand
cugcugaauguuuaugaua

SEQ ID NO: 208076 - RNA, 19 nt, Homo sapiens
  misc_RNA (1)...(19): siRNA sense strand
aagcaucaggccaaaugua

SEQ ID NO: 208077 - RNA, 19 nt, Homo sapiens
  misc_RNA (1)...(19): siRNA sense strand
uggcaucauuucccugugu

SEQ ID NO: 208078 - RNA, 19 nt, Homo sapiens
  misc_RNA (1)...(19): siRNA sense strand
ccaugaaacuccgaagacu

SEQ ID NO: 208079 - RNA, 19 nt, Homo sapiens
  misc_RNA (1)...(19): siRNA sense strand
auaauaagccagagaucga

SEQ ID NO: 208080 - RNA, 19 nt, Homo sapiens
  misc_RNA (1)...(19): siRNA sense strand
cuaauaauaagccagagau

SEQ ID NO: 208081 - RNA, 19 nt, Homo sapiens
  misc_RNA (1)...(19): siRNA sense strand
ugggugaaguugcauccuu

SEQ ID NO: 208082 - RNA, 19 nt, Homo sapiens
  misc_RNA (1)...(19): siRNA sense strand
caucauuucccuguguaaa

SEQ ID NO: 208083 - RNA, 19 nt, Homo sapiens
  misc_RNA (1)...(19): siRNA sense strand
gcguggauaugugucugaa

SEQ ID NO: 208084 - RNA, 19 nt, Homo sapiens
  misc_RNA (1)...(19): siRNA sense strand
gcacuaucccaugguggaa

SEQ ID NO: 208085 - RNA, 19 nt, Homo sapiens
  misc_RNA (1)...(19): siRNA sense strand
gagccugucagcugcaugu

SEQ ID NO: 208086 - RNA, 19 nt, Homo sapiens
  misc_RNA (1)...(19): siRNA sense strand
guacagauaccuuuucaag

SEQ ID NO: 208087 - RNA, 19 nt, Homo sapiens
  misc_RNA (1)...(19): siRNA sense strand
gucccucucugcguggaua

SEQ ID NO: 208088 - RNA, 19 nt, Homo sapiens
  misc_RNA (1)...(19): siRNA sense strand
ggagcugcuuccaauuugc

SEQ ID NO: 208089 - RNA, 19 nt, Homo sapiens
  misc_RNA (1)...(19): siRNA sense strand
uuagcugaccugaauaaug

SEQ ID NO: 208090 - RNA, 19 nt, Homo sapiens
  misc_RNA (1)...(19): siRNA sense strand
guggcaaguucaacaggau

SEQ ID NO: 208091 - RNA, 19 nt, Homo sapiens
  misc_RNA (1)...(19): siRNA sense strand
acaacaauuuggucaacgu

SEQ ID NO: 208092 - RNA, 19 nt, Homo sapiens
  misc_RNA (1)...(19): siRNA sense strand
gacuacaucaggagaagau

SEQ ID NO: 208093 - RNA, 19 nt, Homo sapiens
  misc_RNA (1)...(19): siRNA sense strand
uaauaagccagagaucgaa

SEQ ID NO: 208094 - RNA, 19 nt, Homo sapiens
  misc_RNA (1)...(19): siRNA sense strand
ugucagauucucagcuuau

SEQ ID NO: 208095 - RNA, 19 nt, Homo sapiens
  misc_RNA (1)...(19): siRNA sense strand
ggauauccugcagauuauu

SEQ ID NO: 208096 - RNA, 19 nt, Homo sapiens
  misc_RNA (1)...(19): siRNA sense strand
agcaucaggccaaauguaa

SEQ ID NO: 208097 - RNA, 19 nt, Homo sapiens
  misc_RNA (1)...(19): siRNA sense strand
gcccuuugcuuggaucucu

SEQ ID NO: 208098 - RNA, 19 nt, Homo sapiens
  misc_RNA (1)...(19): siRNA sense strand
gcugaauguuuaugauacg

SEQ ID NO: 208099 - RNA, 19 nt, Homo sapiens
  misc_RNA (1)...(19): siRNA sense strand
agacuuugccaagguacua

SEQ ID NO: 208100 - RNA, 19 nt, Homo sapiens
  misc_RNA (1)...(19): siRNA sense strand
caagcaaguggcaaguuca

SEQ ID NO: 208101 - RNA, 19 nt, Homo sapiens
  misc_RNA (1)...(19): siRNA sense strand
agacaaguacagauaccuu

SEQ ID NO: 208102 - RNA, 19 nt, Homo sapiens
  misc_RNA (1)...(19): siRNA sense strand
gcaucauuucccuguguaa

SEQ ID NO: 208103 - RNA, 19 nt, Homo sapiens
  misc_RNA (1)...(19): siRNA sense strand
cugcaaagaguguccaauc

SEQ ID NO: 208104 - RNA, 19 nt, Homo sapiens
  misc_RNA (1)...(19): siRNA sense strand
cuuauaggacugccaugaa

SEQ ID NO: 208105 - RNA, 19 nt, Homo sapiens
  misc_RNA (1)...(19): siRNA sense strand
caaagaguguccaaucauu

SEQ ID NO: 208106 - RNA, 19 nt, Homo sapiens
  misc_RNA (1)...(19): siRNA sense strand
uagcugaccugaauaaugu

SEQ ID NO: 208107 - RNA, 19 nt, Homo sapiens
  misc_RNA (1)...(19): siRNA sense strand
gcaugauucuauccaaauu

SEQ ID NO: 208108 - RNA, 19 nt, Homo sapiens
  misc_RNA (1)...(19): siRNA sense strand
ugaacuggcugcugaaugu

SEQ ID NO: 208109 - RNA, 19 nt, Homo sapiens
  misc_RNA (1)...(19): siRNA sense strand
gauauccugcagauuauua

SEQ ID NO: 208110 - RNA, 19 nt, Homo sapiens
  misc_RNA (1)...(19): siRNA sense strand
gagaagauguucgagacuu

SEQ ID NO: 208111 - RNA, 19 nt, Homo sapiens
  misc_RNA (1)...(19): siRNA sense strand
gcacuuuaauuaugacauc

SEQ ID NO: 208112 - RNA, 19 nt, Homo sapiens
  misc_RNA (1)...(19): siRNA sense strand
guaaagcacauuuggaaga

SEQ ID NO: 208113 - RNA, 19 nt, Homo sapiens
  misc_RNA (1)...(19): siRNA sense strand
gaauauugcacuccgacua

SEQ ID NO: 208114 - RNA, 19 nt, Homo sapiens
  misc_RNA (1)...(19): siRNA sense strand
uuauaggacugccaugaaa

SEQ ID NO: 208115 - RNA, 19 nt, Homo sapiens
  misc_RNA (1)...(19): siRNA sense strand
gggugaaguugcauccuuu

SEQ ID NO: 208116 - RNA, 19 nt, Homo sapiens
  misc_RNA (1)...(19): siRNA sense strand
gcaagagcacaacaauuug

SEQ ID NO: 208117 - RNA, 19 nt, Homo sapiens
  misc_RNA (1)...(19): siRNA sense strand
gcacaacaauuuggucaac

SEQ ID NO: 208118 - RNA, 19 nt, Homo sapiens
  misc_RNA (1)...(19): siRNA sense strand
agcaagagcacaacaauuu

SEQ ID NO: 208119 - RNA, 19 nt, Homo sapiens
  misc_RNA (1)...(19): siRNA sense strand
agaagauguucgagacuuu

SEQ ID NO: 208120 - RNA, 19 nt, Homo sapiens
  misc_RNA (1)...(19): siRNA sense strand
gagcaagagcacaacaauu

SEQ ID NO: 208121 - RNA, 19 nt, Homo sapiens
  misc_RNA (1)...(19): siRNA sense strand
ucaagcaaguggcaaguuc

SEQ ID NO: 208122 - RNA, 19 nt, Homo sapiens
  misc_RNA (1)...(19): siRNA sense strand
ccacgagacucaaacaacu

SEQ ID NO: 208123 - RNA, 19 nt, Homo sapiens
  misc_RNA (1)...(19): siRNA sense strand
cagcacaaccucaagcaaa

SEQ ID NO: 208124 - RNA, 19 nt, Homo sapiens
  misc_RNA (1)...(19): siRNA sense strand
gcaaagaguguccaaucau

SEQ ID NO: 208125 - RNA, 19 nt, Homo sapiens
  misc_RNA (1)...(19): siRNA sense strand
auggauauccugcagauua

SEQ ID NO: 208126 - RNA, 19 nt, Homo sapiens
  misc_RNA (1)...(19): siRNA sense strand
uguaacaucugcaaagagu

SEQ ID NO: 208127 - RNA, 19 nt, Homo sapiens
  misc_RNA (1)...(19): siRNA sense strand
guccggagcugcuuccaau

SEQ ID NO: 208128 - RNA, 19 nt, Homo sapiens
  misc_RNA (1)...(19): siRNA sense strand
gcaaguggcaaguucaaca

SEQ ID NO: 208129 - RNA, 19 nt, Homo sapiens
  misc_RNA (1)...(19): siRNA sense strand
gcuuccaauuugcuaauaa

SEQ ID NO: 208130 - RNA, 19 nt, Homo sapiens
  misc_RNA (1)...(19): siRNA sense strand
uggaagacaaguacagaua

SEQ ID NO: 208131 - RNA, 19 nt, Homo sapiens
  misc_RNA (1)...(19): siRNA sense strand
ggauccguguccugucuuu

SEQ ID NO: 208132 - RNA, 19 nt, Homo sapiens
  misc_RNA (1)...(19): siRNA sense strand
gucuuuagcugaccugaau

SEQ ID NO: 208133 - RNA, 19 nt, Homo sapiens
  misc_RNA (1)...(19): siRNA sense strand
gacaaguacagauaccuuu

SEQ ID NO: 208134 - RNA, 19 nt, Homo sapiens
  misc_RNA (1)...(19): siRNA sense strand
ccaagcaucaggccaaaug

SEQ ID NO: 208135 - RNA, 19 nt, Homo sapiens
  misc_RNA (1)...(19): siRNA sense strand
ggagcaagagcacaacaau

SEQ ID NO: 208136 - RNA, 19 nt, Homo sapiens
  misc_RNA (1)...(19): siRNA sense strand
guguaaagcacauuuggaa

SEQ ID NO: 208137 - RNA, 19 nt, Homo sapiens
  misc_RNA (1)...(19): siRNA sense strand
caagacaguugggugaagu

SEQ ID NO: 208138 - RNA, 19 nt, Homo sapiens
  misc_RNA (1)...(19): siRNA sense strand
gaagauguucgagacuuug

SEQ ID NO: 208139 - RNA, 19 nt, Homo sapiens
  misc_RNA (1)...(19): siRNA sense strand
gucagauucucagcuuaua

SEQ ID NO: 208140 - RNA, 19 nt, Homo sapiens
  misc_RNA (1)...(19): siRNA sense strand
uaacaucugcaaagagugu

SEQ ID NO: 208141 - RNA, 19 nt, Homo sapiens
  misc_RNA (1)...(19): siRNA sense strand
cggagcugcuuccaauuug

SEQ ID NO: 208142 - RNA, 19 nt, Homo sapiens
  misc_RNA (1)...(19): siRNA sense strand
gaagacaaguacagauacc

SEQ ID NO: 208143 - RNA, 19 nt, Homo sapiens
  misc_RNA (1)...(19): siRNA sense strand
ccauggauauccugcagau

SEQ ID NO: 208144 - RNA, 19 nt, Homo sapiens
  misc_RNA (1)...(19): siRNA sense strand
ggcaucauuucccugugua

SEQ ID NO: 208145 - RNA, 19 nt, Homo sapiens
  misc_RNA (1)...(19): siRNA sense strand
uggauauccugcagauuau

SEQ ID NO: 208146 - RNA, 19 nt, Homo sapiens
  misc_RNA (1)...(19): siRNA sense strand
ggaagacaaguacagauac

SEQ ID NO: 208147 - RNA, 19 nt, Homo sapiens
  misc_RNA (1)...(19): siRNA sense strand
ugcaaagaguguccaauca

SEQ ID NO: 208148 - RNA, 19 nt, Homo sapiens
  misc_RNA (1)...(19): siRNA sense strand
guggauaugugucugaacu

SEQ ID NO: 208149 - RNA, 19 nt, Homo sapiens
  misc_RNA (1)...(19): siRNA sense strand
acuggcugcugaauguuua

SEQ ID NO: 208150 - RNA, 19 nt, Homo sapiens
  misc_RNA (1)...(19): siRNA sense strand
acuaucccaugguggaaua

SEQ ID NO: 208151 - RNA, 19 nt, Homo sapiens
  misc_RNA (1)...(19): siRNA sense strand
ccggagcugcuuccaauuu

SEQ ID NO: 208152 - RNA, 19 nt, Homo sapiens
  misc_RNA (1)...(19): siRNA sense strand
ccaaauuccaagacaguug

SEQ ID NO: 208153 - RNA, 19 nt, Homo sapiens
  misc_RNA (1)...(19): siRNA sense strand
cagaaacugccaagcauca

SEQ ID NO: 208154 - RNA, 19 nt, Homo sapiens
  misc_RNA (1)...(19): siRNA sense strand
uaugacaucugccaaagcu

SEQ ID NO: 208155 - RNA, 19 nt, Homo sapiens
  misc_RNA (1)...(19): siRNA sense strand
aaugucagauucucagcuu

SEQ ID NO: 208156 - RNA, 19 nt, Homo sapiens
  misc_RNA (1)...(19): siRNA sense strand
ucgagacuuugccaaggua

SEQ ID NO: 208157 - RNA, 19 nt, Homo sapiens
  misc_RNA (1)...(19): siRNA sense strand
gcaaaaggccauaaaaugc

SEQ ID NO: 208158 - RNA, 19 nt, Homo sapiens
  misc_RNA (1)...(19): siRNA sense strand
cugcaugauucuauccaaa

SEQ ID NO: 208159 - RNA, 19 nt, Homo sapiens
  misc_RNA (1)...(19): siRNA sense strand
uaaagcacauuuggaagac

SEQ ID NO: 208160 - RNA, 19 nt, Homo sapiens
  misc_RNA (1)...(19): siRNA sense strand
acaggagucuaaagcacuu

SEQ ID NO: 208161 - RNA, 19 nt, Homo sapiens
  misc_RNA (1)...(19): siRNA sense strand
acagauaccuuuucaagca

SEQ ID NO: 208162 - RNA, 19 nt, Homo sapiens
  misc_RNA (1)...(19): siRNA sense strand
aagcacauuuggaagacaa

SEQ ID NO: 208163 - RNA, 19 nt, Homo sapiens
  misc_RNA (1)...(19): siRNA sense strand
gcuaauaauaagccagaga

SEQ ID NO: 208164 - RNA, 19 nt, Homo sapiens
  misc_RNA (1)...(19): siRNA sense strand
caagagcacaacaauuugg

SEQ ID NO: 208165 - RNA, 19 nt, Homo sapiens
  misc_RNA (1)...(19): siRNA sense strand
ccugucagcugcaugugau

SEQ ID NO: 208166 - RNA, 19 nt, Homo sapiens
  misc_RNA (1)...(19): siRNA sense strand
gcugcugaauguuuaugau

SEQ ID NO: 208167 - RNA, 19 nt, Homo sapiens
  misc_RNA (1)...(19): siRNA sense strand
acagagcucuaccagucuu

SEQ ID NO: 208168 - RNA, 19 nt, Homo sapiens
  misc_RNA (1)...(19): siRNA sense strand
acaguugggugaaguugca

SEQ ID NO: 208169 - RNA, 19 nt, Homo sapiens
  misc_RNA (1)...(19): siRNA sense strand
guuugaccacuauuuauga

SEQ ID NO: 208170 - RNA, 19 nt, Homo sapiens
  misc_RNA (1)...(19): siRNA sense strand
gcuuauaggacugccauga

SEQ ID NO: 208171 - RNA, 19 nt, Homo sapiens
  misc_RNA (1)...(19): siRNA sense strand
caucaggccaaauguaaca

SEQ ID NO: 208172 - RNA, 19 nt, Homo sapiens
  misc_RNA (1)...(19): siRNA sense strand
gauucuauccaaauuccaa

SEQ ID NO: 208173 - RNA, 19 nt, Homo sapiens
  misc_RNA (1)...(19): siRNA sense strand
ggcaaguucaacaggauuu

SEQ ID NO: 208174 - RNA, 19 nt, Homo sapiens
  misc_RNA (1)...(19): siRNA sense strand
gaacuggcugcugaauguu

SEQ ID NO: 208175 - RNA, 19 nt, Homo sapiens
  misc_RNA (1)...(19): siRNA sense strand
cugcugaauguuuaugaua

SEQ ID NO: 208176 - RNA, 19 nt, Homo sapiens
  misc_RNA (1)...(19): siRNA sense strand
aagcaucaggccaaaugua

SEQ ID NO: 208177 - RNA, 19 nt, Homo sapiens
  misc_RNA (1)...(19): siRNA sense strand
uggcaucauuucccugugu

SEQ ID NO: 208178 - RNA, 19 nt, Homo sapiens
  misc_RNA (1)...(19): siRNA sense strand
ccaugaaacuccgaagacu

SEQ ID NO: 208179 - RNA, 19 nt, Homo sapiens
  misc_RNA (1)...(19): siRNA sense strand
auaauaagccagagaucga

SEQ ID NO: 208180 - RNA, 19 nt, Homo sapiens
  misc_RNA (1)...(19): siRNA sense strand
cuaauaauaagccagagau

SEQ ID NO: 208181 - RNA, 19 nt, Homo sapiens
  misc_RNA (1)...(19): siRNA sense strand
ugggugaaguugcauccuu

SEQ ID NO: 208182 - RNA, 19 nt, Homo sapiens
  misc_RNA (1)...(19): siRNA sense strand
caucauuucccuguguaaa

SEQ ID NO: 208183 - RNA, 19 nt, Homo sapiens
  misc_RNA (1)...(19): siRNA sense strand
gcguggauaugugucugaa

SEQ ID NO: 208184 - RNA, 19 nt, Homo sapiens
  misc_RNA (1)...(19): siRNA sense strand
gcacuaucccaugguggaa

SEQ ID NO: 208185 - RNA, 19 nt, Homo sapiens
  misc_RNA (1)...(19): siRNA sense strand
gagccugucagcugcaugu

SEQ ID NO: 208186 - RNA, 19 nt, Homo sapiens
  misc_RNA (1)...(19): siRNA sense strand
guacagauaccuuuucaag

SEQ ID NO: 208187 - RNA, 19 nt, Homo sapiens
  misc_RNA (1)...(19): siRNA sense strand
gucccucucugcguggaua

SEQ ID NO: 208188 - RNA, 19 nt, Homo sapiens
  misc_RNA (1)...(19): siRNA sense strand
ggagcugcuuccaauuugc

SEQ ID NO: 208189 - RNA, 19 nt, Homo sapiens
  misc_RNA (1)...(19): siRNA sense strand
uuagcugaccugaauaaug

SEQ ID NO: 208190 - RNA, 19 nt, Homo sapiens
  misc_RNA (1)...(19): siRNA sense strand
guggcaaguucaacaggau

SEQ ID NO: 208191 - RNA, 19 nt, Homo sapiens
  misc_RNA (1)...(19): siRNA sense strand
acaacaauuuggucaacgu

SEQ ID NO: 208192 - RNA, 19 nt, Homo sapiens
  misc_RNA (1)...(19): siRNA sense strand
gacuacaucaggagaagau

SEQ ID NO: 208193 - RNA, 19 nt, Homo sapiens
  misc_RNA (1)...(19): siRNA sense strand
uaauaagccagagaucgaa

SEQ ID NO: 208194 - RNA, 19 nt, Homo sapiens
  misc_RNA (1)...(19): siRNA sense strand
ugucagauucucagcuuau

SEQ ID NO: 208195 - RNA, 19 nt, Homo sapiens
  misc_RNA (1)...(19): siRNA sense strand
ggauauccugcagauuauu

SEQ ID NO: 208196 - RNA, 19 nt, Homo sapiens
  misc_RNA (1)...(19): siRNA sense strand
agcaucaggccaaauguaa

SEQ ID NO: 208197 - RNA, 19 nt, Homo sapiens
  misc_RNA (1)...(19): siRNA sense strand
gcccuuugcuuggaucucu

SEQ ID NO: 208198 - RNA, 19 nt, Homo sapiens
  misc_RNA (1)...(19): siRNA sense strand
gcugaauguuuaugauacg

SEQ ID NO: 208199 - RNA, 19 nt, Homo sapiens
  misc_RNA (1)...(19): siRNA sense strand
agacuuugccaagguacua

SEQ ID NO: 208200 - RNA, 19 nt, Homo sapiens
  misc_RNA (1)...(19): siRNA sense strand
caagcaaguggcaaguuca

SEQ ID NO: 208201 - RNA, 19 nt, Homo sapiens
  misc_RNA (1)...(19): siRNA sense strand
agacaaguacagauaccuu

SEQ ID NO: 208202 - RNA, 19 nt, Homo sapiens
  misc_RNA (1)...(19): siRNA sense strand
gcaucauuucccuguguaa

SEQ ID NO: 208203 - RNA, 19 nt, Homo sapiens
  misc_RNA (1)...(19): siRNA sense strand
cugcaaagaguguccaauc

SEQ ID NO: 208204 - RNA, 19 nt, Homo sapiens
  misc_RNA (1)...(19): siRNA sense strand
cuuauaggacugccaugaa

SEQ ID NO: 208205 - RNA, 19 nt, Homo sapiens
  misc_RNA (1)...(19): siRNA sense strand
caaagaguguccaaucauu

SEQ ID NO: 208206 - RNA, 19 nt, Homo sapiens
  misc_RNA (1)...(19): siRNA sense strand
uagcugaccugaauaaugu

SEQ ID NO: 208207 - RNA, 19 nt, Homo sapiens
  misc_RNA (1)...(19): siRNA sense strand
gcaugauucuauccaaauu

SEQ ID NO: 208208 - RNA, 19 nt, Homo sapiens
  misc_RNA (1)...(19): siRNA sense strand
ugaacuggcugcugaaugu

SEQ ID NO: 208209 - RNA, 19 nt, Homo sapiens
  misc_RNA (1)...(19): siRNA sense strand
gauauccugcagauuauua

SEQ ID NO: 208210 - RNA, 19 nt, Homo sapiens
  misc_RNA (1)...(19): siRNA sense strand
gagaagauguucgagacuu

SEQ ID NO: 208211 - RNA, 19 nt, Homo sapiens
  misc_RNA (1)...(19): siRNA sense strand
gcacuuuaauuaugacauc

SEQ ID NO: 208212 - RNA, 19 nt, Homo sapiens
  misc_RNA (1)...(19): siRNA sense strand
guaaagcacauuuggaaga

SEQ ID NO: 208213 - RNA, 19 nt, Homo sapiens
  misc_RNA (1)...(19): siRNA sense strand
gaauauugcacuccgacua

SEQ ID NO: 208214 - RNA, 19 nt, Homo sapiens
  misc_RNA (1)...(19): siRNA sense strand
uuauaggacugccaugaaa

SEQ ID NO: 208215 - RNA, 19 nt, Homo sapiens
  misc_RNA (1)...(19): siRNA sense strand
gggugaaguugcauccuuu

SEQ ID NO: 208216 - RNA, 19 nt, Homo sapiens
  misc_RNA (1)...(19): siRNA sense strand
gcaagagcacaacaauuug

SEQ ID NO: 208217 - RNA, 19 nt, Homo sapiens
  misc_RNA (1)...(19): siRNA sense strand
gcacaacaauuuggucaac

SEQ ID NO: 208218 - RNA, 19 nt, Homo sapiens
  misc_RNA (1)...(19): siRNA sense strand
agcaagagcacaacaauuu

SEQ ID NO: 208219 - RNA, 19 nt, Homo sapiens
  misc_RNA (1)...(19): siRNA sense strand
agaagauguucgagacuuu

SEQ ID NO: 208220 - RNA, 19 nt, Homo sapiens
  misc_RNA (1)...(19): siRNA sense strand
gagcaagagcacaacaauu

SEQ ID NO: 208221 - RNA, 19 nt, Homo sapiens
  misc_RNA (1)...(19): siRNA sense strand
ucaagcaaguggcaaguuc

SEQ ID NO: 208222 - RNA, 19 nt, Homo sapiens
  misc_RNA (1)...(19): siRNA sense strand
ccacgagacucaaacaacu

SEQ ID NO: 208223 - RNA, 19 nt, Homo sapiens
  misc_RNA (1)...(19): siRNA sense strand
cagcacaaccucaagcaaa

SEQ ID NO: 208224 - RNA, 19 nt, Homo sapiens
  misc_RNA (1)...(19): siRNA sense strand
gcaaagaguguccaaucau

SEQ ID NO: 208225 - RNA, 19 nt, Homo sapiens
  misc_RNA (1)...(19): siRNA sense strand
auggauauccugcagauua

SEQ ID NO: 208226 - RNA, 19 nt, Homo sapiens
  misc_RNA (1)...(19): siRNA sense strand
uguaacaucugcaaagagu

SEQ ID NO: 208227 - RNA, 19 nt, Homo sapiens
  misc_RNA (1)...(19): siRNA sense strand
guccggagcugcuuccaau

SEQ ID NO: 208228 - RNA, 19 nt, Homo sapiens
  misc_RNA (1)...(19): siRNA sense strand
gcaaguggcaaguucaaca

SEQ ID NO: 208229 - RNA, 19 nt, Homo sapiens
  misc_RNA (1)...(19): siRNA sense strand
gcuuccaauuugcuaauaa

SEQ ID NO: 208230 - RNA, 19 nt, Homo sapiens
  misc_RNA (1)...(19): siRNA sense strand
uggaagacaaguacagaua

SEQ ID NO: 208231 - RNA, 19 nt, Homo sapiens
  misc_RNA (1)...(19): siRNA sense strand
ggauccguguccugucuuu

SEQ ID NO: 208232 - RNA, 19 nt, Homo sapiens
  misc_RNA (1)...(19): siRNA sense strand
gucuuuagcugaccugaau

SEQ ID NO: 208233 - RNA, 19 nt, Homo sapiens
  misc_RNA (1)...(19): siRNA sense strand
gacaaguacagauaccuuu

SEQ ID NO: 208234 - RNA, 19 nt, Homo sapiens
  misc_RNA (1)...(19): siRNA sense strand
ccaagcaucaggccaaaug

SEQ ID NO: 208235 - RNA, 19 nt, Homo sapiens
  misc_RNA (1)...(19): siRNA sense strand
ggagcaagagcacaacaau

SEQ ID NO: 208236 - RNA, 19 nt, Homo sapiens
  misc_RNA (1)...(19): siRNA sense strand
guguaaagcacauuuggaa

SEQ ID NO: 208237 - RNA, 19 nt, Homo sapiens
  misc_RNA (1)...(19): siRNA sense strand
caagacaguugggugaagu

SEQ ID NO: 208238 - RNA, 19 nt, Homo sapiens
  misc_RNA (1)...(19): siRNA sense strand
gaagauguucgagacuuug

SEQ ID NO: 208239 - RNA, 19 nt, Homo sapiens
  misc_RNA (1)...(19): siRNA sense strand
gucagauucucagcuuaua

SEQ ID NO: 208240 - RNA, 19 nt, Homo sapiens
  misc_RNA (1)...(19): siRNA sense strand
uaacaucugcaaagagugu

SEQ ID NO: 208241 - RNA, 19 nt, Homo sapiens
  misc_RNA (1)...(19): siRNA sense strand
cggagcugcuuccaauuug

SEQ ID NO: 208242 - RNA, 19 nt, Homo sapiens
  misc_RNA (1)...(19): siRNA sense strand
gaagacaaguacagauacc

SEQ ID NO: 208243 - RNA, 19 nt, Homo sapiens
  misc_RNA (1)...(19): siRNA sense strand
ccauggauauccugcagau

SEQ ID NO: 208244 - RNA, 19 nt, Homo sapiens
  misc_RNA (1)...(19): siRNA sense strand
ggcaucauuucccugugua

SEQ ID NO: 208245 - RNA, 19 nt, Homo sapiens
  misc_RNA (1)...(19): siRNA sense strand
uggauauccugcagauuau

SEQ ID NO: 208246 - RNA, 19 nt, Homo sapiens
  misc_RNA (1)...(19): siRNA sense strand
ggaagacaaguacagauac

SEQ ID NO: 208247 - RNA, 19 nt, Homo sapiens
  misc_RNA (1)...(19): siRNA sense strand
ugcaaagaguguccaauca

SEQ ID NO: 208248 - RNA, 19 nt, Homo sapiens
  misc_RNA (1)...(19): siRNA sense strand
guggauaugugucugaacu

SEQ ID NO: 208249 - RNA, 19 nt, Homo sapiens
  misc_RNA (1)...(19): siRNA sense strand
acuggcugcugaauguuua

SEQ ID NO: 208250 - RNA, 19 nt, Homo sapiens
  misc_RNA (1)...(19): siRNA sense strand
acuaucccaugguggaaua

SEQ ID NO: 208251 - RNA, 19 nt, Homo sapiens
  misc_RNA (1)...(19): siRNA sense strand
ccggagcugcuuccaauuu

SEQ ID NO: 208252 - RNA, 19 nt, Homo sapiens
  misc_RNA (1)...(19): siRNA sense strand
ccaaauuccaagacaguug

SEQ ID NO: 208253 - RNA, 19 nt, Homo sapiens
  misc_RNA (1)...(19): siRNA sense strand
cagaaacugccaagcauca

SEQ ID NO: 208254 - RNA, 19 nt, Homo sapiens
  misc_RNA (1)...(19): siRNA sense strand
uaugacaucugccaaagcu

SEQ ID NO: 208255 - RNA, 19 nt, Homo sapiens
  misc_RNA (1)...(19): siRNA sense strand
aaugucagauucucagcuu

SEQ ID NO: 208256 - RNA, 19 nt, Homo sapiens
  misc_RNA (1)...(19): siRNA sense strand
ucgagacuuugccaaggua

SEQ ID NO: 208257 - RNA, 19 nt, Homo sapiens
  misc_RNA (1)...(19): siRNA sense strand
gcaaaaggccauaaaaugc

SEQ ID NO: 208258 - RNA, 19 nt, Homo sapiens
  misc_RNA (1)...(19): siRNA sense strand
cugcaugauucuauccaaa

SEQ ID NO: 208259 - RNA, 19 nt, Homo sapiens
  misc_RNA (1)...(19): siRNA sense strand
uaaagcacauuuggaagac

SEQ ID NO: 208260 - RNA, 19 nt, Homo sapiens
  misc_RNA (1)...(19): siRNA sense strand
acaggagucuaaagcacuu

SEQ ID NO: 208261 - RNA, 19 nt, Homo sapiens
  misc_RNA (1)...(19): siRNA sense strand
acagauaccuuuucaagca

SEQ ID NO: 208262 - RNA, 19 nt, Homo sapiens
  misc_RNA (1)...(19): siRNA sense strand
aagcacauuuggaagacaa

SEQ ID NO: 208263 - RNA, 19 nt, Homo sapiens
  misc_RNA (1)...(19): siRNA sense strand
gcuaauaauaagccagaga

SEQ ID NO: 208264 - RNA, 19 nt, Homo sapiens
  misc_RNA (1)...(19): siRNA sense strand
caagagcacaacaauuugg

SEQ ID NO: 208265 - RNA, 19 nt, Homo sapiens
  misc_RNA (1)...(19): siRNA sense strand
ccugucagcugcaugugau

SEQ ID NO: 208266 - RNA, 19 nt, Homo sapiens
  misc_RNA (1)...(19): siRNA sense strand
gcugcugaauguuuaugau

SEQ ID NO: 208267 - RNA, 19 nt, Homo sapiens
  misc_RNA (1)...(19): siRNA sense strand
acagagcucuaccagucuu

SEQ ID NO: 208268 - RNA, 19 nt, Homo sapiens
  misc_RNA (1)...(19): siRNA sense strand
acaguugggugaaguugca

SEQ ID NO: 208269 - RNA, 19 nt, Homo sapiens
  misc_RNA (1)...(19): siRNA sense strand
guuugaccacuauuuauga

SEQ ID NO: 208270 - RNA, 19 nt, Homo sapiens
  misc_RNA (1)...(19): siRNA sense strand
gcuuauaggacugccauga

SEQ ID NO: 208271 - RNA, 19 nt, Homo sapiens
  misc_RNA (1)...(19): siRNA sense strand
caucaggccaaauguaaca

SEQ ID NO: 208272 - RNA, 19 nt, Homo sapiens
  misc_RNA (1)...(19): siRNA sense strand
gauucuauccaaauuccaa

SEQ ID NO: 208273 - RNA, 19 nt, Homo sapiens
  misc_RNA (1)...(19): siRNA sense strand
ggcaaguucaacaggauuu

SEQ ID NO: 208274 - RNA, 19 nt, Homo sapiens
  misc_RNA (1)...(19): siRNA sense strand
gaacuggcugcugaauguu

SEQ ID NO: 208275 - RNA, 19 nt, Homo sapiens
  misc_RNA (1)...(19): siRNA sense strand
cugcugaauguuuaugaua

SEQ ID NO: 208276 - RNA, 19 nt, Homo sapiens
  misc_RNA (1)...(19): siRNA sense strand
aagcaucaggccaaaugua

SEQ ID NO: 208277 - RNA, 19 nt, Homo sapiens
  misc_RNA (1)...(19): siRNA sense strand
uggcaucauuucccugugu

SEQ ID NO: 208278 - RNA, 19 nt, Homo sapiens
  misc_RNA (1)...(19): siRNA sense strand
ccaugaaacuccgaagacu

SEQ ID NO: 208279 - RNA, 19 nt, Homo sapiens
  misc_RNA (1)...(19): siRNA sense strand
auaauaagccagagaucga

SEQ ID NO: 208280 - RNA, 19 nt, Homo sapiens
  misc_RNA (1)...(19): siRNA sense strand
cuaauaauaagccagagau

SEQ ID NO: 208281 - RNA, 19 nt, Homo sapiens
  misc_RNA (1)...(19): siRNA sense strand
ugggugaaguugcauccuu

SEQ ID NO: 208282 - RNA, 19 nt, Homo sapiens
  misc_RNA (1)...(19): siRNA sense strand
caucauuucccuguguaaa

SEQ ID NO: 208283 - RNA, 19 nt, Homo sapiens
  misc_RNA (1)...(19): siRNA sense strand
gcguggauaugugucugaa

SEQ ID NO: 208284 - RNA, 19 nt, Homo sapiens
  misc_RNA (1)...(19): siRNA sense strand
gcacuaucccaugguggaa

SEQ ID NO: 208285 - RNA, 19 nt, Homo sapiens
  misc_RNA (1)...(19): siRNA sense strand
gagccugucagcugcaugu

SEQ ID NO: 208286 - RNA, 19 nt, Homo sapiens
  misc_RNA (1)...(19): siRNA sense strand
guacagauaccuuuucaag

SEQ ID NO: 208287 - RNA, 19 nt, Homo sapiens
  misc_RNA (1)...(19): siRNA sense strand
gucccucucugcguggaua

SEQ ID NO: 208288 - RNA, 19 nt, Homo sapiens
  misc_RNA (1)...(19): siRNA sense strand
ggagcugcuuccaauuugc

SEQ ID NO: 208289 - RNA, 19 nt, Homo sapiens
  misc_RNA (1)...(19): siRNA sense strand
uuagcugaccugaauaaug

SEQ ID NO: 208290 - RNA, 19 nt, Homo sapiens
  misc_RNA (1)...(19): siRNA sense strand
guggcaaguucaacaggau

SEQ ID NO: 208291 - RNA, 19 nt, Homo sapiens
  misc_RNA (1)...(19): siRNA sense strand
acaacaauuuggucaacgu

SEQ ID NO: 208292 - RNA, 19 nt, Homo sapiens
  misc_RNA (1)...(19): siRNA sense strand
gacuacaucaggagaagau

SEQ ID NO: 208293 - RNA, 19 nt, Homo sapiens
  misc_RNA (1)...(19): siRNA sense strand
uaauaagccagagaucgaa

SEQ ID NO: 208294 - RNA, 19 nt, Homo sapiens
  misc_RNA (1)...(19): siRNA sense strand
ugucagauucucagcuuau

SEQ ID NO: 208295 - RNA, 19 nt, Homo sapiens
  misc_RNA (1)...(19): siRNA sense strand
ggauauccugcagauuauu

SEQ ID NO: 208296 - RNA, 19 nt, Homo sapiens
  misc_RNA (1)...(19): siRNA sense strand
agcaucaggccaaauguaa

SEQ ID NO: 208297 - RNA, 19 nt, Homo sapiens
  misc_RNA (1)...(19): siRNA sense strand
gcccuuugcuuggaucucu

SEQ ID NO: 208298 - RNA, 19 nt, Homo sapiens
  misc_RNA (1)...(19): siRNA sense strand
gcugaauguuuaugauacg

SEQ ID NO: 208299 - RNA, 19 nt, Homo sapiens
  misc_RNA (1)...(19): siRNA sense strand
agacuuugccaagguacua

SEQ ID NO: 208300 - RNA, 19 nt, Homo sapiens
  misc_RNA (1)...(19): siRNA sense strand
caagcaaguggcaaguuca

SEQ ID NO: 208301 - RNA, 19 nt, Homo sapiens
  misc_RNA (1)...(19): siRNA sense strand
agacaaguacagauaccuu

SEQ ID NO: 208302 - RNA, 19 nt, Homo sapiens
  misc_RNA (1)...(19): siRNA sense strand
gcaucauuucccuguguaa

SEQ ID NO: 208303 - RNA, 19 nt, Homo sapiens
  misc_RNA (1)...(19): siRNA sense strand
cugcaaagaguguccaauc

SEQ ID NO: 208304 - RNA, 19 nt, Homo sapiens
  misc_RNA (1)...(19): siRNA sense strand
cuuauaggacugccaugaa

SEQ ID NO: 208305 - RNA, 19 nt, Homo sapiens
  misc_RNA (1)...(19): siRNA sense strand
caaagaguguccaaucauu

SEQ ID NO: 208306 - RNA, 19 nt, Homo sapiens
  misc_RNA (1)...(19): siRNA sense strand
uagcugaccugaauaaugu

SEQ ID NO: 208307 - RNA, 19 nt, Homo sapiens
  misc_RNA (1)...(19): siRNA sense strand
gcaugauucuauccaaauu

SEQ ID NO: 208308 - RNA, 19 nt, Homo sapiens
  misc_RNA (1)...(19): siRNA sense strand
ugaacuggcugcugaaugu

SEQ ID NO: 208309 - RNA, 19 nt, Homo sapiens
  misc_RNA (1)...(19): siRNA sense strand
gauauccugcagauuauua

SEQ ID NO: 208310 - RNA, 19 nt, Homo sapiens
  misc_RNA (1)...(19): siRNA sense strand
gagaagauguucgagacuu

SEQ ID NO: 208311 - RNA, 19 nt, Homo sapiens
  misc_RNA (1)...(19): siRNA sense strand
gcacuuuaauuaugacauc

SEQ ID NO: 208312 - RNA, 19 nt, Homo sapiens
  misc_RNA (1)...(19): siRNA sense strand
guaaagcacauuuggaaga

SEQ ID NO: 208313 - RNA, 19 nt, Homo sapiens
  misc_RNA (1)...(19): siRNA sense strand
gaauauugcacuccgacua

SEQ ID NO: 208314 - RNA, 19 nt, Homo sapiens
  misc_RNA (1)...(19): siRNA sense strand
uuauaggacugccaugaaa

SEQ ID NO: 208315 - RNA, 19 nt, Homo sapiens
  misc_RNA (1)...(19): siRNA sense strand
gggugaaguugcauccuuu

SEQ ID NO: 208316 - RNA, 19 nt, Homo sapiens
  misc_RNA (1)...(19): siRNA sense strand
gcaagagcacaacaauuug

SEQ ID NO: 208317 - RNA, 19 nt, Homo sapiens
  misc_RNA (1)...(19): siRNA sense strand
gcacaacaauuuggucaac

SEQ ID NO: 208318 - RNA, 19 nt, Homo sapiens
  misc_RNA (1)...(19): siRNA sense strand
agcaagagcacaacaauuu

SEQ ID NO: 208319 - RNA, 19 nt, Homo sapiens
  misc_RNA (1)...(19): siRNA sense strand
agaagauguucgagacuuu

SEQ ID NO: 208320 - RNA, 19 nt, Homo sapiens
  misc_RNA (1)...(19): siRNA sense strand
gagcaagagcacaacaauu

SEQ ID NO: 208321 - RNA, 19 nt, Homo sapiens
  misc_RNA (1)...(19): siRNA sense strand
ucaagcaaguggcaaguuc

SEQ ID NO: 208322 - RNA, 19 nt, Homo sapiens
  misc_RNA (1)...(19): siRNA sense strand
ccacgagacucaaacaacu

SEQ ID NO: 208323 - RNA, 19 nt, Homo sapiens
  misc_RNA (1)...(19): siRNA sense strand
cagcacaaccucaagcaaa

SEQ ID NO: 208324 - RNA, 19 nt, Homo sapiens
  misc_RNA (1)...(19): siRNA sense strand
gcaaagaguguccaaucau

SEQ ID NO: 208325 - RNA, 19 nt, Homo sapiens
  misc_RNA (1)...(19): siRNA sense strand
auggauauccugcagauua

SEQ ID NO: 208326 - RNA, 19 nt, Homo sapiens
  misc_RNA (1)...(19): siRNA sense strand
uguaacaucugcaaagagu

SEQ ID NO: 208327 - RNA, 19 nt, Homo sapiens
  misc_RNA (1)...(19): siRNA sense strand
guccggagcugcuuccaau

SEQ ID NO: 208328 - RNA, 19 nt, Homo sapiens
  misc_RNA (1)...(19): siRNA sense strand
gcaaguggcaaguucaaca

SEQ ID NO: 208329 - RNA, 19 nt, Homo sapiens
  misc_RNA (1)...(19): siRNA sense strand
gcuuccaauuugcuaauaa

SEQ ID NO: 208330 - RNA, 19 nt, Homo sapiens
  misc_RNA (1)...(19): siRNA sense strand
uggaagacaaguacagaua

SEQ ID NO: 208331 - RNA, 19 nt, Homo sapiens
  misc_RNA (1)...(19): siRNA sense strand
ggauccguguccugucuuu

SEQ ID NO: 208332 - RNA, 19 nt, Homo sapiens
  misc_RNA (1)...(19): siRNA sense strand
gucuuuagcugaccugaau

SEQ ID NO: 208333 - RNA, 19 nt, Homo sapiens
  misc_RNA (1)...(19): siRNA sense strand
gacaaguacagauaccuuu

SEQ ID NO: 208334 - RNA, 19 nt, Homo sapiens
  misc_RNA (1)...(19): siRNA sense strand
ccaagcaucaggccaaaug

SEQ ID NO: 208335 - RNA, 19 nt, Homo sapiens
  misc_RNA (1)...(19): siRNA sense strand
ggagcaagagcacaacaau

SEQ ID NO: 208336 - RNA, 19 nt, Homo sapiens
  misc_RNA (1)...(19): siRNA sense strand
guguaaagcacauuuggaa

SEQ ID NO: 208337 - RNA, 19 nt, Homo sapiens
  misc_RNA (1)...(19): siRNA sense strand
caagacaguugggugaagu

SEQ ID NO: 208338 - RNA, 19 nt, Homo sapiens
  misc_RNA (1)...(19): siRNA sense strand
gaagauguucgagacuuug

SEQ ID NO: 208339 - RNA, 19 nt, Homo sapiens
  misc_RNA (1)...(19): siRNA sense strand
gucagauucucagcuuaua

SEQ ID NO: 208340 - RNA, 19 nt, Homo sapiens
  misc_RNA (1)...(19): siRNA sense strand
uaacaucugcaaagagugu

SEQ ID NO: 208341 - RNA, 19 nt, Homo sapiens
  misc_RNA (1)...(19): siRNA sense strand
cggagcugcuuccaauuug

SEQ ID NO: 208342 - RNA, 19 nt, Homo sapiens
  misc_RNA (1)...(19): siRNA sense strand
gaagacaaguacagauacc

SEQ ID NO: 208343 - RNA, 19 nt, Homo sapiens
  misc_RNA (1)...(19): siRNA sense strand
ccauggauauccugcagau

SEQ ID NO: 208344 - RNA, 19 nt, Homo sapiens
  misc_RNA (1)...(19): siRNA sense strand
ggcaucauuucccugugua

SEQ ID NO: 208345 - RNA, 19 nt, Homo sapiens
  misc_RNA (1)...(19): siRNA sense strand
uggauauccugcagauuau

SEQ ID NO: 208346 - RNA, 19 nt, Homo sapiens
  misc_RNA (1)...(19): siRNA sense strand
ggaagacaaguacagauac

SEQ ID NO: 208347 - RNA, 19 nt, Homo sapiens
  misc_RNA (1)...(19): siRNA sense strand
ugcaaagaguguccaauca

SEQ ID NO: 208348 - RNA, 19 nt, Homo sapiens
  misc_RNA (1)...(19): siRNA sense strand
guggauaugugucugaacu

SEQ ID NO: 208349 - RNA, 19 nt, Homo sapiens
  misc_RNA (1)...(19): siRNA sense strand
acuggcugcugaauguuua

SEQ ID NO: 208350 - RNA, 19 nt, Homo sapiens
  misc_RNA (1)...(19): siRNA sense strand
acuaucccaugguggaaua

SEQ ID NO: 208351 - RNA, 19 nt, Homo sapiens
  misc_RNA (1)...(19): siRNA sense strand
ccggagcugcuuccaauuu

SEQ ID NO: 208352 - RNA, 19 nt, Homo sapiens
  misc_RNA (1)...(19): siRNA sense strand
ccaaauuccaagacaguug

SEQ ID NO: 208353 - RNA, 19 nt, Homo sapiens
  misc_RNA (1)...(19): siRNA sense strand
cagaaacugccaagcauca

SEQ ID NO: 208354 - RNA, 19 nt, Homo sapiens
  misc_RNA (1)...(19): siRNA sense strand
uaugacaucugccaaagcu

SEQ ID NO: 208355 - RNA, 19 nt, Homo sapiens
  misc_RNA (1)...(19): siRNA sense strand
aaugucagauucucagcuu

SEQ ID NO: 208356 - RNA, 19 nt, Homo sapiens
  misc_RNA (1)...(19): siRNA sense strand
ucgagacuuugccaaggua

SEQ ID NO: 208357 - RNA, 19 nt, Homo sapiens
  misc_RNA (1)...(19): siRNA sense strand
gcaaaaggccauaaaaugc

SEQ ID NO: 208358 - RNA, 19 nt, Homo sapiens
  misc_RNA (1)...(19): siRNA sense strand
cugcaugauucuauccaaa

SEQ ID NO: 208359 - RNA, 19 nt, Homo sapiens
  misc_RNA (1)...(19): siRNA sense strand
uaaagcacauuuggaagac

SEQ ID NO: 208360 - RNA, 19 nt, Homo sapiens
  misc_RNA (1)...(19): siRNA sense strand
acaggagucuaaagcacuu

SEQ ID NO: 208361 - RNA, 19 nt, Homo sapiens
  misc_RNA (1)...(19): siRNA sense strand
acagauaccuuuucaagca

SEQ ID NO: 208362 - RNA, 19 nt, Homo sapiens
  misc_RNA (1)...(19): siRNA sense strand
aagcacauuuggaagacaa

SEQ ID NO: 208363 - RNA, 19 nt, Homo sapiens
  misc_RNA (1)...(19): siRNA sense strand
gcuaauaauaagccagaga

SEQ ID NO: 208364 - RNA, 19 nt, Homo sapiens
  misc_RNA (1)...(19): siRNA sense strand
caagagcacaacaauuugg

SEQ ID NO: 208365 - RNA, 19 nt, Homo sapiens
  misc_RNA (1)...(19): siRNA sense strand
ccugucagcugcaugugau

SEQ ID NO: 208366 - RNA, 19 nt, Homo sapiens
  misc_RNA (1)...(19): siRNA sense strand
gcugcugaauguuuaugau

SEQ ID NO: 208367 - RNA, 19 nt, Homo sapiens
  misc_RNA (1)...(19): siRNA sense strand
acagagcucuaccagucuu

SEQ ID NO: 208368 - RNA, 19 nt, Homo sapiens
  misc_RNA (1)...(19): siRNA sense strand
acaguugggugaaguugca

SEQ ID NO: 208369 - RNA, 19 nt, Homo sapiens
  misc_RNA (1)...(19): siRNA sense strand
guuugaccacuauuuauga

SEQ ID NO: 208370 - RNA, 19 nt, Homo sapiens
  misc_RNA (1)...(19): siRNA sense strand
gcuuauaggacugccauga

SEQ ID NO: 208371 - RNA, 19 nt, Homo sapiens
  misc_RNA (1)...(19): siRNA sense strand
caucaggccaaauguaaca

SEQ ID NO: 208372 - RNA, 19 nt, Homo sapiens
  misc_RNA (1)...(19): siRNA sense strand
gauucuauccaaauuccaa

SEQ ID NO: 208373 - RNA, 19 nt, Homo sapiens
  misc_RNA (1)...(19): siRNA sense strand
ggcaaguucaacaggauuu

SEQ ID NO: 208374 - RNA, 19 nt, Homo sapiens
  misc_RNA (1)...(19): siRNA sense strand
gaacuggcugcugaauguu

SEQ ID NO: 208375 - RNA, 19 nt, Homo sapiens
  misc_RNA (1)...(19): siRNA sense strand
cugcugaauguuuaugaua

SEQ ID NO: 208376 - RNA, 19 nt, Homo sapiens
  misc_RNA (1)...(19): siRNA sense strand
aagcaucaggccaaaugua

SEQ ID NO: 208377 - RNA, 19 nt, Homo sapiens
  misc_RNA (1)...(19): siRNA sense strand
uggcaucauuucccugugu

SEQ ID NO: 208378 - RNA, 19 nt, Homo sapiens
  misc_RNA (1)...(19): siRNA sense strand
ccaugaaacuccgaagacu

SEQ ID NO: 208379 - RNA, 19 nt, Homo sapiens
  misc_RNA (1)...(19): siRNA sense strand
auaauaagccagagaucga

SEQ ID NO: 208380 - RNA, 19 nt, Homo sapiens
  misc_RNA (1)...(19): siRNA sense strand
cuaauaauaagccagagau

SEQ ID NO: 208381 - RNA, 19 nt, Homo sapiens
  misc_RNA (1)...(19): siRNA sense strand
ugggugaaguugcauccuu

SEQ ID NO: 208382 - RNA, 19 nt, Homo sapiens
  misc_RNA (1)...(19): siRNA sense strand
caucauuucccuguguaaa

SEQ ID NO: 208383 - RNA, 19 nt, Homo sapiens
  misc_RNA (1)...(19): siRNA sense strand
gcguggauaugugucugaa

SEQ ID NO: 208384 - RNA, 19 nt, Homo sapiens
  misc_RNA (1)...(19): siRNA sense strand
gcacuaucccaugguggaa

SEQ ID NO: 208385 - RNA, 19 nt, Homo sapiens
  misc_RNA (1)...(19): siRNA sense strand
gagccugucagcugcaugu

SEQ ID NO: 208386 - RNA, 19 nt, Homo sapiens
  misc_RNA (1)...(19): siRNA sense strand
guacagauaccuuuucaag

SEQ ID NO: 208387 - RNA, 19 nt, Homo sapiens
  misc_RNA (1)...(19): siRNA sense strand
gucccucucugcguggaua

SEQ ID NO: 208388 - RNA, 19 nt, Homo sapiens
  misc_RNA (1)...(19): siRNA sense strand
ggagcugcuuccaauuugc

SEQ ID NO: 208389 - RNA, 19 nt, Homo sapiens
  misc_RNA (1)...(19): siRNA sense strand
uuagcugaccugaauaaug

SEQ ID NO: 208390 - RNA, 19 nt, Homo sapiens
  misc_RNA (1)...(19): siRNA sense strand
guggcaaguucaacaggau

SEQ ID NO: 208391 - RNA, 19 nt, Homo sapiens
  misc_RNA (1)...(19): siRNA sense strand
acaacaauuuggucaacgu

SEQ ID NO: 208392 - RNA, 19 nt, Homo sapiens
  misc_RNA (1)...(19): siRNA sense strand
gacuacaucaggagaagau

SEQ ID NO: 208393 - RNA, 19 nt, Homo sapiens
  misc_RNA (1)...(19): siRNA sense strand
uaauaagccagagaucgaa

SEQ ID NO: 208394 - RNA, 19 nt, Homo sapiens
  misc_RNA (1)...(19): siRNA sense strand
ugucagauucucagcuuau

SEQ ID NO: 208395 - RNA, 19 nt, Homo sapiens
  misc_RNA (1)...(19): siRNA sense strand
ggauauccugcagauuauu

SEQ ID NO: 208396 - RNA, 19 nt, Homo sapiens
  misc_RNA (1)...(19): siRNA sense strand
agcaucaggccaaauguaa

SEQ ID NO: 208397 - RNA, 19 nt, Homo sapiens
  misc_RNA (1)...(19): siRNA sense strand
gcccuuugcuuggaucucu

SEQ ID NO: 208398 - RNA, 19 nt, Homo sapiens
  misc_RNA (1)...(19): siRNA sense strand
gcugaauguuuaugauacg

SEQ ID NO: 208399 - RNA, 19 nt, Homo sapiens
  misc_RNA (1)...(19): siRNA sense strand
agacuuugccaagguacua

SEQ ID NO: 208400 - RNA, 19 nt, Homo sapiens
  misc_RNA (1)...(19): siRNA sense strand
caagcaaguggcaaguuca

SEQ ID NO: 208401 - RNA, 19 nt, Homo sapiens
  misc_RNA (1)...(19): siRNA sense strand
agacaaguacagauaccuu

SEQ ID NO: 208402 - RNA, 19 nt, Homo sapiens
  misc_RNA (1)...(19): siRNA sense strand
gcaucauuucccuguguaa

SEQ ID NO: 208403 - RNA, 19 nt, Homo sapiens
  misc_RNA (1)...(19): siRNA sense strand
cugcaaagaguguccaauc

SEQ ID NO: 208404 - RNA, 19 nt, Homo sapiens
  misc_RNA (1)...(19): siRNA sense strand
cuuauaggacugccaugaa

SEQ ID NO: 208405 - RNA, 19 nt, Homo sapiens
  misc_RNA (1)...(19): siRNA sense strand
caaagaguguccaaucauu

SEQ ID NO: 208406 - RNA, 19 nt, Homo sapiens
  misc_RNA (1)...(19): siRNA sense strand
uagcugaccugaauaaugu

SEQ ID NO: 208407 - RNA, 19 nt, Homo sapiens
  misc_RNA (1)...(19): siRNA sense strand
gcaugauucuauccaaauu

SEQ ID NO: 208408 - RNA, 19 nt, Homo sapiens
  misc_RNA (1)...(19): siRNA sense strand
ugaacuggcugcugaaugu

SEQ ID NO: 208409 - RNA, 19 nt, Homo sapiens
  misc_RNA (1)...(19): siRNA sense strand
gauauccugcagauuauua

SEQ ID NO: 208410 - RNA, 19 nt, Homo sapiens
  misc_RNA (1)...(19): siRNA sense strand
gagaagauguucgagacuu

SEQ ID NO: 208411 - RNA, 19 nt, Homo sapiens
  misc_RNA (1)...(19): siRNA sense strand
gcacuuuaauuaugacauc

SEQ ID NO: 208412 - RNA, 19 nt, Homo sapiens
  misc_RNA (1)...(19): siRNA sense strand
guaaagcacauuuggaaga

SEQ ID NO: 208413 - RNA, 19 nt, Homo sapiens
  misc_RNA (1)...(19): siRNA sense strand
gaauauugcacuccgacua

SEQ ID NO: 208414 - RNA, 19 nt, Homo sapiens
  misc_RNA (1)...(19): siRNA sense strand
uuauaggacugccaugaaa

SEQ ID NO: 208415 - RNA, 19 nt, Homo sapiens
  misc_RNA (1)...(19): siRNA sense strand
gggugaaguugcauccuuu

SEQ ID NO: 208416 - RNA, 19 nt, Homo sapiens
  misc_RNA (1)...(19): siRNA sense strand
gcaagagcacaacaauuug

SEQ ID NO: 208417 - RNA, 19 nt, Homo sapiens
  misc_RNA (1)...(19): siRNA sense strand
gcacaacaauuuggucaac

SEQ ID NO: 208418 - RNA, 19 nt, Homo sapiens
  misc_RNA (1)...(19): siRNA sense strand
agcaagagcacaacaauuu

SEQ ID NO: 208419 - RNA, 19 nt, Homo sapiens
  misc_RNA (1)...(19): siRNA sense strand
agaagauguucgagacuuu

SEQ ID NO: 208420 - RNA, 19 nt, Homo sapiens
  misc_RNA (1)...(19): siRNA sense strand
gagcaagagcacaacaauu

SEQ ID NO: 208421 - RNA, 19 nt, Homo sapiens
  misc_RNA (1)...(19): siRNA sense strand
ucaagcaaguggcaaguuc

SEQ ID NO: 208422 - RNA, 19 nt, Homo sapiens
  misc_RNA (1)...(19): siRNA sense strand
ccacgagacucaaacaacu

SEQ ID NO: 208423 - RNA, 19 nt, Homo sapiens
  misc_RNA (1)...(19): siRNA sense strand
cagcacaaccucaagcaaa

SEQ ID NO: 208424 - RNA, 19 nt, Homo sapiens
  misc_RNA (1)...(19): siRNA sense strand
gcaaagaguguccaaucau

SEQ ID NO: 208425 - RNA, 19 nt, Homo sapiens
  misc_RNA (1)...(19): siRNA sense strand
auggauauccugcagauua

SEQ ID NO: 208426 - RNA, 19 nt, Homo sapiens
  misc_RNA (1)...(19): siRNA sense strand
uguaacaucugcaaagagu

SEQ ID NO: 208427 - RNA, 19 nt, Homo sapiens
  misc_RNA (1)...(19): siRNA sense strand
guccggagcugcuuccaau

SEQ ID NO: 208428 - RNA, 19 nt, Homo sapiens
  misc_RNA (1)...(19): siRNA sense strand
gcaaguggcaaguucaaca

SEQ ID NO: 208429 - RNA, 19 nt, Homo sapiens
  misc_RNA (1)...(19): siRNA sense strand
gcuuccaauuugcuaauaa

SEQ ID NO: 208430 - RNA, 19 nt, Homo sapiens
  misc_RNA (1)...(19): siRNA sense strand
uggaagacaaguacagaua

SEQ ID NO: 208431 - RNA, 19 nt, Homo sapiens
  misc_RNA (1)...(19): siRNA sense strand
ggauccguguccugucuuu

SEQ ID NO: 208432 - RNA, 19 nt, Homo sapiens
  misc_RNA (1)...(19): siRNA sense strand
gucuuuagcugaccugaau

SEQ ID NO: 208433 - RNA, 19 nt, Homo sapiens
  misc_RNA (1)...(19): siRNA sense strand
gacaaguacagauaccuuu

SEQ ID NO: 208434 - RNA, 19 nt, Homo sapiens
  misc_RNA (1)...(19): siRNA sense strand
ccaagcaucaggccaaaug

SEQ ID NO: 208435 - RNA, 19 nt, Homo sapiens
  misc_RNA (1)...(19): siRNA sense strand
ggagcaagagcacaacaau

SEQ ID NO: 208436 - RNA, 19 nt, Homo sapiens
  misc_RNA (1)...(19): siRNA sense strand
guguaaagcacauuuggaa

SEQ ID NO: 208437 - RNA, 19 nt, Homo sapiens
  misc_RNA (1)...(19): siRNA sense strand
caagacaguugggugaagu

SEQ ID NO: 208438 - RNA, 19 nt, Homo sapiens
  misc_RNA (1)...(19): siRNA sense strand
gaagauguucgagacuuug

SEQ ID NO: 208439 - RNA, 19 nt, Homo sapiens
  misc_RNA (1)...(19): siRNA sense strand
gucagauucucagcuuaua

SEQ ID NO: 208440 - RNA, 19 nt, Homo sapiens
  misc_RNA (1)...(19): siRNA sense strand
uaacaucugcaaagagugu

SEQ ID NO: 208441 - RNA, 19 nt, Homo sapiens
  misc_RNA (1)...(19): siRNA sense strand
cggagcugcuuccaauuug

SEQ ID NO: 208442 - RNA, 19 nt, Homo sapiens
  misc_RNA (1)...(19): siRNA sense strand
gaagacaaguacagauacc

SEQ ID NO: 208443 - RNA, 19 nt, Homo sapiens
  misc_RNA (1)...(19): siRNA sense strand
ccauggauauccugcagau

SEQ ID NO: 208444 - RNA, 19 nt, Homo sapiens
  misc_RNA (1)...(19): siRNA sense strand
ggcaucauuucccugugua

SEQ ID NO: 208445 - RNA, 19 nt, Homo sapiens
  misc_RNA (1)...(19): siRNA sense strand
uggauauccugcagauuau

SEQ ID NO: 208446 - RNA, 19 nt, Homo sapiens
  misc_RNA (1)...(19): siRNA sense strand
ggaagacaaguacagauac

SEQ ID NO: 208447 - RNA, 19 nt, Homo sapiens
  misc_RNA (1)...(19): siRNA sense strand
ugcaaagaguguccaauca

SEQ ID NO: 208448 - RNA, 19 nt, Homo sapiens
  misc_RNA (1)...(19): siRNA sense strand
guggauaugugucugaacu

SEQ ID NO: 208449 - RNA, 19 nt, Homo sapiens
  misc_RNA (1)...(19): siRNA sense strand
acuggcugcugaauguuua

SEQ ID NO: 208450 - RNA, 19 nt, Homo sapiens
  misc_RNA (1)...(19): siRNA sense strand
acuaucccaugguggaaua

SEQ ID NO: 208451 - RNA, 19 nt, Homo sapiens
  misc_RNA (1)...(19): siRNA sense strand
ccggagcugcuuccaauuu

SEQ ID NO: 208452 - RNA, 19 nt, Homo sapiens
  misc_RNA (1)...(19): siRNA sense strand
ccaaauuccaagacaguug

SEQ ID NO: 208453 - RNA, 19 nt, Homo sapiens
  misc_RNA (1)...(19): siRNA sense strand
cagaaacugccaagcauca

SEQ ID NO: 208454 - RNA, 19 nt, Homo sapiens
  misc_RNA (1)...(19): siRNA sense strand
uaugacaucugccaaagcu

SEQ ID NO: 208455 - RNA, 19 nt, Homo sapiens
  misc_RNA (1)...(19): siRNA sense strand
aaugucagauucucagcuu

SEQ ID NO: 208456 - RNA, 19 nt, Homo sapiens
  misc_RNA (1)...(19): siRNA sense strand
ucgagacuuugccaaggua

SEQ ID NO: 208457 - RNA, 19 nt, Homo sapiens
  misc_RNA (1)...(19): siRNA sense strand
gcaaaaggccauaaaaugc

SEQ ID NO: 208458 - RNA, 19 nt, Homo sapiens
  misc_RNA (1)...(19): siRNA sense strand
cugcaugauucuauccaaa

SEQ ID NO: 208459 - RNA, 19 nt, Homo sapiens
  misc_RNA (1)...(19): siRNA sense strand
uaaagcacauuuggaagac

SEQ ID NO: 208460 - RNA, 19 nt, Homo sapiens
  misc_RNA (1)...(19): siRNA sense strand
acaggagucuaaagcacuu

SEQ ID NO: 208461 - RNA, 19 nt, Homo sapiens
  misc_RNA (1)...(19): siRNA sense strand
acagauaccuuuucaagca

SEQ ID NO: 208462 - RNA, 19 nt, Homo sapiens
  misc_RNA (1)...(19): siRNA sense strand
aagcacauuuggaagacaa

SEQ ID NO: 208463 - RNA, 19 nt, Homo sapiens
  misc_RNA (1)...(19): siRNA sense strand
gcuaauaauaagccagaga

SEQ ID NO: 208464 - RNA, 19 nt, Homo sapiens
  misc_RNA (1)...(19): siRNA sense strand
caagagcacaacaauuugg

SEQ ID NO: 208465 - RNA, 19 nt, Homo sapiens
  misc_RNA (1)...(19): siRNA sense strand
ccugucagcugcaugugau

SEQ ID NO: 208466 - RNA, 19 nt, Homo sapiens
  misc_RNA (1)...(19): siRNA sense strand
gcugcugaauguuuaugau

SEQ ID NO: 208467 - RNA, 19 nt, Homo sapiens
  misc_RNA (1)...(19): siRNA sense strand
acagagcucuaccagucuu

SEQ ID NO: 208468 - RNA, 19 nt, Homo sapiens
  misc_RNA (1)...(19): siRNA sense strand
acaguugggugaaguugca

SEQ ID NO: 208469 - RNA, 19 nt, Homo sapiens
  misc_RNA (1)...(19): siRNA sense strand
guuugaccacuauuuauga

SEQ ID NO: 208470 - RNA, 19 nt, Homo sapiens
  misc_RNA (1)...(19): siRNA sense strand
gcuuauaggacugccauga

SEQ ID NO: 208471 - RNA, 19 nt, Homo sapiens
  misc_RNA (1)...(19): siRNA sense strand
caucaggccaaauguaaca

SEQ ID NO: 208472 - RNA, 19 nt, Homo sapiens
  misc_RNA (1)...(19): siRNA sense strand
gauucuauccaaauuccaa

SEQ ID NO: 208473 - RNA, 19 nt, Homo sapiens
  misc_RNA (1)...(19): siRNA sense strand
ggcaaguucaacaggauuu

SEQ ID NO: 208474 - RNA, 19 nt, Homo sapiens
  misc_RNA (1)...(19): siRNA sense strand
gaacuggcugcugaauguu

SEQ ID NO: 208475 - RNA, 19 nt, Homo sapiens
  misc_RNA (1)...(19): siRNA sense strand
cugcugaauguuuaugaua

SEQ ID NO: 208476 - RNA, 19 nt, Homo sapiens
  misc_RNA (1)...(19): siRNA sense strand
aagcaucaggccaaaugua

SEQ ID NO: 208477 - RNA, 19 nt, Homo sapiens
  misc_RNA (1)...(19): siRNA sense strand
uggcaucauuucccugugu

SEQ ID NO: 208478 - RNA, 19 nt, Homo sapiens
  misc_RNA (1)...(19): siRNA sense strand
ccaugaaacuccgaagacu

SEQ ID NO: 208479 - RNA, 19 nt, Homo sapiens
  misc_RNA (1)...(19): siRNA sense strand
auaauaagccagagaucga

SEQ ID NO: 208480 - RNA, 19 nt, Homo sapiens
  misc_RNA (1)...(19): siRNA sense strand
cuaauaauaagccagagau

SEQ ID NO: 208481 - RNA, 19 nt, Homo sapiens
  misc_RNA (1)...(19): siRNA sense strand
ugggugaaguugcauccuu

SEQ ID NO: 208482 - RNA, 19 nt, Homo sapiens
  misc_RNA (1)...(19): siRNA sense strand
caucauuucccuguguaaa

SEQ ID NO: 208483 - RNA, 19 nt, Homo sapiens
  misc_RNA (1)...(19): siRNA sense strand
gcguggauaugugucugaa

SEQ ID NO: 208484 - RNA, 19 nt, Homo sapiens
  misc_RNA (1)...(19): siRNA sense strand
gcacuaucccaugguggaa

SEQ ID NO: 208485 - RNA, 19 nt, Homo sapiens
  misc_RNA (1)...(19): siRNA sense strand
gagccugucagcugcaugu

SEQ ID NO: 208486 - RNA, 19 nt, Homo sapiens
  misc_RNA (1)...(19): siRNA sense strand
guacagauaccuuuucaag

SEQ ID NO: 208487 - RNA, 19 nt, Homo sapiens
  misc_RNA (1)...(19): siRNA sense strand
gucccucucugcguggaua

SEQ ID NO: 208488 - RNA, 19 nt, Homo sapiens
  misc_RNA (1)...(19): siRNA sense strand
ggagcugcuuccaauuugc

SEQ ID NO: 208489 - RNA, 19 nt, Homo sapiens
  misc_RNA (1)...(19): siRNA sense strand
uuagcugaccugaauaaug

SEQ ID NO: 208490 - RNA, 19 nt, Homo sapiens
  misc_RNA (1)...(19): siRNA sense strand
guggcaaguucaacaggau

SEQ ID NO: 208491 - RNA, 19 nt, Homo sapiens
  misc_RNA (1)...(19): siRNA sense strand
acaacaauuuggucaacgu

SEQ ID NO: 208492 - RNA, 19 nt, Homo sapiens
  misc_RNA (1)...(19): siRNA sense strand
gacuacaucaggagaagau

SEQ ID NO: 208493 - RNA, 19 nt, Homo sapiens
  misc_RNA (1)...(19): siRNA sense strand
uaauaagccagagaucgaa

SEQ ID NO: 208494 - RNA, 19 nt, Homo sapiens
  misc_RNA (1)...(19): siRNA sense strand
ugucagauucucagcuuau

SEQ ID NO: 208495 - RNA, 19 nt, Homo sapiens
  misc_RNA (1)...(19): siRNA sense strand
ggauauccugcagauuauu

SEQ ID NO: 208496 - RNA, 19 nt, Homo sapiens
  misc_RNA (1)...(19): siRNA sense strand
agcaucaggccaaauguaa

SEQ ID NO: 208497 - RNA, 19 nt, Homo sapiens
  misc_RNA (1)...(19): siRNA sense strand
gcccuuugcuuggaucucu

SEQ ID NO: 208498 - RNA, 19 nt, Homo sapiens
  misc_RNA (1)...(19): siRNA sense strand
gcugaauguuuaugauacg

SEQ ID NO: 208499 - RNA, 19 nt, Homo sapiens
  misc_RNA (1)...(19): siRNA sense strand
agacuuugccaagguacua

SEQ ID NO: 208500 - RNA, 19 nt, Homo sapiens
  misc_RNA (1)...(19): siRNA sense strand
caagcaaguggcaaguuca

SEQ ID NO: 208501 - RNA, 19 nt, Homo sapiens
  misc_RNA (1)...(19): siRNA sense strand
agacaaguacagauaccuu

SEQ ID NO: 208502 - RNA, 19 nt, Homo sapiens
  misc_RNA (1)...(19): siRNA sense strand
gcaucauuucccuguguaa

SEQ ID NO: 208503 - RNA, 19 nt, Homo sapiens
  misc_RNA (1)...(19): siRNA sense strand
cugcaaagaguguccaauc

SEQ ID NO: 208504 - RNA, 19 nt, Homo sapiens
  misc_RNA (1)...(19): siRNA sense strand
cuuauaggacugccaugaa

SEQ ID NO: 208505 - RNA, 19 nt, Homo sapiens
  misc_RNA (1)...(19): siRNA sense strand
caaagaguguccaaucauu

SEQ ID NO: 208506 - RNA, 19 nt, Homo sapiens
  misc_RNA (1)...(19): siRNA sense strand
uagcugaccugaauaaugu

SEQ ID NO: 208507 - RNA, 19 nt, Homo sapiens
  misc_RNA (1)...(19): siRNA sense strand
gcaugauucuauccaaauu

SEQ ID NO: 208508 - RNA, 19 nt, Homo sapiens
  misc_RNA (1)...(19): siRNA sense strand
ugaacuggcugcugaaugu

SEQ ID NO: 208509 - RNA, 19 nt, Homo sapiens
  misc_RNA (1)...(19): siRNA sense strand
gauauccugcagauuauua

SEQ ID NO: 208510 - RNA, 19 nt, Homo sapiens
  misc_RNA (1)...(19): siRNA sense strand
gagaagauguucgagacuu

SEQ ID NO: 208511 - RNA, 19 nt, Homo sapiens
  misc_RNA (1)...(19): siRNA sense strand
gcacuuuaauuaugacauc

SEQ ID NO: 208512 - RNA, 19 nt, Homo sapiens
  misc_RNA (1)...(19): siRNA sense strand
guaaagcacauuuggaaga

SEQ ID NO: 208513 - RNA, 19 nt, Homo sapiens
  misc_RNA (1)...(19): siRNA sense strand
gaauauugcacuccgacua

SEQ ID NO: 208514 - RNA, 19 nt, Homo sapiens
  misc_RNA (1)...(19): siRNA sense strand
uuauaggacugccaugaaa

SEQ ID NO: 208515 - RNA, 19 nt, Homo sapiens
  misc_RNA (1)...(19): siRNA sense strand
gggugaaguugcauccuuu

SEQ ID NO: 208516 - RNA, 19 nt, Homo sapiens
  misc_RNA (1)...(19): siRNA sense strand
gcaagagcacaacaauuug

SEQ ID NO: 208517 - RNA, 19 nt, Homo sapiens
  misc_RNA (1)...(19): siRNA sense strand
gcacaacaauuuggucaac

SEQ ID NO: 208518 - RNA, 19 nt, Homo sapiens
  misc_RNA (1)...(19): siRNA sense strand
agcaagagcacaacaauuu

SEQ ID NO: 208519 - RNA, 19 nt, Homo sapiens
  misc_RNA (1)...(19): siRNA sense strand
agaagauguucgagacuuu

SEQ ID NO: 208520 - RNA, 19 nt, Homo sapiens
  misc_RNA (1)...(19): siRNA sense strand
gagcaagagcacaacaauu

SEQ ID NO: 208521 - RNA, 19 nt, Homo sapiens
  misc_RNA (1)...(19): siRNA sense strand
ucaagcaaguggcaaguuc

SEQ ID NO: 208522 - RNA, 19 nt, Homo sapiens
  misc_RNA (1)...(19): siRNA sense strand
ccacgagacucaaacaacu

SEQ ID NO: 208523 - RNA, 19 nt, Homo sapiens
  misc_RNA (1)...(19): siRNA sense strand
cagcacaaccucaagcaaa

SEQ ID NO: 208524 - RNA, 19 nt, Homo sapiens
  misc_RNA (1)...(19): siRNA sense strand
gcaaagaguguccaaucau

SEQ ID NO: 208525 - RNA, 19 nt, Homo sapiens
  misc_RNA (1)...(19): siRNA sense strand
auggauauccugcagauua

SEQ ID NO: 208526 - RNA, 19 nt, Homo sapiens
  misc_RNA (1)...(19): siRNA sense strand
uguaacaucugcaaagagu

SEQ ID NO: 208527 - RNA, 19 nt, Homo sapiens
  misc_RNA (1)...(19): siRNA sense strand
guccggagcugcuuccaau

SEQ ID NO: 208528 - RNA, 19 nt, Homo sapiens
  misc_RNA (1)...(19): siRNA sense strand
gcaaguggcaaguucaaca

SEQ ID NO: 208529 - RNA, 19 nt, Homo sapiens
  misc_RNA (1)...(19): siRNA sense strand
gcuuccaauuugcuaauaa

SEQ ID NO: 208530 - RNA, 19 nt, Homo sapiens
  misc_RNA (1)...(19): siRNA sense strand
uggaagacaaguacagaua

SEQ ID NO: 208531 - RNA, 19 nt, Homo sapiens
  misc_RNA (1)...(19): siRNA sense strand
ggauccguguccugucuuu

SEQ ID NO: 208532 - RNA, 19 nt, Homo sapiens
  misc_RNA (1)...(19): siRNA sense strand
gucuuuagcugaccugaau

SEQ ID NO: 208533 - RNA, 19 nt, Homo sapiens
  misc_RNA (1)...(19): siRNA sense strand
gacaaguacagauaccuuu

SEQ ID NO: 208534 - RNA, 19 nt, Homo sapiens
  misc_RNA (1)...(19): siRNA sense strand
ccaagcaucaggccaaaug

SEQ ID NO: 208535 - RNA, 19 nt, Homo sapiens
  misc_RNA (1)...(19): siRNA sense strand
ggagcaagagcacaacaau

SEQ ID NO: 208536 - RNA, 19 nt, Homo sapiens
  misc_RNA (1)...(19): siRNA sense strand
guguaaagcacauuuggaa

SEQ ID NO: 208537 - RNA, 19 nt, Homo sapiens
  misc_RNA (1)...(19): siRNA sense strand
caagacaguugggugaagu

SEQ ID NO: 208538 - RNA, 19 nt, Homo sapiens
  misc_RNA (1)...(19): siRNA sense strand
gaagauguucgagacuuug

SEQ ID NO: 208539 - RNA, 19 nt, Homo sapiens
  misc_RNA (1)...(19): siRNA sense strand
gucagauucucagcuuaua

SEQ ID NO: 208540 - RNA, 19 nt, Homo sapiens
  misc_RNA (1)...(19): siRNA sense strand
uaacaucugcaaagagugu

SEQ ID NO: 208541 - RNA, 19 nt, Homo sapiens
  misc_RNA (1)...(19): siRNA sense strand
cggagcugcuuccaauuug

SEQ ID NO: 208542 - RNA, 19 nt, Homo sapiens
  misc_RNA (1)...(19): siRNA sense strand
gaagacaaguacagauacc

SEQ ID NO: 208543 - RNA, 19 nt, Homo sapiens
  misc_RNA (1)...(19): siRNA sense strand
ccauggauauccugcagau

SEQ ID NO: 208544 - RNA, 19 nt, Homo sapiens
  misc_RNA (1)...(19): siRNA sense strand
ggcaucauuucccugugua

SEQ ID NO: 208545 - RNA, 19 nt, Homo sapiens
  misc_RNA (1)...(19): siRNA sense strand
uggauauccugcagauuau

SEQ ID NO: 208546 - RNA, 19 nt, Homo sapiens
  misc_RNA (1)...(19): siRNA sense strand
ggaagacaaguacagauac

SEQ ID NO: 208547 - RNA, 19 nt, Homo sapiens
  misc_RNA (1)...(19): siRNA sense strand
ugcaaagaguguccaauca

SEQ ID NO: 208548 - RNA, 19 nt, Homo sapiens
  misc_RNA (1)...(19): siRNA sense strand
guggauaugugucugaacu

SEQ ID NO: 208549 - RNA, 19 nt, Homo sapiens
  misc_RNA (1)...(19): siRNA sense strand
acuggcugcugaauguuua

SEQ ID NO: 208550 - RNA, 19 nt, Homo sapiens
  misc_RNA (1)...(19): siRNA sense strand
acuaucccaugguggaaua

SEQ ID NO: 208551 - RNA, 19 nt, Homo sapiens
  misc_RNA (1)...(19): siRNA sense strand
ccggagcugcuuccaauuu

SEQ ID NO: 208552 - RNA, 19 nt, Homo sapiens
  misc_RNA (1)...(19): siRNA sense strand
ccaaauuccaagacaguug

SEQ ID NO: 208553 - RNA, 19 nt, Homo sapiens
  misc_RNA (1)...(19): siRNA sense strand
cagaaacugccaagcauca

SEQ ID NO: 208554 - RNA, 19 nt, Homo sapiens
  misc_RNA (1)...(19): siRNA sense strand
uaugacaucugccaaagcu

SEQ ID NO: 208555 - RNA, 19 nt, Homo sapiens
  misc_RNA (1)...(19): siRNA sense strand
aaugucagauucucagcuu

SEQ ID NO: 208556 - RNA, 19 nt, Homo sapiens
  misc_RNA (1)...(19): siRNA sense strand
ucgagacuuugccaaggua

SEQ ID NO: 208557 - RNA, 19 nt, Homo sapiens
  misc_RNA (1)...(19): siRNA sense strand
gcaaaaggccauaaaaugc

SEQ ID NO: 208558 - RNA, 19 nt, Homo sapiens
  misc_RNA (1)...(19): siRNA sense strand
cugcaugauucuauccaaa

SEQ ID NO: 208559 - RNA, 19 nt, Homo sapiens
  misc_RNA (1)...(19): siRNA sense strand
uaaagcacauuuggaagac

SEQ ID NO: 208560 - RNA, 19 nt, Homo sapiens
  misc_RNA (1)...(19): siRNA sense strand
acaggagucuaaagcacuu

SEQ ID NO: 208561 - RNA, 19 nt, Homo sapiens
  misc_RNA (1)...(19): siRNA sense strand
acagauaccuuuucaagca

SEQ ID NO: 208562 - RNA, 19 nt, Homo sapiens
  misc_RNA (1)...(19): siRNA sense strand
aagcacauuuggaagacaa

SEQ ID NO: 208563 - RNA, 19 nt, Homo sapiens
  misc_RNA (1)...(19): siRNA sense strand
gcuaauaauaagccagaga

SEQ ID NO: 208564 - RNA, 19 nt, Homo sapiens
  misc_RNA (1)...(19): siRNA sense strand
caagagcacaacaauuugg

SEQ ID NO: 208565 - RNA, 19 nt, Homo sapiens
  misc_RNA (1)...(19): siRNA sense strand
ccugucagcugcaugugau

SEQ ID NO: 208566 - RNA, 19 nt, Homo sapiens
  misc_RNA (1)...(19): siRNA sense strand
gcugcugaauguuuaugau

SEQ ID NO: 208567 - RNA, 19 nt, Homo sapiens
  misc_RNA (1)...(19): siRNA sense strand
acagagcucuaccagucuu

SEQ ID NO: 208568 - RNA, 19 nt, Homo sapiens
  misc_RNA (1)...(19): siRNA sense strand
acaguugggugaaguugca

SEQ ID NO: 208569 - RNA, 19 nt, Homo sapiens
  misc_RNA (1)...(19): siRNA sense strand
guuugaccacuauuuauga

SEQ ID NO: 208570 - RNA, 19 nt, Homo sapiens
  misc_RNA (1)...(19): siRNA sense strand
gcuuauaggacugccauga

SEQ ID NO: 208571 - RNA, 19 nt, Homo sapiens
  misc_RNA (1)...(19): siRNA sense strand
caucaggccaaauguaaca

SEQ ID NO: 208572 - RNA, 19 nt, Homo sapiens
  misc_RNA (1)...(19): siRNA sense strand
gauucuauccaaauuccaa

SEQ ID NO: 208573 - RNA, 19 nt, Homo sapiens
  misc_RNA (1)...(19): siRNA sense strand
ggcaaguucaacaggauuu

SEQ ID NO: 208574 - RNA, 19 nt, Homo sapiens
  misc_RNA (1)...(19): siRNA sense strand
gaacuggcugcugaauguu

SEQ ID NO: 208575 - RNA, 19 nt, Homo sapiens
  misc_RNA (1)...(19): siRNA sense strand
cugcugaauguuuaugaua

SEQ ID NO: 208576 - RNA, 19 nt, Homo sapiens
  misc_RNA (1)...(19): siRNA sense strand
aagcaucaggccaaaugua

SEQ ID NO: 208577 - RNA, 19 nt, Homo sapiens
  misc_RNA (1)...(19): siRNA sense strand
uggcaucauuucccugugu

SEQ ID NO: 208578 - RNA, 19 nt, Homo sapiens
  misc_RNA (1)...(19): siRNA sense strand
ccaugaaacuccgaagacu

SEQ ID NO: 208579 - RNA, 19 nt, Homo sapiens
  misc_RNA (1)...(19): siRNA sense strand
auaauaagccagagaucga

SEQ ID NO: 208580 - RNA, 19 nt, Homo sapiens
  misc_RNA (1)...(19): siRNA sense strand
cuaauaauaagccagagau

SEQ ID NO: 208581 - RNA, 19 nt, Homo sapiens
  misc_RNA (1)...(19): siRNA sense strand
ugggugaaguugcauccuu

SEQ ID NO: 208582 - RNA, 19 nt, Homo sapiens
  misc_RNA (1)...(19): siRNA sense strand
caucauuucccuguguaaa

SEQ ID NO: 208583 - RNA, 19 nt, Homo sapiens
  misc_RNA (1)...(19): siRNA sense strand
gcguggauaugugucugaa

SEQ ID NO: 208584 - RNA, 19 nt, Homo sapiens
  misc_RNA (1)...(19): siRNA sense strand
gcacuaucccaugguggaa

SEQ ID NO: 208585 - RNA, 19 nt, Homo sapiens
  misc_RNA (1)...(19): siRNA sense strand
gagccugucagcugcaugu

SEQ ID NO: 208586 - RNA, 19 nt, Homo sapiens
  misc_RNA (1)...(19): siRNA sense strand
guacagauaccuuuucaag

SEQ ID NO: 208587 - RNA, 19 nt, Homo sapiens
  misc_RNA (1)...(19): siRNA sense strand
gucccucucugcguggaua

SEQ ID NO: 208588 - RNA, 19 nt, Homo sapiens
  misc_RNA (1)...(19): siRNA sense strand
ggagcugcuuccaauuugc

SEQ ID NO: 208589 - RNA, 19 nt, Homo sapiens
  misc_RNA (1)...(19): siRNA sense strand
uuagcugaccugaauaaug

SEQ ID NO: 208590 - RNA, 19 nt, Homo sapiens
  misc_RNA (1)...(19): siRNA sense strand
guggcaaguucaacaggau

SEQ ID NO: 208591 - RNA, 19 nt, Homo sapiens
  misc_RNA (1)...(19): siRNA sense strand
acaacaauuuggucaacgu

SEQ ID NO: 208592 - RNA, 19 nt, Homo sapiens
  misc_RNA (1)...(19): siRNA sense strand
gacuacaucaggagaagau

SEQ ID NO: 208593 - RNA, 19 nt, Homo sapiens
  misc_RNA (1)...(19): siRNA sense strand
uaauaagccagagaucgaa

SEQ ID NO: 208594 - RNA, 19 nt, Homo sapiens
  misc_RNA (1)...(19): siRNA sense strand
ugucagauucucagcuuau

SEQ ID NO: 208595 - RNA, 19 nt, Homo sapiens
  misc_RNA (1)...(19): siRNA sense strand
ggauauccugcagauuauu

SEQ ID NO: 208596 - RNA, 19 nt, Homo sapiens
  misc_RNA (1)...(19): siRNA sense strand
agcaucaggccaaauguaa

SEQ ID NO: 208597 - RNA, 19 nt, Homo sapiens
  misc_RNA (1)...(19): siRNA sense strand
gcccuuugcuuggaucucu

SEQ ID NO: 208598 - RNA, 19 nt, Homo sapiens
  misc_RNA (1)...(19): siRNA sense strand
gcugaauguuuaugauacg

SEQ ID NO: 208599 - RNA, 19 nt, Homo sapiens
  misc_RNA (1)...(19): siRNA sense strand
agacuuugccaagguacua

SEQ ID NO: 208600 - RNA, 19 nt, Homo sapiens
  misc_RNA (1)...(19): siRNA sense strand
caagcaaguggcaaguuca

SEQ ID NO: 208601 - RNA, 19 nt, Homo sapiens
  misc_RNA (1)...(19): siRNA sense strand
agacaaguacagauaccuu

SEQ ID NO: 208602 - RNA, 19 nt, Homo sapiens
  misc_RNA (1)...(19): siRNA sense strand
gcaucauuucccuguguaa

SEQ ID NO: 208603 - RNA, 19 nt, Homo sapiens
  misc_RNA (1)...(19): siRNA sense strand
cugcaaagaguguccaauc

SEQ ID NO: 208604 - RNA, 19 nt, Homo sapiens
  misc_RNA (1)...(19): siRNA sense strand
cuuauaggacugccaugaa

SEQ ID NO: 208605 - RNA, 19 nt, Homo sapiens
  misc_RNA (1)...(19): siRNA sense strand
caaagaguguccaaucauu

SEQ ID NO: 208606 - RNA, 19 nt, Homo sapiens
  misc_RNA (1)...(19): siRNA sense strand
uagcugaccugaauaaugu

SEQ ID NO: 208607 - RNA, 19 nt, Homo sapiens
  misc_RNA (1)...(19): siRNA sense strand
gcaugauucuauccaaauu

SEQ ID NO: 208608 - RNA, 19 nt, Homo sapiens
  misc_RNA (1)...(19): siRNA sense strand
ugaacuggcugcugaaugu

SEQ ID NO: 208609 - RNA, 19 nt, Homo sapiens
  misc_RNA (1)...(19): siRNA sense strand
gauauccugcagauuauua

SEQ ID NO: 208610 - RNA, 19 nt, Homo sapiens
  misc_RNA (1)...(19): siRNA sense strand
gagaagauguucgagacuu

SEQ ID NO: 208611 - RNA, 19 nt, Homo sapiens
  misc_RNA (1)...(19): siRNA sense strand
gcacuuuaauuaugacauc

SEQ ID NO: 208612 - RNA, 19 nt, Homo sapiens
  misc_RNA (1)...(19): siRNA sense strand
guaaagcacauuuggaaga

SEQ ID NO: 208613 - RNA, 19 nt, Homo sapiens
  misc_RNA (1)...(19): siRNA sense strand
gaauauugcacuccgacua

SEQ ID NO: 208614 - RNA, 19 nt, Homo sapiens
  misc_RNA (1)...(19): siRNA sense strand
uuauaggacugccaugaaa

SEQ ID NO: 208615 - RNA, 19 nt, Homo sapiens
  misc_RNA (1)...(19): siRNA sense strand
gggugaaguugcauccuuu

SEQ ID NO: 208616 - RNA, 19 nt, Homo sapiens
  misc_RNA (1)...(19): siRNA sense strand
gcaagagcacaacaauuug

SEQ ID NO: 208617 - RNA, 19 nt, Homo sapiens
  misc_RNA (1)...(19): siRNA sense strand
gcacaacaauuuggucaac

SEQ ID NO: 208618 - RNA, 19 nt, Homo sapiens
  misc_RNA (1)...(19): siRNA sense strand
agcaagagcacaacaauuu

SEQ ID NO: 208619 - RNA, 19 nt, Homo sapiens
  misc_RNA (1)...(19): siRNA sense strand
agaagauguucgagacuuu

SEQ ID NO: 208620 - RNA, 19 nt, Homo sapiens
  misc_RNA (1)...(19): siRNA sense strand
gagcaagagcacaacaauu

SEQ ID NO: 208621 - RNA, 19 nt, Homo sapiens
  misc_RNA (1)...(19): siRNA sense strand
ucaagcaaguggcaaguuc

SEQ ID NO: 208622 - RNA, 19 nt, Homo sapiens
  misc_RNA (1)...(19): siRNA sense strand
ccacgagacucaaacaacu

SEQ ID NO: 208623 - RNA, 19 nt, Homo sapiens
  misc_RNA (1)...(19): siRNA sense strand
cagcacaaccucaagcaaa

SEQ ID NO: 208624 - RNA, 19 nt, Homo sapiens
  misc_RNA (1)...(19): siRNA sense strand
gcaaagaguguccaaucau

SEQ ID NO: 208625 - RNA, 19 nt, Homo sapiens
  misc_RNA (1)...(19): siRNA sense strand
auggauauccugcagauua

SEQ ID NO: 208626 - RNA, 19 nt, Homo sapiens
  misc_RNA (1)...(19): siRNA sense strand
uguaacaucugcaaagagu

SEQ ID NO: 208627 - RNA, 19 nt, Homo sapiens
  misc_RNA (1)...(19): siRNA sense strand
guccggagcugcuuccaau

SEQ ID NO: 208628 - RNA, 19 nt, Homo sapiens
  misc_RNA (1)...(19): siRNA sense strand
gcaaguggcaaguucaaca

SEQ ID NO: 208629 - RNA, 19 nt, Homo sapiens
  misc_RNA (1)...(19): siRNA sense strand
gcuuccaauuugcuaauaa

SEQ ID NO: 208630 - RNA, 19 nt, Homo sapiens
  misc_RNA (1)...(19): siRNA sense strand
uggaagacaaguacagaua

SEQ ID NO: 208631 - RNA, 19 nt, Homo sapiens
  misc_RNA (1)...(19): siRNA sense strand
ggauccguguccugucuuu

SEQ ID NO: 208632 - RNA, 19 nt, Homo sapiens
  misc_RNA (1)...(19): siRNA sense strand
gucuuuagcugaccugaau

SEQ ID NO: 208633 - RNA, 19 nt, Homo sapiens
  misc_RNA (1)...(19): siRNA sense strand
gacaaguacagauaccuuu

SEQ ID NO: 208634 - RNA, 19 nt, Homo sapiens
  misc_RNA (1)...(19): siRNA sense strand
ccaagcaucaggccaaaug

SEQ ID NO: 208635 - RNA, 19 nt, Homo sapiens
  misc_RNA (1)...(19): siRNA sense strand
ggagcaagagcacaacaau

SEQ ID NO: 208636 - RNA, 19 nt, Homo sapiens
  misc_RNA (1)...(19): siRNA sense strand
guguaaagcacauuuggaa

SEQ ID NO: 208637 - RNA, 19 nt, Homo sapiens
  misc_RNA (1)...(19): siRNA sense strand
caagacaguugggugaagu

SEQ ID NO: 208638 - RNA, 19 nt, Homo sapiens
  misc_RNA (1)...(19): siRNA sense strand
gaagauguucgagacuuug

SEQ ID NO: 208639 - RNA, 19 nt, Homo sapiens
  misc_RNA (1)...(19): siRNA sense strand
gucagauucucagcuuaua

SEQ ID NO: 208640 - RNA, 19 nt, Homo sapiens
  misc_RNA (1)...(19): siRNA sense strand
uaacaucugcaaagagugu

SEQ ID NO: 208641 - RNA, 19 nt, Homo sapiens
  misc_RNA (1)...(19): siRNA sense strand
cggagcugcuuccaauuug

SEQ ID NO: 208642 - RNA, 19 nt, Homo sapiens
  misc_RNA (1)...(19): siRNA sense strand
gaagacaaguacagauacc

SEQ ID NO: 208643 - RNA, 19 nt, Homo sapiens
  misc_RNA (1)...(19): siRNA sense strand
ccauggauauccugcagau

SEQ ID NO: 208644 - RNA, 19 nt, Homo sapiens
  misc_RNA (1)...(19): siRNA sense strand
ggcaucauuucccugugua

SEQ ID NO: 208645 - RNA, 19 nt, Homo sapiens
  misc_RNA (1)...(19): siRNA sense strand
uggauauccugcagauuau

SEQ ID NO: 208646 - RNA, 19 nt, Homo sapiens
  misc_RNA (1)...(19): siRNA sense strand
ggaagacaaguacagauac

SEQ ID NO: 208647 - RNA, 19 nt, Homo sapiens
  misc_RNA (1)...(19): siRNA sense strand
ugcaaagaguguccaauca

SEQ ID NO: 208648 - RNA, 19 nt, Homo sapiens
  misc_RNA (1)...(19): siRNA sense strand
guggauaugugucugaacu

SEQ ID NO: 208649 - RNA, 19 nt, Homo sapiens
  misc_RNA (1)...(19): siRNA sense strand
acuggcugcugaauguuua

SEQ ID NO: 208650 - RNA, 19 nt, Homo sapiens
  misc_RNA (1)...(19): siRNA sense strand
acuaucccaugguggaaua

SEQ ID NO: 208651 - RNA, 19 nt, Homo sapiens
  misc_RNA (1)...(19): siRNA sense strand
ccggagcugcuuccaauuu

SEQ ID NO: 208652 - RNA, 19 nt, Homo sapiens
  misc_RNA (1)...(19): siRNA sense strand
ccaaauuccaagacaguug

SEQ ID NO: 208653 - RNA, 19 nt, Homo sapiens
  misc_RNA (1)...(19): siRNA sense strand
cagaaacugccaagcauca

SEQ ID NO: 208654 - RNA, 19 nt, Homo sapiens
  misc_RNA (1)...(19): siRNA sense strand
uaugacaucugccaaagcu

SEQ ID NO: 208655 - RNA, 19 nt, Homo sapiens
  misc_RNA (1)...(19): siRNA sense strand
aaugucagauucucagcuu

SEQ ID NO: 208656 - RNA, 19 nt, Homo sapiens
  misc_RNA (1)...(19): siRNA sense strand
ucgagacuuugccaaggua

SEQ ID NO: 208657 - RNA, 19 nt, Homo sapiens
  misc_RNA (1)...(19): siRNA sense strand
gcaaaaggccauaaaaugc

SEQ ID NO: 208658 - RNA, 19 nt, Homo sapiens
  misc_RNA (1)...(19): siRNA sense strand
cugcaugauucuauccaaa

SEQ ID NO: 208659 - RNA, 19 nt, Homo sapiens
  misc_RNA (1)...(19): siRNA sense strand
uaaagcacauuuggaagac

SEQ ID NO: 208660 - RNA, 19 nt, Homo sapiens
  misc_RNA (1)...(19): siRNA sense strand
acaggagucuaaagcacuu

SEQ ID NO: 208661 - RNA, 19 nt, Homo sapiens
  misc_RNA (1)...(19): siRNA sense strand
acagauaccuuuucaagca

SEQ ID NO: 208662 - RNA, 19 nt, Homo sapiens
  misc_RNA (1)...(19): siRNA sense strand
aagcacauuuggaagacaa

SEQ ID NO: 208663 - RNA, 19 nt, Homo sapiens
  misc_RNA (1)...(19): siRNA sense strand
gcuaauaauaagccagaga

SEQ ID NO: 208664 - RNA, 19 nt, Homo sapiens
  misc_RNA (1)...(19): siRNA sense strand
caagagcacaacaauuugg

SEQ ID NO: 208665 - RNA, 19 nt, Homo sapiens
  misc_RNA (1)...(19): siRNA sense strand
ccugucagcugcaugugau

SEQ ID NO: 208666 - RNA, 19 nt, Homo sapiens
  misc_RNA (1)...(19): siRNA sense strand
gcugcugaauguuuaugau

SEQ ID NO: 208667 - RNA, 19 nt, Homo sapiens
  misc_RNA (1)...(19): siRNA sense strand
acagagcucuaccagucuu

SEQ ID NO: 208668 - RNA, 19 nt, Homo sapiens
  misc_RNA (1)...(19): siRNA sense strand
acaguugggugaaguugca

SEQ ID NO: 208669 - RNA, 19 nt, Homo sapiens
  misc_RNA (1)...(19): siRNA sense strand
guuugaccacuauuuauga

SEQ ID NO: 208670 - RNA, 19 nt, Homo sapiens
  misc_RNA (1)...(19): siRNA sense strand
gcuuauaggacugccauga

SEQ ID NO: 208671 - RNA, 19 nt, Homo sapiens
  misc_RNA (1)...(19): siRNA sense strand
caucaggccaaauguaaca

SEQ ID NO: 208672 - RNA, 19 nt, Homo sapiens
  misc_RNA (1)...(19): siRNA sense strand
gauucuauccaaauuccaa

SEQ ID NO: 208673 - RNA, 19 nt, Homo sapiens
  misc_RNA (1)...(19): siRNA sense strand
ggcaaguucaacaggauuu

SEQ ID NO: 208674 - RNA, 19 nt, Homo sapiens
  misc_RNA (1)...(19): siRNA sense strand
gaacuggcugcugaauguu

SEQ ID NO: 208675 - RNA, 19 nt, Homo sapiens
  misc_RNA (1)...(19): siRNA sense strand
cugcugaauguuuaugaua

SEQ ID NO: 208676 - RNA, 19 nt, Homo sapiens
  misc_RNA (1)...(19): siRNA sense strand
aagcaucaggccaaaugua

SEQ ID NO: 208677 - RNA, 19 nt, Homo sapiens
  misc_RNA (1)...(19): siRNA sense strand
uggcaucauuucccugugu

SEQ ID NO: 208678 - RNA, 19 nt, Homo sapiens
  misc_RNA (1)...(19): siRNA sense strand
ccaugaaacuccgaagacu

SEQ ID NO: 208679 - RNA, 19 nt, Homo sapiens
  misc_RNA (1)...(19): siRNA sense strand
auaauaagccagagaucga

SEQ ID NO: 208680 - RNA, 19 nt, Homo sapiens
  misc_RNA (1)...(19): siRNA sense strand
cuaauaauaagccagagau

SEQ ID NO: 208681 - RNA, 19 nt, Homo sapiens
  misc_RNA (1)...(19): siRNA sense strand
ugggugaaguugcauccuu

SEQ ID NO: 208682 - RNA, 19 nt, Homo sapiens
  misc_RNA (1)...(19): siRNA sense strand
caucauuucccuguguaaa

SEQ ID NO: 208683 - RNA, 19 nt, Homo sapiens
  misc_RNA (1)...(19): siRNA sense strand
gcguggauaugugucugaa

SEQ ID NO: 208684 - RNA, 19 nt, Homo sapiens
  misc_RNA (1)...(19): siRNA sense strand
gcacuaucccaugguggaa

SEQ ID NO: 208685 - RNA, 19 nt, Homo sapiens
  misc_RNA (1)...(19): siRNA sense strand
gagccugucagcugcaugu

SEQ ID NO: 208686 - RNA, 19 nt, Homo sapiens
  misc_RNA (1)...(19): siRNA sense strand
guacagauaccuuuucaag

SEQ ID NO: 208687 - RNA, 19 nt, Homo sapiens
  misc_RNA (1)...(19): siRNA sense strand
gucccucucugcguggaua

SEQ ID NO: 208688 - RNA, 19 nt, Homo sapiens
  misc_RNA (1)...(19): siRNA sense strand
ggagcugcuuccaauuugc

SEQ ID NO: 208689 - RNA, 19 nt, Homo sapiens
  misc_RNA (1)...(19): siRNA sense strand
uuagcugaccugaauaaug

SEQ ID NO: 208690 - RNA, 19 nt, Homo sapiens
  misc_RNA (1)...(19): siRNA sense strand
guggcaaguucaacaggau

SEQ ID NO: 208691 - RNA, 19 nt, Homo sapiens
  misc_RNA (1)...(19): siRNA sense strand
acaacaauuuggucaacgu

SEQ ID NO: 208692 - RNA, 19 nt, Homo sapiens
  misc_RNA (1)...(19): siRNA sense strand
gacuacaucaggagaagau

SEQ ID NO: 208693 - RNA, 19 nt, Homo sapiens
  misc_RNA (1)...(19): siRNA sense strand
uaauaagccagagaucgaa

SEQ ID NO: 208694 - RNA, 19 nt, Homo sapiens
  misc_RNA (1)...(19): siRNA sense strand
ugucagauucucagcuuau

SEQ ID NO: 208695 - RNA, 19 nt, Homo sapiens
  misc_RNA (1)...(19): siRNA sense strand
ggauauccugcagauuauu

SEQ ID NO: 208696 - RNA, 19 nt, Homo sapiens
  misc_RNA (1)...(19): siRNA sense strand
agcaucaggccaaauguaa

SEQ ID NO: 208697 - RNA, 19 nt, Homo sapiens
  misc_RNA (1)...(19): siRNA sense strand
gcccuuugcuuggaucucu

SEQ ID NO: 208698 - RNA, 19 nt, Homo sapiens
  misc_RNA (1)...(19): siRNA sense strand
gcugaauguuuaugauacg

SEQ ID NO: 208699 - RNA, 19 nt, Homo sapiens
  misc_RNA (1)...(19): siRNA sense strand
agacuuugccaagguacua

SEQ ID NO: 208700 - RNA, 19 nt, Homo sapiens
  misc_RNA (1)...(19): siRNA sense strand
caagcaaguggcaaguuca

SEQ ID NO: 208701 - RNA, 19 nt, Homo sapiens
  misc_RNA (1)...(19): siRNA sense strand
agacaaguacagauaccuu

SEQ ID NO: 208702 - RNA, 19 nt, Homo sapiens
  misc_RNA (1)...(19): siRNA sense strand
gcaucauuucccuguguaa

SEQ ID NO: 208703 - RNA, 19 nt, Homo sapiens
  misc_RNA (1)...(19): siRNA sense strand
cugcaaagaguguccaauc

SEQ ID NO: 208704 - RNA, 19 nt, Homo sapiens
  misc_RNA (1)...(19): siRNA sense strand
cuuauaggacugccaugaa

SEQ ID NO: 208705 - RNA, 19 nt, Homo sapiens
  misc_RNA (1)...(19): siRNA sense strand
caaagaguguccaaucauu

SEQ ID NO: 208706 - RNA, 19 nt, Homo sapiens
  misc_RNA (1)...(19): siRNA sense strand
uagcugaccugaauaaugu

SEQ ID NO: 208707 - RNA, 19 nt, Homo sapiens
  misc_RNA (1)...(19): siRNA sense strand
gcaugauucuauccaaauu

SEQ ID NO: 208708 - RNA, 19 nt, Homo sapiens
  misc_RNA (1)...(19): siRNA sense strand
ugaacuggcugcugaaugu

SEQ ID NO: 208709 - RNA, 19 nt, Homo sapiens
  misc_RNA (1)...(19): siRNA sense strand
gauauccugcagauuauua

SEQ ID NO: 208710 - RNA, 19 nt, Homo sapiens
  misc_RNA (1)...(19): siRNA sense strand
gagaagauguucgagacuu

SEQ ID NO: 208711 - RNA, 19 nt, Homo sapiens
  misc_RNA (1)...(19): siRNA sense strand
gcacuuuaauuaugacauc

SEQ ID NO: 208712 - RNA, 19 nt, Homo sapiens
  misc_RNA (1)...(19): siRNA sense strand
guaaagcacauuuggaaga

SEQ ID NO: 208713 - RNA, 19 nt, Homo sapiens
  misc_RNA (1)...(19): siRNA sense strand
gaauauugcacuccgacua

SEQ ID NO: 208714 - RNA, 19 nt, Homo sapiens
  misc_RNA (1)...(19): siRNA sense strand
uuauaggacugccaugaaa

SEQ ID NO: 208715 - RNA, 19 nt, Homo sapiens
  misc_RNA (1)...(19): siRNA sense strand
gggugaaguugcauccuuu

SEQ ID NO: 208716 - RNA, 19 nt, Homo sapiens
  misc_RNA (1)...(19): siRNA sense strand
gcaagagcacaacaauuug

SEQ ID NO: 208717 - RNA, 19 nt, Homo sapiens
  misc_RNA (1)...(19): siRNA sense strand
gcacaacaauuuggucaac

SEQ ID NO: 208718 - RNA, 19 nt, Homo sapiens
  misc_RNA (1)...(19): siRNA sense strand
agcaagagcacaacaauuu

SEQ ID NO: 208719 - RNA, 19 nt, Homo sapiens
  misc_RNA (1)...(19): siRNA sense strand
agaagauguucgagacuuu

SEQ ID NO: 208720 - RNA, 19 nt, Homo sapiens
  misc_RNA (1)...(19): siRNA sense strand
gagcaagagcacaacaauu

SEQ ID NO: 208721 - RNA, 19 nt, Homo sapiens
  misc_RNA (1)...(19): siRNA sense strand
ucaagcaaguggcaaguuc

SEQ ID NO: 208722 - RNA, 19 nt, Homo sapiens
  misc_RNA (1)...(19): siRNA sense strand
ccacgagacucaaacaacu

SEQ ID NO: 208723 - RNA, 19 nt, Homo sapiens
  misc_RNA (1)...(19): siRNA sense strand
cagcacaaccucaagcaaa

SEQ ID NO: 208724 - RNA, 19 nt, Homo sapiens
  misc_RNA (1)...(19): siRNA sense strand
gcaaagaguguccaaucau

SEQ ID NO: 208725 - RNA, 19 nt, Homo sapiens
  misc_RNA (1)...(19): siRNA sense strand
auggauauccugcagauua

SEQ ID NO: 208726 - RNA, 19 nt, Homo sapiens
  misc_RNA (1)...(19): siRNA sense strand
uguaacaucugcaaagagu

SEQ ID NO: 208727 - RNA, 19 nt, Homo sapiens
  misc_RNA (1)...(19): siRNA sense strand
guccggagcugcuuccaau

SEQ ID NO: 208728 - RNA, 19 nt, Homo sapiens
  misc_RNA (1)...(19): siRNA sense strand
gcaaguggcaaguucaaca

SEQ ID NO: 208729 - RNA, 19 nt, Homo sapiens
  misc_RNA (1)...(19): siRNA sense strand
gcuuccaauuugcuaauaa

SEQ ID NO: 208730 - RNA, 19 nt, Homo sapiens
  misc_RNA (1)...(19): siRNA sense strand
uggaagacaaguacagaua

SEQ ID NO: 208731 - RNA, 19 nt, Homo sapiens
  misc_RNA (1)...(19): siRNA sense strand
ggauccguguccugucuuu

SEQ ID NO: 208732 - RNA, 19 nt, Homo sapiens
  misc_RNA (1)...(19): siRNA sense strand
gucuuuagcugaccugaau

SEQ ID NO: 208733 - RNA, 19 nt, Homo sapiens
  misc_RNA (1)...(19): siRNA sense strand
gacaaguacagauaccuuu

SEQ ID NO: 208734 - RNA, 19 nt, Homo sapiens
  misc_RNA (1)...(19): siRNA sense strand
ccaagcaucaggccaaaug

SEQ ID NO: 208735 - RNA, 19 nt, Homo sapiens
  misc_RNA (1)...(19): siRNA sense strand
ggagcaagagcacaacaau

SEQ ID NO: 208736 - RNA, 19 nt, Homo sapiens
  misc_RNA (1)...(19): siRNA sense strand
guguaaagcacauuuggaa

SEQ ID NO: 208737 - RNA, 19 nt, Homo sapiens
  misc_RNA (1)...(19): siRNA sense strand
caagacaguugggugaagu

SEQ ID NO: 208738 - RNA, 19 nt, Homo sapiens
  misc_RNA (1)...(19): siRNA sense strand
gaagauguucgagacuuug

SEQ ID NO: 208739 - RNA, 19 nt, Homo sapiens
  misc_RNA (1)...(19): siRNA sense strand
gucagauucucagcuuaua

SEQ ID NO: 208740 - RNA, 19 nt, Homo sapiens
  misc_RNA (1)...(19): siRNA sense strand
uaacaucugcaaagagugu

SEQ ID NO: 208741 - RNA, 19 nt, Homo sapiens
  misc_RNA (1)...(19): siRNA sense strand
cggagcugcuuccaauuug

SEQ ID NO: 208742 - RNA, 19 nt, Homo sapiens
  misc_RNA (1)...(19): siRNA sense strand
gaagacaaguacagauacc

SEQ ID NO: 208743 - RNA, 19 nt, Homo sapiens
  misc_RNA (1)...(19): siRNA sense strand
ccauggauauccugcagau

SEQ ID NO: 208744 - RNA, 19 nt, Homo sapiens
  misc_RNA (1)...(19): siRNA sense strand
ggcaucauuucccugugua

SEQ ID NO: 208745 - RNA, 19 nt, Homo sapiens
  misc_RNA (1)...(19): siRNA sense strand
uggauauccugcagauuau

SEQ ID NO: 208746 - RNA, 19 nt, Homo sapiens
  misc_RNA (1)...(19): siRNA sense strand
ggaagacaaguacagauac

SEQ ID NO: 208747 - RNA, 19 nt, Homo sapiens
  misc_RNA (1)...(19): siRNA sense strand
ugcaaagaguguccaauca

SEQ ID NO: 208748 - RNA, 19 nt, Homo sapiens
  misc_RNA (1)...(19): siRNA sense strand
guggauaugugucugaacu

SEQ ID NO: 208749 - RNA, 19 nt, Homo sapiens
  misc_RNA (1)...(19): siRNA sense strand
acuggcugcugaauguuua

SEQ ID NO: 208750 - RNA, 19 nt, Homo sapiens
  misc_RNA (1)...(19): siRNA sense strand
acuaucccaugguggaaua

SEQ ID NO: 208751 - RNA, 19 nt, Homo sapiens
  misc_RNA (1)...(19): siRNA sense strand
ccggagcugcuuccaauuu

SEQ ID NO: 208752 - RNA, 19 nt, Homo sapiens
  misc_RNA (1)...(19): siRNA sense strand
ccaaauuccaagacaguug

SEQ ID NO: 208753 - RNA, 19 nt, Homo sapiens
  misc_RNA (1)...(19): siRNA sense strand
cagaaacugccaagcauca

SEQ ID NO: 208754 - RNA, 19 nt, Homo sapiens
  misc_RNA (1)...(19): siRNA sense strand
uaugacaucugccaaagcu

SEQ ID NO: 208755 - RNA, 19 nt, Homo sapiens
  misc_RNA (1)...(19): siRNA sense strand
aaugucagauucucagcuu

SEQ ID NO: 208756 - RNA, 19 nt, Homo sapiens
  misc_RNA (1)...(19): siRNA sense strand
ucgagacuuugccaaggua

SEQ ID NO: 208757 - RNA, 19 nt, Homo sapiens
  misc_RNA (1)...(19): siRNA sense strand
gcaaaaggccauaaaaugc

SEQ ID NO: 208758 - RNA, 19 nt, Homo sapiens
  misc_RNA (1)...(19): siRNA sense strand
cugcaugauucuauccaaa

SEQ ID NO: 208759 - RNA, 19 nt, Homo sapiens
  misc_RNA (1)...(19): siRNA sense strand
uaaagcacauuuggaagac

SEQ ID NO: 208760 - RNA, 19 nt, Homo sapiens
  misc_RNA (1)...(19): siRNA sense strand
acaggagucuaaagcacuu

SEQ ID NO: 208761 - RNA, 19 nt, Homo sapiens
  misc_RNA (1)...(19): siRNA sense strand
acagauaccuuuucaagca

SEQ ID NO: 208762 - RNA, 19 nt, Homo sapiens
  misc_RNA (1)...(19): siRNA sense strand
aagcacauuuggaagacaa

SEQ ID NO: 208763 - RNA, 19 nt, Homo sapiens
  misc_RNA (1)...(19): siRNA sense strand
gcuaauaauaagccagaga

SEQ ID NO: 208764 - RNA, 19 nt, Homo sapiens
  misc_RNA (1)...(19): siRNA sense strand
caagagcacaacaauuugg

SEQ ID NO: 208765 - RNA, 19 nt, Homo sapiens
  misc_RNA (1)...(19): siRNA sense strand
ccugucagcugcaugugau

SEQ ID NO: 208766 - RNA, 19 nt, Homo sapiens
  misc_RNA (1)...(19): siRNA sense strand
gcugcugaauguuuaugau

SEQ ID NO: 208767 - RNA, 19 nt, Homo sapiens
  misc_RNA (1)...(19): siRNA sense strand
acagagcucuaccagucuu

SEQ ID NO: 208768 - RNA, 19 nt, Homo sapiens
  misc_RNA (1)...(19): siRNA sense strand
acaguugggugaaguugca

SEQ ID NO: 208769 - RNA, 19 nt, Homo sapiens
  misc_RNA (1)...(19): siRNA sense strand
guuugaccacuauuuauga

SEQ ID NO: 208770 - RNA, 19 nt, Homo sapiens
  misc_RNA (1)...(19): siRNA sense strand
gcuuauaggacugccauga

SEQ ID NO: 208771 - RNA, 19 nt, Homo sapiens
  misc_RNA (1)...(19): siRNA sense strand
caucaggccaaauguaaca

SEQ ID NO: 208772 - RNA, 19 nt, Homo sapiens
  misc_RNA (1)...(19): siRNA sense strand
gauucuauccaaauuccaa

SEQ ID NO: 208773 - RNA, 19 nt, Homo sapiens
  misc_RNA (1)...(19): siRNA sense strand
ggcaaguucaacaggauuu

SEQ ID NO: 208774 - RNA, 19 nt, Homo sapiens
  misc_RNA (1)...(19): siRNA sense strand
gaacuggcugcugaauguu

SEQ ID NO: 208775 - RNA, 19 nt, Homo sapiens
  misc_RNA (1)...(19): siRNA sense strand
cugcugaauguuuaugaua

SEQ ID NO: 208776 - RNA, 19 nt, Homo sapiens
  misc_RNA (1)...(19): siRNA sense strand
aagcaucaggccaaaugua

SEQ ID NO: 208777 - RNA, 19 nt, Homo sapiens
  misc_RNA (1)...(19): siRNA sense strand
uggcaucauuucccugugu

SEQ ID NO: 208778 - RNA, 19 nt, Homo sapiens
  misc_RNA (1)...(19): siRNA sense strand
ccaugaaacuccgaagacu

SEQ ID NO: 208779 - RNA, 19 nt, Homo sapiens
  misc_RNA (1)...(19): siRNA sense strand
auaauaagccagagaucga

SEQ ID NO: 208780 - RNA, 19 nt, Homo sapiens
  misc_RNA (1)...(19): siRNA sense strand
cuaauaauaagccagagau

SEQ ID NO: 208781 - RNA, 19 nt, Homo sapiens
  misc_RNA (1)...(19): siRNA sense strand
ugggugaaguugcauccuu

SEQ ID NO: 208782 - RNA, 19 nt, Homo sapiens
  misc_RNA (1)...(19): siRNA sense strand
caucauuucccuguguaaa

SEQ ID NO: 208783 - RNA, 19 nt, Homo sapiens
  misc_RNA (1)...(19): siRNA sense strand
gcguggauaugugucugaa

SEQ ID NO: 208784 - RNA, 19 nt, Homo sapiens
  misc_RNA (1)...(19): siRNA sense strand
gcacuaucccaugguggaa

SEQ ID NO: 208785 - RNA, 19 nt, Homo sapiens
  misc_RNA (1)...(19): siRNA sense strand
gagccugucagcugcaugu

SEQ ID NO: 208786 - RNA, 19 nt, Homo sapiens
  misc_RNA (1)...(19): siRNA sense strand
guacagauaccuuuucaag

SEQ ID NO: 208787 - RNA, 19 nt, Homo sapiens
  misc_RNA (1)...(19): siRNA sense strand
gucccucucugcguggaua

SEQ ID NO: 208788 - RNA, 19 nt, Homo sapiens
  misc_RNA (1)...(19): siRNA sense strand
ggagcugcuuccaauuugc

SEQ ID NO: 208789 - RNA, 19 nt, Homo sapiens
  misc_RNA (1)...(19): siRNA sense strand
uuagcugaccugaauaaug

SEQ ID NO: 208790 - RNA, 19 nt, Homo sapiens
  misc_RNA (1)...(19): siRNA sense strand
guggcaaguucaacaggau

SEQ ID NO: 208791 - RNA, 19 nt, Homo sapiens
  misc_RNA (1)...(19): siRNA sense strand
acaacaauuuggucaacgu

SEQ ID NO: 208792 - RNA, 19 nt, Homo sapiens
  misc_RNA (1)...(19): siRNA sense strand
gacuacaucaggagaagau

SEQ ID NO: 208793 - RNA, 19 nt, Homo sapiens
  misc_RNA (1)...(19): siRNA sense strand
uaauaagccagagaucgaa

SEQ ID NO: 208794 - RNA, 19 nt, Homo sapiens
  misc_RNA (1)...(19): siRNA sense strand
ugucagauucucagcuuau

SEQ ID NO: 208795 - RNA, 19 nt, Homo sapiens
  misc_RNA (1)...(19): siRNA sense strand
ggauauccugcagauuauu

SEQ ID NO: 208796 - RNA, 19 nt, Homo sapiens
  misc_RNA (1)...(19): siRNA sense strand
agcaucaggccaaauguaa

SEQ ID NO: 208797 - RNA, 19 nt, Homo sapiens
  misc_RNA (1)...(19): siRNA sense strand
gcccuuugcuuggaucucu

SEQ ID NO: 208798 - RNA, 19 nt, Homo sapiens
  misc_RNA (1)...(19): siRNA sense strand
gcugaauguuuaugauacg

SEQ ID NO: 208799 - RNA, 19 nt, Homo sapiens
  misc_RNA (1)...(19): siRNA sense strand
agacuuugccaagguacua

SEQ ID NO: 208800 - RNA, 19 nt, Homo sapiens
  misc_RNA (1)...(19): siRNA sense strand
caagcaaguggcaaguuca

SEQ ID NO: 208801 - RNA, 19 nt, Homo sapiens
  misc_RNA (1)...(19): siRNA sense strand
agacaaguacagauaccuu

SEQ ID NO: 208802 - RNA, 19 nt, Homo sapiens
  misc_RNA (1)...(19): siRNA sense strand
gcaucauuucccuguguaa

SEQ ID NO: 208803 - RNA, 19 nt, Homo sapiens
  misc_RNA (1)...(19): siRNA sense strand
cugcaaagaguguccaauc

SEQ ID NO: 208804 - RNA, 19 nt, Homo sapiens
  misc_RNA (1)...(19): siRNA sense strand
cuuauaggacugccaugaa

SEQ ID NO: 208805 - RNA, 19 nt, Homo sapiens
  misc_RNA (1)...(19): siRNA sense strand
caaagaguguccaaucauu

SEQ ID NO: 208806 - RNA, 19 nt, Homo sapiens
  misc_RNA (1)...(19): siRNA sense strand
uagcugaccugaauaaugu

SEQ ID NO: 208807 - RNA, 19 nt, Homo sapiens
  misc_RNA (1)...(19): siRNA sense strand
gcaugauucuauccaaauu

SEQ ID NO: 208808 - RNA, 19 nt, Homo sapiens
  misc_RNA (1)...(19): siRNA sense strand
ugaacuggcugcugaaugu

SEQ ID NO: 208809 - RNA, 19 nt, Homo sapiens
  misc_RNA (1)...(19): siRNA sense strand
gauauccugcagauuauua

SEQ ID NO: 208810 - RNA, 19 nt, Homo sapiens
  misc_RNA (1)...(19): siRNA sense strand
gagaagauguucgagacuu

SEQ ID NO: 208811 - RNA, 19 nt, Homo sapiens
  misc_RNA (1)...(19): siRNA sense strand
gcacuuuaauuaugacauc

SEQ ID NO: 208812 - RNA, 19 nt, Homo sapiens
  misc_RNA (1)...(19): siRNA sense strand
guaaagcacauuuggaaga

SEQ ID NO: 208813 - RNA, 19 nt, Homo sapiens
  misc_RNA (1)...(19): siRNA sense strand
gaauauugcacuccgacua

SEQ ID NO: 208814 - RNA, 19 nt, Homo sapiens
  misc_RNA (1)...(19): siRNA sense strand
uuauaggacugccaugaaa

SEQ ID NO: 208815 - RNA, 19 nt, Homo sapiens
  misc_RNA (1)...(19): siRNA sense strand
gggugaaguugcauccuuu

SEQ ID NO: 208816 - RNA, 19 nt, Homo sapiens
  misc_RNA (1)...(19): siRNA sense strand
gcaagagcacaacaauuug

SEQ ID NO: 208817 - RNA, 19 nt, Homo sapiens
  misc_RNA (1)...(19): siRNA sense strand
gcacaacaauuuggucaac

SEQ ID NO: 208818 - RNA, 19 nt, Homo sapiens
  misc_RNA (1)...(19): siRNA sense strand
agcaagagcacaacaauuu

SEQ ID NO: 208819 - RNA, 19 nt, Homo sapiens
  misc_RNA (1)...(19): siRNA sense strand
agaagauguucgagacuuu

SEQ ID NO: 208820 - RNA, 19 nt, Homo sapiens
  misc_RNA (1)...(19): siRNA sense strand
gagcaagagcacaacaauu

SEQ ID NO: 208821 - RNA, 19 nt, Homo sapiens
  misc_RNA (1)...(19): siRNA sense strand
ucaagcaaguggcaaguuc

SEQ ID NO: 208822 - RNA, 19 nt, Homo sapiens
  misc_RNA (1)...(19): siRNA sense strand
ccacgagacucaaacaacu

SEQ ID NO: 208823 - RNA, 19 nt, Homo sapiens
  misc_RNA (1)...(19): siRNA sense strand
cagcacaaccucaagcaaa

SEQ ID NO: 208824 - RNA, 19 nt, Homo sapiens
  misc_RNA (1)...(19): siRNA sense strand
gcaaagaguguccaaucau

SEQ ID NO: 208825 - RNA, 19 nt, Homo sapiens
  misc_RNA (1)...(19): siRNA sense strand
auggauauccugcagauua

SEQ ID NO: 208826 - RNA, 19 nt, Homo sapiens
  misc_RNA (1)...(19): siRNA sense strand
uguaacaucugcaaagagu

SEQ ID NO: 208827 - RNA, 19 nt, Homo sapiens
  misc_RNA (1)...(19): siRNA sense strand
guccggagcugcuuccaau

SEQ ID NO: 208828 - RNA, 19 nt, Homo sapiens
  misc_RNA (1)...(19): siRNA sense strand
gcaaguggcaaguucaaca

SEQ ID NO: 208829 - RNA, 19 nt, Homo sapiens
  misc_RNA (1)...(19): siRNA sense strand
gcuuccaauuugcuaauaa

SEQ ID NO: 208830 - RNA, 19 nt, Homo sapiens
  misc_RNA (1)...(19): siRNA sense strand
uggaagacaaguacagaua

SEQ ID NO: 208831 - RNA, 19 nt, Homo sapiens
  misc_RNA (1)...(19): siRNA sense strand
ggauccguguccugucuuu

SEQ ID NO: 208832 - RNA, 19 nt, Homo sapiens
  misc_RNA (1)...(19): siRNA sense strand
gucuuuagcugaccugaau

SEQ ID NO: 208833 - RNA, 19 nt, Homo sapiens
  misc_RNA (1)...(19): siRNA sense strand
gacaaguacagauaccuuu

SEQ ID NO: 208834 - RNA, 19 nt, Homo sapiens
  misc_RNA (1)...(19): siRNA sense strand
ccaagcaucaggccaaaug

SEQ ID NO: 208835 - RNA, 19 nt, Homo sapiens
  misc_RNA (1)...(19): siRNA sense strand
ggagcaagagcacaacaau

SEQ ID NO: 208836 - RNA, 19 nt, Homo sapiens
  misc_RNA (1)...(19): siRNA sense strand
guguaaagcacauuuggaa

SEQ ID NO: 208837 - RNA, 19 nt, Homo sapiens
  misc_RNA (1)...(19): siRNA sense strand
caagacaguugggugaagu

SEQ ID NO: 208838 - RNA, 19 nt, Homo sapiens
  misc_RNA (1)...(19): siRNA sense strand
gaagauguucgagacuuug

SEQ ID NO: 208839 - RNA, 19 nt, Homo sapiens
  misc_RNA (1)...(19): siRNA sense strand
gucagauucucagcuuaua

SEQ ID NO: 208840 - RNA, 19 nt, Homo sapiens
  misc_RNA (1)...(19): siRNA sense strand
uaacaucugcaaagagugu

SEQ ID NO: 208841 - RNA, 19 nt, Homo sapiens
  misc_RNA (1)...(19): siRNA sense strand
cggagcugcuuccaauuug

SEQ ID NO: 208842 - RNA, 19 nt, Homo sapiens
  misc_RNA (1)...(19): siRNA sense strand
gaagacaaguacagauacc

SEQ ID NO: 208843 - RNA, 19 nt, Homo sapiens
  misc_RNA (1)...(19): siRNA sense strand
ccauggauauccugcagau

SEQ ID NO: 208844 - RNA, 19 nt, Homo sapiens
  misc_RNA (1)...(19): siRNA sense strand
ggcaucauuucccugugua

SEQ ID NO: 208845 - RNA, 19 nt, Homo sapiens
  misc_RNA (1)...(19): siRNA sense strand
uggauauccugcagauuau

SEQ ID NO: 208846 - RNA, 19 nt, Homo sapiens
  misc_RNA (1)...(19): siRNA sense strand
ggaagacaaguacagauac

SEQ ID NO: 208847 - RNA, 19 nt, Homo sapiens
  misc_RNA (1)...(19): siRNA sense strand
ugcaaagaguguccaauca

SEQ ID NO: 208848 - RNA, 19 nt, Homo sapiens
  misc_RNA (1)...(19): siRNA sense strand
guggauaugugucugaacu

SEQ ID NO: 208849 - RNA, 19 nt, Homo sapiens
  misc_RNA (1)...(19): siRNA sense strand
acuggcugcugaauguuua

SEQ ID NO: 208850 - RNA, 19 nt, Homo sapiens
  misc_RNA (1)...(19): siRNA sense strand
acuaucccaugguggaaua

SEQ ID NO: 208851 - RNA, 19 nt, Homo sapiens
  misc_RNA (1)...(19): siRNA sense strand
ccggagcugcuuccaauuu

SEQ ID NO: 208852 - RNA, 19 nt, Homo sapiens
  misc_RNA (1)...(19): siRNA sense strand
ccaaauuccaagacaguug

SEQ ID NO: 208853 - RNA, 19 nt, Homo sapiens
  misc_RNA (1)...(19): siRNA sense strand
cagaaacugccaagcauca

SEQ ID NO: 208854 - RNA, 19 nt, Homo sapiens
  misc_RNA (1)...(19): siRNA sense strand
uaugacaucugccaaagcu

SEQ ID NO: 208855 - RNA, 19 nt, Homo sapiens
  misc_RNA (1)...(19): siRNA sense strand
aaugucagauucucagcuu

SEQ ID NO: 208856 - RNA, 19 nt, Homo sapiens
  misc_RNA (1)...(19): siRNA sense strand
ucgagacuuugccaaggua

SEQ ID NO: 208857 - RNA, 19 nt, Homo sapiens
  misc_RNA (1)...(19): siRNA sense strand
gcaaaaggccauaaaaugc

SEQ ID NO: 208858 - RNA, 19 nt, Homo sapiens
  misc_RNA (1)...(19): siRNA sense strand
cugcaugauucuauccaaa

SEQ ID NO: 208859 - RNA, 19 nt, Homo sapiens
  misc_RNA (1)...(19): siRNA sense strand
uaaagcacauuuggaagac

SEQ ID NO: 208860 - RNA, 19 nt, Homo sapiens
  misc_RNA (1)...(19): siRNA sense strand
acaggagucuaaagcacuu

SEQ ID NO: 208861 - RNA, 19 nt, Homo sapiens
  misc_RNA (1)...(19): siRNA sense strand
acagauaccuuuucaagca

SEQ ID NO: 208862 - RNA, 19 nt, Homo sapiens
  misc_RNA (1)...(19): siRNA sense strand
aagcacauuuggaagacaa

SEQ ID NO: 208863 - RNA, 19 nt, Homo sapiens
  misc_RNA (1)...(19): siRNA sense strand
gcuaauaauaagccagaga

SEQ ID NO: 208864 - RNA, 19 nt, Homo sapiens
  misc_RNA (1)...(19): siRNA sense strand
caagagcacaacaauuugg

SEQ ID NO: 208865 - RNA, 19 nt, Homo sapiens
  misc_RNA (1)...(19): siRNA sense strand
ccugucagcugcaugugau

SEQ ID NO: 208866 - RNA, 19 nt, Homo sapiens
  misc_RNA (1)...(19): siRNA sense strand
gcugcugaauguuuaugau

SEQ ID NO: 208867 - RNA, 19 nt, Homo sapiens
  misc_RNA (1)...(19): siRNA sense strand
acagagcucuaccagucuu

SEQ ID NO: 208868 - RNA, 19 nt, Homo sapiens
  misc_RNA (1)...(19): siRNA sense strand
acaguugggugaaguugca

SEQ ID NO: 208869 - RNA, 19 nt, Homo sapiens
  misc_RNA (1)...(19): siRNA sense strand
guuugaccacuauuuauga

SEQ ID NO: 208870 - RNA, 19 nt, Homo sapiens
  misc_RNA (1)...(19): siRNA sense strand
gcuuauaggacugccauga

SEQ ID NO: 208871 - RNA, 19 nt, Homo sapiens
  misc_RNA (1)...(19): siRNA sense strand
caucaggccaaauguaaca

SEQ ID NO: 208872 - RNA, 19 nt, Homo sapiens
  misc_RNA (1)...(19): siRNA sense strand
gauucuauccaaauuccaa

SEQ ID NO: 208873 - RNA, 19 nt, Homo sapiens
  misc_RNA (1)...(19): siRNA sense strand
ggcaaguucaacaggauuu

SEQ ID NO: 208874 - RNA, 19 nt, Homo sapiens
  misc_RNA (1)...(19): siRNA sense strand
gaacuggcugcugaauguu

SEQ ID NO: 208875 - RNA, 19 nt, Homo sapiens
  misc_RNA (1)...(19): siRNA sense strand
cugcugaauguuuaugaua

SEQ ID NO: 208876 - RNA, 19 nt, Homo sapiens
  misc_RNA (1)...(19): siRNA sense strand
aagcaucaggccaaaugua

SEQ ID NO: 208877 - RNA, 19 nt, Homo sapiens
  misc_RNA (1)...(19): siRNA sense strand
uggcaucauuucccugugu

SEQ ID NO: 208878 - RNA, 19 nt, Homo sapiens
  misc_RNA (1)...(19): siRNA sense strand
ccaugaaacuccgaagacu

SEQ ID NO: 208879 - RNA, 19 nt, Homo sapiens
  misc_RNA (1)...(19): siRNA sense strand
auaauaagccagagaucga

SEQ ID NO: 208880 - RNA, 19 nt, Homo sapiens
  misc_RNA (1)...(19): siRNA sense strand
cuaauaauaagccagagau

SEQ ID NO: 208881 - RNA, 19 nt, Homo sapiens
  misc_RNA (1)...(19): siRNA sense strand
ugggugaaguugcauccuu

SEQ ID NO: 208882 - RNA, 19 nt, Homo sapiens
  misc_RNA (1)...(19): siRNA sense strand
caucauuucccuguguaaa

SEQ ID NO: 208883 - RNA, 19 nt, Homo sapiens
  misc_RNA (1)...(19): siRNA sense strand
gcguggauaugugucugaa

SEQ ID NO: 208884 - RNA, 19 nt, Homo sapiens
  misc_RNA (1)...(19): siRNA sense strand
gcacuaucccaugguggaa

SEQ ID NO: 208885 - RNA, 19 nt, Homo sapiens
  misc_RNA (1)...(19): siRNA sense strand
gagccugucagcugcaugu

SEQ ID NO: 208886 - RNA, 19 nt, Homo sapiens
  misc_RNA (1)...(19): siRNA sense strand
guacagauaccuuuucaag

SEQ ID NO: 208887 - RNA, 19 nt, Homo sapiens
  misc_RNA (1)...(19): siRNA sense strand
gucccucucugcguggaua

SEQ ID NO: 208888 - RNA, 19 nt, Homo sapiens
  misc_RNA (1)...(19): siRNA sense strand
ggagcugcuuccaauuugc

SEQ ID NO: 208889 - RNA, 19 nt, Homo sapiens
  misc_RNA (1)...(19): siRNA sense strand
uuagcugaccugaauaaug

SEQ ID NO: 208890 - RNA, 19 nt, Homo sapiens
  misc_RNA (1)...(19): siRNA sense strand
guggcaaguucaacaggau

SEQ ID NO: 208891 - RNA, 19 nt, Homo sapiens
  misc_RNA (1)...(19): siRNA sense strand
acaacaauuuggucaacgu

SEQ ID NO: 208892 - RNA, 19 nt, Homo sapiens
  misc_RNA (1)...(19): siRNA sense strand
gacuacaucaggagaagau

SEQ ID NO: 208893 - RNA, 19 nt, Homo sapiens
  misc_RNA (1)...(19): siRNA sense strand
uaauaagccagagaucgaa

SEQ ID NO: 208894 - RNA, 19 nt, Homo sapiens
  misc_RNA (1)...(19): siRNA sense strand
ugucagauucucagcuuau

SEQ ID NO: 208895 - RNA, 19 nt, Homo sapiens
  misc_RNA (1)...(19): siRNA sense strand
ggauauccugcagauuauu

SEQ ID NO: 208896 - RNA, 19 nt, Homo sapiens
  misc_RNA (1)...(19): siRNA sense strand
agcaucaggccaaauguaa

SEQ ID NO: 208897 - RNA, 19 nt, Homo sapiens
  misc_RNA (1)...(19): siRNA sense strand
gcccuuugcuuggaucucu

SEQ ID NO: 208898 - RNA, 19 nt, Homo sapiens
  misc_RNA (1)...(19): siRNA sense strand
gcugaauguuuaugauacg

SEQ ID NO: 208899 - RNA, 19 nt, Homo sapiens
  misc_RNA (1)...(19): siRNA sense strand
agacuuugccaagguacua

SEQ ID NO: 208900 - RNA, 19 nt, Homo sapiens
  misc_RNA (1)...(19): siRNA sense strand
caagcaaguggcaaguuca

SEQ ID NO: 208901 - RNA, 19 nt, Homo sapiens
  misc_RNA (1)...(19): siRNA sense strand
agacaaguacagauaccuu

SEQ ID NO: 208902 - RNA, 19 nt, Homo sapiens
  misc_RNA (1)...(19): siRNA sense strand
gcaucauuucccuguguaa

SEQ ID NO: 208903 - RNA, 19 nt, Homo sapiens
  misc_RNA (1)...(19): siRNA sense strand
cugcaaagaguguccaauc

SEQ ID NO: 208904 - RNA, 19 nt, Homo sapiens
  misc_RNA (1)...(19): siRNA sense strand
cuuauaggacugccaugaa

SEQ ID NO: 208905 - RNA, 19 nt, Homo sapiens
  misc_RNA (1)...(19): siRNA sense strand
caaagaguguccaaucauu

SEQ ID NO: 208906 - RNA, 19 nt, Homo sapiens
  misc_RNA (1)...(19): siRNA sense strand
uagcugaccugaauaaugu

SEQ ID NO: 208907 - RNA, 19 nt, Homo sapiens
  misc_RNA (1)...(19): siRNA sense strand
gcaugauucuauccaaauu

SEQ ID NO: 208908 - RNA, 19 nt, Homo sapiens
  misc_RNA (1)...(19): siRNA sense strand
ugaacuggcugcugaaugu

SEQ ID NO: 208909 - RNA, 19 nt, Homo sapiens
  misc_RNA (1)...(19): siRNA sense strand
gauauccugcagauuauua

SEQ ID NO: 208910 - RNA, 19 nt, Homo sapiens
  misc_RNA (1)...(19): siRNA sense strand
gagaagauguucgagacuu

SEQ ID NO: 208911 - RNA, 19 nt, Homo sapiens
  misc_RNA (1)...(19): siRNA sense strand
gcacuuuaauuaugacauc

SEQ ID NO: 208912 - RNA, 19 nt, Homo sapiens
  misc_RNA (1)...(19): siRNA sense strand
guaaagcacauuuggaaga

SEQ ID NO: 208913 - RNA, 19 nt, Homo sapiens
  misc_RNA (1)...(19): siRNA sense strand
gaauauugcacuccgacua

SEQ ID NO: 208914 - RNA, 19 nt, Homo sapiens
  misc_RNA (1)...(19): siRNA sense strand
uuauaggacugccaugaaa

SEQ ID NO: 208915 - RNA, 19 nt, Homo sapiens
  misc_RNA (1)...(19): siRNA sense strand
gggugaaguugcauccuuu

SEQ ID NO: 208916 - RNA, 19 nt, Homo sapiens
  misc_RNA (1)...(19): siRNA sense strand
gcaagagcacaacaauuug

SEQ ID NO: 208917 - RNA, 19 nt, Homo sapiens
  misc_RNA (1)...(19): siRNA sense strand
gcacaacaauuuggucaac

SEQ ID NO: 208918 - RNA, 19 nt, Homo sapiens
  misc_RNA (1)...(19): siRNA sense strand
agcaagagcacaacaauuu

SEQ ID NO: 208919 - RNA, 19 nt, Homo sapiens
  misc_RNA (1)...(19): siRNA sense strand
agaagauguucgagacuuu

SEQ ID NO: 208920 - RNA, 19 nt, Homo sapiens
  misc_RNA (1)...(19): siRNA sense strand
gagcaagagcacaacaauu

SEQ ID NO: 208921 - RNA, 19 nt, Homo sapiens
  misc_RNA (1)...(19): siRNA sense strand
ucaagcaaguggcaaguuc

SEQ ID NO: 208922 - RNA, 19 nt, Homo sapiens
  misc_RNA (1)...(19): siRNA sense strand
ccacgagacucaaacaacu

SEQ ID NO: 208923 - RNA, 19 nt, Homo sapiens
  misc_RNA (1)...(19): siRNA sense strand
cagcacaaccucaagcaaa

SEQ ID NO: 208924 - RNA, 19 nt, Homo sapiens
  misc_RNA (1)...(19): siRNA sense strand
gcaaagaguguccaaucau

SEQ ID NO: 208925 - RNA, 19 nt, Homo sapiens
  misc_RNA (1)...(19): siRNA sense strand
auggauauccugcagauua

SEQ ID NO: 208926 - RNA, 19 nt, Homo sapiens
  misc_RNA (1)...(19): siRNA sense strand
uguaacaucugcaaagagu

SEQ ID NO: 208927 - RNA, 19 nt, Homo sapiens
  misc_RNA (1)...(19): siRNA sense strand
guccggagcugcuuccaau

SEQ ID NO: 208928 - RNA, 19 nt, Homo sapiens
  misc_RNA (1)...(19): siRNA sense strand
gcaaguggcaaguucaaca

SEQ ID NO: 208929 - RNA, 19 nt, Homo sapiens
  misc_RNA (1)...(19): siRNA sense strand
gcuuccaauuugcuaauaa

SEQ ID NO: 208930 - RNA, 19 nt, Homo sapiens
  misc_RNA (1)...(19): siRNA sense strand
uggaagacaaguacagaua

SEQ ID NO: 208931 - RNA, 19 nt, Homo sapiens
  misc_RNA (1)...(19): siRNA sense strand
ggauccguguccugucuuu

SEQ ID NO: 208932 - RNA, 19 nt, Homo sapiens
  misc_RNA (1)...(19): siRNA sense strand
gucuuuagcugaccugaau

SEQ ID NO: 208933 - RNA, 19 nt, Homo sapiens
  misc_RNA (1)...(19): siRNA sense strand
gacaaguacagauaccuuu

SEQ ID NO: 208934 - RNA, 19 nt, Homo sapiens
  misc_RNA (1)...(19): siRNA sense strand
ccaagcaucaggccaaaug

SEQ ID NO: 208935 - RNA, 19 nt, Homo sapiens
  misc_RNA (1)...(19): siRNA sense strand
ggagcaagagcacaacaau

SEQ ID NO: 208936 - RNA, 19 nt, Homo sapiens
  misc_RNA (1)...(19): siRNA sense strand
guguaaagcacauuuggaa

SEQ ID NO: 208937 - RNA, 19 nt, Homo sapiens
  misc_RNA (1)...(19): siRNA sense strand
caagacaguugggugaagu

SEQ ID NO: 208938 - RNA, 19 nt, Homo sapiens
  misc_RNA (1)...(19): siRNA sense strand
gaagauguucgagacuuug

SEQ ID NO: 208939 - RNA, 19 nt, Homo sapiens
  misc_RNA (1)...(19): siRNA sense strand
gucagauucucagcuuaua

SEQ ID NO: 208940 - RNA, 19 nt, Homo sapiens
  misc_RNA (1)...(19): siRNA sense strand
uaacaucugcaaagagugu

SEQ ID NO: 208941 - RNA, 19 nt, Homo sapiens
  misc_RNA (1)...(19): siRNA sense strand
cggagcugcuuccaauuug

SEQ ID NO: 208942 - RNA, 19 nt, Homo sapiens
  misc_RNA (1)...(19): siRNA sense strand
gaagacaaguacagauacc

SEQ ID NO: 208943 - RNA, 19 nt, Homo sapiens
  misc_RNA (1)...(19): siRNA sense strand
ccauggauauccugcagau

SEQ ID NO: 208944 - RNA, 19 nt, Homo sapiens
  misc_RNA (1)...(19): siRNA sense strand
ggcaucauuucccugugua

SEQ ID NO: 208945 - RNA, 19 nt, Homo sapiens
  misc_RNA (1)...(19): siRNA sense strand
uggauauccugcagauuau

SEQ ID NO: 208946 - RNA, 19 nt, Homo sapiens
  misc_RNA (1)...(19): siRNA sense strand
ggaagacaaguacagauac

SEQ ID NO: 208947 - RNA, 19 nt, Homo sapiens
  misc_RNA (1)...(19): siRNA sense strand
ugcaaagaguguccaauca

SEQ ID NO: 208948 - RNA, 19 nt, Homo sapiens
  misc_RNA (1)...(19): siRNA sense strand
guggauaugugucugaacu

SEQ ID NO: 208949 - RNA, 19 nt, Homo sapiens
  misc_RNA (1)...(19): siRNA sense strand
acuggcugcugaauguuua

SEQ ID NO: 208950 - RNA, 19 nt, Homo sapiens
  misc_RNA (1)...(19): siRNA sense strand
acuaucccaugguggaaua

SEQ ID NO: 208951 - RNA, 19 nt, Homo sapiens
  misc_RNA (1)...(19): siRNA sense strand
ccggagcugcuuccaauuu

SEQ ID NO: 208952 - RNA, 19 nt, Homo sapiens
  misc_RNA (1)...(19): siRNA sense strand
ccaaauuccaagacaguug

SEQ ID NO: 208953 - RNA, 19 nt, Homo sapiens
  misc_RNA (1)...(19): siRNA sense strand
cagaaacugccaagcauca

SEQ ID NO: 208954 - RNA, 19 nt, Homo sapiens
  misc_RNA (1)...(19): siRNA sense strand
uaugacaucugccaaagcu

SEQ ID NO: 208955 - RNA, 19 nt, Homo sapiens
  misc_RNA (1)...(19): siRNA sense strand
aaugucagauucucagcuu

SEQ ID NO: 208956 - RNA, 19 nt, Homo sapiens
  misc_RNA (1)...(19): siRNA sense strand
ucgagacuuugccaaggua

SEQ ID NO: 208957 - RNA, 19 nt, Homo sapiens
  misc_RNA (1)...(19): siRNA sense strand
gcaaaaggccauaaaaugc

SEQ ID NO: 208958 - RNA, 19 nt, Homo sapiens
  misc_RNA (1)...(19): siRNA sense strand
cugcaugauucuauccaaa

SEQ ID NO: 208959 - RNA, 19 nt, Homo sapiens
  misc_RNA (1)...(19): siRNA sense strand
uaaagcacauuuggaagac

SEQ ID NO: 208960 - RNA, 19 nt, Homo sapiens
  misc_RNA (1)...(19): siRNA sense strand
acaggagucuaaagcacuu

SEQ ID NO: 208961 - RNA, 19 nt, Homo sapiens
  misc_RNA (1)...(19): siRNA sense strand
acagauaccuuuucaagca

SEQ ID NO: 208962 - RNA, 19 nt, Homo sapiens
  misc_RNA (1)...(19): siRNA sense strand
aagcacauuuggaagacaa

SEQ ID NO: 208963 - RNA, 19 nt, Homo sapiens
  misc_RNA (1)...(19): siRNA sense strand
gcuaauaauaagccagaga

SEQ ID NO: 208964 - RNA, 19 nt, Homo sapiens
  misc_RNA (1)...(19): siRNA sense strand
caagagcacaacaauuugg

SEQ ID NO: 208965 - RNA, 19 nt, Homo sapiens
  misc_RNA (1)...(19): siRNA sense strand
ccugucagcugcaugugau

SEQ ID NO: 208966 - RNA, 19 nt, Homo sapiens
  misc_RNA (1)...(19): siRNA sense strand
gcugcugaauguuuaugau

SEQ ID NO: 208967 - RNA, 19 nt, Homo sapiens
  misc_RNA (1)...(19): siRNA sense strand
acagagcucuaccagucuu

SEQ ID NO: 208968 - RNA, 19 nt, Homo sapiens
  misc_RNA (1)...(19): siRNA sense strand
acaguugggugaaguugca

SEQ ID NO: 208969 - RNA, 19 nt, Homo sapiens
  misc_RNA (1)...(19): siRNA sense strand
guuugaccacuauuuauga

SEQ ID NO: 208970 - RNA, 19 nt, Homo sapiens
  misc_RNA (1)...(19): siRNA sense strand
gcuuauaggacugccauga

SEQ ID NO: 208971 - RNA, 19 nt, Homo sapiens
  misc_RNA (1)...(19): siRNA sense strand
caucaggccaaauguaaca

SEQ ID NO: 208972 - RNA, 19 nt, Homo sapiens
  misc_RNA (1)...(19): siRNA sense strand
gauucuauccaaauuccaa

SEQ ID NO: 208973 - RNA, 19 nt, Homo sapiens
  misc_RNA (1)...(19): siRNA sense strand
ggcaaguucaacaggauuu

SEQ ID NO: 208974 - RNA, 19 nt, Homo sapiens
  misc_RNA (1)...(19): siRNA sense strand
gaacuggcugcugaauguu

SEQ ID NO: 208975 - RNA, 19 nt, Homo sapiens
  misc_RNA (1)...(19): siRNA sense strand
cugcugaauguuuaugaua

SEQ ID NO: 208976 - RNA, 19 nt, Homo sapiens
  misc_RNA (1)...(19): siRNA sense strand
aagcaucaggccaaaugua

SEQ ID NO: 208977 - RNA, 19 nt, Homo sapiens
  misc_RNA (1)...(19): siRNA sense strand
uggcaucauuucccugugu

SEQ ID NO: 208978 - RNA, 19 nt, Homo sapiens
  misc_RNA (1)...(19): siRNA sense strand
ccaugaaacuccgaagacu

SEQ ID NO: 208979 - RNA, 19 nt, Homo sapiens
  misc_RNA (1)...(19): siRNA sense strand
auaauaagccagagaucga

SEQ ID NO: 208980 - RNA, 19 nt, Homo sapiens
  misc_RNA (1)...(19): siRNA sense strand
cuaauaauaagccagagau

SEQ ID NO: 208981 - RNA, 19 nt, Homo sapiens
  misc_RNA (1)...(19): siRNA sense strand
ugggugaaguugcauccuu

SEQ ID NO: 208982 - RNA, 19 nt, Homo sapiens
  misc_RNA (1)...(19): siRNA sense strand
caucauuucccuguguaaa

SEQ ID NO: 208983 - RNA, 19 nt, Homo sapiens
  misc_RNA (1)...(19): siRNA sense strand
gcguggauaugugucugaa

SEQ ID NO: 208984 - RNA, 19 nt, Homo sapiens
  misc_RNA (1)...(19): siRNA sense strand
gcacuaucccaugguggaa

SEQ ID NO: 208985 - RNA, 19 nt, Homo sapiens
  misc_RNA (1)...(19): siRNA sense strand
gagccugucagcugcaugu

SEQ ID NO: 208986 - RNA, 19 nt, Homo sapiens
  misc_RNA (1)...(19): siRNA sense strand
guacagauaccuuuucaag

SEQ ID NO: 208987 - RNA, 19 nt, Homo sapiens
  misc_RNA (1)...(19): siRNA sense strand
gucccucucugcguggaua

SEQ ID NO: 208988 - RNA, 19 nt, Homo sapiens
  misc_RNA (1)...(19): siRNA sense strand
ggagcugcuuccaauuugc

SEQ ID NO: 208989 - RNA, 19 nt, Homo sapiens
  misc_RNA (1)...(19): siRNA sense strand
uuagcugaccugaauaaug

SEQ ID NO: 208990 - RNA, 19 nt, Homo sapiens
  misc_RNA (1)...(19): siRNA sense strand
guggcaaguucaacaggau

SEQ ID NO: 208991 - RNA, 19 nt, Homo sapiens
  misc_RNA (1)...(19): siRNA sense strand
acaacaauuuggucaacgu

SEQ ID NO: 208992 - RNA, 19 nt, Homo sapiens
  misc_RNA (1)...(19): siRNA sense strand
gacuacaucaggagaagau

SEQ ID NO: 208993 - RNA, 19 nt, Homo sapiens
  misc_RNA (1)...(19): siRNA sense strand
uaauaagccagagaucgaa

SEQ ID NO: 208994 - RNA, 19 nt, Homo sapiens
  misc_RNA (1)...(19): siRNA sense strand
ugucagauucucagcuuau

SEQ ID NO: 208995 - RNA, 19 nt, Homo sapiens
  misc_RNA (1)...(19): siRNA sense strand
ggauauccugcagauuauu

SEQ ID NO: 208996 - RNA, 19 nt, Homo sapiens
  misc_RNA (1)...(19): siRNA sense strand
agcaucaggccaaauguaa

SEQ ID NO: 208997 - RNA, 19 nt, Homo sapiens
  misc_RNA (1)...(19): siRNA sense strand
gcccuuugcuuggaucucu

SEQ ID NO: 208998 - RNA, 19 nt, Homo sapiens
  misc_RNA (1)...(19): siRNA sense strand
gcugaauguuuaugauacg

SEQ ID NO: 208999 - RNA, 19 nt, Homo sapiens
  misc_RNA (1)...(19): siRNA sense strand
agacuuugccaagguacua

SEQ ID NO: 209000 - RNA, 19 nt, Homo sapiens
  misc_RNA (1)...(19): siRNA sense strand
caagcaaguggcaaguuca

SEQ ID NO: 209001 - RNA, 19 nt, Homo sapiens
  misc_RNA (1)...(19): siRNA sense strand
agacaaguacagauaccuu

SEQ ID NO: 209002 - RNA, 19 nt, Homo sapiens
  misc_RNA (1)...(19): siRNA sense strand
gcaucauuucccuguguaa

SEQ ID NO: 209003 - RNA, 19 nt, Homo sapiens
  misc_RNA (1)...(19): siRNA sense strand
cugcaaagaguguccaauc

SEQ ID NO: 209004 - RNA, 19 nt, Homo sapiens
  misc_RNA (1)...(19): siRNA sense strand
cuuauaggacugccaugaa

SEQ ID NO: 209005 - RNA, 19 nt, Homo sapiens
  misc_RNA (1)...(19): siRNA sense strand
caaagaguguccaaucauu

SEQ ID NO: 209006 - RNA, 19 nt, Homo sapiens
  misc_RNA (1)...(19): siRNA sense strand
uagcugaccugaauaaugu

SEQ ID NO: 209007 - RNA, 19 nt, Homo sapiens
  misc_RNA (1)...(19): siRNA sense strand
gcaugauucuauccaaauu

SEQ ID NO: 209008 - RNA, 19 nt, Homo sapiens
  misc_RNA (1)...(19): siRNA sense strand
ugaacuggcugcugaaugu

SEQ ID NO: 209009 - RNA, 19 nt, Homo sapiens
  misc_RNA (1)...(19): siRNA sense strand
gauauccugcagauuauua

SEQ ID NO: 209010 - RNA, 19 nt, Homo sapiens
  misc_RNA (1)...(19): siRNA sense strand
gagaagauguucgagacuu

SEQ ID NO: 209011 - RNA, 19 nt, Homo sapiens
  misc_RNA (1)...(19): siRNA sense strand
gcacuuuaauuaugacauc

SEQ ID NO: 209012 - RNA, 19 nt, Homo sapiens
  misc_RNA (1)...(19): siRNA sense strand
guaaagcacauuuggaaga

SEQ ID NO: 209013 - RNA, 19 nt, Homo sapiens
  misc_RNA (1)...(19): siRNA sense strand
gaauauugcacuccgacua

SEQ ID NO: 209014 - RNA, 19 nt, Homo sapiens
  misc_RNA (1)...(19): siRNA sense strand
uuauaggacugccaugaaa

SEQ ID NO: 209015 - RNA, 19 nt, Homo sapiens
  misc_RNA (1)...(19): siRNA sense strand
gggugaaguugcauccuuu

SEQ ID NO: 209016 - RNA, 19 nt, Homo sapiens
  misc_RNA (1)...(19): siRNA sense strand
gcaagagcacaacaauuug

SEQ ID NO: 209017 - RNA, 19 nt, Homo sapiens
  misc_RNA (1)...(19): siRNA sense strand
gcacaacaauuuggucaac

SEQ ID NO: 209018 - RNA, 19 nt, Homo sapiens
  misc_RNA (1)...(19): siRNA sense strand
agcaagagcacaacaauuu

SEQ ID NO: 209019 - RNA, 19 nt, Homo sapiens
  misc_RNA (1)...(19): siRNA sense strand
agaagauguucgagacuuu

SEQ ID NO: 209020 - RNA, 19 nt, Homo sapiens
  misc_RNA (1)...(19): siRNA sense strand
gagcaagagcacaacaauu

SEQ ID NO: 209021 - RNA, 19 nt, Homo sapiens
  misc_RNA (1)...(19): siRNA sense strand
ucaagcaaguggcaaguuc

SEQ ID NO: 209022 - RNA, 19 nt, Homo sapiens
  misc_RNA (1)...(19): siRNA sense strand
ccacgagacucaaacaacu

SEQ ID NO: 209023 - RNA, 19 nt, Homo sapiens
  misc_RNA (1)...(19): siRNA sense strand
cagcacaaccucaagcaaa

SEQ ID NO: 209024 - RNA, 19 nt, Homo sapiens
  misc_RNA (1)...(19): siRNA sense strand
gcaaagaguguccaaucau

SEQ ID NO: 209025 - RNA, 19 nt, Homo sapiens
  misc_RNA (1)...(19): siRNA sense strand
auggauauccugcagauua

SEQ ID NO: 209026 - RNA, 19 nt, Homo sapiens
  misc_RNA (1)...(19): siRNA sense strand
uguaacaucugcaaagagu

SEQ ID NO: 209027 - RNA, 19 nt, Homo sapiens
  misc_RNA (1)...(19): siRNA sense strand
guccggagcugcuuccaau

SEQ ID NO: 209028 - RNA, 19 nt, Homo sapiens
  misc_RNA (1)...(19): siRNA sense strand
gcaaguggcaaguucaaca

SEQ ID NO: 209029 - RNA, 19 nt, Homo sapiens
  misc_RNA (1)...(19): siRNA sense strand
gcuuccaauuugcuaauaa

SEQ ID NO: 209030 - RNA, 19 nt, Homo sapiens
  misc_RNA (1)...(19): siRNA sense strand
uggaagacaaguacagaua

SEQ ID NO: 209031 - RNA, 19 nt, Homo sapiens
  misc_RNA (1)...(19): siRNA sense strand
ggauccguguccugucuuu

SEQ ID NO: 209032 - RNA, 19 nt, Homo sapiens
  misc_RNA (1)...(19): siRNA sense strand
gucuuuagcugaccugaau

SEQ ID NO: 209033 - RNA, 19 nt, Homo sapiens
  misc_RNA (1)...(19): siRNA sense strand
gacaaguacagauaccuuu

SEQ ID NO: 209034 - RNA, 19 nt, Homo sapiens
  misc_RNA (1)...(19): siRNA sense strand
ccaagcaucaggccaaaug

SEQ ID NO: 209035 - RNA, 19 nt, Homo sapiens
  misc_RNA (1)...(19): siRNA sense strand
ggagcaagagcacaacaau

SEQ ID NO: 209036 - RNA, 19 nt, Homo sapiens
  misc_RNA (1)...(19): siRNA sense strand
guguaaagcacauuuggaa

SEQ ID NO: 209037 - RNA, 19 nt, Homo sapiens
  misc_RNA (1)...(19): siRNA sense strand
caagacaguugggugaagu

SEQ ID NO: 209038 - RNA, 19 nt, Homo sapiens
  misc_RNA (1)...(19): siRNA sense strand
gaagauguucgagacuuug

SEQ ID NO: 209039 - RNA, 19 nt, Homo sapiens
  misc_RNA (1)...(19): siRNA sense strand
gucagauucucagcuuaua

SEQ ID NO: 209040 - RNA, 19 nt, Homo sapiens
  misc_RNA (1)...(19): siRNA sense strand
uaacaucugcaaagagugu

SEQ ID NO: 209041 - RNA, 19 nt, Homo sapiens
  misc_RNA (1)...(19): siRNA sense strand
cggagcugcuuccaauuug

SEQ ID NO: 209042 - RNA, 19 nt, Homo sapiens
  misc_RNA (1)...(19): siRNA sense strand
gaagacaaguacagauacc

SEQ ID NO: 209043 - RNA, 19 nt, Homo sapiens
  misc_RNA (1)...(19): siRNA sense strand
ccauggauauccugcagau

SEQ ID NO: 209044 - RNA, 19 nt, Homo sapiens
  misc_RNA (1)...(19): siRNA sense strand
ggcaucauuucccugugua

SEQ ID NO: 209045 - RNA, 19 nt, Homo sapiens
  misc_RNA (1)...(19): siRNA sense strand
uggauauccugcagauuau

SEQ ID NO: 209046 - RNA, 19 nt, Homo sapiens
  misc_RNA (1)...(19): siRNA sense strand
ggaagacaaguacagauac

SEQ ID NO: 209047 - RNA, 19 nt, Homo sapiens
  misc_RNA (1)...(19): siRNA sense strand
ugcaaagaguguccaauca

SEQ ID NO: 209048 - RNA, 19 nt, Homo sapiens
  misc_RNA (1)...(19): siRNA sense strand
guggauaugugucugaacu

SEQ ID NO: 209049 - RNA, 19 nt, Homo sapiens
  misc_RNA (1)...(19): siRNA sense strand
acuggcugcugaauguuua

SEQ ID NO: 209050 - RNA, 19 nt, Homo sapiens
  misc_RNA (1)...(19): siRNA sense strand
acuaucccaugguggaaua

SEQ ID NO: 209051 - RNA, 19 nt, Homo sapiens
  misc_RNA (1)...(19): siRNA sense strand
ccggagcugcuuccaauuu

SEQ ID NO: 209052 - RNA, 19 nt, Homo sapiens
  misc_RNA (1)...(19): siRNA sense strand
ccaaauuccaagacaguug

SEQ ID NO: 209053 - RNA, 19 nt, Homo sapiens
  misc_RNA (1)...(19): siRNA sense strand
cagaaacugccaagcauca

SEQ ID NO: 209054 - RNA, 19 nt, Homo sapiens
  misc_RNA (1)...(19): siRNA sense strand
uaugacaucugccaaagcu

SEQ ID NO: 209055 - RNA, 19 nt, Homo sapiens
  misc_RNA (1)...(19): siRNA sense strand
aaugucagauucucagcuu

SEQ ID NO: 209056 - RNA, 19 nt, Homo sapiens
  misc_RNA (1)...(19): siRNA sense strand
ucgagacuuugccaaggua

SEQ ID NO: 209057 - RNA, 19 nt, Homo sapiens
  misc_RNA (1)...(19): siRNA sense strand
gcaaaaggccauaaaaugc

SEQ ID NO: 209058 - RNA, 19 nt, Homo sapiens
  misc_RNA (1)...(19): siRNA sense strand
cugcaugauucuauccaaa

SEQ ID NO: 209059 - RNA, 19 nt, Homo sapiens
  misc_RNA (1)...(19): siRNA sense strand
uaaagcacauuuggaagac

SEQ ID NO: 209060 - RNA, 19 nt, Homo sapiens
  misc_RNA (1)...(19): siRNA sense strand
acaggagucuaaagcacuu

SEQ ID NO: 209061 - RNA, 19 nt, Homo sapiens
  misc_RNA (1)...(19): siRNA sense strand
acagauaccuuuucaagca

SEQ ID NO: 209062 - RNA, 19 nt, Homo sapiens
  misc_RNA (1)...(19): siRNA sense strand
aagcacauuuggaagacaa

SEQ ID NO: 209063 - RNA, 19 nt, Homo sapiens
  misc_RNA (1)...(19): siRNA sense strand
gcuaauaauaagccagaga

SEQ ID NO: 209064 - RNA, 19 nt, Homo sapiens
  misc_RNA (1)...(19): siRNA sense strand
caagagcacaacaauuugg

SEQ ID NO: 209065 - RNA, 19 nt, Homo sapiens
  misc_RNA (1)...(19): siRNA sense strand
ccugucagcugcaugugau

SEQ ID NO: 209066 - RNA, 19 nt, Homo sapiens
  misc_RNA (1)...(19): siRNA sense strand
gcugcugaauguuuaugau

SEQ ID NO: 209067 - RNA, 19 nt, Homo sapiens
  misc_RNA (1)...(19): siRNA sense strand
acagagcucuaccagucuu

SEQ ID NO: 209068 - RNA, 19 nt, Homo sapiens
  misc_RNA (1)...(19): siRNA sense strand
acaguugggugaaguugca

SEQ ID NO: 209069 - RNA, 19 nt, Homo sapiens
  misc_RNA (1)...(19): siRNA sense strand
guuugaccacuauuuauga

SEQ ID NO: 209070 - RNA, 19 nt, Homo sapiens
  misc_RNA (1)...(19): siRNA sense strand
gcuuauaggacugccauga

SEQ ID NO: 209071 - RNA, 19 nt, Homo sapiens
  misc_RNA (1)...(19): siRNA sense strand
caucaggccaaauguaaca

SEQ ID NO: 209072 - RNA, 19 nt, Homo sapiens
  misc_RNA (1)...(19): siRNA sense strand
gauucuauccaaauuccaa

SEQ ID NO: 209073 - RNA, 19 nt, Homo sapiens
  misc_RNA (1)...(19): siRNA sense strand
ggcaaguucaacaggauuu

SEQ ID NO: 209074 - RNA, 19 nt, Homo sapiens
  misc_RNA (1)...(19): siRNA sense strand
gaacuggcugcugaauguu

SEQ ID NO: 209075 - RNA, 19 nt, Homo sapiens
  misc_RNA (1)...(19): siRNA sense strand
cugcugaauguuuaugaua

SEQ ID NO: 209076 - RNA, 19 nt, Homo sapiens
  misc_RNA (1)...(19): siRNA sense strand
aagcaucaggccaaaugua

SEQ ID NO: 209077 - RNA, 19 nt, Homo sapiens
  misc_RNA (1)...(19): siRNA sense strand
uggcaucauuucccugugu

SEQ ID NO: 209078 - RNA, 19 nt, Homo sapiens
  misc_RNA (1)...(19): siRNA sense strand
ccaugaaacuccgaagacu

SEQ ID NO: 209079 - RNA, 19 nt, Homo sapiens
  misc_RNA (1)...(19): siRNA sense strand
auaauaagccagagaucga

SEQ ID NO: 209080 - RNA, 19 nt, Homo sapiens
  misc_RNA (1)...(19): siRNA sense strand
cuaauaauaagccagagau

SEQ ID NO: 209081 - RNA, 19 nt, Homo sapiens
  misc_RNA (1)...(19): siRNA sense strand
ugggugaaguugcauccuu

SEQ ID NO: 209082 - RNA, 19 nt, Homo sapiens
  misc_RNA (1)...(19): siRNA sense strand
caucauuucccuguguaaa

SEQ ID NO: 209083 - RNA, 19 nt, Homo sapiens
  misc_RNA (1)...(19): siRNA sense strand
gcguggauaugugucugaa

SEQ ID NO: 209084 - RNA, 19 nt, Homo sapiens
  misc_RNA (1)...(19): siRNA sense strand
gcacuaucccaugguggaa

SEQ ID NO: 209085 - RNA, 19 nt, Homo sapiens
  misc_RNA (1)...(19): siRNA sense strand
gagccugucagcugcaugu

SEQ ID NO: 209086 - RNA, 19 nt, Homo sapiens
  misc_RNA (1)...(19): siRNA sense strand
guacagauaccuuuucaag

SEQ ID NO: 209087 - RNA, 19 nt, Homo sapiens
  misc_RNA (1)...(19): siRNA sense strand
gucccucucugcguggaua

SEQ ID NO: 209088 - RNA, 19 nt, Homo sapiens
  misc_RNA (1)...(19): siRNA sense strand
ggagcugcuuccaauuugc

SEQ ID NO: 209089 - RNA, 19 nt, Homo sapiens
  misc_RNA (1)...(19): siRNA sense strand
uuagcugaccugaauaaug

SEQ ID NO: 209090 - RNA, 19 nt, Homo sapiens
  misc_RNA (1)...(19): siRNA sense strand
guggcaaguucaacaggau

SEQ ID NO: 209091 - RNA, 19 nt, Homo sapiens
  misc_RNA (1)...(19): siRNA sense strand
acaacaauuuggucaacgu

SEQ ID NO: 209092 - RNA, 19 nt, Homo sapiens
  misc_RNA (1)...(19): siRNA sense strand
gacuacaucaggagaagau

SEQ ID NO: 209093 - RNA, 19 nt, Homo sapiens
  misc_RNA (1)...(19): siRNA sense strand
uaauaagccagagaucgaa

SEQ ID NO: 209094 - RNA, 19 nt, Homo sapiens
  misc_RNA (1)...(19): siRNA sense strand
ugucagauucucagcuuau

SEQ ID NO: 209095 - RNA, 19 nt, Homo sapiens
  misc_RNA (1)...(19): siRNA sense strand
ggauauccugcagauuauu

SEQ ID NO: 209096 - RNA, 19 nt, Homo sapiens
  misc_RNA (1)...(19): siRNA sense strand
agcaucaggccaaauguaa

SEQ ID NO: 209097 - RNA, 19 nt, Homo sapiens
  misc_RNA (1)...(19): siRNA sense strand
gcccuuugcuuggaucucu

SEQ ID NO: 209098 - RNA, 19 nt, Homo sapiens
  misc_RNA (1)...(19): siRNA sense strand
gcugaauguuuaugauacg

SEQ ID NO: 209099 - RNA, 19 nt, Homo sapiens
  misc_RNA (1)...(19): siRNA sense strand
agacuuugccaagguacua

SEQ ID NO: 209100 - RNA, 19 nt, Homo sapiens
  misc_RNA (1)...(19): siRNA sense strand
caagcaaguggcaaguuca

SEQ ID NO: 209101 - RNA, 19 nt, Homo sapiens
  misc_RNA (1)...(19): siRNA sense strand
agacaaguacagauaccuu

SEQ ID NO: 209102 - RNA, 19 nt, Homo sapiens
  misc_RNA (1)...(19): siRNA sense strand
gcaucauuucccuguguaa

SEQ ID NO: 209103 - RNA, 19 nt, Homo sapiens
  misc_RNA (1)...(19): siRNA sense strand
cugcaaagaguguccaauc

SEQ ID NO: 209104 - RNA, 19 nt, Homo sapiens
  misc_RNA (1)...(19): siRNA sense strand
cuuauaggacugccaugaa

SEQ ID NO: 209105 - RNA, 19 nt, Homo sapiens
  misc_RNA (1)...(19): siRNA sense strand
caaagaguguccaaucauu

SEQ ID NO: 209106 - RNA, 19 nt, Homo sapiens
  misc_RNA (1)...(19): siRNA sense strand
uagcugaccugaauaaugu

SEQ ID NO: 209107 - RNA, 19 nt, Homo sapiens
  misc_RNA (1)...(19): siRNA sense strand
gcaugauucuauccaaauu

SEQ ID NO: 209108 - RNA, 19 nt, Homo sapiens
  misc_RNA (1)...(19): siRNA sense strand
ugaacuggcugcugaaugu

SEQ ID NO: 209109 - RNA, 19 nt, Homo sapiens
  misc_RNA (1)...(19): siRNA sense strand
gauauccugcagauuauua

SEQ ID NO: 209110 - RNA, 19 nt, Homo sapiens
  misc_RNA (1)...(19): siRNA sense strand
gagaagauguucgagacuu

SEQ ID NO: 209111 - RNA, 19 nt, Homo sapiens
  misc_RNA (1)...(19): siRNA sense strand
gcacuuuaauuaugacauc

SEQ ID NO: 209112 - RNA, 19 nt, Homo sapiens
  misc_RNA (1)...(19): siRNA sense strand
guaaagcacauuuggaaga

SEQ ID NO: 209113 - RNA, 19 nt, Homo sapiens
  misc_RNA (1)...(19): siRNA sense strand
gaauauugcacuccgacua

SEQ ID NO: 209114 - RNA, 19 nt, Homo sapiens
  misc_RNA (1)...(19): siRNA sense strand
uuauaggacugccaugaaa

SEQ ID NO: 209115 - RNA, 19 nt, Homo sapiens
  misc_RNA (1)...(19): siRNA sense strand
gggugaaguugcauccuuu

SEQ ID NO: 209116 - RNA, 19 nt, Homo sapiens
  misc_RNA (1)...(19): siRNA sense strand
gcaagagcacaacaauuug

SEQ ID NO: 209117 - RNA, 19 nt, Homo sapiens
  misc_RNA (1)...(19): siRNA sense strand
gcacaacaauuuggucaac

SEQ ID NO: 209118 - RNA, 19 nt, Homo sapiens
  misc_RNA (1)...(19): siRNA sense strand
agcaagagcacaacaauuu

SEQ ID NO: 209119 - RNA, 19 nt, Homo sapiens
  misc_RNA (1)...(19): siRNA sense strand
agaagauguucgagacuuu

SEQ ID NO: 209120 - RNA, 19 nt, Homo sapiens
  misc_RNA (1)...(19): siRNA sense strand
gagcaagagcacaacaauu

SEQ ID NO: 209121 - RNA, 19 nt, Homo sapiens
  misc_RNA (1)...(19): siRNA sense strand
ucaagcaaguggcaaguuc

SEQ ID NO: 209122 - RNA, 19 nt, Homo sapiens
  misc_RNA (1)...(19): siRNA sense strand
ccacgagacucaaacaacu

SEQ ID NO: 209123 - RNA, 19 nt, Homo sapiens
  misc_RNA (1)...(19): siRNA sense strand
cagcacaaccucaagcaaa

SEQ ID NO: 209124 - RNA, 19 nt, Homo sapiens
  misc_RNA (1)...(19): siRNA sense strand
gcaaagaguguccaaucau

SEQ ID NO: 209125 - RNA, 19 nt, Homo sapiens
  misc_RNA (1)...(19): siRNA sense strand
auggauauccugcagauua

SEQ ID NO: 209126 - RNA, 19 nt, Homo sapiens
  misc_RNA (1)...(19): siRNA sense strand
uguaacaucugcaaagagu

SEQ ID NO: 209127 - RNA, 19 nt, Homo sapiens
  misc_RNA (1)...(19): siRNA sense strand
guccggagcugcuuccaau

SEQ ID NO: 209128 - RNA, 19 nt, Homo sapiens
  misc_RNA (1)...(19): siRNA sense strand
gcaaguggcaaguucaaca

SEQ ID NO: 209129 - RNA, 19 nt, Homo sapiens
  misc_RNA (1)...(19): siRNA sense strand
gcuuccaauuugcuaauaa

SEQ ID NO: 209130 - RNA, 19 nt, Homo sapiens
  misc_RNA (1)...(19): siRNA sense strand
uggaagacaaguacagaua

SEQ ID NO: 209131 - RNA, 19 nt, Homo sapiens
  misc_RNA (1)...(19): siRNA sense strand
ggauccguguccugucuuu

SEQ ID NO: 209132 - RNA, 19 nt, Homo sapiens
  misc_RNA (1)...(19): siRNA sense strand
gucuuuagcugaccugaau

SEQ ID NO: 209133 - RNA, 19 nt, Homo sapiens
  misc_RNA (1)...(19): siRNA sense strand
gacaaguacagauaccuuu

SEQ ID NO: 209134 - RNA, 19 nt, Homo sapiens
  misc_RNA (1)...(19): siRNA sense strand
ccaagcaucaggccaaaug

SEQ ID NO: 209135 - RNA, 19 nt, Homo sapiens
  misc_RNA (1)...(19): siRNA sense strand
ggagcaagagcacaacaau

SEQ ID NO: 209136 - RNA, 19 nt, Homo sapiens
  misc_RNA (1)...(19): siRNA sense strand
guguaaagcacauuuggaa

SEQ ID NO: 209137 - RNA, 19 nt, Homo sapiens
  misc_RNA (1)...(19): siRNA sense strand
caagacaguugggugaagu

SEQ ID NO: 209138 - RNA, 19 nt, Homo sapiens
  misc_RNA (1)...(19): siRNA sense strand
gaagauguucgagacuuug

SEQ ID NO: 209139 - RNA, 19 nt, Homo sapiens
  misc_RNA (1)...(19): siRNA sense strand
gucagauucucagcuuaua

SEQ ID NO: 209140 - RNA, 19 nt, Homo sapiens
  misc_RNA (1)...(19): siRNA sense strand
uaacaucugcaaagagugu

SEQ ID NO: 209141 - RNA, 19 nt, Homo sapiens
  misc_RNA (1)...(19): siRNA sense strand
cggagcugcuuccaauuug

SEQ ID NO: 209142 - RNA, 19 nt, Homo sapiens
  misc_RNA (1)...(19): siRNA sense strand
gaagacaaguacagauacc

SEQ ID NO: 209143 - RNA, 19 nt, Homo sapiens
  misc_RNA (1)...(19): siRNA sense strand
ccauggauauccugcagau

SEQ ID NO: 209144 - RNA, 19 nt, Homo sapiens
  misc_RNA (1)...(19): siRNA sense strand
ggcaucauuucccugugua

SEQ ID NO: 209145 - RNA, 19 nt, Homo sapiens
  misc_RNA (1)...(19): siRNA sense strand
uggauauccugcagauuau

SEQ ID NO: 209146 - RNA, 19 nt, Homo sapiens
  misc_RNA (1)...(19): siRNA sense strand
ggaagacaaguacagauac

SEQ ID NO: 209147 - RNA, 19 nt, Homo sapiens
  misc_RNA (1)...(19): siRNA sense strand
ugcaaagaguguccaauca

SEQ ID NO: 209148 - RNA, 19 nt, Homo sapiens
  misc_RNA (1)...(19): siRNA sense strand
guggauaugugucugaacu

SEQ ID NO: 209149 - RNA, 19 nt, Homo sapiens
  misc_RNA (1)...(19): siRNA sense strand
acuggcugcugaauguuua

SEQ ID NO: 209150 - RNA, 19 nt, Homo sapiens
  misc_RNA (1)...(19): siRNA sense strand
acuaucccaugguggaaua

SEQ ID NO: 209151 - RNA, 19 nt, Homo sapiens
  misc_RNA (1)...(19): siRNA sense strand
ccggagcugcuuccaauuu

SEQ ID NO: 209152 - RNA, 19 nt, Homo sapiens
  misc_RNA (1)...(19): siRNA sense strand
ccaaauuccaagacaguug

SEQ ID NO: 209153 - RNA, 19 nt, Homo sapiens
  misc_RNA (1)...(19): siRNA sense strand
cagaaacugccaagcauca

SEQ ID NO: 209154 - RNA, 19 nt, Homo sapiens
  misc_RNA (1)...(19): siRNA sense strand
uaugacaucugccaaagcu

SEQ ID NO: 209155 - RNA, 19 nt, Homo sapiens
  misc_RNA (1)...(19): siRNA sense strand
aaugucagauucucagcuu

SEQ ID NO: 209156 - RNA, 19 nt, Homo sapiens
  misc_RNA (1)...(19): siRNA sense strand
ucgagacuuugccaaggua

SEQ ID NO: 209157 - RNA, 19 nt, Homo sapiens
  misc_RNA (1)...(19): siRNA sense strand
gcaaaaggccauaaaaugc

SEQ ID NO: 209158 - RNA, 19 nt, Homo sapiens
  misc_RNA (1)...(19): siRNA sense strand
cugcaugauucuauccaaa

SEQ ID NO: 209159 - RNA, 19 nt, Homo sapiens
  misc_RNA (1)...(19): siRNA sense strand
uaaagcacauuuggaagac

SEQ ID NO: 209160 - RNA, 19 nt, Homo sapiens
  misc_RNA (1)...(19): siRNA sense strand
acaggagucuaaagcacuu

SEQ ID NO: 209161 - RNA, 19 nt, Homo sapiens
  misc_RNA (1)...(19): siRNA sense strand
acagauaccuuuucaagca

SEQ ID NO: 209162 - RNA, 19 nt, Homo sapiens
  misc_RNA (1)...(19): siRNA sense strand
aagcacauuuggaagacaa

SEQ ID NO: 209163 - RNA, 19 nt, Homo sapiens
  misc_RNA (1)...(19): siRNA sense strand
gcuaauaauaagccagaga

SEQ ID NO: 209164 - RNA, 19 nt, Homo sapiens
  misc_RNA (1)...(19): siRNA sense strand
caagagcacaacaauuugg

SEQ ID NO: 209165 - RNA, 19 nt, Homo sapiens
  misc_RNA (1)...(19): siRNA sense strand
ccugucagcugcaugugau

SEQ ID NO: 209166 - RNA, 19 nt, Homo sapiens
  misc_RNA (1)...(19): siRNA sense strand
gcugcugaauguuuaugau

SEQ ID NO: 209167 - RNA, 19 nt, Homo sapiens
  misc_RNA (1)...(19): siRNA sense strand
acagagcucuaccagucuu

SEQ ID NO: 209168 - RNA, 19 nt, Homo sapiens
  misc_RNA (1)...(19): siRNA sense strand
acaguugggugaaguugca

SEQ ID NO: 209169 - RNA, 19 nt, Homo sapiens
  misc_RNA (1)...(19): siRNA sense strand
guuugaccacuauuuauga

SEQ ID NO: 209170 - RNA, 19 nt, Homo sapiens
  misc_RNA (1)...(19): siRNA sense strand
gcuuauaggacugccauga

SEQ ID NO: 209171 - RNA, 19 nt, Homo sapiens
  misc_RNA (1)...(19): siRNA sense strand
caucaggccaaauguaaca

SEQ ID NO: 209172 - RNA, 19 nt, Homo sapiens
  misc_RNA (1)...(19): siRNA sense strand
gauucuauccaaauuccaa

SEQ ID NO: 209173 - RNA, 19 nt, Homo sapiens
  misc_RNA (1)...(19): siRNA sense strand
ggcaaguucaacaggauuu

SEQ ID NO: 209174 - RNA, 19 nt, Homo sapiens
  misc_RNA (1)...(19): siRNA sense strand
gaacuggcugcugaauguu

SEQ ID NO: 209175 - RNA, 19 nt, Homo sapiens
  misc_RNA (1)...(19): siRNA sense strand
cugcugaauguuuaugaua

SEQ ID NO: 209176 - RNA, 19 nt, Homo sapiens
  misc_RNA (1)...(19): siRNA sense strand
aagcaucaggccaaaugua

SEQ ID NO: 209177 - RNA, 19 nt, Homo sapiens
  misc_RNA (1)...(19): siRNA sense strand
uggcaucauuucccugugu

SEQ ID NO: 209178 - RNA, 19 nt, Homo sapiens
  misc_RNA (1)...(19): siRNA sense strand
ccaugaaacuccgaagacu

SEQ ID NO: 209179 - RNA, 19 nt, Homo sapiens
  misc_RNA (1)...(19): siRNA sense strand
auaauaagccagagaucga

SEQ ID NO: 209180 - RNA, 19 nt, Homo sapiens
  misc_RNA (1)...(19): siRNA sense strand
cuaauaauaagccagagau

SEQ ID NO: 209181 - RNA, 19 nt, Homo sapiens
  misc_RNA (1)...(19): siRNA sense strand
ugggugaaguugcauccuu

SEQ ID NO: 209182 - RNA, 19 nt, Homo sapiens
  misc_RNA (1)...(19): siRNA sense strand
caucauuucccuguguaaa

SEQ ID NO: 209183 - RNA, 19 nt, Homo sapiens
  misc_RNA (1)...(19): siRNA sense strand
gcguggauaugugucugaa

SEQ ID NO: 209184 - RNA, 19 nt, Homo sapiens
  misc_RNA (1)...(19): siRNA sense strand
gcacuaucccaugguggaa

SEQ ID NO: 209185 - RNA, 19 nt, Homo sapiens
  misc_RNA (1)...(19): siRNA sense strand
gagccugucagcugcaugu

SEQ ID NO: 209186 - RNA, 19 nt, Homo sapiens
  misc_RNA (1)...(19): siRNA sense strand
guacagauaccuuuucaag

SEQ ID NO: 209187 - RNA, 19 nt, Homo sapiens
  misc_RNA (1)...(19): siRNA sense strand
gucccucucugcguggaua

SEQ ID NO: 209188 - RNA, 19 nt, Homo sapiens
  misc_RNA (1)...(19): siRNA sense strand
ggagcugcuuccaauuugc

SEQ ID NO: 209189 - RNA, 19 nt, Homo sapiens
  misc_RNA (1)...(19): siRNA sense strand
uuagcugaccugaauaaug

SEQ ID NO: 209190 - RNA, 19 nt, Homo sapiens
  misc_RNA (1)...(19): siRNA sense strand
guggcaaguucaacaggau

SEQ ID NO: 209191 - RNA, 19 nt, Homo sapiens
  misc_RNA (1)...(19): siRNA sense strand
acaacaauuuggucaacgu

SEQ ID NO: 209192 - RNA, 19 nt, Homo sapiens
  misc_RNA (1)...(19): siRNA sense strand
gacuacaucaggagaagau

SEQ ID NO: 209193 - RNA, 19 nt, Homo sapiens
  misc_RNA (1)...(19): siRNA sense strand
uaauaagccagagaucgaa

SEQ ID NO: 209194 - RNA, 19 nt, Homo sapiens
  misc_RNA (1)...(19): siRNA sense strand
ugucagauucucagcuuau

SEQ ID NO: 209195 - RNA, 19 nt, Homo sapiens
  misc_RNA (1)...(19): siRNA sense strand
ggauauccugcagauuauu

SEQ ID NO: 209196 - RNA, 19 nt, Homo sapiens
  misc_RNA (1)...(19): siRNA sense strand
agcaucaggccaaauguaa

SEQ ID NO: 209197 - RNA, 19 nt, Homo sapiens
  misc_RNA (1)...(19): siRNA sense strand
gcccuuugcuuggaucucu

SEQ ID NO: 209198 - RNA, 19 nt, Homo sapiens
  misc_RNA (1)...(19): siRNA sense strand
gcugaauguuuaugauacg

SEQ ID NO: 209199 - RNA, 19 nt, Homo sapiens
  misc_RNA (1)...(19): siRNA sense strand
agacuuugccaagguacua

SEQ ID NO: 209200 - RNA, 19 nt, Homo sapiens
  misc_RNA (1)...(19): siRNA sense strand
caagcaaguggcaaguuca

SEQ ID NO: 209201 - RNA, 19 nt, Homo sapiens
  misc_RNA (1)...(19): siRNA sense strand
agacaaguacagauaccuu

SEQ ID NO: 209202 - RNA, 19 nt, Homo sapiens
  misc_RNA (1)...(19): siRNA sense strand
gcaucauuucccuguguaa

SEQ ID NO: 209203 - RNA, 19 nt, Homo sapiens
  misc_RNA (1)...(19): siRNA sense strand
cugcaaagaguguccaauc

SEQ ID NO: 209204 - RNA, 19 nt, Homo sapiens
  misc_RNA (1)...(19): siRNA sense strand
cuuauaggacugccaugaa

SEQ ID NO: 209205 - RNA, 19 nt, Homo sapiens
  misc_RNA (1)...(19): siRNA sense strand
caaagaguguccaaucauu

SEQ ID NO: 209206 - RNA, 19 nt, Homo sapiens
  misc_RNA (1)...(19): siRNA sense strand
uagcugaccugaauaaugu

SEQ ID NO: 209207 - RNA, 19 nt, Homo sapiens
  misc_RNA (1)...(19): siRNA sense strand
gcaugauucuauccaaauu

SEQ ID NO: 209208 - RNA, 19 nt, Homo sapiens
  misc_RNA (1)...(19): siRNA sense strand
ugaacuggcugcugaaugu

SEQ ID NO: 209209 - RNA, 19 nt, Homo sapiens
  misc_RNA (1)...(19): siRNA sense strand
gauauccugcagauuauua

SEQ ID NO: 209210 - RNA, 19 nt, Homo sapiens
  misc_RNA (1)...(19): siRNA sense strand
gagaagauguucgagacuu

SEQ ID NO: 209211 - RNA, 19 nt, Homo sapiens
  misc_RNA (1)...(19): siRNA sense strand
gcacuuuaauuaugacauc

SEQ ID NO: 209212 - RNA, 19 nt, Homo sapiens
  misc_RNA (1)...(19): siRNA sense strand
guaaagcacauuuggaaga

SEQ ID NO: 209213 - RNA, 19 nt, Homo sapiens
  misc_RNA (1)...(19): siRNA sense strand
gaauauugcacuccgacua

SEQ ID NO: 209214 - RNA, 19 nt, Homo sapiens
  misc_RNA (1)...(19): siRNA sense strand
uuauaggacugccaugaaa

SEQ ID NO: 209215 - RNA, 19 nt, Homo sapiens
  misc_RNA (1)...(19): siRNA sense strand
gggugaaguugcauccuuu

SEQ ID NO: 209216 - RNA, 19 nt, Homo sapiens
  misc_RNA (1)...(19): siRNA sense strand
gcaagagcacaacaauuug

SEQ ID NO: 209217 - RNA, 19 nt, Homo sapiens
  misc_RNA (1)...(19): siRNA sense strand
gcacaacaauuuggucaac

SEQ ID NO: 209218 - RNA, 19 nt, Homo sapiens
  misc_RNA (1)...(19): siRNA sense strand
agcaagagcacaacaauuu

SEQ ID NO: 209219 - RNA, 19 nt, Homo sapiens
  misc_RNA (1)...(19): siRNA sense strand
agaagauguucgagacuuu

SEQ ID NO: 209220 - RNA, 19 nt, Homo sapiens
  misc_RNA (1)...(19): siRNA sense strand
gagcaagagcacaacaauu

SEQ ID NO: 209221 - RNA, 19 nt, Homo sapiens
  misc_RNA (1)...(19): siRNA sense strand
ucaagcaaguggcaaguuc

SEQ ID NO: 209222 - RNA, 19 nt, Homo sapiens
  misc_RNA (1)...(19): siRNA sense strand
ccacgagacucaaacaacu

SEQ ID NO: 209223 - RNA, 19 nt, Homo sapiens
  misc_RNA (1)...(19): siRNA sense strand
cagcacaaccucaagcaaa

SEQ ID NO: 209224 - RNA, 19 nt, Homo sapiens
  misc_RNA (1)...(19): siRNA sense strand
gcaaagaguguccaaucau

SEQ ID NO: 209225 - RNA, 19 nt, Homo sapiens
  misc_RNA (1)...(19): siRNA sense strand
auggauauccugcagauua

SEQ ID NO: 209226 - RNA, 19 nt, Homo sapiens
  misc_RNA (1)...(19): siRNA sense strand
uguaacaucugcaaagagu

SEQ ID NO: 209227 - RNA, 19 nt, Homo sapiens
  misc_RNA (1)...(19): siRNA sense strand
guccggagcugcuuccaau

SEQ ID NO: 209228 - RNA, 19 nt, Homo sapiens
  misc_RNA (1)...(19): siRNA sense strand
gcaaguggcaaguucaaca

SEQ ID NO: 209229 - RNA, 19 nt, Homo sapiens
  misc_RNA (1)...(19): siRNA sense strand
gcuuccaauuugcuaauaa

SEQ ID NO: 209230 - RNA, 19 nt, Homo sapiens
  misc_RNA (1)...(19): siRNA sense strand
uggaagacaaguacagaua

SEQ ID NO: 209231 - RNA, 19 nt, Homo sapiens
  misc_RNA (1)...(19): siRNA sense strand
ggauccguguccugucuuu

SEQ ID NO: 209232 - RNA, 19 nt, Homo sapiens
  misc_RNA (1)...(19): siRNA sense strand
gucuuuagcugaccugaau

SEQ ID NO: 209233 - RNA, 19 nt, Homo sapiens
  misc_RNA (1)...(19): siRNA sense strand
gacaaguacagauaccuuu

SEQ ID NO: 209234 - RNA, 19 nt, Homo sapiens
  misc_RNA (1)...(19): siRNA sense strand
ccaagcaucaggccaaaug

SEQ ID NO: 209235 - RNA, 19 nt, Homo sapiens
  misc_RNA (1)...(19): siRNA sense strand
ggagcaagagcacaacaau

SEQ ID NO: 209236 - RNA, 19 nt, Homo sapiens
  misc_RNA (1)...(19): siRNA sense strand
guguaaagcacauuuggaa

SEQ ID NO: 209237 - RNA, 19 nt, Homo sapiens
  misc_RNA (1)...(19): siRNA sense strand
caagacaguugggugaagu

SEQ ID NO: 209238 - RNA, 19 nt, Homo sapiens
  misc_RNA (1)...(19): siRNA sense strand
gaagauguucgagacuuug

SEQ ID NO: 209239 - RNA, 19 nt, Homo sapiens
  misc_RNA (1)...(19): siRNA sense strand
gucagauucucagcuuaua

SEQ ID NO: 209240 - RNA, 19 nt, Homo sapiens
  misc_RNA (1)...(19): siRNA sense strand
uaacaucugcaaagagugu

SEQ ID NO: 209241 - RNA, 19 nt, Homo sapiens
  misc_RNA (1)...(19): siRNA sense strand
cggagcugcuuccaauuug

SEQ ID NO: 209242 - RNA, 19 nt, Homo sapiens
  misc_RNA (1)...(19): siRNA sense strand
gaagacaaguacagauacc

SEQ ID NO: 209243 - RNA, 19 nt, Homo sapiens
  misc_RNA (1)...(19): siRNA sense strand
ccauggauauccugcagau

SEQ ID NO: 209244 - RNA, 19 nt, Homo sapiens
  misc_RNA (1)...(19): siRNA sense strand
ggcaucauuucccugugua

SEQ ID NO: 209245 - RNA, 19 nt, Homo sapiens
  misc_RNA (1)...(19): siRNA sense strand
uggauauccugcagauuau

SEQ ID NO: 209246 - RNA, 19 nt, Homo sapiens
  misc_RNA (1)...(19): siRNA sense strand
ggaagacaaguacagauac

SEQ ID NO: 209247 - RNA, 19 nt, Homo sapiens
  misc_RNA (1)...(19): siRNA sense strand
ugcaaagaguguccaauca

SEQ ID NO: 209248 - RNA, 19 nt, Homo sapiens
  misc_RNA (1)...(19): siRNA sense strand
guggauaugugucugaacu

SEQ ID NO: 209249 - RNA, 19 nt, Homo sapiens
  misc_RNA (1)...(19): siRNA sense strand
acuggcugcugaauguuua

SEQ ID NO: 209250 - RNA, 19 nt, Homo sapiens
  misc_RNA (1)...(19): siRNA sense strand
acuaucccaugguggaaua

SEQ ID NO: 209251 - RNA, 19 nt, Homo sapiens
  misc_RNA (1)...(19): siRNA sense strand
ccggagcugcuuccaauuu

SEQ ID NO: 209252 - RNA, 19 nt, Homo sapiens
  misc_RNA (1)...(19): siRNA sense strand
ccaaauuccaagacaguug

SEQ ID NO: 209253 - RNA, 19 nt, Homo sapiens
  misc_RNA (1)...(19): siRNA sense strand
cagaaacugccaagcauca

SEQ ID NO: 209254 - RNA, 19 nt, Homo sapiens
  misc_RNA (1)...(19): siRNA sense strand
uaugacaucugccaaagcu

SEQ ID NO: 209255 - RNA, 19 nt, Homo sapiens
  misc_RNA (1)...(19): siRNA sense strand
aaugucagauucucagcuu

SEQ ID NO: 209256 - RNA, 19 nt, Homo sapiens
  misc_RNA (1)...(19): siRNA sense strand
ucgagacuuugccaaggua

SEQ ID NO: 209257 - RNA, 19 nt, Homo sapiens
  misc_RNA (1)...(19): siRNA sense strand
gcaaaaggccauaaaaugc

SEQ ID NO: 209258 - RNA, 19 nt, Homo sapiens
  misc_RNA (1)...(19): siRNA sense strand
cugcaugauucuauccaaa

SEQ ID NO: 209259 - RNA, 19 nt, Homo sapiens
  misc_RNA (1)...(19): siRNA sense strand
uaaagcacauuuggaagac

SEQ ID NO: 209260 - RNA, 19 nt, Homo sapiens
  misc_RNA (1)...(19): siRNA sense strand
acaggagucuaaagcacuu

SEQ ID NO: 209261 - RNA, 19 nt, Homo sapiens
  misc_RNA (1)...(19): siRNA sense strand
acagauaccuuuucaagca

SEQ ID NO: 209262 - RNA, 19 nt, Homo sapiens
  misc_RNA (1)...(19): siRNA sense strand
aagcacauuuggaagacaa

SEQ ID NO: 209263 - RNA, 19 nt, Homo sapiens
  misc_RNA (1)...(19): siRNA sense strand
gcuaauaauaagccagaga

SEQ ID NO: 209264 - RNA, 19 nt, Homo sapiens
  misc_RNA (1)...(19): siRNA sense strand
caagagcacaacaauuugg

SEQ ID NO: 209265 - RNA, 19 nt, Homo sapiens
  misc_RNA (1)...(19): siRNA sense strand
ccugucagcugcaugugau

SEQ ID NO: 209266 - RNA, 19 nt, Homo sapiens
  misc_RNA (1)...(19): siRNA sense strand
gcugcugaauguuuaugau

SEQ ID NO: 209267 - RNA, 19 nt, Homo sapiens
  misc_RNA (1)...(19): siRNA sense strand
acagagcucuaccagucuu

SEQ ID NO: 209268 - RNA, 19 nt, Homo sapiens
  misc_RNA (1)...(19): siRNA sense strand
acaguugggugaaguugca

SEQ ID NO: 209269 - RNA, 19 nt, Homo sapiens
  misc_RNA (1)...(19): siRNA sense strand
guuugaccacuauuuauga

SEQ ID NO: 209270 - RNA, 19 nt, Homo sapiens
  misc_RNA (1)...(19): siRNA sense strand
gcuuauaggacugccauga

SEQ ID NO: 209271 - RNA, 19 nt, Homo sapiens
  misc_RNA (1)...(19): siRNA sense strand
caucaggccaaauguaaca

SEQ ID NO: 209272 - RNA, 19 nt, Homo sapiens
  misc_RNA (1)...(19): siRNA sense strand
gauucuauccaaauuccaa

SEQ ID NO: 209273 - RNA, 19 nt, Homo sapiens
  misc_RNA (1)...(19): siRNA sense strand
ggcaaguucaacaggauuu

SEQ ID NO: 209274 - RNA, 19 nt, Homo sapiens
  misc_RNA (1)...(19): siRNA sense strand
gaacuggcugcugaauguu

SEQ ID NO: 209275 - RNA, 19 nt, Homo sapiens
  misc_RNA (1)...(19): siRNA sense strand
cugcugaauguuuaugaua

SEQ ID NO: 209276 - RNA, 19 nt, Homo sapiens
  misc_RNA (1)...(19): siRNA sense strand
aagcaucaggccaaaugua

SEQ ID NO: 209277 - RNA, 19 nt, Homo sapiens
  misc_RNA (1)...(19): siRNA sense strand
uggcaucauuucccugugu

SEQ ID NO: 209278 - RNA, 19 nt, Homo sapiens
  misc_RNA (1)...(19): siRNA sense strand
ccaugaaacuccgaagacu

SEQ ID NO: 209279 - RNA, 19 nt, Homo sapiens
  misc_RNA (1)...(19): siRNA sense strand
auaauaagccagagaucga

SEQ ID NO: 209280 - RNA, 19 nt, Homo sapiens
  misc_RNA (1)...(19): siRNA sense strand
cuaauaauaagccagagau

SEQ ID NO: 209281 - RNA, 19 nt, Homo sapiens
  misc_RNA (1)...(19): siRNA sense strand
ugggugaaguugcauccuu

SEQ ID NO: 209282 - RNA, 19 nt, Homo sapiens
  misc_RNA (1)...(19): siRNA sense strand
caucauuucccuguguaaa

SEQ ID NO: 209283 - RNA, 19 nt, Homo sapiens
  misc_RNA (1)...(19): siRNA sense strand
gcguggauaugugucugaa

SEQ ID NO: 209284 - RNA, 19 nt, Homo sapiens
  misc_RNA (1)...(19): siRNA sense strand
gcacuaucccaugguggaa

SEQ ID NO: 209285 - RNA, 19 nt, Homo sapiens
  misc_RNA (1)...(19): siRNA sense strand
gagccugucagcugcaugu

SEQ ID NO: 209286 - RNA, 19 nt, Homo sapiens
  misc_RNA (1)...(19): siRNA sense strand
guacagauaccuuuucaag

SEQ ID NO: 209287 - RNA, 19 nt, Homo sapiens
  misc_RNA (1)...(19): siRNA sense strand
gucccucucugcguggaua

SEQ ID NO: 209288 - RNA, 19 nt, Homo sapiens
  misc_RNA (1)...(19): siRNA sense strand
ggagcugcuuccaauuugc

SEQ ID NO: 209289 - RNA, 19 nt, Homo sapiens
  misc_RNA (1)...(19): siRNA sense strand
uuagcugaccugaauaaug

SEQ ID NO: 209290 - RNA, 19 nt, Homo sapiens
  misc_RNA (1)...(19): siRNA sense strand
guggcaaguucaacaggau

SEQ ID NO: 209291 - RNA, 19 nt, Homo sapiens
  misc_RNA (1)...(19): siRNA sense strand
acaacaauuuggucaacgu

SEQ ID NO: 209292 - RNA, 19 nt, Homo sapiens
  misc_RNA (1)...(19): siRNA sense strand
gacuacaucaggagaagau

SEQ ID NO: 209293 - RNA, 19 nt, Homo sapiens
  misc_RNA (1)...(19): siRNA sense strand
uaauaagccagagaucgaa

SEQ ID NO: 209294 - RNA, 19 nt, Homo sapiens
  misc_RNA (1)...(19): siRNA sense strand
ugucagauucucagcuuau

SEQ ID NO: 209295 - RNA, 19 nt, Homo sapiens
  misc_RNA (1)...(19): siRNA sense strand
ggauauccugcagauuauu

SEQ ID NO: 209296 - RNA, 19 nt, Homo sapiens
  misc_RNA (1)...(19): siRNA sense strand
agcaucaggccaaauguaa

SEQ ID NO: 209297 - RNA, 19 nt, Homo sapiens
  misc_RNA (1)...(19): siRNA sense strand
gcccuuugcuuggaucucu

SEQ ID NO: 209298 - RNA, 19 nt, Homo sapiens
  misc_RNA (1)...(19): siRNA sense strand
gcugaauguuuaugauacg

SEQ ID NO: 209299 - RNA, 19 nt, Homo sapiens
  misc_RNA (1)...(19): siRNA sense strand
agacuuugccaagguacua

SEQ ID NO: 209300 - RNA, 19 nt, Homo sapiens
  misc_RNA (1)...(19): siRNA sense strand
caagcaaguggcaaguuca

SEQ ID NO: 209301 - RNA, 19 nt, Homo sapiens
  misc_RNA (1)...(19): siRNA sense strand
agacaaguacagauaccuu

SEQ ID NO: 209302 - RNA, 19 nt, Homo sapiens
  misc_RNA (1)...(19): siRNA sense strand
gcaucauuucccuguguaa

SEQ ID NO: 209303 - RNA, 19 nt, Homo sapiens
  misc_RNA (1)...(19): siRNA sense strand
cugcaaagaguguccaauc

SEQ ID NO: 209304 - RNA, 19 nt, Homo sapiens
  misc_RNA (1)...(19): siRNA sense strand
cuuauaggacugccaugaa

SEQ ID NO: 209305 - RNA, 19 nt, Homo sapiens
  misc_RNA (1)...(19): siRNA sense strand
caaagaguguccaaucauu

SEQ ID NO: 209306 - RNA, 19 nt, Homo sapiens
  misc_RNA (1)...(19): siRNA sense strand
uagcugaccugaauaaugu

SEQ ID NO: 209307 - RNA, 19 nt, Homo sapiens
  misc_RNA (1)...(19): siRNA sense strand
gcaugauucuauccaaauu

SEQ ID NO: 209308 - RNA, 19 nt, Homo sapiens
  misc_RNA (1)...(19): siRNA sense strand
ugaacuggcugcugaaugu

SEQ ID NO: 209309 - RNA, 19 nt, Homo sapiens
  misc_RNA (1)...(19): siRNA sense strand
gauauccugcagauuauua

SEQ ID NO: 209310 - RNA, 19 nt, Homo sapiens
  misc_RNA (1)...(19): siRNA sense strand
gagaagauguucgagacuu

SEQ ID NO: 209311 - RNA, 19 nt, Homo sapiens
  misc_RNA (1)...(19): siRNA sense strand
gcacuuuaauuaugacauc

SEQ ID NO: 209312 - RNA, 19 nt, Homo sapiens
  misc_RNA (1)...(19): siRNA sense strand
guaaagcacauuuggaaga

SEQ ID NO: 209313 - RNA, 19 nt, Homo sapiens
  misc_RNA (1)...(19): siRNA sense strand
gaauauugcacuccgacua

SEQ ID NO: 209314 - RNA, 19 nt, Homo sapiens
  misc_RNA (1)...(19): siRNA sense strand
uuauaggacugccaugaaa

SEQ ID NO: 209315 - RNA, 19 nt, Homo sapiens
  misc_RNA (1)...(19): siRNA sense strand
gggugaaguugcauccuuu

SEQ ID NO: 209316 - RNA, 19 nt, Homo sapiens
  misc_RNA (1)...(19): siRNA sense strand
gcaagagcacaacaauuug

SEQ ID NO: 209317 - RNA, 19 nt, Homo sapiens
  misc_RNA (1)...(19): siRNA sense strand
gcacaacaauuuggucaac

SEQ ID NO: 209318 - RNA, 19 nt, Homo sapiens
  misc_RNA (1)...(19): siRNA sense strand
agcaagagcacaacaauuu

SEQ ID NO: 209319 - RNA, 19 nt, Homo sapiens
  misc_RNA (1)...(19): siRNA sense strand
agaagauguucgagacuuu

SEQ ID NO: 209320 - RNA, 19 nt, Homo sapiens
  misc_RNA (1)...(19): siRNA sense strand
gagcaagagcacaacaauu

SEQ ID NO: 209321 - RNA, 19 nt, Homo sapiens
  misc_RNA (1)...(19): siRNA sense strand
ucaagcaaguggcaaguuc

SEQ ID NO: 209322 - RNA, 19 nt, Homo sapiens
  misc_RNA (1)...(19): siRNA sense strand
ccacgagacucaaacaacu

SEQ ID NO: 209323 - RNA, 19 nt, Homo sapiens
  misc_RNA (1)...(19): siRNA sense strand
cagcacaaccucaagcaaa

SEQ ID NO: 209324 - RNA, 19 nt, Homo sapiens
  misc_RNA (1)...(19): siRNA sense strand
gcaaagaguguccaaucau

SEQ ID NO: 209325 - RNA, 19 nt, Homo sapiens
  misc_RNA (1)...(19): siRNA sense strand
auggauauccugcagauua

SEQ ID NO: 209326 - RNA, 19 nt, Homo sapiens
  misc_RNA (1)...(19): siRNA sense strand
uguaacaucugcaaagagu

SEQ ID NO: 209327 - RNA, 19 nt, Homo sapiens
  misc_RNA (1)...(19): siRNA sense strand
guccggagcugcuuccaau

SEQ ID NO: 209328 - RNA, 19 nt, Homo sapiens
  misc_RNA (1)...(19): siRNA sense strand
gcaaguggcaaguucaaca

SEQ ID NO: 209329 - RNA, 19 nt, Homo sapiens
  misc_RNA (1)...(19): siRNA sense strand
gcuuccaauuugcuaauaa

SEQ ID NO: 209330 - RNA, 19 nt, Homo sapiens
  misc_RNA (1)...(19): siRNA sense strand
uggaagacaaguacagaua

SEQ ID NO: 209331 - RNA, 19 nt, Homo sapiens
  misc_RNA (1)...(19): siRNA sense strand
ggauccguguccugucuuu

SEQ ID NO: 209332 - RNA, 19 nt, Homo sapiens
  misc_RNA (1)...(19): siRNA sense strand
gucuuuagcugaccugaau

SEQ ID NO: 209333 - RNA, 19 nt, Homo sapiens
  misc_RNA (1)...(19): siRNA sense strand
gacaaguacagauaccuuu

SEQ ID NO: 209334 - RNA, 19 nt, Homo sapiens
  misc_RNA (1)...(19): siRNA sense strand
ccaagcaucaggccaaaug

SEQ ID NO: 209335 - RNA, 19 nt, Homo sapiens
  misc_RNA (1)...(19): siRNA sense strand
ggagcaagagcacaacaau

SEQ ID NO: 209336 - RNA, 19 nt, Homo sapiens
  misc_RNA (1)...(19): siRNA sense strand
guguaaagcacauuuggaa

SEQ ID NO: 209337 - RNA, 19 nt, Homo sapiens
  misc_RNA (1)...(19): siRNA sense strand
caagacaguugggugaagu

SEQ ID NO: 209338 - RNA, 19 nt, Homo sapiens
  misc_RNA (1)...(19): siRNA sense strand
gaagauguucgagacuuug

SEQ ID NO: 209339 - RNA, 19 nt, Homo sapiens
  misc_RNA (1)...(19): siRNA sense strand
gucagauucucagcuuaua

SEQ ID NO: 209340 - RNA, 19 nt, Homo sapiens
  misc_RNA (1)...(19): siRNA sense strand
uaacaucugcaaagagugu

SEQ ID NO: 209341 - RNA, 19 nt, Homo sapiens
  misc_RNA (1)...(19): siRNA sense strand
cggagcugcuuccaauuug

SEQ ID NO: 209342 - RNA, 19 nt, Homo sapiens
  misc_RNA (1)...(19): siRNA sense strand
gaagacaaguacagauacc

SEQ ID NO: 209343 - RNA, 19 nt, Homo sapiens
  misc_RNA (1)...(19): siRNA sense strand
ccauggauauccugcagau

SEQ ID NO: 209344 - RNA, 19 nt, Homo sapiens
  misc_RNA (1)...(19): siRNA sense strand
ggcaucauuucccugugua

SEQ ID NO: 209345 - RNA, 19 nt, Homo sapiens
  misc_RNA (1)...(19): siRNA sense strand
uggauauccugcagauuau

SEQ ID NO: 209346 - RNA, 19 nt, Homo sapiens
  misc_RNA (1)...(19): siRNA sense strand
ggaagacaaguacagauac

SEQ ID NO: 209347 - RNA, 19 nt, Homo sapiens
  misc_RNA (1)...(19): siRNA sense strand
ugcaaagaguguccaauca

SEQ ID NO: 209348 - RNA, 19 nt, Homo sapiens
  misc_RNA (1)...(19): siRNA sense strand
guggauaugugucugaacu

SEQ ID NO: 209349 - RNA, 19 nt, Homo sapiens
  misc_RNA (1)...(19): siRNA sense strand
acuggcugcugaauguuua

SEQ ID NO: 209350 - RNA, 19 nt, Homo sapiens
  misc_RNA (1)...(19): siRNA sense strand
acuaucccaugguggaaua

SEQ ID NO: 209351 - RNA, 19 nt, Homo sapiens
  misc_RNA (1)...(19): siRNA sense strand
ccggagcugcuuccaauuu

SEQ ID NO: 209352 - RNA, 19 nt, Homo sapiens
  misc_RNA (1)...(19): siRNA sense strand
ccaaauuccaagacaguug

SEQ ID NO: 209353 - RNA, 19 nt, Homo sapiens
  misc_RNA (1)...(19): siRNA sense strand
cagaaacugccaagcauca

SEQ ID NO: 209354 - RNA, 19 nt, Homo sapiens
  misc_RNA (1)...(19): siRNA sense strand
uaugacaucugccaaagcu

SEQ ID NO: 209355 - RNA, 19 nt, Homo sapiens
  misc_RNA (1)...(19): siRNA sense strand
aaugucagauucucagcuu

SEQ ID NO: 209356 - RNA, 19 nt, Homo sapiens
  misc_RNA (1)...(19): siRNA sense strand
ucgagacuuugccaaggua

SEQ ID NO: 209357 - RNA, 19 nt, Homo sapiens
  misc_RNA (1)...(19): siRNA sense strand
gcaaaaggccauaaaaugc

SEQ ID NO: 209358 - RNA, 19 nt, Homo sapiens
  misc_RNA (1)...(19): siRNA sense strand
cugcaugauucuauccaaa

SEQ ID NO: 209359 - RNA, 19 nt, Homo sapiens
  misc_RNA (1)...(19): siRNA sense strand
uaaagcacauuuggaagac

SEQ ID NO: 209360 - RNA, 19 nt, Homo sapiens
  misc_RNA (1)...(19): siRNA sense strand
acaggagucuaaagcacuu

SEQ ID NO: 209361 - RNA, 19 nt, Homo sapiens
  misc_RNA (1)...(19): siRNA sense strand
acagauaccuuuucaagca

SEQ ID NO: 209362 - RNA, 19 nt, Homo sapiens
  misc_RNA (1)...(19): siRNA sense strand
aagcacauuuggaagacaa

SEQ ID NO: 209363 - RNA, 19 nt, Homo sapiens
  misc_RNA (1)...(19): siRNA sense strand
gcuaauaauaagccagaga

SEQ ID NO: 209364 - RNA, 19 nt, Homo sapiens
  misc_RNA (1)...(19): siRNA sense strand
caagagcacaacaauuugg

SEQ ID NO: 209365 - RNA, 19 nt, Homo sapiens
  misc_RNA (1)...(19): siRNA sense strand
ccugucagcugcaugugau

SEQ ID NO: 209366 - RNA, 19 nt, Homo sapiens
  misc_RNA (1)...(19): siRNA sense strand
gcugcugaauguuuaugau

SEQ ID NO: 209367 - RNA, 19 nt, Homo sapiens
  misc_RNA (1)...(19): siRNA sense strand
acagagcucuaccagucuu

SEQ ID NO: 209368 - RNA, 19 nt, Homo sapiens
  misc_RNA (1)...(19): siRNA sense strand
acaguugggugaaguugca

SEQ ID NO: 209369 - RNA, 19 nt, Homo sapiens
  misc_RNA (1)...(19): siRNA sense strand
guuugaccacuauuuauga

SEQ ID NO: 209370 - RNA, 19 nt, Homo sapiens
  misc_RNA (1)...(19): siRNA sense strand
gcuuauaggacugccauga

SEQ ID NO: 209371 - RNA, 19 nt, Homo sapiens
  misc_RNA (1)...(19): siRNA sense strand
caucaggccaaauguaaca

SEQ ID NO: 209372 - RNA, 19 nt, Homo sapiens
  misc_RNA (1)...(19): siRNA sense strand
gauucuauccaaauuccaa

SEQ ID NO: 209373 - RNA, 19 nt, Homo sapiens
  misc_RNA (1)...(19): siRNA sense strand
ggcaaguucaacaggauuu

SEQ ID NO: 209374 - RNA, 19 nt, Homo sapiens
  misc_RNA (1)...(19): siRNA sense strand
gaacuggcugcugaauguu

SEQ ID NO: 209375 - RNA, 19 nt, Homo sapiens
  misc_RNA (1)...(19): siRNA sense strand
cugcugaauguuuaugaua

SEQ ID NO: 209376 - RNA, 19 nt, Homo sapiens
  misc_RNA (1)...(19): siRNA sense strand
aagcaucaggccaaaugua

SEQ ID NO: 209377 - RNA, 19 nt, Homo sapiens
  misc_RNA (1)...(19): siRNA sense strand
uggcaucauuucccugugu

SEQ ID NO: 209378 - RNA, 19 nt, Homo sapiens
  misc_RNA (1)...(19): siRNA sense strand
ccaugaaacuccgaagacu

SEQ ID NO: 209379 - RNA, 19 nt, Homo sapiens
  misc_RNA (1)...(19): siRNA sense strand
auaauaagccagagaucga

SEQ ID NO: 209380 - RNA, 19 nt, Homo sapiens
  misc_RNA (1)...(19): siRNA sense strand
cuaauaauaagccagagau

SEQ ID NO: 209381 - RNA, 19 nt, Homo sapiens
  misc_RNA (1)...(19): siRNA sense strand
ugggugaaguugcauccuu

SEQ ID NO: 209382 - RNA, 19 nt, Homo sapiens
  misc_RNA (1)...(19): siRNA sense strand
caucauuucccuguguaaa

SEQ ID NO: 209383 - RNA, 19 nt, Homo sapiens
  misc_RNA (1)...(19): siRNA sense strand
gcguggauaugugucugaa

SEQ ID NO: 209384 - RNA, 19 nt, Homo sapiens
  misc_RNA (1)...(19): siRNA sense strand
gcacuaucccaugguggaa

SEQ ID NO: 209385 - RNA, 19 nt, Homo sapiens
  misc_RNA (1)...(19): siRNA sense strand
gagccugucagcugcaugu

SEQ ID NO: 209386 - RNA, 19 nt, Homo sapiens
  misc_RNA (1)...(19): siRNA sense strand
guacagauaccuuuucaag

SEQ ID NO: 209387 - RNA, 19 nt, Homo sapiens
  misc_RNA (1)...(19): siRNA sense strand
gucccucucugcguggaua

SEQ ID NO: 209388 - RNA, 19 nt, Homo sapiens
  misc_RNA (1)...(19): siRNA sense strand
ggagcugcuuccaauuugc

SEQ ID NO: 209389 - RNA, 19 nt, Homo sapiens
  misc_RNA (1)...(19): siRNA sense strand
uuagcugaccugaauaaug

SEQ ID NO: 209390 - RNA, 19 nt, Homo sapiens
  misc_RNA (1)...(19): siRNA sense strand
guggcaaguucaacaggau

SEQ ID NO: 209391 - RNA, 19 nt, Homo sapiens
  misc_RNA (1)...(19): siRNA sense strand
acaacaauuuggucaacgu

SEQ ID NO: 209392 - RNA, 19 nt, Homo sapiens
  misc_RNA (1)...(19): siRNA sense strand
gacuacaucaggagaagau

SEQ ID NO: 209393 - RNA, 19 nt, Homo sapiens
  misc_RNA (1)...(19): siRNA sense strand
uaauaagccagagaucgaa

SEQ ID NO: 209394 - RNA, 19 nt, Homo sapiens
  misc_RNA (1)...(19): siRNA sense strand
ugucagauucucagcuuau

SEQ ID NO: 209395 - RNA, 19 nt, Homo sapiens
  misc_RNA (1)...(19): siRNA sense strand
ggauauccugcagauuauu

SEQ ID NO: 209396 - RNA, 19 nt, Homo sapiens
  misc_RNA (1)...(19): siRNA sense strand
agcaucaggccaaauguaa

SEQ ID NO: 209397 - RNA, 19 nt, Homo sapiens
  misc_RNA (1)...(19): siRNA sense strand
gcccuuugcuuggaucucu

SEQ ID NO: 209398 - RNA, 19 nt, Homo sapiens
  misc_RNA (1)...(19): siRNA sense strand
gcugaauguuuaugauacg

SEQ ID NO: 209399 - RNA, 19 nt, Homo sapiens
  misc_RNA (1)...(19): siRNA sense strand
agacuuugccaagguacua

SEQ ID NO: 209400 - RNA, 19 nt, Homo sapiens
  misc_RNA (1)...(19): siRNA sense strand
caagcaaguggcaaguuca

SEQ ID NO: 209401 - RNA, 19 nt, Homo sapiens
  misc_RNA (1)...(19): siRNA sense strand
agacaaguacagauaccuu

SEQ ID NO: 209402 - RNA, 19 nt, Homo sapiens
  misc_RNA (1)...(19): siRNA sense strand
gcaucauuucccuguguaa

SEQ ID NO: 209403 - RNA, 19 nt, Homo sapiens
  misc_RNA (1)...(19): siRNA sense strand
cugcaaagaguguccaauc

SEQ ID NO: 209404 - RNA, 19 nt, Homo sapiens
  misc_RNA (1)...(19): siRNA sense strand
cuuauaggacugccaugaa

SEQ ID NO: 209405 - RNA, 19 nt, Homo sapiens
  misc_RNA (1)...(19): siRNA sense strand
caaagaguguccaaucauu

SEQ ID NO: 209406 - RNA, 19 nt, Homo sapiens
  misc_RNA (1)...(19): siRNA sense strand
uagcugaccugaauaaugu

SEQ ID NO: 209407 - RNA, 19 nt, Homo sapiens
  misc_RNA (1)...(19): siRNA sense strand
gcaugauucuauccaaauu

SEQ ID NO: 209408 - RNA, 19 nt, Homo sapiens
  misc_RNA (1)...(19): siRNA sense strand
ugaacuggcugcugaaugu

SEQ ID NO: 209409 - RNA, 19 nt, Homo sapiens
  misc_RNA (1)...(19): siRNA sense strand
gauauccugcagauuauua

SEQ ID NO: 209410 - RNA, 19 nt, Homo sapiens
  misc_RNA (1)...(19): siRNA sense strand
gagaagauguucgagacuu

SEQ ID NO: 209411 - RNA, 19 nt, Homo sapiens
  misc_RNA (1)...(19): siRNA sense strand
gcacuuuaauuaugacauc

SEQ ID NO: 209412 - RNA, 19 nt, Homo sapiens
  misc_RNA (1)...(19): siRNA sense strand
guaaagcacauuuggaaga

SEQ ID NO: 209413 - RNA, 19 nt, Homo sapiens
  misc_RNA (1)...(19): siRNA sense strand
gaauauugcacuccgacua

SEQ ID NO: 209414 - RNA, 19 nt, Homo sapiens
  misc_RNA (1)...(19): siRNA sense strand
uuauaggacugccaugaaa

SEQ ID NO: 209415 - RNA, 19 nt, Homo sapiens
  misc_RNA (1)...(19): siRNA sense strand
gggugaaguugcauccuuu

SEQ ID NO: 209416 - RNA, 19 nt, Homo sapiens
  misc_RNA (1)...(19): siRNA sense strand
gcaagagcacaacaauuug

SEQ ID NO: 209417 - RNA, 19 nt, Homo sapiens
  misc_RNA (1)...(19): siRNA sense strand
gcacaacaauuuggucaac

SEQ ID NO: 209418 - RNA, 19 nt, Homo sapiens
  misc_RNA (1)...(19): siRNA sense strand
agcaagagcacaacaauuu

SEQ ID NO: 209419 - RNA, 19 nt, Homo sapiens
  misc_RNA (1)...(19): siRNA sense strand
agaagauguucgagacuuu

SEQ ID NO: 209420 - RNA, 19 nt, Homo sapiens
  misc_RNA (1)...(19): siRNA sense strand
gagcaagagcacaacaauu

SEQ ID NO: 209421 - RNA, 19 nt, Homo sapiens
  misc_RNA (1)...(19): siRNA sense strand
ucaagcaaguggcaaguuc

SEQ ID NO: 209422 - RNA, 19 nt, Homo sapiens
  misc_RNA (1)...(19): siRNA sense strand
ccacgagacucaaacaacu

SEQ ID NO: 209423 - RNA, 19 nt, Homo sapiens
  misc_RNA (1)...(19): siRNA sense strand
cagcacaaccucaagcaaa

SEQ ID NO: 209424 - RNA, 19 nt, Homo sapiens
  misc_RNA (1)...(19): siRNA sense strand
gcaaagaguguccaaucau

SEQ ID NO: 209425 - RNA, 19 nt, Homo sapiens
  misc_RNA (1)...(19): siRNA sense strand
auggauauccugcagauua

SEQ ID NO: 209426 - RNA, 19 nt, Homo sapiens
  misc_RNA (1)...(19): siRNA sense strand
uguaacaucugcaaagagu

SEQ ID NO: 209427 - RNA, 19 nt, Homo sapiens
  misc_RNA (1)...(19): siRNA sense strand
guccggagcugcuuccaau

SEQ ID NO: 209428 - RNA, 19 nt, Homo sapiens
  misc_RNA (1)...(19): siRNA sense strand
gcaaguggcaaguucaaca

SEQ ID NO: 209429 - RNA, 19 nt, Homo sapiens
  misc_RNA (1)...(19): siRNA sense strand
gcuuccaauuugcuaauaa

SEQ ID NO: 209430 - RNA, 19 nt, Homo sapiens
  misc_RNA (1)...(19): siRNA sense strand
uggaagacaaguacagaua

SEQ ID NO: 209431 - RNA, 19 nt, Homo sapiens
  misc_RNA (1)...(19): siRNA sense strand
ggauccguguccugucuuu

SEQ ID NO: 209432 - RNA, 19 nt, Homo sapiens
  misc_RNA (1)...(19): siRNA sense strand
gucuuuagcugaccugaau

SEQ ID NO: 209433 - RNA, 19 nt, Homo sapiens
  misc_RNA (1)...(19): siRNA sense strand
gacaaguacagauaccuuu

SEQ ID NO: 209434 - RNA, 19 nt, Homo sapiens
  misc_RNA (1)...(19): siRNA sense strand
ccaagcaucaggccaaaug

SEQ ID NO: 209435 - RNA, 19 nt, Homo sapiens
  misc_RNA (1)...(19): siRNA sense strand
ggagcaagagcacaacaau

SEQ ID NO: 209436 - RNA, 19 nt, Homo sapiens
  misc_RNA (1)...(19): siRNA sense strand
guguaaagcacauuuggaa

SEQ ID NO: 209437 - RNA, 19 nt, Homo sapiens
  misc_RNA (1)...(19): siRNA sense strand
caagacaguugggugaagu

SEQ ID NO: 209438 - RNA, 19 nt, Homo sapiens
  misc_RNA (1)...(19): siRNA sense strand
gaagauguucgagacuuug

SEQ ID NO: 209439 - RNA, 19 nt, Homo sapiens
  misc_RNA (1)...(19): siRNA sense strand
gucagauucucagcuuaua

SEQ ID NO: 209440 - RNA, 19 nt, Homo sapiens
  misc_RNA (1)...(19): siRNA sense strand
uaacaucugcaaagagugu

SEQ ID NO: 209441 - RNA, 19 nt, Homo sapiens
  misc_RNA (1)...(19): siRNA sense strand
cggagcugcuuccaauuug

SEQ ID NO: 209442 - RNA, 19 nt, Homo sapiens
  misc_RNA (1)...(19): siRNA sense strand
gaagacaaguacagauacc

SEQ ID NO: 209443 - RNA, 19 nt, Homo sapiens
  misc_RNA (1)...(19): siRNA sense strand
ccauggauauccugcagau

SEQ ID NO: 209444 - RNA, 19 nt, Homo sapiens
  misc_RNA (1)...(19): siRNA sense strand
ggcaucauuucccugugua

SEQ ID NO: 209445 - RNA, 19 nt, Homo sapiens
  misc_RNA (1)...(19): siRNA sense strand
uggauauccugcagauuau

SEQ ID NO: 209446 - RNA, 19 nt, Homo sapiens
  misc_RNA (1)...(19): siRNA sense strand
ggaagacaaguacagauac

SEQ ID NO: 209447 - RNA, 19 nt, Homo sapiens
  misc_RNA (1)...(19): siRNA sense strand
ugcaaagaguguccaauca

SEQ ID NO: 209448 - RNA, 19 nt, Homo sapiens
  misc_RNA (1)...(19): siRNA sense strand
guggauaugugucugaacu

SEQ ID NO: 209449 - RNA, 19 nt, Homo sapiens
  misc_RNA (1)...(19): siRNA sense strand
acuggcugcugaauguuua

SEQ ID NO: 209450 - RNA, 19 nt, Homo sapiens
  misc_RNA (1)...(19): siRNA sense strand
acuaucccaugguggaaua

SEQ ID NO: 209451 - RNA, 19 nt, Homo sapiens
  misc_RNA (1)...(19): siRNA sense strand
ccggagcugcuuccaauuu

SEQ ID NO: 209452 - RNA, 19 nt, Homo sapiens
  misc_RNA (1)...(19): siRNA sense strand
ccaaauuccaagacaguug

SEQ ID NO: 209453 - RNA, 19 nt, Homo sapiens
  misc_RNA (1)...(19): siRNA sense strand
cagaaacugccaagcauca

SEQ ID NO: 209454 - RNA, 19 nt, Homo sapiens
  misc_RNA (1)...(19): siRNA sense strand
uaugacaucugccaaagcu

SEQ ID NO: 209455 - RNA, 19 nt, Homo sapiens
  misc_RNA (1)...(19): siRNA sense strand
aaugucagauucucagcuu

SEQ ID NO: 209456 - RNA, 19 nt, Homo sapiens
  misc_RNA (1)...(19): siRNA sense strand
ucgagacuuugccaaggua

SEQ ID NO: 209457 - RNA, 19 nt, Homo sapiens
  misc_RNA (1)...(19): siRNA sense strand
gcaaaaggccauaaaaugc

SEQ ID NO: 209458 - RNA, 19 nt, Homo sapiens
  misc_RNA (1)...(19): siRNA sense strand
cugcaugauucuauccaaa

SEQ ID NO: 209459 - RNA, 19 nt, Homo sapiens
  misc_RNA (1)...(19): siRNA sense strand
uaaagcacauuuggaagac

SEQ ID NO: 209460 - RNA, 19 nt, Homo sapiens
  misc_RNA (1)...(19): siRNA sense strand
acaggagucuaaagcacuu

SEQ ID NO: 209461 - RNA, 19 nt, Homo sapiens
  misc_RNA (1)...(19): siRNA sense strand
acagauaccuuuucaagca

SEQ ID NO: 209462 - RNA, 19 nt, Homo sapiens
  misc_RNA (1)...(19): siRNA sense strand
aagcacauuuggaagacaa

SEQ ID NO: 209463 - RNA, 19 nt, Homo sapiens
  misc_RNA (1)...(19): siRNA sense strand
gcuaauaauaagccagaga

SEQ ID NO: 209464 - RNA, 19 nt, Homo sapiens
  misc_RNA (1)...(19): siRNA sense strand
caagagcacaacaauuugg

SEQ ID NO: 209465 - RNA, 19 nt, Homo sapiens
  misc_RNA (1)...(19): siRNA sense strand
ccugucagcugcaugugau

SEQ ID NO: 209466 - RNA, 19 nt, Homo sapiens
  misc_RNA (1)...(19): siRNA sense strand
gcugcugaauguuuaugau

SEQ ID NO: 209467 - RNA, 19 nt, Homo sapiens
  misc_RNA (1)...(19): siRNA sense strand
acagagcucuaccagucuu

SEQ ID NO: 209468 - RNA, 19 nt, Homo sapiens
  misc_RNA (1)...(19): siRNA sense strand
acaguugggugaaguugca

SEQ ID NO: 209469 - RNA, 19 nt, Homo sapiens
  misc_RNA (1)...(19): siRNA sense strand
guuugaccacuauuuauga

SEQ ID NO: 209470 - RNA, 19 nt, Homo sapiens
  misc_RNA (1)...(19): siRNA sense strand
gcuuauaggacugccauga

SEQ ID NO: 209471 - RNA, 19 nt, Homo sapiens
  misc_RNA (1)...(19): siRNA sense strand
caucaggccaaauguaaca

SEQ ID NO: 209472 - RNA, 19 nt, Homo sapiens
  misc_RNA (1)...(19): siRNA sense strand
gauucuauccaaauuccaa

SEQ ID NO: 209473 - RNA, 19 nt, Homo sapiens
  misc_RNA (1)...(19): siRNA sense strand
ggcaaguucaacaggauuu

SEQ ID NO: 209474 - RNA, 19 nt, Homo sapiens
  misc_RNA (1)...(19): siRNA sense strand
gaacuggcugcugaauguu

SEQ ID NO: 209475 - RNA, 19 nt, Homo sapiens
  misc_RNA (1)...(19): siRNA sense strand
cugcugaauguuuaugaua

SEQ ID NO: 209476 - RNA, 19 nt, Homo sapiens
  misc_RNA (1)...(19): siRNA sense strand
aagcaucaggccaaaugua

SEQ ID NO: 209477 - RNA, 19 nt, Homo sapiens
  misc_RNA (1)...(19): siRNA sense strand
uggcaucauuucccugugu

SEQ ID NO: 209478 - RNA, 19 nt, Homo sapiens
  misc_RNA (1)...(19): siRNA sense strand
ccaugaaacuccgaagacu

SEQ ID NO: 209479 - RNA, 19 nt, Homo sapiens
  misc_RNA (1)...(19): siRNA sense strand
auaauaagccagagaucga

SEQ ID NO: 209480 - RNA, 19 nt, Homo sapiens
  misc_RNA (1)...(19): siRNA sense strand
cuaauaauaagccagagau

SEQ ID NO: 209481 - RNA, 19 nt, Homo sapiens
  misc_RNA (1)...(19): siRNA sense strand
ugggugaaguugcauccuu

SEQ ID NO: 209482 - RNA, 19 nt, Homo sapiens
  misc_RNA (1)...(19): siRNA sense strand
caucauuucccuguguaaa

SEQ ID NO: 209483 - RNA, 19 nt, Homo sapiens
  misc_RNA (1)...(19): siRNA sense strand
gcguggauaugugucugaa

SEQ ID NO: 209484 - RNA, 19 nt, Homo sapiens
  misc_RNA (1)...(19): siRNA sense strand
gcacuaucccaugguggaa

SEQ ID NO: 209485 - RNA, 19 nt, Homo sapiens
  misc_RNA (1)...(19): siRNA sense strand
gagccugucagcugcaugu

SEQ ID NO: 209486 - RNA, 19 nt, Homo sapiens
  misc_RNA (1)...(19): siRNA sense strand
guacagauaccuuuucaag

SEQ ID NO: 209487 - RNA, 19 nt, Homo sapiens
  misc_RNA (1)...(19): siRNA sense strand
gucccucucugcguggaua

SEQ ID NO: 209488 - RNA, 19 nt, Homo sapiens
  misc_RNA (1)...(19): siRNA sense strand
ggagcugcuuccaauuugc

SEQ ID NO: 209489 - RNA, 19 nt, Homo sapiens
  misc_RNA (1)...(19): siRNA sense strand
uuagcugaccugaauaaug

SEQ ID NO: 209490 - RNA, 19 nt, Homo sapiens
  misc_RNA (1)...(19): siRNA sense strand
guggcaaguucaacaggau

SEQ ID NO: 209491 - RNA, 19 nt, Homo sapiens
  misc_RNA (1)...(19): siRNA sense strand
acaacaauuuggucaacgu

SEQ ID NO: 209492 - RNA, 19 nt, Homo sapiens
  misc_RNA (1)...(19): siRNA sense strand
gacuacaucaggagaagau

SEQ ID NO: 209493 - RNA, 19 nt, Homo sapiens
  misc_RNA (1)...(19): siRNA sense strand
uaauaagccagagaucgaa

SEQ ID NO: 209494 - RNA, 19 nt, Homo sapiens
  misc_RNA (1)...(19): siRNA sense strand
ugucagauucucagcuuau

SEQ ID NO: 209495 - RNA, 19 nt, Homo sapiens
  misc_RNA (1)...(19): siRNA sense strand
ggauauccugcagauuauu

SEQ ID NO: 209496 - RNA, 19 nt, Homo sapiens
  misc_RNA (1)...(19): siRNA sense strand
agcaucaggccaaauguaa

SEQ ID NO: 209497 - RNA, 19 nt, Homo sapiens
  misc_RNA (1)...(19): siRNA sense strand
gcccuuugcuuggaucucu

SEQ ID NO: 209498 - RNA, 19 nt, Homo sapiens
  misc_RNA (1)...(19): siRNA sense strand
gcugaauguuuaugauacg

SEQ ID NO: 209499 - RNA, 19 nt, Homo sapiens
  misc_RNA (1)...(19): siRNA sense strand
agacuuugccaagguacua

SEQ ID NO: 209500 - RNA, 19 nt, Homo sapiens
  misc_RNA (1)...(19): siRNA sense strand
caagcaaguggcaaguuca

SEQ ID NO: 209501 - RNA, 19 nt, Homo sapiens
  misc_RNA (1)...(19): siRNA sense strand
agacaaguacagauaccuu

SEQ ID NO: 209502 - RNA, 19 nt, Homo sapiens
  misc_RNA (1)...(19): siRNA sense strand
gcaucauuucccuguguaa

SEQ ID NO: 209503 - RNA, 19 nt, Homo sapiens
  misc_RNA (1)...(19): siRNA sense strand
cugcaaagaguguccaauc

SEQ ID NO: 209504 - RNA, 19 nt, Homo sapiens
  misc_RNA (1)...(19): siRNA sense strand
cuuauaggacugccaugaa

SEQ ID NO: 209505 - RNA, 19 nt, Homo sapiens
  misc_RNA (1)...(19): siRNA sense strand
caaagaguguccaaucauu

SEQ ID NO: 209506 - RNA, 19 nt, Homo sapiens
  misc_RNA (1)...(19): siRNA sense strand
uagcugaccugaauaaugu

SEQ ID NO: 209507 - RNA, 19 nt, Homo sapiens
  misc_RNA (1)...(19): siRNA sense strand
gcaugauucuauccaaauu

SEQ ID NO: 209508 - RNA, 19 nt, Homo sapiens
  misc_RNA (1)...(19): siRNA sense strand
ugaacuggcugcugaaugu

SEQ ID NO: 209509 - RNA, 19 nt, Homo sapiens
  misc_RNA (1)...(19): siRNA sense strand
gauauccugcagauuauua

SEQ ID NO: 209510 - RNA, 19 nt, Homo sapiens
  misc_RNA (1)...(19): siRNA sense strand
gagaagauguucgagacuu

SEQ ID NO: 209511 - RNA, 19 nt, Homo sapiens
  misc_RNA (1)...(19): siRNA sense strand
gcacuuuaauuaugacauc

SEQ ID NO: 209512 - RNA, 19 nt, Homo sapiens
  misc_RNA (1)...(19): siRNA sense strand
guaaagcacauuuggaaga

SEQ ID NO: 209513 - RNA, 19 nt, Homo sapiens
  misc_RNA (1)...(19): siRNA sense strand
gaauauugcacuccgacua

SEQ ID NO: 209514 - RNA, 19 nt, Homo sapiens
  misc_RNA (1)...(19): siRNA sense strand
uuauaggacugccaugaaa

SEQ ID NO: 209515 - RNA, 19 nt, Homo sapiens
  misc_RNA (1)...(19): siRNA sense strand
gggugaaguugcauccuuu

SEQ ID NO: 209516 - RNA, 19 nt, Homo sapiens
  misc_RNA (1)...(19): siRNA sense strand
gcaagagcacaacaauuug

SEQ ID NO: 209517 - RNA, 19 nt, Homo sapiens
  misc_RNA (1)...(19): siRNA sense strand
gcacaacaauuuggucaac

SEQ ID NO: 209518 - RNA, 19 nt, Homo sapiens
  misc_RNA (1)...(19): siRNA sense strand
agcaagagcacaacaauuu

SEQ ID NO: 209519 - RNA, 19 nt, Homo sapiens
  misc_RNA (1)...(19): siRNA sense strand
agaagauguucgagacuuu

SEQ ID NO: 209520 - RNA, 19 nt, Homo sapiens
  misc_RNA (1)...(19): siRNA sense strand
gagcaagagcacaacaauu

SEQ ID NO: 209521 - RNA, 19 nt, Homo sapiens
  misc_RNA (1)...(19): siRNA sense strand
ucaagcaaguggcaaguuc

SEQ ID NO: 209522 - RNA, 19 nt, Homo sapiens
  misc_RNA (1)...(19): siRNA sense strand
ccacgagacucaaacaacu

SEQ ID NO: 209523 - RNA, 19 nt, Homo sapiens
  misc_RNA (1)...(19): siRNA sense strand
cagcacaaccucaagcaaa

SEQ ID NO: 209524 - RNA, 19 nt, Homo sapiens
  misc_RNA (1)...(19): siRNA sense strand
gcaaagaguguccaaucau

SEQ ID NO: 209525 - RNA, 19 nt, Homo sapiens
  misc_RNA (1)...(19): siRNA sense strand
auggauauccugcagauua

SEQ ID NO: 209526 - RNA, 19 nt, Homo sapiens
  misc_RNA (1)...(19): siRNA sense strand
uguaacaucugcaaagagu

SEQ ID NO: 209527 - RNA, 19 nt, Homo sapiens
  misc_RNA (1)...(19): siRNA sense strand
guccggagcugcuuccaau

SEQ ID NO: 209528 - RNA, 19 nt, Homo sapiens
  misc_RNA (1)...(19): siRNA sense strand
gcaaguggcaaguucaaca

SEQ ID NO: 209529 - RNA, 19 nt, Homo sapiens
  misc_RNA (1)...(19): siRNA sense strand
gcuuccaauuugcuaauaa

SEQ ID NO: 209530 - RNA, 19 nt, Homo sapiens
  misc_RNA (1)...(19): siRNA sense strand
uggaagacaaguacagaua

SEQ ID NO: 209531 - RNA, 19 nt, Homo sapiens
  misc_RNA (1)...(19): siRNA sense strand
ggauccguguccugucuuu

SEQ ID NO: 209532 - RNA, 19 nt, Homo sapiens
  misc_RNA (1)...(19): siRNA sense strand
gucuuuagcugaccugaau

SEQ ID NO: 209533 - RNA, 19 nt, Homo sapiens
  misc_RNA (1)...(19): siRNA sense strand
gacaaguacagauaccuuu

SEQ ID NO: 209534 - RNA, 19 nt, Homo sapiens
  misc_RNA (1)...(19): siRNA sense strand
ccaagcaucaggccaaaug

SEQ ID NO: 209535 - RNA, 19 nt, Homo sapiens
  misc_RNA (1)...(19): siRNA sense strand
ggagcaagagcacaacaau

SEQ ID NO: 209536 - RNA, 19 nt, Homo sapiens
  misc_RNA (1)...(19): siRNA sense strand
guguaaagcacauuuggaa

SEQ ID NO: 209537 - RNA, 19 nt, Homo sapiens
  misc_RNA (1)...(19): siRNA sense strand
caagacaguugggugaagu

SEQ ID NO: 209538 - RNA, 19 nt, Homo sapiens
  misc_RNA (1)...(19): siRNA sense strand
gaagauguucgagacuuug

SEQ ID NO: 209539 - RNA, 19 nt, Homo sapiens
  misc_RNA (1)...(19): siRNA sense strand
gucagauucucagcuuaua

SEQ ID NO: 209540 - RNA, 19 nt, Homo sapiens
  misc_RNA (1)...(19): siRNA sense strand
uaacaucugcaaagagugu

SEQ ID NO: 209541 - RNA, 19 nt, Homo sapiens
  misc_RNA (1)...(19): siRNA sense strand
cggagcugcuuccaauuug

SEQ ID NO: 209542 - RNA, 19 nt, Homo sapiens
  misc_RNA (1)...(19): siRNA sense strand
gaagacaaguacagauacc

SEQ ID NO: 209543 - RNA, 19 nt, Homo sapiens
  misc_RNA (1)...(19): siRNA sense strand
ccauggauauccugcagau

SEQ ID NO: 209544 - RNA, 19 nt, Homo sapiens
  misc_RNA (1)...(19): siRNA sense strand
ggcaucauuucccugugua

SEQ ID NO: 209545 - RNA, 19 nt, Homo sapiens
  misc_RNA (1)...(19): siRNA sense strand
uggauauccugcagauuau

SEQ ID NO: 209546 - RNA, 19 nt, Homo sapiens
  misc_RNA (1)...(19): siRNA sense strand
ggaagacaaguacagauac

SEQ ID NO: 209547 - RNA, 19 nt, Homo sapiens
  misc_RNA (1)...(19): siRNA sense strand
ugcaaagaguguccaauca

SEQ ID NO: 209548 - RNA, 19 nt, Homo sapiens
  misc_RNA (1)...(19): siRNA sense strand
guggauaugugucugaacu

SEQ ID NO: 209549 - RNA, 19 nt, Homo sapiens
  misc_RNA (1)...(19): siRNA sense strand
acuggcugcugaauguuua

SEQ ID NO: 209550 - RNA, 19 nt, Homo sapiens
  misc_RNA (1)...(19): siRNA sense strand
acuaucccaugguggaaua

SEQ ID NO: 209551 - RNA, 19 nt, Homo sapiens
  misc_RNA (1)...(19): siRNA sense strand
ccggagcugcuuccaauuu

SEQ ID NO: 209552 - RNA, 19 nt, Homo sapiens
  misc_RNA (1)...(19): siRNA sense strand
ccaaauuccaagacaguug

SEQ ID NO: 209553 - RNA, 19 nt, Homo sapiens
  misc_RNA (1)...(19): siRNA sense strand
cagaaacugccaagcauca

SEQ ID NO: 209554 - RNA, 19 nt, Homo sapiens
  misc_RNA (1)...(19): siRNA sense strand
uaugacaucugccaaagcu

SEQ ID NO: 209555 - RNA, 19 nt, Homo sapiens
  misc_RNA (1)...(19): siRNA sense strand
aaugucagauucucagcuu

SEQ ID NO: 209556 - RNA, 19 nt, Homo sapiens
  misc_RNA (1)...(19): siRNA sense strand
ucgagacuuugccaaggua

SEQ ID NO: 209557 - RNA, 19 nt, Homo sapiens
  misc_RNA (1)...(19): siRNA sense strand
gcaaaaggccauaaaaugc

SEQ ID NO: 209558 - RNA, 19 nt, Homo sapiens
  misc_RNA (1)...(19): siRNA sense strand
cugcaugauucuauccaaa

SEQ ID NO: 209559 - RNA, 19 nt, Homo sapiens
  misc_RNA (1)...(19): siRNA sense strand
uaaagcacauuuggaagac

SEQ ID NO: 209560 - RNA, 19 nt, Homo sapiens
  misc_RNA (1)...(19): siRNA sense strand
acaggagucuaaagcacuu

SEQ ID NO: 209561 - RNA, 19 nt, Homo sapiens
  misc_RNA (1)...(19): siRNA sense strand
acagauaccuuuucaagca

SEQ ID NO: 209562 - RNA, 19 nt, Homo sapiens
  misc_RNA (1)...(19): siRNA sense strand
aagcacauuuggaagacaa

SEQ ID NO: 209563 - RNA, 19 nt, Homo sapiens
  misc_RNA (1)...(19): siRNA sense strand
gcuaauaauaagccagaga

SEQ ID NO: 209564 - RNA, 19 nt, Homo sapiens
  misc_RNA (1)...(19): siRNA sense strand
caagagcacaacaauuugg

SEQ ID NO: 209565 - RNA, 19 nt, Homo sapiens
  misc_RNA (1)...(19): siRNA sense strand
ccugucagcugcaugugau

SEQ ID NO: 209566 - RNA, 19 nt, Homo sapiens
  misc_RNA (1)...(19): siRNA sense strand
gcugcugaauguuuaugau

SEQ ID NO: 209567 - RNA, 19 nt, Homo sapiens
  misc_RNA (1)...(19): siRNA sense strand
acagagcucuaccagucuu

SEQ ID NO: 209568 - RNA, 19 nt, Homo sapiens
  misc_RNA (1)...(19): siRNA sense strand
acaguugggugaaguugca

SEQ ID NO: 209569 - RNA, 19 nt, Homo sapiens
  misc_RNA (1)...(19): siRNA sense strand
guuugaccacuauuuauga

SEQ ID NO: 209570 - RNA, 19 nt, Homo sapiens
  misc_RNA (1)...(19): siRNA sense strand
gcuuauaggacugccauga

SEQ ID NO: 209571 - RNA, 19 nt, Homo sapiens
  misc_RNA (1)...(19): siRNA sense strand
caucaggccaaauguaaca

SEQ ID NO: 209572 - RNA, 19 nt, Homo sapiens
  misc_RNA (1)...(19): siRNA sense strand
gauucuauccaaauuccaa

SEQ ID NO: 209573 - RNA, 19 nt, Homo sapiens
  misc_RNA (1)...(19): siRNA sense strand
ggcaaguucaacaggauuu

SEQ ID NO: 209574 - RNA, 19 nt, Homo sapiens
  misc_RNA (1)...(19): siRNA sense strand
gaacuggcugcugaauguu

SEQ ID NO: 209575 - RNA, 19 nt, Homo sapiens
  misc_RNA (1)...(19): siRNA sense strand
cugcugaauguuuaugaua

SEQ ID NO: 209576 - RNA, 19 nt, Homo sapiens
  misc_RNA (1)...(19): siRNA sense strand
aagcaucaggccaaaugua

SEQ ID NO: 209577 - RNA, 19 nt, Homo sapiens
  misc_RNA (1)...(19): siRNA sense strand
uggcaucauuucccugugu

SEQ ID NO: 209578 - RNA, 19 nt, Homo sapiens
  misc_RNA (1)...(19): siRNA sense strand
ccaugaaacuccgaagacu

SEQ ID NO: 209579 - RNA, 19 nt, Homo sapiens
  misc_RNA (1)...(19): siRNA sense strand
auaauaagccagagaucga

SEQ ID NO: 209580 - RNA, 19 nt, Homo sapiens
  misc_RNA (1)...(19): siRNA sense strand
cuaauaauaagccagagau

SEQ ID NO: 209581 - RNA, 19 nt, Homo sapiens
  misc_RNA (1)...(19): siRNA sense strand
ugggugaaguugcauccuu

SEQ ID NO: 209582 - RNA, 19 nt, Homo sapiens
  misc_RNA (1)...(19): siRNA sense strand
caucauuucccuguguaaa

SEQ ID NO: 209583 - RNA, 19 nt, Homo sapiens
  misc_RNA (1)...(19): siRNA sense strand
gcguggauaugugucugaa

SEQ ID NO: 209584 - RNA, 19 nt, Homo sapiens
  misc_RNA (1)...(19): siRNA sense strand
gcacuaucccaugguggaa

SEQ ID NO: 209585 - RNA, 19 nt, Homo sapiens
  misc_RNA (1)...(19): siRNA sense strand
gagccugucagcugcaugu

SEQ ID NO: 209586 - RNA, 19 nt, Homo sapiens
  misc_RNA (1)...(19): siRNA sense strand
guacagauaccuuuucaag

SEQ ID NO: 209587 - RNA, 19 nt, Homo sapiens
  misc_RNA (1)...(19): siRNA sense strand
gucccucucugcguggaua

SEQ ID NO: 209588 - RNA, 19 nt, Homo sapiens
  misc_RNA (1)...(19): siRNA sense strand
ggagcugcuuccaauuugc

SEQ ID NO: 209589 - RNA, 19 nt, Homo sapiens
  misc_RNA (1)...(19): siRNA sense strand
uuagcugaccugaauaaug

SEQ ID NO: 209590 - RNA, 19 nt, Homo sapiens
  misc_RNA (1)...(19): siRNA sense strand
guggcaaguucaacaggau

SEQ ID NO: 209591 - RNA, 19 nt, Homo sapiens
  misc_RNA (1)...(19): siRNA sense strand
acaacaauuuggucaacgu

SEQ ID NO: 209592 - RNA, 19 nt, Homo sapiens
  misc_RNA (1)...(19): siRNA sense strand
gacuacaucaggagaagau

SEQ ID NO: 209593 - RNA, 19 nt, Homo sapiens
  misc_RNA (1)...(19): siRNA sense strand
uaauaagccagagaucgaa

SEQ ID NO: 209594 - RNA, 19 nt, Homo sapiens
  misc_RNA (1)...(19): siRNA sense strand
ugucagauucucagcuuau

SEQ ID NO: 209595 - RNA, 19 nt, Homo sapiens
  misc_RNA (1)...(19): siRNA sense strand
ggauauccugcagauuauu

SEQ ID NO: 209596 - RNA, 19 nt, Homo sapiens
  misc_RNA (1)...(19): siRNA sense strand
agcaucaggccaaauguaa

SEQ ID NO: 209597 - RNA, 19 nt, Homo sapiens
  misc_RNA (1)...(19): siRNA sense strand
gcccuuugcuuggaucucu

SEQ ID NO: 209598 - RNA, 19 nt, Homo sapiens
  misc_RNA (1)...(19): siRNA sense strand
gcugaauguuuaugauacg

SEQ ID NO: 209599 - RNA, 19 nt, Homo sapiens
  misc_RNA (1)...(19): siRNA sense strand
agacuuugccaagguacua

SEQ ID NO: 209600 - RNA, 19 nt, Homo sapiens
  misc_RNA (1)...(19): siRNA sense strand
caagcaaguggcaaguuca

SEQ ID NO: 209601 - RNA, 19 nt, Homo sapiens
  misc_RNA (1)...(19): siRNA sense strand
agacaaguacagauaccuu

SEQ ID NO: 209602 - RNA, 19 nt, Homo sapiens
  misc_RNA (1)...(19): siRNA sense strand
gcaucauuucccuguguaa

SEQ ID NO: 209603 - RNA, 19 nt, Homo sapiens
  misc_RNA (1)...(19): siRNA sense strand
cugcaaagaguguccaauc

SEQ ID NO: 209604 - RNA, 19 nt, Homo sapiens
  misc_RNA (1)...(19): siRNA sense strand
cuuauaggacugccaugaa

SEQ ID NO: 209605 - RNA, 19 nt, Homo sapiens
  misc_RNA (1)...(19): siRNA sense strand
caaagaguguccaaucauu

SEQ ID NO: 209606 - RNA, 19 nt, Homo sapiens
  misc_RNA (1)...(19): siRNA sense strand
uagcugaccugaauaaugu

SEQ ID NO: 209607 - RNA, 19 nt, Homo sapiens
  misc_RNA (1)...(19): siRNA sense strand
gcaugauucuauccaaauu

SEQ ID NO: 209608 - RNA, 19 nt, Homo sapiens
  misc_RNA (1)...(19): siRNA sense strand
ugaacuggcugcugaaugu

SEQ ID NO: 209609 - RNA, 19 nt, Homo sapiens
  misc_RNA (1)...(19): siRNA sense strand
gauauccugcagauuauua

SEQ ID NO: 209610 - RNA, 19 nt, Homo sapiens
  misc_RNA (1)...(19): siRNA sense strand
gagaagauguucgagacuu

SEQ ID NO: 209611 - RNA, 19 nt, Homo sapiens
  misc_RNA (1)...(19): siRNA sense strand
gcacuuuaauuaugacauc

SEQ ID NO: 209612 - RNA, 19 nt, Homo sapiens
  misc_RNA (1)...(19): siRNA sense strand
guaaagcacauuuggaaga

SEQ ID NO: 209613 - RNA, 19 nt, Homo sapiens
  misc_RNA (1)...(19): siRNA sense strand
gaauauugcacuccgacua

SEQ ID NO: 209614 - RNA, 19 nt, Homo sapiens
  misc_RNA (1)...(19): siRNA sense strand
uuauaggacugccaugaaa

SEQ ID NO: 209615 - RNA, 19 nt, Homo sapiens
  misc_RNA (1)...(19): siRNA sense strand
gggugaaguugcauccuuu

SEQ ID NO: 209616 - RNA, 19 nt, Homo sapiens
  misc_RNA (1)...(19): siRNA sense strand
gcaagagcacaacaauuug

SEQ ID NO: 209617 - RNA, 19 nt, Homo sapiens
  misc_RNA (1)...(19): siRNA sense strand
gcacaacaauuuggucaac

SEQ ID NO: 209618 - RNA, 19 nt, Homo sapiens
  misc_RNA (1)...(19): siRNA sense strand
agcaagagcacaacaauuu

SEQ ID NO: 209619 - RNA, 19 nt, Homo sapiens
  misc_RNA (1)...(19): siRNA sense strand
agaagauguucgagacuuu

SEQ ID NO: 209620 - RNA, 19 nt, Homo sapiens
  misc_RNA (1)...(19): siRNA sense strand
gagcaagagcacaacaauu

SEQ ID NO: 209621 - RNA, 19 nt, Homo sapiens
  misc_RNA (1)...(19): siRNA sense strand
ucaagcaaguggcaaguuc

SEQ ID NO: 209622 - RNA, 19 nt, Homo sapiens
  misc_RNA (1)...(19): siRNA sense strand
ccacgagacucaaacaacu

SEQ ID NO: 209623 - RNA, 19 nt, Homo sapiens
  misc_RNA (1)...(19): siRNA sense strand
cagcacaaccucaagcaaa

SEQ ID NO: 209624 - RNA, 19 nt, Homo sapiens
  misc_RNA (1)...(19): siRNA sense strand
gcaaagaguguccaaucau

SEQ ID NO: 209625 - RNA, 19 nt, Homo sapiens
  misc_RNA (1)...(19): siRNA sense strand
auggauauccugcagauua

SEQ ID NO: 209626 - RNA, 19 nt, Homo sapiens
  misc_RNA (1)...(19): siRNA sense strand
uguaacaucugcaaagagu

SEQ ID NO: 209627 - RNA, 19 nt, Homo sapiens
  misc_RNA (1)...(19): siRNA sense strand
guccggagcugcuuccaau

SEQ ID NO: 209628 - RNA, 19 nt, Homo sapiens
  misc_RNA (1)...(19): siRNA sense strand
gcaaguggcaaguucaaca

SEQ ID NO: 209629 - RNA, 19 nt, Homo sapiens
  misc_RNA (1)...(19): siRNA sense strand
gcuuccaauuugcuaauaa

SEQ ID NO: 209630 - RNA, 19 nt, Homo sapiens
  misc_RNA (1)...(19): siRNA sense strand
uggaagacaaguacagaua

SEQ ID NO: 209631 - RNA, 19 nt, Homo sapiens
  misc_RNA (1)...(19): siRNA sense strand
ggauccguguccugucuuu

SEQ ID NO: 209632 - RNA, 19 nt, Homo sapiens
  misc_RNA (1)...(19): siRNA sense strand
gucuuuagcugaccugaau

SEQ ID NO: 209633 - RNA, 19 nt, Homo sapiens
  misc_RNA (1)...(19): siRNA sense strand
gacaaguacagauaccuuu

SEQ ID NO: 209634 - RNA, 19 nt, Homo sapiens
  misc_RNA (1)...(19): siRNA sense strand
ccaagcaucaggccaaaug

SEQ ID NO: 209635 - RNA, 19 nt, Homo sapiens
  misc_RNA (1)...(19): siRNA sense strand
ggagcaagagcacaacaau

SEQ ID NO: 209636 - RNA, 19 nt, Homo sapiens
  misc_RNA (1)...(19): siRNA sense strand
guguaaagcacauuuggaa

SEQ ID NO: 209637 - RNA, 19 nt, Homo sapiens
  misc_RNA (1)...(19): siRNA sense strand
caagacaguugggugaagu

SEQ ID NO: 209638 - RNA, 19 nt, Homo sapiens
  misc_RNA (1)...(19): siRNA sense strand
gaagauguucgagacuuug

SEQ ID NO: 209639 - RNA, 19 nt, Homo sapiens
  misc_RNA (1)...(19): siRNA sense strand
gucagauucucagcuuaua

SEQ ID NO: 209640 - RNA, 19 nt, Homo sapiens
  misc_RNA (1)...(19): siRNA sense strand
uaacaucugcaaagagugu

SEQ ID NO: 209641 - RNA, 19 nt, Homo sapiens
  misc_RNA (1)...(19): siRNA sense strand
cggagcugcuuccaauuug

SEQ ID NO: 209642 - RNA, 19 nt, Homo sapiens
  misc_RNA (1)...(19): siRNA sense strand
gaagacaaguacagauacc

SEQ ID NO: 209643 - RNA, 19 nt, Homo sapiens
  misc_RNA (1)...(19): siRNA sense strand
ccauggauauccugcagau

SEQ ID NO: 209644 - RNA, 19 nt, Homo sapiens
  misc_RNA (1)...(19): siRNA sense strand
ggcaucauuucccugugua

SEQ ID NO: 209645 - RNA, 19 nt, Homo sapiens
  misc_RNA (1)...(19): siRNA sense strand
uggauauccugcagauuau

SEQ ID NO: 209646 - RNA, 19 nt, Homo sapiens
  misc_RNA (1)...(19): siRNA sense strand
ggaagacaaguacagauac

SEQ ID NO: 209647 - RNA, 19 nt, Homo sapiens
  misc_RNA (1)...(19): siRNA sense strand
ugcaaagaguguccaauca

SEQ ID NO: 209648 - RNA, 19 nt, Homo sapiens
  misc_RNA (1)...(19): siRNA sense strand
guggauaugugucugaacu

SEQ ID NO: 209649 - RNA, 19 nt, Homo sapiens
  misc_RNA (1)...(19): siRNA sense strand
acuggcugcugaauguuua

SEQ ID NO: 209650 - RNA, 19 nt, Homo sapiens
  misc_RNA (1)...(19): siRNA sense strand
acuaucccaugguggaaua

SEQ ID NO: 209651 - RNA, 19 nt, Homo sapiens
  misc_RNA (1)...(19): siRNA sense strand
ccggagcugcuuccaauuu

SEQ ID NO: 209652 - RNA, 19 nt, Homo sapiens
  misc_RNA (1)...(19): siRNA sense strand
ccaaauuccaagacaguug

SEQ ID NO: 209653 - RNA, 19 nt, Homo sapiens
  misc_RNA (1)...(19): siRNA sense strand
cagaaacugccaagcauca

SEQ ID NO: 209654 - RNA, 19 nt, Homo sapiens
  misc_RNA (1)...(19): siRNA sense strand
uaugacaucugccaaagcu

SEQ ID NO: 209655 - RNA, 19 nt, Homo sapiens
  misc_RNA (1)...(19): siRNA sense strand
aaugucagauucucagcuu

SEQ ID NO: 209656 - RNA, 19 nt, Homo sapiens
  misc_RNA (1)...(19): siRNA sense strand
ucgagacuuugccaaggua

SEQ ID NO: 209657 - RNA, 19 nt, Homo sapiens
  misc_RNA (1)...(19): siRNA sense strand
gcaaaaggccauaaaaugc

SEQ ID NO: 209658 - RNA, 19 nt, Homo sapiens
  misc_RNA (1)...(19): siRNA sense strand
cugcaugauucuauccaaa

SEQ ID NO: 209659 - RNA, 19 nt, Homo sapiens
  misc_RNA (1)...(19): siRNA sense strand
uaaagcacauuuggaagac

SEQ ID NO: 209660 - RNA, 19 nt, Homo sapiens
  misc_RNA (1)...(19): siRNA sense strand
acaggagucuaaagcacuu

SEQ ID NO: 209661 - RNA, 19 nt, Homo sapiens
  misc_RNA (1)...(19): siRNA sense strand
acagauaccuuuucaagca

SEQ ID NO: 209662 - RNA, 19 nt, Homo sapiens
  misc_RNA (1)...(19): siRNA sense strand
aagcacauuuggaagacaa

SEQ ID NO: 209663 - RNA, 19 nt, Homo sapiens
  misc_RNA (1)...(19): siRNA sense strand
gcuaauaauaagccagaga

SEQ ID NO: 209664 - RNA, 19 nt, Homo sapiens
  misc_RNA (1)...(19): siRNA sense strand
caagagcacaacaauuugg

SEQ ID NO: 209665 - RNA, 19 nt, Homo sapiens
  misc_RNA (1)...(19): siRNA sense strand
ccugucagcugcaugugau

SEQ ID NO: 209666 - RNA, 19 nt, Homo sapiens
  misc_RNA (1)...(19): siRNA sense strand
gcugcugaauguuuaugau

SEQ ID NO: 209667 - RNA, 19 nt, Homo sapiens
  misc_RNA (1)...(19): siRNA sense strand
acagagcucuaccagucuu

SEQ ID NO: 209668 - RNA, 19 nt, Homo sapiens
  misc_RNA (1)...(19): siRNA sense strand
acaguugggugaaguugca

SEQ ID NO: 209669 - RNA, 19 nt, Homo sapiens
  misc_RNA (1)...(19): siRNA sense strand
guuugaccacuauuuauga

SEQ ID NO: 209670 - RNA, 19 nt, Homo sapiens
  misc_RNA (1)...(19): siRNA sense strand
gcuuauaggacugccauga

SEQ ID NO: 209671 - RNA, 19 nt, Homo sapiens
  misc_RNA (1)...(19): siRNA sense strand
caucaggccaaauguaaca

SEQ ID NO: 209672 - RNA, 19 nt, Homo sapiens
  misc_RNA (1)...(19): siRNA sense strand
gauucuauccaaauuccaa

SEQ ID NO: 209673 - RNA, 19 nt, Homo sapiens
  misc_RNA (1)...(19): siRNA sense strand
ggcaaguucaacaggauuu

SEQ ID NO: 209674 - RNA, 19 nt, Homo sapiens
  misc_RNA (1)...(19): siRNA sense strand
gaacuggcugcugaauguu

SEQ ID NO: 209675 - RNA, 19 nt, Homo sapiens
  misc_RNA (1)...(19): siRNA sense strand
cugcugaauguuuaugaua

SEQ ID NO: 209676 - RNA, 19 nt, Homo sapiens
  misc_RNA (1)...(19): siRNA sense strand
aagcaucaggccaaaugua

SEQ ID NO: 209677 - RNA, 19 nt, Homo sapiens
  misc_RNA (1)...(19): siRNA sense strand
uggcaucauuucccugugu

SEQ ID NO: 209678 - RNA, 19 nt, Homo sapiens
  misc_RNA (1)...(19): siRNA sense strand
ccaugaaacuccgaagacu

SEQ ID NO: 209679 - RNA, 19 nt, Homo sapiens
  misc_RNA (1)...(19): siRNA sense strand
auaauaagccagagaucga

SEQ ID NO: 209680 - RNA, 19 nt, Homo sapiens
  misc_RNA (1)...(19): siRNA sense strand
cuaauaauaagccagagau

SEQ ID NO: 209681 - RNA, 19 nt, Homo sapiens
  misc_RNA (1)...(19): siRNA sense strand
ugggugaaguugcauccuu

SEQ ID NO: 209682 - RNA, 19 nt, Homo sapiens
  misc_RNA (1)...(19): siRNA sense strand
caucauuucccuguguaaa

SEQ ID NO: 209683 - RNA, 19 nt, Homo sapiens
  misc_RNA (1)...(19): siRNA sense strand
gcguggauaugugucugaa

SEQ ID NO: 209684 - RNA, 19 nt, Homo sapiens
  misc_RNA (1)...(19): siRNA sense strand
gcacuaucccaugguggaa

SEQ ID NO: 209685 - RNA, 19 nt, Homo sapiens
  misc_RNA (1)...(19): siRNA sense strand
gagccugucagcugcaugu

SEQ ID NO: 209686 - RNA, 19 nt, Homo sapiens
  misc_RNA (1)...(19): siRNA sense strand
guacagauaccuuuucaag

SEQ ID NO: 209687 - RNA, 19 nt, Homo sapiens
  misc_RNA (1)...(19): siRNA sense strand
gucccucucugcguggaua

SEQ ID NO: 209688 - RNA, 19 nt, Homo sapiens
  misc_RNA (1)...(19): siRNA sense strand
ggagcugcuuccaauuugc

SEQ ID NO: 209689 - RNA, 19 nt, Homo sapiens
  misc_RNA (1)...(19): siRNA sense strand
uuagcugaccugaauaaug

SEQ ID NO: 209690 - RNA, 19 nt, Homo sapiens
  misc_RNA (1)...(19): siRNA sense strand
guggcaaguucaacaggau

SEQ ID NO: 209691 - RNA, 19 nt, Homo sapiens
  misc_RNA (1)...(19): siRNA sense strand
acaacaauuuggucaacgu

SEQ ID NO: 209692 - RNA, 19 nt, Homo sapiens
  misc_RNA (1)...(19): siRNA sense strand
gacuacaucaggagaagau

SEQ ID NO: 209693 - RNA, 19 nt, Homo sapiens
  misc_RNA (1)...(19): siRNA sense strand
uaauaagccagagaucgaa

SEQ ID NO: 209694 - RNA, 19 nt, Homo sapiens
  misc_RNA (1)...(19): siRNA sense strand
ugucagauucucagcuuau

SEQ ID NO: 209695 - RNA, 19 nt, Homo sapiens
  misc_RNA (1)...(19): siRNA sense strand
ggauauccugcagauuauu

SEQ ID NO: 209696 - RNA, 19 nt, Homo sapiens
  misc_RNA (1)...(19): siRNA sense strand
agcaucaggccaaauguaa

SEQ ID NO: 209697 - RNA, 19 nt, Homo sapiens
  misc_RNA (1)...(19): siRNA sense strand
gcccuuugcuuggaucucu

SEQ ID NO: 209698 - RNA, 19 nt, Homo sapiens
  misc_RNA (1)...(19): siRNA sense strand
gcugaauguuuaugauacg

SEQ ID NO: 209699 - RNA, 19 nt, Homo sapiens
  misc_RNA (1)...(19): siRNA sense strand
agacuuugccaagguacua

SEQ ID NO: 209700 - RNA, 19 nt, Homo sapiens
  misc_RNA (1)...(19): siRNA sense strand
caagcaaguggcaaguuca

SEQ ID NO: 209701 - RNA, 19 nt, Homo sapiens
  misc_RNA (1)...(19): siRNA sense strand
agacaaguacagauaccuu

SEQ ID NO: 209702 - RNA, 19 nt, Homo sapiens
  misc_RNA (1)...(19): siRNA sense strand
gcaucauuucccuguguaa

SEQ ID NO: 209703 - RNA, 19 nt, Homo sapiens
  misc_RNA (1)...(19): siRNA sense strand
cugcaaagaguguccaauc

SEQ ID NO: 209704 - RNA, 19 nt, Homo sapiens
  misc_RNA (1)...(19): siRNA sense strand
cuuauaggacugccaugaa

SEQ ID NO: 209705 - RNA, 19 nt, Homo sapiens
  misc_RNA (1)...(19): siRNA sense strand
caaagaguguccaaucauu

SEQ ID NO: 209706 - RNA, 19 nt, Homo sapiens
  misc_RNA (1)...(19): siRNA sense strand
uagcugaccugaauaaugu

SEQ ID NO: 209707 - RNA, 19 nt, Homo sapiens
  misc_RNA (1)...(19): siRNA sense strand
gcaugauucuauccaaauu

SEQ ID NO: 209708 - RNA, 19 nt, Homo sapiens
  misc_RNA (1)...(19): siRNA sense strand
ugaacuggcugcugaaugu

SEQ ID NO: 209709 - RNA, 19 nt, Homo sapiens
  misc_RNA (1)...(19): siRNA sense strand
gauauccugcagauuauua

SEQ ID NO: 209710 - RNA, 19 nt, Homo sapiens
  misc_RNA (1)...(19): siRNA sense strand
gagaagauguucgagacuu

SEQ ID NO: 209711 - RNA, 19 nt, Homo sapiens
  misc_RNA (1)...(19): siRNA sense strand
gcacuuuaauuaugacauc

SEQ ID NO: 209712 - RNA, 19 nt, Homo sapiens
  misc_RNA (1)...(19): siRNA sense strand
guaaagcacauuuggaaga

SEQ ID NO: 209713 - RNA, 19 nt, Homo sapiens
  misc_RNA (1)...(19): siRNA sense strand
gaauauugcacuccgacua

SEQ ID NO: 209714 - RNA, 19 nt, Homo sapiens
  misc_RNA (1)...(19): siRNA sense strand
uuauaggacugccaugaaa

SEQ ID NO: 209715 - RNA, 19 nt, Homo sapiens
  misc_RNA (1)...(19): siRNA sense strand
gggugaaguugcauccuuu

SEQ ID NO: 209716 - RNA, 19 nt, Homo sapiens
  misc_RNA (1)...(19): siRNA sense strand
gcaagagcacaacaauuug

SEQ ID NO: 209717 - RNA, 19 nt, Homo sapiens
  misc_RNA (1)...(19): siRNA sense strand
gcacaacaauuuggucaac

SEQ ID NO: 209718 - RNA, 19 nt, Homo sapiens
  misc_RNA (1)...(19): siRNA sense strand
agcaagagcacaacaauuu

SEQ ID NO: 209719 - RNA, 19 nt, Homo sapiens
  misc_RNA (1)...(19): siRNA sense strand
agaagauguucgagacuuu

SEQ ID NO: 209720 - RNA, 19 nt, Homo sapiens
  misc_RNA (1)...(19): siRNA sense strand
gagcaagagcacaacaauu

SEQ ID NO: 209721 - RNA, 19 nt, Homo sapiens
  misc_RNA (1)...(19): siRNA sense strand
ucaagcaaguggcaaguuc

SEQ ID NO: 209722 - RNA, 19 nt, Homo sapiens
  misc_RNA (1)...(19): siRNA sense strand
ccacgagacucaaacaacu

SEQ ID NO: 209723 - RNA, 19 nt, Homo sapiens
  misc_RNA (1)...(19): siRNA sense strand
cagcacaaccucaagcaaa

SEQ ID NO: 209724 - RNA, 19 nt, Homo sapiens
  misc_RNA (1)...(19): siRNA sense strand
gcaaagaguguccaaucau

SEQ ID NO: 209725 - RNA, 19 nt, Homo sapiens
  misc_RNA (1)...(19): siRNA sense strand
auggauauccugcagauua

SEQ ID NO: 209726 - RNA, 19 nt, Homo sapiens
  misc_RNA (1)...(19): siRNA sense strand
uguaacaucugcaaagagu

SEQ ID NO: 209727 - RNA, 19 nt, Homo sapiens
  misc_RNA (1)...(19): siRNA sense strand
guccggagcugcuuccaau

SEQ ID NO: 209728 - RNA, 19 nt, Homo sapiens
  misc_RNA (1)...(19): siRNA sense strand
gcaaguggcaaguucaaca

SEQ ID NO: 209729 - RNA, 19 nt, Homo sapiens
  misc_RNA (1)...(19): siRNA sense strand
gcuuccaauuugcuaauaa

SEQ ID NO: 209730 - RNA, 19 nt, Homo sapiens
  misc_RNA (1)...(19): siRNA sense strand
uggaagacaaguacagaua

SEQ ID NO: 209731 - RNA, 19 nt, Homo sapiens
  misc_RNA (1)...(19): siRNA sense strand
ggauccguguccugucuuu

SEQ ID NO: 209732 - RNA, 19 nt, Homo sapiens
  misc_RNA (1)...(19): siRNA sense strand
gucuuuagcugaccugaau

SEQ ID NO: 209733 - RNA, 19 nt, Homo sapiens
  misc_RNA (1)...(19): siRNA sense strand
gacaaguacagauaccuuu

SEQ ID NO: 209734 - RNA, 19 nt, Homo sapiens
  misc_RNA (1)...(19): siRNA sense strand
ccaagcaucaggccaaaug

SEQ ID NO: 209735 - RNA, 19 nt, Homo sapiens
  misc_RNA (1)...(19): siRNA sense strand
ggagcaagagcacaacaau

SEQ ID NO: 209736 - RNA, 19 nt, Homo sapiens
  misc_RNA (1)...(19): siRNA sense strand
guguaaagcacauuuggaa

SEQ ID NO: 209737 - RNA, 19 nt, Homo sapiens
  misc_RNA (1)...(19): siRNA sense strand
caagacaguugggugaagu

SEQ ID NO: 209738 - RNA, 19 nt, Homo sapiens
  misc_RNA (1)...(19): siRNA sense strand
gaagauguucgagacuuug

SEQ ID NO: 209739 - RNA, 19 nt, Homo sapiens
  misc_RNA (1)...(19): siRNA sense strand
gucagauucucagcuuaua

SEQ ID NO: 209740 - RNA, 19 nt, Homo sapiens
  misc_RNA (1)...(19): siRNA sense strand
uaacaucugcaaagagugu

SEQ ID NO: 209741 - RNA, 19 nt, Homo sapiens
  misc_RNA (1)...(19): siRNA sense strand
cggagcugcuuccaauuug

SEQ ID NO: 209742 - RNA, 19 nt, Homo sapiens
  misc_RNA (1)...(19): siRNA sense strand
gaagacaaguacagauacc

SEQ ID NO: 209743 - RNA, 19 nt, Homo sapiens
  misc_RNA (1)...(19): siRNA sense strand
ccauggauauccugcagau

SEQ ID NO: 209744 - RNA, 19 nt, Homo sapiens
  misc_RNA (1)...(19): siRNA sense strand
ggcaucauuucccugugua

SEQ ID NO: 209745 - RNA, 19 nt, Homo sapiens
  misc_RNA (1)...(19): siRNA sense strand
uggauauccugcagauuau

SEQ ID NO: 209746 - RNA, 19 nt, Homo sapiens
  misc_RNA (1)...(19): siRNA sense strand
ggaagacaaguacagauac

SEQ ID NO: 209747 - RNA, 19 nt, Homo sapiens
  misc_RNA (1)...(19): siRNA sense strand
ugcaaagaguguccaauca

SEQ ID NO: 209748 - RNA, 19 nt, Homo sapiens
  misc_RNA (1)...(19): siRNA sense strand
guggauaugugucugaacu

SEQ ID NO: 209749 - RNA, 19 nt, Homo sapiens
  misc_RNA (1)...(19): siRNA sense strand
acuggcugcugaauguuua

SEQ ID NO: 209750 - RNA, 19 nt, Homo sapiens
  misc_RNA (1)...(19): siRNA sense strand
acuaucccaugguggaaua

SEQ ID NO: 209751 - RNA, 19 nt, Homo sapiens
  misc_RNA (1)...(19): siRNA sense strand
ccggagcugcuuccaauuu

SEQ ID NO: 209752 - RNA, 19 nt, Homo sapiens
  misc_RNA (1)...(19): siRNA sense strand
ccaaauuccaagacaguug

SEQ ID NO: 209753 - RNA, 19 nt, Homo sapiens
  misc_RNA (1)...(19): siRNA sense strand
cagaaacugccaagcauca

SEQ ID NO: 209754 - RNA, 19 nt, Homo sapiens
  misc_RNA (1)...(19): siRNA sense strand
uaugacaucugccaaagcu

SEQ ID NO: 209755 - RNA, 19 nt, Homo sapiens
  misc_RNA (1)...(19): siRNA sense strand
aaugucagauucucagcuu

SEQ ID NO: 209756 - RNA, 19 nt, Homo sapiens
  misc_RNA (1)...(19): siRNA sense strand
ucgagacuuugccaaggua

SEQ ID NO: 209757 - RNA, 19 nt, Homo sapiens
  misc_RNA (1)...(19): siRNA sense strand
gcaaaaggccauaaaaugc

SEQ ID NO: 209758 - RNA, 19 nt, Homo sapiens
  misc_RNA (1)...(19): siRNA sense strand
cugcaugauucuauccaaa

SEQ ID NO: 209759 - RNA, 19 nt, Homo sapiens
  misc_RNA (1)...(19): siRNA sense strand
uaaagcacauuuggaagac

SEQ ID NO: 209760 - RNA, 19 nt, Homo sapiens
  misc_RNA (1)...(19): siRNA sense strand
acaggagucuaaagcacuu

SEQ ID NO: 209761 - RNA, 19 nt, Homo sapiens
  misc_RNA (1)...(19): siRNA sense strand
acagauaccuuuucaagca

SEQ ID NO: 209762 - RNA, 19 nt, Homo sapiens
  misc_RNA (1)...(19): siRNA sense strand
aagcacauuuggaagacaa

SEQ ID NO: 209763 - RNA, 19 nt, Homo sapiens
  misc_RNA (1)...(19): siRNA sense strand
gcuaauaauaagccagaga

SEQ ID NO: 209764 - RNA, 19 nt, Homo sapiens
  misc_RNA (1)...(19): siRNA sense strand
caagagcacaacaauuugg

SEQ ID NO: 209765 - RNA, 19 nt, Homo sapiens
  misc_RNA (1)...(19): siRNA sense strand
ccugucagcugcaugugau

SEQ ID NO: 209766 - RNA, 19 nt, Homo sapiens
  misc_RNA (1)...(19): siRNA sense strand
gcugcugaauguuuaugau

SEQ ID NO: 209767 - RNA, 19 nt, Homo sapiens
  misc_RNA (1)...(19): siRNA sense strand
acagagcucuaccagucuu

SEQ ID NO: 209768 - RNA, 19 nt, Homo sapiens
  misc_RNA (1)...(19): siRNA sense strand
acaguugggugaaguugca

SEQ ID NO: 209769 - RNA, 19 nt, Homo sapiens
  misc_RNA (1)...(19): siRNA sense strand
guuugaccacuauuuauga

SEQ ID NO: 209770 - RNA, 19 nt, Homo sapiens
  misc_RNA (1)...(19): siRNA sense strand
gcuuauaggacugccauga

SEQ ID NO: 209771 - RNA, 19 nt, Homo sapiens
  misc_RNA (1)...(19): siRNA sense strand
caucaggccaaauguaaca

SEQ ID NO: 209772 - RNA, 19 nt, Homo sapiens
  misc_RNA (1)...(19): siRNA sense strand
gauucuauccaaauuccaa

SEQ ID NO: 209773 - RNA, 19 nt, Homo sapiens
  misc_RNA (1)...(19): siRNA sense strand
ggcaaguucaacaggauuu

SEQ ID NO: 209774 - RNA, 19 nt, Homo sapiens
  misc_RNA (1)...(19): siRNA sense strand
gaacuggcugcugaauguu

SEQ ID NO: 209775 - RNA, 19 nt, Homo sapiens
  misc_RNA (1)...(19): siRNA sense strand
cugcugaauguuuaugaua

SEQ ID NO: 209776 - RNA, 19 nt, Homo sapiens
  misc_RNA (1)...(19): siRNA sense strand
aagcaucaggccaaaugua

SEQ ID NO: 209777 - RNA, 19 nt, Homo sapiens
  misc_RNA (1)...(19): siRNA sense strand
uggcaucauuucccugugu

SEQ ID NO: 209778 - RNA, 19 nt, Homo sapiens
  misc_RNA (1)...(19): siRNA sense strand
ccaugaaacuccgaagacu

SEQ ID NO: 209779 - RNA, 19 nt, Homo sapiens
  misc_RNA (1)...(19): siRNA sense strand
auaauaagccagagaucga

SEQ ID NO: 209780 - RNA, 19 nt, Homo sapiens
  misc_RNA (1)...(19): siRNA sense strand
cuaauaauaagccagagau

SEQ ID NO: 209781 - RNA, 19 nt, Homo sapiens
  misc_RNA (1)...(19): siRNA sense strand
ugggugaaguugcauccuu

SEQ ID NO: 209782 - RNA, 19 nt, Homo sapiens
  misc_RNA (1)...(19): siRNA sense strand
caucauuucccuguguaaa

SEQ ID NO: 209783 - RNA, 19 nt, Homo sapiens
  misc_RNA (1)...(19): siRNA sense strand
gcguggauaugugucugaa

SEQ ID NO: 209784 - RNA, 19 nt, Homo sapiens
  misc_RNA (1)...(19): siRNA sense strand
gcacuaucccaugguggaa

SEQ ID NO: 209785 - RNA, 19 nt, Homo sapiens
  misc_RNA (1)...(19): siRNA sense strand
gagccugucagcugcaugu

SEQ ID NO: 209786 - RNA, 19 nt, Homo sapiens
  misc_RNA (1)...(19): siRNA sense strand
guacagauaccuuuucaag

SEQ ID NO: 209787 - RNA, 19 nt, Homo sapiens
  misc_RNA (1)...(19): siRNA sense strand
gucccucucugcguggaua

SEQ ID NO: 209788 - RNA, 19 nt, Homo sapiens
  misc_RNA (1)...(19): siRNA sense strand
ggagcugcuuccaauuugc

SEQ ID NO: 209789 - RNA, 19 nt, Homo sapiens
  misc_RNA (1)...(19): siRNA sense strand
uuagcugaccugaauaaug

SEQ ID NO: 209790 - RNA, 19 nt, Homo sapiens
  misc_RNA (1)...(19): siRNA sense strand
guggcaaguucaacaggau

SEQ ID NO: 209791 - RNA, 19 nt, Homo sapiens
  misc_RNA (1)...(19): siRNA sense strand
acaacaauuuggucaacgu

SEQ ID NO: 209792 - RNA, 19 nt, Homo sapiens
  misc_RNA (1)...(19): siRNA sense strand
gacuacaucaggagaagau

SEQ ID NO: 209793 - RNA, 19 nt, Homo sapiens
  misc_RNA (1)...(19): siRNA sense strand
uaauaagccagagaucgaa

SEQ ID NO: 209794 - RNA, 19 nt, Homo sapiens
  misc_RNA (1)...(19): siRNA sense strand
ugucagauucucagcuuau

SEQ ID NO: 209795 - RNA, 19 nt, Homo sapiens
  misc_RNA (1)...(19): siRNA sense strand
ggauauccugcagauuauu

SEQ ID NO: 209796 - RNA, 19 nt, Homo sapiens
  misc_RNA (1)...(19): siRNA sense strand
agcaucaggccaaauguaa

SEQ ID NO: 209797 - RNA, 19 nt, Homo sapiens
  misc_RNA (1)...(19): siRNA sense strand
gcccuuugcuuggaucucu

SEQ ID NO: 209798 - RNA, 19 nt, Homo sapiens
  misc_RNA (1)...(19): siRNA sense strand
gcugaauguuuaugauacg

SEQ ID NO: 209799 - RNA, 19 nt, Homo sapiens
  misc_RNA (1)...(19): siRNA sense strand
agacuuugccaagguacua

SEQ ID NO: 209800 - RNA, 19 nt, Homo sapiens
  misc_RNA (1)...(19): siRNA sense strand
caagcaaguggcaaguuca

SEQ ID NO: 209801 - RNA, 19 nt, Homo sapiens
  misc_RNA (1)...(19): siRNA sense strand
agacaaguacagauaccuu

SEQ ID NO: 209802 - RNA, 19 nt, Homo sapiens
  misc_RNA (1)...(19): siRNA sense strand
gcaucauuucccuguguaa

SEQ ID NO: 209803 - RNA, 19 nt, Homo sapiens
  misc_RNA (1)...(19): siRNA sense strand
cugcaaagaguguccaauc

SEQ ID NO: 209804 - RNA, 19 nt, Homo sapiens
  misc_RNA (1)...(19): siRNA sense strand
cuuauaggacugccaugaa

SEQ ID NO: 209805 - RNA, 19 nt, Homo sapiens
  misc_RNA (1)...(19): siRNA sense strand
caaagaguguccaaucauu

SEQ ID NO: 209806 - RNA, 19 nt, Homo sapiens
  misc_RNA (1)...(19): siRNA sense strand
uagcugaccugaauaaugu

SEQ ID NO: 209807 - RNA, 19 nt, Homo sapiens
  misc_RNA (1)...(19): siRNA sense strand
gcaugauucuauccaaauu

SEQ ID NO: 209808 - RNA, 19 nt, Homo sapiens
  misc_RNA (1)...(19): siRNA sense strand
ugaacuggcugcugaaugu

SEQ ID NO: 209809 - RNA, 19 nt, Homo sapiens
  misc_RNA (1)...(19): siRNA sense strand
gauauccugcagauuauua

SEQ ID NO: 209810 - RNA, 19 nt, Homo sapiens
  misc_RNA (1)...(19): siRNA sense strand
gagaagauguucgagacuu

SEQ ID NO: 209811 - RNA, 19 nt, Homo sapiens
  misc_RNA (1)...(19): siRNA sense strand
gcacuuuaauuaugacauc

SEQ ID NO: 209812 - RNA, 19 nt, Homo sapiens
  misc_RNA (1)...(19): siRNA sense strand
guaaagcacauuuggaaga

SEQ ID NO: 209813 - RNA, 19 nt, Homo sapiens
  misc_RNA (1)...(19): siRNA sense strand
gaauauugcacuccgacua

SEQ ID NO: 209814 - RNA, 19 nt, Homo sapiens
  misc_RNA (1)...(19): siRNA sense strand
uuauaggacugccaugaaa

SEQ ID NO: 209815 - RNA, 19 nt, Homo sapiens
  misc_RNA (1)...(19): siRNA sense strand
gggugaaguugcauccuuu

SEQ ID NO: 209816 - RNA, 19 nt, Homo sapiens
  misc_RNA (1)...(19): siRNA sense strand
gcaagagcacaacaauuug

SEQ ID NO: 209817 - RNA, 19 nt, Homo sapiens
  misc_RNA (1)...(19): siRNA sense strand
gcacaacaauuuggucaac

SEQ ID NO: 209818 - RNA, 19 nt, Homo sapiens
  misc_RNA (1)...(19): siRNA sense strand
agcaagagcacaacaauuu

SEQ ID NO: 209819 - RNA, 19 nt, Homo sapiens
  misc_RNA (1)...(19): siRNA sense strand
agaagauguucgagacuuu

SEQ ID NO: 209820 - RNA, 19 nt, Homo sapiens
  misc_RNA (1)...(19): siRNA sense strand
gagcaagagcacaacaauu

SEQ ID NO: 209821 - RNA, 19 nt, Homo sapiens
  misc_RNA (1)...(19): siRNA sense strand
ucaagcaaguggcaaguuc

SEQ ID NO: 209822 - RNA, 19 nt, Homo sapiens
  misc_RNA (1)...(19): siRNA sense strand
ccacgagacucaaacaacu

SEQ ID NO: 209823 - RNA, 19 nt, Homo sapiens
  misc_RNA (1)...(19): siRNA sense strand
cagcacaaccucaagcaaa

SEQ ID NO: 209824 - RNA, 19 nt, Homo sapiens
  misc_RNA (1)...(19): siRNA sense strand
gcaaagaguguccaaucau

SEQ ID NO: 209825 - RNA, 19 nt, Homo sapiens
  misc_RNA (1)...(19): siRNA sense strand
auggauauccugcagauua

SEQ ID NO: 209826 - RNA, 19 nt, Homo sapiens
  misc_RNA (1)...(19): siRNA sense strand
uguaacaucugcaaagagu

SEQ ID NO: 209827 - RNA, 19 nt, Homo sapiens
  misc_RNA (1)...(19): siRNA sense strand
guccggagcugcuuccaau

SEQ ID NO: 209828 - RNA, 19 nt, Homo sapiens
  misc_RNA (1)...(19): siRNA sense strand
gcaaguggcaaguucaaca

SEQ ID NO: 209829 - RNA, 19 nt, Homo sapiens
  misc_RNA (1)...(19): siRNA sense strand
gcuuccaauuugcuaauaa

SEQ ID NO: 209830 - RNA, 19 nt, Homo sapiens
  misc_RNA (1)...(19): siRNA sense strand
uggaagacaaguacagaua

SEQ ID NO: 209831 - RNA, 19 nt, Homo sapiens
  misc_RNA (1)...(19): siRNA sense strand
ggauccguguccugucuuu

SEQ ID NO: 209832 - RNA, 19 nt, Homo sapiens
  misc_RNA (1)...(19): siRNA sense strand
gucuuuagcugaccugaau

SEQ ID NO: 209833 - RNA, 19 nt, Homo sapiens
  misc_RNA (1)...(19): siRNA sense strand
gacaaguacagauaccuuu

SEQ ID NO: 209834 - RNA, 19 nt, Homo sapiens
  misc_RNA (1)...(19): siRNA sense strand
ccaagcaucaggccaaaug

SEQ ID NO: 209835 - RNA, 19 nt, Homo sapiens
  misc_RNA (1)...(19): siRNA sense strand
ggagcaagagcacaacaau

SEQ ID NO: 209836 - RNA, 19 nt, Homo sapiens
  misc_RNA (1)...(19): siRNA sense strand
guguaaagcacauuuggaa

SEQ ID NO: 209837 - RNA, 19 nt, Homo sapiens
  misc_RNA (1)...(19): siRNA sense strand
caagacaguugggugaagu

SEQ ID NO: 209838 - RNA, 19 nt, Homo sapiens
  misc_RNA (1)...(19): siRNA sense strand
gaagauguucgagacuuug

SEQ ID NO: 209839 - RNA, 19 nt, Homo sapiens
  misc_RNA (1)...(19): siRNA sense strand
gucagauucucagcuuaua

SEQ ID NO: 209840 - RNA, 19 nt, Homo sapiens
  misc_RNA (1)...(19): siRNA sense strand
uaacaucugcaaagagugu

SEQ ID NO: 209841 - RNA, 19 nt, Homo sapiens
  misc_RNA (1)...(19): siRNA sense strand
cggagcugcuuccaauuug

SEQ ID NO: 209842 - RNA, 19 nt, Homo sapiens
  misc_RNA (1)...(19): siRNA sense strand
gaagacaaguacagauacc

SEQ ID NO: 209843 - RNA, 19 nt, Homo sapiens
  misc_RNA (1)...(19): siRNA sense strand
ccauggauauccugcagau

SEQ ID NO: 209844 - RNA, 19 nt, Homo sapiens
  misc_RNA (1)...(19): siRNA sense strand
ggcaucauuucccugugua

SEQ ID NO: 209845 - RNA, 19 nt, Homo sapiens
  misc_RNA (1)...(19): siRNA sense strand
uggauauccugcagauuau

SEQ ID NO: 209846 - RNA, 19 nt, Homo sapiens
  misc_RNA (1)...(19): siRNA sense strand
ggaagacaaguacagauac

SEQ ID NO: 209847 - RNA, 19 nt, Homo sapiens
  misc_RNA (1)...(19): siRNA sense strand
ugcaaagaguguccaauca

SEQ ID NO: 209848 - RNA, 19 nt, Homo sapiens
  misc_RNA (1)...(19): siRNA sense strand
guggauaugugucugaacu

SEQ ID NO: 209849 - RNA, 19 nt, Homo sapiens
  misc_RNA (1)...(19): siRNA sense strand
acuggcugcugaauguuua

SEQ ID NO: 209850 - RNA, 19 nt, Homo sapiens
  misc_RNA (1)...(19): siRNA sense strand
acuaucccaugguggaaua

SEQ ID NO: 209851 - RNA, 19 nt, Homo sapiens
  misc_RNA (1)...(19): siRNA sense strand
ccggagcugcuuccaauuu

SEQ ID NO: 209852 - RNA, 19 nt, Homo sapiens
  misc_RNA (1)...(19): siRNA sense strand
ccaaauuccaagacaguug

SEQ ID NO: 209853 - RNA, 19 nt, Homo sapiens
  misc_RNA (1)...(19): siRNA sense strand
cagaaacugccaagcauca

SEQ ID NO: 209854 - RNA, 19 nt, Homo sapiens
  misc_RNA (1)...(19): siRNA sense strand
uaugacaucugccaaagcu

SEQ ID NO: 209855 - RNA, 19 nt, Homo sapiens
  misc_RNA (1)...(19): siRNA sense strand
aaugucagauucucagcuu

SEQ ID NO: 209856 - RNA, 19 nt, Homo sapiens
  misc_RNA (1)...(19): siRNA sense strand
ucgagacuuugccaaggua

SEQ ID NO: 209857 - RNA, 19 nt, Homo sapiens
  misc_RNA (1)...(19): siRNA sense strand
gcaaaaggccauaaaaugc

SEQ ID NO: 209858 - RNA, 19 nt, Homo sapiens
  misc_RNA (1)...(19): siRNA sense strand
cugcaugauucuauccaaa

SEQ ID NO: 209859 - RNA, 19 nt, Homo sapiens
  misc_RNA (1)...(19): siRNA sense strand
uaaagcacauuuggaagac

SEQ ID NO: 209860 - RNA, 19 nt, Homo sapiens
  misc_RNA (1)...(19): siRNA sense strand
acaggagucuaaagcacuu

SEQ ID NO: 209861 - RNA, 19 nt, Homo sapiens
  misc_RNA (1)...(19): siRNA sense strand
acagauaccuuuucaagca

SEQ ID NO: 209862 - RNA, 19 nt, Homo sapiens
  misc_RNA (1)...(19): siRNA sense strand
aagcacauuuggaagacaa

SEQ ID NO: 209863 - RNA, 19 nt, Homo sapiens
  misc_RNA (1)...(19): siRNA sense strand
gcuaauaauaagccagaga

SEQ ID NO: 209864 - RNA, 19 nt, Homo sapiens
  misc_RNA (1)...(19): siRNA sense strand
caagagcacaacaauuugg

SEQ ID NO: 209865 - RNA, 19 nt, Homo sapiens
  misc_RNA (1)...(19): siRNA sense strand
ccugucagcugcaugugau

SEQ ID NO: 209866 - RNA, 19 nt, Homo sapiens
  misc_RNA (1)...(19): siRNA sense strand
gcugcugaauguuuaugau

SEQ ID NO: 209867 - RNA, 19 nt, Homo sapiens
  misc_RNA (1)...(19): siRNA sense strand
acagagcucuaccagucuu

SEQ ID NO: 209868 - RNA, 19 nt, Homo sapiens
  misc_RNA (1)...(19): siRNA sense strand
acaguugggugaaguugca

SEQ ID NO: 209869 - RNA, 19 nt, Homo sapiens
  misc_RNA (1)...(19): siRNA sense strand
guuugaccacuauuuauga

SEQ ID NO: 209870 - RNA, 19 nt, Homo sapiens
  misc_RNA (1)...(19): siRNA sense strand
gcuuauaggacugccauga

SEQ ID NO: 209871 - RNA, 19 nt, Homo sapiens
  misc_RNA (1)...(19): siRNA sense strand
caucaggccaaauguaaca

SEQ ID NO: 209872 - RNA, 19 nt, Homo sapiens
  misc_RNA (1)...(19): siRNA sense strand
gauucuauccaaauuccaa

SEQ ID NO: 209873 - RNA, 19 nt, Homo sapiens
  misc_RNA (1)...(19): siRNA sense strand
ggcaaguucaacaggauuu

SEQ ID NO: 209874 - RNA, 19 nt, Homo sapiens
  misc_RNA (1)...(19): siRNA sense strand
gaacuggcugcugaauguu

SEQ ID NO: 209875 - RNA, 19 nt, Homo sapiens
  misc_RNA (1)...(19): siRNA sense strand
cugcugaauguuuaugaua

SEQ ID NO: 209876 - RNA, 19 nt, Homo sapiens
  misc_RNA (1)...(19): siRNA sense strand
aagcaucaggccaaaugua

SEQ ID NO: 209877 - RNA, 19 nt, Homo sapiens
  misc_RNA (1)...(19): siRNA sense strand
uggcaucauuucccugugu

SEQ ID NO: 209878 - RNA, 19 nt, Homo sapiens
  misc_RNA (1)...(19): siRNA sense strand
ccaugaaacuccgaagacu

SEQ ID NO: 209879 - RNA, 19 nt, Homo sapiens
  misc_RNA (1)...(19): siRNA sense strand
auaauaagccagagaucga

SEQ ID NO: 209880 - RNA, 19 nt, Homo sapiens
  misc_RNA (1)...(19): siRNA sense strand
cuaauaauaagccagagau

SEQ ID NO: 209881 - RNA, 19 nt, Homo sapiens
  misc_RNA (1)...(19): siRNA sense strand
ugggugaaguugcauccuu

SEQ ID NO: 209882 - RNA, 19 nt, Homo sapiens
  misc_RNA (1)...(19): siRNA sense strand
caucauuucccuguguaaa

SEQ ID NO: 209883 - RNA, 19 nt, Homo sapiens
  misc_RNA (1)...(19): siRNA sense strand
gcguggauaugugucugaa

SEQ ID NO: 209884 - RNA, 19 nt, Homo sapiens
  misc_RNA (1)...(19): siRNA sense strand
gcacuaucccaugguggaa

SEQ ID NO: 209885 - RNA, 19 nt, Homo sapiens
  misc_RNA (1)...(19): siRNA sense strand
gagccugucagcugcaugu

SEQ ID NO: 209886 - RNA, 19 nt, Homo sapiens
  misc_RNA (1)...(19): siRNA sense strand
guacagauaccuuuucaag

SEQ ID NO: 209887 - RNA, 19 nt, Homo sapiens
  misc_RNA (1)...(19): siRNA sense strand
gucccucucugcguggaua

SEQ ID NO: 209888 - RNA, 19 nt, Homo sapiens
  misc_RNA (1)...(19): siRNA sense strand
ggagcugcuuccaauuugc

SEQ ID NO: 209889 - RNA, 19 nt, Homo sapiens
  misc_RNA (1)...(19): siRNA sense strand
uuagcugaccugaauaaug

SEQ ID NO: 209890 - RNA, 19 nt, Homo sapiens
  misc_RNA (1)...(19): siRNA sense strand
guggcaaguucaacaggau

SEQ ID NO: 209891 - RNA, 19 nt, Homo sapiens
  misc_RNA (1)...(19): siRNA sense strand
acaacaauuuggucaacgu

SEQ ID NO: 209892 - RNA, 19 nt, Homo sapiens
  misc_RNA (1)...(19): siRNA sense strand
gacuacaucaggagaagau

SEQ ID NO: 209893 - RNA, 19 nt, Homo sapiens
  misc_RNA (1)...(19): siRNA sense strand
uaauaagccagagaucgaa

SEQ ID NO: 209894 - RNA, 19 nt, Homo sapiens
  misc_RNA (1)...(19): siRNA sense strand
ugucagauucucagcuuau

SEQ ID NO: 209895 - RNA, 19 nt, Homo sapiens
  misc_RNA (1)...(19): siRNA sense strand
ggauauccugcagauuauu

SEQ ID NO: 209896 - RNA, 19 nt, Homo sapiens
  misc_RNA (1)...(19): siRNA sense strand
agcaucaggccaaauguaa

SEQ ID NO: 209897 - RNA, 19 nt, Homo sapiens
  misc_RNA (1)...(19): siRNA sense strand
gcccuuugcuuggaucucu

SEQ ID NO: 209898 - RNA, 19 nt, Homo sapiens
  misc_RNA (1)...(19): siRNA sense strand
gcugaauguuuaugauacg

SEQ ID NO: 209899 - RNA, 19 nt, Homo sapiens
  misc_RNA (1)...(19): siRNA sense strand
agacuuugccaagguacua

SEQ ID NO: 209900 - RNA, 19 nt, Homo sapiens
  misc_RNA (1)...(19): siRNA sense strand
caagcaaguggcaaguuca

SEQ ID NO: 209901 - RNA, 19 nt, Homo sapiens
  misc_RNA (1)...(19): siRNA sense strand
agacaaguacagauaccuu

SEQ ID NO: 209902 - RNA, 19 nt, Homo sapiens
  misc_RNA (1)...(19): siRNA sense strand
gcaucauuucccuguguaa

SEQ ID NO: 209903 - RNA, 19 nt, Homo sapiens
  misc_RNA (1)...(19): siRNA sense strand
cugcaaagaguguccaauc

SEQ ID NO: 209904 - RNA, 19 nt, Homo sapiens
  misc_RNA (1)...(19): siRNA sense strand
cuuauaggacugccaugaa

SEQ ID NO: 209905 - RNA, 19 nt, Homo sapiens
  misc_RNA (1)...(19): siRNA sense strand
caaagaguguccaaucauu

SEQ ID NO: 209906 - RNA, 19 nt, Homo sapiens
  misc_RNA (1)...(19): siRNA sense strand
uagcugaccugaauaaugu

SEQ ID NO: 209907 - RNA, 19 nt, Homo sapiens
  misc_RNA (1)...(19): siRNA sense strand
gcaugauucuauccaaauu

SEQ ID NO: 209908 - RNA, 19 nt, Homo sapiens
  misc_RNA (1)...(19): siRNA sense strand
ugaacuggcugcugaaugu

SEQ ID NO: 209909 - RNA, 19 nt, Homo sapiens
  misc_RNA (1)...(19): siRNA sense strand
gauauccugcagauuauua

SEQ ID NO: 209910 - RNA, 19 nt, Homo sapiens
  misc_RNA (1)...(19): siRNA sense strand
gagaagauguucgagacuu

SEQ ID NO: 209911 - RNA, 19 nt, Homo sapiens
  misc_RNA (1)...(19): siRNA sense strand
gcacuuuaauuaugacauc

SEQ ID NO: 209912 - RNA, 19 nt, Homo sapiens
  misc_RNA (1)...(19): siRNA sense strand
guaaagcacauuuggaaga

SEQ ID NO: 209913 - RNA, 19 nt, Homo sapiens
  misc_RNA (1)...(19): siRNA sense strand
gaauauugcacuccgacua

SEQ ID NO: 209914 - RNA, 19 nt, Homo sapiens
  misc_RNA (1)...(19): siRNA sense strand
uuauaggacugccaugaaa

SEQ ID NO: 209915 - RNA, 19 nt, Homo sapiens
  misc_RNA (1)...(19): siRNA sense strand
gggugaaguugcauccuuu

SEQ ID NO: 209916 - RNA, 19 nt, Homo sapiens
  misc_RNA (1)...(19): siRNA sense strand
gcaagagcacaacaauuug

SEQ ID NO: 209917 - RNA, 19 nt, Homo sapiens
  misc_RNA (1)...(19): siRNA sense strand
gcacaacaauuuggucaac

SEQ ID NO: 209918 - RNA, 19 nt, Homo sapiens
  misc_RNA (1)...(19): siRNA sense strand
agcaagagcacaacaauuu

SEQ ID NO: 209919 - RNA, 19 nt, Homo sapiens
  misc_RNA (1)...(19): siRNA sense strand
agaagauguucgagacuuu

SEQ ID NO: 209920 - RNA, 19 nt, Homo sapiens
  misc_RNA (1)...(19): siRNA sense strand
gagcaagagcacaacaauu

SEQ ID NO: 209921 - RNA, 19 nt, Homo sapiens
  misc_RNA (1)...(19): siRNA sense strand
ucaagcaaguggcaaguuc

SEQ ID NO: 209922 - RNA, 19 nt, Homo sapiens
  misc_RNA (1)...(19): siRNA sense strand
ccacgagacucaaacaacu

SEQ ID NO: 209923 - RNA, 19 nt, Homo sapiens
  misc_RNA (1)...(19): siRNA sense strand
cagcacaaccucaagcaaa

SEQ ID NO: 209924 - RNA, 19 nt, Homo sapiens
  misc_RNA (1)...(19): siRNA sense strand
gcaaagaguguccaaucau

SEQ ID NO: 209925 - RNA, 19 nt, Homo sapiens
  misc_RNA (1)...(19): siRNA sense strand
auggauauccugcagauua

SEQ ID NO: 209926 - RNA, 19 nt, Homo sapiens
  misc_RNA (1)...(19): siRNA sense strand
uguaacaucugcaaagagu

SEQ ID NO: 209927 - RNA, 19 nt, Homo sapiens
  misc_RNA (1)...(19): siRNA sense strand
guccggagcugcuuccaau

SEQ ID NO: 209928 - RNA, 19 nt, Homo sapiens
  misc_RNA (1)...(19): siRNA sense strand
gcaaguggcaaguucaaca

SEQ ID NO: 209929 - RNA, 19 nt, Homo sapiens
  misc_RNA (1)...(19): siRNA sense strand
gcuuccaauuugcuaauaa

SEQ ID NO: 209930 - RNA, 19 nt, Homo sapiens
  misc_RNA (1)...(19): siRNA sense strand
uggaagacaaguacagaua

SEQ ID NO: 209931 - RNA, 19 nt, Homo sapiens
  misc_RNA (1)...(19): siRNA sense strand
ggauccguguccugucuuu

SEQ ID NO: 209932 - RNA, 19 nt, Homo sapiens
  misc_RNA (1)...(19): siRNA sense strand
gucuuuagcugaccugaau

SEQ ID NO: 209933 - RNA, 19 nt, Homo sapiens
  misc_RNA (1)...(19): siRNA sense strand
gacaaguacagauaccuuu

SEQ ID NO: 209934 - RNA, 19 nt, Homo sapiens
  misc_RNA (1)...(19): siRNA sense strand
ccaagcaucaggccaaaug

SEQ ID NO: 209935 - RNA, 19 nt, Homo sapiens
  misc_RNA (1)...(19): siRNA sense strand
ggagcaagagcacaacaau

SEQ ID NO: 209936 - RNA, 19 nt, Homo sapiens
  misc_RNA (1)...(19): siRNA sense strand
guguaaagcacauuuggaa

SEQ ID NO: 209937 - RNA, 19 nt, Homo sapiens
  misc_RNA (1)...(19): siRNA sense strand
caagacaguugggugaagu

SEQ ID NO: 209938 - RNA, 19 nt, Homo sapiens
  misc_RNA (1)...(19): siRNA sense strand
gaagauguucgagacuuug

SEQ ID NO: 209939 - RNA, 19 nt, Homo sapiens
  misc_RNA (1)...(19): siRNA sense strand
gucagauucucagcuuaua

SEQ ID NO: 209940 - RNA, 19 nt, Homo sapiens
  misc_RNA (1)...(19): siRNA sense strand
uaacaucugcaaagagugu

SEQ ID NO: 209941 - RNA, 19 nt, Homo sapiens
  misc_RNA (1)...(19): siRNA sense strand
cggagcugcuuccaauuug

SEQ ID NO: 209942 - RNA, 19 nt, Homo sapiens
  misc_RNA (1)...(19): siRNA sense strand
gaagacaaguacagauacc

SEQ ID NO: 209943 - RNA, 19 nt, Homo sapiens
  misc_RNA (1)...(19): siRNA sense strand
ccauggauauccugcagau

SEQ ID NO: 209944 - RNA, 19 nt, Homo sapiens
  misc_RNA (1)...(19): siRNA sense strand
ggcaucauuucccugugua

SEQ ID NO: 209945 - RNA, 19 nt, Homo sapiens
  misc_RNA (1)...(19): siRNA sense strand
uggauauccugcagauuau

SEQ ID NO: 209946 - RNA, 19 nt, Homo sapiens
  misc_RNA (1)...(19): siRNA sense strand
ggaagacaaguacagauac

SEQ ID NO: 209947 - RNA, 19 nt, Homo sapiens
  misc_RNA (1)...(19): siRNA sense strand
ugcaaagaguguccaauca

SEQ ID NO: 209948 - RNA, 19 nt, Homo sapiens
  misc_RNA (1)...(19): siRNA sense strand
guggauaugugucugaacu

SEQ ID NO: 209949 - RNA, 19 nt, Homo sapiens
  misc_RNA (1)...(19): siRNA sense strand
acuggcugcugaauguuua

SEQ ID NO: 209950 - RNA, 19 nt, Homo sapiens
  misc_RNA (1)...(19): siRNA sense strand
acuaucccaugguggaaua

SEQ ID NO: 209951 - RNA, 19 nt, Homo sapiens
  misc_RNA (1)...(19): siRNA sense strand
ccggagcugcuuccaauuu

SEQ ID NO: 209952 - RNA, 19 nt, Homo sapiens
  misc_RNA (1)...(19): siRNA sense strand
ccaaauuccaagacaguug

SEQ ID NO: 209953 - RNA, 19 nt, Homo sapiens
  misc_RNA (1)...(19): siRNA sense strand
cagaaacugccaagcauca

SEQ ID NO: 209954 - RNA, 19 nt, Homo sapiens
  misc_RNA (1)...(19): siRNA sense strand
uaugacaucugccaaagcu

SEQ ID NO: 209955 - RNA, 19 nt, Homo sapiens
  misc_RNA (1)...(19): siRNA sense strand
aaugucagauucucagcuu

SEQ ID NO: 209956 - RNA, 19 nt, Homo sapiens
  misc_RNA (1)...(19): siRNA sense strand
ucgagacuuugccaaggua

SEQ ID NO: 209957 - RNA, 19 nt, Homo sapiens
  misc_RNA (1)...(19): siRNA sense strand
gcaaaaggccauaaaaugc

SEQ ID NO: 209958 - RNA, 19 nt, Homo sapiens
  misc_RNA (1)...(19): siRNA sense strand
cugcaugauucuauccaaa

SEQ ID NO: 209959 - RNA, 19 nt, Homo sapiens
  misc_RNA (1)...(19): siRNA sense strand
uaaagcacauuuggaagac

SEQ ID NO: 209960 - RNA, 19 nt, Homo sapiens
  misc_RNA (1)...(19): siRNA sense strand
acaggagucuaaagcacuu

SEQ ID NO: 209961 - RNA, 19 nt, Homo sapiens
  misc_RNA (1)...(19): siRNA sense strand
acagauaccuuuucaagca

SEQ ID NO: 209962 - RNA, 19 nt, Homo sapiens
  misc_RNA (1)...(19): siRNA sense strand
aagcacauuuggaagacaa

SEQ ID NO: 209963 - RNA, 19 nt, Homo sapiens
  misc_RNA (1)...(19): siRNA sense strand
gcuaauaauaagccagaga

SEQ ID NO: 209964 - RNA, 19 nt, Homo sapiens
  misc_RNA (1)...(19): siRNA sense strand
caagagcacaacaauuugg

SEQ ID NO: 209965 - RNA, 19 nt, Homo sapiens
  misc_RNA (1)...(19): siRNA sense strand
ccugucagcugcaugugau

SEQ ID NO: 209966 - RNA, 19 nt, Homo sapiens
  misc_RNA (1)...(19): siRNA sense strand
gcugcugaauguuuaugau

SEQ ID NO: 209967 - RNA, 19 nt, Homo sapiens
  misc_RNA (1)...(19): siRNA sense strand
acagagcucuaccagucuu

SEQ ID NO: 209968 - RNA, 19 nt, Homo sapiens
  misc_RNA (1)...(19): siRNA sense strand
acaguugggugaaguugca

SEQ ID NO: 209969 - RNA, 19 nt, Homo sapiens
  misc_RNA (1)...(19): siRNA sense strand
guuugaccacuauuuauga

SEQ ID NO: 209970 - RNA, 19 nt, Homo sapiens
  misc_RNA (1)...(19): siRNA sense strand
gcuuauaggacugccauga

SEQ ID NO: 209971 - RNA, 19 nt, Homo sapiens
  misc_RNA (1)...(19): siRNA sense strand
caucaggccaaauguaaca

SEQ ID NO: 209972 - RNA, 19 nt, Homo sapiens
  misc_RNA (1)...(19): siRNA sense strand
gauucuauccaaauuccaa

SEQ ID NO: 209973 - RNA, 19 nt, Homo sapiens
  misc_RNA (1)...(19): siRNA sense strand
ggcaaguucaacaggauuu

SEQ ID NO: 209974 - RNA, 19 nt, Homo sapiens
  misc_RNA (1)...(19): siRNA sense strand
gaacuggcugcugaauguu

SEQ ID NO: 209975 - RNA, 19 nt, Homo sapiens
  misc_RNA (1)...(19): siRNA sense strand
cugcugaauguuuaugaua

SEQ ID NO: 209976 - RNA, 19 nt, Homo sapiens
  misc_RNA (1)...(19): siRNA sense strand
aagcaucaggccaaaugua

SEQ ID NO: 209977 - RNA, 19 nt, Homo sapiens
  misc_RNA (1)...(19): siRNA sense strand
uggcaucauuucccugugu

SEQ ID NO: 209978 - RNA, 19 nt, Homo sapiens
  misc_RNA (1)...(19): siRNA sense strand
ccaugaaacuccgaagacu

SEQ ID NO: 209979 - RNA, 19 nt, Homo sapiens
  misc_RNA (1)...(19): siRNA sense strand
auaauaagccagagaucga

SEQ ID NO: 209980 - RNA, 19 nt, Homo sapiens
  misc_RNA (1)...(19): siRNA sense strand
cuaauaauaagccagagau

SEQ ID NO: 209981 - RNA, 19 nt, Homo sapiens
  misc_RNA (1)...(19): siRNA sense strand
ugggugaaguugcauccuu

SEQ ID NO: 209982 - RNA, 19 nt, Homo sapiens
  misc_RNA (1)...(19): siRNA sense strand
caucauuucccuguguaaa

SEQ ID NO: 209983 - RNA, 19 nt, Homo sapiens
  misc_RNA (1)...(19): siRNA sense strand
gcguggauaugugucugaa

SEQ ID NO: 209984 - RNA, 19 nt, Homo sapiens
  misc_RNA (1)...(19): siRNA sense strand
gcacuaucccaugguggaa

SEQ ID NO: 209985 - RNA, 19 nt, Homo sapiens
  misc_RNA (1)...(19): siRNA sense strand
gagccugucagcugcaugu

SEQ ID NO: 209986 - RNA, 19 nt, Homo sapiens
  misc_RNA (1)...(19): siRNA sense strand
guacagauaccuuuucaag

SEQ ID NO: 209987 - RNA, 19 nt, Homo sapiens
  misc_RNA (1)...(19): siRNA sense strand
gucccucucugcguggaua

SEQ ID NO: 209988 - RNA, 19 nt, Homo sapiens
  misc_RNA (1)...(19): siRNA sense strand
ggagcugcuuccaauuugc

SEQ ID NO: 209989 - RNA, 19 nt, Homo sapiens
  misc_RNA (1)...(19): siRNA sense strand
uuagcugaccugaauaaug

SEQ ID NO: 209990 - RNA, 19 nt, Homo sapiens
  misc_RNA (1)...(19): siRNA sense strand
guggcaaguucaacaggau

SEQ ID NO: 209991 - RNA, 19 nt, Homo sapiens
  misc_RNA (1)...(19): siRNA sense strand
acaacaauuuggucaacgu

SEQ ID NO: 209992 - RNA, 19 nt, Homo sapiens
  misc_RNA (1)...(19): siRNA sense strand
gacuacaucaggagaagau

SEQ ID NO: 209993 - RNA, 19 nt, Homo sapiens
  misc_RNA (1)...(19): siRNA sense strand
uaauaagccagagaucgaa

SEQ ID NO: 209994 - RNA, 19 nt, Homo sapiens
  misc_RNA (1)...(19): siRNA sense strand
ugucagauucucagcuuau

SEQ ID NO: 209995 - RNA, 19 nt, Homo sapiens
  misc_RNA (1)...(19): siRNA sense strand
ggauauccugcagauuauu

SEQ ID NO: 209996 - RNA, 19 nt, Homo sapiens
  misc_RNA (1)...(19): siRNA sense strand
agcaucaggccaaauguaa

SEQ ID NO: 209997 - RNA, 19 nt, Homo sapiens
  misc_RNA (1)...(19): siRNA sense strand
gcccuuugcuuggaucucu

SEQ ID NO: 209998 - RNA, 19 nt, Homo sapiens
  misc_RNA (1)...(19): siRNA sense strand
gcugaauguuuaugauacg

SEQ ID NO: 209999 - RNA, 19 nt, Homo sapiens
  misc_RNA (1)...(19): siRNA sense strand
agacuuugccaagguacua

SEQ ID NO: 210000 - RNA, 19 nt, Homo sapiens
  misc_RNA (1)...(19): siRNA sense strand
caagcaaguggcaaguuca

SEQ ID NO: 210001 - RNA, 19 nt, Homo sapiens
  misc_RNA (1)...(19): siRNA sense strand
agacaaguacagauaccuu

SEQ ID NO: 210002 - RNA, 19 nt, Homo sapiens
  misc_RNA (1)...(19): siRNA sense strand
gcaucauuucccuguguaa

SEQ ID NO: 210003 - RNA, 19 nt, Homo sapiens
  misc_RNA (1)...(19): siRNA sense strand
cugcaaagaguguccaauc

SEQ ID NO: 210004 - RNA, 19 nt, Homo sapiens
  misc_RNA (1)...(19): siRNA sense strand
cuuauaggacugccaugaa

SEQ ID NO: 210005 - RNA, 19 nt, Homo sapiens
  misc_RNA (1)...(19): siRNA sense strand
caaagaguguccaaucauu

SEQ ID NO: 210006 - RNA, 19 nt, Homo sapiens
  misc_RNA (1)...(19): siRNA sense strand
uagcugaccugaauaaugu

SEQ ID NO: 210007 - RNA, 19 nt, Homo sapiens
  misc_RNA (1)...(19): siRNA sense strand
gcaugauucuauccaaauu

SEQ ID NO: 210008 - RNA, 19 nt, Homo sapiens
  misc_RNA (1)...(19): siRNA sense strand
ugaacuggcugcugaaugu

SEQ ID NO: 210009 - RNA, 19 nt, Homo sapiens
  misc_RNA (1)...(19): siRNA sense strand
gauauccugcagauuauua

SEQ ID NO: 210010 - RNA, 19 nt, Homo sapiens
  misc_RNA (1)...(19): siRNA sense strand
gagaagauguucgagacuu

SEQ ID NO: 210011 - RNA, 19 nt, Homo sapiens
  misc_RNA (1)...(19): siRNA sense strand
gcacuuuaauuaugacauc

SEQ ID NO: 210012 - RNA, 19 nt, Homo sapiens
  misc_RNA (1)...(19): siRNA sense strand
guaaagcacauuuggaaga

SEQ ID NO: 210013 - RNA, 19 nt, Homo sapiens
  misc_RNA (1)...(19): siRNA sense strand
gaauauugcacuccgacua

SEQ ID NO: 210014 - RNA, 19 nt, Homo sapiens
  misc_RNA (1)...(19): siRNA sense strand
uuauaggacugccaugaaa

SEQ ID NO: 210015 - RNA, 19 nt, Homo sapiens
  misc_RNA (1)...(19): siRNA sense strand
gggugaaguugcauccuuu

SEQ ID NO: 210016 - RNA, 19 nt, Homo sapiens
  misc_RNA (1)...(19): siRNA sense strand
gcaagagcacaacaauuug

SEQ ID NO: 210017 - RNA, 19 nt, Homo sapiens
  misc_RNA (1)...(19): siRNA sense strand
gcacaacaauuuggucaac

SEQ ID NO: 210018 - RNA, 19 nt, Homo sapiens
  misc_RNA (1)...(19): siRNA sense strand
agcaagagcacaacaauuu

SEQ ID NO: 210019 - RNA, 19 nt, Homo sapiens
  misc_RNA (1)...(19): siRNA sense strand
agaagauguucgagacuuu

SEQ ID NO: 210020 - RNA, 19 nt, Homo sapiens
  misc_RNA (1)...(19): siRNA sense strand
gagcaagagcacaacaauu

SEQ ID NO: 210021 - RNA, 19 nt, Homo sapiens
  misc_RNA (1)...(19): siRNA sense strand
ucaagcaaguggcaaguuc

SEQ ID NO: 210022 - RNA, 19 nt, Homo sapiens
  misc_RNA (1)...(19): siRNA sense strand
ccacgagacucaaacaacu

SEQ ID NO: 210023 - RNA, 19 nt, Homo sapiens
  misc_RNA (1)...(19): siRNA sense strand
cagcacaaccucaagcaaa

SEQ ID NO: 210024 - RNA, 19 nt, Homo sapiens
  misc_RNA (1)...(19): siRNA sense strand
gcaaagaguguccaaucau

SEQ ID NO: 210025 - RNA, 19 nt, Homo sapiens
  misc_RNA (1)...(19): siRNA sense strand
auggauauccugcagauua

SEQ ID NO: 210026 - RNA, 19 nt, Homo sapiens
  misc_RNA (1)...(19): siRNA sense strand
uguaacaucugcaaagagu

SEQ ID NO: 210027 - RNA, 19 nt, Homo sapiens
  misc_RNA (1)...(19): siRNA sense strand
guccggagcugcuuccaau

SEQ ID NO: 210028 - RNA, 19 nt, Homo sapiens
  misc_RNA (1)...(19): siRNA sense strand
gcaaguggcaaguucaaca

SEQ ID NO: 210029 - RNA, 19 nt, Homo sapiens
  misc_RNA (1)...(19): siRNA sense strand
gcuuccaauuugcuaauaa

SEQ ID NO: 210030 - RNA, 19 nt, Homo sapiens
  misc_RNA (1)...(19): siRNA sense strand
uggaagacaaguacagaua

SEQ ID NO: 210031 - RNA, 19 nt, Homo sapiens
  misc_RNA (1)...(19): siRNA sense strand
ggauccguguccugucuuu

SEQ ID NO: 210032 - RNA, 19 nt, Homo sapiens
  misc_RNA (1)...(19): siRNA sense strand
gucuuuagcugaccugaau

SEQ ID NO: 210033 - RNA, 19 nt, Homo sapiens
  misc_RNA (1)...(19): siRNA sense strand
gacaaguacagauaccuuu

SEQ ID NO: 210034 - RNA, 19 nt, Homo sapiens
  misc_RNA (1)...(19): siRNA sense strand
ccaagcaucaggccaaaug

SEQ ID NO: 210035 - RNA, 19 nt, Homo sapiens
  misc_RNA (1)...(19): siRNA sense strand
ggagcaagagcacaacaau

SEQ ID NO: 210036 - RNA, 19 nt, Homo sapiens
  misc_RNA (1)...(19): siRNA sense strand
guguaaagcacauuuggaa

SEQ ID NO: 210037 - RNA, 19 nt, Homo sapiens
  misc_RNA (1)...(19): siRNA sense strand
caagacaguugggugaagu

SEQ ID NO: 210038 - RNA, 19 nt, Homo sapiens
  misc_RNA (1)...(19): siRNA sense strand
gaagauguucgagacuuug

SEQ ID NO: 210039 - RNA, 19 nt, Homo sapiens
  misc_RNA (1)...(19): siRNA sense strand
gucagauucucagcuuaua

SEQ ID NO: 210040 - RNA, 19 nt, Homo sapiens
  misc_RNA (1)...(19): siRNA sense strand
uaacaucugcaaagagugu

SEQ ID NO: 210041 - RNA, 19 nt, Homo sapiens
  misc_RNA (1)...(19): siRNA sense strand
cggagcugcuuccaauuug

SEQ ID NO: 210042 - RNA, 19 nt, Homo sapiens
  misc_RNA (1)...(19): siRNA sense strand
gaagacaaguacagauacc

SEQ ID NO: 210043 - RNA, 19 nt, Homo sapiens
  misc_RNA (1)...(19): siRNA sense strand
ccauggauauccugcagau

SEQ ID NO: 210044 - RNA, 19 nt, Homo sapiens
  misc_RNA (1)...(19): siRNA sense strand
ggcaucauuucccugugua

SEQ ID NO: 210045 - RNA, 19 nt, Homo sapiens
  misc_RNA (1)...(19): siRNA sense strand
uggauauccugcagauuau

SEQ ID NO: 210046 - RNA, 19 nt, Homo sapiens
  misc_RNA (1)...(19): siRNA sense strand
ggaagacaaguacagauac

SEQ ID NO: 210047 - RNA, 19 nt, Homo sapiens
  misc_RNA (1)...(19): siRNA sense strand
ugcaaagaguguccaauca

SEQ ID NO: 210048 - RNA, 19 nt, Homo sapiens
  misc_RNA (1)...(19): siRNA sense strand
guggauaugugucugaacu

SEQ ID NO: 210049 - RNA, 19 nt, Homo sapiens
  misc_RNA (1)...(19): siRNA sense strand
acuggcugcugaauguuua

SEQ ID NO: 210050 - RNA, 19 nt, Homo sapiens
  misc_RNA (1)...(19): siRNA sense strand
acuaucccaugguggaaua

SEQ ID NO: 210051 - RNA, 19 nt, Homo sapiens
  misc_RNA (1)...(19): siRNA sense strand
ccggagcugcuuccaauuu

SEQ ID NO: 210052 - RNA, 19 nt, Homo sapiens
  misc_RNA (1)...(19): siRNA sense strand
ccaaauuccaagacaguug

SEQ ID NO: 210053 - RNA, 19 nt, Homo sapiens
  misc_RNA (1)...(19): siRNA sense strand
cagaaacugccaagcauca

SEQ ID NO: 210054 - RNA, 19 nt, Homo sapiens
  misc_RNA (1)...(19): siRNA sense strand
uaugacaucugccaaagcu

SEQ ID NO: 210055 - RNA, 19 nt, Homo sapiens
  misc_RNA (1)...(19): siRNA sense strand
aaugucagauucucagcuu

SEQ ID NO: 210056 - RNA, 19 nt, Homo sapiens
  misc_RNA (1)...(19): siRNA sense strand
ucgagacuuugccaaggua

SEQ ID NO: 210057 - RNA, 19 nt, Homo sapiens
  misc_RNA (1)...(19): siRNA sense strand
gcaaaaggccauaaaaugc

SEQ ID NO: 210058 - RNA, 19 nt, Homo sapiens
  misc_RNA (1)...(19): siRNA sense strand
cugcaugauucuauccaaa

SEQ ID NO: 210059 - RNA, 19 nt, Homo sapiens
  misc_RNA (1)...(19): siRNA sense strand
uaaagcacauuuggaagac

SEQ ID NO: 210060 - RNA, 19 nt, Homo sapiens
  misc_RNA (1)...(19): siRNA sense strand
acaggagucuaaagcacuu

SEQ ID NO: 210061 - RNA, 19 nt, Homo sapiens
  misc_RNA (1)...(19): siRNA sense strand
acagauaccuuuucaagca

SEQ ID NO: 210062 - RNA, 19 nt, Homo sapiens
  misc_RNA (1)...(19): siRNA sense strand
aagcacauuuggaagacaa

SEQ ID NO: 210063 - RNA, 19 nt, Homo sapiens
  misc_RNA (1)...(19): siRNA sense strand
gcuaauaauaagccagaga

SEQ ID NO: 210064 - RNA, 19 nt, Homo sapiens
  misc_RNA (1)...(19): siRNA sense strand
caagagcacaacaauuugg

SEQ ID NO: 210065 - RNA, 19 nt, Homo sapiens
  misc_RNA (1)...(19): siRNA sense strand
ccugucagcugcaugugau

SEQ ID NO: 210066 - RNA, 19 nt, Homo sapiens
  misc_RNA (1)...(19): siRNA sense strand
gcugcugaauguuuaugau

SEQ ID NO: 210067 - RNA, 19 nt, Homo sapiens
  misc_RNA (1)...(19): siRNA sense strand
acagagcucuaccagucuu

SEQ ID NO: 210068 - RNA, 19 nt, Homo sapiens
  misc_RNA (1)...(19): siRNA sense strand
acaguugggugaaguugca

SEQ ID NO: 210069 - RNA, 19 nt, Homo sapiens
  misc_RNA (1)...(19): siRNA sense strand
guuugaccacuauuuauga

SEQ ID NO: 210070 - RNA, 19 nt, Homo sapiens
  misc_RNA (1)...(19): siRNA sense strand
gcuuauaggacugccauga

SEQ ID NO: 210071 - RNA, 19 nt, Homo sapiens
  misc_RNA (1)...(19): siRNA sense strand
caucaggccaaauguaaca

SEQ ID NO: 210072 - RNA, 19 nt, Homo sapiens
  misc_RNA (1)...(19): siRNA sense strand
gauucuauccaaauuccaa

SEQ ID NO: 210073 - RNA, 19 nt, Homo sapiens
  misc_RNA (1)...(19): siRNA sense strand
ggcaaguucaacaggauuu

SEQ ID NO: 210074 - RNA, 19 nt, Homo sapiens
  misc_RNA (1)...(19): siRNA sense strand
gaacuggcugcugaauguu

SEQ ID NO: 210075 - RNA, 19 nt, Homo sapiens
  misc_RNA (1)...(19): siRNA sense strand
cugcugaauguuuaugaua

SEQ ID NO: 210076 - RNA, 19 nt, Homo sapiens
  misc_RNA (1)...(19): siRNA sense strand
aagcaucaggccaaaugua

SEQ ID NO: 210077 - RNA, 19 nt, Homo sapiens
  misc_RNA (1)...(19): siRNA sense strand
uggcaucauuucccugugu

SEQ ID NO: 210078 - RNA, 19 nt, Homo sapiens
  misc_RNA (1)...(19): siRNA sense strand
ccaugaaacuccgaagacu

SEQ ID NO: 210079 - RNA, 19 nt, Homo sapiens
  misc_RNA (1)...(19): siRNA sense strand
auaauaagccagagaucga

SEQ ID NO: 210080 - RNA, 19 nt, Homo sapiens
  misc_RNA (1)...(19): siRNA sense strand
cuaauaauaagccagagau

SEQ ID NO: 210081 - RNA, 19 nt, Homo sapiens
  misc_RNA (1)...(19): siRNA sense strand
ugggugaaguugcauccuu

SEQ ID NO: 210082 - RNA, 19 nt, Homo sapiens
  misc_RNA (1)...(19): siRNA sense strand
caucauuucccuguguaaa

SEQ ID NO: 210083 - RNA, 19 nt, Homo sapiens
  misc_RNA (1)...(19): siRNA sense strand
gcguggauaugugucugaa

SEQ ID NO: 210084 - RNA, 19 nt, Homo sapiens
  misc_RNA (1)...(19): siRNA sense strand
gcacuaucccaugguggaa

SEQ ID NO: 210085 - RNA, 19 nt, Homo sapiens
  misc_RNA (1)...(19): siRNA sense strand
gagccugucagcugcaugu

SEQ ID NO: 210086 - RNA, 19 nt, Homo sapiens
  misc_RNA (1)...(19): siRNA sense strand
guacagauaccuuuucaag

SEQ ID NO: 210087 - RNA, 19 nt, Homo sapiens
  misc_RNA (1)...(19): siRNA sense strand
gucccucucugcguggaua

SEQ ID NO: 210088 - RNA, 19 nt, Homo sapiens
  misc_RNA (1)...(19): siRNA sense strand
ggagcugcuuccaauuugc

SEQ ID NO: 210089 - RNA, 19 nt, Homo sapiens
  misc_RNA (1)...(19): siRNA sense strand
uuagcugaccugaauaaug

SEQ ID NO: 210090 - RNA, 19 nt, Homo sapiens
  misc_RNA (1)...(19): siRNA sense strand
guggcaaguucaacaggau

SEQ ID NO: 210091 - RNA, 19 nt, Homo sapiens
  misc_RNA (1)...(19): siRNA sense strand
acaacaauuuggucaacgu

SEQ ID NO: 210092 - RNA, 19 nt, Homo sapiens
  misc_RNA (1)...(19): siRNA sense strand
gacuacaucaggagaagau

SEQ ID NO: 210093 - RNA, 19 nt, Homo sapiens
  misc_RNA (1)...(19): siRNA sense strand
uaauaagccagagaucgaa

SEQ ID NO: 210094 - RNA, 19 nt, Homo sapiens
  misc_RNA (1)...(19): siRNA sense strand
ugucagauucucagcuuau

SEQ ID NO: 210095 - RNA, 19 nt, Homo sapiens
  misc_RNA (1)...(19): siRNA sense strand
ggauauccugcagauuauu

SEQ ID NO: 210096 - RNA, 19 nt, Homo sapiens
  misc_RNA (1)...(19): siRNA sense strand
agcaucaggccaaauguaa

SEQ ID NO: 210097 - RNA, 19 nt, Homo sapiens
  misc_RNA (1)...(19): siRNA sense strand
gcccuuugcuuggaucucu

SEQ ID NO: 210098 - RNA, 19 nt, Homo sapiens
  misc_RNA (1)...(19): siRNA sense strand
gcugaauguuuaugauacg

SEQ ID NO: 210099 - RNA, 19 nt, Homo sapiens
  misc_RNA (1)...(19): siRNA sense strand
agacuuugccaagguacua

SEQ ID NO: 210100 - RNA, 19 nt, Homo sapiens
  misc_RNA (1)...(19): siRNA sense strand
caagcaaguggcaaguuca

SEQ ID NO: 210101 - RNA, 19 nt, Homo sapiens
  misc_RNA (1)...(19): siRNA sense strand
agacaaguacagauaccuu

SEQ ID NO: 210102 - RNA, 19 nt, Homo sapiens
  misc_RNA (1)...(19): siRNA sense strand
gcaucauuucccuguguaa

SEQ ID NO: 210103 - RNA, 19 nt, Homo sapiens
  misc_RNA (1)...(19): siRNA sense strand
cugcaaagaguguccaauc

SEQ ID NO: 210104 - RNA, 19 nt, Homo sapiens
  misc_RNA (1)...(19): siRNA sense strand
cuuauaggacugccaugaa

SEQ ID NO: 210105 - RNA, 19 nt, Homo sapiens
  misc_RNA (1)...(19): siRNA sense strand
caaagaguguccaaucauu

SEQ ID NO: 210106 - RNA, 19 nt, Homo sapiens
  misc_RNA (1)...(19): siRNA sense strand
uagcugaccugaauaaugu

SEQ ID NO: 210107 - RNA, 19 nt, Homo sapiens
  misc_RNA (1)...(19): siRNA sense strand
gcaugauucuauccaaauu

SEQ ID NO: 210108 - RNA, 19 nt, Homo sapiens
  misc_RNA (1)...(19): siRNA sense strand
ugaacuggcugcugaaugu

SEQ ID NO: 210109 - RNA, 19 nt, Homo sapiens
  misc_RNA (1)...(19): siRNA sense strand
gauauccugcagauuauua

SEQ ID NO: 210110 - RNA, 19 nt, Homo sapiens
  misc_RNA (1)...(19): siRNA sense strand
gagaagauguucgagacuu

SEQ ID NO: 210111 - RNA, 19 nt, Homo sapiens
  misc_RNA (1)...(19): siRNA sense strand
gcacuuuaauuaugacauc

SEQ ID NO: 210112 - RNA, 19 nt, Homo sapiens
  misc_RNA (1)...(19): siRNA sense strand
guaaagcacauuuggaaga

SEQ ID NO: 210113 - RNA, 19 nt, Homo sapiens
  misc_RNA (1)...(19): siRNA sense strand
gaauauugcacuccgacua

SEQ ID NO: 210114 - RNA, 19 nt, Homo sapiens
  misc_RNA (1)...(19): siRNA sense strand
uuauaggacugccaugaaa

SEQ ID NO: 210115 - RNA, 19 nt, Homo sapiens
  misc_RNA (1)...(19): siRNA sense strand
gggugaaguugcauccuuu

SEQ ID NO: 210116 - RNA, 19 nt, Homo sapiens
  misc_RNA (1)...(19): siRNA sense strand
gcaagagcacaacaauuug

SEQ ID NO: 210117 - RNA, 19 nt, Homo sapiens
  misc_RNA (1)...(19): siRNA sense strand
gcacaacaauuuggucaac

SEQ ID NO: 210118 - RNA, 19 nt, Homo sapiens
  misc_RNA (1)...(19): siRNA sense strand
agcaagagcacaacaauuu

SEQ ID NO: 210119 - RNA, 19 nt, Homo sapiens
  misc_RNA (1)...(19): siRNA sense strand
agaagauguucgagacuuu

SEQ ID NO: 210120 - RNA, 19 nt, Homo sapiens
  misc_RNA (1)...(19): siRNA sense strand
gagcaagagcacaacaauu

SEQ ID NO: 210121 - RNA, 19 nt, Homo sapiens
  misc_RNA (1)...(19): siRNA sense strand
ucaagcaaguggcaaguuc

SEQ ID NO: 210122 - RNA, 19 nt, Homo sapiens
  misc_RNA (1)...(19): siRNA sense strand
ccacgagacucaaacaacu

SEQ ID NO: 210123 - RNA, 19 nt, Homo sapiens
  misc_RNA (1)...(19): siRNA sense strand
cagcacaaccucaagcaaa

SEQ ID NO: 210124 - RNA, 19 nt, Homo sapiens
  misc_RNA (1)...(19): siRNA sense strand
gcaaagaguguccaaucau

SEQ ID NO: 210125 - RNA, 19 nt, Homo sapiens
  misc_RNA (1)...(19): siRNA sense strand
auggauauccugcagauua

SEQ ID NO: 210126 - RNA, 19 nt, Homo sapiens
  misc_RNA (1)...(19): siRNA sense strand
uguaacaucugcaaagagu

SEQ ID NO: 210127 - RNA, 19 nt, Homo sapiens
  misc_RNA (1)...(19): siRNA sense strand
guccggagcugcuuccaau

SEQ ID NO: 210128 - RNA, 19 nt, Homo sapiens
  misc_RNA (1)...(19): siRNA sense strand
gcaaguggcaaguucaaca

SEQ ID NO: 210129 - RNA, 19 nt, Homo sapiens
  misc_RNA (1)...(19): siRNA sense strand
gcuuccaauuugcuaauaa

SEQ ID NO: 210130 - RNA, 19 nt, Homo sapiens
  misc_RNA (1)...(19): siRNA sense strand
uggaagacaaguacagaua

SEQ ID NO: 210131 - RNA, 19 nt, Homo sapiens
  misc_RNA (1)...(19): siRNA sense strand
ggauccguguccugucuuu

SEQ ID NO: 210132 - RNA, 19 nt, Homo sapiens
  misc_RNA (1)...(19): siRNA sense strand
gucuuuagcugaccugaau

SEQ ID NO: 210133 - RNA, 19 nt, Homo sapiens
  misc_RNA (1)...(19): siRNA sense strand
gacaaguacagauaccuuu

SEQ ID NO: 210134 - RNA, 19 nt, Homo sapiens
  misc_RNA (1)...(19): siRNA sense strand
ccaagcaucaggccaaaug

SEQ ID NO: 210135 - RNA, 19 nt, Homo sapiens
  misc_RNA (1)...(19): siRNA sense strand
ggagcaagagcacaacaau

SEQ ID NO: 210136 - RNA, 19 nt, Homo sapiens
  misc_RNA (1)...(19): siRNA sense strand
guguaaagcacauuuggaa

SEQ ID NO: 210137 - RNA, 19 nt, Homo sapiens
  misc_RNA (1)...(19): siRNA sense strand
caagacaguugggugaagu

SEQ ID NO: 210138 - RNA, 19 nt, Homo sapiens
  misc_RNA (1)...(19): siRNA sense strand
gaagauguucgagacuuug

SEQ ID NO: 210139 - RNA, 19 nt, Homo sapiens
  misc_RNA (1)...(19): siRNA sense strand
gucagauucucagcuuaua

SEQ ID NO: 210140 - RNA, 19 nt, Homo sapiens
  misc_RNA (1)...(19): siRNA sense strand
uaacaucugcaaagagugu

SEQ ID NO: 210141 - RNA, 19 nt, Homo sapiens
  misc_RNA (1)...(19): siRNA sense strand
cggagcugcuuccaauuug

SEQ ID NO: 210142 - RNA, 19 nt, Homo sapiens
  misc_RNA (1)...(19): siRNA sense strand
gaagacaaguacagauacc

SEQ ID NO: 210143 - RNA, 19 nt, Homo sapiens
  misc_RNA (1)...(19): siRNA sense strand
ccauggauauccugcagau

SEQ ID NO: 210144 - RNA, 19 nt, Homo sapiens
  misc_RNA (1)...(19): siRNA sense strand
ggcaucauuucccugugua

SEQ ID NO: 210145 - RNA, 19 nt, Homo sapiens
  misc_RNA (1)...(19): siRNA sense strand
uggauauccugcagauuau

SEQ ID NO: 210146 - RNA, 19 nt, Homo sapiens
  misc_RNA (1)...(19): siRNA sense strand
ggaagacaaguacagauac

SEQ ID NO: 210147 - RNA, 19 nt, Homo sapiens
  misc_RNA (1)...(19): siRNA sense strand
ugcaaagaguguccaauca

SEQ ID NO: 210148 - RNA, 19 nt, Homo sapiens
  misc_RNA (1)...(19): siRNA sense strand
guggauaugugucugaacu

SEQ ID NO: 210149 - RNA, 19 nt, Homo sapiens
  misc_RNA (1)...(19): siRNA sense strand
acuggcugcugaauguuua

SEQ ID NO: 210150 - RNA, 19 nt, Homo sapiens
  misc_RNA (1)...(19): siRNA sense strand
acuaucccaugguggaaua

SEQ ID NO: 210151 - RNA, 19 nt, Homo sapiens
  misc_RNA (1)...(19): siRNA sense strand
ccggagcugcuuccaauuu

SEQ ID NO: 210152 - RNA, 19 nt, Homo sapiens
  misc_RNA (1)...(19): siRNA sense strand
ccaaauuccaagacaguug

SEQ ID NO: 210153 - RNA, 19 nt, Homo sapiens
  misc_RNA (1)...(19): siRNA sense strand
cagaaacugccaagcauca

SEQ ID NO: 210154 - RNA, 19 nt, Homo sapiens
  misc_RNA (1)...(19): siRNA sense strand
uaugacaucugccaaagcu

SEQ ID NO: 210155 - RNA, 19 nt, Homo sapiens
  misc_RNA (1)...(19): siRNA sense strand
aaugucagauucucagcuu

SEQ ID NO: 210156 - RNA, 19 nt, Homo sapiens
  misc_RNA (1)...(19): siRNA sense strand
ucgagacuuugccaaggua

SEQ ID NO: 210157 - RNA, 19 nt, Homo sapiens
  misc_RNA (1)...(19): siRNA sense strand
gcaaaaggccauaaaaugc

SEQ ID NO: 210158 - RNA, 19 nt, Homo sapiens
  misc_RNA (1)...(19): siRNA sense strand
cugcaugauucuauccaaa

SEQ ID NO: 210159 - RNA, 19 nt, Homo sapiens
  misc_RNA (1)...(19): siRNA sense strand
uaaagcacauuuggaagac

SEQ ID NO: 210160 - RNA, 19 nt, Homo sapiens
  misc_RNA (1)...(19): siRNA sense strand
acaggagucuaaagcacuu

SEQ ID NO: 210161 - RNA, 19 nt, Homo sapiens
  misc_RNA (1)...(19): siRNA sense strand
acagauaccuuuucaagca

SEQ ID NO: 210162 - RNA, 19 nt, Homo sapiens
  misc_RNA (1)...(19): siRNA sense strand
aagcacauuuggaagacaa

SEQ ID NO: 210163 - RNA, 19 nt, Homo sapiens
  misc_RNA (1)...(19): siRNA sense strand
gcuaauaauaagccagaga

SEQ ID NO: 210164 - RNA, 19 nt, Homo sapiens
  misc_RNA (1)...(19): siRNA sense strand
caagagcacaacaauuugg

SEQ ID NO: 210165 - RNA, 19 nt, Homo sapiens
  misc_RNA (1)...(19): siRNA sense strand
ccugucagcugcaugugau

SEQ ID NO: 210166 - RNA, 19 nt, Homo sapiens
  misc_RNA (1)...(19): siRNA sense strand
gcugcugaauguuuaugau

SEQ ID NO: 210167 - RNA, 19 nt, Homo sapiens
  misc_RNA (1)...(19): siRNA sense strand
acagagcucuaccagucuu

SEQ ID NO: 210168 - RNA, 19 nt, Homo sapiens
  misc_RNA (1)...(19): siRNA sense strand
acaguugggugaaguugca

SEQ ID NO: 210169 - RNA, 19 nt, Homo sapiens
  misc_RNA (1)...(19): siRNA sense strand
guuugaccacuauuuauga

SEQ ID NO: 210170 - RNA, 19 nt, Homo sapiens
  misc_RNA (1)...(19): siRNA sense strand
gcuuauaggacugccauga

SEQ ID NO: 210171 - RNA, 19 nt, Homo sapiens
  misc_RNA (1)...(19): siRNA sense strand
caucaggccaaauguaaca

SEQ ID NO: 210172 - RNA, 19 nt, Homo sapiens
  misc_RNA (1)...(19): siRNA sense strand
gauucuauccaaauuccaa

SEQ ID NO: 210173 - RNA, 19 nt, Homo sapiens
  misc_RNA (1)...(19): siRNA sense strand
ggcaaguucaacaggauuu

SEQ ID NO: 210174 - RNA, 19 nt, Homo sapiens
  misc_RNA (1)...(19): siRNA sense strand
gaacuggcugcugaauguu

SEQ ID NO: 210175 - RNA, 19 nt, Homo sapiens
  misc_RNA (1)...(19): siRNA sense strand
cugcugaauguuuaugaua

SEQ ID NO: 210176 - RNA, 19 nt, Homo sapiens
  misc_RNA (1)...(19): siRNA sense strand
aagcaucaggccaaaugua

SEQ ID NO: 210177 - RNA, 19 nt, Homo sapiens
  misc_RNA (1)...(19): siRNA sense strand
uggcaucauuucccugugu

SEQ ID NO: 210178 - RNA, 19 nt, Homo sapiens
  misc_RNA (1)...(19): siRNA sense strand
ccaugaaacuccgaagacu

SEQ ID NO: 210179 - RNA, 19 nt, Homo sapiens
  misc_RNA (1)...(19): siRNA sense strand
auaauaagccagagaucga

SEQ ID NO: 210180 - RNA, 19 nt, Homo sapiens
  misc_RNA (1)...(19): siRNA sense strand
cuaauaauaagccagagau

SEQ ID NO: 210181 - RNA, 19 nt, Homo sapiens
  misc_RNA (1)...(19): siRNA sense strand
ugggugaaguugcauccuu

SEQ ID NO: 210182 - RNA, 19 nt, Homo sapiens
  misc_RNA (1)...(19): siRNA sense strand
caucauuucccuguguaaa

SEQ ID NO: 210183 - RNA, 19 nt, Homo sapiens
  misc_RNA (1)...(19): siRNA sense strand
gcguggauaugugucugaa

SEQ ID NO: 210184 - RNA, 19 nt, Homo sapiens
  misc_RNA (1)...(19): siRNA sense strand
gcacuaucccaugguggaa

SEQ ID NO: 210185 - RNA, 19 nt, Homo sapiens
  misc_RNA (1)...(19): siRNA sense strand
gagccugucagcugcaugu

SEQ ID NO: 210186 - RNA, 19 nt, Homo sapiens
  misc_RNA (1)...(19): siRNA sense strand
guacagauaccuuuucaag

SEQ ID NO: 210187 - RNA, 19 nt, Homo sapiens
  misc_RNA (1)...(19): siRNA sense strand
gucccucucugcguggaua

SEQ ID NO: 210188 - RNA, 19 nt, Homo sapiens
  misc_RNA (1)...(19): siRNA sense strand
ggagcugcuuccaauuugc

SEQ ID NO: 210189 - RNA, 19 nt, Homo sapiens
  misc_RNA (1)...(19): siRNA sense strand
uuagcugaccugaauaaug

SEQ ID NO: 210190 - RNA, 19 nt, Homo sapiens
  misc_RNA (1)...(19): siRNA sense strand
guggcaaguucaacaggau

SEQ ID NO: 210191 - RNA, 19 nt, Homo sapiens
  misc_RNA (1)...(19): siRNA sense strand
acaacaauuuggucaacgu

SEQ ID NO: 210192 - RNA, 19 nt, Homo sapiens
  misc_RNA (1)...(19): siRNA sense strand
gacuacaucaggagaagau

SEQ ID NO: 210193 - RNA, 19 nt, Homo sapiens
  misc_RNA (1)...(19): siRNA sense strand
uaauaagccagagaucgaa

SEQ ID NO: 210194 - RNA, 19 nt, Homo sapiens
  misc_RNA (1)...(19): siRNA sense strand
ugucagauucucagcuuau

SEQ ID NO: 210195 - RNA, 19 nt, Homo sapiens
  misc_RNA (1)...(19): siRNA sense strand
ggauauccugcagauuauu

SEQ ID NO: 210196 - RNA, 19 nt, Homo sapiens
  misc_RNA (1)...(19): siRNA sense strand
agcaucaggccaaauguaa

SEQ ID NO: 210197 - RNA, 19 nt, Homo sapiens
  misc_RNA (1)...(19): siRNA sense strand
gcccuuugcuuggaucucu

SEQ ID NO: 210198 - RNA, 19 nt, Homo sapiens
  misc_RNA (1)...(19): siRNA sense strand
gcugaauguuuaugauacg

SEQ ID NO: 210199 - RNA, 19 nt, Homo sapiens
  misc_RNA (1)...(19): siRNA sense strand
agacuuugccaagguacua

SEQ ID NO: 210200 - RNA, 19 nt, Homo sapiens
  misc_RNA (1)...(19): siRNA sense strand
caagcaaguggcaaguuca

SEQ ID NO: 210201 - RNA, 19 nt, Homo sapiens
  misc_RNA (1)...(19): siRNA sense strand
agacaaguacagauaccuu

SEQ ID NO: 210202 - RNA, 19 nt, Homo sapiens
  misc_RNA (1)...(19): siRNA sense strand
gcaucauuucccuguguaa

SEQ ID NO: 210203 - RNA, 19 nt, Homo sapiens
  misc_RNA (1)...(19): siRNA sense strand
cugcaaagaguguccaauc

SEQ ID NO: 210204 - RNA, 19 nt, Homo sapiens
  misc_RNA (1)...(19): siRNA sense strand
cuuauaggacugccaugaa

SEQ ID NO: 210205 - RNA, 19 nt, Homo sapiens
  misc_RNA (1)...(19): siRNA sense strand
caaagaguguccaaucauu

SEQ ID NO: 210206 - RNA, 19 nt, Homo sapiens
  misc_RNA (1)...(19): siRNA sense strand
uagcugaccugaauaaugu

SEQ ID NO: 210207 - RNA, 19 nt, Homo sapiens
  misc_RNA (1)...(19): siRNA sense strand
gcaugauucuauccaaauu

SEQ ID NO: 210208 - RNA, 19 nt, Homo sapiens
  misc_RNA (1)...(19): siRNA sense strand
ugaacuggcugcugaaugu

SEQ ID NO: 210209 - RNA, 19 nt, Homo sapiens
  misc_RNA (1)...(19): siRNA sense strand
gauauccugcagauuauua

SEQ ID NO: 210210 - RNA, 19 nt, Homo sapiens
  misc_RNA (1)...(19): siRNA sense strand
gagaagauguucgagacuu

SEQ ID NO: 210211 - RNA, 19 nt, Homo sapiens
  misc_RNA (1)...(19): siRNA sense strand
gcacuuuaauuaugacauc

SEQ ID NO: 210212 - RNA, 19 nt, Homo sapiens
  misc_RNA (1)...(19): siRNA sense strand
guaaagcacauuuggaaga

SEQ ID NO: 210213 - RNA, 19 nt, Homo sapiens
  misc_RNA (1)...(19): siRNA sense strand
gaauauugcacuccgacua

SEQ ID NO: 210214 - RNA, 19 nt, Homo sapiens
  misc_RNA (1)...(19): siRNA sense strand
uuauaggacugccaugaaa

SEQ ID NO: 210215 - RNA, 19 nt, Homo sapiens
  misc_RNA (1)...(19): siRNA sense strand
gggugaaguugcauccuuu

SEQ ID NO: 210216 - RNA, 19 nt, Homo sapiens
  misc_RNA (1)...(19): siRNA sense strand
gcaagagcacaacaauuug

SEQ ID NO: 210217 - RNA, 19 nt, Homo sapiens
  misc_RNA (1)...(19): siRNA sense strand
gcacaacaauuuggucaac

SEQ ID NO: 210218 - RNA, 19 nt, Homo sapiens
  misc_RNA (1)...(19): siRNA sense strand
agcaagagcacaacaauuu

SEQ ID NO: 210219 - RNA, 19 nt, Homo sapiens
  misc_RNA (1)...(19): siRNA sense strand
agaagauguucgagacuuu

SEQ ID NO: 210220 - RNA, 19 nt, Homo sapiens
  misc_RNA (1)...(19): siRNA sense strand
gagcaagagcacaacaauu

SEQ ID NO: 210221 - RNA, 19 nt, Homo sapiens
  misc_RNA (1)...(19): siRNA sense strand
ucaagcaaguggcaaguuc

SEQ ID NO: 210222 - RNA, 19 nt, Homo sapiens
  misc_RNA (1)...(19): siRNA sense strand
ccacgagacucaaacaacu

SEQ ID NO: 210223 - RNA, 19 nt, Homo sapiens
  misc_RNA (1)...(19): siRNA sense strand
cagcacaaccucaagcaaa

SEQ ID NO: 210224 - RNA, 19 nt, Homo sapiens
  misc_RNA (1)...(19): siRNA sense strand
gcaaagaguguccaaucau

SEQ ID NO: 210225 - RNA, 19 nt, Homo sapiens
  misc_RNA (1)...(19): siRNA sense strand
auggauauccugcagauua

SEQ ID NO: 210226 - RNA, 19 nt, Homo sapiens
  misc_RNA (1)...(19): siRNA sense strand
uguaacaucugcaaagagu

SEQ ID NO: 210227 - RNA, 19 nt, Homo sapiens
  misc_RNA (1)...(19): siRNA sense strand
guccggagcugcuuccaau

SEQ ID NO: 210228 - RNA, 19 nt, Homo sapiens
  misc_RNA (1)...(19): siRNA sense strand
gcaaguggcaaguucaaca

SEQ ID NO: 210229 - RNA, 19 nt, Homo sapiens
  misc_RNA (1)...(19): siRNA sense strand
gcuuccaauuugcuaauaa

SEQ ID NO: 210230 - RNA, 19 nt, Homo sapiens
  misc_RNA (1)...(19): siRNA sense strand
uggaagacaaguacagaua

SEQ ID NO: 210231 - RNA, 19 nt, Homo sapiens
  misc_RNA (1)...(19): siRNA sense strand
ggauccguguccugucuuu

SEQ ID NO: 210232 - RNA, 19 nt, Homo sapiens
  misc_RNA (1)...(19): siRNA sense strand
gucuuuagcugaccugaau

SEQ ID NO: 210233 - RNA, 19 nt, Homo sapiens
  misc_RNA (1)...(19): siRNA sense strand
gacaaguacagauaccuuu

SEQ ID NO: 210234 - RNA, 19 nt, Homo sapiens
  misc_RNA (1)...(19): siRNA sense strand
ccaagcaucaggccaaaug

SEQ ID NO: 210235 - RNA, 19 nt, Homo sapiens
  misc_RNA (1)...(19): siRNA sense strand
ggagcaagagcacaacaau

SEQ ID NO: 210236 - RNA, 19 nt, Homo sapiens
  misc_RNA (1)...(19): siRNA sense strand
guguaaagcacauuuggaa

SEQ ID NO: 210237 - RNA, 19 nt, Homo sapiens
  misc_RNA (1)...(19): siRNA sense strand
caagacaguugggugaagu

SEQ ID NO: 210238 - RNA, 19 nt, Homo sapiens
  misc_RNA (1)...(19): siRNA sense strand
gaagauguucgagacuuug

SEQ ID NO: 210239 - RNA, 19 nt, Homo sapiens
  misc_RNA (1)...(19): siRNA sense strand
gucagauucucagcuuaua

SEQ ID NO: 210240 - RNA, 19 nt, Homo sapiens
  misc_RNA (1)...(19): siRNA sense strand
uaacaucugcaaagagugu

SEQ ID NO: 210241 - RNA, 19 nt, Homo sapiens
  misc_RNA (1)...(19): siRNA sense strand
cggagcugcuuccaauuug

SEQ ID NO: 210242 - RNA, 19 nt, Homo sapiens
  misc_RNA (1)...(19): siRNA sense strand
gaagacaaguacagauacc

SEQ ID NO: 210243 - RNA, 19 nt, Homo sapiens
  misc_RNA (1)...(19): siRNA sense strand
ccauggauauccugcagau

SEQ ID NO: 210244 - RNA, 19 nt, Homo sapiens
  misc_RNA (1)...(19): siRNA sense strand
ggcaucauuucccugugua

SEQ ID NO: 210245 - RNA, 19 nt, Homo sapiens
  misc_RNA (1)...(19): siRNA sense strand
uggauauccugcagauuau

SEQ ID NO: 210246 - RNA, 19 nt, Homo sapiens
  misc_RNA (1)...(19): siRNA sense strand
ggaagacaaguacagauac

SEQ ID NO: 210247 - RNA, 19 nt, Homo sapiens
  misc_RNA (1)...(19): siRNA sense strand
ugcaaagaguguccaauca

SEQ ID NO: 210248 - RNA, 19 nt, Homo sapiens
  misc_RNA (1)...(19): siRNA sense strand
guggauaugugucugaacu

SEQ ID NO: 210249 - RNA, 19 nt, Homo sapiens
  misc_RNA (1)...(19): siRNA sense strand
acuggcugcugaauguuua

SEQ ID NO: 210250 - RNA, 19 nt, Homo sapiens
  misc_RNA (1)...(19): siRNA sense strand
acuaucccaugguggaaua

SEQ ID NO: 210251 - RNA, 19 nt, Homo sapiens
  misc_RNA (1)...(19): siRNA sense strand
ccggagcugcuuccaauuu

SEQ ID NO: 210252 - RNA, 19 nt, Homo sapiens
  misc_RNA (1)...(19): siRNA sense strand
ccaaauuccaagacaguug

SEQ ID NO: 210253 - RNA, 19 nt, Homo sapiens
  misc_RNA (1)...(19): siRNA sense strand
cagaaacugccaagcauca

SEQ ID NO: 210254 - RNA, 19 nt, Homo sapiens
  misc_RNA (1)...(19): siRNA sense strand
uaugacaucugccaaagcu

SEQ ID NO: 210255 - RNA, 19 nt, Homo sapiens
  misc_RNA (1)...(19): siRNA sense strand
aaugucagauucucagcuu

SEQ ID NO: 210256 - RNA, 19 nt, Homo sapiens
  misc_RNA (1)...(19): siRNA sense strand
ucgagacuuugccaaggua

SEQ ID NO: 210257 - RNA, 19 nt, Homo sapiens
  misc_RNA (1)...(19): siRNA sense strand
gcaaaaggccauaaaaugc

SEQ ID NO: 210258 - RNA, 19 nt, Homo sapiens
  misc_RNA (1)...(19): siRNA sense strand
cugcaugauucuauccaaa

SEQ ID NO: 210259 - RNA, 19 nt, Homo sapiens
  misc_RNA (1)...(19): siRNA sense strand
uaaagcacauuuggaagac

SEQ ID NO: 210260 - RNA, 19 nt, Homo sapiens
  misc_RNA (1)...(19): siRNA sense strand
acaggagucuaaagcacuu

SEQ ID NO: 210261 - RNA, 19 nt, Homo sapiens
  misc_RNA (1)...(19): siRNA sense strand
acagauaccuuuucaagca

SEQ ID NO: 210262 - RNA, 19 nt, Homo sapiens
  misc_RNA (1)...(19): siRNA sense strand
aagcacauuuggaagacaa

SEQ ID NO: 210263 - RNA, 19 nt, Homo sapiens
  misc_RNA (1)...(19): siRNA sense strand
gcuaauaauaagccagaga

SEQ ID NO: 210264 - RNA, 19 nt, Homo sapiens
  misc_RNA (1)...(19): siRNA sense strand
caagagcacaacaauuugg

SEQ ID NO: 210265 - RNA, 19 nt, Homo sapiens
  misc_RNA (1)...(19): siRNA sense strand
ccugucagcugcaugugau

SEQ ID NO: 210266 - RNA, 19 nt, Homo sapiens
  misc_RNA (1)...(19): siRNA sense strand
gcugcugaauguuuaugau

SEQ ID NO: 210267 - RNA, 19 nt, Homo sapiens
  misc_RNA (1)...(19): siRNA sense strand
acagagcucuaccagucuu

SEQ ID NO: 210268 - RNA, 19 nt, Homo sapiens
  misc_RNA (1)...(19): siRNA sense strand
acaguugggugaaguugca

SEQ ID NO: 210269 - RNA, 19 nt, Homo sapiens
  misc_RNA (1)...(19): siRNA sense strand
guuugaccacuauuuauga

SEQ ID NO: 210270 - RNA, 19 nt, Homo sapiens
  misc_RNA (1)...(19): siRNA sense strand
gcuuauaggacugccauga

SEQ ID NO: 210271 - RNA, 19 nt, Homo sapiens
  misc_RNA (1)...(19): siRNA sense strand
caucaggccaaauguaaca

SEQ ID NO: 210272 - RNA, 19 nt, Homo sapiens
  misc_RNA (1)...(19): siRNA sense strand
gauucuauccaaauuccaa

SEQ ID NO: 210273 - RNA, 19 nt, Homo sapiens
  misc_RNA (1)...(19): siRNA sense strand
ggcaaguucaacaggauuu

SEQ ID NO: 210274 - RNA, 19 nt, Homo sapiens
  misc_RNA (1)...(19): siRNA sense strand
gaacuggcugcugaauguu

SEQ ID NO: 210275 - RNA, 19 nt, Homo sapiens
  misc_RNA (1)...(19): siRNA sense strand
cugcugaauguuuaugaua

SEQ ID NO: 210276 - RNA, 19 nt, Homo sapiens
  misc_RNA (1)...(19): siRNA sense strand
aagcaucaggccaaaugua

SEQ ID NO: 210277 - RNA, 19 nt, Homo sapiens
  misc_RNA (1)...(19): siRNA sense strand
uggcaucauuucccugugu

SEQ ID NO: 210278 - RNA, 19 nt, Homo sapiens
  misc_RNA (1)...(19): siRNA sense strand
ccaugaaacuccgaagacu

SEQ ID NO: 210279 - RNA, 19 nt, Homo sapiens
  misc_RNA (1)...(19): siRNA sense strand
auaauaagccagagaucga

SEQ ID NO: 210280 - RNA, 19 nt, Homo sapiens
  misc_RNA (1)...(19): siRNA sense strand
cuaauaauaagccagagau

SEQ ID NO: 210281 - RNA, 19 nt, Homo sapiens
  misc_RNA (1)...(19): siRNA sense strand
ugggugaaguugcauccuu

SEQ ID NO: 210282 - RNA, 19 nt, Homo sapiens
  misc_RNA (1)...(19): siRNA sense strand
caucauuucccuguguaaa

SEQ ID NO: 210283 - RNA, 19 nt, Homo sapiens
  misc_RNA (1)...(19): siRNA sense strand
gcguggauaugugucugaa

SEQ ID NO: 210284 - RNA, 19 nt, Homo sapiens
  misc_RNA (1)...(19): siRNA sense strand
gcacuaucccaugguggaa

SEQ ID NO: 210285 - RNA, 19 nt, Homo sapiens
  misc_RNA (1)...(19): siRNA sense strand
gagccugucagcugcaugu

SEQ ID NO: 210286 - RNA, 19 nt, Homo sapiens
  misc_RNA (1)...(19): siRNA sense strand
guacagauaccuuuucaag

SEQ ID NO: 210287 - RNA, 19 nt, Homo sapiens
  misc_RNA (1)...(19): siRNA sense strand
gucccucucugcguggaua

SEQ ID NO: 210288 - RNA, 19 nt, Homo sapiens
  misc_RNA (1)...(19): siRNA sense strand
ggagcugcuuccaauuugc

SEQ ID NO: 210289 - RNA, 19 nt, Homo sapiens
  misc_RNA (1)...(19): siRNA sense strand
uuagcugaccugaauaaug

SEQ ID NO: 210290 - RNA, 19 nt, Homo sapiens
  misc_RNA (1)...(19): siRNA sense strand
guggcaaguucaacaggau

SEQ ID NO: 210291 - RNA, 19 nt, Homo sapiens
  misc_RNA (1)...(19): siRNA sense strand
acaacaauuuggucaacgu

SEQ ID NO: 210292 - RNA, 19 nt, Homo sapiens
  misc_RNA (1)...(19): siRNA sense strand
gacuacaucaggagaagau

SEQ ID NO: 210293 - RNA, 19 nt, Homo sapiens
  misc_RNA (1)...(19): siRNA sense strand
uaauaagccagagaucgaa

SEQ ID NO: 210294 - RNA, 19 nt, Homo sapiens
  misc_RNA (1)...(19): siRNA sense strand
ugucagauucucagcuuau

SEQ ID NO: 210295 - RNA, 19 nt, Homo sapiens
  misc_RNA (1)...(19): siRNA sense strand
ggauauccugcagauuauu

SEQ ID NO: 210296 - RNA, 19 nt, Homo sapiens
  misc_RNA (1)...(19): siRNA sense strand
agcaucaggccaaauguaa

SEQ ID NO: 210297 - RNA, 19 nt, Homo sapiens
  misc_RNA (1)...(19): siRNA sense strand
gcccuuugcuuggaucucu

SEQ ID NO: 210298 - RNA, 19 nt, Homo sapiens
  misc_RNA (1)...(19): siRNA sense strand
gcugaauguuuaugauacg

SEQ ID NO: 210299 - RNA, 19 nt, Homo sapiens
  misc_RNA (1)...(19): siRNA sense strand
agacuuugccaagguacua

SEQ ID NO: 210300 - RNA, 19 nt, Homo sapiens
  misc_RNA (1)...(19): siRNA sense strand
caagcaaguggcaaguuca

SEQ ID NO: 210301 - RNA, 19 nt, Homo sapiens
  misc_RNA (1)...(19): siRNA sense strand
agacaaguacagauaccuu

SEQ ID NO: 210302 - RNA, 19 nt, Homo sapiens
  misc_RNA (1)...(19): siRNA sense strand
gcaucauuucccuguguaa

SEQ ID NO: 210303 - RNA, 19 nt, Homo sapiens
  misc_RNA (1)...(19): siRNA sense strand
cugcaaagaguguccaauc

SEQ ID NO: 210304 - RNA, 19 nt, Homo sapiens
  misc_RNA (1)...(19): siRNA sense strand
cuuauaggacugccaugaa

SEQ ID NO: 210305 - RNA, 19 nt, Homo sapiens
  misc_RNA (1)...(19): siRNA sense strand
caaagaguguccaaucauu

SEQ ID NO: 210306 - RNA, 19 nt, Homo sapiens
  misc_RNA (1)...(19): siRNA sense strand
uagcugaccugaauaaugu

SEQ ID NO: 210307 - RNA, 19 nt, Homo sapiens
  misc_RNA (1)...(19): siRNA sense strand
gcaugauucuauccaaauu

SEQ ID NO: 210308 - RNA, 19 nt, Homo sapiens
  misc_RNA (1)...(19): siRNA sense strand
ugaacuggcugcugaaugu

SEQ ID NO: 210309 - RNA, 19 nt, Homo sapiens
  misc_RNA (1)...(19): siRNA sense strand
gauauccugcagauuauua

SEQ ID NO: 210310 - RNA, 19 nt, Homo sapiens
  misc_RNA (1)...(19): siRNA sense strand
gagaagauguucgagacuu

SEQ ID NO: 210311 - RNA, 19 nt, Homo sapiens
  misc_RNA (1)...(19): siRNA sense strand
gcacuuuaauuaugacauc

SEQ ID NO: 210312 - RNA, 19 nt, Homo sapiens
  misc_RNA (1)...(19): siRNA sense strand
guaaagcacauuuggaaga

SEQ ID NO: 210313 - RNA, 19 nt, Homo sapiens
  misc_RNA (1)...(19): siRNA sense strand
gaauauugcacuccgacua

SEQ ID NO: 210314 - RNA, 19 nt, Homo sapiens
  misc_RNA (1)...(19): siRNA sense strand
uuauaggacugccaugaaa

SEQ ID NO: 210315 - RNA, 19 nt, Homo sapiens
  misc_RNA (1)...(19): siRNA sense strand
gggugaaguugcauccuuu

SEQ ID NO: 210316 - RNA, 19 nt, Homo sapiens
  misc_RNA (1)...(19): siRNA sense strand
gcaagagcacaacaauuug

SEQ ID NO: 210317 - RNA, 19 nt, Homo sapiens
  misc_RNA (1)...(19): siRNA sense strand
gcacaacaauuuggucaac

SEQ ID NO: 210318 - RNA, 19 nt, Homo sapiens
  misc_RNA (1)...(19): siRNA sense strand
agcaagagcacaacaauuu

SEQ ID NO: 210319 - RNA, 19 nt, Homo sapiens
  misc_RNA (1)...(19): siRNA sense strand
agaagauguucgagacuuu

SEQ ID NO: 210320 - RNA, 19 nt, Homo sapiens
  misc_RNA (1)...(19): siRNA sense strand
gagcaagagcacaacaauu

SEQ ID NO: 210321 - RNA, 19 nt, Homo sapiens
  misc_RNA (1)...(19): siRNA sense strand
ucaagcaaguggcaaguuc

SEQ ID NO: 210322 - RNA, 19 nt, Homo sapiens
  misc_RNA (1)...(19): siRNA sense strand
ccacgagacucaaacaacu

SEQ ID NO: 210323 - RNA, 19 nt, Homo sapiens
  misc_RNA (1)...(19): siRNA sense strand
cagcacaaccucaagcaaa

SEQ ID NO: 210324 - RNA, 19 nt, Homo sapiens
  misc_RNA (1)...(19): siRNA sense strand
gcaaagaguguccaaucau

SEQ ID NO: 210325 - RNA, 19 nt, Homo sapiens
  misc_RNA (1)...(19): siRNA sense strand
auggauauccugcagauua

SEQ ID NO: 210326 - RNA, 19 nt, Homo sapiens
  misc_RNA (1)...(19): siRNA sense strand
uguaacaucugcaaagagu

SEQ ID NO: 210327 - RNA, 19 nt, Homo sapiens
  misc_RNA (1)...(19): siRNA sense strand
guccggagcugcuuccaau

SEQ ID NO: 210328 - RNA, 19 nt, Homo sapiens
  misc_RNA (1)...(19): siRNA sense strand
gcaaguggcaaguucaaca

SEQ ID NO: 210329 - RNA, 19 nt, Homo sapiens
  misc_RNA (1)...(19): siRNA sense strand
gcuuccaauuugcuaauaa

SEQ ID NO: 210330 - RNA, 19 nt, Homo sapiens
  misc_RNA (1)...(19): siRNA sense strand
uggaagacaaguacagaua

SEQ ID NO: 210331 - RNA, 19 nt, Homo sapiens
  misc_RNA (1)...(19): siRNA sense strand
ggauccguguccugucuuu

SEQ ID NO: 210332 - RNA, 19 nt, Homo sapiens
  misc_RNA (1)...(19): siRNA sense strand
gucuuuagcugaccugaau

SEQ ID NO: 210333 - RNA, 19 nt, Homo sapiens
  misc_RNA (1)...(19): siRNA sense strand
gacaaguacagauaccuuu

SEQ ID NO: 210334 - RNA, 19 nt, Homo sapiens
  misc_RNA (1)...(19): siRNA sense strand
ccaagcaucaggccaaaug

SEQ ID NO: 210335 - RNA, 19 nt, Homo sapiens
  misc_RNA (1)...(19): siRNA sense strand
ggagcaagagcacaacaau

SEQ ID NO: 210336 - RNA, 19 nt, Homo sapiens
  misc_RNA (1)...(19): siRNA sense strand
guguaaagcacauuuggaa

SEQ ID NO: 210337 - RNA, 19 nt, Homo sapiens
  misc_RNA (1)...(19): siRNA sense strand
caagacaguugggugaagu

SEQ ID NO: 210338 - RNA, 19 nt, Homo sapiens
  misc_RNA (1)...(19): siRNA sense strand
gaagauguucgagacuuug

SEQ ID NO: 210339 - RNA, 19 nt, Homo sapiens
  misc_RNA (1)...(19): siRNA sense strand
gucagauucucagcuuaua

SEQ ID NO: 210340 - RNA, 19 nt, Homo sapiens
  misc_RNA (1)...(19): siRNA sense strand
uaacaucugcaaagagugu

SEQ ID NO: 210341 - RNA, 19 nt, Homo sapiens
  misc_RNA (1)...(19): siRNA sense strand
cggagcugcuuccaauuug

SEQ ID NO: 210342 - RNA, 19 nt, Homo sapiens
  misc_RNA (1)...(19): siRNA sense strand
gaagacaaguacagauacc

SEQ ID NO: 210343 - RNA, 19 nt, Homo sapiens
  misc_RNA (1)...(19): siRNA sense strand
ccauggauauccugcagau

SEQ ID NO: 210344 - RNA, 19 nt, Homo sapiens
  misc_RNA (1)...(19): siRNA sense strand
ggcaucauuucccugugua

SEQ ID NO: 210345 - RNA, 19 nt, Homo sapiens
  misc_RNA (1)...(19): siRNA sense strand
uggauauccugcagauuau

SEQ ID NO: 210346 - RNA, 19 nt, Homo sapiens
  misc_RNA (1)...(19): siRNA sense strand
ggaagacaaguacagauac

SEQ ID NO: 210347 - RNA, 19 nt, Homo sapiens
  misc_RNA (1)...(19): siRNA sense strand
ugcaaagaguguccaauca

SEQ ID NO: 210348 - RNA, 19 nt, Homo sapiens
  misc_RNA (1)...(19): siRNA sense strand
guggauaugugucugaacu

SEQ ID NO: 210349 - RNA, 19 nt, Homo sapiens
  misc_RNA (1)...(19): siRNA sense strand
acuggcugcugaauguuua

SEQ ID NO: 210350 - RNA, 19 nt, Homo sapiens
  misc_RNA (1)...(19): siRNA sense strand
acuaucccaugguggaaua

SEQ ID NO: 210351 - RNA, 19 nt, Homo sapiens
  misc_RNA (1)...(19): siRNA sense strand
ccggagcugcuuccaauuu

SEQ ID NO: 210352 - RNA, 19 nt, Homo sapiens
  misc_RNA (1)...(19): siRNA sense strand
ccaaauuccaagacaguug

SEQ ID NO: 210353 - RNA, 19 nt, Homo sapiens
  misc_RNA (1)...(19): siRNA sense strand
cagaaacugccaagcauca

SEQ ID NO: 210354 - RNA, 19 nt, Homo sapiens
  misc_RNA (1)...(19): siRNA sense strand
uaugacaucugccaaagcu

SEQ ID NO: 210355 - RNA, 19 nt, Homo sapiens
  misc_RNA (1)...(19): siRNA sense strand
aaugucagauucucagcuu

SEQ ID NO: 210356 - RNA, 19 nt, Homo sapiens
  misc_RNA (1)...(19): siRNA sense strand
ucgagacuuugccaaggua

SEQ ID NO: 210357 - RNA, 19 nt, Homo sapiens
  misc_RNA (1)...(19): siRNA sense strand
gcaaaaggccauaaaaugc

SEQ ID NO: 210358 - RNA, 19 nt, Homo sapiens
  misc_RNA (1)...(19): siRNA sense strand
cugcaugauucuauccaaa

SEQ ID NO: 210359 - RNA, 19 nt, Homo sapiens
  misc_RNA (1)...(19): siRNA sense strand
uaaagcacauuuggaagac

SEQ ID NO: 210360 - RNA, 19 nt, Homo sapiens
  misc_RNA (1)...(19): siRNA sense strand
acaggagucuaaagcacuu

SEQ ID NO: 210361 - RNA, 19 nt, Homo sapiens
  misc_RNA (1)...(19): siRNA sense strand
acagauaccuuuucaagca

SEQ ID NO: 210362 - RNA, 19 nt, Homo sapiens
  misc_RNA (1)...(19): siRNA sense strand
aagcacauuuggaagacaa

SEQ ID NO: 210363 - RNA, 19 nt, Homo sapiens
  misc_RNA (1)...(19): siRNA sense strand
gcuaauaauaagccagaga

SEQ ID NO: 210364 - RNA, 19 nt, Homo sapiens
  misc_RNA (1)...(19): siRNA sense strand
caagagcacaacaauuugg

SEQ ID NO: 210365 - RNA, 19 nt, Homo sapiens
  misc_RNA (1)...(19): siRNA sense strand
ccugucagcugcaugugau

SEQ ID NO: 210366 - RNA, 19 nt, Homo sapiens
  misc_RNA (1)...(19): siRNA sense strand
gcugcugaauguuuaugau

SEQ ID NO: 210367 - RNA, 19 nt, Homo sapiens
  misc_RNA (1)...(19): siRNA sense strand
acagagcucuaccagucuu

SEQ ID NO: 210368 - RNA, 19 nt, Homo sapiens
  misc_RNA (1)...(19): siRNA sense strand
acaguugggugaaguugca

SEQ ID NO: 210369 - RNA, 19 nt, Homo sapiens
  misc_RNA (1)...(19): siRNA sense strand
guuugaccacuauuuauga

SEQ ID NO: 210370 - RNA, 19 nt, Homo sapiens
  misc_RNA (1)...(19): siRNA sense strand
gcuuauaggacugccauga

SEQ ID NO: 210371 - RNA, 19 nt, Homo sapiens
  misc_RNA (1)...(19): siRNA sense strand
caucaggccaaauguaaca

SEQ ID NO: 210372 - RNA, 19 nt, Homo sapiens
  misc_RNA (1)...(19): siRNA sense strand
gauucuauccaaauuccaa

SEQ ID NO: 210373 - RNA, 19 nt, Homo sapiens
  misc_RNA (1)...(19): siRNA sense strand
ggcaaguucaacaggauuu

SEQ ID NO: 210374 - RNA, 19 nt, Homo sapiens
  misc_RNA (1)...(19): siRNA sense strand
gaacuggcugcugaauguu

SEQ ID NO: 210375 - RNA, 19 nt, Homo sapiens
  misc_RNA (1)...(19): siRNA sense strand
cugcugaauguuuaugaua

SEQ ID NO: 210376 - RNA, 19 nt, Homo sapiens
  misc_RNA (1)...(19): siRNA sense strand
aagcaucaggccaaaugua

SEQ ID NO: 210377 - RNA, 19 nt, Homo sapiens
  misc_RNA (1)...(19): siRNA sense strand
uggcaucauuucccugugu

SEQ ID NO: 210378 - RNA, 19 nt, Homo sapiens
  misc_RNA (1)...(19): siRNA sense strand
ccaugaaacuccgaagacu

SEQ ID NO: 210379 - RNA, 19 nt, Homo sapiens
  misc_RNA (1)...(19): siRNA sense strand
auaauaagccagagaucga

SEQ ID NO: 210380 - RNA, 19 nt, Homo sapiens
  misc_RNA (1)...(19): siRNA sense strand
cuaauaauaagccagagau

SEQ ID NO: 210381 - RNA, 19 nt, Homo sapiens
  misc_RNA (1)...(19): siRNA sense strand
ugggugaaguugcauccuu

SEQ ID NO: 210382 - RNA, 19 nt, Homo sapiens
  misc_RNA (1)...(19): siRNA sense strand
caucauuucccuguguaaa

SEQ ID NO: 210383 - RNA, 19 nt, Homo sapiens
  misc_RNA (1)...(19): siRNA sense strand
gcguggauaugugucugaa

SEQ ID NO: 210384 - RNA, 19 nt, Homo sapiens
  misc_RNA (1)...(19): siRNA sense strand
gcacuaucccaugguggaa

SEQ ID NO: 210385 - RNA, 19 nt, Homo sapiens
  misc_RNA (1)...(19): siRNA sense strand
gagccugucagcugcaugu

SEQ ID NO: 210386 - RNA, 19 nt, Homo sapiens
  misc_RNA (1)...(19): siRNA sense strand
guacagauaccuuuucaag

SEQ ID NO: 210387 - RNA, 19 nt, Homo sapiens
  misc_RNA (1)...(19): siRNA sense strand
gucccucucugcguggaua

SEQ ID NO: 210388 - RNA, 19 nt, Homo sapiens
  misc_RNA (1)...(19): siRNA sense strand
ggagcugcuuccaauuugc

SEQ ID NO: 210389 - RNA, 19 nt, Homo sapiens
  misc_RNA (1)...(19): siRNA sense strand
uuagcugaccugaauaaug

SEQ ID NO: 210390 - RNA, 19 nt, Homo sapiens
  misc_RNA (1)...(19): siRNA sense strand
guggcaaguucaacaggau

SEQ ID NO: 210391 - RNA, 19 nt, Homo sapiens
  misc_RNA (1)...(19): siRNA sense strand
acaacaauuuggucaacgu

SEQ ID NO: 210392 - RNA, 19 nt, Homo sapiens
  misc_RNA (1)...(19): siRNA sense strand
gacuacaucaggagaagau

SEQ ID NO: 210393 - RNA, 19 nt, Homo sapiens
  misc_RNA (1)...(19): siRNA sense strand
uaauaagccagagaucgaa

SEQ ID NO: 210394 - RNA, 19 nt, Homo sapiens
  misc_RNA (1)...(19): siRNA sense strand
ugucagauucucagcuuau

SEQ ID NO: 210395 - RNA, 19 nt, Homo sapiens
  misc_RNA (1)...(19): siRNA sense strand
ggauauccugcagauuauu

SEQ ID NO: 210396 - RNA, 19 nt, Homo sapiens
  misc_RNA (1)...(19): siRNA sense strand
agcaucaggccaaauguaa

SEQ ID NO: 210397 - RNA, 19 nt, Homo sapiens
  misc_RNA (1)...(19): siRNA sense strand
gcccuuugcuuggaucucu

SEQ ID NO: 210398 - RNA, 19 nt, Homo sapiens
  misc_RNA (1)...(19): siRNA sense strand
gcugaauguuuaugauacg

SEQ ID NO: 210399 - RNA, 19 nt, Homo sapiens
  misc_RNA (1)...(19): siRNA sense strand
agacuuugccaagguacua

SEQ ID NO: 210400 - RNA, 19 nt, Homo sapiens
  misc_RNA (1)...(19): siRNA sense strand
caagcaaguggcaaguuca

SEQ ID NO: 210401 - RNA, 19 nt, Homo sapiens
  misc_RNA (1)...(19): siRNA sense strand
agacaaguacagauaccuu

SEQ ID NO: 210402 - RNA, 19 nt, Homo sapiens
  misc_RNA (1)...(19): siRNA sense strand
gcaucauuucccuguguaa

SEQ ID NO: 210403 - RNA, 19 nt, Homo sapiens
  misc_RNA (1)...(19): siRNA sense strand
cugcaaagaguguccaauc

SEQ ID NO: 210404 - RNA, 19 nt, Homo sapiens
  misc_RNA (1)...(19): siRNA sense strand
cuuauaggacugccaugaa

SEQ ID NO: 210405 - RNA, 19 nt, Homo sapiens
  misc_RNA (1)...(19): siRNA sense strand
caaagaguguccaaucauu

SEQ ID NO: 210406 - RNA, 19 nt, Homo sapiens
  misc_RNA (1)...(19): siRNA sense strand
uagcugaccugaauaaugu

SEQ ID NO: 210407 - RNA, 19 nt, Homo sapiens
  misc_RNA (1)...(19): siRNA sense strand
gcaugauucuauccaaauu

SEQ ID NO: 210408 - RNA, 19 nt, Homo sapiens
  misc_RNA (1)...(19): siRNA sense strand
ugaacuggcugcugaaugu

SEQ ID NO: 210409 - RNA, 19 nt, Homo sapiens
  misc_RNA (1)...(19): siRNA sense strand
gauauccugcagauuauua

SEQ ID NO: 210410 - RNA, 19 nt, Homo sapiens
  misc_RNA (1)...(19): siRNA sense strand
gagaagauguucgagacuu

SEQ ID NO: 210411 - RNA, 19 nt, Homo sapiens
  misc_RNA (1)...(19): siRNA sense strand
gcacuuuaauuaugacauc

SEQ ID NO: 210412 - RNA, 19 nt, Homo sapiens
  misc_RNA (1)...(19): siRNA sense strand
guaaagcacauuuggaaga

SEQ ID NO: 210413 - RNA, 19 nt, Homo sapiens
  misc_RNA (1)...(19): siRNA sense strand
gaauauugcacuccgacua

SEQ ID NO: 210414 - RNA, 19 nt, Homo sapiens
  misc_RNA (1)...(19): siRNA sense strand
uuauaggacugccaugaaa

SEQ ID NO: 210415 - RNA, 19 nt, Homo sapiens
  misc_RNA (1)...(19): siRNA sense strand
gggugaaguugcauccuuu

SEQ ID NO: 210416 - RNA, 19 nt, Homo sapiens
  misc_RNA (1)...(19): siRNA sense strand
gcaagagcacaacaauuug

SEQ ID NO: 210417 - RNA, 19 nt, Homo sapiens
  misc_RNA (1)...(19): siRNA sense strand
gcacaacaauuuggucaac

SEQ ID NO: 210418 - RNA, 19 nt, Homo sapiens
  misc_RNA (1)...(19): siRNA sense strand
agcaagagcacaacaauuu

SEQ ID NO: 210419 - RNA, 19 nt, Homo sapiens
  misc_RNA (1)...(19): siRNA sense strand
agaagauguucgagacuuu

SEQ ID NO: 210420 - RNA, 19 nt, Homo sapiens
  misc_RNA (1)...(19): siRNA sense strand
gagcaagagcacaacaauu

SEQ ID NO: 210421 - RNA, 19 nt, Homo sapiens
  misc_RNA (1)...(19): siRNA sense strand
ucaagcaaguggcaaguuc

SEQ ID NO: 210422 - RNA, 19 nt, Homo sapiens
  misc_RNA (1)...(19): siRNA sense strand
ccacgagacucaaacaacu

SEQ ID NO: 210423 - RNA, 19 nt, Homo sapiens
  misc_RNA (1)...(19): siRNA sense strand
cagcacaaccucaagcaaa

SEQ ID NO: 210424 - RNA, 19 nt, Homo sapiens
  misc_RNA (1)...(19): siRNA sense strand
gcaaagaguguccaaucau

SEQ ID NO: 210425 - RNA, 19 nt, Homo sapiens
  misc_RNA (1)...(19): siRNA sense strand
auggauauccugcagauua

SEQ ID NO: 210426 - RNA, 19 nt, Homo sapiens
  misc_RNA (1)...(19): siRNA sense strand
uguaacaucugcaaagagu

SEQ ID NO: 210427 - RNA, 19 nt, Homo sapiens
  misc_RNA (1)...(19): siRNA sense strand
guccggagcugcuuccaau

SEQ ID NO: 210428 - RNA, 19 nt, Homo sapiens
  misc_RNA (1)...(19): siRNA sense strand
gcaaguggcaaguucaaca

SEQ ID NO: 210429 - RNA, 19 nt, Homo sapiens
  misc_RNA (1)...(19): siRNA sense strand
gcuuccaauuugcuaauaa

SEQ ID NO: 210430 - RNA, 19 nt, Homo sapiens
  misc_RNA (1)...(19): siRNA sense strand
uggaagacaaguacagaua

SEQ ID NO: 210431 - RNA, 19 nt, Homo sapiens
  misc_RNA (1)...(19): siRNA sense strand
ggauccguguccugucuuu

SEQ ID NO: 210432 - RNA, 19 nt, Homo sapiens
  misc_RNA (1)...(19): siRNA sense strand
gucuuuagcugaccugaau

SEQ ID NO: 210433 - RNA, 19 nt, Homo sapiens
  misc_RNA (1)...(19): siRNA sense strand
gacaaguacagauaccuuu

SEQ ID NO: 210434 - RNA, 19 nt, Homo sapiens
  misc_RNA (1)...(19): siRNA sense strand
ccaagcaucaggccaaaug

SEQ ID NO: 210435 - RNA, 19 nt, Homo sapiens
  misc_RNA (1)...(19): siRNA sense strand
ggagcaagagcacaacaau

SEQ ID NO: 210436 - RNA, 19 nt, Homo sapiens
  misc_RNA (1)...(19): siRNA sense strand
guguaaagcacauuuggaa

SEQ ID NO: 210437 - RNA, 19 nt, Homo sapiens
  misc_RNA (1)...(19): siRNA sense strand
caagacaguugggugaagu

SEQ ID NO: 210438 - RNA, 19 nt, Homo sapiens
  misc_RNA (1)...(19): siRNA sense strand
gaagauguucgagacuuug

SEQ ID NO: 210439 - RNA, 19 nt, Homo sapiens
  misc_RNA (1)...(19): siRNA sense strand
gucagauucucagcuuaua

SEQ ID NO: 210440 - RNA, 19 nt, Homo sapiens
  misc_RNA (1)...(19): siRNA sense strand
uaacaucugcaaagagugu

SEQ ID NO: 210441 - RNA, 19 nt, Homo sapiens
  misc_RNA (1)...(19): siRNA sense strand
cggagcugcuuccaauuug

SEQ ID NO: 210442 - RNA, 19 nt, Homo sapiens
  misc_RNA (1)...(19): siRNA sense strand
gaagacaaguacagauacc

SEQ ID NO: 210443 - RNA, 19 nt, Homo sapiens
  misc_RNA (1)...(19): siRNA sense strand
ccauggauauccugcagau

SEQ ID NO: 210444 - RNA, 19 nt, Homo sapiens
  misc_RNA (1)...(19): siRNA sense strand
ggcaucauuucccugugua

SEQ ID NO: 210445 - RNA, 19 nt, Homo sapiens
  misc_RNA (1)...(19): siRNA sense strand
uggauauccugcagauuau

SEQ ID NO: 210446 - RNA, 19 nt, Homo sapiens
  misc_RNA (1)...(19): siRNA sense strand
ggaagacaaguacagauac

SEQ ID NO: 210447 - RNA, 19 nt, Homo sapiens
  misc_RNA (1)...(19): siRNA sense strand
ugcaaagaguguccaauca

SEQ ID NO: 210448 - RNA, 19 nt, Homo sapiens
  misc_RNA (1)...(19): siRNA sense strand
guggauaugugucugaacu

SEQ ID NO: 210449 - RNA, 19 nt, Homo sapiens
  misc_RNA (1)...(19): siRNA sense strand
acuggcugcugaauguuua

SEQ ID NO: 210450 - RNA, 19 nt, Homo sapiens
  misc_RNA (1)...(19): siRNA sense strand
acuaucccaugguggaaua

SEQ ID NO: 210451 - RNA, 19 nt, Homo sapiens
  misc_RNA (1)...(19): siRNA sense strand
ccggagcugcuuccaauuu

SEQ ID NO: 210452 - RNA, 19 nt, Homo sapiens
  misc_RNA (1)...(19): siRNA sense strand
ccaaauuccaagacaguug

SEQ ID NO: 210453 - RNA, 19 nt, Homo sapiens
  misc_RNA (1)...(19): siRNA sense strand
cagaaacugccaagcauca

SEQ ID NO: 210454 - RNA, 19 nt, Homo sapiens
  misc_RNA (1)...(19): siRNA sense strand
uaugacaucugccaaagcu

SEQ ID NO: 210455 - RNA, 19 nt, Homo sapiens
  misc_RNA (1)...(19): siRNA sense strand
aaugucagauucucagcuu

SEQ ID NO: 210456 - RNA, 19 nt, Homo sapiens
  misc_RNA (1)...(19): siRNA sense strand
ucgagacuuugccaaggua

SEQ ID NO: 210457 - RNA, 19 nt, Homo sapiens
  misc_RNA (1)...(19): siRNA sense strand
gcaaaaggccauaaaaugc

SEQ ID NO: 210458 - RNA, 19 nt, Homo sapiens
  misc_RNA (1)...(19): siRNA sense strand
cugcaugauucuauccaaa

SEQ ID NO: 210459 - RNA, 19 nt, Homo sapiens
  misc_RNA (1)...(19): siRNA sense strand
uaaagcacauuuggaagac

SEQ ID NO: 210460 - RNA, 19 nt, Homo sapiens
  misc_RNA (1)...(19): siRNA sense strand
acaggagucuaaagcacuu

SEQ ID NO: 210461 - RNA, 19 nt, Homo sapiens
  misc_RNA (1)...(19): siRNA sense strand
acagauaccuuuucaagca

SEQ ID NO: 210462 - RNA, 19 nt, Homo sapiens
  misc_RNA (1)...(19): siRNA sense strand
aagcacauuuggaagacaa

SEQ ID NO: 210463 - RNA, 19 nt, Homo sapiens
  misc_RNA (1)...(19): siRNA sense strand
gcuaauaauaagccagaga

SEQ ID NO: 210464 - RNA, 19 nt, Homo sapiens
  misc_RNA (1)...(19): siRNA sense strand
caagagcacaacaauuugg

SEQ ID NO: 210465 - RNA, 19 nt, Homo sapiens
  misc_RNA (1)...(19): siRNA sense strand
ccugucagcugcaugugau

SEQ ID NO: 210466 - RNA, 19 nt, Homo sapiens
  misc_RNA (1)...(19): siRNA sense strand
gcugcugaauguuuaugau

SEQ ID NO: 210467 - RNA, 19 nt, Homo sapiens
  misc_RNA (1)...(19): siRNA sense strand
acagagcucuaccagucuu

SEQ ID NO: 210468 - RNA, 19 nt, Homo sapiens
  misc_RNA (1)...(19): siRNA sense strand
acaguugggugaaguugca

SEQ ID NO: 210469 - RNA, 19 nt, Homo sapiens
  misc_RNA (1)...(19): siRNA sense strand
guuugaccacuauuuauga

SEQ ID NO: 210470 - RNA, 19 nt, Homo sapiens
  misc_RNA (1)...(19): siRNA sense strand
gcuuauaggacugccauga

SEQ ID NO: 210471 - RNA, 19 nt, Homo sapiens
  misc_RNA (1)...(19): siRNA sense strand
caucaggccaaauguaaca

SEQ ID NO: 210472 - RNA, 19 nt, Homo sapiens
  misc_RNA (1)...(19): siRNA sense strand
gauucuauccaaauuccaa

SEQ ID NO: 210473 - RNA, 19 nt, Homo sapiens
  misc_RNA (1)...(19): siRNA sense strand
ggcaaguucaacaggauuu

SEQ ID NO: 210474 - RNA, 19 nt, Homo sapiens
  misc_RNA (1)...(19): siRNA sense strand
gaacuggcugcugaauguu

SEQ ID NO: 210475 - RNA, 19 nt, Homo sapiens
  misc_RNA (1)...(19): siRNA sense strand
cugcugaauguuuaugaua

SEQ ID NO: 210476 - RNA, 19 nt, Homo sapiens
  misc_RNA (1)...(19): siRNA sense strand
aagcaucaggccaaaugua

SEQ ID NO: 210477 - RNA, 19 nt, Homo sapiens
  misc_RNA (1)...(19): siRNA sense strand
uggcaucauuucccugugu

SEQ ID NO: 210478 - RNA, 19 nt, Homo sapiens
  misc_RNA (1)...(19): siRNA sense strand
ccaugaaacuccgaagacu

SEQ ID NO: 210479 - RNA, 19 nt, Homo sapiens
  misc_RNA (1)...(19): siRNA sense strand
auaauaagccagagaucga

SEQ ID NO: 210480 - RNA, 19 nt, Homo sapiens
  misc_RNA (1)...(19): siRNA sense strand
cuaauaauaagccagagau

SEQ ID NO: 210481 - RNA, 19 nt, Homo sapiens
  misc_RNA (1)...(19): siRNA sense strand
ugggugaaguugcauccuu

SEQ ID NO: 210482 - RNA, 19 nt, Homo sapiens
  misc_RNA (1)...(19): siRNA sense strand
caucauuucccuguguaaa

SEQ ID NO: 210483 - RNA, 19 nt, Homo sapiens
  misc_RNA (1)...(19): siRNA sense strand
gcguggauaugugucugaa

SEQ ID NO: 210484 - RNA, 19 nt, Homo sapiens
  misc_RNA (1)...(19): siRNA sense strand
gcacuaucccaugguggaa

SEQ ID NO: 210485 - RNA, 19 nt, Homo sapiens
  misc_RNA (1)...(19): siRNA sense strand
gagccugucagcugcaugu

SEQ ID NO: 210486 - RNA, 19 nt, Homo sapiens
  misc_RNA (1)...(19): siRNA sense strand
guacagauaccuuuucaag

SEQ ID NO: 210487 - RNA, 19 nt, Homo sapiens
  misc_RNA (1)...(19): siRNA sense strand
gucccucucugcguggaua

SEQ ID NO: 210488 - RNA, 19 nt, Homo sapiens
  misc_RNA (1)...(19): siRNA sense strand
ggagcugcuuccaauuugc

SEQ ID NO: 210489 - RNA, 19 nt, Homo sapiens
  misc_RNA (1)...(19): siRNA sense strand
uuagcugaccugaauaaug

SEQ ID NO: 210490 - RNA, 19 nt, Homo sapiens
  misc_RNA (1)...(19): siRNA sense strand
guggcaaguucaacaggau

SEQ ID NO: 210491 - RNA, 19 nt, Homo sapiens
  misc_RNA (1)...(19): siRNA sense strand
acaacaauuuggucaacgu

SEQ ID NO: 210492 - RNA, 19 nt, Homo sapiens
  misc_RNA (1)...(19): siRNA sense strand
gacuacaucaggagaagau

SEQ ID NO: 210493 - RNA, 19 nt, Homo sapiens
  misc_RNA (1)...(19): siRNA sense strand
uaauaagccagagaucgaa

SEQ ID NO: 210494 - RNA, 19 nt, Homo sapiens
  misc_RNA (1)...(19): siRNA sense strand
ugucagauucucagcuuau

SEQ ID NO: 210495 - RNA, 19 nt, Homo sapiens
  misc_RNA (1)...(19): siRNA sense strand
ggauauccugcagauuauu

SEQ ID NO: 210496 - RNA, 19 nt, Homo sapiens
  misc_RNA (1)...(19): siRNA sense strand
agcaucaggccaaauguaa

SEQ ID NO: 210497 - RNA, 19 nt, Homo sapiens
  misc_RNA (1)...(19): siRNA sense strand
gcccuuugcuuggaucucu

SEQ ID NO: 210498 - RNA, 19 nt, Homo sapiens
  misc_RNA (1)...(19): siRNA sense strand
gcugaauguuuaugauacg

SEQ ID NO: 210499 - RNA, 19 nt, Homo sapiens
  misc_RNA (1)...(19): siRNA sense strand
agacuuugccaagguacua

SEQ ID NO: 210500 - RNA, 19 nt, Homo sapiens
  misc_RNA (1)...(19): siRNA sense strand
caagcaaguggcaaguuca

SEQ ID NO: 210501 - RNA, 19 nt, Homo sapiens
  misc_RNA (1)...(19): siRNA sense strand
agacaaguacagauaccuu

SEQ ID NO: 210502 - RNA, 19 nt, Homo sapiens
  misc_RNA (1)...(19): siRNA sense strand
gcaucauuucccuguguaa

SEQ ID NO: 210503 - RNA, 19 nt, Homo sapiens
  misc_RNA (1)...(19): siRNA sense strand
cugcaaagaguguccaauc

SEQ ID NO: 210504 - RNA, 19 nt, Homo sapiens
  misc_RNA (1)...(19): siRNA sense strand
cuuauaggacugccaugaa

SEQ ID NO: 210505 - RNA, 19 nt, Homo sapiens
  misc_RNA (1)...(19): siRNA sense strand
caaagaguguccaaucauu

SEQ ID NO: 210506 - RNA, 19 nt, Homo sapiens
  misc_RNA (1)...(19): siRNA sense strand
uagcugaccugaauaaugu

SEQ ID NO: 210507 - RNA, 19 nt, Homo sapiens
  misc_RNA (1)...(19): siRNA sense strand
gcaugauucuauccaaauu

SEQ ID NO: 210508 - RNA, 19 nt, Homo sapiens
  misc_RNA (1)...(19): siRNA sense strand
ugaacuggcugcugaaugu

SEQ ID NO: 210509 - RNA, 19 nt, Homo sapiens
  misc_RNA (1)...(19): siRNA sense strand
gauauccugcagauuauua

SEQ ID NO: 210510 - RNA, 19 nt, Homo sapiens
  misc_RNA (1)...(19): siRNA sense strand
gagaagauguucgagacuu

SEQ ID NO: 210511 - RNA, 19 nt, Homo sapiens
  misc_RNA (1)...(19): siRNA sense strand
gcacuuuaauuaugacauc

SEQ ID NO: 210512 - RNA, 19 nt, Homo sapiens
  misc_RNA (1)...(19): siRNA sense strand
guaaagcacauuuggaaga

SEQ ID NO: 210513 - RNA, 19 nt, Homo sapiens
  misc_RNA (1)...(19): siRNA sense strand
gaauauugcacuccgacua

SEQ ID NO: 210514 - RNA, 19 nt, Homo sapiens
  misc_RNA (1)...(19): siRNA sense strand
uuauaggacugccaugaaa

SEQ ID NO: 210515 - RNA, 19 nt, Homo sapiens
  misc_RNA (1)...(19): siRNA sense strand
gggugaaguugcauccuuu

SEQ ID NO: 210516 - RNA, 19 nt, Homo sapiens
  misc_RNA (1)...(19): siRNA sense strand
gcaagagcacaacaauuug

SEQ ID NO: 210517 - RNA, 19 nt, Homo sapiens
  misc_RNA (1)...(19): siRNA sense strand
gcacaacaauuuggucaac

SEQ ID NO: 210518 - RNA, 19 nt, Homo sapiens
  misc_RNA (1)...(19): siRNA sense strand
agcaagagcacaacaauuu

SEQ ID NO: 210519 - RNA, 19 nt, Homo sapiens
  misc_RNA (1)...(19): siRNA sense strand
agaagauguucgagacuuu

SEQ ID NO: 210520 - RNA, 19 nt, Homo sapiens
  misc_RNA (1)...(19): siRNA sense strand
gagcaagagcacaacaauu

SEQ ID NO: 210521 - RNA, 19 nt, Homo sapiens
  misc_RNA (1)...(19): siRNA sense strand
ucaagcaaguggcaaguuc

SEQ ID NO: 210522 - RNA, 19 nt, Homo sapiens
  misc_RNA (1)...(19): siRNA sense strand
ccacgagacucaaacaacu

SEQ ID NO: 210523 - RNA, 19 nt, Homo sapiens
  misc_RNA (1)...(19): siRNA sense strand
cagcacaaccucaagcaaa

SEQ ID NO: 210524 - RNA, 19 nt, Homo sapiens
  misc_RNA (1)...(19): siRNA sense strand
gcaaagaguguccaaucau

SEQ ID NO: 210525 - RNA, 19 nt, Homo sapiens
  misc_RNA (1)...(19): siRNA sense strand
auggauauccugcagauua

SEQ ID NO: 210526 - RNA, 19 nt, Homo sapiens
  misc_RNA (1)...(19): siRNA sense strand
uguaacaucugcaaagagu

SEQ ID NO: 210527 - RNA, 19 nt, Homo sapiens
  misc_RNA (1)...(19): siRNA sense strand
guccggagcugcuuccaau

SEQ ID NO: 210528 - RNA, 19 nt, Homo sapiens
  misc_RNA (1)...(19): siRNA sense strand
gcaaguggcaaguucaaca

SEQ ID NO: 210529 - RNA, 19 nt, Homo sapiens
  misc_RNA (1)...(19): siRNA sense strand
gcuuccaauuugcuaauaa

SEQ ID NO: 210530 - RNA, 19 nt, Homo sapiens
  misc_RNA (1)...(19): siRNA sense strand
uggaagacaaguacagaua

SEQ ID NO: 210531 - RNA, 19 nt, Homo sapiens
  misc_RNA (1)...(19): siRNA sense strand
ggauccguguccugucuuu

SEQ ID NO: 210532 - RNA, 19 nt, Homo sapiens
  misc_RNA (1)...(19): siRNA sense strand
gucuuuagcugaccugaau

SEQ ID NO: 210533 - RNA, 19 nt, Homo sapiens
  misc_RNA (1)...(19): siRNA sense strand
gacaaguacagauaccuuu

SEQ ID NO: 210534 - RNA, 19 nt, Homo sapiens
  misc_RNA (1)...(19): siRNA sense strand
ccaagcaucaggccaaaug

SEQ ID NO: 210535 - RNA, 19 nt, Homo sapiens
  misc_RNA (1)...(19): siRNA sense strand
ggagcaagagcacaacaau

SEQ ID NO: 210536 - RNA, 19 nt, Homo sapiens
  misc_RNA (1)...(19): siRNA sense strand
guguaaagcacauuuggaa

SEQ ID NO: 210537 - RNA, 19 nt, Homo sapiens
  misc_RNA (1)...(19): siRNA sense strand
caagacaguugggugaagu

SEQ ID NO: 210538 - RNA, 19 nt, Homo sapiens
  misc_RNA (1)...(19): siRNA sense strand
gaagauguucgagacuuug

SEQ ID NO: 210539 - RNA, 19 nt, Homo sapiens
  misc_RNA (1)...(19): siRNA sense strand
gucagauucucagcuuaua

SEQ ID NO: 210540 - RNA, 19 nt, Homo sapiens
  misc_RNA (1)...(19): siRNA sense strand
uaacaucugcaaagagugu

SEQ ID NO: 210541 - RNA, 19 nt, Homo sapiens
  misc_RNA (1)...(19): siRNA sense strand
cggagcugcuuccaauuug

SEQ ID NO: 210542 - RNA, 19 nt, Homo sapiens
  misc_RNA (1)...(19): siRNA sense strand
gaagacaaguacagauacc

SEQ ID NO: 210543 - RNA, 19 nt, Homo sapiens
  misc_RNA (1)...(19): siRNA sense strand
ccauggauauccugcagau

SEQ ID NO: 210544 - RNA, 19 nt, Homo sapiens
  misc_RNA (1)...(19): siRNA sense strand
ggcaucauuucccugugua

SEQ ID NO: 210545 - RNA, 19 nt, Homo sapiens
  misc_RNA (1)...(19): siRNA sense strand
uggauauccugcagauuau

SEQ ID NO: 210546 - RNA, 19 nt, Homo sapiens
  misc_RNA (1)...(19): siRNA sense strand
ggaagacaaguacagauac

SEQ ID NO: 210547 - RNA, 19 nt, Homo sapiens
  misc_RNA (1)...(19): siRNA sense strand
ugcaaagaguguccaauca

SEQ ID NO: 210548 - RNA, 19 nt, Homo sapiens
  misc_RNA (1)...(19): siRNA sense strand
guggauaugugucugaacu

SEQ ID NO: 210549 - RNA, 19 nt, Homo sapiens
  misc_RNA (1)...(19): siRNA sense strand
acuggcugcugaauguuua

SEQ ID NO: 210550 - RNA, 19 nt, Homo sapiens
  misc_RNA (1)...(19): siRNA sense strand
acuaucccaugguggaaua

SEQ ID NO: 210551 - RNA, 19 nt, Homo sapiens
  misc_RNA (1)...(19): siRNA sense strand
ccggagcugcuuccaauuu

SEQ ID NO: 210552 - RNA, 19 nt, Homo sapiens
  misc_RNA (1)...(19): siRNA sense strand
ccaaauuccaagacaguug

SEQ ID NO: 210553 - RNA, 19 nt, Homo sapiens
  misc_RNA (1)...(19): siRNA sense strand
cagaaacugccaagcauca

SEQ ID NO: 210554 - RNA, 19 nt, Homo sapiens
  misc_RNA (1)...(19): siRNA sense strand
uaugacaucugccaaagcu

SEQ ID NO: 210555 - RNA, 19 nt, Homo sapiens
  misc_RNA (1)...(19): siRNA sense strand
aaugucagauucucagcuu

SEQ ID NO: 210556 - RNA, 19 nt, Homo sapiens
  misc_RNA (1)...(19): siRNA sense strand
ucgagacuuugccaaggua

SEQ ID NO: 210557 - RNA, 19 nt, Homo sapiens
  misc_RNA (1)...(19): siRNA sense strand
gcaaaaggccauaaaaugc

SEQ ID NO: 210558 - RNA, 19 nt, Homo sapiens
  misc_RNA (1)...(19): siRNA sense strand
cugcaugauucuauccaaa

SEQ ID NO: 210559 - RNA, 19 nt, Homo sapiens
  misc_RNA (1)...(19): siRNA sense strand
uaaagcacauuuggaagac

SEQ ID NO: 210560 - RNA, 19 nt, Homo sapiens
  misc_RNA (1)...(19): siRNA sense strand
acaggagucuaaagcacuu

SEQ ID NO: 210561 - RNA, 19 nt, Homo sapiens
  misc_RNA (1)...(19): siRNA sense strand
acagauaccuuuucaagca

SEQ ID NO: 210562 - RNA, 19 nt, Homo sapiens
  misc_RNA (1)...(19): siRNA sense strand
aagcacauuuggaagacaa

SEQ ID NO: 210563 - RNA, 19 nt, Homo sapiens
  misc_RNA (1)...(19): siRNA sense strand
gcuaauaauaagccagaga

SEQ ID NO: 210564 - RNA, 19 nt, Homo sapiens
  misc_RNA (1)...(19): siRNA sense strand
caagagcacaacaauuugg

SEQ ID NO: 210565 - RNA, 19 nt, Homo sapiens
  misc_RNA (1)...(19): siRNA sense strand
ccugucagcugcaugugau

SEQ ID NO: 210566 - RNA, 19 nt, Homo sapiens
  misc_RNA (1)...(19): siRNA sense strand
gcugcugaauguuuaugau

SEQ ID NO: 210567 - RNA, 19 nt, Homo sapiens
  misc_RNA (1)...(19): siRNA sense strand
acagagcucuaccagucuu

SEQ ID NO: 210568 - RNA, 19 nt, Homo sapiens
  misc_RNA (1)...(19): siRNA sense strand
acaguugggugaaguugca

SEQ ID NO: 210569 - RNA, 19 nt, Homo sapiens
  misc_RNA (1)...(19): siRNA sense strand
guuugaccacuauuuauga

SEQ ID NO: 210570 - RNA, 19 nt, Homo sapiens
  misc_RNA (1)...(19): siRNA sense strand
gcuuauaggacugccauga

SEQ ID NO: 210571 - RNA, 19 nt, Homo sapiens
  misc_RNA (1)...(19): siRNA sense strand
caucaggccaaauguaaca

SEQ ID NO: 210572 - RNA, 19 nt, Homo sapiens
  misc_RNA (1)...(19): siRNA sense strand
gauucuauccaaauuccaa

SEQ ID NO: 210573 - RNA, 19 nt, Homo sapiens
  misc_RNA (1)...(19): siRNA sense strand
ggcaaguucaacaggauuu

SEQ ID NO: 210574 - RNA, 19 nt, Homo sapiens
  misc_RNA (1)...(19): siRNA sense strand
gaacuggcugcugaauguu

SEQ ID NO: 210575 - RNA, 19 nt, Homo sapiens
  misc_RNA (1)...(19): siRNA sense strand
cugcugaauguuuaugaua

SEQ ID NO: 210576 - RNA, 19 nt, Homo sapiens
  misc_RNA (1)...(19): siRNA sense strand
aagcaucaggccaaaugua

SEQ ID NO: 210577 - RNA, 19 nt, Homo sapiens
  misc_RNA (1)...(19): siRNA sense strand
uggcaucauuucccugugu

SEQ ID NO: 210578 - RNA, 19 nt, Homo sapiens
  misc_RNA (1)...(19): siRNA sense strand
ccaugaaacuccgaagacu

SEQ ID NO: 210579 - RNA, 19 nt, Homo sapiens
  misc_RNA (1)...(19): siRNA sense strand
auaauaagccagagaucga

SEQ ID NO: 210580 - RNA, 19 nt, Homo sapiens
  misc_RNA (1)...(19): siRNA sense strand
cuaauaauaagccagagau

SEQ ID NO: 210581 - RNA, 19 nt, Homo sapiens
  misc_RNA (1)...(19): siRNA sense strand
ugggugaaguugcauccuu

SEQ ID NO: 210582 - RNA, 19 nt, Homo sapiens
  misc_RNA (1)...(19): siRNA sense strand
caucauuucccuguguaaa

SEQ ID NO: 210583 - RNA, 19 nt, Homo sapiens
  misc_RNA (1)...(19): siRNA sense strand
gcguggauaugugucugaa

SEQ ID NO: 210584 - RNA, 19 nt, Homo sapiens
  misc_RNA (1)...(19): siRNA sense strand
gcacuaucccaugguggaa

SEQ ID NO: 210585 - RNA, 19 nt, Homo sapiens
  misc_RNA (1)...(19): siRNA sense strand
gagccugucagcugcaugu

SEQ ID NO: 210586 - RNA, 19 nt, Homo sapiens
  misc_RNA (1)...(19): siRNA sense strand
guacagauaccuuuucaag

SEQ ID NO: 210587 - RNA, 19 nt, Homo sapiens
  misc_RNA (1)...(19): siRNA sense strand
gucccucucugcguggaua

SEQ ID NO: 210588 - RNA, 19 nt, Homo sapiens
  misc_RNA (1)...(19): siRNA sense strand
ggagcugcuuccaauuugc

SEQ ID NO: 210589 - RNA, 19 nt, Homo sapiens
  misc_RNA (1)...(19): siRNA sense strand
uuagcugaccugaauaaug

SEQ ID NO: 210590 - RNA, 19 nt, Homo sapiens
  misc_RNA (1)...(19): siRNA sense strand
guggcaaguucaacaggau

SEQ ID NO: 210591 - RNA, 19 nt, Homo sapiens
  misc_RNA (1)...(19): siRNA sense strand
acaacaauuuggucaacgu

SEQ ID NO: 210592 - RNA, 19 nt, Homo sapiens
  misc_RNA (1)...(19): siRNA sense strand
gacuacaucaggagaagau

SEQ ID NO: 210593 - RNA, 19 nt, Homo sapiens
  misc_RNA (1)...(19): siRNA sense strand
uaauaagccagagaucgaa

SEQ ID NO: 210594 - RNA, 19 nt, Homo sapiens
  misc_RNA (1)...(19): siRNA sense strand
ugucagauucucagcuuau

SEQ ID NO: 210595 - RNA, 19 nt, Homo sapiens
  misc_RNA (1)...(19): siRNA sense strand
ggauauccugcagauuauu

SEQ ID NO: 210596 - RNA, 19 nt, Homo sapiens
  misc_RNA (1)...(19): siRNA sense strand
agcaucaggccaaauguaa

SEQ ID NO: 210597 - RNA, 19 nt, Homo sapiens
  misc_RNA (1)...(19): siRNA sense strand
gcccuuugcuuggaucucu

SEQ ID NO: 210598 - RNA, 19 nt, Homo sapiens
  misc_RNA (1)...(19): siRNA sense strand
gcugaauguuuaugauacg

SEQ ID NO: 210599 - RNA, 19 nt, Homo sapiens
  misc_RNA (1)...(19): siRNA sense strand
agacuuugccaagguacua

SEQ ID NO: 210600 - RNA, 19 nt, Homo sapiens
  misc_RNA (1)...(19): siRNA sense strand
caagcaaguggcaaguuca

SEQ ID NO: 210601 - RNA, 19 nt, Homo sapiens
  misc_RNA (1)...(19): siRNA sense strand
agacaaguacagauaccuu

SEQ ID NO: 210602 - RNA, 19 nt, Homo sapiens
  misc_RNA (1)...(19): siRNA sense strand
gcaucauuucccuguguaa

SEQ ID NO: 210603 - RNA, 19 nt, Homo sapiens
  misc_RNA (1)...(19): siRNA sense strand
cugcaaagaguguccaauc

SEQ ID NO: 210604 - RNA, 19 nt, Homo sapiens
  misc_RNA (1)...(19): siRNA sense strand
cuuauaggacugccaugaa

SEQ ID NO: 210605 - RNA, 19 nt, Homo sapiens
  misc_RNA (1)...(19): siRNA sense strand
caaagaguguccaaucauu

SEQ ID NO: 210606 - RNA, 19 nt, Homo sapiens
  misc_RNA (1)...(19): siRNA sense strand
uagcugaccugaauaaugu

SEQ ID NO: 210607 - RNA, 19 nt, Homo sapiens
  misc_RNA (1)...(19): siRNA sense strand
gcaugauucuauccaaauu

SEQ ID NO: 210608 - RNA, 19 nt, Homo sapiens
  misc_RNA (1)...(19): siRNA sense strand
ugaacuggcugcugaaugu

SEQ ID NO: 210609 - RNA, 19 nt, Homo sapiens
  misc_RNA (1)...(19): siRNA sense strand
gauauccugcagauuauua

SEQ ID NO: 210610 - RNA, 19 nt, Homo sapiens
  misc_RNA (1)...(19): siRNA sense strand
gagaagauguucgagacuu

SEQ ID NO: 210611 - RNA, 19 nt, Homo sapiens
  misc_RNA (1)...(19): siRNA sense strand
gcacuuuaauuaugacauc

SEQ ID NO: 210612 - RNA, 19 nt, Homo sapiens
  misc_RNA (1)...(19): siRNA sense strand
guaaagcacauuuggaaga

SEQ ID NO: 210613 - RNA, 19 nt, Homo sapiens
  misc_RNA (1)...(19): siRNA sense strand
gaauauugcacuccgacua

SEQ ID NO: 210614 - RNA, 19 nt, Homo sapiens
  misc_RNA (1)...(19): siRNA sense strand
uuauaggacugccaugaaa

SEQ ID NO: 210615 - RNA, 19 nt, Homo sapiens
  misc_RNA (1)...(19): siRNA sense strand
gggugaaguugcauccuuu

SEQ ID NO: 210616 - RNA, 19 nt, Homo sapiens
  misc_RNA (1)...(19): siRNA sense strand
gcaagagcacaacaauuug

SEQ ID NO: 210617 - RNA, 19 nt, Homo sapiens
  misc_RNA (1)...(19): siRNA sense strand
gcacaacaauuuggucaac

SEQ ID NO: 210618 - RNA, 19 nt, Homo sapiens
  misc_RNA (1)...(19): siRNA sense strand
agcaagagcacaacaauuu

SEQ ID NO: 210619 - RNA, 19 nt, Homo sapiens
  misc_RNA (1)...(19): siRNA sense strand
agaagauguucgagacuuu

SEQ ID NO: 210620 - RNA, 19 nt, Homo sapiens
  misc_RNA (1)...(19): siRNA sense strand
gagcaagagcacaacaauu

SEQ ID NO: 210621 - RNA, 19 nt, Homo sapiens
  misc_RNA (1)...(19): siRNA sense strand
ucaagcaaguggcaaguuc

SEQ ID NO: 210622 - RNA, 19 nt, Homo sapiens
  misc_RNA (1)...(19): siRNA sense strand
ccacgagacucaaacaacu

SEQ ID NO: 210623 - RNA, 19 nt, Homo sapiens
  misc_RNA (1)...(19): siRNA sense strand
cagcacaaccucaagcaaa

SEQ ID NO: 210624 - RNA, 19 nt, Homo sapiens
  misc_RNA (1)...(19): siRNA sense strand
gcaaagaguguccaaucau

SEQ ID NO: 210625 - RNA, 19 nt, Homo sapiens
  misc_RNA (1)...(19): siRNA sense strand
auggauauccugcagauua

SEQ ID NO: 210626 - RNA, 19 nt, Homo sapiens
  misc_RNA (1)...(19): siRNA sense strand
uguaacaucugcaaagagu

SEQ ID NO: 210627 - RNA, 19 nt, Homo sapiens
  misc_RNA (1)...(19): siRNA sense strand
guccggagcugcuuccaau

SEQ ID NO: 210628 - RNA, 19 nt, Homo sapiens
  misc_RNA (1)...(19): siRNA sense strand
gcaaguggcaaguucaaca

SEQ ID NO: 210629 - RNA, 19 nt, Homo sapiens
  misc_RNA (1)...(19): siRNA sense strand
gcuuccaauuugcuaauaa

SEQ ID NO: 210630 - RNA, 19 nt, Homo sapiens
  misc_RNA (1)...(19): siRNA sense strand
uggaagacaaguacagaua

SEQ ID NO: 210631 - RNA, 19 nt, Homo sapiens
  misc_RNA (1)...(19): siRNA sense strand
ggauccguguccugucuuu

SEQ ID NO: 210632 - RNA, 19 nt, Homo sapiens
  misc_RNA (1)...(19): siRNA sense strand
gucuuuagcugaccugaau

SEQ ID NO: 210633 - RNA, 19 nt, Homo sapiens
  misc_RNA (1)...(19): siRNA sense strand
gacaaguacagauaccuuu

SEQ ID NO: 210634 - RNA, 19 nt, Homo sapiens
  misc_RNA (1)...(19): siRNA sense strand
ccaagcaucaggccaaaug

SEQ ID NO: 210635 - RNA, 19 nt, Homo sapiens
  misc_RNA (1)...(19): siRNA sense strand
ggagcaagagcacaacaau

SEQ ID NO: 210636 - RNA, 19 nt, Homo sapiens
  misc_RNA (1)...(19): siRNA sense strand
guguaaagcacauuuggaa

SEQ ID NO: 210637 - RNA, 19 nt, Homo sapiens
  misc_RNA (1)...(19): siRNA sense strand
caagacaguugggugaagu

SEQ ID NO: 210638 - RNA, 19 nt, Homo sapiens
  misc_RNA (1)...(19): siRNA sense strand
gaagauguucgagacuuug

SEQ ID NO: 210639 - RNA, 19 nt, Homo sapiens
  misc_RNA (1)...(19): siRNA sense strand
gucagauucucagcuuaua

SEQ ID NO: 210640 - RNA, 19 nt, Homo sapiens
  misc_RNA (1)...(19): siRNA sense strand
uaacaucugcaaagagugu

SEQ ID NO: 210641 - RNA, 19 nt, Homo sapiens
  misc_RNA (1)...(19): siRNA sense strand
cggagcugcuuccaauuug

SEQ ID NO: 210642 - RNA, 19 nt, Homo sapiens
  misc_RNA (1)...(19): siRNA sense strand
gaagacaaguacagauacc

SEQ ID NO: 210643 - RNA, 19 nt, Homo sapiens
  misc_RNA (1)...(19): siRNA sense strand
ccauggauauccugcagau

SEQ ID NO: 210644 - RNA, 19 nt, Homo sapiens
  misc_RNA (1)...(19): siRNA sense strand
ggcaucauuucccugugua

SEQ ID NO: 210645 - RNA, 19 nt, Homo sapiens
  misc_RNA (1)...(19): siRNA sense strand
uggauauccugcagauuau

SEQ ID NO: 210646 - RNA, 19 nt, Homo sapiens
  misc_RNA (1)...(19): siRNA sense strand
ggaagacaaguacagauac

SEQ ID NO: 210647 - RNA, 19 nt, Homo sapiens
  misc_RNA (1)...(19): siRNA sense strand
ugcaaagaguguccaauca

SEQ ID NO: 210648 - RNA, 19 nt, Homo sapiens
  misc_RNA (1)...(19): siRNA sense strand
guggauaugugucugaacu

SEQ ID NO: 210649 - RNA, 19 nt, Homo sapiens
  misc_RNA (1)...(19): siRNA sense strand
acuggcugcugaauguuua

SEQ ID NO: 210650 - RNA, 19 nt, Homo sapiens
  misc_RNA (1)...(19): siRNA sense strand
acuaucccaugguggaaua

SEQ ID NO: 210651 - RNA, 19 nt, Homo sapiens
  misc_RNA (1)...(19): siRNA sense strand
ccggagcugcuuccaauuu

SEQ ID NO: 210652 - RNA, 19 nt, Homo sapiens
  misc_RNA (1)...(19): siRNA sense strand
ccaaauuccaagacaguug

SEQ ID NO: 210653 - RNA, 19 nt, Homo sapiens
  misc_RNA (1)...(19): siRNA sense strand
cagaaacugccaagcauca

SEQ ID NO: 210654 - RNA, 19 nt, Homo sapiens
  misc_RNA (1)...(19): siRNA sense strand
uaugacaucugccaaagcu

SEQ ID NO: 210655 - RNA, 19 nt, Homo sapiens
  misc_RNA (1)...(19): siRNA sense strand
aaugucagauucucagcuu

SEQ ID NO: 210656 - RNA, 19 nt, Homo sapiens
  misc_RNA (1)...(19): siRNA sense strand
ucgagacuuugccaaggua

SEQ ID NO: 210657 - RNA, 19 nt, Homo sapiens
  misc_RNA (1)...(19): siRNA sense strand
gcaaaaggccauaaaaugc

SEQ ID NO: 210658 - RNA, 19 nt, Homo sapiens
  misc_RNA (1)...(19): siRNA sense strand
cugcaugauucuauccaaa

SEQ ID NO: 210659 - RNA, 19 nt, Homo sapiens
  misc_RNA (1)...(19): siRNA sense strand
uaaagcacauuuggaagac

SEQ ID NO: 210660 - RNA, 19 nt, Homo sapiens
  misc_RNA (1)...(19): siRNA sense strand
acaggagucuaaagcacuu

SEQ ID NO: 210661 - RNA, 19 nt, Homo sapiens
  misc_RNA (1)...(19): siRNA sense strand
acagauaccuuuucaagca

SEQ ID NO: 210662 - RNA, 19 nt, Homo sapiens
  misc_RNA (1)...(19): siRNA sense strand
aagcacauuuggaagacaa

SEQ ID NO: 210663 - RNA, 19 nt, Homo sapiens
  misc_RNA (1)...(19): siRNA sense strand
gcuaauaauaagccagaga

SEQ ID NO: 210664 - RNA, 19 nt, Homo sapiens
  misc_RNA (1)...(19): siRNA sense strand
caagagcacaacaauuugg

SEQ ID NO: 210665 - RNA, 19 nt, Homo sapiens
  misc_RNA (1)...(19): siRNA sense strand
ccugucagcugcaugugau

SEQ ID NO: 210666 - RNA, 19 nt, Homo sapiens
  misc_RNA (1)...(19): siRNA sense strand
gcugcugaauguuuaugau

SEQ ID NO: 210667 - RNA, 19 nt, Homo sapiens
  misc_RNA (1)...(19): siRNA sense strand
acagagcucuaccagucuu

SEQ ID NO: 210668 - RNA, 19 nt, Homo sapiens
  misc_RNA (1)...(19): siRNA sense strand
acaguugggugaaguugca

SEQ ID NO: 210669 - RNA, 19 nt, Homo sapiens
  misc_RNA (1)...(19): siRNA sense strand
guuugaccacuauuuauga

SEQ ID NO: 210670 - RNA, 19 nt, Homo sapiens
  misc_RNA (1)...(19): siRNA sense strand
gcuuauaggacugccauga

SEQ ID NO: 210671 - RNA, 19 nt, Homo sapiens
  misc_RNA (1)...(19): siRNA sense strand
caucaggccaaauguaaca

SEQ ID NO: 210672 - RNA, 19 nt, Homo sapiens
  misc_RNA (1)...(19): siRNA sense strand
gauucuauccaaauuccaa

SEQ ID NO: 210673 - RNA, 19 nt, Homo sapiens
  misc_RNA (1)...(19): siRNA sense strand
ggcaaguucaacaggauuu

SEQ ID NO: 210674 - RNA, 19 nt, Homo sapiens
  misc_RNA (1)...(19): siRNA sense strand
gaacuggcugcugaauguu

SEQ ID NO: 210675 - RNA, 19 nt, Homo sapiens
  misc_RNA (1)...(19): siRNA sense strand
cugcugaauguuuaugaua

SEQ ID NO: 210676 - RNA, 19 nt, Homo sapiens
  misc_RNA (1)...(19): siRNA sense strand
aagcaucaggccaaaugua

SEQ ID NO: 210677 - RNA, 19 nt, Homo sapiens
  misc_RNA (1)...(19): siRNA sense strand
uggcaucauuucccugugu

SEQ ID NO: 210678 - RNA, 19 nt, Homo sapiens
  misc_RNA (1)...(19): siRNA sense strand
ccaugaaacuccgaagacu

SEQ ID NO: 210679 - RNA, 19 nt, Homo sapiens
  misc_RNA (1)...(19): siRNA sense strand
auaauaagccagagaucga

SEQ ID NO: 210680 - RNA, 19 nt, Homo sapiens
  misc_RNA (1)...(19): siRNA sense strand
cuaauaauaagccagagau

SEQ ID NO: 210681 - RNA, 19 nt, Homo sapiens
  misc_RNA (1)...(19): siRNA sense strand
ugggugaaguugcauccuu

SEQ ID NO: 210682 - RNA, 19 nt, Homo sapiens
  misc_RNA (1)...(19): siRNA sense strand
caucauuucccuguguaaa

SEQ ID NO: 210683 - RNA, 19 nt, Homo sapiens
  misc_RNA (1)...(19): siRNA sense strand
gcguggauaugugucugaa

SEQ ID NO: 210684 - RNA, 19 nt, Homo sapiens
  misc_RNA (1)...(19): siRNA sense strand
gcacuaucccaugguggaa

SEQ ID NO: 210685 - RNA, 19 nt, Homo sapiens
  misc_RNA (1)...(19): siRNA sense strand
gagccugucagcugcaugu

SEQ ID NO: 210686 - RNA, 19 nt, Homo sapiens
  misc_RNA (1)...(19): siRNA sense strand
guacagauaccuuuucaag

SEQ ID NO: 210687 - RNA, 19 nt, Homo sapiens
  misc_RNA (1)...(19): siRNA sense strand
gucccucucugcguggaua

SEQ ID NO: 210688 - RNA, 19 nt, Homo sapiens
  misc_RNA (1)...(19): siRNA sense strand
ggagcugcuuccaauuugc

SEQ ID NO: 210689 - RNA, 19 nt, Homo sapiens
  misc_RNA (1)...(19): siRNA sense strand
uuagcugaccugaauaaug

SEQ ID NO: 210690 - RNA, 19 nt, Homo sapiens
  misc_RNA (1)...(19): siRNA sense strand
guggcaaguucaacaggau

SEQ ID NO: 210691 - RNA, 19 nt, Homo sapiens
  misc_RNA (1)...(19): siRNA sense strand
acaacaauuuggucaacgu

SEQ ID NO: 210692 - RNA, 19 nt, Homo sapiens
  misc_RNA (1)...(19): siRNA sense strand
gacuacaucaggagaagau

SEQ ID NO: 210693 - RNA, 19 nt, Homo sapiens
  misc_RNA (1)...(19): siRNA sense strand
uaauaagccagagaucgaa

SEQ ID NO: 210694 - RNA, 19 nt, Homo sapiens
  misc_RNA (1)...(19): siRNA sense strand
ugucagauucucagcuuau

SEQ ID NO: 210695 - RNA, 19 nt, Homo sapiens
  misc_RNA (1)...(19): siRNA sense strand
ggauauccugcagauuauu

SEQ ID NO: 210696 - RNA, 19 nt, Homo sapiens
  misc_RNA (1)...(19): siRNA sense strand
agcaucaggccaaauguaa

SEQ ID NO: 210697 - RNA, 19 nt, Homo sapiens
  misc_RNA (1)...(19): siRNA sense strand
gcccuuugcuuggaucucu

SEQ ID NO: 210698 - RNA, 19 nt, Homo sapiens
  misc_RNA (1)...(19): siRNA sense strand
gcugaauguuuaugauacg

SEQ ID NO: 210699 - RNA, 19 nt, Homo sapiens
  misc_RNA (1)...(19): siRNA sense strand
agacuuugccaagguacua

SEQ ID NO: 210700 - RNA, 19 nt, Homo sapiens
  misc_RNA (1)...(19): siRNA sense strand
caagcaaguggcaaguuca

SEQ ID NO: 210701 - RNA, 19 nt, Homo sapiens
  misc_RNA (1)...(19): siRNA sense strand
agacaaguacagauaccuu

SEQ ID NO: 210702 - RNA, 19 nt, Homo sapiens
  misc_RNA (1)...(19): siRNA sense strand
gcaucauuucccuguguaa

SEQ ID NO: 210703 - RNA, 19 nt, Homo sapiens
  misc_RNA (1)...(19): siRNA sense strand
cugcaaagaguguccaauc

SEQ ID NO: 210704 - RNA, 19 nt, Homo sapiens
  misc_RNA (1)...(19): siRNA sense strand
cuuauaggacugccaugaa

SEQ ID NO: 210705 - RNA, 19 nt, Homo sapiens
  misc_RNA (1)...(19): siRNA sense strand
caaagaguguccaaucauu

SEQ ID NO: 210706 - RNA, 19 nt, Homo sapiens
  misc_RNA (1)...(19): siRNA sense strand
uagcugaccugaauaaugu

SEQ ID NO: 210707 - RNA, 19 nt, Homo sapiens
  misc_RNA (1)...(19): siRNA sense strand
gcaugauucuauccaaauu

SEQ ID NO: 210708 - RNA, 19 nt, Homo sapiens
  misc_RNA (1)...(19): siRNA sense strand
ugaacuggcugcugaaugu

SEQ ID NO: 210709 - RNA, 19 nt, Homo sapiens
  misc_RNA (1)...(19): siRNA sense strand
gauauccugcagauuauua

SEQ ID NO: 210710 - RNA, 19 nt, Homo sapiens
  misc_RNA (1)...(19): siRNA sense strand
gagaagauguucgagacuu

SEQ ID NO: 210711 - RNA, 19 nt, Homo sapiens
  misc_RNA (1)...(19): siRNA sense strand
gcacuuuaauuaugacauc

SEQ ID NO: 210712 - RNA, 19 nt, Homo sapiens
  misc_RNA (1)...(19): siRNA sense strand
guaaagcacauuuggaaga

SEQ ID NO: 210713 - RNA, 19 nt, Homo sapiens
  misc_RNA (1)...(19): siRNA sense strand
gaauauugcacuccgacua

SEQ ID NO: 210714 - RNA, 19 nt, Homo sapiens
  misc_RNA (1)...(19): siRNA sense strand
uuauaggacugccaugaaa

SEQ ID NO: 210715 - RNA, 19 nt, Homo sapiens
  misc_RNA (1)...(19): siRNA sense strand
gggugaaguugcauccuuu

SEQ ID NO: 210716 - RNA, 19 nt, Homo sapiens
  misc_RNA (1)...(19): siRNA sense strand
gcaagagcacaacaauuug

SEQ ID NO: 210717 - RNA, 19 nt, Homo sapiens
  misc_RNA (1)...(19): siRNA sense strand
gcacaacaauuuggucaac

SEQ ID NO: 210718 - RNA, 19 nt, Homo sapiens
  misc_RNA (1)...(19): siRNA sense strand
agcaagagcacaacaauuu

SEQ ID NO: 210719 - RNA, 19 nt, Homo sapiens
  misc_RNA (1)...(19): siRNA sense strand
agaagauguucgagacuuu

SEQ ID NO: 210720 - RNA, 19 nt, Homo sapiens
  misc_RNA (1)...(19): siRNA sense strand
gagcaagagcacaacaauu

SEQ ID NO: 210721 - RNA, 19 nt, Homo sapiens
  misc_RNA (1)...(19): siRNA sense strand
ucaagcaaguggcaaguuc

SEQ ID NO: 210722 - RNA, 19 nt, Homo sapiens
  misc_RNA (1)...(19): siRNA sense strand
ccacgagacucaaacaacu

SEQ ID NO: 210723 - RNA, 19 nt, Homo sapiens
  misc_RNA (1)...(19): siRNA sense strand
cagcacaaccucaagcaaa

SEQ ID NO: 210724 - RNA, 19 nt, Homo sapiens
  misc_RNA (1)...(19): siRNA sense strand
gcaaagaguguccaaucau

SEQ ID NO: 210725 - RNA, 19 nt, Homo sapiens
  misc_RNA (1)...(19): siRNA sense strand
auggauauccugcagauua

SEQ ID NO: 210726 - RNA, 19 nt, Homo sapiens
  misc_RNA (1)...(19): siRNA sense strand
uguaacaucugcaaagagu

SEQ ID NO: 210727 - RNA, 19 nt, Homo sapiens
  misc_RNA (1)...(19): siRNA sense strand
guccggagcugcuuccaau

SEQ ID NO: 210728 - RNA, 19 nt, Homo sapiens
  misc_RNA (1)...(19): siRNA sense strand
gcaaguggcaaguucaaca

SEQ ID NO: 210729 - RNA, 19 nt, Homo sapiens
  misc_RNA (1)...(19): siRNA sense strand
gcuuccaauuugcuaauaa

SEQ ID NO: 210730 - RNA, 19 nt, Homo sapiens
  misc_RNA (1)...(19): siRNA sense strand
uggaagacaaguacagaua

SEQ ID NO: 210731 - RNA, 19 nt, Homo sapiens
  misc_RNA (1)...(19): siRNA sense strand
ggauccguguccugucuuu

SEQ ID NO: 210732 - RNA, 19 nt, Homo sapiens
  misc_RNA (1)...(19): siRNA sense strand
gucuuuagcugaccugaau

SEQ ID NO: 210733 - RNA, 19 nt, Homo sapiens
  misc_RNA (1)...(19): siRNA sense strand
gacaaguacagauaccuuu

SEQ ID NO: 210734 - RNA, 19 nt, Homo sapiens
  misc_RNA (1)...(19): siRNA sense strand
ccaagcaucaggccaaaug

SEQ ID NO: 210735 - RNA, 19 nt, Homo sapiens
  misc_RNA (1)...(19): siRNA sense strand
ggagcaagagcacaacaau

SEQ ID NO: 210736 - RNA, 19 nt, Homo sapiens
  misc_RNA (1)...(19): siRNA sense strand
guguaaagcacauuuggaa

SEQ ID NO: 210737 - RNA, 19 nt, Homo sapiens
  misc_RNA (1)...(19): siRNA sense strand
caagacaguugggugaagu

SEQ ID NO: 210738 - RNA, 19 nt, Homo sapiens
  misc_RNA (1)...(19): siRNA sense strand
gaagauguucgagacuuug

SEQ ID NO: 210739 - RNA, 19 nt, Homo sapiens
  misc_RNA (1)...(19): siRNA sense strand
gucagauucucagcuuaua

SEQ ID NO: 210740 - RNA, 19 nt, Homo sapiens
  misc_RNA (1)...(19): siRNA sense strand
uaacaucugcaaagagugu

SEQ ID NO: 210741 - RNA, 19 nt, Homo sapiens
  misc_RNA (1)...(19): siRNA sense strand
cggagcugcuuccaauuug

SEQ ID NO: 210742 - RNA, 19 nt, Homo sapiens
  misc_RNA (1)...(19): siRNA sense strand
gaagacaaguacagauacc

SEQ ID NO: 210743 - RNA, 19 nt, Homo sapiens
  misc_RNA (1)...(19): siRNA sense strand
ccauggauauccugcagau

SEQ ID NO: 210744 - RNA, 19 nt, Homo sapiens
  misc_RNA (1)...(19): siRNA sense strand
ggcaucauuucccugugua

SEQ ID NO: 210745 - RNA, 19 nt, Homo sapiens
  misc_RNA (1)...(19): siRNA sense strand
uggauauccugcagauuau

SEQ ID NO: 210746 - RNA, 19 nt, Homo sapiens
  misc_RNA (1)...(19): siRNA sense strand
ggaagacaaguacagauac

SEQ ID NO: 210747 - RNA, 19 nt, Homo sapiens
  misc_RNA (1)...(19): siRNA sense strand
ugcaaagaguguccaauca

SEQ ID NO: 210748 - RNA, 19 nt, Homo sapiens
  misc_RNA (1)...(19): siRNA sense strand
guggauaugugucugaacu

SEQ ID NO: 210749 - RNA, 19 nt, Homo sapiens
  misc_RNA (1)...(19): siRNA sense strand
acuggcugcugaauguuua

SEQ ID NO: 210750 - RNA, 19 nt, Homo sapiens
  misc_RNA (1)...(19): siRNA sense strand
acuaucccaugguggaaua

SEQ ID NO: 210751 - RNA, 19 nt, Homo sapiens
  misc_RNA (1)...(19): siRNA sense strand
ccggagcugcuuccaauuu

SEQ ID NO: 210752 - RNA, 19 nt, Homo sapiens
  misc_RNA (1)...(19): siRNA sense strand
ccaaauuccaagacaguug

SEQ ID NO: 210753 - RNA, 19 nt, Homo sapiens
  misc_RNA (1)...(19): siRNA sense strand
cagaaacugccaagcauca

SEQ ID NO: 210754 - RNA, 19 nt, Homo sapiens
  misc_RNA (1)...(19): siRNA sense strand
uaugacaucugccaaagcu

SEQ ID NO: 210755 - RNA, 19 nt, Homo sapiens
  misc_RNA (1)...(19): siRNA sense strand
aaugucagauucucagcuu

SEQ ID NO: 210756 - RNA, 19 nt, Homo sapiens
  misc_RNA (1)...(19): siRNA sense strand
ucgagacuuugccaaggua

SEQ ID NO: 210757 - RNA, 19 nt, Homo sapiens
  misc_RNA (1)...(19): siRNA sense strand
gcaaaaggccauaaaaugc

SEQ ID NO: 210758 - RNA, 19 nt, Homo sapiens
  misc_RNA (1)...(19): siRNA sense strand
cugcaugauucuauccaaa

SEQ ID NO: 210759 - RNA, 19 nt, Homo sapiens
  misc_RNA (1)...(19): siRNA sense strand
uaaagcacauuuggaagac

SEQ ID NO: 210760 - RNA, 19 nt, Homo sapiens
  misc_RNA (1)...(19): siRNA sense strand
acaggagucuaaagcacuu

SEQ ID NO: 210761 - RNA, 19 nt, Homo sapiens
  misc_RNA (1)...(19): siRNA sense strand
acagauaccuuuucaagca

SEQ ID NO: 210762 - RNA, 19 nt, Homo sapiens
  misc_RNA (1)...(19): siRNA sense strand
aagcacauuuggaagacaa

SEQ ID NO: 210763 - RNA, 19 nt, Homo sapiens
  misc_RNA (1)...(19): siRNA sense strand
gcuaauaauaagccagaga

SEQ ID NO: 210764 - RNA, 19 nt, Homo sapiens
  misc_RNA (1)...(19): siRNA sense strand
caagagcacaacaauuugg

SEQ ID NO: 210765 - RNA, 19 nt, Homo sapiens
  misc_RNA (1)...(19): siRNA sense strand
ccugucagcugcaugugau

SEQ ID NO: 210766 - RNA, 19 nt, Homo sapiens
  misc_RNA (1)...(19): siRNA sense strand
gcugcugaauguuuaugau

SEQ ID NO: 210767 - RNA, 19 nt, Homo sapiens
  misc_RNA (1)...(19): siRNA sense strand
acagagcucuaccagucuu

SEQ ID NO: 210768 - RNA, 19 nt, Homo sapiens
  misc_RNA (1)...(19): siRNA sense strand
acaguugggugaaguugca

SEQ ID NO: 210769 - RNA, 19 nt, Homo sapiens
  misc_RNA (1)...(19): siRNA sense strand
guuugaccacuauuuauga

SEQ ID NO: 210770 - RNA, 19 nt, Homo sapiens
  misc_RNA (1)...(19): siRNA sense strand
gcuuauaggacugccauga

SEQ ID NO: 210771 - RNA, 19 nt, Homo sapiens
  misc_RNA (1)...(19): siRNA sense strand
caucaggccaaauguaaca

SEQ ID NO: 210772 - RNA, 19 nt, Homo sapiens
  misc_RNA (1)...(19): siRNA sense strand
gauucuauccaaauuccaa

SEQ ID NO: 210773 - RNA, 19 nt, Homo sapiens
  misc_RNA (1)...(19): siRNA sense strand
ggcaaguucaacaggauuu

SEQ ID NO: 210774 - RNA, 19 nt, Homo sapiens
  misc_RNA (1)...(19): siRNA sense strand
gaacuggcugcugaauguu

SEQ ID NO: 210775 - RNA, 19 nt, Homo sapiens
  misc_RNA (1)...(19): siRNA sense strand
cugcugaauguuuaugaua

SEQ ID NO: 210776 - RNA, 19 nt, Homo sapiens
  misc_RNA (1)...(19): siRNA sense strand
aagcaucaggccaaaugua

SEQ ID NO: 210777 - RNA, 19 nt, Homo sapiens
  misc_RNA (1)...(19): siRNA sense strand
uggcaucauuucccugugu

SEQ ID NO: 210778 - RNA, 19 nt, Homo sapiens
  misc_RNA (1)...(19): siRNA sense strand
ccaugaaacuccgaagacu

SEQ ID NO: 210779 - RNA, 19 nt, Homo sapiens
  misc_RNA (1)...(19): siRNA sense strand
auaauaagccagagaucga

SEQ ID NO: 210780 - RNA, 19 nt, Homo sapiens
  misc_RNA (1)...(19): siRNA sense strand
cuaauaauaagccagagau

SEQ ID NO: 210781 - RNA, 19 nt, Homo sapiens
  misc_RNA (1)...(19): siRNA sense strand
ugggugaaguugcauccuu

SEQ ID NO: 210782 - RNA, 19 nt, Homo sapiens
  misc_RNA (1)...(19): siRNA sense strand
caucauuucccuguguaaa

SEQ ID NO: 210783 - RNA, 19 nt, Homo sapiens
  misc_RNA (1)...(19): siRNA sense strand
gcguggauaugugucugaa

SEQ ID NO: 210784 - RNA, 19 nt, Homo sapiens
  misc_RNA (1)...(19): siRNA sense strand
gcacuaucccaugguggaa

SEQ ID NO: 210785 - RNA, 19 nt, Homo sapiens
  misc_RNA (1)...(19): siRNA sense strand
gagccugucagcugcaugu

SEQ ID NO: 210786 - RNA, 19 nt, Homo sapiens
  misc_RNA (1)...(19): siRNA sense strand
guacagauaccuuuucaag

SEQ ID NO: 210787 - RNA, 19 nt, Homo sapiens
  misc_RNA (1)...(19): siRNA sense strand
gucccucucugcguggaua

SEQ ID NO: 210788 - RNA, 19 nt, Homo sapiens
  misc_RNA (1)...(19): siRNA sense strand
ggagcugcuuccaauuugc

SEQ ID NO: 210789 - RNA, 19 nt, Homo sapiens
  misc_RNA (1)...(19): siRNA sense strand
uuagcugaccugaauaaug

SEQ ID NO: 210790 - RNA, 19 nt, Homo sapiens
  misc_RNA (1)...(19): siRNA sense strand
guggcaaguucaacaggau

SEQ ID NO: 210791 - RNA, 19 nt, Homo sapiens
  misc_RNA (1)...(19): siRNA sense strand
acaacaauuuggucaacgu

SEQ ID NO: 210792 - RNA, 19 nt, Homo sapiens
  misc_RNA (1)...(19): siRNA sense strand
gacuacaucaggagaagau

SEQ ID NO: 210793 - RNA, 19 nt, Homo sapiens
  misc_RNA (1)...(19): siRNA sense strand
uaauaagccagagaucgaa

SEQ ID NO: 210794 - RNA, 19 nt, Homo sapiens
  misc_RNA (1)...(19): siRNA sense strand
ugucagauucucagcuuau

SEQ ID NO: 210795 - RNA, 19 nt, Homo sapiens
  misc_RNA (1)...(19): siRNA sense strand
ggauauccugcagauuauu

SEQ ID NO: 210796 - RNA, 19 nt, Homo sapiens
  misc_RNA (1)...(19): siRNA sense strand
agcaucaggccaaauguaa

SEQ ID NO: 210797 - RNA, 19 nt, Homo sapiens
  misc_RNA (1)...(19): siRNA sense strand
gcccuuugcuuggaucucu

SEQ ID NO: 210798 - RNA, 19 nt, Homo sapiens
  misc_RNA (1)...(19): siRNA sense strand
gcugaauguuuaugauacg

SEQ ID NO: 210799 - RNA, 19 nt, Homo sapiens
  misc_RNA (1)...(19): siRNA sense strand
agacuuugccaagguacua

SEQ ID NO: 210800 - RNA, 19 nt, Homo sapiens
  misc_RNA (1)...(19): siRNA sense strand
caagcaaguggcaaguuca

SEQ ID NO: 210801 - RNA, 19 nt, Homo sapiens
  misc_RNA (1)...(19): siRNA sense strand
agacaaguacagauaccuu

SEQ ID NO: 210802 - RNA, 19 nt, Homo sapiens
  misc_RNA (1)...(19): siRNA sense strand
gcaucauuucccuguguaa

SEQ ID NO: 210803 - RNA, 19 nt, Homo sapiens
  misc_RNA (1)...(19): siRNA sense strand
cugcaaagaguguccaauc

SEQ ID NO: 210804 - RNA, 19 nt, Homo sapiens
  misc_RNA (1)...(19): siRNA sense strand
cuuauaggacugccaugaa

SEQ ID NO: 210805 - RNA, 19 nt, Homo sapiens
  misc_RNA (1)...(19): siRNA sense strand
caaagaguguccaaucauu

SEQ ID NO: 210806 - RNA, 19 nt, Homo sapiens
  misc_RNA (1)...(19): siRNA sense strand
uagcugaccugaauaaugu

SEQ ID NO: 210807 - RNA, 19 nt, Homo sapiens
  misc_RNA (1)...(19): siRNA sense strand
gcaugauucuauccaaauu

SEQ ID NO: 210808 - RNA, 19 nt, Homo sapiens
  misc_RNA (1)...(19): siRNA sense strand
ugaacuggcugcugaaugu

SEQ ID NO: 210809 - RNA, 19 nt, Homo sapiens
  misc_RNA (1)...(19): siRNA sense strand
gauauccugcagauuauua

SEQ ID NO: 210810 - RNA, 19 nt, Homo sapiens
  misc_RNA (1)...(19): siRNA sense strand
gagaagauguucgagacuu

SEQ ID NO: 210811 - RNA, 19 nt, Homo sapiens
  misc_RNA (1)...(19): siRNA sense strand
gcacuuuaauuaugacauc

SEQ ID NO: 210812 - RNA, 19 nt, Homo sapiens
  misc_RNA (1)...(19): siRNA sense strand
guaaagcacauuuggaaga

SEQ ID NO: 210813 - RNA, 19 nt, Homo sapiens
  misc_RNA (1)...(19): siRNA sense strand
gaauauugcacuccgacua

SEQ ID NO: 210814 - RNA, 19 nt, Homo sapiens
  misc_RNA (1)...(19): siRNA sense strand
uuauaggacugccaugaaa

SEQ ID NO: 210815 - RNA, 19 nt, Homo sapiens
  misc_RNA (1)...(19): siRNA sense strand
gggugaaguugcauccuuu

SEQ ID NO: 210816 - RNA, 19 nt, Homo sapiens
  misc_RNA (1)...(19): siRNA sense strand
gcaagagcacaacaauuug

SEQ ID NO: 210817 - RNA, 19 nt, Homo sapiens
  misc_RNA (1)...(19): siRNA sense strand
gcacaacaauuuggucaac

SEQ ID NO: 210818 - RNA, 19 nt, Homo sapiens
  misc_RNA (1)...(19): siRNA sense strand
agcaagagcacaacaauuu

SEQ ID NO: 210819 - RNA, 19 nt, Homo sapiens
  misc_RNA (1)...(19): siRNA sense strand
agaagauguucgagacuuu

SEQ ID NO: 210820 - RNA, 19 nt, Homo sapiens
  misc_RNA (1)...(19): siRNA sense strand
gagcaagagcacaacaauu

SEQ ID NO: 210821 - RNA, 19 nt, Homo sapiens
  misc_RNA (1)...(19): siRNA sense strand
ucaagcaaguggcaaguuc

SEQ ID NO: 210822 - RNA, 19 nt, Homo sapiens
  misc_RNA (1)...(19): siRNA sense strand
ccacgagacucaaacaacu

SEQ ID NO: 210823 - RNA, 19 nt, Homo sapiens
  misc_RNA (1)...(19): siRNA sense strand
cagcacaaccucaagcaaa

SEQ ID NO: 210824 - RNA, 19 nt, Homo sapiens
  misc_RNA (1)...(19): siRNA sense strand
gcaaagaguguccaaucau

SEQ ID NO: 210825 - RNA, 19 nt, Homo sapiens
  misc_RNA (1)...(19): siRNA sense strand
auggauauccugcagauua

SEQ ID NO: 210826 - RNA, 19 nt, Homo sapiens
  misc_RNA (1)...(19): siRNA sense strand
uguaacaucugcaaagagu

SEQ ID NO: 210827 - RNA, 19 nt, Homo sapiens
  misc_RNA (1)...(19): siRNA sense strand
guccggagcugcuuccaau

SEQ ID NO: 210828 - RNA, 19 nt, Homo sapiens
  misc_RNA (1)...(19): siRNA sense strand
gcaaguggcaaguucaaca

SEQ ID NO: 210829 - RNA, 19 nt, Homo sapiens
  misc_RNA (1)...(19): siRNA sense strand
gcuuccaauuugcuaauaa

SEQ ID NO: 210830 - RNA, 19 nt, Homo sapiens
  misc_RNA (1)...(19): siRNA sense strand
uggaagacaaguacagaua

SEQ ID NO: 210831 - RNA, 19 nt, Homo sapiens
  misc_RNA (1)...(19): siRNA sense strand
ggauccguguccugucuuu

SEQ ID NO: 210832 - RNA, 19 nt, Homo sapiens
  misc_RNA (1)...(19): siRNA sense strand
gucuuuagcugaccugaau

SEQ ID NO: 210833 - RNA, 19 nt, Homo sapiens
  misc_RNA (1)...(19): siRNA sense strand
gacaaguacagauaccuuu

SEQ ID NO: 210834 - RNA, 19 nt, Homo sapiens
  misc_RNA (1)...(19): siRNA sense strand
ccaagcaucaggccaaaug

SEQ ID NO: 210835 - RNA, 19 nt, Homo sapiens
  misc_RNA (1)...(19): siRNA sense strand
ggagcaagagcacaacaau

SEQ ID NO: 210836 - RNA, 19 nt, Homo sapiens
  misc_RNA (1)...(19): siRNA sense strand
guguaaagcacauuuggaa

SEQ ID NO: 210837 - RNA, 19 nt, Homo sapiens
  misc_RNA (1)...(19): siRNA sense strand
caagacaguugggugaagu

SEQ ID NO: 210838 - RNA, 19 nt, Homo sapiens
  misc_RNA (1)...(19): siRNA sense strand
gaagauguucgagacuuug

SEQ ID NO: 210839 - RNA, 19 nt, Homo sapiens
  misc_RNA (1)...(19): siRNA sense strand
gucagauucucagcuuaua

SEQ ID NO: 210840 - RNA, 19 nt, Homo sapiens
  misc_RNA (1)...(19): siRNA sense strand
uaacaucugcaaagagugu

SEQ ID NO: 210841 - RNA, 19 nt, Homo sapiens
  misc_RNA (1)...(19): siRNA sense strand
cggagcugcuuccaauuug

SEQ ID NO: 210842 - RNA, 19 nt, Homo sapiens
  misc_RNA (1)...(19): siRNA sense strand
gaagacaaguacagauacc

SEQ ID NO: 210843 - RNA, 19 nt, Homo sapiens
  misc_RNA (1)...(19): siRNA sense strand
ccauggauauccugcagau

SEQ ID NO: 210844 - RNA, 19 nt, Homo sapiens
  misc_RNA (1)...(19): siRNA sense strand
ggcaucauuucccugugua

SEQ ID NO: 210845 - RNA, 19 nt, Homo sapiens
  misc_RNA (1)...(19): siRNA sense strand
uggauauccugcagauuau

SEQ ID NO: 210846 - RNA, 19 nt, Homo sapiens
  misc_RNA (1)...(19): siRNA sense strand
ggaagacaaguacagauac

SEQ ID NO: 210847 - RNA, 19 nt, Homo sapiens
  misc_RNA (1)...(19): siRNA sense strand
ugcaaagaguguccaauca

SEQ ID NO: 210848 - RNA, 19 nt, Homo sapiens
  misc_RNA (1)...(19): siRNA sense strand
guggauaugugucugaacu

SEQ ID NO: 210849 - RNA, 19 nt, Homo sapiens
  misc_RNA (1)...(19): siRNA sense strand
acuggcugcugaauguuua

SEQ ID NO: 210850 - RNA, 19 nt, Homo sapiens
  misc_RNA (1)...(19): siRNA sense strand
acuaucccaugguggaaua

SEQ ID NO: 210851 - RNA, 19 nt, Homo sapiens
  misc_RNA (1)...(19): siRNA sense strand
ccggagcugcuuccaauuu

SEQ ID NO: 210852 - RNA, 19 nt, Homo sapiens
  misc_RNA (1)...(19): siRNA sense strand
ccaaauuccaagacaguug

SEQ ID NO: 210853 - RNA, 19 nt, Homo sapiens
  misc_RNA (1)...(19): siRNA sense strand
cagaaacugccaagcauca

SEQ ID NO: 210854 - RNA, 19 nt, Homo sapiens
  misc_RNA (1)...(19): siRNA sense strand
uaugacaucugccaaagcu

SEQ ID NO: 210855 - RNA, 19 nt, Homo sapiens
  misc_RNA (1)...(19): siRNA sense strand
aaugucagauucucagcuu

SEQ ID NO: 210856 - RNA, 19 nt, Homo sapiens
  misc_RNA (1)...(19): siRNA sense strand
ucgagacuuugccaaggua

SEQ ID NO: 210857 - RNA, 19 nt, Homo sapiens
  misc_RNA (1)...(19): siRNA sense strand
gcaaaaggccauaaaaugc

SEQ ID NO: 210858 - RNA, 19 nt, Homo sapiens
  misc_RNA (1)...(19): siRNA sense strand
cugcaugauucuauccaaa

SEQ ID NO: 210859 - RNA, 19 nt, Homo sapiens
  misc_RNA (1)...(19): siRNA sense strand
uaaagcacauuuggaagac

SEQ ID NO: 210860 - RNA, 19 nt, Homo sapiens
  misc_RNA (1)...(19): siRNA sense strand
acaggagucuaaagcacuu

SEQ ID NO: 210861 - RNA, 19 nt, Homo sapiens
  misc_RNA (1)...(19): siRNA sense strand
acagauaccuuuucaagca

SEQ ID NO: 210862 - RNA, 19 nt, Homo sapiens
  misc_RNA (1)...(19): siRNA sense strand
aagcacauuuggaagacaa

SEQ ID NO: 210863 - RNA, 19 nt, Homo sapiens
  misc_RNA (1)...(19): siRNA sense strand
gcuaauaauaagccagaga

SEQ ID NO: 210864 - RNA, 19 nt, Homo sapiens
  misc_RNA (1)...(19): siRNA sense strand
caagagcacaacaauuugg

SEQ ID NO: 210865 - RNA, 19 nt, Homo sapiens
  misc_RNA (1)...(19): siRNA sense strand
ccugucagcugcaugugau

SEQ ID NO: 210866 - RNA, 19 nt, Homo sapiens
  misc_RNA (1)...(19): siRNA sense strand
gcugcugaauguuuaugau

SEQ ID NO: 210867 - RNA, 19 nt, Homo sapiens
  misc_RNA (1)...(19): siRNA sense strand
acagagcucuaccagucuu

SEQ ID NO: 210868 - RNA, 19 nt, Homo sapiens
  misc_RNA (1)...(19): siRNA sense strand
acaguugggugaaguugca

SEQ ID NO: 210869 - RNA, 19 nt, Homo sapiens
  misc_RNA (1)...(19): siRNA sense strand
guuugaccacuauuuauga

SEQ ID NO: 210870 - RNA, 19 nt, Homo sapiens
  misc_RNA (1)...(19): siRNA sense strand
gcuuauaggacugccauga

SEQ ID NO: 210871 - RNA, 19 nt, Homo sapiens
  misc_RNA (1)...(19): siRNA sense strand
caucaggccaaauguaaca

SEQ ID NO: 210872 - RNA, 19 nt, Homo sapiens
  misc_RNA (1)...(19): siRNA sense strand
gauucuauccaaauuccaa

SEQ ID NO: 210873 - RNA, 19 nt, Homo sapiens
  misc_RNA (1)...(19): siRNA sense strand
ggcaaguucaacaggauuu

SEQ ID NO: 210874 - RNA, 19 nt, Homo sapiens
  misc_RNA (1)...(19): siRNA sense strand
gaacuggcugcugaauguu

SEQ ID NO: 210875 - RNA, 19 nt, Homo sapiens
  misc_RNA (1)...(19): siRNA sense strand
cugcugaauguuuaugaua

SEQ ID NO: 210876 - RNA, 19 nt, Homo sapiens
  misc_RNA (1)...(19): siRNA sense strand
aagcaucaggccaaaugua

SEQ ID NO: 210877 - RNA, 19 nt, Homo sapiens
  misc_RNA (1)...(19): siRNA sense strand
uggcaucauuucccugugu

SEQ ID NO: 210878 - RNA, 19 nt, Homo sapiens
  misc_RNA (1)...(19): siRNA sense strand
ccaugaaacuccgaagacu

SEQ ID NO: 210879 - RNA, 19 nt, Homo sapiens
  misc_RNA (1)...(19): siRNA sense strand
auaauaagccagagaucga

SEQ ID NO: 210880 - RNA, 19 nt, Homo sapiens
  misc_RNA (1)...(19): siRNA sense strand
cuaauaauaagccagagau

SEQ ID NO: 210881 - RNA, 19 nt, Homo sapiens
  misc_RNA (1)...(19): siRNA sense strand
ugggugaaguugcauccuu

SEQ ID NO: 210882 - RNA, 19 nt, Homo sapiens
  misc_RNA (1)...(19): siRNA sense strand
caucauuucccuguguaaa

SEQ ID NO: 210883 - RNA, 19 nt, Homo sapiens
  misc_RNA (1)...(19): siRNA sense strand
gcguggauaugugucugaa

SEQ ID NO: 210884 - RNA, 19 nt, Homo sapiens
  misc_RNA (1)...(19): siRNA sense strand
gcacuaucccaugguggaa

SEQ ID NO: 210885 - RNA, 19 nt, Homo sapiens
  misc_RNA (1)...(19): siRNA sense strand
gagccugucagcugcaugu

SEQ ID NO: 210886 - RNA, 19 nt, Homo sapiens
  misc_RNA (1)...(19): siRNA sense strand
guacagauaccuuuucaag

SEQ ID NO: 210887 - RNA, 19 nt, Homo sapiens
  misc_RNA (1)...(19): siRNA sense strand
gucccucucugcguggaua

SEQ ID NO: 210888 - RNA, 19 nt, Homo sapiens
  misc_RNA (1)...(19): siRNA sense strand
ggagcugcuuccaauuugc

SEQ ID NO: 210889 - RNA, 19 nt, Homo sapiens
  misc_RNA (1)...(19): siRNA sense strand
uuagcugaccugaauaaug

SEQ ID NO: 210890 - RNA, 19 nt, Homo sapiens
  misc_RNA (1)...(19): siRNA sense strand
guggcaaguucaacaggau

SEQ ID NO: 210891 - RNA, 19 nt, Homo sapiens
  misc_RNA (1)...(19): siRNA sense strand
acaacaauuuggucaacgu

SEQ ID NO: 210892 - RNA, 19 nt, Homo sapiens
  misc_RNA (1)...(19): siRNA sense strand
gacuacaucaggagaagau

SEQ ID NO: 210893 - RNA, 19 nt, Homo sapiens
  misc_RNA (1)...(19): siRNA sense strand
uaauaagccagagaucgaa

SEQ ID NO: 210894 - RNA, 19 nt, Homo sapiens
  misc_RNA (1)...(19): siRNA sense strand
ugucagauucucagcuuau

SEQ ID NO: 210895 - RNA, 19 nt, Homo sapiens
  misc_RNA (1)...(19): siRNA sense strand
ggauauccugcagauuauu

SEQ ID NO: 210896 - RNA, 19 nt, Homo sapiens
  misc_RNA (1)...(19): siRNA sense strand
agcaucaggccaaauguaa

SEQ ID NO: 210897 - RNA, 19 nt, Homo sapiens
  misc_RNA (1)...(19): siRNA sense strand
gcccuuugcuuggaucucu

SEQ ID NO: 210898 - RNA, 19 nt, Homo sapiens
  misc_RNA (1)...(19): siRNA sense strand
gcugaauguuuaugauacg

SEQ ID NO: 210899 - RNA, 19 nt, Homo sapiens
  misc_RNA (1)...(19): siRNA sense strand
agacuuugccaagguacua

SEQ ID NO: 210900 - RNA, 19 nt, Homo sapiens
  misc_RNA (1)...(19): siRNA sense strand
caagcaaguggcaaguuca

SEQ ID NO: 210901 - RNA, 19 nt, Homo sapiens
  misc_RNA (1)...(19): siRNA sense strand
agacaaguacagauaccuu

SEQ ID NO: 210902 - RNA, 19 nt, Homo sapiens
  misc_RNA (1)...(19): siRNA sense strand
gcaucauuucccuguguaa

SEQ ID NO: 210903 - RNA, 19 nt, Homo sapiens
  misc_RNA (1)...(19): siRNA sense strand
cugcaaagaguguccaauc

SEQ ID NO: 210904 - RNA, 19 nt, Homo sapiens
  misc_RNA (1)...(19): siRNA sense strand
cuuauaggacugccaugaa

SEQ ID NO: 210905 - RNA, 19 nt, Homo sapiens
  misc_RNA (1)...(19): siRNA sense strand
caaagaguguccaaucauu

SEQ ID NO: 210906 - RNA, 19 nt, Homo sapiens
  misc_RNA (1)...(19): siRNA sense strand
uagcugaccugaauaaugu

SEQ ID NO: 210907 - RNA, 19 nt, Homo sapiens
  misc_RNA (1)...(19): siRNA sense strand
gcaugauucuauccaaauu

SEQ ID NO: 210908 - RNA, 19 nt, Homo sapiens
  misc_RNA (1)...(19): siRNA sense strand
ugaacuggcugcugaaugu

SEQ ID NO: 210909 - RNA, 19 nt, Homo sapiens
  misc_RNA (1)...(19): siRNA sense strand
gauauccugcagauuauua

SEQ ID NO: 210910 - RNA, 19 nt, Homo sapiens
  misc_RNA (1)...(19): siRNA sense strand
gagaagauguucgagacuu

SEQ ID NO: 210911 - RNA, 19 nt, Homo sapiens
  misc_RNA (1)...(19): siRNA sense strand
gcacuuuaauuaugacauc

SEQ ID NO: 210912 - RNA, 19 nt, Homo sapiens
  misc_RNA (1)...(19): siRNA sense strand
guaaagcacauuuggaaga

SEQ ID NO: 210913 - RNA, 19 nt, Homo sapiens
  misc_RNA (1)...(19): siRNA sense strand
gaauauugcacuccgacua

SEQ ID NO: 210914 - RNA, 19 nt, Homo sapiens
  misc_RNA (1)...(19): siRNA sense strand
uuauaggacugccaugaaa

SEQ ID NO: 210915 - RNA, 19 nt, Homo sapiens
  misc_RNA (1)...(19): siRNA sense strand
gggugaaguugcauccuuu

SEQ ID NO: 210916 - RNA, 19 nt, Homo sapiens
  misc_RNA (1)...(19): siRNA sense strand
gcaagagcacaacaauuug

SEQ ID NO: 210917 - RNA, 19 nt, Homo sapiens
  misc_RNA (1)...(19): siRNA sense strand
gcacaacaauuuggucaac

SEQ ID NO: 210918 - RNA, 19 nt, Homo sapiens
  misc_RNA (1)...(19): siRNA sense strand
agcaagagcacaacaauuu

SEQ ID NO: 210919 - RNA, 19 nt, Homo sapiens
  misc_RNA (1)...(19): siRNA sense strand
agaagauguucgagacuuu

SEQ ID NO: 210920 - RNA, 19 nt, Homo sapiens
  misc_RNA (1)...(19): siRNA sense strand
gagcaagagcacaacaauu

SEQ ID NO: 210921 - RNA, 19 nt, Homo sapiens
  misc_RNA (1)...(19): siRNA sense strand
ucaagcaaguggcaaguuc

SEQ ID NO: 210922 - RNA, 19 nt, Homo sapiens
  misc_RNA (1)...(19): siRNA sense strand
ccacgagacucaaacaacu

SEQ ID NO: 210923 - RNA, 19 nt, Homo sapiens
  misc_RNA (1)...(19): siRNA sense strand
cagcacaaccucaagcaaa

SEQ ID NO: 210924 - RNA, 19 nt, Homo sapiens
  misc_RNA (1)...(19): siRNA sense strand
gcaaagaguguccaaucau

SEQ ID NO: 210925 - RNA, 19 nt, Homo sapiens
  misc_RNA (1)...(19): siRNA sense strand
auggauauccugcagauua

SEQ ID NO: 210926 - RNA, 19 nt, Homo sapiens
  misc_RNA (1)...(19): siRNA sense strand
uguaacaucugcaaagagu

SEQ ID NO: 210927 - RNA, 19 nt, Homo sapiens
  misc_RNA (1)...(19): siRNA sense strand
guccggagcugcuuccaau

SEQ ID NO: 210928 - RNA, 19 nt, Homo sapiens
  misc_RNA (1)...(19): siRNA sense strand
gcaaguggcaaguucaaca

SEQ ID NO: 210929 - RNA, 19 nt, Homo sapiens
  misc_RNA (1)...(19): siRNA sense strand
gcuuccaauuugcuaauaa

SEQ ID NO: 210930 - RNA, 19 nt, Homo sapiens
  misc_RNA (1)...(19): siRNA sense strand
uggaagacaaguacagaua

SEQ ID NO: 210931 - RNA, 19 nt, Homo sapiens
  misc_RNA (1)...(19): siRNA sense strand
ggauccguguccugucuuu

SEQ ID NO: 210932 - RNA, 19 nt, Homo sapiens
  misc_RNA (1)...(19): siRNA sense strand
gucuuuagcugaccugaau

SEQ ID NO: 210933 - RNA, 19 nt, Homo sapiens
  misc_RNA (1)...(19): siRNA sense strand
gacaaguacagauaccuuu

SEQ ID NO: 210934 - RNA, 19 nt, Homo sapiens
  misc_RNA (1)...(19): siRNA sense strand
ccaagcaucaggccaaaug

SEQ ID NO: 210935 - RNA, 19 nt, Homo sapiens
  misc_RNA (1)...(19): siRNA sense strand
ggagcaagagcacaacaau

SEQ ID NO: 210936 - RNA, 19 nt, Homo sapiens
  misc_RNA (1)...(19): siRNA sense strand
guguaaagcacauuuggaa

SEQ ID NO: 210937 - RNA, 19 nt, Homo sapiens
  misc_RNA (1)...(19): siRNA sense strand
caagacaguugggugaagu

SEQ ID NO: 210938 - RNA, 19 nt, Homo sapiens
  misc_RNA (1)...(19): siRNA sense strand
gaagauguucgagacuuug

SEQ ID NO: 210939 - RNA, 19 nt, Homo sapiens
  misc_RNA (1)...(19): siRNA sense strand
gucagauucucagcuuaua

SEQ ID NO: 210940 - RNA, 19 nt, Homo sapiens
  misc_RNA (1)...(19): siRNA sense strand
uaacaucugcaaagagugu

SEQ ID NO: 210941 - RNA, 19 nt, Homo sapiens
  misc_RNA (1)...(19): siRNA sense strand
cggagcugcuuccaauuug

SEQ ID NO: 210942 - RNA, 19 nt, Homo sapiens
  misc_RNA (1)...(19): siRNA sense strand
gaagacaaguacagauacc

SEQ ID NO: 210943 - RNA, 19 nt, Homo sapiens
  misc_RNA (1)...(19): siRNA sense strand
ccauggauauccugcagau

SEQ ID NO: 210944 - RNA, 19 nt, Homo sapiens
  misc_RNA (1)...(19): siRNA sense strand
ggcaucauuucccugugua

SEQ ID NO: 210945 - RNA, 19 nt, Homo sapiens
  misc_RNA (1)...(19): siRNA sense strand
uggauauccugcagauuau

SEQ ID NO: 210946 - RNA, 19 nt, Homo sapiens
  misc_RNA (1)...(19): siRNA sense strand
ggaagacaaguacagauac

SEQ ID NO: 210947 - RNA, 19 nt, Homo sapiens
  misc_RNA (1)...(19): siRNA sense strand
ugcaaagaguguccaauca

SEQ ID NO: 210948 - RNA, 19 nt, Homo sapiens
  misc_RNA (1)...(19): siRNA sense strand
guggauaugugucugaacu

SEQ ID NO: 210949 - RNA, 19 nt, Homo sapiens
  misc_RNA (1)...(19): siRNA sense strand
acuggcugcugaauguuua

SEQ ID NO: 210950 - RNA, 19 nt, Homo sapiens
  misc_RNA (1)...(19): siRNA sense strand
acuaucccaugguggaaua

SEQ ID NO: 210951 - RNA, 19 nt, Homo sapiens
  misc_RNA (1)...(19): siRNA sense strand
ccggagcugcuuccaauuu

SEQ ID NO: 210952 - RNA, 19 nt, Homo sapiens
  misc_RNA (1)...(19): siRNA sense strand
ccaaauuccaagacaguug

SEQ ID NO: 210953 - RNA, 19 nt, Homo sapiens
  misc_RNA (1)...(19): siRNA sense strand
cagaaacugccaagcauca

SEQ ID NO: 210954 - RNA, 19 nt, Homo sapiens
  misc_RNA (1)...(19): siRNA sense strand
uaugacaucugccaaagcu

SEQ ID NO: 210955 - RNA, 19 nt, Homo sapiens
  misc_RNA (1)...(19): siRNA sense strand
aaugucagauucucagcuu

SEQ ID NO: 210956 - RNA, 19 nt, Homo sapiens
  misc_RNA (1)...(19): siRNA sense strand
ucgagacuuugccaaggua

SEQ ID NO: 210957 - RNA, 19 nt, Homo sapiens
  misc_RNA (1)...(19): siRNA sense strand
gcaaaaggccauaaaaugc

SEQ ID NO: 210958 - RNA, 19 nt, Homo sapiens
  misc_RNA (1)...(19): siRNA sense strand
cugcaugauucuauccaaa

SEQ ID NO: 210959 - RNA, 19 nt, Homo sapiens
  misc_RNA (1)...(19): siRNA sense strand
uaaagcacauuuggaagac

SEQ ID NO: 210960 - RNA, 19 nt, Homo sapiens
  misc_RNA (1)...(19): siRNA sense strand
acaggagucuaaagcacuu

SEQ ID NO: 210961 - RNA, 19 nt, Homo sapiens
  misc_RNA (1)...(19): siRNA sense strand
acagauaccuuuucaagca

SEQ ID NO: 210962 - RNA, 19 nt, Homo sapiens
  misc_RNA (1)...(19): siRNA sense strand
aagcacauuuggaagacaa

SEQ ID NO: 210963 - RNA, 19 nt, Homo sapiens
  misc_RNA (1)...(19): siRNA sense strand
gcuaauaauaagccagaga

SEQ ID NO: 210964 - RNA, 19 nt, Homo sapiens
  misc_RNA (1)...(19): siRNA sense strand
caagagcacaacaauuugg

SEQ ID NO: 210965 - RNA, 19 nt, Homo sapiens
  misc_RNA (1)...(19): siRNA sense strand
ccugucagcugcaugugau

SEQ ID NO: 210966 - RNA, 19 nt, Homo sapiens
  misc_RNA (1)...(19): siRNA sense strand
gcugcugaauguuuaugau

SEQ ID NO: 210967 - RNA, 19 nt, Homo sapiens
  misc_RNA (1)...(19): siRNA sense strand
acagagcucuaccagucuu

SEQ ID NO: 210968 - RNA, 19 nt, Homo sapiens
  misc_RNA (1)...(19): siRNA sense strand
acaguugggugaaguugca

SEQ ID NO: 210969 - RNA, 19 nt, Homo sapiens
  misc_RNA (1)...(19): siRNA sense strand
guuugaccacuauuuauga

SEQ ID NO: 210970 - RNA, 19 nt, Homo sapiens
  misc_RNA (1)...(19): siRNA sense strand
gcuuauaggacugccauga

SEQ ID NO: 210971 - RNA, 19 nt, Homo sapiens
  misc_RNA (1)...(19): siRNA sense strand
caucaggccaaauguaaca

SEQ ID NO: 210972 - RNA, 19 nt, Homo sapiens
  misc_RNA (1)...(19): siRNA sense strand
gauucuauccaaauuccaa

SEQ ID NO: 210973 - RNA, 19 nt, Homo sapiens
  misc_RNA (1)...(19): siRNA sense strand
ggcaaguucaacaggauuu

SEQ ID NO: 210974 - RNA, 19 nt, Homo sapiens
  misc_RNA (1)...(19): siRNA sense strand
gaacuggcugcugaauguu

SEQ ID NO: 210975 - RNA, 19 nt, Homo sapiens
  misc_RNA (1)...(19): siRNA sense strand
cugcugaauguuuaugaua

SEQ ID NO: 210976 - RNA, 19 nt, Homo sapiens
  misc_RNA (1)...(19): siRNA sense strand
aagcaucaggccaaaugua

SEQ ID NO: 210977 - RNA, 19 nt, Homo sapiens
  misc_RNA (1)...(19): siRNA sense strand
uggcaucauuucccugugu

SEQ ID NO: 210978 - RNA, 19 nt, Homo sapiens
  misc_RNA (1)...(19): siRNA sense strand
ccaugaaacuccgaagacu

SEQ ID NO: 210979 - RNA, 19 nt, Homo sapiens
  misc_RNA (1)...(19): siRNA sense strand
auaauaagccagagaucga

SEQ ID NO: 210980 - RNA, 19 nt, Homo sapiens
  misc_RNA (1)...(19): siRNA sense strand
cuaauaauaagccagagau

SEQ ID NO: 210981 - RNA, 19 nt, Homo sapiens
  misc_RNA (1)...(19): siRNA sense strand
ugggugaaguugcauccuu

SEQ ID NO: 210982 - RNA, 19 nt, Homo sapiens
  misc_RNA (1)...(19): siRNA sense strand
caucauuucccuguguaaa

SEQ ID NO: 210983 - RNA, 19 nt, Homo sapiens
  misc_RNA (1)...(19): siRNA sense strand
gcguggauaugugucugaa

SEQ ID NO: 210984 - RNA, 19 nt, Homo sapiens
  misc_RNA (1)...(19): siRNA sense strand
gcacuaucccaugguggaa

SEQ ID NO: 210985 - RNA, 19 nt, Homo sapiens
  misc_RNA (1)...(19): siRNA sense strand
gagccugucagcugcaugu

SEQ ID NO: 210986 - RNA, 19 nt, Homo sapiens
  misc_RNA (1)...(19): siRNA sense strand
guacagauaccuuuucaag

SEQ ID NO: 210987 - RNA, 19 nt, Homo sapiens
  misc_RNA (1)...(19): siRNA sense strand
gucccucucugcguggaua

SEQ ID NO: 210988 - RNA, 19 nt, Homo sapiens
  misc_RNA (1)...(19): siRNA sense strand
ggagcugcuuccaauuugc

SEQ ID NO: 210989 - RNA, 19 nt, Homo sapiens
  misc_RNA (1)...(19): siRNA sense strand
uuagcugaccugaauaaug

SEQ ID NO: 210990 - RNA, 19 nt, Homo sapiens
  misc_RNA (1)...(19): siRNA sense strand
guggcaaguucaacaggau

SEQ ID NO: 210991 - RNA, 19 nt, Homo sapiens
  misc_RNA (1)...(19): siRNA sense strand
acaacaauuuggucaacgu

SEQ ID NO: 210992 - RNA, 19 nt, Homo sapiens
  misc_RNA (1)...(19): siRNA sense strand
gacuacaucaggagaagau

SEQ ID NO: 210993 - RNA, 19 nt, Homo sapiens
  misc_RNA (1)...(19): siRNA sense strand
uaauaagccagagaucgaa

SEQ ID NO: 210994 - RNA, 19 nt, Homo sapiens
  misc_RNA (1)...(19): siRNA sense strand
ugucagauucucagcuuau

SEQ ID NO: 210995 - RNA, 19 nt, Homo sapiens
  misc_RNA (1)...(19): siRNA sense strand
ggauauccugcagauuauu

SEQ ID NO: 210996 - RNA, 19 nt, Homo sapiens
  misc_RNA (1)...(19): siRNA sense strand
agcaucaggccaaauguaa

SEQ ID NO: 210997 - RNA, 19 nt, Homo sapiens
  misc_RNA (1)...(19): siRNA sense strand
gcccuuugcuuggaucucu

SEQ ID NO: 210998 - RNA, 19 nt, Homo sapiens
  misc_RNA (1)...(19): siRNA sense strand
gcugaauguuuaugauacg

SEQ ID NO: 210999 - RNA, 19 nt, Homo sapiens
  misc_RNA (1)...(19): siRNA sense strand
agacuuugccaagguacua

SEQ ID NO: 211000 - RNA, 19 nt, Homo sapiens
  misc_RNA (1)...(19): siRNA sense strand
caagcaaguggcaaguuca

SEQ ID NO: 211001 - RNA, 19 nt, Homo sapiens
  misc_RNA (1)...(19): siRNA sense strand
agacaaguacagauaccuu

SEQ ID NO: 211002 - RNA, 19 nt, Homo sapiens
  misc_RNA (1)...(19): siRNA sense strand
gcaucauuucccuguguaa

SEQ ID NO: 211003 - RNA, 19 nt, Homo sapiens
  misc_RNA (1)...(19): siRNA sense strand
cugcaaagaguguccaauc

SEQ ID NO: 211004 - RNA, 19 nt, Homo sapiens
  misc_RNA (1)...(19): siRNA sense strand
cuuauaggacugccaugaa

SEQ ID NO: 211005 - RNA, 19 nt, Homo sapiens
  misc_RNA (1)...(19): siRNA sense strand
caaagaguguccaaucauu

SEQ ID NO: 211006 - RNA, 19 nt, Homo sapiens
  misc_RNA (1)...(19): siRNA sense strand
uagcugaccugaauaaugu

SEQ ID NO: 211007 - RNA, 19 nt, Homo sapiens
  misc_RNA (1)...(19): siRNA sense strand
gcaugauucuauccaaauu

SEQ ID NO: 211008 - RNA, 19 nt, Homo sapiens
  misc_RNA (1)...(19): siRNA sense strand
ugaacuggcugcugaaugu

SEQ ID NO: 211009 - RNA, 19 nt, Homo sapiens
  misc_RNA (1)...(19): siRNA sense strand
gauauccugcagauuauua

SEQ ID NO: 211010 - RNA, 19 nt, Homo sapiens
  misc_RNA (1)...(19): siRNA sense strand
gagaagauguucgagacuu

SEQ ID NO: 211011 - RNA, 19 nt, Homo sapiens
  misc_RNA (1)...(19): siRNA sense strand
gcacuuuaauuaugacauc

SEQ ID NO: 211012 - RNA, 19 nt, Homo sapiens
  misc_RNA (1)...(19): siRNA sense strand
guaaagcacauuuggaaga

SEQ ID NO: 211013 - RNA, 19 nt, Homo sapiens
  misc_RNA (1)...(19): siRNA sense strand
gaauauugcacuccgacua

SEQ ID NO: 211014 - RNA, 19 nt, Homo sapiens
  misc_RNA (1)...(19): siRNA sense strand
uuauaggacugccaugaaa

SEQ ID NO: 211015 - RNA, 19 nt, Homo sapiens
  misc_RNA (1)...(19): siRNA sense strand
gggugaaguugcauccuuu

SEQ ID NO: 211016 - RNA, 19 nt, Homo sapiens
  misc_RNA (1)...(19): siRNA sense strand
gcaagagcacaacaauuug

SEQ ID NO: 211017 - RNA, 19 nt, Homo sapiens
  misc_RNA (1)...(19): siRNA sense strand
gcacaacaauuuggucaac

SEQ ID NO: 211018 - RNA, 19 nt, Homo sapiens
  misc_RNA (1)...(19): siRNA sense strand
agcaagagcacaacaauuu

SEQ ID NO: 211019 - RNA, 19 nt, Homo sapiens
  misc_RNA (1)...(19): siRNA sense strand
agaagauguucgagacuuu

SEQ ID NO: 211020 - RNA, 19 nt, Homo sapiens
  misc_RNA (1)...(19): siRNA sense strand
gagcaagagcacaacaauu

SEQ ID NO: 211021 - RNA, 19 nt, Homo sapiens
  misc_RNA (1)...(19): siRNA sense strand
ucaagcaaguggcaaguuc

SEQ ID NO: 211022 - RNA, 19 nt, Homo sapiens
  misc_RNA (1)...(19): siRNA sense strand
ccacgagacucaaacaacu

SEQ ID NO: 211023 - RNA, 19 nt, Homo sapiens
  misc_RNA (1)...(19): siRNA sense strand
cagcacaaccucaagcaaa

SEQ ID NO: 211024 - RNA, 19 nt, Homo sapiens
  misc_RNA (1)...(19): siRNA sense strand
gcaaagaguguccaaucau

SEQ ID NO: 211025 - RNA, 19 nt, Homo sapiens
  misc_RNA (1)...(19): siRNA sense strand
auggauauccugcagauua

SEQ ID NO: 211026 - RNA, 19 nt, Homo sapiens
  misc_RNA (1)...(19): siRNA sense strand
uguaacaucugcaaagagu

SEQ ID NO: 211027 - RNA, 19 nt, Homo sapiens
  misc_RNA (1)...(19): siRNA sense strand
guccggagcugcuuccaau

SEQ ID NO: 211028 - RNA, 19 nt, Homo sapiens
  misc_RNA (1)...(19): siRNA sense strand
gcaaguggcaaguucaaca

SEQ ID NO: 211029 - RNA, 19 nt, Homo sapiens
  misc_RNA (1)...(19): siRNA sense strand
gcuuccaauuugcuaauaa

SEQ ID NO: 211030 - RNA, 19 nt, Homo sapiens
  misc_RNA (1)...(19): siRNA sense strand
uggaagacaaguacagaua

SEQ ID NO: 211031 - RNA, 19 nt, Homo sapiens
  misc_RNA (1)...(19): siRNA sense strand
ggauccguguccugucuuu

SEQ ID NO: 211032 - RNA, 19 nt, Homo sapiens
  misc_RNA (1)...(19): siRNA sense strand
gucuuuagcugaccugaau

SEQ ID NO: 211033 - RNA, 19 nt, Homo sapiens
  misc_RNA (1)...(19): siRNA sense strand
gacaaguacagauaccuuu

SEQ ID NO: 211034 - RNA, 19 nt, Homo sapiens
  misc_RNA (1)...(19): siRNA sense strand
ccaagcaucaggccaaaug

SEQ ID NO: 211035 - RNA, 19 nt, Homo sapiens
  misc_RNA (1)...(19): siRNA sense strand
ggagcaagagcacaacaau

SEQ ID NO: 211036 - RNA, 19 nt, Homo sapiens
  misc_RNA (1)...(19): siRNA sense strand
guguaaagcacauuuggaa

SEQ ID NO: 211037 - RNA, 19 nt, Homo sapiens
  misc_RNA (1)...(19): siRNA sense strand
caagacaguugggugaagu

SEQ ID NO: 211038 - RNA, 19 nt, Homo sapiens
  misc_RNA (1)...(19): siRNA sense strand
gaagauguucgagacuuug

SEQ ID NO: 211039 - RNA, 19 nt, Homo sapiens
  misc_RNA (1)...(19): siRNA sense strand
gucagauucucagcuuaua

SEQ ID NO: 211040 - RNA, 19 nt, Homo sapiens
  misc_RNA (1)...(19): siRNA sense strand
uaacaucugcaaagagugu

SEQ ID NO: 211041 - RNA, 19 nt, Homo sapiens
  misc_RNA (1)...(19): siRNA sense strand
cggagcugcuuccaauuug

SEQ ID NO: 211042 - RNA, 19 nt, Homo sapiens
  misc_RNA (1)...(19): siRNA sense strand
gaagacaaguacagauacc

SEQ ID NO: 211043 - RNA, 19 nt, Homo sapiens
  misc_RNA (1)...(19): siRNA sense strand
ccauggauauccugcagau

SEQ ID NO: 211044 - RNA, 19 nt, Homo sapiens
  misc_RNA (1)...(19): siRNA sense strand
ggcaucauuucccugugua

SEQ ID NO: 211045 - RNA, 19 nt, Homo sapiens
  misc_RNA (1)...(19): siRNA sense strand
uggauauccugcagauuau

SEQ ID NO: 211046 - RNA, 19 nt, Homo sapiens
  misc_RNA (1)...(19): siRNA sense strand
ggaagacaaguacagauac

SEQ ID NO: 211047 - RNA, 19 nt, Homo sapiens
  misc_RNA (1)...(19): siRNA sense strand
ugcaaagaguguccaauca

SEQ ID NO: 211048 - RNA, 19 nt, Homo sapiens
  misc_RNA (1)...(19): siRNA sense strand
guggauaugugucugaacu

SEQ ID NO: 211049 - RNA, 19 nt, Homo sapiens
  misc_RNA (1)...(19): siRNA sense strand
acuggcugcugaauguuua

SEQ ID NO: 211050 - RNA, 19 nt, Homo sapiens
  misc_RNA (1)...(19): siRNA sense strand
acuaucccaugguggaaua

SEQ ID NO: 211051 - RNA, 19 nt, Homo sapiens
  misc_RNA (1)...(19): siRNA sense strand
ccggagcugcuuccaauuu

SEQ ID NO: 211052 - RNA, 19 nt, Homo sapiens
  misc_RNA (1)...(19): siRNA sense strand
ccaaauuccaagacaguug

SEQ ID NO: 211053 - RNA, 19 nt, Homo sapiens
  misc_RNA (1)...(19): siRNA sense strand
cagaaacugccaagcauca

SEQ ID NO: 211054 - RNA, 19 nt, Homo sapiens
  misc_RNA (1)...(19): siRNA sense strand
uaugacaucugccaaagcu

SEQ ID NO: 211055 - RNA, 19 nt, Homo sapiens
  misc_RNA (1)...(19): siRNA sense strand
aaugucagauucucagcuu

SEQ ID NO: 211056 - RNA, 19 nt, Homo sapiens
  misc_RNA (1)...(19): siRNA sense strand
ucgagacuuugccaaggua

SEQ ID NO: 211057 - RNA, 19 nt, Homo sapiens
  misc_RNA (1)...(19): siRNA sense strand
gcaaaaggccauaaaaugc

SEQ ID NO: 211058 - RNA, 19 nt, Homo sapiens
  misc_RNA (1)...(19): siRNA sense strand
cugcaugauucuauccaaa

SEQ ID NO: 211059 - RNA, 19 nt, Homo sapiens
  misc_RNA (1)...(19): siRNA sense strand
uaaagcacauuuggaagac

SEQ ID NO: 211060 - RNA, 19 nt, Homo sapiens
  misc_RNA (1)...(19): siRNA sense strand
acaggagucuaaagcacuu

SEQ ID NO: 211061 - RNA, 19 nt, Homo sapiens
  misc_RNA (1)...(19): siRNA sense strand
acagauaccuuuucaagca

SEQ ID NO: 211062 - RNA, 19 nt, Homo sapiens
  misc_RNA (1)...(19): siRNA sense strand
aagcacauuuggaagacaa

SEQ ID NO: 211063 - RNA, 19 nt, Homo sapiens
  misc_RNA (1)...(19): siRNA sense strand
gcuaauaauaagccagaga

SEQ ID NO: 211064 - RNA, 19 nt, Homo sapiens
  misc_RNA (1)...(19): siRNA sense strand
caagagcacaacaauuugg

SEQ ID NO: 211065 - RNA, 19 nt, Homo sapiens
  misc_RNA (1)...(19): siRNA sense strand
ccugucagcugcaugugau

SEQ ID NO: 211066 - RNA, 19 nt, Homo sapiens
  misc_RNA (1)...(19): siRNA sense strand
gcugcugaauguuuaugau

SEQ ID NO: 211067 - RNA, 19 nt, Homo sapiens
  misc_RNA (1)...(19): siRNA sense strand
acagagcucuaccagucuu

SEQ ID NO: 211068 - RNA, 19 nt, Homo sapiens
  misc_RNA (1)...(19): siRNA sense strand
acaguugggugaaguugca

SEQ ID NO: 211069 - RNA, 19 nt, Homo sapiens
  misc_RNA (1)...(19): siRNA sense strand
guuugaccacuauuuauga

SEQ ID NO: 211070 - RNA, 19 nt, Homo sapiens
  misc_RNA (1)...(19): siRNA sense strand
gcuuauaggacugccauga

SEQ ID NO: 211071 - RNA, 19 nt, Homo sapiens
  misc_RNA (1)...(19): siRNA sense strand
caucaggccaaauguaaca

SEQ ID NO: 211072 - RNA, 19 nt, Homo sapiens
  misc_RNA (1)...(19): siRNA sense strand
gauucuauccaaauuccaa

SEQ ID NO: 211073 - RNA, 19 nt, Homo sapiens
  misc_RNA (1)...(19): siRNA sense strand
ggcaaguucaacaggauuu

SEQ ID NO: 211074 - RNA, 19 nt, Homo sapiens
  misc_RNA (1)...(19): siRNA sense strand
gaacuggcugcugaauguu

SEQ ID NO: 211075 - RNA, 19 nt, Homo sapiens
  misc_RNA (1)...(19): siRNA sense strand
cugcugaauguuuaugaua

SEQ ID NO: 211076 - RNA, 19 nt, Homo sapiens
  misc_RNA (1)...(19): siRNA sense strand
aagcaucaggccaaaugua

SEQ ID NO: 211077 - RNA, 19 nt, Homo sapiens
  misc_RNA (1)...(19): siRNA sense strand
uggcaucauuucccugugu

SEQ ID NO: 211078 - RNA, 19 nt, Homo sapiens
  misc_RNA (1)...(19): siRNA sense strand
ccaugaaacuccgaagacu

SEQ ID NO: 211079 - RNA, 19 nt, Homo sapiens
  misc_RNA (1)...(19): siRNA sense strand
auaauaagccagagaucga

SEQ ID NO: 211080 - RNA, 19 nt, Homo sapiens
  misc_RNA (1)...(19): siRNA sense strand
cuaauaauaagccagagau

SEQ ID NO: 211081 - RNA, 19 nt, Homo sapiens
  misc_RNA (1)...(19): siRNA sense strand
ugggugaaguugcauccuu

SEQ ID NO: 211082 - RNA, 19 nt, Homo sapiens
  misc_RNA (1)...(19): siRNA sense strand
caucauuucccuguguaaa

SEQ ID NO: 211083 - RNA, 19 nt, Homo sapiens
  misc_RNA (1)...(19): siRNA sense strand
gcguggauaugugucugaa

SEQ ID NO: 211084 - RNA, 19 nt, Homo sapiens
  misc_RNA (1)...(19): siRNA sense strand
gcacuaucccaugguggaa

SEQ ID NO: 211085 - RNA, 19 nt, Homo sapiens
  misc_RNA (1)...(19): siRNA sense strand
gagccugucagcugcaugu

SEQ ID NO: 211086 - RNA, 19 nt, Homo sapiens
  misc_RNA (1)...(19): siRNA sense strand
guacagauaccuuuucaag

SEQ ID NO: 211087 - RNA, 19 nt, Homo sapiens
  misc_RNA (1)...(19): siRNA sense strand
gucccucucugcguggaua

SEQ ID NO: 211088 - RNA, 19 nt, Homo sapiens
  misc_RNA (1)...(19): siRNA sense strand
ggagcugcuuccaauuugc

SEQ ID NO: 211089 - RNA, 19 nt, Homo sapiens
  misc_RNA (1)...(19): siRNA sense strand
uuagcugaccugaauaaug

SEQ ID NO: 211090 - RNA, 19 nt, Homo sapiens
  misc_RNA (1)...(19): siRNA sense strand
guggcaaguucaacaggau

SEQ ID NO: 211091 - RNA, 19 nt, Homo sapiens
  misc_RNA (1)...(19): siRNA sense strand
acaacaauuuggucaacgu

SEQ ID NO: 211092 - RNA, 19 nt, Homo sapiens
  misc_RNA (1)...(19): siRNA sense strand
gacuacaucaggagaagau

SEQ ID NO: 211093 - RNA, 19 nt, Homo sapiens
  misc_RNA (1)...(19): siRNA sense strand
uaauaagccagagaucgaa

SEQ ID NO: 211094 - RNA, 19 nt, Homo sapiens
  misc_RNA (1)...(19): siRNA sense strand
ugucagauucucagcuuau

SEQ ID NO: 211095 - RNA, 19 nt, Homo sapiens
  misc_RNA (1)...(19): siRNA sense strand
ggauauccugcagauuauu

SEQ ID NO: 211096 - RNA, 19 nt, Homo sapiens
  misc_RNA (1)...(19): siRNA sense strand
agcaucaggccaaauguaa

SEQ ID NO: 211097 - RNA, 19 nt, Homo sapiens
  misc_RNA (1)...(19): siRNA sense strand
gcccuuugcuuggaucucu

SEQ ID NO: 211098 - RNA, 19 nt, Homo sapiens
  misc_RNA (1)...(19): siRNA sense strand
gcugaauguuuaugauacg

SEQ ID NO: 211099 - RNA, 19 nt, Homo sapiens
  misc_RNA (1)...(19): siRNA sense strand
agacuuugccaagguacua

SEQ ID NO: 211100 - RNA, 19 nt, Homo sapiens
  misc_RNA (1)...(19): siRNA sense strand
caagcaaguggcaaguuca

SEQ ID NO: 211101 - RNA, 19 nt, Homo sapiens
  misc_RNA (1)...(19): siRNA sense strand
agacaaguacagauaccuu

SEQ ID NO: 211102 - RNA, 19 nt, Homo sapiens
  misc_RNA (1)...(19): siRNA sense strand
gcaucauuucccuguguaa

SEQ ID NO: 211103 - RNA, 19 nt, Homo sapiens
  misc_RNA (1)...(19): siRNA sense strand
cugcaaagaguguccaauc

SEQ ID NO: 211104 - RNA, 19 nt, Homo sapiens
  misc_RNA (1)...(19): siRNA sense strand
cuuauaggacugccaugaa

SEQ ID NO: 211105 - RNA, 19 nt, Homo sapiens
  misc_RNA (1)...(19): siRNA sense strand
caaagaguguccaaucauu

SEQ ID NO: 211106 - RNA, 19 nt, Homo sapiens
  misc_RNA (1)...(19): siRNA sense strand
uagcugaccugaauaaugu

SEQ ID NO: 211107 - RNA, 19 nt, Homo sapiens
  misc_RNA (1)...(19): siRNA sense strand
gcaugauucuauccaaauu

SEQ ID NO: 211108 - RNA, 19 nt, Homo sapiens
  misc_RNA (1)...(19): siRNA sense strand
ugaacuggcugcugaaugu

SEQ ID NO: 211109 - RNA, 19 nt, Homo sapiens
  misc_RNA (1)...(19): siRNA sense strand
gauauccugcagauuauua

SEQ ID NO: 211110 - RNA, 19 nt, Homo sapiens
  misc_RNA (1)...(19): siRNA sense strand
gagaagauguucgagacuu

SEQ ID NO: 211111 - RNA, 19 nt, Homo sapiens
  misc_RNA (1)...(19): siRNA sense strand
gcacuuuaauuaugacauc

SEQ ID NO: 211112 - RNA, 19 nt, Homo sapiens
  misc_RNA (1)...(19): siRNA sense strand
guaaagcacauuuggaaga

SEQ ID NO: 211113 - RNA, 19 nt, Homo sapiens
  misc_RNA (1)...(19): siRNA sense strand
gaauauugcacuccgacua

SEQ ID NO: 211114 - RNA, 19 nt, Homo sapiens
  misc_RNA (1)...(19): siRNA sense strand
uuauaggacugccaugaaa

SEQ ID NO: 211115 - RNA, 19 nt, Homo sapiens
  misc_RNA (1)...(19): siRNA sense strand
gggugaaguugcauccuuu

SEQ ID NO: 211116 - RNA, 19 nt, Homo sapiens
  misc_RNA (1)...(19): siRNA sense strand
gcaagagcacaacaauuug

SEQ ID NO: 211117 - RNA, 19 nt, Homo sapiens
  misc_RNA (1)...(19): siRNA sense strand
gcacaacaauuuggucaac

SEQ ID NO: 211118 - RNA, 19 nt, Homo sapiens
  misc_RNA (1)...(19): siRNA sense strand
agcaagagcacaacaauuu

SEQ ID NO: 211119 - RNA, 19 nt, Homo sapiens
  misc_RNA (1)...(19): siRNA sense strand
agaagauguucgagacuuu

SEQ ID NO: 211120 - RNA, 19 nt, Homo sapiens
  misc_RNA (1)...(19): siRNA sense strand
gagcaagagcacaacaauu

SEQ ID NO: 211121 - RNA, 19 nt, Homo sapiens
  misc_RNA (1)...(19): siRNA sense strand
ucaagcaaguggcaaguuc

SEQ ID NO: 211122 - RNA, 19 nt, Homo sapiens
  misc_RNA (1)...(19): siRNA sense strand
ccacgagacucaaacaacu

SEQ ID NO: 211123 - RNA, 19 nt, Homo sapiens
  misc_RNA (1)...(19): siRNA sense strand
cagcacaaccucaagcaaa

SEQ ID NO: 211124 - RNA, 19 nt, Homo sapiens
  misc_RNA (1)...(19): siRNA sense strand
gcaaagaguguccaaucau

SEQ ID NO: 211125 - RNA, 19 nt, Homo sapiens
  misc_RNA (1)...(19): siRNA sense strand
auggauauccugcagauua

SEQ ID NO: 211126 - RNA, 19 nt, Homo sapiens
  misc_RNA (1)...(19): siRNA sense strand
uguaacaucugcaaagagu

SEQ ID NO: 211127 - RNA, 19 nt, Homo sapiens
  misc_RNA (1)...(19): siRNA sense strand
guccggagcugcuuccaau

SEQ ID NO: 211128 - RNA, 19 nt, Homo sapiens
  misc_RNA (1)...(19): siRNA sense strand
gcaaguggcaaguucaaca

SEQ ID NO: 211129 - RNA, 19 nt, Homo sapiens
  misc_RNA (1)...(19): siRNA sense strand
gcuuccaauuugcuaauaa

SEQ ID NO: 211130 - RNA, 19 nt, Homo sapiens
  misc_RNA (1)...(19): siRNA sense strand
uggaagacaaguacagaua

SEQ ID NO: 211131 - RNA, 19 nt, Homo sapiens
  misc_RNA (1)...(19): siRNA sense strand
ggauccguguccugucuuu

SEQ ID NO: 211132 - RNA, 19 nt, Homo sapiens
  misc_RNA (1)...(19): siRNA sense strand
gucuuuagcugaccugaau

SEQ ID NO: 211133 - RNA, 19 nt, Homo sapiens
  misc_RNA (1)...(19): siRNA sense strand
gacaaguacagauaccuuu

SEQ ID NO: 211134 - RNA, 19 nt, Homo sapiens
  misc_RNA (1)...(19): siRNA sense strand
ccaagcaucaggccaaaug

SEQ ID NO: 211135 - RNA, 19 nt, Homo sapiens
  misc_RNA (1)...(19): siRNA sense strand
ggagcaagagcacaacaau

SEQ ID NO: 211136 - RNA, 19 nt, Homo sapiens
  misc_RNA (1)...(19): siRNA sense strand
guguaaagcacauuuggaa

SEQ ID NO: 211137 - RNA, 19 nt, Homo sapiens
  misc_RNA (1)...(19): siRNA sense strand
caagacaguugggugaagu

SEQ ID NO: 211138 - RNA, 19 nt, Homo sapiens
  misc_RNA (1)...(19): siRNA sense strand
gaagauguucgagacuuug

SEQ ID NO: 211139 - RNA, 19 nt, Homo sapiens
  misc_RNA (1)...(19): siRNA sense strand
gucagauucucagcuuaua

SEQ ID NO: 211140 - RNA, 19 nt, Homo sapiens
  misc_RNA (1)...(19): siRNA sense strand
uaacaucugcaaagagugu

SEQ ID NO: 211141 - RNA, 19 nt, Homo sapiens
  misc_RNA (1)...(19): siRNA sense strand
cggagcugcuuccaauuug

SEQ ID NO: 211142 - RNA, 19 nt, Homo sapiens
  misc_RNA (1)...(19): siRNA sense strand
gaagacaaguacagauacc

SEQ ID NO: 211143 - RNA, 19 nt, Homo sapiens
  misc_RNA (1)...(19): siRNA sense strand
ccauggauauccugcagau

SEQ ID NO: 211144 - RNA, 19 nt, Homo sapiens
  misc_RNA (1)...(19): siRNA sense strand
ggcaucauuucccugugua

SEQ ID NO: 211145 - RNA, 19 nt, Homo sapiens
  misc_RNA (1)...(19): siRNA sense strand
uggauauccugcagauuau

SEQ ID NO: 211146 - RNA, 19 nt, Homo sapiens
  misc_RNA (1)...(19): siRNA sense strand
ggaagacaaguacagauac

SEQ ID NO: 211147 - RNA, 19 nt, Homo sapiens
  misc_RNA (1)...(19): siRNA sense strand
ugcaaagaguguccaauca

SEQ ID NO: 211148 - RNA, 19 nt, Homo sapiens
  misc_RNA (1)...(19): siRNA sense strand
guggauaugugucugaacu

SEQ ID NO: 211149 - RNA, 19 nt, Homo sapiens
  misc_RNA (1)...(19): siRNA sense strand
acuggcugcugaauguuua

SEQ ID NO: 211150 - RNA, 19 nt, Homo sapiens
  misc_RNA (1)...(19): siRNA sense strand
acuaucccaugguggaaua

SEQ ID NO: 211151 - RNA, 19 nt, Homo sapiens
  misc_RNA (1)...(19): siRNA sense strand
ccggagcugcuuccaauuu

SEQ ID NO: 211152 - RNA, 19 nt, Homo sapiens
  misc_RNA (1)...(19): siRNA sense strand
ccaaauuccaagacaguug

SEQ ID NO: 211153 - RNA, 19 nt, Homo sapiens
  misc_RNA (1)...(19): siRNA sense strand
cagaaacugccaagcauca

SEQ ID NO: 211154 - RNA, 19 nt, Homo sapiens
  misc_RNA (1)...(19): siRNA sense strand
uaugacaucugccaaagcu

SEQ ID NO: 211155 - RNA, 19 nt, Homo sapiens
  misc_RNA (1)...(19): siRNA sense strand
aaugucagauucucagcuu

SEQ ID NO: 211156 - RNA, 19 nt, Homo sapiens
  misc_RNA (1)...(19): siRNA sense strand
ucgagacuuugccaaggua

SEQ ID NO: 211157 - RNA, 19 nt, Homo sapiens
  misc_RNA (1)...(19): siRNA sense strand
gcaaaaggccauaaaaugc

SEQ ID NO: 211158 - RNA, 19 nt, Homo sapiens
  misc_RNA (1)...(19): siRNA sense strand
cugcaugauucuauccaaa

SEQ ID NO: 211159 - RNA, 19 nt, Homo sapiens
  misc_RNA (1)...(19): siRNA sense strand
uaaagcacauuuggaagac

SEQ ID NO: 211160 - RNA, 19 nt, Homo sapiens
  misc_RNA (1)...(19): siRNA sense strand
acaggagucuaaagcacuu

SEQ ID NO: 211161 - RNA, 19 nt, Homo sapiens
  misc_RNA (1)...(19): siRNA sense strand
acagauaccuuuucaagca

SEQ ID NO: 211162 - RNA, 19 nt, Homo sapiens
  misc_RNA (1)...(19): siRNA sense strand
aagcacauuuggaagacaa

SEQ ID NO: 211163 - RNA, 19 nt, Homo sapiens
  misc_RNA (1)...(19): siRNA sense strand
gcuaauaauaagccagaga

SEQ ID NO: 211164 - RNA, 19 nt, Homo sapiens
  misc_RNA (1)...(19): siRNA sense strand
caagagcacaacaauuugg

SEQ ID NO: 211165 - RNA, 19 nt, Homo sapiens
  misc_RNA (1)...(19): siRNA sense strand
ccugucagcugcaugugau

SEQ ID NO: 211166 - RNA, 19 nt, Homo sapiens
  misc_RNA (1)...(19): siRNA sense strand
gcugcugaauguuuaugau

SEQ ID NO: 211167 - RNA, 19 nt, Homo sapiens
  misc_RNA (1)...(19): siRNA sense strand
acagagcucuaccagucuu

SEQ ID NO: 211168 - RNA, 19 nt, Homo sapiens
  misc_RNA (1)...(19): siRNA sense strand
acaguugggugaaguugca

SEQ ID NO: 211169 - RNA, 19 nt, Homo sapiens
  misc_RNA (1)...(19): siRNA sense strand
guuugaccacuauuuauga

SEQ ID NO: 211170 - RNA, 19 nt, Homo sapiens
  misc_RNA (1)...(19): siRNA sense strand
gcuuauaggacugccauga

SEQ ID NO: 211171 - RNA, 19 nt, Homo sapiens
  misc_RNA (1)...(19): siRNA sense strand
caucaggccaaauguaaca

SEQ ID NO: 211172 - RNA, 19 nt, Homo sapiens
  misc_RNA (1)...(19): siRNA sense strand
gauucuauccaaauuccaa

SEQ ID NO: 211173 - RNA, 19 nt, Homo sapiens
  misc_RNA (1)...(19): siRNA sense strand
ggcaaguucaacaggauuu

SEQ ID NO: 211174 - RNA, 19 nt, Homo sapiens
  misc_RNA (1)...(19): siRNA sense strand
gaacuggcugcugaauguu

SEQ ID NO: 211175 - RNA, 19 nt, Homo sapiens
  misc_RNA (1)...(19): siRNA sense strand
cugcugaauguuuaugaua

SEQ ID NO: 211176 - RNA, 19 nt, Homo sapiens
  misc_RNA (1)...(19): siRNA sense strand
aagcaucaggccaaaugua

SEQ ID NO: 211177 - RNA, 19 nt, Homo sapiens
  misc_RNA (1)...(19): siRNA sense strand
uggcaucauuucccugugu

SEQ ID NO: 211178 - RNA, 19 nt, Homo sapiens
  misc_RNA (1)...(19): siRNA sense strand
ccaugaaacuccgaagacu

SEQ ID NO: 211179 - RNA, 19 nt, Homo sapiens
  misc_RNA (1)...(19): siRNA sense strand
auaauaagccagagaucga

SEQ ID NO: 211180 - RNA, 19 nt, Homo sapiens
  misc_RNA (1)...(19): siRNA sense strand
cuaauaauaagccagagau

SEQ ID NO: 211181 - RNA, 19 nt, Homo sapiens
  misc_RNA (1)...(19): siRNA sense strand
ugggugaaguugcauccuu

SEQ ID NO: 211182 - RNA, 19 nt, Homo sapiens
  misc_RNA (1)...(19): siRNA sense strand
caucauuucccuguguaaa

SEQ ID NO: 211183 - RNA, 19 nt, Homo sapiens
  misc_RNA (1)...(19): siRNA sense strand
gcguggauaugugucugaa

SEQ ID NO: 211184 - RNA, 19 nt, Homo sapiens
  misc_RNA (1)...(19): siRNA sense strand
gcacuaucccaugguggaa

SEQ ID NO: 211185 - RNA, 19 nt, Homo sapiens
  misc_RNA (1)...(19): siRNA sense strand
gagccugucagcugcaugu

SEQ ID NO: 211186 - RNA, 19 nt, Homo sapiens
  misc_RNA (1)...(19): siRNA sense strand
guacagauaccuuuucaag

SEQ ID NO: 211187 - RNA, 19 nt, Homo sapiens
  misc_RNA (1)...(19): siRNA sense strand
gucccucucugcguggaua

SEQ ID NO: 211188 - RNA, 19 nt, Homo sapiens
  misc_RNA (1)...(19): siRNA sense strand
ggagcugcuuccaauuugc

SEQ ID NO: 211189 - RNA, 19 nt, Homo sapiens
  misc_RNA (1)...(19): siRNA sense strand
uuagcugaccugaauaaug

SEQ ID NO: 211190 - RNA, 19 nt, Homo sapiens
  misc_RNA (1)...(19): siRNA sense strand
guggcaaguucaacaggau

SEQ ID NO: 211191 - RNA, 19 nt, Homo sapiens
  misc_RNA (1)...(19): siRNA sense strand
acaacaauuuggucaacgu

SEQ ID NO: 211192 - RNA, 19 nt, Homo sapiens
  misc_RNA (1)...(19): siRNA sense strand
gacuacaucaggagaagau

SEQ ID NO: 211193 - RNA, 19 nt, Homo sapiens
  misc_RNA (1)...(19): siRNA sense strand
uaauaagccagagaucgaa

SEQ ID NO: 211194 - RNA, 19 nt, Homo sapiens
  misc_RNA (1)...(19): siRNA sense strand
ugucagauucucagcuuau

SEQ ID NO: 211195 - RNA, 19 nt, Homo sapiens
  misc_RNA (1)...(19): siRNA sense strand
ggauauccugcagauuauu

SEQ ID NO: 211196 - RNA, 19 nt, Homo sapiens
  misc_RNA (1)...(19): siRNA sense strand
agcaucaggccaaauguaa

SEQ ID NO: 211197 - RNA, 19 nt, Homo sapiens
  misc_RNA (1)...(19): siRNA sense strand
gcccuuugcuuggaucucu

SEQ ID NO: 211198 - RNA, 19 nt, Homo sapiens
  misc_RNA (1)...(19): siRNA sense strand
gcugaauguuuaugauacg

SEQ ID NO: 211199 - RNA, 19 nt, Homo sapiens
  misc_RNA (1)...(19): siRNA sense strand
agacuuugccaagguacua

SEQ ID NO: 211200 - RNA, 19 nt, Homo sapiens
  misc_RNA (1)...(19): siRNA sense strand
caagcaaguggcaaguuca

SEQ ID NO: 211201 - RNA, 19 nt, Homo sapiens
  misc_RNA (1)...(19): siRNA sense strand
agacaaguacagauaccuu

SEQ ID NO: 211202 - RNA, 19 nt, Homo sapiens
  misc_RNA (1)...(19): siRNA sense strand
gcaucauuucccuguguaa

SEQ ID NO: 211203 - RNA, 19 nt, Homo sapiens
  misc_RNA (1)...(19): siRNA sense strand
cugcaaagaguguccaauc

SEQ ID NO: 211204 - RNA, 19 nt, Homo sapiens
  misc_RNA (1)...(19): siRNA sense strand
cuuauaggacugccaugaa

SEQ ID NO: 211205 - RNA, 19 nt, Homo sapiens
  misc_RNA (1)...(19): siRNA sense strand
caaagaguguccaaucauu

SEQ ID NO: 211206 - RNA, 19 nt, Homo sapiens
  misc_RNA (1)...(19): siRNA sense strand
uagcugaccugaauaaugu

SEQ ID NO: 211207 - RNA, 19 nt, Homo sapiens
  misc_RNA (1)...(19): siRNA sense strand
gcaugauucuauccaaauu

SEQ ID NO: 211208 - RNA, 19 nt, Homo sapiens
  misc_RNA (1)...(19): siRNA sense strand
ugaacuggcugcugaaugu

SEQ ID NO: 211209 - RNA, 19 nt, Homo sapiens
  misc_RNA (1)...(19): siRNA sense strand
gauauccugcagauuauua

SEQ ID NO: 211210 - RNA, 19 nt, Homo sapiens
  misc_RNA (1)...(19): siRNA sense strand
gagaagauguucgagacuu

SEQ ID NO: 211211 - RNA, 19 nt, Homo sapiens
  misc_RNA (1)...(19): siRNA sense strand
gcacuuuaauuaugacauc

SEQ ID NO: 211212 - RNA, 19 nt, Homo sapiens
  misc_RNA (1)...(19): siRNA sense strand
guaaagcacauuuggaaga

SEQ ID NO: 211213 - RNA, 19 nt, Homo sapiens
  misc_RNA (1)...(19): siRNA sense strand
gaauauugcacuccgacua

SEQ ID NO: 211214 - RNA, 19 nt, Homo sapiens
  misc_RNA (1)...(19): siRNA sense strand
uuauaggacugccaugaaa

SEQ ID NO: 211215 - RNA, 19 nt, Homo sapiens
  misc_RNA (1)...(19): siRNA sense strand
gggugaaguugcauccuuu

SEQ ID NO: 211216 - RNA, 19 nt, Homo sapiens
  misc_RNA (1)...(19): siRNA sense strand
gcaagagcacaacaauuug

SEQ ID NO: 211217 - RNA, 19 nt, Homo sapiens
  misc_RNA (1)...(19): siRNA sense strand
gcacaacaauuuggucaac

SEQ ID NO: 211218 - RNA, 19 nt, Homo sapiens
  misc_RNA (1)...(19): siRNA sense strand
agcaagagcacaacaauuu

SEQ ID NO: 211219 - RNA, 19 nt, Homo sapiens
  misc_RNA (1)...(19): siRNA sense strand
agaagauguucgagacuuu

SEQ ID NO: 211220 - RNA, 19 nt, Homo sapiens
  misc_RNA (1)...(19): siRNA sense strand
gagcaagagcacaacaauu

SEQ ID NO: 211221 - RNA, 19 nt, Homo sapiens
  misc_RNA (1)...(19): siRNA sense strand
ucaagcaaguggcaaguuc

SEQ ID NO: 211222 - RNA, 19 nt, Homo sapiens
  misc_RNA (1)...(19): siRNA sense strand
ccacgagacucaaacaacu

SEQ ID NO: 211223 - RNA, 19 nt, Homo sapiens
  misc_RNA (1)...(19): siRNA sense strand
cagcacaaccucaagcaaa

SEQ ID NO: 211224 - RNA, 19 nt, Homo sapiens
  misc_RNA (1)...(19): siRNA sense strand
gcaaagaguguccaaucau

SEQ ID NO: 211225 - RNA, 19 nt, Homo sapiens
  misc_RNA (1)...(19): siRNA sense strand
auggauauccugcagauua

SEQ ID NO: 211226 - RNA, 19 nt, Homo sapiens
  misc_RNA (1)...(19): siRNA sense strand
uguaacaucugcaaagagu

SEQ ID NO: 211227 - RNA, 19 nt, Homo sapiens
  misc_RNA (1)...(19): siRNA sense strand
guccggagcugcuuccaau

SEQ ID NO: 211228 - RNA, 19 nt, Homo sapiens
  misc_RNA (1)...(19): siRNA sense strand
gcaaguggcaaguucaaca

SEQ ID NO: 211229 - RNA, 19 nt, Homo sapiens
  misc_RNA (1)...(19): siRNA sense strand
gcuuccaauuugcuaauaa

SEQ ID NO: 211230 - RNA, 19 nt, Homo sapiens
  misc_RNA (1)...(19): siRNA sense strand
uggaagacaaguacagaua

SEQ ID NO: 211231 - RNA, 19 nt, Homo sapiens
  misc_RNA (1)...(19): siRNA sense strand
ggauccguguccugucuuu

SEQ ID NO: 211232 - RNA, 19 nt, Homo sapiens
  misc_RNA (1)...(19): siRNA sense strand
gucuuuagcugaccugaau

SEQ ID NO: 211233 - RNA, 19 nt, Homo sapiens
  misc_RNA (1)...(19): siRNA sense strand
gacaaguacagauaccuuu

SEQ ID NO: 211234 - RNA, 19 nt, Homo sapiens
  misc_RNA (1)...(19): siRNA sense strand
ccaagcaucaggccaaaug

SEQ ID NO: 211235 - RNA, 19 nt, Homo sapiens
  misc_RNA (1)...(19): siRNA sense strand
ggagcaagagcacaacaau

SEQ ID NO: 211236 - RNA, 19 nt, Homo sapiens
  misc_RNA (1)...(19): siRNA sense strand
guguaaagcacauuuggaa

SEQ ID NO: 211237 - RNA, 19 nt, Homo sapiens
  misc_RNA (1)...(19): siRNA sense strand
caagacaguugggugaagu

SEQ ID NO: 211238 - RNA, 19 nt, Homo sapiens
  misc_RNA (1)...(19): siRNA sense strand
gaagauguucgagacuuug

SEQ ID NO: 211239 - RNA, 19 nt, Homo sapiens
  misc_RNA (1)...(19): siRNA sense strand
gucagauucucagcuuaua

SEQ ID NO: 211240 - RNA, 19 nt, Homo sapiens
  misc_RNA (1)...(19): siRNA sense strand
uaacaucugcaaagagugu

SEQ ID NO: 211241 - RNA, 19 nt, Homo sapiens
  misc_RNA (1)...(19): siRNA sense strand
cggagcugcuuccaauuug

SEQ ID NO: 211242 - RNA, 19 nt, Homo sapiens
  misc_RNA (1)...(19): siRNA sense strand
gaagacaaguacagauacc

SEQ ID NO: 211243 - RNA, 19 nt, Homo sapiens
  misc_RNA (1)...(19): siRNA sense strand
ccauggauauccugcagau

SEQ ID NO: 211244 - RNA, 19 nt, Homo sapiens
  misc_RNA (1)...(19): siRNA sense strand
ggcaucauuucccugugua

SEQ ID NO: 211245 - RNA, 19 nt, Homo sapiens
  misc_RNA (1)...(19): siRNA sense strand
uggauauccugcagauuau

SEQ ID NO: 211246 - RNA, 19 nt, Homo sapiens
  misc_RNA (1)...(19): siRNA sense strand
ggaagacaaguacagauac

SEQ ID NO: 211247 - RNA, 19 nt, Homo sapiens
  misc_RNA (1)...(19): siRNA sense strand
ugcaaagaguguccaauca

SEQ ID NO: 211248 - RNA, 19 nt, Homo sapiens
  misc_RNA (1)...(19): siRNA sense strand
guggauaugugucugaacu

SEQ ID NO: 211249 - RNA, 19 nt, Homo sapiens
  misc_RNA (1)...(19): siRNA sense strand
acuggcugcugaauguuua

SEQ ID NO: 211250 - RNA, 19 nt, Homo sapiens
  misc_RNA (1)...(19): siRNA sense strand
acuaucccaugguggaaua

SEQ ID NO: 211251 - RNA, 19 nt, Homo sapiens
  misc_RNA (1)...(19): siRNA sense strand
ccggagcugcuuccaauuu

SEQ ID NO: 211252 - RNA, 19 nt, Homo sapiens
  misc_RNA (1)...(19): siRNA sense strand
ccaaauuccaagacaguug

SEQ ID NO: 211253 - RNA, 19 nt, Homo sapiens
  misc_RNA (1)...(19): siRNA sense strand
cagaaacugccaagcauca

SEQ ID NO: 211254 - RNA, 19 nt, Homo sapiens
  misc_RNA (1)...(19): siRNA sense strand
uaugacaucugccaaagcu

SEQ ID NO: 211255 - RNA, 19 nt, Homo sapiens
  misc_RNA (1)...(19): siRNA sense strand
aaugucagauucucagcuu

SEQ ID NO: 211256 - RNA, 19 nt, Homo sapiens
  misc_RNA (1)...(19): siRNA sense strand
ucgagacuuugccaaggua

SEQ ID NO: 211257 - RNA, 19 nt, Homo sapiens
  misc_RNA (1)...(19): siRNA sense strand
gcaaaaggccauaaaaugc

SEQ ID NO: 211258 - RNA, 19 nt, Homo sapiens
  misc_RNA (1)...(19): siRNA sense strand
cugcaugauucuauccaaa

SEQ ID NO: 211259 - RNA, 19 nt, Homo sapiens
  misc_RNA (1)...(19): siRNA sense strand
uaaagcacauuuggaagac

SEQ ID NO: 211260 - RNA, 19 nt, Homo sapiens
  misc_RNA (1)...(19): siRNA sense strand
acaggagucuaaagcacuu

SEQ ID NO: 211261 - RNA, 19 nt, Homo sapiens
  misc_RNA (1)...(19): siRNA sense strand
acagauaccuuuucaagca

SEQ ID NO: 211262 - RNA, 19 nt, Homo sapiens
  misc_RNA (1)...(19): siRNA sense strand
aagcacauuuggaagacaa

SEQ ID NO: 211263 - RNA, 19 nt, Homo sapiens
  misc_RNA (1)...(19): siRNA sense strand
gcuaauaauaagccagaga

SEQ ID NO: 211264 - RNA, 19 nt, Homo sapiens
  misc_RNA (1)...(19): siRNA sense strand
caagagcacaacaauuugg

SEQ ID NO: 211265 - RNA, 19 nt, Homo sapiens
  misc_RNA (1)...(19): siRNA sense strand
ccugucagcugcaugugau

SEQ ID NO: 211266 - RNA, 19 nt, Homo sapiens
  misc_RNA (1)...(19): siRNA sense strand
gcugcugaauguuuaugau

SEQ ID NO: 211267 - RNA, 19 nt, Homo sapiens
  misc_RNA (1)...(19): siRNA sense strand
acagagcucuaccagucuu

SEQ ID NO: 211268 - RNA, 19 nt, Homo sapiens
  misc_RNA (1)...(19): siRNA sense strand
acaguugggugaaguugca

SEQ ID NO: 211269 - RNA, 19 nt, Homo sapiens
  misc_RNA (1)...(19): siRNA sense strand
guuugaccacuauuuauga

SEQ ID NO: 211270 - RNA, 19 nt, Homo sapiens
  misc_RNA (1)...(19): siRNA sense strand
gcuuauaggacugccauga

SEQ ID NO: 211271 - RNA, 19 nt, Homo sapiens
  misc_RNA (1)...(19): siRNA sense strand
caucaggccaaauguaaca

SEQ ID NO: 211272 - RNA, 19 nt, Homo sapiens
  misc_RNA (1)...(19): siRNA sense strand
gauucuauccaaauuccaa

SEQ ID NO: 211273 - RNA, 19 nt, Homo sapiens
  misc_RNA (1)...(19): siRNA sense strand
ggcaaguucaacaggauuu

SEQ ID NO: 211274 - RNA, 19 nt, Homo sapiens
  misc_RNA (1)...(19): siRNA sense strand
gaacuggcugcugaauguu

SEQ ID NO: 211275 - RNA, 19 nt, Homo sapiens
  misc_RNA (1)...(19): siRNA sense strand
cugcugaauguuuaugaua

SEQ ID NO: 211276 - RNA, 19 nt, Homo sapiens
  misc_RNA (1)...(19): siRNA sense strand
aagcaucaggccaaaugua

SEQ ID NO: 211277 - RNA, 19 nt, Homo sapiens
  misc_RNA (1)...(19): siRNA sense strand
uggcaucauuucccugugu

SEQ ID NO: 211278 - RNA, 19 nt, Homo sapiens
  misc_RNA (1)...(19): siRNA sense strand
ccaugaaacuccgaagacu

SEQ ID NO: 211279 - RNA, 19 nt, Homo sapiens
  misc_RNA (1)...(19): siRNA sense strand
auaauaagccagagaucga

SEQ ID NO: 211280 - RNA, 19 nt, Homo sapiens
  misc_RNA (1)...(19): siRNA sense strand
cuaauaauaagccagagau

SEQ ID NO: 211281 - RNA, 19 nt, Homo sapiens
  misc_RNA (1)...(19): siRNA sense strand
ugggugaaguugcauccuu

SEQ ID NO: 211282 - RNA, 19 nt, Homo sapiens
  misc_RNA (1)...(19): siRNA sense strand
caucauuucccuguguaaa

SEQ ID NO: 211283 - RNA, 19 nt, Homo sapiens
  misc_RNA (1)...(19): siRNA sense strand
gcguggauaugugucugaa

SEQ ID NO: 211284 - RNA, 19 nt, Homo sapiens
  misc_RNA (1)...(19): siRNA sense strand
gcacuaucccaugguggaa

SEQ ID NO: 211285 - RNA, 19 nt, Homo sapiens
  misc_RNA (1)...(19): siRNA sense strand
gagccugucagcugcaugu

SEQ ID NO: 211286 - RNA, 19 nt, Homo sapiens
  misc_RNA (1)...(19): siRNA sense strand
guacagauaccuuuucaag

SEQ ID NO: 211287 - RNA, 19 nt, Homo sapiens
  misc_RNA (1)...(19): siRNA sense strand
gucccucucugcguggaua

SEQ ID NO: 211288 - RNA, 19 nt, Homo sapiens
  misc_RNA (1)...(19): siRNA sense strand
ggagcugcuuccaauuugc

SEQ ID NO: 211289 - RNA, 19 nt, Homo sapiens
  misc_RNA (1)...(19): siRNA sense strand
uuagcugaccugaauaaug

SEQ ID NO: 211290 - RNA, 19 nt, Homo sapiens
  misc_RNA (1)...(19): siRNA sense strand
guggcaaguucaacaggau

SEQ ID NO: 211291 - RNA, 19 nt, Homo sapiens
  misc_RNA (1)...(19): siRNA sense strand
acaacaauuuggucaacgu

SEQ ID NO: 211292 - RNA, 19 nt, Homo sapiens
  misc_RNA (1)...(19): siRNA sense strand
gacuacaucaggagaagau

SEQ ID NO: 211293 - RNA, 19 nt, Homo sapiens
  misc_RNA (1)...(19): siRNA sense strand
uaauaagccagagaucgaa

SEQ ID NO: 211294 - RNA, 19 nt, Homo sapiens
  misc_RNA (1)...(19): siRNA sense strand
ugucagauucucagcuuau

SEQ ID NO: 211295 - RNA, 19 nt, Homo sapiens
  misc_RNA (1)...(19): siRNA sense strand
ggauauccugcagauuauu

SEQ ID NO: 211296 - RNA, 19 nt, Homo sapiens
  misc_RNA (1)...(19): siRNA sense strand
agcaucaggccaaauguaa

SEQ ID NO: 211297 - RNA, 19 nt, Homo sapiens
  misc_RNA (1)...(19): siRNA sense strand
gcccuuugcuuggaucucu

SEQ ID NO: 211298 - RNA, 19 nt, Homo sapiens
  misc_RNA (1)...(19): siRNA sense strand
gcugaauguuuaugauacg

SEQ ID NO: 211299 - RNA, 19 nt, Homo sapiens
  misc_RNA (1)...(19): siRNA sense strand
agacuuugccaagguacua

SEQ ID NO: 211300 - RNA, 19 nt, Homo sapiens
  misc_RNA (1)...(19): siRNA sense strand
caagcaaguggcaaguuca

SEQ ID NO: 211301 - RNA, 19 nt, Homo sapiens
  misc_RNA (1)...(19): siRNA sense strand
agacaaguacagauaccuu

SEQ ID NO: 211302 - RNA, 19 nt, Homo sapiens
  misc_RNA (1)...(19): siRNA sense strand
gcaucauuucccuguguaa

SEQ ID NO: 211303 - RNA, 19 nt, Homo sapiens
  misc_RNA (1)...(19): siRNA sense strand
cugcaaagaguguccaauc

SEQ ID NO: 211304 - RNA, 19 nt, Homo sapiens
  misc_RNA (1)...(19): siRNA sense strand
cuuauaggacugccaugaa

SEQ ID NO: 211305 - RNA, 19 nt, Homo sapiens
  misc_RNA (1)...(19): siRNA sense strand
caaagaguguccaaucauu

SEQ ID NO: 211306 - RNA, 19 nt, Homo sapiens
  misc_RNA (1)...(19): siRNA sense strand
uagcugaccugaauaaugu

SEQ ID NO: 211307 - RNA, 19 nt, Homo sapiens
  misc_RNA (1)...(19): siRNA sense strand
gcaugauucuauccaaauu

SEQ ID NO: 211308 - RNA, 19 nt, Homo sapiens
  misc_RNA (1)...(19): siRNA sense strand
ugaacuggcugcugaaugu

SEQ ID NO: 211309 - RNA, 19 nt, Homo sapiens
  misc_RNA (1)...(19): siRNA sense strand
gauauccugcagauuauua

SEQ ID NO: 211310 - RNA, 19 nt, Homo sapiens
  misc_RNA (1)...(19): siRNA sense strand
gagaagauguucgagacuu

SEQ ID NO: 211311 - RNA, 19 nt, Homo sapiens
  misc_RNA (1)...(19): siRNA sense strand
gcacuuuaauuaugacauc

SEQ ID NO: 211312 - RNA, 19 nt, Homo sapiens
  misc_RNA (1)...(19): siRNA sense strand
guaaagcacauuuggaaga

SEQ ID NO: 211313 - RNA, 19 nt, Homo sapiens
  misc_RNA (1)...(19): siRNA sense strand
gaauauugcacuccgacua

SEQ ID NO: 211314 - RNA, 19 nt, Homo sapiens
  misc_RNA (1)...(19): siRNA sense strand
uuauaggacugccaugaaa

SEQ ID NO: 211315 - RNA, 19 nt, Homo sapiens
  misc_RNA (1)...(19): siRNA sense strand
gggugaaguugcauccuuu

SEQ ID NO: 211316 - RNA, 19 nt, Homo sapiens
  misc_RNA (1)...(19): siRNA sense strand
gcaagagcacaacaauuug

SEQ ID NO: 211317 - RNA, 19 nt, Homo sapiens
  misc_RNA (1)...(19): siRNA sense strand
gcacaacaauuuggucaac

SEQ ID NO: 211318 - RNA, 19 nt, Homo sapiens
  misc_RNA (1)...(19): siRNA sense strand
agcaagagcacaacaauuu

SEQ ID NO: 211319 - RNA, 19 nt, Homo sapiens
  misc_RNA (1)...(19): siRNA sense strand
agaagauguucgagacuuu

SEQ ID NO: 211320 - RNA, 19 nt, Homo sapiens
  misc_RNA (1)...(19): siRNA sense strand
gagcaagagcacaacaauu

SEQ ID NO: 211321 - RNA, 19 nt, Homo sapiens
  misc_RNA (1)...(19): siRNA sense strand
ucaagcaaguggcaaguuc

SEQ ID NO: 211322 - RNA, 19 nt, Homo sapiens
  misc_RNA (1)...(19): siRNA sense strand
ccacgagacucaaacaacu

SEQ ID NO: 211323 - RNA, 19 nt, Homo sapiens
  misc_RNA (1)...(19): siRNA sense strand
cagcacaaccucaagcaaa

SEQ ID NO: 211324 - RNA, 19 nt, Homo sapiens
  misc_RNA (1)...(19): siRNA sense strand
gcaaagaguguccaaucau

SEQ ID NO: 211325 - RNA, 19 nt, Homo sapiens
  misc_RNA (1)...(19): siRNA sense strand
auggauauccugcagauua

SEQ ID NO: 211326 - RNA, 19 nt, Homo sapiens
  misc_RNA (1)...(19): siRNA sense strand
uguaacaucugcaaagagu

SEQ ID NO: 211327 - RNA, 19 nt, Homo sapiens
  misc_RNA (1)...(19): siRNA sense strand
guccggagcugcuuccaau

SEQ ID NO: 211328 - RNA, 19 nt, Homo sapiens
  misc_RNA (1)...(19): siRNA sense strand
gcaaguggcaaguucaaca

SEQ ID NO: 211329 - RNA, 19 nt, Homo sapiens
  misc_RNA (1)...(19): siRNA sense strand
gcuuccaauuugcuaauaa

SEQ ID NO: 211330 - RNA, 19 nt, Homo sapiens
  misc_RNA (1)...(19): siRNA sense strand
uggaagacaaguacagaua

SEQ ID NO: 211331 - RNA, 19 nt, Homo sapiens
  misc_RNA (1)...(19): siRNA sense strand
ggauccguguccugucuuu

SEQ ID NO: 211332 - RNA, 19 nt, Homo sapiens
  misc_RNA (1)...(19): siRNA sense strand
gucuuuagcugaccugaau

SEQ ID NO: 211333 - RNA, 19 nt, Homo sapiens
  misc_RNA (1)...(19): siRNA sense strand
gacaaguacagauaccuuu

SEQ ID NO: 211334 - RNA, 19 nt, Homo sapiens
  misc_RNA (1)...(19): siRNA sense strand
ccaagcaucaggccaaaug

SEQ ID NO: 211335 - RNA, 19 nt, Homo sapiens
  misc_RNA (1)...(19): siRNA sense strand
ggagcaagagcacaacaau

SEQ ID NO: 211336 - RNA, 19 nt, Homo sapiens
  misc_RNA (1)...(19): siRNA sense strand
guguaaagcacauuuggaa

SEQ ID NO: 211337 - RNA, 19 nt, Homo sapiens
  misc_RNA (1)...(19): siRNA sense strand
caagacaguugggugaagu

SEQ ID NO: 211338 - RNA, 19 nt, Homo sapiens
  misc_RNA (1)...(19): siRNA sense strand
gaagauguucgagacuuug

SEQ ID NO: 211339 - RNA, 19 nt, Homo sapiens
  misc_RNA (1)...(19): siRNA sense strand
gucagauucucagcuuaua

SEQ ID NO: 211340 - RNA, 19 nt, Homo sapiens
  misc_RNA (1)...(19): siRNA sense strand
uaacaucugcaaagagugu

SEQ ID NO: 211341 - RNA, 19 nt, Homo sapiens
  misc_RNA (1)...(19): siRNA sense strand
cggagcugcuuccaauuug

SEQ ID NO: 211342 - RNA, 19 nt, Homo sapiens
  misc_RNA (1)...(19): siRNA sense strand
gaagacaaguacagauacc

SEQ ID NO: 211343 - RNA, 19 nt, Homo sapiens
  misc_RNA (1)...(19): siRNA sense strand
ccauggauauccugcagau

SEQ ID NO: 211344 - RNA, 19 nt, Homo sapiens
  misc_RNA (1)...(19): siRNA sense strand
ggcaucauuucccugugua

SEQ ID NO: 211345 - RNA, 19 nt, Homo sapiens
  misc_RNA (1)...(19): siRNA sense strand
uggauauccugcagauuau

SEQ ID NO: 211346 - RNA, 19 nt, Homo sapiens
  misc_RNA (1)...(19): siRNA sense strand
ggaagacaaguacagauac

SEQ ID NO: 211347 - RNA, 19 nt, Homo sapiens
  misc_RNA (1)...(19): siRNA sense strand
ugcaaagaguguccaauca

SEQ ID NO: 211348 - RNA, 19 nt, Homo sapiens
  misc_RNA (1)...(19): siRNA sense strand
guggauaugugucugaacu

SEQ ID NO: 211349 - RNA, 19 nt, Homo sapiens
  misc_RNA (1)...(19): siRNA sense strand
acuggcugcugaauguuua

SEQ ID NO: 211350 - RNA, 19 nt, Homo sapiens
  misc_RNA (1)...(19): siRNA sense strand
acuaucccaugguggaaua

SEQ ID NO: 211351 - RNA, 19 nt, Homo sapiens
  misc_RNA (1)...(19): siRNA sense strand
ccggagcugcuuccaauuu

SEQ ID NO: 211352 - RNA, 19 nt, Homo sapiens
  misc_RNA (1)...(19): siRNA sense strand
ccaaauuccaagacaguug

SEQ ID NO: 211353 - RNA, 19 nt, Homo sapiens
  misc_RNA (1)...(19): siRNA sense strand
cagaaacugccaagcauca

SEQ ID NO: 211354 - RNA, 19 nt, Homo sapiens
  misc_RNA (1)...(19): siRNA sense strand
uaugacaucugccaaagcu

SEQ ID NO: 211355 - RNA, 19 nt, Homo sapiens
  misc_RNA (1)...(19): siRNA sense strand
aaugucagauucucagcuu

SEQ ID NO: 211356 - RNA, 19 nt, Homo sapiens
  misc_RNA (1)...(19): siRNA sense strand
ucgagacuuugccaaggua

SEQ ID NO: 211357 - RNA, 19 nt, Homo sapiens
  misc_RNA (1)...(19): siRNA sense strand
gcaaaaggccauaaaaugc

SEQ ID NO: 211358 - RNA, 19 nt, Homo sapiens
  misc_RNA (1)...(19): siRNA sense strand
cugcaugauucuauccaaa

SEQ ID NO: 211359 - RNA, 19 nt, Homo sapiens
  misc_RNA (1)...(19): siRNA sense strand
uaaagcacauuuggaagac

SEQ ID NO: 211360 - RNA, 19 nt, Homo sapiens
  misc_RNA (1)...(19): siRNA sense strand
acaggagucuaaagcacuu

SEQ ID NO: 211361 - RNA, 19 nt, Homo sapiens
  misc_RNA (1)...(19): siRNA sense strand
acagauaccuuuucaagca

SEQ ID NO: 211362 - RNA, 19 nt, Homo sapiens
  misc_RNA (1)...(19): siRNA sense strand
aagcacauuuggaagacaa

SEQ ID NO: 211363 - RNA, 19 nt, Homo sapiens
  misc_RNA (1)...(19): siRNA sense strand
gcuaauaauaagccagaga

SEQ ID NO: 211364 - RNA, 19 nt, Homo sapiens
  misc_RNA (1)...(19): siRNA sense strand
caagagcacaacaauuugg

SEQ ID NO: 211365 - RNA, 19 nt, Homo sapiens
  misc_RNA (1)...(19): siRNA sense strand
ccugucagcugcaugugau

SEQ ID NO: 211366 - RNA, 19 nt, Homo sapiens
  misc_RNA (1)...(19): siRNA sense strand
gcugcugaauguuuaugau

SEQ ID NO: 211367 - RNA, 19 nt, Homo sapiens
  misc_RNA (1)...(19): siRNA sense strand
acagagcucuaccagucuu

SEQ ID NO: 211368 - RNA, 19 nt, Homo sapiens
  misc_RNA (1)...(19): siRNA sense strand
acaguugggugaaguugca

SEQ ID NO: 211369 - RNA, 19 nt, Homo sapiens
  misc_RNA (1)...(19): siRNA sense strand
guuugaccacuauuuauga

SEQ ID NO: 211370 - RNA, 19 nt, Homo sapiens
  misc_RNA (1)...(19): siRNA sense strand
gcuuauaggacugccauga

SEQ ID NO: 211371 - RNA, 19 nt, Homo sapiens
  misc_RNA (1)...(19): siRNA sense strand
caucaggccaaauguaaca

SEQ ID NO: 211372 - RNA, 19 nt, Homo sapiens
  misc_RNA (1)...(19): siRNA sense strand
gauucuauccaaauuccaa

SEQ ID NO: 211373 - RNA, 19 nt, Homo sapiens
  misc_RNA (1)...(19): siRNA sense strand
ggcaaguucaacaggauuu

SEQ ID NO: 211374 - RNA, 19 nt, Homo sapiens
  misc_RNA (1)...(19): siRNA sense strand
gaacuggcugcugaauguu

SEQ ID NO: 211375 - RNA, 19 nt, Homo sapiens
  misc_RNA (1)...(19): siRNA sense strand
cugcugaauguuuaugaua

SEQ ID NO: 211376 - RNA, 19 nt, Homo sapiens
  misc_RNA (1)...(19): siRNA sense strand
aagcaucaggccaaaugua

SEQ ID NO: 211377 - RNA, 19 nt, Homo sapiens
  misc_RNA (1)...(19): siRNA sense strand
uggcaucauuucccugugu

SEQ ID NO: 211378 - RNA, 19 nt, Homo sapiens
  misc_RNA (1)...(19): siRNA sense strand
ccaugaaacuccgaagacu

SEQ ID NO: 211379 - RNA, 19 nt, Homo sapiens
  misc_RNA (1)...(19): siRNA sense strand
auaauaagccagagaucga

SEQ ID NO: 211380 - RNA, 19 nt, Homo sapiens
  misc_RNA (1)...(19): siRNA sense strand
cuaauaauaagccagagau

SEQ ID NO: 211381 - RNA, 19 nt, Homo sapiens
  misc_RNA (1)...(19): siRNA sense strand
ugggugaaguugcauccuu

SEQ ID NO: 211382 - RNA, 19 nt, Homo sapiens
  misc_RNA (1)...(19): siRNA sense strand
caucauuucccuguguaaa

SEQ ID NO: 211383 - RNA, 19 nt, Homo sapiens
  misc_RNA (1)...(19): siRNA sense strand
gcguggauaugugucugaa

SEQ ID NO: 211384 - RNA, 19 nt, Homo sapiens
  misc_RNA (1)...(19): siRNA sense strand
gcacuaucccaugguggaa

SEQ ID NO: 211385 - RNA, 19 nt, Homo sapiens
  misc_RNA (1)...(19): siRNA sense strand
gagccugucagcugcaugu

SEQ ID NO: 211386 - RNA, 19 nt, Homo sapiens
  misc_RNA (1)...(19): siRNA sense strand
guacagauaccuuuucaag

SEQ ID NO: 211387 - RNA, 19 nt, Homo sapiens
  misc_RNA (1)...(19): siRNA sense strand
gucccucucugcguggaua

SEQ ID NO: 211388 - RNA, 19 nt, Homo sapiens
  misc_RNA (1)...(19): siRNA sense strand
ggagcugcuuccaauuugc

SEQ ID NO: 211389 - RNA, 19 nt, Homo sapiens
  misc_RNA (1)...(19): siRNA sense strand
uuagcugaccugaauaaug

SEQ ID NO: 211390 - RNA, 19 nt, Homo sapiens
  misc_RNA (1)...(19): siRNA sense strand
guggcaaguucaacaggau

SEQ ID NO: 211391 - RNA, 19 nt, Homo sapiens
  misc_RNA (1)...(19): siRNA sense strand
acaacaauuuggucaacgu

SEQ ID NO: 211392 - RNA, 19 nt, Homo sapiens
  misc_RNA (1)...(19): siRNA sense strand
gacuacaucaggagaagau

SEQ ID NO: 211393 - RNA, 19 nt, Homo sapiens
  misc_RNA (1)...(19): siRNA sense strand
uaauaagccagagaucgaa

SEQ ID NO: 211394 - RNA, 19 nt, Homo sapiens
  misc_RNA (1)...(19): siRNA sense strand
ugucagauucucagcuuau

SEQ ID NO: 211395 - RNA, 19 nt, Homo sapiens
  misc_RNA (1)...(19): siRNA sense strand
ggauauccugcagauuauu

SEQ ID NO: 211396 - RNA, 19 nt, Homo sapiens
  misc_RNA (1)...(19): siRNA sense strand
agcaucaggccaaauguaa

SEQ ID NO: 211397 - RNA, 19 nt, Homo sapiens
  misc_RNA (1)...(19): siRNA sense strand
gcccuuugcuuggaucucu

SEQ ID NO: 211398 - RNA, 19 nt, Homo sapiens
  misc_RNA (1)...(19): siRNA sense strand
gcugaauguuuaugauacg

SEQ ID NO: 211399 - RNA, 19 nt, Homo sapiens
  misc_RNA (1)...(19): siRNA sense strand
agacuuugccaagguacua

SEQ ID NO: 211400 - RNA, 19 nt, Homo sapiens
  misc_RNA (1)...(19): siRNA sense strand
caagcaaguggcaaguuca

SEQ ID NO: 211401 - RNA, 19 nt, Homo sapiens
  misc_RNA (1)...(19): siRNA sense strand
agacaaguacagauaccuu

SEQ ID NO: 211402 - RNA, 19 nt, Homo sapiens
  misc_RNA (1)...(19): siRNA sense strand
gcaucauuucccuguguaa

SEQ ID NO: 211403 - RNA, 19 nt, Homo sapiens
  misc_RNA (1)...(19): siRNA sense strand
cugcaaagaguguccaauc

SEQ ID NO: 211404 - RNA, 19 nt, Homo sapiens
  misc_RNA (1)...(19): siRNA sense strand
cuuauaggacugccaugaa

SEQ ID NO: 211405 - RNA, 19 nt, Homo sapiens
  misc_RNA (1)...(19): siRNA sense strand
caaagaguguccaaucauu

SEQ ID NO: 211406 - RNA, 19 nt, Homo sapiens
  misc_RNA (1)...(19): siRNA sense strand
uagcugaccugaauaaugu

SEQ ID NO: 211407 - RNA, 19 nt, Homo sapiens
  misc_RNA (1)...(19): siRNA sense strand
gcaugauucuauccaaauu

SEQ ID NO: 211408 - RNA, 19 nt, Homo sapiens
  misc_RNA (1)...(19): siRNA sense strand
ugaacuggcugcugaaugu

SEQ ID NO: 211409 - RNA, 19 nt, Homo sapiens
  misc_RNA (1)...(19): siRNA sense strand
gauauccugcagauuauua

SEQ ID NO: 211410 - RNA, 19 nt, Homo sapiens
  misc_RNA (1)...(19): siRNA sense strand
gagaagauguucgagacuu

SEQ ID NO: 211411 - RNA, 19 nt, Homo sapiens
  misc_RNA (1)...(19): siRNA sense strand
gcacuuuaauuaugacauc

SEQ ID NO: 211412 - RNA, 19 nt, Homo sapiens
  misc_RNA (1)...(19): siRNA sense strand
guaaagcacauuuggaaga

SEQ ID NO: 211413 - RNA, 19 nt, Homo sapiens
  misc_RNA (1)...(19): siRNA sense strand
gaauauugcacuccgacua

SEQ ID NO: 211414 - RNA, 19 nt, Homo sapiens
  misc_RNA (1)...(19): siRNA sense strand
uuauaggacugccaugaaa

SEQ ID NO: 211415 - RNA, 19 nt, Homo sapiens
  misc_RNA (1)...(19): siRNA sense strand
gggugaaguugcauccuuu

SEQ ID NO: 211416 - RNA, 19 nt, Homo sapiens
  misc_RNA (1)...(19): siRNA sense strand
gcaagagcacaacaauuug

SEQ ID NO: 211417 - RNA, 19 nt, Homo sapiens
  misc_RNA (1)...(19): siRNA sense strand
gcacaacaauuuggucaac

SEQ ID NO: 211418 - RNA, 19 nt, Homo sapiens
  misc_RNA (1)...(19): siRNA sense strand
agcaagagcacaacaauuu

SEQ ID NO: 211419 - RNA, 19 nt, Homo sapiens
  misc_RNA (1)...(19): siRNA sense strand
agaagauguucgagacuuu

SEQ ID NO: 211420 - RNA, 19 nt, Homo sapiens
  misc_RNA (1)...(19): siRNA sense strand
gagcaagagcacaacaauu

SEQ ID NO: 211421 - RNA, 19 nt, Homo sapiens
  misc_RNA (1)...(19): siRNA sense strand
ucaagcaaguggcaaguuc

SEQ ID NO: 211422 - RNA, 19 nt, Homo sapiens
  misc_RNA (1)...(19): siRNA sense strand
ccacgagacucaaacaacu

SEQ ID NO: 211423 - RNA, 19 nt, Homo sapiens
  misc_RNA (1)...(19): siRNA sense strand
cagcacaaccucaagcaaa

SEQ ID NO: 211424 - RNA, 19 nt, Homo sapiens
  misc_RNA (1)...(19): siRNA sense strand
gcaaagaguguccaaucau

SEQ ID NO: 211425 - RNA, 19 nt, Homo sapiens
  misc_RNA (1)...(19): siRNA sense strand
auggauauccugcagauua

SEQ ID NO: 211426 - RNA, 19 nt, Homo sapiens
  misc_RNA (1)...(19): siRNA sense strand
uguaacaucugcaaagagu

SEQ ID NO: 211427 - RNA, 19 nt, Homo sapiens
  misc_RNA (1)...(19): siRNA sense strand
guccggagcugcuuccaau

SEQ ID NO: 211428 - RNA, 19 nt, Homo sapiens
  misc_RNA (1)...(19): siRNA sense strand
gcaaguggcaaguucaaca

SEQ ID NO: 211429 - RNA, 19 nt, Homo sapiens
  misc_RNA (1)...(19): siRNA sense strand
gcuuccaauuugcuaauaa

SEQ ID NO: 211430 - RNA, 19 nt, Homo sapiens
  misc_RNA (1)...(19): siRNA sense strand
uggaagacaaguacagaua

SEQ ID NO: 211431 - RNA, 19 nt, Homo sapiens
  misc_RNA (1)...(19): siRNA sense strand
ggauccguguccugucuuu

SEQ ID NO: 211432 - RNA, 19 nt, Homo sapiens
  misc_RNA (1)...(19): siRNA sense strand
gucuuuagcugaccugaau

SEQ ID NO: 211433 - RNA, 19 nt, Homo sapiens
  misc_RNA (1)...(19): siRNA sense strand
gacaaguacagauaccuuu

SEQ ID NO: 211434 - RNA, 19 nt, Homo sapiens
  misc_RNA (1)...(19): siRNA sense strand
ccaagcaucaggccaaaug

SEQ ID NO: 211435 - RNA, 19 nt, Homo sapiens
  misc_RNA (1)...(19): siRNA sense strand
ggagcaagagcacaacaau

SEQ ID NO: 211436 - RNA, 19 nt, Homo sapiens
  misc_RNA (1)...(19): siRNA sense strand
guguaaagcacauuuggaa

SEQ ID NO: 211437 - RNA, 19 nt, Homo sapiens
  misc_RNA (1)...(19): siRNA sense strand
caagacaguugggugaagu

SEQ ID NO: 211438 - RNA, 19 nt, Homo sapiens
  misc_RNA (1)...(19): siRNA sense strand
gaagauguucgagacuuug

SEQ ID NO: 211439 - RNA, 19 nt, Homo sapiens
  misc_RNA (1)...(19): siRNA sense strand
gucagauucucagcuuaua

SEQ ID NO: 211440 - RNA, 19 nt, Homo sapiens
  misc_RNA (1)...(19): siRNA sense strand
uaacaucugcaaagagugu

SEQ ID NO: 211441 - RNA, 19 nt, Homo sapiens
  misc_RNA (1)...(19): siRNA sense strand
cggagcugcuuccaauuug

SEQ ID NO: 211442 - RNA, 19 nt, Homo sapiens
  misc_RNA (1)...(19): siRNA sense strand
gaagacaaguacagauacc

SEQ ID NO: 211443 - RNA, 19 nt, Homo sapiens
  misc_RNA (1)...(19): siRNA sense strand
ccauggauauccugcagau

SEQ ID NO: 211444 - RNA, 19 nt, Homo sapiens
  misc_RNA (1)...(19): siRNA sense strand
ggcaucauuucccugugua

SEQ ID NO: 211445 - RNA, 19 nt, Homo sapiens
  misc_RNA (1)...(19): siRNA sense strand
uggauauccugcagauuau

SEQ ID NO: 211446 - RNA, 19 nt, Homo sapiens
  misc_RNA (1)...(19): siRNA sense strand
ggaagacaaguacagauac

SEQ ID NO: 211447 - RNA, 19 nt, Homo sapiens
  misc_RNA (1)...(19): siRNA sense strand
ugcaaagaguguccaauca

SEQ ID NO: 211448 - RNA, 19 nt, Homo sapiens
  misc_RNA (1)...(19): siRNA sense strand
guggauaugugucugaacu

SEQ ID NO: 211449 - RNA, 19 nt, Homo sapiens
  misc_RNA (1)...(19): siRNA sense strand
acuggcugcugaauguuua

SEQ ID NO: 211450 - RNA, 19 nt, Homo sapiens
  misc_RNA (1)...(19): siRNA sense strand
acuaucccaugguggaaua

SEQ ID NO: 211451 - RNA, 19 nt, Homo sapiens
  misc_RNA (1)...(19): siRNA sense strand
ccggagcugcuuccaauuu

SEQ ID NO: 211452 - RNA, 19 nt, Homo sapiens
  misc_RNA (1)...(19): siRNA sense strand
ccaaauuccaagacaguug

SEQ ID NO: 211453 - RNA, 19 nt, Homo sapiens
  misc_RNA (1)...(19): siRNA sense strand
cagaaacugccaagcauca

SEQ ID NO: 211454 - RNA, 19 nt, Homo sapiens
  misc_RNA (1)...(19): siRNA sense strand
uaugacaucugccaaagcu

SEQ ID NO: 211455 - RNA, 19 nt, Homo sapiens
  misc_RNA (1)...(19): siRNA sense strand
aaugucagauucucagcuu

SEQ ID NO: 211456 - RNA, 19 nt, Homo sapiens
  misc_RNA (1)...(19): siRNA sense strand
ucgagacuuugccaaggua

SEQ ID NO: 211457 - RNA, 19 nt, Homo sapiens
  misc_RNA (1)...(19): siRNA sense strand
gcaaaaggccauaaaaugc

SEQ ID NO: 211458 - RNA, 19 nt, Homo sapiens
  misc_RNA (1)...(19): siRNA sense strand
cugcaugauucuauccaaa

SEQ ID NO: 211459 - RNA, 19 nt, Homo sapiens
  misc_RNA (1)...(19): siRNA sense strand
uaaagcacauuuggaagac

SEQ ID NO: 211460 - RNA, 19 nt, Homo sapiens
  misc_RNA (1)...(19): siRNA sense strand
acaggagucuaaagcacuu

SEQ ID NO: 211461 - RNA, 19 nt, Homo sapiens
  misc_RNA (1)...(19): siRNA sense strand
acagauaccuuuucaagca

SEQ ID NO: 211462 - RNA, 19 nt, Homo sapiens
  misc_RNA (1)...(19): siRNA sense strand
aagcacauuuggaagacaa

SEQ ID NO: 211463 - RNA, 19 nt, Homo sapiens
  misc_RNA (1)...(19): siRNA sense strand
gcuaauaauaagccagaga

SEQ ID NO: 211464 - RNA, 19 nt, Homo sapiens
  misc_RNA (1)...(19): siRNA sense strand
caagagcacaacaauuugg

SEQ ID NO: 211465 - RNA, 19 nt, Homo sapiens
  misc_RNA (1)...(19): siRNA sense strand
ccugucagcugcaugugau

SEQ ID NO: 211466 - RNA, 19 nt, Homo sapiens
  misc_RNA (1)...(19): siRNA sense strand
gcugcugaauguuuaugau

SEQ ID NO: 211467 - RNA, 19 nt, Homo sapiens
  misc_RNA (1)...(19): siRNA sense strand
acagagcucuaccagucuu

SEQ ID NO: 211468 - RNA, 19 nt, Homo sapiens
  misc_RNA (1)...(19): siRNA sense strand
acaguugggugaaguugca

SEQ ID NO: 211469 - RNA, 19 nt, Homo sapiens
  misc_RNA (1)...(19): siRNA sense strand
guuugaccacuauuuauga

SEQ ID NO: 211470 - RNA, 19 nt, Homo sapiens
  misc_RNA (1)...(19): siRNA sense strand
gcuuauaggacugccauga

SEQ ID NO: 211471 - RNA, 19 nt, Homo sapiens
  misc_RNA (1)...(19): siRNA sense strand
caucaggccaaauguaaca

SEQ ID NO: 211472 - RNA, 19 nt, Homo sapiens
  misc_RNA (1)...(19): siRNA sense strand
gauucuauccaaauuccaa

SEQ ID NO: 211473 - RNA, 19 nt, Homo sapiens
  misc_RNA (1)...(19): siRNA sense strand
ggcaaguucaacaggauuu

SEQ ID NO: 211474 - RNA, 19 nt, Homo sapiens
  misc_RNA (1)...(19): siRNA sense strand
gaacuggcugcugaauguu

SEQ ID NO: 211475 - RNA, 19 nt, Homo sapiens
  misc_RNA (1)...(19): siRNA sense strand
cugcugaauguuuaugaua

SEQ ID NO: 211476 - RNA, 19 nt, Homo sapiens
  misc_RNA (1)...(19): siRNA sense strand
aagcaucaggccaaaugua

SEQ ID NO: 211477 - RNA, 19 nt, Homo sapiens
  misc_RNA (1)...(19): siRNA sense strand
uggcaucauuucccugugu

SEQ ID NO: 211478 - RNA, 19 nt, Homo sapiens
  misc_RNA (1)...(19): siRNA sense strand
ccaugaaacuccgaagacu

SEQ ID NO: 211479 - RNA, 19 nt, Homo sapiens
  misc_RNA (1)...(19): siRNA sense strand
auaauaagccagagaucga

SEQ ID NO: 211480 - RNA, 19 nt, Homo sapiens
  misc_RNA (1)...(19): siRNA sense strand
cuaauaauaagccagagau

SEQ ID NO: 211481 - RNA, 19 nt, Homo sapiens
  misc_RNA (1)...(19): siRNA sense strand
ugggugaaguugcauccuu

SEQ ID NO: 211482 - RNA, 19 nt, Homo sapiens
  misc_RNA (1)...(19): siRNA sense strand
caucauuucccuguguaaa

SEQ ID NO: 211483 - RNA, 19 nt, Homo sapiens
  misc_RNA (1)...(19): siRNA sense strand
gcguggauaugugucugaa

SEQ ID NO: 211484 - RNA, 19 nt, Homo sapiens
  misc_RNA (1)...(19): siRNA sense strand
gcacuaucccaugguggaa

SEQ ID NO: 211485 - RNA, 19 nt, Homo sapiens
  misc_RNA (1)...(19): siRNA sense strand
gagccugucagcugcaugu

SEQ ID NO: 211486 - RNA, 19 nt, Homo sapiens
  misc_RNA (1)...(19): siRNA sense strand
guacagauaccuuuucaag

SEQ ID NO: 211487 - RNA, 19 nt, Homo sapiens
  misc_RNA (1)...(19): siRNA sense strand
gucccucucugcguggaua

SEQ ID NO: 211488 - RNA, 19 nt, Homo sapiens
  misc_RNA (1)...(19): siRNA sense strand
ggagcugcuuccaauuugc

SEQ ID NO: 211489 - RNA, 19 nt, Homo sapiens
  misc_RNA (1)...(19): siRNA sense strand
uuagcugaccugaauaaug

SEQ ID NO: 211490 - RNA, 19 nt, Homo sapiens
  misc_RNA (1)...(19): siRNA sense strand
guggcaaguucaacaggau

SEQ ID NO: 211491 - RNA, 19 nt, Homo sapiens
  misc_RNA (1)...(19): siRNA sense strand
acaacaauuuggucaacgu

SEQ ID NO: 211492 - RNA, 19 nt, Homo sapiens
  misc_RNA (1)...(19): siRNA sense strand
gacuacaucaggagaagau

SEQ ID NO: 211493 - RNA, 19 nt, Homo sapiens
  misc_RNA (1)...(19): siRNA sense strand
uaauaagccagagaucgaa

SEQ ID NO: 211494 - RNA, 19 nt, Homo sapiens
  misc_RNA (1)...(19): siRNA sense strand
ugucagauucucagcuuau

SEQ ID NO: 211495 - RNA, 19 nt, Homo sapiens
  misc_RNA (1)...(19): siRNA sense strand
ggauauccugcagauuauu

SEQ ID NO: 211496 - RNA, 19 nt, Homo sapiens
  misc_RNA (1)...(19): siRNA sense strand
agcaucaggccaaauguaa

SEQ ID NO: 211497 - RNA, 19 nt, Homo sapiens
  misc_RNA (1)...(19): siRNA sense strand
gcccuuugcuuggaucucu

SEQ ID NO: 211498 - RNA, 19 nt, Homo sapiens
  misc_RNA (1)...(19): siRNA sense strand
gcugaauguuuaugauacg

SEQ ID NO: 211499 - RNA, 19 nt, Homo sapiens
  misc_RNA (1)...(19): siRNA sense strand
agacuuugccaagguacua

SEQ ID NO: 211500 - RNA, 19 nt, Homo sapiens
  misc_RNA (1)...(19): siRNA sense strand
caagcaaguggcaaguuca

SEQ ID NO: 211501 - RNA, 19 nt, Homo sapiens
  misc_RNA (1)...(19): siRNA sense strand
agacaaguacagauaccuu

SEQ ID NO: 211502 - RNA, 19 nt, Homo sapiens
  misc_RNA (1)...(19): siRNA sense strand
gcaucauuucccuguguaa

SEQ ID NO: 211503 - RNA, 19 nt, Homo sapiens
  misc_RNA (1)...(19): siRNA sense strand
cugcaaagaguguccaauc

SEQ ID NO: 211504 - RNA, 19 nt, Homo sapiens
  misc_RNA (1)...(19): siRNA sense strand
cuuauaggacugccaugaa

SEQ ID NO: 211505 - RNA, 19 nt, Homo sapiens
  misc_RNA (1)...(19): siRNA sense strand
caaagaguguccaaucauu

SEQ ID NO: 211506 - RNA, 19 nt, Homo sapiens
  misc_RNA (1)...(19): siRNA sense strand
uagcugaccugaauaaugu

SEQ ID NO: 211507 - RNA, 19 nt, Homo sapiens
  misc_RNA (1)...(19): siRNA sense strand
gcaugauucuauccaaauu

SEQ ID NO: 211508 - RNA, 19 nt, Homo sapiens
  misc_RNA (1)...(19): siRNA sense strand
ugaacuggcugcugaaugu

SEQ ID NO: 211509 - RNA, 19 nt, Homo sapiens
  misc_RNA (1)...(19): siRNA sense strand
gauauccugcagauuauua

SEQ ID NO: 211510 - RNA, 19 nt, Homo sapiens
  misc_RNA (1)...(19): siRNA sense strand
gagaagauguucgagacuu

SEQ ID NO: 211511 - RNA, 19 nt, Homo sapiens
  misc_RNA (1)...(19): siRNA sense strand
gcacuuuaauuaugacauc

SEQ ID NO: 211512 - RNA, 19 nt, Homo sapiens
  misc_RNA (1)...(19): siRNA sense strand
guaaagcacauuuggaaga

SEQ ID NO: 211513 - RNA, 19 nt, Homo sapiens
  misc_RNA (1)...(19): siRNA sense strand
gaauauugcacuccgacua

SEQ ID NO: 211514 - RNA, 19 nt, Homo sapiens
  misc_RNA (1)...(19): siRNA sense strand
uuauaggacugccaugaaa

SEQ ID NO: 211515 - RNA, 19 nt, Homo sapiens
  misc_RNA (1)...(19): siRNA sense strand
gggugaaguugcauccuuu

SEQ ID NO: 211516 - RNA, 19 nt, Homo sapiens
  misc_RNA (1)...(19): siRNA sense strand
gcaagagcacaacaauuug

SEQ ID NO: 211517 - RNA, 19 nt, Homo sapiens
  misc_RNA (1)...(19): siRNA sense strand
gcacaacaauuuggucaac

SEQ ID NO: 211518 - RNA, 19 nt, Homo sapiens
  misc_RNA (1)...(19): siRNA sense strand
agcaagagcacaacaauuu

SEQ ID NO: 211519 - RNA, 19 nt, Homo sapiens
  misc_RNA (1)...(19): siRNA sense strand
agaagauguucgagacuuu

SEQ ID NO: 211520 - RNA, 19 nt, Homo sapiens
  misc_RNA (1)...(19): siRNA sense strand
gagcaagagcacaacaauu

SEQ ID NO: 211521 - RNA, 19 nt, Homo sapiens
  misc_RNA (1)...(19): siRNA sense strand
ucaagcaaguggcaaguuc

SEQ ID NO: 211522 - RNA, 19 nt, Homo sapiens
  misc_RNA (1)...(19): siRNA sense strand
ccacgagacucaaacaacu

SEQ ID NO: 211523 - RNA, 19 nt, Homo sapiens
  misc_RNA (1)...(19): siRNA sense strand
cagcacaaccucaagcaaa

SEQ ID NO: 211524 - RNA, 19 nt, Homo sapiens
  misc_RNA (1)...(19): siRNA sense strand
gcaaagaguguccaaucau

SEQ ID NO: 211525 - RNA, 19 nt, Homo sapiens
  misc_RNA (1)...(19): siRNA sense strand
auggauauccugcagauua

SEQ ID NO: 211526 - RNA, 19 nt, Homo sapiens
  misc_RNA (1)...(19): siRNA sense strand
uguaacaucugcaaagagu

SEQ ID NO: 211527 - RNA, 19 nt, Homo sapiens
  misc_RNA (1)...(19): siRNA sense strand
guccggagcugcuuccaau

SEQ ID NO: 211528 - RNA, 19 nt, Homo sapiens
  misc_RNA (1)...(19): siRNA sense strand
gcaaguggcaaguucaaca

SEQ ID NO: 211529 - RNA, 19 nt, Homo sapiens
  misc_RNA (1)...(19): siRNA sense strand
gcuuccaauuugcuaauaa

SEQ ID NO: 211530 - RNA, 19 nt, Homo sapiens
  misc_RNA (1)...(19): siRNA sense strand
uggaagacaaguacagaua

SEQ ID NO: 211531 - RNA, 19 nt, Homo sapiens
  misc_RNA (1)...(19): siRNA sense strand
ggauccguguccugucuuu

SEQ ID NO: 211532 - RNA, 19 nt, Homo sapiens
  misc_RNA (1)...(19): siRNA sense strand
gucuuuagcugaccugaau

SEQ ID NO: 211533 - RNA, 19 nt, Homo sapiens
  misc_RNA (1)...(19): siRNA sense strand
gacaaguacagauaccuuu

SEQ ID NO: 211534 - RNA, 19 nt, Homo sapiens
  misc_RNA (1)...(19): siRNA sense strand
ccaagcaucaggccaaaug

SEQ ID NO: 211535 - RNA, 19 nt, Homo sapiens
  misc_RNA (1)...(19): siRNA sense strand
ggagcaagagcacaacaau

SEQ ID NO: 211536 - RNA, 19 nt, Homo sapiens
  misc_RNA (1)...(19): siRNA sense strand
guguaaagcacauuuggaa

SEQ ID NO: 211537 - RNA, 19 nt, Homo sapiens
  misc_RNA (1)...(19): siRNA sense strand
caagacaguugggugaagu

SEQ ID NO: 211538 - RNA, 19 nt, Homo sapiens
  misc_RNA (1)...(19): siRNA sense strand
gaagauguucgagacuuug

SEQ ID NO: 211539 - RNA, 19 nt, Homo sapiens
  misc_RNA (1)...(19): siRNA sense strand
gucagauucucagcuuaua

SEQ ID NO: 211540 - RNA, 19 nt, Homo sapiens
  misc_RNA (1)...(19): siRNA sense strand
uaacaucugcaaagagugu

SEQ ID NO: 211541 - RNA, 19 nt, Homo sapiens
  misc_RNA (1)...(19): siRNA sense strand
cggagcugcuuccaauuug

SEQ ID NO: 211542 - RNA, 19 nt, Homo sapiens
  misc_RNA (1)...(19): siRNA sense strand
gaagacaaguacagauacc

SEQ ID NO: 211543 - RNA, 19 nt, Homo sapiens
  misc_RNA (1)...(19): siRNA sense strand
ccauggauauccugcagau

SEQ ID NO: 211544 - RNA, 19 nt, Homo sapiens
  misc_RNA (1)...(19): siRNA sense strand
ggcaucauuucccugugua

SEQ ID NO: 211545 - RNA, 19 nt, Homo sapiens
  misc_RNA (1)...(19): siRNA sense strand
uggauauccugcagauuau

SEQ ID NO: 211546 - RNA, 19 nt, Homo sapiens
  misc_RNA (1)...(19): siRNA sense strand
ggaagacaaguacagauac

SEQ ID NO: 211547 - RNA, 19 nt, Homo sapiens
  misc_RNA (1)...(19): siRNA sense strand
ugcaaagaguguccaauca

SEQ ID NO: 211548 - RNA, 19 nt, Homo sapiens
  misc_RNA (1)...(19): siRNA sense strand
guggauaugugucugaacu

SEQ ID NO: 211549 - RNA, 19 nt, Homo sapiens
  misc_RNA (1)...(19): siRNA sense strand
acuggcugcugaauguuua

SEQ ID NO: 211550 - RNA, 19 nt, Homo sapiens
  misc_RNA (1)...(19): siRNA sense strand
acuaucccaugguggaaua

SEQ ID NO: 211551 - RNA, 19 nt, Homo sapiens
  misc_RNA (1)...(19): siRNA sense strand
ccggagcugcuuccaauuu

SEQ ID NO: 211552 - RNA, 19 nt, Homo sapiens
  misc_RNA (1)...(19): siRNA sense strand
ccaaauuccaagacaguug

SEQ ID NO: 211553 - RNA, 19 nt, Homo sapiens
  misc_RNA (1)...(19): siRNA sense strand
cagaaacugccaagcauca

SEQ ID NO: 211554 - RNA, 19 nt, Homo sapiens
  misc_RNA (1)...(19): siRNA sense strand
uaugacaucugccaaagcu

SEQ ID NO: 211555 - RNA, 19 nt, Homo sapiens
  misc_RNA (1)...(19): siRNA sense strand
aaugucagauucucagcuu

SEQ ID NO: 211556 - RNA, 19 nt, Homo sapiens
  misc_RNA (1)...(19): siRNA sense strand
ucgagacuuugccaaggua

SEQ ID NO: 211557 - RNA, 19 nt, Homo sapiens
  misc_RNA (1)...(19): siRNA sense strand
gcaaaaggccauaaaaugc

SEQ ID NO: 211558 - RNA, 19 nt, Homo sapiens
  misc_RNA (1)...(19): siRNA sense strand
cugcaugauucuauccaaa

SEQ ID NO: 211559 - RNA, 19 nt, Homo sapiens
  misc_RNA (1)...(19): siRNA sense strand
uaaagcacauuuggaagac

SEQ ID NO: 211560 - RNA, 19 nt, Homo sapiens
  misc_RNA (1)...(19): siRNA sense strand
acaggagucuaaagcacuu

SEQ ID NO: 211561 - RNA, 19 nt, Homo sapiens
  misc_RNA (1)...(19): siRNA sense strand
acagauaccuuuucaagca

SEQ ID NO: 211562 - RNA, 19 nt, Homo sapiens
  misc_RNA (1)...(19): siRNA sense strand
aagcacauuuggaagacaa

SEQ ID NO: 211563 - RNA, 19 nt, Homo sapiens
  misc_RNA (1)...(19): siRNA sense strand
gcuaauaauaagccagaga

SEQ ID NO: 211564 - RNA, 19 nt, Homo sapiens
  misc_RNA (1)...(19): siRNA sense strand
caagagcacaacaauuugg

SEQ ID NO: 211565 - RNA, 19 nt, Homo sapiens
  misc_RNA (1)...(19): siRNA sense strand
ccugucagcugcaugugau

SEQ ID NO: 211566 - RNA, 19 nt, Homo sapiens
  misc_RNA (1)...(19): siRNA sense strand
gcugcugaauguuuaugau

SEQ ID NO: 211567 - RNA, 19 nt, Homo sapiens
  misc_RNA (1)...(19): siRNA sense strand
acagagcucuaccagucuu

SEQ ID NO: 211568 - RNA, 19 nt, Homo sapiens
  misc_RNA (1)...(19): siRNA sense strand
acaguugggugaaguugca

SEQ ID NO: 211569 - RNA, 19 nt, Homo sapiens
  misc_RNA (1)...(19): siRNA sense strand
guuugaccacuauuuauga

SEQ ID NO: 211570 - RNA, 19 nt, Homo sapiens
  misc_RNA (1)...(19): siRNA sense strand
gcuuauaggacugccauga

SEQ ID NO: 211571 - RNA, 19 nt, Homo sapiens
  misc_RNA (1)...(19): siRNA sense strand
caucaggccaaauguaaca

SEQ ID NO: 211572 - RNA, 19 nt, Homo sapiens
  misc_RNA (1)...(19): siRNA sense strand
gauucuauccaaauuccaa

SEQ ID NO: 211573 - RNA, 19 nt, Homo sapiens
  misc_RNA (1)...(19): siRNA sense strand
ggcaaguucaacaggauuu

SEQ ID NO: 211574 - RNA, 19 nt, Homo sapiens
  misc_RNA (1)...(19): siRNA sense strand
gaacuggcugcugaauguu

SEQ ID NO: 211575 - RNA, 19 nt, Homo sapiens
  misc_RNA (1)...(19): siRNA sense strand
cugcugaauguuuaugaua

SEQ ID NO: 211576 - RNA, 19 nt, Homo sapiens
  misc_RNA (1)...(19): siRNA sense strand
aagcaucaggccaaaugua

SEQ ID NO: 211577 - RNA, 19 nt, Homo sapiens
  misc_RNA (1)...(19): siRNA sense strand
uggcaucauuucccugugu

SEQ ID NO: 211578 - RNA, 19 nt, Homo sapiens
  misc_RNA (1)...(19): siRNA sense strand
ccaugaaacuccgaagacu

SEQ ID NO: 211579 - RNA, 19 nt, Homo sapiens
  misc_RNA (1)...(19): siRNA sense strand
auaauaagccagagaucga

SEQ ID NO: 211580 - RNA, 19 nt, Homo sapiens
  misc_RNA (1)...(19): siRNA sense strand
cuaauaauaagccagagau

SEQ ID NO: 211581 - RNA, 19 nt, Homo sapiens
  misc_RNA (1)...(19): siRNA sense strand
ugggugaaguugcauccuu

SEQ ID NO: 211582 - RNA, 19 nt, Homo sapiens
  misc_RNA (1)...(19): siRNA sense strand
caucauuucccuguguaaa

SEQ ID NO: 211583 - RNA, 19 nt, Homo sapiens
  misc_RNA (1)...(19): siRNA sense strand
gcguggauaugugucugaa

SEQ ID NO: 211584 - RNA, 19 nt, Homo sapiens
  misc_RNA (1)...(19): siRNA sense strand
gcacuaucccaugguggaa

SEQ ID NO: 211585 - RNA, 19 nt, Homo sapiens
  misc_RNA (1)...(19): siRNA sense strand
gagccugucagcugcaugu

SEQ ID NO: 211586 - RNA, 19 nt, Homo sapiens
  misc_RNA (1)...(19): siRNA sense strand
guacagauaccuuuucaag

SEQ ID NO: 211587 - RNA, 19 nt, Homo sapiens
  misc_RNA (1)...(19): siRNA sense strand
gucccucucugcguggaua

SEQ ID NO: 211588 - RNA, 19 nt, Homo sapiens
  misc_RNA (1)...(19): siRNA sense strand
ggagcugcuuccaauuugc

SEQ ID NO: 211589 - RNA, 19 nt, Homo sapiens
  misc_RNA (1)...(19): siRNA sense strand
uuagcugaccugaauaaug

SEQ ID NO: 211590 - RNA, 19 nt, Homo sapiens
  misc_RNA (1)...(19): siRNA sense strand
guggcaaguucaacaggau

SEQ ID NO: 211591 - RNA, 19 nt, Homo sapiens
  misc_RNA (1)...(19): siRNA sense strand
acaacaauuuggucaacgu

SEQ ID NO: 211592 - RNA, 19 nt, Homo sapiens
  misc_RNA (1)...(19): siRNA sense strand
gacuacaucaggagaagau

SEQ ID NO: 211593 - RNA, 19 nt, Homo sapiens
  misc_RNA (1)...(19): siRNA sense strand
uaauaagccagagaucgaa

SEQ ID NO: 211594 - RNA, 19 nt, Homo sapiens
  misc_RNA (1)...(19): siRNA sense strand
ugucagauucucagcuuau

SEQ ID NO: 211595 - RNA, 19 nt, Homo sapiens
  misc_RNA (1)...(19): siRNA sense strand
ggauauccugcagauuauu

SEQ ID NO: 211596 - RNA, 19 nt, Homo sapiens
  misc_RNA (1)...(19): siRNA sense strand
agcaucaggccaaauguaa

SEQ ID NO: 211597 - RNA, 19 nt, Homo sapiens
  misc_RNA (1)...(19): siRNA sense strand
gcccuuugcuuggaucucu

SEQ ID NO: 211598 - RNA, 19 nt, Homo sapiens
  misc_RNA (1)...(19): siRNA sense strand
gcugaauguuuaugauacg

SEQ ID NO: 211599 - RNA, 19 nt, Homo sapiens
  misc_RNA (1)...(19): siRNA sense strand
agacuuugccaagguacua

SEQ ID NO: 211600 - RNA, 19 nt, Homo sapiens
  misc_RNA (1)...(19): siRNA sense strand
caagcaaguggcaaguuca

SEQ ID NO: 211601 - RNA, 19 nt, Homo sapiens
  misc_RNA (1)...(19): siRNA sense strand
agacaaguacagauaccuu

SEQ ID NO: 211602 - RNA, 19 nt, Homo sapiens
  misc_RNA (1)...(19): siRNA sense strand
gcaucauuucccuguguaa

SEQ ID NO: 211603 - RNA, 19 nt, Homo sapiens
  misc_RNA (1)...(19): siRNA sense strand
cugcaaagaguguccaauc

SEQ ID NO: 211604 - RNA, 19 nt, Homo sapiens
  misc_RNA (1)...(19): siRNA sense strand
cuuauaggacugccaugaa

SEQ ID NO: 211605 - RNA, 19 nt, Homo sapiens
  misc_RNA (1)...(19): siRNA sense strand
caaagaguguccaaucauu

SEQ ID NO: 211606 - RNA, 19 nt, Homo sapiens
  misc_RNA (1)...(19): siRNA sense strand
uagcugaccugaauaaugu

SEQ ID NO: 211607 - RNA, 19 nt, Homo sapiens
  misc_RNA (1)...(19): siRNA sense strand
gcaugauucuauccaaauu

SEQ ID NO: 211608 - RNA, 19 nt, Homo sapiens
  misc_RNA (1)...(19): siRNA sense strand
ugaacuggcugcugaaugu

SEQ ID NO: 211609 - RNA, 19 nt, Homo sapiens
  misc_RNA (1)...(19): siRNA sense strand
gauauccugcagauuauua

SEQ ID NO: 211610 - RNA, 19 nt, Homo sapiens
  misc_RNA (1)...(19): siRNA sense strand
gagaagauguucgagacuu

SEQ ID NO: 211611 - RNA, 19 nt, Homo sapiens
  misc_RNA (1)...(19): siRNA sense strand
gcacuuuaauuaugacauc

SEQ ID NO: 211612 - RNA, 19 nt, Homo sapiens
  misc_RNA (1)...(19): siRNA sense strand
guaaagcacauuuggaaga

SEQ ID NO: 211613 - RNA, 19 nt, Homo sapiens
  misc_RNA (1)...(19): siRNA sense strand
gaauauugcacuccgacua

SEQ ID NO: 211614 - RNA, 19 nt, Homo sapiens
  misc_RNA (1)...(19): siRNA sense strand
uuauaggacugccaugaaa

SEQ ID NO: 211615 - RNA, 19 nt, Homo sapiens
  misc_RNA (1)...(19): siRNA sense strand
gggugaaguugcauccuuu

SEQ ID NO: 211616 - RNA, 19 nt, Homo sapiens
  misc_RNA (1)...(19): siRNA sense strand
gcaagagcacaacaauuug

SEQ ID NO: 211617 - RNA, 19 nt, Homo sapiens
  misc_RNA (1)...(19): siRNA sense strand
gcacaacaauuuggucaac

SEQ ID NO: 211618 - RNA, 19 nt, Homo sapiens
  misc_RNA (1)...(19): siRNA sense strand
agcaagagcacaacaauuu

SEQ ID NO: 211619 - RNA, 19 nt, Homo sapiens
  misc_RNA (1)...(19): siRNA sense strand
agaagauguucgagacuuu

SEQ ID NO: 211620 - RNA, 19 nt, Homo sapiens
  misc_RNA (1)...(19): siRNA sense strand
gagcaagagcacaacaauu

SEQ ID NO: 211621 - RNA, 19 nt, Homo sapiens
  misc_RNA (1)...(19): siRNA sense strand
ucaagcaaguggcaaguuc

SEQ ID NO: 211622 - RNA, 19 nt, Homo sapiens
  misc_RNA (1)...(19): siRNA sense strand
ccacgagacucaaacaacu

SEQ ID NO: 211623 - RNA, 19 nt, Homo sapiens
  misc_RNA (1)...(19): siRNA sense strand
cagcacaaccucaagcaaa

SEQ ID NO: 211624 - RNA, 19 nt, Homo sapiens
  misc_RNA (1)...(19): siRNA sense strand
gcaaagaguguccaaucau

SEQ ID NO: 211625 - RNA, 19 nt, Homo sapiens
  misc_RNA (1)...(19): siRNA sense strand
auggauauccugcagauua

SEQ ID NO: 211626 - RNA, 19 nt, Homo sapiens
  misc_RNA (1)...(19): siRNA sense strand
uguaacaucugcaaagagu

SEQ ID NO: 211627 - RNA, 19 nt, Homo sapiens
  misc_RNA (1)...(19): siRNA sense strand
guccggagcugcuuccaau

SEQ ID NO: 211628 - RNA, 19 nt, Homo sapiens
  misc_RNA (1)...(19): siRNA sense strand
gcaaguggcaaguucaaca

SEQ ID NO: 211629 - RNA, 19 nt, Homo sapiens
  misc_RNA (1)...(19): siRNA sense strand
gcuuccaauuugcuaauaa

SEQ ID NO: 211630 - RNA, 19 nt, Homo sapiens
  misc_RNA (1)...(19): siRNA sense strand
uggaagacaaguacagaua

SEQ ID NO: 211631 - RNA, 19 nt, Homo sapiens
  misc_RNA (1)...(19): siRNA sense strand
ggauccguguccugucuuu

SEQ ID NO: 211632 - RNA, 19 nt, Homo sapiens
  misc_RNA (1)...(19): siRNA sense strand
gucuuuagcugaccugaau

SEQ ID NO: 211633 - RNA, 19 nt, Homo sapiens
  misc_RNA (1)...(19): siRNA sense strand
gacaaguacagauaccuuu

SEQ ID NO: 211634 - RNA, 19 nt, Homo sapiens
  misc_RNA (1)...(19): siRNA sense strand
ccaagcaucaggccaaaug

SEQ ID NO: 211635 - RNA, 19 nt, Homo sapiens
  misc_RNA (1)...(19): siRNA sense strand
ggagcaagagcacaacaau

SEQ ID NO: 211636 - RNA, 19 nt, Homo sapiens
  misc_RNA (1)...(19): siRNA sense strand
guguaaagcacauuuggaa

SEQ ID NO: 211637 - RNA, 19 nt, Homo sapiens
  misc_RNA (1)...(19): siRNA sense strand
caagacaguugggugaagu

SEQ ID NO: 211638 - RNA, 19 nt, Homo sapiens
  misc_RNA (1)...(19): siRNA sense strand
gaagauguucgagacuuug

SEQ ID NO: 211639 - RNA, 19 nt, Homo sapiens
  misc_RNA (1)...(19): siRNA sense strand
gucagauucucagcuuaua

SEQ ID NO: 211640 - RNA, 19 nt, Homo sapiens
  misc_RNA (1)...(19): siRNA sense strand
uaacaucugcaaagagugu

SEQ ID NO: 211641 - RNA, 19 nt, Homo sapiens
  misc_RNA (1)...(19): siRNA sense strand
cggagcugcuuccaauuug

SEQ ID NO: 211642 - RNA, 19 nt, Homo sapiens
  misc_RNA (1)...(19): siRNA sense strand
gaagacaaguacagauacc

SEQ ID NO: 211643 - RNA, 19 nt, Homo sapiens
  misc_RNA (1)...(19): siRNA sense strand
ccauggauauccugcagau

SEQ ID NO: 211644 - RNA, 19 nt, Homo sapiens
  misc_RNA (1)...(19): siRNA sense strand
ggcaucauuucccugugua

SEQ ID NO: 211645 - RNA, 19 nt, Homo sapiens
  misc_RNA (1)...(19): siRNA sense strand
uggauauccugcagauuau

SEQ ID NO: 211646 - RNA, 19 nt, Homo sapiens
  misc_RNA (1)...(19): siRNA sense strand
ggaagacaaguacagauac

SEQ ID NO: 211647 - RNA, 19 nt, Homo sapiens
  misc_RNA (1)...(19): siRNA sense strand
ugcaaagaguguccaauca

SEQ ID NO: 211648 - RNA, 19 nt, Homo sapiens
  misc_RNA (1)...(19): siRNA sense strand
guggauaugugucugaacu

SEQ ID NO: 211649 - RNA, 19 nt, Homo sapiens
  misc_RNA (1)...(19): siRNA sense strand
acuggcugcugaauguuua

SEQ ID NO: 211650 - RNA, 19 nt, Homo sapiens
  misc_RNA (1)...(19): siRNA sense strand
acuaucccaugguggaaua

SEQ ID NO: 211651 - RNA, 19 nt, Homo sapiens
  misc_RNA (1)...(19): siRNA sense strand
ccggagcugcuuccaauuu

SEQ ID NO: 211652 - RNA, 19 nt, Homo sapiens
  misc_RNA (1)...(19): siRNA sense strand
ccaaauuccaagacaguug

SEQ ID NO: 211653 - RNA, 19 nt, Homo sapiens
  misc_RNA (1)...(19): siRNA sense strand
cagaaacugccaagcauca

SEQ ID NO: 211654 - RNA, 19 nt, Homo sapiens
  misc_RNA (1)...(19): siRNA sense strand
uaugacaucugccaaagcu

SEQ ID NO: 211655 - RNA, 19 nt, Homo sapiens
  misc_RNA (1)...(19): siRNA sense strand
aaugucagauucucagcuu

SEQ ID NO: 211656 - RNA, 19 nt, Homo sapiens
  misc_RNA (1)...(19): siRNA sense strand
ucgagacuuugccaaggua

SEQ ID NO: 211657 - RNA, 19 nt, Homo sapiens
  misc_RNA (1)...(19): siRNA sense strand
gcaaaaggccauaaaaugc

SEQ ID NO: 211658 - RNA, 19 nt, Homo sapiens
  misc_RNA (1)...(19): siRNA sense strand
cugcaugauucuauccaaa

SEQ ID NO: 211659 - RNA, 19 nt, Homo sapiens
  misc_RNA (1)...(19): siRNA sense strand
uaaagcacauuuggaagac

SEQ ID NO: 211660 - RNA, 19 nt, Homo sapiens
  misc_RNA (1)...(19): siRNA sense strand
acaggagucuaaagcacuu

SEQ ID NO: 211661 - RNA, 19 nt, Homo sapiens
  misc_RNA (1)...(19): siRNA sense strand
acagauaccuuuucaagca

SEQ ID NO: 211662 - RNA, 19 nt, Homo sapiens
  misc_RNA (1)...(19): siRNA sense strand
aagcacauuuggaagacaa

SEQ ID NO: 211663 - RNA, 19 nt, Homo sapiens
  misc_RNA (1)...(19): siRNA sense strand
gcuaauaauaagccagaga

SEQ ID NO: 211664 - RNA, 19 nt, Homo sapiens
  misc_RNA (1)...(19): siRNA sense strand
caagagcacaacaauuugg

SEQ ID NO: 211665 - RNA, 19 nt, Homo sapiens
  misc_RNA (1)...(19): siRNA sense strand
ccugucagcugcaugugau

SEQ ID NO: 211666 - RNA, 19 nt, Homo sapiens
  misc_RNA (1)...(19): siRNA sense strand
gcugcugaauguuuaugau

SEQ ID NO: 211667 - RNA, 19 nt, Homo sapiens
  misc_RNA (1)...(19): siRNA sense strand
acagagcucuaccagucuu

SEQ ID NO: 211668 - RNA, 19 nt, Homo sapiens
  misc_RNA (1)...(19): siRNA sense strand
acaguugggugaaguugca

SEQ ID NO: 211669 - RNA, 19 nt, Homo sapiens
  misc_RNA (1)...(19): siRNA sense strand
guuugaccacuauuuauga

SEQ ID NO: 211670 - RNA, 19 nt, Homo sapiens
  misc_RNA (1)...(19): siRNA sense strand
gcuuauaggacugccauga

SEQ ID NO: 211671 - RNA, 19 nt, Homo sapiens
  misc_RNA (1)...(19): siRNA sense strand
caucaggccaaauguaaca

SEQ ID NO: 211672 - RNA, 19 nt, Homo sapiens
  misc_RNA (1)...(19): siRNA sense strand
gauucuauccaaauuccaa

SEQ ID NO: 211673 - RNA, 19 nt, Homo sapiens
  misc_RNA (1)...(19): siRNA sense strand
ggcaaguucaacaggauuu

SEQ ID NO: 211674 - RNA, 19 nt, Homo sapiens
  misc_RNA (1)...(19): siRNA sense strand
gaacuggcugcugaauguu

SEQ ID NO: 211675 - RNA, 19 nt, Homo sapiens
  misc_RNA (1)...(19): siRNA sense strand
cugcugaauguuuaugaua

SEQ ID NO: 211676 - RNA, 19 nt, Homo sapiens
  misc_RNA (1)...(19): siRNA sense strand
aagcaucaggccaaaugua

SEQ ID NO: 211677 - RNA, 19 nt, Homo sapiens
  misc_RNA (1)...(19): siRNA sense strand
uggcaucauuucccugugu

SEQ ID NO: 211678 - RNA, 19 nt, Homo sapiens
  misc_RNA (1)...(19): siRNA sense strand
ccaugaaacuccgaagacu

SEQ ID NO: 211679 - RNA, 19 nt, Homo sapiens
  misc_RNA (1)...(19): siRNA sense strand
auaauaagccagagaucga

SEQ ID NO: 211680 - RNA, 19 nt, Homo sapiens
  misc_RNA (1)...(19): siRNA sense strand
cuaauaauaagccagagau

SEQ ID NO: 211681 - RNA, 19 nt, Homo sapiens
  misc_RNA (1)...(19): siRNA sense strand
ugggugaaguugcauccuu

SEQ ID NO: 211682 - RNA, 19 nt, Homo sapiens
  misc_RNA (1)...(19): siRNA sense strand
caucauuucccuguguaaa

SEQ ID NO: 211683 - RNA, 19 nt, Homo sapiens
  misc_RNA (1)...(19): siRNA sense strand
gcguggauaugugucugaa

SEQ ID NO: 211684 - RNA, 19 nt, Homo sapiens
  misc_RNA (1)...(19): siRNA sense strand
gcacuaucccaugguggaa

SEQ ID NO: 211685 - RNA, 19 nt, Homo sapiens
  misc_RNA (1)...(19): siRNA sense strand
gagccugucagcugcaugu

SEQ ID NO: 211686 - RNA, 19 nt, Homo sapiens
  misc_RNA (1)...(19): siRNA sense strand
guacagauaccuuuucaag

SEQ ID NO: 211687 - RNA, 19 nt, Homo sapiens
  misc_RNA (1)...(19): siRNA sense strand
gucccucucugcguggaua

SEQ ID NO: 211688 - RNA, 19 nt, Homo sapiens
  misc_RNA (1)...(19): siRNA sense strand
ggagcugcuuccaauuugc

SEQ ID NO: 211689 - RNA, 19 nt, Homo sapiens
  misc_RNA (1)...(19): siRNA sense strand
uuagcugaccugaauaaug

SEQ ID NO: 211690 - RNA, 19 nt, Homo sapiens
  misc_RNA (1)...(19): siRNA sense strand
guggcaaguucaacaggau

SEQ ID NO: 211691 - RNA, 19 nt, Homo sapiens
  misc_RNA (1)...(19): siRNA sense strand
acaacaauuuggucaacgu

SEQ ID NO: 211692 - RNA, 19 nt, Homo sapiens
  misc_RNA (1)...(19): siRNA sense strand
gacuacaucaggagaagau

SEQ ID NO: 211693 - RNA, 19 nt, Homo sapiens
  misc_RNA (1)...(19): siRNA sense strand
uaauaagccagagaucgaa

SEQ ID NO: 211694 - RNA, 19 nt, Homo sapiens
  misc_RNA (1)...(19): siRNA sense strand
ugucagauucucagcuuau

SEQ ID NO: 211695 - RNA, 19 nt, Homo sapiens
  misc_RNA (1)...(19): siRNA sense strand
ggauauccugcagauuauu

SEQ ID NO: 211696 - RNA, 19 nt, Homo sapiens
  misc_RNA (1)...(19): siRNA sense strand
agcaucaggccaaauguaa

SEQ ID NO: 211697 - RNA, 19 nt, Homo sapiens
  misc_RNA (1)...(19): siRNA sense strand
gcccuuugcuuggaucucu

SEQ ID NO: 211698 - RNA, 19 nt, Homo sapiens
  misc_RNA (1)...(19): siRNA sense strand
gcugaauguuuaugauacg

SEQ ID NO: 211699 - RNA, 19 nt, Homo sapiens
  misc_RNA (1)...(19): siRNA sense strand
agacuuugccaagguacua

SEQ ID NO: 211700 - RNA, 19 nt, Homo sapiens
  misc_RNA (1)...(19): siRNA sense strand
caagcaaguggcaaguuca

SEQ ID NO: 211701 - RNA, 19 nt, Homo sapiens
  misc_RNA (1)...(19): siRNA sense strand
agacaaguacagauaccuu

SEQ ID NO: 211702 - RNA, 19 nt, Homo sapiens
  misc_RNA (1)...(19): siRNA sense strand
gcaucauuucccuguguaa

SEQ ID NO: 211703 - RNA, 19 nt, Homo sapiens
  misc_RNA (1)...(19): siRNA sense strand
cugcaaagaguguccaauc

SEQ ID NO: 211704 - RNA, 19 nt, Homo sapiens
  misc_RNA (1)...(19): siRNA sense strand
cuuauaggacugccaugaa

SEQ ID NO: 211705 - RNA, 19 nt, Homo sapiens
  misc_RNA (1)...(19): siRNA sense strand
caaagaguguccaaucauu

SEQ ID NO: 211706 - RNA, 19 nt, Homo sapiens
  misc_RNA (1)...(19): siRNA sense strand
uagcugaccugaauaaugu

SEQ ID NO: 211707 - RNA, 19 nt, Homo sapiens
  misc_RNA (1)...(19): siRNA sense strand
gcaugauucuauccaaauu

SEQ ID NO: 211708 - RNA, 19 nt, Homo sapiens
  misc_RNA (1)...(19): siRNA sense strand
ugaacuggcugcugaaugu

SEQ ID NO: 211709 - RNA, 19 nt, Homo sapiens
  misc_RNA (1)...(19): siRNA sense strand
gauauccugcagauuauua

SEQ ID NO: 211710 - RNA, 19 nt, Homo sapiens
  misc_RNA (1)...(19): siRNA sense strand
gagaagauguucgagacuu

SEQ ID NO: 211711 - RNA, 19 nt, Homo sapiens
  misc_RNA (1)...(19): siRNA sense strand
gcacuuuaauuaugacauc

SEQ ID NO: 211712 - RNA, 19 nt, Homo sapiens
  misc_RNA (1)...(19): siRNA sense strand
guaaagcacauuuggaaga

SEQ ID NO: 211713 - RNA, 19 nt, Homo sapiens
  misc_RNA (1)...(19): siRNA sense strand
gaauauugcacuccgacua

SEQ ID NO: 211714 - RNA, 19 nt, Homo sapiens
  misc_RNA (1)...(19): siRNA sense strand
uuauaggacugccaugaaa

SEQ ID NO: 211715 - RNA, 19 nt, Homo sapiens
  misc_RNA (1)...(19): siRNA sense strand
gggugaaguugcauccuuu

SEQ ID NO: 211716 - RNA, 19 nt, Homo sapiens
  misc_RNA (1)...(19): siRNA sense strand
gcaagagcacaacaauuug

SEQ ID NO: 211717 - RNA, 19 nt, Homo sapiens
  misc_RNA (1)...(19): siRNA sense strand
gcacaacaauuuggucaac

SEQ ID NO: 211718 - RNA, 19 nt, Homo sapiens
  misc_RNA (1)...(19): siRNA sense strand
agcaagagcacaacaauuu

SEQ ID NO: 211719 - RNA, 19 nt, Homo sapiens
  misc_RNA (1)...(19): siRNA sense strand
agaagauguucgagacuuu

SEQ ID NO: 211720 - RNA, 19 nt, Homo sapiens
  misc_RNA (1)...(19): siRNA sense strand
gagcaagagcacaacaauu

SEQ ID NO: 211721 - RNA, 19 nt, Homo sapiens
  misc_RNA (1)...(19): siRNA sense strand
ucaagcaaguggcaaguuc

SEQ ID NO: 211722 - RNA, 19 nt, Homo sapiens
  misc_RNA (1)...(19): siRNA sense strand
ccacgagacucaaacaacu

SEQ ID NO: 211723 - RNA, 19 nt, Homo sapiens
  misc_RNA (1)...(19): siRNA sense strand
cagcacaaccucaagcaaa

SEQ ID NO: 211724 - RNA, 19 nt, Homo sapiens
  misc_RNA (1)...(19): siRNA sense strand
gcaaagaguguccaaucau

SEQ ID NO: 211725 - RNA, 19 nt, Homo sapiens
  misc_RNA (1)...(19): siRNA sense strand
auggauauccugcagauua

SEQ ID NO: 211726 - RNA, 19 nt, Homo sapiens
  misc_RNA (1)...(19): siRNA sense strand
uguaacaucugcaaagagu

SEQ ID NO: 211727 - RNA, 19 nt, Homo sapiens
  misc_RNA (1)...(19): siRNA sense strand
guccggagcugcuuccaau

SEQ ID NO: 211728 - RNA, 19 nt, Homo sapiens
  misc_RNA (1)...(19): siRNA sense strand
gcaaguggcaaguucaaca

SEQ ID NO: 211729 - RNA, 19 nt, Homo sapiens
  misc_RNA (1)...(19): siRNA sense strand
gcuuccaauuugcuaauaa

SEQ ID NO: 211730 - RNA, 19 nt, Homo sapiens
  misc_RNA (1)...(19): siRNA sense strand
uggaagacaaguacagaua

SEQ ID NO: 211731 - RNA, 19 nt, Homo sapiens
  misc_RNA (1)...(19): siRNA sense strand
ggauccguguccugucuuu

SEQ ID NO: 211732 - RNA, 19 nt, Homo sapiens
  misc_RNA (1)...(19): siRNA sense strand
gucuuuagcugaccugaau

SEQ ID NO: 211733 - RNA, 19 nt, Homo sapiens
  misc_RNA (1)...(19): siRNA sense strand
gacaaguacagauaccuuu

SEQ ID NO: 211734 - RNA, 19 nt, Homo sapiens
  misc_RNA (1)...(19): siRNA sense strand
ccaagcaucaggccaaaug

SEQ ID NO: 211735 - RNA, 19 nt, Homo sapiens
  misc_RNA (1)...(19): siRNA sense strand
ggagcaagagcacaacaau

SEQ ID NO: 211736 - RNA, 19 nt, Homo sapiens
  misc_RNA (1)...(19): siRNA sense strand
guguaaagcacauuuggaa

SEQ ID NO: 211737 - RNA, 19 nt, Homo sapiens
  misc_RNA (1)...(19): siRNA sense strand
caagacaguugggugaagu

SEQ ID NO: 211738 - RNA, 19 nt, Homo sapiens
  misc_RNA (1)...(19): siRNA sense strand
gaagauguucgagacuuug

SEQ ID NO: 211739 - RNA, 19 nt, Homo sapiens
  misc_RNA (1)...(19): siRNA sense strand
gucagauucucagcuuaua

SEQ ID NO: 211740 - RNA, 19 nt, Homo sapiens
  misc_RNA (1)...(19): siRNA sense strand
uaacaucugcaaagagugu

SEQ ID NO: 211741 - RNA, 19 nt, Homo sapiens
  misc_RNA (1)...(19): siRNA sense strand
cggagcugcuuccaauuug

SEQ ID NO: 211742 - RNA, 19 nt, Homo sapiens
  misc_RNA (1)...(19): siRNA sense strand
gaagacaaguacagauacc

SEQ ID NO: 211743 - RNA, 19 nt, Homo sapiens
  misc_RNA (1)...(19): siRNA sense strand
ccauggauauccugcagau

SEQ ID NO: 211744 - RNA, 19 nt, Homo sapiens
  misc_RNA (1)...(19): siRNA sense strand
ggcaucauuucccugugua

SEQ ID NO: 211745 - RNA, 19 nt, Homo sapiens
  misc_RNA (1)...(19): siRNA sense strand
uggauauccugcagauuau

SEQ ID NO: 211746 - RNA, 19 nt, Homo sapiens
  misc_RNA (1)...(19): siRNA sense strand
ggaagacaaguacagauac

SEQ ID NO: 211747 - RNA, 19 nt, Homo sapiens
  misc_RNA (1)...(19): siRNA sense strand
ugcaaagaguguccaauca

SEQ ID NO: 211748 - RNA, 19 nt, Homo sapiens
  misc_RNA (1)...(19): siRNA sense strand
guggauaugugucugaacu

SEQ ID NO: 211749 - RNA, 19 nt, Homo sapiens
  misc_RNA (1)...(19): siRNA sense strand
acuggcugcugaauguuua

SEQ ID NO: 211750 - RNA, 19 nt, Homo sapiens
  misc_RNA (1)...(19): siRNA sense strand
acuaucccaugguggaaua

SEQ ID NO: 211751 - RNA, 19 nt, Homo sapiens
  misc_RNA (1)...(19): siRNA sense strand
ccggagcugcuuccaauuu

SEQ ID NO: 211752 - RNA, 19 nt, Homo sapiens
  misc_RNA (1)...(19): siRNA sense strand
ccaaauuccaagacaguug

SEQ ID NO: 211753 - RNA, 19 nt, Homo sapiens
  misc_RNA (1)...(19): siRNA sense strand
cagaaacugccaagcauca

SEQ ID NO: 211754 - RNA, 19 nt, Homo sapiens
  misc_RNA (1)...(19): siRNA sense strand
uaugacaucugccaaagcu

SEQ ID NO: 211755 - RNA, 19 nt, Homo sapiens
  misc_RNA (1)...(19): siRNA sense strand
aaugucagauucucagcuu

SEQ ID NO: 211756 - RNA, 19 nt, Homo sapiens
  misc_RNA (1)...(19): siRNA sense strand
ucgagacuuugccaaggua

SEQ ID NO: 211757 - RNA, 19 nt, Homo sapiens
  misc_RNA (1)...(19): siRNA sense strand
gcaaaaggccauaaaaugc

SEQ ID NO: 211758 - RNA, 19 nt, Homo sapiens
  misc_RNA (1)...(19): siRNA sense strand
cugcaugauucuauccaaa

SEQ ID NO: 211759 - RNA, 19 nt, Homo sapiens
  misc_RNA (1)...(19): siRNA sense strand
uaaagcacauuuggaagac

SEQ ID NO: 211760 - RNA, 19 nt, Homo sapiens
  misc_RNA (1)...(19): siRNA sense strand
acaggagucuaaagcacuu

SEQ ID NO: 211761 - RNA, 19 nt, Homo sapiens
  misc_RNA (1)...(19): siRNA sense strand
acagauaccuuuucaagca

SEQ ID NO: 211762 - RNA, 19 nt, Homo sapiens
  misc_RNA (1)...(19): siRNA sense strand
aagcacauuuggaagacaa

SEQ ID NO: 211763 - RNA, 19 nt, Homo sapiens
  misc_RNA (1)...(19): siRNA sense strand
gcuaauaauaagccagaga

SEQ ID NO: 211764 - RNA, 19 nt, Homo sapiens
  misc_RNA (1)...(19): siRNA sense strand
caagagcacaacaauuugg

SEQ ID NO: 211765 - RNA, 19 nt, Homo sapiens
  misc_RNA (1)...(19): siRNA sense strand
ccugucagcugcaugugau

SEQ ID NO: 211766 - RNA, 19 nt, Homo sapiens
  misc_RNA (1)...(19): siRNA sense strand
gcugcugaauguuuaugau

SEQ ID NO: 211767 - RNA, 19 nt, Homo sapiens
  misc_RNA (1)...(19): siRNA sense strand
acagagcucuaccagucuu

SEQ ID NO: 211768 - RNA, 19 nt, Homo sapiens
  misc_RNA (1)...(19): siRNA sense strand
acaguugggugaaguugca

SEQ ID NO: 211769 - RNA, 19 nt, Homo sapiens
  misc_RNA (1)...(19): siRNA sense strand
guuugaccacuauuuauga

SEQ ID NO: 211770 - RNA, 19 nt, Homo sapiens
  misc_RNA (1)...(19): siRNA sense strand
gcuuauaggacugccauga

SEQ ID NO: 211771 - RNA, 19 nt, Homo sapiens
  misc_RNA (1)...(19): siRNA sense strand
caucaggccaaauguaaca

SEQ ID NO: 211772 - RNA, 19 nt, Homo sapiens
  misc_RNA (1)...(19): siRNA sense strand
gauucuauccaaauuccaa

SEQ ID NO: 211773 - RNA, 19 nt, Homo sapiens
  misc_RNA (1)...(19): siRNA sense strand
ggcaaguucaacaggauuu

SEQ ID NO: 211774 - RNA, 19 nt, Homo sapiens
  misc_RNA (1)...(19): siRNA sense strand
gaacuggcugcugaauguu

SEQ ID NO: 211775 - RNA, 19 nt, Homo sapiens
  misc_RNA (1)...(19): siRNA sense strand
cugcugaauguuuaugaua

SEQ ID NO: 211776 - RNA, 19 nt, Homo sapiens
  misc_RNA (1)...(19): siRNA sense strand
aagcaucaggccaaaugua

SEQ ID NO: 211777 - RNA, 19 nt, Homo sapiens
  misc_RNA (1)...(19): siRNA sense strand
uggcaucauuucccugugu

SEQ ID NO: 211778 - RNA, 19 nt, Homo sapiens
  misc_RNA (1)...(19): siRNA sense strand
ccaugaaacuccgaagacu

SEQ ID NO: 211779 - RNA, 19 nt, Homo sapiens
  misc_RNA (1)...(19): siRNA sense strand
auaauaagccagagaucga

SEQ ID NO: 211780 - RNA, 19 nt, Homo sapiens
  misc_RNA (1)...(19): siRNA sense strand
cuaauaauaagccagagau

SEQ ID NO: 211781 - RNA, 19 nt, Homo sapiens
  misc_RNA (1)...(19): siRNA sense strand
ugggugaaguugcauccuu

SEQ ID NO: 211782 - RNA, 19 nt, Homo sapiens
  misc_RNA (1)...(19): siRNA sense strand
caucauuucccuguguaaa

SEQ ID NO: 211783 - RNA, 19 nt, Homo sapiens
  misc_RNA (1)...(19): siRNA sense strand
gcguggauaugugucugaa

SEQ ID NO: 211784 - RNA, 19 nt, Homo sapiens
  misc_RNA (1)...(19): siRNA sense strand
gcacuaucccaugguggaa

SEQ ID NO: 211785 - RNA, 19 nt, Homo sapiens
  misc_RNA (1)...(19): siRNA sense strand
gagccugucagcugcaugu

SEQ ID NO: 211786 - RNA, 19 nt, Homo sapiens
  misc_RNA (1)...(19): siRNA sense strand
guacagauaccuuuucaag

SEQ ID NO: 211787 - RNA, 19 nt, Homo sapiens
  misc_RNA (1)...(19): siRNA sense strand
gucccucucugcguggaua

SEQ ID NO: 211788 - RNA, 19 nt, Homo sapiens
  misc_RNA (1)...(19): siRNA sense strand
ggagcugcuuccaauuugc

SEQ ID NO: 211789 - RNA, 19 nt, Homo sapiens
  misc_RNA (1)...(19): siRNA sense strand
uuagcugaccugaauaaug

SEQ ID NO: 211790 - RNA, 19 nt, Homo sapiens
  misc_RNA (1)...(19): siRNA sense strand
guggcaaguucaacaggau

SEQ ID NO: 211791 - RNA, 19 nt, Homo sapiens
  misc_RNA (1)...(19): siRNA sense strand
acaacaauuuggucaacgu

SEQ ID NO: 211792 - RNA, 19 nt, Homo sapiens
  misc_RNA (1)...(19): siRNA sense strand
gacuacaucaggagaagau

SEQ ID NO: 211793 - RNA, 19 nt, Homo sapiens
  misc_RNA (1)...(19): siRNA sense strand
uaauaagccagagaucgaa

SEQ ID NO: 211794 - RNA, 19 nt, Homo sapiens
  misc_RNA (1)...(19): siRNA sense strand
ugucagauucucagcuuau

SEQ ID NO: 211795 - RNA, 19 nt, Homo sapiens
  misc_RNA (1)...(19): siRNA sense strand
ggauauccugcagauuauu

SEQ ID NO: 211796 - RNA, 19 nt, Homo sapiens
  misc_RNA (1)...(19): siRNA sense strand
agcaucaggccaaauguaa

SEQ ID NO: 211797 - RNA, 19 nt, Homo sapiens
  misc_RNA (1)...(19): siRNA sense strand
gcccuuugcuuggaucucu

SEQ ID NO: 211798 - RNA, 19 nt, Homo sapiens
  misc_RNA (1)...(19): siRNA sense strand
gcugaauguuuaugauacg

SEQ ID NO: 211799 - RNA, 19 nt, Homo sapiens
  misc_RNA (1)...(19): siRNA sense strand
agacuuugccaagguacua

SEQ ID NO: 211800 - RNA, 19 nt, Homo sapiens
  misc_RNA (1)...(19): siRNA sense strand
caagcaaguggcaaguuca

SEQ ID NO: 211801 - RNA, 19 nt, Homo sapiens
  misc_RNA (1)...(19): siRNA sense strand
agacaaguacagauaccuu

SEQ ID NO: 211802 - RNA, 19 nt, Homo sapiens
  misc_RNA (1)...(19): siRNA sense strand
gcaucauuucccuguguaa

SEQ ID NO: 211803 - RNA, 19 nt, Homo sapiens
  misc_RNA (1)...(19): siRNA sense strand
cugcaaagaguguccaauc

SEQ ID NO: 211804 - RNA, 19 nt, Homo sapiens
  misc_RNA (1)...(19): siRNA sense strand
cuuauaggacugccaugaa

SEQ ID NO: 211805 - RNA, 19 nt, Homo sapiens
  misc_RNA (1)...(19): siRNA sense strand
caaagaguguccaaucauu

SEQ ID NO: 211806 - RNA, 19 nt, Homo sapiens
  misc_RNA (1)...(19): siRNA sense strand
uagcugaccugaauaaugu

SEQ ID NO: 211807 - RNA, 19 nt, Homo sapiens
  misc_RNA (1)...(19): siRNA sense strand
gcaugauucuauccaaauu

SEQ ID NO: 211808 - RNA, 19 nt, Homo sapiens
  misc_RNA (1)...(19): siRNA sense strand
ugaacuggcugcugaaugu

SEQ ID NO: 211809 - RNA, 19 nt, Homo sapiens
  misc_RNA (1)...(19): siRNA sense strand
gauauccugcagauuauua

SEQ ID NO: 211810 - RNA, 19 nt, Homo sapiens
  misc_RNA (1)...(19): siRNA sense strand
gagaagauguucgagacuu

SEQ ID NO: 211811 - RNA, 19 nt, Homo sapiens
  misc_RNA (1)...(19): siRNA sense strand
gcacuuuaauuaugacauc

SEQ ID NO: 211812 - RNA, 19 nt, Homo sapiens
  misc_RNA (1)...(19): siRNA sense strand
guaaagcacauuuggaaga

SEQ ID NO: 211813 - RNA, 19 nt, Homo sapiens
  misc_RNA (1)...(19): siRNA sense strand
gaauauugcacuccgacua

SEQ ID NO: 211814 - RNA, 19 nt, Homo sapiens
  misc_RNA (1)...(19): siRNA sense strand
uuauaggacugccaugaaa

SEQ ID NO: 211815 - RNA, 19 nt, Homo sapiens
  misc_RNA (1)...(19): siRNA sense strand
gggugaaguugcauccuuu

SEQ ID NO: 211816 - RNA, 19 nt, Homo sapiens
  misc_RNA (1)...(19): siRNA sense strand
gcaagagcacaacaauuug

SEQ ID NO: 211817 - RNA, 19 nt, Homo sapiens
  misc_RNA (1)...(19): siRNA sense strand
gcacaacaauuuggucaac

SEQ ID NO: 211818 - RNA, 19 nt, Homo sapiens
  misc_RNA (1)...(19): siRNA sense strand
agcaagagcacaacaauuu

SEQ ID NO: 211819 - RNA, 19 nt, Homo sapiens
  misc_RNA (1)...(19): siRNA sense strand
agaagauguucgagacuuu

SEQ ID NO: 211820 - RNA, 19 nt, Homo sapiens
  misc_RNA (1)...(19): siRNA sense strand
gagcaagagcacaacaauu

SEQ ID NO: 211821 - RNA, 19 nt, Homo sapiens
  misc_RNA (1)...(19): siRNA sense strand
ucaagcaaguggcaaguuc

SEQ ID NO: 211822 - RNA, 19 nt, Homo sapiens
  misc_RNA (1)...(19): siRNA sense strand
ccacgagacucaaacaacu

SEQ ID NO: 211823 - RNA, 19 nt, Homo sapiens
  misc_RNA (1)...(19): siRNA sense strand
cagcacaaccucaagcaaa

SEQ ID NO: 211824 - RNA, 19 nt, Homo sapiens
  misc_RNA (1)...(19): siRNA sense strand
gcaaagaguguccaaucau

SEQ ID NO: 211825 - RNA, 19 nt, Homo sapiens
  misc_RNA (1)...(19): siRNA sense strand
auggauauccugcagauua

SEQ ID NO: 211826 - RNA, 19 nt, Homo sapiens
  misc_RNA (1)...(19): siRNA sense strand
uguaacaucugcaaagagu

SEQ ID NO: 211827 - RNA, 19 nt, Homo sapiens
  misc_RNA (1)...(19): siRNA sense strand
guccggagcugcuuccaau

SEQ ID NO: 211828 - RNA, 19 nt, Homo sapiens
  misc_RNA (1)...(19): siRNA sense strand
gcaaguggcaaguucaaca

SEQ ID NO: 211829 - RNA, 19 nt, Homo sapiens
  misc_RNA (1)...(19): siRNA sense strand
gcuuccaauuugcuaauaa

SEQ ID NO: 211830 - RNA, 19 nt, Homo sapiens
  misc_RNA (1)...(19): siRNA sense strand
uggaagacaaguacagaua

SEQ ID NO: 211831 - RNA, 19 nt, Homo sapiens
  misc_RNA (1)...(19): siRNA sense strand
ggauccguguccugucuuu

SEQ ID NO: 211832 - RNA, 19 nt, Homo sapiens
  misc_RNA (1)...(19): siRNA sense strand
gucuuuagcugaccugaau

SEQ ID NO: 211833 - RNA, 19 nt, Homo sapiens
  misc_RNA (1)...(19): siRNA sense strand
gacaaguacagauaccuuu

SEQ ID NO: 211834 - RNA, 19 nt, Homo sapiens
  misc_RNA (1)...(19): siRNA sense strand
ccaagcaucaggccaaaug

SEQ ID NO: 211835 - RNA, 19 nt, Homo sapiens
  misc_RNA (1)...(19): siRNA sense strand
ggagcaagagcacaacaau

SEQ ID NO: 211836 - RNA, 19 nt, Homo sapiens
  misc_RNA (1)...(19): siRNA sense strand
guguaaagcacauuuggaa

SEQ ID NO: 211837 - RNA, 19 nt, Homo sapiens
  misc_RNA (1)...(19): siRNA sense strand
caagacaguugggugaagu

SEQ ID NO: 211838 - RNA, 19 nt, Homo sapiens
  misc_RNA (1)...(19): siRNA sense strand
gaagauguucgagacuuug

SEQ ID NO: 211839 - RNA, 19 nt, Homo sapiens
  misc_RNA (1)...(19): siRNA sense strand
gucagauucucagcuuaua

SEQ ID NO: 211840 - RNA, 19 nt, Homo sapiens
  misc_RNA (1)...(19): siRNA sense strand
uaacaucugcaaagagugu

SEQ ID NO: 211841 - RNA, 19 nt, Homo sapiens
  misc_RNA (1)...(19): siRNA sense strand
cggagcugcuuccaauuug

SEQ ID NO: 211842 - RNA, 19 nt, Homo sapiens
  misc_RNA (1)...(19): siRNA sense strand
gaagacaaguacagauacc

SEQ ID NO: 211843 - RNA, 19 nt, Homo sapiens
  misc_RNA (1)...(19): siRNA sense strand
ccauggauauccugcagau

SEQ ID NO: 211844 - RNA, 19 nt, Homo sapiens
  misc_RNA (1)...(19): siRNA sense strand
ggcaucauuucccugugua

SEQ ID NO: 211845 - RNA, 19 nt, Homo sapiens
  misc_RNA (1)...(19): siRNA sense strand
uggauauccugcagauuau

SEQ ID NO: 211846 - RNA, 19 nt, Homo sapiens
  misc_RNA (1)...(19): siRNA sense strand
ggaagacaaguacagauac

SEQ ID NO: 211847 - RNA, 19 nt, Homo sapiens
  misc_RNA (1)...(19): siRNA sense strand
ugcaaagaguguccaauca

SEQ ID NO: 211848 - RNA, 19 nt, Homo sapiens
  misc_RNA (1)...(19): siRNA sense strand
guggauaugugucugaacu

SEQ ID NO: 211849 - RNA, 19 nt, Homo sapiens
  misc_RNA (1)...(19): siRNA sense strand
acuggcugcugaauguuua

SEQ ID NO: 211850 - RNA, 19 nt, Homo sapiens
  misc_RNA (1)...(19): siRNA sense strand
acuaucccaugguggaaua

SEQ ID NO: 211851 - RNA, 19 nt, Homo sapiens
  misc_RNA (1)...(19): siRNA sense strand
ccggagcugcuuccaauuu

SEQ ID NO: 211852 - RNA, 19 nt, Homo sapiens
  misc_RNA (1)...(19): siRNA sense strand
ccaaauuccaagacaguug

SEQ ID NO: 211853 - RNA, 19 nt, Homo sapiens
  misc_RNA (1)...(19): siRNA sense strand
cagaaacugccaagcauca

SEQ ID NO: 211854 - RNA, 19 nt, Homo sapiens
  misc_RNA (1)...(19): siRNA sense strand
uaugacaucugccaaagcu

SEQ ID NO: 211855 - RNA, 19 nt, Homo sapiens
  misc_RNA (1)...(19): siRNA sense strand
aaugucagauucucagcuu

SEQ ID NO: 211856 - RNA, 19 nt, Homo sapiens
  misc_RNA (1)...(19): siRNA sense strand
ucgagacuuugccaaggua

SEQ ID NO: 211857 - RNA, 19 nt, Homo sapiens
  misc_RNA (1)...(19): siRNA sense strand
gcaaaaggccauaaaaugc

SEQ ID NO: 211858 - RNA, 19 nt, Homo sapiens
  misc_RNA (1)...(19): siRNA sense strand
cugcaugauucuauccaaa

SEQ ID NO: 211859 - RNA, 19 nt, Homo sapiens
  misc_RNA (1)...(19): siRNA sense strand
uaaagcacauuuggaagac

SEQ ID NO: 211860 - RNA, 19 nt, Homo sapiens
  misc_RNA (1)...(19): siRNA sense strand
acaggagucuaaagcacuu

SEQ ID NO: 211861 - RNA, 19 nt, Homo sapiens
  misc_RNA (1)...(19): siRNA sense strand
acagauaccuuuucaagca

SEQ ID NO: 211862 - RNA, 19 nt, Homo sapiens
  misc_RNA (1)...(19): siRNA sense strand
aagcacauuuggaagacaa

SEQ ID NO: 211863 - RNA, 19 nt, Homo sapiens
  misc_RNA (1)...(19): siRNA sense strand
gcuaauaauaagccagaga

SEQ ID NO: 211864 - RNA, 19 nt, Homo sapiens
  misc_RNA (1)...(19): siRNA sense strand
caagagcacaacaauuugg

SEQ ID NO: 211865 - RNA, 19 nt, Homo sapiens
  misc_RNA (1)...(19): siRNA sense strand
ccugucagcugcaugugau

SEQ ID NO: 211866 - RNA, 19 nt, Homo sapiens
  misc_RNA (1)...(19): siRNA sense strand
gcugcugaauguuuaugau

SEQ ID NO: 211867 - RNA, 19 nt, Homo sapiens
  misc_RNA (1)...(19): siRNA sense strand
acagagcucuaccagucuu

SEQ ID NO: 211868 - RNA, 19 nt, Homo sapiens
  misc_RNA (1)...(19): siRNA sense strand
acaguugggugaaguugca

SEQ ID NO: 211869 - RNA, 19 nt, Homo sapiens
  misc_RNA (1)...(19): siRNA sense strand
guuugaccacuauuuauga

SEQ ID NO: 211870 - RNA, 19 nt, Homo sapiens
  misc_RNA (1)...(19): siRNA sense strand
gcuuauaggacugccauga

SEQ ID NO: 211871 - RNA, 19 nt, Homo sapiens
  misc_RNA (1)...(19): siRNA sense strand
caucaggccaaauguaaca

SEQ ID NO: 211872 - RNA, 19 nt, Homo sapiens
  misc_RNA (1)...(19): siRNA sense strand
gauucuauccaaauuccaa

SEQ ID NO: 211873 - RNA, 19 nt, Homo sapiens
  misc_RNA (1)...(19): siRNA sense strand
ggcaaguucaacaggauuu

SEQ ID NO: 211874 - RNA, 19 nt, Homo sapiens
  misc_RNA (1)...(19): siRNA sense strand
gaacuggcugcugaauguu

SEQ ID NO: 211875 - RNA, 19 nt, Homo sapiens
  misc_RNA (1)...(19): siRNA sense strand
cugcugaauguuuaugaua

SEQ ID NO: 211876 - RNA, 19 nt, Homo sapiens
  misc_RNA (1)...(19): siRNA sense strand
aagcaucaggccaaaugua

SEQ ID NO: 211877 - RNA, 19 nt, Homo sapiens
  misc_RNA (1)...(19): siRNA sense strand
uggcaucauuucccugugu

SEQ ID NO: 211878 - RNA, 19 nt, Homo sapiens
  misc_RNA (1)...(19): siRNA sense strand
ccaugaaacuccgaagacu

SEQ ID NO: 211879 - RNA, 19 nt, Homo sapiens
  misc_RNA (1)...(19): siRNA sense strand
auaauaagccagagaucga

SEQ ID NO: 211880 - RNA, 19 nt, Homo sapiens
  misc_RNA (1)...(19): siRNA sense strand
cuaauaauaagccagagau

SEQ ID NO: 211881 - RNA, 19 nt, Homo sapiens
  misc_RNA (1)...(19): siRNA sense strand
ugggugaaguugcauccuu

SEQ ID NO: 211882 - RNA, 19 nt, Homo sapiens
  misc_RNA (1)...(19): siRNA sense strand
caucauuucccuguguaaa

SEQ ID NO: 211883 - RNA, 19 nt, Homo sapiens
  misc_RNA (1)...(19): siRNA sense strand
gcguggauaugugucugaa

SEQ ID NO: 211884 - RNA, 19 nt, Homo sapiens
  misc_RNA (1)...(19): siRNA sense strand
gcacuaucccaugguggaa

SEQ ID NO: 211885 - RNA, 19 nt, Homo sapiens
  misc_RNA (1)...(19): siRNA sense strand
gagccugucagcugcaugu

SEQ ID NO: 211886 - RNA, 19 nt, Homo sapiens
  misc_RNA (1)...(19): siRNA sense strand
guacagauaccuuuucaag

SEQ ID NO: 211887 - RNA, 19 nt, Homo sapiens
  misc_RNA (1)...(19): siRNA sense strand
gucccucucugcguggaua

SEQ ID NO: 211888 - RNA, 19 nt, Homo sapiens
  misc_RNA (1)...(19): siRNA sense strand
ggagcugcuuccaauuugc

SEQ ID NO: 211889 - RNA, 19 nt, Homo sapiens
  misc_RNA (1)...(19): siRNA sense strand
uuagcugaccugaauaaug

SEQ ID NO: 211890 - RNA, 19 nt, Homo sapiens
  misc_RNA (1)...(19): siRNA sense strand
guggcaaguucaacaggau

SEQ ID NO: 211891 - RNA, 19 nt, Homo sapiens
  misc_RNA (1)...(19): siRNA sense strand
acaacaauuuggucaacgu

SEQ ID NO: 211892 - RNA, 19 nt, Homo sapiens
  misc_RNA (1)...(19): siRNA sense strand
gacuacaucaggagaagau

SEQ ID NO: 211893 - RNA, 19 nt, Homo sapiens
  misc_RNA (1)...(19): siRNA sense strand
uaauaagccagagaucgaa

SEQ ID NO: 211894 - RNA, 19 nt, Homo sapiens
  misc_RNA (1)...(19): siRNA sense strand
ugucagauucucagcuuau

SEQ ID NO: 211895 - RNA, 19 nt, Homo sapiens
  misc_RNA (1)...(19): siRNA sense strand
ggauauccugcagauuauu

SEQ ID NO: 211896 - RNA, 19 nt, Homo sapiens
  misc_RNA (1)...(19): siRNA sense strand
agcaucaggccaaauguaa

SEQ ID NO: 211897 - RNA, 19 nt, Homo sapiens
  misc_RNA (1)...(19): siRNA sense strand
gcccuuugcuuggaucucu

SEQ ID NO: 211898 - RNA, 19 nt, Homo sapiens
  misc_RNA (1)...(19): siRNA sense strand
gcugaauguuuaugauacg

SEQ ID NO: 211899 - RNA, 19 nt, Homo sapiens
  misc_RNA (1)...(19): siRNA sense strand
agacuuugccaagguacua

SEQ ID NO: 211900 - RNA, 19 nt, Homo sapiens
  misc_RNA (1)...(19): siRNA sense strand
caagcaaguggcaaguuca

SEQ ID NO: 211901 - RNA, 19 nt, Homo sapiens
  misc_RNA (1)...(19): siRNA sense strand
agacaaguacagauaccuu

SEQ ID NO: 211902 - RNA, 19 nt, Homo sapiens
  misc_RNA (1)...(19): siRNA sense strand
gcaucauuucccuguguaa

SEQ ID NO: 211903 - RNA, 19 nt, Homo sapiens
  misc_RNA (1)...(19): siRNA sense strand
cugcaaagaguguccaauc

SEQ ID NO: 211904 - RNA, 19 nt, Homo sapiens
  misc_RNA (1)...(19): siRNA sense strand
cuuauaggacugccaugaa

SEQ ID NO: 211905 - RNA, 19 nt, Homo sapiens
  misc_RNA (1)...(19): siRNA sense strand
caaagaguguccaaucauu

SEQ ID NO: 211906 - RNA, 19 nt, Homo sapiens
  misc_RNA (1)...(19): siRNA sense strand
uagcugaccugaauaaugu

SEQ ID NO: 211907 - RNA, 19 nt, Homo sapiens
  misc_RNA (1)...(19): siRNA sense strand
gcaugauucuauccaaauu

SEQ ID NO: 211908 - RNA, 19 nt, Homo sapiens
  misc_RNA (1)...(19): siRNA sense strand
ugaacuggcugcugaaugu

SEQ ID NO: 211909 - RNA, 19 nt, Homo sapiens
  misc_RNA (1)...(19): siRNA sense strand
gauauccugcagauuauua

SEQ ID NO: 211910 - RNA, 19 nt, Homo sapiens
  misc_RNA (1)...(19): siRNA sense strand
gagaagauguucgagacuu

SEQ ID NO: 211911 - RNA, 19 nt, Homo sapiens
  misc_RNA (1)...(19): siRNA sense strand
gcacuuuaauuaugacauc

SEQ ID NO: 211912 - RNA, 19 nt, Homo sapiens
  misc_RNA (1)...(19): siRNA sense strand
guaaagcacauuuggaaga

SEQ ID NO: 211913 - RNA, 19 nt, Homo sapiens
  misc_RNA (1)...(19): siRNA sense strand
gaauauugcacuccgacua

SEQ ID NO: 211914 - RNA, 19 nt, Homo sapiens
  misc_RNA (1)...(19): siRNA sense strand
uuauaggacugccaugaaa

SEQ ID NO: 211915 - RNA, 19 nt, Homo sapiens
  misc_RNA (1)...(19): siRNA sense strand
gggugaaguugcauccuuu

SEQ ID NO: 211916 - RNA, 19 nt, Homo sapiens
  misc_RNA (1)...(19): siRNA sense strand
gcaagagcacaacaauuug

SEQ ID NO: 211917 - RNA, 19 nt, Homo sapiens
  misc_RNA (1)...(19): siRNA sense strand
gcacaacaauuuggucaac

SEQ ID NO: 211918 - RNA, 19 nt, Homo sapiens
  misc_RNA (1)...(19): siRNA sense strand
agcaagagcacaacaauuu

SEQ ID NO: 211919 - RNA, 19 nt, Homo sapiens
  misc_RNA (1)...(19): siRNA sense strand
agaagauguucgagacuuu

SEQ ID NO: 211920 - RNA, 19 nt, Homo sapiens
  misc_RNA (1)...(19): siRNA sense strand
gagcaagagcacaacaauu

SEQ ID NO: 211921 - RNA, 19 nt, Homo sapiens
  misc_RNA (1)...(19): siRNA sense strand
ucaagcaaguggcaaguuc

SEQ ID NO: 211922 - RNA, 19 nt, Homo sapiens
  misc_RNA (1)...(19): siRNA sense strand
ccacgagacucaaacaacu

SEQ ID NO: 211923 - RNA, 19 nt, Homo sapiens
  misc_RNA (1)...(19): siRNA sense strand
cagcacaaccucaagcaaa

SEQ ID NO: 211924 - RNA, 19 nt, Homo sapiens
  misc_RNA (1)...(19): siRNA sense strand
gcaaagaguguccaaucau

SEQ ID NO: 211925 - RNA, 19 nt, Homo sapiens
  misc_RNA (1)...(19): siRNA sense strand
auggauauccugcagauua

SEQ ID NO: 211926 - RNA, 19 nt, Homo sapiens
  misc_RNA (1)...(19): siRNA sense strand
uguaacaucugcaaagagu

SEQ ID NO: 211927 - RNA, 19 nt, Homo sapiens
  misc_RNA (1)...(19): siRNA sense strand
guccggagcugcuuccaau

SEQ ID NO: 211928 - RNA, 19 nt, Homo sapiens
  misc_RNA (1)...(19): siRNA sense strand
gcaaguggcaaguucaaca

SEQ ID NO: 211929 - RNA, 19 nt, Homo sapiens
  misc_RNA (1)...(19): siRNA sense strand
gcuuccaauuugcuaauaa

SEQ ID NO: 211930 - RNA, 19 nt, Homo sapiens
  misc_RNA (1)...(19): siRNA sense strand
uggaagacaaguacagaua

SEQ ID NO: 211931 - RNA, 19 nt, Homo sapiens
  misc_RNA (1)...(19): siRNA sense strand
ggauccguguccugucuuu

SEQ ID NO: 211932 - RNA, 19 nt, Homo sapiens
  misc_RNA (1)...(19): siRNA sense strand
gucuuuagcugaccugaau

SEQ ID NO: 211933 - RNA, 19 nt, Homo sapiens
  misc_RNA (1)...(19): siRNA sense strand
gacaaguacagauaccuuu

SEQ ID NO: 211934 - RNA, 19 nt, Homo sapiens
  misc_RNA (1)...(19): siRNA sense strand
ccaagcaucaggccaaaug

SEQ ID NO: 211935 - RNA, 19 nt, Homo sapiens
  misc_RNA (1)...(19): siRNA sense strand
ggagcaagagcacaacaau

SEQ ID NO: 211936 - RNA, 19 nt, Homo sapiens
  misc_RNA (1)...(19): siRNA sense strand
guguaaagcacauuuggaa

SEQ ID NO: 211937 - RNA, 19 nt, Homo sapiens
  misc_RNA (1)...(19): siRNA sense strand
caagacaguugggugaagu

SEQ ID NO: 211938 - RNA, 19 nt, Homo sapiens
  misc_RNA (1)...(19): siRNA sense strand
gaagauguucgagacuuug

SEQ ID NO: 211939 - RNA, 19 nt, Homo sapiens
  misc_RNA (1)...(19): siRNA sense strand
gucagauucucagcuuaua

SEQ ID NO: 211940 - RNA, 19 nt, Homo sapiens
  misc_RNA (1)...(19): siRNA sense strand
uaacaucugcaaagagugu

SEQ ID NO: 211941 - RNA, 19 nt, Homo sapiens
  misc_RNA (1)...(19): siRNA sense strand
cggagcugcuuccaauuug

SEQ ID NO: 211942 - RNA, 19 nt, Homo sapiens
  misc_RNA (1)...(19): siRNA sense strand
gaagacaaguacagauacc

SEQ ID NO: 211943 - RNA, 19 nt, Homo sapiens
  misc_RNA (1)...(19): siRNA sense strand
ccauggauauccugcagau

SEQ ID NO: 211944 - RNA, 19 nt, Homo sapiens
  misc_RNA (1)...(19): siRNA sense strand
ggcaucauuucccugugua

SEQ ID NO: 211945 - RNA, 19 nt, Homo sapiens
  misc_RNA (1)...(19): siRNA sense strand
uggauauccugcagauuau

SEQ ID NO: 211946 - RNA, 19 nt, Homo sapiens
  misc_RNA (1)...(19): siRNA sense strand
ggaagacaaguacagauac

SEQ ID NO: 211947 - RNA, 19 nt, Homo sapiens
  misc_RNA (1)...(19): siRNA sense strand
ugcaaagaguguccaauca

SEQ ID NO: 211948 - RNA, 19 nt, Homo sapiens
  misc_RNA (1)...(19): siRNA sense strand
guggauaugugucugaacu

SEQ ID NO: 211949 - RNA, 19 nt, Homo sapiens
  misc_RNA (1)...(19): siRNA sense strand
acuggcugcugaauguuua

SEQ ID NO: 211950 - RNA, 19 nt, Homo sapiens
  misc_RNA (1)...(19): siRNA sense strand
acuaucccaugguggaaua

SEQ ID NO: 211951 - RNA, 19 nt, Homo sapiens
  misc_RNA (1)...(19): siRNA sense strand
ccggagcugcuuccaauuu

SEQ ID NO: 211952 - RNA, 19 nt, Homo sapiens
  misc_RNA (1)...(19): siRNA sense strand
ccaaauuccaagacaguug

SEQ ID NO: 211953 - RNA, 19 nt, Homo sapiens
  misc_RNA (1)...(19): siRNA sense strand
cagaaacugccaagcauca

SEQ ID NO: 211954 - RNA, 19 nt, Homo sapiens
  misc_RNA (1)...(19): siRNA sense strand
uaugacaucugccaaagcu

SEQ ID NO: 211955 - RNA, 19 nt, Homo sapiens
  misc_RNA (1)...(19): siRNA sense strand
aaugucagauucucagcuu

SEQ ID NO: 211956 - RNA, 19 nt, Homo sapiens
  misc_RNA (1)...(19): siRNA sense strand
ucgagacuuugccaaggua

SEQ ID NO: 211957 - RNA, 19 nt, Homo sapiens
  misc_RNA (1)...(19): siRNA sense strand
gcaaaaggccauaaaaugc

SEQ ID NO: 211958 - RNA, 19 nt, Homo sapiens
  misc_RNA (1)...(19): siRNA sense strand
cugcaugauucuauccaaa

SEQ ID NO: 211959 - RNA, 19 nt, Homo sapiens
  misc_RNA (1)...(19): siRNA sense strand
uaaagcacauuuggaagac

SEQ ID NO: 211960 - RNA, 19 nt, Homo sapiens
  misc_RNA (1)...(19): siRNA sense strand
acaggagucuaaagcacuu

SEQ ID NO: 211961 - RNA, 19 nt, Homo sapiens
  misc_RNA (1)...(19): siRNA sense strand
acagauaccuuuucaagca

SEQ ID NO: 211962 - RNA, 19 nt, Homo sapiens
  misc_RNA (1)...(19): siRNA sense strand
aagcacauuuggaagacaa

SEQ ID NO: 211963 - RNA, 19 nt, Homo sapiens
  misc_RNA (1)...(19): siRNA sense strand
gcuaauaauaagccagaga

SEQ ID NO: 211964 - RNA, 19 nt, Homo sapiens
  misc_RNA (1)...(19): siRNA sense strand
caagagcacaacaauuugg

SEQ ID NO: 211965 - RNA, 19 nt, Homo sapiens
  misc_RNA (1)...(19): siRNA sense strand
ccugucagcugcaugugau

SEQ ID NO: 211966 - RNA, 19 nt, Homo sapiens
  misc_RNA (1)...(19): siRNA sense strand
gcugcugaauguuuaugau

SEQ ID NO: 211967 - RNA, 19 nt, Homo sapiens
  misc_RNA (1)...(19): siRNA sense strand
acagagcucuaccagucuu

SEQ ID NO: 211968 - RNA, 19 nt, Homo sapiens
  misc_RNA (1)...(19): siRNA sense strand
acaguugggugaaguugca

SEQ ID NO: 211969 - RNA, 19 nt, Homo sapiens
  misc_RNA (1)...(19): siRNA sense strand
guuugaccacuauuuauga

SEQ ID NO: 211970 - RNA, 19 nt, Homo sapiens
  misc_RNA (1)...(19): siRNA sense strand
gcuuauaggacugccauga

SEQ ID NO: 211971 - RNA, 19 nt, Homo sapiens
  misc_RNA (1)...(19): siRNA sense strand
caucaggccaaauguaaca

SEQ ID NO: 211972 - RNA, 19 nt, Homo sapiens
  misc_RNA (1)...(19): siRNA sense strand
gauucuauccaaauuccaa

SEQ ID NO: 211973 - RNA, 19 nt, Homo sapiens
  misc_RNA (1)...(19): siRNA sense strand
ggcaaguucaacaggauuu

SEQ ID NO: 211974 - RNA, 19 nt, Homo sapiens
  misc_RNA (1)...(19): siRNA sense strand
gaacuggcugcugaauguu

SEQ ID NO: 211975 - RNA, 19 nt, Homo sapiens
  misc_RNA (1)...(19): siRNA sense strand
cugcugaauguuuaugaua

SEQ ID NO: 211976 - RNA, 19 nt, Homo sapiens
  misc_RNA (1)...(19): siRNA sense strand
aagcaucaggccaaaugua

SEQ ID NO: 211977 - RNA, 19 nt, Homo sapiens
  misc_RNA (1)...(19): siRNA sense strand
uggcaucauuucccugugu

SEQ ID NO: 211978 - RNA, 19 nt, Homo sapiens
  misc_RNA (1)...(19): siRNA sense strand
ccaugaaacuccgaagacu

SEQ ID NO: 211979 - RNA, 19 nt, Homo sapiens
  misc_RNA (1)...(19): siRNA sense strand
auaauaagccagagaucga

SEQ ID NO: 211980 - RNA, 19 nt, Homo sapiens
  misc_RNA (1)...(19): siRNA sense strand
cuaauaauaagccagagau

SEQ ID NO: 211981 - RNA, 19 nt, Homo sapiens
  misc_RNA (1)...(19): siRNA sense strand
ugggugaaguugcauccuu

SEQ ID NO: 211982 - RNA, 19 nt, Homo sapiens
  misc_RNA (1)...(19): siRNA sense strand
caucauuucccuguguaaa

SEQ ID NO: 211983 - RNA, 19 nt, Homo sapiens
  misc_RNA (1)...(19): siRNA sense strand
gcguggauaugugucugaa

SEQ ID NO: 211984 - RNA, 19 nt, Homo sapiens
  misc_RNA (1)...(19): siRNA sense strand
gcacuaucccaugguggaa

SEQ ID NO: 211985 - RNA, 19 nt, Homo sapiens
  misc_RNA (1)...(19): siRNA sense strand
gagccugucagcugcaugu

SEQ ID NO: 211986 - RNA, 19 nt, Homo sapiens
  misc_RNA (1)...(19): siRNA sense strand
guacagauaccuuuucaag

SEQ ID NO: 211987 - RNA, 19 nt, Homo sapiens
  misc_RNA (1)...(19): siRNA sense strand
gucccucucugcguggaua

SEQ ID NO: 211988 - RNA, 19 nt, Homo sapiens
  misc_RNA (1)...(19): siRNA sense strand
ggagcugcuuccaauuugc

SEQ ID NO: 211989 - RNA, 19 nt, Homo sapiens
  misc_RNA (1)...(19): siRNA sense strand
uuagcugaccugaauaaug

SEQ ID NO: 211990 - RNA, 19 nt, Homo sapiens
  misc_RNA (1)...(19): siRNA sense strand
guggcaaguucaacaggau

SEQ ID NO: 211991 - RNA, 19 nt, Homo sapiens
  misc_RNA (1)...(19): siRNA sense strand
acaacaauuuggucaacgu

SEQ ID NO: 211992 - RNA, 19 nt, Homo sapiens
  misc_RNA (1)...(19): siRNA sense strand
gacuacaucaggagaagau

SEQ ID NO: 211993 - RNA, 19 nt, Homo sapiens
  misc_RNA (1)...(19): siRNA sense strand
uaauaagccagagaucgaa

SEQ ID NO: 211994 - RNA, 19 nt, Homo sapiens
  misc_RNA (1)...(19): siRNA sense strand
ugucagauucucagcuuau

SEQ ID NO: 211995 - RNA, 19 nt, Homo sapiens
  misc_RNA (1)...(19): siRNA sense strand
ggauauccugcagauuauu

SEQ ID NO: 211996 - RNA, 19 nt, Homo sapiens
  misc_RNA (1)...(19): siRNA sense strand
agcaucaggccaaauguaa

SEQ ID NO: 211997 - RNA, 19 nt, Homo sapiens
  misc_RNA (1)...(19): siRNA sense strand
gcccuuugcuuggaucucu

SEQ ID NO: 211998 - RNA, 19 nt, Homo sapiens
  misc_RNA (1)...(19): siRNA sense strand
gcugaauguuuaugauacg

SEQ ID NO: 211999 - RNA, 19 nt, Homo sapiens
  misc_RNA (1)...(19): siRNA sense strand
agacuuugccaagguacua

SEQ ID NO: 212000 - RNA, 19 nt, Homo sapiens
  misc_RNA (1)...(19): siRNA sense strand
caagcaaguggcaaguuca

SEQ ID NO: 212001 - RNA, 19 nt, Homo sapiens
  misc_RNA (1)...(19): siRNA sense strand
agacaaguacagauaccuu

SEQ ID NO: 212002 - RNA, 19 nt, Homo sapiens
  misc_RNA (1)...(19): siRNA sense strand
gcaucauuucccuguguaa

SEQ ID NO: 212003 - RNA, 19 nt, Homo sapiens
  misc_RNA (1)...(19): siRNA sense strand
cugcaaagaguguccaauc

SEQ ID NO: 212004 - RNA, 19 nt, Homo sapiens
  misc_RNA (1)...(19): siRNA sense strand
cuuauaggacugccaugaa

SEQ ID NO: 212005 - RNA, 19 nt, Homo sapiens
  misc_RNA (1)...(19): siRNA sense strand
caaagaguguccaaucauu

SEQ ID NO: 212006 - RNA, 19 nt, Homo sapiens
  misc_RNA (1)...(19): siRNA sense strand
uagcugaccugaauaaugu

SEQ ID NO: 212007 - RNA, 19 nt, Homo sapiens
  misc_RNA (1)...(19): siRNA sense strand
gcaugauucuauccaaauu

SEQ ID NO: 212008 - RNA, 19 nt, Homo sapiens
  misc_RNA (1)...(19): siRNA sense strand
ugaacuggcugcugaaugu

SEQ ID NO: 212009 - RNA, 19 nt, Homo sapiens
  misc_RNA (1)...(19): siRNA sense strand
gauauccugcagauuauua

SEQ ID NO: 212010 - RNA, 19 nt, Homo sapiens
  misc_RNA (1)...(19): siRNA sense strand
gagaagauguucgagacuu

SEQ ID NO: 212011 - RNA, 19 nt, Homo sapiens
  misc_RNA (1)...(19): siRNA sense strand
gcacuuuaauuaugacauc

SEQ ID NO: 212012 - RNA, 19 nt, Homo sapiens
  misc_RNA (1)...(19): siRNA sense strand
guaaagcacauuuggaaga

SEQ ID NO: 212013 - RNA, 19 nt, Homo sapiens
  misc_RNA (1)...(19): siRNA sense strand
gaauauugcacuccgacua

SEQ ID NO: 212014 - RNA, 19 nt, Homo sapiens
  misc_RNA (1)...(19): siRNA sense strand
uuauaggacugccaugaaa

SEQ ID NO: 212015 - RNA, 19 nt, Homo sapiens
  misc_RNA (1)...(19): siRNA sense strand
gggugaaguugcauccuuu

SEQ ID NO: 212016 - RNA, 19 nt, Homo sapiens
  misc_RNA (1)...(19): siRNA sense strand
gcaagagcacaacaauuug

SEQ ID NO: 212017 - RNA, 19 nt, Homo sapiens
  misc_RNA (1)...(19): siRNA sense strand
gcacaacaauuuggucaac

SEQ ID NO: 212018 - RNA, 19 nt, Homo sapiens
  misc_RNA (1)...(19): siRNA sense strand
agcaagagcacaacaauuu

SEQ ID NO: 212019 - RNA, 19 nt, Homo sapiens
  misc_RNA (1)...(19): siRNA sense strand
agaagauguucgagacuuu

SEQ ID NO: 212020 - RNA, 19 nt, Homo sapiens
  misc_RNA (1)...(19): siRNA sense strand
gagcaagagcacaacaauu

SEQ ID NO: 212021 - RNA, 19 nt, Homo sapiens
  misc_RNA (1)...(19): siRNA sense strand
ucaagcaaguggcaaguuc

SEQ ID NO: 212022 - RNA, 19 nt, Homo sapiens
  misc_RNA (1)...(19): siRNA sense strand
ccacgagacucaaacaacu

SEQ ID NO: 212023 - RNA, 19 nt, Homo sapiens
  misc_RNA (1)...(19): siRNA sense strand
cagcacaaccucaagcaaa

SEQ ID NO: 212024 - RNA, 19 nt, Homo sapiens
  misc_RNA (1)...(19): siRNA sense strand
gcaaagaguguccaaucau

SEQ ID NO: 212025 - RNA, 19 nt, Homo sapiens
  misc_RNA (1)...(19): siRNA sense strand
auggauauccugcagauua

SEQ ID NO: 212026 - RNA, 19 nt, Homo sapiens
  misc_RNA (1)...(19): siRNA sense strand
uguaacaucugcaaagagu

SEQ ID NO: 212027 - RNA, 19 nt, Homo sapiens
  misc_RNA (1)...(19): siRNA sense strand
guccggagcugcuuccaau

SEQ ID NO: 212028 - RNA, 19 nt, Homo sapiens
  misc_RNA (1)...(19): siRNA sense strand
gcaaguggcaaguucaaca

SEQ ID NO: 212029 - RNA, 19 nt, Homo sapiens
  misc_RNA (1)...(19): siRNA sense strand
gcuuccaauuugcuaauaa

SEQ ID NO: 212030 - RNA, 19 nt, Homo sapiens
  misc_RNA (1)...(19): siRNA sense strand
uggaagacaaguacagaua

SEQ ID NO: 212031 - RNA, 19 nt, Homo sapiens
  misc_RNA (1)...(19): siRNA sense strand
ggauccguguccugucuuu

SEQ ID NO: 212032 - RNA, 19 nt, Homo sapiens
  misc_RNA (1)...(19): siRNA sense strand
gucuuuagcugaccugaau

SEQ ID NO: 212033 - RNA, 19 nt, Homo sapiens
  misc_RNA (1)...(19): siRNA sense strand
gacaaguacagauaccuuu

SEQ ID NO: 212034 - RNA, 19 nt, Homo sapiens
  misc_RNA (1)...(19): siRNA sense strand
ccaagcaucaggccaaaug

SEQ ID NO: 212035 - RNA, 19 nt, Homo sapiens
  misc_RNA (1)...(19): siRNA sense strand
ggagcaagagcacaacaau

SEQ ID NO: 212036 - RNA, 19 nt, Homo sapiens
  misc_RNA (1)...(19): siRNA sense strand
guguaaagcacauuuggaa

SEQ ID NO: 212037 - RNA, 19 nt, Homo sapiens
  misc_RNA (1)...(19): siRNA sense strand
caagacaguugggugaagu

SEQ ID NO: 212038 - RNA, 19 nt, Homo sapiens
  misc_RNA (1)...(19): siRNA sense strand
gaagauguucgagacuuug

SEQ ID NO: 212039 - RNA, 19 nt, Homo sapiens
  misc_RNA (1)...(19): siRNA sense strand
gucagauucucagcuuaua

SEQ ID NO: 212040 - RNA, 19 nt, Homo sapiens
  misc_RNA (1)...(19): siRNA sense strand
uaacaucugcaaagagugu

SEQ ID NO: 212041 - RNA, 19 nt, Homo sapiens
  misc_RNA (1)...(19): siRNA sense strand
cggagcugcuuccaauuug

SEQ ID NO: 212042 - RNA, 19 nt, Homo sapiens
  misc_RNA (1)...(19): siRNA sense strand
gaagacaaguacagauacc

SEQ ID NO: 212043 - RNA, 19 nt, Homo sapiens
  misc_RNA (1)...(19): siRNA sense strand
ccauggauauccugcagau

SEQ ID NO: 212044 - RNA, 19 nt, Homo sapiens
  misc_RNA (1)...(19): siRNA sense strand
ggcaucauuucccugugua

SEQ ID NO: 212045 - RNA, 19 nt, Homo sapiens
  misc_RNA (1)...(19): siRNA sense strand
uggauauccugcagauuau

SEQ ID NO: 212046 - RNA, 19 nt, Homo sapiens
  misc_RNA (1)...(19): siRNA sense strand
ggaagacaaguacagauac

SEQ ID NO: 212047 - RNA, 19 nt, Homo sapiens
  misc_RNA (1)...(19): siRNA sense strand
ugcaaagaguguccaauca

SEQ ID NO: 212048 - RNA, 19 nt, Homo sapiens
  misc_RNA (1)...(19): siRNA sense strand
guggauaugugucugaacu

SEQ ID NO: 212049 - RNA, 19 nt, Homo sapiens
  misc_RNA (1)...(19): siRNA sense strand
acuggcugcugaauguuua

SEQ ID NO: 212050 - RNA, 19 nt, Homo sapiens
  misc_RNA (1)...(19): siRNA sense strand
acuaucccaugguggaaua

SEQ ID NO: 212051 - RNA, 19 nt, Homo sapiens
  misc_RNA (1)...(19): siRNA sense strand
ccggagcugcuuccaauuu

SEQ ID NO: 212052 - RNA, 19 nt, Homo sapiens
  misc_RNA (1)...(19): siRNA sense strand
ccaaauuccaagacaguug

SEQ ID NO: 212053 - RNA, 19 nt, Homo sapiens
  misc_RNA (1)...(19): siRNA sense strand
cagaaacugccaagcauca

SEQ ID NO: 212054 - RNA, 19 nt, Homo sapiens
  misc_RNA (1)...(19): siRNA sense strand
uaugacaucugccaaagcu

SEQ ID NO: 212055 - RNA, 19 nt, Homo sapiens
  misc_RNA (1)...(19): siRNA sense strand
aaugucagauucucagcuu

SEQ ID NO: 212056 - RNA, 19 nt, Homo sapiens
  misc_RNA (1)...(19): siRNA sense strand
ucgagacuuugccaaggua

SEQ ID NO: 212057 - RNA, 19 nt, Homo sapiens
  misc_RNA (1)...(19): siRNA sense strand
gcaaaaggccauaaaaugc

SEQ ID NO: 212058 - RNA, 19 nt, Homo sapiens
  misc_RNA (1)...(19): siRNA sense strand
cugcaugauucuauccaaa

SEQ ID NO: 212059 - RNA, 19 nt, Homo sapiens
  misc_RNA (1)...(19): siRNA sense strand
uaaagcacauuuggaagac

SEQ ID NO: 212060 - RNA, 19 nt, Homo sapiens
  misc_RNA (1)...(19): siRNA sense strand
acaggagucuaaagcacuu

SEQ ID NO: 212061 - RNA, 19 nt, Homo sapiens
  misc_RNA (1)...(19): siRNA sense strand
acagauaccuuuucaagca

SEQ ID NO: 212062 - RNA, 19 nt, Homo sapiens
  misc_RNA (1)...(19): siRNA sense strand
aagcacauuuggaagacaa

SEQ ID NO: 212063 - RNA, 19 nt, Homo sapiens
  misc_RNA (1)...(19): siRNA sense strand
gcuaauaauaagccagaga

SEQ ID NO: 212064 - RNA, 19 nt, Homo sapiens
  misc_RNA (1)...(19): siRNA sense strand
caagagcacaacaauuugg

SEQ ID NO: 212065 - RNA, 19 nt, Homo sapiens
  misc_RNA (1)...(19): siRNA sense strand
ccugucagcugcaugugau

SEQ ID NO: 212066 - RNA, 19 nt, Homo sapiens
  misc_RNA (1)...(19): siRNA sense strand
gcugcugaauguuuaugau

SEQ ID NO: 212067 - RNA, 19 nt, Homo sapiens
  misc_RNA (1)...(19): siRNA sense strand
acagagcucuaccagucuu

SEQ ID NO: 212068 - RNA, 19 nt, Homo sapiens
  misc_RNA (1)...(19): siRNA sense strand
acaguugggugaaguugca

SEQ ID NO: 212069 - RNA, 19 nt, Homo sapiens
  misc_RNA (1)...(19): siRNA sense strand
guuugaccacuauuuauga

SEQ ID NO: 212070 - RNA, 19 nt, Homo sapiens
  misc_RNA (1)...(19): siRNA sense strand
gcuuauaggacugccauga

SEQ ID NO: 212071 - RNA, 19 nt, Homo sapiens
  misc_RNA (1)...(19): siRNA sense strand
caucaggccaaauguaaca

SEQ ID NO: 212072 - RNA, 19 nt, Homo sapiens
  misc_RNA (1)...(19): siRNA sense strand
gauucuauccaaauuccaa

SEQ ID NO: 212073 - RNA, 19 nt, Homo sapiens
  misc_RNA (1)...(19): siRNA sense strand
ggcaaguucaacaggauuu

SEQ ID NO: 212074 - RNA, 19 nt, Homo sapiens
  misc_RNA (1)...(19): siRNA sense strand
gaacuggcugcugaauguu

SEQ ID NO: 212075 - RNA, 19 nt, Homo sapiens
  misc_RNA (1)...(19): siRNA sense strand
cugcugaauguuuaugaua

SEQ ID NO: 212076 - RNA, 19 nt, Homo sapiens
  misc_RNA (1)...(19): siRNA sense strand
aagcaucaggccaaaugua

SEQ ID NO: 212077 - RNA, 19 nt, Homo sapiens
  misc_RNA (1)...(19): siRNA sense strand
uggcaucauuucccugugu

SEQ ID NO: 212078 - RNA, 19 nt, Homo sapiens
  misc_RNA (1)...(19): siRNA sense strand
ccaugaaacuccgaagacu

SEQ ID NO: 212079 - RNA, 19 nt, Homo sapiens
  misc_RNA (1)...(19): siRNA sense strand
auaauaagccagagaucga

SEQ ID NO: 212080 - RNA, 19 nt, Homo sapiens
  misc_RNA (1)...(19): siRNA sense strand
cuaauaauaagccagagau

SEQ ID NO: 212081 - RNA, 19 nt, Homo sapiens
  misc_RNA (1)...(19): siRNA sense strand
ugggugaaguugcauccuu

SEQ ID NO: 212082 - RNA, 19 nt, Homo sapiens
  misc_RNA (1)...(19): siRNA sense strand
caucauuucccuguguaaa

SEQ ID NO: 212083 - RNA, 19 nt, Homo sapiens
  misc_RNA (1)...(19): siRNA sense strand
gcguggauaugugucugaa

SEQ ID NO: 212084 - RNA, 19 nt, Homo sapiens
  misc_RNA (1)...(19): siRNA sense strand
gcacuaucccaugguggaa

SEQ ID NO: 212085 - RNA, 19 nt, Homo sapiens
  misc_RNA (1)...(19): siRNA sense strand
gagccugucagcugcaugu

SEQ ID NO: 212086 - RNA, 19 nt, Homo sapiens
  misc_RNA (1)...(19): siRNA sense strand
guacagauaccuuuucaag

SEQ ID NO: 212087 - RNA, 19 nt, Homo sapiens
  misc_RNA (1)...(19): siRNA sense strand
gucccucucugcguggaua

SEQ ID NO: 212088 - RNA, 19 nt, Homo sapiens
  misc_RNA (1)...(19): siRNA sense strand
ggagcugcuuccaauuugc

SEQ ID NO: 212089 - RNA, 19 nt, Homo sapiens
  misc_RNA (1)...(19): siRNA sense strand
uuagcugaccugaauaaug

SEQ ID NO: 212090 - RNA, 19 nt, Homo sapiens
  misc_RNA (1)...(19): siRNA sense strand
guggcaaguucaacaggau

SEQ ID NO: 212091 - RNA, 19 nt, Homo sapiens
  misc_RNA (1)...(19): siRNA sense strand
acaacaauuuggucaacgu

SEQ ID NO: 212092 - RNA, 19 nt, Homo sapiens
  misc_RNA (1)...(19): siRNA sense strand
gacuacaucaggagaagau

SEQ ID NO: 212093 - RNA, 19 nt, Homo sapiens
  misc_RNA (1)...(19): siRNA sense strand
uaauaagccagagaucgaa

SEQ ID NO: 212094 - RNA, 19 nt, Homo sapiens
  misc_RNA (1)...(19): siRNA sense strand
ugucagauucucagcuuau

SEQ ID NO: 212095 - RNA, 19 nt, Homo sapiens
  misc_RNA (1)...(19): siRNA sense strand
ggauauccugcagauuauu

SEQ ID NO: 212096 - RNA, 19 nt, Homo sapiens
  misc_RNA (1)...(19): siRNA sense strand
agcaucaggccaaauguaa

SEQ ID NO: 212097 - RNA, 19 nt, Homo sapiens
  misc_RNA (1)...(19): siRNA sense strand
gcccuuugcuuggaucucu

SEQ ID NO: 212098 - RNA, 19 nt, Homo sapiens
  misc_RNA (1)...(19): siRNA sense strand
gcugaauguuuaugauacg

SEQ ID NO: 212099 - RNA, 19 nt, Homo sapiens
  misc_RNA (1)...(19): siRNA sense strand
agacuuugccaagguacua

SEQ ID NO: 212100 - RNA, 19 nt, Homo sapiens
  misc_RNA (1)...(19): siRNA sense strand
caagcaaguggcaaguuca

SEQ ID NO: 212101 - RNA, 19 nt, Homo sapiens
  misc_RNA (1)...(19): siRNA sense strand
agacaaguacagauaccuu

SEQ ID NO: 212102 - RNA, 19 nt, Homo sapiens
  misc_RNA (1)...(19): siRNA sense strand
gcaucauuucccuguguaa

SEQ ID NO: 212103 - RNA, 19 nt, Homo sapiens
  misc_RNA (1)...(19): siRNA sense strand
cugcaaagaguguccaauc

SEQ ID NO: 212104 - RNA, 19 nt, Homo sapiens
  misc_RNA (1)...(19): siRNA sense strand
cuuauaggacugccaugaa

SEQ ID NO: 212105 - RNA, 19 nt, Homo sapiens
  misc_RNA (1)...(19): siRNA sense strand
caaagaguguccaaucauu

SEQ ID NO: 212106 - RNA, 19 nt, Homo sapiens
  misc_RNA (1)...(19): siRNA sense strand
uagcugaccugaauaaugu

SEQ ID NO: 212107 - RNA, 19 nt, Homo sapiens
  misc_RNA (1)...(19): siRNA sense strand
gcaugauucuauccaaauu

SEQ ID NO: 212108 - RNA, 19 nt, Homo sapiens
  misc_RNA (1)...(19): siRNA sense strand
ugaacuggcugcugaaugu

SEQ ID NO: 212109 - RNA, 19 nt, Homo sapiens
  misc_RNA (1)...(19): siRNA sense strand
gauauccugcagauuauua

SEQ ID NO: 212110 - RNA, 19 nt, Homo sapiens
  misc_RNA (1)...(19): siRNA sense strand
gagaagauguucgagacuu

SEQ ID NO: 212111 - RNA, 19 nt, Homo sapiens
  misc_RNA (1)...(19): siRNA sense strand
gcacuuuaauuaugacauc

SEQ ID NO: 212112 - RNA, 19 nt, Homo sapiens
  misc_RNA (1)...(19): siRNA sense strand
guaaagcacauuuggaaga

SEQ ID NO: 212113 - RNA, 19 nt, Homo sapiens
  misc_RNA (1)...(19): siRNA sense strand
gaauauugcacuccgacua

SEQ ID NO: 212114 - RNA, 19 nt, Homo sapiens
  misc_RNA (1)...(19): siRNA sense strand
uuauaggacugccaugaaa

SEQ ID NO: 212115 - RNA, 19 nt, Homo sapiens
  misc_RNA (1)...(19): siRNA sense strand
gggugaaguugcauccuuu

SEQ ID NO: 212116 - RNA, 19 nt, Homo sapiens
  misc_RNA (1)...(19): siRNA sense strand
gcaagagcacaacaauuug

SEQ ID NO: 212117 - RNA, 19 nt, Homo sapiens
  misc_RNA (1)...(19): siRNA sense strand
gcacaacaauuuggucaac

SEQ ID NO: 212118 - RNA, 19 nt, Homo sapiens
  misc_RNA (1)...(19): siRNA sense strand
agcaagagcacaacaauuu

SEQ ID NO: 212119 - RNA, 19 nt, Homo sapiens
  misc_RNA (1)...(19): siRNA sense strand
agaagauguucgagacuuu

SEQ ID NO: 212120 - RNA, 19 nt, Homo sapiens
  misc_RNA (1)...(19): siRNA sense strand
gagcaagagcacaacaauu

SEQ ID NO: 212121 - RNA, 19 nt, Homo sapiens
  misc_RNA (1)...(19): siRNA sense strand
ucaagcaaguggcaaguuc

SEQ ID NO: 212122 - RNA, 19 nt, Homo sapiens
  misc_RNA (1)...(19): siRNA sense strand
ccacgagacucaaacaacu

SEQ ID NO: 212123 - RNA, 19 nt, Homo sapiens
  misc_RNA (1)...(19): siRNA sense strand
cagcacaaccucaagcaaa

SEQ ID NO: 212124 - RNA, 19 nt, Homo sapiens
  misc_RNA (1)...(19): siRNA sense strand
gcaaagaguguccaaucau

SEQ ID NO: 212125 - RNA, 19 nt, Homo sapiens
  misc_RNA (1)...(19): siRNA sense strand
auggauauccugcagauua

SEQ ID NO: 212126 - RNA, 19 nt, Homo sapiens
  misc_RNA (1)...(19): siRNA sense strand
uguaacaucugcaaagagu

SEQ ID NO: 212127 - RNA, 19 nt, Homo sapiens
  misc_RNA (1)...(19): siRNA sense strand
guccggagcugcuuccaau

SEQ ID NO: 212128 - RNA, 19 nt, Homo sapiens
  misc_RNA (1)...(19): siRNA sense strand
gcaaguggcaaguucaaca

SEQ ID NO: 212129 - RNA, 19 nt, Homo sapiens
  misc_RNA (1)...(19): siRNA sense strand
gcuuccaauuugcuaauaa

SEQ ID NO: 212130 - RNA, 19 nt, Homo sapiens
  misc_RNA (1)...(19): siRNA sense strand
uggaagacaaguacagaua

SEQ ID NO: 212131 - RNA, 19 nt, Homo sapiens
  misc_RNA (1)...(19): siRNA sense strand
ggauccguguccugucuuu

SEQ ID NO: 212132 - RNA, 19 nt, Homo sapiens
  misc_RNA (1)...(19): siRNA sense strand
gucuuuagcugaccugaau

SEQ ID NO: 212133 - RNA, 19 nt, Homo sapiens
  misc_RNA (1)...(19): siRNA sense strand
gacaaguacagauaccuuu

SEQ ID NO: 212134 - RNA, 19 nt, Homo sapiens
  misc_RNA (1)...(19): siRNA sense strand
ccaagcaucaggccaaaug

SEQ ID NO: 212135 - RNA, 19 nt, Homo sapiens
  misc_RNA (1)...(19): siRNA sense strand
ggagcaagagcacaacaau

SEQ ID NO: 212136 - RNA, 19 nt, Homo sapiens
  misc_RNA (1)...(19): siRNA sense strand
guguaaagcacauuuggaa

SEQ ID NO: 212137 - RNA, 19 nt, Homo sapiens
  misc_RNA (1)...(19): siRNA sense strand
caagacaguugggugaagu

SEQ ID NO: 212138 - RNA, 19 nt, Homo sapiens
  misc_RNA (1)...(19): siRNA sense strand
gaagauguucgagacuuug

SEQ ID NO: 212139 - RNA, 19 nt, Homo sapiens
  misc_RNA (1)...(19): siRNA sense strand
gucagauucucagcuuaua

SEQ ID NO: 212140 - RNA, 19 nt, Homo sapiens
  misc_RNA (1)...(19): siRNA sense strand
uaacaucugcaaagagugu

SEQ ID NO: 212141 - RNA, 19 nt, Homo sapiens
  misc_RNA (1)...(19): siRNA sense strand
cggagcugcuuccaauuug

SEQ ID NO: 212142 - RNA, 19 nt, Homo sapiens
  misc_RNA (1)...(19): siRNA sense strand
gaagacaaguacagauacc

SEQ ID NO: 212143 - RNA, 19 nt, Homo sapiens
  misc_RNA (1)...(19): siRNA sense strand
ccauggauauccugcagau

SEQ ID NO: 212144 - RNA, 19 nt, Homo sapiens
  misc_RNA (1)...(19): siRNA sense strand
ggcaucauuucccugugua

SEQ ID NO: 212145 - RNA, 19 nt, Homo sapiens
  misc_RNA (1)...(19): siRNA sense strand
uggauauccugcagauuau

SEQ ID NO: 212146 - RNA, 19 nt, Homo sapiens
  misc_RNA (1)...(19): siRNA sense strand
ggaagacaaguacagauac

SEQ ID NO: 212147 - RNA, 19 nt, Homo sapiens
  misc_RNA (1)...(19): siRNA sense strand
ugcaaagaguguccaauca

SEQ ID NO: 212148 - RNA, 19 nt, Homo sapiens
  misc_RNA (1)...(19): siRNA sense strand
guggauaugugucugaacu

SEQ ID NO: 212149 - RNA, 19 nt, Homo sapiens
  misc_RNA (1)...(19): siRNA sense strand
acuggcugcugaauguuua

SEQ ID NO: 212150 - RNA, 19 nt, Homo sapiens
  misc_RNA (1)...(19): siRNA sense strand
acuaucccaugguggaaua

SEQ ID NO: 212151 - RNA, 19 nt, Homo sapiens
  misc_RNA (1)...(19): siRNA sense strand
ccggagcugcuuccaauuu

SEQ ID NO: 212152 - RNA, 19 nt, Homo sapiens
  misc_RNA (1)...(19): siRNA sense strand
ccaaauuccaagacaguug

SEQ ID NO: 212153 - RNA, 19 nt, Homo sapiens
  misc_RNA (1)...(19): siRNA sense strand
cagaaacugccaagcauca

SEQ ID NO: 212154 - RNA, 19 nt, Homo sapiens
  misc_RNA (1)...(19): siRNA sense strand
uaugacaucugccaaagcu

SEQ ID NO: 212155 - RNA, 19 nt, Homo sapiens
  misc_RNA (1)...(19): siRNA sense strand
aaugucagauucucagcuu

SEQ ID NO: 212156 - RNA, 19 nt, Homo sapiens
  misc_RNA (1)...(19): siRNA sense strand
ucgagacuuugccaaggua

SEQ ID NO: 212157 - RNA, 19 nt, Homo sapiens
  misc_RNA (1)...(19): siRNA sense strand
gcaaaaggccauaaaaugc

SEQ ID NO: 212158 - RNA, 19 nt, Homo sapiens
  misc_RNA (1)...(19): siRNA sense strand
cugcaugauucuauccaaa

SEQ ID NO: 212159 - RNA, 19 nt, Homo sapiens
  misc_RNA (1)...(19): siRNA sense strand
uaaagcacauuuggaagac

SEQ ID NO: 212160 - RNA, 19 nt, Homo sapiens
  misc_RNA (1)...(19): siRNA sense strand
acaggagucuaaagcacuu

SEQ ID NO: 212161 - RNA, 19 nt, Homo sapiens
  misc_RNA (1)...(19): siRNA sense strand
acagauaccuuuucaagca

SEQ ID NO: 212162 - RNA, 19 nt, Homo sapiens
  misc_RNA (1)...(19): siRNA sense strand
aagcacauuuggaagacaa

SEQ ID NO: 212163 - RNA, 19 nt, Homo sapiens
  misc_RNA (1)...(19): siRNA sense strand
gcuaauaauaagccagaga

SEQ ID NO: 212164 - RNA, 19 nt, Homo sapiens
  misc_RNA (1)...(19): siRNA sense strand
caagagcacaacaauuugg

SEQ ID NO: 212165 - RNA, 19 nt, Homo sapiens
  misc_RNA (1)...(19): siRNA sense strand
ccugucagcugcaugugau

SEQ ID NO: 212166 - RNA, 19 nt, Homo sapiens
  misc_RNA (1)...(19): siRNA sense strand
gcugcugaauguuuaugau

SEQ ID NO: 212167 - RNA, 19 nt, Homo sapiens
  misc_RNA (1)...(19): siRNA sense strand
acagagcucuaccagucuu

SEQ ID NO: 212168 - RNA, 19 nt, Homo sapiens
  misc_RNA (1)...(19): siRNA sense strand
acaguugggugaaguugca

SEQ ID NO: 212169 - RNA, 19 nt, Homo sapiens
  misc_RNA (1)...(19): siRNA sense strand
guuugaccacuauuuauga

SEQ ID NO: 212170 - RNA, 19 nt, Homo sapiens
  misc_RNA (1)...(19): siRNA sense strand
gcuuauaggacugccauga

SEQ ID NO: 212171 - RNA, 19 nt, Homo sapiens
  misc_RNA (1)...(19): siRNA sense strand
caucaggccaaauguaaca

SEQ ID NO: 212172 - RNA, 19 nt, Homo sapiens
  misc_RNA (1)...(19): siRNA sense strand
gauucuauccaaauuccaa

SEQ ID NO: 212173 - RNA, 19 nt, Homo sapiens
  misc_RNA (1)...(19): siRNA sense strand
ggcaaguucaacaggauuu

SEQ ID NO: 212174 - RNA, 19 nt, Homo sapiens
  misc_RNA (1)...(19): siRNA sense strand
gaacuggcugcugaauguu

SEQ ID NO: 212175 - RNA, 19 nt, Homo sapiens
  misc_RNA (1)...(19): siRNA sense strand
cugcugaauguuuaugaua

SEQ ID NO: 212176 - RNA, 19 nt, Homo sapiens
  misc_RNA (1)...(19): siRNA sense strand
aagcaucaggccaaaugua

SEQ ID NO: 212177 - RNA, 19 nt, Homo sapiens
  misc_RNA (1)...(19): siRNA sense strand
uggcaucauuucccugugu

SEQ ID NO: 212178 - RNA, 19 nt, Homo sapiens
  misc_RNA (1)...(19): siRNA sense strand
ccaugaaacuccgaagacu

SEQ ID NO: 212179 - RNA, 19 nt, Homo sapiens
  misc_RNA (1)...(19): siRNA sense strand
auaauaagccagagaucga

SEQ ID NO: 212180 - RNA, 19 nt, Homo sapiens
  misc_RNA (1)...(19): siRNA sense strand
cuaauaauaagccagagau

SEQ ID NO: 212181 - RNA, 19 nt, Homo sapiens
  misc_RNA (1)...(19): siRNA sense strand
ugggugaaguugcauccuu

SEQ ID NO: 212182 - RNA, 19 nt, Homo sapiens
  misc_RNA (1)...(19): siRNA sense strand
caucauuucccuguguaaa

SEQ ID NO: 212183 - RNA, 19 nt, Homo sapiens
  misc_RNA (1)...(19): siRNA sense strand
gcguggauaugugucugaa

SEQ ID NO: 212184 - RNA, 19 nt, Homo sapiens
  misc_RNA (1)...(19): siRNA sense strand
gcacuaucccaugguggaa

SEQ ID NO: 212185 - RNA, 19 nt, Homo sapiens
  misc_RNA (1)...(19): siRNA sense strand
gagccugucagcugcaugu

SEQ ID NO: 212186 - RNA, 19 nt, Homo sapiens
  misc_RNA (1)...(19): siRNA sense strand
guacagauaccuuuucaag

SEQ ID NO: 212187 - RNA, 19 nt, Homo sapiens
  misc_RNA (1)...(19): siRNA sense strand
gucccucucugcguggaua

SEQ ID NO: 212188 - RNA, 19 nt, Homo sapiens
  misc_RNA (1)...(19): siRNA sense strand
ggagcugcuuccaauuugc

SEQ ID NO: 212189 - RNA, 19 nt, Homo sapiens
  misc_RNA (1)...(19): siRNA sense strand
uuagcugaccugaauaaug

SEQ ID NO: 212190 - RNA, 19 nt, Homo sapiens
  misc_RNA (1)...(19): siRNA sense strand
guggcaaguucaacaggau

SEQ ID NO: 212191 - RNA, 19 nt, Homo sapiens
  misc_RNA (1)...(19): siRNA sense strand
acaacaauuuggucaacgu

SEQ ID NO: 212192 - RNA, 19 nt, Homo sapiens
  misc_RNA (1)...(19): siRNA sense strand
gacuacaucaggagaagau

SEQ ID NO: 212193 - RNA, 19 nt, Homo sapiens
  misc_RNA (1)...(19): siRNA sense strand
uaauaagccagagaucgaa

SEQ ID NO: 212194 - RNA, 19 nt, Homo sapiens
  misc_RNA (1)...(19): siRNA sense strand
ugucagauucucagcuuau

SEQ ID NO: 212195 - RNA, 19 nt, Homo sapiens
  misc_RNA (1)...(19): siRNA sense strand
ggauauccugcagauuauu

SEQ ID NO: 212196 - RNA, 19 nt, Homo sapiens
  misc_RNA (1)...(19): siRNA sense strand
agcaucaggccaaauguaa

SEQ ID NO: 212197 - RNA, 19 nt, Homo sapiens
  misc_RNA (1)...(19): siRNA sense strand
gcccuuugcuuggaucucu

SEQ ID NO: 212198 - RNA, 19 nt, Homo sapiens
  misc_RNA (1)...(19): siRNA sense strand
gcugaauguuuaugauacg

SEQ ID NO: 212199 - RNA, 19 nt, Homo sapiens
  misc_RNA (1)...(19): siRNA sense strand
agacuuugccaagguacua

SEQ ID NO: 212200 - RNA, 19 nt, Homo sapiens
  misc_RNA (1)...(19): siRNA sense strand
caagcaaguggcaaguuca

SEQ ID NO: 212201 - RNA, 19 nt, Homo sapiens
  misc_RNA (1)...(19): siRNA sense strand
agacaaguacagauaccuu

SEQ ID NO: 212202 - RNA, 19 nt, Homo sapiens
  misc_RNA (1)...(19): siRNA sense strand
gcaucauuucccuguguaa

SEQ ID NO: 212203 - RNA, 19 nt, Homo sapiens
  misc_RNA (1)...(19): siRNA sense strand
cugcaaagaguguccaauc

SEQ ID NO: 212204 - RNA, 19 nt, Homo sapiens
  misc_RNA (1)...(19): siRNA sense strand
cuuauaggacugccaugaa

SEQ ID NO: 212205 - RNA, 19 nt, Homo sapiens
  misc_RNA (1)...(19): siRNA sense strand
caaagaguguccaaucauu

SEQ ID NO: 212206 - RNA, 19 nt, Homo sapiens
  misc_RNA (1)...(19): siRNA sense strand
uagcugaccugaauaaugu

SEQ ID NO: 212207 - RNA, 19 nt, Homo sapiens
  misc_RNA (1)...(19): siRNA sense strand
gcaugauucuauccaaauu

SEQ ID NO: 212208 - RNA, 19 nt, Homo sapiens
  misc_RNA (1)...(19): siRNA sense strand
ugaacuggcugcugaaugu

SEQ ID NO: 212209 - RNA, 19 nt, Homo sapiens
  misc_RNA (1)...(19): siRNA sense strand
gauauccugcagauuauua

SEQ ID NO: 212210 - RNA, 19 nt, Homo sapiens
  misc_RNA (1)...(19): siRNA sense strand
gagaagauguucgagacuu

SEQ ID NO: 212211 - RNA, 19 nt, Homo sapiens
  misc_RNA (1)...(19): siRNA sense strand
gcacuuuaauuaugacauc

SEQ ID NO: 212212 - RNA, 19 nt, Homo sapiens
  misc_RNA (1)...(19): siRNA sense strand
guaaagcacauuuggaaga

SEQ ID NO: 212213 - RNA, 19 nt, Homo sapiens
  misc_RNA (1)...(19): siRNA sense strand
gaauauugcacuccgacua

SEQ ID NO: 212214 - RNA, 19 nt, Homo sapiens
  misc_RNA (1)...(19): siRNA sense strand
uuauaggacugccaugaaa

SEQ ID NO: 212215 - RNA, 19 nt, Homo sapiens
  misc_RNA (1)...(19): siRNA sense strand
gggugaaguugcauccuuu

SEQ ID NO: 212216 - RNA, 19 nt, Homo sapiens
  misc_RNA (1)...(19): siRNA sense strand
gcaagagcacaacaauuug

SEQ ID NO: 212217 - RNA, 19 nt, Homo sapiens
  misc_RNA (1)...(19): siRNA sense strand
gcacaacaauuuggucaac

SEQ ID NO: 212218 - RNA, 19 nt, Homo sapiens
  misc_RNA (1)...(19): siRNA sense strand
agcaagagcacaacaauuu

SEQ ID NO: 212219 - RNA, 19 nt, Homo sapiens
  misc_RNA (1)...(19): siRNA sense strand
agaagauguucgagacuuu

SEQ ID NO: 212220 - RNA, 19 nt, Homo sapiens
  misc_RNA (1)...(19): siRNA sense strand
gagcaagagcacaacaauu

SEQ ID NO: 212221 - RNA, 19 nt, Homo sapiens
  misc_RNA (1)...(19): siRNA sense strand
ucaagcaaguggcaaguuc

SEQ ID NO: 212222 - RNA, 19 nt, Homo sapiens
  misc_RNA (1)...(19): siRNA sense strand
ccacgagacucaaacaacu

SEQ ID NO: 212223 - RNA, 19 nt, Homo sapiens
  misc_RNA (1)...(19): siRNA sense strand
cagcacaaccucaagcaaa

SEQ ID NO: 212224 - RNA, 19 nt, Homo sapiens
  misc_RNA (1)...(19): siRNA sense strand
gcaaagaguguccaaucau

SEQ ID NO: 212225 - RNA, 19 nt, Homo sapiens
  misc_RNA (1)...(19): siRNA sense strand
auggauauccugcagauua

SEQ ID NO: 212226 - RNA, 19 nt, Homo sapiens
  misc_RNA (1)...(19): siRNA sense strand
uguaacaucugcaaagagu

SEQ ID NO: 212227 - RNA, 19 nt, Homo sapiens
  misc_RNA (1)...(19): siRNA sense strand
guccggagcugcuuccaau

SEQ ID NO: 212228 - RNA, 19 nt, Homo sapiens
  misc_RNA (1)...(19): siRNA sense strand
gcaaguggcaaguucaaca

SEQ ID NO: 212229 - RNA, 19 nt, Homo sapiens
  misc_RNA (1)...(19): siRNA sense strand
gcuuccaauuugcuaauaa

SEQ ID NO: 212230 - RNA, 19 nt, Homo sapiens
  misc_RNA (1)...(19): siRNA sense strand
uggaagacaaguacagaua

SEQ ID NO: 212231 - RNA, 19 nt, Homo sapiens
  misc_RNA (1)...(19): siRNA sense strand
ggauccguguccugucuuu

SEQ ID NO: 212232 - RNA, 19 nt, Homo sapiens
  misc_RNA (1)...(19): siRNA sense strand
gucuuuagcugaccugaau

SEQ ID NO: 212233 - RNA, 19 nt, Homo sapiens
  misc_RNA (1)...(19): siRNA sense strand
gacaaguacagauaccuuu

SEQ ID NO: 212234 - RNA, 19 nt, Homo sapiens
  misc_RNA (1)...(19): siRNA sense strand
ccaagcaucaggccaaaug

SEQ ID NO: 212235 - RNA, 19 nt, Homo sapiens
  misc_RNA (1)...(19): siRNA sense strand
ggagcaagagcacaacaau

SEQ ID NO: 212236 - RNA, 19 nt, Homo sapiens
  misc_RNA (1)...(19): siRNA sense strand
guguaaagcacauuuggaa

SEQ ID NO: 212237 - RNA, 19 nt, Homo sapiens
  misc_RNA (1)...(19): siRNA sense strand
caagacaguugggugaagu

SEQ ID NO: 212238 - RNA, 19 nt, Homo sapiens
  misc_RNA (1)...(19): siRNA sense strand
gaagauguucgagacuuug

SEQ ID NO: 212239 - RNA, 19 nt, Homo sapiens
  misc_RNA (1)...(19): siRNA sense strand
gucagauucucagcuuaua

SEQ ID NO: 212240 - RNA, 19 nt, Homo sapiens
  misc_RNA (1)...(19): siRNA sense strand
uaacaucugcaaagagugu

SEQ ID NO: 212241 - RNA, 19 nt, Homo sapiens
  misc_RNA (1)...(19): siRNA sense strand
cggagcugcuuccaauuug

SEQ ID NO: 212242 - RNA, 19 nt, Homo sapiens
  misc_RNA (1)...(19): siRNA sense strand
gaagacaaguacagauacc

SEQ ID NO: 212243 - RNA, 19 nt, Homo sapiens
  misc_RNA (1)...(19): siRNA sense strand
ccauggauauccugcagau

SEQ ID NO: 212244 - RNA, 19 nt, Homo sapiens
  misc_RNA (1)...(19): siRNA sense strand
ggcaucauuucccugugua

SEQ ID NO: 212245 - RNA, 19 nt, Homo sapiens
  misc_RNA (1)...(19): siRNA sense strand
uggauauccugcagauuau

SEQ ID NO: 212246 - RNA, 19 nt, Homo sapiens
  misc_RNA (1)...(19): siRNA sense strand
ggaagacaaguacagauac

SEQ ID NO: 212247 - RNA, 19 nt, Homo sapiens
  misc_RNA (1)...(19): siRNA sense strand
ugcaaagaguguccaauca

SEQ ID NO: 212248 - RNA, 19 nt, Homo sapiens
  misc_RNA (1)...(19): siRNA sense strand
guggauaugugucugaacu

SEQ ID NO: 212249 - RNA, 19 nt, Homo sapiens
  misc_RNA (1)...(19): siRNA sense strand
acuggcugcugaauguuua

SEQ ID NO: 212250 - RNA, 19 nt, Homo sapiens
  misc_RNA (1)...(19): siRNA sense strand
acuaucccaugguggaaua

SEQ ID NO: 212251 - RNA, 19 nt, Homo sapiens
  misc_RNA (1)...(19): siRNA sense strand
ccggagcugcuuccaauuu

SEQ ID NO: 212252 - RNA, 19 nt, Homo sapiens
  misc_RNA (1)...(19): siRNA sense strand
ccaaauuccaagacaguug

SEQ ID NO: 212253 - RNA, 19 nt, Homo sapiens
  misc_RNA (1)...(19): siRNA sense strand
cagaaacugccaagcauca

SEQ ID NO: 212254 - RNA, 19 nt, Homo sapiens
  misc_RNA (1)...(19): siRNA sense strand
uaugacaucugccaaagcu

SEQ ID NO: 212255 - RNA, 19 nt, Homo sapiens
  misc_RNA (1)...(19): siRNA sense strand
aaugucagauucucagcuu

SEQ ID NO: 212256 - RNA, 19 nt, Homo sapiens
  misc_RNA (1)...(19): siRNA sense strand
ucgagacuuugccaaggua

SEQ ID NO: 212257 - RNA, 19 nt, Homo sapiens
  misc_RNA (1)...(19): siRNA sense strand
gcaaaaggccauaaaaugc

SEQ ID NO: 212258 - RNA, 19 nt, Homo sapiens
  misc_RNA (1)...(19): siRNA sense strand
cugcaugauucuauccaaa

SEQ ID NO: 212259 - RNA, 19 nt, Homo sapiens
  misc_RNA (1)...(19): siRNA sense strand
uaaagcacauuuggaagac

SEQ ID NO: 212260 - RNA, 19 nt, Homo sapiens
  misc_RNA (1)...(19): siRNA sense strand
acaggagucuaaagcacuu

SEQ ID NO: 212261 - RNA, 19 nt, Homo sapiens
  misc_RNA (1)...(19): siRNA sense strand
acagauaccuuuucaagca

SEQ ID NO: 212262 - RNA, 19 nt, Homo sapiens
  misc_RNA (1)...(19): siRNA sense strand
aagcacauuuggaagacaa

SEQ ID NO: 212263 - RNA, 19 nt, Homo sapiens
  misc_RNA (1)...(19): siRNA sense strand
gcuaauaauaagccagaga

SEQ ID NO: 212264 - RNA, 19 nt, Homo sapiens
  misc_RNA (1)...(19): siRNA sense strand
caagagcacaacaauuugg

SEQ ID NO: 212265 - RNA, 19 nt, Homo sapiens
  misc_RNA (1)...(19): siRNA sense strand
ccugucagcugcaugugau

SEQ ID NO: 212266 - RNA, 19 nt, Homo sapiens
  misc_RNA (1)...(19): siRNA sense strand
gcugcugaauguuuaugau

SEQ ID NO: 212267 - RNA, 19 nt, Homo sapiens
  misc_RNA (1)...(19): siRNA sense strand
acagagcucuaccagucuu

SEQ ID NO: 212268 - RNA, 19 nt, Homo sapiens
  misc_RNA (1)...(19): siRNA sense strand
acaguugggugaaguugca

SEQ ID NO: 212269 - RNA, 19 nt, Homo sapiens
  misc_RNA (1)...(19): siRNA sense strand
guuugaccacuauuuauga

SEQ ID NO: 212270 - RNA, 19 nt, Homo sapiens
  misc_RNA (1)...(19): siRNA sense strand
gcuuauaggacugccauga

SEQ ID NO: 212271 - RNA, 19 nt, Homo sapiens
  misc_RNA (1)...(19): siRNA sense strand
caucaggccaaauguaaca

SEQ ID NO: 212272 - RNA, 19 nt, Homo sapiens
  misc_RNA (1)...(19): siRNA sense strand
gauucuauccaaauuccaa

SEQ ID NO: 212273 - RNA, 19 nt, Homo sapiens
  misc_RNA (1)...(19): siRNA sense strand
ggcaaguucaacaggauuu

SEQ ID NO: 212274 - RNA, 19 nt, Homo sapiens
  misc_RNA (1)...(19): siRNA sense strand
gaacuggcugcugaauguu

SEQ ID NO: 212275 - RNA, 19 nt, Homo sapiens
  misc_RNA (1)...(19): siRNA sense strand
cugcugaauguuuaugaua

SEQ ID NO: 212276 - RNA, 19 nt, Homo sapiens
  misc_RNA (1)...(19): siRNA sense strand
aagcaucaggccaaaugua

SEQ ID NO: 212277 - RNA, 19 nt, Homo sapiens
  misc_RNA (1)...(19): siRNA sense strand
uggcaucauuucccugugu

SEQ ID NO: 212278 - RNA, 19 nt, Homo sapiens
  misc_RNA (1)...(19): siRNA sense strand
ccaugaaacuccgaagacu

SEQ ID NO: 212279 - RNA, 19 nt, Homo sapiens
  misc_RNA (1)...(19): siRNA sense strand
auaauaagccagagaucga

SEQ ID NO: 212280 - RNA, 19 nt, Homo sapiens
  misc_RNA (1)...(19): siRNA sense strand
cuaauaauaagccagagau

SEQ ID NO: 212281 - RNA, 19 nt, Homo sapiens
  misc_RNA (1)...(19): siRNA sense strand
ugggugaaguugcauccuu

SEQ ID NO: 212282 - RNA, 19 nt, Homo sapiens
  misc_RNA (1)...(19): siRNA sense strand
caucauuucccuguguaaa

SEQ ID NO: 212283 - RNA, 19 nt, Homo sapiens
  misc_RNA (1)...(19): siRNA sense strand
gcguggauaugugucugaa

SEQ ID NO: 212284 - RNA, 19 nt, Homo sapiens
  misc_RNA (1)...(19): siRNA sense strand
gcacuaucccaugguggaa

SEQ ID NO: 212285 - RNA, 19 nt, Homo sapiens
  misc_RNA (1)...(19): siRNA sense strand
gagccugucagcugcaugu

SEQ ID NO: 212286 - RNA, 19 nt, Homo sapiens
  misc_RNA (1)...(19): siRNA sense strand
guacagauaccuuuucaag

SEQ ID NO: 212287 - RNA, 19 nt, Homo sapiens
  misc_RNA (1)...(19): siRNA sense strand
gucccucucugcguggaua

SEQ ID NO: 212288 - RNA, 19 nt, Homo sapiens
  misc_RNA (1)...(19): siRNA sense strand
ggagcugcuuccaauuugc

SEQ ID NO: 212289 - RNA, 19 nt, Homo sapiens
  misc_RNA (1)...(19): siRNA sense strand
uuagcugaccugaauaaug

SEQ ID NO: 212290 - RNA, 19 nt, Homo sapiens
  misc_RNA (1)...(19): siRNA sense strand
guggcaaguucaacaggau

SEQ ID NO: 212291 - RNA, 19 nt, Homo sapiens
  misc_RNA (1)...(19): siRNA sense strand
acaacaauuuggucaacgu

SEQ ID NO: 212292 - RNA, 19 nt, Homo sapiens
  misc_RNA (1)...(19): siRNA sense strand
gacuacaucaggagaagau

SEQ ID NO: 212293 - RNA, 19 nt, Homo sapiens
  misc_RNA (1)...(19): siRNA sense strand
uaauaagccagagaucgaa

SEQ ID NO: 212294 - RNA, 19 nt, Homo sapiens
  misc_RNA (1)...(19): siRNA sense strand
ugucagauucucagcuuau

SEQ ID NO: 212295 - RNA, 19 nt, Homo sapiens
  misc_RNA (1)...(19): siRNA sense strand
ggauauccugcagauuauu

SEQ ID NO: 212296 - RNA, 19 nt, Homo sapiens
  misc_RNA (1)...(19): siRNA sense strand
agcaucaggccaaauguaa

SEQ ID NO: 212297 - RNA, 19 nt, Homo sapiens
  misc_RNA (1)...(19): siRNA sense strand
gcccuuugcuuggaucucu

SEQ ID NO: 212298 - RNA, 19 nt, Homo sapiens
  misc_RNA (1)...(19): siRNA sense strand
gcugaauguuuaugauacg

SEQ ID NO: 212299 - RNA, 19 nt, Homo sapiens
  misc_RNA (1)...(19): siRNA sense strand
agacuuugccaagguacua

SEQ ID NO: 212300 - RNA, 19 nt, Homo sapiens
  misc_RNA (1)...(19): siRNA sense strand
caagcaaguggcaaguuca

SEQ ID NO: 212301 - RNA, 19 nt, Homo sapiens
  misc_RNA (1)...(19): siRNA sense strand
agacaaguacagauaccuu

SEQ ID NO: 212302 - RNA, 19 nt, Homo sapiens
  misc_RNA (1)...(19): siRNA sense strand
gcaucauuucccuguguaa

SEQ ID NO: 212303 - RNA, 19 nt, Homo sapiens
  misc_RNA (1)...(19): siRNA sense strand
cugcaaagaguguccaauc

SEQ ID NO: 212304 - RNA, 19 nt, Homo sapiens
  misc_RNA (1)...(19): siRNA sense strand
cuuauaggacugccaugaa

SEQ ID NO: 212305 - RNA, 19 nt, Homo sapiens
  misc_RNA (1)...(19): siRNA sense strand
caaagaguguccaaucauu

SEQ ID NO: 212306 - RNA, 19 nt, Homo sapiens
  misc_RNA (1)...(19): siRNA sense strand
uagcugaccugaauaaugu

SEQ ID NO: 212307 - RNA, 19 nt, Homo sapiens
  misc_RNA (1)...(19): siRNA sense strand
gcaugauucuauccaaauu

SEQ ID NO: 212308 - RNA, 19 nt, Homo sapiens
  misc_RNA (1)...(19): siRNA sense strand
ugaacuggcugcugaaugu

SEQ ID NO: 212309 - RNA, 19 nt, Homo sapiens
  misc_RNA (1)...(19): siRNA sense strand
gauauccugcagauuauua

SEQ ID NO: 212310 - RNA, 19 nt, Homo sapiens
  misc_RNA (1)...(19): siRNA sense strand
gagaagauguucgagacuu

SEQ ID NO: 212311 - RNA, 19 nt, Homo sapiens
  misc_RNA (1)...(19): siRNA sense strand
gcacuuuaauuaugacauc

SEQ ID NO: 212312 - RNA, 19 nt, Homo sapiens
  misc_RNA (1)...(19): siRNA sense strand
guaaagcacauuuggaaga

SEQ ID NO: 212313 - RNA, 19 nt, Homo sapiens
  misc_RNA (1)...(19): siRNA sense strand
gaauauugcacuccgacua

SEQ ID NO: 212314 - RNA, 19 nt, Homo sapiens
  misc_RNA (1)...(19): siRNA sense strand
uuauaggacugccaugaaa

SEQ ID NO: 212315 - RNA, 19 nt, Homo sapiens
  misc_RNA (1)...(19): siRNA sense strand
gggugaaguugcauccuuu

SEQ ID NO: 212316 - RNA, 19 nt, Homo sapiens
  misc_RNA (1)...(19): siRNA sense strand
gcaagagcacaacaauuug

SEQ ID NO: 212317 - RNA, 19 nt, Homo sapiens
  misc_RNA (1)...(19): siRNA sense strand
gcacaacaauuuggucaac

SEQ ID NO: 212318 - RNA, 19 nt, Homo sapiens
  misc_RNA (1)...(19): siRNA sense strand
agcaagagcacaacaauuu

SEQ ID NO: 212319 - RNA, 19 nt, Homo sapiens
  misc_RNA (1)...(19): siRNA sense strand
agaagauguucgagacuuu

SEQ ID NO: 212320 - RNA, 19 nt, Homo sapiens
  misc_RNA (1)...(19): siRNA sense strand
gagcaagagcacaacaauu

SEQ ID NO: 212321 - RNA, 19 nt, Homo sapiens
  misc_RNA (1)...(19): siRNA sense strand
ucaagcaaguggcaaguuc

SEQ ID NO: 212322 - RNA, 19 nt, Homo sapiens
  misc_RNA (1)...(19): siRNA sense strand
ccacgagacucaaacaacu

SEQ ID NO: 212323 - RNA, 19 nt, Homo sapiens
  misc_RNA (1)...(19): siRNA sense strand
cagcacaaccucaagcaaa

SEQ ID NO: 212324 - RNA, 19 nt, Homo sapiens
  misc_RNA (1)...(19): siRNA sense strand
gcaaagaguguccaaucau

SEQ ID NO: 212325 - RNA, 19 nt, Homo sapiens
  misc_RNA (1)...(19): siRNA sense strand
auggauauccugcagauua

SEQ ID NO: 212326 - RNA, 19 nt, Homo sapiens
  misc_RNA (1)...(19): siRNA sense strand
uguaacaucugcaaagagu

SEQ ID NO: 212327 - RNA, 19 nt, Homo sapiens
  misc_RNA (1)...(19): siRNA sense strand
guccggagcugcuuccaau

SEQ ID NO: 212328 - RNA, 19 nt, Homo sapiens
  misc_RNA (1)...(19): siRNA sense strand
gcaaguggcaaguucaaca

SEQ ID NO: 212329 - RNA, 19 nt, Homo sapiens
  misc_RNA (1)...(19): siRNA sense strand
gcuuccaauuugcuaauaa

SEQ ID NO: 212330 - RNA, 19 nt, Homo sapiens
  misc_RNA (1)...(19): siRNA sense strand
uggaagacaaguacagaua

SEQ ID NO: 212331 - RNA, 19 nt, Homo sapiens
  misc_RNA (1)...(19): siRNA sense strand
ggauccguguccugucuuu

SEQ ID NO: 212332 - RNA, 19 nt, Homo sapiens
  misc_RNA (1)...(19): siRNA sense strand
gucuuuagcugaccugaau

SEQ ID NO: 212333 - RNA, 19 nt, Homo sapiens
  misc_RNA (1)...(19): siRNA sense strand
gacaaguacagauaccuuu

SEQ ID NO: 212334 - RNA, 19 nt, Homo sapiens
  misc_RNA (1)...(19): siRNA sense strand
ccaagcaucaggccaaaug

SEQ ID NO: 212335 - RNA, 19 nt, Homo sapiens
  misc_RNA (1)...(19): siRNA sense strand
ggagcaagagcacaacaau

SEQ ID NO: 212336 - RNA, 19 nt, Homo sapiens
  misc_RNA (1)...(19): siRNA sense strand
guguaaagcacauuuggaa

SEQ ID NO: 212337 - RNA, 19 nt, Homo sapiens
  misc_RNA (1)...(19): siRNA sense strand
caagacaguugggugaagu

SEQ ID NO: 212338 - RNA, 19 nt, Homo sapiens
  misc_RNA (1)...(19): siRNA sense strand
gaagauguucgagacuuug

SEQ ID NO: 212339 - RNA, 19 nt, Homo sapiens
  misc_RNA (1)...(19): siRNA sense strand
gucagauucucagcuuaua

SEQ ID NO: 212340 - RNA, 19 nt, Homo sapiens
  misc_RNA (1)...(19): siRNA sense strand
uaacaucugcaaagagugu

SEQ ID NO: 212341 - RNA, 19 nt, Homo sapiens
  misc_RNA (1)...(19): siRNA sense strand
cggagcugcuuccaauuug

SEQ ID NO: 212342 - RNA, 19 nt, Homo sapiens
  misc_RNA (1)...(19): siRNA sense strand
gaagacaaguacagauacc

SEQ ID NO: 212343 - RNA, 19 nt, Homo sapiens
  misc_RNA (1)...(19): siRNA sense strand
ccauggauauccugcagau

SEQ ID NO: 212344 - RNA, 19 nt, Homo sapiens
  misc_RNA (1)...(19): siRNA sense strand
ggcaucauuucccugugua

SEQ ID NO: 212345 - RNA, 19 nt, Homo sapiens
  misc_RNA (1)...(19): siRNA sense strand
uggauauccugcagauuau

SEQ ID NO: 212346 - RNA, 19 nt, Homo sapiens
  misc_RNA (1)...(19): siRNA sense strand
ggaagacaaguacagauac

SEQ ID NO: 212347 - RNA, 19 nt, Homo sapiens
  misc_RNA (1)...(19): siRNA sense strand
ugcaaagaguguccaauca

SEQ ID NO: 212348 - RNA, 19 nt, Homo sapiens
  misc_RNA (1)...(19): siRNA sense strand
guggauaugugucugaacu

SEQ ID NO: 212349 - RNA, 19 nt, Homo sapiens
  misc_RNA (1)...(19): siRNA sense strand
acuggcugcugaauguuua

SEQ ID NO: 212350 - RNA, 19 nt, Homo sapiens
  misc_RNA (1)...(19): siRNA sense strand
acuaucccaugguggaaua

SEQ ID NO: 212351 - RNA, 19 nt, Homo sapiens
  misc_RNA (1)...(19): siRNA sense strand
ccggagcugcuuccaauuu

SEQ ID NO: 212352 - RNA, 19 nt, Homo sapiens
  misc_RNA (1)...(19): siRNA sense strand
ccaaauuccaagacaguug

SEQ ID NO: 212353 - RNA, 19 nt, Homo sapiens
  misc_RNA (1)...(19): siRNA sense strand
cagaaacugccaagcauca

SEQ ID NO: 212354 - RNA, 19 nt, Homo sapiens
  misc_RNA (1)...(19): siRNA sense strand
uaugacaucugccaaagcu

SEQ ID NO: 212355 - RNA, 19 nt, Homo sapiens
  misc_RNA (1)...(19): siRNA sense strand
aaugucagauucucagcuu

SEQ ID NO: 212356 - RNA, 19 nt, Homo sapiens
  misc_RNA (1)...(19): siRNA sense strand
ucgagacuuugccaaggua

SEQ ID NO: 212357 - RNA, 19 nt, Homo sapiens
  misc_RNA (1)...(19): siRNA sense strand
gcaaaaggccauaaaaugc

SEQ ID NO: 212358 - RNA, 19 nt, Homo sapiens
  misc_RNA (1)...(19): siRNA sense strand
cugcaugauucuauccaaa

SEQ ID NO: 212359 - RNA, 19 nt, Homo sapiens
  misc_RNA (1)...(19): siRNA sense strand
uaaagcacauuuggaagac

SEQ ID NO: 212360 - RNA, 19 nt, Homo sapiens
  misc_RNA (1)...(19): siRNA sense strand
acaggagucuaaagcacuu

SEQ ID NO: 212361 - RNA, 19 nt, Homo sapiens
  misc_RNA (1)...(19): siRNA sense strand
acagauaccuuuucaagca

SEQ ID NO: 212362 - RNA, 19 nt, Homo sapiens
  misc_RNA (1)...(19): siRNA sense strand
aagcacauuuggaagacaa

SEQ ID NO: 212363 - RNA, 19 nt, Homo sapiens
  misc_RNA (1)...(19): siRNA sense strand
gcuaauaauaagccagaga

SEQ ID NO: 212364 - RNA, 19 nt, Homo sapiens
  misc_RNA (1)...(19): siRNA sense strand
caagagcacaacaauuugg

SEQ ID NO: 212365 - RNA, 19 nt, Homo sapiens
  misc_RNA (1)...(19): siRNA sense strand
ccugucagcugcaugugau

SEQ ID NO: 212366 - RNA, 19 nt, Homo sapiens
  misc_RNA (1)...(19): siRNA sense strand
gcugcugaauguuuaugau

SEQ ID NO: 212367 - RNA, 19 nt, Homo sapiens
  misc_RNA (1)...(19): siRNA sense strand
acagagcucuaccagucuu

SEQ ID NO: 212368 - RNA, 19 nt, Homo sapiens
  misc_RNA (1)...(19): siRNA sense strand
acaguugggugaaguugca

SEQ ID NO: 212369 - RNA, 19 nt, Homo sapiens
  misc_RNA (1)...(19): siRNA sense strand
guuugaccacuauuuauga

SEQ ID NO: 212370 - RNA, 19 nt, Homo sapiens
  misc_RNA (1)...(19): siRNA sense strand
gcuuauaggacugccauga

SEQ ID NO: 212371 - RNA, 19 nt, Homo sapiens
  misc_RNA (1)...(19): siRNA sense strand
caucaggccaaauguaaca

SEQ ID NO: 212372 - RNA, 19 nt, Homo sapiens
  misc_RNA (1)...(19): siRNA sense strand
gauucuauccaaauuccaa

SEQ ID NO: 212373 - RNA, 19 nt, Homo sapiens
  misc_RNA (1)...(19): siRNA sense strand
ggcaaguucaacaggauuu

SEQ ID NO: 212374 - RNA, 19 nt, Homo sapiens
  misc_RNA (1)...(19): siRNA sense strand
gaacuggcugcugaauguu

SEQ ID NO: 212375 - RNA, 19 nt, Homo sapiens
  misc_RNA (1)...(19): siRNA sense strand
cugcugaauguuuaugaua

SEQ ID NO: 212376 - RNA, 19 nt, Homo sapiens
  misc_RNA (1)...(19): siRNA sense strand
aagcaucaggccaaaugua

SEQ ID NO: 212377 - RNA, 19 nt, Homo sapiens
  misc_RNA (1)...(19): siRNA sense strand
uggcaucauuucccugugu

SEQ ID NO: 212378 - RNA, 19 nt, Homo sapiens
  misc_RNA (1)...(19): siRNA sense strand
ccaugaaacuccgaagacu

SEQ ID NO: 212379 - RNA, 19 nt, Homo sapiens
  misc_RNA (1)...(19): siRNA sense strand
auaauaagccagagaucga

SEQ ID NO: 212380 - RNA, 19 nt, Homo sapiens
  misc_RNA (1)...(19): siRNA sense strand
cuaauaauaagccagagau

SEQ ID NO: 212381 - RNA, 19 nt, Homo sapiens
  misc_RNA (1)...(19): siRNA sense strand
ugggugaaguugcauccuu

SEQ ID NO: 212382 - RNA, 19 nt, Homo sapiens
  misc_RNA (1)...(19): siRNA sense strand
caucauuucccuguguaaa

SEQ ID NO: 212383 - RNA, 19 nt, Homo sapiens
  misc_RNA (1)...(19): siRNA sense strand
gcguggauaugugucugaa

SEQ ID NO: 212384 - RNA, 19 nt, Homo sapiens
  misc_RNA (1)...(19): siRNA sense strand
gcacuaucccaugguggaa

SEQ ID NO: 212385 - RNA, 19 nt, Homo sapiens
  misc_RNA (1)...(19): siRNA sense strand
gagccugucagcugcaugu

SEQ ID NO: 212386 - RNA, 19 nt, Homo sapiens
  misc_RNA (1)...(19): siRNA sense strand
guacagauaccuuuucaag

SEQ ID NO: 212387 - RNA, 19 nt, Homo sapiens
  misc_RNA (1)...(19): siRNA sense strand
gucccucucugcguggaua

SEQ ID NO: 212388 - RNA, 19 nt, Homo sapiens
  misc_RNA (1)...(19): siRNA sense strand
ggagcugcuuccaauuugc

SEQ ID NO: 212389 - RNA, 19 nt, Homo sapiens
  misc_RNA (1)...(19): siRNA sense strand
uuagcugaccugaauaaug

SEQ ID NO: 212390 - RNA, 19 nt, Homo sapiens
  misc_RNA (1)...(19): siRNA sense strand
guggcaaguucaacaggau

SEQ ID NO: 212391 - RNA, 19 nt, Homo sapiens
  misc_RNA (1)...(19): siRNA sense strand
acaacaauuuggucaacgu

SEQ ID NO: 212392 - RNA, 19 nt, Homo sapiens
  misc_RNA (1)...(19): siRNA sense strand
gacuacaucaggagaagau

SEQ ID NO: 212393 - RNA, 19 nt, Homo sapiens
  misc_RNA (1)...(19): siRNA sense strand
uaauaagccagagaucgaa

SEQ ID NO: 212394 - RNA, 19 nt, Homo sapiens
  misc_RNA (1)...(19): siRNA sense strand
ugucagauucucagcuuau

SEQ ID NO: 212395 - RNA, 19 nt, Homo sapiens
  misc_RNA (1)...(19): siRNA sense strand
ggauauccugcagauuauu

SEQ ID NO: 212396 - RNA, 19 nt, Homo sapiens
  misc_RNA (1)...(19): siRNA sense strand
agcaucaggccaaauguaa

SEQ ID NO: 212397 - RNA, 19 nt, Homo sapiens
  misc_RNA (1)...(19): siRNA sense strand
gcccuuugcuuggaucucu

SEQ ID NO: 212398 - RNA, 19 nt, Homo sapiens
  misc_RNA (1)...(19): siRNA sense strand
gcugaauguuuaugauacg

SEQ ID NO: 212399 - RNA, 19 nt, Homo sapiens
  misc_RNA (1)...(19): siRNA sense strand
agacuuugccaagguacua

SEQ ID NO: 212400 - RNA, 19 nt, Homo sapiens
  misc_RNA (1)...(19): siRNA sense strand
caagcaaguggcaaguuca

SEQ ID NO: 212401 - RNA, 19 nt, Homo sapiens
  misc_RNA (1)...(19): siRNA sense strand
agacaaguacagauaccuu

SEQ ID NO: 212402 - RNA, 19 nt, Homo sapiens
  misc_RNA (1)...(19): siRNA sense strand
gcaucauuucccuguguaa

SEQ ID NO: 212403 - RNA, 19 nt, Homo sapiens
  misc_RNA (1)...(19): siRNA sense strand
cugcaaagaguguccaauc

SEQ ID NO: 212404 - RNA, 19 nt, Homo sapiens
  misc_RNA (1)...(19): siRNA sense strand
cuuauaggacugccaugaa

SEQ ID NO: 212405 - RNA, 19 nt, Homo sapiens
  misc_RNA (1)...(19): siRNA sense strand
caaagaguguccaaucauu

SEQ ID NO: 212406 - RNA, 19 nt, Homo sapiens
  misc_RNA (1)...(19): siRNA sense strand
uagcugaccugaauaaugu

SEQ ID NO: 212407 - RNA, 19 nt, Homo sapiens
  misc_RNA (1)...(19): siRNA sense strand
gcaugauucuauccaaauu

SEQ ID NO: 212408 - RNA, 19 nt, Homo sapiens
  misc_RNA (1)...(19): siRNA sense strand
ugaacuggcugcugaaugu

SEQ ID NO: 212409 - RNA, 19 nt, Homo sapiens
  misc_RNA (1)...(19): siRNA sense strand
gauauccugcagauuauua

SEQ ID NO: 212410 - RNA, 19 nt, Homo sapiens
  misc_RNA (1)...(19): siRNA sense strand
gagaagauguucgagacuu

SEQ ID NO: 212411 - RNA, 19 nt, Homo sapiens
  misc_RNA (1)...(19): siRNA sense strand
gcacuuuaauuaugacauc

SEQ ID NO: 212412 - RNA, 19 nt, Homo sapiens
  misc_RNA (1)...(19): siRNA sense strand
guaaagcacauuuggaaga

SEQ ID NO: 212413 - RNA, 19 nt, Homo sapiens
  misc_RNA (1)...(19): siRNA sense strand
gaauauugcacuccgacua

SEQ ID NO: 212414 - RNA, 19 nt, Homo sapiens
  misc_RNA (1)...(19): siRNA sense strand
uuauaggacugccaugaaa

SEQ ID NO: 212415 - RNA, 19 nt, Homo sapiens
  misc_RNA (1)...(19): siRNA sense strand
gggugaaguugcauccuuu

SEQ ID NO: 212416 - RNA, 19 nt, Homo sapiens
  misc_RNA (1)...(19): siRNA sense strand
gcaagagcacaacaauuug

SEQ ID NO: 212417 - RNA, 19 nt, Homo sapiens
  misc_RNA (1)...(19): siRNA sense strand
gcacaacaauuuggucaac

SEQ ID NO: 212418 - RNA, 19 nt, Homo sapiens
  misc_RNA (1)...(19): siRNA sense strand
agcaagagcacaacaauuu

SEQ ID NO: 212419 - RNA, 19 nt, Homo sapiens
  misc_RNA (1)...(19): siRNA sense strand
agaagauguucgagacuuu

SEQ ID NO: 212420 - RNA, 19 nt, Homo sapiens
  misc_RNA (1)...(19): siRNA sense strand
gagcaagagcacaacaauu

SEQ ID NO: 212421 - RNA, 19 nt, Homo sapiens
  misc_RNA (1)...(19): siRNA sense strand
ucaagcaaguggcaaguuc

SEQ ID NO: 212422 - RNA, 19 nt, Homo sapiens
  misc_RNA (1)...(19): siRNA sense strand
ccacgagacucaaacaacu

SEQ ID NO: 212423 - RNA, 19 nt, Homo sapiens
  misc_RNA (1)...(19): siRNA sense strand
cagcacaaccucaagcaaa

SEQ ID NO: 212424 - RNA, 19 nt, Homo sapiens
  misc_RNA (1)...(19): siRNA sense strand
gcaaagaguguccaaucau

SEQ ID NO: 212425 - RNA, 19 nt, Homo sapiens
  misc_RNA (1)...(19): siRNA sense strand
auggauauccugcagauua

SEQ ID NO: 212426 - RNA, 19 nt, Homo sapiens
  misc_RNA (1)...(19): siRNA sense strand
uguaacaucugcaaagagu

SEQ ID NO: 212427 - RNA, 19 nt, Homo sapiens
  misc_RNA (1)...(19): siRNA sense strand
guccggagcugcuuccaau

SEQ ID NO: 212428 - RNA, 19 nt, Homo sapiens
  misc_RNA (1)...(19): siRNA sense strand
gcaaguggcaaguucaaca

SEQ ID NO: 212429 - RNA, 19 nt, Homo sapiens
  misc_RNA (1)...(19): siRNA sense strand
gcuuccaauuugcuaauaa

SEQ ID NO: 212430 - RNA, 19 nt, Homo sapiens
  misc_RNA (1)...(19): siRNA sense strand
uggaagacaaguacagaua

SEQ ID NO: 212431 - RNA, 19 nt, Homo sapiens
  misc_RNA (1)...(19): siRNA sense strand
ggauccguguccugucuuu

SEQ ID NO: 212432 - RNA, 19 nt, Homo sapiens
  misc_RNA (1)...(19): siRNA sense strand
gucuuuagcugaccugaau

SEQ ID NO: 212433 - RNA, 19 nt, Homo sapiens
  misc_RNA (1)...(19): siRNA sense strand
gacaaguacagauaccuuu

SEQ ID NO: 212434 - RNA, 19 nt, Homo sapiens
  misc_RNA (1)...(19): siRNA sense strand
ccaagcaucaggccaaaug

SEQ ID NO: 212435 - RNA, 19 nt, Homo sapiens
  misc_RNA (1)...(19): siRNA sense strand
ggagcaagagcacaacaau

SEQ ID NO: 212436 - RNA, 19 nt, Homo sapiens
  misc_RNA (1)...(19): siRNA sense strand
guguaaagcacauuuggaa

SEQ ID NO: 212437 - RNA, 19 nt, Homo sapiens
  misc_RNA (1)...(19): siRNA sense strand
caagacaguugggugaagu

SEQ ID NO: 212438 - RNA, 19 nt, Homo sapiens
  misc_RNA (1)...(19): siRNA sense strand
gaagauguucgagacuuug

SEQ ID NO: 212439 - RNA, 19 nt, Homo sapiens
  misc_RNA (1)...(19): siRNA sense strand
gucagauucucagcuuaua

SEQ ID NO: 212440 - RNA, 19 nt, Homo sapiens
  misc_RNA (1)...(19): siRNA sense strand
uaacaucugcaaagagugu

SEQ ID NO: 212441 - RNA, 19 nt, Homo sapiens
  misc_RNA (1)...(19): siRNA sense strand
cggagcugcuuccaauuug

SEQ ID NO: 212442 - RNA, 19 nt, Homo sapiens
  misc_RNA (1)...(19): siRNA sense strand
gaagacaaguacagauacc

SEQ ID NO: 212443 - RNA, 19 nt, Homo sapiens
  misc_RNA (1)...(19): siRNA sense strand
ccauggauauccugcagau

SEQ ID NO: 212444 - RNA, 19 nt, Homo sapiens
  misc_RNA (1)...(19): siRNA sense strand
ggcaucauuucccugugua

SEQ ID NO: 212445 - RNA, 19 nt, Homo sapiens
  misc_RNA (1)...(19): siRNA sense strand
uggauauccugcagauuau

SEQ ID NO: 212446 - RNA, 19 nt, Homo sapiens
  misc_RNA (1)...(19): siRNA sense strand
ggaagacaaguacagauac

SEQ ID NO: 212447 - RNA, 19 nt, Homo sapiens
  misc_RNA (1)...(19): siRNA sense strand
ugcaaagaguguccaauca

SEQ ID NO: 212448 - RNA, 19 nt, Homo sapiens
  misc_RNA (1)...(19): siRNA sense strand
guggauaugugucugaacu

SEQ ID NO: 212449 - RNA, 19 nt, Homo sapiens
  misc_RNA (1)...(19): siRNA sense strand
acuggcugcugaauguuua

SEQ ID NO: 212450 - RNA, 19 nt, Homo sapiens
  misc_RNA (1)...(19): siRNA sense strand
acuaucccaugguggaaua

SEQ ID NO: 212451 - RNA, 19 nt, Homo sapiens
  misc_RNA (1)...(19): siRNA sense strand
ccggagcugcuuccaauuu

SEQ ID NO: 212452 - RNA, 19 nt, Homo sapiens
  misc_RNA (1)...(19): siRNA sense strand
ccaaauuccaagacaguug

SEQ ID NO: 212453 - RNA, 19 nt, Homo sapiens
  misc_RNA (1)...(19): siRNA sense strand
cagaaacugccaagcauca

SEQ ID NO: 212454 - RNA, 19 nt, Homo sapiens
  misc_RNA (1)...(19): siRNA sense strand
uaugacaucugccaaagcu

SEQ ID NO: 212455 - RNA, 19 nt, Homo sapiens
  misc_RNA (1)...(19): siRNA sense strand
aaugucagauucucagcuu

SEQ ID NO: 212456 - RNA, 19 nt, Homo sapiens
  misc_RNA (1)...(19): siRNA sense strand
ucgagacuuugccaaggua

SEQ ID NO: 212457 - RNA, 19 nt, Homo sapiens
  misc_RNA (1)...(19): siRNA sense strand
gcaaaaggccauaaaaugc

SEQ ID NO: 212458 - RNA, 19 nt, Homo sapiens
  misc_RNA (1)...(19): siRNA sense strand
cugcaugauucuauccaaa

SEQ ID NO: 212459 - RNA, 19 nt, Homo sapiens
  misc_RNA (1)...(19): siRNA sense strand
uaaagcacauuuggaagac

SEQ ID NO: 212460 - RNA, 19 nt, Homo sapiens
  misc_RNA (1)...(19): siRNA sense strand
acaggagucuaaagcacuu

SEQ ID NO: 212461 - RNA, 19 nt, Homo sapiens
  misc_RNA (1)...(19): siRNA sense strand
acagauaccuuuucaagca

SEQ ID NO: 212462 - RNA, 19 nt, Homo sapiens
  misc_RNA (1)...(19): siRNA sense strand
aagcacauuuggaagacaa

SEQ ID NO: 212463 - RNA, 19 nt, Homo sapiens
  misc_RNA (1)...(19): siRNA sense strand
gcuaauaauaagccagaga

SEQ ID NO: 212464 - RNA, 19 nt, Homo sapiens
  misc_RNA (1)...(19): siRNA sense strand
caagagcacaacaauuugg

SEQ ID NO: 212465 - RNA, 19 nt, Homo sapiens
  misc_RNA (1)...(19): siRNA sense strand
ccugucagcugcaugugau

SEQ ID NO: 212466 - RNA, 19 nt, Homo sapiens
  misc_RNA (1)...(19): siRNA sense strand
gcugcugaauguuuaugau

SEQ ID NO: 212467 - RNA, 19 nt, Homo sapiens
  misc_RNA (1)...(19): siRNA sense strand
acagagcucuaccagucuu

SEQ ID NO: 212468 - RNA, 19 nt, Homo sapiens
  misc_RNA (1)...(19): siRNA sense strand
acaguugggugaaguugca

SEQ ID NO: 212469 - RNA, 19 nt, Homo sapiens
  misc_RNA (1)...(19): siRNA sense strand
guuugaccacuauuuauga

SEQ ID NO: 212470 - RNA, 19 nt, Homo sapiens
  misc_RNA (1)...(19): siRNA sense strand
gcuuauaggacugccauga

SEQ ID NO: 212471 - RNA, 19 nt, Homo sapiens
  misc_RNA (1)...(19): siRNA sense strand
caucaggccaaauguaaca

SEQ ID NO: 212472 - RNA, 19 nt, Homo sapiens
  misc_RNA (1)...(19): siRNA sense strand
gauucuauccaaauuccaa

SEQ ID NO: 212473 - RNA, 19 nt, Homo sapiens
  misc_RNA (1)...(19): siRNA sense strand
ggcaaguucaacaggauuu

SEQ ID NO: 212474 - RNA, 19 nt, Homo sapiens
  misc_RNA (1)...(19): siRNA sense strand
gaacuggcugcugaauguu

SEQ ID NO: 212475 - RNA, 19 nt, Homo sapiens
  misc_RNA (1)...(19): siRNA sense strand
cugcugaauguuuaugaua

SEQ ID NO: 212476 - RNA, 19 nt, Homo sapiens
  misc_RNA (1)...(19): siRNA sense strand
aagcaucaggccaaaugua

SEQ ID NO: 212477 - RNA, 19 nt, Homo sapiens
  misc_RNA (1)...(19): siRNA sense strand
uggcaucauuucccugugu

SEQ ID NO: 212478 - RNA, 19 nt, Homo sapiens
  misc_RNA (1)...(19): siRNA sense strand
ccaugaaacuccgaagacu

SEQ ID NO: 212479 - RNA, 19 nt, Homo sapiens
  misc_RNA (1)...(19): siRNA sense strand
auaauaagccagagaucga

SEQ ID NO: 212480 - RNA, 19 nt, Homo sapiens
  misc_RNA (1)...(19): siRNA sense strand
cuaauaauaagccagagau

SEQ ID NO: 212481 - RNA, 19 nt, Homo sapiens
  misc_RNA (1)...(19): siRNA sense strand
ugggugaaguugcauccuu

SEQ ID NO: 212482 - RNA, 19 nt, Homo sapiens
  misc_RNA (1)...(19): siRNA sense strand
caucauuucccuguguaaa

SEQ ID NO: 212483 - RNA, 19 nt, Homo sapiens
  misc_RNA (1)...(19): siRNA sense strand
gcguggauaugugucugaa

SEQ ID NO: 212484 - RNA, 19 nt, Homo sapiens
  misc_RNA (1)...(19): siRNA sense strand
gcacuaucccaugguggaa

SEQ ID NO: 212485 - RNA, 19 nt, Homo sapiens
  misc_RNA (1)...(19): siRNA sense strand
gagccugucagcugcaugu

SEQ ID NO: 212486 - RNA, 19 nt, Homo sapiens
  misc_RNA (1)...(19): siRNA sense strand
guacagauaccuuuucaag

SEQ ID NO: 212487 - RNA, 19 nt, Homo sapiens
  misc_RNA (1)...(19): siRNA sense strand
gucccucucugcguggaua

SEQ ID NO: 212488 - RNA, 19 nt, Homo sapiens
  misc_RNA (1)...(19): siRNA sense strand
ggagcugcuuccaauuugc

SEQ ID NO: 212489 - RNA, 19 nt, Homo sapiens
  misc_RNA (1)...(19): siRNA sense strand
uuagcugaccugaauaaug

SEQ ID NO: 212490 - RNA, 19 nt, Homo sapiens
  misc_RNA (1)...(19): siRNA sense strand
guggcaaguucaacaggau

SEQ ID NO: 212491 - RNA, 19 nt, Homo sapiens
  misc_RNA (1)...(19): siRNA sense strand
acaacaauuuggucaacgu

SEQ ID NO: 212492 - RNA, 19 nt, Homo sapiens
  misc_RNA (1)...(19): siRNA sense strand
gacuacaucaggagaagau

SEQ ID NO: 212493 - RNA, 19 nt, Homo sapiens
  misc_RNA (1)...(19): siRNA sense strand
uaauaagccagagaucgaa

SEQ ID NO: 212494 - RNA, 19 nt, Homo sapiens
  misc_RNA (1)...(19): siRNA sense strand
ugucagauucucagcuuau

SEQ ID NO: 212495 - RNA, 19 nt, Homo sapiens
  misc_RNA (1)...(19): siRNA sense strand
ggauauccugcagauuauu

SEQ ID NO: 212496 - RNA, 19 nt, Homo sapiens
  misc_RNA (1)...(19): siRNA sense strand
agcaucaggccaaauguaa

SEQ ID NO: 212497 - RNA, 19 nt, Homo sapiens
  misc_RNA (1)...(19): siRNA sense strand
gcccuuugcuuggaucucu

SEQ ID NO: 212498 - RNA, 19 nt, Homo sapiens
  misc_RNA (1)...(19): siRNA sense strand
gcugaauguuuaugauacg

SEQ ID NO: 212499 - RNA, 19 nt, Homo sapiens
  misc_RNA (1)...(19): siRNA sense strand
agacuuugccaagguacua

SEQ ID NO: 212500 - RNA, 19 nt, Homo sapiens
  misc_RNA (1)...(19): siRNA sense strand
caagcaaguggcaaguuca

SEQ ID NO: 212501 - RNA, 19 nt, Homo sapiens
  misc_RNA (1)...(19): siRNA sense strand
agacaaguacagauaccuu

SEQ ID NO: 212502 - RNA, 19 nt, Homo sapiens
  misc_RNA (1)...(19): siRNA sense strand
gcaucauuucccuguguaa

SEQ ID NO: 212503 - RNA, 19 nt, Homo sapiens
  misc_RNA (1)...(19): siRNA sense strand
cugcaaagaguguccaauc

SEQ ID NO: 212504 - RNA, 19 nt, Homo sapiens
  misc_RNA (1)...(19): siRNA sense strand
cuuauaggacugccaugaa

SEQ ID NO: 212505 - RNA, 19 nt, Homo sapiens
  misc_RNA (1)...(19): siRNA sense strand
caaagaguguccaaucauu

SEQ ID NO: 212506 - RNA, 19 nt, Homo sapiens
  misc_RNA (1)...(19): siRNA sense strand
uagcugaccugaauaaugu

SEQ ID NO: 212507 - RNA, 19 nt, Homo sapiens
  misc_RNA (1)...(19): siRNA sense strand
gcaugauucuauccaaauu

SEQ ID NO: 212508 - RNA, 19 nt, Homo sapiens
  misc_RNA (1)...(19): siRNA sense strand
ugaacuggcugcugaaugu

SEQ ID NO: 212509 - RNA, 19 nt, Homo sapiens
  misc_RNA (1)...(19): siRNA sense strand
gauauccugcagauuauua

SEQ ID NO: 212510 - RNA, 19 nt, Homo sapiens
  misc_RNA (1)...(19): siRNA sense strand
gagaagauguucgagacuu

SEQ ID NO: 212511 - RNA, 19 nt, Homo sapiens
  misc_RNA (1)...(19): siRNA sense strand
gcacuuuaauuaugacauc

SEQ ID NO: 212512 - RNA, 19 nt, Homo sapiens
  misc_RNA (1)...(19): siRNA sense strand
guaaagcacauuuggaaga

SEQ ID NO: 212513 - RNA, 19 nt, Homo sapiens
  misc_RNA (1)...(19): siRNA sense strand
gaauauugcacuccgacua

SEQ ID NO: 212514 - RNA, 19 nt, Homo sapiens
  misc_RNA (1)...(19): siRNA sense strand
uuauaggacugccaugaaa

SEQ ID NO: 212515 - RNA, 19 nt, Homo sapiens
  misc_RNA (1)...(19): siRNA sense strand
gggugaaguugcauccuuu

SEQ ID NO: 212516 - RNA, 19 nt, Homo sapiens
  misc_RNA (1)...(19): siRNA sense strand
gcaagagcacaacaauuug

SEQ ID NO: 212517 - RNA, 19 nt, Homo sapiens
  misc_RNA (1)...(19): siRNA sense strand
gcacaacaauuuggucaac

SEQ ID NO: 212518 - RNA, 19 nt, Homo sapiens
  misc_RNA (1)...(19): siRNA sense strand
agcaagagcacaacaauuu

SEQ ID NO: 212519 - RNA, 19 nt, Homo sapiens
  misc_RNA (1)...(19): siRNA sense strand
agaagauguucgagacuuu

SEQ ID NO: 212520 - RNA, 19 nt, Homo sapiens
  misc_RNA (1)...(19): siRNA sense strand
gagcaagagcacaacaauu

SEQ ID NO: 212521 - RNA, 19 nt, Homo sapiens
  misc_RNA (1)...(19): siRNA sense strand
ucaagcaaguggcaaguuc

SEQ ID NO: 212522 - RNA, 19 nt, Homo sapiens
  misc_RNA (1)...(19): siRNA sense strand
ccacgagacucaaacaacu

SEQ ID NO: 212523 - RNA, 19 nt, Homo sapiens
  misc_RNA (1)...(19): siRNA sense strand
cagcacaaccucaagcaaa

SEQ ID NO: 212524 - RNA, 19 nt, Homo sapiens
  misc_RNA (1)...(19): siRNA sense strand
gcaaagaguguccaaucau

SEQ ID NO: 212525 - RNA, 19 nt, Homo sapiens
  misc_RNA (1)...(19): siRNA sense strand
auggauauccugcagauua

SEQ ID NO: 212526 - RNA, 19 nt, Homo sapiens
  misc_RNA (1)...(19): siRNA sense strand
uguaacaucugcaaagagu

SEQ ID NO: 212527 - RNA, 19 nt, Homo sapiens
  misc_RNA (1)...(19): siRNA sense strand
guccggagcugcuuccaau

SEQ ID NO: 212528 - RNA, 19 nt, Homo sapiens
  misc_RNA (1)...(19): siRNA sense strand
gcaaguggcaaguucaaca

SEQ ID NO: 212529 - RNA, 19 nt, Homo sapiens
  misc_RNA (1)...(19): siRNA sense strand
gcuuccaauuugcuaauaa

SEQ ID NO: 212530 - RNA, 19 nt, Homo sapiens
  misc_RNA (1)...(19): siRNA sense strand
uggaagacaaguacagaua

SEQ ID NO: 212531 - RNA, 19 nt, Homo sapiens
  misc_RNA (1)...(19): siRNA sense strand
ggauccguguccugucuuu

SEQ ID NO: 212532 - RNA, 19 nt, Homo sapiens
  misc_RNA (1)...(19): siRNA sense strand
gucuuuagcugaccugaau

SEQ ID NO: 212533 - RNA, 19 nt, Homo sapiens
  misc_RNA (1)...(19): siRNA sense strand
gacaaguacagauaccuuu

SEQ ID NO: 212534 - RNA, 19 nt, Homo sapiens
  misc_RNA (1)...(19): siRNA sense strand
ccaagcaucaggccaaaug

SEQ ID NO: 212535 - RNA, 19 nt, Homo sapiens
  misc_RNA (1)...(19): siRNA sense strand
ggagcaagagcacaacaau

SEQ ID NO: 212536 - RNA, 19 nt, Homo sapiens
  misc_RNA (1)...(19): siRNA sense strand
guguaaagcacauuuggaa

SEQ ID NO: 212537 - RNA, 19 nt, Homo sapiens
  misc_RNA (1)...(19): siRNA sense strand
caagacaguugggugaagu

SEQ ID NO: 212538 - RNA, 19 nt, Homo sapiens
  misc_RNA (1)...(19): siRNA sense strand
gaagauguucgagacuuug

SEQ ID NO: 212539 - RNA, 19 nt, Homo sapiens
  misc_RNA (1)...(19): siRNA sense strand
gucagauucucagcuuaua

SEQ ID NO: 212540 - RNA, 19 nt, Homo sapiens
  misc_RNA (1)...(19): siRNA sense strand
uaacaucugcaaagagugu

SEQ ID NO: 212541 - RNA, 19 nt, Homo sapiens
  misc_RNA (1)...(19): siRNA sense strand
cggagcugcuuccaauuug

SEQ ID NO: 212542 - RNA, 19 nt, Homo sapiens
  misc_RNA (1)...(19): siRNA sense strand
gaagacaaguacagauacc

SEQ ID NO: 212543 - RNA, 19 nt, Homo sapiens
  misc_RNA (1)...(19): siRNA sense strand
ccauggauauccugcagau

SEQ ID NO: 212544 - RNA, 19 nt, Homo sapiens
  misc_RNA (1)...(19): siRNA sense strand
ggcaucauuucccugugua

SEQ ID NO: 212545 - RNA, 19 nt, Homo sapiens
  misc_RNA (1)...(19): siRNA sense strand
uggauauccugcagauuau

SEQ ID NO: 212546 - RNA, 19 nt, Homo sapiens
  misc_RNA (1)...(19): siRNA sense strand
ggaagacaaguacagauac

SEQ ID NO: 212547 - RNA, 19 nt, Homo sapiens
  misc_RNA (1)...(19): siRNA sense strand
ugcaaagaguguccaauca

SEQ ID NO: 212548 - RNA, 19 nt, Homo sapiens
  misc_RNA (1)...(19): siRNA sense strand
guggauaugugucugaacu

SEQ ID NO: 212549 - RNA, 19 nt, Homo sapiens
  misc_RNA (1)...(19): siRNA sense strand
acuggcugcugaauguuua

SEQ ID NO: 212550 - RNA, 19 nt, Homo sapiens
  misc_RNA (1)...(19): siRNA sense strand
acuaucccaugguggaaua

SEQ ID NO: 212551 - RNA, 19 nt, Homo sapiens
  misc_RNA (1)...(19): siRNA sense strand
ccggagcugcuuccaauuu

SEQ ID NO: 212552 - RNA, 19 nt, Homo sapiens
  misc_RNA (1)...(19): siRNA sense strand
ccaaauuccaagacaguug

SEQ ID NO: 212553 - RNA, 19 nt, Homo sapiens
  misc_RNA (1)...(19): siRNA sense strand
cagaaacugccaagcauca

SEQ ID NO: 212554 - RNA, 19 nt, Homo sapiens
  misc_RNA (1)...(19): siRNA sense strand
uaugacaucugccaaagcu

SEQ ID NO: 212555 - RNA, 19 nt, Homo sapiens
  misc_RNA (1)...(19): siRNA sense strand
aaugucagauucucagcuu

SEQ ID NO: 212556 - RNA, 19 nt, Homo sapiens
  misc_RNA (1)...(19): siRNA sense strand
ucgagacuuugccaaggua

SEQ ID NO: 212557 - RNA, 19 nt, Homo sapiens
  misc_RNA (1)...(19): siRNA sense strand
gcaaaaggccauaaaaugc

SEQ ID NO: 212558 - RNA, 19 nt, Homo sapiens
  misc_RNA (1)...(19): siRNA sense strand
cugcaugauucuauccaaa

SEQ ID NO: 212559 - RNA, 19 nt, Homo sapiens
  misc_RNA (1)...(19): siRNA sense strand
uaaagcacauuuggaagac

SEQ ID NO: 212560 - RNA, 19 nt, Homo sapiens
  misc_RNA (1)...(19): siRNA sense strand
acaggagucuaaagcacuu

SEQ ID NO: 212561 - RNA, 19 nt, Homo sapiens
  misc_RNA (1)...(19): siRNA sense strand
acagauaccuuuucaagca

SEQ ID NO: 212562 - RNA, 19 nt, Homo sapiens
  misc_RNA (1)...(19): siRNA sense strand
aagcacauuuggaagacaa

SEQ ID NO: 212563 - RNA, 19 nt, Homo sapiens
  misc_RNA (1)...(19): siRNA sense strand
gcuaauaauaagccagaga

SEQ ID NO: 212564 - RNA, 19 nt, Homo sapiens
  misc_RNA (1)...(19): siRNA sense strand
caagagcacaacaauuugg

SEQ ID NO: 212565 - RNA, 19 nt, Homo sapiens
  misc_RNA (1)...(19): siRNA sense strand
ccugucagcugcaugugau

SEQ ID NO: 212566 - RNA, 19 nt, Homo sapiens
  misc_RNA (1)...(19): siRNA sense strand
gcugcugaauguuuaugau

SEQ ID NO: 212567 - RNA, 19 nt, Homo sapiens
  misc_RNA (1)...(19): siRNA sense strand
acagagcucuaccagucuu

SEQ ID NO: 212568 - RNA, 19 nt, Homo sapiens
  misc_RNA (1)...(19): siRNA sense strand
acaguugggugaaguugca

SEQ ID NO: 212569 - RNA, 19 nt, Homo sapiens
  misc_RNA (1)...(19): siRNA sense strand
guuugaccacuauuuauga

SEQ ID NO: 212570 - RNA, 19 nt, Homo sapiens
  misc_RNA (1)...(19): siRNA sense strand
gcuuauaggacugccauga

SEQ ID NO: 212571 - RNA, 19 nt, Homo sapiens
  misc_RNA (1)...(19): siRNA sense strand
caucaggccaaauguaaca

SEQ ID NO: 212572 - RNA, 19 nt, Homo sapiens
  misc_RNA (1)...(19): siRNA sense strand
gauucuauccaaauuccaa

SEQ ID NO: 212573 - RNA, 19 nt, Homo sapiens
  misc_RNA (1)...(19): siRNA sense strand
ggcaaguucaacaggauuu

SEQ ID NO: 212574 - RNA, 19 nt, Homo sapiens
  misc_RNA (1)...(19): siRNA sense strand
gaacuggcugcugaauguu

SEQ ID NO: 212575 - RNA, 19 nt, Homo sapiens
  misc_RNA (1)...(19): siRNA sense strand
cugcugaauguuuaugaua

SEQ ID NO: 212576 - RNA, 19 nt, Homo sapiens
  misc_RNA (1)...(19): siRNA sense strand
aagcaucaggccaaaugua

SEQ ID NO: 212577 - RNA, 19 nt, Homo sapiens
  misc_RNA (1)...(19): siRNA sense strand
uggcaucauuucccugugu

SEQ ID NO: 212578 - RNA, 19 nt, Homo sapiens
  misc_RNA (1)...(19): siRNA sense strand
ccaugaaacuccgaagacu

SEQ ID NO: 212579 - RNA, 19 nt, Homo sapiens
  misc_RNA (1)...(19): siRNA sense strand
auaauaagccagagaucga

SEQ ID NO: 212580 - RNA, 19 nt, Homo sapiens
  misc_RNA (1)...(19): siRNA sense strand
cuaauaauaagccagagau

SEQ ID NO: 212581 - RNA, 19 nt, Homo sapiens
  misc_RNA (1)...(19): siRNA sense strand
ugggugaaguugcauccuu

SEQ ID NO: 212582 - RNA, 19 nt, Homo sapiens
  misc_RNA (1)...(19): siRNA sense strand
caucauuucccuguguaaa

SEQ ID NO: 212583 - RNA, 19 nt, Homo sapiens
  misc_RNA (1)...(19): siRNA sense strand
gcguggauaugugucugaa

SEQ ID NO: 212584 - RNA, 19 nt, Homo sapiens
  misc_RNA (1)...(19): siRNA sense strand
gcacuaucccaugguggaa

SEQ ID NO: 212585 - RNA, 19 nt, Homo sapiens
  misc_RNA (1)...(19): siRNA sense strand
gagccugucagcugcaugu

SEQ ID NO: 212586 - RNA, 19 nt, Homo sapiens
  misc_RNA (1)...(19): siRNA sense strand
guacagauaccuuuucaag

SEQ ID NO: 212587 - RNA, 19 nt, Homo sapiens
  misc_RNA (1)...(19): siRNA sense strand
gucccucucugcguggaua

SEQ ID NO: 212588 - RNA, 19 nt, Homo sapiens
  misc_RNA (1)...(19): siRNA sense strand
ggagcugcuuccaauuugc

SEQ ID NO: 212589 - RNA, 19 nt, Homo sapiens
  misc_RNA (1)...(19): siRNA sense strand
uuagcugaccugaauaaug

SEQ ID NO: 212590 - RNA, 19 nt, Homo sapiens
  misc_RNA (1)...(19): siRNA sense strand
guggcaaguucaacaggau

SEQ ID NO: 212591 - RNA, 19 nt, Homo sapiens
  misc_RNA (1)...(19): siRNA sense strand
acaacaauuuggucaacgu

SEQ ID NO: 212592 - RNA, 19 nt, Homo sapiens
  misc_RNA (1)...(19): siRNA sense strand
gacuacaucaggagaagau

SEQ ID NO: 212593 - RNA, 19 nt, Homo sapiens
  misc_RNA (1)...(19): siRNA sense strand
uaauaagccagagaucgaa

SEQ ID NO: 212594 - RNA, 19 nt, Homo sapiens
  misc_RNA (1)...(19): siRNA sense strand
ugucagauucucagcuuau

SEQ ID NO: 212595 - RNA, 19 nt, Homo sapiens
  misc_RNA (1)...(19): siRNA sense strand
ggauauccugcagauuauu

SEQ ID NO: 212596 - RNA, 19 nt, Homo sapiens
  misc_RNA (1)...(19): siRNA sense strand
agcaucaggccaaauguaa

SEQ ID NO: 212597 - RNA, 19 nt, Homo sapiens
  misc_RNA (1)...(19): siRNA sense strand
gcccuuugcuuggaucucu

SEQ ID NO: 212598 - RNA, 19 nt, Homo sapiens
  misc_RNA (1)...(19): siRNA sense strand
gcugaauguuuaugauacg

SEQ ID NO: 212599 - RNA, 19 nt, Homo sapiens
  misc_RNA (1)...(19): siRNA sense strand
agacuuugccaagguacua

SEQ ID NO: 212600 - RNA, 19 nt, Homo sapiens
  misc_RNA (1)...(19): siRNA sense strand
caagcaaguggcaaguuca

SEQ ID NO: 212601 - RNA, 19 nt, Homo sapiens
  misc_RNA (1)...(19): siRNA sense strand
agacaaguacagauaccuu

SEQ ID NO: 212602 - RNA, 19 nt, Homo sapiens
  misc_RNA (1)...(19): siRNA sense strand
gcaucauuucccuguguaa

SEQ ID NO: 212603 - RNA, 19 nt, Homo sapiens
  misc_RNA (1)...(19): siRNA sense strand
cugcaaagaguguccaauc

SEQ ID NO: 212604 - RNA, 19 nt, Homo sapiens
  misc_RNA (1)...(19): siRNA sense strand
cuuauaggacugccaugaa

SEQ ID NO: 212605 - RNA, 19 nt, Homo sapiens
  misc_RNA (1)...(19): siRNA sense strand
caaagaguguccaaucauu

SEQ ID NO: 212606 - RNA, 19 nt, Homo sapiens
  misc_RNA (1)...(19): siRNA sense strand
uagcugaccugaauaaugu

SEQ ID NO: 212607 - RNA, 19 nt, Homo sapiens
  misc_RNA (1)...(19): siRNA sense strand
gcaugauucuauccaaauu

SEQ ID NO: 212608 - RNA, 19 nt, Homo sapiens
  misc_RNA (1)...(19): siRNA sense strand
ugaacuggcugcugaaugu

SEQ ID NO: 212609 - RNA, 19 nt, Homo sapiens
  misc_RNA (1)...(19): siRNA sense strand
gauauccugcagauuauua

SEQ ID NO: 212610 - RNA, 19 nt, Homo sapiens
  misc_RNA (1)...(19): siRNA sense strand
gagaagauguucgagacuu

SEQ ID NO: 212611 - RNA, 19 nt, Homo sapiens
  misc_RNA (1)...(19): siRNA sense strand
gcacuuuaauuaugacauc

SEQ ID NO: 212612 - RNA, 19 nt, Homo sapiens
  misc_RNA (1)...(19): siRNA sense strand
guaaagcacauuuggaaga

SEQ ID NO: 212613 - RNA, 19 nt, Homo sapiens
  misc_RNA (1)...(19): siRNA sense strand
gaauauugcacuccgacua

SEQ ID NO: 212614 - RNA, 19 nt, Homo sapiens
  misc_RNA (1)...(19): siRNA sense strand
uuauaggacugccaugaaa

SEQ ID NO: 212615 - RNA, 19 nt, Homo sapiens
  misc_RNA (1)...(19): siRNA sense strand
gggugaaguugcauccuuu

SEQ ID NO: 212616 - RNA, 19 nt, Homo sapiens
  misc_RNA (1)...(19): siRNA sense strand
gcaagagcacaacaauuug

SEQ ID NO: 212617 - RNA, 19 nt, Homo sapiens
  misc_RNA (1)...(19): siRNA sense strand
gcacaacaauuuggucaac

SEQ ID NO: 212618 - RNA, 19 nt, Homo sapiens
  misc_RNA (1)...(19): siRNA sense strand
agcaagagcacaacaauuu

SEQ ID NO: 212619 - RNA, 19 nt, Homo sapiens
  misc_RNA (1)...(19): siRNA sense strand
agaagauguucgagacuuu

SEQ ID NO: 212620 - RNA, 19 nt, Homo sapiens
  misc_RNA (1)...(19): siRNA sense strand
gagcaagagcacaacaauu

SEQ ID NO: 212621 - RNA, 19 nt, Homo sapiens
  misc_RNA (1)...(19): siRNA sense strand
ucaagcaaguggcaaguuc

SEQ ID NO: 212622 - RNA, 19 nt, Homo sapiens
  misc_RNA (1)...(19): siRNA sense strand
ccacgagacucaaacaacu

SEQ ID NO: 212623 - RNA, 19 nt, Homo sapiens
  misc_RNA (1)...(19): siRNA sense strand
cagcacaaccucaagcaaa

SEQ ID NO: 212624 - RNA, 19 nt, Homo sapiens
  misc_RNA (1)...(19): siRNA sense strand
gcaaagaguguccaaucau

SEQ ID NO: 212625 - RNA, 19 nt, Homo sapiens
  misc_RNA (1)...(19): siRNA sense strand
auggauauccugcagauua

SEQ ID NO: 212626 - RNA, 19 nt, Homo sapiens
  misc_RNA (1)...(19): siRNA sense strand
uguaacaucugcaaagagu

SEQ ID NO: 212627 - RNA, 19 nt, Homo sapiens
  misc_RNA (1)...(19): siRNA sense strand
guccggagcugcuuccaau

SEQ ID NO: 212628 - RNA, 19 nt, Homo sapiens
  misc_RNA (1)...(19): siRNA sense strand
gcaaguggcaaguucaaca

SEQ ID NO: 212629 - RNA, 19 nt, Homo sapiens
  misc_RNA (1)...(19): siRNA sense strand
gcuuccaauuugcuaauaa

SEQ ID NO: 212630 - RNA, 19 nt, Homo sapiens
  misc_RNA (1)...(19): siRNA sense strand
uggaagacaaguacagaua

SEQ ID NO: 212631 - RNA, 19 nt, Homo sapiens
  misc_RNA (1)...(19): siRNA sense strand
ggauccguguccugucuuu

SEQ ID NO: 212632 - RNA, 19 nt, Homo sapiens
  misc_RNA (1)...(19): siRNA sense strand
gucuuuagcugaccugaau

SEQ ID NO: 212633 - RNA, 19 nt, Homo sapiens
  misc_RNA (1)...(19): siRNA sense strand
gacaaguacagauaccuuu

SEQ ID NO: 212634 - RNA, 19 nt, Homo sapiens
  misc_RNA (1)...(19): siRNA sense strand
ccaagcaucaggccaaaug

SEQ ID NO: 212635 - RNA, 19 nt, Homo sapiens
  misc_RNA (1)...(19): siRNA sense strand
ggagcaagagcacaacaau

SEQ ID NO: 212636 - RNA, 19 nt, Homo sapiens
  misc_RNA (1)...(19): siRNA sense strand
guguaaagcacauuuggaa

SEQ ID NO: 212637 - RNA, 19 nt, Homo sapiens
  misc_RNA (1)...(19): siRNA sense strand
caagacaguugggugaagu

SEQ ID NO: 212638 - RNA, 19 nt, Homo sapiens
  misc_RNA (1)...(19): siRNA sense strand
gaagauguucgagacuuug

SEQ ID NO: 212639 - RNA, 19 nt, Homo sapiens
  misc_RNA (1)...(19): siRNA sense strand
gucagauucucagcuuaua

SEQ ID NO: 212640 - RNA, 19 nt, Homo sapiens
  misc_RNA (1)...(19): siRNA sense strand
uaacaucugcaaagagugu

SEQ ID NO: 212641 - RNA, 19 nt, Homo sapiens
  misc_RNA (1)...(19): siRNA sense strand
cggagcugcuuccaauuug

SEQ ID NO: 212642 - RNA, 19 nt, Homo sapiens
  misc_RNA (1)...(19): siRNA sense strand
gaagacaaguacagauacc

SEQ ID NO: 212643 - RNA, 19 nt, Homo sapiens
  misc_RNA (1)...(19): siRNA sense strand
ccauggauauccugcagau

SEQ ID NO: 212644 - RNA, 19 nt, Homo sapiens
  misc_RNA (1)...(19): siRNA sense strand
ggcaucauuucccugugua

SEQ ID NO: 212645 - RNA, 19 nt, Homo sapiens
  misc_RNA (1)...(19): siRNA sense strand
uggauauccugcagauuau

SEQ ID NO: 212646 - RNA, 19 nt, Homo sapiens
  misc_RNA (1)...(19): siRNA sense strand
ggaagacaaguacagauac

SEQ ID NO: 212647 - RNA, 19 nt, Homo sapiens
  misc_RNA (1)...(19): siRNA sense strand
ugcaaagaguguccaauca

SEQ ID NO: 212648 - RNA, 19 nt, Homo sapiens
  misc_RNA (1)...(19): siRNA sense strand
guggauaugugucugaacu

SEQ ID NO: 212649 - RNA, 19 nt, Homo sapiens
  misc_RNA (1)...(19): siRNA sense strand
acuggcugcugaauguuua

SEQ ID NO: 212650 - RNA, 19 nt, Homo sapiens
  misc_RNA (1)...(19): siRNA sense strand
acuaucccaugguggaaua

SEQ ID NO: 212651 - RNA, 19 nt, Homo sapiens
  misc_RNA (1)...(19): siRNA sense strand
ccggagcugcuuccaauuu

SEQ ID NO: 212652 - RNA, 19 nt, Homo sapiens
  misc_RNA (1)...(19): siRNA sense strand
ccaaauuccaagacaguug

SEQ ID NO: 212653 - RNA, 19 nt, Homo sapiens
  misc_RNA (1)...(19): siRNA sense strand
cagaaacugccaagcauca

SEQ ID NO: 212654 - RNA, 19 nt, Homo sapiens
  misc_RNA (1)...(19): siRNA sense strand
uaugacaucugccaaagcu

SEQ ID NO: 212655 - RNA, 19 nt, Homo sapiens
  misc_RNA (1)...(19): siRNA sense strand
aaugucagauucucagcuu

SEQ ID NO: 212656 - RNA, 19 nt, Homo sapiens
  misc_RNA (1)...(19): siRNA sense strand
ucgagacuuugccaaggua

SEQ ID NO: 212657 - RNA, 19 nt, Homo sapiens
  misc_RNA (1)...(19): siRNA sense strand
gcaaaaggccauaaaaugc

SEQ ID NO: 212658 - RNA, 19 nt, Homo sapiens
  misc_RNA (1)...(19): siRNA sense strand
cugcaugauucuauccaaa

SEQ ID NO: 212659 - RNA, 19 nt, Homo sapiens
  misc_RNA (1)...(19): siRNA sense strand
uaaagcacauuuggaagac

SEQ ID NO: 212660 - RNA, 19 nt, Homo sapiens
  misc_RNA (1)...(19): siRNA sense strand
acaggagucuaaagcacuu

SEQ ID NO: 212661 - RNA, 19 nt, Homo sapiens
  misc_RNA (1)...(19): siRNA sense strand
acagauaccuuuucaagca

SEQ ID NO: 212662 - RNA, 19 nt, Homo sapiens
  misc_RNA (1)...(19): siRNA sense strand
aagcacauuuggaagacaa

SEQ ID NO: 212663 - RNA, 19 nt, Homo sapiens
  misc_RNA (1)...(19): siRNA sense strand
gcuaauaauaagccagaga

SEQ ID NO: 212664 - RNA, 19 nt, Homo sapiens
  misc_RNA (1)...(19): siRNA sense strand
caagagcacaacaauuugg

SEQ ID NO: 212665 - RNA, 19 nt, Homo sapiens
  misc_RNA (1)...(19): siRNA sense strand
ccugucagcugcaugugau

SEQ ID NO: 212666 - RNA, 19 nt, Homo sapiens
  misc_RNA (1)...(19): siRNA sense strand
gcugcugaauguuuaugau

SEQ ID NO: 212667 - RNA, 19 nt, Homo sapiens
  misc_RNA (1)...(19): siRNA sense strand
acagagcucuaccagucuu

SEQ ID NO: 212668 - RNA, 19 nt, Homo sapiens
  misc_RNA (1)...(19): siRNA sense strand
acaguugggugaaguugca

SEQ ID NO: 212669 - RNA, 19 nt, Homo sapiens
  misc_RNA (1)...(19): siRNA sense strand
guuugaccacuauuuauga

SEQ ID NO: 212670 - RNA, 19 nt, Homo sapiens
  misc_RNA (1)...(19): siRNA sense strand
gcuuauaggacugccauga

SEQ ID NO: 212671 - RNA, 19 nt, Homo sapiens
  misc_RNA (1)...(19): siRNA sense strand
caucaggccaaauguaaca

SEQ ID NO: 212672 - RNA, 19 nt, Homo sapiens
  misc_RNA (1)...(19): siRNA sense strand
gauucuauccaaauuccaa

SEQ ID NO: 212673 - RNA, 19 nt, Homo sapiens
  misc_RNA (1)...(19): siRNA sense strand
ggcaaguucaacaggauuu

SEQ ID NO: 212674 - RNA, 19 nt, Homo sapiens
  misc_RNA (1)...(19): siRNA sense strand
gaacuggcugcugaauguu

SEQ ID NO: 212675 - RNA, 19 nt, Homo sapiens
  misc_RNA (1)...(19): siRNA sense strand
cugcugaauguuuaugaua

SEQ ID NO: 212676 - RNA, 19 nt, Homo sapiens
  misc_RNA (1)...(19): siRNA sense strand
aagcaucaggccaaaugua

SEQ ID NO: 212677 - RNA, 19 nt, Homo sapiens
  misc_RNA (1)...(19): siRNA sense strand
uggcaucauuucccugugu

SEQ ID NO: 212678 - RNA, 19 nt, Homo sapiens
  misc_RNA (1)...(19): siRNA sense strand
ccaugaaacuccgaagacu

SEQ ID NO: 212679 - RNA, 19 nt, Homo sapiens
  misc_RNA (1)...(19): siRNA sense strand
auaauaagccagagaucga

SEQ ID NO: 212680 - RNA, 19 nt, Homo sapiens
  misc_RNA (1)...(19): siRNA sense strand
cuaauaauaagccagagau

SEQ ID NO: 212681 - RNA, 19 nt, Homo sapiens
  misc_RNA (1)...(19): siRNA sense strand
ugggugaaguugcauccuu

SEQ ID NO: 212682 - RNA, 19 nt, Homo sapiens
  misc_RNA (1)...(19): siRNA sense strand
caucauuucccuguguaaa

SEQ ID NO: 212683 - RNA, 19 nt, Homo sapiens
  misc_RNA (1)...(19): siRNA sense strand
gcguggauaugugucugaa

SEQ ID NO: 212684 - RNA, 19 nt, Homo sapiens
  misc_RNA (1)...(19): siRNA sense strand
gcacuaucccaugguggaa

SEQ ID NO: 212685 - RNA, 19 nt, Homo sapiens
  misc_RNA (1)...(19): siRNA sense strand
gagccugucagcugcaugu

SEQ ID NO: 212686 - RNA, 19 nt, Homo sapiens
  misc_RNA (1)...(19): siRNA sense strand
guacagauaccuuuucaag

SEQ ID NO: 212687 - RNA, 19 nt, Homo sapiens
  misc_RNA (1)...(19): siRNA sense strand
gucccucucugcguggaua

SEQ ID NO: 212688 - RNA, 19 nt, Homo sapiens
  misc_RNA (1)...(19): siRNA sense strand
ggagcugcuuccaauuugc

SEQ ID NO: 212689 - RNA, 19 nt, Homo sapiens
  misc_RNA (1)...(19): siRNA sense strand
uuagcugaccugaauaaug

SEQ ID NO: 212690 - RNA, 19 nt, Homo sapiens
  misc_RNA (1)...(19): siRNA sense strand
guggcaaguucaacaggau

SEQ ID NO: 212691 - RNA, 19 nt, Homo sapiens
  misc_RNA (1)...(19): siRNA sense strand
acaacaauuuggucaacgu

SEQ ID NO: 212692 - RNA, 19 nt, Homo sapiens
  misc_RNA (1)...(19): siRNA sense strand
gacuacaucaggagaagau

SEQ ID NO: 212693 - RNA, 19 nt, Homo sapiens
  misc_RNA (1)...(19): siRNA sense strand
uaauaagccagagaucgaa

SEQ ID NO: 212694 - RNA, 19 nt, Homo sapiens
  misc_RNA (1)...(19): siRNA sense strand
ugucagauucucagcuuau

SEQ ID NO: 212695 - RNA, 19 nt, Homo sapiens
  misc_RNA (1)...(19): siRNA sense strand
ggauauccugcagauuauu

SEQ ID NO: 212696 - RNA, 19 nt, Homo sapiens
  misc_RNA (1)...(19): siRNA sense strand
agcaucaggccaaauguaa

SEQ ID NO: 212697 - RNA, 19 nt, Homo sapiens
  misc_RNA (1)...(19): siRNA sense strand
gcccuuugcuuggaucucu

SEQ ID NO: 212698 - RNA, 19 nt, Homo sapiens
  misc_RNA (1)...(19): siRNA sense strand
gcugaauguuuaugauacg

SEQ ID NO: 212699 - RNA, 19 nt, Homo sapiens
  misc_RNA (1)...(19): siRNA sense strand
agacuuugccaagguacua

SEQ ID NO: 212700 - RNA, 19 nt, Homo sapiens
  misc_RNA (1)...(19): siRNA sense strand
caagcaaguggcaaguuca

SEQ ID NO: 212701 - RNA, 19 nt, Homo sapiens
  misc_RNA (1)...(19): siRNA sense strand
agacaaguacagauaccuu

SEQ ID NO: 212702 - RNA, 19 nt, Homo sapiens
  misc_RNA (1)...(19): siRNA sense strand
gcaucauuucccuguguaa

SEQ ID NO: 212703 - RNA, 19 nt, Homo sapiens
  misc_RNA (1)...(19): siRNA sense strand
cugcaaagaguguccaauc

SEQ ID NO: 212704 - RNA, 19 nt, Homo sapiens
  misc_RNA (1)...(19): siRNA sense strand
cuuauaggacugccaugaa

SEQ ID NO: 212705 - RNA, 19 nt, Homo sapiens
  misc_RNA (1)...(19): siRNA sense strand
caaagaguguccaaucauu

SEQ ID NO: 212706 - RNA, 19 nt, Homo sapiens
  misc_RNA (1)...(19): siRNA sense strand
uagcugaccugaauaaugu

SEQ ID NO: 212707 - RNA, 19 nt, Homo sapiens
  misc_RNA (1)...(19): siRNA sense strand
gcaugauucuauccaaauu

SEQ ID NO: 212708 - RNA, 19 nt, Homo sapiens
  misc_RNA (1)...(19): siRNA sense strand
ugaacuggcugcugaaugu

SEQ ID NO: 212709 - RNA, 19 nt, Homo sapiens
  misc_RNA (1)...(19): siRNA sense strand
gauauccugcagauuauua

SEQ ID NO: 212710 - RNA, 19 nt, Homo sapiens
  misc_RNA (1)...(19): siRNA sense strand
gagaagauguucgagacuu

SEQ ID NO: 212711 - RNA, 19 nt, Homo sapiens
  misc_RNA (1)...(19): siRNA sense strand
gcacuuuaauuaugacauc

SEQ ID NO: 212712 - RNA, 19 nt, Homo sapiens
  misc_RNA (1)...(19): siRNA sense strand
guaaagcacauuuggaaga

SEQ ID NO: 212713 - RNA, 19 nt, Homo sapiens
  misc_RNA (1)...(19): siRNA sense strand
gaauauugcacuccgacua

SEQ ID NO: 212714 - RNA, 19 nt, Homo sapiens
  misc_RNA (1)...(19): siRNA sense strand
uuauaggacugccaugaaa

SEQ ID NO: 212715 - RNA, 19 nt, Homo sapiens
  misc_RNA (1)...(19): siRNA sense strand
gggugaaguugcauccuuu

SEQ ID NO: 212716 - RNA, 19 nt, Homo sapiens
  misc_RNA (1)...(19): siRNA sense strand
gcaagagcacaacaauuug

SEQ ID NO: 212717 - RNA, 19 nt, Homo sapiens
  misc_RNA (1)...(19): siRNA sense strand
gcacaacaauuuggucaac

SEQ ID NO: 212718 - RNA, 19 nt, Homo sapiens
  misc_RNA (1)...(19): siRNA sense strand
agcaagagcacaacaauuu

SEQ ID NO: 212719 - RNA, 19 nt, Homo sapiens
  misc_RNA (1)...(19): siRNA sense strand
agaagauguucgagacuuu

SEQ ID NO: 212720 - RNA, 19 nt, Homo sapiens
  misc_RNA (1)...(19): siRNA sense strand
gagcaagagcacaacaauu

SEQ ID NO: 212721 - RNA, 19 nt, Homo sapiens
  misc_RNA (1)...(19): siRNA sense strand
ucaagcaaguggcaaguuc

SEQ ID NO: 212722 - RNA, 19 nt, Homo sapiens
  misc_RNA (1)...(19): siRNA sense strand
ccacgagacucaaacaacu

SEQ ID NO: 212723 - RNA, 19 nt, Homo sapiens
  misc_RNA (1)...(19): siRNA sense strand
cagcacaaccucaagcaaa

SEQ ID NO: 212724 - RNA, 19 nt, Homo sapiens
  misc_RNA (1)...(19): siRNA sense strand
gcaaagaguguccaaucau

SEQ ID NO: 212725 - RNA, 19 nt, Homo sapiens
  misc_RNA (1)...(19): siRNA sense strand
auggauauccugcagauua

SEQ ID NO: 212726 - RNA, 19 nt, Homo sapiens
  misc_RNA (1)...(19): siRNA sense strand
uguaacaucugcaaagagu

SEQ ID NO: 212727 - RNA, 19 nt, Homo sapiens
  misc_RNA (1)...(19): siRNA sense strand
guccggagcugcuuccaau

SEQ ID NO: 212728 - RNA, 19 nt, Homo sapiens
  misc_RNA (1)...(19): siRNA sense strand
gcaaguggcaaguucaaca

SEQ ID NO: 212729 - RNA, 19 nt, Homo sapiens
  misc_RNA (1)...(19): siRNA sense strand
gcuuccaauuugcuaauaa

SEQ ID NO: 212730 - RNA, 19 nt, Homo sapiens
  misc_RNA (1)...(19): siRNA sense strand
uggaagacaaguacagaua

SEQ ID NO: 212731 - RNA, 19 nt, Homo sapiens
  misc_RNA (1)...(19): siRNA sense strand
ggauccguguccugucuuu

SEQ ID NO: 212732 - RNA, 19 nt, Homo sapiens
  misc_RNA (1)...(19): siRNA sense strand
gucuuuagcugaccugaau

SEQ ID NO: 212733 - RNA, 19 nt, Homo sapiens
  misc_RNA (1)...(19): siRNA sense strand
gacaaguacagauaccuuu

SEQ ID NO: 212734 - RNA, 19 nt, Homo sapiens
  misc_RNA (1)...(19): siRNA sense strand
ccaagcaucaggccaaaug

SEQ ID NO: 212735 - RNA, 19 nt, Homo sapiens
  misc_RNA (1)...(19): siRNA sense strand
ggagcaagagcacaacaau

SEQ ID NO: 212736 - RNA, 19 nt, Homo sapiens
  misc_RNA (1)...(19): siRNA sense strand
guguaaagcacauuuggaa

SEQ ID NO: 212737 - RNA, 19 nt, Homo sapiens
  misc_RNA (1)...(19): siRNA sense strand
caagacaguugggugaagu

SEQ ID NO: 212738 - RNA, 19 nt, Homo sapiens
  misc_RNA (1)...(19): siRNA sense strand
gaagauguucgagacuuug

SEQ ID NO: 212739 - RNA, 19 nt, Homo sapiens
  misc_RNA (1)...(19): siRNA sense strand
gucagauucucagcuuaua

SEQ ID NO: 212740 - RNA, 19 nt, Homo sapiens
  misc_RNA (1)...(19): siRNA sense strand
uaacaucugcaaagagugu

SEQ ID NO: 212741 - RNA, 19 nt, Homo sapiens
  misc_RNA (1)...(19): siRNA sense strand
cggagcugcuuccaauuug

SEQ ID NO: 212742 - RNA, 19 nt, Homo sapiens
  misc_RNA (1)...(19): siRNA sense strand
gaagacaaguacagauacc

SEQ ID NO: 212743 - RNA, 19 nt, Homo sapiens
  misc_RNA (1)...(19): siRNA sense strand
ccauggauauccugcagau

SEQ ID NO: 212744 - RNA, 19 nt, Homo sapiens
  misc_RNA (1)...(19): siRNA sense strand
ggcaucauuucccugugua

SEQ ID NO: 212745 - RNA, 19 nt, Homo sapiens
  misc_RNA (1)...(19): siRNA sense strand
uggauauccugcagauuau

SEQ ID NO: 212746 - RNA, 19 nt, Homo sapiens
  misc_RNA (1)...(19): siRNA sense strand
ggaagacaaguacagauac

SEQ ID NO: 212747 - RNA, 19 nt, Homo sapiens
  misc_RNA (1)...(19): siRNA sense strand
ugcaaagaguguccaauca

SEQ ID NO: 212748 - RNA, 19 nt, Homo sapiens
  misc_RNA (1)...(19): siRNA sense strand
guggauaugugucugaacu

SEQ ID NO: 212749 - RNA, 19 nt, Homo sapiens
  misc_RNA (1)...(19): siRNA sense strand
acuggcugcugaauguuua

SEQ ID NO: 212750 - RNA, 19 nt, Homo sapiens
  misc_RNA (1)...(19): siRNA sense strand
acuaucccaugguggaaua

SEQ ID NO: 212751 - RNA, 19 nt, Homo sapiens
  misc_RNA (1)...(19): siRNA sense strand
ccggagcugcuuccaauuu

SEQ ID NO: 212752 - RNA, 19 nt, Homo sapiens
  misc_RNA (1)...(19): siRNA sense strand
ccaaauuccaagacaguug

SEQ ID NO: 212753 - RNA, 19 nt, Homo sapiens
  misc_RNA (1)...(19): siRNA sense strand
cagaaacugccaagcauca

SEQ ID NO: 212754 - RNA, 19 nt, Homo sapiens
  misc_RNA (1)...(19): siRNA sense strand
uaugacaucugccaaagcu

SEQ ID NO: 212755 - RNA, 19 nt, Homo sapiens
  misc_RNA (1)...(19): siRNA sense strand
aaugucagauucucagcuu

SEQ ID NO: 212756 - RNA, 19 nt, Homo sapiens
  misc_RNA (1)...(19): siRNA sense strand
ucgagacuuugccaaggua

SEQ ID NO: 212757 - RNA, 19 nt, Homo sapiens
  misc_RNA (1)...(19): siRNA sense strand
gcaaaaggccauaaaaugc

SEQ ID NO: 212758 - RNA, 19 nt, Homo sapiens
  misc_RNA (1)...(19): siRNA sense strand
cugcaugauucuauccaaa

SEQ ID NO: 212759 - RNA, 19 nt, Homo sapiens
  misc_RNA (1)...(19): siRNA sense strand
uaaagcacauuuggaagac

SEQ ID NO: 212760 - RNA, 19 nt, Homo sapiens
  misc_RNA (1)...(19): siRNA sense strand
acaggagucuaaagcacuu

SEQ ID NO: 212761 - RNA, 19 nt, Homo sapiens
  misc_RNA (1)...(19): siRNA sense strand
acagauaccuuuucaagca

SEQ ID NO: 212762 - RNA, 19 nt, Homo sapiens
  misc_RNA (1)...(19): siRNA sense strand
aagcacauuuggaagacaa

SEQ ID NO: 212763 - RNA, 19 nt, Homo sapiens
  misc_RNA (1)...(19): siRNA sense strand
gcuaauaauaagccagaga

SEQ ID NO: 212764 - RNA, 19 nt, Homo sapiens
  misc_RNA (1)...(19): siRNA sense strand
caagagcacaacaauuugg

SEQ ID NO: 212765 - RNA, 19 nt, Homo sapiens
  misc_RNA (1)...(19): siRNA sense strand
ccugucagcugcaugugau

SEQ ID NO: 212766 - RNA, 19 nt, Homo sapiens
  misc_RNA (1)...(19): siRNA sense strand
gcugcugaauguuuaugau

SEQ ID NO: 212767 - RNA, 19 nt, Homo sapiens
  misc_RNA (1)...(19): siRNA sense strand
acagagcucuaccagucuu

SEQ ID NO: 212768 - RNA, 19 nt, Homo sapiens
  misc_RNA (1)...(19): siRNA sense strand
acaguugggugaaguugca

SEQ ID NO: 212769 - RNA, 19 nt, Homo sapiens
  misc_RNA (1)...(19): siRNA sense strand
guuugaccacuauuuauga

SEQ ID NO: 212770 - RNA, 19 nt, Homo sapiens
  misc_RNA (1)...(19): siRNA sense strand
gcuuauaggacugccauga

SEQ ID NO: 212771 - RNA, 19 nt, Homo sapiens
  misc_RNA (1)...(19): siRNA sense strand
caucaggccaaauguaaca

SEQ ID NO: 212772 - RNA, 19 nt, Homo sapiens
  misc_RNA (1)...(19): siRNA sense strand
gauucuauccaaauuccaa

SEQ ID NO: 212773 - RNA, 19 nt, Homo sapiens
  misc_RNA (1)...(19): siRNA sense strand
ggcaaguucaacaggauuu

SEQ ID NO: 212774 - RNA, 19 nt, Homo sapiens
  misc_RNA (1)...(19): siRNA sense strand
gaacuggcugcugaauguu

SEQ ID NO: 212775 - RNA, 19 nt, Homo sapiens
  misc_RNA (1)...(19): siRNA sense strand
cugcugaauguuuaugaua

SEQ ID NO: 212776 - RNA, 19 nt, Homo sapiens
  misc_RNA (1)...(19): siRNA sense strand
aagcaucaggccaaaugua

SEQ ID NO: 212777 - RNA, 19 nt, Homo sapiens
  misc_RNA (1)...(19): siRNA sense strand
uggcaucauuucccugugu

SEQ ID NO: 212778 - RNA, 19 nt, Homo sapiens
  misc_RNA (1)...(19): siRNA sense strand
ccaugaaacuccgaagacu

SEQ ID NO: 212779 - RNA, 19 nt, Homo sapiens
  misc_RNA (1)...(19): siRNA sense strand
auaauaagccagagaucga

SEQ ID NO: 212780 - RNA, 19 nt, Homo sapiens
  misc_RNA (1)...(19): siRNA sense strand
cuaauaauaagccagagau

SEQ ID NO: 212781 - RNA, 19 nt, Homo sapiens
  misc_RNA (1)...(19): siRNA sense strand
ugggugaaguugcauccuu

SEQ ID NO: 212782 - RNA, 19 nt, Homo sapiens
  misc_RNA (1)...(19): siRNA sense strand
caucauuucccuguguaaa

SEQ ID NO: 212783 - RNA, 19 nt, Homo sapiens
  misc_RNA (1)...(19): siRNA sense strand
gcguggauaugugucugaa

SEQ ID NO: 212784 - RNA, 19 nt, Homo sapiens
  misc_RNA (1)...(19): siRNA sense strand
gcacuaucccaugguggaa

SEQ ID NO: 212785 - RNA, 19 nt, Homo sapiens
  misc_RNA (1)...(19): siRNA sense strand
gagccugucagcugcaugu

SEQ ID NO: 212786 - RNA, 19 nt, Homo sapiens
  misc_RNA (1)...(19): siRNA sense strand
guacagauaccuuuucaag

SEQ ID NO: 212787 - RNA, 19 nt, Homo sapiens
  misc_RNA (1)...(19): siRNA sense strand
gucccucucugcguggaua

SEQ ID NO: 212788 - RNA, 19 nt, Homo sapiens
  misc_RNA (1)...(19): siRNA sense strand
ggagcugcuuccaauuugc

SEQ ID NO: 212789 - RNA, 19 nt, Homo sapiens
  misc_RNA (1)...(19): siRNA sense strand
uuagcugaccugaauaaug

SEQ ID NO: 212790 - RNA, 19 nt, Homo sapiens
  misc_RNA (1)...(19): siRNA sense strand
guggcaaguucaacaggau

SEQ ID NO: 212791 - RNA, 19 nt, Homo sapiens
  misc_RNA (1)...(19): siRNA sense strand
acaacaauuuggucaacgu

SEQ ID NO: 212792 - RNA, 19 nt, Homo sapiens
  misc_RNA (1)...(19): siRNA sense strand
gacuacaucaggagaagau

SEQ ID NO: 212793 - RNA, 19 nt, Homo sapiens
  misc_RNA (1)...(19): siRNA sense strand
uaauaagccagagaucgaa

SEQ ID NO: 212794 - RNA, 19 nt, Homo sapiens
  misc_RNA (1)...(19): siRNA sense strand
ugucagauucucagcuuau

SEQ ID NO: 212795 - RNA, 19 nt, Homo sapiens
  misc_RNA (1)...(19): siRNA sense strand
ggauauccugcagauuauu

SEQ ID NO: 212796 - RNA, 19 nt, Homo sapiens
  misc_RNA (1)...(19): siRNA sense strand
agcaucaggccaaauguaa

SEQ ID NO: 212797 - RNA, 19 nt, Homo sapiens
  misc_RNA (1)...(19): siRNA sense strand
gcccuuugcuuggaucucu

SEQ ID NO: 212798 - RNA, 19 nt, Homo sapiens
  misc_RNA (1)...(19): siRNA sense strand
gcugaauguuuaugauacg

SEQ ID NO: 212799 - RNA, 19 nt, Homo sapiens
  misc_RNA (1)...(19): siRNA sense strand
agacuuugccaagguacua

SEQ ID NO: 212800 - RNA, 19 nt, Homo sapiens
  misc_RNA (1)...(19): siRNA sense strand
caagcaaguggcaaguuca

SEQ ID NO: 212801 - RNA, 19 nt, Homo sapiens
  misc_RNA (1)...(19): siRNA sense strand
agacaaguacagauaccuu

SEQ ID NO: 212802 - RNA, 19 nt, Homo sapiens
  misc_RNA (1)...(19): siRNA sense strand
gcaucauuucccuguguaa

SEQ ID NO: 212803 - RNA, 19 nt, Homo sapiens
  misc_RNA (1)...(19): siRNA sense strand
cugcaaagaguguccaauc

SEQ ID NO: 212804 - RNA, 19 nt, Homo sapiens
  misc_RNA (1)...(19): siRNA sense strand
cuuauaggacugccaugaa

SEQ ID NO: 212805 - RNA, 19 nt, Homo sapiens
  misc_RNA (1)...(19): siRNA sense strand
caaagaguguccaaucauu

SEQ ID NO: 212806 - RNA, 19 nt, Homo sapiens
  misc_RNA (1)...(19): siRNA sense strand
uagcugaccugaauaaugu

SEQ ID NO: 212807 - RNA, 19 nt, Homo sapiens
  misc_RNA (1)...(19): siRNA sense strand
gcaugauucuauccaaauu

SEQ ID NO: 212808 - RNA, 19 nt, Homo sapiens
  misc_RNA (1)...(19): siRNA sense strand
ugaacuggcugcugaaugu

SEQ ID NO: 212809 - RNA, 19 nt, Homo sapiens
  misc_RNA (1)...(19): siRNA sense strand
gauauccugcagauuauua

SEQ ID NO: 212810 - RNA, 19 nt, Homo sapiens
  misc_RNA (1)...(19): siRNA sense strand
gagaagauguucgagacuu

SEQ ID NO: 212811 - RNA, 19 nt, Homo sapiens
  misc_RNA (1)...(19): siRNA sense strand
gcacuuuaauuaugacauc

SEQ ID NO: 212812 - RNA, 19 nt, Homo sapiens
  misc_RNA (1)...(19): siRNA sense strand
guaaagcacauuuggaaga

SEQ ID NO: 212813 - RNA, 19 nt, Homo sapiens
  misc_RNA (1)...(19): siRNA sense strand
gaauauugcacuccgacua

SEQ ID NO: 212814 - RNA, 19 nt, Homo sapiens
  misc_RNA (1)...(19): siRNA sense strand
uuauaggacugccaugaaa

SEQ ID NO: 212815 - RNA, 19 nt, Homo sapiens
  misc_RNA (1)...(19): siRNA sense strand
gggugaaguugcauccuuu

SEQ ID NO: 212816 - RNA, 19 nt, Homo sapiens
  misc_RNA (1)...(19): siRNA sense strand
gcaagagcacaacaauuug

SEQ ID NO: 212817 - RNA, 19 nt, Homo sapiens
  misc_RNA (1)...(19): siRNA sense strand
gcacaacaauuuggucaac

SEQ ID NO: 212818 - RNA, 19 nt, Homo sapiens
  misc_RNA (1)...(19): siRNA sense strand
agcaagagcacaacaauuu

SEQ ID NO: 212819 - RNA, 19 nt, Homo sapiens
  misc_RNA (1)...(19): siRNA sense strand
agaagauguucgagacuuu

SEQ ID NO: 212820 - RNA, 19 nt, Homo sapiens
  misc_RNA (1)...(19): siRNA sense strand
gagcaagagcacaacaauu

SEQ ID NO: 212821 - RNA, 19 nt, Homo sapiens
  misc_RNA (1)...(19): siRNA sense strand
ucaagcaaguggcaaguuc

SEQ ID NO: 212822 - RNA, 19 nt, Homo sapiens
  misc_RNA (1)...(19): siRNA sense strand
ccacgagacucaaacaacu

SEQ ID NO: 212823 - RNA, 19 nt, Homo sapiens
  misc_RNA (1)...(19): siRNA sense strand
cagcacaaccucaagcaaa

SEQ ID NO: 212824 - RNA, 19 nt, Homo sapiens
  misc_RNA (1)...(19): siRNA sense strand
gcaaagaguguccaaucau

SEQ ID NO: 212825 - RNA, 19 nt, Homo sapiens
  misc_RNA (1)...(19): siRNA sense strand
auggauauccugcagauua

SEQ ID NO: 212826 - RNA, 19 nt, Homo sapiens
  misc_RNA (1)...(19): siRNA sense strand
uguaacaucugcaaagagu

SEQ ID NO: 212827 - RNA, 19 nt, Homo sapiens
  misc_RNA (1)...(19): siRNA sense strand
guccggagcugcuuccaau

SEQ ID NO: 212828 - RNA, 19 nt, Homo sapiens
  misc_RNA (1)...(19): siRNA sense strand
gcaaguggcaaguucaaca

SEQ ID NO: 212829 - RNA, 19 nt, Homo sapiens
  misc_RNA (1)...(19): siRNA sense strand
gcuuccaauuugcuaauaa

SEQ ID NO: 212830 - RNA, 19 nt, Homo sapiens
  misc_RNA (1)...(19): siRNA sense strand
uggaagacaaguacagaua

SEQ ID NO: 212831 - RNA, 19 nt, Homo sapiens
  misc_RNA (1)...(19): siRNA sense strand
ggauccguguccugucuuu

SEQ ID NO: 212832 - RNA, 19 nt, Homo sapiens
  misc_RNA (1)...(19): siRNA sense strand
gucuuuagcugaccugaau

SEQ ID NO: 212833 - RNA, 19 nt, Homo sapiens
  misc_RNA (1)...(19): siRNA sense strand
gacaaguacagauaccuuu

SEQ ID NO: 212834 - RNA, 19 nt, Homo sapiens
  misc_RNA (1)...(19): siRNA sense strand
ccaagcaucaggccaaaug

SEQ ID NO: 212835 - RNA, 19 nt, Homo sapiens
  misc_RNA (1)...(19): siRNA sense strand
ggagcaagagcacaacaau

SEQ ID NO: 212836 - RNA, 19 nt, Homo sapiens
  misc_RNA (1)...(19): siRNA sense strand
guguaaagcacauuuggaa

SEQ ID NO: 212837 - RNA, 19 nt, Homo sapiens
  misc_RNA (1)...(19): siRNA sense strand
caagacaguugggugaagu

SEQ ID NO: 212838 - RNA, 19 nt, Homo sapiens
  misc_RNA (1)...(19): siRNA sense strand
gaagauguucgagacuuug

SEQ ID NO: 212839 - RNA, 19 nt, Homo sapiens
  misc_RNA (1)...(19): siRNA sense strand
gucagauucucagcuuaua

SEQ ID NO: 212840 - RNA, 19 nt, Homo sapiens
  misc_RNA (1)...(19): siRNA sense strand
uaacaucugcaaagagugu

SEQ ID NO: 212841 - RNA, 19 nt, Homo sapiens
  misc_RNA (1)...(19): siRNA sense strand
cggagcugcuuccaauuug

SEQ ID NO: 212842 - RNA, 19 nt, Homo sapiens
  misc_RNA (1)...(19): siRNA sense strand
gaagacaaguacagauacc

SEQ ID NO: 212843 - RNA, 19 nt, Homo sapiens
  misc_RNA (1)...(19): siRNA sense strand
ccauggauauccugcagau

SEQ ID NO: 212844 - RNA, 19 nt, Homo sapiens
  misc_RNA (1)...(19): siRNA sense strand
ggcaucauuucccugugua

SEQ ID NO: 212845 - RNA, 19 nt, Homo sapiens
  misc_RNA (1)...(19): siRNA sense strand
uggauauccugcagauuau

SEQ ID NO: 212846 - RNA, 19 nt, Homo sapiens
  misc_RNA (1)...(19): siRNA sense strand
ggaagacaaguacagauac

SEQ ID NO: 212847 - RNA, 19 nt, Homo sapiens
  misc_RNA (1)...(19): siRNA sense strand
ugcaaagaguguccaauca

SEQ ID NO: 212848 - RNA, 19 nt, Homo sapiens
  misc_RNA (1)...(19): siRNA sense strand
guggauaugugucugaacu

SEQ ID NO: 212849 - RNA, 19 nt, Homo sapiens
  misc_RNA (1)...(19): siRNA sense strand
acuggcugcugaauguuua

SEQ ID NO: 212850 - RNA, 19 nt, Homo sapiens
  misc_RNA (1)...(19): siRNA sense strand
acuaucccaugguggaaua

SEQ ID NO: 212851 - RNA, 19 nt, Homo sapiens
  misc_RNA (1)...(19): siRNA sense strand
ccggagcugcuuccaauuu

SEQ ID NO: 212852 - RNA, 19 nt, Homo sapiens
  misc_RNA (1)...(19): siRNA sense strand
ccaaauuccaagacaguug

SEQ ID NO: 212853 - RNA, 19 nt, Homo sapiens
  misc_RNA (1)...(19): siRNA sense strand
cagaaacugccaagcauca

SEQ ID NO: 212854 - RNA, 19 nt, Homo sapiens
  misc_RNA (1)...(19): siRNA sense strand
uaugacaucugccaaagcu

SEQ ID NO: 212855 - RNA, 19 nt, Homo sapiens
  misc_RNA (1)...(19): siRNA sense strand
aaugucagauucucagcuu

SEQ ID NO: 212856 - RNA, 19 nt, Homo sapiens
  misc_RNA (1)...(19): siRNA sense strand
ucgagacuuugccaaggua

SEQ ID NO: 212857 - RNA, 19 nt, Homo sapiens
  misc_RNA (1)...(19): siRNA sense strand
gcaaaaggccauaaaaugc

SEQ ID NO: 212858 - RNA, 19 nt, Homo sapiens
  misc_RNA (1)...(19): siRNA sense strand
cugcaugauucuauccaaa

SEQ ID NO: 212859 - RNA, 19 nt, Homo sapiens
  misc_RNA (1)...(19): siRNA sense strand
uaaagcacauuuggaagac

SEQ ID NO: 212860 - RNA, 19 nt, Homo sapiens
  misc_RNA (1)...(19): siRNA sense strand
acaggagucuaaagcacuu

SEQ ID NO: 212861 - RNA, 19 nt, Homo sapiens
  misc_RNA (1)...(19): siRNA sense strand
acagauaccuuuucaagca

SEQ ID NO: 212862 - RNA, 19 nt, Homo sapiens
  misc_RNA (1)...(19): siRNA sense strand
aagcacauuuggaagacaa

SEQ ID NO: 212863 - RNA, 19 nt, Homo sapiens
  misc_RNA (1)...(19): siRNA sense strand
gcuaauaauaagccagaga

SEQ ID NO: 212864 - RNA, 19 nt, Homo sapiens
  misc_RNA (1)...(19): siRNA sense strand
caagagcacaacaauuugg

SEQ ID NO: 212865 - RNA, 19 nt, Homo sapiens
  misc_RNA (1)...(19): siRNA sense strand
ccugucagcugcaugugau

SEQ ID NO: 212866 - RNA, 19 nt, Homo sapiens
  misc_RNA (1)...(19): siRNA sense strand
gcugcugaauguuuaugau

SEQ ID NO: 212867 - RNA, 19 nt, Homo sapiens
  misc_RNA (1)...(19): siRNA sense strand
acagagcucuaccagucuu

SEQ ID NO: 212868 - RNA, 19 nt, Homo sapiens
  misc_RNA (1)...(19): siRNA sense strand
acaguugggugaaguugca

SEQ ID NO: 212869 - RNA, 19 nt, Homo sapiens
  misc_RNA (1)...(19): siRNA sense strand
guuugaccacuauuuauga

SEQ ID NO: 212870 - RNA, 19 nt, Homo sapiens
  misc_RNA (1)...(19): siRNA sense strand
gcuuauaggacugccauga

SEQ ID NO: 212871 - RNA, 19 nt, Homo sapiens
  misc_RNA (1)...(19): siRNA sense strand
caucaggccaaauguaaca

SEQ ID NO: 212872 - RNA, 19 nt, Homo sapiens
  misc_RNA (1)...(19): siRNA sense strand
gauucuauccaaauuccaa

SEQ ID NO: 212873 - RNA, 19 nt, Homo sapiens
  misc_RNA (1)...(19): siRNA sense strand
ggcaaguucaacaggauuu

SEQ ID NO: 212874 - RNA, 19 nt, Homo sapiens
  misc_RNA (1)...(19): siRNA sense strand
gaacuggcugcugaauguu

SEQ ID NO: 212875 - RNA, 19 nt, Homo sapiens
  misc_RNA (1)...(19): siRNA sense strand
cugcugaauguuuaugaua

SEQ ID NO: 212876 - RNA, 19 nt, Homo sapiens
  misc_RNA (1)...(19): siRNA sense strand
aagcaucaggccaaaugua

SEQ ID NO: 212877 - RNA, 19 nt, Homo sapiens
  misc_RNA (1)...(19): siRNA sense strand
uggcaucauuucccugugu

SEQ ID NO: 212878 - RNA, 19 nt, Homo sapiens
  misc_RNA (1)...(19): siRNA sense strand
ccaugaaacuccgaagacu

SEQ ID NO: 212879 - RNA, 19 nt, Homo sapiens
  misc_RNA (1)...(19): siRNA sense strand
auaauaagccagagaucga

SEQ ID NO: 212880 - RNA, 19 nt, Homo sapiens
  misc_RNA (1)...(19): siRNA sense strand
cuaauaauaagccagagau

SEQ ID NO: 212881 - RNA, 19 nt, Homo sapiens
  misc_RNA (1)...(19): siRNA sense strand
ugggugaaguugcauccuu

SEQ ID NO: 212882 - RNA, 19 nt, Homo sapiens
  misc_RNA (1)...(19): siRNA sense strand
caucauuucccuguguaaa

SEQ ID NO: 212883 - RNA, 19 nt, Homo sapiens
  misc_RNA (1)...(19): siRNA sense strand
gcguggauaugugucugaa

SEQ ID NO: 212884 - RNA, 19 nt, Homo sapiens
  misc_RNA (1)...(19): siRNA sense strand
gcacuaucccaugguggaa

SEQ ID NO: 212885 - RNA, 19 nt, Homo sapiens
  misc_RNA (1)...(19): siRNA sense strand
gagccugucagcugcaugu

SEQ ID NO: 212886 - RNA, 19 nt, Homo sapiens
  misc_RNA (1)...(19): siRNA sense strand
guacagauaccuuuucaag

SEQ ID NO: 212887 - RNA, 19 nt, Homo sapiens
  misc_RNA (1)...(19): siRNA sense strand
gucccucucugcguggaua

SEQ ID NO: 212888 - RNA, 19 nt, Homo sapiens
  misc_RNA (1)...(19): siRNA sense strand
ggagcugcuuccaauuugc

SEQ ID NO: 212889 - RNA, 19 nt, Homo sapiens
  misc_RNA (1)...(19): siRNA sense strand
uuagcugaccugaauaaug

SEQ ID NO: 212890 - RNA, 19 nt, Homo sapiens
  misc_RNA (1)...(19): siRNA sense strand
guggcaaguucaacaggau

SEQ ID NO: 212891 - RNA, 19 nt, Homo sapiens
  misc_RNA (1)...(19): siRNA sense strand
acaacaauuuggucaacgu

SEQ ID NO: 212892 - RNA, 19 nt, Homo sapiens
  misc_RNA (1)...(19): siRNA sense strand
gacuacaucaggagaagau

SEQ ID NO: 212893 - RNA, 19 nt, Homo sapiens
  misc_RNA (1)...(19): siRNA sense strand
uaauaagccagagaucgaa

SEQ ID NO: 212894 - RNA, 19 nt, Homo sapiens
  misc_RNA (1)...(19): siRNA sense strand
ugucagauucucagcuuau

SEQ ID NO: 212895 - RNA, 19 nt, Homo sapiens
  misc_RNA (1)...(19): siRNA sense strand
ggauauccugcagauuauu

SEQ ID NO: 212896 - RNA, 19 nt, Homo sapiens
  misc_RNA (1)...(19): siRNA sense strand
agcaucaggccaaauguaa

SEQ ID NO: 212897 - RNA, 19 nt, Homo sapiens
  misc_RNA (1)...(19): siRNA sense strand
gcccuuugcuuggaucucu

SEQ ID NO: 212898 - RNA, 19 nt, Homo sapiens
  misc_RNA (1)...(19): siRNA sense strand
gcugaauguuuaugauacg

SEQ ID NO: 212899 - RNA, 19 nt, Homo sapiens
  misc_RNA (1)...(19): siRNA sense strand
agacuuugccaagguacua

SEQ ID NO: 212900 - RNA, 19 nt, Homo sapiens
  misc_RNA (1)...(19): siRNA sense strand
caagcaaguggcaaguuca

SEQ ID NO: 212901 - RNA, 19 nt, Homo sapiens
  misc_RNA (1)...(19): siRNA sense strand
agacaaguacagauaccuu

SEQ ID NO: 212902 - RNA, 19 nt, Homo sapiens
  misc_RNA (1)...(19): siRNA sense strand
gcaucauuucccuguguaa

SEQ ID NO: 212903 - RNA, 19 nt, Homo sapiens
  misc_RNA (1)...(19): siRNA sense strand
cugcaaagaguguccaauc

SEQ ID NO: 212904 - RNA, 19 nt, Homo sapiens
  misc_RNA (1)...(19): siRNA sense strand
cuuauaggacugccaugaa

SEQ ID NO: 212905 - RNA, 19 nt, Homo sapiens
  misc_RNA (1)...(19): siRNA sense strand
caaagaguguccaaucauu

SEQ ID NO: 212906 - RNA, 19 nt, Homo sapiens
  misc_RNA (1)...(19): siRNA sense strand
uagcugaccugaauaaugu

SEQ ID NO: 212907 - RNA, 19 nt, Homo sapiens
  misc_RNA (1)...(19): siRNA sense strand
gcaugauucuauccaaauu

SEQ ID NO: 212908 - RNA, 19 nt, Homo sapiens
  misc_RNA (1)...(19): siRNA sense strand
ugaacuggcugcugaaugu

SEQ ID NO: 212909 - RNA, 19 nt, Homo sapiens
  misc_RNA (1)...(19): siRNA sense strand
gauauccugcagauuauua

SEQ ID NO: 212910 - RNA, 19 nt, Homo sapiens
  misc_RNA (1)...(19): siRNA sense strand
gagaagauguucgagacuu

SEQ ID NO: 212911 - RNA, 19 nt, Homo sapiens
  misc_RNA (1)...(19): siRNA sense strand
gcacuuuaauuaugacauc

SEQ ID NO: 212912 - RNA, 19 nt, Homo sapiens
  misc_RNA (1)...(19): siRNA sense strand
guaaagcacauuuggaaga

SEQ ID NO: 212913 - RNA, 19 nt, Homo sapiens
  misc_RNA (1)...(19): siRNA sense strand
gaauauugcacuccgacua

SEQ ID NO: 212914 - RNA, 19 nt, Homo sapiens
  misc_RNA (1)...(19): siRNA sense strand
uuauaggacugccaugaaa

SEQ ID NO: 212915 - RNA, 19 nt, Homo sapiens
  misc_RNA (1)...(19): siRNA sense strand
gggugaaguugcauccuuu

SEQ ID NO: 212916 - RNA, 19 nt, Homo sapiens
  misc_RNA (1)...(19): siRNA sense strand
gcaagagcacaacaauuug

SEQ ID NO: 212917 - RNA, 19 nt, Homo sapiens
  misc_RNA (1)...(19): siRNA sense strand
gcacaacaauuuggucaac

SEQ ID NO: 212918 - RNA, 19 nt, Homo sapiens
  misc_RNA (1)...(19): siRNA sense strand
agcaagagcacaacaauuu

SEQ ID NO: 212919 - RNA, 19 nt, Homo sapiens
  misc_RNA (1)...(19): siRNA sense strand
agaagauguucgagacuuu

SEQ ID NO: 212920 - RNA, 19 nt, Homo sapiens
  misc_RNA (1)...(19): siRNA sense strand
gagcaagagcacaacaauu

SEQ ID NO: 212921 - RNA, 19 nt, Homo sapiens
  misc_RNA (1)...(19): siRNA sense strand
ucaagcaaguggcaaguuc

SEQ ID NO: 212922 - RNA, 19 nt, Homo sapiens
  misc_RNA (1)...(19): siRNA sense strand
ccacgagacucaaacaacu

SEQ ID NO: 212923 - RNA, 19 nt, Homo sapiens
  misc_RNA (1)...(19): siRNA sense strand
cagcacaaccucaagcaaa

SEQ ID NO: 212924 - RNA, 19 nt, Homo sapiens
  misc_RNA (1)...(19): siRNA sense strand
gcaaagaguguccaaucau

SEQ ID NO: 212925 - RNA, 19 nt, Homo sapiens
  misc_RNA (1)...(19): siRNA sense strand
auggauauccugcagauua

SEQ ID NO: 212926 - RNA, 19 nt, Homo sapiens
  misc_RNA (1)...(19): siRNA sense strand
uguaacaucugcaaagagu

SEQ ID NO: 212927 - RNA, 19 nt, Homo sapiens
  misc_RNA (1)...(19): siRNA sense strand
guccggagcugcuuccaau

SEQ ID NO: 212928 - RNA, 19 nt, Homo sapiens
  misc_RNA (1)...(19): siRNA sense strand
gcaaguggcaaguucaaca

SEQ ID NO: 212929 - RNA, 19 nt, Homo sapiens
  misc_RNA (1)...(19): siRNA sense strand
gcuuccaauuugcuaauaa

SEQ ID NO: 212930 - RNA, 19 nt, Homo sapiens
  misc_RNA (1)...(19): siRNA sense strand
uggaagacaaguacagaua

SEQ ID NO: 212931 - RNA, 19 nt, Homo sapiens
  misc_RNA (1)...(19): siRNA sense strand
ggauccguguccugucuuu

SEQ ID NO: 212932 - RNA, 19 nt, Homo sapiens
  misc_RNA (1)...(19): siRNA sense strand
gucuuuagcugaccugaau

SEQ ID NO: 212933 - RNA, 19 nt, Homo sapiens
  misc_RNA (1)...(19): siRNA sense strand
gacaaguacagauaccuuu

SEQ ID NO: 212934 - RNA, 19 nt, Homo sapiens
  misc_RNA (1)...(19): siRNA sense strand
ccaagcaucaggccaaaug

SEQ ID NO: 212935 - RNA, 19 nt, Homo sapiens
  misc_RNA (1)...(19): siRNA sense strand
ggagcaagagcacaacaau

SEQ ID NO: 212936 - RNA, 19 nt, Homo sapiens
  misc_RNA (1)...(19): siRNA sense strand
guguaaagcacauuuggaa

SEQ ID NO: 212937 - RNA, 19 nt, Homo sapiens
  misc_RNA (1)...(19): siRNA sense strand
caagacaguugggugaagu

SEQ ID NO: 212938 - RNA, 19 nt, Homo sapiens
  misc_RNA (1)...(19): siRNA sense strand
gaagauguucgagacuuug

SEQ ID NO: 212939 - RNA, 19 nt, Homo sapiens
  misc_RNA (1)...(19): siRNA sense strand
gucagauucucagcuuaua

SEQ ID NO: 212940 - RNA, 19 nt, Homo sapiens
  misc_RNA (1)...(19): siRNA sense strand
uaacaucugcaaagagugu

SEQ ID NO: 212941 - RNA, 19 nt, Homo sapiens
  misc_RNA (1)...(19): siRNA sense strand
cggagcugcuuccaauuug

SEQ ID NO: 212942 - RNA, 19 nt, Homo sapiens
  misc_RNA (1)...(19): siRNA sense strand
gaagacaaguacagauacc

SEQ ID NO: 212943 - RNA, 19 nt, Homo sapiens
  misc_RNA (1)...(19): siRNA sense strand
ccauggauauccugcagau

SEQ ID NO: 212944 - RNA, 19 nt, Homo sapiens
  misc_RNA (1)...(19): siRNA sense strand
ggcaucauuucccugugua

SEQ ID NO: 212945 - RNA, 19 nt, Homo sapiens
  misc_RNA (1)...(19): siRNA sense strand
uggauauccugcagauuau

SEQ ID NO: 212946 - RNA, 19 nt, Homo sapiens
  misc_RNA (1)...(19): siRNA sense strand
ggaagacaaguacagauac

SEQ ID NO: 212947 - RNA, 19 nt, Homo sapiens
  misc_RNA (1)...(19): siRNA sense strand
ugcaaagaguguccaauca

SEQ ID NO: 212948 - RNA, 19 nt, Homo sapiens
  misc_RNA (1)...(19): siRNA sense strand
guggauaugugucugaacu

SEQ ID NO: 212949 - RNA, 19 nt, Homo sapiens
  misc_RNA (1)...(19): siRNA sense strand
acuggcugcugaauguuua

SEQ ID NO: 212950 - RNA, 19 nt, Homo sapiens
  misc_RNA (1)...(19): siRNA sense strand
acuaucccaugguggaaua

SEQ ID NO: 212951 - RNA, 19 nt, Homo sapiens
  misc_RNA (1)...(19): siRNA sense strand
ccggagcugcuuccaauuu

SEQ ID NO: 212952 - RNA, 19 nt, Homo sapiens
  misc_RNA (1)...(19): siRNA sense strand
ccaaauuccaagacaguug

SEQ ID NO: 212953 - RNA, 19 nt, Homo sapiens
  misc_RNA (1)...(19): siRNA sense strand
cagaaacugccaagcauca

SEQ ID NO: 212954 - RNA, 19 nt, Homo sapiens
  misc_RNA (1)...(19): siRNA sense strand
uaugacaucugccaaagcu

SEQ ID NO: 212955 - RNA, 19 nt, Homo sapiens
  misc_RNA (1)...(19): siRNA sense strand
aaugucagauucucagcuu

SEQ ID NO: 212956 - RNA, 19 nt, Homo sapiens
  misc_RNA (1)...(19): siRNA sense strand
ucgagacuuugccaaggua

SEQ ID NO: 212957 - RNA, 19 nt, Homo sapiens
  misc_RNA (1)...(19): siRNA sense strand
gcaaaaggccauaaaaugc

SEQ ID NO: 212958 - RNA, 19 nt, Homo sapiens
  misc_RNA (1)...(19): siRNA sense strand
cugcaugauucuauccaaa

SEQ ID NO: 212959 - RNA, 19 nt, Homo sapiens
  misc_RNA (1)...(19): siRNA sense strand
uaaagcacauuuggaagac

SEQ ID NO: 212960 - RNA, 19 nt, Homo sapiens
  misc_RNA (1)...(19): siRNA sense strand
acaggagucuaaagcacuu

SEQ ID NO: 212961 - RNA, 19 nt, Homo sapiens
  misc_RNA (1)...(19): siRNA sense strand
acagauaccuuuucaagca

SEQ ID NO: 212962 - RNA, 19 nt, Homo sapiens
  misc_RNA (1)...(19): siRNA sense strand
aagcacauuuggaagacaa

SEQ ID NO: 212963 - RNA, 19 nt, Homo sapiens
  misc_RNA (1)...(19): siRNA sense strand
gcuaauaauaagccagaga

SEQ ID NO: 212964 - RNA, 19 nt, Homo sapiens
  misc_RNA (1)...(19): siRNA sense strand
caagagcacaacaauuugg

SEQ ID NO: 212965 - RNA, 19 nt, Homo sapiens
  misc_RNA (1)...(19): siRNA sense strand
ccugucagcugcaugugau

SEQ ID NO: 212966 - RNA, 19 nt, Homo sapiens
  misc_RNA (1)...(19): siRNA sense strand
gcugcugaauguuuaugau

SEQ ID NO: 212967 - RNA, 19 nt, Homo sapiens
  misc_RNA (1)...(19): siRNA sense strand
acagagcucuaccagucuu

SEQ ID NO: 212968 - RNA, 19 nt, Homo sapiens
  misc_RNA (1)...(19): siRNA sense strand
acaguugggugaaguugca

SEQ ID NO: 212969 - RNA, 19 nt, Homo sapiens
  misc_RNA (1)...(19): siRNA sense strand
guuugaccacuauuuauga

SEQ ID NO: 212970 - RNA, 19 nt, Homo sapiens
  misc_RNA (1)...(19): siRNA sense strand
gcuuauaggacugccauga

SEQ ID NO: 212971 - RNA, 19 nt, Homo sapiens
  misc_RNA (1)...(19): siRNA sense strand
caucaggccaaauguaaca

SEQ ID NO: 212972 - RNA, 19 nt, Homo sapiens
  misc_RNA (1)...(19): siRNA sense strand
gauucuauccaaauuccaa

SEQ ID NO: 212973 - RNA, 19 nt, Homo sapiens
  misc_RNA (1)...(19): siRNA sense strand
ggcaaguucaacaggauuu

SEQ ID NO: 212974 - RNA, 19 nt, Homo sapiens
  misc_RNA (1)...(19): siRNA sense strand
gaacuggcugcugaauguu

SEQ ID NO: 212975 - RNA, 19 nt, Homo sapiens
  misc_RNA (1)...(19): siRNA sense strand
cugcugaauguuuaugaua

SEQ ID NO: 212976 - RNA, 19 nt, Homo sapiens
  misc_RNA (1)...(19): siRNA sense strand
aagcaucaggccaaaugua

SEQ ID NO: 212977 - RNA, 19 nt, Homo sapiens
  misc_RNA (1)...(19): siRNA sense strand
uggcaucauuucccugugu

SEQ ID NO: 212978 - RNA, 19 nt, Homo sapiens
  misc_RNA (1)...(19): siRNA sense strand
ccaugaaacuccgaagacu

SEQ ID NO: 212979 - RNA, 19 nt, Homo sapiens
  misc_RNA (1)...(19): siRNA sense strand
auaauaagccagagaucga

SEQ ID NO: 212980 - RNA, 19 nt, Homo sapiens
  misc_RNA (1)...(19): siRNA sense strand
cuaauaauaagccagagau

SEQ ID NO: 212981 - RNA, 19 nt, Homo sapiens
  misc_RNA (1)...(19): siRNA sense strand
ugggugaaguugcauccuu

SEQ ID NO: 212982 - RNA, 19 nt, Homo sapiens
  misc_RNA (1)...(19): siRNA sense strand
caucauuucccuguguaaa

SEQ ID NO: 212983 - RNA, 19 nt, Homo sapiens
  misc_RNA (1)...(19): siRNA sense strand
gcguggauaugugucugaa

SEQ ID NO: 212984 - RNA, 19 nt, Homo sapiens
  misc_RNA (1)...(19): siRNA sense strand
gcacuaucccaugguggaa

SEQ ID NO: 212985 - RNA, 19 nt, Homo sapiens
  misc_RNA (1)...(19): siRNA sense strand
gagccugucagcugcaugu

SEQ ID NO: 212986 - RNA, 19 nt, Homo sapiens
  misc_RNA (1)...(19): siRNA sense strand
guacagauaccuuuucaag

SEQ ID NO: 212987 - RNA, 19 nt, Homo sapiens
  misc_RNA (1)...(19): siRNA sense strand
gucccucucugcguggaua

SEQ ID NO: 212988 - RNA, 19 nt, Homo sapiens
  misc_RNA (1)...(19): siRNA sense strand
ggagcugcuuccaauuugc

SEQ ID NO: 212989 - RNA, 19 nt, Homo sapiens
  misc_RNA (1)...(19): siRNA sense strand
uuagcugaccugaauaaug

SEQ ID NO: 212990 - RNA, 19 nt, Homo sapiens
  misc_RNA (1)...(19): siRNA sense strand
guggcaaguucaacaggau

SEQ ID NO: 212991 - RNA, 19 nt, Homo sapiens
  misc_RNA (1)...(19): siRNA sense strand
acaacaauuuggucaacgu

SEQ ID NO: 212992 - RNA, 19 nt, Homo sapiens
  misc_RNA (1)...(19): siRNA sense strand
gacuacaucaggagaagau

SEQ ID NO: 212993 - RNA, 19 nt, Homo sapiens
  misc_RNA (1)...(19): siRNA sense strand
uaauaagccagagaucgaa

SEQ ID NO: 212994 - RNA, 19 nt, Homo sapiens
  misc_RNA (1)...(19): siRNA sense strand
ugucagauucucagcuuau

SEQ ID NO: 212995 - RNA, 19 nt, Homo sapiens
  misc_RNA (1)...(19): siRNA sense strand
ggauauccugcagauuauu

SEQ ID NO: 212996 - RNA, 19 nt, Homo sapiens
  misc_RNA (1)...(19): siRNA sense strand
agcaucaggccaaauguaa

SEQ ID NO: 212997 - RNA, 19 nt, Homo sapiens
  misc_RNA (1)...(19): siRNA sense strand
gcccuuugcuuggaucucu

SEQ ID NO: 212998 - RNA, 19 nt, Homo sapiens
  misc_RNA (1)...(19): siRNA sense strand
gcugaauguuuaugauacg

SEQ ID NO: 212999 - RNA, 19 nt, Homo sapiens
  misc_RNA (1)...(19): siRNA sense strand
agacuuugccaagguacua

SEQ ID NO: 213000 - RNA, 19 nt, Homo sapiens
  misc_RNA (1)...(19): siRNA sense strand
caagcaaguggcaaguuca

SEQ ID NO: 213001 - RNA, 19 nt, Homo sapiens
  misc_RNA (1)...(19): siRNA sense strand
agacaaguacagauaccuu

SEQ ID NO: 213002 - RNA, 19 nt, Homo sapiens
  misc_RNA (1)...(19): siRNA sense strand
gcaucauuucccuguguaa

SEQ ID NO: 213003 - RNA, 19 nt, Homo sapiens
  misc_RNA (1)...(19): siRNA sense strand
cugcaaagaguguccaauc

SEQ ID NO: 213004 - RNA, 19 nt, Homo sapiens
  misc_RNA (1)...(19): siRNA sense strand
cuuauaggacugccaugaa

SEQ ID NO: 213005 - RNA, 19 nt, Homo sapiens
  misc_RNA (1)...(19): siRNA sense strand
caaagaguguccaaucauu

SEQ ID NO: 213006 - RNA, 19 nt, Homo sapiens
  misc_RNA (1)...(19): siRNA sense strand
uagcugaccugaauaaugu

SEQ ID NO: 213007 - RNA, 19 nt, Homo sapiens
  misc_RNA (1)...(19): siRNA sense strand
gcaugauucuauccaaauu

SEQ ID NO: 213008 - RNA, 19 nt, Homo sapiens
  misc_RNA (1)...(19): siRNA sense strand
ugaacuggcugcugaaugu

SEQ ID NO: 213009 - RNA, 19 nt, Homo sapiens
  misc_RNA (1)...(19): siRNA sense strand
gauauccugcagauuauua

SEQ ID NO: 213010 - RNA, 19 nt, Homo sapiens
  misc_RNA (1)...(19): siRNA sense strand
gagaagauguucgagacuu

SEQ ID NO: 213011 - RNA, 19 nt, Homo sapiens
  misc_RNA (1)...(19): siRNA sense strand
gcacuuuaauuaugacauc

SEQ ID NO: 213012 - RNA, 19 nt, Homo sapiens
  misc_RNA (1)...(19): siRNA sense strand
guaaagcacauuuggaaga

SEQ ID NO: 213013 - RNA, 19 nt, Homo sapiens
  misc_RNA (1)...(19): siRNA sense strand
gaauauugcacuccgacua

SEQ ID NO: 213014 - RNA, 19 nt, Homo sapiens
  misc_RNA (1)...(19): siRNA sense strand
uuauaggacugccaugaaa

SEQ ID NO: 213015 - RNA, 19 nt, Homo sapiens
  misc_RNA (1)...(19): siRNA sense strand
gggugaaguugcauccuuu

SEQ ID NO: 213016 - RNA, 19 nt, Homo sapiens
  misc_RNA (1)...(19): siRNA sense strand
gcaagagcacaacaauuug

SEQ ID NO: 213017 - RNA, 19 nt, Homo sapiens
  misc_RNA (1)...(19): siRNA sense strand
gcacaacaauuuggucaac

SEQ ID NO: 213018 - RNA, 19 nt, Homo sapiens
  misc_RNA (1)...(19): siRNA sense strand
agcaagagcacaacaauuu

SEQ ID NO: 213019 - RNA, 19 nt, Homo sapiens
  misc_RNA (1)...(19): siRNA sense strand
agaagauguucgagacuuu

SEQ ID NO: 213020 - RNA, 19 nt, Homo sapiens
  misc_RNA (1)...(19): siRNA sense strand
gagcaagagcacaacaauu

SEQ ID NO: 213021 - RNA, 19 nt, Homo sapiens
  misc_RNA (1)...(19): siRNA sense strand
ucaagcaaguggcaaguuc

SEQ ID NO: 213022 - RNA, 19 nt, Homo sapiens
  misc_RNA (1)...(19): siRNA sense strand
ccacgagacucaaacaacu

SEQ ID NO: 213023 - RNA, 19 nt, Homo sapiens
  misc_RNA (1)...(19): siRNA sense strand
cagcacaaccucaagcaaa

SEQ ID NO: 213024 - RNA, 19 nt, Homo sapiens
  misc_RNA (1)...(19): siRNA sense strand
gcaaagaguguccaaucau

SEQ ID NO: 213025 - RNA, 19 nt, Homo sapiens
  misc_RNA (1)...(19): siRNA sense strand
auggauauccugcagauua

SEQ ID NO: 213026 - RNA, 19 nt, Homo sapiens
  misc_RNA (1)...(19): siRNA sense strand
uguaacaucugcaaagagu

SEQ ID NO: 213027 - RNA, 19 nt, Homo sapiens
  misc_RNA (1)...(19): siRNA sense strand
guccggagcugcuuccaau

SEQ ID NO: 213028 - RNA, 19 nt, Homo sapiens
  misc_RNA (1)...(19): siRNA sense strand
gcaaguggcaaguucaaca

SEQ ID NO: 213029 - RNA, 19 nt, Homo sapiens
  misc_RNA (1)...(19): siRNA sense strand
gcuuccaauuugcuaauaa

SEQ ID NO: 213030 - RNA, 19 nt, Homo sapiens
  misc_RNA (1)...(19): siRNA sense strand
uggaagacaaguacagaua

SEQ ID NO: 213031 - RNA, 19 nt, Homo sapiens
  misc_RNA (1)...(19): siRNA sense strand
ggauccguguccugucuuu

SEQ ID NO: 213032 - RNA, 19 nt, Homo sapiens
  misc_RNA (1)...(19): siRNA sense strand
gucuuuagcugaccugaau

SEQ ID NO: 213033 - RNA, 19 nt, Homo sapiens
  misc_RNA (1)...(19): siRNA sense strand
gacaaguacagauaccuuu

SEQ ID NO: 213034 - RNA, 19 nt, Homo sapiens
  misc_RNA (1)...(19): siRNA sense strand
ccaagcaucaggccaaaug

SEQ ID NO: 213035 - RNA, 19 nt, Homo sapiens
  misc_RNA (1)...(19): siRNA sense strand
ggagcaagagcacaacaau

SEQ ID NO: 213036 - RNA, 19 nt, Homo sapiens
  misc_RNA (1)...(19): siRNA sense strand
guguaaagcacauuuggaa

SEQ ID NO: 213037 - RNA, 19 nt, Homo sapiens
  misc_RNA (1)...(19): siRNA sense strand
caagacaguugggugaagu

SEQ ID NO: 213038 - RNA, 19 nt, Homo sapiens
  misc_RNA (1)...(19): siRNA sense strand
gaagauguucgagacuuug

SEQ ID NO: 213039 - RNA, 19 nt, Homo sapiens
  misc_RNA (1)...(19): siRNA sense strand
gucagauucucagcuuaua

SEQ ID NO: 213040 - RNA, 19 nt, Homo sapiens
  misc_RNA (1)...(19): siRNA sense strand
uaacaucugcaaagagugu

SEQ ID NO: 213041 - RNA, 19 nt, Homo sapiens
  misc_RNA (1)...(19): siRNA sense strand
cggagcugcuuccaauuug

SEQ ID NO: 213042 - RNA, 19 nt, Homo sapiens
  misc_RNA (1)...(19): siRNA sense strand
gaagacaaguacagauacc

SEQ ID NO: 213043 - RNA, 19 nt, Homo sapiens
  misc_RNA (1)...(19): siRNA sense strand
ccauggauauccugcagau

SEQ ID NO: 213044 - RNA, 19 nt, Homo sapiens
  misc_RNA (1)...(19): siRNA sense strand
ggcaucauuucccugugua

SEQ ID NO: 213045 - RNA, 19 nt, Homo sapiens
  misc_RNA (1)...(19): siRNA sense strand
uggauauccugcagauuau

SEQ ID NO: 213046 - RNA, 19 nt, Homo sapiens
  misc_RNA (1)...(19): siRNA sense strand
ggaagacaaguacagauac

SEQ ID NO: 213047 - RNA, 19 nt, Homo sapiens
  misc_RNA (1)...(19): siRNA sense strand
ugcaaagaguguccaauca

SEQ ID NO: 213048 - RNA, 19 nt, Homo sapiens
  misc_RNA (1)...(19): siRNA sense strand
guggauaugugucugaacu

SEQ ID NO: 213049 - RNA, 19 nt, Homo sapiens
  misc_RNA (1)...(19): siRNA sense strand
acuggcugcugaauguuua

SEQ ID NO: 213050 - RNA, 19 nt, Homo sapiens
  misc_RNA (1)...(19): siRNA sense strand
acuaucccaugguggaaua

SEQ ID NO: 213051 - RNA, 19 nt, Homo sapiens
  misc_RNA (1)...(19): siRNA sense strand
ccggagcugcuuccaauuu

SEQ ID NO: 213052 - RNA, 19 nt, Homo sapiens
  misc_RNA (1)...(19): siRNA sense strand
ccaaauuccaagacaguug

SEQ ID NO: 213053 - RNA, 19 nt, Homo sapiens
  misc_RNA (1)...(19): siRNA sense strand
cagaaacugccaagcauca

SEQ ID NO: 213054 - RNA, 19 nt, Homo sapiens
  misc_RNA (1)...(19): siRNA sense strand
uaugacaucugccaaagcu

SEQ ID NO: 213055 - RNA, 19 nt, Homo sapiens
  misc_RNA (1)...(19): siRNA sense strand
aaugucagauucucagcuu

SEQ ID NO: 213056 - RNA, 19 nt, Homo sapiens
  misc_RNA (1)...(19): siRNA sense strand
ucgagacuuugccaaggua

SEQ ID NO: 213057 - RNA, 19 nt, Homo sapiens
  misc_RNA (1)...(19): siRNA sense strand
gcaaaaggccauaaaaugc

SEQ ID NO: 213058 - RNA, 19 nt, Homo sapiens
  misc_RNA (1)...(19): siRNA sense strand
cugcaugauucuauccaaa

SEQ ID NO: 213059 - RNA, 19 nt, Homo sapiens
  misc_RNA (1)...(19): siRNA sense strand
uaaagcacauuuggaagac

SEQ ID NO: 213060 - RNA, 19 nt, Homo sapiens
  misc_RNA (1)...(19): siRNA sense strand
acaggagucuaaagcacuu

SEQ ID NO: 213061 - RNA, 19 nt, Homo sapiens
  misc_RNA (1)...(19): siRNA sense strand
acagauaccuuuucaagca

SEQ ID NO: 213062 - RNA, 19 nt, Homo sapiens
  misc_RNA (1)...(19): siRNA sense strand
aagcacauuuggaagacaa

SEQ ID NO: 213063 - RNA, 19 nt, Homo sapiens
  misc_RNA (1)...(19): siRNA sense strand
gcuaauaauaagccagaga

SEQ ID NO: 213064 - RNA, 19 nt, Homo sapiens
  misc_RNA (1)...(19): siRNA sense strand
caagagcacaacaauuugg

SEQ ID NO: 213065 - RNA, 19 nt, Homo sapiens
  misc_RNA (1)...(19): siRNA sense strand
ccugucagcugcaugugau

SEQ ID NO: 213066 - RNA, 19 nt, Homo sapiens
  misc_RNA (1)...(19): siRNA sense strand
gcugcugaauguuuaugau

SEQ ID NO: 213067 - RNA, 19 nt, Homo sapiens
  misc_RNA (1)...(19): siRNA sense strand
acagagcucuaccagucuu

SEQ ID NO: 213068 - RNA, 19 nt, Homo sapiens
  misc_RNA (1)...(19): siRNA sense strand
acaguugggugaaguugca

SEQ ID NO: 213069 - RNA, 19 nt, Homo sapiens
  misc_RNA (1)...(19): siRNA sense strand
guuugaccacuauuuauga

SEQ ID NO: 213070 - RNA, 19 nt, Homo sapiens
  misc_RNA (1)...(19): siRNA sense strand
gcuuauaggacugccauga

SEQ ID NO: 213071 - RNA, 19 nt, Homo sapiens
  misc_RNA (1)...(19): siRNA sense strand
caucaggccaaauguaaca

SEQ ID NO: 213072 - RNA, 19 nt, Homo sapiens
  misc_RNA (1)...(19): siRNA sense strand
gauucuauccaaauuccaa

SEQ ID NO: 213073 - RNA, 19 nt, Homo sapiens
  misc_RNA (1)...(19): siRNA sense strand
ggcaaguucaacaggauuu

SEQ ID NO: 213074 - RNA, 19 nt, Homo sapiens
  misc_RNA (1)...(19): siRNA sense strand
gaacuggcugcugaauguu

SEQ ID NO: 213075 - RNA, 19 nt, Homo sapiens
  misc_RNA (1)...(19): siRNA sense strand
cugcugaauguuuaugaua

SEQ ID NO: 213076 - RNA, 19 nt, Homo sapiens
  misc_RNA (1)...(19): siRNA sense strand
aagcaucaggccaaaugua

SEQ ID NO: 213077 - RNA, 19 nt, Homo sapiens
  misc_RNA (1)...(19): siRNA sense strand
uggcaucauuucccugugu

SEQ ID NO: 213078 - RNA, 19 nt, Homo sapiens
  misc_RNA (1)...(19): siRNA sense strand
ccaugaaacuccgaagacu

SEQ ID NO: 213079 - RNA, 19 nt, Homo sapiens
  misc_RNA (1)...(19): siRNA sense strand
auaauaagccagagaucga

SEQ ID NO: 213080 - RNA, 19 nt, Homo sapiens
  misc_RNA (1)...(19): siRNA sense strand
cuaauaauaagccagagau

SEQ ID NO: 213081 - RNA, 19 nt, Homo sapiens
  misc_RNA (1)...(19): siRNA sense strand
ugggugaaguugcauccuu

SEQ ID NO: 213082 - RNA, 19 nt, Homo sapiens
  misc_RNA (1)...(19): siRNA sense strand
caucauuucccuguguaaa

SEQ ID NO: 213083 - RNA, 19 nt, Homo sapiens
  misc_RNA (1)...(19): siRNA sense strand
gcguggauaugugucugaa

SEQ ID NO: 213084 - RNA, 19 nt, Homo sapiens
  misc_RNA (1)...(19): siRNA sense strand
gcacuaucccaugguggaa

SEQ ID NO: 213085 - RNA, 19 nt, Homo sapiens
  misc_RNA (1)...(19): siRNA sense strand
gagccugucagcugcaugu

SEQ ID NO: 213086 - RNA, 19 nt, Homo sapiens
  misc_RNA (1)...(19): siRNA sense strand
guacagauaccuuuucaag

SEQ ID NO: 213087 - RNA, 19 nt, Homo sapiens
  misc_RNA (1)...(19): siRNA sense strand
gucccucucugcguggaua

SEQ ID NO: 213088 - RNA, 19 nt, Homo sapiens
  misc_RNA (1)...(19): siRNA sense strand
ggagcugcuuccaauuugc

SEQ ID NO: 213089 - RNA, 19 nt, Homo sapiens
  misc_RNA (1)...(19): siRNA sense strand
uuagcugaccugaauaaug

SEQ ID NO: 213090 - RNA, 19 nt, Homo sapiens
  misc_RNA (1)...(19): siRNA sense strand
guggcaaguucaacaggau

SEQ ID NO: 213091 - RNA, 19 nt, Homo sapiens
  misc_RNA (1)...(19): siRNA sense strand
acaacaauuuggucaacgu

SEQ ID NO: 213092 - RNA, 19 nt, Homo sapiens
  misc_RNA (1)...(19): siRNA sense strand
gacuacaucaggagaagau

SEQ ID NO: 213093 - RNA, 19 nt, Homo sapiens
  misc_RNA (1)...(19): siRNA sense strand
uaauaagccagagaucgaa

SEQ ID NO: 213094 - RNA, 19 nt, Homo sapiens
  misc_RNA (1)...(19): siRNA sense strand
ugucagauucucagcuuau

SEQ ID NO: 213095 - RNA, 19 nt, Homo sapiens
  misc_RNA (1)...(19): siRNA sense strand
ggauauccugcagauuauu

SEQ ID NO: 213096 - RNA, 19 nt, Homo sapiens
  misc_RNA (1)...(19): siRNA sense strand
agcaucaggccaaauguaa

SEQ ID NO: 213097 - RNA, 19 nt, Homo sapiens
  misc_RNA (1)...(19): siRNA sense strand
gcccuuugcuuggaucucu

SEQ ID NO: 213098 - RNA, 19 nt, Homo sapiens
  misc_RNA (1)...(19): siRNA sense strand
gcugaauguuuaugauacg

SEQ ID NO: 213099 - RNA, 19 nt, Homo sapiens
  misc_RNA (1)...(19): siRNA sense strand
agacuuugccaagguacua

SEQ ID NO: 213100 - RNA, 19 nt, Homo sapiens
  misc_RNA (1)...(19): siRNA sense strand
caagcaaguggcaaguuca

SEQ ID NO: 213101 - RNA, 19 nt, Homo sapiens
  misc_RNA (1)...(19): siRNA sense strand
agacaaguacagauaccuu

SEQ ID NO: 213102 - RNA, 19 nt, Homo sapiens
  misc_RNA (1)...(19): siRNA sense strand
gcaucauuucccuguguaa

SEQ ID NO: 213103 - RNA, 19 nt, Homo sapiens
  misc_RNA (1)...(19): siRNA sense strand
cugcaaagaguguccaauc

SEQ ID NO: 213104 - RNA, 19 nt, Homo sapiens
  misc_RNA (1)...(19): siRNA sense strand
cuuauaggacugccaugaa

SEQ ID NO: 213105 - RNA, 19 nt, Homo sapiens
  misc_RNA (1)...(19): siRNA sense strand
caaagaguguccaaucauu

SEQ ID NO: 213106 - RNA, 19 nt, Homo sapiens
  misc_RNA (1)...(19): siRNA sense strand
uagcugaccugaauaaugu

SEQ ID NO: 213107 - RNA, 19 nt, Homo sapiens
  misc_RNA (1)...(19): siRNA sense strand
gcaugauucuauccaaauu

SEQ ID NO: 213108 - RNA, 19 nt, Homo sapiens
  misc_RNA (1)...(19): siRNA sense strand
ugaacuggcugcugaaugu

SEQ ID NO: 213109 - RNA, 19 nt, Homo sapiens
  misc_RNA (1)...(19): siRNA sense strand
gauauccugcagauuauua

SEQ ID NO: 213110 - RNA, 19 nt, Homo sapiens
  misc_RNA (1)...(19): siRNA sense strand
gagaagauguucgagacuu

SEQ ID NO: 213111 - RNA, 19 nt, Homo sapiens
  misc_RNA (1)...(19): siRNA sense strand
gcacuuuaauuaugacauc

SEQ ID NO: 213112 - RNA, 19 nt, Homo sapiens
  misc_RNA (1)...(19): siRNA sense strand
guaaagcacauuuggaaga

SEQ ID NO: 213113 - RNA, 19 nt, Homo sapiens
  misc_RNA (1)...(19): siRNA sense strand
gaauauugcacuccgacua

SEQ ID NO: 213114 - RNA, 19 nt, Homo sapiens
  misc_RNA (1)...(19): siRNA sense strand
uuauaggacugccaugaaa

SEQ ID NO: 213115 - RNA, 19 nt, Homo sapiens
  misc_RNA (1)...(19): siRNA sense strand
gggugaaguugcauccuuu

SEQ ID NO: 213116 - RNA, 19 nt, Homo sapiens
  misc_RNA (1)...(19): siRNA sense strand
gcaagagcacaacaauuug

SEQ ID NO: 213117 - RNA, 19 nt, Homo sapiens
  misc_RNA (1)...(19): siRNA sense strand
gcacaacaauuuggucaac

SEQ ID NO: 213118 - RNA, 19 nt, Homo sapiens
  misc_RNA (1)...(19): siRNA sense strand
agcaagagcacaacaauuu

SEQ ID NO: 213119 - RNA, 19 nt, Homo sapiens
  misc_RNA (1)...(19): siRNA sense strand
agaagauguucgagacuuu

SEQ ID NO: 213120 - RNA, 19 nt, Homo sapiens
  misc_RNA (1)...(19): siRNA sense strand
gagcaagagcacaacaauu

SEQ ID NO: 213121 - RNA, 19 nt, Homo sapiens
  misc_RNA (1)...(19): siRNA sense strand
ucaagcaaguggcaaguuc

SEQ ID NO: 213122 - RNA, 19 nt, Homo sapiens
  misc_RNA (1)...(19): siRNA sense strand
ccacgagacucaaacaacu

SEQ ID NO: 213123 - RNA, 19 nt, Homo sapiens
  misc_RNA (1)...(19): siRNA sense strand
cagcacaaccucaagcaaa

SEQ ID NO: 213124 - RNA, 19 nt, Homo sapiens
  misc_RNA (1)...(19): siRNA sense strand
gcaaagaguguccaaucau

SEQ ID NO: 213125 - RNA, 19 nt, Homo sapiens
  misc_RNA (1)...(19): siRNA sense strand
auggauauccugcagauua

SEQ ID NO: 213126 - RNA, 19 nt, Homo sapiens
  misc_RNA (1)...(19): siRNA sense strand
uguaacaucugcaaagagu

SEQ ID NO: 213127 - RNA, 19 nt, Homo sapiens
  misc_RNA (1)...(19): siRNA sense strand
guccggagcugcuuccaau

SEQ ID NO: 213128 - RNA, 19 nt, Homo sapiens
  misc_RNA (1)...(19): siRNA sense strand
gcaaguggcaaguucaaca

SEQ ID NO: 213129 - RNA, 19 nt, Homo sapiens
  misc_RNA (1)...(19): siRNA sense strand
gcuuccaauuugcuaauaa

SEQ ID NO: 213130 - RNA, 19 nt, Homo sapiens
  misc_RNA (1)...(19): siRNA sense strand
uggaagacaaguacagaua

SEQ ID NO: 213131 - RNA, 19 nt, Homo sapiens
  misc_RNA (1)...(19): siRNA sense strand
ggauccguguccugucuuu

SEQ ID NO: 213132 - RNA, 19 nt, Homo sapiens
  misc_RNA (1)...(19): siRNA sense strand
gucuuuagcugaccugaau

SEQ ID NO: 213133 - RNA, 19 nt, Homo sapiens
  misc_RNA (1)...(19): siRNA sense strand
gacaaguacagauaccuuu

SEQ ID NO: 213134 - RNA, 19 nt, Homo sapiens
  misc_RNA (1)...(19): siRNA sense strand
ccaagcaucaggccaaaug

SEQ ID NO: 213135 - RNA, 19 nt, Homo sapiens
  misc_RNA (1)...(19): siRNA sense strand
ggagcaagagcacaacaau

SEQ ID NO: 213136 - RNA, 19 nt, Homo sapiens
  misc_RNA (1)...(19): siRNA sense strand
guguaaagcacauuuggaa

SEQ ID NO: 213137 - RNA, 19 nt, Homo sapiens
  misc_RNA (1)...(19): siRNA sense strand
caagacaguugggugaagu

SEQ ID NO: 213138 - RNA, 19 nt, Homo sapiens
  misc_RNA (1)...(19): siRNA sense strand
gaagauguucgagacuuug

SEQ ID NO: 213139 - RNA, 19 nt, Homo sapiens
  misc_RNA (1)...(19): siRNA sense strand
gucagauucucagcuuaua

SEQ ID NO: 213140 - RNA, 19 nt, Homo sapiens
  misc_RNA (1)...(19): siRNA sense strand
uaacaucugcaaagagugu

SEQ ID NO: 213141 - RNA, 19 nt, Homo sapiens
  misc_RNA (1)...(19): siRNA sense strand
cggagcugcuuccaauuug

SEQ ID NO: 213142 - RNA, 19 nt, Homo sapiens
  misc_RNA (1)...(19): siRNA sense strand
gaagacaaguacagauacc

SEQ ID NO: 213143 - RNA, 19 nt, Homo sapiens
  misc_RNA (1)...(19): siRNA sense strand
ccauggauauccugcagau

SEQ ID NO: 213144 - RNA, 19 nt, Homo sapiens
  misc_RNA (1)...(19): siRNA sense strand
ggcaucauuucccugugua

SEQ ID NO: 213145 - RNA, 19 nt, Homo sapiens
  misc_RNA (1)...(19): siRNA sense strand
uggauauccugcagauuau

SEQ ID NO: 213146 - RNA, 19 nt, Homo sapiens
  misc_RNA (1)...(19): siRNA sense strand
ggaagacaaguacagauac

SEQ ID NO: 213147 - RNA, 19 nt, Homo sapiens
  misc_RNA (1)...(19): siRNA sense strand
ugcaaagaguguccaauca

SEQ ID NO: 213148 - RNA, 19 nt, Homo sapiens
  misc_RNA (1)...(19): siRNA sense strand
guggauaugugucugaacu

SEQ ID NO: 213149 - RNA, 19 nt, Homo sapiens
  misc_RNA (1)...(19): siRNA sense strand
acuggcugcugaauguuua

SEQ ID NO: 213150 - RNA, 19 nt, Homo sapiens
  misc_RNA (1)...(19): siRNA sense strand
acuaucccaugguggaaua

SEQ ID NO: 213151 - RNA, 19 nt, Homo sapiens
  misc_RNA (1)...(19): siRNA sense strand
ccggagcugcuuccaauuu

SEQ ID NO: 213152 - RNA, 19 nt, Homo sapiens
  misc_RNA (1)...(19): siRNA sense strand
ccaaauuccaagacaguug

SEQ ID NO: 213153 - RNA, 19 nt, Homo sapiens
  misc_RNA (1)...(19): siRNA sense strand
cagaaacugccaagcauca

SEQ ID NO: 213154 - RNA, 19 nt, Homo sapiens
  misc_RNA (1)...(19): siRNA sense strand
uaugacaucugccaaagcu

SEQ ID NO: 213155 - RNA, 19 nt, Homo sapiens
  misc_RNA (1)...(19): siRNA sense strand
aaugucagauucucagcuu

SEQ ID NO: 213156 - RNA, 19 nt, Homo sapiens
  misc_RNA (1)...(19): siRNA sense strand
ucgagacuuugccaaggua

SEQ ID NO: 213157 - RNA, 19 nt, Homo sapiens
  misc_RNA (1)...(19): siRNA sense strand
gcaaaaggccauaaaaugc

SEQ ID NO: 213158 - RNA, 19 nt, Homo sapiens
  misc_RNA (1)...(19): siRNA sense strand
cugcaugauucuauccaaa

SEQ ID NO: 213159 - RNA, 19 nt, Homo sapiens
  misc_RNA (1)...(19): siRNA sense strand
uaaagcacauuuggaagac

SEQ ID NO: 213160 - RNA, 19 nt, Homo sapiens
  misc_RNA (1)...(19): siRNA sense strand
acaggagucuaaagcacuu

SEQ ID NO: 213161 - RNA, 19 nt, Homo sapiens
  misc_RNA (1)...(19): siRNA sense strand
acagauaccuuuucaagca

SEQ ID NO: 213162 - RNA, 19 nt, Homo sapiens
  misc_RNA (1)...(19): siRNA sense strand
aagcacauuuggaagacaa

SEQ ID NO: 213163 - RNA, 19 nt, Homo sapiens
  misc_RNA (1)...(19): siRNA sense strand
gcuaauaauaagccagaga

SEQ ID NO: 213164 - RNA, 19 nt, Homo sapiens
  misc_RNA (1)...(19): siRNA sense strand
caagagcacaacaauuugg

SEQ ID NO: 213165 - RNA, 19 nt, Homo sapiens
  misc_RNA (1)...(19): siRNA sense strand
ccugucagcugcaugugau

SEQ ID NO: 213166 - RNA, 19 nt, Homo sapiens
  misc_RNA (1)...(19): siRNA sense strand
gcugcugaauguuuaugau

SEQ ID NO: 213167 - RNA, 19 nt, Homo sapiens
  misc_RNA (1)...(19): siRNA sense strand
acagagcucuaccagucuu

SEQ ID NO: 213168 - RNA, 19 nt, Homo sapiens
  misc_RNA (1)...(19): siRNA sense strand
acaguugggugaaguugca

SEQ ID NO: 213169 - RNA, 19 nt, Homo sapiens
  misc_RNA (1)...(19): siRNA sense strand
guuugaccacuauuuauga

SEQ ID NO: 213170 - RNA, 19 nt, Homo sapiens
  misc_RNA (1)...(19): siRNA sense strand
gcuuauaggacugccauga

SEQ ID NO: 213171 - RNA, 19 nt, Homo sapiens
  misc_RNA (1)...(19): siRNA sense strand
caucaggccaaauguaaca

SEQ ID NO: 213172 - RNA, 19 nt, Homo sapiens
  misc_RNA (1)...(19): siRNA sense strand
gauucuauccaaauuccaa

SEQ ID NO: 213173 - RNA, 19 nt, Homo sapiens
  misc_RNA (1)...(19): siRNA sense strand
ggcaaguucaacaggauuu

SEQ ID NO: 213174 - RNA, 19 nt, Homo sapiens
  misc_RNA (1)...(19): siRNA sense strand
gaacuggcugcugaauguu

SEQ ID NO: 213175 - RNA, 19 nt, Homo sapiens
  misc_RNA (1)...(19): siRNA sense strand
cugcugaauguuuaugaua

SEQ ID NO: 213176 - RNA, 19 nt, Homo sapiens
  misc_RNA (1)...(19): siRNA sense strand
aagcaucaggccaaaugua

SEQ ID NO: 213177 - RNA, 19 nt, Homo sapiens
  misc_RNA (1)...(19): siRNA sense strand
uggcaucauuucccugugu

SEQ ID NO: 213178 - RNA, 19 nt, Homo sapiens
  misc_RNA (1)...(19): siRNA sense strand
ccaugaaacuccgaagacu

SEQ ID NO: 213179 - RNA, 19 nt, Homo sapiens
  misc_RNA (1)...(19): siRNA sense strand
auaauaagccagagaucga

SEQ ID NO: 213180 - RNA, 19 nt, Homo sapiens
  misc_RNA (1)...(19): siRNA sense strand
cuaauaauaagccagagau

SEQ ID NO: 213181 - RNA, 19 nt, Homo sapiens
  misc_RNA (1)...(19): siRNA sense strand
ugggugaaguugcauccuu

SEQ ID NO: 213182 - RNA, 19 nt, Homo sapiens
  misc_RNA (1)...(19): siRNA sense strand
caucauuucccuguguaaa

SEQ ID NO: 213183 - RNA, 19 nt, Homo sapiens
  misc_RNA (1)...(19): siRNA sense strand
gcguggauaugugucugaa

SEQ ID NO: 213184 - RNA, 19 nt, Homo sapiens
  misc_RNA (1)...(19): siRNA sense strand
gcacuaucccaugguggaa

SEQ ID NO: 213185 - RNA, 19 nt, Homo sapiens
  misc_RNA (1)...(19): siRNA sense strand
gagccugucagcugcaugu

SEQ ID NO: 213186 - RNA, 19 nt, Homo sapiens
  misc_RNA (1)...(19): siRNA sense strand
guacagauaccuuuucaag

SEQ ID NO: 213187 - RNA, 19 nt, Homo sapiens
  misc_RNA (1)...(19): siRNA sense strand
gucccucucugcguggaua

SEQ ID NO: 213188 - RNA, 19 nt, Homo sapiens
  misc_RNA (1)...(19): siRNA sense strand
ggagcugcuuccaauuugc

SEQ ID NO: 213189 - RNA, 19 nt, Homo sapiens
  misc_RNA (1)...(19): siRNA sense strand
uuagcugaccugaauaaug

SEQ ID NO: 213190 - RNA, 19 nt, Homo sapiens
  misc_RNA (1)...(19): siRNA sense strand
guggcaaguucaacaggau

SEQ ID NO: 213191 - RNA, 19 nt, Homo sapiens
  misc_RNA (1)...(19): siRNA sense strand
acaacaauuuggucaacgu

SEQ ID NO: 213192 - RNA, 19 nt, Homo sapiens
  misc_RNA (1)...(19): siRNA sense strand
gacuacaucaggagaagau

SEQ ID NO: 213193 - RNA, 19 nt, Homo sapiens
  misc_RNA (1)...(19): siRNA sense strand
uaauaagccagagaucgaa

SEQ ID NO: 213194 - RNA, 19 nt, Homo sapiens
  misc_RNA (1)...(19): siRNA sense strand
ugucagauucucagcuuau

SEQ ID NO: 213195 - RNA, 19 nt, Homo sapiens
  misc_RNA (1)...(19): siRNA sense strand
ggauauccugcagauuauu

SEQ ID NO: 213196 - RNA, 19 nt, Homo sapiens
  misc_RNA (1)...(19): siRNA sense strand
agcaucaggccaaauguaa

SEQ ID NO: 213197 - RNA, 19 nt, Homo sapiens
  misc_RNA (1)...(19): siRNA sense strand
gcccuuugcuuggaucucu

SEQ ID NO: 213198 - RNA, 19 nt, Homo sapiens
  misc_RNA (1)...(19): siRNA sense strand
gcugaauguuuaugauacg

SEQ ID NO: 213199 - RNA, 19 nt, Homo sapiens
  misc_RNA (1)...(19): siRNA sense strand
agacuuugccaagguacua

SEQ ID NO: 213200 - RNA, 19 nt, Homo sapiens
  misc_RNA (1)...(19): siRNA sense strand
caagcaaguggcaaguuca

SEQ ID NO: 213201 - RNA, 19 nt, Homo sapiens
  misc_RNA (1)...(19): siRNA sense strand
agacaaguacagauaccuu

SEQ ID NO: 213202 - RNA, 19 nt, Homo sapiens
  misc_RNA (1)...(19): siRNA sense strand
gcaucauuucccuguguaa

SEQ ID NO: 213203 - RNA, 19 nt, Homo sapiens
  misc_RNA (1)...(19): siRNA sense strand
cugcaaagaguguccaauc

SEQ ID NO: 213204 - RNA, 19 nt, Homo sapiens
  misc_RNA (1)...(19): siRNA sense strand
cuuauaggacugccaugaa

SEQ ID NO: 213205 - RNA, 19 nt, Homo sapiens
  misc_RNA (1)...(19): siRNA sense strand
caaagaguguccaaucauu

SEQ ID NO: 213206 - RNA, 19 nt, Homo sapiens
  misc_RNA (1)...(19): siRNA sense strand
uagcugaccugaauaaugu

SEQ ID NO: 213207 - RNA, 19 nt, Homo sapiens
  misc_RNA (1)...(19): siRNA sense strand
gcaugauucuauccaaauu

SEQ ID NO: 213208 - RNA, 19 nt, Homo sapiens
  misc_RNA (1)...(19): siRNA sense strand
ugaacuggcugcugaaugu

SEQ ID NO: 213209 - RNA, 19 nt, Homo sapiens
  misc_RNA (1)...(19): siRNA sense strand
gauauccugcagauuauua

SEQ ID NO: 213210 - RNA, 19 nt, Homo sapiens
  misc_RNA (1)...(19): siRNA sense strand
gagaagauguucgagacuu

SEQ ID NO: 213211 - RNA, 19 nt, Homo sapiens
  misc_RNA (1)...(19): siRNA sense strand
gcacuuuaauuaugacauc

SEQ ID NO: 213212 - RNA, 19 nt, Homo sapiens
  misc_RNA (1)...(19): siRNA sense strand
guaaagcacauuuggaaga

SEQ ID NO: 213213 - RNA, 19 nt, Homo sapiens
  misc_RNA (1)...(19): siRNA sense strand
gaauauugcacuccgacua

SEQ ID NO: 213214 - RNA, 19 nt, Homo sapiens
  misc_RNA (1)...(19): siRNA sense strand
uuauaggacugccaugaaa

SEQ ID NO: 213215 - RNA, 19 nt, Homo sapiens
  misc_RNA (1)...(19): siRNA sense strand
gggugaaguugcauccuuu

SEQ ID NO: 213216 - RNA, 19 nt, Homo sapiens
  misc_RNA (1)...(19): siRNA sense strand
gcaagagcacaacaauuug

SEQ ID NO: 213217 - RNA, 19 nt, Homo sapiens
  misc_RNA (1)...(19): siRNA sense strand
gcacaacaauuuggucaac

SEQ ID NO: 213218 - RNA, 19 nt, Homo sapiens
  misc_RNA (1)...(19): siRNA sense strand
agcaagagcacaacaauuu

SEQ ID NO: 213219 - RNA, 19 nt, Homo sapiens
  misc_RNA (1)...(19): siRNA sense strand
agaagauguucgagacuuu

SEQ ID NO: 213220 - RNA, 19 nt, Homo sapiens
  misc_RNA (1)...(19): siRNA sense strand
gagcaagagcacaacaauu

SEQ ID NO: 213221 - RNA, 19 nt, Homo sapiens
  misc_RNA (1)...(19): siRNA sense strand
ucaagcaaguggcaaguuc

SEQ ID NO: 213222 - RNA, 19 nt, Homo sapiens
  misc_RNA (1)...(19): siRNA sense strand
ccacgagacucaaacaacu

SEQ ID NO: 213223 - RNA, 19 nt, Homo sapiens
  misc_RNA (1)...(19): siRNA sense strand
cagcacaaccucaagcaaa

SEQ ID NO: 213224 - RNA, 19 nt, Homo sapiens
  misc_RNA (1)...(19): siRNA sense strand
gcaaagaguguccaaucau

SEQ ID NO: 213225 - RNA, 19 nt, Homo sapiens
  misc_RNA (1)...(19): siRNA sense strand
auggauauccugcagauua

SEQ ID NO: 213226 - RNA, 19 nt, Homo sapiens
  misc_RNA (1)...(19): siRNA sense strand
uguaacaucugcaaagagu

SEQ ID NO: 213227 - RNA, 19 nt, Homo sapiens
  misc_RNA (1)...(19): siRNA sense strand
guccggagcugcuuccaau

SEQ ID NO: 213228 - RNA, 19 nt, Homo sapiens
  misc_RNA (1)...(19): siRNA sense strand
gcaaguggcaaguucaaca

SEQ ID NO: 213229 - RNA, 19 nt, Homo sapiens
  misc_RNA (1)...(19): siRNA sense strand
gcuuccaauuugcuaauaa

SEQ ID NO: 213230 - RNA, 19 nt, Homo sapiens
  misc_RNA (1)...(19): siRNA sense strand
uggaagacaaguacagaua

SEQ ID NO: 213231 - RNA, 19 nt, Homo sapiens
  misc_RNA (1)...(19): siRNA sense strand
ggauccguguccugucuuu

SEQ ID NO: 213232 - RNA, 19 nt, Homo sapiens
  misc_RNA (1)...(19): siRNA sense strand
gucuuuagcugaccugaau

SEQ ID NO: 213233 - RNA, 19 nt, Homo sapiens
  misc_RNA (1)...(19): siRNA sense strand
gacaaguacagauaccuuu

SEQ ID NO: 213234 - RNA, 19 nt, Homo sapiens
  misc_RNA (1)...(19): siRNA sense strand
ccaagcaucaggccaaaug

SEQ ID NO: 213235 - RNA, 19 nt, Homo sapiens
  misc_RNA (1)...(19): siRNA sense strand
ggagcaagagcacaacaau

SEQ ID NO: 213236 - RNA, 19 nt, Homo sapiens
  misc_RNA (1)...(19): siRNA sense strand
guguaaagcacauuuggaa

SEQ ID NO: 213237 - RNA, 19 nt, Homo sapiens
  misc_RNA (1)...(19): siRNA sense strand
caagacaguugggugaagu

SEQ ID NO: 213238 - RNA, 19 nt, Homo sapiens
  misc_RNA (1)...(19): siRNA sense strand
gaagauguucgagacuuug

SEQ ID NO: 213239 - RNA, 19 nt, Homo sapiens
  misc_RNA (1)...(19): siRNA sense strand
gucagauucucagcuuaua

SEQ ID NO: 213240 - RNA, 19 nt, Homo sapiens
  misc_RNA (1)...(19): siRNA sense strand
uaacaucugcaaagagugu

SEQ ID NO: 213241 - RNA, 19 nt, Homo sapiens
  misc_RNA (1)...(19): siRNA sense strand
cggagcugcuuccaauuug

SEQ ID NO: 213242 - RNA, 19 nt, Homo sapiens
  misc_RNA (1)...(19): siRNA sense strand
gaagacaaguacagauacc

SEQ ID NO: 213243 - RNA, 19 nt, Homo sapiens
  misc_RNA (1)...(19): siRNA sense strand
ccauggauauccugcagau

SEQ ID NO: 213244 - RNA, 19 nt, Homo sapiens
  misc_RNA (1)...(19): siRNA sense strand
ggcaucauuucccugugua

SEQ ID NO: 213245 - RNA, 19 nt, Homo sapiens
  misc_RNA (1)...(19): siRNA sense strand
uggauauccugcagauuau

SEQ ID NO: 213246 - RNA, 19 nt, Homo sapiens
  misc_RNA (1)...(19): siRNA sense strand
ggaagacaaguacagauac

SEQ ID NO: 213247 - RNA, 19 nt, Homo sapiens
  misc_RNA (1)...(19): siRNA sense strand
ugcaaagaguguccaauca

SEQ ID NO: 213248 - RNA, 19 nt, Homo sapiens
  misc_RNA (1)...(19): siRNA sense strand
guggauaugugucugaacu

SEQ ID NO: 213249 - RNA, 19 nt, Homo sapiens
  misc_RNA (1)...(19): siRNA sense strand
acuggcugcugaauguuua

SEQ ID NO: 213250 - RNA, 19 nt, Homo sapiens
  misc_RNA (1)...(19): siRNA sense strand
acuaucccaugguggaaua

SEQ ID NO: 213251 - RNA, 19 nt, Homo sapiens
  misc_RNA (1)...(19): siRNA sense strand
ccggagcugcuuccaauuu

SEQ ID NO: 213252 - RNA, 19 nt, Homo sapiens
  misc_RNA (1)...(19): siRNA sense strand
ccaaauuccaagacaguug

SEQ ID NO: 213253 - RNA, 19 nt, Homo sapiens
  misc_RNA (1)...(19): siRNA sense strand
cagaaacugccaagcauca

SEQ ID NO: 213254 - RNA, 19 nt, Homo sapiens
  misc_RNA (1)...(19): siRNA sense strand
uaugacaucugccaaagcu

SEQ ID NO: 213255 - RNA, 19 nt, Homo sapiens
  misc_RNA (1)...(19): siRNA sense strand
aaugucagauucucagcuu

SEQ ID NO: 213256 - RNA, 19 nt, Homo sapiens
  misc_RNA (1)...(19): siRNA sense strand
ucgagacuuugccaaggua

SEQ ID NO: 213257 - RNA, 19 nt, Homo sapiens
  misc_RNA (1)...(19): siRNA sense strand
gcaaaaggccauaaaaugc

SEQ ID NO: 213258 - RNA, 19 nt, Homo sapiens
  misc_RNA (1)...(19): siRNA sense strand
cugcaugauucuauccaaa

SEQ ID NO: 213259 - RNA, 19 nt, Homo sapiens
  misc_RNA (1)...(19): siRNA sense strand
uaaagcacauuuggaagac

SEQ ID NO: 213260 - RNA, 19 nt, Homo sapiens
  misc_RNA (1)...(19): siRNA sense strand
acaggagucuaaagcacuu

SEQ ID NO: 213261 - RNA, 19 nt, Homo sapiens
  misc_RNA (1)...(19): siRNA sense strand
acagauaccuuuucaagca

SEQ ID NO: 213262 - RNA, 19 nt, Homo sapiens
  misc_RNA (1)...(19): siRNA sense strand
aagcacauuuggaagacaa

SEQ ID NO: 213263 - RNA, 19 nt, Homo sapiens
  misc_RNA (1)...(19): siRNA sense strand
gcuaauaauaagccagaga

SEQ ID NO: 213264 - RNA, 19 nt, Homo sapiens
  misc_RNA (1)...(19): siRNA sense strand
caagagcacaacaauuugg

SEQ ID NO: 213265 - RNA, 19 nt, Homo sapiens
  misc_RNA (1)...(19): siRNA sense strand
ccugucagcugcaugugau

SEQ ID NO: 213266 - RNA, 19 nt, Homo sapiens
  misc_RNA (1)...(19): siRNA sense strand
gcugcugaauguuuaugau

SEQ ID NO: 213267 - RNA, 19 nt, Homo sapiens
  misc_RNA (1)...(19): siRNA sense strand
acagagcucuaccagucuu

SEQ ID NO: 213268 - RNA, 19 nt, Homo sapiens
  misc_RNA (1)...(19): siRNA sense strand
acaguugggugaaguugca

SEQ ID NO: 213269 - RNA, 19 nt, Homo sapiens
  misc_RNA (1)...(19): siRNA sense strand
guuugaccacuauuuauga

SEQ ID NO: 213270 - RNA, 19 nt, Homo sapiens
  misc_RNA (1)...(19): siRNA sense strand
gcuuauaggacugccauga

SEQ ID NO: 213271 - RNA, 19 nt, Homo sapiens
  misc_RNA (1)...(19): siRNA sense strand
caucaggccaaauguaaca

SEQ ID NO: 213272 - RNA, 19 nt, Homo sapiens
  misc_RNA (1)...(19): siRNA sense strand
gauucuauccaaauuccaa

SEQ ID NO: 213273 - RNA, 19 nt, Homo sapiens
  misc_RNA (1)...(19): siRNA sense strand
ggcaaguucaacaggauuu

SEQ ID NO: 213274 - RNA, 19 nt, Homo sapiens
  misc_RNA (1)...(19): siRNA sense strand
gaacuggcugcugaauguu

SEQ ID NO: 213275 - RNA, 19 nt, Homo sapiens
  misc_RNA (1)...(19): siRNA sense strand
cugcugaauguuuaugaua

SEQ ID NO: 213276 - RNA, 19 nt, Homo sapiens
  misc_RNA (1)...(19): siRNA sense strand
aagcaucaggccaaaugua

SEQ ID NO: 213277 - RNA, 19 nt, Homo sapiens
  misc_RNA (1)...(19): siRNA sense strand
uggcaucauuucccugugu

SEQ ID NO: 213278 - RNA, 19 nt, Homo sapiens
  misc_RNA (1)...(19): siRNA sense strand
ccaugaaacuccgaagacu

SEQ ID NO: 213279 - RNA, 19 nt, Homo sapiens
  misc_RNA (1)...(19): siRNA sense strand
auaauaagccagagaucga

SEQ ID NO: 213280 - RNA, 19 nt, Homo sapiens
  misc_RNA (1)...(19): siRNA sense strand
cuaauaauaagccagagau

SEQ ID NO: 213281 - RNA, 19 nt, Homo sapiens
  misc_RNA (1)...(19): siRNA sense strand
ugggugaaguugcauccuu

SEQ ID NO: 213282 - RNA, 19 nt, Homo sapiens
  misc_RNA (1)...(19): siRNA sense strand
caucauuucccuguguaaa

SEQ ID NO: 213283 - RNA, 19 nt, Homo sapiens
  misc_RNA (1)...(19): siRNA sense strand
gcguggauaugugucugaa

SEQ ID NO: 213284 - RNA, 19 nt, Homo sapiens
  misc_RNA (1)...(19): siRNA sense strand
gcacuaucccaugguggaa

SEQ ID NO: 213285 - RNA, 19 nt, Homo sapiens
  misc_RNA (1)...(19): siRNA sense strand
gagccugucagcugcaugu

SEQ ID NO: 213286 - RNA, 19 nt, Homo sapiens
  misc_RNA (1)...(19): siRNA sense strand
guacagauaccuuuucaag

SEQ ID NO: 213287 - RNA, 19 nt, Homo sapiens
  misc_RNA (1)...(19): siRNA sense strand
gucccucucugcguggaua

SEQ ID NO: 213288 - RNA, 19 nt, Homo sapiens
  misc_RNA (1)...(19): siRNA sense strand
ggagcugcuuccaauuugc

SEQ ID NO: 213289 - RNA, 19 nt, Homo sapiens
  misc_RNA (1)...(19): siRNA sense strand
uuagcugaccugaauaaug

SEQ ID NO: 213290 - RNA, 19 nt, Homo sapiens
  misc_RNA (1)...(19): siRNA sense strand
guggcaaguucaacaggau

SEQ ID NO: 213291 - RNA, 19 nt, Homo sapiens
  misc_RNA (1)...(19): siRNA sense strand
acaacaauuuggucaacgu

SEQ ID NO: 213292 - RNA, 19 nt, Homo sapiens
  misc_RNA (1)...(19): siRNA sense strand
gacuacaucaggagaagau

SEQ ID NO: 213293 - RNA, 19 nt, Homo sapiens
  misc_RNA (1)...(19): siRNA sense strand
uaauaagccagagaucgaa

SEQ ID NO: 213294 - RNA, 19 nt, Homo sapiens
  misc_RNA (1)...(19): siRNA sense strand
ugucagauucucagcuuau

SEQ ID NO: 213295 - RNA, 19 nt, Homo sapiens
  misc_RNA (1)...(19): siRNA sense strand
ggauauccugcagauuauu

SEQ ID NO: 213296 - RNA, 19 nt, Homo sapiens
  misc_RNA (1)...(19): siRNA sense strand
agcaucaggccaaauguaa

SEQ ID NO: 213297 - RNA, 19 nt, Homo sapiens
  misc_RNA (1)...(19): siRNA sense strand
gcccuuugcuuggaucucu

SEQ ID NO: 213298 - RNA, 19 nt, Homo sapiens
  misc_RNA (1)...(19): siRNA sense strand
gcugaauguuuaugauacg

SEQ ID NO: 213299 - RNA, 19 nt, Homo sapiens
  misc_RNA (1)...(19): siRNA sense strand
agacuuugccaagguacua

SEQ ID NO: 213300 - RNA, 19 nt, Homo sapiens
  misc_RNA (1)...(19): siRNA sense strand
caagcaaguggcaaguuca

SEQ ID NO: 213301 - RNA, 19 nt, Homo sapiens
  misc_RNA (1)...(19): siRNA sense strand
agacaaguacagauaccuu

SEQ ID NO: 213302 - RNA, 19 nt, Homo sapiens
  misc_RNA (1)...(19): siRNA sense strand
gcaucauuucccuguguaa

SEQ ID NO: 213303 - RNA, 19 nt, Homo sapiens
  misc_RNA (1)...(19): siRNA sense strand
cugcaaagaguguccaauc

SEQ ID NO: 213304 - RNA, 19 nt, Homo sapiens
  misc_RNA (1)...(19): siRNA sense strand
cuuauaggacugccaugaa

SEQ ID NO: 213305 - RNA, 19 nt, Homo sapiens
  misc_RNA (1)...(19): siRNA sense strand
caaagaguguccaaucauu

SEQ ID NO: 213306 - RNA, 19 nt, Homo sapiens
  misc_RNA (1)...(19): siRNA sense strand
uagcugaccugaauaaugu

SEQ ID NO: 213307 - RNA, 19 nt, Homo sapiens
  misc_RNA (1)...(19): siRNA sense strand
gcaugauucuauccaaauu

SEQ ID NO: 213308 - RNA, 19 nt, Homo sapiens
  misc_RNA (1)...(19): siRNA sense strand
ugaacuggcugcugaaugu

SEQ ID NO: 213309 - RNA, 19 nt, Homo sapiens
  misc_RNA (1)...(19): siRNA sense strand
gauauccugcagauuauua

SEQ ID NO: 213310 - RNA, 19 nt, Homo sapiens
  misc_RNA (1)...(19): siRNA sense strand
gagaagauguucgagacuu

SEQ ID NO: 213311 - RNA, 19 nt, Homo sapiens
  misc_RNA (1)...(19): siRNA sense strand
gcacuuuaauuaugacauc

SEQ ID NO: 213312 - RNA, 19 nt, Homo sapiens
  misc_RNA (1)...(19): siRNA sense strand
guaaagcacauuuggaaga

SEQ ID NO: 213313 - RNA, 19 nt, Homo sapiens
  misc_RNA (1)...(19): siRNA sense strand
gaauauugcacuccgacua

SEQ ID NO: 213314 - RNA, 19 nt, Homo sapiens
  misc_RNA (1)...(19): siRNA sense strand
uuauaggacugccaugaaa

SEQ ID NO: 213315 - RNA, 19 nt, Homo sapiens
  misc_RNA (1)...(19): siRNA sense strand
gggugaaguugcauccuuu

SEQ ID NO: 213316 - RNA, 19 nt, Homo sapiens
  misc_RNA (1)...(19): siRNA sense strand
gcaagagcacaacaauuug

SEQ ID NO: 213317 - RNA, 19 nt, Homo sapiens
  misc_RNA (1)...(19): siRNA sense strand
gcacaacaauuuggucaac

SEQ ID NO: 213318 - RNA, 19 nt, Homo sapiens
  misc_RNA (1)...(19): siRNA sense strand
agcaagagcacaacaauuu

SEQ ID NO: 213319 - RNA, 19 nt, Homo sapiens
  misc_RNA (1)...(19): siRNA sense strand
agaagauguucgagacuuu

SEQ ID NO: 213320 - RNA, 19 nt, Homo sapiens
  misc_RNA (1)...(19): siRNA sense strand
gagcaagagcacaacaauu

SEQ ID NO: 213321 - RNA, 19 nt, Homo sapiens
  misc_RNA (1)...(19): siRNA sense strand
ucaagcaaguggcaaguuc

SEQ ID NO: 213322 - RNA, 19 nt, Homo sapiens
  misc_RNA (1)...(19): siRNA sense strand
ccacgagacucaaacaacu

SEQ ID NO: 213323 - RNA, 19 nt, Homo sapiens
  misc_RNA (1)...(19): siRNA sense strand
cagcacaaccucaagcaaa

SEQ ID NO: 213324 - RNA, 19 nt, Homo sapiens
  misc_RNA (1)...(19): siRNA sense strand
gcaaagaguguccaaucau

SEQ ID NO: 213325 - RNA, 19 nt, Homo sapiens
  misc_RNA (1)...(19): siRNA sense strand
auggauauccugcagauua

SEQ ID NO: 213326 - RNA, 19 nt, Homo sapiens
  misc_RNA (1)...(19): siRNA sense strand
uguaacaucugcaaagagu

SEQ ID NO: 213327 - RNA, 19 nt, Homo sapiens
  misc_RNA (1)...(19): siRNA sense strand
guccggagcugcuuccaau

SEQ ID NO: 213328 - RNA, 19 nt, Homo sapiens
  misc_RNA (1)...(19): siRNA sense strand
gcaaguggcaaguucaaca

SEQ ID NO: 213329 - RNA, 19 nt, Homo sapiens
  misc_RNA (1)...(19): siRNA sense strand
gcuuccaauuugcuaauaa

SEQ ID NO: 213330 - RNA, 19 nt, Homo sapiens
  misc_RNA (1)...(19): siRNA sense strand
uggaagacaaguacagaua

SEQ ID NO: 213331 - RNA, 19 nt, Homo sapiens
  misc_RNA (1)...(19): siRNA sense strand
ggauccguguccugucuuu

SEQ ID NO: 213332 - RNA, 19 nt, Homo sapiens
  misc_RNA (1)...(19): siRNA sense strand
gucuuuagcugaccugaau

SEQ ID NO: 213333 - RNA, 19 nt, Homo sapiens
  misc_RNA (1)...(19): siRNA sense strand
gacaaguacagauaccuuu

SEQ ID NO: 213334 - RNA, 19 nt, Homo sapiens
  misc_RNA (1)...(19): siRNA sense strand
ccaagcaucaggccaaaug

SEQ ID NO: 213335 - RNA, 19 nt, Homo sapiens
  misc_RNA (1)...(19): siRNA sense strand
ggagcaagagcacaacaau

SEQ ID NO: 213336 - RNA, 19 nt, Homo sapiens
  misc_RNA (1)...(19): siRNA sense strand
guguaaagcacauuuggaa

SEQ ID NO: 213337 - RNA, 19 nt, Homo sapiens
  misc_RNA (1)...(19): siRNA sense strand
caagacaguugggugaagu

SEQ ID NO: 213338 - RNA, 19 nt, Homo sapiens
  misc_RNA (1)...(19): siRNA sense strand
gaagauguucgagacuuug

SEQ ID NO: 213339 - RNA, 19 nt, Homo sapiens
  misc_RNA (1)...(19): siRNA sense strand
gucagauucucagcuuaua

SEQ ID NO: 213340 - RNA, 19 nt, Homo sapiens
  misc_RNA (1)...(19): siRNA sense strand
uaacaucugcaaagagugu

SEQ ID NO: 213341 - RNA, 19 nt, Homo sapiens
  misc_RNA (1)...(19): siRNA sense strand
cggagcugcuuccaauuug

SEQ ID NO: 213342 - RNA, 19 nt, Homo sapiens
  misc_RNA (1)...(19): siRNA sense strand
gaagacaaguacagauacc

SEQ ID NO: 213343 - RNA, 19 nt, Homo sapiens
  misc_RNA (1)...(19): siRNA sense strand
ccauggauauccugcagau

SEQ ID NO: 213344 - RNA, 19 nt, Homo sapiens
  misc_RNA (1)...(19): siRNA sense strand
ggcaucauuucccugugua

SEQ ID NO: 213345 - RNA, 19 nt, Homo sapiens
  misc_RNA (1)...(19): siRNA sense strand
uggauauccugcagauuau

SEQ ID NO: 213346 - RNA, 19 nt, Homo sapiens
  misc_RNA (1)...(19): siRNA sense strand
ggaagacaaguacagauac

SEQ ID NO: 213347 - RNA, 19 nt, Homo sapiens
  misc_RNA (1)...(19): siRNA sense strand
ugcaaagaguguccaauca

SEQ ID NO: 213348 - RNA, 19 nt, Homo sapiens
  misc_RNA (1)...(19): siRNA sense strand
guggauaugugucugaacu

SEQ ID NO: 213349 - RNA, 19 nt, Homo sapiens
  misc_RNA (1)...(19): siRNA sense strand
acuggcugcugaauguuua

SEQ ID NO: 213350 - RNA, 19 nt, Homo sapiens
  misc_RNA (1)...(19): siRNA sense strand
acuaucccaugguggaaua

SEQ ID NO: 213351 - RNA, 19 nt, Homo sapiens
  misc_RNA (1)...(19): siRNA sense strand
ccggagcugcuuccaauuu

SEQ ID NO: 213352 - RNA, 19 nt, Homo sapiens
  misc_RNA (1)...(19): siRNA sense strand
ccaaauuccaagacaguug

SEQ ID NO: 213353 - RNA, 19 nt, Homo sapiens
  misc_RNA (1)...(19): siRNA sense strand
cagaaacugccaagcauca

SEQ ID NO: 213354 - RNA, 19 nt, Homo sapiens
  misc_RNA (1)...(19): siRNA sense strand
uaugacaucugccaaagcu

SEQ ID NO: 213355 - RNA, 19 nt, Homo sapiens
  misc_RNA (1)...(19): siRNA sense strand
aaugucagauucucagcuu

SEQ ID NO: 213356 - RNA, 19 nt, Homo sapiens
  misc_RNA (1)...(19): siRNA sense strand
ucgagacuuugccaaggua

SEQ ID NO: 213357 - RNA, 19 nt, Homo sapiens
  misc_RNA (1)...(19): siRNA sense strand
gcaaaaggccauaaaaugc

SEQ ID NO: 213358 - RNA, 19 nt, Homo sapiens
  misc_RNA (1)...(19): siRNA sense strand
cugcaugauucuauccaaa

SEQ ID NO: 213359 - RNA, 19 nt, Homo sapiens
  misc_RNA (1)...(19): siRNA sense strand
uaaagcacauuuggaagac

SEQ ID NO: 213360 - RNA, 19 nt, Homo sapiens
  misc_RNA (1)...(19): siRNA sense strand
acaggagucuaaagcacuu

SEQ ID NO: 213361 - RNA, 19 nt, Homo sapiens
  misc_RNA (1)...(19): siRNA sense strand
acagauaccuuuucaagca

SEQ ID NO: 213362 - RNA, 19 nt, Homo sapiens
  misc_RNA (1)...(19): siRNA sense strand
aagcacauuuggaagacaa

SEQ ID NO: 213363 - RNA, 19 nt, Homo sapiens
  misc_RNA (1)...(19): siRNA sense strand
gcuaauaauaagccagaga

SEQ ID NO: 213364 - RNA, 19 nt, Homo sapiens
  misc_RNA (1)...(19): siRNA sense strand
caagagcacaacaauuugg

SEQ ID NO: 213365 - RNA, 19 nt, Homo sapiens
  misc_RNA (1)...(19): siRNA sense strand
ccugucagcugcaugugau

SEQ ID NO: 213366 - RNA, 19 nt, Homo sapiens
  misc_RNA (1)...(19): siRNA sense strand
gcugcugaauguuuaugau

SEQ ID NO: 213367 - RNA, 19 nt, Homo sapiens
  misc_RNA (1)...(19): siRNA sense strand
acagagcucuaccagucuu

SEQ ID NO: 213368 - RNA, 19 nt, Homo sapiens
  misc_RNA (1)...(19): siRNA sense strand
acaguugggugaaguugca

SEQ ID NO: 213369 - RNA, 19 nt, Homo sapiens
  misc_RNA (1)...(19): siRNA sense strand
guuugaccacuauuuauga

SEQ ID NO: 213370 - RNA, 19 nt, Homo sapiens
  misc_RNA (1)...(19): siRNA sense strand
gcuuauaggacugccauga

SEQ ID NO: 213371 - RNA, 19 nt, Homo sapiens
  misc_RNA (1)...(19): siRNA sense strand
caucaggccaaauguaaca

SEQ ID NO: 213372 - RNA, 19 nt, Homo sapiens
  misc_RNA (1)...(19): siRNA sense strand
gauucuauccaaauuccaa

SEQ ID NO: 213373 - RNA, 19 nt, Homo sapiens
  misc_RNA (1)...(19): siRNA sense strand
ggcaaguucaacaggauuu

SEQ ID NO: 213374 - RNA, 19 nt, Homo sapiens
  misc_RNA (1)...(19): siRNA sense strand
gaacuggcugcugaauguu

SEQ ID NO: 213375 - RNA, 19 nt, Homo sapiens
  misc_RNA (1)...(19): siRNA sense strand
cugcugaauguuuaugaua

SEQ ID NO: 213376 - RNA, 19 nt, Homo sapiens
  misc_RNA (1)...(19): siRNA sense strand
aagcaucaggccaaaugua

SEQ ID NO: 213377 - RNA, 19 nt, Homo sapiens
  misc_RNA (1)...(19): siRNA sense strand
uggcaucauuucccugugu

SEQ ID NO: 213378 - RNA, 19 nt, Homo sapiens
  misc_RNA (1)...(19): siRNA sense strand
ccaugaaacuccgaagacu

SEQ ID NO: 213379 - RNA, 19 nt, Homo sapiens
  misc_RNA (1)...(19): siRNA sense strand
auaauaagccagagaucga

SEQ ID NO: 213380 - RNA, 19 nt, Homo sapiens
  misc_RNA (1)...(19): siRNA sense strand
cuaauaauaagccagagau

SEQ ID NO: 213381 - RNA, 19 nt, Homo sapiens
  misc_RNA (1)...(19): siRNA sense strand
ugggugaaguugcauccuu

SEQ ID NO: 213382 - RNA, 19 nt, Homo sapiens
  misc_RNA (1)...(19): siRNA sense strand
caucauuucccuguguaaa

SEQ ID NO: 213383 - RNA, 19 nt, Homo sapiens
  misc_RNA (1)...(19): siRNA sense strand
gcguggauaugugucugaa

SEQ ID NO: 213384 - RNA, 19 nt, Homo sapiens
  misc_RNA (1)...(19): siRNA sense strand
gcacuaucccaugguggaa

SEQ ID NO: 213385 - RNA, 19 nt, Homo sapiens
  misc_RNA (1)...(19): siRNA sense strand
gagccugucagcugcaugu

SEQ ID NO: 213386 - RNA, 19 nt, Homo sapiens
  misc_RNA (1)...(19): siRNA sense strand
guacagauaccuuuucaag

SEQ ID NO: 213387 - RNA, 19 nt, Homo sapiens
  misc_RNA (1)...(19): siRNA sense strand
gucccucucugcguggaua

SEQ ID NO: 213388 - RNA, 19 nt, Homo sapiens
  misc_RNA (1)...(19): siRNA sense strand
ggagcugcuuccaauuugc

SEQ ID NO: 213389 - RNA, 19 nt, Homo sapiens
  misc_RNA (1)...(19): siRNA sense strand
uuagcugaccugaauaaug

SEQ ID NO: 213390 - RNA, 19 nt, Homo sapiens
  misc_RNA (1)...(19): siRNA sense strand
guggcaaguucaacaggau

SEQ ID NO: 213391 - RNA, 19 nt, Homo sapiens
  misc_RNA (1)...(19): siRNA sense strand
acaacaauuuggucaacgu

SEQ ID NO: 213392 - RNA, 19 nt, Homo sapiens
  misc_RNA (1)...(19): siRNA sense strand
gacuacaucaggagaagau

SEQ ID NO: 213393 - RNA, 19 nt, Homo sapiens
  misc_RNA (1)...(19): siRNA sense strand
uaauaagccagagaucgaa

SEQ ID NO: 213394 - RNA, 19 nt, Homo sapiens
  misc_RNA (1)...(19): siRNA sense strand
ugucagauucucagcuuau

SEQ ID NO: 213395 - RNA, 19 nt, Homo sapiens
  misc_RNA (1)...(19): siRNA sense strand
ggauauccugcagauuauu

SEQ ID NO: 213396 - RNA, 19 nt, Homo sapiens
  misc_RNA (1)...(19): siRNA sense strand
agcaucaggccaaauguaa

SEQ ID NO: 213397 - RNA, 19 nt, Homo sapiens
  misc_RNA (1)...(19): siRNA sense strand
gcccuuugcuuggaucucu

SEQ ID NO: 213398 - RNA, 19 nt, Homo sapiens
  misc_RNA (1)...(19): siRNA sense strand
gcugaauguuuaugauacg

SEQ ID NO: 213399 - RNA, 19 nt, Homo sapiens
  misc_RNA (1)...(19): siRNA sense strand
agacuuugccaagguacua

SEQ ID NO: 213400 - RNA, 19 nt, Homo sapiens
  misc_RNA (1)...(19): siRNA sense strand
caagcaaguggcaaguuca

SEQ ID NO: 213401 - RNA, 19 nt, Homo sapiens
  misc_RNA (1)...(19): siRNA sense strand
agacaaguacagauaccuu

SEQ ID NO: 213402 - RNA, 19 nt, Homo sapiens
  misc_RNA (1)...(19): siRNA sense strand
gcaucauuucccuguguaa

SEQ ID NO: 213403 - RNA, 19 nt, Homo sapiens
  misc_RNA (1)...(19): siRNA sense strand
cugcaaagaguguccaauc

SEQ ID NO: 213404 - RNA, 19 nt, Homo sapiens
  misc_RNA (1)...(19): siRNA sense strand
cuuauaggacugccaugaa

SEQ ID NO: 213405 - RNA, 19 nt, Homo sapiens
  misc_RNA (1)...(19): siRNA sense strand
caaagaguguccaaucauu

SEQ ID NO: 213406 - RNA, 19 nt, Homo sapiens
  misc_RNA (1)...(19): siRNA sense strand
uagcugaccugaauaaugu

SEQ ID NO: 213407 - RNA, 19 nt, Homo sapiens
  misc_RNA (1)...(19): siRNA sense strand
gcaugauucuauccaaauu

SEQ ID NO: 213408 - RNA, 19 nt, Homo sapiens
  misc_RNA (1)...(19): siRNA sense strand
ugaacuggcugcugaaugu

SEQ ID NO: 213409 - RNA, 19 nt, Homo sapiens
  misc_RNA (1)...(19): siRNA sense strand
gauauccugcagauuauua

SEQ ID NO: 213410 - RNA, 19 nt, Homo sapiens
  misc_RNA (1)...(19): siRNA sense strand
gagaagauguucgagacuu

SEQ ID NO: 213411 - RNA, 19 nt, Homo sapiens
  misc_RNA (1)...(19): siRNA sense strand
gcacuuuaauuaugacauc

SEQ ID NO: 213412 - RNA, 19 nt, Homo sapiens
  misc_RNA (1)...(19): siRNA sense strand
guaaagcacauuuggaaga

SEQ ID NO: 213413 - RNA, 19 nt, Homo sapiens
  misc_RNA (1)...(19): siRNA sense strand
gaauauugcacuccgacua

SEQ ID NO: 213414 - RNA, 19 nt, Homo sapiens
  misc_RNA (1)...(19): siRNA sense strand
uuauaggacugccaugaaa

SEQ ID NO: 213415 - RNA, 19 nt, Homo sapiens
  misc_RNA (1)...(19): siRNA sense strand
gggugaaguugcauccuuu

SEQ ID NO: 213416 - RNA, 19 nt, Homo sapiens
  misc_RNA (1)...(19): siRNA sense strand
gcaagagcacaacaauuug

SEQ ID NO: 213417 - RNA, 19 nt, Homo sapiens
  misc_RNA (1)...(19): siRNA sense strand
gcacaacaauuuggucaac

SEQ ID NO: 213418 - RNA, 19 nt, Homo sapiens
  misc_RNA (1)...(19): siRNA sense strand
agcaagagcacaacaauuu

SEQ ID NO: 213419 - RNA, 19 nt, Homo sapiens
  misc_RNA (1)...(19): siRNA sense strand
agaagauguucgagacuuu

SEQ ID NO: 213420 - RNA, 19 nt, Homo sapiens
  misc_RNA (1)...(19): siRNA sense strand
gagcaagagcacaacaauu

SEQ ID NO: 213421 - RNA, 19 nt, Homo sapiens
  misc_RNA (1)...(19): siRNA sense strand
ucaagcaaguggcaaguuc

SEQ ID NO: 213422 - RNA, 19 nt, Homo sapiens
  misc_RNA (1)...(19): siRNA sense strand
ccacgagacucaaacaacu

SEQ ID NO: 213423 - RNA, 19 nt, Homo sapiens
  misc_RNA (1)...(19): siRNA sense strand
cagcacaaccucaagcaaa

SEQ ID NO: 213424 - RNA, 19 nt, Homo sapiens
  misc_RNA (1)...(19): siRNA sense strand
gcaaagaguguccaaucau

SEQ ID NO: 213425 - RNA, 19 nt, Homo sapiens
  misc_RNA (1)...(19): siRNA sense strand
auggauauccugcagauua

SEQ ID NO: 213426 - RNA, 19 nt, Homo sapiens
  misc_RNA (1)...(19): siRNA sense strand
uguaacaucugcaaagagu

SEQ ID NO: 213427 - RNA, 19 nt, Homo sapiens
  misc_RNA (1)...(19): siRNA sense strand
guccggagcugcuuccaau

SEQ ID NO: 213428 - RNA, 19 nt, Homo sapiens
  misc_RNA (1)...(19): siRNA sense strand
gcaaguggcaaguucaaca

SEQ ID NO: 213429 - RNA, 19 nt, Homo sapiens
  misc_RNA (1)...(19): siRNA sense strand
gcuuccaauuugcuaauaa

SEQ ID NO: 213430 - RNA, 19 nt, Homo sapiens
  misc_RNA (1)...(19): siRNA sense strand
uggaagacaaguacagaua

SEQ ID NO: 213431 - RNA, 19 nt, Homo sapiens
  misc_RNA (1)...(19): siRNA sense strand
ggauccguguccugucuuu

SEQ ID NO: 213432 - RNA, 19 nt, Homo sapiens
  misc_RNA (1)...(19): siRNA sense strand
gucuuuagcugaccugaau

SEQ ID NO: 213433 - RNA, 19 nt, Homo sapiens
  misc_RNA (1)...(19): siRNA sense strand
gacaaguacagauaccuuu

SEQ ID NO: 213434 - RNA, 19 nt, Homo sapiens
  misc_RNA (1)...(19): siRNA sense strand
ccaagcaucaggccaaaug

SEQ ID NO: 213435 - RNA, 19 nt, Homo sapiens
  misc_RNA (1)...(19): siRNA sense strand
ggagcaagagcacaacaau

SEQ ID NO: 213436 - RNA, 19 nt, Homo sapiens
  misc_RNA (1)...(19): siRNA sense strand
guguaaagcacauuuggaa

SEQ ID NO: 213437 - RNA, 19 nt, Homo sapiens
  misc_RNA (1)...(19): siRNA sense strand
caagacaguugggugaagu

SEQ ID NO: 213438 - RNA, 19 nt, Homo sapiens
  misc_RNA (1)...(19): siRNA sense strand
gaagauguucgagacuuug

SEQ ID NO: 213439 - RNA, 19 nt, Homo sapiens
  misc_RNA (1)...(19): siRNA sense strand
gucagauucucagcuuaua

SEQ ID NO: 213440 - RNA, 19 nt, Homo sapiens
  misc_RNA (1)...(19): siRNA sense strand
uaacaucugcaaagagugu

SEQ ID NO: 213441 - RNA, 19 nt, Homo sapiens
  misc_RNA (1)...(19): siRNA sense strand
cggagcugcuuccaauuug

SEQ ID NO: 213442 - RNA, 19 nt, Homo sapiens
  misc_RNA (1)...(19): siRNA sense strand
gaagacaaguacagauacc

SEQ ID NO: 213443 - RNA, 19 nt, Homo sapiens
  misc_RNA (1)...(19): siRNA sense strand
ccauggauauccugcagau

SEQ ID NO: 213444 - RNA, 19 nt, Homo sapiens
  misc_RNA (1)...(19): siRNA sense strand
ggcaucauuucccugugua

SEQ ID NO: 213445 - RNA, 19 nt, Homo sapiens
  misc_RNA (1)...(19): siRNA sense strand
uggauauccugcagauuau

SEQ ID NO: 213446 - RNA, 19 nt, Homo sapiens
  misc_RNA (1)...(19): siRNA sense strand
ggaagacaaguacagauac

SEQ ID NO: 213447 - RNA, 19 nt, Homo sapiens
  misc_RNA (1)...(19): siRNA sense strand
ugcaaagaguguccaauca

SEQ ID NO: 213448 - RNA, 19 nt, Homo sapiens
  misc_RNA (1)...(19): siRNA sense strand
guggauaugugucugaacu

SEQ ID NO: 213449 - RNA, 19 nt, Homo sapiens
  misc_RNA (1)...(19): siRNA sense strand
acuggcugcugaauguuua

SEQ ID NO: 213450 - RNA, 19 nt, Homo sapiens
  misc_RNA (1)...(19): siRNA sense strand
acuaucccaugguggaaua

SEQ ID NO: 213451 - RNA, 19 nt, Homo sapiens
  misc_RNA (1)...(19): siRNA sense strand
ccggagcugcuuccaauuu

SEQ ID NO: 213452 - RNA, 19 nt, Homo sapiens
  misc_RNA (1)...(19): siRNA sense strand
ccaaauuccaagacaguug

SEQ ID NO: 213453 - RNA, 19 nt, Homo sapiens
  misc_RNA (1)...(19): siRNA sense strand
cagaaacugccaagcauca

SEQ ID NO: 213454 - RNA, 19 nt, Homo sapiens
  misc_RNA (1)...(19): siRNA sense strand
uaugacaucugccaaagcu

SEQ ID NO: 213455 - RNA, 19 nt, Homo sapiens
  misc_RNA (1)...(19): siRNA sense strand
aaugucagauucucagcuu

SEQ ID NO: 213456 - RNA, 19 nt, Homo sapiens
  misc_RNA (1)...(19): siRNA sense strand
ucgagacuuugccaaggua

SEQ ID NO: 213457 - RNA, 19 nt, Homo sapiens
  misc_RNA (1)...(19): siRNA sense strand
gcaaaaggccauaaaaugc

SEQ ID NO: 213458 - RNA, 19 nt, Homo sapiens
  misc_RNA (1)...(19): siRNA sense strand
cugcaugauucuauccaaa

SEQ ID NO: 213459 - RNA, 19 nt, Homo sapiens
  misc_RNA (1)...(19): siRNA sense strand
uaaagcacauuuggaagac

SEQ ID NO: 213460 - RNA, 19 nt, Homo sapiens
  misc_RNA (1)...(19): siRNA sense strand
acaggagucuaaagcacuu

SEQ ID NO: 213461 - RNA, 19 nt, Homo sapiens
  misc_RNA (1)...(19): siRNA sense strand
acagauaccuuuucaagca

SEQ ID NO: 213462 - RNA, 19 nt, Homo sapiens
  misc_RNA (1)...(19): siRNA sense strand
aagcacauuuggaagacaa

SEQ ID NO: 213463 - RNA, 19 nt, Homo sapiens
  misc_RNA (1)...(19): siRNA sense strand
gcuaauaauaagccagaga

SEQ ID NO: 213464 - RNA, 19 nt, Homo sapiens
  misc_RNA (1)...(19): siRNA sense strand
caagagcacaacaauuugg

SEQ ID NO: 213465 - RNA, 19 nt, Homo sapiens
  misc_RNA (1)...(19): siRNA sense strand
ccugucagcugcaugugau

SEQ ID NO: 213466 - RNA, 19 nt, Homo sapiens
  misc_RNA (1)...(19): siRNA sense strand
gcugcugaauguuuaugau

SEQ ID NO: 213467 - RNA, 19 nt, Homo sapiens
  misc_RNA (1)...(19): siRNA sense strand
acagagcucuaccagucuu

SEQ ID NO: 213468 - RNA, 19 nt, Homo sapiens
  misc_RNA (1)...(19): siRNA sense strand
acaguugggugaaguugca

SEQ ID NO: 213469 - RNA, 19 nt, Homo sapiens
  misc_RNA (1)...(19): siRNA sense strand
guuugaccacuauuuauga

SEQ ID NO: 213470 - RNA, 19 nt, Homo sapiens
  misc_RNA (1)...(19): siRNA sense strand
gcuuauaggacugccauga

SEQ ID NO: 213471 - RNA, 19 nt, Homo sapiens
  misc_RNA (1)...(19): siRNA sense strand
caucaggccaaauguaaca

SEQ ID NO: 213472 - RNA, 19 nt, Homo sapiens
  misc_RNA (1)...(19): siRNA sense strand
gauucuauccaaauuccaa

SEQ ID NO: 213473 - RNA, 19 nt, Homo sapiens
  misc_RNA (1)...(19): siRNA sense strand
ggcaaguucaacaggauuu

SEQ ID NO: 213474 - RNA, 19 nt, Homo sapiens
  misc_RNA (1)...(19): siRNA sense strand
gaacuggcugcugaauguu

SEQ ID NO: 213475 - RNA, 19 nt, Homo sapiens
  misc_RNA (1)...(19): siRNA sense strand
cugcugaauguuuaugaua

SEQ ID NO: 213476 - RNA, 19 nt, Homo sapiens
  misc_RNA (1)...(19): siRNA sense strand
aagcaucaggccaaaugua

SEQ ID NO: 213477 - RNA, 19 nt, Homo sapiens
  misc_RNA (1)...(19): siRNA sense strand
uggcaucauuucccugugu

SEQ ID NO: 213478 - RNA, 19 nt, Homo sapiens
  misc_RNA (1)...(19): siRNA sense strand
ccaugaaacuccgaagacu

SEQ ID NO: 213479 - RNA, 19 nt, Homo sapiens
  misc_RNA (1)...(19): siRNA sense strand
auaauaagccagagaucga

SEQ ID NO: 213480 - RNA, 19 nt, Homo sapiens
  misc_RNA (1)...(19): siRNA sense strand
cuaauaauaagccagagau

SEQ ID NO: 213481 - RNA, 19 nt, Homo sapiens
  misc_RNA (1)...(19): siRNA sense strand
ugggugaaguugcauccuu

SEQ ID NO: 213482 - RNA, 19 nt, Homo sapiens
  misc_RNA (1)...(19): siRNA sense strand
caucauuucccuguguaaa

SEQ ID NO: 213483 - RNA, 19 nt, Homo sapiens
  misc_RNA (1)...(19): siRNA sense strand
gcguggauaugugucugaa

SEQ ID NO: 213484 - RNA, 19 nt, Homo sapiens
  misc_RNA (1)...(19): siRNA sense strand
gcacuaucccaugguggaa

SEQ ID NO: 213485 - RNA, 19 nt, Homo sapiens
  misc_RNA (1)...(19): siRNA sense strand
gagccugucagcugcaugu

SEQ ID NO: 213486 - RNA, 19 nt, Homo sapiens
  misc_RNA (1)...(19): siRNA sense strand
guacagauaccuuuucaag

SEQ ID NO: 213487 - RNA, 19 nt, Homo sapiens
  misc_RNA (1)...(19): siRNA sense strand
gucccucucugcguggaua

SEQ ID NO: 213488 - RNA, 19 nt, Homo sapiens
  misc_RNA (1)...(19): siRNA sense strand
ggagcugcuuccaauuugc

SEQ ID NO: 213489 - RNA, 19 nt, Homo sapiens
  misc_RNA (1)...(19): siRNA sense strand
uuagcugaccugaauaaug

SEQ ID NO: 213490 - RNA, 19 nt, Homo sapiens
  misc_RNA (1)...(19): siRNA sense strand
guggcaaguucaacaggau

SEQ ID NO: 213491 - RNA, 19 nt, Homo sapiens
  misc_RNA (1)...(19): siRNA sense strand
acaacaauuuggucaacgu

SEQ ID NO: 213492 - RNA, 19 nt, Homo sapiens
  misc_RNA (1)...(19): siRNA sense strand
gacuacaucaggagaagau

SEQ ID NO: 213493 - RNA, 19 nt, Homo sapiens
  misc_RNA (1)...(19): siRNA sense strand
uaauaagccagagaucgaa

SEQ ID NO: 213494 - RNA, 19 nt, Homo sapiens
  misc_RNA (1)...(19): siRNA sense strand
ugucagauucucagcuuau

SEQ ID NO: 213495 - RNA, 19 nt, Homo sapiens
  misc_RNA (1)...(19): siRNA sense strand
ggauauccugcagauuauu

SEQ ID NO: 213496 - RNA, 19 nt, Homo sapiens
  misc_RNA (1)...(19): siRNA sense strand
agcaucaggccaaauguaa

SEQ ID NO: 213497 - RNA, 19 nt, Homo sapiens
  misc_RNA (1)...(19): siRNA sense strand
gcccuuugcuuggaucucu

SEQ ID NO: 213498 - RNA, 19 nt, Homo sapiens
  misc_RNA (1)...(19): siRNA sense strand
gcugaauguuuaugauacg

SEQ ID NO: 213499 - RNA, 19 nt, Homo sapiens
  misc_RNA (1)...(19): siRNA sense strand
agacuuugccaagguacua

SEQ ID NO: 213500 - RNA, 19 nt, Homo sapiens
  misc_RNA (1)...(19): siRNA sense strand
caagcaaguggcaaguuca

SEQ ID NO: 213501 - RNA, 19 nt, Homo sapiens
  misc_RNA (1)...(19): siRNA sense strand
agacaaguacagauaccuu

SEQ ID NO: 213502 - RNA, 19 nt, Homo sapiens
  misc_RNA (1)...(19): siRNA sense strand
gcaucauuucccuguguaa

SEQ ID NO: 213503 - RNA, 19 nt, Homo sapiens
  misc_RNA (1)...(19): siRNA sense strand
cugcaaagaguguccaauc

SEQ ID NO: 213504 - RNA, 19 nt, Homo sapiens
  misc_RNA (1)...(19): siRNA sense strand
cuuauaggacugccaugaa

SEQ ID NO: 213505 - RNA, 19 nt, Homo sapiens
  misc_RNA (1)...(19): siRNA sense strand
caaagaguguccaaucauu

SEQ ID NO: 213506 - RNA, 19 nt, Homo sapiens
  misc_RNA (1)...(19): siRNA sense strand
uagcugaccugaauaaugu

SEQ ID NO: 213507 - RNA, 19 nt, Homo sapiens
  misc_RNA (1)...(19): siRNA sense strand
gcaugauucuauccaaauu

SEQ ID NO: 213508 - RNA, 19 nt, Homo sapiens
  misc_RNA (1)...(19): siRNA sense strand
ugaacuggcugcugaaugu

SEQ ID NO: 213509 - RNA, 19 nt, Homo sapiens
  misc_RNA (1)...(19): siRNA sense strand
gauauccugcagauuauua

SEQ ID NO: 213510 - RNA, 19 nt, Homo sapiens
  misc_RNA (1)...(19): siRNA sense strand
gagaagauguucgagacuu

SEQ ID NO: 213511 - RNA, 19 nt, Homo sapiens
  misc_RNA (1)...(19): siRNA sense strand
gcacuuuaauuaugacauc

SEQ ID NO: 213512 - RNA, 19 nt, Homo sapiens
  misc_RNA (1)...(19): siRNA sense strand
guaaagcacauuuggaaga

SEQ ID NO: 213513 - RNA, 19 nt, Homo sapiens
  misc_RNA (1)...(19): siRNA sense strand
gaauauugcacuccgacua

SEQ ID NO: 213514 - RNA, 19 nt, Homo sapiens
  misc_RNA (1)...(19): siRNA sense strand
uuauaggacugccaugaaa

SEQ ID NO: 213515 - RNA, 19 nt, Homo sapiens
  misc_RNA (1)...(19): siRNA sense strand
gggugaaguugcauccuuu

SEQ ID NO: 213516 - RNA, 19 nt, Homo sapiens
  misc_RNA (1)...(19): siRNA sense strand
gcaagagcacaacaauuug

SEQ ID NO: 213517 - RNA, 19 nt, Homo sapiens
  misc_RNA (1)...(19): siRNA sense strand
gcacaacaauuuggucaac

SEQ ID NO: 213518 - RNA, 19 nt, Homo sapiens
  misc_RNA (1)...(19): siRNA sense strand
agcaagagcacaacaauuu

SEQ ID NO: 213519 - RNA, 19 nt, Homo sapiens
  misc_RNA (1)...(19): siRNA sense strand
agaagauguucgagacuuu

SEQ ID NO: 213520 - RNA, 19 nt, Homo sapiens
  misc_RNA (1)...(19): siRNA sense strand
gagcaagagcacaacaauu

SEQ ID NO: 213521 - RNA, 19 nt, Homo sapiens
  misc_RNA (1)...(19): siRNA sense strand
ucaagcaaguggcaaguuc

SEQ ID NO: 213522 - RNA, 19 nt, Homo sapiens
  misc_RNA (1)...(19): siRNA sense strand
ccacgagacucaaacaacu

SEQ ID NO: 213523 - RNA, 19 nt, Homo sapiens
  misc_RNA (1)...(19): siRNA sense strand
cagcacaaccucaagcaaa

SEQ ID NO: 213524 - RNA, 19 nt, Homo sapiens
  misc_RNA (1)...(19): siRNA sense strand
gcaaagaguguccaaucau

SEQ ID NO: 213525 - RNA, 19 nt, Homo sapiens
  misc_RNA (1)...(19): siRNA sense strand
auggauauccugcagauua

SEQ ID NO: 213526 - RNA, 19 nt, Homo sapiens
  misc_RNA (1)...(19): siRNA sense strand
uguaacaucugcaaagagu

SEQ ID NO: 213527 - RNA, 19 nt, Homo sapiens
  misc_RNA (1)...(19): siRNA sense strand
guccggagcugcuuccaau

SEQ ID NO: 213528 - RNA, 19 nt, Homo sapiens
  misc_RNA (1)...(19): siRNA sense strand
gcaaguggcaaguucaaca

SEQ ID NO: 213529 - RNA, 19 nt, Homo sapiens
  misc_RNA (1)...(19): siRNA sense strand
gcuuccaauuugcuaauaa

SEQ ID NO: 213530 - RNA, 19 nt, Homo sapiens
  misc_RNA (1)...(19): siRNA sense strand
uggaagacaaguacagaua

SEQ ID NO: 213531 - RNA, 19 nt, Homo sapiens
  misc_RNA (1)...(19): siRNA sense strand
ggauccguguccugucuuu

SEQ ID NO: 213532 - RNA, 19 nt, Homo sapiens
  misc_RNA (1)...(19): siRNA sense strand
gucuuuagcugaccugaau

SEQ ID NO: 213533 - RNA, 19 nt, Homo sapiens
  misc_RNA (1)...(19): siRNA sense strand
gacaaguacagauaccuuu

SEQ ID NO: 213534 - RNA, 19 nt, Homo sapiens
  misc_RNA (1)...(19): siRNA sense strand
ccaagcaucaggccaaaug

SEQ ID NO: 213535 - RNA, 19 nt, Homo sapiens
  misc_RNA (1)...(19): siRNA sense strand
ggagcaagagcacaacaau

SEQ ID NO: 213536 - RNA, 19 nt, Homo sapiens
  misc_RNA (1)...(19): siRNA sense strand
guguaaagcacauuuggaa

SEQ ID NO: 213537 - RNA, 19 nt, Homo sapiens
  misc_RNA (1)...(19): siRNA sense strand
caagacaguugggugaagu

SEQ ID NO: 213538 - RNA, 19 nt, Homo sapiens
  misc_RNA (1)...(19): siRNA sense strand
gaagauguucgagacuuug

SEQ ID NO: 213539 - RNA, 19 nt, Homo sapiens
  misc_RNA (1)...(19): siRNA sense strand
gucagauucucagcuuaua

SEQ ID NO: 213540 - RNA, 19 nt, Homo sapiens
  misc_RNA (1)...(19): siRNA sense strand
uaacaucugcaaagagugu

SEQ ID NO: 213541 - RNA, 19 nt, Homo sapiens
  misc_RNA (1)...(19): siRNA sense strand
cggagcugcuuccaauuug

SEQ ID NO: 213542 - RNA, 19 nt, Homo sapiens
  misc_RNA (1)...(19): siRNA sense strand
gaagacaaguacagauacc

SEQ ID NO: 213543 - RNA, 19 nt, Homo sapiens
  misc_RNA (1)...(19): siRNA sense strand
ccauggauauccugcagau

SEQ ID NO: 213544 - RNA, 19 nt, Homo sapiens
  misc_RNA (1)...(19): siRNA sense strand
ggcaucauuucccugugua

SEQ ID NO: 213545 - RNA, 19 nt, Homo sapiens
  misc_RNA (1)...(19): siRNA sense strand
uggauauccugcagauuau

SEQ ID NO: 213546 - RNA, 19 nt, Homo sapiens
  misc_RNA (1)...(19): siRNA sense strand
ggaagacaaguacagauac

SEQ ID NO: 213547 - RNA, 19 nt, Homo sapiens
  misc_RNA (1)...(19): siRNA sense strand
ugcaaagaguguccaauca

SEQ ID NO: 213548 - RNA, 19 nt, Homo sapiens
  misc_RNA (1)...(19): siRNA sense strand
guggauaugugucugaacu

SEQ ID NO: 213549 - RNA, 19 nt, Homo sapiens
  misc_RNA (1)...(19): siRNA sense strand
acuggcugcugaauguuua

SEQ ID NO: 213550 - RNA, 19 nt, Homo sapiens
  misc_RNA (1)...(19): siRNA sense strand
acuaucccaugguggaaua

SEQ ID NO: 213551 - RNA, 19 nt, Homo sapiens
  misc_RNA (1)...(19): siRNA sense strand
ccggagcugcuuccaauuu

SEQ ID NO: 213552 - RNA, 19 nt, Homo sapiens
  misc_RNA (1)...(19): siRNA sense strand
ccaaauuccaagacaguug

SEQ ID NO: 213553 - RNA, 19 nt, Homo sapiens
  misc_RNA (1)...(19): siRNA sense strand
cagaaacugccaagcauca

SEQ ID NO: 213554 - RNA, 19 nt, Homo sapiens
  misc_RNA (1)...(19): siRNA sense strand
uaugacaucugccaaagcu

SEQ ID NO: 213555 - RNA, 19 nt, Homo sapiens
  misc_RNA (1)...(19): siRNA sense strand
aaugucagauucucagcuu

SEQ ID NO: 213556 - RNA, 19 nt, Homo sapiens
  misc_RNA (1)...(19): siRNA sense strand
ucgagacuuugccaaggua

SEQ ID NO: 213557 - RNA, 19 nt, Homo sapiens
  misc_RNA (1)...(19): siRNA sense strand
gcaaaaggccauaaaaugc

SEQ ID NO: 213558 - RNA, 19 nt, Homo sapiens
  misc_RNA (1)...(19): siRNA sense strand
cugcaugauucuauccaaa

SEQ ID NO: 213559 - RNA, 19 nt, Homo sapiens
  misc_RNA (1)...(19): siRNA sense strand
uaaagcacauuuggaagac

SEQ ID NO: 213560 - RNA, 19 nt, Homo sapiens
  misc_RNA (1)...(19): siRNA sense strand
acaggagucuaaagcacuu

SEQ ID NO: 213561 - RNA, 19 nt, Homo sapiens
  misc_RNA (1)...(19): siRNA sense strand
acagauaccuuuucaagca

SEQ ID NO: 213562 - RNA, 19 nt, Homo sapiens
  misc_RNA (1)...(19): siRNA sense strand
aagcacauuuggaagacaa

SEQ ID NO: 213563 - RNA, 19 nt, Homo sapiens
  misc_RNA (1)...(19): siRNA sense strand
gcuaauaauaagccagaga

SEQ ID NO: 213564 - RNA, 19 nt, Homo sapiens
  misc_RNA (1)...(19): siRNA sense strand
caagagcacaacaauuugg

SEQ ID NO: 213565 - RNA, 19 nt, Homo sapiens
  misc_RNA (1)...(19): siRNA sense strand
ccugucagcugcaugugau

SEQ ID NO: 213566 - RNA, 19 nt, Homo sapiens
  misc_RNA (1)...(19): siRNA sense strand
gcugcugaauguuuaugau

SEQ ID NO: 213567 - RNA, 19 nt, Homo sapiens
  misc_RNA (1)...(19): siRNA sense strand
acagagcucuaccagucuu

SEQ ID NO: 213568 - RNA, 19 nt, Homo sapiens
  misc_RNA (1)...(19): siRNA sense strand
acaguugggugaaguugca

SEQ ID NO: 213569 - RNA, 19 nt, Homo sapiens
  misc_RNA (1)...(19): siRNA sense strand
guuugaccacuauuuauga

SEQ ID NO: 213570 - RNA, 19 nt, Homo sapiens
  misc_RNA (1)...(19): siRNA sense strand
gcuuauaggacugccauga

SEQ ID NO: 213571 - RNA, 19 nt, Homo sapiens
  misc_RNA (1)...(19): siRNA sense strand
caucaggccaaauguaaca

SEQ ID NO: 213572 - RNA, 19 nt, Homo sapiens
  misc_RNA (1)...(19): siRNA sense strand
gauucuauccaaauuccaa

SEQ ID NO: 213573 - RNA, 19 nt, Homo sapiens
  misc_RNA (1)...(19): siRNA sense strand
ggcaaguucaacaggauuu

SEQ ID NO: 213574 - RNA, 19 nt, Homo sapiens
  misc_RNA (1)...(19): siRNA sense strand
gaacuggcugcugaauguu

SEQ ID NO: 213575 - RNA, 19 nt, Homo sapiens
  misc_RNA (1)...(19): siRNA sense strand
cugcugaauguuuaugaua

SEQ ID NO: 213576 - RNA, 19 nt, Homo sapiens
  misc_RNA (1)...(19): siRNA sense strand
aagcaucaggccaaaugua

SEQ ID NO: 213577 - RNA, 19 nt, Homo sapiens
  misc_RNA (1)...(19): siRNA sense strand
uggcaucauuucccugugu

SEQ ID NO: 213578 - RNA, 19 nt, Homo sapiens
  misc_RNA (1)...(19): siRNA sense strand
ccaugaaacuccgaagacu

SEQ ID NO: 213579 - RNA, 19 nt, Homo sapiens
  misc_RNA (1)...(19): siRNA sense strand
auaauaagccagagaucga

SEQ ID NO: 213580 - RNA, 19 nt, Homo sapiens
  misc_RNA (1)...(19): siRNA sense strand
cuaauaauaagccagagau

SEQ ID NO: 213581 - RNA, 19 nt, Homo sapiens
  misc_RNA (1)...(19): siRNA sense strand
ugggugaaguugcauccuu

SEQ ID NO: 213582 - RNA, 19 nt, Homo sapiens
  misc_RNA (1)...(19): siRNA sense strand
caucauuucccuguguaaa

SEQ ID NO: 213583 - RNA, 19 nt, Homo sapiens
  misc_RNA (1)...(19): siRNA sense strand
gcguggauaugugucugaa

SEQ ID NO: 213584 - RNA, 19 nt, Homo sapiens
  misc_RNA (1)...(19): siRNA sense strand
gcacuaucccaugguggaa

SEQ ID NO: 213585 - RNA, 19 nt, Homo sapiens
  misc_RNA (1)...(19): siRNA sense strand
gagccugucagcugcaugu

SEQ ID NO: 213586 - RNA, 19 nt, Homo sapiens
  misc_RNA (1)...(19): siRNA sense strand
guacagauaccuuuucaag

SEQ ID NO: 213587 - RNA, 19 nt, Homo sapiens
  misc_RNA (1)...(19): siRNA sense strand
gucccucucugcguggaua

SEQ ID NO: 213588 - RNA, 19 nt, Homo sapiens
  misc_RNA (1)...(19): siRNA sense strand
ggagcugcuuccaauuugc

SEQ ID NO: 213589 - RNA, 19 nt, Homo sapiens
  misc_RNA (1)...(19): siRNA sense strand
uuagcugaccugaauaaug

SEQ ID NO: 213590 - RNA, 19 nt, Homo sapiens
  misc_RNA (1)...(19): siRNA sense strand
guggcaaguucaacaggau

SEQ ID NO: 213591 - RNA, 19 nt, Homo sapiens
  misc_RNA (1)...(19): siRNA sense strand
acaacaauuuggucaacgu

SEQ ID NO: 213592 - RNA, 19 nt, Homo sapiens
  misc_RNA (1)...(19): siRNA sense strand
gacuacaucaggagaagau

SEQ ID NO: 213593 - RNA, 19 nt, Homo sapiens
  misc_RNA (1)...(19): siRNA sense strand
uaauaagccagagaucgaa

SEQ ID NO: 213594 - RNA, 19 nt, Homo sapiens
  misc_RNA (1)...(19): siRNA sense strand
ugucagauucucagcuuau

SEQ ID NO: 213595 - RNA, 19 nt, Homo sapiens
  misc_RNA (1)...(19): siRNA sense strand
ggauauccugcagauuauu

SEQ ID NO: 213596 - RNA, 19 nt, Homo sapiens
  misc_RNA (1)...(19): siRNA sense strand
agcaucaggccaaauguaa

SEQ ID NO: 213597 - RNA, 19 nt, Homo sapiens
  misc_RNA (1)...(19): siRNA sense strand
gcccuuugcuuggaucucu

SEQ ID NO: 213598 - RNA, 19 nt, Homo sapiens
  misc_RNA (1)...(19): siRNA sense strand
gcugaauguuuaugauacg

SEQ ID NO: 213599 - RNA, 19 nt, Homo sapiens
  misc_RNA (1)...(19): siRNA sense strand
agacuuugccaagguacua

SEQ ID NO: 213600 - RNA, 19 nt, Homo sapiens
  misc_RNA (1)...(19): siRNA sense strand
caagcaaguggcaaguuca

SEQ ID NO: 213601 - RNA, 19 nt, Homo sapiens
  misc_RNA (1)...(19): siRNA sense strand
agacaaguacagauaccuu

SEQ ID NO: 213602 - RNA, 19 nt, Homo sapiens
  misc_RNA (1)...(19): siRNA sense strand
gcaucauuucccuguguaa

SEQ ID NO: 213603 - RNA, 19 nt, Homo sapiens
  misc_RNA (1)...(19): siRNA sense strand
cugcaaagaguguccaauc

SEQ ID NO: 213604 - RNA, 19 nt, Homo sapiens
  misc_RNA (1)...(19): siRNA sense strand
cuuauaggacugccaugaa

SEQ ID NO: 213605 - RNA, 19 nt, Homo sapiens
  misc_RNA (1)...(19): siRNA sense strand
caaagaguguccaaucauu

SEQ ID NO: 213606 - RNA, 19 nt, Homo sapiens
  misc_RNA (1)...(19): siRNA sense strand
uagcugaccugaauaaugu

SEQ ID NO: 213607 - RNA, 19 nt, Homo sapiens
  misc_RNA (1)...(19): siRNA sense strand
gcaugauucuauccaaauu

SEQ ID NO: 213608 - RNA, 19 nt, Homo sapiens
  misc_RNA (1)...(19): siRNA sense strand
ugaacuggcugcugaaugu

SEQ ID NO: 213609 - RNA, 19 nt, Homo sapiens
  misc_RNA (1)...(19): siRNA sense strand
gauauccugcagauuauua

SEQ ID NO: 213610 - RNA, 19 nt, Homo sapiens
  misc_RNA (1)...(19): siRNA sense strand
gagaagauguucgagacuu

SEQ ID NO: 213611 - RNA, 19 nt, Homo sapiens
  misc_RNA (1)...(19): siRNA sense strand
gcacuuuaauuaugacauc

SEQ ID NO: 213612 - RNA, 19 nt, Homo sapiens
  misc_RNA (1)...(19): siRNA sense strand
guaaagcacauuuggaaga

SEQ ID NO: 213613 - RNA, 19 nt, Homo sapiens
  misc_RNA (1)...(19): siRNA sense strand
gaauauugcacuccgacua

SEQ ID NO: 213614 - RNA, 19 nt, Homo sapiens
  misc_RNA (1)...(19): siRNA sense strand
uuauaggacugccaugaaa

SEQ ID NO: 213615 - RNA, 19 nt, Homo sapiens
  misc_RNA (1)...(19): siRNA sense strand
gggugaaguugcauccuuu

SEQ ID NO: 213616 - RNA, 19 nt, Homo sapiens
  misc_RNA (1)...(19): siRNA sense strand
gcaagagcacaacaauuug

SEQ ID NO: 213617 - RNA, 19 nt, Homo sapiens
  misc_RNA (1)...(19): siRNA sense strand
gcacaacaauuuggucaac

SEQ ID NO: 213618 - RNA, 19 nt, Homo sapiens
  misc_RNA (1)...(19): siRNA sense strand
agcaagagcacaacaauuu

SEQ ID NO: 213619 - RNA, 19 nt, Homo sapiens
  misc_RNA (1)...(19): siRNA sense strand
agaagauguucgagacuuu

SEQ ID NO: 213620 - RNA, 19 nt, Homo sapiens
  misc_RNA (1)...(19): siRNA sense strand
gagcaagagcacaacaauu

SEQ ID NO: 213621 - RNA, 19 nt, Homo sapiens
  misc_RNA (1)...(19): siRNA sense strand
ucaagcaaguggcaaguuc

SEQ ID NO: 213622 - RNA, 19 nt, Homo sapiens
  misc_RNA (1)...(19): siRNA sense strand
ccacgagacucaaacaacu

SEQ ID NO: 213623 - RNA, 19 nt, Homo sapiens
  misc_RNA (1)...(19): siRNA sense strand
cagcacaaccucaagcaaa

SEQ ID NO: 213624 - RNA, 19 nt, Homo sapiens
  misc_RNA (1)...(19): siRNA sense strand
gcaaagaguguccaaucau

SEQ ID NO: 213625 - RNA, 19 nt, Homo sapiens
  misc_RNA (1)...(19): siRNA sense strand
auggauauccugcagauua

SEQ ID NO: 213626 - RNA, 19 nt, Homo sapiens
  misc_RNA (1)...(19): siRNA sense strand
uguaacaucugcaaagagu

SEQ ID NO: 213627 - RNA, 19 nt, Homo sapiens
  misc_RNA (1)...(19): siRNA sense strand
guccggagcugcuuccaau

SEQ ID NO: 213628 - RNA, 19 nt, Homo sapiens
  misc_RNA (1)...(19): siRNA sense strand
gcaaguggcaaguucaaca

SEQ ID NO: 213629 - RNA, 19 nt, Homo sapiens
  misc_RNA (1)...(19): siRNA sense strand
gcuuccaauuugcuaauaa

SEQ ID NO: 213630 - RNA, 19 nt, Homo sapiens
  misc_RNA (1)...(19): siRNA sense strand
uggaagacaaguacagaua

SEQ ID NO: 213631 - RNA, 19 nt, Homo sapiens
  misc_RNA (1)...(19): siRNA sense strand
ggauccguguccugucuuu

SEQ ID NO: 213632 - RNA, 19 nt, Homo sapiens
  misc_RNA (1)...(19): siRNA sense strand
gucuuuagcugaccugaau

SEQ ID NO: 213633 - RNA, 19 nt, Homo sapiens
  misc_RNA (1)...(19): siRNA sense strand
gacaaguacagauaccuuu

SEQ ID NO: 213634 - RNA, 19 nt, Homo sapiens
  misc_RNA (1)...(19): siRNA sense strand
ccaagcaucaggccaaaug

SEQ ID NO: 213635 - RNA, 19 nt, Homo sapiens
  misc_RNA (1)...(19): siRNA sense strand
ggagcaagagcacaacaau

SEQ ID NO: 213636 - RNA, 19 nt, Homo sapiens
  misc_RNA (1)...(19): siRNA sense strand
guguaaagcacauuuggaa

SEQ ID NO: 213637 - RNA, 19 nt, Homo sapiens
  misc_RNA (1)...(19): siRNA sense strand
caagacaguugggugaagu

SEQ ID NO: 213638 - RNA, 19 nt, Homo sapiens
  misc_RNA (1)...(19): siRNA sense strand
gaagauguucgagacuuug

SEQ ID NO: 213639 - RNA, 19 nt, Homo sapiens
  misc_RNA (1)...(19): siRNA sense strand
gucagauucucagcuuaua

SEQ ID NO: 213640 - RNA, 19 nt, Homo sapiens
  misc_RNA (1)...(19): siRNA sense strand
uaacaucugcaaagagugu

SEQ ID NO: 213641 - RNA, 19 nt, Homo sapiens
  misc_RNA (1)...(19): siRNA sense strand
cggagcugcuuccaauuug

SEQ ID NO: 213642 - RNA, 19 nt, Homo sapiens
  misc_RNA (1)...(19): siRNA sense strand
gaagacaaguacagauacc

SEQ ID NO: 213643 - RNA, 19 nt, Homo sapiens
  misc_RNA (1)...(19): siRNA sense strand
ccauggauauccugcagau

SEQ ID NO: 213644 - RNA, 19 nt, Homo sapiens
  misc_RNA (1)...(19): siRNA sense strand
ggcaucauuucccugugua

SEQ ID NO: 213645 - RNA, 19 nt, Homo sapiens
  misc_RNA (1)...(19): siRNA sense strand
uggauauccugcagauuau

SEQ ID NO: 213646 - RNA, 19 nt, Homo sapiens
  misc_RNA (1)...(19): siRNA sense strand
ggaagacaaguacagauac

SEQ ID NO: 213647 - RNA, 19 nt, Homo sapiens
  misc_RNA (1)...(19): siRNA sense strand
ugcaaagaguguccaauca

SEQ ID NO: 213648 - RNA, 19 nt, Homo sapiens
  misc_RNA (1)...(19): siRNA sense strand
guggauaugugucugaacu

SEQ ID NO: 213649 - RNA, 19 nt, Homo sapiens
  misc_RNA (1)...(19): siRNA sense strand
acuggcugcugaauguuua

SEQ ID NO: 213650 - RNA, 19 nt, Homo sapiens
  misc_RNA (1)...(19): siRNA sense strand
acuaucccaugguggaaua

SEQ ID NO: 213651 - RNA, 19 nt, Homo sapiens
  misc_RNA (1)...(19): siRNA sense strand
ccggagcugcuuccaauuu

SEQ ID NO: 213652 - RNA, 19 nt, Homo sapiens
  misc_RNA (1)...(19): siRNA sense strand
ccaaauuccaagacaguug

SEQ ID NO: 213653 - RNA, 19 nt, Homo sapiens
  misc_RNA (1)...(19): siRNA sense strand
cagaaacugccaagcauca

SEQ ID NO: 213654 - RNA, 19 nt, Homo sapiens
  misc_RNA (1)...(19): siRNA sense strand
uaugacaucugccaaagcu

SEQ ID NO: 213655 - RNA, 19 nt, Homo sapiens
  misc_RNA (1)...(19): siRNA sense strand
aaugucagauucucagcuu

SEQ ID NO: 213656 - RNA, 19 nt, Homo sapiens
  misc_RNA (1)...(19): siRNA sense strand
ucgagacuuugccaaggua

SEQ ID NO: 213657 - RNA, 19 nt, Homo sapiens
  misc_RNA (1)...(19): siRNA sense strand
gcaaaaggccauaaaaugc

SEQ ID NO: 213658 - RNA, 19 nt, Homo sapiens
  misc_RNA (1)...(19): siRNA sense strand
cugcaugauucuauccaaa

SEQ ID NO: 213659 - RNA, 19 nt, Homo sapiens
  misc_RNA (1)...(19): siRNA sense strand
uaaagcacauuuggaagac

SEQ ID NO: 213660 - RNA, 19 nt, Homo sapiens
  misc_RNA (1)...(19): siRNA sense strand
acaggagucuaaagcacuu

SEQ ID NO: 213661 - RNA, 19 nt, Homo sapiens
  misc_RNA (1)...(19): siRNA sense strand
acagauaccuuuucaagca

SEQ ID NO: 213662 - RNA, 19 nt, Homo sapiens
  misc_RNA (1)...(19): siRNA sense strand
aagcacauuuggaagacaa

SEQ ID NO: 213663 - RNA, 19 nt, Homo sapiens
  misc_RNA (1)...(19): siRNA sense strand
gcuaauaauaagccagaga

SEQ ID NO: 213664 - RNA, 19 nt, Homo sapiens
  misc_RNA (1)...(19): siRNA sense strand
caagagcacaacaauuugg

SEQ ID NO: 213665 - RNA, 19 nt, Homo sapiens
  misc_RNA (1)...(19): siRNA sense strand
ccugucagcugcaugugau

SEQ ID NO: 213666 - RNA, 19 nt, Homo sapiens
  misc_RNA (1)...(19): siRNA sense strand
gcugcugaauguuuaugau

SEQ ID NO: 213667 - RNA, 19 nt, Homo sapiens
  misc_RNA (1)...(19): siRNA sense strand
acagagcucuaccagucuu

SEQ ID NO: 213668 - RNA, 19 nt, Homo sapiens
  misc_RNA (1)...(19): siRNA sense strand
acaguugggugaaguugca

SEQ ID NO: 213669 - RNA, 19 nt, Homo sapiens
  misc_RNA (1)...(19): siRNA sense strand
guuugaccacuauuuauga

SEQ ID NO: 213670 - RNA, 19 nt, Homo sapiens
  misc_RNA (1)...(19): siRNA sense strand
gcuuauaggacugccauga

SEQ ID NO: 213671 - RNA, 19 nt, Homo sapiens
  misc_RNA (1)...(19): siRNA sense strand
caucaggccaaauguaaca

SEQ ID NO: 213672 - RNA, 19 nt, Homo sapiens
  misc_RNA (1)...(19): siRNA sense strand
gauucuauccaaauuccaa

SEQ ID NO: 213673 - RNA, 19 nt, Homo sapiens
  misc_RNA (1)...(19): siRNA sense strand
ggcaaguucaacaggauuu

SEQ ID NO: 213674 - RNA, 19 nt, Homo sapiens
  misc_RNA (1)...(19): siRNA sense strand
gaacuggcugcugaauguu

SEQ ID NO: 213675 - RNA, 19 nt, Homo sapiens
  misc_RNA (1)...(19): siRNA sense strand
cugcugaauguuuaugaua

SEQ ID NO: 213676 - RNA, 19 nt, Homo sapiens
  misc_RNA (1)...(19): siRNA sense strand
aagcaucaggccaaaugua

SEQ ID NO: 213677 - RNA, 19 nt, Homo sapiens
  misc_RNA (1)...(19): siRNA sense strand
uggcaucauuucccugugu

SEQ ID NO: 213678 - RNA, 19 nt, Homo sapiens
  misc_RNA (1)...(19): siRNA sense strand
ccaugaaacuccgaagacu

SEQ ID NO: 213679 - RNA, 19 nt, Homo sapiens
  misc_RNA (1)...(19): siRNA sense strand
auaauaagccagagaucga

SEQ ID NO: 213680 - RNA, 19 nt, Homo sapiens
  misc_RNA (1)...(19): siRNA sense strand
cuaauaauaagccagagau

SEQ ID NO: 213681 - RNA, 19 nt, Homo sapiens
  misc_RNA (1)...(19): siRNA sense strand
ugggugaaguugcauccuu

SEQ ID NO: 213682 - RNA, 19 nt, Homo sapiens
  misc_RNA (1)...(19): siRNA sense strand
caucauuucccuguguaaa

SEQ ID NO: 213683 - RNA, 19 nt, Homo sapiens
  misc_RNA (1)...(19): siRNA sense strand
gcguggauaugugucugaa

SEQ ID NO: 213684 - RNA, 19 nt, Homo sapiens
  misc_RNA (1)...(19): siRNA sense strand
gcacuaucccaugguggaa

SEQ ID NO: 213685 - RNA, 19 nt, Homo sapiens
  misc_RNA (1)...(19): siRNA sense strand
gagccugucagcugcaugu

SEQ ID NO: 213686 - RNA, 19 nt, Homo sapiens
  misc_RNA (1)...(19): siRNA sense strand
guacagauaccuuuucaag

SEQ ID NO: 213687 - RNA, 19 nt, Homo sapiens
  misc_RNA (1)...(19): siRNA sense strand
gucccucucugcguggaua

SEQ ID NO: 213688 - RNA, 19 nt, Homo sapiens
  misc_RNA (1)...(19): siRNA sense strand
ggagcugcuuccaauuugc

SEQ ID NO: 213689 - RNA, 19 nt, Homo sapiens
  misc_RNA (1)...(19): siRNA sense strand
uuagcugaccugaauaaug

SEQ ID NO: 213690 - RNA, 19 nt, Homo sapiens
  misc_RNA (1)...(19): siRNA sense strand
guggcaaguucaacaggau

SEQ ID NO: 213691 - RNA, 19 nt, Homo sapiens
  misc_RNA (1)...(19): siRNA sense strand
acaacaauuuggucaacgu

SEQ ID NO: 213692 - RNA, 19 nt, Homo sapiens
  misc_RNA (1)...(19): siRNA sense strand
gacuacaucaggagaagau

SEQ ID NO: 213693 - RNA, 19 nt, Homo sapiens
  misc_RNA (1)...(19): siRNA sense strand
uaauaagccagagaucgaa

SEQ ID NO: 213694 - RNA, 19 nt, Homo sapiens
  misc_RNA (1)...(19): siRNA sense strand
ugucagauucucagcuuau

SEQ ID NO: 213695 - RNA, 19 nt, Homo sapiens
  misc_RNA (1)...(19): siRNA sense strand
ggauauccugcagauuauu

SEQ ID NO: 213696 - RNA, 19 nt, Homo sapiens
  misc_RNA (1)...(19): siRNA sense strand
agcaucaggccaaauguaa

SEQ ID NO: 213697 - RNA, 19 nt, Homo sapiens
  misc_RNA (1)...(19): siRNA sense strand
gcccuuugcuuggaucucu

SEQ ID NO: 213698 - RNA, 19 nt, Homo sapiens
  misc_RNA (1)...(19): siRNA sense strand
gcugaauguuuaugauacg

SEQ ID NO: 213699 - RNA, 19 nt, Homo sapiens
  misc_RNA (1)...(19): siRNA sense strand
agacuuugccaagguacua

SEQ ID NO: 213700 - RNA, 19 nt, Homo sapiens
  misc_RNA (1)...(19): siRNA sense strand
caagcaaguggcaaguuca

SEQ ID NO: 213701 - RNA, 19 nt, Homo sapiens
  misc_RNA (1)...(19): siRNA sense strand
agacaaguacagauaccuu

SEQ ID NO: 213702 - RNA, 19 nt, Homo sapiens
  misc_RNA (1)...(19): siRNA sense strand
gcaucauuucccuguguaa

SEQ ID NO: 213703 - RNA, 19 nt, Homo sapiens
  misc_RNA (1)...(19): siRNA sense strand
cugcaaagaguguccaauc

SEQ ID NO: 213704 - RNA, 19 nt, Homo sapiens
  misc_RNA (1)...(19): siRNA sense strand
cuuauaggacugccaugaa

SEQ ID NO: 213705 - RNA, 19 nt, Homo sapiens
  misc_RNA (1)...(19): siRNA sense strand
caaagaguguccaaucauu

SEQ ID NO: 213706 - RNA, 19 nt, Homo sapiens
  misc_RNA (1)...(19): siRNA sense strand
uagcugaccugaauaaugu

SEQ ID NO: 213707 - RNA, 19 nt, Homo sapiens
  misc_RNA (1)...(19): siRNA sense strand
gcaugauucuauccaaauu

SEQ ID NO: 213708 - RNA, 19 nt, Homo sapiens
  misc_RNA (1)...(19): siRNA sense strand
ugaacuggcugcugaaugu

SEQ ID NO: 213709 - RNA, 19 nt, Homo sapiens
  misc_RNA (1)...(19): siRNA sense strand
gauauccugcagauuauua

SEQ ID NO: 213710 - RNA, 19 nt, Homo sapiens
  misc_RNA (1)...(19): siRNA sense strand
gagaagauguucgagacuu

SEQ ID NO: 213711 - RNA, 19 nt, Homo sapiens
  misc_RNA (1)...(19): siRNA sense strand
gcacuuuaauuaugacauc

SEQ ID NO: 213712 - RNA, 19 nt, Homo sapiens
  misc_RNA (1)...(19): siRNA sense strand
guaaagcacauuuggaaga

SEQ ID NO: 213713 - RNA, 19 nt, Homo sapiens
  misc_RNA (1)...(19): siRNA sense strand
gaauauugcacuccgacua

SEQ ID NO: 213714 - RNA, 19 nt, Homo sapiens
  misc_RNA (1)...(19): siRNA sense strand
uuauaggacugccaugaaa

SEQ ID NO: 213715 - RNA, 19 nt, Homo sapiens
  misc_RNA (1)...(19): siRNA sense strand
gggugaaguugcauccuuu

SEQ ID NO: 213716 - RNA, 19 nt, Homo sapiens
  misc_RNA (1)...(19): siRNA sense strand
gcaagagcacaacaauuug

SEQ ID NO: 213717 - RNA, 19 nt, Homo sapiens
  misc_RNA (1)...(19): siRNA sense strand
gcacaacaauuuggucaac

SEQ ID NO: 213718 - RNA, 19 nt, Homo sapiens
  misc_RNA (1)...(19): siRNA sense strand
agcaagagcacaacaauuu

SEQ ID NO: 213719 - RNA, 19 nt, Homo sapiens
  misc_RNA (1)...(19): siRNA sense strand
agaagauguucgagacuuu

SEQ ID NO: 213720 - RNA, 19 nt, Homo sapiens
  misc_RNA (1)...(19): siRNA sense strand
gagcaagagcacaacaauu

SEQ ID NO: 213721 - RNA, 19 nt, Homo sapiens
  misc_RNA (1)...(19): siRNA sense strand
ucaagcaaguggcaaguuc

SEQ ID NO: 213722 - RNA, 19 nt, Homo sapiens
  misc_RNA (1)...(19): siRNA sense strand
ccacgagacucaaacaacu

SEQ ID NO: 213723 - RNA, 19 nt, Homo sapiens
  misc_RNA (1)...(19): siRNA sense strand
cagcacaaccucaagcaaa

SEQ ID NO: 213724 - RNA, 19 nt, Homo sapiens
  misc_RNA (1)...(19): siRNA sense strand
gcaaagaguguccaaucau

SEQ ID NO: 213725 - RNA, 19 nt, Homo sapiens
  misc_RNA (1)...(19): siRNA sense strand
auggauauccugcagauua

SEQ ID NO: 213726 - RNA, 19 nt, Homo sapiens
  misc_RNA (1)...(19): siRNA sense strand
uguaacaucugcaaagagu

SEQ ID NO: 213727 - RNA, 19 nt, Homo sapiens
  misc_RNA (1)...(19): siRNA sense strand
guccggagcugcuuccaau

SEQ ID NO: 213728 - RNA, 19 nt, Homo sapiens
  misc_RNA (1)...(19): siRNA sense strand
gcaaguggcaaguucaaca

SEQ ID NO: 213729 - RNA, 19 nt, Homo sapiens
  misc_RNA (1)...(19): siRNA sense strand
gcuuccaauuugcuaauaa

SEQ ID NO: 213730 - RNA, 19 nt, Homo sapiens
  misc_RNA (1)...(19): siRNA sense strand
uggaagacaaguacagaua

SEQ ID NO: 213731 - RNA, 19 nt, Homo sapiens
  misc_RNA (1)...(19): siRNA sense strand
ggauccguguccugucuuu

SEQ ID NO: 213732 - RNA, 19 nt, Homo sapiens
  misc_RNA (1)...(19): siRNA sense strand
gucuuuagcugaccugaau

SEQ ID NO: 213733 - RNA, 19 nt, Homo sapiens
  misc_RNA (1)...(19): siRNA sense strand
gacaaguacagauaccuuu

SEQ ID NO: 213734 - RNA, 19 nt, Homo sapiens
  misc_RNA (1)...(19): siRNA sense strand
ccaagcaucaggccaaaug

SEQ ID NO: 213735 - RNA, 19 nt, Homo sapiens
  misc_RNA (1)...(19): siRNA sense strand
ggagcaagagcacaacaau

SEQ ID NO: 213736 - RNA, 19 nt, Homo sapiens
  misc_RNA (1)...(19): siRNA sense strand
guguaaagcacauuuggaa

SEQ ID NO: 213737 - RNA, 19 nt, Homo sapiens
  misc_RNA (1)...(19): siRNA sense strand
caagacaguugggugaagu

SEQ ID NO: 213738 - RNA, 19 nt, Homo sapiens
  misc_RNA (1)...(19): siRNA sense strand
gaagauguucgagacuuug

SEQ ID NO: 213739 - RNA, 19 nt, Homo sapiens
  misc_RNA (1)...(19): siRNA sense strand
gucagauucucagcuuaua

SEQ ID NO: 213740 - RNA, 19 nt, Homo sapiens
  misc_RNA (1)...(19): siRNA sense strand
uaacaucugcaaagagugu

SEQ ID NO: 213741 - RNA, 19 nt, Homo sapiens
  misc_RNA (1)...(19): siRNA sense strand
cggagcugcuuccaauuug

SEQ ID NO: 213742 - RNA, 19 nt, Homo sapiens
  misc_RNA (1)...(19): siRNA sense strand
gaagacaaguacagauacc

SEQ ID NO: 213743 - RNA, 19 nt, Homo sapiens
  misc_RNA (1)...(19): siRNA sense strand
ccauggauauccugcagau

SEQ ID NO: 213744 - RNA, 19 nt, Homo sapiens
  misc_RNA (1)...(19): siRNA sense strand
ggcaucauuucccugugua

SEQ ID NO: 213745 - RNA, 19 nt, Homo sapiens
  misc_RNA (1)...(19): siRNA sense strand
uggauauccugcagauuau

SEQ ID NO: 213746 - RNA, 19 nt, Homo sapiens
  misc_RNA (1)...(19): siRNA sense strand
ggaagacaaguacagauac

SEQ ID NO: 213747 - RNA, 19 nt, Homo sapiens
  misc_RNA (1)...(19): siRNA sense strand
ugcaaagaguguccaauca

SEQ ID NO: 213748 - RNA, 19 nt, Homo sapiens
  misc_RNA (1)...(19): siRNA sense strand
guggauaugugucugaacu

SEQ ID NO: 213749 - RNA, 19 nt, Homo sapiens
  misc_RNA (1)...(19): siRNA sense strand
acuggcugcugaauguuua

SEQ ID NO: 213750 - RNA, 19 nt, Homo sapiens
  misc_RNA (1)...(19): siRNA sense strand
acuaucccaugguggaaua

SEQ ID NO: 213751 - RNA, 19 nt, Homo sapiens
  misc_RNA (1)...(19): siRNA sense strand
ccggagcugcuuccaauuu

SEQ ID NO: 213752 - RNA, 19 nt, Homo sapiens
  misc_RNA (1)...(19): siRNA sense strand
ccaaauuccaagacaguug

SEQ ID NO: 213753 - RNA, 19 nt, Homo sapiens
  misc_RNA (1)...(19): siRNA sense strand
cagaaacugccaagcauca

SEQ ID NO: 213754 - RNA, 19 nt, Homo sapiens
  misc_RNA (1)...(19): siRNA sense strand
uaugacaucugccaaagcu

SEQ ID NO: 213755 - RNA, 19 nt, Homo sapiens
  misc_RNA (1)...(19): siRNA sense strand
aaugucagauucucagcuu

SEQ ID NO: 213756 - RNA, 19 nt, Homo sapiens
  misc_RNA (1)...(19): siRNA sense strand
ucgagacuuugccaaggua

SEQ ID NO: 213757 - RNA, 19 nt, Homo sapiens
  misc_RNA (1)...(19): siRNA sense strand
gcaaaaggccauaaaaugc

SEQ ID NO: 213758 - RNA, 19 nt, Homo sapiens
  misc_RNA (1)...(19): siRNA sense strand
cugcaugauucuauccaaa

SEQ ID NO: 213759 - RNA, 19 nt, Homo sapiens
  misc_RNA (1)...(19): siRNA sense strand
uaaagcacauuuggaagac

SEQ ID NO: 213760 - RNA, 19 nt, Homo sapiens
  misc_RNA (1)...(19): siRNA sense strand
acaggagucuaaagcacuu

SEQ ID NO: 213761 - RNA, 19 nt, Homo sapiens
  misc_RNA (1)...(19): siRNA sense strand
acagauaccuuuucaagca

SEQ ID NO: 213762 - RNA, 19 nt, Homo sapiens
  misc_RNA (1)...(19): siRNA sense strand
aagcacauuuggaagacaa

SEQ ID NO: 213763 - RNA, 19 nt, Homo sapiens
  misc_RNA (1)...(19): siRNA sense strand
gcuaauaauaagccagaga

SEQ ID NO: 213764 - RNA, 19 nt, Homo sapiens
  misc_RNA (1)...(19): siRNA sense strand
caagagcacaacaauuugg

SEQ ID NO: 213765 - RNA, 19 nt, Homo sapiens
  misc_RNA (1)...(19): siRNA sense strand
ccugucagcugcaugugau

SEQ ID NO: 213766 - RNA, 19 nt, Homo sapiens
  misc_RNA (1)...(19): siRNA sense strand
gcugcugaauguuuaugau

SEQ ID NO: 213767 - RNA, 19 nt, Homo sapiens
  misc_RNA (1)...(19): siRNA sense strand
acagagcucuaccagucuu

SEQ ID NO: 213768 - RNA, 19 nt, Homo sapiens
  misc_RNA (1)...(19): siRNA sense strand
acaguugggugaaguugca

SEQ ID NO: 213769 - RNA, 19 nt, Homo sapiens
  misc_RNA (1)...(19): siRNA sense strand
guuugaccacuauuuauga

SEQ ID NO: 213770 - RNA, 19 nt, Homo sapiens
  misc_RNA (1)...(19): siRNA sense strand
gcuuauaggacugccauga

SEQ ID NO: 213771 - RNA, 19 nt, Homo sapiens
  misc_RNA (1)...(19): siRNA sense strand
caucaggccaaauguaaca

SEQ ID NO: 213772 - RNA, 19 nt, Homo sapiens
  misc_RNA (1)...(19): siRNA sense strand
gauucuauccaaauuccaa

SEQ ID NO: 213773 - RNA, 19 nt, Homo sapiens
  misc_RNA (1)...(19): siRNA sense strand
ggcaaguucaacaggauuu

SEQ ID NO: 213774 - RNA, 19 nt, Homo sapiens
  misc_RNA (1)...(19): siRNA sense strand
gaacuggcugcugaauguu

SEQ ID NO: 213775 - RNA, 19 nt, Homo sapiens
  misc_RNA (1)...(19): siRNA sense strand
cugcugaauguuuaugaua

SEQ ID NO: 213776 - RNA, 19 nt, Homo sapiens
  misc_RNA (1)...(19): siRNA sense strand
aagcaucaggccaaaugua

SEQ ID NO: 213777 - RNA, 19 nt, Homo sapiens
  misc_RNA (1)...(19): siRNA sense strand
uggcaucauuucccugugu

SEQ ID NO: 213778 - RNA, 19 nt, Homo sapiens
  misc_RNA (1)...(19): siRNA sense strand
ccaugaaacuccgaagacu

SEQ ID NO: 213779 - RNA, 19 nt, Homo sapiens
  misc_RNA (1)...(19): siRNA sense strand
auaauaagccagagaucga

SEQ ID NO: 213780 - RNA, 19 nt, Homo sapiens
  misc_RNA (1)...(19): siRNA sense strand
cuaauaauaagccagagau

SEQ ID NO: 213781 - RNA, 19 nt, Homo sapiens
  misc_RNA (1)...(19): siRNA sense strand
ugggugaaguugcauccuu

SEQ ID NO: 213782 - RNA, 19 nt, Homo sapiens
  misc_RNA (1)...(19): siRNA sense strand
caucauuucccuguguaaa

SEQ ID NO: 213783 - RNA, 19 nt, Homo sapiens
  misc_RNA (1)...(19): siRNA sense strand
gcguggauaugugucugaa

SEQ ID NO: 213784 - RNA, 19 nt, Homo sapiens
  misc_RNA (1)...(19): siRNA sense strand
gcacuaucccaugguggaa

SEQ ID NO: 213785 - RNA, 19 nt, Homo sapiens
  misc_RNA (1)...(19): siRNA sense strand
gagccugucagcugcaugu

SEQ ID NO: 213786 - RNA, 19 nt, Homo sapiens
  misc_RNA (1)...(19): siRNA sense strand
guacagauaccuuuucaag

SEQ ID NO: 213787 - RNA, 19 nt, Homo sapiens
  misc_RNA (1)...(19): siRNA sense strand
gucccucucugcguggaua

SEQ ID NO: 213788 - RNA, 19 nt, Homo sapiens
  misc_RNA (1)...(19): siRNA sense strand
ggagcugcuuccaauuugc

SEQ ID NO: 213789 - RNA, 19 nt, Homo sapiens
  misc_RNA (1)...(19): siRNA sense strand
uuagcugaccugaauaaug

SEQ ID NO: 213790 - RNA, 19 nt, Homo sapiens
  misc_RNA (1)...(19): siRNA sense strand
guggcaaguucaacaggau

SEQ ID NO: 213791 - RNA, 19 nt, Homo sapiens
  misc_RNA (1)...(19): siRNA sense strand
acaacaauuuggucaacgu

SEQ ID NO: 213792 - RNA, 19 nt, Homo sapiens
  misc_RNA (1)...(19): siRNA sense strand
gacuacaucaggagaagau

SEQ ID NO: 213793 - RNA, 19 nt, Homo sapiens
  misc_RNA (1)...(19): siRNA sense strand
uaauaagccagagaucgaa

SEQ ID NO: 213794 - RNA, 19 nt, Homo sapiens
  misc_RNA (1)...(19): siRNA sense strand
ugucagauucucagcuuau

SEQ ID NO: 213795 - RNA, 19 nt, Homo sapiens
  misc_RNA (1)...(19): siRNA sense strand
ggauauccugcagauuauu

SEQ ID NO: 213796 - RNA, 19 nt, Homo sapiens
  misc_RNA (1)...(19): siRNA sense strand
agcaucaggccaaauguaa

SEQ ID NO: 213797 - RNA, 19 nt, Homo sapiens
  misc_RNA (1)...(19): siRNA sense strand
gcccuuugcuuggaucucu

SEQ ID NO: 213798 - RNA, 19 nt, Homo sapiens
  misc_RNA (1)...(19): siRNA sense strand
gcugaauguuuaugauacg

SEQ ID NO: 213799 - RNA, 19 nt, Homo sapiens
  misc_RNA (1)...(19): siRNA sense strand
agacuuugccaagguacua

SEQ ID NO: 213800 - RNA, 19 nt, Homo sapiens
  misc_RNA (1)...(19): siRNA sense strand
caagcaaguggcaaguuca

SEQ ID NO: 213801 - RNA, 19 nt, Homo sapiens
  misc_RNA (1)...(19): siRNA sense strand
agacaaguacagauaccuu

SEQ ID NO: 213802 - RNA, 19 nt, Homo sapiens
  misc_RNA (1)...(19): siRNA sense strand
gcaucauuucccuguguaa

SEQ ID NO: 213803 - RNA, 19 nt, Homo sapiens
  misc_RNA (1)...(19): siRNA sense strand
cugcaaagaguguccaauc

SEQ ID NO: 213804 - RNA, 19 nt, Homo sapiens
  misc_RNA (1)...(19): siRNA sense strand
cuuauaggacugccaugaa

SEQ ID NO: 213805 - RNA, 19 nt, Homo sapiens
  misc_RNA (1)...(19): siRNA sense strand
caaagaguguccaaucauu

SEQ ID NO: 213806 - RNA, 19 nt, Homo sapiens
  misc_RNA (1)...(19): siRNA sense strand
uagcugaccugaauaaugu

SEQ ID NO: 213807 - RNA, 19 nt, Homo sapiens
  misc_RNA (1)...(19): siRNA sense strand
gcaugauucuauccaaauu

SEQ ID NO: 213808 - RNA, 19 nt, Homo sapiens
  misc_RNA (1)...(19): siRNA sense strand
ugaacuggcugcugaaugu

SEQ ID NO: 213809 - RNA, 19 nt, Homo sapiens
  misc_RNA (1)...(19): siRNA sense strand
gauauccugcagauuauua

SEQ ID NO: 213810 - RNA, 19 nt, Homo sapiens
  misc_RNA (1)...(19): siRNA sense strand
gagaagauguucgagacuu

SEQ ID NO: 213811 - RNA, 19 nt, Homo sapiens
  misc_RNA (1)...(19): siRNA sense strand
gcacuuuaauuaugacauc

SEQ ID NO: 213812 - RNA, 19 nt, Homo sapiens
  misc_RNA (1)...(19): siRNA sense strand
guaaagcacauuuggaaga

SEQ ID NO: 213813 - RNA, 19 nt, Homo sapiens
  misc_RNA (1)...(19): siRNA sense strand
gaauauugcacuccgacua

SEQ ID NO: 213814 - RNA, 19 nt, Homo sapiens
  misc_RNA (1)...(19): siRNA sense strand
uuauaggacugccaugaaa

SEQ ID NO: 213815 - RNA, 19 nt, Homo sapiens
  misc_RNA (1)...(19): siRNA sense strand
gggugaaguugcauccuuu

SEQ ID NO: 213816 - RNA, 19 nt, Homo sapiens
  misc_RNA (1)...(19): siRNA sense strand
gcaagagcacaacaauuug

SEQ ID NO: 213817 - RNA, 19 nt, Homo sapiens
  misc_RNA (1)...(19): siRNA sense strand
gcacaacaauuuggucaac

SEQ ID NO: 213818 - RNA, 19 nt, Homo sapiens
  misc_RNA (1)...(19): siRNA sense strand
agcaagagcacaacaauuu

SEQ ID NO: 213819 - RNA, 19 nt, Homo sapiens
  misc_RNA (1)...(19): siRNA sense strand
agaagauguucgagacuuu

SEQ ID NO: 213820 - RNA, 19 nt, Homo sapiens
  misc_RNA (1)...(19): siRNA sense strand
gagcaagagcacaacaauu

SEQ ID NO: 213821 - RNA, 19 nt, Homo sapiens
  misc_RNA (1)...(19): siRNA sense strand
ucaagcaaguggcaaguuc

SEQ ID NO: 213822 - RNA, 19 nt, Homo sapiens
  misc_RNA (1)...(19): siRNA sense strand
ccacgagacucaaacaacu

SEQ ID NO: 213823 - RNA, 19 nt, Homo sapiens
  misc_RNA (1)...(19): siRNA sense strand
cagcacaaccucaagcaaa

SEQ ID NO: 213824 - RNA, 19 nt, Homo sapiens
  misc_RNA (1)...(19): siRNA sense strand
gcaaagaguguccaaucau

SEQ ID NO: 213825 - RNA, 19 nt, Homo sapiens
  misc_RNA (1)...(19): siRNA sense strand
auggauauccugcagauua

SEQ ID NO: 213826 - RNA, 19 nt, Homo sapiens
  misc_RNA (1)...(19): siRNA sense strand
uguaacaucugcaaagagu

SEQ ID NO: 213827 - RNA, 19 nt, Homo sapiens
  misc_RNA (1)...(19): siRNA sense strand
guccggagcugcuuccaau

SEQ ID NO: 213828 - RNA, 19 nt, Homo sapiens
  misc_RNA (1)...(19): siRNA sense strand
gcaaguggcaaguucaaca

SEQ ID NO: 213829 - RNA, 19 nt, Homo sapiens
  misc_RNA (1)...(19): siRNA sense strand
gcuuccaauuugcuaauaa

SEQ ID NO: 213830 - RNA, 19 nt, Homo sapiens
  misc_RNA (1)...(19): siRNA sense strand
uggaagacaaguacagaua

SEQ ID NO: 213831 - RNA, 19 nt, Homo sapiens
  misc_RNA (1)...(19): siRNA sense strand
ggauccguguccugucuuu

SEQ ID NO: 213832 - RNA, 19 nt, Homo sapiens
  misc_RNA (1)...(19): siRNA sense strand
gucuuuagcugaccugaau

SEQ ID NO: 213833 - RNA, 19 nt, Homo sapiens
  misc_RNA (1)...(19): siRNA sense strand
gacaaguacagauaccuuu

SEQ ID NO: 213834 - RNA, 19 nt, Homo sapiens
  misc_RNA (1)...(19): siRNA sense strand
ccaagcaucaggccaaaug

SEQ ID NO: 213835 - RNA, 19 nt, Homo sapiens
  misc_RNA (1)...(19): siRNA sense strand
ggagcaagagcacaacaau

SEQ ID NO: 213836 - RNA, 19 nt, Homo sapiens
  misc_RNA (1)...(19): siRNA sense strand
guguaaagcacauuuggaa

SEQ ID NO: 213837 - RNA, 19 nt, Homo sapiens
  misc_RNA (1)...(19): siRNA sense strand
caagacaguugggugaagu

SEQ ID NO: 213838 - RNA, 19 nt, Homo sapiens
  misc_RNA (1)...(19): siRNA sense strand
gaagauguucgagacuuug

SEQ ID NO: 213839 - RNA, 19 nt, Homo sapiens
  misc_RNA (1)...(19): siRNA sense strand
gucagauucucagcuuaua

SEQ ID NO: 213840 - RNA, 19 nt, Homo sapiens
  misc_RNA (1)...(19): siRNA sense strand
uaacaucugcaaagagugu

SEQ ID NO: 213841 - RNA, 19 nt, Homo sapiens
  misc_RNA (1)...(19): siRNA sense strand
cggagcugcuuccaauuug

SEQ ID NO: 213842 - RNA, 19 nt, Homo sapiens
  misc_RNA (1)...(19): siRNA sense strand
gaagacaaguacagauacc

SEQ ID NO: 213843 - RNA, 19 nt, Homo sapiens
  misc_RNA (1)...(19): siRNA sense strand
ccauggauauccugcagau

SEQ ID NO: 213844 - RNA, 19 nt, Homo sapiens
  misc_RNA (1)...(19): siRNA sense strand
ggcaucauuucccugugua

SEQ ID NO: 213845 - RNA, 19 nt, Homo sapiens
  misc_RNA (1)...(19): siRNA sense strand
uggauauccugcagauuau

SEQ ID NO: 213846 - RNA, 19 nt, Homo sapiens
  misc_RNA (1)...(19): siRNA sense strand
ggaagacaaguacagauac

SEQ ID NO: 213847 - RNA, 19 nt, Homo sapiens
  misc_RNA (1)...(19): siRNA sense strand
ugcaaagaguguccaauca

SEQ ID NO: 213848 - RNA, 19 nt, Homo sapiens
  misc_RNA (1)...(19): siRNA sense strand
guggauaugugucugaacu

SEQ ID NO: 213849 - RNA, 19 nt, Homo sapiens
  misc_RNA (1)...(19): siRNA sense strand
acuggcugcugaauguuua

SEQ ID NO: 213850 - RNA, 19 nt, Homo sapiens
  misc_RNA (1)...(19): siRNA sense strand
acuaucccaugguggaaua

SEQ ID NO: 213851 - RNA, 19 nt, Homo sapiens
  misc_RNA (1)...(19): siRNA sense strand
ccggagcugcuuccaauuu

SEQ ID NO: 213852 - RNA, 19 nt, Homo sapiens
  misc_RNA (1)...(19): siRNA sense strand
ccaaauuccaagacaguug

SEQ ID NO: 213853 - RNA, 19 nt, Homo sapiens
  misc_RNA (1)...(19): siRNA sense strand
cagaaacugccaagcauca

SEQ ID NO: 213854 - RNA, 19 nt, Homo sapiens
  misc_RNA (1)...(19): siRNA sense strand
uaugacaucugccaaagcu

SEQ ID NO: 213855 - RNA, 19 nt, Homo sapiens
  misc_RNA (1)...(19): siRNA sense strand
aaugucagauucucagcuu

SEQ ID NO: 213856 - RNA, 19 nt, Homo sapiens
  misc_RNA (1)...(19): siRNA sense strand
ucgagacuuugccaaggua

SEQ ID NO: 213857 - RNA, 19 nt, Homo sapiens
  misc_RNA (1)...(19): siRNA sense strand
gcaaaaggccauaaaaugc

SEQ ID NO: 213858 - RNA, 19 nt, Homo sapiens
  misc_RNA (1)...(19): siRNA sense strand
cugcaugauucuauccaaa

SEQ ID NO: 213859 - RNA, 19 nt, Homo sapiens
  misc_RNA (1)...(19): siRNA sense strand
uaaagcacauuuggaagac

SEQ ID NO: 213860 - RNA, 19 nt, Homo sapiens
  misc_RNA (1)...(19): siRNA sense strand
acaggagucuaaagcacuu

SEQ ID NO: 213861 - RNA, 19 nt, Homo sapiens
  misc_RNA (1)...(19): siRNA sense strand
acagauaccuuuucaagca

SEQ ID NO: 213862 - RNA, 19 nt, Homo sapiens
  misc_RNA (1)...(19): siRNA sense strand
aagcacauuuggaagacaa

SEQ ID NO: 213863 - RNA, 19 nt, Homo sapiens
  misc_RNA (1)...(19): siRNA sense strand
gcuaauaauaagccagaga

SEQ ID NO: 213864 - RNA, 19 nt, Homo sapiens
  misc_RNA (1)...(19): siRNA sense strand
caagagcacaacaauuugg

SEQ ID NO: 213865 - RNA, 19 nt, Homo sapiens
  misc_RNA (1)...(19): siRNA sense strand
ccugucagcugcaugugau

SEQ ID NO: 213866 - RNA, 19 nt, Homo sapiens
  misc_RNA (1)...(19): siRNA sense strand
gcugcugaauguuuaugau

SEQ ID NO: 213867 - RNA, 19 nt, Homo sapiens
  misc_RNA (1)...(19): siRNA sense strand
acagagcucuaccagucuu

SEQ ID NO: 213868 - RNA, 19 nt, Homo sapiens
  misc_RNA (1)...(19): siRNA sense strand
acaguugggugaaguugca

SEQ ID NO: 213869 - RNA, 19 nt, Homo sapiens
  misc_RNA (1)...(19): siRNA sense strand
guuugaccacuauuuauga

SEQ ID NO: 213870 - RNA, 19 nt, Homo sapiens
  misc_RNA (1)...(19): siRNA sense strand
gcuuauaggacugccauga

SEQ ID NO: 213871 - RNA, 19 nt, Homo sapiens
  misc_RNA (1)...(19): siRNA sense strand
caucaggccaaauguaaca

SEQ ID NO: 213872 - RNA, 19 nt, Homo sapiens
  misc_RNA (1)...(19): siRNA sense strand
gauucuauccaaauuccaa

SEQ ID NO: 213873 - RNA, 19 nt, Homo sapiens
  misc_RNA (1)...(19): siRNA sense strand
ggcaaguucaacaggauuu

SEQ ID NO: 213874 - RNA, 19 nt, Homo sapiens
  misc_RNA (1)...(19): siRNA sense strand
gaacuggcugcugaauguu

SEQ ID NO: 213875 - RNA, 19 nt, Homo sapiens
  misc_RNA (1)...(19): siRNA sense strand
cugcugaauguuuaugaua

SEQ ID NO: 213876 - RNA, 19 nt, Homo sapiens
  misc_RNA (1)...(19): siRNA sense strand
aagcaucaggccaaaugua

SEQ ID NO: 213877 - RNA, 19 nt, Homo sapiens
  misc_RNA (1)...(19): siRNA sense strand
uggcaucauuucccugugu

SEQ ID NO: 213878 - RNA, 19 nt, Homo sapiens
  misc_RNA (1)...(19): siRNA sense strand
ccaugaaacuccgaagacu

SEQ ID NO: 213879 - RNA, 19 nt, Homo sapiens
  misc_RNA (1)...(19): siRNA sense strand
auaauaagccagagaucga

SEQ ID NO: 213880 - RNA, 19 nt, Homo sapiens
  misc_RNA (1)...(19): siRNA sense strand
cuaauaauaagccagagau

SEQ ID NO: 213881 - RNA, 19 nt, Homo sapiens
  misc_RNA (1)...(19): siRNA sense strand
ugggugaaguugcauccuu

SEQ ID NO: 213882 - RNA, 19 nt, Homo sapiens
  misc_RNA (1)...(19): siRNA sense strand
caucauuucccuguguaaa

SEQ ID NO: 213883 - RNA, 19 nt, Homo sapiens
  misc_RNA (1)...(19): siRNA sense strand
gcguggauaugugucugaa

SEQ ID NO: 213884 - RNA, 19 nt, Homo sapiens
  misc_RNA (1)...(19): siRNA sense strand
gcacuaucccaugguggaa

SEQ ID NO: 213885 - RNA, 19 nt, Homo sapiens
  misc_RNA (1)...(19): siRNA sense strand
gagccugucagcugcaugu

SEQ ID NO: 213886 - RNA, 19 nt, Homo sapiens
  misc_RNA (1)...(19): siRNA sense strand
guacagauaccuuuucaag

SEQ ID NO: 213887 - RNA, 19 nt, Homo sapiens
  misc_RNA (1)...(19): siRNA sense strand
gucccucucugcguggaua

SEQ ID NO: 213888 - RNA, 19 nt, Homo sapiens
  misc_RNA (1)...(19): siRNA sense strand
ggagcugcuuccaauuugc

SEQ ID NO: 213889 - RNA, 19 nt, Homo sapiens
  misc_RNA (1)...(19): siRNA sense strand
uuagcugaccugaauaaug

SEQ ID NO: 213890 - RNA, 19 nt, Homo sapiens
  misc_RNA (1)...(19): siRNA sense strand
guggcaaguucaacaggau

SEQ ID NO: 213891 - RNA, 19 nt, Homo sapiens
  misc_RNA (1)...(19): siRNA sense strand
acaacaauuuggucaacgu

SEQ ID NO: 213892 - RNA, 19 nt, Homo sapiens
  misc_RNA (1)...(19): siRNA sense strand
gacuacaucaggagaagau

SEQ ID NO: 213893 - RNA, 19 nt, Homo sapiens
  misc_RNA (1)...(19): siRNA sense strand
uaauaagccagagaucgaa

SEQ ID NO: 213894 - RNA, 19 nt, Homo sapiens
  misc_RNA (1)...(19): siRNA sense strand
ugucagauucucagcuuau

SEQ ID NO: 213895 - RNA, 19 nt, Homo sapiens
  misc_RNA (1)...(19): siRNA sense strand
ggauauccugcagauuauu

SEQ ID NO: 213896 - RNA, 19 nt, Homo sapiens
  misc_RNA (1)...(19): siRNA sense strand
agcaucaggccaaauguaa

SEQ ID NO: 213897 - RNA, 19 nt, Homo sapiens
  misc_RNA (1)...(19): siRNA sense strand
gcccuuugcuuggaucucu

SEQ ID NO: 213898 - RNA, 19 nt, Homo sapiens
  misc_RNA (1)...(19): siRNA sense strand
gcugaauguuuaugauacg

SEQ ID NO: 213899 - RNA, 19 nt, Homo sapiens
  misc_RNA (1)...(19): siRNA sense strand
agacuuugccaagguacua

SEQ ID NO: 213900 - RNA, 19 nt, Homo sapiens
  misc_RNA (1)...(19): siRNA sense strand
caagcaaguggcaaguuca

SEQ ID NO: 213901 - RNA, 19 nt, Homo sapiens
  misc_RNA (1)...(19): siRNA sense strand
agacaaguacagauaccuu

SEQ ID NO: 213902 - RNA, 19 nt, Homo sapiens
  misc_RNA (1)...(19): siRNA sense strand
gcaucauuucccuguguaa

SEQ ID NO: 213903 - RNA, 19 nt, Homo sapiens
  misc_RNA (1)...(19): siRNA sense strand
cugcaaagaguguccaauc

SEQ ID NO: 213904 - RNA, 19 nt, Homo sapiens
  misc_RNA (1)...(19): siRNA sense strand
cuuauaggacugccaugaa

SEQ ID NO: 213905 - RNA, 19 nt, Homo sapiens
  misc_RNA (1)...(19): siRNA sense strand
caaagaguguccaaucauu

SEQ ID NO: 213906 - RNA, 19 nt, Homo sapiens
  misc_RNA (1)...(19): siRNA sense strand
uagcugaccugaauaaugu

SEQ ID NO: 213907 - RNA, 19 nt, Homo sapiens
  misc_RNA (1)...(19): siRNA sense strand
gcaugauucuauccaaauu

SEQ ID NO: 213908 - RNA, 19 nt, Homo sapiens
  misc_RNA (1)...(19): siRNA sense strand
ugaacuggcugcugaaugu

SEQ ID NO: 213909 - RNA, 19 nt, Homo sapiens
  misc_RNA (1)...(19): siRNA sense strand
gauauccugcagauuauua

SEQ ID NO: 213910 - RNA, 19 nt, Homo sapiens
  misc_RNA (1)...(19): siRNA sense strand
gagaagauguucgagacuu

SEQ ID NO: 213911 - RNA, 19 nt, Homo sapiens
  misc_RNA (1)...(19): siRNA sense strand
gcacuuuaauuaugacauc

SEQ ID NO: 213912 - RNA, 19 nt, Homo sapiens
  misc_RNA (1)...(19): siRNA sense strand
guaaagcacauuuggaaga

SEQ ID NO: 213913 - RNA, 19 nt, Homo sapiens
  misc_RNA (1)...(19): siRNA sense strand
gaauauugcacuccgacua

SEQ ID NO: 213914 - RNA, 19 nt, Homo sapiens
  misc_RNA (1)...(19): siRNA sense strand
uuauaggacugccaugaaa

SEQ ID NO: 213915 - RNA, 19 nt, Homo sapiens
  misc_RNA (1)...(19): siRNA sense strand
gggugaaguugcauccuuu

SEQ ID NO: 213916 - RNA, 19 nt, Homo sapiens
  misc_RNA (1)...(19): siRNA sense strand
gcaagagcacaacaauuug

SEQ ID NO: 213917 - RNA, 19 nt, Homo sapiens
  misc_RNA (1)...(19): siRNA sense strand
gcacaacaauuuggucaac

SEQ ID NO: 213918 - RNA, 19 nt, Homo sapiens
  misc_RNA (1)...(19): siRNA sense strand
agcaagagcacaacaauuu

SEQ ID NO: 213919 - RNA, 19 nt, Homo sapiens
  misc_RNA (1)...(19): siRNA sense strand
agaagauguucgagacuuu

SEQ ID NO: 213920 - RNA, 19 nt, Homo sapiens
  misc_RNA (1)...(19): siRNA sense strand
gagcaagagcacaacaauu

SEQ ID NO: 213921 - RNA, 19 nt, Homo sapiens
  misc_RNA (1)...(19): siRNA sense strand
ucaagcaaguggcaaguuc

SEQ ID NO: 213922 - RNA, 19 nt, Homo sapiens
  misc_RNA (1)...(19): siRNA sense strand
ccacgagacucaaacaacu

SEQ ID NO: 213923 - RNA, 19 nt, Homo sapiens
  misc_RNA (1)...(19): siRNA sense strand
cagcacaaccucaagcaaa

SEQ ID NO: 213924 - RNA, 19 nt, Homo sapiens
  misc_RNA (1)...(19): siRNA sense strand
gcaaagaguguccaaucau

SEQ ID NO: 213925 - RNA, 19 nt, Homo sapiens
  misc_RNA (1)...(19): siRNA sense strand
auggauauccugcagauua

SEQ ID NO: 213926 - RNA, 19 nt, Homo sapiens
  misc_RNA (1)...(19): siRNA sense strand
uguaacaucugcaaagagu

SEQ ID NO: 213927 - RNA, 19 nt, Homo sapiens
  misc_RNA (1)...(19): siRNA sense strand
guccggagcugcuuccaau

SEQ ID NO: 213928 - RNA, 19 nt, Homo sapiens
  misc_RNA (1)...(19): siRNA sense strand
gcaaguggcaaguucaaca

SEQ ID NO: 213929 - RNA, 19 nt, Homo sapiens
  misc_RNA (1)...(19): siRNA sense strand
gcuuccaauuugcuaauaa

SEQ ID NO: 213930 - RNA, 19 nt, Homo sapiens
  misc_RNA (1)...(19): siRNA sense strand
uggaagacaaguacagaua

SEQ ID NO: 213931 - RNA, 19 nt, Homo sapiens
  misc_RNA (1)...(19): siRNA sense strand
ggauccguguccugucuuu

SEQ ID NO: 213932 - RNA, 19 nt, Homo sapiens
  misc_RNA (1)...(19): siRNA sense strand
gucuuuagcugaccugaau

SEQ ID NO: 213933 - RNA, 19 nt, Homo sapiens
  misc_RNA (1)...(19): siRNA sense strand
gacaaguacagauaccuuu

SEQ ID NO: 213934 - RNA, 19 nt, Homo sapiens
  misc_RNA (1)...(19): siRNA sense strand
ccaagcaucaggccaaaug

SEQ ID NO: 213935 - RNA, 19 nt, Homo sapiens
  misc_RNA (1)...(19): siRNA sense strand
ggagcaagagcacaacaau

SEQ ID NO: 213936 - RNA, 19 nt, Homo sapiens
  misc_RNA (1)...(19): siRNA sense strand
guguaaagcacauuuggaa

SEQ ID NO: 213937 - RNA, 19 nt, Homo sapiens
  misc_RNA (1)...(19): siRNA sense strand
caagacaguugggugaagu

SEQ ID NO: 213938 - RNA, 19 nt, Homo sapiens
  misc_RNA (1)...(19): siRNA sense strand
gaagauguucgagacuuug

SEQ ID NO: 213939 - RNA, 19 nt, Homo sapiens
  misc_RNA (1)...(19): siRNA sense strand
gucagauucucagcuuaua

SEQ ID NO: 213940 - RNA, 19 nt, Homo sapiens
  misc_RNA (1)...(19): siRNA sense strand
uaacaucugcaaagagugu

SEQ ID NO: 213941 - RNA, 19 nt, Homo sapiens
  misc_RNA (1)...(19): siRNA sense strand
cggagcugcuuccaauuug

SEQ ID NO: 213942 - RNA, 19 nt, Homo sapiens
  misc_RNA (1)...(19): siRNA sense strand
gaagacaaguacagauacc

SEQ ID NO: 213943 - RNA, 19 nt, Homo sapiens
  misc_RNA (1)...(19): siRNA sense strand
ccauggauauccugcagau

SEQ ID NO: 213944 - RNA, 19 nt, Homo sapiens
  misc_RNA (1)...(19): siRNA sense strand
ggcaucauuucccugugua

SEQ ID NO: 213945 - RNA, 19 nt, Homo sapiens
  misc_RNA (1)...(19): siRNA sense strand
uggauauccugcagauuau

SEQ ID NO: 213946 - RNA, 19 nt, Homo sapiens
  misc_RNA (1)...(19): siRNA sense strand
ggaagacaaguacagauac

SEQ ID NO: 213947 - RNA, 19 nt, Homo sapiens
  misc_RNA (1)...(19): siRNA sense strand
ugcaaagaguguccaauca

SEQ ID NO: 213948 - RNA, 19 nt, Homo sapiens
  misc_RNA (1)...(19): siRNA sense strand
guggauaugugucugaacu

SEQ ID NO: 213949 - RNA, 19 nt, Homo sapiens
  misc_RNA (1)...(19): siRNA sense strand
acuggcugcugaauguuua

SEQ ID NO: 213950 - RNA, 19 nt, Homo sapiens
  misc_RNA (1)...(19): siRNA sense strand
acuaucccaugguggaaua

SEQ ID NO: 213951 - RNA, 19 nt, Homo sapiens
  misc_RNA (1)...(19): siRNA sense strand
ccggagcugcuuccaauuu

SEQ ID NO: 213952 - RNA, 19 nt, Homo sapiens
  misc_RNA (1)...(19): siRNA sense strand
ccaaauuccaagacaguug

SEQ ID NO: 213953 - RNA, 19 nt, Homo sapiens
  misc_RNA (1)...(19): siRNA sense strand
cagaaacugccaagcauca

SEQ ID NO: 213954 - RNA, 19 nt, Homo sapiens
  misc_RNA (1)...(19): siRNA sense strand
uaugacaucugccaaagcu

SEQ ID NO: 213955 - RNA, 19 nt, Homo sapiens
  misc_RNA (1)...(19): siRNA sense strand
aaugucagauucucagcuu

SEQ ID NO: 213956 - RNA, 19 nt, Homo sapiens
  misc_RNA (1)...(19): siRNA sense strand
ucgagacuuugccaaggua

SEQ ID NO: 213957 - RNA, 19 nt, Homo sapiens
  misc_RNA (1)...(19): siRNA sense strand
gcaaaaggccauaaaaugc

SEQ ID NO: 213958 - RNA, 19 nt, Homo sapiens
  misc_RNA (1)...(19): siRNA sense strand
cugcaugauucuauccaaa

SEQ ID NO: 213959 - RNA, 19 nt, Homo sapiens
  misc_RNA (1)...(19): siRNA sense strand
uaaagcacauuuggaagac

SEQ ID NO: 213960 - RNA, 19 nt, Homo sapiens
  misc_RNA (1)...(19): siRNA sense strand
acaggagucuaaagcacuu

SEQ ID NO: 213961 - RNA, 19 nt, Homo sapiens
  misc_RNA (1)...(19): siRNA sense strand
acagauaccuuuucaagca

SEQ ID NO: 213962 - RNA, 19 nt, Homo sapiens
  misc_RNA (1)...(19): siRNA sense strand
aagcacauuuggaagacaa

SEQ ID NO: 213963 - RNA, 19 nt, Homo sapiens
  misc_RNA (1)...(19): siRNA sense strand
gcuaauaauaagccagaga

SEQ ID NO: 213964 - RNA, 19 nt, Homo sapiens
  misc_RNA (1)...(19): siRNA sense strand
caagagcacaacaauuugg

SEQ ID NO: 213965 - RNA, 19 nt, Homo sapiens
  misc_RNA (1)...(19): siRNA sense strand
ccugucagcugcaugugau

SEQ ID NO: 213966 - RNA, 19 nt, Homo sapiens
  misc_RNA (1)...(19): siRNA sense strand
gcugcugaauguuuaugau

SEQ ID NO: 213967 - RNA, 19 nt, Homo sapiens
  misc_RNA (1)...(19): siRNA sense strand
acagagcucuaccagucuu

SEQ ID NO: 213968 - RNA, 19 nt, Homo sapiens
  misc_RNA (1)...(19): siRNA sense strand
acaguugggugaaguugca

SEQ ID NO: 213969 - RNA, 19 nt, Homo sapiens
  misc_RNA (1)...(19): siRNA sense strand
guuugaccacuauuuauga

SEQ ID NO: 213970 - RNA, 19 nt, Homo sapiens
  misc_RNA (1)...(19): siRNA sense strand
gcuuauaggacugccauga

SEQ ID NO: 213971 - RNA, 19 nt, Homo sapiens
  misc_RNA (1)...(19): siRNA sense strand
caucaggccaaauguaaca

SEQ ID NO: 213972 - RNA, 19 nt, Homo sapiens
  misc_RNA (1)...(19): siRNA sense strand
gauucuauccaaauuccaa

SEQ ID NO: 213973 - RNA, 19 nt, Homo sapiens
  misc_RNA (1)...(19): siRNA sense strand
ggcaaguucaacaggauuu

SEQ ID NO: 213974 - RNA, 19 nt, Homo sapiens
  misc_RNA (1)...(19): siRNA sense strand
gaacuggcugcugaauguu

SEQ ID NO: 213975 - RNA, 19 nt, Homo sapiens
  misc_RNA (1)...(19): siRNA sense strand
cugcugaauguuuaugaua

SEQ ID NO: 213976 - RNA, 19 nt, Homo sapiens
  misc_RNA (1)...(19): siRNA sense strand
aagcaucaggccaaaugua

SEQ ID NO: 213977 - RNA, 19 nt, Homo sapiens
  misc_RNA (1)...(19): siRNA sense strand
uggcaucauuucccugugu

SEQ ID NO: 213978 - RNA, 19 nt, Homo sapiens
  misc_RNA (1)...(19): siRNA sense strand
ccaugaaacuccgaagacu

SEQ ID NO: 213979 - RNA, 19 nt, Homo sapiens
  misc_RNA (1)...(19): siRNA sense strand
auaauaagccagagaucga

SEQ ID NO: 213980 - RNA, 19 nt, Homo sapiens
  misc_RNA (1)...(19): siRNA sense strand
cuaauaauaagccagagau

SEQ ID NO: 213981 - RNA, 19 nt, Homo sapiens
  misc_RNA (1)...(19): siRNA sense strand
ugggugaaguugcauccuu

SEQ ID NO: 213982 - RNA, 19 nt, Homo sapiens
  misc_RNA (1)...(19): siRNA sense strand
caucauuucccuguguaaa

SEQ ID NO: 213983 - RNA, 19 nt, Homo sapiens
  misc_RNA (1)...(19): siRNA sense strand
gcguggauaugugucugaa

SEQ ID NO: 213984 - RNA, 19 nt, Homo sapiens
  misc_RNA (1)...(19): siRNA sense strand
gcacuaucccaugguggaa

SEQ ID NO: 213985 - RNA, 19 nt, Homo sapiens
  misc_RNA (1)...(19): siRNA sense strand
gagccugucagcugcaugu

SEQ ID NO: 213986 - RNA, 19 nt, Homo sapiens
  misc_RNA (1)...(19): siRNA sense strand
guacagauaccuuuucaag

SEQ ID NO: 213987 - RNA, 19 nt, Homo sapiens
  misc_RNA (1)...(19): siRNA sense strand
gucccucucugcguggaua

SEQ ID NO: 213988 - RNA, 19 nt, Homo sapiens
  misc_RNA (1)...(19): siRNA sense strand
ggagcugcuuccaauuugc

SEQ ID NO: 213989 - RNA, 19 nt, Homo sapiens
  misc_RNA (1)...(19): siRNA sense strand
uuagcugaccugaauaaug

SEQ ID NO: 213990 - RNA, 19 nt, Homo sapiens
  misc_RNA (1)...(19): siRNA sense strand
guggcaaguucaacaggau

SEQ ID NO: 213991 - RNA, 19 nt, Homo sapiens
  misc_RNA (1)...(19): siRNA sense strand
acaacaauuuggucaacgu

SEQ ID NO: 213992 - RNA, 19 nt, Homo sapiens
  misc_RNA (1)...(19): siRNA sense strand
gacuacaucaggagaagau

SEQ ID NO: 213993 - RNA, 19 nt, Homo sapiens
  misc_RNA (1)...(19): siRNA sense strand
uaauaagccagagaucgaa

SEQ ID NO: 213994 - RNA, 19 nt, Homo sapiens
  misc_RNA (1)...(19): siRNA sense strand
ugucagauucucagcuuau

SEQ ID NO: 213995 - RNA, 19 nt, Homo sapiens
  misc_RNA (1)...(19): siRNA sense strand
ggauauccugcagauuauu

SEQ ID NO: 213996 - RNA, 19 nt, Homo sapiens
  misc_RNA (1)...(19): siRNA sense strand
agcaucaggccaaauguaa

SEQ ID NO: 213997 - RNA, 19 nt, Homo sapiens
  misc_RNA (1)...(19): siRNA sense strand
gcccuuugcuuggaucucu

SEQ ID NO: 213998 - RNA, 19 nt, Homo sapiens
  misc_RNA (1)...(19): siRNA sense strand
gcugaauguuuaugauacg

SEQ ID NO: 213999 - RNA, 19 nt, Homo sapiens
  misc_RNA (1)...(19): siRNA sense strand
agacuuugccaagguacua

SEQ ID NO: 214000 - RNA, 19 nt, Homo sapiens
  misc_RNA (1)...(19): siRNA sense strand
caagcaaguggcaaguuca

SEQ ID NO: 214001 - RNA, 19 nt, Homo sapiens
  misc_RNA (1)...(19): siRNA sense strand
agacaaguacagauaccuu

SEQ ID NO: 214002 - RNA, 19 nt, Homo sapiens
  misc_RNA (1)...(19): siRNA sense strand
gcaucauuucccuguguaa

SEQ ID NO: 214003 - RNA, 19 nt, Homo sapiens
  misc_RNA (1)...(19): siRNA sense strand
cugcaaagaguguccaauc

SEQ ID NO: 214004 - RNA, 19 nt, Homo sapiens
  misc_RNA (1)...(19): siRNA sense strand
cuuauaggacugccaugaa

SEQ ID NO: 214005 - RNA, 19 nt, Homo sapiens
  misc_RNA (1)...(19): siRNA sense strand
caaagaguguccaaucauu

SEQ ID NO: 214006 - RNA, 19 nt, Homo sapiens
  misc_RNA (1)...(19): siRNA sense strand
uagcugaccugaauaaugu

SEQ ID NO: 214007 - RNA, 19 nt, Homo sapiens
  misc_RNA (1)...(19): siRNA sense strand
gcaugauucuauccaaauu

SEQ ID NO: 214008 - RNA, 19 nt, Homo sapiens
  misc_RNA (1)...(19): siRNA sense strand
ugaacuggcugcugaaugu

SEQ ID NO: 214009 - RNA, 19 nt, Homo sapiens
  misc_RNA (1)...(19): siRNA sense strand
gauauccugcagauuauua

SEQ ID NO: 214010 - RNA, 19 nt, Homo sapiens
  misc_RNA (1)...(19): siRNA sense strand
gagaagauguucgagacuu

SEQ ID NO: 214011 - RNA, 19 nt, Homo sapiens
  misc_RNA (1)...(19): siRNA sense strand
gcacuuuaauuaugacauc

SEQ ID NO: 214012 - RNA, 19 nt, Homo sapiens
  misc_RNA (1)...(19): siRNA sense strand
guaaagcacauuuggaaga

SEQ ID NO: 214013 - RNA, 19 nt, Homo sapiens
  misc_RNA (1)...(19): siRNA sense strand
gaauauugcacuccgacua

SEQ ID NO: 214014 - RNA, 19 nt, Homo sapiens
  misc_RNA (1)...(19): siRNA sense strand
uuauaggacugccaugaaa

SEQ ID NO: 214015 - RNA, 19 nt, Homo sapiens
  misc_RNA (1)...(19): siRNA sense strand
gggugaaguugcauccuuu

SEQ ID NO: 214016 - RNA, 19 nt, Homo sapiens
  misc_RNA (1)...(19): siRNA sense strand
gcaagagcacaacaauuug

SEQ ID NO: 214017 - RNA, 19 nt, Homo sapiens
  misc_RNA (1)...(19): siRNA sense strand
gcacaacaauuuggucaac

SEQ ID NO: 214018 - RNA, 19 nt, Homo sapiens
  misc_RNA (1)...(19): siRNA sense strand
agcaagagcacaacaauuu

SEQ ID NO: 214019 - RNA, 19 nt, Homo sapiens
  misc_RNA (1)...(19): siRNA sense strand
agaagauguucgagacuuu

SEQ ID NO: 214020 - RNA, 19 nt, Homo sapiens
  misc_RNA (1)...(19): siRNA sense strand
gagcaagagcacaacaauu

SEQ ID NO: 214021 - RNA, 19 nt, Homo sapiens
  misc_RNA (1)...(19): siRNA sense strand
ucaagcaaguggcaaguuc

SEQ ID NO: 214022 - RNA, 19 nt, Homo sapiens
  misc_RNA (1)...(19): siRNA sense strand
ccacgagacucaaacaacu

SEQ ID NO: 214023 - RNA, 19 nt, Homo sapiens
  misc_RNA (1)...(19): siRNA sense strand
cagcacaaccucaagcaaa

SEQ ID NO: 214024 - RNA, 19 nt, Homo sapiens
  misc_RNA (1)...(19): siRNA sense strand
gcaaagaguguccaaucau

SEQ ID NO: 214025 - RNA, 19 nt, Homo sapiens
  misc_RNA (1)...(19): siRNA sense strand
auggauauccugcagauua

SEQ ID NO: 214026 - RNA, 19 nt, Homo sapiens
  misc_RNA (1)...(19): siRNA sense strand
uguaacaucugcaaagagu

SEQ ID NO: 214027 - RNA, 19 nt, Homo sapiens
  misc_RNA (1)...(19): siRNA sense strand
guccggagcugcuuccaau

SEQ ID NO: 214028 - RNA, 19 nt, Homo sapiens
  misc_RNA (1)...(19): siRNA sense strand
gcaaguggcaaguucaaca

SEQ ID NO: 214029 - RNA, 19 nt, Homo sapiens
  misc_RNA (1)...(19): siRNA sense strand
gcuuccaauuugcuaauaa

SEQ ID NO: 214030 - RNA, 19 nt, Homo sapiens
  misc_RNA (1)...(19): siRNA sense strand
uggaagacaaguacagaua

SEQ ID NO: 214031 - RNA, 19 nt, Homo sapiens
  misc_RNA (1)...(19): siRNA sense strand
ggauccguguccugucuuu

SEQ ID NO: 214032 - RNA, 19 nt, Homo sapiens
  misc_RNA (1)...(19): siRNA sense strand
gucuuuagcugaccugaau

SEQ ID NO: 214033 - RNA, 19 nt, Homo sapiens
  misc_RNA (1)...(19): siRNA sense strand
gacaaguacagauaccuuu

SEQ ID NO: 214034 - RNA, 19 nt, Homo sapiens
  misc_RNA (1)...(19): siRNA sense strand
ccaagcaucaggccaaaug

SEQ ID NO: 214035 - RNA, 19 nt, Homo sapiens
  misc_RNA (1)...(19): siRNA sense strand
ggagcaagagcacaacaau

SEQ ID NO: 214036 - RNA, 19 nt, Homo sapiens
  misc_RNA (1)...(19): siRNA sense strand
guguaaagcacauuuggaa

SEQ ID NO: 214037 - RNA, 19 nt, Homo sapiens
  misc_RNA (1)...(19): siRNA sense strand
caagacaguugggugaagu

SEQ ID NO: 214038 - RNA, 19 nt, Homo sapiens
  misc_RNA (1)...(19): siRNA sense strand
gaagauguucgagacuuug

SEQ ID NO: 214039 - RNA, 19 nt, Homo sapiens
  misc_RNA (1)...(19): siRNA sense strand
gucagauucucagcuuaua

SEQ ID NO: 214040 - RNA, 19 nt, Homo sapiens
  misc_RNA (1)...(19): siRNA sense strand
uaacaucugcaaagagugu

SEQ ID NO: 214041 - RNA, 19 nt, Homo sapiens
  misc_RNA (1)...(19): siRNA sense strand
cggagcugcuuccaauuug

SEQ ID NO: 214042 - RNA, 19 nt, Homo sapiens
  misc_RNA (1)...(19): siRNA sense strand
gaagacaaguacagauacc

SEQ ID NO: 214043 - RNA, 19 nt, Homo sapiens
  misc_RNA (1)...(19): siRNA sense strand
ccauggauauccugcagau

SEQ ID NO: 214044 - RNA, 19 nt, Homo sapiens
  misc_RNA (1)...(19): siRNA sense strand
ggcaucauuucccugugua

SEQ ID NO: 214045 - RNA, 19 nt, Homo sapiens
  misc_RNA (1)...(19): siRNA sense strand
uggauauccugcagauuau

SEQ ID NO: 214046 - RNA, 19 nt, Homo sapiens
  misc_RNA (1)...(19): siRNA sense strand
ggaagacaaguacagauac

SEQ ID NO: 214047 - RNA, 19 nt, Homo sapiens
  misc_RNA (1)...(19): siRNA sense strand
ugcaaagaguguccaauca

SEQ ID NO: 214048 - RNA, 19 nt, Homo sapiens
  misc_RNA (1)...(19): siRNA sense strand
guggauaugugucugaacu

SEQ ID NO: 214049 - RNA, 19 nt, Homo sapiens
  misc_RNA (1)...(19): siRNA sense strand
acuggcugcugaauguuua

SEQ ID NO: 214050 - RNA, 19 nt, Homo sapiens
  misc_RNA (1)...(19): siRNA sense strand
acuaucccaugguggaaua

SEQ ID NO: 214051 - RNA, 19 nt, Homo sapiens
  misc_RNA (1)...(19): siRNA sense strand
ccggagcugcuuccaauuu

SEQ ID NO: 214052 - RNA, 19 nt, Homo sapiens
  misc_RNA (1)...(19): siRNA sense strand
ccaaauuccaagacaguug

SEQ ID NO: 214053 - RNA, 19 nt, Homo sapiens
  misc_RNA (1)...(19): siRNA sense strand
cagaaacugccaagcauca

SEQ ID NO: 214054 - RNA, 19 nt, Homo sapiens
  misc_RNA (1)...(19): siRNA sense strand
uaugacaucugccaaagcu

SEQ ID NO: 214055 - RNA, 19 nt, Homo sapiens
  misc_RNA (1)...(19): siRNA sense strand
aaugucagauucucagcuu

SEQ ID NO: 214056 - RNA, 19 nt, Homo sapiens
  misc_RNA (1)...(19): siRNA sense strand
ucgagacuuugccaaggua

SEQ ID NO: 214057 - RNA, 19 nt, Homo sapiens
  misc_RNA (1)...(19): siRNA sense strand
gcaaaaggccauaaaaugc

SEQ ID NO: 214058 - RNA, 19 nt, Homo sapiens
  misc_RNA (1)...(19): siRNA sense strand
cugcaugauucuauccaaa

SEQ ID NO: 214059 - RNA, 19 nt, Homo sapiens
  misc_RNA (1)...(19): siRNA sense strand
uaaagcacauuuggaagac

SEQ ID NO: 214060 - RNA, 19 nt, Homo sapiens
  misc_RNA (1)...(19): siRNA sense strand
acaggagucuaaagcacuu

SEQ ID NO: 214061 - RNA, 19 nt, Homo sapiens
  misc_RNA (1)...(19): siRNA sense strand
acagauaccuuuucaagca

SEQ ID NO: 214062 - RNA, 19 nt, Homo sapiens
  misc_RNA (1)...(19): siRNA sense strand
aagcacauuuggaagacaa

SEQ ID NO: 214063 - RNA, 19 nt, Homo sapiens
  misc_RNA (1)...(19): siRNA sense strand
gcuaauaauaagccagaga

SEQ ID NO: 214064 - RNA, 19 nt, Homo sapiens
  misc_RNA (1)...(19): siRNA sense strand
caagagcacaacaauuugg

SEQ ID NO: 214065 - RNA, 19 nt, Homo sapiens
  misc_RNA (1)...(19): siRNA sense strand
ccugucagcugcaugugau

SEQ ID NO: 214066 - RNA, 19 nt, Homo sapiens
  misc_RNA (1)...(19): siRNA sense strand
gcugcugaauguuuaugau

SEQ ID NO: 214067 - RNA, 19 nt, Homo sapiens
  misc_RNA (1)...(19): siRNA sense strand
acagagcucuaccagucuu

SEQ ID NO: 214068 - RNA, 19 nt, Homo sapiens
  misc_RNA (1)...(19): siRNA sense strand
acaguugggugaaguugca

SEQ ID NO: 214069 - RNA, 19 nt, Homo sapiens
  misc_RNA (1)...(19): siRNA sense strand
guuugaccacuauuuauga

SEQ ID NO: 214070 - RNA, 19 nt, Homo sapiens
  misc_RNA (1)...(19): siRNA sense strand
gcuuauaggacugccauga

SEQ ID NO: 214071 - RNA, 19 nt, Homo sapiens
  misc_RNA (1)...(19): siRNA sense strand
caucaggccaaauguaaca

SEQ ID NO: 214072 - RNA, 19 nt, Homo sapiens
  misc_RNA (1)...(19): siRNA sense strand
gauucuauccaaauuccaa

SEQ ID NO: 214073 - RNA, 19 nt, Homo sapiens
  misc_RNA (1)...(19): siRNA sense strand
ggcaaguucaacaggauuu

SEQ ID NO: 214074 - RNA, 19 nt, Homo sapiens
  misc_RNA (1)...(19): siRNA sense strand
gaacuggcugcugaauguu

SEQ ID NO: 214075 - RNA, 19 nt, Homo sapiens
  misc_RNA (1)...(19): siRNA sense strand
cugcugaauguuuaugaua

SEQ ID NO: 214076 - RNA, 19 nt, Homo sapiens
  misc_RNA (1)...(19): siRNA sense strand
aagcaucaggccaaaugua

SEQ ID NO: 214077 - RNA, 19 nt, Homo sapiens
  misc_RNA (1)...(19): siRNA sense strand
uggcaucauuucccugugu

SEQ ID NO: 214078 - RNA, 19 nt, Homo sapiens
  misc_RNA (1)...(19): siRNA sense strand
ccaugaaacuccgaagacu

SEQ ID NO: 214079 - RNA, 19 nt, Homo sapiens
  misc_RNA (1)...(19): siRNA sense strand
auaauaagccagagaucga

SEQ ID NO: 214080 - RNA, 19 nt, Homo sapiens
  misc_RNA (1)...(19): siRNA sense strand
cuaauaauaagccagagau

SEQ ID NO: 214081 - RNA, 19 nt, Homo sapiens
  misc_RNA (1)...(19): siRNA sense strand
ugggugaaguugcauccuu

SEQ ID NO: 214082 - RNA, 19 nt, Homo sapiens
  misc_RNA (1)...(19): siRNA sense strand
caucauuucccuguguaaa

SEQ ID NO: 214083 - RNA, 19 nt, Homo sapiens
  misc_RNA (1)...(19): siRNA sense strand
gcguggauaugugucugaa

SEQ ID NO: 214084 - RNA, 19 nt, Homo sapiens
  misc_RNA (1)...(19): siRNA sense strand
gcacuaucccaugguggaa

SEQ ID NO: 214085 - RNA, 19 nt, Homo sapiens
  misc_RNA (1)...(19): siRNA sense strand
gagccugucagcugcaugu

SEQ ID NO: 214086 - RNA, 19 nt, Homo sapiens
  misc_RNA (1)...(19): siRNA sense strand
guacagauaccuuuucaag

SEQ ID NO: 214087 - RNA, 19 nt, Homo sapiens
  misc_RNA (1)...(19): siRNA sense strand
gucccucucugcguggaua

SEQ ID NO: 214088 - RNA, 19 nt, Homo sapiens
  misc_RNA (1)...(19): siRNA sense strand
ggagcugcuuccaauuugc

SEQ ID NO: 214089 - RNA, 19 nt, Homo sapiens
  misc_RNA (1)...(19): siRNA sense strand
uuagcugaccugaauaaug

SEQ ID NO: 214090 - RNA, 19 nt, Homo sapiens
  misc_RNA (1)...(19): siRNA sense strand
guggcaaguucaacaggau

SEQ ID NO: 214091 - RNA, 19 nt, Homo sapiens
  misc_RNA (1)...(19): siRNA sense strand
acaacaauuuggucaacgu

SEQ ID NO: 214092 - RNA, 19 nt, Homo sapiens
  misc_RNA (1)...(19): siRNA sense strand
gacuacaucaggagaagau

SEQ ID NO: 214093 - RNA, 19 nt, Homo sapiens
  misc_RNA (1)...(19): siRNA sense strand
uaauaagccagagaucgaa

SEQ ID NO: 214094 - RNA, 19 nt, Homo sapiens
  misc_RNA (1)...(19): siRNA sense strand
ugucagauucucagcuuau

SEQ ID NO: 214095 - RNA, 19 nt, Homo sapiens
  misc_RNA (1)...(19): siRNA sense strand
ggauauccugcagauuauu

SEQ ID NO: 214096 - RNA, 19 nt, Homo sapiens
  misc_RNA (1)...(19): siRNA sense strand
agcaucaggccaaauguaa

SEQ ID NO: 214097 - RNA, 19 nt, Homo sapiens
  misc_RNA (1)...(19): siRNA sense strand
gcccuuugcuuggaucucu

SEQ ID NO: 214098 - RNA, 19 nt, Homo sapiens
  misc_RNA (1)...(19): siRNA sense strand
gcugaauguuuaugauacg

SEQ ID NO: 214099 - RNA, 19 nt, Homo sapiens
  misc_RNA (1)...(19): siRNA sense strand
agacuuugccaagguacua

SEQ ID NO: 214100 - RNA, 19 nt, Homo sapiens
  misc_RNA (1)...(19): siRNA sense strand
caagcaaguggcaaguuca

SEQ ID NO: 214101 - RNA, 19 nt, Homo sapiens
  misc_RNA (1)...(19): siRNA sense strand
agacaaguacagauaccuu

SEQ ID NO: 214102 - RNA, 19 nt, Homo sapiens
  misc_RNA (1)...(19): siRNA sense strand
gcaucauuucccuguguaa

SEQ ID NO: 214103 - RNA, 19 nt, Homo sapiens
  misc_RNA (1)...(19): siRNA sense strand
cugcaaagaguguccaauc

SEQ ID NO: 214104 - RNA, 19 nt, Homo sapiens
  misc_RNA (1)...(19): siRNA sense strand
cuuauaggacugccaugaa

SEQ ID NO: 214105 - RNA, 19 nt, Homo sapiens
  misc_RNA (1)...(19): siRNA sense strand
caaagaguguccaaucauu

SEQ ID NO: 214106 - RNA, 19 nt, Homo sapiens
  misc_RNA (1)...(19): siRNA sense strand
uagcugaccugaauaaugu

SEQ ID NO: 214107 - RNA, 19 nt, Homo sapiens
  misc_RNA (1)...(19): siRNA sense strand
gcaugauucuauccaaauu

SEQ ID NO: 214108 - RNA, 19 nt, Homo sapiens
  misc_RNA (1)...(19): siRNA sense strand
ugaacuggcugcugaaugu

SEQ ID NO: 214109 - RNA, 19 nt, Homo sapiens
  misc_RNA (1)...(19): siRNA sense strand
gauauccugcagauuauua

SEQ ID NO: 214110 - RNA, 19 nt, Homo sapiens
  misc_RNA (1)...(19): siRNA sense strand
gagaagauguucgagacuu

SEQ ID NO: 214111 - RNA, 19 nt, Homo sapiens
  misc_RNA (1)...(19): siRNA sense strand
gcacuuuaauuaugacauc

SEQ ID NO: 214112 - RNA, 19 nt, Homo sapiens
  misc_RNA (1)...(19): siRNA sense strand
guaaagcacauuuggaaga

SEQ ID NO: 214113 - RNA, 19 nt, Homo sapiens
  misc_RNA (1)...(19): siRNA sense strand
gaauauugcacuccgacua

SEQ ID NO: 214114 - RNA, 19 nt, Homo sapiens
  misc_RNA (1)...(19): siRNA sense strand
uuauaggacugccaugaaa

SEQ ID NO: 214115 - RNA, 19 nt, Homo sapiens
  misc_RNA (1)...(19): siRNA sense strand
gggugaaguugcauccuuu

SEQ ID NO: 214116 - RNA, 19 nt, Homo sapiens
  misc_RNA (1)...(19): siRNA sense strand
gcaagagcacaacaauuug

SEQ ID NO: 214117 - RNA, 19 nt, Homo sapiens
  misc_RNA (1)...(19): siRNA sense strand
gcacaacaauuuggucaac

SEQ ID NO: 214118 - RNA, 19 nt, Homo sapiens
  misc_RNA (1)...(19): siRNA sense strand
agcaagagcacaacaauuu

SEQ ID NO: 214119 - RNA, 19 nt, Homo sapiens
  misc_RNA (1)...(19): siRNA sense strand
agaagauguucgagacuuu

SEQ ID NO: 214120 - RNA, 19 nt, Homo sapiens
  misc_RNA (1)...(19): siRNA sense strand
gagcaagagcacaacaauu

SEQ ID NO: 214121 - RNA, 19 nt, Homo sapiens
  misc_RNA (1)...(19): siRNA sense strand
ucaagcaaguggcaaguuc

SEQ ID NO: 214122 - RNA, 19 nt, Homo sapiens
  misc_RNA (1)...(19): siRNA sense strand
ccacgagacucaaacaacu

SEQ ID NO: 214123 - RNA, 19 nt, Homo sapiens
  misc_RNA (1)...(19): siRNA sense strand
cagcacaaccucaagcaaa

SEQ ID NO: 214124 - RNA, 19 nt, Homo sapiens
  misc_RNA (1)...(19): siRNA sense strand
gcaaagaguguccaaucau

SEQ ID NO: 214125 - RNA, 19 nt, Homo sapiens
  misc_RNA (1)...(19): siRNA sense strand
auggauauccugcagauua

SEQ ID NO: 214126 - RNA, 19 nt, Homo sapiens
  misc_RNA (1)...(19): siRNA sense strand
uguaacaucugcaaagagu

SEQ ID NO: 214127 - RNA, 19 nt, Homo sapiens
  misc_RNA (1)...(19): siRNA sense strand
guccggagcugcuuccaau

SEQ ID NO: 214128 - RNA, 19 nt, Homo sapiens
  misc_RNA (1)...(19): siRNA sense strand
gcaaguggcaaguucaaca

SEQ ID NO: 214129 - RNA, 19 nt, Homo sapiens
  misc_RNA (1)...(19): siRNA sense strand
gcuuccaauuugcuaauaa

SEQ ID NO: 214130 - RNA, 19 nt, Homo sapiens
  misc_RNA (1)...(19): siRNA sense strand
uggaagacaaguacagaua

SEQ ID NO: 214131 - RNA, 19 nt, Homo sapiens
  misc_RNA (1)...(19): siRNA sense strand
ggauccguguccugucuuu

SEQ ID NO: 214132 - RNA, 19 nt, Homo sapiens
  misc_RNA (1)...(19): siRNA sense strand
gucuuuagcugaccugaau

SEQ ID NO: 214133 - RNA, 19 nt, Homo sapiens
  misc_RNA (1)...(19): siRNA sense strand
gacaaguacagauaccuuu

SEQ ID NO: 214134 - RNA, 19 nt, Homo sapiens
  misc_RNA (1)...(19): siRNA sense strand
ccaagcaucaggccaaaug

SEQ ID NO: 214135 - RNA, 19 nt, Homo sapiens
  misc_RNA (1)...(19): siRNA sense strand
ggagcaagagcacaacaau

SEQ ID NO: 214136 - RNA, 19 nt, Homo sapiens
  misc_RNA (1)...(19): siRNA sense strand
guguaaagcacauuuggaa

SEQ ID NO: 214137 - RNA, 19 nt, Homo sapiens
  misc_RNA (1)...(19): siRNA sense strand
caagacaguugggugaagu

SEQ ID NO: 214138 - RNA, 19 nt, Homo sapiens
  misc_RNA (1)...(19): siRNA sense strand
gaagauguucgagacuuug

SEQ ID NO: 214139 - RNA, 19 nt, Homo sapiens
  misc_RNA (1)...(19): siRNA sense strand
gucagauucucagcuuaua

SEQ ID NO: 214140 - RNA, 19 nt, Homo sapiens
  misc_RNA (1)...(19): siRNA sense strand
uaacaucugcaaagagugu

SEQ ID NO: 214141 - RNA, 19 nt, Homo sapiens
  misc_RNA (1)...(19): siRNA sense strand
cggagcugcuuccaauuug

SEQ ID NO: 214142 - RNA, 19 nt, Homo sapiens
  misc_RNA (1)...(19): siRNA sense strand
gaagacaaguacagauacc

SEQ ID NO: 214143 - RNA, 19 nt, Homo sapiens
  misc_RNA (1)...(19): siRNA sense strand
ccauggauauccugcagau

SEQ ID NO: 214144 - RNA, 19 nt, Homo sapiens
  misc_RNA (1)...(19): siRNA sense strand
ggcaucauuucccugugua

SEQ ID NO: 214145 - RNA, 19 nt, Homo sapiens
  misc_RNA (1)...(19): siRNA sense strand
uggauauccugcagauuau

SEQ ID NO: 214146 - RNA, 19 nt, Homo sapiens
  misc_RNA (1)...(19): siRNA sense strand
ggaagacaaguacagauac

SEQ ID NO: 214147 - RNA, 19 nt, Homo sapiens
  misc_RNA (1)...(19): siRNA sense strand
ugcaaagaguguccaauca

SEQ ID NO: 214148 - RNA, 19 nt, Homo sapiens
  misc_RNA (1)...(19): siRNA sense strand
guggauaugugucugaacu

SEQ ID NO: 214149 - RNA, 19 nt, Homo sapiens
  misc_RNA (1)...(19): siRNA sense strand
acuggcugcugaauguuua

SEQ ID NO: 214150 - RNA, 19 nt, Homo sapiens
  misc_RNA (1)...(19): siRNA sense strand
acuaucccaugguggaaua

SEQ ID NO: 214151 - RNA, 19 nt, Homo sapiens
  misc_RNA (1)...(19): siRNA sense strand
ccggagcugcuuccaauuu

SEQ ID NO: 214152 - RNA, 19 nt, Homo sapiens
  misc_RNA (1)...(19): siRNA sense strand
ccaaauuccaagacaguug

SEQ ID NO: 214153 - RNA, 19 nt, Homo sapiens
  misc_RNA (1)...(19): siRNA sense strand
cagaaacugccaagcauca

SEQ ID NO: 214154 - RNA, 19 nt, Homo sapiens
  misc_RNA (1)...(19): siRNA sense strand
uaugacaucugccaaagcu

SEQ ID NO: 214155 - RNA, 19 nt, Homo sapiens
  misc_RNA (1)...(19): siRNA sense strand
aaugucagauucucagcuu

SEQ ID NO: 214156 - RNA, 19 nt, Homo sapiens
  misc_RNA (1)...(19): siRNA sense strand
ucgagacuuugccaaggua

SEQ ID NO: 214157 - RNA, 19 nt, Homo sapiens
  misc_RNA (1)...(19): siRNA sense strand
gcaaaaggccauaaaaugc

SEQ ID NO: 214158 - RNA, 19 nt, Homo sapiens
  misc_RNA (1)...(19): siRNA sense strand
cugcaugauucuauccaaa

SEQ ID NO: 214159 - RNA, 19 nt, Homo sapiens
  misc_RNA (1)...(19): siRNA sense strand
uaaagcacauuuggaagac

SEQ ID NO: 214160 - RNA, 19 nt, Homo sapiens
  misc_RNA (1)...(19): siRNA sense strand
acaggagucuaaagcacuu

SEQ ID NO: 214161 - RNA, 19 nt, Homo sapiens
  misc_RNA (1)...(19): siRNA sense strand
acagauaccuuuucaagca

SEQ ID NO: 214162 - RNA, 19 nt, Homo sapiens
  misc_RNA (1)...(19): siRNA sense strand
aagcacauuuggaagacaa

SEQ ID NO: 214163 - RNA, 19 nt, Homo sapiens
  misc_RNA (1)...(19): siRNA sense strand
gcuaauaauaagccagaga

SEQ ID NO: 214164 - RNA, 19 nt, Homo sapiens
  misc_RNA (1)...(19): siRNA sense strand
caagagcacaacaauuugg

SEQ ID NO: 214165 - RNA, 19 nt, Homo sapiens
  misc_RNA (1)...(19): siRNA sense strand
ccugucagcugcaugugau

SEQ ID NO: 214166 - RNA, 19 nt, Homo sapiens
  misc_RNA (1)...(19): siRNA sense strand
gcugcugaauguuuaugau

SEQ ID NO: 214167 - RNA, 19 nt, Homo sapiens
  misc_RNA (1)...(19): siRNA sense strand
acagagcucuaccagucuu

SEQ ID NO: 214168 - RNA, 19 nt, Homo sapiens
  misc_RNA (1)...(19): siRNA sense strand
acaguugggugaaguugca

SEQ ID NO: 214169 - RNA, 19 nt, Homo sapiens
  misc_RNA (1)...(19): siRNA sense strand
guuugaccacuauuuauga

SEQ ID NO: 214170 - RNA, 19 nt, Homo sapiens
  misc_RNA (1)...(19): siRNA sense strand
gcuuauaggacugccauga

SEQ ID NO: 214171 - RNA, 19 nt, Homo sapiens
  misc_RNA (1)...(19): siRNA sense strand
caucaggccaaauguaaca

SEQ ID NO: 214172 - RNA, 19 nt, Homo sapiens
  misc_RNA (1)...(19): siRNA sense strand
gauucuauccaaauuccaa

SEQ ID NO: 214173 - RNA, 19 nt, Homo sapiens
  misc_RNA (1)...(19): siRNA sense strand
ggcaaguucaacaggauuu

SEQ ID NO: 214174 - RNA, 19 nt, Homo sapiens
  misc_RNA (1)...(19): siRNA sense strand
gaacuggcugcugaauguu

SEQ ID NO: 214175 - RNA, 19 nt, Homo sapiens
  misc_RNA (1)...(19): siRNA sense strand
cugcugaauguuuaugaua

SEQ ID NO: 214176 - RNA, 19 nt, Homo sapiens
  misc_RNA (1)...(19): siRNA sense strand
aagcaucaggccaaaugua

SEQ ID NO: 214177 - RNA, 19 nt, Homo sapiens
  misc_RNA (1)...(19): siRNA sense strand
uggcaucauuucccugugu

SEQ ID NO: 214178 - RNA, 19 nt, Homo sapiens
  misc_RNA (1)...(19): siRNA sense strand
ccaugaaacuccgaagacu

SEQ ID NO: 214179 - RNA, 19 nt, Homo sapiens
  misc_RNA (1)...(19): siRNA sense strand
auaauaagccagagaucga

SEQ ID NO: 214180 - RNA, 19 nt, Homo sapiens
  misc_RNA (1)...(19): siRNA sense strand
cuaauaauaagccagagau

SEQ ID NO: 214181 - RNA, 19 nt, Homo sapiens
  misc_RNA (1)...(19): siRNA sense strand
ugggugaaguugcauccuu

SEQ ID NO: 214182 - RNA, 19 nt, Homo sapiens
  misc_RNA (1)...(19): siRNA sense strand
caucauuucccuguguaaa

SEQ ID NO: 214183 - RNA, 19 nt, Homo sapiens
  misc_RNA (1)...(19): siRNA sense strand
gcguggauaugugucugaa

SEQ ID NO: 214184 - RNA, 19 nt, Homo sapiens
  misc_RNA (1)...(19): siRNA sense strand
gcacuaucccaugguggaa

SEQ ID NO: 214185 - RNA, 19 nt, Homo sapiens
  misc_RNA (1)...(19): siRNA sense strand
gagccugucagcugcaugu

SEQ ID NO: 214186 - RNA, 19 nt, Homo sapiens
  misc_RNA (1)...(19): siRNA sense strand
guacagauaccuuuucaag

SEQ ID NO: 214187 - RNA, 19 nt, Homo sapiens
  misc_RNA (1)...(19): siRNA sense strand
gucccucucugcguggaua

SEQ ID NO: 214188 - RNA, 19 nt, Homo sapiens
  misc_RNA (1)...(19): siRNA sense strand
ggagcugcuuccaauuugc

SEQ ID NO: 214189 - RNA, 19 nt, Homo sapiens
  misc_RNA (1)...(19): siRNA sense strand
uuagcugaccugaauaaug

SEQ ID NO: 214190 - RNA, 19 nt, Homo sapiens
  misc_RNA (1)...(19): siRNA sense strand
guggcaaguucaacaggau

SEQ ID NO: 214191 - RNA, 19 nt, Homo sapiens
  misc_RNA (1)...(19): siRNA sense strand
acaacaauuuggucaacgu

SEQ ID NO: 214192 - RNA, 19 nt, Homo sapiens
  misc_RNA (1)...(19): siRNA sense strand
gacuacaucaggagaagau

SEQ ID NO: 214193 - RNA, 19 nt, Homo sapiens
  misc_RNA (1)...(19): siRNA sense strand
uaauaagccagagaucgaa

SEQ ID NO: 214194 - RNA, 19 nt, Homo sapiens
  misc_RNA (1)...(19): siRNA sense strand
ugucagauucucagcuuau

SEQ ID NO: 214195 - RNA, 19 nt, Homo sapiens
  misc_RNA (1)...(19): siRNA sense strand
ggauauccugcagauuauu

SEQ ID NO: 214196 - RNA, 19 nt, Homo sapiens
  misc_RNA (1)...(19): siRNA sense strand
agcaucaggccaaauguaa

SEQ ID NO: 214197 - RNA, 19 nt, Homo sapiens
  misc_RNA (1)...(19): siRNA sense strand
gcccuuugcuuggaucucu

SEQ ID NO: 214198 - RNA, 19 nt, Homo sapiens
  misc_RNA (1)...(19): siRNA sense strand
gcugaauguuuaugauacg

SEQ ID NO: 214199 - RNA, 19 nt, Homo sapiens
  misc_RNA (1)...(19): siRNA sense strand
agacuuugccaagguacua

SEQ ID NO: 214200 - RNA, 19 nt, Homo sapiens
  misc_RNA (1)...(19): siRNA sense strand
caagcaaguggcaaguuca

SEQ ID NO: 214201 - RNA, 19 nt, Homo sapiens
  misc_RNA (1)...(19): siRNA sense strand
agacaaguacagauaccuu

SEQ ID NO: 214202 - RNA, 19 nt, Homo sapiens
  misc_RNA (1)...(19): siRNA sense strand
gcaucauuucccuguguaa

SEQ ID NO: 214203 - RNA, 19 nt, Homo sapiens
  misc_RNA (1)...(19): siRNA sense strand
cugcaaagaguguccaauc

SEQ ID NO: 214204 - RNA, 19 nt, Homo sapiens
  misc_RNA (1)...(19): siRNA sense strand
cuuauaggacugccaugaa

SEQ ID NO: 214205 - RNA, 19 nt, Homo sapiens
  misc_RNA (1)...(19): siRNA sense strand
caaagaguguccaaucauu

SEQ ID NO: 214206 - RNA, 19 nt, Homo sapiens
  misc_RNA (1)...(19): siRNA sense strand
uagcugaccugaauaaugu

SEQ ID NO: 214207 - RNA, 19 nt, Homo sapiens
  misc_RNA (1)...(19): siRNA sense strand
gcaugauucuauccaaauu

SEQ ID NO: 214208 - RNA, 19 nt, Homo sapiens
  misc_RNA (1)...(19): siRNA sense strand
ugaacuggcugcugaaugu

SEQ ID NO: 214209 - RNA, 19 nt, Homo sapiens
  misc_RNA (1)...(19): siRNA sense strand
gauauccugcagauuauua

SEQ ID NO: 214210 - RNA, 19 nt, Homo sapiens
  misc_RNA (1)...(19): siRNA sense strand
gagaagauguucgagacuu

SEQ ID NO: 214211 - RNA, 19 nt, Homo sapiens
  misc_RNA (1)...(19): siRNA sense strand
gcacuuuaauuaugacauc

SEQ ID NO: 214212 - RNA, 19 nt, Homo sapiens
  misc_RNA (1)...(19): siRNA sense strand
guaaagcacauuuggaaga

SEQ ID NO: 214213 - RNA, 19 nt, Homo sapiens
  misc_RNA (1)...(19): siRNA sense strand
gaauauugcacuccgacua

SEQ ID NO: 214214 - RNA, 19 nt, Homo sapiens
  misc_RNA (1)...(19): siRNA sense strand
uuauaggacugccaugaaa

SEQ ID NO: 214215 - RNA, 19 nt, Homo sapiens
  misc_RNA (1)...(19): siRNA sense strand
gggugaaguugcauccuuu

SEQ ID NO: 214216 - RNA, 19 nt, Homo sapiens
  misc_RNA (1)...(19): siRNA sense strand
gcaagagcacaacaauuug

SEQ ID NO: 214217 - RNA, 19 nt, Homo sapiens
  misc_RNA (1)...(19): siRNA sense strand
gcacaacaauuuggucaac

SEQ ID NO: 214218 - RNA, 19 nt, Homo sapiens
  misc_RNA (1)...(19): siRNA sense strand
agcaagagcacaacaauuu

SEQ ID NO: 214219 - RNA, 19 nt, Homo sapiens
  misc_RNA (1)...(19): siRNA sense strand
agaagauguucgagacuuu

SEQ ID NO: 214220 - RNA, 19 nt, Homo sapiens
  misc_RNA (1)...(19): siRNA sense strand
gagcaagagcacaacaauu

SEQ ID NO: 214221 - RNA, 19 nt, Homo sapiens
  misc_RNA (1)...(19): siRNA sense strand
ucaagcaaguggcaaguuc

SEQ ID NO: 214222 - RNA, 19 nt, Homo sapiens
  misc_RNA (1)...(19): siRNA sense strand
ccacgagacucaaacaacu

SEQ ID NO: 214223 - RNA, 19 nt, Homo sapiens
  misc_RNA (1)...(19): siRNA sense strand
cagcacaaccucaagcaaa

SEQ ID NO: 214224 - RNA, 19 nt, Homo sapiens
  misc_RNA (1)...(19): siRNA sense strand
gcaaagaguguccaaucau

SEQ ID NO: 214225 - RNA, 19 nt, Homo sapiens
  misc_RNA (1)...(19): siRNA sense strand
auggauauccugcagauua

SEQ ID NO: 214226 - RNA, 19 nt, Homo sapiens
  misc_RNA (1)...(19): siRNA sense strand
uguaacaucugcaaagagu

SEQ ID NO: 214227 - RNA, 19 nt, Homo sapiens
  misc_RNA (1)...(19): siRNA sense strand
guccggagcugcuuccaau

SEQ ID NO: 214228 - RNA, 19 nt, Homo sapiens
  misc_RNA (1)...(19): siRNA sense strand
gcaaguggcaaguucaaca

SEQ ID NO: 214229 - RNA, 19 nt, Homo sapiens
  misc_RNA (1)...(19): siRNA sense strand
gcuuccaauuugcuaauaa

SEQ ID NO: 214230 - RNA, 19 nt, Homo sapiens
  misc_RNA (1)...(19): siRNA sense strand
uggaagacaaguacagaua

SEQ ID NO: 214231 - RNA, 19 nt, Homo sapiens
  misc_RNA (1)...(19): siRNA sense strand
ggauccguguccugucuuu

SEQ ID NO: 214232 - RNA, 19 nt, Homo sapiens
  misc_RNA (1)...(19): siRNA sense strand
gucuuuagcugaccugaau

SEQ ID NO: 214233 - RNA, 19 nt, Homo sapiens
  misc_RNA (1)...(19): siRNA sense strand
gacaaguacagauaccuuu

SEQ ID NO: 214234 - RNA, 19 nt, Homo sapiens
  misc_RNA (1)...(19): siRNA sense strand
ccaagcaucaggccaaaug

SEQ ID NO: 214235 - RNA, 19 nt, Homo sapiens
  misc_RNA (1)...(19): siRNA sense strand
ggagcaagagcacaacaau

SEQ ID NO: 214236 - RNA, 19 nt, Homo sapiens
  misc_RNA (1)...(19): siRNA sense strand
guguaaagcacauuuggaa

SEQ ID NO: 214237 - RNA, 19 nt, Homo sapiens
  misc_RNA (1)...(19): siRNA sense strand
caagacaguugggugaagu

SEQ ID NO: 214238 - RNA, 19 nt, Homo sapiens
  misc_RNA (1)...(19): siRNA sense strand
gaagauguucgagacuuug

SEQ ID NO: 214239 - RNA, 19 nt, Homo sapiens
  misc_RNA (1)...(19): siRNA sense strand
gucagauucucagcuuaua

SEQ ID NO: 214240 - RNA, 19 nt, Homo sapiens
  misc_RNA (1)...(19): siRNA sense strand
uaacaucugcaaagagugu

SEQ ID NO: 214241 - RNA, 19 nt, Homo sapiens
  misc_RNA (1)...(19): siRNA sense strand
cggagcugcuuccaauuug

SEQ ID NO: 214242 - RNA, 19 nt, Homo sapiens
  misc_RNA (1)...(19): siRNA sense strand
gaagacaaguacagauacc

SEQ ID NO: 214243 - RNA, 19 nt, Homo sapiens
  misc_RNA (1)...(19): siRNA sense strand
ccauggauauccugcagau

SEQ ID NO: 214244 - RNA, 19 nt, Homo sapiens
  misc_RNA (1)...(19): siRNA sense strand
ggcaucauuucccugugua

SEQ ID NO: 214245 - RNA, 19 nt, Homo sapiens
  misc_RNA (1)...(19): siRNA sense strand
uggauauccugcagauuau

SEQ ID NO: 214246 - RNA, 19 nt, Homo sapiens
  misc_RNA (1)...(19): siRNA sense strand
ggaagacaaguacagauac

SEQ ID NO: 214247 - RNA, 19 nt, Homo sapiens
  misc_RNA (1)...(19): siRNA sense strand
ugcaaagaguguccaauca

SEQ ID NO: 214248 - RNA, 19 nt, Homo sapiens
  misc_RNA (1)...(19): siRNA sense strand
guggauaugugucugaacu

SEQ ID NO: 214249 - RNA, 19 nt, Homo sapiens
  misc_RNA (1)...(19): siRNA sense strand
acuggcugcugaauguuua

SEQ ID NO: 214250 - RNA, 19 nt, Homo sapiens
  misc_RNA (1)...(19): siRNA sense strand
acuaucccaugguggaaua

SEQ ID NO: 214251 - RNA, 19 nt, Homo sapiens
  misc_RNA (1)...(19): siRNA sense strand
ccggagcugcuuccaauuu

SEQ ID NO: 214252 - RNA, 19 nt, Homo sapiens
  misc_RNA (1)...(19): siRNA sense strand
ccaaauuccaagacaguug

SEQ ID NO: 214253 - RNA, 19 nt, Homo sapiens
  misc_RNA (1)...(19): siRNA sense strand
cagaaacugccaagcauca

SEQ ID NO: 214254 - RNA, 19 nt, Homo sapiens
  misc_RNA (1)...(19): siRNA sense strand
uaugacaucugccaaagcu

SEQ ID NO: 214255 - RNA, 19 nt, Homo sapiens
  misc_RNA (1)...(19): siRNA sense strand
aaugucagauucucagcuu

SEQ ID NO: 214256 - RNA, 19 nt, Homo sapiens
  misc_RNA (1)...(19): siRNA sense strand
ucgagacuuugccaaggua

SEQ ID NO: 214257 - RNA, 19 nt, Homo sapiens
  misc_RNA (1)...(19): siRNA sense strand
gcaaaaggccauaaaaugc

SEQ ID NO: 214258 - RNA, 19 nt, Homo sapiens
  misc_RNA (1)...(19): siRNA sense strand
cugcaugauucuauccaaa

SEQ ID NO: 214259 - RNA, 19 nt, Homo sapiens
  misc_RNA (1)...(19): siRNA sense strand
uaaagcacauuuggaagac

SEQ ID NO: 214260 - RNA, 19 nt, Homo sapiens
  misc_RNA (1)...(19): siRNA sense strand
acaggagucuaaagcacuu

SEQ ID NO: 214261 - RNA, 19 nt, Homo sapiens
  misc_RNA (1)...(19): siRNA sense strand
acagauaccuuuucaagca

SEQ ID NO: 214262 - RNA, 19 nt, Homo sapiens
  misc_RNA (1)...(19): siRNA sense strand
aagcacauuuggaagacaa

SEQ ID NO: 214263 - RNA, 19 nt, Homo sapiens
  misc_RNA (1)...(19): siRNA sense strand
gcuaauaauaagccagaga

SEQ ID NO: 214264 - RNA, 19 nt, Homo sapiens
  misc_RNA (1)...(19): siRNA sense strand
caagagcacaacaauuugg

SEQ ID NO: 214265 - RNA, 19 nt, Homo sapiens
  misc_RNA (1)...(19): siRNA sense strand
ccugucagcugcaugugau

SEQ ID NO: 214266 - RNA, 19 nt, Homo sapiens
  misc_RNA (1)...(19): siRNA sense strand
gcugcugaauguuuaugau

SEQ ID NO: 214267 - RNA, 19 nt, Homo sapiens
  misc_RNA (1)...(19): siRNA sense strand
acagagcucuaccagucuu

SEQ ID NO: 214268 - RNA, 19 nt, Homo sapiens
  misc_RNA (1)...(19): siRNA sense strand
acaguugggugaaguugca

SEQ ID NO: 214269 - RNA, 19 nt, Homo sapiens
  misc_RNA (1)...(19): siRNA sense strand
guuugaccacuauuuauga

SEQ ID NO: 214270 - RNA, 19 nt, Homo sapiens
  misc_RNA (1)...(19): siRNA sense strand
gcuuauaggacugccauga

SEQ ID NO: 214271 - RNA, 19 nt, Homo sapiens
  misc_RNA (1)...(19): siRNA sense strand
caucaggccaaauguaaca

SEQ ID NO: 214272 - RNA, 19 nt, Homo sapiens
  misc_RNA (1)...(19): siRNA sense strand
gauucuauccaaauuccaa

SEQ ID NO: 214273 - RNA, 19 nt, Homo sapiens
  misc_RNA (1)...(19): siRNA sense strand
ggcaaguucaacaggauuu

SEQ ID NO: 214274 - RNA, 19 nt, Homo sapiens
  misc_RNA (1)...(19): siRNA sense strand
gaacuggcugcugaauguu

SEQ ID NO: 214275 - RNA, 19 nt, Homo sapiens
  misc_RNA (1)...(19): siRNA sense strand
cugcugaauguuuaugaua

SEQ ID NO: 214276 - RNA, 19 nt, Homo sapiens
  misc_RNA (1)...(19): siRNA sense strand
aagcaucaggccaaaugua

SEQ ID NO: 214277 - RNA, 19 nt, Homo sapiens
  misc_RNA (1)...(19): siRNA sense strand
uggcaucauuucccugugu

SEQ ID NO: 214278 - RNA, 19 nt, Homo sapiens
  misc_RNA (1)...(19): siRNA sense strand
ccaugaaacuccgaagacu

SEQ ID NO: 214279 - RNA, 19 nt, Homo sapiens
  misc_RNA (1)...(19): siRNA sense strand
auaauaagccagagaucga

SEQ ID NO: 214280 - RNA, 19 nt, Homo sapiens
  misc_RNA (1)...(19): siRNA sense strand
cuaauaauaagccagagau

SEQ ID NO: 214281 - RNA, 19 nt, Homo sapiens
  misc_RNA (1)...(19): siRNA sense strand
ugggugaaguugcauccuu

SEQ ID NO: 214282 - RNA, 19 nt, Homo sapiens
  misc_RNA (1)...(19): siRNA sense strand
caucauuucccuguguaaa

SEQ ID NO: 214283 - RNA, 19 nt, Homo sapiens
  misc_RNA (1)...(19): siRNA sense strand
gcguggauaugugucugaa

SEQ ID NO: 214284 - RNA, 19 nt, Homo sapiens
  misc_RNA (1)...(19): siRNA sense strand
gcacuaucccaugguggaa

SEQ ID NO: 214285 - RNA, 19 nt, Homo sapiens
  misc_RNA (1)...(19): siRNA sense strand
gagccugucagcugcaugu

SEQ ID NO: 214286 - RNA, 19 nt, Homo sapiens
  misc_RNA (1)...(19): siRNA sense strand
guacagauaccuuuucaag

SEQ ID NO: 214287 - RNA, 19 nt, Homo sapiens
  misc_RNA (1)...(19): siRNA sense strand
gucccucucugcguggaua

SEQ ID NO: 214288 - RNA, 19 nt, Homo sapiens
  misc_RNA (1)...(19): siRNA sense strand
ggagcugcuuccaauuugc

SEQ ID NO: 214289 - RNA, 19 nt, Homo sapiens
  misc_RNA (1)...(19): siRNA sense strand
uuagcugaccugaauaaug

SEQ ID NO: 214290 - RNA, 19 nt, Homo sapiens
  misc_RNA (1)...(19): siRNA sense strand
guggcaaguucaacaggau

SEQ ID NO: 214291 - RNA, 19 nt, Homo sapiens
  misc_RNA (1)...(19): siRNA sense strand
acaacaauuuggucaacgu

SEQ ID NO: 214292 - RNA, 19 nt, Homo sapiens
  misc_RNA (1)...(19): siRNA sense strand
gacuacaucaggagaagau

SEQ ID NO: 214293 - RNA, 19 nt, Homo sapiens
  misc_RNA (1)...(19): siRNA sense strand
uaauaagccagagaucgaa

SEQ ID NO: 214294 - RNA, 19 nt, Homo sapiens
  misc_RNA (1)...(19): siRNA sense strand
ugucagauucucagcuuau

SEQ ID NO: 214295 - RNA, 19 nt, Homo sapiens
  misc_RNA (1)...(19): siRNA sense strand
ggauauccugcagauuauu

SEQ ID NO: 214296 - RNA, 19 nt, Homo sapiens
  misc_RNA (1)...(19): siRNA sense strand
agcaucaggccaaauguaa

SEQ ID NO: 214297 - RNA, 19 nt, Homo sapiens
  misc_RNA (1)...(19): siRNA sense strand
gcccuuugcuuggaucucu

SEQ ID NO: 214298 - RNA, 19 nt, Homo sapiens
  misc_RNA (1)...(19): siRNA sense strand
gcugaauguuuaugauacg

SEQ ID NO: 214299 - RNA, 19 nt, Homo sapiens
  misc_RNA (1)...(19): siRNA sense strand
agacuuugccaagguacua

SEQ ID NO: 214300 - RNA, 19 nt, Homo sapiens
  misc_RNA (1)...(19): siRNA sense strand
caagcaaguggcaaguuca

SEQ ID NO: 214301 - RNA, 19 nt, Homo sapiens
  misc_RNA (1)...(19): siRNA sense strand
agacaaguacagauaccuu

SEQ ID NO: 214302 - RNA, 19 nt, Homo sapiens
  misc_RNA (1)...(19): siRNA sense strand
gcaucauuucccuguguaa

SEQ ID NO: 214303 - RNA, 19 nt, Homo sapiens
  misc_RNA (1)...(19): siRNA sense strand
cugcaaagaguguccaauc

SEQ ID NO: 214304 - RNA, 19 nt, Homo sapiens
  misc_RNA (1)...(19): siRNA sense strand
cuuauaggacugccaugaa

SEQ ID NO: 214305 - RNA, 19 nt, Homo sapiens
  misc_RNA (1)...(19): siRNA sense strand
caaagaguguccaaucauu

SEQ ID NO: 214306 - RNA, 19 nt, Homo sapiens
  misc_RNA (1)...(19): siRNA sense strand
uagcugaccugaauaaugu

SEQ ID NO: 214307 - RNA, 19 nt, Homo sapiens
  misc_RNA (1)...(19): siRNA sense strand
gcaugauucuauccaaauu

SEQ ID NO: 214308 - RNA, 19 nt, Homo sapiens
  misc_RNA (1)...(19): siRNA sense strand
ugaacuggcugcugaaugu

SEQ ID NO: 214309 - RNA, 19 nt, Homo sapiens
  misc_RNA (1)...(19): siRNA sense strand
gauauccugcagauuauua

SEQ ID NO: 214310 - RNA, 19 nt, Homo sapiens
  misc_RNA (1)...(19): siRNA sense strand
gagaagauguucgagacuu

SEQ ID NO: 214311 - RNA, 19 nt, Homo sapiens
  misc_RNA (1)...(19): siRNA sense strand
gcacuuuaauuaugacauc

SEQ ID NO: 214312 - RNA, 19 nt, Homo sapiens
  misc_RNA (1)...(19): siRNA sense strand
guaaagcacauuuggaaga

SEQ ID NO: 214313 - RNA, 19 nt, Homo sapiens
  misc_RNA (1)...(19): siRNA sense strand
gaauauugcacuccgacua

SEQ ID NO: 214314 - RNA, 19 nt, Homo sapiens
  misc_RNA (1)...(19): siRNA sense strand
uuauaggacugccaugaaa

SEQ ID NO: 214315 - RNA, 19 nt, Homo sapiens
  misc_RNA (1)...(19): siRNA sense strand
gggugaaguugcauccuuu

SEQ ID NO: 214316 - RNA, 19 nt, Homo sapiens
  misc_RNA (1)...(19): siRNA sense strand
gcaagagcacaacaauuug

SEQ ID NO: 214317 - RNA, 19 nt, Homo sapiens
  misc_RNA (1)...(19): siRNA sense strand
gcacaacaauuuggucaac

SEQ ID NO: 214318 - RNA, 19 nt, Homo sapiens
  misc_RNA (1)...(19): siRNA sense strand
agcaagagcacaacaauuu

SEQ ID NO: 214319 - RNA, 19 nt, Homo sapiens
  misc_RNA (1)...(19): siRNA sense strand
agaagauguucgagacuuu

SEQ ID NO: 214320 - RNA, 19 nt, Homo sapiens
  misc_RNA (1)...(19): siRNA sense strand
gagcaagagcacaacaauu

SEQ ID NO: 214321 - RNA, 19 nt, Homo sapiens
  misc_RNA (1)...(19): siRNA sense strand
ucaagcaaguggcaaguuc

SEQ ID NO: 214322 - RNA, 19 nt, Homo sapiens
  misc_RNA (1)...(19): siRNA sense strand
ccacgagacucaaacaacu

SEQ ID NO: 214323 - RNA, 19 nt, Homo sapiens
  misc_RNA (1)...(19): siRNA sense strand
cagcacaaccucaagcaaa

SEQ ID NO: 214324 - RNA, 19 nt, Homo sapiens
  misc_RNA (1)...(19): siRNA sense strand
gcaaagaguguccaaucau

SEQ ID NO: 214325 - RNA, 19 nt, Homo sapiens
  misc_RNA (1)...(19): siRNA sense strand
auggauauccugcagauua

SEQ ID NO: 214326 - RNA, 19 nt, Homo sapiens
  misc_RNA (1)...(19): siRNA sense strand
uguaacaucugcaaagagu

SEQ ID NO: 214327 - RNA, 19 nt, Homo sapiens
  misc_RNA (1)...(19): siRNA sense strand
guccggagcugcuuccaau

SEQ ID NO: 214328 - RNA, 19 nt, Homo sapiens
  misc_RNA (1)...(19): siRNA sense strand
gcaaguggcaaguucaaca

SEQ ID NO: 214329 - RNA, 19 nt, Homo sapiens
  misc_RNA (1)...(19): siRNA sense strand
gcuuccaauuugcuaauaa

SEQ ID NO: 214330 - RNA, 19 nt, Homo sapiens
  misc_RNA (1)...(19): siRNA sense strand
uggaagacaaguacagaua

SEQ ID NO: 214331 - RNA, 19 nt, Homo sapiens
  misc_RNA (1)...(19): siRNA sense strand
ggauccguguccugucuuu

SEQ ID NO: 214332 - RNA, 19 nt, Homo sapiens
  misc_RNA (1)...(19): siRNA sense strand
gucuuuagcugaccugaau

SEQ ID NO: 214333 - RNA, 19 nt, Homo sapiens
  misc_RNA (1)...(19): siRNA sense strand
gacaaguacagauaccuuu

SEQ ID NO: 214334 - RNA, 19 nt, Homo sapiens
  misc_RNA (1)...(19): siRNA sense strand
ccaagcaucaggccaaaug

SEQ ID NO: 214335 - RNA, 19 nt, Homo sapiens
  misc_RNA (1)...(19): siRNA sense strand
ggagcaagagcacaacaau

SEQ ID NO: 214336 - RNA, 19 nt, Homo sapiens
  misc_RNA (1)...(19): siRNA sense strand
guguaaagcacauuuggaa

SEQ ID NO: 214337 - RNA, 19 nt, Homo sapiens
  misc_RNA (1)...(19): siRNA sense strand
caagacaguugggugaagu

SEQ ID NO: 214338 - RNA, 19 nt, Homo sapiens
  misc_RNA (1)...(19): siRNA sense strand
gaagauguucgagacuuug

SEQ ID NO: 214339 - RNA, 19 nt, Homo sapiens
  misc_RNA (1)...(19): siRNA sense strand
gucagauucucagcuuaua

SEQ ID NO: 214340 - RNA, 19 nt, Homo sapiens
  misc_RNA (1)...(19): siRNA sense strand
uaacaucugcaaagagugu

SEQ ID NO: 214341 - RNA, 19 nt, Homo sapiens
  misc_RNA (1)...(19): siRNA sense strand
cggagcugcuuccaauuug

SEQ ID NO: 214342 - RNA, 19 nt, Homo sapiens
  misc_RNA (1)...(19): siRNA sense strand
gaagacaaguacagauacc

SEQ ID NO: 214343 - RNA, 19 nt, Homo sapiens
  misc_RNA (1)...(19): siRNA sense strand
ccauggauauccugcagau

SEQ ID NO: 214344 - RNA, 19 nt, Homo sapiens
  misc_RNA (1)...(19): siRNA sense strand
ggcaucauuucccugugua

SEQ ID NO: 214345 - RNA, 19 nt, Homo sapiens
  misc_RNA (1)...(19): siRNA sense strand
uggauauccugcagauuau

SEQ ID NO: 214346 - RNA, 19 nt, Homo sapiens
  misc_RNA (1)...(19): siRNA sense strand
ggaagacaaguacagauac

SEQ ID NO: 214347 - RNA, 19 nt, Homo sapiens
  misc_RNA (1)...(19): siRNA sense strand
ugcaaagaguguccaauca

SEQ ID NO: 214348 - RNA, 19 nt, Homo sapiens
  misc_RNA (1)...(19): siRNA sense strand
guggauaugugucugaacu

SEQ ID NO: 214349 - RNA, 19 nt, Homo sapiens
  misc_RNA (1)...(19): siRNA sense strand
acuggcugcugaauguuua

SEQ ID NO: 214350 - RNA, 19 nt, Homo sapiens
  misc_RNA (1)...(19): siRNA sense strand
acuaucccaugguggaaua

SEQ ID NO: 214351 - RNA, 19 nt, Homo sapiens
  misc_RNA (1)...(19): siRNA sense strand
ccggagcugcuuccaauuu

SEQ ID NO: 214352 - RNA, 19 nt, Homo sapiens
  misc_RNA (1)...(19): siRNA sense strand
ccaaauuccaagacaguug

SEQ ID NO: 214353 - RNA, 19 nt, Homo sapiens
  misc_RNA (1)...(19): siRNA sense strand
cagaaacugccaagcauca

SEQ ID NO: 214354 - RNA, 19 nt, Homo sapiens
  misc_RNA (1)...(19): siRNA sense strand
uaugacaucugccaaagcu

SEQ ID NO: 214355 - RNA, 19 nt, Homo sapiens
  misc_RNA (1)...(19): siRNA sense strand
aaugucagauucucagcuu

SEQ ID NO: 214356 - RNA, 19 nt, Homo sapiens
  misc_RNA (1)...(19): siRNA sense strand
ucgagacuuugccaaggua

SEQ ID NO: 214357 - RNA, 19 nt, Homo sapiens
  misc_RNA (1)...(19): siRNA sense strand
gcaaaaggccauaaaaugc

SEQ ID NO: 214358 - RNA, 19 nt, Homo sapiens
  misc_RNA (1)...(19): siRNA sense strand
cugcaugauucuauccaaa

SEQ ID NO: 214359 - RNA, 19 nt, Homo sapiens
  misc_RNA (1)...(19): siRNA sense strand
uaaagcacauuuggaagac

SEQ ID NO: 214360 - RNA, 19 nt, Homo sapiens
  misc_RNA (1)...(19): siRNA sense strand
acaggagucuaaagcacuu

SEQ ID NO: 214361 - RNA, 19 nt, Homo sapiens
  misc_RNA (1)...(19): siRNA sense strand
acagauaccuuuucaagca

SEQ ID NO: 214362 - RNA, 19 nt, Homo sapiens
  misc_RNA (1)...(19): siRNA sense strand
aagcacauuuggaagacaa

SEQ ID NO: 214363 - RNA, 19 nt, Homo sapiens
  misc_RNA (1)...(19): siRNA sense strand
gcuaauaauaagccagaga

SEQ ID NO: 214364 - RNA, 19 nt, Homo sapiens
  misc_RNA (1)...(19): siRNA sense strand
caagagcacaacaauuugg

SEQ ID NO: 214365 - RNA, 19 nt, Homo sapiens
  misc_RNA (1)...(19): siRNA sense strand
ccugucagcugcaugugau

SEQ ID NO: 214366 - RNA, 19 nt, Homo sapiens
  misc_RNA (1)...(19): siRNA sense strand
gcugcugaauguuuaugau

SEQ ID NO: 214367 - RNA, 19 nt, Homo sapiens
  misc_RNA (1)...(19): siRNA sense strand
acagagcucuaccagucuu

SEQ ID NO: 214368 - RNA, 19 nt, Homo sapiens
  misc_RNA (1)...(19): siRNA sense strand
acaguugggugaaguugca

SEQ ID NO: 214369 - RNA, 19 nt, Homo sapiens
  misc_RNA (1)...(19): siRNA sense strand
guuugaccacuauuuauga

SEQ ID NO: 214370 - RNA, 19 nt, Homo sapiens
  misc_RNA (1)...(19): siRNA sense strand
gcuuauaggacugccauga

SEQ ID NO: 214371 - RNA, 19 nt, Homo sapiens
  misc_RNA (1)...(19): siRNA sense strand
caucaggccaaauguaaca

SEQ ID NO: 214372 - RNA, 19 nt, Homo sapiens
  misc_RNA (1)...(19): siRNA sense strand
gauucuauccaaauuccaa

SEQ ID NO: 214373 - RNA, 19 nt, Homo sapiens
  misc_RNA (1)...(19): siRNA sense strand
ggcaaguucaacaggauuu

SEQ ID NO: 214374 - RNA, 19 nt, Homo sapiens
  misc_RNA (1)...(19): siRNA sense strand
gaacuggcugcugaauguu

SEQ ID NO: 214375 - RNA, 19 nt, Homo sapiens
  misc_RNA (1)...(19): siRNA sense strand
cugcugaauguuuaugaua

SEQ ID NO: 214376 - RNA, 19 nt, Homo sapiens
  misc_RNA (1)...(19): siRNA sense strand
aagcaucaggccaaaugua

SEQ ID NO: 214377 - RNA, 19 nt, Homo sapiens
  misc_RNA (1)...(19): siRNA sense strand
uggcaucauuucccugugu

SEQ ID NO: 214378 - RNA, 19 nt, Homo sapiens
  misc_RNA (1)...(19): siRNA sense strand
ccaugaaacuccgaagacu

SEQ ID NO: 214379 - RNA, 19 nt, Homo sapiens
  misc_RNA (1)...(19): siRNA sense strand
auaauaagccagagaucga

SEQ ID NO: 214380 - RNA, 19 nt, Homo sapiens
  misc_RNA (1)...(19): siRNA sense strand
cuaauaauaagccagagau

SEQ ID NO: 214381 - RNA, 19 nt, Homo sapiens
  misc_RNA (1)...(19): siRNA sense strand
ugggugaaguugcauccuu

SEQ ID NO: 214382 - RNA, 19 nt, Homo sapiens
  misc_RNA (1)...(19): siRNA sense strand
caucauuucccuguguaaa

SEQ ID NO: 214383 - RNA, 19 nt, Homo sapiens
  misc_RNA (1)...(19): siRNA sense strand
gcguggauaugugucugaa

SEQ ID NO: 214384 - RNA, 19 nt, Homo sapiens
  misc_RNA (1)...(19): siRNA sense strand
gcacuaucccaugguggaa

SEQ ID NO: 214385 - RNA, 19 nt, Homo sapiens
  misc_RNA (1)...(19): siRNA sense strand
gagccugucagcugcaugu

SEQ ID NO: 214386 - RNA, 19 nt, Homo sapiens
  misc_RNA (1)...(19): siRNA sense strand
guacagauaccuuuucaag

SEQ ID NO: 214387 - RNA, 19 nt, Homo sapiens
  misc_RNA (1)...(19): siRNA sense strand
gucccucucugcguggaua

SEQ ID NO: 214388 - RNA, 19 nt, Homo sapiens
  misc_RNA (1)...(19): siRNA sense strand
ggagcugcuuccaauuugc

SEQ ID NO: 214389 - RNA, 19 nt, Homo sapiens
  misc_RNA (1)...(19): siRNA sense strand
uuagcugaccugaauaaug

SEQ ID NO: 214390 - RNA, 19 nt, Homo sapiens
  misc_RNA (1)...(19): siRNA sense strand
guggcaaguucaacaggau

SEQ ID NO: 214391 - RNA, 19 nt, Homo sapiens
  misc_RNA (1)...(19): siRNA sense strand
acaacaauuuggucaacgu

SEQ ID NO: 214392 - RNA, 19 nt, Homo sapiens
  misc_RNA (1)...(19): siRNA sense strand
gacuacaucaggagaagau

SEQ ID NO: 214393 - RNA, 19 nt, Homo sapiens
  misc_RNA (1)...(19): siRNA sense strand
uaauaagccagagaucgaa

SEQ ID NO: 214394 - RNA, 19 nt, Homo sapiens
  misc_RNA (1)...(19): siRNA sense strand
ugucagauucucagcuuau

SEQ ID NO: 214395 - RNA, 19 nt, Homo sapiens
  misc_RNA (1)...(19): siRNA sense strand
ggauauccugcagauuauu

SEQ ID NO: 214396 - RNA, 19 nt, Homo sapiens
  misc_RNA (1)...(19): siRNA sense strand
agcaucaggccaaauguaa

SEQ ID NO: 214397 - RNA, 19 nt, Homo sapiens
  misc_RNA (1)...(19): siRNA sense strand
gcccuuugcuuggaucucu

SEQ ID NO: 214398 - RNA, 19 nt, Homo sapiens
  misc_RNA (1)...(19): siRNA sense strand
gcugaauguuuaugauacg

SEQ ID NO: 214399 - RNA, 19 nt, Homo sapiens
  misc_RNA (1)...(19): siRNA sense strand
agacuuugccaagguacua

SEQ ID NO: 214400 - RNA, 19 nt, Homo sapiens
  misc_RNA (1)...(19): siRNA sense strand
caagcaaguggcaaguuca

SEQ ID NO: 214401 - RNA, 19 nt, Homo sapiens
  misc_RNA (1)...(19): siRNA sense strand
agacaaguacagauaccuu

SEQ ID NO: 214402 - RNA, 19 nt, Homo sapiens
  misc_RNA (1)...(19): siRNA sense strand
gcaucauuucccuguguaa

SEQ ID NO: 214403 - RNA, 19 nt, Homo sapiens
  misc_RNA (1)...(19): siRNA sense strand
cugcaaagaguguccaauc

SEQ ID NO: 214404 - RNA, 19 nt, Homo sapiens
  misc_RNA (1)...(19): siRNA sense strand
cuuauaggacugccaugaa

SEQ ID NO: 214405 - RNA, 19 nt, Homo sapiens
  misc_RNA (1)...(19): siRNA sense strand
caaagaguguccaaucauu

SEQ ID NO: 214406 - RNA, 19 nt, Homo sapiens
  misc_RNA (1)...(19): siRNA sense strand
uagcugaccugaauaaugu

SEQ ID NO: 214407 - RNA, 19 nt, Homo sapiens
  misc_RNA (1)...(19): siRNA sense strand
gcaugauucuauccaaauu

SEQ ID NO: 214408 - RNA, 19 nt, Homo sapiens
  misc_RNA (1)...(19): siRNA sense strand
ugaacuggcugcugaaugu

SEQ ID NO: 214409 - RNA, 19 nt, Homo sapiens
  misc_RNA (1)...(19): siRNA sense strand
gauauccugcagauuauua

SEQ ID NO: 214410 - RNA, 19 nt, Homo sapiens
  misc_RNA (1)...(19): siRNA sense strand
gagaagauguucgagacuu

SEQ ID NO: 214411 - RNA, 19 nt, Homo sapiens
  misc_RNA (1)...(19): siRNA sense strand
gcacuuuaauuaugacauc

SEQ ID NO: 214412 - RNA, 19 nt, Homo sapiens
  misc_RNA (1)...(19): siRNA sense strand
guaaagcacauuuggaaga

SEQ ID NO: 214413 - RNA, 19 nt, Homo sapiens
  misc_RNA (1)...(19): siRNA sense strand
gaauauugcacuccgacua

SEQ ID NO: 214414 - RNA, 19 nt, Homo sapiens
  misc_RNA (1)...(19): siRNA sense strand
uuauaggacugccaugaaa

SEQ ID NO: 214415 - RNA, 19 nt, Homo sapiens
  misc_RNA (1)...(19): siRNA sense strand
gggugaaguugcauccuuu

SEQ ID NO: 214416 - RNA, 19 nt, Homo sapiens
  misc_RNA (1)...(19): siRNA sense strand
gcaagagcacaacaauuug

SEQ ID NO: 214417 - RNA, 19 nt, Homo sapiens
  misc_RNA (1)...(19): siRNA sense strand
gcacaacaauuuggucaac

SEQ ID NO: 214418 - RNA, 19 nt, Homo sapiens
  misc_RNA (1)...(19): siRNA sense strand
agcaagagcacaacaauuu

SEQ ID NO: 214419 - RNA, 19 nt, Homo sapiens
  misc_RNA (1)...(19): siRNA sense strand
agaagauguucgagacuuu

SEQ ID NO: 214420 - RNA, 19 nt, Homo sapiens
  misc_RNA (1)...(19): siRNA sense strand
gagcaagagcacaacaauu

SEQ ID NO: 214421 - RNA, 19 nt, Homo sapiens
  misc_RNA (1)...(19): siRNA sense strand
ucaagcaaguggcaaguuc

SEQ ID NO: 214422 - RNA, 19 nt, Homo sapiens
  misc_RNA (1)...(19): siRNA sense strand
ccacgagacucaaacaacu

SEQ ID NO: 214423 - RNA, 19 nt, Homo sapiens
  misc_RNA (1)...(19): siRNA sense strand
cagcacaaccucaagcaaa

SEQ ID NO: 214424 - RNA, 19 nt, Homo sapiens
  misc_RNA (1)...(19): siRNA sense strand
gcaaagaguguccaaucau

SEQ ID NO: 214425 - RNA, 19 nt, Homo sapiens
  misc_RNA (1)...(19): siRNA sense strand
auggauauccugcagauua

SEQ ID NO: 214426 - RNA, 19 nt, Homo sapiens
  misc_RNA (1)...(19): siRNA sense strand
uguaacaucugcaaagagu

SEQ ID NO: 214427 - RNA, 19 nt, Homo sapiens
  misc_RNA (1)...(19): siRNA sense strand
guccggagcugcuuccaau

SEQ ID NO: 214428 - RNA, 19 nt, Homo sapiens
  misc_RNA (1)...(19): siRNA sense strand
gcaaguggcaaguucaaca

SEQ ID NO: 214429 - RNA, 19 nt, Homo sapiens
  misc_RNA (1)...(19): siRNA sense strand
gcuuccaauuugcuaauaa

SEQ ID NO: 214430 - RNA, 19 nt, Homo sapiens
  misc_RNA (1)...(19): siRNA sense strand
uggaagacaaguacagaua

SEQ ID NO: 214431 - RNA, 19 nt, Homo sapiens
  misc_RNA (1)...(19): siRNA sense strand
ggauccguguccugucuuu

SEQ ID NO: 214432 - RNA, 19 nt, Homo sapiens
  misc_RNA (1)...(19): siRNA sense strand
gucuuuagcugaccugaau

SEQ ID NO: 214433 - RNA, 19 nt, Homo sapiens
  misc_RNA (1)...(19): siRNA sense strand
gacaaguacagauaccuuu

SEQ ID NO: 214434 - RNA, 19 nt, Homo sapiens
  misc_RNA (1)...(19): siRNA sense strand
ccaagcaucaggccaaaug

SEQ ID NO: 214435 - RNA, 19 nt, Homo sapiens
  misc_RNA (1)...(19): siRNA sense strand
ggagcaagagcacaacaau

SEQ ID NO: 214436 - RNA, 19 nt, Homo sapiens
  misc_RNA (1)...(19): siRNA sense strand
guguaaagcacauuuggaa

SEQ ID NO: 214437 - RNA, 19 nt, Homo sapiens
  misc_RNA (1)...(19): siRNA sense strand
caagacaguugggugaagu

SEQ ID NO: 214438 - RNA, 19 nt, Homo sapiens
  misc_RNA (1)...(19): siRNA sense strand
gaagauguucgagacuuug

SEQ ID NO: 214439 - RNA, 19 nt, Homo sapiens
  misc_RNA (1)...(19): siRNA sense strand
gucagauucucagcuuaua

SEQ ID NO: 214440 - RNA, 19 nt, Homo sapiens
  misc_RNA (1)...(19): siRNA sense strand
uaacaucugcaaagagugu

SEQ ID NO: 214441 - RNA, 19 nt, Homo sapiens
  misc_RNA (1)...(19): siRNA sense strand
cggagcugcuuccaauuug

SEQ ID NO: 214442 - RNA, 19 nt, Homo sapiens
  misc_RNA (1)...(19): siRNA sense strand
gaagacaaguacagauacc

SEQ ID NO: 214443 - RNA, 19 nt, Homo sapiens
  misc_RNA (1)...(19): siRNA sense strand
ccauggauauccugcagau

SEQ ID NO: 214444 - RNA, 19 nt, Homo sapiens
  misc_RNA (1)...(19): siRNA sense strand
ggcaucauuucccugugua

SEQ ID NO: 214445 - RNA, 19 nt, Homo sapiens
  misc_RNA (1)...(19): siRNA sense strand
uggauauccugcagauuau

SEQ ID NO: 214446 - RNA, 19 nt, Homo sapiens
  misc_RNA (1)...(19): siRNA sense strand
ggaagacaaguacagauac

SEQ ID NO: 214447 - RNA, 19 nt, Homo sapiens
  misc_RNA (1)...(19): siRNA sense strand
ugcaaagaguguccaauca

SEQ ID NO: 214448 - RNA, 19 nt, Homo sapiens
  misc_RNA (1)...(19): siRNA sense strand
guggauaugugucugaacu

SEQ ID NO: 214449 - RNA, 19 nt, Homo sapiens
  misc_RNA (1)...(19): siRNA sense strand
acuggcugcugaauguuua

SEQ ID NO: 214450 - RNA, 19 nt, Homo sapiens
  misc_RNA (1)...(19): siRNA sense strand
acuaucccaugguggaaua

SEQ ID NO: 214451 - RNA, 19 nt, Homo sapiens
  misc_RNA (1)...(19): siRNA sense strand
ccggagcugcuuccaauuu

SEQ ID NO: 214452 - RNA, 19 nt, Homo sapiens
  misc_RNA (1)...(19): siRNA sense strand
ccaaauuccaagacaguug

SEQ ID NO: 214453 - RNA, 19 nt, Homo sapiens
  misc_RNA (1)...(19): siRNA sense strand
cagaaacugccaagcauca

SEQ ID NO: 214454 - RNA, 19 nt, Homo sapiens
  misc_RNA (1)...(19): siRNA sense strand
uaugacaucugccaaagcu

SEQ ID NO: 214455 - RNA, 19 nt, Homo sapiens
  misc_RNA (1)...(19): siRNA sense strand
aaugucagauucucagcuu

SEQ ID NO: 214456 - RNA, 19 nt, Homo sapiens
  misc_RNA (1)...(19): siRNA sense strand
ucgagacuuugccaaggua

SEQ ID NO: 214457 - RNA, 19 nt, Homo sapiens
  misc_RNA (1)...(19): siRNA sense strand
gcaaaaggccauaaaaugc

SEQ ID NO: 214458 - RNA, 19 nt, Homo sapiens
  misc_RNA (1)...(19): siRNA sense strand
cugcaugauucuauccaaa

SEQ ID NO: 214459 - RNA, 19 nt, Homo sapiens
  misc_RNA (1)...(19): siRNA sense strand
uaaagcacauuuggaagac

SEQ ID NO: 214460 - RNA, 19 nt, Homo sapiens
  misc_RNA (1)...(19): siRNA sense strand
acaggagucuaaagcacuu

SEQ ID NO: 214461 - RNA, 19 nt, Homo sapiens
  misc_RNA (1)...(19): siRNA sense strand
acagauaccuuuucaagca

SEQ ID NO: 214462 - RNA, 19 nt, Homo sapiens
  misc_RNA (1)...(19): siRNA sense strand
aagcacauuuggaagacaa

SEQ ID NO: 214463 - RNA, 19 nt, Homo sapiens
  misc_RNA (1)...(19): siRNA sense strand
gcuaauaauaagccagaga

SEQ ID NO: 214464 - RNA, 19 nt, Homo sapiens
  misc_RNA (1)...(19): siRNA sense strand
caagagcacaacaauuugg

SEQ ID NO: 214465 - RNA, 19 nt, Homo sapiens
  misc_RNA (1)...(19): siRNA sense strand
ccugucagcugcaugugau

SEQ ID NO: 214466 - RNA, 19 nt, Homo sapiens
  misc_RNA (1)...(19): siRNA sense strand
gcugcugaauguuuaugau

SEQ ID NO: 214467 - RNA, 19 nt, Homo sapiens
  misc_RNA (1)...(19): siRNA sense strand
acagagcucuaccagucuu

SEQ ID NO: 214468 - RNA, 19 nt, Homo sapiens
  misc_RNA (1)...(19): siRNA sense strand
acaguugggugaaguugca

SEQ ID NO: 214469 - RNA, 19 nt, Homo sapiens
  misc_RNA (1)...(19): siRNA sense strand
guuugaccacuauuuauga

SEQ ID NO: 214470 - RNA, 19 nt, Homo sapiens
  misc_RNA (1)...(19): siRNA sense strand
gcuuauaggacugccauga

SEQ ID NO: 214471 - RNA, 19 nt, Homo sapiens
  misc_RNA (1)...(19): siRNA sense strand
caucaggccaaauguaaca

SEQ ID NO: 214472 - RNA, 19 nt, Homo sapiens
  misc_RNA (1)...(19): siRNA sense strand
gauucuauccaaauuccaa

SEQ ID NO: 214473 - RNA, 19 nt, Homo sapiens
  misc_RNA (1)...(19): siRNA sense strand
ggcaaguucaacaggauuu

SEQ ID NO: 214474 - RNA, 19 nt, Homo sapiens
  misc_RNA (1)...(19): siRNA sense strand
gaacuggcugcugaauguu

SEQ ID NO: 214475 - RNA, 19 nt, Homo sapiens
  misc_RNA (1)...(19): siRNA sense strand
cugcugaauguuuaugaua

SEQ ID NO: 214476 - RNA, 19 nt, Homo sapiens
  misc_RNA (1)...(19): siRNA sense strand
aagcaucaggccaaaugua

SEQ ID NO: 214477 - RNA, 19 nt, Homo sapiens
  misc_RNA (1)...(19): siRNA sense strand
uggcaucauuucccugugu

SEQ ID NO: 214478 - RNA, 19 nt, Homo sapiens
  misc_RNA (1)...(19): siRNA sense strand
ccaugaaacuccgaagacu

SEQ ID NO: 214479 - RNA, 19 nt, Homo sapiens
  misc_RNA (1)...(19): siRNA sense strand
auaauaagccagagaucga

SEQ ID NO: 214480 - RNA, 19 nt, Homo sapiens
  misc_RNA (1)...(19): siRNA sense strand
cuaauaauaagccagagau

SEQ ID NO: 214481 - RNA, 19 nt, Homo sapiens
  misc_RNA (1)...(19): siRNA sense strand
ugggugaaguugcauccuu

SEQ ID NO: 214482 - RNA, 19 nt, Homo sapiens
  misc_RNA (1)...(19): siRNA sense strand
caucauuucccuguguaaa

SEQ ID NO: 214483 - RNA, 19 nt, Homo sapiens
  misc_RNA (1)...(19): siRNA sense strand
gcguggauaugugucugaa

SEQ ID NO: 214484 - RNA, 19 nt, Homo sapiens
  misc_RNA (1)...(19): siRNA sense strand
gcacuaucccaugguggaa

SEQ ID NO: 214485 - RNA, 19 nt, Homo sapiens
  misc_RNA (1)...(19): siRNA sense strand
gagccugucagcugcaugu

SEQ ID NO: 214486 - RNA, 19 nt, Homo sapiens
  misc_RNA (1)...(19): siRNA sense strand
guacagauaccuuuucaag

SEQ ID NO: 214487 - RNA, 19 nt, Homo sapiens
  misc_RNA (1)...(19): siRNA sense strand
gucccucucugcguggaua

SEQ ID NO: 214488 - RNA, 19 nt, Homo sapiens
  misc_RNA (1)...(19): siRNA sense strand
ggagcugcuuccaauuugc

SEQ ID NO: 214489 - RNA, 19 nt, Homo sapiens
  misc_RNA (1)...(19): siRNA sense strand
uuagcugaccugaauaaug

SEQ ID NO: 214490 - RNA, 19 nt, Homo sapiens
  misc_RNA (1)...(19): siRNA sense strand
guggcaaguucaacaggau

SEQ ID NO: 214491 - RNA, 19 nt, Homo sapiens
  misc_RNA (1)...(19): siRNA sense strand
acaacaauuuggucaacgu

SEQ ID NO: 214492 - RNA, 19 nt, Homo sapiens
  misc_RNA (1)...(19): siRNA sense strand
gacuacaucaggagaagau

SEQ ID NO: 214493 - RNA, 19 nt, Homo sapiens
  misc_RNA (1)...(19): siRNA sense strand
uaauaagccagagaucgaa

SEQ ID NO: 214494 - RNA, 19 nt, Homo sapiens
  misc_RNA (1)...(19): siRNA sense strand
ugucagauucucagcuuau

SEQ ID NO: 214495 - RNA, 19 nt, Homo sapiens
  misc_RNA (1)...(19): siRNA sense strand
ggauauccugcagauuauu

SEQ ID NO: 214496 - RNA, 19 nt, Homo sapiens
  misc_RNA (1)...(19): siRNA sense strand
agcaucaggccaaauguaa

SEQ ID NO: 214497 - RNA, 19 nt, Homo sapiens
  misc_RNA (1)...(19): siRNA sense strand
gcccuuugcuuggaucucu

SEQ ID NO: 214498 - RNA, 19 nt, Homo sapiens
  misc_RNA (1)...(19): siRNA sense strand
gcugaauguuuaugauacg

SEQ ID NO: 214499 - RNA, 19 nt, Homo sapiens
  misc_RNA (1)...(19): siRNA sense strand
agacuuugccaagguacua

SEQ ID NO: 214500 - RNA, 19 nt, Homo sapiens
  misc_RNA (1)...(19): siRNA sense strand
caagcaaguggcaaguuca

SEQ ID NO: 214501 - RNA, 19 nt, Homo sapiens
  misc_RNA (1)...(19): siRNA sense strand
agacaaguacagauaccuu

SEQ ID NO: 214502 - RNA, 19 nt, Homo sapiens
  misc_RNA (1)...(19): siRNA sense strand
gcaucauuucccuguguaa

SEQ ID NO: 214503 - RNA, 19 nt, Homo sapiens
  misc_RNA (1)...(19): siRNA sense strand
cugcaaagaguguccaauc

SEQ ID NO: 214504 - RNA, 19 nt, Homo sapiens
  misc_RNA (1)...(19): siRNA sense strand
cuuauaggacugccaugaa

SEQ ID NO: 214505 - RNA, 19 nt, Homo sapiens
  misc_RNA (1)...(19): siRNA sense strand
caaagaguguccaaucauu

SEQ ID NO: 214506 - RNA, 19 nt, Homo sapiens
  misc_RNA (1)...(19): siRNA sense strand
uagcugaccugaauaaugu

SEQ ID NO: 214507 - RNA, 19 nt, Homo sapiens
  misc_RNA (1)...(19): siRNA sense strand
gcaugauucuauccaaauu

SEQ ID NO: 214508 - RNA, 19 nt, Homo sapiens
  misc_RNA (1)...(19): siRNA sense strand
ugaacuggcugcugaaugu

SEQ ID NO: 214509 - RNA, 19 nt, Homo sapiens
  misc_RNA (1)...(19): siRNA sense strand
gauauccugcagauuauua

SEQ ID NO: 214510 - RNA, 19 nt, Homo sapiens
  misc_RNA (1)...(19): siRNA sense strand
gagaagauguucgagacuu

SEQ ID NO: 214511 - RNA, 19 nt, Homo sapiens
  misc_RNA (1)...(19): siRNA sense strand
gcacuuuaauuaugacauc

SEQ ID NO: 214512 - RNA, 19 nt, Homo sapiens
  misc_RNA (1)...(19): siRNA sense strand
guaaagcacauuuggaaga

SEQ ID NO: 214513 - RNA, 19 nt, Homo sapiens
  misc_RNA (1)...(19): siRNA sense strand
gaauauugcacuccgacua

SEQ ID NO: 214514 - RNA, 19 nt, Homo sapiens
  misc_RNA (1)...(19): siRNA sense strand
uuauaggacugccaugaaa

SEQ ID NO: 214515 - RNA, 19 nt, Homo sapiens
  misc_RNA (1)...(19): siRNA sense strand
gggugaaguugcauccuuu

SEQ ID NO: 214516 - RNA, 19 nt, Homo sapiens
  misc_RNA (1)...(19): siRNA sense strand
gcaagagcacaacaauuug

SEQ ID NO: 214517 - RNA, 19 nt, Homo sapiens
  misc_RNA (1)...(19): siRNA sense strand
gcacaacaauuuggucaac

SEQ ID NO: 214518 - RNA, 19 nt, Homo sapiens
  misc_RNA (1)...(19): siRNA sense strand
agcaagagcacaacaauuu

SEQ ID NO: 214519 - RNA, 19 nt, Homo sapiens
  misc_RNA (1)...(19): siRNA sense strand
agaagauguucgagacuuu

SEQ ID NO: 214520 - RNA, 19 nt, Homo sapiens
  misc_RNA (1)...(19): siRNA sense strand
gagcaagagcacaacaauu

SEQ ID NO: 214521 - RNA, 19 nt, Homo sapiens
  misc_RNA (1)...(19): siRNA sense strand
ucaagcaaguggcaaguuc

SEQ ID NO: 214522 - RNA, 19 nt, Homo sapiens
  misc_RNA (1)...(19): siRNA sense strand
ccacgagacucaaacaacu

SEQ ID NO: 214523 - RNA, 19 nt, Homo sapiens
  misc_RNA (1)...(19): siRNA sense strand
cagcacaaccucaagcaaa

SEQ ID NO: 214524 - RNA, 19 nt, Homo sapiens
  misc_RNA (1)...(19): siRNA sense strand
gcaaagaguguccaaucau

SEQ ID NO: 214525 - RNA, 19 nt, Homo sapiens
  misc_RNA (1)...(19): siRNA sense strand
auggauauccugcagauua

SEQ ID NO: 214526 - RNA, 19 nt, Homo sapiens
  misc_RNA (1)...(19): siRNA sense strand
uguaacaucugcaaagagu

SEQ ID NO: 214527 - RNA, 19 nt, Homo sapiens
  misc_RNA (1)...(19): siRNA sense strand
guccggagcugcuuccaau

SEQ ID NO: 214528 - RNA, 19 nt, Homo sapiens
  misc_RNA (1)...(19): siRNA sense strand
gcaaguggcaaguucaaca

SEQ ID NO: 214529 - RNA, 19 nt, Homo sapiens
  misc_RNA (1)...(19): siRNA sense strand
gcuuccaauuugcuaauaa

SEQ ID NO: 214530 - RNA, 19 nt, Homo sapiens
  misc_RNA (1)...(19): siRNA sense strand
uggaagacaaguacagaua

SEQ ID NO: 214531 - RNA, 19 nt, Homo sapiens
  misc_RNA (1)...(19): siRNA sense strand
ggauccguguccugucuuu

SEQ ID NO: 214532 - RNA, 19 nt, Homo sapiens
  misc_RNA (1)...(19): siRNA sense strand
gucuuuagcugaccugaau

SEQ ID NO: 214533 - RNA, 19 nt, Homo sapiens
  misc_RNA (1)...(19): siRNA sense strand
gacaaguacagauaccuuu

SEQ ID NO: 214534 - RNA, 19 nt, Homo sapiens
  misc_RNA (1)...(19): siRNA sense strand
ccaagcaucaggccaaaug

SEQ ID NO: 214535 - RNA, 19 nt, Homo sapiens
  misc_RNA (1)...(19): siRNA sense strand
ggagcaagagcacaacaau

SEQ ID NO: 214536 - RNA, 19 nt, Homo sapiens
  misc_RNA (1)...(19): siRNA sense strand
guguaaagcacauuuggaa

SEQ ID NO: 214537 - RNA, 19 nt, Homo sapiens
  misc_RNA (1)...(19): siRNA sense strand
caagacaguugggugaagu

SEQ ID NO: 214538 - RNA, 19 nt, Homo sapiens
  misc_RNA (1)...(19): siRNA sense strand
gaagauguucgagacuuug

SEQ ID NO: 214539 - RNA, 19 nt, Homo sapiens
  misc_RNA (1)...(19): siRNA sense strand
gucagauucucagcuuaua

SEQ ID NO: 214540 - RNA, 19 nt, Homo sapiens
  misc_RNA (1)...(19): siRNA sense strand
uaacaucugcaaagagugu

SEQ ID NO: 214541 - RNA, 19 nt, Homo sapiens
  misc_RNA (1)...(19): siRNA sense strand
cggagcugcuuccaauuug

SEQ ID NO: 214542 - RNA, 19 nt, Homo sapiens
  misc_RNA (1)...(19): siRNA sense strand
gaagacaaguacagauacc

SEQ ID NO: 214543 - RNA, 19 nt, Homo sapiens
  misc_RNA (1)...(19): siRNA sense strand
ccauggauauccugcagau

SEQ ID NO: 214544 - RNA, 19 nt, Homo sapiens
  misc_RNA (1)...(19): siRNA sense strand
ggcaucauuucccugugua

SEQ ID NO: 214545 - RNA, 19 nt, Homo sapiens
  misc_RNA (1)...(19): siRNA sense strand
uggauauccugcagauuau

SEQ ID NO: 214546 - RNA, 19 nt, Homo sapiens
  misc_RNA (1)...(19): siRNA sense strand
ggaagacaaguacagauac

SEQ ID NO: 214547 - RNA, 19 nt, Homo sapiens
  misc_RNA (1)...(19): siRNA sense strand
ugcaaagaguguccaauca

SEQ ID NO: 214548 - RNA, 19 nt, Homo sapiens
  misc_RNA (1)...(19): siRNA sense strand
guggauaugugucugaacu

SEQ ID NO: 214549 - RNA, 19 nt, Homo sapiens
  misc_RNA (1)...(19): siRNA sense strand
acuggcugcugaauguuua

SEQ ID NO: 214550 - RNA, 19 nt, Homo sapiens
  misc_RNA (1)...(19): siRNA sense strand
acuaucccaugguggaaua

SEQ ID NO: 214551 - RNA, 19 nt, Homo sapiens
  misc_RNA (1)...(19): siRNA sense strand
ccggagcugcuuccaauuu

SEQ ID NO: 214552 - RNA, 19 nt, Homo sapiens
  misc_RNA (1)...(19): siRNA sense strand
ccaaauuccaagacaguug

SEQ ID NO: 214553 - RNA, 19 nt, Homo sapiens
  misc_RNA (1)...(19): siRNA sense strand
cagaaacugccaagcauca

SEQ ID NO: 214554 - RNA, 19 nt, Homo sapiens
  misc_RNA (1)...(19): siRNA sense strand
uaugacaucugccaaagcu

SEQ ID NO: 214555 - RNA, 19 nt, Homo sapiens
  misc_RNA (1)...(19): siRNA sense strand
aaugucagauucucagcuu

SEQ ID NO: 214556 - RNA, 19 nt, Homo sapiens
  misc_RNA (1)...(19): siRNA sense strand
ucgagacuuugccaaggua

SEQ ID NO: 214557 - RNA, 19 nt, Homo sapiens
  misc_RNA (1)...(19): siRNA sense strand
gcaaaaggccauaaaaugc

SEQ ID NO: 214558 - RNA, 19 nt, Homo sapiens
  misc_RNA (1)...(19): siRNA sense strand
cugcaugauucuauccaaa

SEQ ID NO: 214559 - RNA, 19 nt, Homo sapiens
  misc_RNA (1)...(19): siRNA sense strand
uaaagcacauuuggaagac

SEQ ID NO: 214560 - RNA, 19 nt, Homo sapiens
  misc_RNA (1)...(19): siRNA sense strand
acaggagucuaaagcacuu

SEQ ID NO: 214561 - RNA, 19 nt, Homo sapiens
  misc_RNA (1)...(19): siRNA sense strand
acagauaccuuuucaagca

SEQ ID NO: 214562 - RNA, 19 nt, Homo sapiens
  misc_RNA (1)...(19): siRNA sense strand
aagcacauuuggaagacaa

SEQ ID NO: 214563 - RNA, 19 nt, Homo sapiens
  misc_RNA (1)...(19): siRNA sense strand
gcuaauaauaagccagaga

SEQ ID NO: 214564 - RNA, 19 nt, Homo sapiens
  misc_RNA (1)...(19): siRNA sense strand
caagagcacaacaauuugg

SEQ ID NO: 214565 - RNA, 19 nt, Homo sapiens
  misc_RNA (1)...(19): siRNA sense strand
ccugucagcugcaugugau

SEQ ID NO: 214566 - RNA, 19 nt, Homo sapiens
  misc_RNA (1)...(19): siRNA sense strand
gcugcugaauguuuaugau

SEQ ID NO: 214567 - RNA, 19 nt, Homo sapiens
  misc_RNA (1)...(19): siRNA sense strand
acagagcucuaccagucuu

SEQ ID NO: 214568 - RNA, 19 nt, Homo sapiens
  misc_RNA (1)...(19): siRNA sense strand
acaguugggugaaguugca

SEQ ID NO: 214569 - RNA, 19 nt, Homo sapiens
  misc_RNA (1)...(19): siRNA sense strand
guuugaccacuauuuauga

SEQ ID NO: 214570 - RNA, 19 nt, Homo sapiens
  misc_RNA (1)...(19): siRNA sense strand
gcuuauaggacugccauga

SEQ ID NO: 214571 - RNA, 19 nt, Homo sapiens
  misc_RNA (1)...(19): siRNA sense strand
caucaggccaaauguaaca

SEQ ID NO: 214572 - RNA, 19 nt, Homo sapiens
  misc_RNA (1)...(19): siRNA sense strand
gauucuauccaaauuccaa

SEQ ID NO: 214573 - RNA, 19 nt, Homo sapiens
  misc_RNA (1)...(19): siRNA sense strand
ggcaaguucaacaggauuu

SEQ ID NO: 214574 - RNA, 19 nt, Homo sapiens
  misc_RNA (1)...(19): siRNA sense strand
gaacuggcugcugaauguu

SEQ ID NO: 214575 - RNA, 19 nt, Homo sapiens
  misc_RNA (1)...(19): siRNA sense strand
cugcugaauguuuaugaua

SEQ ID NO: 214576 - RNA, 19 nt, Homo sapiens
  misc_RNA (1)...(19): siRNA sense strand
aagcaucaggccaaaugua

SEQ ID NO: 214577 - RNA, 19 nt, Homo sapiens
  misc_RNA (1)...(19): siRNA sense strand
uggcaucauuucccugugu

SEQ ID NO: 214578 - RNA, 19 nt, Homo sapiens
  misc_RNA (1)...(19): siRNA sense strand
ccaugaaacuccgaagacu

SEQ ID NO: 214579 - RNA, 19 nt, Homo sapiens
  misc_RNA (1)...(19): siRNA sense strand
auaauaagccagagaucga

SEQ ID NO: 214580 - RNA, 19 nt, Homo sapiens
  misc_RNA (1)...(19): siRNA sense strand
cuaauaauaagccagagau

SEQ ID NO: 214581 - RNA, 19 nt, Homo sapiens
  misc_RNA (1)...(19): siRNA sense strand
ugggugaaguugcauccuu

SEQ ID NO: 214582 - RNA, 19 nt, Homo sapiens
  misc_RNA (1)...(19): siRNA sense strand
caucauuucccuguguaaa

SEQ ID NO: 214583 - RNA, 19 nt, Homo sapiens
  misc_RNA (1)...(19): siRNA sense strand
gcguggauaugugucugaa

SEQ ID NO: 214584 - RNA, 19 nt, Homo sapiens
  misc_RNA (1)...(19): siRNA sense strand
gcacuaucccaugguggaa

SEQ ID NO: 214585 - RNA, 19 nt, Homo sapiens
  misc_RNA (1)...(19): siRNA sense strand
gagccugucagcugcaugu

SEQ ID NO: 214586 - RNA, 19 nt, Homo sapiens
  misc_RNA (1)...(19): siRNA sense strand
guacagauaccuuuucaag

SEQ ID NO: 214587 - RNA, 19 nt, Homo sapiens
  misc_RNA (1)...(19): siRNA sense strand
gucccucucugcguggaua

SEQ ID NO: 214588 - RNA, 19 nt, Homo sapiens
  misc_RNA (1)...(19): siRNA sense strand
ggagcugcuuccaauuugc

SEQ ID NO: 214589 - RNA, 19 nt, Homo sapiens
  misc_RNA (1)...(19): siRNA sense strand
uuagcugaccugaauaaug

SEQ ID NO: 214590 - RNA, 19 nt, Homo sapiens
  misc_RNA (1)...(19): siRNA sense strand
guggcaaguucaacaggau

SEQ ID NO: 214591 - RNA, 19 nt, Homo sapiens
  misc_RNA (1)...(19): siRNA sense strand
acaacaauuuggucaacgu

SEQ ID NO: 214592 - RNA, 19 nt, Homo sapiens
  misc_RNA (1)...(19): siRNA sense strand
gacuacaucaggagaagau

SEQ ID NO: 214593 - RNA, 19 nt, Homo sapiens
  misc_RNA (1)...(19): siRNA sense strand
uaauaagccagagaucgaa

SEQ ID NO: 214594 - RNA, 19 nt, Homo sapiens
  misc_RNA (1)...(19): siRNA sense strand
ugucagauucucagcuuau

SEQ ID NO: 214595 - RNA, 19 nt, Homo sapiens
  misc_RNA (1)...(19): siRNA sense strand
ggauauccugcagauuauu

SEQ ID NO: 214596 - RNA, 19 nt, Homo sapiens
  misc_RNA (1)...(19): siRNA sense strand
agcaucaggccaaauguaa

SEQ ID NO: 214597 - RNA, 19 nt, Homo sapiens
  misc_RNA (1)...(19): siRNA sense strand
gcccuuugcuuggaucucu

SEQ ID NO: 214598 - RNA, 19 nt, Homo sapiens
  misc_RNA (1)...(19): siRNA sense strand
gcugaauguuuaugauacg

SEQ ID NO: 214599 - RNA, 19 nt, Homo sapiens
  misc_RNA (1)...(19): siRNA sense strand
agacuuugccaagguacua

SEQ ID NO: 214600 - RNA, 19 nt, Homo sapiens
  misc_RNA (1)...(19): siRNA sense strand
caagcaaguggcaaguuca

SEQ ID NO: 214601 - RNA, 19 nt, Homo sapiens
  misc_RNA (1)...(19): siRNA sense strand
agacaaguacagauaccuu

SEQ ID NO: 214602 - RNA, 19 nt, Homo sapiens
  misc_RNA (1)...(19): siRNA sense strand
gcaucauuucccuguguaa

SEQ ID NO: 214603 - RNA, 19 nt, Homo sapiens
  misc_RNA (1)...(19): siRNA sense strand
cugcaaagaguguccaauc

SEQ ID NO: 214604 - RNA, 19 nt, Homo sapiens
  misc_RNA (1)...(19): siRNA sense strand
cuuauaggacugccaugaa

SEQ ID NO: 214605 - RNA, 19 nt, Homo sapiens
  misc_RNA (1)...(19): siRNA sense strand
caaagaguguccaaucauu

SEQ ID NO: 214606 - RNA, 19 nt, Homo sapiens
  misc_RNA (1)...(19): siRNA sense strand
uagcugaccugaauaaugu

SEQ ID NO: 214607 - RNA, 19 nt, Homo sapiens
  misc_RNA (1)...(19): siRNA sense strand
gcaugauucuauccaaauu

SEQ ID NO: 214608 - RNA, 19 nt, Homo sapiens
  misc_RNA (1)...(19): siRNA sense strand
ugaacuggcugcugaaugu

SEQ ID NO: 214609 - RNA, 19 nt, Homo sapiens
  misc_RNA (1)...(19): siRNA sense strand
gauauccugcagauuauua

SEQ ID NO: 214610 - RNA, 19 nt, Homo sapiens
  misc_RNA (1)...(19): siRNA sense strand
gagaagauguucgagacuu

SEQ ID NO: 214611 - RNA, 19 nt, Homo sapiens
  misc_RNA (1)...(19): siRNA sense strand
gcacuuuaauuaugacauc

SEQ ID NO: 214612 - RNA, 19 nt, Homo sapiens
  misc_RNA (1)...(19): siRNA sense strand
guaaagcacauuuggaaga

SEQ ID NO: 214613 - RNA, 19 nt, Homo sapiens
  misc_RNA (1)...(19): siRNA sense strand
gaauauugcacuccgacua

SEQ ID NO: 214614 - RNA, 19 nt, Homo sapiens
  misc_RNA (1)...(19): siRNA sense strand
uuauaggacugccaugaaa

SEQ ID NO: 214615 - RNA, 19 nt, Homo sapiens
  misc_RNA (1)...(19): siRNA sense strand
gggugaaguugcauccuuu

SEQ ID NO: 214616 - RNA, 19 nt, Homo sapiens
  misc_RNA (1)...(19): siRNA sense strand
gcaagagcacaacaauuug

SEQ ID NO: 214617 - RNA, 19 nt, Homo sapiens
  misc_RNA (1)...(19): siRNA sense strand
gcacaacaauuuggucaac

SEQ ID NO: 214618 - RNA, 19 nt, Homo sapiens
  misc_RNA (1)...(19): siRNA sense strand
agcaagagcacaacaauuu

SEQ ID NO: 214619 - RNA, 19 nt, Homo sapiens
  misc_RNA (1)...(19): siRNA sense strand
agaagauguucgagacuuu

SEQ ID NO: 214620 - RNA, 19 nt, Homo sapiens
  misc_RNA (1)...(19): siRNA sense strand
gagcaagagcacaacaauu

SEQ ID NO: 214621 - RNA, 19 nt, Homo sapiens
  misc_RNA (1)...(19): siRNA sense strand
ucaagcaaguggcaaguuc

SEQ ID NO: 214622 - RNA, 19 nt, Homo sapiens
  misc_RNA (1)...(19): siRNA sense strand
ccacgagacucaaacaacu

SEQ ID NO: 214623 - RNA, 19 nt, Homo sapiens
  misc_RNA (1)...(19): siRNA sense strand
cagcacaaccucaagcaaa

SEQ ID NO: 214624 - RNA, 19 nt, Homo sapiens
  misc_RNA (1)...(19): siRNA sense strand
gcaaagaguguccaaucau

SEQ ID NO: 214625 - RNA, 19 nt, Homo sapiens
  misc_RNA (1)...(19): siRNA sense strand
auggauauccugcagauua

SEQ ID NO: 214626 - RNA, 19 nt, Homo sapiens
  misc_RNA (1)...(19): siRNA sense strand
uguaacaucugcaaagagu

SEQ ID NO: 214627 - RNA, 19 nt, Homo sapiens
  misc_RNA (1)...(19): siRNA sense strand
guccggagcugcuuccaau

SEQ ID NO: 214628 - RNA, 19 nt, Homo sapiens
  misc_RNA (1)...(19): siRNA sense strand
gcaaguggcaaguucaaca

SEQ ID NO: 214629 - RNA, 19 nt, Homo sapiens
  misc_RNA (1)...(19): siRNA sense strand
gcuuccaauuugcuaauaa

SEQ ID NO: 214630 - RNA, 19 nt, Homo sapiens
  misc_RNA (1)...(19): siRNA sense strand
uggaagacaaguacagaua

SEQ ID NO: 214631 - RNA, 19 nt, Homo sapiens
  misc_RNA (1)...(19): siRNA sense strand
ggauccguguccugucuuu

SEQ ID NO: 214632 - RNA, 19 nt, Homo sapiens
  misc_RNA (1)...(19): siRNA sense strand
gucuuuagcugaccugaau

SEQ ID NO: 214633 - RNA, 19 nt, Homo sapiens
  misc_RNA (1)...(19): siRNA sense strand
gacaaguacagauaccuuu

SEQ ID NO: 214634 - RNA, 19 nt, Homo sapiens
  misc_RNA (1)...(19): siRNA sense strand
ccaagcaucaggccaaaug

SEQ ID NO: 214635 - RNA, 19 nt, Homo sapiens
  misc_RNA (1)...(19): siRNA sense strand
ggagcaagagcacaacaau

SEQ ID NO: 214636 - RNA, 19 nt, Homo sapiens
  misc_RNA (1)...(19): siRNA sense strand
guguaaagcacauuuggaa

SEQ ID NO: 214637 - RNA, 19 nt, Homo sapiens
  misc_RNA (1)...(19): siRNA sense strand
caagacaguugggugaagu

SEQ ID NO: 214638 - RNA, 19 nt, Homo sapiens
  misc_RNA (1)...(19): siRNA sense strand
gaagauguucgagacuuug

SEQ ID NO: 214639 - RNA, 19 nt, Homo sapiens
  misc_RNA (1)...(19): siRNA sense strand
gucagauucucagcuuaua

SEQ ID NO: 214640 - RNA, 19 nt, Homo sapiens
  misc_RNA (1)...(19): siRNA sense strand
uaacaucugcaaagagugu

SEQ ID NO: 214641 - RNA, 19 nt, Homo sapiens
  misc_RNA (1)...(19): siRNA sense strand
cggagcugcuuccaauuug

SEQ ID NO: 214642 - RNA, 19 nt, Homo sapiens
  misc_RNA (1)...(19): siRNA sense strand
gaagacaaguacagauacc

SEQ ID NO: 214643 - RNA, 19 nt, Homo sapiens
  misc_RNA (1)...(19): siRNA sense strand
ccauggauauccugcagau

SEQ ID NO: 214644 - RNA, 19 nt, Homo sapiens
  misc_RNA (1)...(19): siRNA sense strand
ggcaucauuucccugugua

SEQ ID NO: 214645 - RNA, 19 nt, Homo sapiens
  misc_RNA (1)...(19): siRNA sense strand
uggauauccugcagauuau

SEQ ID NO: 214646 - RNA, 19 nt, Homo sapiens
  misc_RNA (1)...(19): siRNA sense strand
ggaagacaaguacagauac

SEQ ID NO: 214647 - RNA, 19 nt, Homo sapiens
  misc_RNA (1)...(19): siRNA sense strand
ugcaaagaguguccaauca

SEQ ID NO: 214648 - RNA, 19 nt, Homo sapiens
  misc_RNA (1)...(19): siRNA sense strand
guggauaugugucugaacu

SEQ ID NO: 214649 - RNA, 19 nt, Homo sapiens
  misc_RNA (1)...(19): siRNA sense strand
acuggcugcugaauguuua

SEQ ID NO: 214650 - RNA, 19 nt, Homo sapiens
  misc_RNA (1)...(19): siRNA sense strand
acuaucccaugguggaaua

SEQ ID NO: 214651 - RNA, 19 nt, Homo sapiens
  misc_RNA (1)...(19): siRNA sense strand
ccggagcugcuuccaauuu

SEQ ID NO: 214652 - RNA, 19 nt, Homo sapiens
  misc_RNA (1)...(19): siRNA sense strand
ccaaauuccaagacaguug

SEQ ID NO: 214653 - RNA, 19 nt, Homo sapiens
  misc_RNA (1)...(19): siRNA sense strand
cagaaacugccaagcauca

SEQ ID NO: 214654 - RNA, 19 nt, Homo sapiens
  misc_RNA (1)...(19): siRNA sense strand
uaugacaucugccaaagcu

SEQ ID NO: 214655 - RNA, 19 nt, Homo sapiens
  misc_RNA (1)...(19): siRNA sense strand
aaugucagauucucagcuu

SEQ ID NO: 214656 - RNA, 19 nt, Homo sapiens
  misc_RNA (1)...(19): siRNA sense strand
ucgagacuuugccaaggua

SEQ ID NO: 214657 - RNA, 19 nt, Homo sapiens
  misc_RNA (1)...(19): siRNA sense strand
gcaaaaggccauaaaaugc

SEQ ID NO: 214658 - RNA, 19 nt, Homo sapiens
  misc_RNA (1)...(19): siRNA sense strand
cugcaugauucuauccaaa

SEQ ID NO: 214659 - RNA, 19 nt, Homo sapiens
  misc_RNA (1)...(19): siRNA sense strand
uaaagcacauuuggaagac

SEQ ID NO: 214660 - RNA, 19 nt, Homo sapiens
  misc_RNA (1)...(19): siRNA sense strand
acaggagucuaaagcacuu

SEQ ID NO: 214661 - RNA, 19 nt, Homo sapiens
  misc_RNA (1)...(19): siRNA sense strand
acagauaccuuuucaagca

SEQ ID NO: 214662 - RNA, 19 nt, Homo sapiens
  misc_RNA (1)...(19): siRNA sense strand
aagcacauuuggaagacaa

SEQ ID NO: 214663 - RNA, 19 nt, Homo sapiens
  misc_RNA (1)...(19): siRNA sense strand
gcuaauaauaagccagaga

SEQ ID NO: 214664 - RNA, 19 nt, Homo sapiens
  misc_RNA (1)...(19): siRNA sense strand
caagagcacaacaauuugg

SEQ ID NO: 214665 - RNA, 19 nt, Homo sapiens
  misc_RNA (1)...(19): siRNA sense strand
ccugucagcugcaugugau

SEQ ID NO: 214666 - RNA, 19 nt, Homo sapiens
  misc_RNA (1)...(19): siRNA sense strand
gcugcugaauguuuaugau

SEQ ID NO: 214667 - RNA, 19 nt, Homo sapiens
  misc_RNA (1)...(19): siRNA sense strand
acagagcucuaccagucuu

SEQ ID NO: 214668 - RNA, 19 nt, Homo sapiens
  misc_RNA (1)...(19): siRNA sense strand
acaguugggugaaguugca

SEQ ID NO: 214669 - RNA, 19 nt, Homo sapiens
  misc_RNA (1)...(19): siRNA sense strand
guuugaccacuauuuauga

SEQ ID NO: 214670 - RNA, 19 nt, Homo sapiens
  misc_RNA (1)...(19): siRNA sense strand
gcuuauaggacugccauga

SEQ ID NO: 214671 - RNA, 19 nt, Homo sapiens
  misc_RNA (1)...(19): siRNA sense strand
caucaggccaaauguaaca

SEQ ID NO: 214672 - RNA, 19 nt, Homo sapiens
  misc_RNA (1)...(19): siRNA sense strand
gauucuauccaaauuccaa

SEQ ID NO: 214673 - RNA, 19 nt, Homo sapiens
  misc_RNA (1)...(19): siRNA sense strand
ggcaaguucaacaggauuu

SEQ ID NO: 214674 - RNA, 19 nt, Homo sapiens
  misc_RNA (1)...(19): siRNA sense strand
gaacuggcugcugaauguu

SEQ ID NO: 214675 - RNA, 19 nt, Homo sapiens
  misc_RNA (1)...(19): siRNA sense strand
cugcugaauguuuaugaua

SEQ ID NO: 214676 - RNA, 19 nt, Homo sapiens
  misc_RNA (1)...(19): siRNA sense strand
aagcaucaggccaaaugua

SEQ ID NO: 214677 - RNA, 19 nt, Homo sapiens
  misc_RNA (1)...(19): siRNA sense strand
uggcaucauuucccugugu

SEQ ID NO: 214678 - RNA, 19 nt, Homo sapiens
  misc_RNA (1)...(19): siRNA sense strand
ccaugaaacuccgaagacu

SEQ ID NO: 214679 - RNA, 19 nt, Homo sapiens
  misc_RNA (1)...(19): siRNA sense strand
auaauaagccagagaucga

SEQ ID NO: 214680 - RNA, 19 nt, Homo sapiens
  misc_RNA (1)...(19): siRNA sense strand
cuaauaauaagccagagau

SEQ ID NO: 214681 - RNA, 19 nt, Homo sapiens
  misc_RNA (1)...(19): siRNA sense strand
ugggugaaguugcauccuu

SEQ ID NO: 214682 - RNA, 19 nt, Homo sapiens
  misc_RNA (1)...(19): siRNA sense strand
caucauuucccuguguaaa

SEQ ID NO: 214683 - RNA, 19 nt, Homo sapiens
  misc_RNA (1)...(19): siRNA sense strand
gcguggauaugugucugaa

SEQ ID NO: 214684 - RNA, 19 nt, Homo sapiens
  misc_RNA (1)...(19): siRNA sense strand
gcacuaucccaugguggaa

SEQ ID NO: 214685 - RNA, 19 nt, Homo sapiens
  misc_RNA (1)...(19): siRNA sense strand
gagccugucagcugcaugu

SEQ ID NO: 214686 - RNA, 19 nt, Homo sapiens
  misc_RNA (1)...(19): siRNA sense strand
guacagauaccuuuucaag

SEQ ID NO: 214687 - RNA, 19 nt, Homo sapiens
  misc_RNA (1)...(19): siRNA sense strand
gucccucucugcguggaua

SEQ ID NO: 214688 - RNA, 19 nt, Homo sapiens
  misc_RNA (1)...(19): siRNA sense strand
ggagcugcuuccaauuugc

SEQ ID NO: 214689 - RNA, 19 nt, Homo sapiens
  misc_RNA (1)...(19): siRNA sense strand
uuagcugaccugaauaaug

SEQ ID NO: 214690 - RNA, 19 nt, Homo sapiens
  misc_RNA (1)...(19): siRNA sense strand
guggcaaguucaacaggau

SEQ ID NO: 214691 - RNA, 19 nt, Homo sapiens
  misc_RNA (1)...(19): siRNA sense strand
acaacaauuuggucaacgu

SEQ ID NO: 214692 - RNA, 19 nt, Homo sapiens
  misc_RNA (1)...(19): siRNA sense strand
gacuacaucaggagaagau

SEQ ID NO: 214693 - RNA, 19 nt, Homo sapiens
  misc_RNA (1)...(19): siRNA sense strand
uaauaagccagagaucgaa

SEQ ID NO: 214694 - RNA, 19 nt, Homo sapiens
  misc_RNA (1)...(19): siRNA sense strand
ugucagauucucagcuuau

SEQ ID NO: 214695 - RNA, 19 nt, Homo sapiens
  misc_RNA (1)...(19): siRNA sense strand
ggauauccugcagauuauu

SEQ ID NO: 214696 - RNA, 19 nt, Homo sapiens
  misc_RNA (1)...(19): siRNA sense strand
agcaucaggccaaauguaa

SEQ ID NO: 214697 - RNA, 19 nt, Homo sapiens
  misc_RNA (1)...(19): siRNA sense strand
gcccuuugcuuggaucucu

SEQ ID NO: 214698 - RNA, 19 nt, Homo sapiens
  misc_RNA (1)...(19): siRNA sense strand
gcugaauguuuaugauacg

SEQ ID NO: 214699 - RNA, 19 nt, Homo sapiens
  misc_RNA (1)...(19): siRNA sense strand
agacuuugccaagguacua

SEQ ID NO: 214700 - RNA, 19 nt, Homo sapiens
  misc_RNA (1)...(19): siRNA sense strand
caagcaaguggcaaguuca

SEQ ID NO: 214701 - RNA, 19 nt, Homo sapiens
  misc_RNA (1)...(19): siRNA sense strand
agacaaguacagauaccuu

SEQ ID NO: 214702 - RNA, 19 nt, Homo sapiens
  misc_RNA (1)...(19): siRNA sense strand
gcaucauuucccuguguaa

SEQ ID NO: 214703 - RNA, 19 nt, Homo sapiens
  misc_RNA (1)...(19): siRNA sense strand
cugcaaagaguguccaauc

SEQ ID NO: 214704 - RNA, 19 nt, Homo sapiens
  misc_RNA (1)...(19): siRNA sense strand
cuuauaggacugccaugaa

SEQ ID NO: 214705 - RNA, 19 nt, Homo sapiens
  misc_RNA (1)...(19): siRNA sense strand
caaagaguguccaaucauu

SEQ ID NO: 214706 - RNA, 19 nt, Homo sapiens
  misc_RNA (1)...(19): siRNA sense strand
uagcugaccugaauaaugu

SEQ ID NO: 214707 - RNA, 19 nt, Homo sapiens
  misc_RNA (1)...(19): siRNA sense strand
gcaugauucuauccaaauu

SEQ ID NO: 214708 - RNA, 19 nt, Homo sapiens
  misc_RNA (1)...(19): siRNA sense strand
ugaacuggcugcugaaugu

SEQ ID NO: 214709 - RNA, 19 nt, Homo sapiens
  misc_RNA (1)...(19): siRNA sense strand
gauauccugcagauuauua

SEQ ID NO: 214710 - RNA, 19 nt, Homo sapiens
  misc_RNA (1)...(19): siRNA sense strand
gagaagauguucgagacuu

SEQ ID NO: 214711 - RNA, 19 nt, Homo sapiens
  misc_RNA (1)...(19): siRNA sense strand
gcacuuuaauuaugacauc

SEQ ID NO: 214712 - RNA, 19 nt, Homo sapiens
  misc_RNA (1)...(19): siRNA sense strand
guaaagcacauuuggaaga

SEQ ID NO: 214713 - RNA, 19 nt, Homo sapiens
  misc_RNA (1)...(19): siRNA sense strand
gaauauugcacuccgacua

SEQ ID NO: 214714 - RNA, 19 nt, Homo sapiens
  misc_RNA (1)...(19): siRNA sense strand
uuauaggacugccaugaaa

SEQ ID NO: 214715 - RNA, 19 nt, Homo sapiens
  misc_RNA (1)...(19): siRNA sense strand
gggugaaguugcauccuuu

SEQ ID NO: 214716 - RNA, 19 nt, Homo sapiens
  misc_RNA (1)...(19): siRNA sense strand
gcaagagcacaacaauuug

SEQ ID NO: 214717 - RNA, 19 nt, Homo sapiens
  misc_RNA (1)...(19): siRNA sense strand
gcacaacaauuuggucaac

SEQ ID NO: 214718 - RNA, 19 nt, Homo sapiens
  misc_RNA (1)...(19): siRNA sense strand
agcaagagcacaacaauuu

SEQ ID NO: 214719 - RNA, 19 nt, Homo sapiens
  misc_RNA (1)...(19): siRNA sense strand
agaagauguucgagacuuu

SEQ ID NO: 214720 - RNA, 19 nt, Homo sapiens
  misc_RNA (1)...(19): siRNA sense strand
gagcaagagcacaacaauu

SEQ ID NO: 214721 - RNA, 19 nt, Homo sapiens
  misc_RNA (1)...(19): siRNA sense strand
ucaagcaaguggcaaguuc

SEQ ID NO: 214722 - RNA, 19 nt, Homo sapiens
  misc_RNA (1)...(19): siRNA sense strand
ccacgagacucaaacaacu

SEQ ID NO: 214723 - RNA, 19 nt, Homo sapiens
  misc_RNA (1)...(19): siRNA sense strand
cagcacaaccucaagcaaa

SEQ ID NO: 214724 - RNA, 19 nt, Homo sapiens
  misc_RNA (1)...(19): siRNA sense strand
gcaaagaguguccaaucau

SEQ ID NO: 214725 - RNA, 19 nt, Homo sapiens
  misc_RNA (1)...(19): siRNA sense strand
auggauauccugcagauua

SEQ ID NO: 214726 - RNA, 19 nt, Homo sapiens
  misc_RNA (1)...(19): siRNA sense strand
uguaacaucugcaaagagu

SEQ ID NO: 214727 - RNA, 19 nt, Homo sapiens
  misc_RNA (1)...(19): siRNA sense strand
guccggagcugcuuccaau

SEQ ID NO: 214728 - RNA, 19 nt, Homo sapiens
  misc_RNA (1)...(19): siRNA sense strand
gcaaguggcaaguucaaca

SEQ ID NO: 214729 - RNA, 19 nt, Homo sapiens
  misc_RNA (1)...(19): siRNA sense strand
gcuuccaauuugcuaauaa

SEQ ID NO: 214730 - RNA, 19 nt, Homo sapiens
  misc_RNA (1)...(19): siRNA sense strand
uggaagacaaguacagaua

SEQ ID NO: 214731 - RNA, 19 nt, Homo sapiens
  misc_RNA (1)...(19): siRNA sense strand
ggauccguguccugucuuu

SEQ ID NO: 214732 - RNA, 19 nt, Homo sapiens
  misc_RNA (1)...(19): siRNA sense strand
gucuuuagcugaccugaau

SEQ ID NO: 214733 - RNA, 19 nt, Homo sapiens
  misc_RNA (1)...(19): siRNA sense strand
gacaaguacagauaccuuu

SEQ ID NO: 214734 - RNA, 19 nt, Homo sapiens
  misc_RNA (1)...(19): siRNA sense strand
ccaagcaucaggccaaaug

SEQ ID NO: 214735 - RNA, 19 nt, Homo sapiens
  misc_RNA (1)...(19): siRNA sense strand
ggagcaagagcacaacaau

SEQ ID NO: 214736 - RNA, 19 nt, Homo sapiens
  misc_RNA (1)...(19): siRNA sense strand
guguaaagcacauuuggaa

SEQ ID NO: 214737 - RNA, 19 nt, Homo sapiens
  misc_RNA (1)...(19): siRNA sense strand
caagacaguugggugaagu

SEQ ID NO: 214738 - RNA, 19 nt, Homo sapiens
  misc_RNA (1)...(19): siRNA sense strand
gaagauguucgagacuuug

SEQ ID NO: 214739 - RNA, 19 nt, Homo sapiens
  misc_RNA (1)...(19): siRNA sense strand
gucagauucucagcuuaua

SEQ ID NO: 214740 - RNA, 19 nt, Homo sapiens
  misc_RNA (1)...(19): siRNA sense strand
uaacaucugcaaagagugu

SEQ ID NO: 214741 - RNA, 19 nt, Homo sapiens
  misc_RNA (1)...(19): siRNA sense strand
cggagcugcuuccaauuug

SEQ ID NO: 214742 - RNA, 19 nt, Homo sapiens
  misc_RNA (1)...(19): siRNA sense strand
gaagacaaguacagauacc

SEQ ID NO: 214743 - RNA, 19 nt, Homo sapiens
  misc_RNA (1)...(19): siRNA sense strand
ccauggauauccugcagau

SEQ ID NO: 214744 - RNA, 19 nt, Homo sapiens
  misc_RNA (1)...(19): siRNA sense strand
ggcaucauuucccugugua

SEQ ID NO: 214745 - RNA, 19 nt, Homo sapiens
  misc_RNA (1)...(19): siRNA sense strand
uggauauccugcagauuau

SEQ ID NO: 214746 - RNA, 19 nt, Homo sapiens
  misc_RNA (1)...(19): siRNA sense strand
ggaagacaaguacagauac

SEQ ID NO: 214747 - RNA, 19 nt, Homo sapiens
  misc_RNA (1)...(19): siRNA sense strand
ugcaaagaguguccaauca

SEQ ID NO: 214748 - RNA, 19 nt, Homo sapiens
  misc_RNA (1)...(19): siRNA sense strand
guggauaugugucugaacu

SEQ ID NO: 214749 - RNA, 19 nt, Homo sapiens
  misc_RNA (1)...(19): siRNA sense strand
acuggcugcugaauguuua

SEQ ID NO: 214750 - RNA, 19 nt, Homo sapiens
  misc_RNA (1)...(19): siRNA sense strand
acuaucccaugguggaaua

SEQ ID NO: 214751 - RNA, 19 nt, Homo sapiens
  misc_RNA (1)...(19): siRNA sense strand
ccggagcugcuuccaauuu

SEQ ID NO: 214752 - RNA, 19 nt, Homo sapiens
  misc_RNA (1)...(19): siRNA sense strand
ccaaauuccaagacaguug

SEQ ID NO: 214753 - RNA, 19 nt, Homo sapiens
  misc_RNA (1)...(19): siRNA sense strand
cagaaacugccaagcauca

SEQ ID NO: 214754 - RNA, 19 nt, Homo sapiens
  misc_RNA (1)...(19): siRNA sense strand
uaugacaucugccaaagcu

SEQ ID NO: 214755 - RNA, 19 nt, Homo sapiens
  misc_RNA (1)...(19): siRNA sense strand
aaugucagauucucagcuu

SEQ ID NO: 214756 - RNA, 19 nt, Homo sapiens
  misc_RNA (1)...(19): siRNA sense strand
ucgagacuuugccaaggua

SEQ ID NO: 214757 - RNA, 19 nt, Homo sapiens
  misc_RNA (1)...(19): siRNA sense strand
gcaaaaggccauaaaaugc

SEQ ID NO: 214758 - RNA, 19 nt, Homo sapiens
  misc_RNA (1)...(19): siRNA sense strand
cugcaugauucuauccaaa

SEQ ID NO: 214759 - RNA, 19 nt, Homo sapiens
  misc_RNA (1)...(19): siRNA sense strand
uaaagcacauuuggaagac

SEQ ID NO: 214760 - RNA, 19 nt, Homo sapiens
  misc_RNA (1)...(19): siRNA sense strand
acaggagucuaaagcacuu

SEQ ID NO: 214761 - RNA, 19 nt, Homo sapiens
  misc_RNA (1)...(19): siRNA sense strand
acagauaccuuuucaagca

SEQ ID NO: 214762 - RNA, 19 nt, Homo sapiens
  misc_RNA (1)...(19): siRNA sense strand
aagcacauuuggaagacaa

SEQ ID NO: 214763 - RNA, 19 nt, Homo sapiens
  misc_RNA (1)...(19): siRNA sense strand
gcuaauaauaagccagaga

SEQ ID NO: 214764 - RNA, 19 nt, Homo sapiens
  misc_RNA (1)...(19): siRNA sense strand
caagagcacaacaauuugg

SEQ ID NO: 214765 - RNA, 19 nt, Homo sapiens
  misc_RNA (1)...(19): siRNA sense strand
ccugucagcugcaugugau

SEQ ID NO: 214766 - RNA, 19 nt, Homo sapiens
  misc_RNA (1)...(19): siRNA sense strand
gcugcugaauguuuaugau

SEQ ID NO: 214767 - RNA, 19 nt, Homo sapiens
  misc_RNA (1)...(19): siRNA sense strand
acagagcucuaccagucuu

SEQ ID NO: 214768 - RNA, 19 nt, Homo sapiens
  misc_RNA (1)...(19): siRNA sense strand
acaguugggugaaguugca

SEQ ID NO: 214769 - RNA, 19 nt, Homo sapiens
  misc_RNA (1)...(19): siRNA sense strand
guuugaccacuauuuauga

SEQ ID NO: 214770 - RNA, 19 nt, Homo sapiens
  misc_RNA (1)...(19): siRNA sense strand
gcuuauaggacugccauga

SEQ ID NO: 214771 - RNA, 19 nt, Homo sapiens
  misc_RNA (1)...(19): siRNA sense strand
caucaggccaaauguaaca

SEQ ID NO: 214772 - RNA, 19 nt, Homo sapiens
  misc_RNA (1)...(19): siRNA sense strand
gauucuauccaaauuccaa

SEQ ID NO: 214773 - RNA, 19 nt, Homo sapiens
  misc_RNA (1)...(19): siRNA sense strand
ggcaaguucaacaggauuu

SEQ ID NO: 214774 - RNA, 19 nt, Homo sapiens
  misc_RNA (1)...(19): siRNA sense strand
gaacuggcugcugaauguu

SEQ ID NO: 214775 - RNA, 19 nt, Homo sapiens
  misc_RNA (1)...(19): siRNA sense strand
cugcugaauguuuaugaua

SEQ ID NO: 214776 - RNA, 19 nt, Homo sapiens
  misc_RNA (1)...(19): siRNA sense strand
aagcaucaggccaaaugua

SEQ ID NO: 214777 - RNA, 19 nt, Homo sapiens
  misc_RNA (1)...(19): siRNA sense strand
uggcaucauuucccugugu

SEQ ID NO: 214778 - RNA, 19 nt, Homo sapiens
  misc_RNA (1)...(19): siRNA sense strand
ccaugaaacuccgaagacu

SEQ ID NO: 214779 - RNA, 19 nt, Homo sapiens
  misc_RNA (1)...(19): siRNA sense strand
auaauaagccagagaucga

SEQ ID NO: 214780 - RNA, 19 nt, Homo sapiens
  misc_RNA (1)...(19): siRNA sense strand
cuaauaauaagccagagau

SEQ ID NO: 214781 - RNA, 19 nt, Homo sapiens
  misc_RNA (1)...(19): siRNA sense strand
ugggugaaguugcauccuu

SEQ ID NO: 214782 - RNA, 19 nt, Homo sapiens
  misc_RNA (1)...(19): siRNA sense strand
caucauuucccuguguaaa

SEQ ID NO: 214783 - RNA, 19 nt, Homo sapiens
  misc_RNA (1)...(19): siRNA sense strand
gcguggauaugugucugaa

SEQ ID NO: 214784 - RNA, 19 nt, Homo sapiens
  misc_RNA (1)...(19): siRNA sense strand
gcacuaucccaugguggaa

SEQ ID NO: 214785 - RNA, 19 nt, Homo sapiens
  misc_RNA (1)...(19): siRNA sense strand
gagccugucagcugcaugu

SEQ ID NO: 214786 - RNA, 19 nt, Homo sapiens
  misc_RNA (1)...(19): siRNA sense strand
guacagauaccuuuucaag

SEQ ID NO: 214787 - RNA, 19 nt, Homo sapiens
  misc_RNA (1)...(19): siRNA sense strand
gucccucucugcguggaua

SEQ ID NO: 214788 - RNA, 19 nt, Homo sapiens
  misc_RNA (1)...(19): siRNA sense strand
ggagcugcuuccaauuugc

SEQ ID NO: 214789 - RNA, 19 nt, Homo sapiens
  misc_RNA (1)...(19): siRNA sense strand
uuagcugaccugaauaaug

SEQ ID NO: 214790 - RNA, 19 nt, Homo sapiens
  misc_RNA (1)...(19): siRNA sense strand
guggcaaguucaacaggau

SEQ ID NO: 214791 - RNA, 19 nt, Homo sapiens
  misc_RNA (1)...(19): siRNA sense strand
acaacaauuuggucaacgu

SEQ ID NO: 214792 - RNA, 19 nt, Homo sapiens
  misc_RNA (1)...(19): siRNA sense strand
gacuacaucaggagaagau

SEQ ID NO: 214793 - RNA, 19 nt, Homo sapiens
  misc_RNA (1)...(19): siRNA sense strand
uaauaagccagagaucgaa

SEQ ID NO: 214794 - RNA, 19 nt, Homo sapiens
  misc_RNA (1)...(19): siRNA sense strand
ugucagauucucagcuuau

SEQ ID NO: 214795 - RNA, 19 nt, Homo sapiens
  misc_RNA (1)...(19): siRNA sense strand
ggauauccugcagauuauu

SEQ ID NO: 214796 - RNA, 19 nt, Homo sapiens
  misc_RNA (1)...(19): siRNA sense strand
agcaucaggccaaauguaa

SEQ ID NO: 214797 - RNA, 19 nt, Homo sapiens
  misc_RNA (1)...(19): siRNA sense strand
gcccuuugcuuggaucucu

SEQ ID NO: 214798 - RNA, 19 nt, Homo sapiens
  misc_RNA (1)...(19): siRNA sense strand
gcugaauguuuaugauacg

SEQ ID NO: 214799 - RNA, 19 nt, Homo sapiens
  misc_RNA (1)...(19): siRNA sense strand
agacuuugccaagguacua

SEQ ID NO: 214800 - RNA, 19 nt, Homo sapiens
  misc_RNA (1)...(19): siRNA sense strand
caagcaaguggcaaguuca

SEQ ID NO: 214801 - RNA, 19 nt, Homo sapiens
  misc_RNA (1)...(19): siRNA sense strand
agacaaguacagauaccuu

SEQ ID NO: 214802 - RNA, 19 nt, Homo sapiens
  misc_RNA (1)...(19): siRNA sense strand
gcaucauuucccuguguaa

SEQ ID NO: 214803 - RNA, 19 nt, Homo sapiens
  misc_RNA (1)...(19): siRNA sense strand
cugcaaagaguguccaauc

SEQ ID NO: 214804 - RNA, 19 nt, Homo sapiens
  misc_RNA (1)...(19): siRNA sense strand
cuuauaggacugccaugaa

SEQ ID NO: 214805 - RNA, 19 nt, Homo sapiens
  misc_RNA (1)...(19): siRNA sense strand
caaagaguguccaaucauu

SEQ ID NO: 214806 - RNA, 19 nt, Homo sapiens
  misc_RNA (1)...(19): siRNA sense strand
uagcugaccugaauaaugu

SEQ ID NO: 214807 - RNA, 19 nt, Homo sapiens
  misc_RNA (1)...(19): siRNA sense strand
gcaugauucuauccaaauu

SEQ ID NO: 214808 - RNA, 19 nt, Homo sapiens
  misc_RNA (1)...(19): siRNA sense strand
ugaacuggcugcugaaugu

SEQ ID NO: 214809 - RNA, 19 nt, Homo sapiens
  misc_RNA (1)...(19): siRNA sense strand
gauauccugcagauuauua

SEQ ID NO: 214810 - RNA, 19 nt, Homo sapiens
  misc_RNA (1)...(19): siRNA sense strand
gagaagauguucgagacuu

SEQ ID NO: 214811 - RNA, 19 nt, Homo sapiens
  misc_RNA (1)...(19): siRNA sense strand
gcacuuuaauuaugacauc

SEQ ID NO: 214812 - RNA, 19 nt, Homo sapiens
  misc_RNA (1)...(19): siRNA sense strand
guaaagcacauuuggaaga

SEQ ID NO: 214813 - RNA, 19 nt, Homo sapiens
  misc_RNA (1)...(19): siRNA sense strand
gaauauugcacuccgacua

SEQ ID NO: 214814 - RNA, 19 nt, Homo sapiens
  misc_RNA (1)...(19): siRNA sense strand
uuauaggacugccaugaaa

SEQ ID NO: 214815 - RNA, 19 nt, Homo sapiens
  misc_RNA (1)...(19): siRNA sense strand
gggugaaguugcauccuuu

SEQ ID NO: 214816 - RNA, 19 nt, Homo sapiens
  misc_RNA (1)...(19): siRNA sense strand
gcaagagcacaacaauuug

SEQ ID NO: 214817 - RNA, 19 nt, Homo sapiens
  misc_RNA (1)...(19): siRNA sense strand
gcacaacaauuuggucaac

SEQ ID NO: 214818 - RNA, 19 nt, Homo sapiens
  misc_RNA (1)...(19): siRNA sense strand
agcaagagcacaacaauuu

SEQ ID NO: 214819 - RNA, 19 nt, Homo sapiens
  misc_RNA (1)...(19): siRNA sense strand
agaagauguucgagacuuu

SEQ ID NO: 214820 - RNA, 19 nt, Homo sapiens
  misc_RNA (1)...(19): siRNA sense strand
gagcaagagcacaacaauu

SEQ ID NO: 214821 - RNA, 19 nt, Homo sapiens
  misc_RNA (1)...(19): siRNA sense strand
ucaagcaaguggcaaguuc

SEQ ID NO: 214822 - RNA, 19 nt, Homo sapiens
  misc_RNA (1)...(19): siRNA sense strand
ccacgagacucaaacaacu

SEQ ID NO: 214823 - RNA, 19 nt, Homo sapiens
  misc_RNA (1)...(19): siRNA sense strand
cagcacaaccucaagcaaa

SEQ ID NO: 214824 - RNA, 19 nt, Homo sapiens
  misc_RNA (1)...(19): siRNA sense strand
gcaaagaguguccaaucau

SEQ ID NO: 214825 - RNA, 19 nt, Homo sapiens
  misc_RNA (1)...(19): siRNA sense strand
auggauauccugcagauua

SEQ ID NO: 214826 - RNA, 19 nt, Homo sapiens
  misc_RNA (1)...(19): siRNA sense strand
uguaacaucugcaaagagu

SEQ ID NO: 214827 - RNA, 19 nt, Homo sapiens
  misc_RNA (1)...(19): siRNA sense strand
guccggagcugcuuccaau

SEQ ID NO: 214828 - RNA, 19 nt, Homo sapiens
  misc_RNA (1)...(19): siRNA sense strand
gcaaguggcaaguucaaca

SEQ ID NO: 214829 - RNA, 19 nt, Homo sapiens
  misc_RNA (1)...(19): siRNA sense strand
gcuuccaauuugcuaauaa

SEQ ID NO: 214830 - RNA, 19 nt, Homo sapiens
  misc_RNA (1)...(19): siRNA sense strand
uggaagacaaguacagaua

SEQ ID NO: 214831 - RNA, 19 nt, Homo sapiens
  misc_RNA (1)...(19): siRNA sense strand
ggauccguguccugucuuu

SEQ ID NO: 214832 - RNA, 19 nt, Homo sapiens
  misc_RNA (1)...(19): siRNA sense strand
gucuuuagcugaccugaau

SEQ ID NO: 214833 - RNA, 19 nt, Homo sapiens
  misc_RNA (1)...(19): siRNA sense strand
gacaaguacagauaccuuu

SEQ ID NO: 214834 - RNA, 19 nt, Homo sapiens
  misc_RNA (1)...(19): siRNA sense strand
ccaagcaucaggccaaaug

SEQ ID NO: 214835 - RNA, 19 nt, Homo sapiens
  misc_RNA (1)...(19): siRNA sense strand
ggagcaagagcacaacaau

SEQ ID NO: 214836 - RNA, 19 nt, Homo sapiens
  misc_RNA (1)...(19): siRNA sense strand
guguaaagcacauuuggaa

SEQ ID NO: 214837 - RNA, 19 nt, Homo sapiens
  misc_RNA (1)...(19): siRNA sense strand
caagacaguugggugaagu

SEQ ID NO: 214838 - RNA, 19 nt, Homo sapiens
  misc_RNA (1)...(19): siRNA sense strand
gaagauguucgagacuuug

SEQ ID NO: 214839 - RNA, 19 nt, Homo sapiens
  misc_RNA (1)...(19): siRNA sense strand
gucagauucucagcuuaua

SEQ ID NO: 214840 - RNA, 19 nt, Homo sapiens
  misc_RNA (1)...(19): siRNA sense strand
uaacaucugcaaagagugu

SEQ ID NO: 214841 - RNA, 19 nt, Homo sapiens
  misc_RNA (1)...(19): siRNA sense strand
cggagcugcuuccaauuug

SEQ ID NO: 214842 - RNA, 19 nt, Homo sapiens
  misc_RNA (1)...(19): siRNA sense strand
gaagacaaguacagauacc

SEQ ID NO: 214843 - RNA, 19 nt, Homo sapiens
  misc_RNA (1)...(19): siRNA sense strand
ccauggauauccugcagau

SEQ ID NO: 214844 - RNA, 19 nt, Homo sapiens
  misc_RNA (1)...(19): siRNA sense strand
ggcaucauuucccugugua

SEQ ID NO: 214845 - RNA, 19 nt, Homo sapiens
  misc_RNA (1)...(19): siRNA sense strand
uggauauccugcagauuau

SEQ ID NO: 214846 - RNA, 19 nt, Homo sapiens
  misc_RNA (1)...(19): siRNA sense strand
ggaagacaaguacagauac

SEQ ID NO: 214847 - RNA, 19 nt, Homo sapiens
  misc_RNA (1)...(19): siRNA sense strand
ugcaaagaguguccaauca

SEQ ID NO: 214848 - RNA, 19 nt, Homo sapiens
  misc_RNA (1)...(19): siRNA sense strand
guggauaugugucugaacu

SEQ ID NO: 214849 - RNA, 19 nt, Homo sapiens
  misc_RNA (1)...(19): siRNA sense strand
acuggcugcugaauguuua

SEQ ID NO: 214850 - RNA, 19 nt, Homo sapiens
  misc_RNA (1)...(19): siRNA sense strand
acuaucccaugguggaaua

SEQ ID NO: 214851 - RNA, 19 nt, Homo sapiens
  misc_RNA (1)...(19): siRNA sense strand
ccggagcugcuuccaauuu

SEQ ID NO: 214852 - RNA, 19 nt, Homo sapiens
  misc_RNA (1)...(19): siRNA sense strand
ccaaauuccaagacaguug

SEQ ID NO: 214853 - RNA, 19 nt, Homo sapiens
  misc_RNA (1)...(19): siRNA sense strand
cagaaacugccaagcauca

SEQ ID NO: 214854 - RNA, 19 nt, Homo sapiens
  misc_RNA (1)...(19): siRNA sense strand
uaugacaucugccaaagcu

SEQ ID NO: 214855 - RNA, 19 nt, Homo sapiens
  misc_RNA (1)...(19): siRNA sense strand
aaugucagauucucagcuu

SEQ ID NO: 214856 - RNA, 19 nt, Homo sapiens
  misc_RNA (1)...(19): siRNA sense strand
ucgagacuuugccaaggua

SEQ ID NO: 214857 - RNA, 19 nt, Homo sapiens
  misc_RNA (1)...(19): siRNA sense strand
gcaaaaggccauaaaaugc

SEQ ID NO: 214858 - RNA, 19 nt, Homo sapiens
  misc_RNA (1)...(19): siRNA sense strand
cugcaugauucuauccaaa

SEQ ID NO: 214859 - RNA, 19 nt, Homo sapiens
  misc_RNA (1)...(19): siRNA sense strand
uaaagcacauuuggaagac

SEQ ID NO: 214860 - RNA, 19 nt, Homo sapiens
  misc_RNA (1)...(19): siRNA sense strand
acaggagucuaaagcacuu

SEQ ID NO: 214861 - RNA, 19 nt, Homo sapiens
  misc_RNA (1)...(19): siRNA sense strand
acagauaccuuuucaagca

SEQ ID NO: 214862 - RNA, 19 nt, Homo sapiens
  misc_RNA (1)...(19): siRNA sense strand
aagcacauuuggaagacaa

SEQ ID NO: 214863 - RNA, 19 nt, Homo sapiens
  misc_RNA (1)...(19): siRNA sense strand
gcuaauaauaagccagaga

SEQ ID NO: 214864 - RNA, 19 nt, Homo sapiens
  misc_RNA (1)...(19): siRNA sense strand
caagagcacaacaauuugg

SEQ ID NO: 214865 - RNA, 19 nt, Homo sapiens
  misc_RNA (1)...(19): siRNA sense strand
ccugucagcugcaugugau

SEQ ID NO: 214866 - RNA, 19 nt, Homo sapiens
  misc_RNA (1)...(19): siRNA sense strand
gcugcugaauguuuaugau

SEQ ID NO: 214867 - RNA, 19 nt, Homo sapiens
  misc_RNA (1)...(19): siRNA sense strand
acagagcucuaccagucuu

SEQ ID NO: 214868 - RNA, 19 nt, Homo sapiens
  misc_RNA (1)...(19): siRNA sense strand
acaguugggugaaguugca

SEQ ID NO: 214869 - RNA, 19 nt, Homo sapiens
  misc_RNA (1)...(19): siRNA sense strand
guuugaccacuauuuauga

SEQ ID NO: 214870 - RNA, 19 nt, Homo sapiens
  misc_RNA (1)...(19): siRNA sense strand
gcuuauaggacugccauga

SEQ ID NO: 214871 - RNA, 19 nt, Homo sapiens
  misc_RNA (1)...(19): siRNA sense strand
caucaggccaaauguaaca

SEQ ID NO: 214872 - RNA, 19 nt, Homo sapiens
  misc_RNA (1)...(19): siRNA sense strand
gauucuauccaaauuccaa

SEQ ID NO: 214873 - RNA, 19 nt, Homo sapiens
  misc_RNA (1)...(19): siRNA sense strand
ggcaaguucaacaggauuu

SEQ ID NO: 214874 - RNA, 19 nt, Homo sapiens
  misc_RNA (1)...(19): siRNA sense strand
gaacuggcugcugaauguu

SEQ ID NO: 214875 - RNA, 19 nt, Homo sapiens
  misc_RNA (1)...(19): siRNA sense strand
cugcugaauguuuaugaua

SEQ ID NO: 214876 - RNA, 19 nt, Homo sapiens
  misc_RNA (1)...(19): siRNA sense strand
aagcaucaggccaaaugua

SEQ ID NO: 214877 - RNA, 19 nt, Homo sapiens
  misc_RNA (1)...(19): siRNA sense strand
uggcaucauuucccugugu

SEQ ID NO: 214878 - RNA, 19 nt, Homo sapiens
  misc_RNA (1)...(19): siRNA sense strand
ccaugaaacuccgaagacu

SEQ ID NO: 214879 - RNA, 19 nt, Homo sapiens
  misc_RNA (1)...(19): siRNA sense strand
auaauaagccagagaucga

SEQ ID NO: 214880 - RNA, 19 nt, Homo sapiens
  misc_RNA (1)...(19): siRNA sense strand
cuaauaauaagccagagau

SEQ ID NO: 214881 - RNA, 19 nt, Homo sapiens
  misc_RNA (1)...(19): siRNA sense strand
ugggugaaguugcauccuu

SEQ ID NO: 214882 - RNA, 19 nt, Homo sapiens
  misc_RNA (1)...(19): siRNA sense strand
caucauuucccuguguaaa

SEQ ID NO: 214883 - RNA, 19 nt, Homo sapiens
  misc_RNA (1)...(19): siRNA sense strand
gcguggauaugugucugaa

SEQ ID NO: 214884 - RNA, 19 nt, Homo sapiens
  misc_RNA (1)...(19): siRNA sense strand
gcacuaucccaugguggaa

SEQ ID NO: 214885 - RNA, 19 nt, Homo sapiens
  misc_RNA (1)...(19): siRNA sense strand
gagccugucagcugcaugu

SEQ ID NO: 214886 - RNA, 19 nt, Homo sapiens
  misc_RNA (1)...(19): siRNA sense strand
guacagauaccuuuucaag

SEQ ID NO: 214887 - RNA, 19 nt, Homo sapiens
  misc_RNA (1)...(19): siRNA sense strand
gucccucucugcguggaua

SEQ ID NO: 214888 - RNA, 19 nt, Homo sapiens
  misc_RNA (1)...(19): siRNA sense strand
ggagcugcuuccaauuugc

SEQ ID NO: 214889 - RNA, 19 nt, Homo sapiens
  misc_RNA (1)...(19): siRNA sense strand
uuagcugaccugaauaaug

SEQ ID NO: 214890 - RNA, 19 nt, Homo sapiens
  misc_RNA (1)...(19): siRNA sense strand
guggcaaguucaacaggau

SEQ ID NO: 214891 - RNA, 19 nt, Homo sapiens
  misc_RNA (1)...(19): siRNA sense strand
acaacaauuuggucaacgu

SEQ ID NO: 214892 - RNA, 19 nt, Homo sapiens
  misc_RNA (1)...(19): siRNA sense strand
gacuacaucaggagaagau

SEQ ID NO: 214893 - RNA, 19 nt, Homo sapiens
  misc_RNA (1)...(19): siRNA sense strand
uaauaagccagagaucgaa

SEQ ID NO: 214894 - RNA, 19 nt, Homo sapiens
  misc_RNA (1)...(19): siRNA sense strand
ugucagauucucagcuuau

SEQ ID NO: 214895 - RNA, 19 nt, Homo sapiens
  misc_RNA (1)...(19): siRNA sense strand
ggauauccugcagauuauu

SEQ ID NO: 214896 - RNA, 19 nt, Homo sapiens
  misc_RNA (1)...(19): siRNA sense strand
agcaucaggccaaauguaa

SEQ ID NO: 214897 - RNA, 19 nt, Homo sapiens
  misc_RNA (1)...(19): siRNA sense strand
gcccuuugcuuggaucucu

SEQ ID NO: 214898 - RNA, 19 nt, Homo sapiens
  misc_RNA (1)...(19): siRNA sense strand
gcugaauguuuaugauacg

SEQ ID NO: 214899 - RNA, 19 nt, Homo sapiens
  misc_RNA (1)...(19): siRNA sense strand
agacuuugccaagguacua

SEQ ID NO: 214900 - RNA, 19 nt, Homo sapiens
  misc_RNA (1)...(19): siRNA sense strand
caagcaaguggcaaguuca

SEQ ID NO: 214901 - RNA, 19 nt, Homo sapiens
  misc_RNA (1)...(19): siRNA sense strand
agacaaguacagauaccuu

SEQ ID NO: 214902 - RNA, 19 nt, Homo sapiens
  misc_RNA (1)...(19): siRNA sense strand
gcaucauuucccuguguaa

SEQ ID NO: 214903 - RNA, 19 nt, Homo sapiens
  misc_RNA (1)...(19): siRNA sense strand
cugcaaagaguguccaauc

SEQ ID NO: 214904 - RNA, 19 nt, Homo sapiens
  misc_RNA (1)...(19): siRNA sense strand
cuuauaggacugccaugaa

SEQ ID NO: 214905 - RNA, 19 nt, Homo sapiens
  misc_RNA (1)...(19): siRNA sense strand
caaagaguguccaaucauu

SEQ ID NO: 214906 - RNA, 19 nt, Homo sapiens
  misc_RNA (1)...(19): siRNA sense strand
uagcugaccugaauaaugu

SEQ ID NO: 214907 - RNA, 19 nt, Homo sapiens
  misc_RNA (1)...(19): siRNA sense strand
gcaugauucuauccaaauu

SEQ ID NO: 214908 - RNA, 19 nt, Homo sapiens
  misc_RNA (1)...(19): siRNA sense strand
ugaacuggcugcugaaugu

SEQ ID NO: 214909 - RNA, 19 nt, Homo sapiens
  misc_RNA (1)...(19): siRNA sense strand
gauauccugcagauuauua

SEQ ID NO: 214910 - RNA, 19 nt, Homo sapiens
  misc_RNA (1)...(19): siRNA sense strand
gagaagauguucgagacuu

SEQ ID NO: 214911 - RNA, 19 nt, Homo sapiens
  misc_RNA (1)...(19): siRNA sense strand
gcacuuuaauuaugacauc

SEQ ID NO: 214912 - RNA, 19 nt, Homo sapiens
  misc_RNA (1)...(19): siRNA sense strand
guaaagcacauuuggaaga

SEQ ID NO: 214913 - RNA, 19 nt, Homo sapiens
  misc_RNA (1)...(19): siRNA sense strand
gaauauugcacuccgacua

SEQ ID NO: 214914 - RNA, 19 nt, Homo sapiens
  misc_RNA (1)...(19): siRNA sense strand
uuauaggacugccaugaaa

SEQ ID NO: 214915 - RNA, 19 nt, Homo sapiens
  misc_RNA (1)...(19): siRNA sense strand
gggugaaguugcauccuuu

SEQ ID NO: 214916 - RNA, 19 nt, Homo sapiens
  misc_RNA (1)...(19): siRNA sense strand
gcaagagcacaacaauuug

SEQ ID NO: 214917 - RNA, 19 nt, Homo sapiens
  misc_RNA (1)...(19): siRNA sense strand
gcacaacaauuuggucaac

SEQ ID NO: 214918 - RNA, 19 nt, Homo sapiens
  misc_RNA (1)...(19): siRNA sense strand
agcaagagcacaacaauuu

SEQ ID NO: 214919 - RNA, 19 nt, Homo sapiens
  misc_RNA (1)...(19): siRNA sense strand
agaagauguucgagacuuu

SEQ ID NO: 214920 - RNA, 19 nt, Homo sapiens
  misc_RNA (1)...(19): siRNA sense strand
gagcaagagcacaacaauu

SEQ ID NO: 214921 - RNA, 19 nt, Homo sapiens
  misc_RNA (1)...(19): siRNA sense strand
ucaagcaaguggcaaguuc

SEQ ID NO: 214922 - RNA, 19 nt, Homo sapiens
  misc_RNA (1)...(19): siRNA sense strand
ccacgagacucaaacaacu

SEQ ID NO: 214923 - RNA, 19 nt, Homo sapiens
  misc_RNA (1)...(19): siRNA sense strand
cagcacaaccucaagcaaa

SEQ ID NO: 214924 - RNA, 19 nt, Homo sapiens
  misc_RNA (1)...(19): siRNA sense strand
gcaaagaguguccaaucau

SEQ ID NO: 214925 - RNA, 19 nt, Homo sapiens
  misc_RNA (1)...(19): siRNA sense strand
auggauauccugcagauua

SEQ ID NO: 214926 - RNA, 19 nt, Homo sapiens
  misc_RNA (1)...(19): siRNA sense strand
uguaacaucugcaaagagu

SEQ ID NO: 214927 - RNA, 19 nt, Homo sapiens
  misc_RNA (1)...(19): siRNA sense strand
guccggagcugcuuccaau

SEQ ID NO: 214928 - RNA, 19 nt, Homo sapiens
  misc_RNA (1)...(19): siRNA sense strand
gcaaguggcaaguucaaca

SEQ ID NO: 214929 - RNA, 19 nt, Homo sapiens
  misc_RNA (1)...(19): siRNA sense strand
gcuuccaauuugcuaauaa

SEQ ID NO: 214930 - RNA, 19 nt, Homo sapiens
  misc_RNA (1)...(19): siRNA sense strand
uggaagacaaguacagaua

SEQ ID NO: 214931 - RNA, 19 nt, Homo sapiens
  misc_RNA (1)...(19): siRNA sense strand
ggauccguguccugucuuu

SEQ ID NO: 214932 - RNA, 19 nt, Homo sapiens
  misc_RNA (1)...(19): siRNA sense strand
gucuuuagcugaccugaau

SEQ ID NO: 214933 - RNA, 19 nt, Homo sapiens
  misc_RNA (1)...(19): siRNA sense strand
gacaaguacagauaccuuu

SEQ ID NO: 214934 - RNA, 19 nt, Homo sapiens
  misc_RNA (1)...(19): siRNA sense strand
ccaagcaucaggccaaaug

SEQ ID NO: 214935 - RNA, 19 nt, Homo sapiens
  misc_RNA (1)...(19): siRNA sense strand
ggagcaagagcacaacaau

SEQ ID NO: 214936 - RNA, 19 nt, Homo sapiens
  misc_RNA (1)...(19): siRNA sense strand
guguaaagcacauuuggaa

SEQ ID NO: 214937 - RNA, 19 nt, Homo sapiens
  misc_RNA (1)...(19): siRNA sense strand
caagacaguugggugaagu

SEQ ID NO: 214938 - RNA, 19 nt, Homo sapiens
  misc_RNA (1)...(19): siRNA sense strand
gaagauguucgagacuuug

SEQ ID NO: 214939 - RNA, 19 nt, Homo sapiens
  misc_RNA (1)...(19): siRNA sense strand
gucagauucucagcuuaua

SEQ ID NO: 214940 - RNA, 19 nt, Homo sapiens
  misc_RNA (1)...(19): siRNA sense strand
uaacaucugcaaagagugu

SEQ ID NO: 214941 - RNA, 19 nt, Homo sapiens
  misc_RNA (1)...(19): siRNA sense strand
cggagcugcuuccaauuug

SEQ ID NO: 214942 - RNA, 19 nt, Homo sapiens
  misc_RNA (1)...(19): siRNA sense strand
gaagacaaguacagauacc

SEQ ID NO: 214943 - RNA, 19 nt, Homo sapiens
  misc_RNA (1)...(19): siRNA sense strand
ccauggauauccugcagau

SEQ ID NO: 214944 - RNA, 19 nt, Homo sapiens
  misc_RNA (1)...(19): siRNA sense strand
ggcaucauuucccugugua

SEQ ID NO: 214945 - RNA, 19 nt, Homo sapiens
  misc_RNA (1)...(19): siRNA sense strand
uggauauccugcagauuau

SEQ ID NO: 214946 - RNA, 19 nt, Homo sapiens
  misc_RNA (1)...(19): siRNA sense strand
ggaagacaaguacagauac

SEQ ID NO: 214947 - RNA, 19 nt, Homo sapiens
  misc_RNA (1)...(19): siRNA sense strand
ugcaaagaguguccaauca

SEQ ID NO: 214948 - RNA, 19 nt, Homo sapiens
  misc_RNA (1)...(19): siRNA sense strand
guggauaugugucugaacu

SEQ ID NO: 214949 - RNA, 19 nt, Homo sapiens
  misc_RNA (1)...(19): siRNA sense strand
acuggcugcugaauguuua

SEQ ID NO: 214950 - RNA, 19 nt, Homo sapiens
  misc_RNA (1)...(19): siRNA sense strand
acuaucccaugguggaaua

SEQ ID NO: 214951 - RNA, 19 nt, Homo sapiens
  misc_RNA (1)...(19): siRNA sense strand
ccggagcugcuuccaauuu

SEQ ID NO: 214952 - RNA, 19 nt, Homo sapiens
  misc_RNA (1)...(19): siRNA sense strand
ccaaauuccaagacaguug

SEQ ID NO: 214953 - RNA, 19 nt, Homo sapiens
  misc_RNA (1)...(19): siRNA sense strand
cagaaacugccaagcauca

SEQ ID NO: 214954 - RNA, 19 nt, Homo sapiens
  misc_RNA (1)...(19): siRNA sense strand
uaugacaucugccaaagcu

SEQ ID NO: 214955 - RNA, 19 nt, Homo sapiens
  misc_RNA (1)...(19): siRNA sense strand
aaugucagauucucagcuu

SEQ ID NO: 214956 - RNA, 19 nt, Homo sapiens
  misc_RNA (1)...(19): siRNA sense strand
ucgagacuuugccaaggua

SEQ ID NO: 214957 - RNA, 19 nt, Homo sapiens
  misc_RNA (1)...(19): siRNA sense strand
gcaaaaggccauaaaaugc

SEQ ID NO: 214958 - RNA, 19 nt, Homo sapiens
  misc_RNA (1)...(19): siRNA sense strand
cugcaugauucuauccaaa

SEQ ID NO: 214959 - RNA, 19 nt, Homo sapiens
  misc_RNA (1)...(19): siRNA sense strand
uaaagcacauuuggaagac

SEQ ID NO: 214960 - RNA, 19 nt, Homo sapiens
  misc_RNA (1)...(19): siRNA sense strand
acaggagucuaaagcacuu

SEQ ID NO: 214961 - RNA, 19 nt, Homo sapiens
  misc_RNA (1)...(19): siRNA sense strand
acagauaccuuuucaagca

SEQ ID NO: 214962 - RNA, 19 nt, Homo sapiens
  misc_RNA (1)...(19): siRNA sense strand
aagcacauuuggaagacaa

SEQ ID NO: 214963 - RNA, 19 nt, Homo sapiens
  misc_RNA (1)...(19): siRNA sense strand
gcuaauaauaagccagaga

SEQ ID NO: 214964 - RNA, 19 nt, Homo sapiens
  misc_RNA (1)...(19): siRNA sense strand
caagagcacaacaauuugg

SEQ ID NO: 214965 - RNA, 19 nt, Homo sapiens
  misc_RNA (1)...(19): siRNA sense strand
ccugucagcugcaugugau

SEQ ID NO: 214966 - RNA, 19 nt, Homo sapiens
  misc_RNA (1)...(19): siRNA sense strand
gcugcugaauguuuaugau

SEQ ID NO: 214967 - RNA, 19 nt, Homo sapiens
  misc_RNA (1)...(19): siRNA sense strand
acagagcucuaccagucuu

SEQ ID NO: 214968 - RNA, 19 nt, Homo sapiens
  misc_RNA (1)...(19): siRNA sense strand
acaguugggugaaguugca

SEQ ID NO: 214969 - RNA, 19 nt, Homo sapiens
  misc_RNA (1)...(19): siRNA sense strand
guuugaccacuauuuauga

SEQ ID NO: 214970 - RNA, 19 nt, Homo sapiens
  misc_RNA (1)...(19): siRNA sense strand
gcuuauaggacugccauga

SEQ ID NO: 214971 - RNA, 19 nt, Homo sapiens
  misc_RNA (1)...(19): siRNA sense strand
caucaggccaaauguaaca

SEQ ID NO: 214972 - RNA, 19 nt, Homo sapiens
  misc_RNA (1)...(19): siRNA sense strand
gauucuauccaaauuccaa

SEQ ID NO: 214973 - RNA, 19 nt, Homo sapiens
  misc_RNA (1)...(19): siRNA sense strand
ggcaaguucaacaggauuu

SEQ ID NO: 214974 - RNA, 19 nt, Homo sapiens
  misc_RNA (1)...(19): siRNA sense strand
gaacuggcugcugaauguu

SEQ ID NO: 214975 - RNA, 19 nt, Homo sapiens
  misc_RNA (1)...(19): siRNA sense strand
cugcugaauguuuaugaua

SEQ ID NO: 214976 - RNA, 19 nt, Homo sapiens
  misc_RNA (1)...(19): siRNA sense strand
aagcaucaggccaaaugua

SEQ ID NO: 214977 - RNA, 19 nt, Homo sapiens
  misc_RNA (1)...(19): siRNA sense strand
uggcaucauuucccugugu

SEQ ID NO: 214978 - RNA, 19 nt, Homo sapiens
  misc_RNA (1)...(19): siRNA sense strand
ccaugaaacuccgaagacu

SEQ ID NO: 214979 - RNA, 19 nt, Homo sapiens
  misc_RNA (1)...(19): siRNA sense strand
auaauaagccagagaucga

SEQ ID NO: 214980 - RNA, 19 nt, Homo sapiens
  misc_RNA (1)...(19): siRNA sense strand
cuaauaauaagccagagau

SEQ ID NO: 214981 - RNA, 19 nt, Homo sapiens
  misc_RNA (1)...(19): siRNA sense strand
ugggugaaguugcauccuu

SEQ ID NO: 214982 - RNA, 19 nt, Homo sapiens
  misc_RNA (1)...(19): siRNA sense strand
caucauuucccuguguaaa

SEQ ID NO: 214983 - RNA, 19 nt, Homo sapiens
  misc_RNA (1)...(19): siRNA sense strand
gcguggauaugugucugaa

SEQ ID NO: 214984 - RNA, 19 nt, Homo sapiens
  misc_RNA (1)...(19): siRNA sense strand
gcacuaucccaugguggaa

SEQ ID NO: 214985 - RNA, 19 nt, Homo sapiens
  misc_RNA (1)...(19): siRNA sense strand
gagccugucagcugcaugu

SEQ ID NO: 214986 - RNA, 19 nt, Homo sapiens
  misc_RNA (1)...(19): siRNA sense strand
guacagauaccuuuucaag

SEQ ID NO: 214987 - RNA, 19 nt, Homo sapiens
  misc_RNA (1)...(19): siRNA sense strand
gucccucucugcguggaua

SEQ ID NO: 214988 - RNA, 19 nt, Homo sapiens
  misc_RNA (1)...(19): siRNA sense strand
ggagcugcuuccaauuugc

SEQ ID NO: 214989 - RNA, 19 nt, Homo sapiens
  misc_RNA (1)...(19): siRNA sense strand
uuagcugaccugaauaaug

SEQ ID NO: 214990 - RNA, 19 nt, Homo sapiens
  misc_RNA (1)...(19): siRNA sense strand
guggcaaguucaacaggau

SEQ ID NO: 214991 - RNA, 19 nt, Homo sapiens
  misc_RNA (1)...(19): siRNA sense strand
acaacaauuuggucaacgu

SEQ ID NO: 214992 - RNA, 19 nt, Homo sapiens
  misc_RNA (1)...(19): siRNA sense strand
gacuacaucaggagaagau

SEQ ID NO: 214993 - RNA, 19 nt, Homo sapiens
  misc_RNA (1)...(19): siRNA sense strand
uaauaagccagagaucgaa

SEQ ID NO: 214994 - RNA, 19 nt, Homo sapiens
  misc_RNA (1)...(19): siRNA sense strand
ugucagauucucagcuuau

SEQ ID NO: 214995 - RNA, 19 nt, Homo sapiens
  misc_RNA (1)...(19): siRNA sense strand
ggauauccugcagauuauu

SEQ ID NO: 214996 - RNA, 19 nt, Homo sapiens
  misc_RNA (1)...(19): siRNA sense strand
agcaucaggccaaauguaa

SEQ ID NO: 214997 - RNA, 19 nt, Homo sapiens
  misc_RNA (1)...(19): siRNA sense strand
gcccuuugcuuggaucucu

SEQ ID NO: 214998 - RNA, 19 nt, Homo sapiens
  misc_RNA (1)...(19): siRNA sense strand
gcugaauguuuaugauacg

SEQ ID NO: 214999 - RNA, 19 nt, Homo sapiens
  misc_RNA (1)...(19): siRNA sense strand
agacuuugccaagguacua

SEQ ID NO: 215000 - RNA, 19 nt, Homo sapiens
  misc_RNA (1)...(19): siRNA sense strand
caagcaaguggcaaguuca

SEQ ID NO: 215001 - RNA, 19 nt, Homo sapiens
  misc_RNA (1)...(19): siRNA sense strand
agacaaguacagauaccuu

SEQ ID NO: 215002 - RNA, 19 nt, Homo sapiens
  misc_RNA (1)...(19): siRNA sense strand
gcaucauuucccuguguaa

SEQ ID NO: 215003 - RNA, 19 nt, Homo sapiens
  misc_RNA (1)...(19): siRNA sense strand
cugcaaagaguguccaauc

SEQ ID NO: 215004 - RNA, 19 nt, Homo sapiens
  misc_RNA (1)...(19): siRNA sense strand
cuuauaggacugccaugaa

SEQ ID NO: 215005 - RNA, 19 nt, Homo sapiens
  misc_RNA (1)...(19): siRNA sense strand
caaagaguguccaaucauu

SEQ ID NO: 215006 - RNA, 19 nt, Homo sapiens
  misc_RNA (1)...(19): siRNA sense strand
uagcugaccugaauaaugu

SEQ ID NO: 215007 - RNA, 19 nt, Homo sapiens
  misc_RNA (1)...(19): siRNA sense strand
gcaugauucuauccaaauu

SEQ ID NO: 215008 - RNA, 19 nt, Homo sapiens
  misc_RNA (1)...(19): siRNA sense strand
ugaacuggcugcugaaugu

SEQ ID NO: 215009 - RNA, 19 nt, Homo sapiens
  misc_RNA (1)...(19): siRNA sense strand
gauauccugcagauuauua

SEQ ID NO: 215010 - RNA, 19 nt, Homo sapiens
  misc_RNA (1)...(19): siRNA sense strand
gagaagauguucgagacuu

SEQ ID NO: 215011 - RNA, 19 nt, Homo sapiens
  misc_RNA (1)...(19): siRNA sense strand
gcacuuuaauuaugacauc

SEQ ID NO: 215012 - RNA, 19 nt, Homo sapiens
  misc_RNA (1)...(19): siRNA sense strand
guaaagcacauuuggaaga

SEQ ID NO: 215013 - RNA, 19 nt, Homo sapiens
  misc_RNA (1)...(19): siRNA sense strand
gaauauugcacuccgacua

SEQ ID NO: 215014 - RNA, 19 nt, Homo sapiens
  misc_RNA (1)...(19): siRNA sense strand
uuauaggacugccaugaaa

SEQ ID NO: 215015 - RNA, 19 nt, Homo sapiens
  misc_RNA (1)...(19): siRNA sense strand
gggugaaguugcauccuuu

SEQ ID NO: 215016 - RNA, 19 nt, Homo sapiens
  misc_RNA (1)...(19): siRNA sense strand
gcaagagcacaacaauuug

SEQ ID NO: 215017 - RNA, 19 nt, Homo sapiens
  misc_RNA (1)...(19): siRNA sense strand
gcacaacaauuuggucaac

SEQ ID NO: 215018 - RNA, 19 nt, Homo sapiens
  misc_RNA (1)...(19): siRNA sense strand
agcaagagcacaacaauuu

SEQ ID NO: 215019 - RNA, 19 nt, Homo sapiens
  misc_RNA (1)...(19): siRNA sense strand
agaagauguucgagacuuu

SEQ ID NO: 215020 - RNA, 19 nt, Homo sapiens
  misc_RNA (1)...(19): siRNA sense strand
gagcaagagcacaacaauu

SEQ ID NO: 215021 - RNA, 19 nt, Homo sapiens
  misc_RNA (1)...(19): siRNA sense strand
ucaagcaaguggcaaguuc

SEQ ID NO: 215022 - RNA, 19 nt, Homo sapiens
  misc_RNA (1)...(19): siRNA sense strand
ccacgagacucaaacaacu

SEQ ID NO: 215023 - RNA, 19 nt, Homo sapiens
  misc_RNA (1)...(19): siRNA sense strand
cagcacaaccucaagcaaa

SEQ ID NO: 215024 - RNA, 19 nt, Homo sapiens
  misc_RNA (1)...(19): siRNA sense strand
gcaaagaguguccaaucau

SEQ ID NO: 215025 - RNA, 19 nt, Homo sapiens
  misc_RNA (1)...(19): siRNA sense strand
auggauauccugcagauua

SEQ ID NO: 215026 - RNA, 19 nt, Homo sapiens
  misc_RNA (1)...(19): siRNA sense strand
uguaacaucugcaaagagu

SEQ ID NO: 215027 - RNA, 19 nt, Homo sapiens
  misc_RNA (1)...(19): siRNA sense strand
guccggagcugcuuccaau

SEQ ID NO: 215028 - RNA, 19 nt, Homo sapiens
  misc_RNA (1)...(19): siRNA sense strand
gcaaguggcaaguucaaca

SEQ ID NO: 215029 - RNA, 19 nt, Homo sapiens
  misc_RNA (1)...(19): siRNA sense strand
gcuuccaauuugcuaauaa

SEQ ID NO: 215030 - RNA, 19 nt, Homo sapiens
  misc_RNA (1)...(19): siRNA sense strand
uggaagacaaguacagaua

SEQ ID NO: 215031 - RNA, 19 nt, Homo sapiens
  misc_RNA (1)...(19): siRNA sense strand
ggauccguguccugucuuu

SEQ ID NO: 215032 - RNA, 19 nt, Homo sapiens
  misc_RNA (1)...(19): siRNA sense strand
gucuuuagcugaccugaau

SEQ ID NO: 215033 - RNA, 19 nt, Homo sapiens
  misc_RNA (1)...(19): siRNA sense strand
gacaaguacagauaccuuu

SEQ ID NO: 215034 - RNA, 19 nt, Homo sapiens
  misc_RNA (1)...(19): siRNA sense strand
ccaagcaucaggccaaaug

SEQ ID NO: 215035 - RNA, 19 nt, Homo sapiens
  misc_RNA (1)...(19): siRNA sense strand
ggagcaagagcacaacaau

SEQ ID NO: 215036 - RNA, 19 nt, Homo sapiens
  misc_RNA (1)...(19): siRNA sense strand
guguaaagcacauuuggaa

SEQ ID NO: 215037 - RNA, 19 nt, Homo sapiens
  misc_RNA (1)...(19): siRNA sense strand
caagacaguugggugaagu

SEQ ID NO: 215038 - RNA, 19 nt, Homo sapiens
  misc_RNA (1)...(19): siRNA sense strand
gaagauguucgagacuuug

SEQ ID NO: 215039 - RNA, 19 nt, Homo sapiens
  misc_RNA (1)...(19): siRNA sense strand
gucagauucucagcuuaua

SEQ ID NO: 215040 - RNA, 19 nt, Homo sapiens
  misc_RNA (1)...(19): siRNA sense strand
uaacaucugcaaagagugu

SEQ ID NO: 215041 - RNA, 19 nt, Homo sapiens
  misc_RNA (1)...(19): siRNA sense strand
cggagcugcuuccaauuug

SEQ ID NO: 215042 - RNA, 19 nt, Homo sapiens
  misc_RNA (1)...(19): siRNA sense strand
gaagacaaguacagauacc

SEQ ID NO: 215043 - RNA, 19 nt, Homo sapiens
  misc_RNA (1)...(19): siRNA sense strand
ccauggauauccugcagau

SEQ ID NO: 215044 - RNA, 19 nt, Homo sapiens
  misc_RNA (1)...(19): siRNA sense strand
ggcaucauuucccugugua

SEQ ID NO: 215045 - RNA, 19 nt, Homo sapiens
  misc_RNA (1)...(19): siRNA sense strand
uggauauccugcagauuau

SEQ ID NO: 215046 - RNA, 19 nt, Homo sapiens
  misc_RNA (1)...(19): siRNA sense strand
ggaagacaaguacagauac

SEQ ID NO: 215047 - RNA, 19 nt, Homo sapiens
  misc_RNA (1)...(19): siRNA sense strand
ugcaaagaguguccaauca

SEQ ID NO: 215048 - RNA, 19 nt, Homo sapiens
  misc_RNA (1)...(19): siRNA sense strand
guggauaugugucugaacu

SEQ ID NO: 215049 - RNA, 19 nt, Homo sapiens
  misc_RNA (1)...(19): siRNA sense strand
acuggcugcugaauguuua

SEQ ID NO: 215050 - RNA, 19 nt, Homo sapiens
  misc_RNA (1)...(19): siRNA sense strand
acuaucccaugguggaaua

SEQ ID NO: 215051 - RNA, 19 nt, Homo sapiens
  misc_RNA (1)...(19): siRNA sense strand
ccggagcugcuuccaauuu

SEQ ID NO: 215052 - RNA, 19 nt, Homo sapiens
  misc_RNA (1)...(19): siRNA sense strand
ccaaauuccaagacaguug

SEQ ID NO: 215053 - RNA, 19 nt, Homo sapiens
  misc_RNA (1)...(19): siRNA sense strand
cagaaacugccaagcauca

SEQ ID NO: 215054 - RNA, 19 nt, Homo sapiens
  misc_RNA (1)...(19): siRNA sense strand
uaugacaucugccaaagcu

SEQ ID NO: 215055 - RNA, 19 nt, Homo sapiens
  misc_RNA (1)...(19): siRNA sense strand
aaugucagauucucagcuu

SEQ ID NO: 215056 - RNA, 19 nt, Homo sapiens
  misc_RNA (1)...(19): siRNA sense strand
ucgagacuuugccaaggua

SEQ ID NO: 215057 - RNA, 19 nt, Homo sapiens
  misc_RNA (1)...(19): siRNA sense strand
gcaaaaggccauaaaaugc

SEQ ID NO: 215058 - RNA, 19 nt, Homo sapiens
  misc_RNA (1)...(19): siRNA sense strand
cugcaugauucuauccaaa

SEQ ID NO: 215059 - RNA, 19 nt, Homo sapiens
  misc_RNA (1)...(19): siRNA sense strand
uaaagcacauuuggaagac

SEQ ID NO: 215060 - RNA, 19 nt, Homo sapiens
  misc_RNA (1)...(19): siRNA sense strand
acaggagucuaaagcacuu

SEQ ID NO: 215061 - RNA, 19 nt, Homo sapiens
  misc_RNA (1)...(19): siRNA sense strand
acagauaccuuuucaagca

SEQ ID NO: 215062 - RNA, 19 nt, Homo sapiens
  misc_RNA (1)...(19): siRNA sense strand
aagcacauuuggaagacaa

SEQ ID NO: 215063 - RNA, 19 nt, Homo sapiens
  misc_RNA (1)...(19): siRNA sense strand
gcuaauaauaagccagaga

SEQ ID NO: 215064 - RNA, 19 nt, Homo sapiens
  misc_RNA (1)...(19): siRNA sense strand
caagagcacaacaauuugg

SEQ ID NO: 215065 - RNA, 19 nt, Homo sapiens
  misc_RNA (1)...(19): siRNA sense strand
ccugucagcugcaugugau

SEQ ID NO: 215066 - RNA, 19 nt, Homo sapiens
  misc_RNA (1)...(19): siRNA sense strand
gcugcugaauguuuaugau

SEQ ID NO: 215067 - RNA, 19 nt, Homo sapiens
  misc_RNA (1)...(19): siRNA sense strand
acagagcucuaccagucuu

SEQ ID NO: 215068 - RNA, 19 nt, Homo sapiens
  misc_RNA (1)...(19): siRNA sense strand
acaguugggugaaguugca

SEQ ID NO: 215069 - RNA, 19 nt, Homo sapiens
  misc_RNA (1)...(19): siRNA sense strand
guuugaccacuauuuauga

SEQ ID NO: 215070 - RNA, 19 nt, Homo sapiens
  misc_RNA (1)...(19): siRNA sense strand
gcuuauaggacugccauga

SEQ ID NO: 215071 - RNA, 19 nt, Homo sapiens
  misc_RNA (1)...(19): siRNA sense strand
caucaggccaaauguaaca

SEQ ID NO: 215072 - RNA, 19 nt, Homo sapiens
  misc_RNA (1)...(19): siRNA sense strand
gauucuauccaaauuccaa

SEQ ID NO: 215073 - RNA, 19 nt, Homo sapiens
  misc_RNA (1)...(19): siRNA sense strand
ggcaaguucaacaggauuu

SEQ ID NO: 215074 - RNA, 19 nt, Homo sapiens
  misc_RNA (1)...(19): siRNA sense strand
gaacuggcugcugaauguu

SEQ ID NO: 215075 - RNA, 19 nt, Homo sapiens
  misc_RNA (1)...(19): siRNA sense strand
cugcugaauguuuaugaua

SEQ ID NO: 215076 - RNA, 19 nt, Homo sapiens
  misc_RNA (1)...(19): siRNA sense strand
aagcaucaggccaaaugua

SEQ ID NO: 215077 - RNA, 19 nt, Homo sapiens
  misc_RNA (1)...(19): siRNA sense strand
uggcaucauuucccugugu

SEQ ID NO: 215078 - RNA, 19 nt, Homo sapiens
  misc_RNA (1)...(19): siRNA sense strand
ccaugaaacuccgaagacu

SEQ ID NO: 215079 - RNA, 19 nt, Homo sapiens
  misc_RNA (1)...(19): siRNA sense strand
auaauaagccagagaucga

SEQ ID NO: 215080 - RNA, 19 nt, Homo sapiens
  misc_RNA (1)...(19): siRNA sense strand
cuaauaauaagccagagau

SEQ ID NO: 215081 - RNA, 19 nt, Homo sapiens
  misc_RNA (1)...(19): siRNA sense strand
ugggugaaguugcauccuu

SEQ ID NO: 215082 - RNA, 19 nt, Homo sapiens
  misc_RNA (1)...(19): siRNA sense strand
caucauuucccuguguaaa

SEQ ID NO: 215083 - RNA, 19 nt, Homo sapiens
  misc_RNA (1)...(19): siRNA sense strand
gcguggauaugugucugaa

SEQ ID NO: 215084 - RNA, 19 nt, Homo sapiens
  misc_RNA (1)...(19): siRNA sense strand
gcacuaucccaugguggaa

SEQ ID NO: 215085 - RNA, 19 nt, Homo sapiens
  misc_RNA (1)...(19): siRNA sense strand
gagccugucagcugcaugu

SEQ ID NO: 215086 - RNA, 19 nt, Homo sapiens
  misc_RNA (1)...(19): siRNA sense strand
guacagauaccuuuucaag

SEQ ID NO: 215087 - RNA, 19 nt, Homo sapiens
  misc_RNA (1)...(19): siRNA sense strand
gucccucucugcguggaua

SEQ ID NO: 215088 - RNA, 19 nt, Homo sapiens
  misc_RNA (1)...(19): siRNA sense strand
ggagcugcuuccaauuugc

SEQ ID NO: 215089 - RNA, 19 nt, Homo sapiens
  misc_RNA (1)...(19): siRNA sense strand
uuagcugaccugaauaaug

SEQ ID NO: 215090 - RNA, 19 nt, Homo sapiens
  misc_RNA (1)...(19): siRNA sense strand
guggcaaguucaacaggau

SEQ ID NO: 215091 - RNA, 19 nt, Homo sapiens
  misc_RNA (1)...(19): siRNA sense strand
acaacaauuuggucaacgu

SEQ ID NO: 215092 - RNA, 19 nt, Homo sapiens
  misc_RNA (1)...(19): siRNA sense strand
gacuacaucaggagaagau

SEQ ID NO: 215093 - RNA, 19 nt, Homo sapiens
  misc_RNA (1)...(19): siRNA sense strand
uaauaagccagagaucgaa

SEQ ID NO: 215094 - RNA, 19 nt, Homo sapiens
  misc_RNA (1)...(19): siRNA sense strand
ugucagauucucagcuuau

SEQ ID NO: 215095 - RNA, 19 nt, Homo sapiens
  misc_RNA (1)...(19): siRNA sense strand
ggauauccugcagauuauu

SEQ ID NO: 215096 - RNA, 19 nt, Homo sapiens
  misc_RNA (1)...(19): siRNA sense strand
agcaucaggccaaauguaa

SEQ ID NO: 215097 - RNA, 19 nt, Homo sapiens
  misc_RNA (1)...(19): siRNA sense strand
gcccuuugcuuggaucucu

SEQ ID NO: 215098 - RNA, 19 nt, Homo sapiens
  misc_RNA (1)...(19): siRNA sense strand
gcugaauguuuaugauacg

SEQ ID NO: 215099 - RNA, 19 nt, Homo sapiens
  misc_RNA (1)...(19): siRNA sense strand
agacuuugccaagguacua

SEQ ID NO: 215100 - RNA, 19 nt, Homo sapiens
  misc_RNA (1)...(19): siRNA sense strand
caagcaaguggcaaguuca

SEQ ID NO: 215101 - RNA, 19 nt, Homo sapiens
  misc_RNA (1)...(19): siRNA sense strand
agacaaguacagauaccuu

SEQ ID NO: 215102 - RNA, 19 nt, Homo sapiens
  misc_RNA (1)...(19): siRNA sense strand
gcaucauuucccuguguaa

SEQ ID NO: 215103 - RNA, 19 nt, Homo sapiens
  misc_RNA (1)...(19): siRNA sense strand
cugcaaagaguguccaauc

SEQ ID NO: 215104 - RNA, 19 nt, Homo sapiens
  misc_RNA (1)...(19): siRNA sense strand
cuuauaggacugccaugaa

SEQ ID NO: 215105 - RNA, 19 nt, Homo sapiens
  misc_RNA (1)...(19): siRNA sense strand
caaagaguguccaaucauu

SEQ ID NO: 215106 - RNA, 19 nt, Homo sapiens
  misc_RNA (1)...(19): siRNA sense strand
uagcugaccugaauaaugu

SEQ ID NO: 215107 - RNA, 19 nt, Homo sapiens
  misc_RNA (1)...(19): siRNA sense strand
gcaugauucuauccaaauu

SEQ ID NO: 215108 - RNA, 19 nt, Homo sapiens
  misc_RNA (1)...(19): siRNA sense strand
ugaacuggcugcugaaugu

SEQ ID NO: 215109 - RNA, 19 nt, Homo sapiens
  misc_RNA (1)...(19): siRNA sense strand
gauauccugcagauuauua

SEQ ID NO: 215110 - RNA, 19 nt, Homo sapiens
  misc_RNA (1)...(19): siRNA sense strand
gagaagauguucgagacuu

SEQ ID NO: 215111 - RNA, 19 nt, Homo sapiens
  misc_RNA (1)...(19): siRNA sense strand
gcacuuuaauuaugacauc

SEQ ID NO: 215112 - RNA, 19 nt, Homo sapiens
  misc_RNA (1)...(19): siRNA sense strand
guaaagcacauuuggaaga

SEQ ID NO: 215113 - RNA, 19 nt, Homo sapiens
  misc_RNA (1)...(19): siRNA sense strand
gaauauugcacuccgacua

SEQ ID NO: 215114 - RNA, 19 nt, Homo sapiens
  misc_RNA (1)...(19): siRNA sense strand
uuauaggacugccaugaaa

SEQ ID NO: 215115 - RNA, 19 nt, Homo sapiens
  misc_RNA (1)...(19): siRNA sense strand
gggugaaguugcauccuuu

SEQ ID NO: 215116 - RNA, 19 nt, Homo sapiens
  misc_RNA (1)...(19): siRNA sense strand
gcaagagcacaacaauuug

SEQ ID NO: 215117 - RNA, 19 nt, Homo sapiens
  misc_RNA (1)...(19): siRNA sense strand
gcacaacaauuuggucaac

SEQ ID NO: 215118 - RNA, 19 nt, Homo sapiens
  misc_RNA (1)...(19): siRNA sense strand
agcaagagcacaacaauuu

SEQ ID NO: 215119 - RNA, 19 nt, Homo sapiens
  misc_RNA (1)...(19): siRNA sense strand
agaagauguucgagacuuu

SEQ ID NO: 215120 - RNA, 19 nt, Homo sapiens
  misc_RNA (1)...(19): siRNA sense strand
gagcaagagcacaacaauu

SEQ ID NO: 215121 - RNA, 19 nt, Homo sapiens
  misc_RNA (1)...(19): siRNA sense strand
ucaagcaaguggcaaguuc

SEQ ID NO: 215122 - RNA, 19 nt, Homo sapiens
  misc_RNA (1)...(19): siRNA sense strand
ccacgagacucaaacaacu

SEQ ID NO: 215123 - RNA, 19 nt, Homo sapiens
  misc_RNA (1)...(19): siRNA sense strand
cagcacaaccucaagcaaa

SEQ ID NO: 215124 - RNA, 19 nt, Homo sapiens
  misc_RNA (1)...(19): siRNA sense strand
gcaaagaguguccaaucau

SEQ ID NO: 215125 - RNA, 19 nt, Homo sapiens
  misc_RNA (1)...(19): siRNA sense strand
auggauauccugcagauua

SEQ ID NO: 215126 - RNA, 19 nt, Homo sapiens
  misc_RNA (1)...(19): siRNA sense strand
uguaacaucugcaaagagu

SEQ ID NO: 215127 - RNA, 19 nt, Homo sapiens
  misc_RNA (1)...(19): siRNA sense strand
guccggagcugcuuccaau

SEQ ID NO: 215128 - RNA, 19 nt, Homo sapiens
  misc_RNA (1)...(19): siRNA sense strand
gcaaguggcaaguucaaca

SEQ ID NO: 215129 - RNA, 19 nt, Homo sapiens
  misc_RNA (1)...(19): siRNA sense strand
gcuuccaauuugcuaauaa

SEQ ID NO: 215130 - RNA, 19 nt, Homo sapiens
  misc_RNA (1)...(19): siRNA sense strand
uggaagacaaguacagaua

SEQ ID NO: 215131 - RNA, 19 nt, Homo sapiens
  misc_RNA (1)...(19): siRNA sense strand
ggauccguguccugucuuu

SEQ ID NO: 215132 - RNA, 19 nt, Homo sapiens
  misc_RNA (1)...(19): siRNA sense strand
gucuuuagcugaccugaau

SEQ ID NO: 215133 - RNA, 19 nt, Homo sapiens
  misc_RNA (1)...(19): siRNA sense strand
gacaaguacagauaccuuu

SEQ ID NO: 215134 - RNA, 19 nt, Homo sapiens
  misc_RNA (1)...(19): siRNA sense strand
ccaagcaucaggccaaaug

SEQ ID NO: 215135 - RNA, 19 nt, Homo sapiens
  misc_RNA (1)...(19): siRNA sense strand
ggagcaagagcacaacaau

SEQ ID NO: 215136 - RNA, 19 nt, Homo sapiens
  misc_RNA (1)...(19): siRNA sense strand
guguaaagcacauuuggaa

SEQ ID NO: 215137 - RNA, 19 nt, Homo sapiens
  misc_RNA (1)...(19): siRNA sense strand
caagacaguugggugaagu

SEQ ID NO: 215138 - RNA, 19 nt, Homo sapiens
  misc_RNA (1)...(19): siRNA sense strand
gaagauguucgagacuuug

SEQ ID NO: 215139 - RNA, 19 nt, Homo sapiens
  misc_RNA (1)...(19): siRNA sense strand
gucagauucucagcuuaua

SEQ ID NO: 215140 - RNA, 19 nt, Homo sapiens
  misc_RNA (1)...(19): siRNA sense strand
uaacaucugcaaagagugu

SEQ ID NO: 215141 - RNA, 19 nt, Homo sapiens
  misc_RNA (1)...(19): siRNA sense strand
cggagcugcuuccaauuug

SEQ ID NO: 215142 - RNA, 19 nt, Homo sapiens
  misc_RNA (1)...(19): siRNA sense strand
gaagacaaguacagauacc

SEQ ID NO: 215143 - RNA, 19 nt, Homo sapiens
  misc_RNA (1)...(19): siRNA sense strand
ccauggauauccugcagau

SEQ ID NO: 215144 - RNA, 19 nt, Homo sapiens
  misc_RNA (1)...(19): siRNA sense strand
ggcaucauuucccugugua

SEQ ID NO: 215145 - RNA, 19 nt, Homo sapiens
  misc_RNA (1)...(19): siRNA sense strand
uggauauccugcagauuau

SEQ ID NO: 215146 - RNA, 19 nt, Homo sapiens
  misc_RNA (1)...(19): siRNA sense strand
ggaagacaaguacagauac

SEQ ID NO: 215147 - RNA, 19 nt, Homo sapiens
  misc_RNA (1)...(19): siRNA sense strand
ugcaaagaguguccaauca

SEQ ID NO: 215148 - RNA, 19 nt, Homo sapiens
  misc_RNA (1)...(19): siRNA sense strand
guggauaugugucugaacu

SEQ ID NO: 215149 - RNA, 19 nt, Homo sapiens
  misc_RNA (1)...(19): siRNA sense strand
acuggcugcugaauguuua

SEQ ID NO: 215150 - RNA, 19 nt, Homo sapiens
  misc_RNA (1)...(19): siRNA sense strand
acuaucccaugguggaaua

SEQ ID NO: 215151 - RNA, 19 nt, Homo sapiens
  misc_RNA (1)...(19): siRNA sense strand
ccggagcugcuuccaauuu

SEQ ID NO: 215152 - RNA, 19 nt, Homo sapiens
  misc_RNA (1)...(19): siRNA sense strand
ccaaauuccaagacaguug

SEQ ID NO: 215153 - RNA, 19 nt, Homo sapiens
  misc_RNA (1)...(19): siRNA sense strand
cagaaacugccaagcauca

SEQ ID NO: 215154 - RNA, 19 nt, Homo sapiens
  misc_RNA (1)...(19): siRNA sense strand
uaugacaucugccaaagcu

SEQ ID NO: 215155 - RNA, 19 nt, Homo sapiens
  misc_RNA (1)...(19): siRNA sense strand
aaugucagauucucagcuu

SEQ ID NO: 215156 - RNA, 19 nt, Homo sapiens
  misc_RNA (1)...(19): siRNA sense strand
ucgagacuuugccaaggua

SEQ ID NO: 215157 - RNA, 19 nt, Homo sapiens
  misc_RNA (1)...(19): siRNA sense strand
gcaaaaggccauaaaaugc

SEQ ID NO: 215158 - RNA, 19 nt, Homo sapiens
  misc_RNA (1)...(19): siRNA sense strand
cugcaugauucuauccaaa

SEQ ID NO: 215159 - RNA, 19 nt, Homo sapiens
  misc_RNA (1)...(19): siRNA sense strand
uaaagcacauuuggaagac

SEQ ID NO: 215160 - RNA, 19 nt, Homo sapiens
  misc_RNA (1)...(19): siRNA sense strand
acaggagucuaaagcacuu

SEQ ID NO: 215161 - RNA, 19 nt, Homo sapiens
  misc_RNA (1)...(19): siRNA sense strand
acagauaccuuuucaagca

SEQ ID NO: 215162 - RNA, 19 nt, Homo sapiens
  misc_RNA (1)...(19): siRNA sense strand
aagcacauuuggaagacaa

SEQ ID NO: 215163 - RNA, 19 nt, Homo sapiens
  misc_RNA (1)...(19): siRNA sense strand
gcuaauaauaagccagaga

SEQ ID NO: 215164 - RNA, 19 nt, Homo sapiens
  misc_RNA (1)...(19): siRNA sense strand
caagagcacaacaauuugg

SEQ ID NO: 215165 - RNA, 19 nt, Homo sapiens
  misc_RNA (1)...(19): siRNA sense strand
ccugucagcugcaugugau

SEQ ID NO: 215166 - RNA, 19 nt, Homo sapiens
  misc_RNA (1)...(19): siRNA sense strand
gcugcugaauguuuaugau

SEQ ID NO: 215167 - RNA, 19 nt, Homo sapiens
  misc_RNA (1)...(19): siRNA sense strand
acagagcucuaccagucuu

SEQ ID NO: 215168 - RNA, 19 nt, Homo sapiens
  misc_RNA (1)...(19): siRNA sense strand
acaguugggugaaguugca

SEQ ID NO: 215169 - RNA, 19 nt, Homo sapiens
  misc_RNA (1)...(19): siRNA sense strand
guuugaccacuauuuauga

SEQ ID NO: 215170 - RNA, 19 nt, Homo sapiens
  misc_RNA (1)...(19): siRNA sense strand
gcuuauaggacugccauga

SEQ ID NO: 215171 - RNA, 19 nt, Homo sapiens
  misc_RNA (1)...(19): siRNA sense strand
caucaggccaaauguaaca

SEQ ID NO: 215172 - RNA, 19 nt, Homo sapiens
  misc_RNA (1)...(19): siRNA sense strand
gauucuauccaaauuccaa

SEQ ID NO: 215173 - RNA, 19 nt, Homo sapiens
  misc_RNA (1)...(19): siRNA sense strand
ggcaaguucaacaggauuu

SEQ ID NO: 215174 - RNA, 19 nt, Homo sapiens
  misc_RNA (1)...(19): siRNA sense strand
gaacuggcugcugaauguu

SEQ ID NO: 215175 - RNA, 19 nt, Homo sapiens
  misc_RNA (1)...(19): siRNA sense strand
cugcugaauguuuaugaua

SEQ ID NO: 215176 - RNA, 19 nt, Homo sapiens
  misc_RNA (1)...(19): siRNA sense strand
aagcaucaggccaaaugua

SEQ ID NO: 215177 - RNA, 19 nt, Homo sapiens
  misc_RNA (1)...(19): siRNA sense strand
uggcaucauuucccugugu

SEQ ID NO: 215178 - RNA, 19 nt, Homo sapiens
  misc_RNA (1)...(19): siRNA sense strand
ccaugaaacuccgaagacu

SEQ ID NO: 215179 - RNA, 19 nt, Homo sapiens
  misc_RNA (1)...(19): siRNA sense strand
auaauaagccagagaucga

SEQ ID NO: 215180 - RNA, 19 nt, Homo sapiens
  misc_RNA (1)...(19): siRNA sense strand
cuaauaauaagccagagau

SEQ ID NO: 215181 - RNA, 19 nt, Homo sapiens
  misc_RNA (1)...(19): siRNA sense strand
ugggugaaguugcauccuu

SEQ ID NO: 215182 - RNA, 19 nt, Homo sapiens
  misc_RNA (1)...(19): siRNA sense strand
caucauuucccuguguaaa

SEQ ID NO: 215183 - RNA, 19 nt, Homo sapiens
  misc_RNA (1)...(19): siRNA sense strand
gcguggauaugugucugaa

SEQ ID NO: 215184 - RNA, 19 nt, Homo sapiens
  misc_RNA (1)...(19): siRNA sense strand
gcacuaucccaugguggaa

SEQ ID NO: 215185 - RNA, 19 nt, Homo sapiens
  misc_RNA (1)...(19): siRNA sense strand
gagccugucagcugcaugu

SEQ ID NO: 215186 - RNA, 19 nt, Homo sapiens
  misc_RNA (1)...(19): siRNA sense strand
guacagauaccuuuucaag

SEQ ID NO: 215187 - RNA, 19 nt, Homo sapiens
  misc_RNA (1)...(19): siRNA sense strand
gucccucucugcguggaua

SEQ ID NO: 215188 - RNA, 19 nt, Homo sapiens
  misc_RNA (1)...(19): siRNA sense strand
ggagcugcuuccaauuugc

SEQ ID NO: 215189 - RNA, 19 nt, Homo sapiens
  misc_RNA (1)...(19): siRNA sense strand
uuagcugaccugaauaaug

SEQ ID NO: 215190 - RNA, 19 nt, Homo sapiens
  misc_RNA (1)...(19): siRNA sense strand
guggcaaguucaacaggau

SEQ ID NO: 215191 - RNA, 19 nt, Homo sapiens
  misc_RNA (1)...(19): siRNA sense strand
acaacaauuuggucaacgu

SEQ ID NO: 215192 - RNA, 19 nt, Homo sapiens
  misc_RNA (1)...(19): siRNA sense strand
gacuacaucaggagaagau

SEQ ID NO: 215193 - RNA, 19 nt, Homo sapiens
  misc_RNA (1)...(19): siRNA sense strand
uaauaagccagagaucgaa

SEQ ID NO: 215194 - RNA, 19 nt, Homo sapiens
  misc_RNA (1)...(19): siRNA sense strand
ugucagauucucagcuuau

SEQ ID NO: 215195 - RNA, 19 nt, Homo sapiens
  misc_RNA (1)...(19): siRNA sense strand
ggauauccugcagauuauu

SEQ ID NO: 215196 - RNA, 19 nt, Homo sapiens
  misc_RNA (1)...(19): siRNA sense strand
agcaucaggccaaauguaa

SEQ ID NO: 215197 - RNA, 19 nt, Homo sapiens
  misc_RNA (1)...(19): siRNA sense strand
gcccuuugcuuggaucucu

SEQ ID NO: 215198 - RNA, 19 nt, Homo sapiens
  misc_RNA (1)...(19): siRNA sense strand
gcugaauguuuaugauacg

SEQ ID NO: 215199 - RNA, 19 nt, Homo sapiens
  misc_RNA (1)...(19): siRNA sense strand
agacuuugccaagguacua

SEQ ID NO: 215200 - RNA, 19 nt, Homo sapiens
  misc_RNA (1)...(19): siRNA sense strand
caagcaaguggcaaguuca

SEQ ID NO: 215201 - RNA, 19 nt, Homo sapiens
  misc_RNA (1)...(19): siRNA sense strand
agacaaguacagauaccuu

SEQ ID NO: 215202 - RNA, 19 nt, Homo sapiens
  misc_RNA (1)...(19): siRNA sense strand
gcaucauuucccuguguaa

SEQ ID NO: 215203 - RNA, 19 nt, Homo sapiens
  misc_RNA (1)...(19): siRNA sense strand
cugcaaagaguguccaauc

SEQ ID NO: 215204 - RNA, 19 nt, Homo sapiens
  misc_RNA (1)...(19): siRNA sense strand
cuuauaggacugccaugaa

SEQ ID NO: 215205 - RNA, 19 nt, Homo sapiens
  misc_RNA (1)...(19): siRNA sense strand
caaagaguguccaaucauu

SEQ ID NO: 215206 - RNA, 19 nt, Homo sapiens
  misc_RNA (1)...(19): siRNA sense strand
uagcugaccugaauaaugu

SEQ ID NO: 215207 - RNA, 19 nt, Homo sapiens
  misc_RNA (1)...(19): siRNA sense strand
gcaugauucuauccaaauu

SEQ ID NO: 215208 - RNA, 19 nt, Homo sapiens
  misc_RNA (1)...(19): siRNA sense strand
ugaacuggcugcugaaugu

SEQ ID NO: 215209 - RNA, 19 nt, Homo sapiens
  misc_RNA (1)...(19): siRNA sense strand
gauauccugcagauuauua

SEQ ID NO: 215210 - RNA, 19 nt, Homo sapiens
  misc_RNA (1)...(19): siRNA sense strand
gagaagauguucgagacuu

SEQ ID NO: 215211 - RNA, 19 nt, Homo sapiens
  misc_RNA (1)...(19): siRNA sense strand
gcacuuuaauuaugacauc

SEQ ID NO: 215212 - RNA, 19 nt, Homo sapiens
  misc_RNA (1)...(19): siRNA sense strand
guaaagcacauuuggaaga

SEQ ID NO: 215213 - RNA, 19 nt, Homo sapiens
  misc_RNA (1)...(19): siRNA sense strand
gaauauugcacuccgacua

SEQ ID NO: 215214 - RNA, 19 nt, Homo sapiens
  misc_RNA (1)...(19): siRNA sense strand
uuauaggacugccaugaaa

SEQ ID NO: 215215 - RNA, 19 nt, Homo sapiens
  misc_RNA (1)...(19): siRNA sense strand
gggugaaguugcauccuuu

SEQ ID NO: 215216 - RNA, 19 nt, Homo sapiens
  misc_RNA (1)...(19): siRNA sense strand
gcaagagcacaacaauuug

SEQ ID NO: 215217 - RNA, 19 nt, Homo sapiens
  misc_RNA (1)...(19): siRNA sense strand
gcacaacaauuuggucaac

SEQ ID NO: 215218 - RNA, 19 nt, Homo sapiens
  misc_RNA (1)...(19): siRNA sense strand
agcaagagcacaacaauuu

SEQ ID NO: 215219 - RNA, 19 nt, Homo sapiens
  misc_RNA (1)...(19): siRNA sense strand
agaagauguucgagacuuu

SEQ ID NO: 215220 - RNA, 19 nt, Homo sapiens
  misc_RNA (1)...(19): siRNA sense strand
gagcaagagcacaacaauu

SEQ ID NO: 215221 - RNA, 19 nt, Homo sapiens
  misc_RNA (1)...(19): siRNA sense strand
ucaagcaaguggcaaguuc

SEQ ID NO: 215222 - RNA, 19 nt, Homo sapiens
  misc_RNA (1)...(19): siRNA sense strand
ccacgagacucaaacaacu

SEQ ID NO: 215223 - RNA, 19 nt, Homo sapiens
  misc_RNA (1)...(19): siRNA sense strand
cagcacaaccucaagcaaa

SEQ ID NO: 215224 - RNA, 19 nt, Homo sapiens
  misc_RNA (1)...(19): siRNA sense strand
gcaaagaguguccaaucau

SEQ ID NO: 215225 - RNA, 19 nt, Homo sapiens
  misc_RNA (1)...(19): siRNA sense strand
auggauauccugcagauua

SEQ ID NO: 215226 - RNA, 19 nt, Homo sapiens
  misc_RNA (1)...(19): siRNA sense strand
uguaacaucugcaaagagu

SEQ ID NO: 215227 - RNA, 19 nt, Homo sapiens
  misc_RNA (1)...(19): siRNA sense strand
guccggagcugcuuccaau

SEQ ID NO: 215228 - RNA, 19 nt, Homo sapiens
  misc_RNA (1)...(19): siRNA sense strand
gcaaguggcaaguucaaca

SEQ ID NO: 215229 - RNA, 19 nt, Homo sapiens
  misc_RNA (1)...(19): siRNA sense strand
gcuuccaauuugcuaauaa

SEQ ID NO: 215230 - RNA, 19 nt, Homo sapiens
  misc_RNA (1)...(19): siRNA sense strand
uggaagacaaguacagaua

SEQ ID NO: 215231 - RNA, 19 nt, Homo sapiens
  misc_RNA (1)...(19): siRNA sense strand
ggauccguguccugucuuu

SEQ ID NO: 215232 - RNA, 19 nt, Homo sapiens
  misc_RNA (1)...(19): siRNA sense strand
gucuuuagcugaccugaau

SEQ ID NO: 215233 - RNA, 19 nt, Homo sapiens
  misc_RNA (1)...(19): siRNA sense strand
gacaaguacagauaccuuu

SEQ ID NO: 215234 - RNA, 19 nt, Homo sapiens
  misc_RNA (1)...(19): siRNA sense strand
ccaagcaucaggccaaaug

SEQ ID NO: 215235 - RNA, 19 nt, Homo sapiens
  misc_RNA (1)...(19): siRNA sense strand
ggagcaagagcacaacaau

SEQ ID NO: 215236 - RNA, 19 nt, Homo sapiens
  misc_RNA (1)...(19): siRNA sense strand
guguaaagcacauuuggaa

SEQ ID NO: 215237 - RNA, 19 nt, Homo sapiens
  misc_RNA (1)...(19): siRNA sense strand
caagacaguugggugaagu

SEQ ID NO: 215238 - RNA, 19 nt, Homo sapiens
  misc_RNA (1)...(19): siRNA sense strand
gaagauguucgagacuuug

SEQ ID NO: 215239 - RNA, 19 nt, Homo sapiens
  misc_RNA (1)...(19): siRNA sense strand
gucagauucucagcuuaua

SEQ ID NO: 215240 - RNA, 19 nt, Homo sapiens
  misc_RNA (1)...(19): siRNA sense strand
uaacaucugcaaagagugu

SEQ ID NO: 215241 - RNA, 19 nt, Homo sapiens
  misc_RNA (1)...(19): siRNA sense strand
cggagcugcuuccaauuug

SEQ ID NO: 215242 - RNA, 19 nt, Homo sapiens
  misc_RNA (1)...(19): siRNA sense strand
gaagacaaguacagauacc

SEQ ID NO: 215243 - RNA, 19 nt, Homo sapiens
  misc_RNA (1)...(19): siRNA sense strand
ccauggauauccugcagau

SEQ ID NO: 215244 - RNA, 19 nt, Homo sapiens
  misc_RNA (1)...(19): siRNA sense strand
ggcaucauuucccugugua

SEQ ID NO: 215245 - RNA, 19 nt, Homo sapiens
  misc_RNA (1)...(19): siRNA sense strand
uggauauccugcagauuau

SEQ ID NO: 215246 - RNA, 19 nt, Homo sapiens
  misc_RNA (1)...(19): siRNA sense strand
ggaagacaaguacagauac

SEQ ID NO: 215247 - RNA, 19 nt, Homo sapiens
  misc_RNA (1)...(19): siRNA sense strand
ugcaaagaguguccaauca

SEQ ID NO: 215248 - RNA, 19 nt, Homo sapiens
  misc_RNA (1)...(19): siRNA sense strand
guggauaugugucugaacu

SEQ ID NO: 215249 - RNA, 19 nt, Homo sapiens
  misc_RNA (1)...(19): siRNA sense strand
acuggcugcugaauguuua

SEQ ID NO: 215250 - RNA, 19 nt, Homo sapiens
  misc_RNA (1)...(19): siRNA sense strand
acuaucccaugguggaaua

SEQ ID NO: 215251 - RNA, 19 nt, Homo sapiens
  misc_RNA (1)...(19): siRNA sense strand
ccggagcugcuuccaauuu

SEQ ID NO: 215252 - RNA, 19 nt, Homo sapiens
  misc_RNA (1)...(19): siRNA sense strand
ccaaauuccaagacaguug

SEQ ID NO: 215253 - RNA, 19 nt, Homo sapiens
  misc_RNA (1)...(19): siRNA sense strand
cagaaacugccaagcauca

SEQ ID NO: 215254 - RNA, 19 nt, Homo sapiens
  misc_RNA (1)...(19): siRNA sense strand
uaugacaucugccaaagcu

SEQ ID NO: 215255 - RNA, 19 nt, Homo sapiens
  misc_RNA (1)...(19): siRNA sense strand
aaugucagauucucagcuu

SEQ ID NO: 215256 - RNA, 19 nt, Homo sapiens
  misc_RNA (1)...(19): siRNA sense strand
ucgagacuuugccaaggua

SEQ ID NO: 215257 - RNA, 19 nt, Homo sapiens
  misc_RNA (1)...(19): siRNA sense strand
gcaaaaggccauaaaaugc

SEQ ID NO: 215258 - RNA, 19 nt, Homo sapiens
  misc_RNA (1)...(19): siRNA sense strand
cugcaugauucuauccaaa

SEQ ID NO: 215259 - RNA, 19 nt, Homo sapiens
  misc_RNA (1)...(19): siRNA sense strand
uaaagcacauuuggaagac

SEQ ID NO: 215260 - RNA, 19 nt, Homo sapiens
  misc_RNA (1)...(19): siRNA sense strand
acaggagucuaaagcacuu

SEQ ID NO: 215261 - RNA, 19 nt, Homo sapiens
  misc_RNA (1)...(19): siRNA sense strand
acagauaccuuuucaagca

SEQ ID NO: 215262 - RNA, 19 nt, Homo sapiens
  misc_RNA (1)...(19): siRNA sense strand
aagcacauuuggaagacaa

SEQ ID NO: 215263 - RNA, 19 nt, Homo sapiens
  misc_RNA (1)...(19): siRNA sense strand
gcuaauaauaagccagaga

SEQ ID NO: 215264 - RNA, 19 nt, Homo sapiens
  misc_RNA (1)...(19): siRNA sense strand
caagagcacaacaauuugg

SEQ ID NO: 215265 - RNA, 19 nt, Homo sapiens
  misc_RNA (1)...(19): siRNA sense strand
ccugucagcugcaugugau

SEQ ID NO: 215266 - RNA, 19 nt, Homo sapiens
  misc_RNA (1)...(19): siRNA sense strand
gcugcugaauguuuaugau

SEQ ID NO: 215267 - RNA, 19 nt, Homo sapiens
  misc_RNA (1)...(19): siRNA sense strand
acagagcucuaccagucuu

SEQ ID NO: 215268 - RNA, 19 nt, Homo sapiens
  misc_RNA (1)...(19): siRNA sense strand
acaguugggugaaguugca

SEQ ID NO: 215269 - RNA, 19 nt, Homo sapiens
  misc_RNA (1)...(19): siRNA sense strand
guuugaccacuauuuauga

SEQ ID NO: 215270 - RNA, 19 nt, Homo sapiens
  misc_RNA (1)...(19): siRNA sense strand
gcuuauaggacugccauga

SEQ ID NO: 215271 - RNA, 19 nt, Homo sapiens
  misc_RNA (1)...(19): siRNA sense strand
caucaggccaaauguaaca

SEQ ID NO: 215272 - RNA, 19 nt, Homo sapiens
  misc_RNA (1)...(19): siRNA sense strand
gauucuauccaaauuccaa

SEQ ID NO: 215273 - RNA, 19 nt, Homo sapiens
  misc_RNA (1)...(19): siRNA sense strand
ggcaaguucaacaggauuu

SEQ ID NO: 215274 - RNA, 19 nt, Homo sapiens
  misc_RNA (1)...(19): siRNA sense strand
gaacuggcugcugaauguu

SEQ ID NO: 215275 - RNA, 19 nt, Homo sapiens
  misc_RNA (1)...(19): siRNA sense strand
cugcugaauguuuaugaua

SEQ ID NO: 215276 - RNA, 19 nt, Homo sapiens
  misc_RNA (1)...(19): siRNA sense strand
aagcaucaggccaaaugua

SEQ ID NO: 215277 - RNA, 19 nt, Homo sapiens
  misc_RNA (1)...(19): siRNA sense strand
uggcaucauuucccugugu

SEQ ID NO: 215278 - RNA, 19 nt, Homo sapiens
  misc_RNA (1)...(19): siRNA sense strand
ccaugaaacuccgaagacu

SEQ ID NO: 215279 - RNA, 19 nt, Homo sapiens
  misc_RNA (1)...(19): siRNA sense strand
auaauaagccagagaucga

SEQ ID NO: 215280 - RNA, 19 nt, Homo sapiens
  misc_RNA (1)...(19): siRNA sense strand
cuaauaauaagccagagau

SEQ ID NO: 215281 - RNA, 19 nt, Homo sapiens
  misc_RNA (1)...(19): siRNA sense strand
ugggugaaguugcauccuu

SEQ ID NO: 215282 - RNA, 19 nt, Homo sapiens
  misc_RNA (1)...(19): siRNA sense strand
caucauuucccuguguaaa

SEQ ID NO: 215283 - RNA, 19 nt, Homo sapiens
  misc_RNA (1)...(19): siRNA sense strand
gcguggauaugugucugaa

SEQ ID NO: 215284 - RNA, 19 nt, Homo sapiens
  misc_RNA (1)...(19): siRNA sense strand
gcacuaucccaugguggaa

SEQ ID NO: 215285 - RNA, 19 nt, Homo sapiens
  misc_RNA (1)...(19): siRNA sense strand
gagccugucagcugcaugu

SEQ ID NO: 215286 - RNA, 19 nt, Homo sapiens
  misc_RNA (1)...(19): siRNA sense strand
guacagauaccuuuucaag

SEQ ID NO: 215287 - RNA, 19 nt, Homo sapiens
  misc_RNA (1)...(19): siRNA sense strand
gucccucucugcguggaua

SEQ ID NO: 215288 - RNA, 19 nt, Homo sapiens
  misc_RNA (1)...(19): siRNA sense strand
ggagcugcuuccaauuugc

SEQ ID NO: 215289 - RNA, 19 nt, Homo sapiens
  misc_RNA (1)...(19): siRNA sense strand
uuagcugaccugaauaaug

SEQ ID NO: 215290 - RNA, 19 nt, Homo sapiens
  misc_RNA (1)...(19): siRNA sense strand
guggcaaguucaacaggau

SEQ ID NO: 215291 - RNA, 19 nt, Homo sapiens
  misc_RNA (1)...(19): siRNA sense strand
acaacaauuuggucaacgu

SEQ ID NO: 215292 - RNA, 19 nt, Homo sapiens
  misc_RNA (1)...(19): siRNA sense strand
gacuacaucaggagaagau

SEQ ID NO: 215293 - RNA, 19 nt, Homo sapiens
  misc_RNA (1)...(19): siRNA sense strand
uaauaagccagagaucgaa

SEQ ID NO: 215294 - RNA, 19 nt, Homo sapiens
  misc_RNA (1)...(19): siRNA sense strand
ugucagauucucagcuuau

SEQ ID NO: 215295 - RNA, 19 nt, Homo sapiens
  misc_RNA (1)...(19): siRNA sense strand
ggauauccugcagauuauu

SEQ ID NO: 215296 - RNA, 19 nt, Homo sapiens
  misc_RNA (1)...(19): siRNA sense strand
agcaucaggccaaauguaa

SEQ ID NO: 215297 - RNA, 19 nt, Homo sapiens
  misc_RNA (1)...(19): siRNA sense strand
gcccuuugcuuggaucucu

SEQ ID NO: 215298 - RNA, 19 nt, Homo sapiens
  misc_RNA (1)...(19): siRNA sense strand
gcugaauguuuaugauacg

SEQ ID NO: 215299 - RNA, 19 nt, Homo sapiens
  misc_RNA (1)...(19): siRNA sense strand
agacuuugccaagguacua

SEQ ID NO: 215300 - RNA, 19 nt, Homo sapiens
  misc_RNA (1)...(19): siRNA sense strand
caagcaaguggcaaguuca

SEQ ID NO: 215301 - RNA, 19 nt, Homo sapiens
  misc_RNA (1)...(19): siRNA sense strand
agacaaguacagauaccuu

SEQ ID NO: 215302 - RNA, 19 nt, Homo sapiens
  misc_RNA (1)...(19): siRNA sense strand
gcaucauuucccuguguaa

SEQ ID NO: 215303 - RNA, 19 nt, Homo sapiens
  misc_RNA (1)...(19): siRNA sense strand
cugcaaagaguguccaauc

SEQ ID NO: 215304 - RNA, 19 nt, Homo sapiens
  misc_RNA (1)...(19): siRNA sense strand
cuuauaggacugccaugaa

SEQ ID NO: 215305 - RNA, 19 nt, Homo sapiens
  misc_RNA (1)...(19): siRNA sense strand
caaagaguguccaaucauu

SEQ ID NO: 215306 - RNA, 19 nt, Homo sapiens
  misc_RNA (1)...(19): siRNA sense strand
uagcugaccugaauaaugu

SEQ ID NO: 215307 - RNA, 19 nt, Homo sapiens
  misc_RNA (1)...(19): siRNA sense strand
gcaugauucuauccaaauu

SEQ ID NO: 215308 - RNA, 19 nt, Homo sapiens
  misc_RNA (1)...(19): siRNA sense strand
ugaacuggcugcugaaugu

SEQ ID NO: 215309 - RNA, 19 nt, Homo sapiens
  misc_RNA (1)...(19): siRNA sense strand
gauauccugcagauuauua

SEQ ID NO: 215310 - RNA, 19 nt, Homo sapiens
  misc_RNA (1)...(19): siRNA sense strand
gagaagauguucgagacuu

SEQ ID NO: 215311 - RNA, 19 nt, Homo sapiens
  misc_RNA (1)...(19): siRNA sense strand
gcacuuuaauuaugacauc

SEQ ID NO: 215312 - RNA, 19 nt, Homo sapiens
  misc_RNA (1)...(19): siRNA sense strand
guaaagcacauuuggaaga

SEQ ID NO: 215313 - RNA, 19 nt, Homo sapiens
  misc_RNA (1)...(19): siRNA sense strand
gaauauugcacuccgacua

SEQ ID NO: 215314 - RNA, 19 nt, Homo sapiens
  misc_RNA (1)...(19): siRNA sense strand
uuauaggacugccaugaaa

SEQ ID NO: 215315 - RNA, 19 nt, Homo sapiens
  misc_RNA (1)...(19): siRNA sense strand
gggugaaguugcauccuuu

SEQ ID NO: 215316 - RNA, 19 nt, Homo sapiens
  misc_RNA (1)...(19): siRNA sense strand
gcaagagcacaacaauuug

SEQ ID NO: 215317 - RNA, 19 nt, Homo sapiens
  misc_RNA (1)...(19): siRNA sense strand
gcacaacaauuuggucaac

SEQ ID NO: 215318 - RNA, 19 nt, Homo sapiens
  misc_RNA (1)...(19): siRNA sense strand
agcaagagcacaacaauuu

SEQ ID NO: 215319 - RNA, 19 nt, Homo sapiens
  misc_RNA (1)...(19): siRNA sense strand
agaagauguucgagacuuu

SEQ ID NO: 215320 - RNA, 19 nt, Homo sapiens
  misc_RNA (1)...(19): siRNA sense strand
gagcaagagcacaacaauu

SEQ ID NO: 215321 - RNA, 19 nt, Homo sapiens
  misc_RNA (1)...(19): siRNA sense strand
ucaagcaaguggcaaguuc

SEQ ID NO: 215322 - RNA, 19 nt, Homo sapiens
  misc_RNA (1)...(19): siRNA sense strand
ccacgagacucaaacaacu

SEQ ID NO: 215323 - RNA, 19 nt, Homo sapiens
  misc_RNA (1)...(19): siRNA sense strand
cagcacaaccucaagcaaa

SEQ ID NO: 215324 - RNA, 19 nt, Homo sapiens
  misc_RNA (1)...(19): siRNA sense strand
gcaaagaguguccaaucau

SEQ ID NO: 215325 - RNA, 19 nt, Homo sapiens
  misc_RNA (1)...(19): siRNA sense strand
auggauauccugcagauua

SEQ ID NO: 215326 - RNA, 19 nt, Homo sapiens
  misc_RNA (1)...(19): siRNA sense strand
uguaacaucugcaaagagu

SEQ ID NO: 215327 - RNA, 19 nt, Homo sapiens
  misc_RNA (1)...(19): siRNA sense strand
guccggagcugcuuccaau

SEQ ID NO: 215328 - RNA, 19 nt, Homo sapiens
  misc_RNA (1)...(19): siRNA sense strand
gcaaguggcaaguucaaca

SEQ ID NO: 215329 - RNA, 19 nt, Homo sapiens
  misc_RNA (1)...(19): siRNA sense strand
gcuuccaauuugcuaauaa

SEQ ID NO: 215330 - RNA, 19 nt, Homo sapiens
  misc_RNA (1)...(19): siRNA sense strand
uggaagacaaguacagaua

SEQ ID NO: 215331 - RNA, 19 nt, Homo sapiens
  misc_RNA (1)...(19): siRNA sense strand
ggauccguguccugucuuu

SEQ ID NO: 215332 - RNA, 19 nt, Homo sapiens
  misc_RNA (1)...(19): siRNA sense strand
gucuuuagcugaccugaau

SEQ ID NO: 215333 - RNA, 19 nt, Homo sapiens
  misc_RNA (1)...(19): siRNA sense strand
gacaaguacagauaccuuu

SEQ ID NO: 215334 - RNA, 19 nt, Homo sapiens
  misc_RNA (1)...(19): siRNA sense strand
ccaagcaucaggccaaaug

SEQ ID NO: 215335 - RNA, 19 nt, Homo sapiens
  misc_RNA (1)...(19): siRNA sense strand
ggagcaagagcacaacaau

SEQ ID NO: 215336 - RNA, 19 nt, Homo sapiens
  misc_RNA (1)...(19): siRNA sense strand
guguaaagcacauuuggaa

SEQ ID NO: 215337 - RNA, 19 nt, Homo sapiens
  misc_RNA (1)...(19): siRNA sense strand
caagacaguugggugaagu

SEQ ID NO: 215338 - RNA, 19 nt, Homo sapiens
  misc_RNA (1)...(19): siRNA sense strand
gaagauguucgagacuuug

SEQ ID NO: 215339 - RNA, 19 nt, Homo sapiens
  misc_RNA (1)...(19): siRNA sense strand
gucagauucucagcuuaua

SEQ ID NO: 215340 - RNA, 19 nt, Homo sapiens
  misc_RNA (1)...(19): siRNA sense strand
uaacaucugcaaagagugu

SEQ ID NO: 215341 - RNA, 19 nt, Homo sapiens
  misc_RNA (1)...(19): siRNA sense strand
cggagcugcuuccaauuug

SEQ ID NO: 215342 - RNA, 19 nt, Homo sapiens
  misc_RNA (1)...(19): siRNA sense strand
gaagacaaguacagauacc

SEQ ID NO: 215343 - RNA, 19 nt, Homo sapiens
  misc_RNA (1)...(19): siRNA sense strand
ccauggauauccugcagau

SEQ ID NO: 215344 - RNA, 19 nt, Homo sapiens
  misc_RNA (1)...(19): siRNA sense strand
ggcaucauuucccugugua

SEQ ID NO: 215345 - RNA, 19 nt, Homo sapiens
  misc_RNA (1)...(19): siRNA sense strand
uggauauccugcagauuau

SEQ ID NO: 215346 - RNA, 19 nt, Homo sapiens
  misc_RNA (1)...(19): siRNA sense strand
ggaagacaaguacagauac

SEQ ID NO: 215347 - RNA, 19 nt, Homo sapiens
  misc_RNA (1)...(19): siRNA sense strand
ugcaaagaguguccaauca

SEQ ID NO: 215348 - RNA, 19 nt, Homo sapiens
  misc_RNA (1)...(19): siRNA sense strand
guggauaugugucugaacu

SEQ ID NO: 215349 - RNA, 19 nt, Homo sapiens
  misc_RNA (1)...(19): siRNA sense strand
acuggcugcugaauguuua

SEQ ID NO: 215350 - RNA, 19 nt, Homo sapiens
  misc_RNA (1)...(19): siRNA sense strand
acuaucccaugguggaaua

SEQ ID NO: 215351 - RNA, 19 nt, Homo sapiens
  misc_RNA (1)...(19): siRNA sense strand
ccggagcugcuuccaauuu

SEQ ID NO: 215352 - RNA, 19 nt, Homo sapiens
  misc_RNA (1)...(19): siRNA sense strand
ccaaauuccaagacaguug

SEQ ID NO: 215353 - RNA, 19 nt, Homo sapiens
  misc_RNA (1)...(19): siRNA sense strand
cagaaacugccaagcauca

SEQ ID NO: 215354 - RNA, 19 nt, Homo sapiens
  misc_RNA (1)...(19): siRNA sense strand
uaugacaucugccaaagcu

SEQ ID NO: 215355 - RNA, 19 nt, Homo sapiens
  misc_RNA (1)...(19): siRNA sense strand
aaugucagauucucagcuu

SEQ ID NO: 215356 - RNA, 19 nt, Homo sapiens
  misc_RNA (1)...(19): siRNA sense strand
ucgagacuuugccaaggua

SEQ ID NO: 215357 - RNA, 19 nt, Homo sapiens
  misc_RNA (1)...(19): siRNA sense strand
gcaaaaggccauaaaaugc

SEQ ID NO: 215358 - RNA, 19 nt, Homo sapiens
  misc_RNA (1)...(19): siRNA sense strand
cugcaugauucuauccaaa

SEQ ID NO: 215359 - RNA, 19 nt, Homo sapiens
  misc_RNA (1)...(19): siRNA sense strand
uaaagcacauuuggaagac

SEQ ID NO: 215360 - RNA, 19 nt, Homo sapiens
  misc_RNA (1)...(19): siRNA sense strand
acaggagucuaaagcacuu

SEQ ID NO: 215361 - RNA, 19 nt, Homo sapiens
  misc_RNA (1)...(19): siRNA sense strand
acagauaccuuuucaagca

SEQ ID NO: 215362 - RNA, 19 nt, Homo sapiens
  misc_RNA (1)...(19): siRNA sense strand
aagcacauuuggaagacaa

SEQ ID NO: 215363 - RNA, 19 nt, Homo sapiens
  misc_RNA (1)...(19): siRNA sense strand
gcuaauaauaagccagaga

SEQ ID NO: 215364 - RNA, 19 nt, Homo sapiens
  misc_RNA (1)...(19): siRNA sense strand
caagagcacaacaauuugg

SEQ ID NO: 215365 - RNA, 19 nt, Homo sapiens
  misc_RNA (1)...(19): siRNA sense strand
ccugucagcugcaugugau

SEQ ID NO: 215366 - RNA, 19 nt, Homo sapiens
  misc_RNA (1)...(19): siRNA sense strand
gcugcugaauguuuaugau

SEQ ID NO: 215367 - RNA, 19 nt, Homo sapiens
  misc_RNA (1)...(19): siRNA sense strand
acagagcucuaccagucuu

SEQ ID NO: 215368 - RNA, 19 nt, Homo sapiens
  misc_RNA (1)...(19): siRNA sense strand
acaguugggugaaguugca

SEQ ID NO: 215369 - RNA, 19 nt, Homo sapiens
  misc_RNA (1)...(19): siRNA sense strand
guuugaccacuauuuauga

SEQ ID NO: 215370 - RNA, 19 nt, Homo sapiens
  misc_RNA (1)...(19): siRNA sense strand
gcuuauaggacugccauga

SEQ ID NO: 215371 - RNA, 19 nt, Homo sapiens
  misc_RNA (1)...(19): siRNA sense strand
caucaggccaaauguaaca

SEQ ID NO: 215372 - RNA, 19 nt, Homo sapiens
  misc_RNA (1)...(19): siRNA sense strand
gauucuauccaaauuccaa

SEQ ID NO: 215373 - RNA, 19 nt, Homo sapiens
  misc_RNA (1)...(19): siRNA sense strand
ggcaaguucaacaggauuu

SEQ ID NO: 215374 - RNA, 19 nt, Homo sapiens
  misc_RNA (1)...(19): siRNA sense strand
gaacuggcugcugaauguu

SEQ ID NO: 215375 - RNA, 19 nt, Homo sapiens
  misc_RNA (1)...(19): siRNA sense strand
cugcugaauguuuaugaua

SEQ ID NO: 215376 - RNA, 19 nt, Homo sapiens
  misc_RNA (1)...(19): siRNA sense strand
aagcaucaggccaaaugua

SEQ ID NO: 215377 - RNA, 19 nt, Homo sapiens
  misc_RNA (1)...(19): siRNA sense strand
uggcaucauuucccugugu

SEQ ID NO: 215378 - RNA, 19 nt, Homo sapiens
  misc_RNA (1)...(19): siRNA sense strand
ccaugaaacuccgaagacu

SEQ ID NO: 215379 - RNA, 19 nt, Homo sapiens
  misc_RNA (1)...(19): siRNA sense strand
auaauaagccagagaucga

SEQ ID NO: 215380 - RNA, 19 nt, Homo sapiens
  misc_RNA (1)...(19): siRNA sense strand
cuaauaauaagccagagau

SEQ ID NO: 215381 - RNA, 19 nt, Homo sapiens
  misc_RNA (1)...(19): siRNA sense strand
ugggugaaguugcauccuu

SEQ ID NO: 215382 - RNA, 19 nt, Homo sapiens
  misc_RNA (1)...(19): siRNA sense strand
caucauuucccuguguaaa

SEQ ID NO: 215383 - RNA, 19 nt, Homo sapiens
  misc_RNA (1)...(19): siRNA sense strand
gcguggauaugugucugaa

SEQ ID NO: 215384 - RNA, 19 nt, Homo sapiens
  misc_RNA (1)...(19): siRNA sense strand
gcacuaucccaugguggaa

SEQ ID NO: 215385 - RNA, 19 nt, Homo sapiens
  misc_RNA (1)...(19): siRNA sense strand
gagccugucagcugcaugu

SEQ ID NO: 215386 - RNA, 19 nt, Homo sapiens
  misc_RNA (1)...(19): siRNA sense strand
guacagauaccuuuucaag

SEQ ID NO: 215387 - RNA, 19 nt, Homo sapiens
  misc_RNA (1)...(19): siRNA sense strand
gucccucucugcguggaua

SEQ ID NO: 215388 - RNA, 19 nt, Homo sapiens
  misc_RNA (1)...(19): siRNA sense strand
ggagcugcuuccaauuugc

SEQ ID NO: 215389 - RNA, 19 nt, Homo sapiens
  misc_RNA (1)...(19): siRNA sense strand
uuagcugaccugaauaaug

SEQ ID NO: 215390 - RNA, 19 nt, Homo sapiens
  misc_RNA (1)...(19): siRNA sense strand
guggcaaguucaacaggau

SEQ ID NO: 215391 - RNA, 19 nt, Homo sapiens
  misc_RNA (1)...(19): siRNA sense strand
acaacaauuuggucaacgu

SEQ ID NO: 215392 - RNA, 19 nt, Homo sapiens
  misc_RNA (1)...(19): siRNA sense strand
gacuacaucaggagaagau

SEQ ID NO: 215393 - RNA, 19 nt, Homo sapiens
  misc_RNA (1)...(19): siRNA sense strand
uaauaagccagagaucgaa

SEQ ID NO: 215394 - RNA, 19 nt, Homo sapiens
  misc_RNA (1)...(19): siRNA sense strand
ugucagauucucagcuuau

SEQ ID NO: 215395 - RNA, 19 nt, Homo sapiens
  misc_RNA (1)...(19): siRNA sense strand
ggauauccugcagauuauu

SEQ ID NO: 215396 - RNA, 19 nt, Homo sapiens
  misc_RNA (1)...(19): siRNA sense strand
agcaucaggccaaauguaa

SEQ ID NO: 215397 - RNA, 19 nt, Homo sapiens
  misc_RNA (1)...(19): siRNA sense strand
gcccuuugcuuggaucucu

SEQ ID NO: 215398 - RNA, 19 nt, Homo sapiens
  misc_RNA (1)...(19): siRNA sense strand
gcugaauguuuaugauacg

SEQ ID NO: 215399 - RNA, 19 nt, Homo sapiens
  misc_RNA (1)...(19): siRNA sense strand
agacuuugccaagguacua

SEQ ID NO: 215400 - RNA, 19 nt, Homo sapiens
  misc_RNA (1)...(19): siRNA sense strand
caagcaaguggcaaguuca

SEQ ID NO: 215401 - RNA, 19 nt, Homo sapiens
  misc_RNA (1)...(19): siRNA sense strand
agacaaguacagauaccuu

SEQ ID NO: 215402 - RNA, 19 nt, Homo sapiens
  misc_RNA (1)...(19): siRNA sense strand
gcaucauuucccuguguaa

SEQ ID NO: 215403 - RNA, 19 nt, Homo sapiens
  misc_RNA (1)...(19): siRNA sense strand
cugcaaagaguguccaauc

SEQ ID NO: 215404 - RNA, 19 nt, Homo sapiens
  misc_RNA (1)...(19): siRNA sense strand
cuuauaggacugccaugaa

SEQ ID NO: 215405 - RNA, 19 nt, Homo sapiens
  misc_RNA (1)...(19): siRNA sense strand
caaagaguguccaaucauu

SEQ ID NO: 215406 - RNA, 19 nt, Homo sapiens
  misc_RNA (1)...(19): siRNA sense strand
uagcugaccugaauaaugu

SEQ ID NO: 215407 - RNA, 19 nt, Homo sapiens
  misc_RNA (1)...(19): siRNA sense strand
gcaugauucuauccaaauu

SEQ ID NO: 215408 - RNA, 19 nt, Homo sapiens
  misc_RNA (1)...(19): siRNA sense strand
ugaacuggcugcugaaugu

SEQ ID NO: 215409 - RNA, 19 nt, Homo sapiens
  misc_RNA (1)...(19): siRNA sense strand
gauauccugcagauuauua

SEQ ID NO: 215410 - RNA, 19 nt, Homo sapiens
  misc_RNA (1)...(19): siRNA sense strand
gagaagauguucgagacuu

SEQ ID NO: 215411 - RNA, 19 nt, Homo sapiens
  misc_RNA (1)...(19): siRNA sense strand
gcacuuuaauuaugacauc

SEQ ID NO: 215412 - RNA, 19 nt, Homo sapiens
  misc_RNA (1)...(19): siRNA sense strand
guaaagcacauuuggaaga

SEQ ID NO: 215413 - RNA, 19 nt, Homo sapiens
  misc_RNA (1)...(19): siRNA sense strand
gaauauugcacuccgacua

SEQ ID NO: 215414 - RNA, 19 nt, Homo sapiens
  misc_RNA (1)...(19): siRNA sense strand
uuauaggacugccaugaaa

SEQ ID NO: 215415 - RNA, 19 nt, Homo sapiens
  misc_RNA (1)...(19): siRNA sense strand
gggugaaguugcauccuuu

SEQ ID NO: 215416 - RNA, 19 nt, Homo sapiens
  misc_RNA (1)...(19): siRNA sense strand
gcaagagcacaacaauuug

SEQ ID NO: 215417 - RNA, 19 nt, Homo sapiens
  misc_RNA (1)...(19): siRNA sense strand
gcacaacaauuuggucaac

SEQ ID NO: 215418 - RNA, 19 nt, Homo sapiens
  misc_RNA (1)...(19): siRNA sense strand
agcaagagcacaacaauuu

SEQ ID NO: 215419 - RNA, 19 nt, Homo sapiens
  misc_RNA (1)...(19): siRNA sense strand
agaagauguucgagacuuu

SEQ ID NO: 215420 - RNA, 19 nt, Homo sapiens
  misc_RNA (1)...(19): siRNA sense strand
gagcaagagcacaacaauu

SEQ ID NO: 215421 - RNA, 19 nt, Homo sapiens
  misc_RNA (1)...(19): siRNA sense strand
ucaagcaaguggcaaguuc

SEQ ID NO: 215422 - RNA, 19 nt, Homo sapiens
  misc_RNA (1)...(19): siRNA sense strand
ccacgagacucaaacaacu

SEQ ID NO: 215423 - RNA, 19 nt, Homo sapiens
  misc_RNA (1)...(19): siRNA sense strand
cagcacaaccucaagcaaa

SEQ ID NO: 215424 - RNA, 19 nt, Homo sapiens
  misc_RNA (1)...(19): siRNA sense strand
gcaaagaguguccaaucau

SEQ ID NO: 215425 - RNA, 19 nt, Homo sapiens
  misc_RNA (1)...(19): siRNA sense strand
auggauauccugcagauua

SEQ ID NO: 215426 - RNA, 19 nt, Homo sapiens
  misc_RNA (1)...(19): siRNA sense strand
uguaacaucugcaaagagu

SEQ ID NO: 215427 - RNA, 19 nt, Homo sapiens
  misc_RNA (1)...(19): siRNA sense strand
guccggagcugcuuccaau

SEQ ID NO: 215428 - RNA, 19 nt, Homo sapiens
  misc_RNA (1)...(19): siRNA sense strand
gcaaguggcaaguucaaca

SEQ ID NO: 215429 - RNA, 19 nt, Homo sapiens
  misc_RNA (1)...(19): siRNA sense strand
gcuuccaauuugcuaauaa

SEQ ID NO: 215430 - RNA, 19 nt, Homo sapiens
  misc_RNA (1)...(19): siRNA sense strand
uggaagacaaguacagaua

SEQ ID NO: 215431 - RNA, 19 nt, Homo sapiens
  misc_RNA (1)...(19): siRNA sense strand
ggauccguguccugucuuu

SEQ ID NO: 215432 - RNA, 19 nt, Homo sapiens
  misc_RNA (1)...(19): siRNA sense strand
gucuuuagcugaccugaau

SEQ ID NO: 215433 - RNA, 19 nt, Homo sapiens
  misc_RNA (1)...(19): siRNA sense strand
gacaaguacagauaccuuu

SEQ ID NO: 215434 - RNA, 19 nt, Homo sapiens
  misc_RNA (1)...(19): siRNA sense strand
ccaagcaucaggccaaaug

SEQ ID NO: 215435 - RNA, 19 nt, Homo sapiens
  misc_RNA (1)...(19): siRNA sense strand
ggagcaagagcacaacaau

SEQ ID NO: 215436 - RNA, 19 nt, Homo sapiens
  misc_RNA (1)...(19): siRNA sense strand
guguaaagcacauuuggaa

SEQ ID NO: 215437 - RNA, 19 nt, Homo sapiens
  misc_RNA (1)...(19): siRNA sense strand
caagacaguugggugaagu

SEQ ID NO: 215438 - RNA, 19 nt, Homo sapiens
  misc_RNA (1)...(19): siRNA sense strand
gaagauguucgagacuuug

SEQ ID NO: 215439 - RNA, 19 nt, Homo sapiens
  misc_RNA (1)...(19): siRNA sense strand
gucagauucucagcuuaua

SEQ ID NO: 215440 - RNA, 19 nt, Homo sapiens
  misc_RNA (1)...(19): siRNA sense strand
uaacaucugcaaagagugu

SEQ ID NO: 215441 - RNA, 19 nt, Homo sapiens
  misc_RNA (1)...(19): siRNA sense strand
cggagcugcuuccaauuug

SEQ ID NO: 215442 - RNA, 19 nt, Homo sapiens
  misc_RNA (1)...(19): siRNA sense strand
gaagacaaguacagauacc

SEQ ID NO: 215443 - RNA, 19 nt, Homo sapiens
  misc_RNA (1)...(19): siRNA sense strand
ccauggauauccugcagau

SEQ ID NO: 215444 - RNA, 19 nt, Homo sapiens
  misc_RNA (1)...(19): siRNA sense strand
ggcaucauuucccugugua

SEQ ID NO: 215445 - RNA, 19 nt, Homo sapiens
  misc_RNA (1)...(19): siRNA sense strand
uggauauccugcagauuau

SEQ ID NO: 215446 - RNA, 19 nt, Homo sapiens
  misc_RNA (1)...(19): siRNA sense strand
ggaagacaaguacagauac

SEQ ID NO: 215447 - RNA, 19 nt, Homo sapiens
  misc_RNA (1)...(19): siRNA sense strand
ugcaaagaguguccaauca

SEQ ID NO: 215448 - RNA, 19 nt, Homo sapiens
  misc_RNA (1)...(19): siRNA sense strand
guggauaugugucugaacu

SEQ ID NO: 215449 - RNA, 19 nt, Homo sapiens
  misc_RNA (1)...(19): siRNA sense strand
acuggcugcugaauguuua

SEQ ID NO: 215450 - RNA, 19 nt, Homo sapiens
  misc_RNA (1)...(19): siRNA sense strand
acuaucccaugguggaaua

SEQ ID NO: 215451 - RNA, 19 nt, Homo sapiens
  misc_RNA (1)...(19): siRNA sense strand
ccggagcugcuuccaauuu

SEQ ID NO: 215452 - RNA, 19 nt, Homo sapiens
  misc_RNA (1)...(19): siRNA sense strand
ccaaauuccaagacaguug

SEQ ID NO: 215453 - RNA, 19 nt, Homo sapiens
  misc_RNA (1)...(19): siRNA sense strand
cagaaacugccaagcauca

SEQ ID NO: 215454 - RNA, 19 nt, Homo sapiens
  misc_RNA (1)...(19): siRNA sense strand
uaugacaucugccaaagcu

SEQ ID NO: 215455 - RNA, 19 nt, Homo sapiens
  misc_RNA (1)...(19): siRNA sense strand
aaugucagauucucagcuu

SEQ ID NO: 215456 - RNA, 19 nt, Homo sapiens
  misc_RNA (1)...(19): siRNA sense strand
ucgagacuuugccaaggua

SEQ ID NO: 215457 - RNA, 19 nt, Homo sapiens
  misc_RNA (1)...(19): siRNA sense strand
gcaaaaggccauaaaaugc

SEQ ID NO: 215458 - RNA, 19 nt, Homo sapiens
  misc_RNA (1)...(19): siRNA sense strand
cugcaugauucuauccaaa

SEQ ID NO: 215459 - RNA, 19 nt, Homo sapiens
  misc_RNA (1)...(19): siRNA sense strand
uaaagcacauuuggaagac

SEQ ID NO: 215460 - RNA, 19 nt, Homo sapiens
  misc_RNA (1)...(19): siRNA sense strand
acaggagucuaaagcacuu

SEQ ID NO: 215461 - RNA, 19 nt, Homo sapiens
  misc_RNA (1)...(19): siRNA sense strand
acagauaccuuuucaagca

SEQ ID NO: 215462 - RNA, 19 nt, Homo sapiens
  misc_RNA (1)...(19): siRNA sense strand
aagcacauuuggaagacaa

SEQ ID NO: 215463 - RNA, 19 nt, Homo sapiens
  misc_RNA (1)...(19): siRNA sense strand
gcuaauaauaagccagaga

SEQ ID NO: 215464 - RNA, 19 nt, Homo sapiens
  misc_RNA (1)...(19): siRNA sense strand
caagagcacaacaauuugg

SEQ ID NO: 215465 - RNA, 19 nt, Homo sapiens
  misc_RNA (1)...(19): siRNA sense strand
ccugucagcugcaugugau

SEQ ID NO: 215466 - RNA, 19 nt, Homo sapiens
  misc_RNA (1)...(19): siRNA sense strand
gcugcugaauguuuaugau

SEQ ID NO: 215467 - RNA, 19 nt, Homo sapiens
  misc_RNA (1)...(19): siRNA sense strand
acagagcucuaccagucuu

SEQ ID NO: 215468 - RNA, 19 nt, Homo sapiens
  misc_RNA (1)...(19): siRNA sense strand
acaguugggugaaguugca

SEQ ID NO: 215469 - RNA, 19 nt, Homo sapiens
  misc_RNA (1)...(19): siRNA sense strand
guuugaccacuauuuauga

SEQ ID NO: 215470 - RNA, 19 nt, Homo sapiens
  misc_RNA (1)...(19): siRNA sense strand
gcuuauaggacugccauga

SEQ ID NO: 215471 - RNA, 19 nt, Homo sapiens
  misc_RNA (1)...(19): siRNA sense strand
caucaggccaaauguaaca

SEQ ID NO: 215472 - RNA, 19 nt, Homo sapiens
  misc_RNA (1)...(19): siRNA sense strand
gauucuauccaaauuccaa

SEQ ID NO: 215473 - RNA, 19 nt, Homo sapiens
  misc_RNA (1)...(19): siRNA sense strand
ggcaaguucaacaggauuu

SEQ ID NO: 215474 - RNA, 19 nt, Homo sapiens
  misc_RNA (1)...(19): siRNA sense strand
gaacuggcugcugaauguu

SEQ ID NO: 215475 - RNA, 19 nt, Homo sapiens
  misc_RNA (1)...(19): siRNA sense strand
cugcugaauguuuaugaua

SEQ ID NO: 215476 - RNA, 19 nt, Homo sapiens
  misc_RNA (1)...(19): siRNA sense strand
aagcaucaggccaaaugua

SEQ ID NO: 215477 - RNA, 19 nt, Homo sapiens
  misc_RNA (1)...(19): siRNA sense strand
uggcaucauuucccugugu

SEQ ID NO: 215478 - RNA, 19 nt, Homo sapiens
  misc_RNA (1)...(19): siRNA sense strand
ccaugaaacuccgaagacu

SEQ ID NO: 215479 - RNA, 19 nt, Homo sapiens
  misc_RNA (1)...(19): siRNA sense strand
auaauaagccagagaucga

SEQ ID NO: 215480 - RNA, 19 nt, Homo sapiens
  misc_RNA (1)...(19): siRNA sense strand
cuaauaauaagccagagau

SEQ ID NO: 215481 - RNA, 19 nt, Homo sapiens
  misc_RNA (1)...(19): siRNA sense strand
ugggugaaguugcauccuu

SEQ ID NO: 215482 - RNA, 19 nt, Homo sapiens
  misc_RNA (1)...(19): siRNA sense strand
caucauuucccuguguaaa

SEQ ID NO: 215483 - RNA, 19 nt, Homo sapiens
  misc_RNA (1)...(19): siRNA sense strand
gcguggauaugugucugaa

SEQ ID NO: 215484 - RNA, 19 nt, Homo sapiens
  misc_RNA (1)...(19): siRNA sense strand
gcacuaucccaugguggaa

SEQ ID NO: 215485 - RNA, 19 nt, Homo sapiens
  misc_RNA (1)...(19): siRNA sense strand
gagccugucagcugcaugu

SEQ ID NO: 215486 - RNA, 19 nt, Homo sapiens
  misc_RNA (1)...(19): siRNA sense strand
guacagauaccuuuucaag

SEQ ID NO: 215487 - RNA, 19 nt, Homo sapiens
  misc_RNA (1)...(19): siRNA sense strand
gucccucucugcguggaua

SEQ ID NO: 215488 - RNA, 19 nt, Homo sapiens
  misc_RNA (1)...(19): siRNA sense strand
ggagcugcuuccaauuugc

SEQ ID NO: 215489 - RNA, 19 nt, Homo sapiens
  misc_RNA (1)...(19): siRNA sense strand
uuagcugaccugaauaaug

SEQ ID NO: 215490 - RNA, 19 nt, Homo sapiens
  misc_RNA (1)...(19): siRNA sense strand
guggcaaguucaacaggau

SEQ ID NO: 215491 - RNA, 19 nt, Homo sapiens
  misc_RNA (1)...(19): siRNA sense strand
acaacaauuuggucaacgu

SEQ ID NO: 215492 - RNA, 19 nt, Homo sapiens
  misc_RNA (1)...(19): siRNA sense strand
gacuacaucaggagaagau

SEQ ID NO: 215493 - RNA, 19 nt, Homo sapiens
  misc_RNA (1)...(19): siRNA sense strand
uaauaagccagagaucgaa

SEQ ID NO: 215494 - RNA, 19 nt, Homo sapiens
  misc_RNA (1)...(19): siRNA sense strand
ugucagauucucagcuuau

SEQ ID NO: 215495 - RNA, 19 nt, Homo sapiens
  misc_RNA (1)...(19): siRNA sense strand
ggauauccugcagauuauu

SEQ ID NO: 215496 - RNA, 19 nt, Homo sapiens
  misc_RNA (1)...(19): siRNA sense strand
agcaucaggccaaauguaa

SEQ ID NO: 215497 - RNA, 19 nt, Homo sapiens
  misc_RNA (1)...(19): siRNA sense strand
gcccuuugcuuggaucucu

SEQ ID NO: 215498 - RNA, 19 nt, Homo sapiens
  misc_RNA (1)...(19): siRNA sense strand
gcugaauguuuaugauacg

SEQ ID NO: 215499 - RNA, 19 nt, Homo sapiens
  misc_RNA (1)...(19): siRNA sense strand
agacuuugccaagguacua

SEQ ID NO: 215500 - RNA, 19 nt, Homo sapiens
  misc_RNA (1)...(19): siRNA sense strand
caagcaaguggcaaguuca

SEQ ID NO: 215501 - RNA, 19 nt, Homo sapiens
  misc_RNA (1)...(19): siRNA sense strand
agacaaguacagauaccuu

SEQ ID NO: 215502 - RNA, 19 nt, Homo sapiens
  misc_RNA (1)...(19): siRNA sense strand
gcaucauuucccuguguaa

SEQ ID NO: 215503 - RNA, 19 nt, Homo sapiens
  misc_RNA (1)...(19): siRNA sense strand
cugcaaagaguguccaauc

SEQ ID NO: 215504 - RNA, 19 nt, Homo sapiens
  misc_RNA (1)...(19): siRNA sense strand
cuuauaggacugccaugaa

SEQ ID NO: 215505 - RNA, 19 nt, Homo sapiens
  misc_RNA (1)...(19): siRNA sense strand
caaagaguguccaaucauu

SEQ ID NO: 215506 - RNA, 19 nt, Homo sapiens
  misc_RNA (1)...(19): siRNA sense strand
uagcugaccugaauaaugu

SEQ ID NO: 215507 - RNA, 19 nt, Homo sapiens
  misc_RNA (1)...(19): siRNA sense strand
gcaugauucuauccaaauu

SEQ ID NO: 215508 - RNA, 19 nt, Homo sapiens
  misc_RNA (1)...(19): siRNA sense strand
ugaacuggcugcugaaugu

SEQ ID NO: 215509 - RNA, 19 nt, Homo sapiens
  misc_RNA (1)...(19): siRNA sense strand
gauauccugcagauuauua

SEQ ID NO: 215510 - RNA, 19 nt, Homo sapiens
  misc_RNA (1)...(19): siRNA sense strand
gagaagauguucgagacuu

SEQ ID NO: 215511 - RNA, 19 nt, Homo sapiens
  misc_RNA (1)...(19): siRNA sense strand
gcacuuuaauuaugacauc

SEQ ID NO: 215512 - RNA, 19 nt, Homo sapiens
  misc_RNA (1)...(19): siRNA sense strand
guaaagcacauuuggaaga

SEQ ID NO: 215513 - RNA, 19 nt, Homo sapiens
  misc_RNA (1)...(19): siRNA sense strand
gaauauugcacuccgacua

SEQ ID NO: 215514 - RNA, 19 nt, Homo sapiens
  misc_RNA (1)...(19): siRNA sense strand
uuauaggacugccaugaaa

SEQ ID NO: 215515 - RNA, 19 nt, Homo sapiens
  misc_RNA (1)...(19): siRNA sense strand
gggugaaguugcauccuuu

SEQ ID NO: 215516 - RNA, 19 nt, Homo sapiens
  misc_RNA (1)...(19): siRNA sense strand
gcaagagcacaacaauuug

SEQ ID NO: 215517 - RNA, 19 nt, Homo sapiens
  misc_RNA (1)...(19): siRNA sense strand
gcacaacaauuuggucaac

SEQ ID NO: 215518 - RNA, 19 nt, Homo sapiens
  misc_RNA (1)...(19): siRNA sense strand
agcaagagcacaacaauuu

SEQ ID NO: 215519 - RNA, 19 nt, Homo sapiens
  misc_RNA (1)...(19): siRNA sense strand
agaagauguucgagacuuu

SEQ ID NO: 215520 - RNA, 19 nt, Homo sapiens
  misc_RNA (1)...(19): siRNA sense strand
gagcaagagcacaacaauu

SEQ ID NO: 215521 - RNA, 19 nt, Homo sapiens
  misc_RNA (1)...(19): siRNA sense strand
ucaagcaaguggcaaguuc

SEQ ID NO: 215522 - RNA, 19 nt, Homo sapiens
  misc_RNA (1)...(19): siRNA sense strand
ccacgagacucaaacaacu

SEQ ID NO: 215523 - RNA, 19 nt, Homo sapiens
  misc_RNA (1)...(19): siRNA sense strand
cagcacaaccucaagcaaa

SEQ ID NO: 215524 - RNA, 19 nt, Homo sapiens
  misc_RNA (1)...(19): siRNA sense strand
gcaaagaguguccaaucau

SEQ ID NO: 215525 - RNA, 19 nt, Homo sapiens
  misc_RNA (1)...(19): siRNA sense strand
auggauauccugcagauua

SEQ ID NO: 215526 - RNA, 19 nt, Homo sapiens
  misc_RNA (1)...(19): siRNA sense strand
uguaacaucugcaaagagu

SEQ ID NO: 215527 - RNA, 19 nt, Homo sapiens
  misc_RNA (1)...(19): siRNA sense strand
guccggagcugcuuccaau

SEQ ID NO: 215528 - RNA, 19 nt, Homo sapiens
  misc_RNA (1)...(19): siRNA sense strand
gcaaguggcaaguucaaca

SEQ ID NO: 215529 - RNA, 19 nt, Homo sapiens
  misc_RNA (1)...(19): siRNA sense strand
gcuuccaauuugcuaauaa

SEQ ID NO: 215530 - RNA, 19 nt, Homo sapiens
  misc_RNA (1)...(19): siRNA sense strand
uggaagacaaguacagaua

SEQ ID NO: 215531 - RNA, 19 nt, Homo sapiens
  misc_RNA (1)...(19): siRNA sense strand
ggauccguguccugucuuu

SEQ ID NO: 215532 - RNA, 19 nt, Homo sapiens
  misc_RNA (1)...(19): siRNA sense strand
gucuuuagcugaccugaau

SEQ ID NO: 215533 - RNA, 19 nt, Homo sapiens
  misc_RNA (1)...(19): siRNA sense strand
gacaaguacagauaccuuu

SEQ ID NO: 215534 - RNA, 19 nt, Homo sapiens
  misc_RNA (1)...(19): siRNA sense strand
ccaagcaucaggccaaaug

SEQ ID NO: 215535 - RNA, 19 nt, Homo sapiens
  misc_RNA (1)...(19): siRNA sense strand
ggagcaagagcacaacaau

SEQ ID NO: 215536 - RNA, 19 nt, Homo sapiens
  misc_RNA (1)...(19): siRNA sense strand
guguaaagcacauuuggaa

SEQ ID NO: 215537 - RNA, 19 nt, Homo sapiens
  misc_RNA (1)...(19): siRNA sense strand
caagacaguugggugaagu

SEQ ID NO: 215538 - RNA, 19 nt, Homo sapiens
  misc_RNA (1)...(19): siRNA sense strand
gaagauguucgagacuuug

SEQ ID NO: 215539 - RNA, 19 nt, Homo sapiens
  misc_RNA (1)...(19): siRNA sense strand
gucagauucucagcuuaua

SEQ ID NO: 215540 - RNA, 19 nt, Homo sapiens
  misc_RNA (1)...(19): siRNA sense strand
uaacaucugcaaagagugu

SEQ ID NO: 215541 - RNA, 19 nt, Homo sapiens
  misc_RNA (1)...(19): siRNA sense strand
cggagcugcuuccaauuug

SEQ ID NO: 215542 - RNA, 19 nt, Homo sapiens
  misc_RNA (1)...(19): siRNA sense strand
gaagacaaguacagauacc

SEQ ID NO: 215543 - RNA, 19 nt, Homo sapiens
  misc_RNA (1)...(19): siRNA sense strand
ccauggauauccugcagau

SEQ ID NO: 215544 - RNA, 19 nt, Homo sapiens
  misc_RNA (1)...(19): siRNA sense strand
ggcaucauuucccugugua

SEQ ID NO: 215545 - RNA, 19 nt, Homo sapiens
  misc_RNA (1)...(19): siRNA sense strand
uggauauccugcagauuau

SEQ ID NO: 215546 - RNA, 19 nt, Homo sapiens
  misc_RNA (1)...(19): siRNA sense strand
ggaagacaaguacagauac

SEQ ID NO: 215547 - RNA, 19 nt, Homo sapiens
  misc_RNA (1)...(19): siRNA sense strand
ugcaaagaguguccaauca

SEQ ID NO: 215548 - RNA, 19 nt, Homo sapiens
  misc_RNA (1)...(19): siRNA sense strand
guggauaugugucugaacu

SEQ ID NO: 215549 - RNA, 19 nt, Homo sapiens
  misc_RNA (1)...(19): siRNA sense strand
acuggcugcugaauguuua

SEQ ID NO: 215550 - RNA, 19 nt, Homo sapiens
  misc_RNA (1)...(19): siRNA sense strand
acuaucccaugguggaaua

SEQ ID NO: 215551 - RNA, 19 nt, Homo sapiens
  misc_RNA (1)...(19): siRNA sense strand
ccggagcugcuuccaauuu

SEQ ID NO: 215552 - RNA, 19 nt, Homo sapiens
  misc_RNA (1)...(19): siRNA sense strand
ccaaauuccaagacaguug

SEQ ID NO: 215553 - RNA, 19 nt, Homo sapiens
  misc_RNA (1)...(19): siRNA sense strand
cagaaacugccaagcauca

SEQ ID NO: 215554 - RNA, 19 nt, Homo sapiens
  misc_RNA (1)...(19): siRNA sense strand
uaugacaucugccaaagcu

SEQ ID NO: 215555 - RNA, 19 nt, Homo sapiens
  misc_RNA (1)...(19): siRNA sense strand
aaugucagauucucagcuu

SEQ ID NO: 215556 - RNA, 19 nt, Homo sapiens
  misc_RNA (1)...(19): siRNA sense strand
ucgagacuuugccaaggua

SEQ ID NO: 215557 - RNA, 19 nt, Homo sapiens
  misc_RNA (1)...(19): siRNA sense strand
gcaaaaggccauaaaaugc

SEQ ID NO: 215558 - RNA, 19 nt, Homo sapiens
  misc_RNA (1)...(19): siRNA sense strand
cugcaugauucuauccaaa

SEQ ID NO: 215559 - RNA, 19 nt, Homo sapiens
  misc_RNA (1)...(19): siRNA sense strand
uaaagcacauuuggaagac

SEQ ID NO: 215560 - RNA, 19 nt, Homo sapiens
  misc_RNA (1)...(19): siRNA sense strand
acaggagucuaaagcacuu

SEQ ID NO: 215561 - RNA, 19 nt, Homo sapiens
  misc_RNA (1)...(19): siRNA sense strand
acagauaccuuuucaagca

SEQ ID NO: 215562 - RNA, 19 nt, Homo sapiens
  misc_RNA (1)...(19): siRNA sense strand
aagcacauuuggaagacaa

SEQ ID NO: 215563 - RNA, 19 nt, Homo sapiens
  misc_RNA (1)...(19): siRNA sense strand
gcuaauaauaagccagaga

SEQ ID NO: 215564 - RNA, 19 nt, Homo sapiens
  misc_RNA (1)...(19): siRNA sense strand
caagagcacaacaauuugg

SEQ ID NO: 215565 - RNA, 19 nt, Homo sapiens
  misc_RNA (1)...(19): siRNA sense strand
ccugucagcugcaugugau

SEQ ID NO: 215566 - RNA, 19 nt, Homo sapiens
  misc_RNA (1)...(19): siRNA sense strand
gcugcugaauguuuaugau

SEQ ID NO: 215567 - RNA, 19 nt, Homo sapiens
  misc_RNA (1)...(19): siRNA sense strand
acagagcucuaccagucuu

SEQ ID NO: 215568 - RNA, 19 nt, Homo sapiens
  misc_RNA (1)...(19): siRNA sense strand
acaguugggugaaguugca

SEQ ID NO: 215569 - RNA, 19 nt, Homo sapiens
  misc_RNA (1)...(19): siRNA sense strand
guuugaccacuauuuauga

SEQ ID NO: 215570 - RNA, 19 nt, Homo sapiens
  misc_RNA (1)...(19): siRNA sense strand
gcuuauaggacugccauga

SEQ ID NO: 215571 - RNA, 19 nt, Homo sapiens
  misc_RNA (1)...(19): siRNA sense strand
caucaggccaaauguaaca

SEQ ID NO: 215572 - RNA, 19 nt, Homo sapiens
  misc_RNA (1)...(19): siRNA sense strand
gauucuauccaaauuccaa

SEQ ID NO: 215573 - RNA, 19 nt, Homo sapiens
  misc_RNA (1)...(19): siRNA sense strand
ggcaaguucaacaggauuu

SEQ ID NO: 215574 - RNA, 19 nt, Homo sapiens
  misc_RNA (1)...(19): siRNA sense strand
gaacuggcugcugaauguu

SEQ ID NO: 215575 - RNA, 19 nt, Homo sapiens
  misc_RNA (1)...(19): siRNA sense strand
cugcugaauguuuaugaua

SEQ ID NO: 215576 - RNA, 19 nt, Homo sapiens
  misc_RNA (1)...(19): siRNA sense strand
aagcaucaggccaaaugua

SEQ ID NO: 215577 - RNA, 19 nt, Homo sapiens
  misc_RNA (1)...(19): siRNA sense strand
uggcaucauuucccugugu

SEQ ID NO: 215578 - RNA, 19 nt, Homo sapiens
  misc_RNA (1)...(19): siRNA sense strand
ccaugaaacuccgaagacu

SEQ ID NO: 215579 - RNA, 19 nt, Homo sapiens
  misc_RNA (1)...(19): siRNA sense strand
auaauaagccagagaucga

SEQ ID NO: 215580 - RNA, 19 nt, Homo sapiens
  misc_RNA (1)...(19): siRNA sense strand
cuaauaauaagccagagau

SEQ ID NO: 215581 - RNA, 19 nt, Homo sapiens
  misc_RNA (1)...(19): siRNA sense strand
ugggugaaguugcauccuu

SEQ ID NO: 215582 - RNA, 19 nt, Homo sapiens
  misc_RNA (1)...(19): siRNA sense strand
caucauuucccuguguaaa

SEQ ID NO: 215583 - RNA, 19 nt, Homo sapiens
  misc_RNA (1)...(19): siRNA sense strand
gcguggauaugugucugaa

SEQ ID NO: 215584 - RNA, 19 nt, Homo sapiens
  misc_RNA (1)...(19): siRNA sense strand
gcacuaucccaugguggaa

SEQ ID NO: 215585 - RNA, 19 nt, Homo sapiens
  misc_RNA (1)...(19): siRNA sense strand
gagccugucagcugcaugu

SEQ ID NO: 215586 - RNA, 19 nt, Homo sapiens
  misc_RNA (1)...(19): siRNA sense strand
guacagauaccuuuucaag

SEQ ID NO: 215587 - RNA, 19 nt, Homo sapiens
  misc_RNA (1)...(19): siRNA sense strand
gucccucucugcguggaua

SEQ ID NO: 215588 - RNA, 19 nt, Homo sapiens
  misc_RNA (1)...(19): siRNA sense strand
ggagcugcuuccaauuugc

SEQ ID NO: 215589 - RNA, 19 nt, Homo sapiens
  misc_RNA (1)...(19): siRNA sense strand
uuagcugaccugaauaaug

SEQ ID NO: 215590 - RNA, 19 nt, Homo sapiens
  misc_RNA (1)...(19): siRNA sense strand
guggcaaguucaacaggau

SEQ ID NO: 215591 - RNA, 19 nt, Homo sapiens
  misc_RNA (1)...(19): siRNA sense strand
acaacaauuuggucaacgu

SEQ ID NO: 215592 - RNA, 19 nt, Homo sapiens
  misc_RNA (1)...(19): siRNA sense strand
gacuacaucaggagaagau

SEQ ID NO: 215593 - RNA, 19 nt, Homo sapiens
  misc_RNA (1)...(19): siRNA sense strand
uaauaagccagagaucgaa

SEQ ID NO: 215594 - RNA, 19 nt, Homo sapiens
  misc_RNA (1)...(19): siRNA sense strand
ugucagauucucagcuuau

SEQ ID NO: 215595 - RNA, 19 nt, Homo sapiens
  misc_RNA (1)...(19): siRNA sense strand
ggauauccugcagauuauu

SEQ ID NO: 215596 - RNA, 19 nt, Homo sapiens
  misc_RNA (1)...(19): siRNA sense strand
agcaucaggccaaauguaa

SEQ ID NO: 215597 - RNA, 19 nt, Homo sapiens
  misc_RNA (1)...(19): siRNA sense strand
gcccuuugcuuggaucucu

SEQ ID NO: 215598 - RNA, 19 nt, Homo sapiens
  misc_RNA (1)...(19): siRNA sense strand
gcugaauguuuaugauacg

SEQ ID NO: 215599 - RNA, 19 nt, Homo sapiens
  misc_RNA (1)...(19): siRNA sense strand
agacuuugccaagguacua

SEQ ID NO: 215600 - RNA, 19 nt, Homo sapiens
  misc_RNA (1)...(19): siRNA sense strand
caagcaaguggcaaguuca

SEQ ID NO: 215601 - RNA, 19 nt, Homo sapiens
  misc_RNA (1)...(19): siRNA sense strand
agacaaguacagauaccuu

SEQ ID NO: 215602 - RNA, 19 nt, Homo sapiens
  misc_RNA (1)...(19): siRNA sense strand
gcaucauuucccuguguaa

SEQ ID NO: 215603 - RNA, 19 nt, Homo sapiens
  misc_RNA (1)...(19): siRNA sense strand
cugcaaagaguguccaauc

SEQ ID NO: 215604 - RNA, 19 nt, Homo sapiens
  misc_RNA (1)...(19): siRNA sense strand
cuuauaggacugccaugaa

SEQ ID NO: 215605 - RNA, 19 nt, Homo sapiens
  misc_RNA (1)...(19): siRNA sense strand
caaagaguguccaaucauu

SEQ ID NO: 215606 - RNA, 19 nt, Homo sapiens
  misc_RNA (1)...(19): siRNA sense strand
uagcugaccugaauaaugu

SEQ ID NO: 215607 - RNA, 19 nt, Homo sapiens
  misc_RNA (1)...(19): siRNA sense strand
gcaugauucuauccaaauu

SEQ ID NO: 215608 - RNA, 19 nt, Homo sapiens
  misc_RNA (1)...(19): siRNA sense strand
ugaacuggcugcugaaugu

SEQ ID NO: 215609 - RNA, 19 nt, Homo sapiens
  misc_RNA (1)...(19): siRNA sense strand
gauauccugcagauuauua

SEQ ID NO: 215610 - RNA, 19 nt, Homo sapiens
  misc_RNA (1)...(19): siRNA sense strand
gagaagauguucgagacuu

SEQ ID NO: 215611 - RNA, 19 nt, Homo sapiens
  misc_RNA (1)...(19): siRNA sense strand
gcacuuuaauuaugacauc

SEQ ID NO: 215612 - RNA, 19 nt, Homo sapiens
  misc_RNA (1)...(19): siRNA sense strand
guaaagcacauuuggaaga

SEQ ID NO: 215613 - RNA, 19 nt, Homo sapiens
  misc_RNA (1)...(19): siRNA sense strand
gaauauugcacuccgacua

SEQ ID NO: 215614 - RNA, 19 nt, Homo sapiens
  misc_RNA (1)...(19): siRNA sense strand
uuauaggacugccaugaaa

SEQ ID NO: 215615 - RNA, 19 nt, Homo sapiens
  misc_RNA (1)...(19): siRNA sense strand
gggugaaguugcauccuuu

SEQ ID NO: 215616 - RNA, 19 nt, Homo sapiens
  misc_RNA (1)...(19): siRNA sense strand
gcaagagcacaacaauuug

SEQ ID NO: 215617 - RNA, 19 nt, Homo sapiens
  misc_RNA (1)...(19): siRNA sense strand
gcacaacaauuuggucaac

SEQ ID NO: 215618 - RNA, 19 nt, Homo sapiens
  misc_RNA (1)...(19): siRNA sense strand
agcaagagcacaacaauuu

SEQ ID NO: 215619 - RNA, 19 nt, Homo sapiens
  misc_RNA (1)...(19): siRNA sense strand
agaagauguucgagacuuu

SEQ ID NO: 215620 - RNA, 19 nt, Homo sapiens
  misc_RNA (1)...(19): siRNA sense strand
gagcaagagcacaacaauu

SEQ ID NO: 215621 - RNA, 19 nt, Homo sapiens
  misc_RNA (1)...(19): siRNA sense strand
ucaagcaaguggcaaguuc

SEQ ID NO: 215622 - RNA, 19 nt, Homo sapiens
  misc_RNA (1)...(19): siRNA sense strand
ccacgagacucaaacaacu

SEQ ID NO: 215623 - RNA, 19 nt, Homo sapiens
  misc_RNA (1)...(19): siRNA sense strand
cagcacaaccucaagcaaa

SEQ ID NO: 215624 - RNA, 19 nt, Homo sapiens
  misc_RNA (1)...(19): siRNA sense strand
gcaaagaguguccaaucau

SEQ ID NO: 215625 - RNA, 19 nt, Homo sapiens
  misc_RNA (1)...(19): siRNA sense strand
auggauauccugcagauua

SEQ ID NO: 215626 - RNA, 19 nt, Homo sapiens
  misc_RNA (1)...(19): siRNA sense strand
uguaacaucugcaaagagu

SEQ ID NO: 215627 - RNA, 19 nt, Homo sapiens
  misc_RNA (1)...(19): siRNA sense strand
guccggagcugcuuccaau

SEQ ID NO: 215628 - RNA, 19 nt, Homo sapiens
  misc_RNA (1)...(19): siRNA sense strand
gcaaguggcaaguucaaca

SEQ ID NO: 215629 - RNA, 19 nt, Homo sapiens
  misc_RNA (1)...(19): siRNA sense strand
gcuuccaauuugcuaauaa

SEQ ID NO: 215630 - RNA, 19 nt, Homo sapiens
  misc_RNA (1)...(19): siRNA sense strand
uggaagacaaguacagaua

SEQ ID NO: 215631 - RNA, 19 nt, Homo sapiens
  misc_RNA (1)...(19): siRNA sense strand
ggauccguguccugucuuu

SEQ ID NO: 215632 - RNA, 19 nt, Homo sapiens
  misc_RNA (1)...(19): siRNA sense strand
gucuuuagcugaccugaau

SEQ ID NO: 215633 - RNA, 19 nt, Homo sapiens
  misc_RNA (1)...(19): siRNA sense strand
gacaaguacagauaccuuu

SEQ ID NO: 215634 - RNA, 19 nt, Homo sapiens
  misc_RNA (1)...(19): siRNA sense strand
ccaagcaucaggccaaaug

SEQ ID NO: 215635 - RNA, 19 nt, Homo sapiens
  misc_RNA (1)...(19): siRNA sense strand
ggagcaagagcacaacaau

SEQ ID NO: 215636 - RNA, 19 nt, Homo sapiens
  misc_RNA (1)...(19): siRNA sense strand
guguaaagcacauuuggaa

SEQ ID NO: 215637 - RNA, 19 nt, Homo sapiens
  misc_RNA (1)...(19): siRNA sense strand
caagacaguugggugaagu

SEQ ID NO: 215638 - RNA, 19 nt, Homo sapiens
  misc_RNA (1)...(19): siRNA sense strand
gaagauguucgagacuuug

SEQ ID NO: 215639 - RNA, 19 nt, Homo sapiens
  misc_RNA (1)...(19): siRNA sense strand
gucagauucucagcuuaua

SEQ ID NO: 215640 - RNA, 19 nt, Homo sapiens
  misc_RNA (1)...(19): siRNA sense strand
uaacaucugcaaagagugu

SEQ ID NO: 215641 - RNA, 19 nt, Homo sapiens
  misc_RNA (1)...(19): siRNA sense strand
cggagcugcuuccaauuug

SEQ ID NO: 215642 - RNA, 19 nt, Homo sapiens
  misc_RNA (1)...(19): siRNA sense strand
gaagacaaguacagauacc

SEQ ID NO: 215643 - RNA, 19 nt, Homo sapiens
  misc_RNA (1)...(19): siRNA sense strand
ccauggauauccugcagau

SEQ ID NO: 215644 - RNA, 19 nt, Homo sapiens
  misc_RNA (1)...(19): siRNA sense strand
ggcaucauuucccugugua

SEQ ID NO: 215645 - RNA, 19 nt, Homo sapiens
  misc_RNA (1)...(19): siRNA sense strand
uggauauccugcagauuau

SEQ ID NO: 215646 - RNA, 19 nt, Homo sapiens
  misc_RNA (1)...(19): siRNA sense strand
ggaagacaaguacagauac

SEQ ID NO: 215647 - RNA, 19 nt, Homo sapiens
  misc_RNA (1)...(19): siRNA sense strand
ugcaaagaguguccaauca

SEQ ID NO: 215648 - RNA, 19 nt, Homo sapiens
  misc_RNA (1)...(19): siRNA sense strand
guggauaugugucugaacu

SEQ ID NO: 215649 - RNA, 19 nt, Homo sapiens
  misc_RNA (1)...(19): siRNA sense strand
acuggcugcugaauguuua

SEQ ID NO: 215650 - RNA, 19 nt, Homo sapiens
  misc_RNA (1)...(19): siRNA sense strand
acuaucccaugguggaaua

SEQ ID NO: 215651 - RNA, 19 nt, Homo sapiens
  misc_RNA (1)...(19): siRNA sense strand
ccggagcugcuuccaauuu

SEQ ID NO: 215652 - RNA, 19 nt, Homo sapiens
  misc_RNA (1)...(19): siRNA sense strand
ccaaauuccaagacaguug

SEQ ID NO: 215653 - RNA, 19 nt, Homo sapiens
  misc_RNA (1)...(19): siRNA sense strand
cagaaacugccaagcauca

SEQ ID NO: 215654 - RNA, 19 nt, Homo sapiens
  misc_RNA (1)...(19): siRNA sense strand
uaugacaucugccaaagcu

SEQ ID NO: 215655 - RNA, 19 nt, Homo sapiens
  misc_RNA (1)...(19): siRNA sense strand
aaugucagauucucagcuu

SEQ ID NO: 215656 - RNA, 19 nt, Homo sapiens
  misc_RNA (1)...(19): siRNA sense strand
ucgagacuuugccaaggua

SEQ ID NO: 215657 - RNA, 19 nt, Homo sapiens
  misc_RNA (1)...(19): siRNA sense strand
gcaaaaggccauaaaaugc

SEQ ID NO: 215658 - RNA, 19 nt, Homo sapiens
  misc_RNA (1)...(19): siRNA sense strand
cugcaugauucuauccaaa

SEQ ID NO: 215659 - RNA, 19 nt, Homo sapiens
  misc_RNA (1)...(19): siRNA sense strand
uaaagcacauuuggaagac

SEQ ID NO: 215660 - RNA, 19 nt, Homo sapiens
  misc_RNA (1)...(19): siRNA sense strand
acaggagucuaaagcacuu

SEQ ID NO: 215661 - RNA, 19 nt, Homo sapiens
  misc_RNA (1)...(19): siRNA sense strand
acagauaccuuuucaagca

SEQ ID NO: 215662 - RNA, 19 nt, Homo sapiens
  misc_RNA (1)...(19): siRNA sense strand
aagcacauuuggaagacaa

SEQ ID NO: 215663 - RNA, 19 nt, Homo sapiens
  misc_RNA (1)...(19): siRNA sense strand
gcuaauaauaagccagaga

SEQ ID NO: 215664 - RNA, 19 nt, Homo sapiens
  misc_RNA (1)...(19): siRNA sense strand
caagagcacaacaauuugg

SEQ ID NO: 215665 - RNA, 19 nt, Homo sapiens
  misc_RNA (1)...(19): siRNA sense strand
ccugucagcugcaugugau

SEQ ID NO: 215666 - RNA, 19 nt, Homo sapiens
  misc_RNA (1)...(19): siRNA sense strand
gcugcugaauguuuaugau

SEQ ID NO: 215667 - RNA, 19 nt, Homo sapiens
  misc_RNA (1)...(19): siRNA sense strand
acagagcucuaccagucuu

SEQ ID NO: 215668 - RNA, 19 nt, Homo sapiens
  misc_RNA (1)...(19): siRNA sense strand
acaguugggugaaguugca

SEQ ID NO: 215669 - RNA, 19 nt, Homo sapiens
  misc_RNA (1)...(19): siRNA sense strand
guuugaccacuauuuauga

SEQ ID NO: 215670 - RNA, 19 nt, Homo sapiens
  misc_RNA (1)...(19): siRNA sense strand
gcuuauaggacugccauga

SEQ ID NO: 215671 - RNA, 19 nt, Homo sapiens
  misc_RNA (1)...(19): siRNA sense strand
caucaggccaaauguaaca

SEQ ID NO: 215672 - RNA, 19 nt, Homo sapiens
  misc_RNA (1)...(19): siRNA sense strand
gauucuauccaaauuccaa

SEQ ID NO: 215673 - RNA, 19 nt, Homo sapiens
  misc_RNA (1)...(19): siRNA sense strand
ggcaaguucaacaggauuu

SEQ ID NO: 215674 - RNA, 19 nt, Homo sapiens
  misc_RNA (1)...(19): siRNA sense strand
gaacuggcugcugaauguu

SEQ ID NO: 215675 - RNA, 19 nt, Homo sapiens
  misc_RNA (1)...(19): siRNA sense strand
cugcugaauguuuaugaua

SEQ ID NO: 215676 - RNA, 19 nt, Homo sapiens
  misc_RNA (1)...(19): siRNA sense strand
aagcaucaggccaaaugua

SEQ ID NO: 215677 - RNA, 19 nt, Homo sapiens
  misc_RNA (1)...(19): siRNA sense strand
uggcaucauuucccugugu

SEQ ID NO: 215678 - RNA, 19 nt, Homo sapiens
  misc_RNA (1)...(19): siRNA sense strand
ccaugaaacuccgaagacu

SEQ ID NO: 215679 - RNA, 19 nt, Homo sapiens
  misc_RNA (1)...(19): siRNA sense strand
auaauaagccagagaucga

SEQ ID NO: 215680 - RNA, 19 nt, Homo sapiens
  misc_RNA (1)...(19): siRNA sense strand
cuaauaauaagccagagau

SEQ ID NO: 215681 - RNA, 19 nt, Homo sapiens
  misc_RNA (1)...(19): siRNA sense strand
ugggugaaguugcauccuu

SEQ ID NO: 215682 - RNA, 19 nt, Homo sapiens
  misc_RNA (1)...(19): siRNA sense strand
caucauuucccuguguaaa

SEQ ID NO: 215683 - RNA, 19 nt, Homo sapiens
  misc_RNA (1)...(19): siRNA sense strand
gcguggauaugugucugaa

SEQ ID NO: 215684 - RNA, 19 nt, Homo sapiens
  misc_RNA (1)...(19): siRNA sense strand
gcacuaucccaugguggaa

SEQ ID NO: 215685 - RNA, 19 nt, Homo sapiens
  misc_RNA (1)...(19): siRNA sense strand
gagccugucagcugcaugu

SEQ ID NO: 215686 - RNA, 19 nt, Homo sapiens
  misc_RNA (1)...(19): siRNA sense strand
guacagauaccuuuucaag

SEQ ID NO: 215687 - RNA, 19 nt, Homo sapiens
  misc_RNA (1)...(19): siRNA sense strand
gucccucucugcguggaua

SEQ ID NO: 215688 - RNA, 19 nt, Homo sapiens
  misc_RNA (1)...(19): siRNA sense strand
ggagcugcuuccaauuugc

SEQ ID NO: 215689 - RNA, 19 nt, Homo sapiens
  misc_RNA (1)...(19): siRNA sense strand
uuagcugaccugaauaaug

SEQ ID NO: 215690 - RNA, 19 nt, Homo sapiens
  misc_RNA (1)...(19): siRNA sense strand
guggcaaguucaacaggau

SEQ ID NO: 215691 - RNA, 19 nt, Homo sapiens
  misc_RNA (1)...(19): siRNA sense strand
acaacaauuuggucaacgu

SEQ ID NO: 215692 - RNA, 19 nt, Homo sapiens
  misc_RNA (1)...(19): siRNA sense strand
gacuacaucaggagaagau

SEQ ID NO: 215693 - RNA, 19 nt, Homo sapiens
  misc_RNA (1)...(19): siRNA sense strand
uaauaagccagagaucgaa

SEQ ID NO: 215694 - RNA, 19 nt, Homo sapiens
  misc_RNA (1)...(19): siRNA sense strand
ugucagauucucagcuuau

SEQ ID NO: 215695 - RNA, 19 nt, Homo sapiens
  misc_RNA (1)...(19): siRNA sense strand
ggauauccugcagauuauu

SEQ ID NO: 215696 - RNA, 19 nt, Homo sapiens
  misc_RNA (1)...(19): siRNA sense strand
agcaucaggccaaauguaa

SEQ ID NO: 215697 - RNA, 19 nt, Homo sapiens
  misc_RNA (1)...(19): siRNA sense strand
gcccuuugcuuggaucucu

SEQ ID NO: 215698 - RNA, 19 nt, Homo sapiens
  misc_RNA (1)...(19): siRNA sense strand
gcugaauguuuaugauacg

SEQ ID NO: 215699 - RNA, 19 nt, Homo sapiens
  misc_RNA (1)...(19): siRNA sense strand
agacuuugccaagguacua

SEQ ID NO: 215700 - RNA, 19 nt, Homo sapiens
  misc_RNA (1)...(19): siRNA sense strand
caagcaaguggcaaguuca

SEQ ID NO: 215701 - RNA, 19 nt, Homo sapiens
  misc_RNA (1)...(19): siRNA sense strand
agacaaguacagauaccuu

SEQ ID NO: 215702 - RNA, 19 nt, Homo sapiens
  misc_RNA (1)...(19): siRNA sense strand
gcaucauuucccuguguaa

SEQ ID NO: 215703 - RNA, 19 nt, Homo sapiens
  misc_RNA (1)...(19): siRNA sense strand
cugcaaagaguguccaauc

SEQ ID NO: 215704 - RNA, 19 nt, Homo sapiens
  misc_RNA (1)...(19): siRNA sense strand
cuuauaggacugccaugaa

SEQ ID NO: 215705 - RNA, 19 nt, Homo sapiens
  misc_RNA (1)...(19): siRNA sense strand
caaagaguguccaaucauu

SEQ ID NO: 215706 - RNA, 19 nt, Homo sapiens
  misc_RNA (1)...(19): siRNA sense strand
uagcugaccugaauaaugu

SEQ ID NO: 215707 - RNA, 19 nt, Homo sapiens
  misc_RNA (1)...(19): siRNA sense strand
gcaugauucuauccaaauu

SEQ ID NO: 215708 - RNA, 19 nt, Homo sapiens
  misc_RNA (1)...(19): siRNA sense strand
ugaacuggcugcugaaugu

SEQ ID NO: 215709 - RNA, 19 nt, Homo sapiens
  misc_RNA (1)...(19): siRNA sense strand
gauauccugcagauuauua

SEQ ID NO: 215710 - RNA, 19 nt, Homo sapiens
  misc_RNA (1)...(19): siRNA sense strand
gagaagauguucgagacuu

SEQ ID NO: 215711 - RNA, 19 nt, Homo sapiens
  misc_RNA (1)...(19): siRNA sense strand
gcacuuuaauuaugacauc

SEQ ID NO: 215712 - RNA, 19 nt, Homo sapiens
  misc_RNA (1)...(19): siRNA sense strand
guaaagcacauuuggaaga

SEQ ID NO: 215713 - RNA, 19 nt, Homo sapiens
  misc_RNA (1)...(19): siRNA sense strand
gaauauugcacuccgacua

SEQ ID NO: 215714 - RNA, 19 nt, Homo sapiens
  misc_RNA (1)...(19): siRNA sense strand
uuauaggacugccaugaaa

SEQ ID NO: 215715 - RNA, 19 nt, Homo sapiens
  misc_RNA (1)...(19): siRNA sense strand
gggugaaguugcauccuuu

SEQ ID NO: 215716 - RNA, 19 nt, Homo sapiens
  misc_RNA (1)...(19): siRNA sense strand
gcaagagcacaacaauuug

SEQ ID NO: 215717 - RNA, 19 nt, Homo sapiens
  misc_RNA (1)...(19): siRNA sense strand
gcacaacaauuuggucaac

SEQ ID NO: 215718 - RNA, 19 nt, Homo sapiens
  misc_RNA (1)...(19): siRNA sense strand
agcaagagcacaacaauuu

SEQ ID NO: 215719 - RNA, 19 nt, Homo sapiens
  misc_RNA (1)...(19): siRNA sense strand
agaagauguucgagacuuu

SEQ ID NO: 215720 - RNA, 19 nt, Homo sapiens
  misc_RNA (1)...(19): siRNA sense strand
gagcaagagcacaacaauu

SEQ ID NO: 215721 - RNA, 19 nt, Homo sapiens
  misc_RNA (1)...(19): siRNA sense strand
ucaagcaaguggcaaguuc

SEQ ID NO: 215722 - RNA, 19 nt, Homo sapiens
  misc_RNA (1)...(19): siRNA sense strand
ccacgagacucaaacaacu

SEQ ID NO: 215723 - RNA, 19 nt, Homo sapiens
  misc_RNA (1)...(19): siRNA sense strand
cagcacaaccucaagcaaa

SEQ ID NO: 215724 - RNA, 19 nt, Homo sapiens
  misc_RNA (1)...(19): siRNA sense strand
gcaaagaguguccaaucau

SEQ ID NO: 215725 - RNA, 19 nt, Homo sapiens
  misc_RNA (1)...(19): siRNA sense strand
auggauauccugcagauua

SEQ ID NO: 215726 - RNA, 19 nt, Homo sapiens
  misc_RNA (1)...(19): siRNA sense strand
uguaacaucugcaaagagu

SEQ ID NO: 215727 - RNA, 19 nt, Homo sapiens
  misc_RNA (1)...(19): siRNA sense strand
guccggagcugcuuccaau

SEQ ID NO: 215728 - RNA, 19 nt, Homo sapiens
  misc_RNA (1)...(19): siRNA sense strand
gcaaguggcaaguucaaca

SEQ ID NO: 215729 - RNA, 19 nt, Homo sapiens
  misc_RNA (1)...(19): siRNA sense strand
gcuuccaauuugcuaauaa

SEQ ID NO: 215730 - RNA, 19 nt, Homo sapiens
  misc_RNA (1)...(19): siRNA sense strand
uggaagacaaguacagaua

SEQ ID NO: 215731 - RNA, 19 nt, Homo sapiens
  misc_RNA (1)...(19): siRNA sense strand
ggauccguguccugucuuu

SEQ ID NO: 215732 - RNA, 19 nt, Homo sapiens
  misc_RNA (1)...(19): siRNA sense strand
gucuuuagcugaccugaau

SEQ ID NO: 215733 - RNA, 19 nt, Homo sapiens
  misc_RNA (1)...(19): siRNA sense strand
gacaaguacagauaccuuu

SEQ ID NO: 215734 - RNA, 19 nt, Homo sapiens
  misc_RNA (1)...(19): siRNA sense strand
ccaagcaucaggccaaaug

SEQ ID NO: 215735 - RNA, 19 nt, Homo sapiens
  misc_RNA (1)...(19): siRNA sense strand
ggagcaagagcacaacaau

SEQ ID NO: 215736 - RNA, 19 nt, Homo sapiens
  misc_RNA (1)...(19): siRNA sense strand
guguaaagcacauuuggaa

SEQ ID NO: 215737 - RNA, 19 nt, Homo sapiens
  misc_RNA (1)...(19): siRNA sense strand
caagacaguugggugaagu

SEQ ID NO: 215738 - RNA, 19 nt, Homo sapiens
  misc_RNA (1)...(19): siRNA sense strand
gaagauguucgagacuuug

SEQ ID NO: 215739 - RNA, 19 nt, Homo sapiens
  misc_RNA (1)...(19): siRNA sense strand
gucagauucucagcuuaua

SEQ ID NO: 215740 - RNA, 19 nt, Homo sapiens
  misc_RNA (1)...(19): siRNA sense strand
uaacaucugcaaagagugu

SEQ ID NO: 215741 - RNA, 19 nt, Homo sapiens
  misc_RNA (1)...(19): siRNA sense strand
cggagcugcuuccaauuug

SEQ ID NO: 215742 - RNA, 19 nt, Homo sapiens
  misc_RNA (1)...(19): siRNA sense strand
gaagacaaguacagauacc

SEQ ID NO: 215743 - RNA, 19 nt, Homo sapiens
  misc_RNA (1)...(19): siRNA sense strand
ccauggauauccugcagau

SEQ ID NO: 215744 - RNA, 19 nt, Homo sapiens
  misc_RNA (1)...(19): siRNA sense strand
ggcaucauuucccugugua

SEQ ID NO: 215745 - RNA, 19 nt, Homo sapiens
  misc_RNA (1)...(19): siRNA sense strand
uggauauccugcagauuau

SEQ ID NO: 215746 - RNA, 19 nt, Homo sapiens
  misc_RNA (1)...(19): siRNA sense strand
ggaagacaaguacagauac

SEQ ID NO: 215747 - RNA, 19 nt, Homo sapiens
  misc_RNA (1)...(19): siRNA sense strand
ugcaaagaguguccaauca

SEQ ID NO: 215748 - RNA, 19 nt, Homo sapiens
  misc_RNA (1)...(19): siRNA sense strand
guggauaugugucugaacu

SEQ ID NO: 215749 - RNA, 19 nt, Homo sapiens
  misc_RNA (1)...(19): siRNA sense strand
acuggcugcugaauguuua

SEQ ID NO: 215750 - RNA, 19 nt, Homo sapiens
  misc_RNA (1)...(19): siRNA sense strand
acuaucccaugguggaaua

SEQ ID NO: 215751 - RNA, 19 nt, Homo sapiens
  misc_RNA (1)...(19): siRNA sense strand
ccggagcugcuuccaauuu

SEQ ID NO: 215752 - RNA, 19 nt, Homo sapiens
  misc_RNA (1)...(19): siRNA sense strand
ccaaauuccaagacaguug

SEQ ID NO: 215753 - RNA, 19 nt, Homo sapiens
  misc_RNA (1)...(19): siRNA sense strand
cagaaacugccaagcauca

SEQ ID NO: 215754 - RNA, 19 nt, Homo sapiens
  misc_RNA (1)...(19): siRNA sense strand
uaugacaucugccaaagcu

SEQ ID NO: 215755 - RNA, 19 nt, Homo sapiens
  misc_RNA (1)...(19): siRNA sense strand
aaugucagauucucagcuu

SEQ ID NO: 215756 - RNA, 19 nt, Homo sapiens
  misc_RNA (1)...(19): siRNA sense strand
ucgagacuuugccaaggua

SEQ ID NO: 215757 - RNA, 19 nt, Homo sapiens
  misc_RNA (1)...(19): siRNA sense strand
gcaaaaggccauaaaaugc

SEQ ID NO: 215758 - RNA, 19 nt, Homo sapiens
  misc_RNA (1)...(19): siRNA sense strand
cugcaugauucuauccaaa

SEQ ID NO: 215759 - RNA, 19 nt, Homo sapiens
  misc_RNA (1)...(19): siRNA sense strand
uaaagcacauuuggaagac

SEQ ID NO: 215760 - RNA, 19 nt, Homo sapiens
  misc_RNA (1)...(19): siRNA sense strand
acaggagucuaaagcacuu

SEQ ID NO: 215761 - RNA, 19 nt, Homo sapiens
  misc_RNA (1)...(19): siRNA sense strand
acagauaccuuuucaagca

SEQ ID NO: 215762 - RNA, 19 nt, Homo sapiens
  misc_RNA (1)...(19): siRNA sense strand
aagcacauuuggaagacaa

SEQ ID NO: 215763 - RNA, 19 nt, Homo sapiens
  misc_RNA (1)...(19): siRNA sense strand
gcuaauaauaagccagaga

SEQ ID NO: 215764 - RNA, 19 nt, Homo sapiens
  misc_RNA (1)...(19): siRNA sense strand
caagagcacaacaauuugg

SEQ ID NO: 215765 - RNA, 19 nt, Homo sapiens
  misc_RNA (1)...(19): siRNA sense strand
ccugucagcugcaugugau

SEQ ID NO: 215766 - RNA, 19 nt, Homo sapiens
  misc_RNA (1)...(19): siRNA sense strand
gcugcugaauguuuaugau

SEQ ID NO: 215767 - RNA, 19 nt, Homo sapiens
  misc_RNA (1)...(19): siRNA sense strand
acagagcucuaccagucuu

SEQ ID NO: 215768 - RNA, 19 nt, Homo sapiens
  misc_RNA (1)...(19): siRNA sense strand
acaguugggugaaguugca

SEQ ID NO: 215769 - RNA, 19 nt, Homo sapiens
  misc_RNA (1)...(19): siRNA sense strand
guuugaccacuauuuauga

SEQ ID NO: 215770 - RNA, 19 nt, Homo sapiens
  misc_RNA (1)...(19): siRNA sense strand
gcuuauaggacugccauga

SEQ ID NO: 215771 - RNA, 19 nt, Homo sapiens
  misc_RNA (1)...(19): siRNA sense strand
caucaggccaaauguaaca

SEQ ID NO: 215772 - RNA, 19 nt, Homo sapiens
  misc_RNA (1)...(19): siRNA sense strand
gauucuauccaaauuccaa

SEQ ID NO: 215773 - RNA, 19 nt, Homo sapiens
  misc_RNA (1)...(19): siRNA sense strand
ggcaaguucaacaggauuu

SEQ ID NO: 215774 - RNA, 19 nt, Homo sapiens
  misc_RNA (1)...(19): siRNA sense strand
gaacuggcugcugaauguu

SEQ ID NO: 215775 - RNA, 19 nt, Homo sapiens
  misc_RNA (1)...(19): siRNA sense strand
cugcugaauguuuaugaua

SEQ ID NO: 215776 - RNA, 19 nt, Homo sapiens
  misc_RNA (1)...(19): siRNA sense strand
aagcaucaggccaaaugua

SEQ ID NO: 215777 - RNA, 19 nt, Homo sapiens
  misc_RNA (1)...(19): siRNA sense strand
uggcaucauuucccugugu

SEQ ID NO: 215778 - RNA, 19 nt, Homo sapiens
  misc_RNA (1)...(19): siRNA sense strand
ccaugaaacuccgaagacu

SEQ ID NO: 215779 - RNA, 19 nt, Homo sapiens
  misc_RNA (1)...(19): siRNA sense strand
auaauaagccagagaucga

SEQ ID NO: 215780 - RNA, 19 nt, Homo sapiens
  misc_RNA (1)...(19): siRNA sense strand
cuaauaauaagccagagau

SEQ ID NO: 215781 - RNA, 19 nt, Homo sapiens
  misc_RNA (1)...(19): siRNA sense strand
ugggugaaguugcauccuu

SEQ ID NO: 215782 - RNA, 19 nt, Homo sapiens
  misc_RNA (1)...(19): siRNA sense strand
caucauuucccuguguaaa

SEQ ID NO: 215783 - RNA, 19 nt, Homo sapiens
  misc_RNA (1)...(19): siRNA sense strand
gcguggauaugugucugaa

SEQ ID NO: 215784 - RNA, 19 nt, Homo sapiens
  misc_RNA (1)...(19): siRNA sense strand
gcacuaucccaugguggaa

SEQ ID NO: 215785 - RNA, 19 nt, Homo sapiens
  misc_RNA (1)...(19): siRNA sense strand
gagccugucagcugcaugu

SEQ ID NO: 215786 - RNA, 19 nt, Homo sapiens
  misc_RNA (1)...(19): siRNA sense strand
guacagauaccuuuucaag

SEQ ID NO: 215787 - RNA, 19 nt, Homo sapiens
  misc_RNA (1)...(19): siRNA sense strand
gucccucucugcguggaua

SEQ ID NO: 215788 - RNA, 19 nt, Homo sapiens
  misc_RNA (1)...(19): siRNA sense strand
ggagcugcuuccaauuugc

SEQ ID NO: 215789 - RNA, 19 nt, Homo sapiens
  misc_RNA (1)...(19): siRNA sense strand
uuagcugaccugaauaaug

SEQ ID NO: 215790 - RNA, 19 nt, Homo sapiens
  misc_RNA (1)...(19): siRNA sense strand
guggcaaguucaacaggau

SEQ ID NO: 215791 - RNA, 19 nt, Homo sapiens
  misc_RNA (1)...(19): siRNA sense strand
acaacaauuuggucaacgu

SEQ ID NO: 215792 - RNA, 19 nt, Homo sapiens
  misc_RNA (1)...(19): siRNA sense strand
gacuacaucaggagaagau

SEQ ID NO: 215793 - RNA, 19 nt, Homo sapiens
  misc_RNA (1)...(19): siRNA sense strand
uaauaagccagagaucgaa

SEQ ID NO: 215794 - RNA, 19 nt, Homo sapiens
  misc_RNA (1)...(19): siRNA sense strand
ugucagauucucagcuuau

SEQ ID NO: 215795 - RNA, 19 nt, Homo sapiens
  misc_RNA (1)...(19): siRNA sense strand
ggauauccugcagauuauu

SEQ ID NO: 215796 - RNA, 19 nt, Homo sapiens
  misc_RNA (1)...(19): siRNA sense strand
agcaucaggccaaauguaa

SEQ ID NO: 215797 - RNA, 19 nt, Homo sapiens
  misc_RNA (1)...(19): siRNA sense strand
gcccuuugcuuggaucucu

SEQ ID NO: 215798 - RNA, 19 nt, Homo sapiens
  misc_RNA (1)...(19): siRNA sense strand
gcugaauguuuaugauacg

SEQ ID NO: 215799 - RNA, 19 nt, Homo sapiens
  misc_RNA (1)...(19): siRNA sense strand
agacuuugccaagguacua

SEQ ID NO: 215800 - RNA, 19 nt, Homo sapiens
  misc_RNA (1)...(19): siRNA sense strand
caagcaaguggcaaguuca

SEQ ID NO: 215801 - RNA, 19 nt, Homo sapiens
  misc_RNA (1)...(19): siRNA sense strand
agacaaguacagauaccuu

SEQ ID NO: 215802 - RNA, 19 nt, Homo sapiens
  misc_RNA (1)...(19): siRNA sense strand
gcaucauuucccuguguaa

SEQ ID NO: 215803 - RNA, 19 nt, Homo sapiens
  misc_RNA (1)...(19): siRNA sense strand
cugcaaagaguguccaauc

SEQ ID NO: 215804 - RNA, 19 nt, Homo sapiens
  misc_RNA (1)...(19): siRNA sense strand
cuuauaggacugccaugaa

SEQ ID NO: 215805 - RNA, 19 nt, Homo sapiens
  misc_RNA (1)...(19): siRNA sense strand
caaagaguguccaaucauu

SEQ ID NO: 215806 - RNA, 19 nt, Homo sapiens
  misc_RNA (1)...(19): siRNA sense strand
uagcugaccugaauaaugu

SEQ ID NO: 215807 - RNA, 19 nt, Homo sapiens
  misc_RNA (1)...(19): siRNA sense strand
gcaugauucuauccaaauu

SEQ ID NO: 215808 - RNA, 19 nt, Homo sapiens
  misc_RNA (1)...(19): siRNA sense strand
ugaacuggcugcugaaugu

SEQ ID NO: 215809 - RNA, 19 nt, Homo sapiens
  misc_RNA (1)...(19): siRNA sense strand
gauauccugcagauuauua

SEQ ID NO: 215810 - RNA, 19 nt, Homo sapiens
  misc_RNA (1)...(19): siRNA sense strand
gagaagauguucgagacuu

SEQ ID NO: 215811 - RNA, 19 nt, Homo sapiens
  misc_RNA (1)...(19): siRNA sense strand
gcacuuuaauuaugacauc

SEQ ID NO: 215812 - RNA, 19 nt, Homo sapiens
  misc_RNA (1)...(19): siRNA sense strand
guaaagcacauuuggaaga

SEQ ID NO: 215813 - RNA, 19 nt, Homo sapiens
  misc_RNA (1)...(19): siRNA sense strand
gaauauugcacuccgacua

SEQ ID NO: 215814 - RNA, 19 nt, Homo sapiens
  misc_RNA (1)...(19): siRNA sense strand
uuauaggacugccaugaaa

SEQ ID NO: 215815 - RNA, 19 nt, Homo sapiens
  misc_RNA (1)...(19): siRNA sense strand
gggugaaguugcauccuuu

SEQ ID NO: 215816 - RNA, 19 nt, Homo sapiens
  misc_RNA (1)...(19): siRNA sense strand
gcaagagcacaacaauuug

SEQ ID NO: 215817 - RNA, 19 nt, Homo sapiens
  misc_RNA (1)...(19): siRNA sense strand
gcacaacaauuuggucaac

SEQ ID NO: 215818 - RNA, 19 nt, Homo sapiens
  misc_RNA (1)...(19): siRNA sense strand
agcaagagcacaacaauuu

SEQ ID NO: 215819 - RNA, 19 nt, Homo sapiens
  misc_RNA (1)...(19): siRNA sense strand
agaagauguucgagacuuu

SEQ ID NO: 215820 - RNA, 19 nt, Homo sapiens
  misc_RNA (1)...(19): siRNA sense strand
gagcaagagcacaacaauu

SEQ ID NO: 215821 - RNA, 19 nt, Homo sapiens
  misc_RNA (1)...(19): siRNA sense strand
ucaagcaaguggcaaguuc

SEQ ID NO: 215822 - RNA, 19 nt, Homo sapiens
  misc_RNA (1)...(19): siRNA sense strand
ccacgagacucaaacaacu

SEQ ID NO: 215823 - RNA, 19 nt, Homo sapiens
  misc_RNA (1)...(19): siRNA sense strand
cagcacaaccucaagcaaa

SEQ ID NO: 215824 - RNA, 19 nt, Homo sapiens
  misc_RNA (1)...(19): siRNA sense strand
gcaaagaguguccaaucau

SEQ ID NO: 215825 - RNA, 19 nt, Homo sapiens
  misc_RNA (1)...(19): siRNA sense strand
auggauauccugcagauua

SEQ ID NO: 215826 - RNA, 19 nt, Homo sapiens
  misc_RNA (1)...(19): siRNA sense strand
uguaacaucugcaaagagu

SEQ ID NO: 215827 - RNA, 19 nt, Homo sapiens
  misc_RNA (1)...(19): siRNA sense strand
guccggagcugcuuccaau

SEQ ID NO: 215828 - RNA, 19 nt, Homo sapiens
  misc_RNA (1)...(19): siRNA sense strand
gcaaguggcaaguucaaca

SEQ ID NO: 215829 - RNA, 19 nt, Homo sapiens
  misc_RNA (1)...(19): siRNA sense strand
gcuuccaauuugcuaauaa

SEQ ID NO: 215830 - RNA, 19 nt, Homo sapiens
  misc_RNA (1)...(19): siRNA sense strand
uggaagacaaguacagaua

SEQ ID NO: 215831 - RNA, 19 nt, Homo sapiens
  misc_RNA (1)...(19): siRNA sense strand
ggauccguguccugucuuu

SEQ ID NO: 215832 - RNA, 19 nt, Homo sapiens
  misc_RNA (1)...(19): siRNA sense strand
gucuuuagcugaccugaau

SEQ ID NO: 215833 - RNA, 19 nt, Homo sapiens
  misc_RNA (1)...(19): siRNA sense strand
gacaaguacagauaccuuu

SEQ ID NO: 215834 - RNA, 19 nt, Homo sapiens
  misc_RNA (1)...(19): siRNA sense strand
ccaagcaucaggccaaaug

SEQ ID NO: 215835 - RNA, 19 nt, Homo sapiens
  misc_RNA (1)...(19): siRNA sense strand
ggagcaagagcacaacaau

SEQ ID NO: 215836 - RNA, 19 nt, Homo sapiens
  misc_RNA (1)...(19): siRNA sense strand
guguaaagcacauuuggaa

SEQ ID NO: 215837 - RNA, 19 nt, Homo sapiens
  misc_RNA (1)...(19): siRNA sense strand
caagacaguugggugaagu

SEQ ID NO: 215838 - RNA, 19 nt, Homo sapiens
  misc_RNA (1)...(19): siRNA sense strand
gaagauguucgagacuuug

SEQ ID NO: 215839 - RNA, 19 nt, Homo sapiens
  misc_RNA (1)...(19): siRNA sense strand
gucagauucucagcuuaua

SEQ ID NO: 215840 - RNA, 19 nt, Homo sapiens
  misc_RNA (1)...(19): siRNA sense strand
uaacaucugcaaagagugu

SEQ ID NO: 215841 - RNA, 19 nt, Homo sapiens
  misc_RNA (1)...(19): siRNA sense strand
cggagcugcuuccaauuug

SEQ ID NO: 215842 - RNA, 19 nt, Homo sapiens
  misc_RNA (1)...(19): siRNA sense strand
gaagacaaguacagauacc

SEQ ID NO: 215843 - RNA, 19 nt, Homo sapiens
  misc_RNA (1)...(19): siRNA sense strand
ccauggauauccugcagau

SEQ ID NO: 215844 - RNA, 19 nt, Homo sapiens
  misc_RNA (1)...(19): siRNA sense strand
ggcaucauuucccugugua

SEQ ID NO: 215845 - RNA, 19 nt, Homo sapiens
  misc_RNA (1)...(19): siRNA sense strand
uggauauccugcagauuau

SEQ ID NO: 215846 - RNA, 19 nt, Homo sapiens
  misc_RNA (1)...(19): siRNA sense strand
ggaagacaaguacagauac

SEQ ID NO: 215847 - RNA, 19 nt, Homo sapiens
  misc_RNA (1)...(19): siRNA sense strand
ugcaaagaguguccaauca

SEQ ID NO: 215848 - RNA, 19 nt, Homo sapiens
  misc_RNA (1)...(19): siRNA sense strand
guggauaugugucugaacu

SEQ ID NO: 215849 - RNA, 19 nt, Homo sapiens
  misc_RNA (1)...(19): siRNA sense strand
acuggcugcugaauguuua

SEQ ID NO: 215850 - RNA, 19 nt, Homo sapiens
  misc_RNA (1)...(19): siRNA sense strand
acuaucccaugguggaaua

SEQ ID NO: 215851 - RNA, 19 nt, Homo sapiens
  misc_RNA (1)...(19): siRNA sense strand
ccggagcugcuuccaauuu

SEQ ID NO: 215852 - RNA, 19 nt, Homo sapiens
  misc_RNA (1)...(19): siRNA sense strand
ccaaauuccaagacaguug

SEQ ID NO: 215853 - RNA, 19 nt, Homo sapiens
  misc_RNA (1)...(19): siRNA sense strand
cagaaacugccaagcauca

SEQ ID NO: 215854 - RNA, 19 nt, Homo sapiens
  misc_RNA (1)...(19): siRNA sense strand
uaugacaucugccaaagcu

SEQ ID NO: 215855 - RNA, 19 nt, Homo sapiens
  misc_RNA (1)...(19): siRNA sense strand
aaugucagauucucagcuu

SEQ ID NO: 215856 - RNA, 19 nt, Homo sapiens
  misc_RNA (1)...(19): siRNA sense strand
ucgagacuuugccaaggua

SEQ ID NO: 215857 - RNA, 19 nt, Homo sapiens
  misc_RNA (1)...(19): siRNA sense strand
gcaaaaggccauaaaaugc

SEQ ID NO: 215858 - RNA, 19 nt, Homo sapiens
  misc_RNA (1)...(19): siRNA sense strand
cugcaugauucuauccaaa

SEQ ID NO: 215859 - RNA, 19 nt, Homo sapiens
  misc_RNA (1)...(19): siRNA sense strand
uaaagcacauuuggaagac

SEQ ID NO: 215860 - RNA, 19 nt, Homo sapiens
  misc_RNA (1)...(19): siRNA sense strand
acaggagucuaaagcacuu

SEQ ID NO: 215861 - RNA, 19 nt, Homo sapiens
  misc_RNA (1)...(19): siRNA sense strand
acagauaccuuuucaagca

SEQ ID NO: 215862 - RNA, 19 nt, Homo sapiens
  misc_RNA (1)...(19): siRNA sense strand
aagcacauuuggaagacaa

SEQ ID NO: 215863 - RNA, 19 nt, Homo sapiens
  misc_RNA (1)...(19): siRNA sense strand
gcuaauaauaagccagaga

SEQ ID NO: 215864 - RNA, 19 nt, Homo sapiens
  misc_RNA (1)...(19): siRNA sense strand
caagagcacaacaauuugg

SEQ ID NO: 215865 - RNA, 19 nt, Homo sapiens
  misc_RNA (1)...(19): siRNA sense strand
ccugucagcugcaugugau

SEQ ID NO: 215866 - RNA, 19 nt, Homo sapiens
  misc_RNA (1)...(19): siRNA sense strand
gcugcugaauguuuaugau

SEQ ID NO: 215867 - RNA, 19 nt, Homo sapiens
  misc_RNA (1)...(19): siRNA sense strand
acagagcucuaccagucuu

SEQ ID NO: 215868 - RNA, 19 nt, Homo sapiens
  misc_RNA (1)...(19): siRNA sense strand
acaguugggugaaguugca

SEQ ID NO: 215869 - RNA, 19 nt, Homo sapiens
  misc_RNA (1)...(19): siRNA sense strand
guuugaccacuauuuauga

SEQ ID NO: 215870 - RNA, 19 nt, Homo sapiens
  misc_RNA (1)...(19): siRNA sense strand
gcuuauaggacugccauga

SEQ ID NO: 215871 - RNA, 19 nt, Homo sapiens
  misc_RNA (1)...(19): siRNA sense strand
caucaggccaaauguaaca

SEQ ID NO: 215872 - RNA, 19 nt, Homo sapiens
  misc_RNA (1)...(19): siRNA sense strand
gauucuauccaaauuccaa

SEQ ID NO: 215873 - RNA, 19 nt, Homo sapiens
  misc_RNA (1)...(19): siRNA sense strand
ggcaaguucaacaggauuu

SEQ ID NO: 215874 - RNA, 19 nt, Homo sapiens
  misc_RNA (1)...(19): siRNA sense strand
gaacuggcugcugaauguu

SEQ ID NO: 215875 - RNA, 19 nt, Homo sapiens
  misc_RNA (1)...(19): siRNA sense strand
cugcugaauguuuaugaua

SEQ ID NO: 215876 - RNA, 19 nt, Homo sapiens
  misc_RNA (1)...(19): siRNA sense strand
aagcaucaggccaaaugua

SEQ ID NO: 215877 - RNA, 19 nt, Homo sapiens
  misc_RNA (1)...(19): siRNA sense strand
uggcaucauuucccugugu

SEQ ID NO: 215878 - RNA, 19 nt, Homo sapiens
  misc_RNA (1)...(19): siRNA sense strand
ccaugaaacuccgaagacu

SEQ ID NO: 215879 - RNA, 19 nt, Homo sapiens
  misc_RNA (1)...(19): siRNA sense strand
auaauaagccagagaucga

SEQ ID NO: 215880 - RNA, 19 nt, Homo sapiens
  misc_RNA (1)...(19): siRNA sense strand
cuaauaauaagccagagau

SEQ ID NO: 215881 - RNA, 19 nt, Homo sapiens
  misc_RNA (1)...(19): siRNA sense strand
ugggugaaguugcauccuu

SEQ ID NO: 215882 - RNA, 19 nt, Homo sapiens
  misc_RNA (1)...(19): siRNA sense strand
caucauuucccuguguaaa

SEQ ID NO: 215883 - RNA, 19 nt, Homo sapiens
  misc_RNA (1)...(19): siRNA sense strand
gcguggauaugugucugaa

SEQ ID NO: 215884 - RNA, 19 nt, Homo sapiens
  misc_RNA (1)...(19): siRNA sense strand
gcacuaucccaugguggaa

SEQ ID NO: 215885 - RNA, 19 nt, Homo sapiens
  misc_RNA (1)...(19): siRNA sense strand
gagccugucagcugcaugu

SEQ ID NO: 215886 - RNA, 19 nt, Homo sapiens
  misc_RNA (1)...(19): siRNA sense strand
guacagauaccuuuucaag

SEQ ID NO: 215887 - RNA, 19 nt, Homo sapiens
  misc_RNA (1)...(19): siRNA sense strand
gucccucucugcguggaua

SEQ ID NO: 215888 - RNA, 19 nt, Homo sapiens
  misc_RNA (1)...(19): siRNA sense strand
ggagcugcuuccaauuugc

SEQ ID NO: 215889 - RNA, 19 nt, Homo sapiens
  misc_RNA (1)...(19): siRNA sense strand
uuagcugaccugaauaaug

SEQ ID NO: 215890 - RNA, 19 nt, Homo sapiens
  misc_RNA (1)...(19): siRNA sense strand
guggcaaguucaacaggau

SEQ ID NO: 215891 - RNA, 19 nt, Homo sapiens
  misc_RNA (1)...(19): siRNA sense strand
acaacaauuuggucaacgu

SEQ ID NO: 215892 - RNA, 19 nt, Homo sapiens
  misc_RNA (1)...(19): siRNA sense strand
gacuacaucaggagaagau

SEQ ID NO: 215893 - RNA, 19 nt, Homo sapiens
  misc_RNA (1)...(19): siRNA sense strand
uaauaagccagagaucgaa

SEQ ID NO: 215894 - RNA, 19 nt, Homo sapiens
  misc_RNA (1)...(19): siRNA sense strand
ugucagauucucagcuuau

SEQ ID NO: 215895 - RNA, 19 nt, Homo sapiens
  misc_RNA (1)...(19): siRNA sense strand
ggauauccugcagauuauu

SEQ ID NO: 215896 - RNA, 19 nt, Homo sapiens
  misc_RNA (1)...(19): siRNA sense strand
agcaucaggccaaauguaa

SEQ ID NO: 215897 - RNA, 19 nt, Homo sapiens
  misc_RNA (1)...(19): siRNA sense strand
gcccuuugcuuggaucucu

SEQ ID NO: 215898 - RNA, 19 nt, Homo sapiens
  misc_RNA (1)...(19): siRNA sense strand
gcugaauguuuaugauacg

SEQ ID NO: 215899 - RNA, 19 nt, Homo sapiens
  misc_RNA (1)...(19): siRNA sense strand
agacuuugccaagguacua

SEQ ID NO: 215900 - RNA, 19 nt, Homo sapiens
  misc_RNA (1)...(19): siRNA sense strand
caagcaaguggcaaguuca

SEQ ID NO: 215901 - RNA, 19 nt, Homo sapiens
  misc_RNA (1)...(19): siRNA sense strand
agacaaguacagauaccuu

SEQ ID NO: 215902 - RNA, 19 nt, Homo sapiens
  misc_RNA (1)...(19): siRNA sense strand
gcaucauuucccuguguaa

SEQ ID NO: 215903 - RNA, 19 nt, Homo sapiens
  misc_RNA (1)...(19): siRNA sense strand
cugcaaagaguguccaauc

SEQ ID NO: 215904 - RNA, 19 nt, Homo sapiens
  misc_RNA (1)...(19): siRNA sense strand
cuuauaggacugccaugaa

SEQ ID NO: 215905 - RNA, 19 nt, Homo sapiens
  misc_RNA (1)...(19): siRNA sense strand
caaagaguguccaaucauu

SEQ ID NO: 215906 - RNA, 19 nt, Homo sapiens
  misc_RNA (1)...(19): siRNA sense strand
uagcugaccugaauaaugu

SEQ ID NO: 215907 - RNA, 19 nt, Homo sapiens
  misc_RNA (1)...(19): siRNA sense strand
gcaugauucuauccaaauu

SEQ ID NO: 215908 - RNA, 19 nt, Homo sapiens
  misc_RNA (1)...(19): siRNA sense strand
ugaacuggcugcugaaugu

SEQ ID NO: 215909 - RNA, 19 nt, Homo sapiens
  misc_RNA (1)...(19): siRNA sense strand
gauauccugcagauuauua

SEQ ID NO: 215910 - RNA, 19 nt, Homo sapiens
  misc_RNA (1)...(19): siRNA sense strand
gagaagauguucgagacuu

SEQ ID NO: 215911 - RNA, 19 nt, Homo sapiens
  misc_RNA (1)...(19): siRNA sense strand
gcacuuuaauuaugacauc

SEQ ID NO: 215912 - RNA, 19 nt, Homo sapiens
  misc_RNA (1)...(19): siRNA sense strand
guaaagcacauuuggaaga

SEQ ID NO: 215913 - RNA, 19 nt, Homo sapiens
  misc_RNA (1)...(19): siRNA sense strand
gaauauugcacuccgacua

SEQ ID NO: 215914 - RNA, 19 nt, Homo sapiens
  misc_RNA (1)...(19): siRNA sense strand
uuauaggacugccaugaaa

SEQ ID NO: 215915 - RNA, 19 nt, Homo sapiens
  misc_RNA (1)...(19): siRNA sense strand
gggugaaguugcauccuuu

SEQ ID NO: 215916 - RNA, 19 nt, Homo sapiens
  misc_RNA (1)...(19): siRNA sense strand
gcaagagcacaacaauuug

SEQ ID NO: 215917 - RNA, 19 nt, Homo sapiens
  misc_RNA (1)...(19): siRNA sense strand
gcacaacaauuuggucaac

SEQ ID NO: 215918 - RNA, 19 nt, Homo sapiens
  misc_RNA (1)...(19): siRNA sense strand
agcaagagcacaacaauuu

SEQ ID NO: 215919 - RNA, 19 nt, Homo sapiens
  misc_RNA (1)...(19): siRNA sense strand
agaagauguucgagacuuu

SEQ ID NO: 215920 - RNA, 19 nt, Homo sapiens
  misc_RNA (1)...(19): siRNA sense strand
gagcaagagcacaacaauu

SEQ ID NO: 215921 - RNA, 19 nt, Homo sapiens
  misc_RNA (1)...(19): siRNA sense strand
ucaagcaaguggcaaguuc

SEQ ID NO: 215922 - RNA, 19 nt, Homo sapiens
  misc_RNA (1)...(19): siRNA sense strand
ccacgagacucaaacaacu

SEQ ID NO: 215923 - RNA, 19 nt, Homo sapiens
  misc_RNA (1)...(19): siRNA sense strand
cagcacaaccucaagcaaa

SEQ ID NO: 215924 - RNA, 19 nt, Homo sapiens
  misc_RNA (1)...(19): siRNA sense strand
gcaaagaguguccaaucau

SEQ ID NO: 215925 - RNA, 19 nt, Homo sapiens
  misc_RNA (1)...(19): siRNA sense strand
auggauauccugcagauua

SEQ ID NO: 215926 - RNA, 19 nt, Homo sapiens
  misc_RNA (1)...(19): siRNA sense strand
uguaacaucugcaaagagu

SEQ ID NO: 215927 - RNA, 19 nt, Homo sapiens
  misc_RNA (1)...(19): siRNA sense strand
guccggagcugcuuccaau

SEQ ID NO: 215928 - RNA, 19 nt, Homo sapiens
  misc_RNA (1)...(19): siRNA sense strand
gcaaguggcaaguucaaca

SEQ ID NO: 215929 - RNA, 19 nt, Homo sapiens
  misc_RNA (1)...(19): siRNA sense strand
gcuuccaauuugcuaauaa

SEQ ID NO: 215930 - RNA, 19 nt, Homo sapiens
  misc_RNA (1)...(19): siRNA sense strand
uggaagacaaguacagaua

SEQ ID NO: 215931 - RNA, 19 nt, Homo sapiens
  misc_RNA (1)...(19): siRNA sense strand
ggauccguguccugucuuu

SEQ ID NO: 215932 - RNA, 19 nt, Homo sapiens
  misc_RNA (1)...(19): siRNA sense strand
gucuuuagcugaccugaau

SEQ ID NO: 215933 - RNA, 19 nt, Homo sapiens
  misc_RNA (1)...(19): siRNA sense strand
gacaaguacagauaccuuu

SEQ ID NO: 215934 - RNA, 19 nt, Homo sapiens
  misc_RNA (1)...(19): siRNA sense strand
ccaagcaucaggccaaaug

SEQ ID NO: 215935 - RNA, 19 nt, Homo sapiens
  misc_RNA (1)...(19): siRNA sense strand
ggagcaagagcacaacaau

SEQ ID NO: 215936 - RNA, 19 nt, Homo sapiens
  misc_RNA (1)...(19): siRNA sense strand
guguaaagcacauuuggaa

SEQ ID NO: 215937 - RNA, 19 nt, Homo sapiens
  misc_RNA (1)...(19): siRNA sense strand
caagacaguugggugaagu

SEQ ID NO: 215938 - RNA, 19 nt, Homo sapiens
  misc_RNA (1)...(19): siRNA sense strand
gaagauguucgagacuuug

SEQ ID NO: 215939 - RNA, 19 nt, Homo sapiens
  misc_RNA (1)...(19): siRNA sense strand
gucagauucucagcuuaua

SEQ ID NO: 215940 - RNA, 19 nt, Homo sapiens
  misc_RNA (1)...(19): siRNA sense strand
uaacaucugcaaagagugu

SEQ ID NO: 215941 - RNA, 19 nt, Homo sapiens
  misc_RNA (1)...(19): siRNA sense strand
cggagcugcuuccaauuug

SEQ ID NO: 215942 - RNA, 19 nt, Homo sapiens
  misc_RNA (1)...(19): siRNA sense strand
gaagacaaguacagauacc

SEQ ID NO: 215943 - RNA, 19 nt, Homo sapiens
  misc_RNA (1)...(19): siRNA sense strand
ccauggauauccugcagau

SEQ ID NO: 215944 - RNA, 19 nt, Homo sapiens
  misc_RNA (1)...(19): siRNA sense strand
ggcaucauuucccugugua

SEQ ID NO: 215945 - RNA, 19 nt, Homo sapiens
  misc_RNA (1)...(19): siRNA sense strand
uggauauccugcagauuau

SEQ ID NO: 215946 - RNA, 19 nt, Homo sapiens
  misc_RNA (1)...(19): siRNA sense strand
ggaagacaaguacagauac

SEQ ID NO: 215947 - RNA, 19 nt, Homo sapiens
  misc_RNA (1)...(19): siRNA sense strand
ugcaaagaguguccaauca

SEQ ID NO: 215948 - RNA, 19 nt, Homo sapiens
  misc_RNA (1)...(19): siRNA sense strand
guggauaugugucugaacu

SEQ ID NO: 215949 - RNA, 19 nt, Homo sapiens
  misc_RNA (1)...(19): siRNA sense strand
acuggcugcugaauguuua

SEQ ID NO: 215950 - RNA, 19 nt, Homo sapiens
  misc_RNA (1)...(19): siRNA sense strand
acuaucccaugguggaaua

SEQ ID NO: 215951 - RNA, 19 nt, Homo sapiens
  misc_RNA (1)...(19): siRNA sense strand
ccggagcugcuuccaauuu

SEQ ID NO: 215952 - RNA, 19 nt, Homo sapiens
  misc_RNA (1)...(19): siRNA sense strand
ccaaauuccaagacaguug

SEQ ID NO: 215953 - RNA, 19 nt, Homo sapiens
  misc_RNA (1)...(19): siRNA sense strand
cagaaacugccaagcauca

SEQ ID NO: 215954 - RNA, 19 nt, Homo sapiens
  misc_RNA (1)...(19): siRNA sense strand
uaugacaucugccaaagcu

SEQ ID NO: 215955 - RNA, 19 nt, Homo sapiens
  misc_RNA (1)...(19): siRNA sense strand
aaugucagauucucagcuu

SEQ ID NO: 215956 - RNA, 19 nt, Homo sapiens
  misc_RNA (1)...(19): siRNA sense strand
ucgagacuuugccaaggua

SEQ ID NO: 215957 - RNA, 19 nt, Homo sapiens
  misc_RNA (1)...(19): siRNA sense strand
gcaaaaggccauaaaaugc

SEQ ID NO: 215958 - RNA, 19 nt, Homo sapiens
  misc_RNA (1)...(19): siRNA sense strand
cugcaugauucuauccaaa

SEQ ID NO: 215959 - RNA, 19 nt, Homo sapiens
  misc_RNA (1)...(19): siRNA sense strand
uaaagcacauuuggaagac

SEQ ID NO: 215960 - RNA, 19 nt, Homo sapiens
  misc_RNA (1)...(19): siRNA sense strand
acaggagucuaaagcacuu

SEQ ID NO: 215961 - RNA, 19 nt, Homo sapiens
  misc_RNA (1)...(19): siRNA sense strand
acagauaccuuuucaagca

SEQ ID NO: 215962 - RNA, 19 nt, Homo sapiens
  misc_RNA (1)...(19): siRNA sense strand
aagcacauuuggaagacaa

SEQ ID NO: 215963 - RNA, 19 nt, Homo sapiens
  misc_RNA (1)...(19): siRNA sense strand
gcuaauaauaagccagaga

SEQ ID NO: 215964 - RNA, 19 nt, Homo sapiens
  misc_RNA (1)...(19): siRNA sense strand
caagagcacaacaauuugg

SEQ ID NO: 215965 - RNA, 19 nt, Homo sapiens
  misc_RNA (1)...(19): siRNA sense strand
ccugucagcugcaugugau

SEQ ID NO: 215966 - RNA, 19 nt, Homo sapiens
  misc_RNA (1)...(19): siRNA sense strand
gcugcugaauguuuaugau

SEQ ID NO: 215967 - RNA, 19 nt, Homo sapiens
  misc_RNA (1)...(19): siRNA sense strand
acagagcucuaccagucuu

SEQ ID NO: 215968 - RNA, 19 nt, Homo sapiens
  misc_RNA (1)...(19): siRNA sense strand
acaguugggugaaguugca

SEQ ID NO: 215969 - RNA, 19 nt, Homo sapiens
  misc_RNA (1)...(19): siRNA sense strand
guuugaccacuauuuauga

SEQ ID NO: 215970 - RNA, 19 nt, Homo sapiens
  misc_RNA (1)...(19): siRNA sense strand
gcuuauaggacugccauga

SEQ ID NO: 215971 - RNA, 19 nt, Homo sapiens
  misc_RNA (1)...(19): siRNA sense strand
caucaggccaaauguaaca

SEQ ID NO: 215972 - RNA, 19 nt, Homo sapiens
  misc_RNA (1)...(19): siRNA sense strand
gauucuauccaaauuccaa

SEQ ID NO: 215973 - RNA, 19 nt, Homo sapiens
  misc_RNA (1)...(19): siRNA sense strand
ggcaaguucaacaggauuu

SEQ ID NO: 215974 - RNA, 19 nt, Homo sapiens
  misc_RNA (1)...(19): siRNA sense strand
gaacuggcugcugaauguu

SEQ ID NO: 215975 - RNA, 19 nt, Homo sapiens
  misc_RNA (1)...(19): siRNA sense strand
cugcugaauguuuaugaua

SEQ ID NO: 215976 - RNA, 19 nt, Homo sapiens
  misc_RNA (1)...(19): siRNA sense strand
aagcaucaggccaaaugua

SEQ ID NO: 215977 - RNA, 19 nt, Homo sapiens
  misc_RNA (1)...(19): siRNA sense strand
uggcaucauuucccugugu

SEQ ID NO: 215978 - RNA, 19 nt, Homo sapiens
  misc_RNA (1)...(19): siRNA sense strand
ccaugaaacuccgaagacu

SEQ ID NO: 215979 - RNA, 19 nt, Homo sapiens
  misc_RNA (1)...(19): siRNA sense strand
auaauaagccagagaucga

SEQ ID NO: 215980 - RNA, 19 nt, Homo sapiens
  misc_RNA (1)...(19): siRNA sense strand
cuaauaauaagccagagau

SEQ ID NO: 215981 - RNA, 19 nt, Homo sapiens
  misc_RNA (1)...(19): siRNA sense strand
ugggugaaguugcauccuu

SEQ ID NO: 215982 - RNA, 19 nt, Homo sapiens
  misc_RNA (1)...(19): siRNA sense strand
caucauuucccuguguaaa

SEQ ID NO: 215983 - RNA, 19 nt, Homo sapiens
  misc_RNA (1)...(19): siRNA sense strand
gcguggauaugugucugaa

SEQ ID NO: 215984 - RNA, 19 nt, Homo sapiens
  misc_RNA (1)...(19): siRNA sense strand
gcacuaucccaugguggaa

SEQ ID NO: 215985 - RNA, 19 nt, Homo sapiens
  misc_RNA (1)...(19): siRNA sense strand
gagccugucagcugcaugu

SEQ ID NO: 215986 - RNA, 19 nt, Homo sapiens
  misc_RNA (1)...(19): siRNA sense strand
guacagauaccuuuucaag

SEQ ID NO: 215987 - RNA, 19 nt, Homo sapiens
  misc_RNA (1)...(19): siRNA sense strand
gucccucucugcguggaua

SEQ ID NO: 215988 - RNA, 19 nt, Homo sapiens
  misc_RNA (1)...(19): siRNA sense strand
ggagcugcuuccaauuugc

SEQ ID NO: 215989 - RNA, 19 nt, Homo sapiens
  misc_RNA (1)...(19): siRNA sense strand
uuagcugaccugaauaaug

SEQ ID NO: 215990 - RNA, 19 nt, Homo sapiens
  misc_RNA (1)...(19): siRNA sense strand
guggcaaguucaacaggau

SEQ ID NO: 215991 - RNA, 19 nt, Homo sapiens
  misc_RNA (1)...(19): siRNA sense strand
acaacaauuuggucaacgu

SEQ ID NO: 215992 - RNA, 19 nt, Homo sapiens
  misc_RNA (1)...(19): siRNA sense strand
gacuacaucaggagaagau

SEQ ID NO: 215993 - RNA, 19 nt, Homo sapiens
  misc_RNA (1)...(19): siRNA sense strand
uaauaagccagagaucgaa

SEQ ID NO: 215994 - RNA, 19 nt, Homo sapiens
  misc_RNA (1)...(19): siRNA sense strand
ugucagauucucagcuuau

SEQ ID NO: 215995 - RNA, 19 nt, Homo sapiens
  misc_RNA (1)...(19): siRNA sense strand
ggauauccugcagauuauu

SEQ ID NO: 215996 - RNA, 19 nt, Homo sapiens
  misc_RNA (1)...(19): siRNA sense strand
agcaucaggccaaauguaa

SEQ ID NO: 215997 - RNA, 19 nt, Homo sapiens
  misc_RNA (1)...(19): siRNA sense strand
gcccuuugcuuggaucucu

SEQ ID NO: 215998 - RNA, 19 nt, Homo sapiens
  misc_RNA (1)...(19): siRNA sense strand
gcugaauguuuaugauacg

SEQ ID NO: 215999 - RNA, 19 nt, Homo sapiens
  misc_RNA (1)...(19): siRNA sense strand
agacuuugccaagguacua

SEQ ID NO: 216000 - RNA, 19 nt, Homo sapiens
  misc_RNA (1)...(19): siRNA sense strand
caagcaaguggcaaguuca

SEQ ID NO: 216001 - RNA, 19 nt, Homo sapiens
  misc_RNA (1)...(19): siRNA sense strand
agacaaguacagauaccuu

SEQ ID NO: 216002 - RNA, 19 nt, Homo sapiens
  misc_RNA (1)...(19): siRNA sense strand
gcaucauuucccuguguaa

SEQ ID NO: 216003 - RNA, 19 nt, Homo sapiens
  misc_RNA (1)...(19): siRNA sense strand
cugcaaagaguguccaauc

SEQ ID NO: 216004 - RNA, 19 nt, Homo sapiens
  misc_RNA (1)...(19): siRNA sense strand
cuuauaggacugccaugaa

SEQ ID NO: 216005 - RNA, 19 nt, Homo sapiens
  misc_RNA (1)...(19): siRNA sense strand
caaagaguguccaaucauu

SEQ ID NO: 216006 - RNA, 19 nt, Homo sapiens
  misc_RNA (1)...(19): siRNA sense strand
uagcugaccugaauaaugu

SEQ ID NO: 216007 - RNA, 19 nt, Homo sapiens
  misc_RNA (1)...(19): siRNA sense strand
gcaugauucuauccaaauu

SEQ ID NO: 216008 - RNA, 19 nt, Homo sapiens
  misc_RNA (1)...(19): siRNA sense strand
ugaacuggcugcugaaugu

SEQ ID NO: 216009 - RNA, 19 nt, Homo sapiens
  misc_RNA (1)...(19): siRNA sense strand
gauauccugcagauuauua

SEQ ID NO: 216010 - RNA, 19 nt, Homo sapiens
  misc_RNA (1)...(19): siRNA sense strand
gagaagauguucgagacuu

SEQ ID NO: 216011 - RNA, 19 nt, Homo sapiens
  misc_RNA (1)...(19): siRNA sense strand
gcacuuuaauuaugacauc

SEQ ID NO: 216012 - RNA, 19 nt, Homo sapiens
  misc_RNA (1)...(19): siRNA sense strand
guaaagcacauuuggaaga

SEQ ID NO: 216013 - RNA, 19 nt, Homo sapiens
  misc_RNA (1)...(19): siRNA sense strand
gaauauugcacuccgacua

SEQ ID NO: 216014 - RNA, 19 nt, Homo sapiens
  misc_RNA (1)...(19): siRNA sense strand
uuauaggacugccaugaaa

SEQ ID NO: 216015 - RNA, 19 nt, Homo sapiens
  misc_RNA (1)...(19): siRNA sense strand
gggugaaguugcauccuuu

SEQ ID NO: 216016 - RNA, 19 nt, Homo sapiens
  misc_RNA (1)...(19): siRNA sense strand
gcaagagcacaacaauuug

SEQ ID NO: 216017 - RNA, 19 nt, Homo sapiens
  misc_RNA (1)...(19): siRNA sense strand
gcacaacaauuuggucaac

SEQ ID NO: 216018 - RNA, 19 nt, Homo sapiens
  misc_RNA (1)...(19): siRNA sense strand
agcaagagcacaacaauuu

SEQ ID NO: 216019 - RNA, 19 nt, Homo sapiens
  misc_RNA (1)...(19): siRNA sense strand
agaagauguucgagacuuu

SEQ ID NO: 216020 - RNA, 19 nt, Homo sapiens
  misc_RNA (1)...(19): siRNA sense strand
gagcaagagcacaacaauu

SEQ ID NO: 216021 - RNA, 19 nt, Homo sapiens
  misc_RNA (1)...(19): siRNA sense strand
ucaagcaaguggcaaguuc

SEQ ID NO: 216022 - RNA, 19 nt, Homo sapiens
  misc_RNA (1)...(19): siRNA sense strand
ccacgagacucaaacaacu

SEQ ID NO: 216023 - RNA, 19 nt, Homo sapiens
  misc_RNA (1)...(19): siRNA sense strand
cagcacaaccucaagcaaa

SEQ ID NO: 216024 - RNA, 19 nt, Homo sapiens
  misc_RNA (1)...(19): siRNA sense strand
gcaaagaguguccaaucau

SEQ ID NO: 216025 - RNA, 19 nt, Homo sapiens
  misc_RNA (1)...(19): siRNA sense strand
auggauauccugcagauua

SEQ ID NO: 216026 - RNA, 19 nt, Homo sapiens
  misc_RNA (1)...(19): siRNA sense strand
uguaacaucugcaaagagu

SEQ ID NO: 216027 - RNA, 19 nt, Homo sapiens
  misc_RNA (1)...(19): siRNA sense strand
guccggagcugcuuccaau

SEQ ID NO: 216028 - RNA, 19 nt, Homo sapiens
  misc_RNA (1)...(19): siRNA sense strand
gcaaguggcaaguucaaca

SEQ ID NO: 216029 - RNA, 19 nt, Homo sapiens
  misc_RNA (1)...(19): siRNA sense strand
gcuuccaauuugcuaauaa

SEQ ID NO: 216030 - RNA, 19 nt, Homo sapiens
  misc_RNA (1)...(19): siRNA sense strand
uggaagacaaguacagaua

SEQ ID NO: 216031 - RNA, 19 nt, Homo sapiens
  misc_RNA (1)...(19): siRNA sense strand
ggauccguguccugucuuu

SEQ ID NO: 216032 - RNA, 19 nt, Homo sapiens
  misc_RNA (1)...(19): siRNA sense strand
gucuuuagcugaccugaau

SEQ ID NO: 216033 - RNA, 19 nt, Homo sapiens
  misc_RNA (1)...(19): siRNA sense strand
gacaaguacagauaccuuu

SEQ ID NO: 216034 - RNA, 19 nt, Homo sapiens
  misc_RNA (1)...(19): siRNA sense strand
ccaagcaucaggccaaaug

SEQ ID NO: 216035 - RNA, 19 nt, Homo sapiens
  misc_RNA (1)...(19): siRNA sense strand
ggagcaagagcacaacaau

SEQ ID NO: 216036 - RNA, 19 nt, Homo sapiens
  misc_RNA (1)...(19): siRNA sense strand
guguaaagcacauuuggaa

SEQ ID NO: 216037 - RNA, 19 nt, Homo sapiens
  misc_RNA (1)...(19): siRNA sense strand
caagacaguugggugaagu

SEQ ID NO: 216038 - RNA, 19 nt, Homo sapiens
  misc_RNA (1)...(19): siRNA sense strand
gaagauguucgagacuuug

SEQ ID NO: 216039 - RNA, 19 nt, Homo sapiens
  misc_RNA (1)...(19): siRNA sense strand
gucagauucucagcuuaua

SEQ ID NO: 216040 - RNA, 19 nt, Homo sapiens
  misc_RNA (1)...(19): siRNA sense strand
uaacaucugcaaagagugu

SEQ ID NO: 216041 - RNA, 19 nt, Homo sapiens
  misc_RNA (1)...(19): siRNA sense strand
cggagcugcuuccaauuug

SEQ ID NO: 216042 - RNA, 19 nt, Homo sapiens
  misc_RNA (1)...(19): siRNA sense strand
gaagacaaguacagauacc

SEQ ID NO: 216043 - RNA, 19 nt, Homo sapiens
  misc_RNA (1)...(19): siRNA sense strand
ccauggauauccugcagau

SEQ ID NO: 216044 - RNA, 19 nt, Homo sapiens
  misc_RNA (1)...(19): siRNA sense strand
ggcaucauuucccugugua

SEQ ID NO: 216045 - RNA, 19 nt, Homo sapiens
  misc_RNA (1)...(19): siRNA sense strand
uggauauccugcagauuau

SEQ ID NO: 216046 - RNA, 19 nt, Homo sapiens
  misc_RNA (1)...(19): siRNA sense strand
ggaagacaaguacagauac

SEQ ID NO: 216047 - RNA, 19 nt, Homo sapiens
  misc_RNA (1)...(19): siRNA sense strand
ugcaaagaguguccaauca

SEQ ID NO: 216048 - RNA, 19 nt, Homo sapiens
  misc_RNA (1)...(19): siRNA sense strand
guggauaugugucugaacu

SEQ ID NO: 216049 - RNA, 19 nt, Homo sapiens
  misc_RNA (1)...(19): siRNA sense strand
acuggcugcugaauguuua

SEQ ID NO: 216050 - RNA, 19 nt, Homo sapiens
  misc_RNA (1)...(19): siRNA sense strand
acuaucccaugguggaaua

SEQ ID NO: 216051 - RNA, 19 nt, Homo sapiens
  misc_RNA (1)...(19): siRNA sense strand
ccggagcugcuuccaauuu

SEQ ID NO: 216052 - RNA, 19 nt, Homo sapiens
  misc_RNA (1)...(19): siRNA sense strand
ccaaauuccaagacaguug

SEQ ID NO: 216053 - RNA, 19 nt, Homo sapiens
  misc_RNA (1)...(19): siRNA sense strand
cagaaacugccaagcauca

SEQ ID NO: 216054 - RNA, 19 nt, Homo sapiens
  misc_RNA (1)...(19): siRNA sense strand
uaugacaucugccaaagcu

SEQ ID NO: 216055 - RNA, 19 nt, Homo sapiens
  misc_RNA (1)...(19): siRNA sense strand
aaugucagauucucagcuu

SEQ ID NO: 216056 - RNA, 19 nt, Homo sapiens
  misc_RNA (1)...(19): siRNA sense strand
ucgagacuuugccaaggua

SEQ ID NO: 216057 - RNA, 19 nt, Homo sapiens
  misc_RNA (1)...(19): siRNA sense strand
gcaaaaggccauaaaaugc

SEQ ID NO: 216058 - RNA, 19 nt, Homo sapiens
  misc_RNA (1)...(19): siRNA sense strand
cugcaugauucuauccaaa

SEQ ID NO: 216059 - RNA, 19 nt, Homo sapiens
  misc_RNA (1)...(19): siRNA sense strand
uaaagcacauuuggaagac

SEQ ID NO: 216060 - RNA, 19 nt, Homo sapiens
  misc_RNA (1)...(19): siRNA sense strand
acaggagucuaaagcacuu

SEQ ID NO: 216061 - RNA, 19 nt, Homo sapiens
  misc_RNA (1)...(19): siRNA sense strand
acagauaccuuuucaagca

SEQ ID NO: 216062 - RNA, 19 nt, Homo sapiens
  misc_RNA (1)...(19): siRNA sense strand
aagcacauuuggaagacaa

SEQ ID NO: 216063 - RNA, 19 nt, Homo sapiens
  misc_RNA (1)...(19): siRNA sense strand
gcuaauaauaagccagaga

SEQ ID NO: 216064 - RNA, 19 nt, Homo sapiens
  misc_RNA (1)...(19): siRNA sense strand
caagagcacaacaauuugg

SEQ ID NO: 216065 - RNA, 19 nt, Homo sapiens
  misc_RNA (1)...(19): siRNA sense strand
ccugucagcugcaugugau

SEQ ID NO: 216066 - RNA, 19 nt, Homo sapiens
  misc_RNA (1)...(19): siRNA sense strand
gcugcugaauguuuaugau

SEQ ID NO: 216067 - RNA, 19 nt, Homo sapiens
  misc_RNA (1)...(19): siRNA sense strand
acagagcucuaccagucuu

SEQ ID NO: 216068 - RNA, 19 nt, Homo sapiens
  misc_RNA (1)...(19): siRNA sense strand
acaguugggugaaguugca

SEQ ID NO: 216069 - RNA, 19 nt, Homo sapiens
  misc_RNA (1)...(19): siRNA sense strand
guuugaccacuauuuauga

SEQ ID NO: 216070 - RNA, 19 nt, Homo sapiens
  misc_RNA (1)...(19): siRNA sense strand
gcuuauaggacugccauga

SEQ ID NO: 216071 - RNA, 19 nt, Homo sapiens
  misc_RNA (1)...(19): siRNA sense strand
caucaggccaaauguaaca

SEQ ID NO: 216072 - RNA, 19 nt, Homo sapiens
  misc_RNA (1)...(19): siRNA sense strand
gauucuauccaaauuccaa

SEQ ID NO: 216073 - RNA, 19 nt, Homo sapiens
  misc_RNA (1)...(19): siRNA sense strand
ggcaaguucaacaggauuu

SEQ ID NO: 216074 - RNA, 19 nt, Homo sapiens
  misc_RNA (1)...(19): siRNA sense strand
gaacuggcugcugaauguu

SEQ ID NO: 216075 - RNA, 19 nt, Homo sapiens
  misc_RNA (1)...(19): siRNA sense strand
cugcugaauguuuaugaua

SEQ ID NO: 216076 - RNA, 19 nt, Homo sapiens
  misc_RNA (1)...(19): siRNA sense strand
aagcaucaggccaaaugua

SEQ ID NO: 216077 - RNA, 19 nt, Homo sapiens
  misc_RNA (1)...(19): siRNA sense strand
uggcaucauuucccugugu

SEQ ID NO: 216078 - RNA, 19 nt, Homo sapiens
  misc_RNA (1)...(19): siRNA sense strand
ccaugaaacuccgaagacu

SEQ ID NO: 216079 - RNA, 19 nt, Homo sapiens
  misc_RNA (1)...(19): siRNA sense strand
auaauaagccagagaucga

SEQ ID NO: 216080 - RNA, 19 nt, Homo sapiens
  misc_RNA (1)...(19): siRNA sense strand
cuaauaauaagccagagau

SEQ ID NO: 216081 - RNA, 19 nt, Homo sapiens
  misc_RNA (1)...(19): siRNA sense strand
ugggugaaguugcauccuu

SEQ ID NO: 216082 - RNA, 19 nt, Homo sapiens
  misc_RNA (1)...(19): siRNA sense strand
caucauuucccuguguaaa

SEQ ID NO: 216083 - RNA, 19 nt, Homo sapiens
  misc_RNA (1)...(19): siRNA sense strand
gcguggauaugugucugaa

SEQ ID NO: 216084 - RNA, 19 nt, Homo sapiens
  misc_RNA (1)...(19): siRNA sense strand
gcacuaucccaugguggaa

SEQ ID NO: 216085 - RNA, 19 nt, Homo sapiens
  misc_RNA (1)...(19): siRNA sense strand
gagccugucagcugcaugu

SEQ ID NO: 216086 - RNA, 19 nt, Homo sapiens
  misc_RNA (1)...(19): siRNA sense strand
guacagauaccuuuucaag

SEQ ID NO: 216087 - RNA, 19 nt, Homo sapiens
  misc_RNA (1)...(19): siRNA sense strand
gucccucucugcguggaua

SEQ ID NO: 216088 - RNA, 19 nt, Homo sapiens
  misc_RNA (1)...(19): siRNA sense strand
ggagcugcuuccaauuugc

SEQ ID NO: 216089 - RNA, 19 nt, Homo sapiens
  misc_RNA (1)...(19): siRNA sense strand
uuagcugaccugaauaaug

SEQ ID NO: 216090 - RNA, 19 nt, Homo sapiens
  misc_RNA (1)...(19): siRNA sense strand
guggcaaguucaacaggau

SEQ ID NO: 216091 - RNA, 19 nt, Homo sapiens
  misc_RNA (1)...(19): siRNA sense strand
acaacaauuuggucaacgu

SEQ ID NO: 216092 - RNA, 19 nt, Homo sapiens
  misc_RNA (1)...(19): siRNA sense strand
gacuacaucaggagaagau

SEQ ID NO: 216093 - RNA, 19 nt, Homo sapiens
  misc_RNA (1)...(19): siRNA sense strand
uaauaagccagagaucgaa

SEQ ID NO: 216094 - RNA, 19 nt, Homo sapiens
  misc_RNA (1)...(19): siRNA sense strand
ugucagauucucagcuuau

SEQ ID NO: 216095 - RNA, 19 nt, Homo sapiens
  misc_RNA (1)...(19): siRNA sense strand
ggauauccugcagauuauu

SEQ ID NO: 216096 - RNA, 19 nt, Homo sapiens
  misc_RNA (1)...(19): siRNA sense strand
agcaucaggccaaauguaa

SEQ ID NO: 216097 - RNA, 19 nt, Homo sapiens
  misc_RNA (1)...(19): siRNA sense strand
gcccuuugcuuggaucucu

SEQ ID NO: 216098 - RNA, 19 nt, Homo sapiens
  misc_RNA (1)...(19): siRNA sense strand
gcugaauguuuaugauacg

SEQ ID NO: 216099 - RNA, 19 nt, Homo sapiens
  misc_RNA (1)...(19): siRNA sense strand
agacuuugccaagguacua

SEQ ID NO: 216100 - RNA, 19 nt, Homo sapiens
  misc_RNA (1)...(19): siRNA sense strand
caagcaaguggcaaguuca

SEQ ID NO: 216101 - RNA, 19 nt, Homo sapiens
  misc_RNA (1)...(19): siRNA sense strand
agacaaguacagauaccuu

SEQ ID NO: 216102 - RNA, 19 nt, Homo sapiens
  misc_RNA (1)...(19): siRNA sense strand
gcaucauuucccuguguaa

SEQ ID NO: 216103 - RNA, 19 nt, Homo sapiens
  misc_RNA (1)...(19): siRNA sense strand
cugcaaagaguguccaauc

SEQ ID NO: 216104 - RNA, 19 nt, Homo sapiens
  misc_RNA (1)...(19): siRNA sense strand
cuuauaggacugccaugaa

SEQ ID NO: 216105 - RNA, 19 nt, Homo sapiens
  misc_RNA (1)...(19): siRNA sense strand
caaagaguguccaaucauu

SEQ ID NO: 216106 - RNA, 19 nt, Homo sapiens
  misc_RNA (1)...(19): siRNA sense strand
uagcugaccugaauaaugu

SEQ ID NO: 216107 - RNA, 19 nt, Homo sapiens
  misc_RNA (1)...(19): siRNA sense strand
gcaugauucuauccaaauu

SEQ ID NO: 216108 - RNA, 19 nt, Homo sapiens
  misc_RNA (1)...(19): siRNA sense strand
ugaacuggcugcugaaugu

SEQ ID NO: 216109 - RNA, 19 nt, Homo sapiens
  misc_RNA (1)...(19): siRNA sense strand
gauauccugcagauuauua

SEQ ID NO: 216110 - RNA, 19 nt, Homo sapiens
  misc_RNA (1)...(19): siRNA sense strand
gagaagauguucgagacuu

SEQ ID NO: 216111 - RNA, 19 nt, Homo sapiens
  misc_RNA (1)...(19): siRNA sense strand
gcacuuuaauuaugacauc

SEQ ID NO: 216112 - RNA, 19 nt, Homo sapiens
  misc_RNA (1)...(19): siRNA sense strand
guaaagcacauuuggaaga

SEQ ID NO: 216113 - RNA, 19 nt, Homo sapiens
  misc_RNA (1)...(19): siRNA sense strand
gaauauugcacuccgacua

SEQ ID NO: 216114 - RNA, 19 nt, Homo sapiens
  misc_RNA (1)...(19): siRNA sense strand
uuauaggacugccaugaaa

SEQ ID NO: 216115 - RNA, 19 nt, Homo sapiens
  misc_RNA (1)...(19): siRNA sense strand
gggugaaguugcauccuuu

SEQ ID NO: 216116 - RNA, 19 nt, Homo sapiens
  misc_RNA (1)...(19): siRNA sense strand
gcaagagcacaacaauuug

SEQ ID NO: 216117 - RNA, 19 nt, Homo sapiens
  misc_RNA (1)...(19): siRNA sense strand
gcacaacaauuuggucaac

SEQ ID NO: 216118 - RNA, 19 nt, Homo sapiens
  misc_RNA (1)...(19): siRNA sense strand
agcaagagcacaacaauuu

SEQ ID NO: 216119 - RNA, 19 nt, Homo sapiens
  misc_RNA (1)...(19): siRNA sense strand
agaagauguucgagacuuu

SEQ ID NO: 216120 - RNA, 19 nt, Homo sapiens
  misc_RNA (1)...(19): siRNA sense strand
gagcaagagcacaacaauu

SEQ ID NO: 216121 - RNA, 19 nt, Homo sapiens
  misc_RNA (1)...(19): siRNA sense strand
ucaagcaaguggcaaguuc

SEQ ID NO: 216122 - RNA, 19 nt, Homo sapiens
  misc_RNA (1)...(19): siRNA sense strand
ccacgagacucaaacaacu

SEQ ID NO: 216123 - RNA, 19 nt, Homo sapiens
  misc_RNA (1)...(19): siRNA sense strand
cagcacaaccucaagcaaa

SEQ ID NO: 216124 - RNA, 19 nt, Homo sapiens
  misc_RNA (1)...(19): siRNA sense strand
gcaaagaguguccaaucau

SEQ ID NO: 216125 - RNA, 19 nt, Homo sapiens
  misc_RNA (1)...(19): siRNA sense strand
auggauauccugcagauua

SEQ ID NO: 216126 - RNA, 19 nt, Homo sapiens
  misc_RNA (1)...(19): siRNA sense strand
uguaacaucugcaaagagu

SEQ ID NO: 216127 - RNA, 19 nt, Homo sapiens
  misc_RNA (1)...(19): siRNA sense strand
guccggagcugcuuccaau

SEQ ID NO: 216128 - RNA, 19 nt, Homo sapiens
  misc_RNA (1)...(19): siRNA sense strand
gcaaguggcaaguucaaca

SEQ ID NO: 216129 - RNA, 19 nt, Homo sapiens
  misc_RNA (1)...(19): siRNA sense strand
gcuuccaauuugcuaauaa

SEQ ID NO: 216130 - RNA, 19 nt, Homo sapiens
  misc_RNA (1)...(19): siRNA sense strand
uggaagacaaguacagaua

SEQ ID NO: 216131 - RNA, 19 nt, Homo sapiens
  misc_RNA (1)...(19): siRNA sense strand
ggauccguguccugucuuu

SEQ ID NO: 216132 - RNA, 19 nt, Homo sapiens
  misc_RNA (1)...(19): siRNA sense strand
gucuuuagcugaccugaau

SEQ ID NO: 216133 - RNA, 19 nt, Homo sapiens
  misc_RNA (1)...(19): siRNA sense strand
gacaaguacagauaccuuu

SEQ ID NO: 216134 - RNA, 19 nt, Homo sapiens
  misc_RNA (1)...(19): siRNA sense strand
ccaagcaucaggccaaaug

SEQ ID NO: 216135 - RNA, 19 nt, Homo sapiens
  misc_RNA (1)...(19): siRNA sense strand
ggagcaagagcacaacaau

SEQ ID NO: 216136 - RNA, 19 nt, Homo sapiens
  misc_RNA (1)...(19): siRNA sense strand
guguaaagcacauuuggaa

SEQ ID NO: 216137 - RNA, 19 nt, Homo sapiens
  misc_RNA (1)...(19): siRNA sense strand
caagacaguugggugaagu

SEQ ID NO: 216138 - RNA, 19 nt, Homo sapiens
  misc_RNA (1)...(19): siRNA sense strand
gaagauguucgagacuuug

SEQ ID NO: 216139 - RNA, 19 nt, Homo sapiens
  misc_RNA (1)...(19): siRNA sense strand
gucagauucucagcuuaua

SEQ ID NO: 216140 - RNA, 19 nt, Homo sapiens
  misc_RNA (1)...(19): siRNA sense strand
uaacaucugcaaagagugu

SEQ ID NO: 216141 - RNA, 19 nt, Homo sapiens
  misc_RNA (1)...(19): siRNA sense strand
cggagcugcuuccaauuug

SEQ ID NO: 216142 - RNA, 19 nt, Homo sapiens
  misc_RNA (1)...(19): siRNA sense strand
gaagacaaguacagauacc

SEQ ID NO: 216143 - RNA, 19 nt, Homo sapiens
  misc_RNA (1)...(19): siRNA sense strand
ccauggauauccugcagau

SEQ ID NO: 216144 - RNA, 19 nt, Homo sapiens
  misc_RNA (1)...(19): siRNA sense strand
ggcaucauuucccugugua

SEQ ID NO: 216145 - RNA, 19 nt, Homo sapiens
  misc_RNA (1)...(19): siRNA sense strand
uggauauccugcagauuau

SEQ ID NO: 216146 - RNA, 19 nt, Homo sapiens
  misc_RNA (1)...(19): siRNA sense strand
ggaagacaaguacagauac

SEQ ID NO: 216147 - RNA, 19 nt, Homo sapiens
  misc_RNA (1)...(19): siRNA sense strand
ugcaaagaguguccaauca

SEQ ID NO: 216148 - RNA, 19 nt, Homo sapiens
  misc_RNA (1)...(19): siRNA sense strand
guggauaugugucugaacu

SEQ ID NO: 216149 - RNA, 19 nt, Homo sapiens
  misc_RNA (1)...(19): siRNA sense strand
acuggcugcugaauguuua

SEQ ID NO: 216150 - RNA, 19 nt, Homo sapiens
  misc_RNA (1)...(19): siRNA sense strand
acuaucccaugguggaaua

SEQ ID NO: 216151 - RNA, 19 nt, Homo sapiens
  misc_RNA (1)...(19): siRNA sense strand
ccggagcugcuuccaauuu

SEQ ID NO: 216152 - RNA, 19 nt, Homo sapiens
  misc_RNA (1)...(19): siRNA sense strand
ccaaauuccaagacaguug

SEQ ID NO: 216153 - RNA, 19 nt, Homo sapiens
  misc_RNA (1)...(19): siRNA sense strand
cagaaacugccaagcauca

SEQ ID NO: 216154 - RNA, 19 nt, Homo sapiens
  misc_RNA (1)...(19): siRNA sense strand
uaugacaucugccaaagcu

SEQ ID NO: 216155 - RNA, 19 nt, Homo sapiens
  misc_RNA (1)...(19): siRNA sense strand
aaugucagauucucagcuu

SEQ ID NO: 216156 - RNA, 19 nt, Homo sapiens
  misc_RNA (1)...(19): siRNA sense strand
ucgagacuuugccaaggua

SEQ ID NO: 216157 - RNA, 19 nt, Homo sapiens
  misc_RNA (1)...(19): siRNA sense strand
gcaaaaggccauaaaaugc

SEQ ID NO: 216158 - RNA, 19 nt, Homo sapiens
  misc_RNA (1)...(19): siRNA sense strand
cugcaugauucuauccaaa

SEQ ID NO: 216159 - RNA, 19 nt, Homo sapiens
  misc_RNA (1)...(19): siRNA sense strand
uaaagcacauuuggaagac

SEQ ID NO: 216160 - RNA, 19 nt, Homo sapiens
  misc_RNA (1)...(19): siRNA sense strand
acaggagucuaaagcacuu

SEQ ID NO: 216161 - RNA, 19 nt, Homo sapiens
  misc_RNA (1)...(19): siRNA sense strand
acagauaccuuuucaagca

SEQ ID NO: 216162 - RNA, 19 nt, Homo sapiens
  misc_RNA (1)...(19): siRNA sense strand
aagcacauuuggaagacaa

SEQ ID NO: 216163 - RNA, 19 nt, Homo sapiens
  misc_RNA (1)...(19): siRNA sense strand
gcuaauaauaagccagaga

SEQ ID NO: 216164 - RNA, 19 nt, Homo sapiens
  misc_RNA (1)...(19): siRNA sense strand
caagagcacaacaauuugg

SEQ ID NO: 216165 - RNA, 19 nt, Homo sapiens
  misc_RNA (1)...(19): siRNA sense strand
ccugucagcugcaugugau

SEQ ID NO: 216166 - RNA, 19 nt, Homo sapiens
  misc_RNA (1)...(19): siRNA sense strand
gcugcugaauguuuaugau

SEQ ID NO: 216167 - RNA, 19 nt, Homo sapiens
  misc_RNA (1)...(19): siRNA sense strand
acagagcucuaccagucuu

SEQ ID NO: 216168 - RNA, 19 nt, Homo sapiens
  misc_RNA (1)...(19): siRNA sense strand
acaguugggugaaguugca

SEQ ID NO: 216169 - RNA, 19 nt, Homo sapiens
  misc_RNA (1)...(19): siRNA sense strand
guuugaccacuauuuauga

SEQ ID NO: 216170 - RNA, 19 nt, Homo sapiens
  misc_RNA (1)...(19): siRNA sense strand
gcuuauaggacugccauga

SEQ ID NO: 216171 - RNA, 19 nt, Homo sapiens
  misc_RNA (1)...(19): siRNA sense strand
caucaggccaaauguaaca

SEQ ID NO: 216172 - RNA, 19 nt, Homo sapiens
  misc_RNA (1)...(19): siRNA sense strand
gauucuauccaaauuccaa

SEQ ID NO: 216173 - RNA, 19 nt, Homo sapiens
  misc_RNA (1)...(19): siRNA sense strand
ggcaaguucaacaggauuu

SEQ ID NO: 216174 - RNA, 19 nt, Homo sapiens
  misc_RNA (1)...(19): siRNA sense strand
gaacuggcugcugaauguu

SEQ ID NO: 216175 - RNA, 19 nt, Homo sapiens
  misc_RNA (1)...(19): siRNA sense strand
cugcugaauguuuaugaua

SEQ ID NO: 216176 - RNA, 19 nt, Homo sapiens
  misc_RNA (1)...(19): siRNA sense strand
aagcaucaggccaaaugua

SEQ ID NO: 216177 - RNA, 19 nt, Homo sapiens
  misc_RNA (1)...(19): siRNA sense strand
uggcaucauuucccugugu

SEQ ID NO: 216178 - RNA, 19 nt, Homo sapiens
  misc_RNA (1)...(19): siRNA sense strand
ccaugaaacuccgaagacu

SEQ ID NO: 216179 - RNA, 19 nt, Homo sapiens
  misc_RNA (1)...(19): siRNA sense strand
auaauaagccagagaucga

SEQ ID NO: 216180 - RNA, 19 nt, Homo sapiens
  misc_RNA (1)...(19): siRNA sense strand
cuaauaauaagccagagau

SEQ ID NO: 216181 - RNA, 19 nt, Homo sapiens
  misc_RNA (1)...(19): siRNA sense strand
ugggugaaguugcauccuu

SEQ ID NO: 216182 - RNA, 19 nt, Homo sapiens
  misc_RNA (1)...(19): siRNA sense strand
caucauuucccuguguaaa

SEQ ID NO: 216183 - RNA, 19 nt, Homo sapiens
  misc_RNA (1)...(19): siRNA sense strand
gcguggauaugugucugaa

SEQ ID NO: 216184 - RNA, 19 nt, Homo sapiens
  misc_RNA (1)...(19): siRNA sense strand
gcacuaucccaugguggaa

SEQ ID NO: 216185 - RNA, 19 nt, Homo sapiens
  misc_RNA (1)...(19): siRNA sense strand
gagccugucagcugcaugu

SEQ ID NO: 216186 - RNA, 19 nt, Homo sapiens
  misc_RNA (1)...(19): siRNA sense strand
guacagauaccuuuucaag

SEQ ID NO: 216187 - RNA, 19 nt, Homo sapiens
  misc_RNA (1)...(19): siRNA sense strand
gucccucucugcguggaua

SEQ ID NO: 216188 - RNA, 19 nt, Homo sapiens
  misc_RNA (1)...(19): siRNA sense strand
ggagcugcuuccaauuugc

SEQ ID NO: 216189 - RNA, 19 nt, Homo sapiens
  misc_RNA (1)...(19): siRNA sense strand
uuagcugaccugaauaaug

SEQ ID NO: 216190 - RNA, 19 nt, Homo sapiens
  misc_RNA (1)...(19): siRNA sense strand
guggcaaguucaacaggau

SEQ ID NO: 216191 - RNA, 19 nt, Homo sapiens
  misc_RNA (1)...(19): siRNA sense strand
acaacaauuuggucaacgu

SEQ ID NO: 216192 - RNA, 19 nt, Homo sapiens
  misc_RNA (1)...(19): siRNA sense strand
gacuacaucaggagaagau

SEQ ID NO: 216193 - RNA, 19 nt, Homo sapiens
  misc_RNA (1)...(19): siRNA sense strand
uaauaagccagagaucgaa

SEQ ID NO: 216194 - RNA, 19 nt, Homo sapiens
  misc_RNA (1)...(19): siRNA sense strand
ugucagauucucagcuuau

SEQ ID NO: 216195 - RNA, 19 nt, Homo sapiens
  misc_RNA (1)...(19): siRNA sense strand
ggauauccugcagauuauu

SEQ ID NO: 216196 - RNA, 19 nt, Homo sapiens
  misc_RNA (1)...(19): siRNA sense strand
agcaucaggccaaauguaa

SEQ ID NO: 216197 - RNA, 19 nt, Homo sapiens
  misc_RNA (1)...(19): siRNA sense strand
gcccuuugcuuggaucucu

SEQ ID NO: 216198 - RNA, 19 nt, Homo sapiens
  misc_RNA (1)...(19): siRNA sense strand
gcugaauguuuaugauacg

SEQ ID NO: 216199 - RNA, 19 nt, Homo sapiens
  misc_RNA (1)...(19): siRNA sense strand
agacuuugccaagguacua

SEQ ID NO: 216200 - RNA, 19 nt, Homo sapiens
  misc_RNA (1)...(19): siRNA sense strand
caagcaaguggcaaguuca

SEQ ID NO: 216201 - RNA, 19 nt, Homo sapiens
  misc_RNA (1)...(19): siRNA sense strand
agacaaguacagauaccuu

SEQ ID NO: 216202 - RNA, 19 nt, Homo sapiens
  misc_RNA (1)...(19): siRNA sense strand
gcaucauuucccuguguaa

SEQ ID NO: 216203 - RNA, 19 nt, Homo sapiens
  misc_RNA (1)...(19): siRNA sense strand
cugcaaagaguguccaauc

SEQ ID NO: 216204 - RNA, 19 nt, Homo sapiens
  misc_RNA (1)...(19): siRNA sense strand
cuuauaggacugccaugaa

SEQ ID NO: 216205 - RNA, 19 nt, Homo sapiens
  misc_RNA (1)...(19): siRNA sense strand
caaagaguguccaaucauu

SEQ ID NO: 216206 - RNA, 19 nt, Homo sapiens
  misc_RNA (1)...(19): siRNA sense strand
uagcugaccugaauaaugu

SEQ ID NO: 216207 - RNA, 19 nt, Homo sapiens
  misc_RNA (1)...(19): siRNA sense strand
gcaugauucuauccaaauu

SEQ ID NO: 216208 - RNA, 19 nt, Homo sapiens
  misc_RNA (1)...(19): siRNA sense strand
ugaacuggcugcugaaugu

SEQ ID NO: 216209 - RNA, 19 nt, Homo sapiens
  misc_RNA (1)...(19): siRNA sense strand
gauauccugcagauuauua

SEQ ID NO: 216210 - RNA, 19 nt, Homo sapiens
  misc_RNA (1)...(19): siRNA sense strand
gagaagauguucgagacuu

SEQ ID NO: 216211 - RNA, 19 nt, Homo sapiens
  misc_RNA (1)...(19): siRNA sense strand
gcacuuuaauuaugacauc

SEQ ID NO: 216212 - RNA, 19 nt, Homo sapiens
  misc_RNA (1)...(19): siRNA sense strand
guaaagcacauuuggaaga

SEQ ID NO: 216213 - RNA, 19 nt, Homo sapiens
  misc_RNA (1)...(19): siRNA sense strand
gaauauugcacuccgacua

SEQ ID NO: 216214 - RNA, 19 nt, Homo sapiens
  misc_RNA (1)...(19): siRNA sense strand
uuauaggacugccaugaaa

SEQ ID NO: 216215 - RNA, 19 nt, Homo sapiens
  misc_RNA (1)...(19): siRNA sense strand
gggugaaguugcauccuuu

SEQ ID NO: 216216 - RNA, 19 nt, Homo sapiens
  misc_RNA (1)...(19): siRNA sense strand
gcaagagcacaacaauuug

SEQ ID NO: 216217 - RNA, 19 nt, Homo sapiens
  misc_RNA (1)...(19): siRNA sense strand
gcacaacaauuuggucaac

SEQ ID NO: 216218 - RNA, 19 nt, Homo sapiens
  misc_RNA (1)...(19): siRNA sense strand
agcaagagcacaacaauuu

SEQ ID NO: 216219 - RNA, 19 nt, Homo sapiens
  misc_RNA (1)...(19): siRNA sense strand
agaagauguucgagacuuu

SEQ ID NO: 216220 - RNA, 19 nt, Homo sapiens
  misc_RNA (1)...(19): siRNA sense strand
gagcaagagcacaacaauu

SEQ ID NO: 216221 - RNA, 19 nt, Homo sapiens
  misc_RNA (1)...(19): siRNA sense strand
ucaagcaaguggcaaguuc

SEQ ID NO: 216222 - RNA, 19 nt, Homo sapiens
  misc_RNA (1)...(19): siRNA sense strand
ccacgagacucaaacaacu

SEQ ID NO: 216223 - RNA, 19 nt, Homo sapiens
  misc_RNA (1)...(19): siRNA sense strand
cagcacaaccucaagcaaa

SEQ ID NO: 216224 - RNA, 19 nt, Homo sapiens
  misc_RNA (1)...(19): siRNA sense strand
gcaaagaguguccaaucau

SEQ ID NO: 216225 - RNA, 19 nt, Homo sapiens
  misc_RNA (1)...(19): siRNA sense strand
auggauauccugcagauua

SEQ ID NO: 216226 - RNA, 19 nt, Homo sapiens
  misc_RNA (1)...(19): siRNA sense strand
uguaacaucugcaaagagu

SEQ ID NO: 216227 - RNA, 19 nt, Homo sapiens
  misc_RNA (1)...(19): siRNA sense strand
guccggagcugcuuccaau

SEQ ID NO: 216228 - RNA, 19 nt, Homo sapiens
  misc_RNA (1)...(19): siRNA sense strand
gcaaguggcaaguucaaca

SEQ ID NO: 216229 - RNA, 19 nt, Homo sapiens
  misc_RNA (1)...(19): siRNA sense strand
gcuuccaauuugcuaauaa

SEQ ID NO: 216230 - RNA, 19 nt, Homo sapiens
  misc_RNA (1)...(19): siRNA sense strand
uggaagacaaguacagaua

SEQ ID NO: 216231 - RNA, 19 nt, Homo sapiens
  misc_RNA (1)...(19): siRNA sense strand
ggauccguguccugucuuu

SEQ ID NO: 216232 - RNA, 19 nt, Homo sapiens
  misc_RNA (1)...(19): siRNA sense strand
gucuuuagcugaccugaau

SEQ ID NO: 216233 - RNA, 19 nt, Homo sapiens
  misc_RNA (1)...(19): siRNA sense strand
gacaaguacagauaccuuu

SEQ ID NO: 216234 - RNA, 19 nt, Homo sapiens
  misc_RNA (1)...(19): siRNA sense strand
ccaagcaucaggccaaaug

SEQ ID NO: 216235 - RNA, 19 nt, Homo sapiens
  misc_RNA (1)...(19): siRNA sense strand
ggagcaagagcacaacaau

SEQ ID NO: 216236 - RNA, 19 nt, Homo sapiens
  misc_RNA (1)...(19): siRNA sense strand
guguaaagcacauuuggaa

SEQ ID NO: 216237 - RNA, 19 nt, Homo sapiens
  misc_RNA (1)...(19): siRNA sense strand
caagacaguugggugaagu

SEQ ID NO: 216238 - RNA, 19 nt, Homo sapiens
  misc_RNA (1)...(19): siRNA sense strand
gaagauguucgagacuuug

SEQ ID NO: 216239 - RNA, 19 nt, Homo sapiens
  misc_RNA (1)...(19): siRNA sense strand
gucagauucucagcuuaua

SEQ ID NO: 216240 - RNA, 19 nt, Homo sapiens
  misc_RNA (1)...(19): siRNA sense strand
uaacaucugcaaagagugu

SEQ ID NO: 216241 - RNA, 19 nt, Homo sapiens
  misc_RNA (1)...(19): siRNA sense strand
cggagcugcuuccaauuug

SEQ ID NO: 216242 - RNA, 19 nt, Homo sapiens
  misc_RNA (1)...(19): siRNA sense strand
gaagacaaguacagauacc

SEQ ID NO: 216243 - RNA, 19 nt, Homo sapiens
  misc_RNA (1)...(19): siRNA sense strand
ccauggauauccugcagau

SEQ ID NO: 216244 - RNA, 19 nt, Homo sapiens
  misc_RNA (1)...(19): siRNA sense strand
ggcaucauuucccugugua

SEQ ID NO: 216245 - RNA, 19 nt, Homo sapiens
  misc_RNA (1)...(19): siRNA sense strand
uggauauccugcagauuau

SEQ ID NO: 216246 - RNA, 19 nt, Homo sapiens
  misc_RNA (1)...(19): siRNA sense strand
ggaagacaaguacagauac

SEQ ID NO: 216247 - RNA, 19 nt, Homo sapiens
  misc_RNA (1)...(19): siRNA sense strand
ugcaaagaguguccaauca

SEQ ID NO: 216248 - RNA, 19 nt, Homo sapiens
  misc_RNA (1)...(19): siRNA sense strand
guggauaugugucugaacu

SEQ ID NO: 216249 - RNA, 19 nt, Homo sapiens
  misc_RNA (1)...(19): siRNA sense strand
acuggcugcugaauguuua

SEQ ID NO: 216250 - RNA, 19 nt, Homo sapiens
  misc_RNA (1)...(19): siRNA sense strand
acuaucccaugguggaaua

SEQ ID NO: 216251 - RNA, 19 nt, Homo sapiens
  misc_RNA (1)...(19): siRNA sense strand
ccggagcugcuuccaauuu

SEQ ID NO: 216252 - RNA, 19 nt, Homo sapiens
  misc_RNA (1)...(19): siRNA sense strand
ccaaauuccaagacaguug

SEQ ID NO: 216253 - RNA, 19 nt, Homo sapiens
  misc_RNA (1)...(19): siRNA sense strand
cagaaacugccaagcauca

SEQ ID NO: 216254 - RNA, 19 nt, Homo sapiens
  misc_RNA (1)...(19): siRNA sense strand
uaugacaucugccaaagcu

SEQ ID NO: 216255 - RNA, 19 nt, Homo sapiens
  misc_RNA (1)...(19): siRNA sense strand
aaugucagauucucagcuu

SEQ ID NO: 216256 - RNA, 19 nt, Homo sapiens
  misc_RNA (1)...(19): siRNA sense strand
ucgagacuuugccaaggua

SEQ ID NO: 216257 - RNA, 19 nt, Homo sapiens
  misc_RNA (1)...(19): siRNA sense strand
gcaaaaggccauaaaaugc

SEQ ID NO: 216258 - RNA, 19 nt, Homo sapiens
  misc_RNA (1)...(19): siRNA sense strand
cugcaugauucuauccaaa

SEQ ID NO: 216259 - RNA, 19 nt, Homo sapiens
  misc_RNA (1)...(19): siRNA sense strand
uaaagcacauuuggaagac

SEQ ID NO: 216260 - RNA, 19 nt, Homo sapiens
  misc_RNA (1)...(19): siRNA sense strand
acaggagucuaaagcacuu

SEQ ID NO: 216261 - RNA, 19 nt, Homo sapiens
  misc_RNA (1)...(19): siRNA sense strand
acagauaccuuuucaagca

SEQ ID NO: 216262 - RNA, 19 nt, Homo sapiens
  misc_RNA (1)...(19): siRNA sense strand
aagcacauuuggaagacaa

SEQ ID NO: 216263 - RNA, 19 nt, Homo sapiens
  misc_RNA (1)...(19): siRNA sense strand
gcuaauaauaagccagaga

SEQ ID NO: 216264 - RNA, 19 nt, Homo sapiens
  misc_RNA (1)...(19): siRNA sense strand
caagagcacaacaauuugg

SEQ ID NO: 216265 - RNA, 19 nt, Homo sapiens
  misc_RNA (1)...(19): siRNA sense strand
ccugucagcugcaugugau

SEQ ID NO: 216266 - RNA, 19 nt, Homo sapiens
  misc_RNA (1)...(19): siRNA sense strand
gcugcugaauguuuaugau

SEQ ID NO: 216267 - RNA, 19 nt, Homo sapiens
  misc_RNA (1)...(19): siRNA sense strand
acagagcucuaccagucuu

SEQ ID NO: 216268 - RNA, 19 nt, Homo sapiens
  misc_RNA (1)...(19): siRNA sense strand
acaguugggugaaguugca

SEQ ID NO: 216269 - RNA, 19 nt, Homo sapiens
  misc_RNA (1)...(19): siRNA sense strand
guuugaccacuauuuauga

SEQ ID NO: 216270 - RNA, 19 nt, Homo sapiens
  misc_RNA (1)...(19): siRNA sense strand
gcuuauaggacugccauga

SEQ ID NO: 216271 - RNA, 19 nt, Homo sapiens
  misc_RNA (1)...(19): siRNA sense strand
caucaggccaaauguaaca

SEQ ID NO: 216272 - RNA, 19 nt, Homo sapiens
  misc_RNA (1)...(19): siRNA sense strand
gauucuauccaaauuccaa

SEQ ID NO: 216273 - RNA, 19 nt, Homo sapiens
  misc_RNA (1)...(19): siRNA sense strand
ggcaaguucaacaggauuu

SEQ ID NO: 216274 - RNA, 19 nt, Homo sapiens
  misc_RNA (1)...(19): siRNA sense strand
gaacuggcugcugaauguu

SEQ ID NO: 216275 - RNA, 19 nt, Homo sapiens
  misc_RNA (1)...(19): siRNA sense strand
cugcugaauguuuaugaua

SEQ ID NO: 216276 - RNA, 19 nt, Homo sapiens
  misc_RNA (1)...(19): siRNA sense strand
aagcaucaggccaaaugua

SEQ ID NO: 216277 - RNA, 19 nt, Homo sapiens
  misc_RNA (1)...(19): siRNA sense strand
uggcaucauuucccugugu

SEQ ID NO: 216278 - RNA, 19 nt, Homo sapiens
  misc_RNA (1)...(19): siRNA sense strand
ccaugaaacuccgaagacu

SEQ ID NO: 216279 - RNA, 19 nt, Homo sapiens
  misc_RNA (1)...(19): siRNA sense strand
auaauaagccagagaucga

SEQ ID NO: 216280 - RNA, 19 nt, Homo sapiens
  misc_RNA (1)...(19): siRNA sense strand
cuaauaauaagccagagau

SEQ ID NO: 216281 - RNA, 19 nt, Homo sapiens
  misc_RNA (1)...(19): siRNA sense strand
ugggugaaguugcauccuu

SEQ ID NO: 216282 - RNA, 19 nt, Homo sapiens
  misc_RNA (1)...(19): siRNA sense strand
caucauuucccuguguaaa

SEQ ID NO: 216283 - RNA, 19 nt, Homo sapiens
  misc_RNA (1)...(19): siRNA sense strand
gcguggauaugugucugaa

SEQ ID NO: 216284 - RNA, 19 nt, Homo sapiens
  misc_RNA (1)...(19): siRNA sense strand
gcacuaucccaugguggaa

SEQ ID NO: 216285 - RNA, 19 nt, Homo sapiens
  misc_RNA (1)...(19): siRNA sense strand
gagccugucagcugcaugu

SEQ ID NO: 216286 - RNA, 19 nt, Homo sapiens
  misc_RNA (1)...(19): siRNA sense strand
guacagauaccuuuucaag

SEQ ID NO: 216287 - RNA, 19 nt, Homo sapiens
  misc_RNA (1)...(19): siRNA sense strand
gucccucucugcguggaua

SEQ ID NO: 216288 - RNA, 19 nt, Homo sapiens
  misc_RNA (1)...(19): siRNA sense strand
ggagcugcuuccaauuugc

SEQ ID NO: 216289 - RNA, 19 nt, Homo sapiens
  misc_RNA (1)...(19): siRNA sense strand
uuagcugaccugaauaaug

SEQ ID NO: 216290 - RNA, 19 nt, Homo sapiens
  misc_RNA (1)...(19): siRNA sense strand
guggcaaguucaacaggau

SEQ ID NO: 216291 - RNA, 19 nt, Homo sapiens
  misc_RNA (1)...(19): siRNA sense strand
acaacaauuuggucaacgu

SEQ ID NO: 216292 - RNA, 19 nt, Homo sapiens
  misc_RNA (1)...(19): siRNA sense strand
gacuacaucaggagaagau

SEQ ID NO: 216293 - RNA, 19 nt, Homo sapiens
  misc_RNA (1)...(19): siRNA sense strand
uaauaagccagagaucgaa

SEQ ID NO: 216294 - RNA, 19 nt, Homo sapiens
  misc_RNA (1)...(19): siRNA sense strand
ugucagauucucagcuuau

SEQ ID NO: 216295 - RNA, 19 nt, Homo sapiens
  misc_RNA (1)...(19): siRNA sense strand
ggauauccugcagauuauu

SEQ ID NO: 216296 - RNA, 19 nt, Homo sapiens
  misc_RNA (1)...(19): siRNA sense strand
agcaucaggccaaauguaa

SEQ ID NO: 216297 - RNA, 19 nt, Homo sapiens
  misc_RNA (1)...(19): siRNA sense strand
gcccuuugcuuggaucucu

SEQ ID NO: 216298 - RNA, 19 nt, Homo sapiens
  misc_RNA (1)...(19): siRNA sense strand
gcugaauguuuaugauacg

SEQ ID NO: 216299 - RNA, 19 nt, Homo sapiens
  misc_RNA (1)...(19): siRNA sense strand
agacuuugccaagguacua

SEQ ID NO: 216300 - RNA, 19 nt, Homo sapiens
  misc_RNA (1)...(19): siRNA sense strand
caagcaaguggcaaguuca

SEQ ID NO: 216301 - RNA, 19 nt, Homo sapiens
  misc_RNA (1)...(19): siRNA sense strand
agacaaguacagauaccuu

SEQ ID NO: 216302 - RNA, 19 nt, Homo sapiens
  misc_RNA (1)...(19): siRNA sense strand
gcaucauuucccuguguaa

SEQ ID NO: 216303 - RNA, 19 nt, Homo sapiens
  misc_RNA (1)...(19): siRNA sense strand
cugcaaagaguguccaauc

SEQ ID NO: 216304 - RNA, 19 nt, Homo sapiens
  misc_RNA (1)...(19): siRNA sense strand
cuuauaggacugccaugaa

SEQ ID NO: 216305 - RNA, 19 nt, Homo sapiens
  misc_RNA (1)...(19): siRNA sense strand
caaagaguguccaaucauu

SEQ ID NO: 216306 - RNA, 19 nt, Homo sapiens
  misc_RNA (1)...(19): siRNA sense strand
uagcugaccugaauaaugu

SEQ ID NO: 216307 - RNA, 19 nt, Homo sapiens
  misc_RNA (1)...(19): siRNA sense strand
gcaugauucuauccaaauu

SEQ ID NO: 216308 - RNA, 19 nt, Homo sapiens
  misc_RNA (1)...(19): siRNA sense strand
ugaacuggcugcugaaugu

SEQ ID NO: 216309 - RNA, 19 nt, Homo sapiens
  misc_RNA (1)...(19): siRNA sense strand
gauauccugcagauuauua

SEQ ID NO: 216310 - RNA, 19 nt, Homo sapiens
  misc_RNA (1)...(19): siRNA sense strand
gagaagauguucgagacuu

SEQ ID NO: 216311 - RNA, 19 nt, Homo sapiens
  misc_RNA (1)...(19): siRNA sense strand
gcacuuuaauuaugacauc

SEQ ID NO: 216312 - RNA, 19 nt, Homo sapiens
  misc_RNA (1)...(19): siRNA sense strand
guaaagcacauuuggaaga

SEQ ID NO: 216313 - RNA, 19 nt, Homo sapiens
  misc_RNA (1)...(19): siRNA sense strand
gaauauugcacuccgacua

SEQ ID NO: 216314 - RNA, 19 nt, Homo sapiens
  misc_RNA (1)...(19): siRNA sense strand
uuauaggacugccaugaaa

SEQ ID NO: 216315 - RNA, 19 nt, Homo sapiens
  misc_RNA (1)...(19): siRNA sense strand
gggugaaguugcauccuuu

SEQ ID NO: 216316 - RNA, 19 nt, Homo sapiens
  misc_RNA (1)...(19): siRNA sense strand
gcaagagcacaacaauuug

SEQ ID NO: 216317 - RNA, 19 nt, Homo sapiens
  misc_RNA (1)...(19): siRNA sense strand
gcacaacaauuuggucaac

SEQ ID NO: 216318 - RNA, 19 nt, Homo sapiens
  misc_RNA (1)...(19): siRNA sense strand
agcaagagcacaacaauuu

SEQ ID NO: 216319 - RNA, 19 nt, Homo sapiens
  misc_RNA (1)...(19): siRNA sense strand
agaagauguucgagacuuu

SEQ ID NO: 216320 - RNA, 19 nt, Homo sapiens
  misc_RNA (1)...(19): siRNA sense strand
gagcaagagcacaacaauu

SEQ ID NO: 216321 - RNA, 19 nt, Homo sapiens
  misc_RNA (1)...(19): siRNA sense strand
ucaagcaaguggcaaguuc

SEQ ID NO: 216322 - RNA, 19 nt, Homo sapiens
  misc_RNA (1)...(19): siRNA sense strand
ccacgagacucaaacaacu

SEQ ID NO: 216323 - RNA, 19 nt, Homo sapiens
  misc_RNA (1)...(19): siRNA sense strand
cagcacaaccucaagcaaa

SEQ ID NO: 216324 - RNA, 19 nt, Homo sapiens
  misc_RNA (1)...(19): siRNA sense strand
gcaaagaguguccaaucau

SEQ ID NO: 216325 - RNA, 19 nt, Homo sapiens
  misc_RNA (1)...(19): siRNA sense strand
auggauauccugcagauua

SEQ ID NO: 216326 - RNA, 19 nt, Homo sapiens
  misc_RNA (1)...(19): siRNA sense strand
uguaacaucugcaaagagu

SEQ ID NO: 216327 - RNA, 19 nt, Homo sapiens
  misc_RNA (1)...(19): siRNA sense strand
guccggagcugcuuccaau

SEQ ID NO: 216328 - RNA, 19 nt, Homo sapiens
  misc_RNA (1)...(19): siRNA sense strand
gcaaguggcaaguucaaca

SEQ ID NO: 216329 - RNA, 19 nt, Homo sapiens
  misc_RNA (1)...(19): siRNA sense strand
gcuuccaauuugcuaauaa

SEQ ID NO: 216330 - RNA, 19 nt, Homo sapiens
  misc_RNA (1)...(19): siRNA sense strand
uggaagacaaguacagaua

SEQ ID NO: 216331 - RNA, 19 nt, Homo sapiens
  misc_RNA (1)...(19): siRNA sense strand
ggauccguguccugucuuu

SEQ ID NO: 216332 - RNA, 19 nt, Homo sapiens
  misc_RNA (1)...(19): siRNA sense strand
gucuuuagcugaccugaau

SEQ ID NO: 216333 - RNA, 19 nt, Homo sapiens
  misc_RNA (1)...(19): siRNA sense strand
gacaaguacagauaccuuu

SEQ ID NO: 216334 - RNA, 19 nt, Homo sapiens
  misc_RNA (1)...(19): siRNA sense strand
ccaagcaucaggccaaaug

SEQ ID NO: 216335 - RNA, 19 nt, Homo sapiens
  misc_RNA (1)...(19): siRNA sense strand
ggagcaagagcacaacaau

SEQ ID NO: 216336 - RNA, 19 nt, Homo sapiens
  misc_RNA (1)...(19): siRNA sense strand
guguaaagcacauuuggaa

SEQ ID NO: 216337 - RNA, 19 nt, Homo sapiens
  misc_RNA (1)...(19): siRNA sense strand
caagacaguugggugaagu

SEQ ID NO: 216338 - RNA, 19 nt, Homo sapiens
  misc_RNA (1)...(19): siRNA sense strand
gaagauguucgagacuuug

SEQ ID NO: 216339 - RNA, 19 nt, Homo sapiens
  misc_RNA (1)...(19): siRNA sense strand
gucagauucucagcuuaua

SEQ ID NO: 216340 - RNA, 19 nt, Homo sapiens
  misc_RNA (1)...(19): siRNA sense strand
uaacaucugcaaagagugu

SEQ ID NO: 216341 - RNA, 19 nt, Homo sapiens
  misc_RNA (1)...(19): siRNA sense strand
cggagcugcuuccaauuug

SEQ ID NO: 216342 - RNA, 19 nt, Homo sapiens
  misc_RNA (1)...(19): siRNA sense strand
gaagacaaguacagauacc

SEQ ID NO: 216343 - RNA, 19 nt, Homo sapiens
  misc_RNA (1)...(19): siRNA sense strand
ccauggauauccugcagau

SEQ ID NO: 216344 - RNA, 19 nt, Homo sapiens
  misc_RNA (1)...(19): siRNA sense strand
ggcaucauuucccugugua

SEQ ID NO: 216345 - RNA, 19 nt, Homo sapiens
  misc_RNA (1)...(19): siRNA sense strand
uggauauccugcagauuau

SEQ ID NO: 216346 - RNA, 19 nt, Homo sapiens
  misc_RNA (1)...(19): siRNA sense strand
ggaagacaaguacagauac

SEQ ID NO: 216347 - RNA, 19 nt, Homo sapiens
  misc_RNA (1)...(19): siRNA sense strand
ugcaaagaguguccaauca

SEQ ID NO: 216348 - RNA, 19 nt, Homo sapiens
  misc_RNA (1)...(19): siRNA sense strand
guggauaugugucugaacu

SEQ ID NO: 216349 - RNA, 19 nt, Homo sapiens
  misc_RNA (1)...(19): siRNA sense strand
acuggcugcugaauguuua

SEQ ID NO: 216350 - RNA, 19 nt, Homo sapiens
  misc_RNA (1)...(19): siRNA sense strand
acuaucccaugguggaaua

SEQ ID NO: 216351 - RNA, 19 nt, Homo sapiens
  misc_RNA (1)...(19): siRNA sense strand
ccggagcugcuuccaauuu

SEQ ID NO: 216352 - RNA, 19 nt, Homo sapiens
  misc_RNA (1)...(19): siRNA sense strand
ccaaauuccaagacaguug

SEQ ID NO: 216353 - RNA, 19 nt, Homo sapiens
  misc_RNA (1)...(19): siRNA sense strand
cagaaacugccaagcauca

SEQ ID NO: 216354 - RNA, 19 nt, Homo sapiens
  misc_RNA (1)...(19): siRNA sense strand
uaugacaucugccaaagcu

SEQ ID NO: 216355 - RNA, 19 nt, Homo sapiens
  misc_RNA (1)...(19): siRNA sense strand
aaugucagauucucagcuu

SEQ ID NO: 216356 - RNA, 19 nt, Homo sapiens
  misc_RNA (1)...(19): siRNA sense strand
ucgagacuuugccaaggua

SEQ ID NO: 216357 - RNA, 19 nt, Homo sapiens
  misc_RNA (1)...(19): siRNA sense strand
gcaaaaggccauaaaaugc

SEQ ID NO: 216358 - RNA, 19 nt, Homo sapiens
  misc_RNA (1)...(19): siRNA sense strand
cugcaugauucuauccaaa

SEQ ID NO: 216359 - RNA, 19 nt, Homo sapiens
  misc_RNA (1)...(19): siRNA sense strand
uaaagcacauuuggaagac

SEQ ID NO: 216360 - RNA, 19 nt, Homo sapiens
  misc_RNA (1)...(19): siRNA sense strand
acaggagucuaaagcacuu

SEQ ID NO: 216361 - RNA, 19 nt, Homo sapiens
  misc_RNA (1)...(19): siRNA sense strand
acagauaccuuuucaagca

SEQ ID NO: 216362 - RNA, 19 nt, Homo sapiens
  misc_RNA (1)...(19): siRNA sense strand
aagcacauuuggaagacaa

SEQ ID NO: 216363 - RNA, 19 nt, Homo sapiens
  misc_RNA (1)...(19): siRNA sense strand
gcuaauaauaagccagaga

SEQ ID NO: 216364 - RNA, 19 nt, Homo sapiens
  misc_RNA (1)...(19): siRNA sense strand
caagagcacaacaauuugg

SEQ ID NO: 216365 - RNA, 19 nt, Homo sapiens
  misc_RNA (1)...(19): siRNA sense strand
ccugucagcugcaugugau

SEQ ID NO: 216366 - RNA, 19 nt, Homo sapiens
  misc_RNA (1)...(19): siRNA sense strand
gcugcugaauguuuaugau

SEQ ID NO: 216367 - RNA, 19 nt, Homo sapiens
  misc_RNA (1)...(19): siRNA sense strand
acagagcucuaccagucuu

SEQ ID NO: 216368 - RNA, 19 nt, Homo sapiens
  misc_RNA (1)...(19): siRNA sense strand
acaguugggugaaguugca

SEQ ID NO: 216369 - RNA, 19 nt, Homo sapiens
  misc_RNA (1)...(19): siRNA sense strand
guuugaccacuauuuauga

SEQ ID NO: 216370 - RNA, 19 nt, Homo sapiens
  misc_RNA (1)...(19): siRNA sense strand
gcuuauaggacugccauga

SEQ ID NO: 216371 - RNA, 19 nt, Homo sapiens
  misc_RNA (1)...(19): siRNA sense strand
caucaggccaaauguaaca

SEQ ID NO: 216372 - RNA, 19 nt, Homo sapiens
  misc_RNA (1)...(19): siRNA sense strand
gauucuauccaaauuccaa

SEQ ID NO: 216373 - RNA, 19 nt, Homo sapiens
  misc_RNA (1)...(19): siRNA sense strand
ggcaaguucaacaggauuu

SEQ ID NO: 216374 - RNA, 19 nt, Homo sapiens
  misc_RNA (1)...(19): siRNA sense strand
gaacuggcugcugaauguu

SEQ ID NO: 216375 - RNA, 19 nt, Homo sapiens
  misc_RNA (1)...(19): siRNA sense strand
cugcugaauguuuaugaua

SEQ ID NO: 216376 - RNA, 19 nt, Homo sapiens
  misc_RNA (1)...(19): siRNA sense strand
aagcaucaggccaaaugua

SEQ ID NO: 216377 - RNA, 19 nt, Homo sapiens
  misc_RNA (1)...(19): siRNA sense strand
uggcaucauuucccugugu

SEQ ID NO: 216378 - RNA, 19 nt, Homo sapiens
  misc_RNA (1)...(19): siRNA sense strand
ccaugaaacuccgaagacu

SEQ ID NO: 216379 - RNA, 19 nt, Homo sapiens
  misc_RNA (1)...(19): siRNA sense strand
auaauaagccagagaucga

SEQ ID NO: 216380 - RNA, 19 nt, Homo sapiens
  misc_RNA (1)...(19): siRNA sense strand
cuaauaauaagccagagau

SEQ ID NO: 216381 - RNA, 19 nt, Homo sapiens
  misc_RNA (1)...(19): siRNA sense strand
ugggugaaguugcauccuu

SEQ ID NO: 216382 - RNA, 19 nt, Homo sapiens
  misc_RNA (1)...(19): siRNA sense strand
caucauuucccuguguaaa

SEQ ID NO: 216383 - RNA, 19 nt, Homo sapiens
  misc_RNA (1)...(19): siRNA sense strand
gcguggauaugugucugaa

SEQ ID NO: 216384 - RNA, 19 nt, Homo sapiens
  misc_RNA (1)...(19): siRNA sense strand
gcacuaucccaugguggaa

SEQ ID NO: 216385 - RNA, 19 nt, Homo sapiens
  misc_RNA (1)...(19): siRNA sense strand
gagccugucagcugcaugu

SEQ ID NO: 216386 - RNA, 19 nt, Homo sapiens
  misc_RNA (1)...(19): siRNA sense strand
guacagauaccuuuucaag

SEQ ID NO: 216387 - RNA, 19 nt, Homo sapiens
  misc_RNA (1)...(19): siRNA sense strand
gucccucucugcguggaua

SEQ ID NO: 216388 - RNA, 19 nt, Homo sapiens
  misc_RNA (1)...(19): siRNA sense strand
ggagcugcuuccaauuugc

SEQ ID NO: 216389 - RNA, 19 nt, Homo sapiens
  misc_RNA (1)...(19): siRNA sense strand
uuagcugaccugaauaaug

SEQ ID NO: 216390 - RNA, 19 nt, Homo sapiens
  misc_RNA (1)...(19): siRNA sense strand
guggcaaguucaacaggau

SEQ ID NO: 216391 - RNA, 19 nt, Homo sapiens
  misc_RNA (1)...(19): siRNA sense strand
acaacaauuuggucaacgu

SEQ ID NO: 216392 - RNA, 19 nt, Homo sapiens
  misc_RNA (1)...(19): siRNA sense strand
gacuacaucaggagaagau

SEQ ID NO: 216393 - RNA, 19 nt, Homo sapiens
  misc_RNA (1)...(19): siRNA sense strand
uaauaagccagagaucgaa

SEQ ID NO: 216394 - RNA, 19 nt, Homo sapiens
  misc_RNA (1)...(19): siRNA sense strand
ugucagauucucagcuuau

SEQ ID NO: 216395 - RNA, 19 nt, Homo sapiens
  misc_RNA (1)...(19): siRNA sense strand
ggauauccugcagauuauu

SEQ ID NO: 216396 - RNA, 19 nt, Homo sapiens
  misc_RNA (1)...(19): siRNA sense strand
agcaucaggccaaauguaa

SEQ ID NO: 216397 - RNA, 19 nt, Homo sapiens
  misc_RNA (1)...(19): siRNA sense strand
gcccuuugcuuggaucucu

SEQ ID NO: 216398 - RNA, 19 nt, Homo sapiens
  misc_RNA (1)...(19): siRNA sense strand
gcugaauguuuaugauacg

SEQ ID NO: 216399 - RNA, 19 nt, Homo sapiens
  misc_RNA (1)...(19): siRNA sense strand
agacuuugccaagguacua

SEQ ID NO: 216400 - RNA, 19 nt, Homo sapiens
  misc_RNA (1)...(19): siRNA sense strand
caagcaaguggcaaguuca

SEQ ID NO: 216401 - RNA, 19 nt, Homo sapiens
  misc_RNA (1)...(19): siRNA sense strand
agacaaguacagauaccuu

SEQ ID NO: 216402 - RNA, 19 nt, Homo sapiens
  misc_RNA (1)...(19): siRNA sense strand
gcaucauuucccuguguaa

SEQ ID NO: 216403 - RNA, 19 nt, Homo sapiens
  misc_RNA (1)...(19): siRNA sense strand
cugcaaagaguguccaauc

SEQ ID NO: 216404 - RNA, 19 nt, Homo sapiens
  misc_RNA (1)...(19): siRNA sense strand
cuuauaggacugccaugaa

SEQ ID NO: 216405 - RNA, 19 nt, Homo sapiens
  misc_RNA (1)...(19): siRNA sense strand
caaagaguguccaaucauu

SEQ ID NO: 216406 - RNA, 19 nt, Homo sapiens
  misc_RNA (1)...(19): siRNA sense strand
uagcugaccugaauaaugu

SEQ ID NO: 216407 - RNA, 19 nt, Homo sapiens
  misc_RNA (1)...(19): siRNA sense strand
gcaugauucuauccaaauu

SEQ ID NO: 216408 - RNA, 19 nt, Homo sapiens
  misc_RNA (1)...(19): siRNA sense strand
ugaacuggcugcugaaugu

SEQ ID NO: 216409 - RNA, 19 nt, Homo sapiens
  misc_RNA (1)...(19): siRNA sense strand
gauauccugcagauuauua

SEQ ID NO: 216410 - RNA, 19 nt, Homo sapiens
  misc_RNA (1)...(19): siRNA sense strand
gagaagauguucgagacuu

SEQ ID NO: 216411 - RNA, 19 nt, Homo sapiens
  misc_RNA (1)...(19): siRNA sense strand
gcacuuuaauuaugacauc

SEQ ID NO: 216412 - RNA, 19 nt, Homo sapiens
  misc_RNA (1)...(19): siRNA sense strand
guaaagcacauuuggaaga

SEQ ID NO: 216413 - RNA, 19 nt, Homo sapiens
  misc_RNA (1)...(19): siRNA sense strand
gaauauugcacuccgacua

SEQ ID NO: 216414 - RNA, 19 nt, Homo sapiens
  misc_RNA (1)...(19): siRNA sense strand
uuauaggacugccaugaaa

SEQ ID NO: 216415 - RNA, 19 nt, Homo sapiens
  misc_RNA (1)...(19): siRNA sense strand
gggugaaguugcauccuuu

SEQ ID NO: 216416 - RNA, 19 nt, Homo sapiens
  misc_RNA (1)...(19): siRNA sense strand
gcaagagcacaacaauuug

SEQ ID NO: 216417 - RNA, 19 nt, Homo sapiens
  misc_RNA (1)...(19): siRNA sense strand
gcacaacaauuuggucaac

SEQ ID NO: 216418 - RNA, 19 nt, Homo sapiens
  misc_RNA (1)...(19): siRNA sense strand
agcaagagcacaacaauuu

SEQ ID NO: 216419 - RNA, 19 nt, Homo sapiens
  misc_RNA (1)...(19): siRNA sense strand
agaagauguucgagacuuu

SEQ ID NO: 216420 - RNA, 19 nt, Homo sapiens
  misc_RNA (1)...(19): siRNA sense strand
gagcaagagcacaacaauu

SEQ ID NO: 216421 - RNA, 19 nt, Homo sapiens
  misc_RNA (1)...(19): siRNA sense strand
ucaagcaaguggcaaguuc

SEQ ID NO: 216422 - RNA, 19 nt, Homo sapiens
  misc_RNA (1)...(19): siRNA sense strand
ccacgagacucaaacaacu

SEQ ID NO: 216423 - RNA, 19 nt, Homo sapiens
  misc_RNA (1)...(19): siRNA sense strand
cagcacaaccucaagcaaa

SEQ ID NO: 216424 - RNA, 19 nt, Homo sapiens
  misc_RNA (1)...(19): siRNA sense strand
gcaaagaguguccaaucau

SEQ ID NO: 216425 - RNA, 19 nt, Homo sapiens
  misc_RNA (1)...(19): siRNA sense strand
auggauauccugcagauua

SEQ ID NO: 216426 - RNA, 19 nt, Homo sapiens
  misc_RNA (1)...(19): siRNA sense strand
uguaacaucugcaaagagu

SEQ ID NO: 216427 - RNA, 19 nt, Homo sapiens
  misc_RNA (1)...(19): siRNA sense strand
guccggagcugcuuccaau

SEQ ID NO: 216428 - RNA, 19 nt, Homo sapiens
  misc_RNA (1)...(19): siRNA sense strand
gcaaguggcaaguucaaca

SEQ ID NO: 216429 - RNA, 19 nt, Homo sapiens
  misc_RNA (1)...(19): siRNA sense strand
gcuuccaauuugcuaauaa

SEQ ID NO: 216430 - RNA, 19 nt, Homo sapiens
  misc_RNA (1)...(19): siRNA sense strand
uggaagacaaguacagaua

SEQ ID NO: 216431 - RNA, 19 nt, Homo sapiens
  misc_RNA (1)...(19): siRNA sense strand
ggauccguguccugucuuu

SEQ ID NO: 216432 - RNA, 19 nt, Homo sapiens
  misc_RNA (1)...(19): siRNA sense strand
gucuuuagcugaccugaau

SEQ ID NO: 216433 - RNA, 19 nt, Homo sapiens
  misc_RNA (1)...(19): siRNA sense strand
gacaaguacagauaccuuu

SEQ ID NO: 216434 - RNA, 19 nt, Homo sapiens
  misc_RNA (1)...(19): siRNA sense strand
ccaagcaucaggccaaaug

SEQ ID NO: 216435 - RNA, 19 nt, Homo sapiens
  misc_RNA (1)...(19): siRNA sense strand
ggagcaagagcacaacaau

SEQ ID NO: 216436 - RNA, 19 nt, Homo sapiens
  misc_RNA (1)...(19): siRNA sense strand
guguaaagcacauuuggaa

SEQ ID NO: 216437 - RNA, 19 nt, Homo sapiens
  misc_RNA (1)...(19): siRNA sense strand
caagacaguugggugaagu

SEQ ID NO: 216438 - RNA, 19 nt, Homo sapiens
  misc_RNA (1)...(19): siRNA sense strand
gaagauguucgagacuuug

SEQ ID NO: 216439 - RNA, 19 nt, Homo sapiens
  misc_RNA (1)...(19): siRNA sense strand
gucagauucucagcuuaua

SEQ ID NO: 216440 - RNA, 19 nt, Homo sapiens
  misc_RNA (1)...(19): siRNA sense strand
uaacaucugcaaagagugu

SEQ ID NO: 216441 - RNA, 19 nt, Homo sapiens
  misc_RNA (1)...(19): siRNA sense strand
cggagcugcuuccaauuug

SEQ ID NO: 216442 - RNA, 19 nt, Homo sapiens
  misc_RNA (1)...(19): siRNA sense strand
gaagacaaguacagauacc

SEQ ID NO: 216443 - RNA, 19 nt, Homo sapiens
  misc_RNA (1)...(19): siRNA sense strand
ccauggauauccugcagau

SEQ ID NO: 216444 - RNA, 19 nt, Homo sapiens
  misc_RNA (1)...(19): siRNA sense strand
ggcaucauuucccugugua

SEQ ID NO: 216445 - RNA, 19 nt, Homo sapiens
  misc_RNA (1)...(19): siRNA sense strand
uggauauccugcagauuau

SEQ ID NO: 216446 - RNA, 19 nt, Homo sapiens
  misc_RNA (1)...(19): siRNA sense strand
ggaagacaaguacagauac

SEQ ID NO: 216447 - RNA, 19 nt, Homo sapiens
  misc_RNA (1)...(19): siRNA sense strand
ugcaaagaguguccaauca

SEQ ID NO: 216448 - RNA, 19 nt, Homo sapiens
  misc_RNA (1)...(19): siRNA sense strand
guggauaugugucugaacu

SEQ ID NO: 216449 - RNA, 19 nt, Homo sapiens
  misc_RNA (1)...(19): siRNA sense strand
acuggcugcugaauguuua

SEQ ID NO: 216450 - RNA, 19 nt, Homo sapiens
  misc_RNA (1)...(19): siRNA sense strand
acuaucccaugguggaaua

SEQ ID NO: 216451 - RNA, 19 nt, Homo sapiens
  misc_RNA (1)...(19): siRNA sense strand
ccggagcugcuuccaauuu

SEQ ID NO: 216452 - RNA, 19 nt, Homo sapiens
  misc_RNA (1)...(19): siRNA sense strand
ccaaauuccaagacaguug

SEQ ID NO: 216453 - RNA, 19 nt, Homo sapiens
  misc_RNA (1)...(19): siRNA sense strand
cagaaacugccaagcauca

SEQ ID NO: 216454 - RNA, 19 nt, Homo sapiens
  misc_RNA (1)...(19): siRNA sense strand
uaugacaucugccaaagcu

SEQ ID NO: 216455 - RNA, 19 nt, Homo sapiens
  misc_RNA (1)...(19): siRNA sense strand
aaugucagauucucagcuu

SEQ ID NO: 216456 - RNA, 19 nt, Homo sapiens
  misc_RNA (1)...(19): siRNA sense strand
ucgagacuuugccaaggua

SEQ ID NO: 216457 - RNA, 19 nt, Homo sapiens
  misc_RNA (1)...(19): siRNA sense strand
gcaaaaggccauaaaaugc

SEQ ID NO: 216458 - RNA, 19 nt, Homo sapiens
  misc_RNA (1)...(19): siRNA sense strand
cugcaugauucuauccaaa

SEQ ID NO: 216459 - RNA, 19 nt, Homo sapiens
  misc_RNA (1)...(19): siRNA sense strand
uaaagcacauuuggaagac

SEQ ID NO: 216460 - RNA, 19 nt, Homo sapiens
  misc_RNA (1)...(19): siRNA sense strand
acaggagucuaaagcacuu

SEQ ID NO: 216461 - RNA, 19 nt, Homo sapiens
  misc_RNA (1)...(19): siRNA sense strand
acagauaccuuuucaagca

SEQ ID NO: 216462 - RNA, 19 nt, Homo sapiens
  misc_RNA (1)...(19): siRNA sense strand
aagcacauuuggaagacaa

SEQ ID NO: 216463 - RNA, 19 nt, Homo sapiens
  misc_RNA (1)...(19): siRNA sense strand
gcuaauaauaagccagaga

SEQ ID NO: 216464 - RNA, 19 nt, Homo sapiens
  misc_RNA (1)...(19): siRNA sense strand
caagagcacaacaauuugg

SEQ ID NO: 216465 - RNA, 19 nt, Homo sapiens
  misc_RNA (1)...(19): siRNA sense strand
ccugucagcugcaugugau

SEQ ID NO: 216466 - RNA, 19 nt, Homo sapiens
  misc_RNA (1)...(19): siRNA sense strand
gcugcugaauguuuaugau

SEQ ID NO: 216467 - RNA, 19 nt, Homo sapiens
  misc_RNA (1)...(19): siRNA sense strand
acagagcucuaccagucuu

SEQ ID NO: 216468 - RNA, 19 nt, Homo sapiens
  misc_RNA (1)...(19): siRNA sense strand
acaguugggugaaguugca

SEQ ID NO: 216469 - RNA, 19 nt, Homo sapiens
  misc_RNA (1)...(19): siRNA sense strand
guuugaccacuauuuauga

SEQ ID NO: 216470 - RNA, 19 nt, Homo sapiens
  misc_RNA (1)...(19): siRNA sense strand
gcuuauaggacugccauga

SEQ ID NO: 216471 - RNA, 19 nt, Homo sapiens
  misc_RNA (1)...(19): siRNA sense strand
caucaggccaaauguaaca

SEQ ID NO: 216472 - RNA, 19 nt, Homo sapiens
  misc_RNA (1)...(19): siRNA sense strand
gauucuauccaaauuccaa

SEQ ID NO: 216473 - RNA, 19 nt, Homo sapiens
  misc_RNA (1)...(19): siRNA sense strand
ggcaaguucaacaggauuu

SEQ ID NO: 216474 - RNA, 19 nt, Homo sapiens
  misc_RNA (1)...(19): siRNA sense strand
gaacuggcugcugaauguu

SEQ ID NO: 216475 - RNA, 19 nt, Homo sapiens
  misc_RNA (1)...(19): siRNA sense strand
cugcugaauguuuaugaua

SEQ ID NO: 216476 - RNA, 19 nt, Homo sapiens
  misc_RNA (1)...(19): siRNA sense strand
aagcaucaggccaaaugua

SEQ ID NO: 216477 - RNA, 19 nt, Homo sapiens
  misc_RNA (1)...(19): siRNA sense strand
uggcaucauuucccugugu

SEQ ID NO: 216478 - RNA, 19 nt, Homo sapiens
  misc_RNA (1)...(19): siRNA sense strand
ccaugaaacuccgaagacu

SEQ ID NO: 216479 - RNA, 19 nt, Homo sapiens
  misc_RNA (1)...(19): siRNA sense strand
auaauaagccagagaucga

SEQ ID NO: 216480 - RNA, 19 nt, Homo sapiens
  misc_RNA (1)...(19): siRNA sense strand
cuaauaauaagccagagau

SEQ ID NO: 216481 - RNA, 19 nt, Homo sapiens
  misc_RNA (1)...(19): siRNA sense strand
ugggugaaguugcauccuu

SEQ ID NO: 216482 - RNA, 19 nt, Homo sapiens
  misc_RNA (1)...(19): siRNA sense strand
caucauuucccuguguaaa

SEQ ID NO: 216483 - RNA, 19 nt, Homo sapiens
  misc_RNA (1)...(19): siRNA sense strand
gcguggauaugugucugaa

SEQ ID NO: 216484 - RNA, 19 nt, Homo sapiens
  misc_RNA (1)...(19): siRNA sense strand
gcacuaucccaugguggaa

SEQ ID NO: 216485 - RNA, 19 nt, Homo sapiens
  misc_RNA (1)...(19): siRNA sense strand
gagccugucagcugcaugu

SEQ ID NO: 216486 - RNA, 19 nt, Homo sapiens
  misc_RNA (1)...(19): siRNA sense strand
guacagauaccuuuucaag

SEQ ID NO: 216487 - RNA, 19 nt, Homo sapiens
  misc_RNA (1)...(19): siRNA sense strand
gucccucucugcguggaua

SEQ ID NO: 216488 - RNA, 19 nt, Homo sapiens
  misc_RNA (1)...(19): siRNA sense strand
ggagcugcuuccaauuugc

SEQ ID NO: 216489 - RNA, 19 nt, Homo sapiens
  misc_RNA (1)...(19): siRNA sense strand
uuagcugaccugaauaaug

SEQ ID NO: 216490 - RNA, 19 nt, Homo sapiens
  misc_RNA (1)...(19): siRNA sense strand
guggcaaguucaacaggau

SEQ ID NO: 216491 - RNA, 19 nt, Homo sapiens
  misc_RNA (1)...(19): siRNA sense strand
acaacaauuuggucaacgu

SEQ ID NO: 216492 - RNA, 19 nt, Homo sapiens
  misc_RNA (1)...(19): siRNA sense strand
gacuacaucaggagaagau

SEQ ID NO: 216493 - RNA, 19 nt, Homo sapiens
  misc_RNA (1)...(19): siRNA sense strand
uaauaagccagagaucgaa

SEQ ID NO: 216494 - RNA, 19 nt, Homo sapiens
  misc_RNA (1)...(19): siRNA sense strand
ugucagauucucagcuuau

SEQ ID NO: 216495 - RNA, 19 nt, Homo sapiens
  misc_RNA (1)...(19): siRNA sense strand
ggauauccugcagauuauu

SEQ ID NO: 216496 - RNA, 19 nt, Homo sapiens
  misc_RNA (1)...(19): siRNA sense strand
agcaucaggccaaauguaa

SEQ ID NO: 216497 - RNA, 19 nt, Homo sapiens
  misc_RNA (1)...(19): siRNA sense strand
gcccuuugcuuggaucucu

SEQ ID NO: 216498 - RNA, 19 nt, Homo sapiens
  misc_RNA (1)...(19): siRNA sense strand
gcugaauguuuaugauacg

SEQ ID NO: 216499 - RNA, 19 nt, Homo sapiens
  misc_RNA (1)...(19): siRNA sense strand
agacuuugccaagguacua

SEQ ID NO: 216500 - RNA, 19 nt, Homo sapiens
  misc_RNA (1)...(19): siRNA sense strand
caagcaaguggcaaguuca

SEQ ID NO: 216501 - RNA, 19 nt, Homo sapiens
  misc_RNA (1)...(19): siRNA sense strand
agacaaguacagauaccuu

SEQ ID NO: 216502 - RNA, 19 nt, Homo sapiens
  misc_RNA (1)...(19): siRNA sense strand
gcaucauuucccuguguaa

SEQ ID NO: 216503 - RNA, 19 nt, Homo sapiens
  misc_RNA (1)...(19): siRNA sense strand
cugcaaagaguguccaauc

SEQ ID NO: 216504 - RNA, 19 nt, Homo sapiens
  misc_RNA (1)...(19): siRNA sense strand
cuuauaggacugccaugaa

SEQ ID NO: 216505 - RNA, 19 nt, Homo sapiens
  misc_RNA (1)...(19): siRNA sense strand
caaagaguguccaaucauu

SEQ ID NO: 216506 - RNA, 19 nt, Homo sapiens
  misc_RNA (1)...(19): siRNA sense strand
uagcugaccugaauaaugu

SEQ ID NO: 216507 - RNA, 19 nt, Homo sapiens
  misc_RNA (1)...(19): siRNA sense strand
gcaugauucuauccaaauu

SEQ ID NO: 216508 - RNA, 19 nt, Homo sapiens
  misc_RNA (1)...(19): siRNA sense strand
ugaacuggcugcugaaugu

SEQ ID NO: 216509 - RNA, 19 nt, Homo sapiens
  misc_RNA (1)...(19): siRNA sense strand
gauauccugcagauuauua

SEQ ID NO: 216510 - RNA, 19 nt, Homo sapiens
  misc_RNA (1)...(19): siRNA sense strand
gagaagauguucgagacuu

SEQ ID NO: 216511 - RNA, 19 nt, Homo sapiens
  misc_RNA (1)...(19): siRNA sense strand
gcacuuuaauuaugacauc

SEQ ID NO: 216512 - RNA, 19 nt, Homo sapiens
  misc_RNA (1)...(19): siRNA sense strand
guaaagcacauuuggaaga

SEQ ID NO: 216513 - RNA, 19 nt, Homo sapiens
  misc_RNA (1)...(19): siRNA sense strand
gaauauugcacuccgacua

SEQ ID NO: 216514 - RNA, 19 nt, Homo sapiens
  misc_RNA (1)...(19): siRNA sense strand
uuauaggacugccaugaaa

SEQ ID NO: 216515 - RNA, 19 nt, Homo sapiens
  misc_RNA (1)...(19): siRNA sense strand
gggugaaguugcauccuuu

SEQ ID NO: 216516 - RNA, 19 nt, Homo sapiens
  misc_RNA (1)...(19): siRNA sense strand
gcaagagcacaacaauuug

SEQ ID NO: 216517 - RNA, 19 nt, Homo sapiens
  misc_RNA (1)...(19): siRNA sense strand
gcacaacaauuuggucaac

SEQ ID NO: 216518 - RNA, 19 nt, Homo sapiens
  misc_RNA (1)...(19): siRNA sense strand
agcaagagcacaacaauuu

SEQ ID NO: 216519 - RNA, 19 nt, Homo sapiens
  misc_RNA (1)...(19): siRNA sense strand
agaagauguucgagacuuu

SEQ ID NO: 216520 - RNA, 19 nt, Homo sapiens
  misc_RNA (1)...(19): siRNA sense strand
gagcaagagcacaacaauu

SEQ ID NO: 216521 - RNA, 19 nt, Homo sapiens
  misc_RNA (1)...(19): siRNA sense strand
ucaagcaaguggcaaguuc

SEQ ID NO: 216522 - RNA, 19 nt, Homo sapiens
  misc_RNA (1)...(19): siRNA sense strand
ccacgagacucaaacaacu

SEQ ID NO: 216523 - RNA, 19 nt, Homo sapiens
  misc_RNA (1)...(19): siRNA sense strand
cagcacaaccucaagcaaa

SEQ ID NO: 216524 - RNA, 19 nt, Homo sapiens
  misc_RNA (1)...(19): siRNA sense strand
gcaaagaguguccaaucau

SEQ ID NO: 216525 - RNA, 19 nt, Homo sapiens
  misc_RNA (1)...(19): siRNA sense strand
auggauauccugcagauua

SEQ ID NO: 216526 - RNA, 19 nt, Homo sapiens
  misc_RNA (1)...(19): siRNA sense strand
uguaacaucugcaaagagu

SEQ ID NO: 216527 - RNA, 19 nt, Homo sapiens
  misc_RNA (1)...(19): siRNA sense strand
guccggagcugcuuccaau

SEQ ID NO: 216528 - RNA, 19 nt, Homo sapiens
  misc_RNA (1)...(19): siRNA sense strand
gcaaguggcaaguucaaca

SEQ ID NO: 216529 - RNA, 19 nt, Homo sapiens
  misc_RNA (1)...(19): siRNA sense strand
gcuuccaauuugcuaauaa

SEQ ID NO: 216530 - RNA, 19 nt, Homo sapiens
  misc_RNA (1)...(19): siRNA sense strand
uggaagacaaguacagaua

SEQ ID NO: 216531 - RNA, 19 nt, Homo sapiens
  misc_RNA (1)...(19): siRNA sense strand
ggauccguguccugucuuu

SEQ ID NO: 216532 - RNA, 19 nt, Homo sapiens
  misc_RNA (1)...(19): siRNA sense strand
gucuuuagcugaccugaau

SEQ ID NO: 216533 - RNA, 19 nt, Homo sapiens
  misc_RNA (1)...(19): siRNA sense strand
gacaaguacagauaccuuu

SEQ ID NO: 216534 - RNA, 19 nt, Homo sapiens
  misc_RNA (1)...(19): siRNA sense strand
ccaagcaucaggccaaaug

SEQ ID NO: 216535 - RNA, 19 nt, Homo sapiens
  misc_RNA (1)...(19): siRNA sense strand
ggagcaagagcacaacaau

SEQ ID NO: 216536 - RNA, 19 nt, Homo sapiens
  misc_RNA (1)...(19): siRNA sense strand
guguaaagcacauuuggaa

SEQ ID NO: 216537 - RNA, 19 nt, Homo sapiens
  misc_RNA (1)...(19): siRNA sense strand
caagacaguugggugaagu

SEQ ID NO: 216538 - RNA, 19 nt, Homo sapiens
  misc_RNA (1)...(19): siRNA sense strand
gaagauguucgagacuuug

SEQ ID NO: 216539 - RNA, 19 nt, Homo sapiens
  misc_RNA (1)...(19): siRNA sense strand
gucagauucucagcuuaua

SEQ ID NO: 216540 - RNA, 19 nt, Homo sapiens
  misc_RNA (1)...(19): siRNA sense strand
uaacaucugcaaagagugu

SEQ ID NO: 216541 - RNA, 19 nt, Homo sapiens
  misc_RNA (1)...(19): siRNA sense strand
cggagcugcuuccaauuug

SEQ ID NO: 216542 - RNA, 19 nt, Homo sapiens
  misc_RNA (1)...(19): siRNA sense strand
gaagacaaguacagauacc

SEQ ID NO: 216543 - RNA, 19 nt, Homo sapiens
  misc_RNA (1)...(19): siRNA sense strand
ccauggauauccugcagau

SEQ ID NO: 216544 - RNA, 19 nt, Homo sapiens
  misc_RNA (1)...(19): siRNA sense strand
ggcaucauuucccugugua

SEQ ID NO: 216545 - RNA, 19 nt, Homo sapiens
  misc_RNA (1)...(19): siRNA sense strand
uggauauccugcagauuau

SEQ ID NO: 216546 - RNA, 19 nt, Homo sapiens
  misc_RNA (1)...(19): siRNA sense strand
ggaagacaaguacagauac

SEQ ID NO: 216547 - RNA, 19 nt, Homo sapiens
  misc_RNA (1)...(19): siRNA sense strand
ugcaaagaguguccaauca

SEQ ID NO: 216548 - RNA, 19 nt, Homo sapiens
  misc_RNA (1)...(19): siRNA sense strand
guggauaugugucugaacu

SEQ ID NO: 216549 - RNA, 19 nt, Homo sapiens
  misc_RNA (1)...(19): siRNA sense strand
acuggcugcugaauguuua

SEQ ID NO: 216550 - RNA, 19 nt, Homo sapiens
  misc_RNA (1)...(19): siRNA sense strand
acuaucccaugguggaaua

SEQ ID NO: 216551 - RNA, 19 nt, Homo sapiens
  misc_RNA (1)...(19): siRNA sense strand
ccggagcugcuuccaauuu

SEQ ID NO: 216552 - RNA, 19 nt, Homo sapiens
  misc_RNA (1)...(19): siRNA sense strand
ccaaauuccaagacaguug

SEQ ID NO: 216553 - RNA, 19 nt, Homo sapiens
  misc_RNA (1)...(19): siRNA sense strand
cagaaacugccaagcauca

SEQ ID NO: 216554 - RNA, 19 nt, Homo sapiens
  misc_RNA (1)...(19): siRNA sense strand
uaugacaucugccaaagcu

SEQ ID NO: 216555 - RNA, 19 nt, Homo sapiens
  misc_RNA (1)...(19): siRNA sense strand
aaugucagauucucagcuu

SEQ ID NO: 216556 - RNA, 19 nt, Homo sapiens
  misc_RNA (1)...(19): siRNA sense strand
ucgagacuuugccaaggua

SEQ ID NO: 216557 - RNA, 19 nt, Homo sapiens
  misc_RNA (1)...(19): siRNA sense strand
gcaaaaggccauaaaaugc

SEQ ID NO: 216558 - RNA, 19 nt, Homo sapiens
  misc_RNA (1)...(19): siRNA sense strand
cugcaugauucuauccaaa

SEQ ID NO: 216559 - RNA, 19 nt, Homo sapiens
  misc_RNA (1)...(19): siRNA sense strand
uaaagcacauuuggaagac

SEQ ID NO: 216560 - RNA, 19 nt, Homo sapiens
  misc_RNA (1)...(19): siRNA sense strand
acaggagucuaaagcacuu

SEQ ID NO: 216561 - RNA, 19 nt, Homo sapiens
  misc_RNA (1)...(19): siRNA sense strand
acagauaccuuuucaagca

SEQ ID NO: 216562 - RNA, 19 nt, Homo sapiens
  misc_RNA (1)...(19): siRNA sense strand
aagcacauuuggaagacaa

SEQ ID NO: 216563 - RNA, 19 nt, Homo sapiens
  misc_RNA (1)...(19): siRNA sense strand
gcuaauaauaagccagaga

SEQ ID NO: 216564 - RNA, 19 nt, Homo sapiens
  misc_RNA (1)...(19): siRNA sense strand
caagagcacaacaauuugg

SEQ ID NO: 216565 - RNA, 19 nt, Homo sapiens
  misc_RNA (1)...(19): siRNA sense strand
ccugucagcugcaugugau

SEQ ID NO: 216566 - RNA, 19 nt, Homo sapiens
  misc_RNA (1)...(19): siRNA sense strand
gcugcugaauguuuaugau

SEQ ID NO: 216567 - RNA, 19 nt, Homo sapiens
  misc_RNA (1)...(19): siRNA sense strand
acagagcucuaccagucuu

SEQ ID NO: 216568 - RNA, 19 nt, Homo sapiens
  misc_RNA (1)...(19): siRNA sense strand
acaguugggugaaguugca

SEQ ID NO: 216569 - RNA, 19 nt, Homo sapiens
  misc_RNA (1)...(19): siRNA sense strand
guuugaccacuauuuauga

SEQ ID NO: 216570 - RNA, 19 nt, Homo sapiens
  misc_RNA (1)...(19): siRNA sense strand
gcuuauaggacugccauga

SEQ ID NO: 216571 - RNA, 19 nt, Homo sapiens
  misc_RNA (1)...(19): siRNA sense strand
caucaggccaaauguaaca

SEQ ID NO: 216572 - RNA, 19 nt, Homo sapiens
  misc_RNA (1)...(19): siRNA sense strand
gauucuauccaaauuccaa

SEQ ID NO: 216573 - RNA, 19 nt, Homo sapiens
  misc_RNA (1)...(19): siRNA sense strand
ggcaaguucaacaggauuu

SEQ ID NO: 216574 - RNA, 19 nt, Homo sapiens
  misc_RNA (1)...(19): siRNA sense strand
gaacuggcugcugaauguu

SEQ ID NO: 216575 - RNA, 19 nt, Homo sapiens
  misc_RNA (1)...(19): siRNA sense strand
cugcugaauguuuaugaua

SEQ ID NO: 216576 - RNA, 19 nt, Homo sapiens
  misc_RNA (1)...(19): siRNA sense strand
aagcaucaggccaaaugua

SEQ ID NO: 216577 - RNA, 19 nt, Homo sapiens
  misc_RNA (1)...(19): siRNA sense strand
uggcaucauuucccugugu

SEQ ID NO: 216578 - RNA, 19 nt, Homo sapiens
  misc_RNA (1)...(19): siRNA sense strand
ccaugaaacuccgaagacu

SEQ ID NO: 216579 - RNA, 19 nt, Homo sapiens
  misc_RNA (1)...(19): siRNA sense strand
auaauaagccagagaucga

SEQ ID NO: 216580 - RNA, 19 nt, Homo sapiens
  misc_RNA (1)...(19): siRNA sense strand
cuaauaauaagccagagau

SEQ ID NO: 216581 - RNA, 19 nt, Homo sapiens
  misc_RNA (1)...(19): siRNA sense strand
ugggugaaguugcauccuu

SEQ ID NO: 216582 - RNA, 19 nt, Homo sapiens
  misc_RNA (1)...(19): siRNA sense strand
caucauuucccuguguaaa

SEQ ID NO: 216583 - RNA, 19 nt, Homo sapiens
  misc_RNA (1)...(19): siRNA sense strand
gcguggauaugugucugaa

SEQ ID NO: 216584 - RNA, 19 nt, Homo sapiens
  misc_RNA (1)...(19): siRNA sense strand
gcacuaucccaugguggaa

SEQ ID NO: 216585 - RNA, 19 nt, Homo sapiens
  misc_RNA (1)...(19): siRNA sense strand
gagccugucagcugcaugu

SEQ ID NO: 216586 - RNA, 19 nt, Homo sapiens
  misc_RNA (1)...(19): siRNA sense strand
guacagauaccuuuucaag

SEQ ID NO: 216587 - RNA, 19 nt, Homo sapiens
  misc_RNA (1)...(19): siRNA sense strand
gucccucucugcguggaua

SEQ ID NO: 216588 - RNA, 19 nt, Homo sapiens
  misc_RNA (1)...(19): siRNA sense strand
ggagcugcuuccaauuugc

SEQ ID NO: 216589 - RNA, 19 nt, Homo sapiens
  misc_RNA (1)...(19): siRNA sense strand
uuagcugaccugaauaaug

SEQ ID NO: 216590 - RNA, 19 nt, Homo sapiens
  misc_RNA (1)...(19): siRNA sense strand
guggcaaguucaacaggau

SEQ ID NO: 216591 - RNA, 19 nt, Homo sapiens
  misc_RNA (1)...(19): siRNA sense strand
acaacaauuuggucaacgu

SEQ ID NO: 216592 - RNA, 19 nt, Homo sapiens
  misc_RNA (1)...(19): siRNA sense strand
gacuacaucaggagaagau

SEQ ID NO: 216593 - RNA, 19 nt, Homo sapiens
  misc_RNA (1)...(19): siRNA sense strand
uaauaagccagagaucgaa

SEQ ID NO: 216594 - RNA, 19 nt, Homo sapiens
  misc_RNA (1)...(19): siRNA sense strand
ugucagauucucagcuuau

SEQ ID NO: 216595 - RNA, 19 nt, Homo sapiens
  misc_RNA (1)...(19): siRNA sense strand
ggauauccugcagauuauu

SEQ ID NO: 216596 - RNA, 19 nt, Homo sapiens
  misc_RNA (1)...(19): siRNA sense strand
agcaucaggccaaauguaa

SEQ ID NO: 216597 - RNA, 19 nt, Homo sapiens
  misc_RNA (1)...(19): siRNA sense strand
gcccuuugcuuggaucucu

SEQ ID NO: 216598 - RNA, 19 nt, Homo sapiens
  misc_RNA (1)...(19): siRNA sense strand
gcugaauguuuaugauacg

SEQ ID NO: 216599 - RNA, 19 nt, Homo sapiens
  misc_RNA (1)...(19): siRNA sense strand
agacuuugccaagguacua

SEQ ID NO: 216600 - RNA, 19 nt, Homo sapiens
  misc_RNA (1)...(19): siRNA sense strand
caagcaaguggcaaguuca

SEQ ID NO: 216601 - RNA, 19 nt, Homo sapiens
  misc_RNA (1)...(19): siRNA sense strand
agacaaguacagauaccuu

SEQ ID NO: 216602 - RNA, 19 nt, Homo sapiens
  misc_RNA (1)...(19): siRNA sense strand
gcaucauuucccuguguaa

SEQ ID NO: 216603 - RNA, 19 nt, Homo sapiens
  misc_RNA (1)...(19): siRNA sense strand
cugcaaagaguguccaauc

SEQ ID NO: 216604 - RNA, 19 nt, Homo sapiens
  misc_RNA (1)...(19): siRNA sense strand
cuuauaggacugccaugaa

SEQ ID NO: 216605 - RNA, 19 nt, Homo sapiens
  misc_RNA (1)...(19): siRNA sense strand
caaagaguguccaaucauu

SEQ ID NO: 216606 - RNA, 19 nt, Homo sapiens
  misc_RNA (1)...(19): siRNA sense strand
uagcugaccugaauaaugu

SEQ ID NO: 216607 - RNA, 19 nt, Homo sapiens
  misc_RNA (1)...(19): siRNA sense strand
gcaugauucuauccaaauu

SEQ ID NO: 216608 - RNA, 19 nt, Homo sapiens
  misc_RNA (1)...(19): siRNA sense strand
ugaacuggcugcugaaugu

SEQ ID NO: 216609 - RNA, 19 nt, Homo sapiens
  misc_RNA (1)...(19): siRNA sense strand
gauauccugcagauuauua

SEQ ID NO: 216610 - RNA, 19 nt, Homo sapiens
  misc_RNA (1)...(19): siRNA sense strand
gagaagauguucgagacuu

SEQ ID NO: 216611 - RNA, 19 nt, Homo sapiens
  misc_RNA (1)...(19): siRNA sense strand
gcacuuuaauuaugacauc

SEQ ID NO: 216612 - RNA, 19 nt, Homo sapiens
  misc_RNA (1)...(19): siRNA sense strand
guaaagcacauuuggaaga

SEQ ID NO: 216613 - RNA, 19 nt, Homo sapiens
  misc_RNA (1)...(19): siRNA sense strand
gaauauugcacuccgacua

SEQ ID NO: 216614 - RNA, 19 nt, Homo sapiens
  misc_RNA (1)...(19): siRNA sense strand
uuauaggacugccaugaaa

SEQ ID NO: 216615 - RNA, 19 nt, Homo sapiens
  misc_RNA (1)...(19): siRNA sense strand
gggugaaguugcauccuuu

SEQ ID NO: 216616 - RNA, 19 nt, Homo sapiens
  misc_RNA (1)...(19): siRNA sense strand
gcaagagcacaacaauuug

SEQ ID NO: 216617 - RNA, 19 nt, Homo sapiens
  misc_RNA (1)...(19): siRNA sense strand
gcacaacaauuuggucaac

SEQ ID NO: 216618 - RNA, 19 nt, Homo sapiens
  misc_RNA (1)...(19): siRNA sense strand
agcaagagcacaacaauuu

SEQ ID NO: 216619 - RNA, 19 nt, Homo sapiens
  misc_RNA (1)...(19): siRNA sense strand
agaagauguucgagacuuu

SEQ ID NO: 216620 - RNA, 19 nt, Homo sapiens
  misc_RNA (1)...(19): siRNA sense strand
gagcaagagcacaacaauu

SEQ ID NO: 216621 - RNA, 19 nt, Homo sapiens
  misc_RNA (1)...(19): siRNA sense strand
ucaagcaaguggcaaguuc

SEQ ID NO: 216622 - RNA, 19 nt, Homo sapiens
  misc_RNA (1)...(19): siRNA sense strand
ccacgagacucaaacaacu

SEQ ID NO: 216623 - RNA, 19 nt, Homo sapiens
  misc_RNA (1)...(19): siRNA sense strand
cagcacaaccucaagcaaa

SEQ ID NO: 216624 - RNA, 19 nt, Homo sapiens
  misc_RNA (1)...(19): siRNA sense strand
gcaaagaguguccaaucau

SEQ ID NO: 216625 - RNA, 19 nt, Homo sapiens
  misc_RNA (1)...(19): siRNA sense strand
auggauauccugcagauua

SEQ ID NO: 216626 - RNA, 19 nt, Homo sapiens
  misc_RNA (1)...(19): siRNA sense strand
uguaacaucugcaaagagu

SEQ ID NO: 216627 - RNA, 19 nt, Homo sapiens
  misc_RNA (1)...(19): siRNA sense strand
guccggagcugcuuccaau

SEQ ID NO: 216628 - RNA, 19 nt, Homo sapiens
  misc_RNA (1)...(19): siRNA sense strand
gcaaguggcaaguucaaca

SEQ ID NO: 216629 - RNA, 19 nt, Homo sapiens
  misc_RNA (1)...(19): siRNA sense strand
gcuuccaauuugcuaauaa

SEQ ID NO: 216630 - RNA, 19 nt, Homo sapiens
  misc_RNA (1)...(19): siRNA sense strand
uggaagacaaguacagaua

SEQ ID NO: 216631 - RNA, 19 nt, Homo sapiens
  misc_RNA (1)...(19): siRNA sense strand
ggauccguguccugucuuu

SEQ ID NO: 216632 - RNA, 19 nt, Homo sapiens
  misc_RNA (1)...(19): siRNA sense strand
gucuuuagcugaccugaau

SEQ ID NO: 216633 - RNA, 19 nt, Homo sapiens
  misc_RNA (1)...(19): siRNA sense strand
gacaaguacagauaccuuu

SEQ ID NO: 216634 - RNA, 19 nt, Homo sapiens
  misc_RNA (1)...(19): siRNA sense strand
ccaagcaucaggccaaaug

SEQ ID NO: 216635 - RNA, 19 nt, Homo sapiens
  misc_RNA (1)...(19): siRNA sense strand
ggagcaagagcacaacaau

SEQ ID NO: 216636 - RNA, 19 nt, Homo sapiens
  misc_RNA (1)...(19): siRNA sense strand
guguaaagcacauuuggaa

SEQ ID NO: 216637 - RNA, 19 nt, Homo sapiens
  misc_RNA (1)...(19): siRNA sense strand
caagacaguugggugaagu

SEQ ID NO: 216638 - RNA, 19 nt, Homo sapiens
  misc_RNA (1)...(19): siRNA sense strand
gaagauguucgagacuuug

SEQ ID NO: 216639 - RNA, 19 nt, Homo sapiens
  misc_RNA (1)...(19): siRNA sense strand
gucagauucucagcuuaua

SEQ ID NO: 216640 - RNA, 19 nt, Homo sapiens
  misc_RNA (1)...(19): siRNA sense strand
uaacaucugcaaagagugu

SEQ ID NO: 216641 - RNA, 19 nt, Homo sapiens
  misc_RNA (1)...(19): siRNA sense strand
cggagcugcuuccaauuug

SEQ ID NO: 216642 - RNA, 19 nt, Homo sapiens
  misc_RNA (1)...(19): siRNA sense strand
gaagacaaguacagauacc

SEQ ID NO: 216643 - RNA, 19 nt, Homo sapiens
  misc_RNA (1)...(19): siRNA sense strand
ccauggauauccugcagau

SEQ ID NO: 216644 - RNA, 19 nt, Homo sapiens
  misc_RNA (1)...(19): siRNA sense strand
ggcaucauuucccugugua

SEQ ID NO: 216645 - RNA, 19 nt, Homo sapiens
  misc_RNA (1)...(19): siRNA sense strand
uggauauccugcagauuau

SEQ ID NO: 216646 - RNA, 19 nt, Homo sapiens
  misc_RNA (1)...(19): siRNA sense strand
ggaagacaaguacagauac

SEQ ID NO: 216647 - RNA, 19 nt, Homo sapiens
  misc_RNA (1)...(19): siRNA sense strand
ugcaaagaguguccaauca

SEQ ID NO: 216648 - RNA, 19 nt, Homo sapiens
  misc_RNA (1)...(19): siRNA sense strand
guggauaugugucugaacu

SEQ ID NO: 216649 - RNA, 19 nt, Homo sapiens
  misc_RNA (1)...(19): siRNA sense strand
acuggcugcugaauguuua

SEQ ID NO: 216650 - RNA, 19 nt, Homo sapiens
  misc_RNA (1)...(19): siRNA sense strand
acuaucccaugguggaaua

SEQ ID NO: 216651 - RNA, 19 nt, Homo sapiens
  misc_RNA (1)...(19): siRNA sense strand
ccggagcugcuuccaauuu

SEQ ID NO: 216652 - RNA, 19 nt, Homo sapiens
  misc_RNA (1)...(19): siRNA sense strand
ccaaauuccaagacaguug

SEQ ID NO: 216653 - RNA, 19 nt, Homo sapiens
  misc_RNA (1)...(19): siRNA sense strand
cagaaacugccaagcauca

SEQ ID NO: 216654 - RNA, 19 nt, Homo sapiens
  misc_RNA (1)...(19): siRNA sense strand
uaugacaucugccaaagcu

SEQ ID NO: 216655 - RNA, 19 nt, Homo sapiens
  misc_RNA (1)...(19): siRNA sense strand
aaugucagauucucagcuu

SEQ ID NO: 216656 - RNA, 19 nt, Homo sapiens
  misc_RNA (1)...(19): siRNA sense strand
ucgagacuuugccaaggua

SEQ ID NO: 216657 - RNA, 19 nt, Homo sapiens
  misc_RNA (1)...(19): siRNA sense strand
gcaaaaggccauaaaaugc

SEQ ID NO: 216658 - RNA, 19 nt, Homo sapiens
  misc_RNA (1)...(19): siRNA sense strand
cugcaugauucuauccaaa

SEQ ID NO: 216659 - RNA, 19 nt, Homo sapiens
  misc_RNA (1)...(19): siRNA sense strand
uaaagcacauuuggaagac

SEQ ID NO: 216660 - RNA, 19 nt, Homo sapiens
  misc_RNA (1)...(19): siRNA sense strand
acaggagucuaaagcacuu

SEQ ID NO: 216661 - RNA, 19 nt, Homo sapiens
  misc_RNA (1)...(19): siRNA sense strand
acagauaccuuuucaagca

SEQ ID NO: 216662 - RNA, 19 nt, Homo sapiens
  misc_RNA (1)...(19): siRNA sense strand
aagcacauuuggaagacaa

SEQ ID NO: 216663 - RNA, 19 nt, Homo sapiens
  misc_RNA (1)...(19): siRNA sense strand
gcuaauaauaagccagaga

SEQ ID NO: 216664 - RNA, 19 nt, Homo sapiens
  misc_RNA (1)...(19): siRNA sense strand
caagagcacaacaauuugg

SEQ ID NO: 216665 - RNA, 19 nt, Homo sapiens
  misc_RNA (1)...(19): siRNA sense strand
ccugucagcugcaugugau

SEQ ID NO: 216666 - RNA, 19 nt, Homo sapiens
  misc_RNA (1)...(19): siRNA sense strand
gcugcugaauguuuaugau

SEQ ID NO: 216667 - RNA, 19 nt, Homo sapiens
  misc_RNA (1)...(19): siRNA sense strand
acagagcucuaccagucuu

SEQ ID NO: 216668 - RNA, 19 nt, Homo sapiens
  misc_RNA (1)...(19): siRNA sense strand
acaguugggugaaguugca

SEQ ID NO: 216669 - RNA, 19 nt, Homo sapiens
  misc_RNA (1)...(19): siRNA sense strand
guuugaccacuauuuauga

SEQ ID NO: 216670 - RNA, 19 nt, Homo sapiens
  misc_RNA (1)...(19): siRNA sense strand
gcuuauaggacugccauga

SEQ ID NO: 216671 - RNA, 19 nt, Homo sapiens
  misc_RNA (1)...(19): siRNA sense strand
caucaggccaaauguaaca

SEQ ID NO: 216672 - RNA, 19 nt, Homo sapiens
  misc_RNA (1)...(19): siRNA sense strand
gauucuauccaaauuccaa

SEQ ID NO: 216673 - RNA, 19 nt, Homo sapiens
  misc_RNA (1)...(19): siRNA sense strand
ggcaaguucaacaggauuu

SEQ ID NO: 216674 - RNA, 19 nt, Homo sapiens
  misc_RNA (1)...(19): siRNA sense strand
gaacuggcugcugaauguu

SEQ ID NO: 216675 - RNA, 19 nt, Homo sapiens
  misc_RNA (1)...(19): siRNA sense strand
cugcugaauguuuaugaua

SEQ ID NO: 216676 - RNA, 19 nt, Homo sapiens
  misc_RNA (1)...(19): siRNA sense strand
aagcaucaggccaaaugua

SEQ ID NO: 216677 - RNA, 19 nt, Homo sapiens
  misc_RNA (1)...(19): siRNA sense strand
uggcaucauuucccugugu

SEQ ID NO: 216678 - RNA, 19 nt, Homo sapiens
  misc_RNA (1)...(19): siRNA sense strand
ccaugaaacuccgaagacu

SEQ ID NO: 216679 - RNA, 19 nt, Homo sapiens
  misc_RNA (1)...(19): siRNA sense strand
auaauaagccagagaucga

SEQ ID NO: 216680 - RNA, 19 nt, Homo sapiens
  misc_RNA (1)...(19): siRNA sense strand
cuaauaauaagccagagau

SEQ ID NO: 216681 - RNA, 19 nt, Homo sapiens
  misc_RNA (1)...(19): siRNA sense strand
ugggugaaguugcauccuu

SEQ ID NO: 216682 - RNA, 19 nt, Homo sapiens
  misc_RNA (1)...(19): siRNA sense strand
caucauuucccuguguaaa

SEQ ID NO: 216683 - RNA, 19 nt, Homo sapiens
  misc_RNA (1)...(19): siRNA sense strand
gcguggauaugugucugaa

SEQ ID NO: 216684 - RNA, 19 nt, Homo sapiens
  misc_RNA (1)...(19): siRNA sense strand
gcacuaucccaugguggaa

SEQ ID NO: 216685 - RNA, 19 nt, Homo sapiens
  misc_RNA (1)...(19): siRNA sense strand
gagccugucagcugcaugu

SEQ ID NO: 216686 - RNA, 19 nt, Homo sapiens
  misc_RNA (1)...(19): siRNA sense strand
guacagauaccuuuucaag

SEQ ID NO: 216687 - RNA, 19 nt, Homo sapiens
  misc_RNA (1)...(19): siRNA sense strand
gucccucucugcguggaua

SEQ ID NO: 216688 - RNA, 19 nt, Homo sapiens
  misc_RNA (1)...(19): siRNA sense strand
ggagcugcuuccaauuugc

SEQ ID NO: 216689 - RNA, 19 nt, Homo sapiens
  misc_RNA (1)...(19): siRNA sense strand
uuagcugaccugaauaaug

SEQ ID NO: 216690 - RNA, 19 nt, Homo sapiens
  misc_RNA (1)...(19): siRNA sense strand
guggcaaguucaacaggau

SEQ ID NO: 216691 - RNA, 19 nt, Homo sapiens
  misc_RNA (1)...(19): siRNA sense strand
acaacaauuuggucaacgu

SEQ ID NO: 216692 - RNA, 19 nt, Homo sapiens
  misc_RNA (1)...(19): siRNA sense strand
gacuacaucaggagaagau

SEQ ID NO: 216693 - RNA, 19 nt, Homo sapiens
  misc_RNA (1)...(19): siRNA sense strand
uaauaagccagagaucgaa

SEQ ID NO: 216694 - RNA, 19 nt, Homo sapiens
  misc_RNA (1)...(19): siRNA sense strand
ugucagauucucagcuuau

SEQ ID NO: 216695 - RNA, 19 nt, Homo sapiens
  misc_RNA (1)...(19): siRNA sense strand
ggauauccugcagauuauu

SEQ ID NO: 216696 - RNA, 19 nt, Homo sapiens
  misc_RNA (1)...(19): siRNA sense strand
agcaucaggccaaauguaa

SEQ ID NO: 216697 - RNA, 19 nt, Homo sapiens
  misc_RNA (1)...(19): siRNA sense strand
gcccuuugcuuggaucucu

SEQ ID NO: 216698 - RNA, 19 nt, Homo sapiens
  misc_RNA (1)...(19): siRNA sense strand
gcugaauguuuaugauacg

SEQ ID NO: 216699 - RNA, 19 nt, Homo sapiens
  misc_RNA (1)...(19): siRNA sense strand
agacuuugccaagguacua

SEQ ID NO: 216700 - RNA, 19 nt, Homo sapiens
  misc_RNA (1)...(19): siRNA sense strand
caagcaaguggcaaguuca

SEQ ID NO: 216701 - RNA, 19 nt, Homo sapiens
  misc_RNA (1)...(19): siRNA sense strand
agacaaguacagauaccuu

SEQ ID NO: 216702 - RNA, 19 nt, Homo sapiens
  misc_RNA (1)...(19): siRNA sense strand
gcaucauuucccuguguaa

SEQ ID NO: 216703 - RNA, 19 nt, Homo sapiens
  misc_RNA (1)...(19): siRNA sense strand
cugcaaagaguguccaauc

SEQ ID NO: 216704 - RNA, 19 nt, Homo sapiens
  misc_RNA (1)...(19): siRNA sense strand
cuuauaggacugccaugaa

SEQ ID NO: 216705 - RNA, 19 nt, Homo sapiens
  misc_RNA (1)...(19): siRNA sense strand
caaagaguguccaaucauu

SEQ ID NO: 216706 - RNA, 19 nt, Homo sapiens
  misc_RNA (1)...(19): siRNA sense strand
uagcugaccugaauaaugu

SEQ ID NO: 216707 - RNA, 19 nt, Homo sapiens
  misc_RNA (1)...(19): siRNA sense strand
gcaugauucuauccaaauu

SEQ ID NO: 216708 - RNA, 19 nt, Homo sapiens
  misc_RNA (1)...(19): siRNA sense strand
ugaacuggcugcugaaugu

SEQ ID NO: 216709 - RNA, 19 nt, Homo sapiens
  misc_RNA (1)...(19): siRNA sense strand
gauauccugcagauuauua

SEQ ID NO: 216710 - RNA, 19 nt, Homo sapiens
  misc_RNA (1)...(19): siRNA sense strand
gagaagauguucgagacuu

SEQ ID NO: 216711 - RNA, 19 nt, Homo sapiens
  misc_RNA (1)...(19): siRNA sense strand
gcacuuuaauuaugacauc

SEQ ID NO: 216712 - RNA, 19 nt, Homo sapiens
  misc_RNA (1)...(19): siRNA sense strand
guaaagcacauuuggaaga

SEQ ID NO: 216713 - RNA, 19 nt, Homo sapiens
  misc_RNA (1)...(19): siRNA sense strand
gaauauugcacuccgacua

SEQ ID NO: 216714 - RNA, 19 nt, Homo sapiens
  misc_RNA (1)...(19): siRNA sense strand
uuauaggacugccaugaaa

SEQ ID NO: 216715 - RNA, 19 nt, Homo sapiens
  misc_RNA (1)...(19): siRNA sense strand
gggugaaguugcauccuuu

SEQ ID NO: 216716 - RNA, 19 nt, Homo sapiens
  misc_RNA (1)...(19): siRNA sense strand
gcaagagcacaacaauuug

SEQ ID NO: 216717 - RNA, 19 nt, Homo sapiens
  misc_RNA (1)...(19): siRNA sense strand
gcacaacaauuuggucaac

SEQ ID NO: 216718 - RNA, 19 nt, Homo sapiens
  misc_RNA (1)...(19): siRNA sense strand
agcaagagcacaacaauuu

SEQ ID NO: 216719 - RNA, 19 nt, Homo sapiens
  misc_RNA (1)...(19): siRNA sense strand
agaagauguucgagacuuu

SEQ ID NO: 216720 - RNA, 19 nt, Homo sapiens
  misc_RNA (1)...(19): siRNA sense strand
gagcaagagcacaacaauu

SEQ ID NO: 216721 - RNA, 19 nt, Homo sapiens
  misc_RNA (1)...(19): siRNA sense strand
ucaagcaaguggcaaguuc

SEQ ID NO: 216722 - RNA, 19 nt, Homo sapiens
  misc_RNA (1)...(19): siRNA sense strand
ccacgagacucaaacaacu

SEQ ID NO: 216723 - RNA, 19 nt, Homo sapiens
  misc_RNA (1)...(19): siRNA sense strand
cagcacaaccucaagcaaa

SEQ ID NO: 216724 - RNA, 19 nt, Homo sapiens
  misc_RNA (1)...(19): siRNA sense strand
gcaaagaguguccaaucau

SEQ ID NO: 216725 - RNA, 19 nt, Homo sapiens
  misc_RNA (1)...(19): siRNA sense strand
auggauauccugcagauua

SEQ ID NO: 216726 - RNA, 19 nt, Homo sapiens
  misc_RNA (1)...(19): siRNA sense strand
uguaacaucugcaaagagu

SEQ ID NO: 216727 - RNA, 19 nt, Homo sapiens
  misc_RNA (1)...(19): siRNA sense strand
guccggagcugcuuccaau

SEQ ID NO: 216728 - RNA, 19 nt, Homo sapiens
  misc_RNA (1)...(19): siRNA sense strand
gcaaguggcaaguucaaca

SEQ ID NO: 216729 - RNA, 19 nt, Homo sapiens
  misc_RNA (1)...(19): siRNA sense strand
gcuuccaauuugcuaauaa

SEQ ID NO: 216730 - RNA, 19 nt, Homo sapiens
  misc_RNA (1)...(19): siRNA sense strand
uggaagacaaguacagaua

SEQ ID NO: 216731 - RNA, 19 nt, Homo sapiens
  misc_RNA (1)...(19): siRNA sense strand
ggauccguguccugucuuu

SEQ ID NO: 216732 - RNA, 19 nt, Homo sapiens
  misc_RNA (1)...(19): siRNA sense strand
gucuuuagcugaccugaau

SEQ ID NO: 216733 - RNA, 19 nt, Homo sapiens
  misc_RNA (1)...(19): siRNA sense strand
gacaaguacagauaccuuu

SEQ ID NO: 216734 - RNA, 19 nt, Homo sapiens
  misc_RNA (1)...(19): siRNA sense strand
ccaagcaucaggccaaaug

SEQ ID NO: 216735 - RNA, 19 nt, Homo sapiens
  misc_RNA (1)...(19): siRNA sense strand
ggagcaagagcacaacaau

SEQ ID NO: 216736 - RNA, 19 nt, Homo sapiens
  misc_RNA (1)...(19): siRNA sense strand
guguaaagcacauuuggaa

SEQ ID NO: 216737 - RNA, 19 nt, Homo sapiens
  misc_RNA (1)...(19): siRNA sense strand
caagacaguugggugaagu

SEQ ID NO: 216738 - RNA, 19 nt, Homo sapiens
  misc_RNA (1)...(19): siRNA sense strand
gaagauguucgagacuuug

SEQ ID NO: 216739 - RNA, 19 nt, Homo sapiens
  misc_RNA (1)...(19): siRNA sense strand
gucagauucucagcuuaua

SEQ ID NO: 216740 - RNA, 19 nt, Homo sapiens
  misc_RNA (1)...(19): siRNA sense strand
uaacaucugcaaagagugu

SEQ ID NO: 216741 - RNA, 19 nt, Homo sapiens
  misc_RNA (1)...(19): siRNA sense strand
cggagcugcuuccaauuug

SEQ ID NO: 216742 - RNA, 19 nt, Homo sapiens
  misc_RNA (1)...(19): siRNA sense strand
gaagacaaguacagauacc

SEQ ID NO: 216743 - RNA, 19 nt, Homo sapiens
  misc_RNA (1)...(19): siRNA sense strand
ccauggauauccugcagau

SEQ ID NO: 216744 - RNA, 19 nt, Homo sapiens
  misc_RNA (1)...(19): siRNA sense strand
ggcaucauuucccugugua

SEQ ID NO: 216745 - RNA, 19 nt, Homo sapiens
  misc_RNA (1)...(19): siRNA sense strand
uggauauccugcagauuau

SEQ ID NO: 216746 - RNA, 19 nt, Homo sapiens
  misc_RNA (1)...(19): siRNA sense strand
ggaagacaaguacagauac

SEQ ID NO: 216747 - RNA, 19 nt, Homo sapiens
  misc_RNA (1)...(19): siRNA sense strand
ugcaaagaguguccaauca

SEQ ID NO: 216748 - RNA, 19 nt, Homo sapiens
  misc_RNA (1)...(19): siRNA sense strand
guggauaugugucugaacu

SEQ ID NO: 216749 - RNA, 19 nt, Homo sapiens
  misc_RNA (1)...(19): siRNA sense strand
acuggcugcugaauguuua

SEQ ID NO: 216750 - RNA, 19 nt, Homo sapiens
  misc_RNA (1)...(19): siRNA sense strand
acuaucccaugguggaaua

SEQ ID NO: 216751 - RNA, 19 nt, Homo sapiens
  misc_RNA (1)...(19): siRNA sense strand
ccggagcugcuuccaauuu

SEQ ID NO: 216752 - RNA, 19 nt, Homo sapiens
  misc_RNA (1)...(19): siRNA sense strand
ccaaauuccaagacaguug

SEQ ID NO: 216753 - RNA, 19 nt, Homo sapiens
  misc_RNA (1)...(19): siRNA sense strand
cagaaacugccaagcauca

SEQ ID NO: 216754 - RNA, 19 nt, Homo sapiens
  misc_RNA (1)...(19): siRNA sense strand
uaugacaucugccaaagcu

SEQ ID NO: 216755 - RNA, 19 nt, Homo sapiens
  misc_RNA (1)...(19): siRNA sense strand
aaugucagauucucagcuu

SEQ ID NO: 216756 - RNA, 19 nt, Homo sapiens
  misc_RNA (1)...(19): siRNA sense strand
ucgagacuuugccaaggua

SEQ ID NO: 216757 - RNA, 19 nt, Homo sapiens
  misc_RNA (1)...(19): siRNA sense strand
gcaaaaggccauaaaaugc

SEQ ID NO: 216758 - RNA, 19 nt, Homo sapiens
  misc_RNA (1)...(19): siRNA sense strand
cugcaugauucuauccaaa

SEQ ID NO: 216759 - RNA, 19 nt, Homo sapiens
  misc_RNA (1)...(19): siRNA sense strand
uaaagcacauuuggaagac

SEQ ID NO: 216760 - RNA, 19 nt, Homo sapiens
  misc_RNA (1)...(19): siRNA sense strand
acaggagucuaaagcacuu

SEQ ID NO: 216761 - RNA, 19 nt, Homo sapiens
  misc_RNA (1)...(19): siRNA sense strand
acagauaccuuuucaagca

SEQ ID NO: 216762 - RNA, 19 nt, Homo sapiens
  misc_RNA (1)...(19): siRNA sense strand
aagcacauuuggaagacaa

SEQ ID NO: 216763 - RNA, 19 nt, Homo sapiens
  misc_RNA (1)...(19): siRNA sense strand
gcuaauaauaagccagaga

SEQ ID NO: 216764 - RNA, 19 nt, Homo sapiens
  misc_RNA (1)...(19): siRNA sense strand
caagagcacaacaauuugg

SEQ ID NO: 216765 - RNA, 19 nt, Homo sapiens
  misc_RNA (1)...(19): siRNA sense strand
ccugucagcugcaugugau

SEQ ID NO: 216766 - RNA, 19 nt, Homo sapiens
  misc_RNA (1)...(19): siRNA sense strand
gcugcugaauguuuaugau

SEQ ID NO: 216767 - RNA, 19 nt, Homo sapiens
  misc_RNA (1)...(19): siRNA sense strand
acagagcucuaccagucuu

SEQ ID NO: 216768 - RNA, 19 nt, Homo sapiens
  misc_RNA (1)...(19): siRNA sense strand
acaguugggugaaguugca

SEQ ID NO: 216769 - RNA, 19 nt, Homo sapiens
  misc_RNA (1)...(19): siRNA sense strand
guuugaccacuauuuauga

SEQ ID NO: 216770 - RNA, 19 nt, Homo sapiens
  misc_RNA (1)...(19): siRNA sense strand
gcuuauaggacugccauga

SEQ ID NO: 216771 - RNA, 19 nt, Homo sapiens
  misc_RNA (1)...(19): siRNA sense strand
caucaggccaaauguaaca

SEQ ID NO: 216772 - RNA, 19 nt, Homo sapiens
  misc_RNA (1)...(19): siRNA sense strand
gauucuauccaaauuccaa

SEQ ID NO: 216773 - RNA, 19 nt, Homo sapiens
  misc_RNA (1)...(19): siRNA sense strand
ggcaaguucaacaggauuu

SEQ ID NO: 216774 - RNA, 19 nt, Homo sapiens
  misc_RNA (1)...(19): siRNA sense strand
gaacuggcugcugaauguu

SEQ ID NO: 216775 - RNA, 19 nt, Homo sapiens
  misc_RNA (1)...(19): siRNA sense strand
cugcugaauguuuaugaua

SEQ ID NO: 216776 - RNA, 19 nt, Homo sapiens
  misc_RNA (1)...(19): siRNA sense strand
aagcaucaggccaaaugua

SEQ ID NO: 216777 - RNA, 19 nt, Homo sapiens
  misc_RNA (1)...(19): siRNA sense strand
uggcaucauuucccugugu

SEQ ID NO: 216778 - RNA, 19 nt, Homo sapiens
  misc_RNA (1)...(19): siRNA sense strand
ccaugaaacuccgaagacu

SEQ ID NO: 216779 - RNA, 19 nt, Homo sapiens
  misc_RNA (1)...(19): siRNA sense strand
auaauaagccagagaucga

SEQ ID NO: 216780 - RNA, 19 nt, Homo sapiens
  misc_RNA (1)...(19): siRNA sense strand
cuaauaauaagccagagau

SEQ ID NO: 216781 - RNA, 19 nt, Homo sapiens
  misc_RNA (1)...(19): siRNA sense strand
ugggugaaguugcauccuu

SEQ ID NO: 216782 - RNA, 19 nt, Homo sapiens
  misc_RNA (1)...(19): siRNA sense strand
caucauuucccuguguaaa

SEQ ID NO: 216783 - RNA, 19 nt, Homo sapiens
  misc_RNA (1)...(19): siRNA sense strand
gcguggauaugugucugaa

SEQ ID NO: 216784 - RNA, 19 nt, Homo sapiens
  misc_RNA (1)...(19): siRNA sense strand
gcacuaucccaugguggaa

SEQ ID NO: 216785 - RNA, 19 nt, Homo sapiens
  misc_RNA (1)...(19): siRNA sense strand
gagccugucagcugcaugu

SEQ ID NO: 216786 - RNA, 19 nt, Homo sapiens
  misc_RNA (1)...(19): siRNA sense strand
guacagauaccuuuucaag

SEQ ID NO: 216787 - RNA, 19 nt, Homo sapiens
  misc_RNA (1)...(19): siRNA sense strand
gucccucucugcguggaua

SEQ ID NO: 216788 - RNA, 19 nt, Homo sapiens
  misc_RNA (1)...(19): siRNA sense strand
ggagcugcuuccaauuugc

SEQ ID NO: 216789 - RNA, 19 nt, Homo sapiens
  misc_RNA (1)...(19): siRNA sense strand
uuagcugaccugaauaaug

SEQ ID NO: 216790 - RNA, 19 nt, Homo sapiens
  misc_RNA (1)...(19): siRNA sense strand
guggcaaguucaacaggau

SEQ ID NO: 216791 - RNA, 19 nt, Homo sapiens
  misc_RNA (1)...(19): siRNA sense strand
acaacaauuuggucaacgu

SEQ ID NO: 216792 - RNA, 19 nt, Homo sapiens
  misc_RNA (1)...(19): siRNA sense strand
gacuacaucaggagaagau

SEQ ID NO: 216793 - RNA, 19 nt, Homo sapiens
  misc_RNA (1)...(19): siRNA sense strand
uaauaagccagagaucgaa

SEQ ID NO: 216794 - RNA, 19 nt, Homo sapiens
  misc_RNA (1)...(19): siRNA sense strand
ugucagauucucagcuuau

SEQ ID NO: 216795 - RNA, 19 nt, Homo sapiens
  misc_RNA (1)...(19): siRNA sense strand
ggauauccugcagauuauu

SEQ ID NO: 216796 - RNA, 19 nt, Homo sapiens
  misc_RNA (1)...(19): siRNA sense strand
agcaucaggccaaauguaa

SEQ ID NO: 216797 - RNA, 19 nt, Homo sapiens
  misc_RNA (1)...(19): siRNA sense strand
gcccuuugcuuggaucucu

SEQ ID NO: 216798 - RNA, 19 nt, Homo sapiens
  misc_RNA (1)...(19): siRNA sense strand
gcugaauguuuaugauacg

SEQ ID NO: 216799 - RNA, 19 nt, Homo sapiens
  misc_RNA (1)...(19): siRNA sense strand
agacuuugccaagguacua

SEQ ID NO: 216800 - RNA, 19 nt, Homo sapiens
  misc_RNA (1)...(19): siRNA sense strand
caagcaaguggcaaguuca

SEQ ID NO: 216801 - RNA, 19 nt, Homo sapiens
  misc_RNA (1)...(19): siRNA sense strand
agacaaguacagauaccuu

SEQ ID NO: 216802 - RNA, 19 nt, Homo sapiens
  misc_RNA (1)...(19): siRNA sense strand
gcaucauuucccuguguaa

SEQ ID NO: 216803 - RNA, 19 nt, Homo sapiens
  misc_RNA (1)...(19): siRNA sense strand
cugcaaagaguguccaauc

SEQ ID NO: 216804 - RNA, 19 nt, Homo sapiens
  misc_RNA (1)...(19): siRNA sense strand
cuuauaggacugccaugaa

SEQ ID NO: 216805 - RNA, 19 nt, Homo sapiens
  misc_RNA (1)...(19): siRNA sense strand
caaagaguguccaaucauu

SEQ ID NO: 216806 - RNA, 19 nt, Homo sapiens
  misc_RNA (1)...(19): siRNA sense strand
uagcugaccugaauaaugu

SEQ ID NO: 216807 - RNA, 19 nt, Homo sapiens
  misc_RNA (1)...(19): siRNA sense strand
gcaugauucuauccaaauu

SEQ ID NO: 216808 - RNA, 19 nt, Homo sapiens
  misc_RNA (1)...(19): siRNA sense strand
ugaacuggcugcugaaugu

SEQ ID NO: 216809 - RNA, 19 nt, Homo sapiens
  misc_RNA (1)...(19): siRNA sense strand
gauauccugcagauuauua

SEQ ID NO: 216810 - RNA, 19 nt, Homo sapiens
  misc_RNA (1)...(19): siRNA sense strand
gagaagauguucgagacuu

SEQ ID NO: 216811 - RNA, 19 nt, Homo sapiens
  misc_RNA (1)...(19): siRNA sense strand
gcacuuuaauuaugacauc

SEQ ID NO: 216812 - RNA, 19 nt, Homo sapiens
  misc_RNA (1)...(19): siRNA sense strand
guaaagcacauuuggaaga

SEQ ID NO: 216813 - RNA, 19 nt, Homo sapiens
  misc_RNA (1)...(19): siRNA sense strand
gaauauugcacuccgacua

SEQ ID NO: 216814 - RNA, 19 nt, Homo sapiens
  misc_RNA (1)...(19): siRNA sense strand
uuauaggacugccaugaaa

SEQ ID NO: 216815 - RNA, 19 nt, Homo sapiens
  misc_RNA (1)...(19): siRNA sense strand
gggugaaguugcauccuuu

SEQ ID NO: 216816 - RNA, 19 nt, Homo sapiens
  misc_RNA (1)...(19): siRNA sense strand
gcaagagcacaacaauuug

SEQ ID NO: 216817 - RNA, 19 nt, Homo sapiens
  misc_RNA (1)...(19): siRNA sense strand
gcacaacaauuuggucaac

SEQ ID NO: 216818 - RNA, 19 nt, Homo sapiens
  misc_RNA (1)...(19): siRNA sense strand
agcaagagcacaacaauuu

SEQ ID NO: 216819 - RNA, 19 nt, Homo sapiens
  misc_RNA (1)...(19): siRNA sense strand
agaagauguucgagacuuu

SEQ ID NO: 216820 - RNA, 19 nt, Homo sapiens
  misc_RNA (1)...(19): siRNA sense strand
gagcaagagcacaacaauu

SEQ ID NO: 216821 - RNA, 19 nt, Homo sapiens
  misc_RNA (1)...(19): siRNA sense strand
ucaagcaaguggcaaguuc

SEQ ID NO: 216822 - RNA, 19 nt, Homo sapiens
  misc_RNA (1)...(19): siRNA sense strand
ccacgagacucaaacaacu

SEQ ID NO: 216823 - RNA, 19 nt, Homo sapiens
  misc_RNA (1)...(19): siRNA sense strand
cagcacaaccucaagcaaa

SEQ ID NO: 216824 - RNA, 19 nt, Homo sapiens
  misc_RNA (1)...(19): siRNA sense strand
gcaaagaguguccaaucau

SEQ ID NO: 216825 - RNA, 19 nt, Homo sapiens
  misc_RNA (1)...(19): siRNA sense strand
auggauauccugcagauua

SEQ ID NO: 216826 - RNA, 19 nt, Homo sapiens
  misc_RNA (1)...(19): siRNA sense strand
uguaacaucugcaaagagu

SEQ ID NO: 216827 - RNA, 19 nt, Homo sapiens
  misc_RNA (1)...(19): siRNA sense strand
guccggagcugcuuccaau

SEQ ID NO: 216828 - RNA, 19 nt, Homo sapiens
  misc_RNA (1)...(19): siRNA sense strand
gcaaguggcaaguucaaca

SEQ ID NO: 216829 - RNA, 19 nt, Homo sapiens
  misc_RNA (1)...(19): siRNA sense strand
gcuuccaauuugcuaauaa

SEQ ID NO: 216830 - RNA, 19 nt, Homo sapiens
  misc_RNA (1)...(19): siRNA sense strand
uggaagacaaguacagaua

SEQ ID NO: 216831 - RNA, 19 nt, Homo sapiens
  misc_RNA (1)...(19): siRNA sense strand
ggauccguguccugucuuu

SEQ ID NO: 216832 - RNA, 19 nt, Homo sapiens
  misc_RNA (1)...(19): siRNA sense strand
gucuuuagcugaccugaau

SEQ ID NO: 216833 - RNA, 19 nt, Homo sapiens
  misc_RNA (1)...(19): siRNA sense strand
gacaaguacagauaccuuu

SEQ ID NO: 216834 - RNA, 19 nt, Homo sapiens
  misc_RNA (1)...(19): siRNA sense strand
ccaagcaucaggccaaaug

SEQ ID NO: 216835 - RNA, 19 nt, Homo sapiens
  misc_RNA (1)...(19): siRNA sense strand
ggagcaagagcacaacaau

SEQ ID NO: 216836 - RNA, 19 nt, Homo sapiens
  misc_RNA (1)...(19): siRNA sense strand
guguaaagcacauuuggaa

SEQ ID NO: 216837 - RNA, 19 nt, Homo sapiens
  misc_RNA (1)...(19): siRNA sense strand
caagacaguugggugaagu

SEQ ID NO: 216838 - RNA, 19 nt, Homo sapiens
  misc_RNA (1)...(19): siRNA sense strand
gaagauguucgagacuuug

SEQ ID NO: 216839 - RNA, 19 nt, Homo sapiens
  misc_RNA (1)...(19): siRNA sense strand
gucagauucucagcuuaua

SEQ ID NO: 216840 - RNA, 19 nt, Homo sapiens
  misc_RNA (1)...(19): siRNA sense strand
uaacaucugcaaagagugu

SEQ ID NO: 216841 - RNA, 19 nt, Homo sapiens
  misc_RNA (1)...(19): siRNA sense strand
cggagcugcuuccaauuug

SEQ ID NO: 216842 - RNA, 19 nt, Homo sapiens
  misc_RNA (1)...(19): siRNA sense strand
gaagacaaguacagauacc

SEQ ID NO: 216843 - RNA, 19 nt, Homo sapiens
  misc_RNA (1)...(19): siRNA sense strand
ccauggauauccugcagau

SEQ ID NO: 216844 - RNA, 19 nt, Homo sapiens
  misc_RNA (1)...(19): siRNA sense strand
ggcaucauuucccugugua

SEQ ID NO: 216845 - RNA, 19 nt, Homo sapiens
  misc_RNA (1)...(19): siRNA sense strand
uggauauccugcagauuau

SEQ ID NO: 216846 - RNA, 19 nt, Homo sapiens
  misc_RNA (1)...(19): siRNA sense strand
ggaagacaaguacagauac

SEQ ID NO: 216847 - RNA, 19 nt, Homo sapiens
  misc_RNA (1)...(19): siRNA sense strand
ugcaaagaguguccaauca

SEQ ID NO: 216848 - RNA, 19 nt, Homo sapiens
  misc_RNA (1)...(19): siRNA sense strand
guggauaugugucugaacu

SEQ ID NO: 216849 - RNA, 19 nt, Homo sapiens
  misc_RNA (1)...(19): siRNA sense strand
acuggcugcugaauguuua

SEQ ID NO: 216850 - RNA, 19 nt, Homo sapiens
  misc_RNA (1)...(19): siRNA sense strand
acuaucccaugguggaaua

SEQ ID NO: 216851 - RNA, 19 nt, Homo sapiens
  misc_RNA (1)...(19): siRNA sense strand
ccggagcugcuuccaauuu

SEQ ID NO: 216852 - RNA, 19 nt, Homo sapiens
  misc_RNA (1)...(19): siRNA sense strand
ccaaauuccaagacaguug

SEQ ID NO: 216853 - RNA, 19 nt, Homo sapiens
  misc_RNA (1)...(19): siRNA sense strand
cagaaacugccaagcauca

SEQ ID NO: 216854 - RNA, 19 nt, Homo sapiens
  misc_RNA (1)...(19): siRNA sense strand
uaugacaucugccaaagcu

SEQ ID NO: 216855 - RNA, 19 nt, Homo sapiens
  misc_RNA (1)...(19): siRNA sense strand
aaugucagauucucagcuu

SEQ ID NO: 216856 - RNA, 19 nt, Homo sapiens
  misc_RNA (1)...(19): siRNA sense strand
ucgagacuuugccaaggua

SEQ ID NO: 216857 - RNA, 19 nt, Homo sapiens
  misc_RNA (1)...(19): siRNA sense strand
gcaaaaggccauaaaaugc

SEQ ID NO: 216858 - RNA, 19 nt, Homo sapiens
  misc_RNA (1)...(19): siRNA sense strand
cugcaugauucuauccaaa

SEQ ID NO: 216859 - RNA, 19 nt, Homo sapiens
  misc_RNA (1)...(19): siRNA sense strand
uaaagcacauuuggaagac

SEQ ID NO: 216860 - RNA, 19 nt, Homo sapiens
  misc_RNA (1)...(19): siRNA sense strand
acaggagucuaaagcacuu

SEQ ID NO: 216861 - RNA, 19 nt, Homo sapiens
  misc_RNA (1)...(19): siRNA sense strand
acagauaccuuuucaagca

SEQ ID NO: 216862 - RNA, 19 nt, Homo sapiens
  misc_RNA (1)...(19): siRNA sense strand
aagcacauuuggaagacaa

SEQ ID NO: 216863 - RNA, 19 nt, Homo sapiens
  misc_RNA (1)...(19): siRNA sense strand
gcuaauaauaagccagaga

SEQ ID NO: 216864 - RNA, 19 nt, Homo sapiens
  misc_RNA (1)...(19): siRNA sense strand
caagagcacaacaauuugg

SEQ ID NO: 216865 - RNA, 19 nt, Homo sapiens
  misc_RNA (1)...(19): siRNA sense strand
ccugucagcugcaugugau

SEQ ID NO: 216866 - RNA, 19 nt, Homo sapiens
  misc_RNA (1)...(19): siRNA sense strand
gcugcugaauguuuaugau

SEQ ID NO: 216867 - RNA, 19 nt, Homo sapiens
  misc_RNA (1)...(19): siRNA sense strand
acagagcucuaccagucuu

SEQ ID NO: 216868 - RNA, 19 nt, Homo sapiens
  misc_RNA (1)...(19): siRNA sense strand
acaguugggugaaguugca

SEQ ID NO: 216869 - RNA, 19 nt, Homo sapiens
  misc_RNA (1)...(19): siRNA sense strand
guuugaccacuauuuauga

SEQ ID NO: 216870 - RNA, 19 nt, Homo sapiens
  misc_RNA (1)...(19): siRNA sense strand
gcuuauaggacugccauga

SEQ ID NO: 216871 - RNA, 19 nt, Homo sapiens
  misc_RNA (1)...(19): siRNA sense strand
caucaggccaaauguaaca

SEQ ID NO: 216872 - RNA, 19 nt, Homo sapiens
  misc_RNA (1)...(19): siRNA sense strand
gauucuauccaaauuccaa

SEQ ID NO: 216873 - RNA, 19 nt, Homo sapiens
  misc_RNA (1)...(19): siRNA sense strand
ggcaaguucaacaggauuu

SEQ ID NO: 216874 - RNA, 19 nt, Homo sapiens
  misc_RNA (1)...(19): siRNA sense strand
gaacuggcugcugaauguu

SEQ ID NO: 216875 - RNA, 19 nt, Homo sapiens
  misc_RNA (1)...(19): siRNA sense strand
cugcugaauguuuaugaua

SEQ ID NO: 216876 - RNA, 19 nt, Homo sapiens
  misc_RNA (1)...(19): siRNA sense strand
aagcaucaggccaaaugua

SEQ ID NO: 216877 - RNA, 19 nt, Homo sapiens
  misc_RNA (1)...(19): siRNA sense strand
uggcaucauuucccugugu

SEQ ID NO: 216878 - RNA, 19 nt, Homo sapiens
  misc_RNA (1)...(19): siRNA sense strand
ccaugaaacuccgaagacu

SEQ ID NO: 216879 - RNA, 19 nt, Homo sapiens
  misc_RNA (1)...(19): siRNA sense strand
auaauaagccagagaucga

SEQ ID NO: 216880 - RNA, 19 nt, Homo sapiens
  misc_RNA (1)...(19): siRNA sense strand
cuaauaauaagccagagau

SEQ ID NO: 216881 - RNA, 19 nt, Homo sapiens
  misc_RNA (1)...(19): siRNA sense strand
ugggugaaguugcauccuu

SEQ ID NO: 216882 - RNA, 19 nt, Homo sapiens
  misc_RNA (1)...(19): siRNA sense strand
caucauuucccuguguaaa

SEQ ID NO: 216883 - RNA, 19 nt, Homo sapiens
  misc_RNA (1)...(19): siRNA sense strand
gcguggauaugugucugaa

SEQ ID NO: 216884 - RNA, 19 nt, Homo sapiens
  misc_RNA (1)...(19): siRNA sense strand
gcacuaucccaugguggaa

SEQ ID NO: 216885 - RNA, 19 nt, Homo sapiens
  misc_RNA (1)...(19): siRNA sense strand
gagccugucagcugcaugu

SEQ ID NO: 216886 - RNA, 19 nt, Homo sapiens
  misc_RNA (1)...(19): siRNA sense strand
guacagauaccuuuucaag

SEQ ID NO: 216887 - RNA, 19 nt, Homo sapiens
  misc_RNA (1)...(19): siRNA sense strand
gucccucucugcguggaua

SEQ ID NO: 216888 - RNA, 19 nt, Homo sapiens
  misc_RNA (1)...(19): siRNA sense strand
ggagcugcuuccaauuugc

SEQ ID NO: 216889 - RNA, 19 nt, Homo sapiens
  misc_RNA (1)...(19): siRNA sense strand
uuagcugaccugaauaaug

SEQ ID NO: 216890 - RNA, 19 nt, Homo sapiens
  misc_RNA (1)...(19): siRNA sense strand
guggcaaguucaacaggau

SEQ ID NO: 216891 - RNA, 19 nt, Homo sapiens
  misc_RNA (1)...(19): siRNA sense strand
acaacaauuuggucaacgu

SEQ ID NO: 216892 - RNA, 19 nt, Homo sapiens
  misc_RNA (1)...(19): siRNA sense strand
gacuacaucaggagaagau

SEQ ID NO: 216893 - RNA, 19 nt, Homo sapiens
  misc_RNA (1)...(19): siRNA sense strand
uaauaagccagagaucgaa

SEQ ID NO: 216894 - RNA, 19 nt, Homo sapiens
  misc_RNA (1)...(19): siRNA sense strand
ugucagauucucagcuuau

SEQ ID NO: 216895 - RNA, 19 nt, Homo sapiens
  misc_RNA (1)...(19): siRNA sense strand
ggauauccugcagauuauu

SEQ ID NO: 216896 - RNA, 19 nt, Homo sapiens
  misc_RNA (1)...(19): siRNA sense strand
agcaucaggccaaauguaa

SEQ ID NO: 216897 - RNA, 19 nt, Homo sapiens
  misc_RNA (1)...(19): siRNA sense strand
gcccuuugcuuggaucucu

SEQ ID NO: 216898 - RNA, 19 nt, Homo sapiens
  misc_RNA (1)...(19): siRNA sense strand
gcugaauguuuaugauacg

SEQ ID NO: 216899 - RNA, 19 nt, Homo sapiens
  misc_RNA (1)...(19): siRNA sense strand
agacuuugccaagguacua

SEQ ID NO: 216900 - RNA, 19 nt, Homo sapiens
  misc_RNA (1)...(19): siRNA sense strand
caagcaaguggcaaguuca

SEQ ID NO: 216901 - RNA, 19 nt, Homo sapiens
  misc_RNA (1)...(19): siRNA sense strand
agacaaguacagauaccuu

SEQ ID NO: 216902 - RNA, 19 nt, Homo sapiens
  misc_RNA (1)...(19): siRNA sense strand
gcaucauuucccuguguaa

SEQ ID NO: 216903 - RNA, 19 nt, Homo sapiens
  misc_RNA (1)...(19): siRNA sense strand
cugcaaagaguguccaauc

SEQ ID NO: 216904 - RNA, 19 nt, Homo sapiens
  misc_RNA (1)...(19): siRNA sense strand
cuuauaggacugccaugaa

SEQ ID NO: 216905 - RNA, 19 nt, Homo sapiens
  misc_RNA (1)...(19): siRNA sense strand
caaagaguguccaaucauu

SEQ ID NO: 216906 - RNA, 19 nt, Homo sapiens
  misc_RNA (1)...(19): siRNA sense strand
uagcugaccugaauaaugu

SEQ ID NO: 216907 - RNA, 19 nt, Homo sapiens
  misc_RNA (1)...(19): siRNA sense strand
gcaugauucuauccaaauu

SEQ ID NO: 216908 - RNA, 19 nt, Homo sapiens
  misc_RNA (1)...(19): siRNA sense strand
ugaacuggcugcugaaugu

SEQ ID NO: 216909 - RNA, 19 nt, Homo sapiens
  misc_RNA (1)...(19): siRNA sense strand
gauauccugcagauuauua

SEQ ID NO: 216910 - RNA, 19 nt, Homo sapiens
  misc_RNA (1)...(19): siRNA sense strand
gagaagauguucgagacuu

SEQ ID NO: 216911 - RNA, 19 nt, Homo sapiens
  misc_RNA (1)...(19): siRNA sense strand
gcacuuuaauuaugacauc

SEQ ID NO: 216912 - RNA, 19 nt, Homo sapiens
  misc_RNA (1)...(19): siRNA sense strand
guaaagcacauuuggaaga

SEQ ID NO: 216913 - RNA, 19 nt, Homo sapiens
  misc_RNA (1)...(19): siRNA sense strand
gaauauugcacuccgacua

SEQ ID NO: 216914 - RNA, 19 nt, Homo sapiens
  misc_RNA (1)...(19): siRNA sense strand
uuauaggacugccaugaaa

SEQ ID NO: 216915 - RNA, 19 nt, Homo sapiens
  misc_RNA (1)...(19): siRNA sense strand
gggugaaguugcauccuuu

SEQ ID NO: 216916 - RNA, 19 nt, Homo sapiens
  misc_RNA (1)...(19): siRNA sense strand
gcaagagcacaacaauuug

SEQ ID NO: 216917 - RNA, 19 nt, Homo sapiens
  misc_RNA (1)...(19): siRNA sense strand
gcacaacaauuuggucaac

SEQ ID NO: 216918 - RNA, 19 nt, Homo sapiens
  misc_RNA (1)...(19): siRNA sense strand
agcaagagcacaacaauuu

SEQ ID NO: 216919 - RNA, 19 nt, Homo sapiens
  misc_RNA (1)...(19): siRNA sense strand
agaagauguucgagacuuu

SEQ ID NO: 216920 - RNA, 19 nt, Homo sapiens
  misc_RNA (1)...(19): siRNA sense strand
gagcaagagcacaacaauu

SEQ ID NO: 216921 - RNA, 19 nt, Homo sapiens
  misc_RNA (1)...(19): siRNA sense strand
ucaagcaaguggcaaguuc

SEQ ID NO: 216922 - RNA, 19 nt, Homo sapiens
  misc_RNA (1)...(19): siRNA sense strand
ccacgagacucaaacaacu

SEQ ID NO: 216923 - RNA, 19 nt, Homo sapiens
  misc_RNA (1)...(19): siRNA sense strand
cagcacaaccucaagcaaa

SEQ ID NO: 216924 - RNA, 19 nt, Homo sapiens
  misc_RNA (1)...(19): siRNA sense strand
gcaaagaguguccaaucau

SEQ ID NO: 216925 - RNA, 19 nt, Homo sapiens
  misc_RNA (1)...(19): siRNA sense strand
auggauauccugcagauua

SEQ ID NO: 216926 - RNA, 19 nt, Homo sapiens
  misc_RNA (1)...(19): siRNA sense strand
uguaacaucugcaaagagu

SEQ ID NO: 216927 - RNA, 19 nt, Homo sapiens
  misc_RNA (1)...(19): siRNA sense strand
guccggagcugcuuccaau

SEQ ID NO: 216928 - RNA, 19 nt, Homo sapiens
  misc_RNA (1)...(19): siRNA sense strand
gcaaguggcaaguucaaca

SEQ ID NO: 216929 - RNA, 19 nt, Homo sapiens
  misc_RNA (1)...(19): siRNA sense strand
gcuuccaauuugcuaauaa

SEQ ID NO: 216930 - RNA, 19 nt, Homo sapiens
  misc_RNA (1)...(19): siRNA sense strand
uggaagacaaguacagaua

SEQ ID NO: 216931 - RNA, 19 nt, Homo sapiens
  misc_RNA (1)...(19): siRNA sense strand
ggauccguguccugucuuu

SEQ ID NO: 216932 - RNA, 19 nt, Homo sapiens
  misc_RNA (1)...(19): siRNA sense strand
gucuuuagcugaccugaau

SEQ ID NO: 216933 - RNA, 19 nt, Homo sapiens
  misc_RNA (1)...(19): siRNA sense strand
gacaaguacagauaccuuu

SEQ ID NO: 216934 - RNA, 19 nt, Homo sapiens
  misc_RNA (1)...(19): siRNA sense strand
ccaagcaucaggccaaaug

SEQ ID NO: 216935 - RNA, 19 nt, Homo sapiens
  misc_RNA (1)...(19): siRNA sense strand
ggagcaagagcacaacaau

SEQ ID NO: 216936 - RNA, 19 nt, Homo sapiens
  misc_RNA (1)...(19): siRNA sense strand
guguaaagcacauuuggaa

SEQ ID NO: 216937 - RNA, 19 nt, Homo sapiens
  misc_RNA (1)...(19): siRNA sense strand
caagacaguugggugaagu

SEQ ID NO: 216938 - RNA, 19 nt, Homo sapiens
  misc_RNA (1)...(19): siRNA sense strand
gaagauguucgagacuuug

SEQ ID NO: 216939 - RNA, 19 nt, Homo sapiens
  misc_RNA (1)...(19): siRNA sense strand
gucagauucucagcuuaua

SEQ ID NO: 216940 - RNA, 19 nt, Homo sapiens
  misc_RNA (1)...(19): siRNA sense strand
uaacaucugcaaagagugu

SEQ ID NO: 216941 - RNA, 19 nt, Homo sapiens
  misc_RNA (1)...(19): siRNA sense strand
cggagcugcuuccaauuug

SEQ ID NO: 216942 - RNA, 19 nt, Homo sapiens
  misc_RNA (1)...(19): siRNA sense strand
gaagacaaguacagauacc

SEQ ID NO: 216943 - RNA, 19 nt, Homo sapiens
  misc_RNA (1)...(19): siRNA sense strand
ccauggauauccugcagau

SEQ ID NO: 216944 - RNA, 19 nt, Homo sapiens
  misc_RNA (1)...(19): siRNA sense strand
ggcaucauuucccugugua

SEQ ID NO: 216945 - RNA, 19 nt, Homo sapiens
  misc_RNA (1)...(19): siRNA sense strand
uggauauccugcagauuau

SEQ ID NO: 216946 - RNA, 19 nt, Homo sapiens
  misc_RNA (1)...(19): siRNA sense strand
ggaagacaaguacagauac

SEQ ID NO: 216947 - RNA, 19 nt, Homo sapiens
  misc_RNA (1)...(19): siRNA sense strand
ugcaaagaguguccaauca

SEQ ID NO: 216948 - RNA, 19 nt, Homo sapiens
  misc_RNA (1)...(19): siRNA sense strand
guggauaugugucugaacu

SEQ ID NO: 216949 - RNA, 19 nt, Homo sapiens
  misc_RNA (1)...(19): siRNA sense strand
acuggcugcugaauguuua

SEQ ID NO: 216950 - RNA, 19 nt, Homo sapiens
  misc_RNA (1)...(19): siRNA sense strand
acuaucccaugguggaaua

SEQ ID NO: 216951 - RNA, 19 nt, Homo sapiens
  misc_RNA (1)...(19): siRNA sense strand
ccggagcugcuuccaauuu

SEQ ID NO: 216952 - RNA, 19 nt, Homo sapiens
  misc_RNA (1)...(19): siRNA sense strand
ccaaauuccaagacaguug

SEQ ID NO: 216953 - RNA, 19 nt, Homo sapiens
  misc_RNA (1)...(19): siRNA sense strand
cagaaacugccaagcauca

SEQ ID NO: 216954 - RNA, 19 nt, Homo sapiens
  misc_RNA (1)...(19): siRNA sense strand
uaugacaucugccaaagcu

SEQ ID NO: 216955 - RNA, 19 nt, Homo sapiens
  misc_RNA (1)...(19): siRNA sense strand
aaugucagauucucagcuu

SEQ ID NO: 216956 - RNA, 19 nt, Homo sapiens
  misc_RNA (1)...(19): siRNA sense strand
ucgagacuuugccaaggua

SEQ ID NO: 216957 - RNA, 19 nt, Homo sapiens
  misc_RNA (1)...(19): siRNA sense strand
gcaaaaggccauaaaaugc

SEQ ID NO: 216958 - RNA, 19 nt, Homo sapiens
  misc_RNA (1)...(19): siRNA sense strand
cugcaugauucuauccaaa

SEQ ID NO: 216959 - RNA, 19 nt, Homo sapiens
  misc_RNA (1)...(19): siRNA sense strand
uaaagcacauuuggaagac

SEQ ID NO: 216960 - RNA, 19 nt, Homo sapiens
  misc_RNA (1)...(19): siRNA sense strand
acaggagucuaaagcacuu

SEQ ID NO: 216961 - RNA, 19 nt, Homo sapiens
  misc_RNA (1)...(19): siRNA sense strand
acagauaccuuuucaagca

SEQ ID NO: 216962 - RNA, 19 nt, Homo sapiens
  misc_RNA (1)...(19): siRNA sense strand
aagcacauuuggaagacaa

SEQ ID NO: 216963 - RNA, 19 nt, Homo sapiens
  misc_RNA (1)...(19): siRNA sense strand
gcuaauaauaagccagaga

SEQ ID NO: 216964 - RNA, 19 nt, Homo sapiens
  misc_RNA (1)...(19): siRNA sense strand
caagagcacaacaauuugg

SEQ ID NO: 216965 - RNA, 19 nt, Homo sapiens
  misc_RNA (1)...(19): siRNA sense strand
ccugucagcugcaugugau

SEQ ID NO: 216966 - RNA, 19 nt, Homo sapiens
  misc_RNA (1)...(19): siRNA sense strand
gcugcugaauguuuaugau

SEQ ID NO: 216967 - RNA, 19 nt, Homo sapiens
  misc_RNA (1)...(19): siRNA sense strand
acagagcucuaccagucuu

SEQ ID NO: 216968 - RNA, 19 nt, Homo sapiens
  misc_RNA (1)...(19): siRNA sense strand
acaguugggugaaguugca

SEQ ID NO: 216969 - RNA, 19 nt, Homo sapiens
  misc_RNA (1)...(19): siRNA sense strand
guuugaccacuauuuauga

SEQ ID NO: 216970 - RNA, 19 nt, Homo sapiens
  misc_RNA (1)...(19): siRNA sense strand
gcuuauaggacugccauga

SEQ ID NO: 216971 - RNA, 19 nt, Homo sapiens
  misc_RNA (1)...(19): siRNA sense strand
caucaggccaaauguaaca

SEQ ID NO: 216972 - RNA, 19 nt, Homo sapiens
  misc_RNA (1)...(19): siRNA sense strand
gauucuauccaaauuccaa

SEQ ID NO: 216973 - RNA, 19 nt, Homo sapiens
  misc_RNA (1)...(19): siRNA sense strand
ggcaaguucaacaggauuu

SEQ ID NO: 216974 - RNA, 19 nt, Homo sapiens
  misc_RNA (1)...(19): siRNA sense strand
gaacuggcugcugaauguu

SEQ ID NO: 216975 - RNA, 19 nt, Homo sapiens
  misc_RNA (1)...(19): siRNA sense strand
cugcugaauguuuaugaua

SEQ ID NO: 216976 - RNA, 19 nt, Homo sapiens
  misc_RNA (1)...(19): siRNA sense strand
aagcaucaggccaaaugua

SEQ ID NO: 216977 - RNA, 19 nt, Homo sapiens
  misc_RNA (1)...(19): siRNA sense strand
uggcaucauuucccugugu

SEQ ID NO: 216978 - RNA, 19 nt, Homo sapiens
  misc_RNA (1)...(19): siRNA sense strand
ccaugaaacuccgaagacu

SEQ ID NO: 216979 - RNA, 19 nt, Homo sapiens
  misc_RNA (1)...(19): siRNA sense strand
auaauaagccagagaucga

SEQ ID NO: 216980 - RNA, 19 nt, Homo sapiens
  misc_RNA (1)...(19): siRNA sense strand
cuaauaauaagccagagau

SEQ ID NO: 216981 - RNA, 19 nt, Homo sapiens
  misc_RNA (1)...(19): siRNA sense strand
ugggugaaguugcauccuu

SEQ ID NO: 216982 - RNA, 19 nt, Homo sapiens
  misc_RNA (1)...(19): siRNA sense strand
caucauuucccuguguaaa

SEQ ID NO: 216983 - RNA, 19 nt, Homo sapiens
  misc_RNA (1)...(19): siRNA sense strand
gcguggauaugugucugaa

SEQ ID NO: 216984 - RNA, 19 nt, Homo sapiens
  misc_RNA (1)...(19): siRNA sense strand
gcacuaucccaugguggaa

SEQ ID NO: 216985 - RNA, 19 nt, Homo sapiens
  misc_RNA (1)...(19): siRNA sense strand
gagccugucagcugcaugu

SEQ ID NO: 216986 - RNA, 19 nt, Homo sapiens
  misc_RNA (1)...(19): siRNA sense strand
guacagauaccuuuucaag

SEQ ID NO: 216987 - RNA, 19 nt, Homo sapiens
  misc_RNA (1)...(19): siRNA sense strand
gucccucucugcguggaua

SEQ ID NO: 216988 - RNA, 19 nt, Homo sapiens
  misc_RNA (1)...(19): siRNA sense strand
ggagcugcuuccaauuugc

SEQ ID NO: 216989 - RNA, 19 nt, Homo sapiens
  misc_RNA (1)...(19): siRNA sense strand
uuagcugaccugaauaaug

SEQ ID NO: 216990 - RNA, 19 nt, Homo sapiens
  misc_RNA (1)...(19): siRNA sense strand
guggcaaguucaacaggau

SEQ ID NO: 216991 - RNA, 19 nt, Homo sapiens
  misc_RNA (1)...(19): siRNA sense strand
acaacaauuuggucaacgu

SEQ ID NO: 216992 - RNA, 19 nt, Homo sapiens
  misc_RNA (1)...(19): siRNA sense strand
gacuacaucaggagaagau

SEQ ID NO: 216993 - RNA, 19 nt, Homo sapiens
  misc_RNA (1)...(19): siRNA sense strand
uaauaagccagagaucgaa

SEQ ID NO: 216994 - RNA, 19 nt, Homo sapiens
  misc_RNA (1)...(19): siRNA sense strand
ugucagauucucagcuuau

SEQ ID NO: 216995 - RNA, 19 nt, Homo sapiens
  misc_RNA (1)...(19): siRNA sense strand
ggauauccugcagauuauu

SEQ ID NO: 216996 - RNA, 19 nt, Homo sapiens
  misc_RNA (1)...(19): siRNA sense strand
agcaucaggccaaauguaa

SEQ ID NO: 216997 - RNA, 19 nt, Homo sapiens
  misc_RNA (1)...(19): siRNA sense strand
gcccuuugcuuggaucucu

SEQ ID NO: 216998 - RNA, 19 nt, Homo sapiens
  misc_RNA (1)...(19): siRNA sense strand
gcugaauguuuaugauacg

SEQ ID NO: 216999 - RNA, 19 nt, Homo sapiens
  misc_RNA (1)...(19): siRNA sense strand
agacuuugccaagguacua

SEQ ID NO: 217000 - RNA, 19 nt, Homo sapiens
  misc_RNA (1)...(19): siRNA sense strand
caagcaaguggcaaguuca

SEQ ID NO: 217001 - RNA, 19 nt, Homo sapiens
  misc_RNA (1)...(19): siRNA sense strand
agacaaguacagauaccuu

SEQ ID NO: 217002 - RNA, 19 nt, Homo sapiens
  misc_RNA (1)...(19): siRNA sense strand
gcaucauuucccuguguaa

SEQ ID NO: 217003 - RNA, 19 nt, Homo sapiens
  misc_RNA (1)...(19): siRNA sense strand
cugcaaagaguguccaauc

SEQ ID NO: 217004 - RNA, 19 nt, Homo sapiens
  misc_RNA (1)...(19): siRNA sense strand
cuuauaggacugccaugaa

SEQ ID NO: 217005 - RNA, 19 nt, Homo sapiens
  misc_RNA (1)...(19): siRNA sense strand
caaagaguguccaaucauu

SEQ ID NO: 217006 - RNA, 19 nt, Homo sapiens
  misc_RNA (1)...(19): siRNA sense strand
uagcugaccugaauaaugu

SEQ ID NO: 217007 - RNA, 19 nt, Homo sapiens
  misc_RNA (1)...(19): siRNA sense strand
gcaugauucuauccaaauu

SEQ ID NO: 217008 - RNA, 19 nt, Homo sapiens
  misc_RNA (1)...(19): siRNA sense strand
ugaacuggcugcugaaugu

SEQ ID NO: 217009 - RNA, 19 nt, Homo sapiens
  misc_RNA (1)...(19): siRNA sense strand
gauauccugcagauuauua

SEQ ID NO: 217010 - RNA, 19 nt, Homo sapiens
  misc_RNA (1)...(19): siRNA sense strand
gagaagauguucgagacuu

SEQ ID NO: 217011 - RNA, 19 nt, Homo sapiens
  misc_RNA (1)...(19): siRNA sense strand
gcacuuuaauuaugacauc

SEQ ID NO: 217012 - RNA, 19 nt, Homo sapiens
  misc_RNA (1)...(19): siRNA sense strand
guaaagcacauuuggaaga

SEQ ID NO: 217013 - RNA, 19 nt, Homo sapiens
  misc_RNA (1)...(19): siRNA sense strand
gaauauugcacuccgacua

SEQ ID NO: 217014 - RNA, 19 nt, Homo sapiens
  misc_RNA (1)...(19): siRNA sense strand
uuauaggacugccaugaaa

SEQ ID NO: 217015 - RNA, 19 nt, Homo sapiens
  misc_RNA (1)...(19): siRNA sense strand
gggugaaguugcauccuuu

SEQ ID NO: 217016 - RNA, 19 nt, Homo sapiens
  misc_RNA (1)...(19): siRNA sense strand
gcaagagcacaacaauuug

SEQ ID NO: 217017 - RNA, 19 nt, Homo sapiens
  misc_RNA (1)...(19): siRNA sense strand
gcacaacaauuuggucaac

SEQ ID NO: 217018 - RNA, 19 nt, Homo sapiens
  misc_RNA (1)...(19): siRNA sense strand
agcaagagcacaacaauuu

SEQ ID NO: 217019 - RNA, 19 nt, Homo sapiens
  misc_RNA (1)...(19): siRNA sense strand
agaagauguucgagacuuu

SEQ ID NO: 217020 - RNA, 19 nt, Homo sapiens
  misc_RNA (1)...(19): siRNA sense strand
gagcaagagcacaacaauu

SEQ ID NO: 217021 - RNA, 19 nt, Homo sapiens
  misc_RNA (1)...(19): siRNA sense strand
ucaagcaaguggcaaguuc

SEQ ID NO: 217022 - RNA, 19 nt, Homo sapiens
  misc_RNA (1)...(19): siRNA sense strand
ccacgagacucaaacaacu

SEQ ID NO: 217023 - RNA, 19 nt, Homo sapiens
  misc_RNA (1)...(19): siRNA sense strand
cagcacaaccucaagcaaa

SEQ ID NO: 217024 - RNA, 19 nt, Homo sapiens
  misc_RNA (1)...(19): siRNA sense strand
gcaaagaguguccaaucau

SEQ ID NO: 217025 - RNA, 19 nt, Homo sapiens
  misc_RNA (1)...(19): siRNA sense strand
auggauauccugcagauua

SEQ ID NO: 217026 - RNA, 19 nt, Homo sapiens
  misc_RNA (1)...(19): siRNA sense strand
uguaacaucugcaaagagu

SEQ ID NO: 217027 - RNA, 19 nt, Homo sapiens
  misc_RNA (1)...(19): siRNA sense strand
guccggagcugcuuccaau

SEQ ID NO: 217028 - RNA, 19 nt, Homo sapiens
  misc_RNA (1)...(19): siRNA sense strand
gcaaguggcaaguucaaca

SEQ ID NO: 217029 - RNA, 19 nt, Homo sapiens
  misc_RNA (1)...(19): siRNA sense strand
gcuuccaauuugcuaauaa

SEQ ID NO: 217030 - RNA, 19 nt, Homo sapiens
  misc_RNA (1)...(19): siRNA sense strand
uggaagacaaguacagaua

SEQ ID NO: 217031 - RNA, 19 nt, Homo sapiens
  misc_RNA (1)...(19): siRNA sense strand
ggauccguguccugucuuu

SEQ ID NO: 217032 - RNA, 19 nt, Homo sapiens
  misc_RNA (1)...(19): siRNA sense strand
gucuuuagcugaccugaau

SEQ ID NO: 217033 - RNA, 19 nt, Homo sapiens
  misc_RNA (1)...(19): siRNA sense strand
gacaaguacagauaccuuu

SEQ ID NO: 217034 - RNA, 19 nt, Homo sapiens
  misc_RNA (1)...(19): siRNA sense strand
ccaagcaucaggccaaaug

SEQ ID NO: 217035 - RNA, 19 nt, Homo sapiens
  misc_RNA (1)...(19): siRNA sense strand
ggagcaagagcacaacaau

SEQ ID NO: 217036 - RNA, 19 nt, Homo sapiens
  misc_RNA (1)...(19): siRNA sense strand
guguaaagcacauuuggaa

SEQ ID NO: 217037 - RNA, 19 nt, Homo sapiens
  misc_RNA (1)...(19): siRNA sense strand
caagacaguugggugaagu

SEQ ID NO: 217038 - RNA, 19 nt, Homo sapiens
  misc_RNA (1)...(19): siRNA sense strand
gaagauguucgagacuuug

SEQ ID NO: 217039 - RNA, 19 nt, Homo sapiens
  misc_RNA (1)...(19): siRNA sense strand
gucagauucucagcuuaua

SEQ ID NO: 217040 - RNA, 19 nt, Homo sapiens
  misc_RNA (1)...(19): siRNA sense strand
uaacaucugcaaagagugu

SEQ ID NO: 217041 - RNA, 19 nt, Homo sapiens
  misc_RNA (1)...(19): siRNA sense strand
cggagcugcuuccaauuug

SEQ ID NO: 217042 - RNA, 19 nt, Homo sapiens
  misc_RNA (1)...(19): siRNA sense strand
gaagacaaguacagauacc

SEQ ID NO: 217043 - RNA, 19 nt, Homo sapiens
  misc_RNA (1)...(19): siRNA sense strand
ccauggauauccugcagau

SEQ ID NO: 217044 - RNA, 19 nt, Homo sapiens
  misc_RNA (1)...(19): siRNA sense strand
ggcaucauuucccugugua

SEQ ID NO: 217045 - RNA, 19 nt, Homo sapiens
  misc_RNA (1)...(19): siRNA sense strand
uggauauccugcagauuau

SEQ ID NO: 217046 - RNA, 19 nt, Homo sapiens
  misc_RNA (1)...(19): siRNA sense strand
ggaagacaaguacagauac

SEQ ID NO: 217047 - RNA, 19 nt, Homo sapiens
  misc_RNA (1)...(19): siRNA sense strand
ugcaaagaguguccaauca

SEQ ID NO: 217048 - RNA, 19 nt, Homo sapiens
  misc_RNA (1)...(19): siRNA sense strand
guggauaugugucugaacu

SEQ ID NO: 217049 - RNA, 19 nt, Homo sapiens
  misc_RNA (1)...(19): siRNA sense strand
acuggcugcugaauguuua

SEQ ID NO: 217050 - RNA, 19 nt, Homo sapiens
  misc_RNA (1)...(19): siRNA sense strand
acuaucccaugguggaaua

SEQ ID NO: 217051 - RNA, 19 nt, Homo sapiens
  misc_RNA (1)...(19): siRNA sense strand
ccggagcugcuuccaauuu

SEQ ID NO: 217052 - RNA, 19 nt, Homo sapiens
  misc_RNA (1)...(19): siRNA sense strand
ccaaauuccaagacaguug

SEQ ID NO: 217053 - RNA, 19 nt, Homo sapiens
  misc_RNA (1)...(19): siRNA sense strand
cagaaacugccaagcauca

SEQ ID NO: 217054 - RNA, 19 nt, Homo sapiens
  misc_RNA (1)...(19): siRNA sense strand
uaugacaucugccaaagcu

SEQ ID NO: 217055 - RNA, 19 nt, Homo sapiens
  misc_RNA (1)...(19): siRNA sense strand
aaugucagauucucagcuu

SEQ ID NO: 217056 - RNA, 19 nt, Homo sapiens
  misc_RNA (1)...(19): siRNA sense strand
ucgagacuuugccaaggua

SEQ ID NO: 217057 - RNA, 19 nt, Homo sapiens
  misc_RNA (1)...(19): siRNA sense strand
gcaaaaggccauaaaaugc

SEQ ID NO: 217058 - RNA, 19 nt, Homo sapiens
  misc_RNA (1)...(19): siRNA sense strand
cugcaugauucuauccaaa

SEQ ID NO: 217059 - RNA, 19 nt, Homo sapiens
  misc_RNA (1)...(19): siRNA sense strand
uaaagcacauuuggaagac

SEQ ID NO: 217060 - RNA, 19 nt, Homo sapiens
  misc_RNA (1)...(19): siRNA sense strand
acaggagucuaaagcacuu

SEQ ID NO: 217061 - RNA, 19 nt, Homo sapiens
  misc_RNA (1)...(19): siRNA sense strand
acagauaccuuuucaagca

SEQ ID NO: 217062 - RNA, 19 nt, Homo sapiens
  misc_RNA (1)...(19): siRNA sense strand
aagcacauuuggaagacaa

SEQ ID NO: 217063 - RNA, 19 nt, Homo sapiens
  misc_RNA (1)...(19): siRNA sense strand
gcuaauaauaagccagaga

SEQ ID NO: 217064 - RNA, 19 nt, Homo sapiens
  misc_RNA (1)...(19): siRNA sense strand
caagagcacaacaauuugg

SEQ ID NO: 217065 - RNA, 19 nt, Homo sapiens
  misc_RNA (1)...(19): siRNA sense strand
ccugucagcugcaugugau

SEQ ID NO: 217066 - RNA, 19 nt, Homo sapiens
  misc_RNA (1)...(19): siRNA sense strand
gcugcugaauguuuaugau

SEQ ID NO: 217067 - RNA, 19 nt, Homo sapiens
  misc_RNA (1)...(19): siRNA sense strand
acagagcucuaccagucuu

SEQ ID NO: 217068 - RNA, 19 nt, Homo sapiens
  misc_RNA (1)...(19): siRNA sense strand
acaguugggugaaguugca

SEQ ID NO: 217069 - RNA, 19 nt, Homo sapiens
  misc_RNA (1)...(19): siRNA sense strand
guuugaccacuauuuauga

SEQ ID NO: 217070 - RNA, 19 nt, Homo sapiens
  misc_RNA (1)...(19): siRNA sense strand
gcuuauaggacugccauga

SEQ ID NO: 217071 - RNA, 19 nt, Homo sapiens
  misc_RNA (1)...(19): siRNA sense strand
caucaggccaaauguaaca

SEQ ID NO: 217072 - RNA, 19 nt, Homo sapiens
  misc_RNA (1)...(19): siRNA sense strand
gauucuauccaaauuccaa

SEQ ID NO: 217073 - RNA, 19 nt, Homo sapiens
  misc_RNA (1)...(19): siRNA sense strand
ggcaaguucaacaggauuu

SEQ ID NO: 217074 - RNA, 19 nt, Homo sapiens
  misc_RNA (1)...(19): siRNA sense strand
gaacuggcugcugaauguu

SEQ ID NO: 217075 - RNA, 19 nt, Homo sapiens
  misc_RNA (1)...(19): siRNA sense strand
cugcugaauguuuaugaua

SEQ ID NO: 217076 - RNA, 19 nt, Homo sapiens
  misc_RNA (1)...(19): siRNA sense strand
aagcaucaggccaaaugua

SEQ ID NO: 217077 - RNA, 19 nt, Homo sapiens
  misc_RNA (1)...(19): siRNA sense strand
uggcaucauuucccugugu

SEQ ID NO: 217078 - RNA, 19 nt, Homo sapiens
  misc_RNA (1)...(19): siRNA sense strand
ccaugaaacuccgaagacu

SEQ ID NO: 217079 - RNA, 19 nt, Homo sapiens
  misc_RNA (1)...(19): siRNA sense strand
auaauaagccagagaucga

SEQ ID NO: 217080 - RNA, 19 nt, Homo sapiens
  misc_RNA (1)...(19): siRNA sense strand
cuaauaauaagccagagau

SEQ ID NO: 217081 - RNA, 19 nt, Homo sapiens
  misc_RNA (1)...(19): siRNA sense strand
ugggugaaguugcauccuu

SEQ ID NO: 217082 - RNA, 19 nt, Homo sapiens
  misc_RNA (1)...(19): siRNA sense strand
caucauuucccuguguaaa

SEQ ID NO: 217083 - RNA, 19 nt, Homo sapiens
  misc_RNA (1)...(19): siRNA sense strand
gcguggauaugugucugaa

SEQ ID NO: 217084 - RNA, 19 nt, Homo sapiens
  misc_RNA (1)...(19): siRNA sense strand
gcacuaucccaugguggaa

SEQ ID NO: 217085 - RNA, 19 nt, Homo sapiens
  misc_RNA (1)...(19): siRNA sense strand
gagccugucagcugcaugu

SEQ ID NO: 217086 - RNA, 19 nt, Homo sapiens
  misc_RNA (1)...(19): siRNA sense strand
guacagauaccuuuucaag

SEQ ID NO: 217087 - RNA, 19 nt, Homo sapiens
  misc_RNA (1)...(19): siRNA sense strand
gucccucucugcguggaua

SEQ ID NO: 217088 - RNA, 19 nt, Homo sapiens
  misc_RNA (1)...(19): siRNA sense strand
ggagcugcuuccaauuugc

SEQ ID NO: 217089 - RNA, 19 nt, Homo sapiens
  misc_RNA (1)...(19): siRNA sense strand
uuagcugaccugaauaaug

SEQ ID NO: 217090 - RNA, 19 nt, Homo sapiens
  misc_RNA (1)...(19): siRNA sense strand
guggcaaguucaacaggau

SEQ ID NO: 217091 - RNA, 19 nt, Homo sapiens
  misc_RNA (1)...(19): siRNA sense strand
acaacaauuuggucaacgu

SEQ ID NO: 217092 - RNA, 19 nt, Homo sapiens
  misc_RNA (1)...(19): siRNA sense strand
gacuacaucaggagaagau

SEQ ID NO: 217093 - RNA, 19 nt, Homo sapiens
  misc_RNA (1)...(19): siRNA sense strand
uaauaagccagagaucgaa

SEQ ID NO: 217094 - RNA, 19 nt, Homo sapiens
  misc_RNA (1)...(19): siRNA sense strand
ugucagauucucagcuuau

SEQ ID NO: 217095 - RNA, 19 nt, Homo sapiens
  misc_RNA (1)...(19): siRNA sense strand
ggauauccugcagauuauu

SEQ ID NO: 217096 - RNA, 19 nt, Homo sapiens
  misc_RNA (1)...(19): siRNA sense strand
agcaucaggccaaauguaa

SEQ ID NO: 217097 - RNA, 19 nt, Homo sapiens
  misc_RNA (1)...(19): siRNA sense strand
gcccuuugcuuggaucucu

SEQ ID NO: 217098 - RNA, 19 nt, Homo sapiens
  misc_RNA (1)...(19): siRNA sense strand
gcugaauguuuaugauacg

SEQ ID NO: 217099 - RNA, 19 nt, Homo sapiens
  misc_RNA (1)...(19): siRNA sense strand
agacuuugccaagguacua

SEQ ID NO: 217100 - RNA, 19 nt, Homo sapiens
  misc_RNA (1)...(19): siRNA sense strand
caagcaaguggcaaguuca

SEQ ID NO: 217101 - RNA, 19 nt, Homo sapiens
  misc_RNA (1)...(19): siRNA sense strand
agacaaguacagauaccuu

SEQ ID NO: 217102 - RNA, 19 nt, Homo sapiens
  misc_RNA (1)...(19): siRNA sense strand
gcaucauuucccuguguaa

SEQ ID NO: 217103 - RNA, 19 nt, Homo sapiens
  misc_RNA (1)...(19): siRNA sense strand
cugcaaagaguguccaauc

SEQ ID NO: 217104 - RNA, 19 nt, Homo sapiens
  misc_RNA (1)...(19): siRNA sense strand
cuuauaggacugccaugaa

SEQ ID NO: 217105 - RNA, 19 nt, Homo sapiens
  misc_RNA (1)...(19): siRNA sense strand
caaagaguguccaaucauu

SEQ ID NO: 217106 - RNA, 19 nt, Homo sapiens
  misc_RNA (1)...(19): siRNA sense strand
uagcugaccugaauaaugu

SEQ ID NO: 217107 - RNA, 19 nt, Homo sapiens
  misc_RNA (1)...(19): siRNA sense strand
gcaugauucuauccaaauu

SEQ ID NO: 217108 - RNA, 19 nt, Homo sapiens
  misc_RNA (1)...(19): siRNA sense strand
ugaacuggcugcugaaugu

SEQ ID NO: 217109 - RNA, 19 nt, Homo sapiens
  misc_RNA (1)...(19): siRNA sense strand
gauauccugcagauuauua

SEQ ID NO: 217110 - RNA, 19 nt, Homo sapiens
  misc_RNA (1)...(19): siRNA sense strand
gagaagauguucgagacuu

SEQ ID NO: 217111 - RNA, 19 nt, Homo sapiens
  misc_RNA (1)...(19): siRNA sense strand
gcacuuuaauuaugacauc

SEQ ID NO: 217112 - RNA, 19 nt, Homo sapiens
  misc_RNA (1)...(19): siRNA sense strand
guaaagcacauuuggaaga

SEQ ID NO: 217113 - RNA, 19 nt, Homo sapiens
  misc_RNA (1)...(19): siRNA sense strand
gaauauugcacuccgacua

SEQ ID NO: 217114 - RNA, 19 nt, Homo sapiens
  misc_RNA (1)...(19): siRNA sense strand
uuauaggacugccaugaaa

SEQ ID NO: 217115 - RNA, 19 nt, Homo sapiens
  misc_RNA (1)...(19): siRNA sense strand
gggugaaguugcauccuuu

SEQ ID NO: 217116 - RNA, 19 nt, Homo sapiens
  misc_RNA (1)...(19): siRNA sense strand
gcaagagcacaacaauuug

SEQ ID NO: 217117 - RNA, 19 nt, Homo sapiens
  misc_RNA (1)...(19): siRNA sense strand
gcacaacaauuuggucaac

SEQ ID NO: 217118 - RNA, 19 nt, Homo sapiens
  misc_RNA (1)...(19): siRNA sense strand
agcaagagcacaacaauuu

SEQ ID NO: 217119 - RNA, 19 nt, Homo sapiens
  misc_RNA (1)...(19): siRNA sense strand
agaagauguucgagacuuu

SEQ ID NO: 217120 - RNA, 19 nt, Homo sapiens
  misc_RNA (1)...(19): siRNA sense strand
gagcaagagcacaacaauu

SEQ ID NO: 217121 - RNA, 19 nt, Homo sapiens
  misc_RNA (1)...(19): siRNA sense strand
ucaagcaaguggcaaguuc

SEQ ID NO: 217122 - RNA, 19 nt, Homo sapiens
  misc_RNA (1)...(19): siRNA sense strand
ccacgagacucaaacaacu

SEQ ID NO: 217123 - RNA, 19 nt, Homo sapiens
  misc_RNA (1)...(19): siRNA sense strand
cagcacaaccucaagcaaa

SEQ ID NO: 217124 - RNA, 19 nt, Homo sapiens
  misc_RNA (1)...(19): siRNA sense strand
gcaaagaguguccaaucau

SEQ ID NO: 217125 - RNA, 19 nt, Homo sapiens
  misc_RNA (1)...(19): siRNA sense strand
auggauauccugcagauua

SEQ ID NO: 217126 - RNA, 19 nt, Homo sapiens
  misc_RNA (1)...(19): siRNA sense strand
uguaacaucugcaaagagu

SEQ ID NO: 217127 - RNA, 19 nt, Homo sapiens
  misc_RNA (1)...(19): siRNA sense strand
guccggagcugcuuccaau

SEQ ID NO: 217128 - RNA, 19 nt, Homo sapiens
  misc_RNA (1)...(19): siRNA sense strand
gcaaguggcaaguucaaca

SEQ ID NO: 217129 - RNA, 19 nt, Homo sapiens
  misc_RNA (1)...(19): siRNA sense strand
gcuuccaauuugcuaauaa

SEQ ID NO: 217130 - RNA, 19 nt, Homo sapiens
  misc_RNA (1)...(19): siRNA sense strand
uggaagacaaguacagaua

SEQ ID NO: 217131 - RNA, 19 nt, Homo sapiens
  misc_RNA (1)...(19): siRNA sense strand
ggauccguguccugucuuu

SEQ ID NO: 217132 - RNA, 19 nt, Homo sapiens
  misc_RNA (1)...(19): siRNA sense strand
gucuuuagcugaccugaau

SEQ ID NO: 217133 - RNA, 19 nt, Homo sapiens
  misc_RNA (1)...(19): siRNA sense strand
gacaaguacagauaccuuu

SEQ ID NO: 217134 - RNA, 19 nt, Homo sapiens
  misc_RNA (1)...(19): siRNA sense strand
ccaagcaucaggccaaaug

SEQ ID NO: 217135 - RNA, 19 nt, Homo sapiens
  misc_RNA (1)...(19): siRNA sense strand
ggagcaagagcacaacaau

SEQ ID NO: 217136 - RNA, 19 nt, Homo sapiens
  misc_RNA (1)...(19): siRNA sense strand
guguaaagcacauuuggaa

SEQ ID NO: 217137 - RNA, 19 nt, Homo sapiens
  misc_RNA (1)...(19): siRNA sense strand
caagacaguugggugaagu

SEQ ID NO: 217138 - RNA, 19 nt, Homo sapiens
  misc_RNA (1)...(19): siRNA sense strand
gaagauguucgagacuuug

SEQ ID NO: 217139 - RNA, 19 nt, Homo sapiens
  misc_RNA (1)...(19): siRNA sense strand
gucagauucucagcuuaua

SEQ ID NO: 217140 - RNA, 19 nt, Homo sapiens
  misc_RNA (1)...(19): siRNA sense strand
uaacaucugcaaagagugu

SEQ ID NO: 217141 - RNA, 19 nt, Homo sapiens
  misc_RNA (1)...(19): siRNA sense strand
cggagcugcuuccaauuug

SEQ ID NO: 217142 - RNA, 19 nt, Homo sapiens
  misc_RNA (1)...(19): siRNA sense strand
gaagacaaguacagauacc

SEQ ID NO: 217143 - RNA, 19 nt, Homo sapiens
  misc_RNA (1)...(19): siRNA sense strand
ccauggauauccugcagau

SEQ ID NO: 217144 - RNA, 19 nt, Homo sapiens
  misc_RNA (1)...(19): siRNA sense strand
ggcaucauuucccugugua

SEQ ID NO: 217145 - RNA, 19 nt, Homo sapiens
  misc_RNA (1)...(19): siRNA sense strand
uggauauccugcagauuau

SEQ ID NO: 217146 - RNA, 19 nt, Homo sapiens
  misc_RNA (1)...(19): siRNA sense strand
ggaagacaaguacagauac

SEQ ID NO: 217147 - RNA, 19 nt, Homo sapiens
  misc_RNA (1)...(19): siRNA sense strand
ugcaaagaguguccaauca

SEQ ID NO: 217148 - RNA, 19 nt, Homo sapiens
  misc_RNA (1)...(19): siRNA sense strand
guggauaugugucugaacu

SEQ ID NO: 217149 - RNA, 19 nt, Homo sapiens
  misc_RNA (1)...(19): siRNA sense strand
acuggcugcugaauguuua

SEQ ID NO: 217150 - RNA, 19 nt, Homo sapiens
  misc_RNA (1)...(19): siRNA sense strand
acuaucccaugguggaaua

SEQ ID NO: 217151 - RNA, 19 nt, Homo sapiens
  misc_RNA (1)...(19): siRNA sense strand
ccggagcugcuuccaauuu

SEQ ID NO: 217152 - RNA, 19 nt, Homo sapiens
  misc_RNA (1)...(19): siRNA sense strand
ccaaauuccaagacaguug

SEQ ID NO: 217153 - RNA, 19 nt, Homo sapiens
  misc_RNA (1)...(19): siRNA sense strand
cagaaacugccaagcauca

SEQ ID NO: 217154 - RNA, 19 nt, Homo sapiens
  misc_RNA (1)...(19): siRNA sense strand
uaugacaucugccaaagcu

SEQ ID NO: 217155 - RNA, 19 nt, Homo sapiens
  misc_RNA (1)...(19): siRNA sense strand
aaugucagauucucagcuu

SEQ ID NO: 217156 - RNA, 19 nt, Homo sapiens
  misc_RNA (1)...(19): siRNA sense strand
ucgagacuuugccaaggua

SEQ ID NO: 217157 - RNA, 19 nt, Homo sapiens
  misc_RNA (1)...(19): siRNA sense strand
gcaaaaggccauaaaaugc

SEQ ID NO: 217158 - RNA, 19 nt, Homo sapiens
  misc_RNA (1)...(19): siRNA sense strand
cugcaugauucuauccaaa

SEQ ID NO: 217159 - RNA, 19 nt, Homo sapiens
  misc_RNA (1)...(19): siRNA sense strand
uaaagcacauuuggaagac

SEQ ID NO: 217160 - RNA, 19 nt, Homo sapiens
  misc_RNA (1)...(19): siRNA sense strand
acaggagucuaaagcacuu

SEQ ID NO: 217161 - RNA, 19 nt, Homo sapiens
  misc_RNA (1)...(19): siRNA sense strand
acagauaccuuuucaagca

SEQ ID NO: 217162 - RNA, 19 nt, Homo sapiens
  misc_RNA (1)...(19): siRNA sense strand
aagcacauuuggaagacaa

SEQ ID NO: 217163 - RNA, 19 nt, Homo sapiens
  misc_RNA (1)...(19): siRNA sense strand
gcuaauaauaagccagaga

SEQ ID NO: 217164 - RNA, 19 nt, Homo sapiens
  misc_RNA (1)...(19): siRNA sense strand
caagagcacaacaauuugg

SEQ ID NO: 217165 - RNA, 19 nt, Homo sapiens
  misc_RNA (1)...(19): siRNA sense strand
ccugucagcugcaugugau

SEQ ID NO: 217166 - RNA, 19 nt, Homo sapiens
  misc_RNA (1)...(19): siRNA sense strand
gcugcugaauguuuaugau

SEQ ID NO: 217167 - RNA, 19 nt, Homo sapiens
  misc_RNA (1)...(19): siRNA sense strand
acagagcucuaccagucuu

SEQ ID NO: 217168 - RNA, 19 nt, Homo sapiens
  misc_RNA (1)...(19): siRNA sense strand
acaguugggugaaguugca

SEQ ID NO: 217169 - RNA, 19 nt, Homo sapiens
  misc_RNA (1)...(19): siRNA sense strand
guuugaccacuauuuauga

SEQ ID NO: 217170 - RNA, 19 nt, Homo sapiens
  misc_RNA (1)...(19): siRNA sense strand
gcuuauaggacugccauga

SEQ ID NO: 217171 - RNA, 19 nt, Homo sapiens
  misc_RNA (1)...(19): siRNA sense strand
caucaggccaaauguaaca

SEQ ID NO: 217172 - RNA, 19 nt, Homo sapiens
  misc_RNA (1)...(19): siRNA sense strand
gauucuauccaaauuccaa

SEQ ID NO: 217173 - RNA, 19 nt, Homo sapiens
  misc_RNA (1)...(19): siRNA sense strand
ggcaaguucaacaggauuu

SEQ ID NO: 217174 - RNA, 19 nt, Homo sapiens
  misc_RNA (1)...(19): siRNA sense strand
gaacuggcugcugaauguu

SEQ ID NO: 217175 - RNA, 19 nt, Homo sapiens
  misc_RNA (1)...(19): siRNA sense strand
cugcugaauguuuaugaua

SEQ ID NO: 217176 - RNA, 19 nt, Homo sapiens
  misc_RNA (1)...(19): siRNA sense strand
aagcaucaggccaaaugua

SEQ ID NO: 217177 - RNA, 19 nt, Homo sapiens
  misc_RNA (1)...(19): siRNA sense strand
uggcaucauuucccugugu

SEQ ID NO: 217178 - RNA, 19 nt, Homo sapiens
  misc_RNA (1)...(19): siRNA sense strand
ccaugaaacuccgaagacu

SEQ ID NO: 217179 - RNA, 19 nt, Homo sapiens
  misc_RNA (1)...(19): siRNA sense strand
auaauaagccagagaucga

SEQ ID NO: 217180 - RNA, 19 nt, Homo sapiens
  misc_RNA (1)...(19): siRNA sense strand
cuaauaauaagccagagau

SEQ ID NO: 217181 - RNA, 19 nt, Homo sapiens
  misc_RNA (1)...(19): siRNA sense strand
ugggugaaguugcauccuu

SEQ ID NO: 217182 - RNA, 19 nt, Homo sapiens
  misc_RNA (1)...(19): siRNA sense strand
caucauuucccuguguaaa

SEQ ID NO: 217183 - RNA, 19 nt, Homo sapiens
  misc_RNA (1)...(19): siRNA sense strand
gcguggauaugugucugaa

SEQ ID NO: 217184 - RNA, 19 nt, Homo sapiens
  misc_RNA (1)...(19): siRNA sense strand
gcacuaucccaugguggaa

SEQ ID NO: 217185 - RNA, 19 nt, Homo sapiens
  misc_RNA (1)...(19): siRNA sense strand
gagccugucagcugcaugu

SEQ ID NO: 217186 - RNA, 19 nt, Homo sapiens
  misc_RNA (1)...(19): siRNA sense strand
guacagauaccuuuucaag

SEQ ID NO: 217187 - RNA, 19 nt, Homo sapiens
  misc_RNA (1)...(19): siRNA sense strand
gucccucucugcguggaua

SEQ ID NO: 217188 - RNA, 19 nt, Homo sapiens
  misc_RNA (1)...(19): siRNA sense strand
ggagcugcuuccaauuugc

SEQ ID NO: 217189 - RNA, 19 nt, Homo sapiens
  misc_RNA (1)...(19): siRNA sense strand
uuagcugaccugaauaaug

SEQ ID NO: 217190 - RNA, 19 nt, Homo sapiens
  misc_RNA (1)...(19): siRNA sense strand
guggcaaguucaacaggau

SEQ ID NO: 217191 - RNA, 19 nt, Homo sapiens
  misc_RNA (1)...(19): siRNA sense strand
acaacaauuuggucaacgu

SEQ ID NO: 217192 - RNA, 19 nt, Homo sapiens
  misc_RNA (1)...(19): siRNA sense strand
gacuacaucaggagaagau

SEQ ID NO: 217193 - RNA, 19 nt, Homo sapiens
  misc_RNA (1)...(19): siRNA sense strand
uaauaagccagagaucgaa

SEQ ID NO: 217194 - RNA, 19 nt, Homo sapiens
  misc_RNA (1)...(19): siRNA sense strand
ugucagauucucagcuuau

SEQ ID NO: 217195 - RNA, 19 nt, Homo sapiens
  misc_RNA (1)...(19): siRNA sense strand
ggauauccugcagauuauu

SEQ ID NO: 217196 - RNA, 19 nt, Homo sapiens
  misc_RNA (1)...(19): siRNA sense strand
agcaucaggccaaauguaa

SEQ ID NO: 217197 - RNA, 19 nt, Homo sapiens
  misc_RNA (1)...(19): siRNA sense strand
gcccuuugcuuggaucucu

SEQ ID NO: 217198 - RNA, 19 nt, Homo sapiens
  misc_RNA (1)...(19): siRNA sense strand
gcugaauguuuaugauacg

SEQ ID NO: 217199 - RNA, 19 nt, Homo sapiens
  misc_RNA (1)...(19): siRNA sense strand
agacuuugccaagguacua

SEQ ID NO: 217200 - RNA, 19 nt, Homo sapiens
  misc_RNA (1)...(19): siRNA sense strand
caagcaaguggcaaguuca

SEQ ID NO: 217201 - RNA, 19 nt, Homo sapiens
  misc_RNA (1)...(19): siRNA sense strand
agacaaguacagauaccuu

SEQ ID NO: 217202 - RNA, 19 nt, Homo sapiens
  misc_RNA (1)...(19): siRNA sense strand
gcaucauuucccuguguaa

SEQ ID NO: 217203 - RNA, 19 nt, Homo sapiens
  misc_RNA (1)...(19): siRNA sense strand
cugcaaagaguguccaauc

SEQ ID NO: 217204 - RNA, 19 nt, Homo sapiens
  misc_RNA (1)...(19): siRNA sense strand
cuuauaggacugccaugaa

SEQ ID NO: 217205 - RNA, 19 nt, Homo sapiens
  misc_RNA (1)...(19): siRNA sense strand
caaagaguguccaaucauu

SEQ ID NO: 217206 - RNA, 19 nt, Homo sapiens
  misc_RNA (1)...(19): siRNA sense strand
uagcugaccugaauaaugu

SEQ ID NO: 217207 - RNA, 19 nt, Homo sapiens
  misc_RNA (1)...(19): siRNA sense strand
gcaugauucuauccaaauu

SEQ ID NO: 217208 - RNA, 19 nt, Homo sapiens
  misc_RNA (1)...(19): siRNA sense strand
ugaacuggcugcugaaugu

SEQ ID NO: 217209 - RNA, 19 nt, Homo sapiens
  misc_RNA (1)...(19): siRNA sense strand
gauauccugcagauuauua

SEQ ID NO: 217210 - RNA, 19 nt, Homo sapiens
  misc_RNA (1)...(19): siRNA sense strand
gagaagauguucgagacuu

SEQ ID NO: 217211 - RNA, 19 nt, Homo sapiens
  misc_RNA (1)...(19): siRNA sense strand
gcacuuuaauuaugacauc

SEQ ID NO: 217212 - RNA, 19 nt, Homo sapiens
  misc_RNA (1)...(19): siRNA sense strand
guaaagcacauuuggaaga

SEQ ID NO: 217213 - RNA, 19 nt, Homo sapiens
  misc_RNA (1)...(19): siRNA sense strand
gaauauugcacuccgacua

SEQ ID NO: 217214 - RNA, 19 nt, Homo sapiens
  misc_RNA (1)...(19): siRNA sense strand
uuauaggacugccaugaaa

SEQ ID NO: 217215 - RNA, 19 nt, Homo sapiens
  misc_RNA (1)...(19): siRNA sense strand
gggugaaguugcauccuuu

SEQ ID NO: 217216 - RNA, 19 nt, Homo sapiens
  misc_RNA (1)...(19): siRNA sense strand
gcaagagcacaacaauuug

SEQ ID NO: 217217 - RNA, 19 nt, Homo sapiens
  misc_RNA (1)...(19): siRNA sense strand
gcacaacaauuuggucaac

SEQ ID NO: 217218 - RNA, 19 nt, Homo sapiens
  misc_RNA (1)...(19): siRNA sense strand
agcaagagcacaacaauuu

SEQ ID NO: 217219 - RNA, 19 nt, Homo sapiens
  misc_RNA (1)...(19): siRNA sense strand
agaagauguucgagacuuu

SEQ ID NO: 217220 - RNA, 19 nt, Homo sapiens
  misc_RNA (1)...(19): siRNA sense strand
gagcaagagcacaacaauu

SEQ ID NO: 217221 - RNA, 19 nt, Homo sapiens
  misc_RNA (1)...(19): siRNA sense strand
ucaagcaaguggcaaguuc

SEQ ID NO: 217222 - RNA, 19 nt, Homo sapiens
  misc_RNA (1)...(19): siRNA sense strand
ccacgagacucaaacaacu

SEQ ID NO: 217223 - RNA, 19 nt, Homo sapiens
  misc_RNA (1)...(19): siRNA sense strand
cagcacaaccucaagcaaa

SEQ ID NO: 217224 - RNA, 19 nt, Homo sapiens
  misc_RNA (1)...(19): siRNA sense strand
gcaaagaguguccaaucau

SEQ ID NO: 217225 - RNA, 19 nt, Homo sapiens
  misc_RNA (1)...(19): siRNA sense strand
auggauauccugcagauua

SEQ ID NO: 217226 - RNA, 19 nt, Homo sapiens
  misc_RNA (1)...(19): siRNA sense strand
uguaacaucugcaaagagu

SEQ ID NO: 217227 - RNA, 19 nt, Homo sapiens
  misc_RNA (1)...(19): siRNA sense strand
guccggagcugcuuccaau

SEQ ID NO: 217228 - RNA, 19 nt, Homo sapiens
  misc_RNA (1)...(19): siRNA sense strand
gcaaguggcaaguucaaca

SEQ ID NO: 217229 - RNA, 19 nt, Homo sapiens
  misc_RNA (1)...(19): siRNA sense strand
gcuuccaauuugcuaauaa

SEQ ID NO: 217230 - RNA, 19 nt, Homo sapiens
  misc_RNA (1)...(19): siRNA sense strand
uggaagacaaguacagaua

SEQ ID NO: 217231 - RNA, 19 nt, Homo sapiens
  misc_RNA (1)...(19): siRNA sense strand
ggauccguguccugucuuu

SEQ ID NO: 217232 - RNA, 19 nt, Homo sapiens
  misc_RNA (1)...(19): siRNA sense strand
gucuuuagcugaccugaau

SEQ ID NO: 217233 - RNA, 19 nt, Homo sapiens
  misc_RNA (1)...(19): siRNA sense strand
gacaaguacagauaccuuu

SEQ ID NO: 217234 - RNA, 19 nt, Homo sapiens
  misc_RNA (1)...(19): siRNA sense strand
ccaagcaucaggccaaaug

SEQ ID NO: 217235 - RNA, 19 nt, Homo sapiens
  misc_RNA (1)...(19): siRNA sense strand
ggagcaagagcacaacaau

SEQ ID NO: 217236 - RNA, 19 nt, Homo sapiens
  misc_RNA (1)...(19): siRNA sense strand
guguaaagcacauuuggaa

SEQ ID NO: 217237 - RNA, 19 nt, Homo sapiens
  misc_RNA (1)...(19): siRNA sense strand
caagacaguugggugaagu

SEQ ID NO: 217238 - RNA, 19 nt, Homo sapiens
  misc_RNA (1)...(19): siRNA sense strand
gaagauguucgagacuuug

SEQ ID NO: 217239 - RNA, 19 nt, Homo sapiens
  misc_RNA (1)...(19): siRNA sense strand
gucagauucucagcuuaua

SEQ ID NO: 217240 - RNA, 19 nt, Homo sapiens
  misc_RNA (1)...(19): siRNA sense strand
uaacaucugcaaagagugu

SEQ ID NO: 217241 - RNA, 19 nt, Homo sapiens
  misc_RNA (1)...(19): siRNA sense strand
cggagcugcuuccaauuug

SEQ ID NO: 217242 - RNA, 19 nt, Homo sapiens
  misc_RNA (1)...(19): siRNA sense strand
gaagacaaguacagauacc

SEQ ID NO: 217243 - RNA, 19 nt, Homo sapiens
  misc_RNA (1)...(19): siRNA sense strand
ccauggauauccugcagau

SEQ ID NO: 217244 - RNA, 19 nt, Homo sapiens
  misc_RNA (1)...(19): siRNA sense strand
ggcaucauuucccugugua

SEQ ID NO: 217245 - RNA, 19 nt, Homo sapiens
  misc_RNA (1)...(19): siRNA sense strand
uggauauccugcagauuau

SEQ ID NO: 217246 - RNA, 19 nt, Homo sapiens
  misc_RNA (1)...(19): siRNA sense strand
ggaagacaaguacagauac

SEQ ID NO: 217247 - RNA, 19 nt, Homo sapiens
  misc_RNA (1)...(19): siRNA sense strand
ugcaaagaguguccaauca

SEQ ID NO: 217248 - RNA, 19 nt, Homo sapiens
  misc_RNA (1)...(19): siRNA sense strand
guggauaugugucugaacu

SEQ ID NO: 217249 - RNA, 19 nt, Homo sapiens
  misc_RNA (1)...(19): siRNA sense strand
acuggcugcugaauguuua

SEQ ID NO: 217250 - RNA, 19 nt, Homo sapiens
  misc_RNA (1)...(19): siRNA sense strand
acuaucccaugguggaaua

SEQ ID NO: 217251 - RNA, 19 nt, Homo sapiens
  misc_RNA (1)...(19): siRNA sense strand
ccggagcugcuuccaauuu

SEQ ID NO: 217252 - RNA, 19 nt, Homo sapiens
  misc_RNA (1)...(19): siRNA sense strand
ccaaauuccaagacaguug

SEQ ID NO: 217253 - RNA, 19 nt, Homo sapiens
  misc_RNA (1)...(19): siRNA sense strand
cagaaacugccaagcauca

SEQ ID NO: 217254 - RNA, 19 nt, Homo sapiens
  misc_RNA (1)...(19): siRNA sense strand
uaugacaucugccaaagcu

SEQ ID NO: 217255 - RNA, 19 nt, Homo sapiens
  misc_RNA (1)...(19): siRNA sense strand
aaugucagauucucagcuu

SEQ ID NO: 217256 - RNA, 19 nt, Homo sapiens
  misc_RNA (1)...(19): siRNA sense strand
ucgagacuuugccaaggua

SEQ ID NO: 217257 - RNA, 19 nt, Homo sapiens
  misc_RNA (1)...(19): siRNA sense strand
gcaaaaggccauaaaaugc

SEQ ID NO: 217258 - RNA, 19 nt, Homo sapiens
  misc_RNA (1)...(19): siRNA sense strand
cugcaugauucuauccaaa

SEQ ID NO: 217259 - RNA, 19 nt, Homo sapiens
  misc_RNA (1)...(19): siRNA sense strand
uaaagcacauuuggaagac

SEQ ID NO: 217260 - RNA, 19 nt, Homo sapiens
  misc_RNA (1)...(19): siRNA sense strand
acaggagucuaaagcacuu

SEQ ID NO: 217261 - RNA, 19 nt, Homo sapiens
  misc_RNA (1)...(19): siRNA sense strand
acagauaccuuuucaagca

SEQ ID NO: 217262 - RNA, 19 nt, Homo sapiens
  misc_RNA (1)...(19): siRNA sense strand
aagcacauuuggaagacaa

SEQ ID NO: 217263 - RNA, 19 nt, Homo sapiens
  misc_RNA (1)...(19): siRNA sense strand
gcuaauaauaagccagaga

SEQ ID NO: 217264 - RNA, 19 nt, Homo sapiens
  misc_RNA (1)...(19): siRNA sense strand
caagagcacaacaauuugg

SEQ ID NO: 217265 - RNA, 19 nt, Homo sapiens
  misc_RNA (1)...(19): siRNA sense strand
ccugucagcugcaugugau

SEQ ID NO: 217266 - RNA, 19 nt, Homo sapiens
  misc_RNA (1)...(19): siRNA sense strand
gcugcugaauguuuaugau

SEQ ID NO: 217267 - RNA, 19 nt, Homo sapiens
  misc_RNA (1)...(19): siRNA sense strand
acagagcucuaccagucuu

SEQ ID NO: 217268 - RNA, 19 nt, Homo sapiens
  misc_RNA (1)...(19): siRNA sense strand
acaguugggugaaguugca

SEQ ID NO: 217269 - RNA, 19 nt, Homo sapiens
  misc_RNA (1)...(19): siRNA sense strand
guuugaccacuauuuauga

SEQ ID NO: 217270 - RNA, 19 nt, Homo sapiens
  misc_RNA (1)...(19): siRNA sense strand
gcuuauaggacugccauga

SEQ ID NO: 217271 - RNA, 19 nt, Homo sapiens
  misc_RNA (1)...(19): siRNA sense strand
caucaggccaaauguaaca

SEQ ID NO: 217272 - RNA, 19 nt, Homo sapiens
  misc_RNA (1)...(19): siRNA sense strand
gauucuauccaaauuccaa

SEQ ID NO: 217273 - RNA, 19 nt, Homo sapiens
  misc_RNA (1)...(19): siRNA sense strand
ggcaaguucaacaggauuu

SEQ ID NO: 217274 - RNA, 19 nt, Homo sapiens
  misc_RNA (1)...(19): siRNA sense strand
gaacuggcugcugaauguu

SEQ ID NO: 217275 - RNA, 19 nt, Homo sapiens
  misc_RNA (1)...(19): siRNA sense strand
cugcugaauguuuaugaua

SEQ ID NO: 217276 - RNA, 19 nt, Homo sapiens
  misc_RNA (1)...(19): siRNA sense strand
aagcaucaggccaaaugua

SEQ ID NO: 217277 - RNA, 19 nt, Homo sapiens
  misc_RNA (1)...(19): siRNA sense strand
uggcaucauuucccugugu

SEQ ID NO: 217278 - RNA, 19 nt, Homo sapiens
  misc_RNA (1)...(19): siRNA sense strand
ccaugaaacuccgaagacu

SEQ ID NO: 217279 - RNA, 19 nt, Homo sapiens
  misc_RNA (1)...(19): siRNA sense strand
auaauaagccagagaucga

SEQ ID NO: 217280 - RNA, 19 nt, Homo sapiens
  misc_RNA (1)...(19): siRNA sense strand
cuaauaauaagccagagau

SEQ ID NO: 217281 - RNA, 19 nt, Homo sapiens
  misc_RNA (1)...(19): siRNA sense strand
ugggugaaguugcauccuu

SEQ ID NO: 217282 - RNA, 19 nt, Homo sapiens
  misc_RNA (1)...(19): siRNA sense strand
caucauuucccuguguaaa

SEQ ID NO: 217283 - RNA, 19 nt, Homo sapiens
  misc_RNA (1)...(19): siRNA sense strand
gcguggauaugugucugaa

SEQ ID NO: 217284 - RNA, 19 nt, Homo sapiens
  misc_RNA (1)...(19): siRNA sense strand
gcacuaucccaugguggaa

SEQ ID NO: 217285 - RNA, 19 nt, Homo sapiens
  misc_RNA (1)...(19): siRNA sense strand
gagccugucagcugcaugu

SEQ ID NO: 217286 - RNA, 19 nt, Homo sapiens
  misc_RNA (1)...(19): siRNA sense strand
guacagauaccuuuucaag

SEQ ID NO: 217287 - RNA, 19 nt, Homo sapiens
  misc_RNA (1)...(19): siRNA sense strand
gucccucucugcguggaua

SEQ ID NO: 217288 - RNA, 19 nt, Homo sapiens
  misc_RNA (1)...(19): siRNA sense strand
ggagcugcuuccaauuugc

SEQ ID NO: 217289 - RNA, 19 nt, Homo sapiens
  misc_RNA (1)...(19): siRNA sense strand
uuagcugaccugaauaaug

SEQ ID NO: 217290 - RNA, 19 nt, Homo sapiens
  misc_RNA (1)...(19): siRNA sense strand
guggcaaguucaacaggau

SEQ ID NO: 217291 - RNA, 19 nt, Homo sapiens
  misc_RNA (1)...(19): siRNA sense strand
acaacaauuuggucaacgu

SEQ ID NO: 217292 - RNA, 19 nt, Homo sapiens
  misc_RNA (1)...(19): siRNA sense strand
gacuacaucaggagaagau

SEQ ID NO: 217293 - RNA, 19 nt, Homo sapiens
  misc_RNA (1)...(19): siRNA sense strand
uaauaagccagagaucgaa

SEQ ID NO: 217294 - RNA, 19 nt, Homo sapiens
  misc_RNA (1)...(19): siRNA sense strand
ugucagauucucagcuuau

SEQ ID NO: 217295 - RNA, 19 nt, Homo sapiens
  misc_RNA (1)...(19): siRNA sense strand
ggauauccugcagauuauu

SEQ ID NO: 217296 - RNA, 19 nt, Homo sapiens
  misc_RNA (1)...(19): siRNA sense strand
agcaucaggccaaauguaa

SEQ ID NO: 217297 - RNA, 19 nt, Homo sapiens
  misc_RNA (1)...(19): siRNA sense strand
gcccuuugcuuggaucucu

SEQ ID NO: 217298 - RNA, 19 nt, Homo sapiens
  misc_RNA (1)...(19): siRNA sense strand
gcugaauguuuaugauacg

SEQ ID NO: 217299 - RNA, 19 nt, Homo sapiens
  misc_RNA (1)...(19): siRNA sense strand
agacuuugccaagguacua

SEQ ID NO: 217300 - RNA, 19 nt, Homo sapiens
  misc_RNA (1)...(19): siRNA sense strand
caagcaaguggcaaguuca

SEQ ID NO: 217301 - RNA, 19 nt, Homo sapiens
  misc_RNA (1)...(19): siRNA sense strand
agacaaguacagauaccuu

SEQ ID NO: 217302 - RNA, 19 nt, Homo sapiens
  misc_RNA (1)...(19): siRNA sense strand
gcaucauuucccuguguaa

SEQ ID NO: 217303 - RNA, 19 nt, Homo sapiens
  misc_RNA (1)...(19): siRNA sense strand
cugcaaagaguguccaauc

SEQ ID NO: 217304 - RNA, 19 nt, Homo sapiens
  misc_RNA (1)...(19): siRNA sense strand
cuuauaggacugccaugaa

SEQ ID NO: 217305 - RNA, 19 nt, Homo sapiens
  misc_RNA (1)...(19): siRNA sense strand
caaagaguguccaaucauu

SEQ ID NO: 217306 - RNA, 19 nt, Homo sapiens
  misc_RNA (1)...(19): siRNA sense strand
uagcugaccugaauaaugu

SEQ ID NO: 217307 - RNA, 19 nt, Homo sapiens
  misc_RNA (1)...(19): siRNA sense strand
gcaugauucuauccaaauu

SEQ ID NO: 217308 - RNA, 19 nt, Homo sapiens
  misc_RNA (1)...(19): siRNA sense strand
ugaacuggcugcugaaugu

SEQ ID NO: 217309 - RNA, 19 nt, Homo sapiens
  misc_RNA (1)...(19): siRNA sense strand
gauauccugcagauuauua

SEQ ID NO: 217310 - RNA, 19 nt, Homo sapiens
  misc_RNA (1)...(19): siRNA sense strand
gagaagauguucgagacuu

SEQ ID NO: 217311 - RNA, 19 nt, Homo sapiens
  misc_RNA (1)...(19): siRNA sense strand
gcacuuuaauuaugacauc

SEQ ID NO: 217312 - RNA, 19 nt, Homo sapiens
  misc_RNA (1)...(19): siRNA sense strand
guaaagcacauuuggaaga

SEQ ID NO: 217313 - RNA, 19 nt, Homo sapiens
  misc_RNA (1)...(19): siRNA sense strand
gaauauugcacuccgacua

SEQ ID NO: 217314 - RNA, 19 nt, Homo sapiens
  misc_RNA (1)...(19): siRNA sense strand
uuauaggacugccaugaaa

SEQ ID NO: 217315 - RNA, 19 nt, Homo sapiens
  misc_RNA (1)...(19): siRNA sense strand
gggugaaguugcauccuuu

SEQ ID NO: 217316 - RNA, 19 nt, Homo sapiens
  misc_RNA (1)...(19): siRNA sense strand
gcaagagcacaacaauuug

SEQ ID NO: 217317 - RNA, 19 nt, Homo sapiens
  misc_RNA (1)...(19): siRNA sense strand
gcacaacaauuuggucaac

SEQ ID NO: 217318 - RNA, 19 nt, Homo sapiens
  misc_RNA (1)...(19): siRNA sense strand
agcaagagcacaacaauuu

SEQ ID NO: 217319 - RNA, 19 nt, Homo sapiens
  misc_RNA (1)...(19): siRNA sense strand
agaagauguucgagacuuu

SEQ ID NO: 217320 - RNA, 19 nt, Homo sapiens
  misc_RNA (1)...(19): siRNA sense strand
gagcaagagcacaacaauu

SEQ ID NO: 217321 - RNA, 19 nt, Homo sapiens
  misc_RNA (1)...(19): siRNA sense strand
ucaagcaaguggcaaguuc

SEQ ID NO: 217322 - RNA, 19 nt, Homo sapiens
  misc_RNA (1)...(19): siRNA sense strand
ccacgagacucaaacaacu

SEQ ID NO: 217323 - RNA, 19 nt, Homo sapiens
  misc_RNA (1)...(19): siRNA sense strand
cagcacaaccucaagcaaa

SEQ ID NO: 217324 - RNA, 19 nt, Homo sapiens
  misc_RNA (1)...(19): siRNA sense strand
gcaaagaguguccaaucau

SEQ ID NO: 217325 - RNA, 19 nt, Homo sapiens
  misc_RNA (1)...(19): siRNA sense strand
auggauauccugcagauua

SEQ ID NO: 217326 - RNA, 19 nt, Homo sapiens
  misc_RNA (1)...(19): siRNA sense strand
uguaacaucugcaaagagu

SEQ ID NO: 217327 - RNA, 19 nt, Homo sapiens
  misc_RNA (1)...(19): siRNA sense strand
guccggagcugcuuccaau

SEQ ID NO: 217328 - RNA, 19 nt, Homo sapiens
  misc_RNA (1)...(19): siRNA sense strand
gcaaguggcaaguucaaca

SEQ ID NO: 217329 - RNA, 19 nt, Homo sapiens
  misc_RNA (1)...(19): siRNA sense strand
gcuuccaauuugcuaauaa

SEQ ID NO: 217330 - RNA, 19 nt, Homo sapiens
  misc_RNA (1)...(19): siRNA sense strand
uggaagacaaguacagaua

SEQ ID NO: 217331 - RNA, 19 nt, Homo sapiens
  misc_RNA (1)...(19): siRNA sense strand
ggauccguguccugucuuu

SEQ ID NO: 217332 - RNA, 19 nt, Homo sapiens
  misc_RNA (1)...(19): siRNA sense strand
gucuuuagcugaccugaau

SEQ ID NO: 217333 - RNA, 19 nt, Homo sapiens
  misc_RNA (1)...(19): siRNA sense strand
gacaaguacagauaccuuu

SEQ ID NO: 217334 - RNA, 19 nt, Homo sapiens
  misc_RNA (1)...(19): siRNA sense strand
ccaagcaucaggccaaaug

SEQ ID NO: 217335 - RNA, 19 nt, Homo sapiens
  misc_RNA (1)...(19): siRNA sense strand
ggagcaagagcacaacaau

SEQ ID NO: 217336 - RNA, 19 nt, Homo sapiens
  misc_RNA (1)...(19): siRNA sense strand
guguaaagcacauuuggaa

SEQ ID NO: 217337 - RNA, 19 nt, Homo sapiens
  misc_RNA (1)...(19): siRNA sense strand
caagacaguugggugaagu

SEQ ID NO: 217338 - RNA, 19 nt, Homo sapiens
  misc_RNA (1)...(19): siRNA sense strand
gaagauguucgagacuuug

SEQ ID NO: 217339 - RNA, 19 nt, Homo sapiens
  misc_RNA (1)...(19): siRNA sense strand
gucagauucucagcuuaua

SEQ ID NO: 217340 - RNA, 19 nt, Homo sapiens
  misc_RNA (1)...(19): siRNA sense strand
uaacaucugcaaagagugu

SEQ ID NO: 217341 - RNA, 19 nt, Homo sapiens
  misc_RNA (1)...(19): siRNA sense strand
cggagcugcuuccaauuug

SEQ ID NO: 217342 - RNA, 19 nt, Homo sapiens
  misc_RNA (1)...(19): siRNA sense strand
gaagacaaguacagauacc

SEQ ID NO: 217343 - RNA, 19 nt, Homo sapiens
  misc_RNA (1)...(19): siRNA sense strand
ccauggauauccugcagau

SEQ ID NO: 217344 - RNA, 19 nt, Homo sapiens
  misc_RNA (1)...(19): siRNA sense strand
ggcaucauuucccugugua

SEQ ID NO: 217345 - RNA, 19 nt, Homo sapiens
  misc_RNA (1)...(19): siRNA sense strand
uggauauccugcagauuau

SEQ ID NO: 217346 - RNA, 19 nt, Homo sapiens
  misc_RNA (1)...(19): siRNA sense strand
ggaagacaaguacagauac

SEQ ID NO: 217347 - RNA, 19 nt, Homo sapiens
  misc_RNA (1)...(19): siRNA sense strand
ugcaaagaguguccaauca

SEQ ID NO: 217348 - RNA, 19 nt, Homo sapiens
  misc_RNA (1)...(19): siRNA sense strand
guggauaugugucugaacu

SEQ ID NO: 217349 - RNA, 19 nt, Homo sapiens
  misc_RNA (1)...(19): siRNA sense strand
acuggcugcugaauguuua

SEQ ID NO: 217350 - RNA, 19 nt, Homo sapiens
  misc_RNA (1)...(19): siRNA sense strand
acuaucccaugguggaaua

SEQ ID NO: 217351 - RNA, 19 nt, Homo sapiens
  misc_RNA (1)...(19): siRNA sense strand
ccggagcugcuuccaauuu

SEQ ID NO: 217352 - RNA, 19 nt, Homo sapiens
  misc_RNA (1)...(19): siRNA sense strand
ccaaauuccaagacaguug

SEQ ID NO: 217353 - RNA, 19 nt, Homo sapiens
  misc_RNA (1)...(19): siRNA sense strand
cagaaacugccaagcauca

SEQ ID NO: 217354 - RNA, 19 nt, Homo sapiens
  misc_RNA (1)...(19): siRNA sense strand
uaugacaucugccaaagcu

SEQ ID NO: 217355 - RNA, 19 nt, Homo sapiens
  misc_RNA (1)...(19): siRNA sense strand
aaugucagauucucagcuu

SEQ ID NO: 217356 - RNA, 19 nt, Homo sapiens
  misc_RNA (1)...(19): siRNA sense strand
ucgagacuuugccaaggua

SEQ ID NO: 217357 - RNA, 19 nt, Homo sapiens
  misc_RNA (1)...(19): siRNA sense strand
gcaaaaggccauaaaaugc

SEQ ID NO: 217358 - RNA, 19 nt, Homo sapiens
  misc_RNA (1)...(19): siRNA sense strand
cugcaugauucuauccaaa

SEQ ID NO: 217359 - RNA, 19 nt, Homo sapiens
  misc_RNA (1)...(19): siRNA sense strand
uaaagcacauuuggaagac

SEQ ID NO: 217360 - RNA, 19 nt, Homo sapiens
  misc_RNA (1)...(19): siRNA sense strand
acaggagucuaaagcacuu

SEQ ID NO: 217361 - RNA, 19 nt, Homo sapiens
  misc_RNA (1)...(19): siRNA sense strand
acagauaccuuuucaagca

SEQ ID NO: 217362 - RNA, 19 nt, Homo sapiens
  misc_RNA (1)...(19): siRNA sense strand
aagcacauuuggaagacaa

SEQ ID NO: 217363 - RNA, 19 nt, Homo sapiens
  misc_RNA (1)...(19): siRNA sense strand
gcuaauaauaagccagaga

SEQ ID NO: 217364 - RNA, 19 nt, Homo sapiens
  misc_RNA (1)...(19): siRNA sense strand
caagagcacaacaauuugg

SEQ ID NO: 217365 - RNA, 19 nt, Homo sapiens
  misc_RNA (1)...(19): siRNA sense strand
ccugucagcugcaugugau

SEQ ID NO: 217366 - RNA, 19 nt, Homo sapiens
  misc_RNA (1)...(19): siRNA sense strand
gcugcugaauguuuaugau

SEQ ID NO: 217367 - RNA, 19 nt, Homo sapiens
  misc_RNA (1)...(19): siRNA sense strand
acagagcucuaccagucuu

SEQ ID NO: 217368 - RNA, 19 nt, Homo sapiens
  misc_RNA (1)...(19): siRNA sense strand
acaguugggugaaguugca

SEQ ID NO: 217369 - RNA, 19 nt, Homo sapiens
  misc_RNA (1)...(19): siRNA sense strand
guuugaccacuauuuauga

SEQ ID NO: 217370 - RNA, 19 nt, Homo sapiens
  misc_RNA (1)...(19): siRNA sense strand
gcuuauaggacugccauga

SEQ ID NO: 217371 - RNA, 19 nt, Homo sapiens
  misc_RNA (1)...(19): siRNA sense strand
caucaggccaaauguaaca

SEQ ID NO: 217372 - RNA, 19 nt, Homo sapiens
  misc_RNA (1)...(19): siRNA sense strand
gauucuauccaaauuccaa

SEQ ID NO: 217373 - RNA, 19 nt, Homo sapiens
  misc_RNA (1)...(19): siRNA sense strand
ggcaaguucaacaggauuu

SEQ ID NO: 217374 - RNA, 19 nt, Homo sapiens
  misc_RNA (1)...(19): siRNA sense strand
gaacuggcugcugaauguu

SEQ ID NO: 217375 - RNA, 19 nt, Homo sapiens
  misc_RNA (1)...(19): siRNA sense strand
cugcugaauguuuaugaua

SEQ ID NO: 217376 - RNA, 19 nt, Homo sapiens
  misc_RNA (1)...(19): siRNA sense strand
aagcaucaggccaaaugua

SEQ ID NO: 217377 - RNA, 19 nt, Homo sapiens
  misc_RNA (1)...(19): siRNA sense strand
uggcaucauuucccugugu

SEQ ID NO: 217378 - RNA, 19 nt, Homo sapiens
  misc_RNA (1)...(19): siRNA sense strand
ccaugaaacuccgaagacu

SEQ ID NO: 217379 - RNA, 19 nt, Homo sapiens
  misc_RNA (1)...(19): siRNA sense strand
auaauaagccagagaucga

SEQ ID NO: 217380 - RNA, 19 nt, Homo sapiens
  misc_RNA (1)...(19): siRNA sense strand
cuaauaauaagccagagau

SEQ ID NO: 217381 - RNA, 19 nt, Homo sapiens
  misc_RNA (1)...(19): siRNA sense strand
ugggugaaguugcauccuu

SEQ ID NO: 217382 - RNA, 19 nt, Homo sapiens
  misc_RNA (1)...(19): siRNA sense strand
caucauuucccuguguaaa

SEQ ID NO: 217383 - RNA, 19 nt, Homo sapiens
  misc_RNA (1)...(19): siRNA sense strand
gcguggauaugugucugaa

SEQ ID NO: 217384 - RNA, 19 nt, Homo sapiens
  misc_RNA (1)...(19): siRNA sense strand
gcacuaucccaugguggaa

SEQ ID NO: 217385 - RNA, 19 nt, Homo sapiens
  misc_RNA (1)...(19): siRNA sense strand
gagccugucagcugcaugu

SEQ ID NO: 217386 - RNA, 19 nt, Homo sapiens
  misc_RNA (1)...(19): siRNA sense strand
guacagauaccuuuucaag

SEQ ID NO: 217387 - RNA, 19 nt, Homo sapiens
  misc_RNA (1)...(19): siRNA sense strand
gucccucucugcguggaua

SEQ ID NO: 217388 - RNA, 19 nt, Homo sapiens
  misc_RNA (1)...(19): siRNA sense strand
ggagcugcuuccaauuugc

SEQ ID NO: 217389 - RNA, 19 nt, Homo sapiens
  misc_RNA (1)...(19): siRNA sense strand
uuagcugaccugaauaaug

SEQ ID NO: 217390 - RNA, 19 nt, Homo sapiens
  misc_RNA (1)...(19): siRNA sense strand
guggcaaguucaacaggau

SEQ ID NO: 217391 - RNA, 19 nt, Homo sapiens
  misc_RNA (1)...(19): siRNA sense strand
acaacaauuuggucaacgu

SEQ ID NO: 217392 - RNA, 19 nt, Homo sapiens
  misc_RNA (1)...(19): siRNA sense strand
gacuacaucaggagaagau

SEQ ID NO: 217393 - RNA, 19 nt, Homo sapiens
  misc_RNA (1)...(19): siRNA sense strand
uaauaagccagagaucgaa

SEQ ID NO: 217394 - RNA, 19 nt, Homo sapiens
  misc_RNA (1)...(19): siRNA sense strand
ugucagauucucagcuuau

SEQ ID NO: 217395 - RNA, 19 nt, Homo sapiens
  misc_RNA (1)...(19): siRNA sense strand
ggauauccugcagauuauu

SEQ ID NO: 217396 - RNA, 19 nt, Homo sapiens
  misc_RNA (1)...(19): siRNA sense strand
agcaucaggccaaauguaa

SEQ ID NO: 217397 - RNA, 19 nt, Homo sapiens
  misc_RNA (1)...(19): siRNA sense strand
gcccuuugcuuggaucucu

SEQ ID NO: 217398 - RNA, 19 nt, Homo sapiens
  misc_RNA (1)...(19): siRNA sense strand
gcugaauguuuaugauacg

SEQ ID NO: 217399 - RNA, 19 nt, Homo sapiens
  misc_RNA (1)...(19): siRNA sense strand
agacuuugccaagguacua

SEQ ID NO: 217400 - RNA, 19 nt, Homo sapiens
  misc_RNA (1)...(19): siRNA sense strand
caagcaaguggcaaguuca

SEQ ID NO: 217401 - RNA, 19 nt, Homo sapiens
  misc_RNA (1)...(19): siRNA sense strand
agacaaguacagauaccuu

SEQ ID NO: 217402 - RNA, 19 nt, Homo sapiens
  misc_RNA (1)...(19): siRNA sense strand
gcaucauuucccuguguaa

SEQ ID NO: 217403 - RNA, 19 nt, Homo sapiens
  misc_RNA (1)...(19): siRNA sense strand
cugcaaagaguguccaauc

SEQ ID NO: 217404 - RNA, 19 nt, Homo sapiens
  misc_RNA (1)...(19): siRNA sense strand
cuuauaggacugccaugaa

SEQ ID NO: 217405 - RNA, 19 nt, Homo sapiens
  misc_RNA (1)...(19): siRNA sense strand
caaagaguguccaaucauu

SEQ ID NO: 217406 - RNA, 19 nt, Homo sapiens
  misc_RNA (1)...(19): siRNA sense strand
uagcugaccugaauaaugu

SEQ ID NO: 217407 - RNA, 19 nt, Homo sapiens
  misc_RNA (1)...(19): siRNA sense strand
gcaugauucuauccaaauu

SEQ ID NO: 217408 - RNA, 19 nt, Homo sapiens
  misc_RNA (1)...(19): siRNA sense strand
ugaacuggcugcugaaugu

SEQ ID NO: 217409 - RNA, 19 nt, Homo sapiens
  misc_RNA (1)...(19): siRNA sense strand
gauauccugcagauuauua

SEQ ID NO: 217410 - RNA, 19 nt, Homo sapiens
  misc_RNA (1)...(19): siRNA sense strand
gagaagauguucgagacuu

SEQ ID NO: 217411 - RNA, 19 nt, Homo sapiens
  misc_RNA (1)...(19): siRNA sense strand
gcacuuuaauuaugacauc

SEQ ID NO: 217412 - RNA, 19 nt, Homo sapiens
  misc_RNA (1)...(19): siRNA sense strand
guaaagcacauuuggaaga

SEQ ID NO: 217413 - RNA, 19 nt, Homo sapiens
  misc_RNA (1)...(19): siRNA sense strand
gaauauugcacuccgacua

SEQ ID NO: 217414 - RNA, 19 nt, Homo sapiens
  misc_RNA (1)...(19): siRNA sense strand
uuauaggacugccaugaaa

SEQ ID NO: 217415 - RNA, 19 nt, Homo sapiens
  misc_RNA (1)...(19): siRNA sense strand
gggugaaguugcauccuuu

SEQ ID NO: 217416 - RNA, 19 nt, Homo sapiens
  misc_RNA (1)...(19): siRNA sense strand
gcaagagcacaacaauuug

SEQ ID NO: 217417 - RNA, 19 nt, Homo sapiens
  misc_RNA (1)...(19): siRNA sense strand
gcacaacaauuuggucaac

SEQ ID NO: 217418 - RNA, 19 nt, Homo sapiens
  misc_RNA (1)...(19): siRNA sense strand
agcaagagcacaacaauuu

SEQ ID NO: 217419 - RNA, 19 nt, Homo sapiens
  misc_RNA (1)...(19): siRNA sense strand
agaagauguucgagacuuu

SEQ ID NO: 217420 - RNA, 19 nt, Homo sapiens
  misc_RNA (1)...(19): siRNA sense strand
gagcaagagcacaacaauu

SEQ ID NO: 217421 - RNA, 19 nt, Homo sapiens
  misc_RNA (1)...(19): siRNA sense strand
ucaagcaaguggcaaguuc

SEQ ID NO: 217422 - RNA, 19 nt, Homo sapiens
  misc_RNA (1)...(19): siRNA sense strand
ccacgagacucaaacaacu

SEQ ID NO: 217423 - RNA, 19 nt, Homo sapiens
  misc_RNA (1)...(19): siRNA sense strand
cagcacaaccucaagcaaa

SEQ ID NO: 217424 - RNA, 19 nt, Homo sapiens
  misc_RNA (1)...(19): siRNA sense strand
gcaaagaguguccaaucau

SEQ ID NO: 217425 - RNA, 19 nt, Homo sapiens
  misc_RNA (1)...(19): siRNA sense strand
auggauauccugcagauua

SEQ ID NO: 217426 - RNA, 19 nt, Homo sapiens
  misc_RNA (1)...(19): siRNA sense strand
uguaacaucugcaaagagu

SEQ ID NO: 217427 - RNA, 19 nt, Homo sapiens
  misc_RNA (1)...(19): siRNA sense strand
guccggagcugcuuccaau

SEQ ID NO: 217428 - RNA, 19 nt, Homo sapiens
  misc_RNA (1)...(19): siRNA sense strand
gcaaguggcaaguucaaca

SEQ ID NO: 217429 - RNA, 19 nt, Homo sapiens
  misc_RNA (1)...(19): siRNA sense strand
gcuuccaauuugcuaauaa

SEQ ID NO: 217430 - RNA, 19 nt, Homo sapiens
  misc_RNA (1)...(19): siRNA sense strand
uggaagacaaguacagaua

SEQ ID NO: 217431 - RNA, 19 nt, Homo sapiens
  misc_RNA (1)...(19): siRNA sense strand
ggauccguguccugucuuu

SEQ ID NO: 217432 - RNA, 19 nt, Homo sapiens
  misc_RNA (1)...(19): siRNA sense strand
gucuuuagcugaccugaau

SEQ ID NO: 217433 - RNA, 19 nt, Homo sapiens
  misc_RNA (1)...(19): siRNA sense strand
gacaaguacagauaccuuu

SEQ ID NO: 217434 - RNA, 19 nt, Homo sapiens
  misc_RNA (1)...(19): siRNA sense strand
ccaagcaucaggccaaaug

SEQ ID NO: 217435 - RNA, 19 nt, Homo sapiens
  misc_RNA (1)...(19): siRNA sense strand
ggagcaagagcacaacaau

SEQ ID NO: 217436 - RNA, 19 nt, Homo sapiens
  misc_RNA (1)...(19): siRNA sense strand
guguaaagcacauuuggaa

SEQ ID NO: 217437 - RNA, 19 nt, Homo sapiens
  misc_RNA (1)...(19): siRNA sense strand
caagacaguugggugaagu

SEQ ID NO: 217438 - RNA, 19 nt, Homo sapiens
  misc_RNA (1)...(19): siRNA sense strand
gaagauguucgagacuuug

SEQ ID NO: 217439 - RNA, 19 nt, Homo sapiens
  misc_RNA (1)...(19): siRNA sense strand
gucagauucucagcuuaua

SEQ ID NO: 217440 - RNA, 19 nt, Homo sapiens
  misc_RNA (1)...(19): siRNA sense strand
uaacaucugcaaagagugu

SEQ ID NO: 217441 - RNA, 19 nt, Homo sapiens
  misc_RNA (1)...(19): siRNA sense strand
cggagcugcuuccaauuug

SEQ ID NO: 217442 - RNA, 19 nt, Homo sapiens
  misc_RNA (1)...(19): siRNA sense strand
gaagacaaguacagauacc

SEQ ID NO: 217443 - RNA, 19 nt, Homo sapiens
  misc_RNA (1)...(19): siRNA sense strand
ccauggauauccugcagau

SEQ ID NO: 217444 - RNA, 19 nt, Homo sapiens
  misc_RNA (1)...(19): siRNA sense strand
ggcaucauuucccugugua

SEQ ID NO: 217445 - RNA, 19 nt, Homo sapiens
  misc_RNA (1)...(19): siRNA sense strand
uggauauccugcagauuau

SEQ ID NO: 217446 - RNA, 19 nt, Homo sapiens
  misc_RNA (1)...(19): siRNA sense strand
ggaagacaaguacagauac

SEQ ID NO: 217447 - RNA, 19 nt, Homo sapiens
  misc_RNA (1)...(19): siRNA sense strand
ugcaaagaguguccaauca

SEQ ID NO: 217448 - RNA, 19 nt, Homo sapiens
  misc_RNA (1)...(19): siRNA sense strand
guggauaugugucugaacu

SEQ ID NO: 217449 - RNA, 19 nt, Homo sapiens
  misc_RNA (1)...(19): siRNA sense strand
acuggcugcugaauguuua

SEQ ID NO: 217450 - RNA, 19 nt, Homo sapiens
  misc_RNA (1)...(19): siRNA sense strand
acuaucccaugguggaaua

SEQ ID NO: 217451 - RNA, 19 nt, Homo sapiens
  misc_RNA (1)...(19): siRNA sense strand
ccggagcugcuuccaauuu

SEQ ID NO: 217452 - RNA, 19 nt, Homo sapiens
  misc_RNA (1)...(19): siRNA sense strand
ccaaauuccaagacaguug

SEQ ID NO: 217453 - RNA, 19 nt, Homo sapiens
  misc_RNA (1)...(19): siRNA sense strand
cagaaacugccaagcauca

SEQ ID NO: 217454 - RNA, 19 nt, Homo sapiens
  misc_RNA (1)...(19): siRNA sense strand
uaugacaucugccaaagcu

SEQ ID NO: 217455 - RNA, 19 nt, Homo sapiens
  misc_RNA (1)...(19): siRNA sense strand
aaugucagauucucagcuu

SEQ ID NO: 217456 - RNA, 19 nt, Homo sapiens
  misc_RNA (1)...(19): siRNA sense strand
ucgagacuuugccaaggua

SEQ ID NO: 217457 - RNA, 19 nt, Homo sapiens
  misc_RNA (1)...(19): siRNA sense strand
gcaaaaggccauaaaaugc

SEQ ID NO: 217458 - RNA, 19 nt, Homo sapiens
  misc_RNA (1)...(19): siRNA sense strand
cugcaugauucuauccaaa

SEQ ID NO: 217459 - RNA, 19 nt, Homo sapiens
  misc_RNA (1)...(19): siRNA sense strand
uaaagcacauuuggaagac

SEQ ID NO: 217460 - RNA, 19 nt, Homo sapiens
  misc_RNA (1)...(19): siRNA sense strand
acaggagucuaaagcacuu

SEQ ID NO: 217461 - RNA, 19 nt, Homo sapiens
  misc_RNA (1)...(19): siRNA sense strand
acagauaccuuuucaagca

SEQ ID NO: 217462 - RNA, 19 nt, Homo sapiens
  misc_RNA (1)...(19): siRNA sense strand
aagcacauuuggaagacaa

SEQ ID NO: 217463 - RNA, 19 nt, Homo sapiens
  misc_RNA (1)...(19): siRNA sense strand
gcuaauaauaagccagaga

SEQ ID NO: 217464 - RNA, 19 nt, Homo sapiens
  misc_RNA (1)...(19): siRNA sense strand
caagagcacaacaauuugg

SEQ ID NO: 217465 - RNA, 19 nt, Homo sapiens
  misc_RNA (1)...(19): siRNA sense strand
ccugucagcugcaugugau

SEQ ID NO: 217466 - RNA, 19 nt, Homo sapiens
  misc_RNA (1)...(19): siRNA sense strand
gcugcugaauguuuaugau

SEQ ID NO: 217467 - RNA, 19 nt, Homo sapiens
  misc_RNA (1)...(19): siRNA sense strand
acagagcucuaccagucuu

SEQ ID NO: 217468 - RNA, 19 nt, Homo sapiens
  misc_RNA (1)...(19): siRNA sense strand
acaguugggugaaguugca

SEQ ID NO: 217469 - RNA, 19 nt, Homo sapiens
  misc_RNA (1)...(19): siRNA sense strand
guuugaccacuauuuauga

SEQ ID NO: 217470 - RNA, 19 nt, Homo sapiens
  misc_RNA (1)...(19): siRNA sense strand
gcuuauaggacugccauga

SEQ ID NO: 217471 - RNA, 19 nt, Homo sapiens
  misc_RNA (1)...(19): siRNA sense strand
caucaggccaaauguaaca

SEQ ID NO: 217472 - RNA, 19 nt, Homo sapiens
  misc_RNA (1)...(19): siRNA sense strand
gauucuauccaaauuccaa

SEQ ID NO: 217473 - RNA, 19 nt, Homo sapiens
  misc_RNA (1)...(19): siRNA sense strand
ggcaaguucaacaggauuu

SEQ ID NO: 217474 - RNA, 19 nt, Homo sapiens
  misc_RNA (1)...(19): siRNA sense strand
gaacuggcugcugaauguu

SEQ ID NO: 217475 - RNA, 19 nt, Homo sapiens
  misc_RNA (1)...(19): siRNA sense strand
cugcugaauguuuaugaua

SEQ ID NO: 217476 - RNA, 19 nt, Homo sapiens
  misc_RNA (1)...(19): siRNA sense strand
aagcaucaggccaaaugua

SEQ ID NO: 217477 - RNA, 19 nt, Homo sapiens
  misc_RNA (1)...(19): siRNA sense strand
uggcaucauuucccugugu

SEQ ID NO: 217478 - RNA, 19 nt, Homo sapiens
  misc_RNA (1)...(19): siRNA sense strand
ccaugaaacuccgaagacu

SEQ ID NO: 217479 - RNA, 19 nt, Homo sapiens
  misc_RNA (1)...(19): siRNA sense strand
auaauaagccagagaucga

SEQ ID NO: 217480 - RNA, 19 nt, Homo sapiens
  misc_RNA (1)...(19): siRNA sense strand
cuaauaauaagccagagau

SEQ ID NO: 217481 - RNA, 19 nt, Homo sapiens
  misc_RNA (1)...(19): siRNA sense strand
ugggugaaguugcauccuu

SEQ ID NO: 217482 - RNA, 19 nt, Homo sapiens
  misc_RNA (1)...(19): siRNA sense strand
caucauuucccuguguaaa

SEQ ID NO: 217483 - RNA, 19 nt, Homo sapiens
  misc_RNA (1)...(19): siRNA sense strand
gcguggauaugugucugaa

SEQ ID NO: 217484 - RNA, 19 nt, Homo sapiens
  misc_RNA (1)...(19): siRNA sense strand
gcacuaucccaugguggaa

SEQ ID NO: 217485 - RNA, 19 nt, Homo sapiens
  misc_RNA (1)...(19): siRNA sense strand
gagccugucagcugcaugu

SEQ ID NO: 217486 - RNA, 19 nt, Homo sapiens
  misc_RNA (1)...(19): siRNA sense strand
guacagauaccuuuucaag

SEQ ID NO: 217487 - RNA, 19 nt, Homo sapiens
  misc_RNA (1)...(19): siRNA sense strand
gucccucucugcguggaua

SEQ ID NO: 217488 - RNA, 19 nt, Homo sapiens
  misc_RNA (1)...(19): siRNA sense strand
ggagcugcuuccaauuugc

SEQ ID NO: 217489 - RNA, 19 nt, Homo sapiens
  misc_RNA (1)...(19): siRNA sense strand
uuagcugaccugaauaaug

SEQ ID NO: 217490 - RNA, 19 nt, Homo sapiens
  misc_RNA (1)...(19): siRNA sense strand
guggcaaguucaacaggau

SEQ ID NO: 217491 - RNA, 19 nt, Homo sapiens
  misc_RNA (1)...(19): siRNA sense strand
acaacaauuuggucaacgu

SEQ ID NO: 217492 - RNA, 19 nt, Homo sapiens
  misc_RNA (1)...(19): siRNA sense strand
gacuacaucaggagaagau

SEQ ID NO: 217493 - RNA, 19 nt, Homo sapiens
  misc_RNA (1)...(19): siRNA sense strand
uaauaagccagagaucgaa

SEQ ID NO: 217494 - RNA, 19 nt, Homo sapiens
  misc_RNA (1)...(19): siRNA sense strand
ugucagauucucagcuuau

SEQ ID NO: 217495 - RNA, 19 nt, Homo sapiens
  misc_RNA (1)...(19): siRNA sense strand
ggauauccugcagauuauu

SEQ ID NO: 217496 - RNA, 19 nt, Homo sapiens
  misc_RNA (1)...(19): siRNA sense strand
agcaucaggccaaauguaa

SEQ ID NO: 217497 - RNA, 19 nt, Homo sapiens
  misc_RNA (1)...(19): siRNA sense strand
gcccuuugcuuggaucucu

SEQ ID NO: 217498 - RNA, 19 nt, Homo sapiens
  misc_RNA (1)...(19): siRNA sense strand
gcugaauguuuaugauacg

SEQ ID NO: 217499 - RNA, 19 nt, Homo sapiens
  misc_RNA (1)...(19): siRNA sense strand
agacuuugccaagguacua

SEQ ID NO: 217500 - RNA, 19 nt, Homo sapiens
  misc_RNA (1)...(19): siRNA sense strand
caagcaaguggcaaguuca

SEQ ID NO: 217501 - RNA, 19 nt, Homo sapiens
  misc_RNA (1)...(19): siRNA sense strand
agacaaguacagauaccuu

SEQ ID NO: 217502 - RNA, 19 nt, Homo sapiens
  misc_RNA (1)...(19): siRNA sense strand
gcaucauuucccuguguaa

SEQ ID NO: 217503 - RNA, 19 nt, Homo sapiens
  misc_RNA (1)...(19): siRNA sense strand
cugcaaagaguguccaauc

SEQ ID NO: 217504 - RNA, 19 nt, Homo sapiens
  misc_RNA (1)...(19): siRNA sense strand
cuuauaggacugccaugaa

SEQ ID NO: 217505 - RNA, 19 nt, Homo sapiens
  misc_RNA (1)...(19): siRNA sense strand
caaagaguguccaaucauu

SEQ ID NO: 217506 - RNA, 19 nt, Homo sapiens
  misc_RNA (1)...(19): siRNA sense strand
uagcugaccugaauaaugu

SEQ ID NO: 217507 - RNA, 19 nt, Homo sapiens
  misc_RNA (1)...(19): siRNA sense strand
gcaugauucuauccaaauu

SEQ ID NO: 217508 - RNA, 19 nt, Homo sapiens
  misc_RNA (1)...(19): siRNA sense strand
ugaacuggcugcugaaugu

SEQ ID NO: 217509 - RNA, 19 nt, Homo sapiens
  misc_RNA (1)...(19): siRNA sense strand
gauauccugcagauuauua

SEQ ID NO: 217510 - RNA, 19 nt, Homo sapiens
  misc_RNA (1)...(19): siRNA sense strand
gagaagauguucgagacuu

SEQ ID NO: 217511 - RNA, 19 nt, Homo sapiens
  misc_RNA (1)...(19): siRNA sense strand
gcacuuuaauuaugacauc

SEQ ID NO: 217512 - RNA, 19 nt, Homo sapiens
  misc_RNA (1)...(19): siRNA sense strand
guaaagcacauuuggaaga

SEQ ID NO: 217513 - RNA, 19 nt, Homo sapiens
  misc_RNA (1)...(19): siRNA sense strand
gaauauugcacuccgacua

SEQ ID NO: 217514 - RNA, 19 nt, Homo sapiens
  misc_RNA (1)...(19): siRNA sense strand
uuauaggacugccaugaaa

SEQ ID NO: 217515 - RNA, 19 nt, Homo sapiens
  misc_RNA (1)...(19): siRNA sense strand
gggugaaguugcauccuuu

SEQ ID NO: 217516 - RNA, 19 nt, Homo sapiens
  misc_RNA (1)...(19): siRNA sense strand
gcaagagcacaacaauuug

SEQ ID NO: 217517 - RNA, 19 nt, Homo sapiens
  misc_RNA (1)...(19): siRNA sense strand
gcacaacaauuuggucaac

SEQ ID NO: 217518 - RNA, 19 nt, Homo sapiens
  misc_RNA (1)...(19): siRNA sense strand
agcaagagcacaacaauuu

SEQ ID NO: 217519 - RNA, 19 nt, Homo sapiens
  misc_RNA (1)...(19): siRNA sense strand
agaagauguucgagacuuu

SEQ ID NO: 217520 - RNA, 19 nt, Homo sapiens
  misc_RNA (1)...(19): siRNA sense strand
gagcaagagcacaacaauu

SEQ ID NO: 217521 - RNA, 19 nt, Homo sapiens
  misc_RNA (1)...(19): siRNA sense strand
ucaagcaaguggcaaguuc

SEQ ID NO: 217522 - RNA, 19 nt, Homo sapiens
  misc_RNA (1)...(19): siRNA sense strand
ccacgagacucaaacaacu

SEQ ID NO: 217523 - RNA, 19 nt, Homo sapiens
  misc_RNA (1)...(19): siRNA sense strand
cagcacaaccucaagcaaa

SEQ ID NO: 217524 - RNA, 19 nt, Homo sapiens
  misc_RNA (1)...(19): siRNA sense strand
gcaaagaguguccaaucau

SEQ ID NO: 217525 - RNA, 19 nt, Homo sapiens
  misc_RNA (1)...(19): siRNA sense strand
auggauauccugcagauua

SEQ ID NO: 217526 - RNA, 19 nt, Homo sapiens
  misc_RNA (1)...(19): siRNA sense strand
uguaacaucugcaaagagu

SEQ ID NO: 217527 - RNA, 19 nt, Homo sapiens
  misc_RNA (1)...(19): siRNA sense strand
guccggagcugcuuccaau

SEQ ID NO: 217528 - RNA, 19 nt, Homo sapiens
  misc_RNA (1)...(19): siRNA sense strand
gcaaguggcaaguucaaca

SEQ ID NO: 217529 - RNA, 19 nt, Homo sapiens
  misc_RNA (1)...(19): siRNA sense strand
gcuuccaauuugcuaauaa

SEQ ID NO: 217530 - RNA, 19 nt, Homo sapiens
  misc_RNA (1)...(19): siRNA sense strand
uggaagacaaguacagaua

SEQ ID NO: 217531 - RNA, 19 nt, Homo sapiens
  misc_RNA (1)...(19): siRNA sense strand
ggauccguguccugucuuu

SEQ ID NO: 217532 - RNA, 19 nt, Homo sapiens
  misc_RNA (1)...(19): siRNA sense strand
gucuuuagcugaccugaau

SEQ ID NO: 217533 - RNA, 19 nt, Homo sapiens
  misc_RNA (1)...(19): siRNA sense strand
gacaaguacagauaccuuu

SEQ ID NO: 217534 - RNA, 19 nt, Homo sapiens
  misc_RNA (1)...(19): siRNA sense strand
ccaagcaucaggccaaaug

SEQ ID NO: 217535 - RNA, 19 nt, Homo sapiens
  misc_RNA (1)...(19): siRNA sense strand
ggagcaagagcacaacaau

SEQ ID NO: 217536 - RNA, 19 nt, Homo sapiens
  misc_RNA (1)...(19): siRNA sense strand
guguaaagcacauuuggaa

SEQ ID NO: 217537 - RNA, 19 nt, Homo sapiens
  misc_RNA (1)...(19): siRNA sense strand
caagacaguugggugaagu

SEQ ID NO: 217538 - RNA, 19 nt, Homo sapiens
  misc_RNA (1)...(19): siRNA sense strand
gaagauguucgagacuuug

SEQ ID NO: 217539 - RNA, 19 nt, Homo sapiens
  misc_RNA (1)...(19): siRNA sense strand
gucagauucucagcuuaua

SEQ ID NO: 217540 - RNA, 19 nt, Homo sapiens
  misc_RNA (1)...(19): siRNA sense strand
uaacaucugcaaagagugu

SEQ ID NO: 217541 - RNA, 19 nt, Homo sapiens
  misc_RNA (1)...(19): siRNA sense strand
cggagcugcuuccaauuug

SEQ ID NO: 217542 - RNA, 19 nt, Homo sapiens
  misc_RNA (1)...(19): siRNA sense strand
gaagacaaguacagauacc

SEQ ID NO: 217543 - RNA, 19 nt, Homo sapiens
  misc_RNA (1)...(19): siRNA sense strand
ccauggauauccugcagau

SEQ ID NO: 217544 - RNA, 19 nt, Homo sapiens
  misc_RNA (1)...(19): siRNA sense strand
ggcaucauuucccugugua

SEQ ID NO: 217545 - RNA, 19 nt, Homo sapiens
  misc_RNA (1)...(19): siRNA sense strand
uggauauccugcagauuau

SEQ ID NO: 217546 - RNA, 19 nt, Homo sapiens
  misc_RNA (1)...(19): siRNA sense strand
ggaagacaaguacagauac

SEQ ID NO: 217547 - RNA, 19 nt, Homo sapiens
  misc_RNA (1)...(19): siRNA sense strand
ugcaaagaguguccaauca

SEQ ID NO: 217548 - RNA, 19 nt, Homo sapiens
  misc_RNA (1)...(19): siRNA sense strand
guggauaugugucugaacu

SEQ ID NO: 217549 - RNA, 19 nt, Homo sapiens
  misc_RNA (1)...(19): siRNA sense strand
acuggcugcugaauguuua

SEQ ID NO: 217550 - RNA, 19 nt, Homo sapiens
  misc_RNA (1)...(19): siRNA sense strand
acuaucccaugguggaaua

SEQ ID NO: 217551 - RNA, 19 nt, Homo sapiens
  misc_RNA (1)...(19): siRNA sense strand
ccggagcugcuuccaauuu

SEQ ID NO: 217552 - RNA, 19 nt, Homo sapiens
  misc_RNA (1)...(19): siRNA sense strand
ccaaauuccaagacaguug

SEQ ID NO: 217553 - RNA, 19 nt, Homo sapiens
  misc_RNA (1)...(19): siRNA sense strand
cagaaacugccaagcauca

SEQ ID NO: 217554 - RNA, 19 nt, Homo sapiens
  misc_RNA (1)...(19): siRNA sense strand
uaugacaucugccaaagcu

SEQ ID NO: 217555 - RNA, 19 nt, Homo sapiens
  misc_RNA (1)...(19): siRNA sense strand
aaugucagauucucagcuu

SEQ ID NO: 217556 - RNA, 19 nt, Homo sapiens
  misc_RNA (1)...(19): siRNA sense strand
ucgagacuuugccaaggua

SEQ ID NO: 217557 - RNA, 19 nt, Homo sapiens
  misc_RNA (1)...(19): siRNA sense strand
gcaaaaggccauaaaaugc

SEQ ID NO: 217558 - RNA, 19 nt, Homo sapiens
  misc_RNA (1)...(19): siRNA sense strand
cugcaugauucuauccaaa

SEQ ID NO: 217559 - RNA, 19 nt, Homo sapiens
  misc_RNA (1)...(19): siRNA sense strand
uaaagcacauuuggaagac

SEQ ID NO: 217560 - RNA, 19 nt, Homo sapiens
  misc_RNA (1)...(19): siRNA sense strand
acaggagucuaaagcacuu

SEQ ID NO: 217561 - RNA, 19 nt, Homo sapiens
  misc_RNA (1)...(19): siRNA sense strand
acagauaccuuuucaagca

SEQ ID NO: 217562 - RNA, 19 nt, Homo sapiens
  misc_RNA (1)...(19): siRNA sense strand
aagcacauuuggaagacaa

SEQ ID NO: 217563 - RNA, 19 nt, Homo sapiens
  misc_RNA (1)...(19): siRNA sense strand
gcuaauaauaagccagaga

SEQ ID NO: 217564 - RNA, 19 nt, Homo sapiens
  misc_RNA (1)...(19): siRNA sense strand
caagagcacaacaauuugg

SEQ ID NO: 217565 - RNA, 19 nt, Homo sapiens
  misc_RNA (1)...(19): siRNA sense strand
ccugucagcugcaugugau

SEQ ID NO: 217566 - RNA, 19 nt, Homo sapiens
  misc_RNA (1)...(19): siRNA sense strand
gcugcugaauguuuaugau

SEQ ID NO: 217567 - RNA, 19 nt, Homo sapiens
  misc_RNA (1)...(19): siRNA sense strand
acagagcucuaccagucuu

SEQ ID NO: 217568 - RNA, 19 nt, Homo sapiens
  misc_RNA (1)...(19): siRNA sense strand
acaguugggugaaguugca

SEQ ID NO: 217569 - RNA, 19 nt, Homo sapiens
  misc_RNA (1)...(19): siRNA sense strand
guuugaccacuauuuauga

SEQ ID NO: 217570 - RNA, 19 nt, Homo sapiens
  misc_RNA (1)...(19): siRNA sense strand
gcuuauaggacugccauga

SEQ ID NO: 217571 - RNA, 19 nt, Homo sapiens
  misc_RNA (1)...(19): siRNA sense strand
caucaggccaaauguaaca

SEQ ID NO: 217572 - RNA, 19 nt, Homo sapiens
  misc_RNA (1)...(19): siRNA sense strand
gauucuauccaaauuccaa

SEQ ID NO: 217573 - RNA, 19 nt, Homo sapiens
  misc_RNA (1)...(19): siRNA sense strand
ggcaaguucaacaggauuu

SEQ ID NO: 217574 - RNA, 19 nt, Homo sapiens
  misc_RNA (1)...(19): siRNA sense strand
gaacuggcugcugaauguu

SEQ ID NO: 217575 - RNA, 19 nt, Homo sapiens
  misc_RNA (1)...(19): siRNA sense strand
cugcugaauguuuaugaua

SEQ ID NO: 217576 - RNA, 19 nt, Homo sapiens
  misc_RNA (1)...(19): siRNA sense strand
aagcaucaggccaaaugua

SEQ ID NO: 217577 - RNA, 19 nt, Homo sapiens
  misc_RNA (1)...(19): siRNA sense strand
uggcaucauuucccugugu

SEQ ID NO: 217578 - RNA, 19 nt, Homo sapiens
  misc_RNA (1)...(19): siRNA sense strand
ccaugaaacuccgaagacu

SEQ ID NO: 217579 - RNA, 19 nt, Homo sapiens
  misc_RNA (1)...(19): siRNA sense strand
auaauaagccagagaucga

SEQ ID NO: 217580 - RNA, 19 nt, Homo sapiens
  misc_RNA (1)...(19): siRNA sense strand
cuaauaauaagccagagau

SEQ ID NO: 217581 - RNA, 19 nt, Homo sapiens
  misc_RNA (1)...(19): siRNA sense strand
ugggugaaguugcauccuu

SEQ ID NO: 217582 - RNA, 19 nt, Homo sapiens
  misc_RNA (1)...(19): siRNA sense strand
caucauuucccuguguaaa

SEQ ID NO: 217583 - RNA, 19 nt, Homo sapiens
  misc_RNA (1)...(19): siRNA sense strand
gcguggauaugugucugaa

SEQ ID NO: 217584 - RNA, 19 nt, Homo sapiens
  misc_RNA (1)...(19): siRNA sense strand
gcacuaucccaugguggaa

SEQ ID NO: 217585 - RNA, 19 nt, Homo sapiens
  misc_RNA (1)...(19): siRNA sense strand
gagccugucagcugcaugu

SEQ ID NO: 217586 - RNA, 19 nt, Homo sapiens
  misc_RNA (1)...(19): siRNA sense strand
guacagauaccuuuucaag

SEQ ID NO: 217587 - RNA, 19 nt, Homo sapiens
  misc_RNA (1)...(19): siRNA sense strand
gucccucucugcguggaua

SEQ ID NO: 217588 - RNA, 19 nt, Homo sapiens
  misc_RNA (1)...(19): siRNA sense strand
ggagcugcuuccaauuugc

SEQ ID NO: 217589 - RNA, 19 nt, Homo sapiens
  misc_RNA (1)...(19): siRNA sense strand
uuagcugaccugaauaaug

SEQ ID NO: 217590 - RNA, 19 nt, Homo sapiens
  misc_RNA (1)...(19): siRNA sense strand
guggcaaguucaacaggau

SEQ ID NO: 217591 - RNA, 19 nt, Homo sapiens
  misc_RNA (1)...(19): siRNA sense strand
acaacaauuuggucaacgu

SEQ ID NO: 217592 - RNA, 19 nt, Homo sapiens
  misc_RNA (1)...(19): siRNA sense strand
gacuacaucaggagaagau

SEQ ID NO: 217593 - RNA, 19 nt, Homo sapiens
  misc_RNA (1)...(19): siRNA sense strand
uaauaagccagagaucgaa

SEQ ID NO: 217594 - RNA, 19 nt, Homo sapiens
  misc_RNA (1)...(19): siRNA sense strand
ugucagauucucagcuuau

SEQ ID NO: 217595 - RNA, 19 nt, Homo sapiens
  misc_RNA (1)...(19): siRNA sense strand
ggauauccugcagauuauu

SEQ ID NO: 217596 - RNA, 19 nt, Homo sapiens
  misc_RNA (1)...(19): siRNA sense strand
agcaucaggccaaauguaa

SEQ ID NO: 217597 - RNA, 19 nt, Homo sapiens
  misc_RNA (1)...(19): siRNA sense strand
gcccuuugcuuggaucucu

SEQ ID NO: 217598 - RNA, 19 nt, Homo sapiens
  misc_RNA (1)...(19): siRNA sense strand
gcugaauguuuaugauacg

SEQ ID NO: 217599 - RNA, 19 nt, Homo sapiens
  misc_RNA (1)...(19): siRNA sense strand
agacuuugccaagguacua

SEQ ID NO: 217600 - RNA, 19 nt, Homo sapiens
  misc_RNA (1)...(19): siRNA sense strand
caagcaaguggcaaguuca

SEQ ID NO: 217601 - RNA, 19 nt, Homo sapiens
  misc_RNA (1)...(19): siRNA sense strand
agacaaguacagauaccuu

SEQ ID NO: 217602 - RNA, 19 nt, Homo sapiens
  misc_RNA (1)...(19): siRNA sense strand
gcaucauuucccuguguaa

SEQ ID NO: 217603 - RNA, 19 nt, Homo sapiens
  misc_RNA (1)...(19): siRNA sense strand
cugcaaagaguguccaauc

SEQ ID NO: 217604 - RNA, 19 nt, Homo sapiens
  misc_RNA (1)...(19): siRNA sense strand
cuuauaggacugccaugaa

SEQ ID NO: 217605 - RNA, 19 nt, Homo sapiens
  misc_RNA (1)...(19): siRNA sense strand
caaagaguguccaaucauu

SEQ ID NO: 217606 - RNA, 19 nt, Homo sapiens
  misc_RNA (1)...(19): siRNA sense strand
uagcugaccugaauaaugu

SEQ ID NO: 217607 - RNA, 19 nt, Homo sapiens
  misc_RNA (1)...(19): siRNA sense strand
gcaugauucuauccaaauu

SEQ ID NO: 217608 - RNA, 19 nt, Homo sapiens
  misc_RNA (1)...(19): siRNA sense strand
ugaacuggcugcugaaugu

SEQ ID NO: 217609 - RNA, 19 nt, Homo sapiens
  misc_RNA (1)...(19): siRNA sense strand
gauauccugcagauuauua

SEQ ID NO: 217610 - RNA, 19 nt, Homo sapiens
  misc_RNA (1)...(19): siRNA sense strand
gagaagauguucgagacuu

SEQ ID NO: 217611 - RNA, 19 nt, Homo sapiens
  misc_RNA (1)...(19): siRNA sense strand
gcacuuuaauuaugacauc

SEQ ID NO: 217612 - RNA, 19 nt, Homo sapiens
  misc_RNA (1)...(19): siRNA sense strand
guaaagcacauuuggaaga

SEQ ID NO: 217613 - RNA, 19 nt, Homo sapiens
  misc_RNA (1)...(19): siRNA sense strand
gaauauugcacuccgacua

SEQ ID NO: 217614 - RNA, 19 nt, Homo sapiens
  misc_RNA (1)...(19): siRNA sense strand
uuauaggacugccaugaaa

SEQ ID NO: 217615 - RNA, 19 nt, Homo sapiens
  misc_RNA (1)...(19): siRNA sense strand
gggugaaguugcauccuuu

SEQ ID NO: 217616 - RNA, 19 nt, Homo sapiens
  misc_RNA (1)...(19): siRNA sense strand
gcaagagcacaacaauuug

SEQ ID NO: 217617 - RNA, 19 nt, Homo sapiens
  misc_RNA (1)...(19): siRNA sense strand
gcacaacaauuuggucaac

SEQ ID NO: 217618 - RNA, 19 nt, Homo sapiens
  misc_RNA (1)...(19): siRNA sense strand
agcaagagcacaacaauuu

SEQ ID NO: 217619 - RNA, 19 nt, Homo sapiens
  misc_RNA (1)...(19): siRNA sense strand
agaagauguucgagacuuu

SEQ ID NO: 217620 - RNA, 19 nt, Homo sapiens
  misc_RNA (1)...(19): siRNA sense strand
gagcaagagcacaacaauu

SEQ ID NO: 217621 - RNA, 19 nt, Homo sapiens
  misc_RNA (1)...(19): siRNA sense strand
ucaagcaaguggcaaguuc

SEQ ID NO: 217622 - RNA, 19 nt, Homo sapiens
  misc_RNA (1)...(19): siRNA sense strand
ccacgagacucaaacaacu

SEQ ID NO: 217623 - RNA, 19 nt, Homo sapiens
  misc_RNA (1)...(19): siRNA sense strand
cagcacaaccucaagcaaa

SEQ ID NO: 217624 - RNA, 19 nt, Homo sapiens
  misc_RNA (1)...(19): siRNA sense strand
gcaaagaguguccaaucau

SEQ ID NO: 217625 - RNA, 19 nt, Homo sapiens
  misc_RNA (1)...(19): siRNA sense strand
auggauauccugcagauua

SEQ ID NO: 217626 - RNA, 19 nt, Homo sapiens
  misc_RNA (1)...(19): siRNA sense strand
uguaacaucugcaaagagu

SEQ ID NO: 217627 - RNA, 19 nt, Homo sapiens
  misc_RNA (1)...(19): siRNA sense strand
guccggagcugcuuccaau

SEQ ID NO: 217628 - RNA, 19 nt, Homo sapiens
  misc_RNA (1)...(19): siRNA sense strand
gcaaguggcaaguucaaca

SEQ ID NO: 217629 - RNA, 19 nt, Homo sapiens
  misc_RNA (1)...(19): siRNA sense strand
gcuuccaauuugcuaauaa

SEQ ID NO: 217630 - RNA, 19 nt, Homo sapiens
  misc_RNA (1)...(19): siRNA sense strand
uggaagacaaguacagaua

SEQ ID NO: 217631 - RNA, 19 nt, Homo sapiens
  misc_RNA (1)...(19): siRNA sense strand
ggauccguguccugucuuu

SEQ ID NO: 217632 - RNA, 19 nt, Homo sapiens
  misc_RNA (1)...(19): siRNA sense strand
gucuuuagcugaccugaau

SEQ ID NO: 217633 - RNA, 19 nt, Homo sapiens
  misc_RNA (1)...(19): siRNA sense strand
gacaaguacagauaccuuu

SEQ ID NO: 217634 - RNA, 19 nt, Homo sapiens
  misc_RNA (1)...(19): siRNA sense strand
ccaagcaucaggccaaaug

SEQ ID NO: 217635 - RNA, 19 nt, Homo sapiens
  misc_RNA (1)...(19): siRNA sense strand
ggagcaagagcacaacaau

SEQ ID NO: 217636 - RNA, 19 nt, Homo sapiens
  misc_RNA (1)...(19): siRNA sense strand
guguaaagcacauuuggaa

SEQ ID NO: 217637 - RNA, 19 nt, Homo sapiens
  misc_RNA (1)...(19): siRNA sense strand
caagacaguugggugaagu

SEQ ID NO: 217638 - RNA, 19 nt, Homo sapiens
  misc_RNA (1)...(19): siRNA sense strand
gaagauguucgagacuuug

SEQ ID NO: 217639 - RNA, 19 nt, Homo sapiens
  misc_RNA (1)...(19): siRNA sense strand
gucagauucucagcuuaua

SEQ ID NO: 217640 - RNA, 19 nt, Homo sapiens
  misc_RNA (1)...(19): siRNA sense strand
uaacaucugcaaagagugu

SEQ ID NO: 217641 - RNA, 19 nt, Homo sapiens
  misc_RNA (1)...(19): siRNA sense strand
cggagcugcuuccaauuug

SEQ ID NO: 217642 - RNA, 19 nt, Homo sapiens
  misc_RNA (1)...(19): siRNA sense strand
gaagacaaguacagauacc

SEQ ID NO: 217643 - RNA, 19 nt, Homo sapiens
  misc_RNA (1)...(19): siRNA sense strand
ccauggauauccugcagau

SEQ ID NO: 217644 - RNA, 19 nt, Homo sapiens
  misc_RNA (1)...(19): siRNA sense strand
ggcaucauuucccugugua

SEQ ID NO: 217645 - RNA, 19 nt, Homo sapiens
  misc_RNA (1)...(19): siRNA sense strand
uggauauccugcagauuau

SEQ ID NO: 217646 - RNA, 19 nt, Homo sapiens
  misc_RNA (1)...(19): siRNA sense strand
ggaagacaaguacagauac

SEQ ID NO: 217647 - RNA, 19 nt, Homo sapiens
  misc_RNA (1)...(19): siRNA sense strand
ugcaaagaguguccaauca

SEQ ID NO: 217648 - RNA, 19 nt, Homo sapiens
  misc_RNA (1)...(19): siRNA sense strand
guggauaugugucugaacu

SEQ ID NO: 217649 - RNA, 19 nt, Homo sapiens
  misc_RNA (1)...(19): siRNA sense strand
acuggcugcugaauguuua

SEQ ID NO: 217650 - RNA, 19 nt, Homo sapiens
  misc_RNA (1)...(19): siRNA sense strand
acuaucccaugguggaaua

SEQ ID NO: 217651 - RNA, 19 nt, Homo sapiens
  misc_RNA (1)...(19): siRNA sense strand
ccggagcugcuuccaauuu

SEQ ID NO: 217652 - RNA, 19 nt, Homo sapiens
  misc_RNA (1)...(19): siRNA sense strand
ccaaauuccaagacaguug

SEQ ID NO: 217653 - RNA, 19 nt, Homo sapiens
  misc_RNA (1)...(19): siRNA sense strand
cagaaacugccaagcauca

SEQ ID NO: 217654 - RNA, 19 nt, Homo sapiens
  misc_RNA (1)...(19): siRNA sense strand
uaugacaucugccaaagcu

SEQ ID NO: 217655 - RNA, 19 nt, Homo sapiens
  misc_RNA (1)...(19): siRNA sense strand
aaugucagauucucagcuu

SEQ ID NO: 217656 - RNA, 19 nt, Homo sapiens
  misc_RNA (1)...(19): siRNA sense strand
ucgagacuuugccaaggua

SEQ ID NO: 217657 - RNA, 19 nt, Homo sapiens
  misc_RNA (1)...(19): siRNA sense strand
gcaaaaggccauaaaaugc

SEQ ID NO: 217658 - RNA, 19 nt, Homo sapiens
  misc_RNA (1)...(19): siRNA sense strand
cugcaugauucuauccaaa

SEQ ID NO: 217659 - RNA, 19 nt, Homo sapiens
  misc_RNA (1)...(19): siRNA sense strand
uaaagcacauuuggaagac

SEQ ID NO: 217660 - RNA, 19 nt, Homo sapiens
  misc_RNA (1)...(19): siRNA sense strand
acaggagucuaaagcacuu

SEQ ID NO: 217661 - RNA, 19 nt, Homo sapiens
  misc_RNA (1)...(19): siRNA sense strand
acagauaccuuuucaagca

SEQ ID NO: 217662 - RNA, 19 nt, Homo sapiens
  misc_RNA (1)...(19): siRNA sense strand
aagcacauuuggaagacaa

SEQ ID NO: 217663 - RNA, 19 nt, Homo sapiens
  misc_RNA (1)...(19): siRNA sense strand
gcuaauaauaagccagaga

SEQ ID NO: 217664 - RNA, 19 nt, Homo sapiens
  misc_RNA (1)...(19): siRNA sense strand
caagagcacaacaauuugg

SEQ ID NO: 217665 - RNA, 19 nt, Homo sapiens
  misc_RNA (1)...(19): siRNA sense strand
ccugucagcugcaugugau

SEQ ID NO: 217666 - RNA, 19 nt, Homo sapiens
  misc_RNA (1)...(19): siRNA sense strand
gcugcugaauguuuaugau

SEQ ID NO: 217667 - RNA, 19 nt, Homo sapiens
  misc_RNA (1)...(19): siRNA sense strand
acagagcucuaccagucuu

SEQ ID NO: 217668 - RNA, 19 nt, Homo sapiens
  misc_RNA (1)...(19): siRNA sense strand
acaguugggugaaguugca

SEQ ID NO: 217669 - RNA, 19 nt, Homo sapiens
  misc_RNA (1)...(19): siRNA sense strand
guuugaccacuauuuauga

SEQ ID NO: 217670 - RNA, 19 nt, Homo sapiens
  misc_RNA (1)...(19): siRNA sense strand
gcuuauaggacugccauga

SEQ ID NO: 217671 - RNA, 19 nt, Homo sapiens
  misc_RNA (1)...(19): siRNA sense strand
caucaggccaaauguaaca

SEQ ID NO: 217672 - RNA, 19 nt, Homo sapiens
  misc_RNA (1)...(19): siRNA sense strand
gauucuauccaaauuccaa

SEQ ID NO: 217673 - RNA, 19 nt, Homo sapiens
  misc_RNA (1)...(19): siRNA sense strand
ggcaaguucaacaggauuu

SEQ ID NO: 217674 - RNA, 19 nt, Homo sapiens
  misc_RNA (1)...(19): siRNA sense strand
gaacuggcugcugaauguu

SEQ ID NO: 217675 - RNA, 19 nt, Homo sapiens
  misc_RNA (1)...(19): siRNA sense strand
cugcugaauguuuaugaua

SEQ ID NO: 217676 - RNA, 19 nt, Homo sapiens
  misc_RNA (1)...(19): siRNA sense strand
aagcaucaggccaaaugua

SEQ ID NO: 217677 - RNA, 19 nt, Homo sapiens
  misc_RNA (1)...(19): siRNA sense strand
uggcaucauuucccugugu

SEQ ID NO: 217678 - RNA, 19 nt, Homo sapiens
  misc_RNA (1)...(19): siRNA sense strand
ccaugaaacuccgaagacu

SEQ ID NO: 217679 - RNA, 19 nt, Homo sapiens
  misc_RNA (1)...(19): siRNA sense strand
auaauaagccagagaucga

SEQ ID NO: 217680 - RNA, 19 nt, Homo sapiens
  misc_RNA (1)...(19): siRNA sense strand
cuaauaauaagccagagau

SEQ ID NO: 217681 - RNA, 19 nt, Homo sapiens
  misc_RNA (1)...(19): siRNA sense strand
ugggugaaguugcauccuu

SEQ ID NO: 217682 - RNA, 19 nt, Homo sapiens
  misc_RNA (1)...(19): siRNA sense strand
caucauuucccuguguaaa

SEQ ID NO: 217683 - RNA, 19 nt, Homo sapiens
  misc_RNA (1)...(19): siRNA sense strand
gcguggauaugugucugaa

SEQ ID NO: 217684 - RNA, 19 nt, Homo sapiens
  misc_RNA (1)...(19): siRNA sense strand
gcacuaucccaugguggaa

SEQ ID NO: 217685 - RNA, 19 nt, Homo sapiens
  misc_RNA (1)...(19): siRNA sense strand
gagccugucagcugcaugu

SEQ ID NO: 217686 - RNA, 19 nt, Homo sapiens
  misc_RNA (1)...(19): siRNA sense strand
guacagauaccuuuucaag

SEQ ID NO: 217687 - RNA, 19 nt, Homo sapiens
  misc_RNA (1)...(19): siRNA sense strand
gucccucucugcguggaua

SEQ ID NO: 217688 - RNA, 19 nt, Homo sapiens
  misc_RNA (1)...(19): siRNA sense strand
ggagcugcuuccaauuugc

SEQ ID NO: 217689 - RNA, 19 nt, Homo sapiens
  misc_RNA (1)...(19): siRNA sense strand
uuagcugaccugaauaaug

SEQ ID NO: 217690 - RNA, 19 nt, Homo sapiens
  misc_RNA (1)...(19): siRNA sense strand
guggcaaguucaacaggau

SEQ ID NO: 217691 - RNA, 19 nt, Homo sapiens
  misc_RNA (1)...(19): siRNA sense strand
acaacaauuuggucaacgu

SEQ ID NO: 217692 - RNA, 19 nt, Homo sapiens
  misc_RNA (1)...(19): siRNA sense strand
gacuacaucaggagaagau

SEQ ID NO: 217693 - RNA, 19 nt, Homo sapiens
  misc_RNA (1)...(19): siRNA sense strand
uaauaagccagagaucgaa

SEQ ID NO: 217694 - RNA, 19 nt, Homo sapiens
  misc_RNA (1)...(19): siRNA sense strand
ugucagauucucagcuuau

SEQ ID NO: 217695 - RNA, 19 nt, Homo sapiens
  misc_RNA (1)...(19): siRNA sense strand
ggauauccugcagauuauu

SEQ ID NO: 217696 - RNA, 19 nt, Homo sapiens
  misc_RNA (1)...(19): siRNA sense strand
agcaucaggccaaauguaa

SEQ ID NO: 217697 - RNA, 19 nt, Homo sapiens
  misc_RNA (1)...(19): siRNA sense strand
gcccuuugcuuggaucucu

SEQ ID NO: 217698 - RNA, 19 nt, Homo sapiens
  misc_RNA (1)...(19): siRNA sense strand
gcugaauguuuaugauacg

SEQ ID NO: 217699 - RNA, 19 nt, Homo sapiens
  misc_RNA (1)...(19): siRNA sense strand
agacuuugccaagguacua

SEQ ID NO: 217700 - RNA, 19 nt, Homo sapiens
  misc_RNA (1)...(19): siRNA sense strand
caagcaaguggcaaguuca

SEQ ID NO: 217701 - RNA, 19 nt, Homo sapiens
  misc_RNA (1)...(19): siRNA sense strand
agacaaguacagauaccuu

SEQ ID NO: 217702 - RNA, 19 nt, Homo sapiens
  misc_RNA (1)...(19): siRNA sense strand
gcaucauuucccuguguaa

SEQ ID NO: 217703 - RNA, 19 nt, Homo sapiens
  misc_RNA (1)...(19): siRNA sense strand
cugcaaagaguguccaauc

SEQ ID NO: 217704 - RNA, 19 nt, Homo sapiens
  misc_RNA (1)...(19): siRNA sense strand
cuuauaggacugccaugaa

SEQ ID NO: 217705 - RNA, 19 nt, Homo sapiens
  misc_RNA (1)...(19): siRNA sense strand
caaagaguguccaaucauu

SEQ ID NO: 217706 - RNA, 19 nt, Homo sapiens
  misc_RNA (1)...(19): siRNA sense strand
uagcugaccugaauaaugu

SEQ ID NO: 217707 - RNA, 19 nt, Homo sapiens
  misc_RNA (1)...(19): siRNA sense strand
gcaugauucuauccaaauu

SEQ ID NO: 217708 - RNA, 19 nt, Homo sapiens
  misc_RNA (1)...(19): siRNA sense strand
ugaacuggcugcugaaugu

SEQ ID NO: 217709 - RNA, 19 nt, Homo sapiens
  misc_RNA (1)...(19): siRNA sense strand
gauauccugcagauuauua

SEQ ID NO: 217710 - RNA, 19 nt, Homo sapiens
  misc_RNA (1)...(19): siRNA sense strand
gagaagauguucgagacuu

SEQ ID NO: 217711 - RNA, 19 nt, Homo sapiens
  misc_RNA (1)...(19): siRNA sense strand
gcacuuuaauuaugacauc

SEQ ID NO: 217712 - RNA, 19 nt, Homo sapiens
  misc_RNA (1)...(19): siRNA sense strand
guaaagcacauuuggaaga

SEQ ID NO: 217713 - RNA, 19 nt, Homo sapiens
  misc_RNA (1)...(19): siRNA sense strand
gaauauugcacuccgacua

SEQ ID NO: 217714 - RNA, 19 nt, Homo sapiens
  misc_RNA (1)...(19): siRNA sense strand
uuauaggacugccaugaaa

SEQ ID NO: 217715 - RNA, 19 nt, Homo sapiens
  misc_RNA (1)...(19): siRNA sense strand
gggugaaguugcauccuuu

SEQ ID NO: 217716 - RNA, 19 nt, Homo sapiens
  misc_RNA (1)...(19): siRNA sense strand
gcaagagcacaacaauuug

SEQ ID NO: 217717 - RNA, 19 nt, Homo sapiens
  misc_RNA (1)...(19): siRNA sense strand
gcacaacaauuuggucaac

SEQ ID NO: 217718 - RNA, 19 nt, Homo sapiens
  misc_RNA (1)...(19): siRNA sense strand
agcaagagcacaacaauuu

SEQ ID NO: 217719 - RNA, 19 nt, Homo sapiens
  misc_RNA (1)...(19): siRNA sense strand
agaagauguucgagacuuu

SEQ ID NO: 217720 - RNA, 19 nt, Homo sapiens
  misc_RNA (1)...(19): siRNA sense strand
gagcaagagcacaacaauu

SEQ ID NO: 217721 - RNA, 19 nt, Homo sapiens
  misc_RNA (1)...(19): siRNA sense strand
ucaagcaaguggcaaguuc

SEQ ID NO: 217722 - RNA, 19 nt, Homo sapiens
  misc_RNA (1)...(19): siRNA sense strand
ccacgagacucaaacaacu

SEQ ID NO: 217723 - RNA, 19 nt, Homo sapiens
  misc_RNA (1)...(19): siRNA sense strand
cagcacaaccucaagcaaa

SEQ ID NO: 217724 - RNA, 19 nt, Homo sapiens
  misc_RNA (1)...(19): siRNA sense strand
gcaaagaguguccaaucau

SEQ ID NO: 217725 - RNA, 19 nt, Homo sapiens
  misc_RNA (1)...(19): siRNA sense strand
auggauauccugcagauua

SEQ ID NO: 217726 - RNA, 19 nt, Homo sapiens
  misc_RNA (1)...(19): siRNA sense strand
uguaacaucugcaaagagu

SEQ ID NO: 217727 - RNA, 19 nt, Homo sapiens
  misc_RNA (1)...(19): siRNA sense strand
guccggagcugcuuccaau

SEQ ID NO: 217728 - RNA, 19 nt, Homo sapiens
  misc_RNA (1)...(19): siRNA sense strand
gcaaguggcaaguucaaca

SEQ ID NO: 217729 - RNA, 19 nt, Homo sapiens
  misc_RNA (1)...(19): siRNA sense strand
gcuuccaauuugcuaauaa

SEQ ID NO: 217730 - RNA, 19 nt, Homo sapiens
  misc_RNA (1)...(19): siRNA sense strand
uggaagacaaguacagaua

SEQ ID NO: 217731 - RNA, 19 nt, Homo sapiens
  misc_RNA (1)...(19): siRNA sense strand
ggauccguguccugucuuu

SEQ ID NO: 217732 - RNA, 19 nt, Homo sapiens
  misc_RNA (1)...(19): siRNA sense strand
gucuuuagcugaccugaau

SEQ ID NO: 217733 - RNA, 19 nt, Homo sapiens
  misc_RNA (1)...(19): siRNA sense strand
gacaaguacagauaccuuu

SEQ ID NO: 217734 - RNA, 19 nt, Homo sapiens
  misc_RNA (1)...(19): siRNA sense strand
ccaagcaucaggccaaaug

SEQ ID NO: 217735 - RNA, 19 nt, Homo sapiens
  misc_RNA (1)...(19): siRNA sense strand
ggagcaagagcacaacaau

SEQ ID NO: 217736 - RNA, 19 nt, Homo sapiens
  misc_RNA (1)...(19): siRNA sense strand
guguaaagcacauuuggaa

SEQ ID NO: 217737 - RNA, 19 nt, Homo sapiens
  misc_RNA (1)...(19): siRNA sense strand
caagacaguugggugaagu

SEQ ID NO: 217738 - RNA, 19 nt, Homo sapiens
  misc_RNA (1)...(19): siRNA sense strand
gaagauguucgagacuuug

SEQ ID NO: 217739 - RNA, 19 nt, Homo sapiens
  misc_RNA (1)...(19): siRNA sense strand
gucagauucucagcuuaua

SEQ ID NO: 217740 - RNA, 19 nt, Homo sapiens
  misc_RNA (1)...(19): siRNA sense strand
uaacaucugcaaagagugu

SEQ ID NO: 217741 - RNA, 19 nt, Homo sapiens
  misc_RNA (1)...(19): siRNA sense strand
cggagcugcuuccaauuug

SEQ ID NO: 217742 - RNA, 19 nt, Homo sapiens
  misc_RNA (1)...(19): siRNA sense strand
gaagacaaguacagauacc

SEQ ID NO: 217743 - RNA, 19 nt, Homo sapiens
  misc_RNA (1)...(19): siRNA sense strand
ccauggauauccugcagau

SEQ ID NO: 217744 - RNA, 19 nt, Homo sapiens
  misc_RNA (1)...(19): siRNA sense strand
ggcaucauuucccugugua

SEQ ID NO: 217745 - RNA, 19 nt, Homo sapiens
  misc_RNA (1)...(19): siRNA sense strand
uggauauccugcagauuau

SEQ ID NO: 217746 - RNA, 19 nt, Homo sapiens
  misc_RNA (1)...(19): siRNA sense strand
ggaagacaaguacagauac

SEQ ID NO: 217747 - RNA, 19 nt, Homo sapiens
  misc_RNA (1)...(19): siRNA sense strand
ugcaaagaguguccaauca

SEQ ID NO: 217748 - RNA, 19 nt, Homo sapiens
  misc_RNA (1)...(19): siRNA sense strand
guggauaugugucugaacu

SEQ ID NO: 217749 - RNA, 19 nt, Homo sapiens
  misc_RNA (1)...(19): siRNA sense strand
acuggcugcugaauguuua

SEQ ID NO: 217750 - RNA, 19 nt, Homo sapiens
  misc_RNA (1)...(19): siRNA sense strand
acuaucccaugguggaaua

SEQ ID NO: 217751 - RNA, 19 nt, Homo sapiens
  misc_RNA (1)...(19): siRNA sense strand
ccggagcugcuuccaauuu

SEQ ID NO: 217752 - RNA, 19 nt, Homo sapiens
  misc_RNA (1)...(19): siRNA sense strand
ccaaauuccaagacaguug

SEQ ID NO: 217753 - RNA, 19 nt, Homo sapiens
  misc_RNA (1)...(19): siRNA sense strand
cagaaacugccaagcauca

SEQ ID NO: 217754 - RNA, 19 nt, Homo sapiens
  misc_RNA (1)...(19): siRNA sense strand
uaugacaucugccaaagcu

SEQ ID NO: 217755 - RNA, 19 nt, Homo sapiens
  misc_RNA (1)...(19): siRNA sense strand
aaugucagauucucagcuu

SEQ ID NO: 217756 - RNA, 19 nt, Homo sapiens
  misc_RNA (1)...(19): siRNA sense strand
ucgagacuuugccaaggua

SEQ ID NO: 217757 - RNA, 19 nt, Homo sapiens
  misc_RNA (1)...(19): siRNA sense strand
gcaaaaggccauaaaaugc

SEQ ID NO: 217758 - RNA, 19 nt, Homo sapiens
  misc_RNA (1)...(19): siRNA sense strand
cugcaugauucuauccaaa

SEQ ID NO: 217759 - RNA, 19 nt, Homo sapiens
  misc_RNA (1)...(19): siRNA sense strand
uaaagcacauuuggaagac

SEQ ID NO: 217760 - RNA, 19 nt, Homo sapiens
  misc_RNA (1)...(19): siRNA sense strand
acaggagucuaaagcacuu

SEQ ID NO: 217761 - RNA, 19 nt, Homo sapiens
  misc_RNA (1)...(19): siRNA sense strand
acagauaccuuuucaagca

SEQ ID NO: 217762 - RNA, 19 nt, Homo sapiens
  misc_RNA (1)...(19): siRNA sense strand
aagcacauuuggaagacaa

SEQ ID NO: 217763 - RNA, 19 nt, Homo sapiens
  misc_RNA (1)...(19): siRNA sense strand
gcuaauaauaagccagaga

SEQ ID NO: 217764 - RNA, 19 nt, Homo sapiens
  misc_RNA (1)...(19): siRNA sense strand
caagagcacaacaauuugg

SEQ ID NO: 217765 - RNA, 19 nt, Homo sapiens
  misc_RNA (1)...(19): siRNA sense strand
ccugucagcugcaugugau

SEQ ID NO: 217766 - RNA, 19 nt, Homo sapiens
  misc_RNA (1)...(19): siRNA sense strand
gcugcugaauguuuaugau

SEQ ID NO: 217767 - RNA, 19 nt, Homo sapiens
  misc_RNA (1)...(19): siRNA sense strand
acagagcucuaccagucuu

SEQ ID NO: 217768 - RNA, 19 nt, Homo sapiens
  misc_RNA (1)...(19): siRNA sense strand
acaguugggugaaguugca

SEQ ID NO: 217769 - RNA, 19 nt, Homo sapiens
  misc_RNA (1)...(19): siRNA sense strand
guuugaccacuauuuauga

SEQ ID NO: 217770 - RNA, 19 nt, Homo sapiens
  misc_RNA (1)...(19): siRNA sense strand
gcuuauaggacugccauga

SEQ ID NO: 217771 - RNA, 19 nt, Homo sapiens
  misc_RNA (1)...(19): siRNA sense strand
caucaggccaaauguaaca

SEQ ID NO: 217772 - RNA, 19 nt, Homo sapiens
  misc_RNA (1)...(19): siRNA sense strand
gauucuauccaaauuccaa

SEQ ID NO: 217773 - RNA, 19 nt, Homo sapiens
  misc_RNA (1)...(19): siRNA sense strand
ggcaaguucaacaggauuu

SEQ ID NO: 217774 - RNA, 19 nt, Homo sapiens
  misc_RNA (1)...(19): siRNA sense strand
gaacuggcugcugaauguu

SEQ ID NO: 217775 - RNA, 19 nt, Homo sapiens
  misc_RNA (1)...(19): siRNA sense strand
cugcugaauguuuaugaua

SEQ ID NO: 217776 - RNA, 19 nt, Homo sapiens
  misc_RNA (1)...(19): siRNA sense strand
aagcaucaggccaaaugua

SEQ ID NO: 217777 - RNA, 19 nt, Homo sapiens
  misc_RNA (1)...(19): siRNA sense strand
uggcaucauuucccugugu

SEQ ID NO: 217778 - RNA, 19 nt, Homo sapiens
  misc_RNA (1)...(19): siRNA sense strand
ccaugaaacuccgaagacu

SEQ ID NO: 217779 - RNA, 19 nt, Homo sapiens
  misc_RNA (1)...(19): siRNA sense strand
auaauaagccagagaucga

SEQ ID NO: 217780 - RNA, 19 nt, Homo sapiens
  misc_RNA (1)...(19): siRNA sense strand
cuaauaauaagccagagau

SEQ ID NO: 217781 - RNA, 19 nt, Homo sapiens
  misc_RNA (1)...(19): siRNA sense strand
ugggugaaguugcauccuu

SEQ ID NO: 217782 - RNA, 19 nt, Homo sapiens
  misc_RNA (1)...(19): siRNA sense strand
caucauuucccuguguaaa

SEQ ID NO: 217783 - RNA, 19 nt, Homo sapiens
  misc_RNA (1)...(19): siRNA sense strand
gcguggauaugugucugaa

SEQ ID NO: 217784 - RNA, 19 nt, Homo sapiens
  misc_RNA (1)...(19): siRNA sense strand
gcacuaucccaugguggaa

SEQ ID NO: 217785 - RNA, 19 nt, Homo sapiens
  misc_RNA (1)...(19): siRNA sense strand
gagccugucagcugcaugu

SEQ ID NO: 217786 - RNA, 19 nt, Homo sapiens
  misc_RNA (1)...(19): siRNA sense strand
guacagauaccuuuucaag

SEQ ID NO: 217787 - RNA, 19 nt, Homo sapiens
  misc_RNA (1)...(19): siRNA sense strand
gucccucucugcguggaua

SEQ ID NO: 217788 - RNA, 19 nt, Homo sapiens
  misc_RNA (1)...(19): siRNA sense strand
ggagcugcuuccaauuugc

SEQ ID NO: 217789 - RNA, 19 nt, Homo sapiens
  misc_RNA (1)...(19): siRNA sense strand
uuagcugaccugaauaaug

SEQ ID NO: 217790 - RNA, 19 nt, Homo sapiens
  misc_RNA (1)...(19): siRNA sense strand
guggcaaguucaacaggau

SEQ ID NO: 217791 - RNA, 19 nt, Homo sapiens
  misc_RNA (1)...(19): siRNA sense strand
acaacaauuuggucaacgu

SEQ ID NO: 217792 - RNA, 19 nt, Homo sapiens
  misc_RNA (1)...(19): siRNA sense strand
gacuacaucaggagaagau

SEQ ID NO: 217793 - RNA, 19 nt, Homo sapiens
  misc_RNA (1)...(19): siRNA sense strand
uaauaagccagagaucgaa

SEQ ID NO: 217794 - RNA, 19 nt, Homo sapiens
  misc_RNA (1)...(19): siRNA sense strand
ugucagauucucagcuuau

SEQ ID NO: 217795 - RNA, 19 nt, Homo sapiens
  misc_RNA (1)...(19): siRNA sense strand
ggauauccugcagauuauu

SEQ ID NO: 217796 - RNA, 19 nt, Homo sapiens
  misc_RNA (1)...(19): siRNA sense strand
agcaucaggccaaauguaa

SEQ ID NO: 217797 - RNA, 19 nt, Homo sapiens
  misc_RNA (1)...(19): siRNA sense strand
gcccuuugcuuggaucucu

SEQ ID NO: 217798 - RNA, 19 nt, Homo sapiens
  misc_RNA (1)...(19): siRNA sense strand
gcugaauguuuaugauacg

SEQ ID NO: 217799 - RNA, 19 nt, Homo sapiens
  misc_RNA (1)...(19): siRNA sense strand
agacuuugccaagguacua

SEQ ID NO: 217800 - RNA, 19 nt, Homo sapiens
  misc_RNA (1)...(19): siRNA sense strand
caagcaaguggcaaguuca

SEQ ID NO: 217801 - RNA, 19 nt, Homo sapiens
  misc_RNA (1)...(19): siRNA sense strand
agacaaguacagauaccuu

SEQ ID NO: 217802 - RNA, 19 nt, Homo sapiens
  misc_RNA (1)...(19): siRNA sense strand
gcaucauuucccuguguaa

SEQ ID NO: 217803 - RNA, 19 nt, Homo sapiens
  misc_RNA (1)...(19): siRNA sense strand
cugcaaagaguguccaauc

SEQ ID NO: 217804 - RNA, 19 nt, Homo sapiens
  misc_RNA (1)...(19): siRNA sense strand
cuuauaggacugccaugaa

SEQ ID NO: 217805 - RNA, 19 nt, Homo sapiens
  misc_RNA (1)...(19): siRNA sense strand
caaagaguguccaaucauu

SEQ ID NO: 217806 - RNA, 19 nt, Homo sapiens
  misc_RNA (1)...(19): siRNA sense strand
uagcugaccugaauaaugu

SEQ ID NO: 217807 - RNA, 19 nt, Homo sapiens
  misc_RNA (1)...(19): siRNA sense strand
gcaugauucuauccaaauu

SEQ ID NO: 217808 - RNA, 19 nt, Homo sapiens
  misc_RNA (1)...(19): siRNA sense strand
ugaacuggcugcugaaugu

SEQ ID NO: 217809 - RNA, 19 nt, Homo sapiens
  misc_RNA (1)...(19): siRNA sense strand
gauauccugcagauuauua

SEQ ID NO: 217810 - RNA, 19 nt, Homo sapiens
  misc_RNA (1)...(19): siRNA sense strand
gagaagauguucgagacuu

SEQ ID NO: 217811 - RNA, 19 nt, Homo sapiens
  misc_RNA (1)...(19): siRNA sense strand
gcacuuuaauuaugacauc

SEQ ID NO: 217812 - RNA, 19 nt, Homo sapiens
  misc_RNA (1)...(19): siRNA sense strand
guaaagcacauuuggaaga

SEQ ID NO: 217813 - RNA, 19 nt, Homo sapiens
  misc_RNA (1)...(19): siRNA sense strand
gaauauugcacuccgacua

SEQ ID NO: 217814 - RNA, 19 nt, Homo sapiens
  misc_RNA (1)...(19): siRNA sense strand
uuauaggacugccaugaaa

SEQ ID NO: 217815 - RNA, 19 nt, Homo sapiens
  misc_RNA (1)...(19): siRNA sense strand
gggugaaguugcauccuuu

SEQ ID NO: 217816 - RNA, 19 nt, Homo sapiens
  misc_RNA (1)...(19): siRNA sense strand
gcaagagcacaacaauuug

SEQ ID NO: 217817 - RNA, 19 nt, Homo sapiens
  misc_RNA (1)...(19): siRNA sense strand
gcacaacaauuuggucaac

SEQ ID NO: 217818 - RNA, 19 nt, Homo sapiens
  misc_RNA (1)...(19): siRNA sense strand
agcaagagcacaacaauuu

SEQ ID NO: 217819 - RNA, 19 nt, Homo sapiens
  misc_RNA (1)...(19): siRNA sense strand
agaagauguucgagacuuu

SEQ ID NO: 217820 - RNA, 19 nt, Homo sapiens
  misc_RNA (1)...(19): siRNA sense strand
gagcaagagcacaacaauu

SEQ ID NO: 217821 - RNA, 19 nt, Homo sapiens
  misc_RNA (1)...(19): siRNA sense strand
ucaagcaaguggcaaguuc

SEQ ID NO: 217822 - RNA, 19 nt, Homo sapiens
  misc_RNA (1)...(19): siRNA sense strand
ccacgagacucaaacaacu

SEQ ID NO: 217823 - RNA, 19 nt, Homo sapiens
  misc_RNA (1)...(19): siRNA sense strand
cagcacaaccucaagcaaa

SEQ ID NO: 217824 - RNA, 19 nt, Homo sapiens
  misc_RNA (1)...(19): siRNA sense strand
gcaaagaguguccaaucau

SEQ ID NO: 217825 - RNA, 19 nt, Homo sapiens
  misc_RNA (1)...(19): siRNA sense strand
auggauauccugcagauua

SEQ ID NO: 217826 - RNA, 19 nt, Homo sapiens
  misc_RNA (1)...(19): siRNA sense strand
uguaacaucugcaaagagu

SEQ ID NO: 217827 - RNA, 19 nt, Homo sapiens
  misc_RNA (1)...(19): siRNA sense strand
guccggagcugcuuccaau

SEQ ID NO: 217828 - RNA, 19 nt, Homo sapiens
  misc_RNA (1)...(19): siRNA sense strand
gcaaguggcaaguucaaca

SEQ ID NO: 217829 - RNA, 19 nt, Homo sapiens
  misc_RNA (1)...(19): siRNA sense strand
gcuuccaauuugcuaauaa

SEQ ID NO: 217830 - RNA, 19 nt, Homo sapiens
  misc_RNA (1)...(19): siRNA sense strand
uggaagacaaguacagaua

SEQ ID NO: 217831 - RNA, 19 nt, Homo sapiens
  misc_RNA (1)...(19): siRNA sense strand
ggauccguguccugucuuu

SEQ ID NO: 217832 - RNA, 19 nt, Homo sapiens
  misc_RNA (1)...(19): siRNA sense strand
gucuuuagcugaccugaau

SEQ ID NO: 217833 - RNA, 19 nt, Homo sapiens
  misc_RNA (1)...(19): siRNA sense strand
gacaaguacagauaccuuu

SEQ ID NO: 217834 - RNA, 19 nt, Homo sapiens
  misc_RNA (1)...(19): siRNA sense strand
ccaagcaucaggccaaaug

SEQ ID NO: 217835 - RNA, 19 nt, Homo sapiens
  misc_RNA (1)...(19): siRNA sense strand
ggagcaagagcacaacaau

SEQ ID NO: 217836 - RNA, 19 nt, Homo sapiens
  misc_RNA (1)...(19): siRNA sense strand
guguaaagcacauuuggaa

SEQ ID NO: 217837 - RNA, 19 nt, Homo sapiens
  misc_RNA (1)...(19): siRNA sense strand
caagacaguugggugaagu

SEQ ID NO: 217838 - RNA, 19 nt, Homo sapiens
  misc_RNA (1)...(19): siRNA sense strand
gaagauguucgagacuuug

SEQ ID NO: 217839 - RNA, 19 nt, Homo sapiens
  misc_RNA (1)...(19): siRNA sense strand
gucagauucucagcuuaua

SEQ ID NO: 217840 - RNA, 19 nt, Homo sapiens
  misc_RNA (1)...(19): siRNA sense strand
uaacaucugcaaagagugu

SEQ ID NO: 217841 - RNA, 19 nt, Homo sapiens
  misc_RNA (1)...(19): siRNA sense strand
cggagcugcuuccaauuug

SEQ ID NO: 217842 - RNA, 19 nt, Homo sapiens
  misc_RNA (1)...(19): siRNA sense strand
gaagacaaguacagauacc

SEQ ID NO: 217843 - RNA, 19 nt, Homo sapiens
  misc_RNA (1)...(19): siRNA sense strand
ccauggauauccugcagau

SEQ ID NO: 217844 - RNA, 19 nt, Homo sapiens
  misc_RNA (1)...(19): siRNA sense strand
ggcaucauuucccugugua

SEQ ID NO: 217845 - RNA, 19 nt, Homo sapiens
  misc_RNA (1)...(19): siRNA sense strand
uggauauccugcagauuau

SEQ ID NO: 217846 - RNA, 19 nt, Homo sapiens
  misc_RNA (1)...(19): siRNA sense strand
ggaagacaaguacagauac

SEQ ID NO: 217847 - RNA, 19 nt, Homo sapiens
  misc_RNA (1)...(19): siRNA sense strand
ugcaaagaguguccaauca

SEQ ID NO: 217848 - RNA, 19 nt, Homo sapiens
  misc_RNA (1)...(19): siRNA sense strand
guggauaugugucugaacu

SEQ ID NO: 217849 - RNA, 19 nt, Homo sapiens
  misc_RNA (1)...(19): siRNA sense strand
acuggcugcugaauguuua

SEQ ID NO: 217850 - RNA, 19 nt, Homo sapiens
  misc_RNA (1)...(19): siRNA sense strand
acuaucccaugguggaaua

SEQ ID NO: 217851 - RNA, 19 nt, Homo sapiens
  misc_RNA (1)...(19): siRNA sense strand
ccggagcugcuuccaauuu

SEQ ID NO: 217852 - RNA, 19 nt, Homo sapiens
  misc_RNA (1)...(19): siRNA sense strand
ccaaauuccaagacaguug

SEQ ID NO: 217853 - RNA, 19 nt, Homo sapiens
  misc_RNA (1)...(19): siRNA sense strand
cagaaacugccaagcauca

SEQ ID NO: 217854 - RNA, 19 nt, Homo sapiens
  misc_RNA (1)...(19): siRNA sense strand
uaugacaucugccaaagcu

SEQ ID NO: 217855 - RNA, 19 nt, Homo sapiens
  misc_RNA (1)...(19): siRNA sense strand
aaugucagauucucagcuu

SEQ ID NO: 217856 - RNA, 19 nt, Homo sapiens
  misc_RNA (1)...(19): siRNA sense strand
ucgagacuuugccaaggua

SEQ ID NO: 217857 - RNA, 19 nt, Homo sapiens
  misc_RNA (1)...(19): siRNA sense strand
gcaaaaggccauaaaaugc

SEQ ID NO: 217858 - RNA, 19 nt, Homo sapiens
  misc_RNA (1)...(19): siRNA sense strand
cugcaugauucuauccaaa

SEQ ID NO: 217859 - RNA, 19 nt, Homo sapiens
  misc_RNA (1)...(19): siRNA sense strand
uaaagcacauuuggaagac

SEQ ID NO: 217860 - RNA, 19 nt, Homo sapiens
  misc_RNA (1)...(19): siRNA sense strand
acaggagucuaaagcacuu

SEQ ID NO: 217861 - RNA, 19 nt, Homo sapiens
  misc_RNA (1)...(19): siRNA sense strand
acagauaccuuuucaagca

SEQ ID NO: 217862 - RNA, 19 nt, Homo sapiens
  misc_RNA (1)...(19): siRNA sense strand
aagcacauuuggaagacaa

SEQ ID NO: 217863 - RNA, 19 nt, Homo sapiens
  misc_RNA (1)...(19): siRNA sense strand
gcuaauaauaagccagaga

SEQ ID NO: 217864 - RNA, 19 nt, Homo sapiens
  misc_RNA (1)...(19): siRNA sense strand
caagagcacaacaauuugg

SEQ ID NO: 217865 - RNA, 19 nt, Homo sapiens
  misc_RNA (1)...(19): siRNA sense strand
ccugucagcugcaugugau

SEQ ID NO: 217866 - RNA, 19 nt, Homo sapiens
  misc_RNA (1)...(19): siRNA sense strand
gcugcugaauguuuaugau

SEQ ID NO: 217867 - RNA, 19 nt, Homo sapiens
  misc_RNA (1)...(19): siRNA sense strand
acagagcucuaccagucuu

SEQ ID NO: 217868 - RNA, 19 nt, Homo sapiens
  misc_RNA (1)...(19): siRNA sense strand
acaguugggugaaguugca

SEQ ID NO: 217869 - RNA, 19 nt, Homo sapiens
  misc_RNA (1)...(19): siRNA sense strand
guuugaccacuauuuauga

SEQ ID NO: 217870 - RNA, 19 nt, Homo sapiens
  misc_RNA (1)...(19): siRNA sense strand
gcuuauaggacugccauga

SEQ ID NO: 217871 - RNA, 19 nt, Homo sapiens
  misc_RNA (1)...(19): siRNA sense strand
caucaggccaaauguaaca

SEQ ID NO: 217872 - RNA, 19 nt, Homo sapiens
  misc_RNA (1)...(19): siRNA sense strand
gauucuauccaaauuccaa

SEQ ID NO: 217873 - RNA, 19 nt, Homo sapiens
  misc_RNA (1)...(19): siRNA sense strand
ggcaaguucaacaggauuu

SEQ ID NO: 217874 - RNA, 19 nt, Homo sapiens
  misc_RNA (1)...(19): siRNA sense strand
gaacuggcugcugaauguu

SEQ ID NO: 217875 - RNA, 19 nt, Homo sapiens
  misc_RNA (1)...(19): siRNA sense strand
cugcugaauguuuaugaua

SEQ ID NO: 217876 - RNA, 19 nt, Homo sapiens
  misc_RNA (1)...(19): siRNA sense strand
aagcaucaggccaaaugua

SEQ ID NO: 217877 - RNA, 19 nt, Homo sapiens
  misc_RNA (1)...(19): siRNA sense strand
uggcaucauuucccugugu

SEQ ID NO: 217878 - RNA, 19 nt, Homo sapiens
  misc_RNA (1)...(19): siRNA sense strand
ccaugaaacuccgaagacu

SEQ ID NO: 217879 - RNA, 19 nt, Homo sapiens
  misc_RNA (1)...(19): siRNA sense strand
auaauaagccagagaucga

SEQ ID NO: 217880 - RNA, 19 nt, Homo sapiens
  misc_RNA (1)...(19): siRNA sense strand
cuaauaauaagccagagau

SEQ ID NO: 217881 - RNA, 19 nt, Homo sapiens
  misc_RNA (1)...(19): siRNA sense strand
ugggugaaguugcauccuu

SEQ ID NO: 217882 - RNA, 19 nt, Homo sapiens
  misc_RNA (1)...(19): siRNA sense strand
caucauuucccuguguaaa

SEQ ID NO: 217883 - RNA, 19 nt, Homo sapiens
  misc_RNA (1)...(19): siRNA sense strand
gcguggauaugugucugaa

SEQ ID NO: 217884 - RNA, 19 nt, Homo sapiens
  misc_RNA (1)...(19): siRNA sense strand
gcacuaucccaugguggaa

SEQ ID NO: 217885 - RNA, 19 nt, Homo sapiens
  misc_RNA (1)...(19): siRNA sense strand
gagccugucagcugcaugu

SEQ ID NO: 217886 - RNA, 19 nt, Homo sapiens
  misc_RNA (1)...(19): siRNA sense strand
guacagauaccuuuucaag

SEQ ID NO: 217887 - RNA, 19 nt, Homo sapiens
  misc_RNA (1)...(19): siRNA sense strand
gucccucucugcguggaua

SEQ ID NO: 217888 - RNA, 19 nt, Homo sapiens
  misc_RNA (1)...(19): siRNA sense strand
ggagcugcuuccaauuugc

SEQ ID NO: 217889 - RNA, 19 nt, Homo sapiens
  misc_RNA (1)...(19): siRNA sense strand
uuagcugaccugaauaaug

SEQ ID NO: 217890 - RNA, 19 nt, Homo sapiens
  misc_RNA (1)...(19): siRNA sense strand
guggcaaguucaacaggau

SEQ ID NO: 217891 - RNA, 19 nt, Homo sapiens
  misc_RNA (1)...(19): siRNA sense strand
acaacaauuuggucaacgu

SEQ ID NO: 217892 - RNA, 19 nt, Homo sapiens
  misc_RNA (1)...(19): siRNA sense strand
gacuacaucaggagaagau

SEQ ID NO: 217893 - RNA, 19 nt, Homo sapiens
  misc_RNA (1)...(19): siRNA sense strand
uaauaagccagagaucgaa

SEQ ID NO: 217894 - RNA, 19 nt, Homo sapiens
  misc_RNA (1)...(19): siRNA sense strand
ugucagauucucagcuuau

SEQ ID NO: 217895 - RNA, 19 nt, Homo sapiens
  misc_RNA (1)...(19): siRNA sense strand
ggauauccugcagauuauu

SEQ ID NO: 217896 - RNA, 19 nt, Homo sapiens
  misc_RNA (1)...(19): siRNA sense strand
agcaucaggccaaauguaa

SEQ ID NO: 217897 - RNA, 19 nt, Homo sapiens
  misc_RNA (1)...(19): siRNA sense strand
gcccuuugcuuggaucucu

SEQ ID NO: 217898 - RNA, 19 nt, Homo sapiens
  misc_RNA (1)...(19): siRNA sense strand
gcugaauguuuaugauacg

SEQ ID NO: 217899 - RNA, 19 nt, Homo sapiens
  misc_RNA (1)...(19): siRNA sense strand
agacuuugccaagguacua

SEQ ID NO: 217900 - RNA, 19 nt, Homo sapiens
  misc_RNA (1)...(19): siRNA sense strand
caagcaaguggcaaguuca

SEQ ID NO: 217901 - RNA, 19 nt, Homo sapiens
  misc_RNA (1)...(19): siRNA sense strand
agacaaguacagauaccuu

SEQ ID NO: 217902 - RNA, 19 nt, Homo sapiens
  misc_RNA (1)...(19): siRNA sense strand
gcaucauuucccuguguaa

SEQ ID NO: 217903 - RNA, 19 nt, Homo sapiens
  misc_RNA (1)...(19): siRNA sense strand
cugcaaagaguguccaauc

SEQ ID NO: 217904 - RNA, 19 nt, Homo sapiens
  misc_RNA (1)...(19): siRNA sense strand
cuuauaggacugccaugaa

SEQ ID NO: 217905 - RNA, 19 nt, Homo sapiens
  misc_RNA (1)...(19): siRNA sense strand
caaagaguguccaaucauu

SEQ ID NO: 217906 - RNA, 19 nt, Homo sapiens
  misc_RNA (1)...(19): siRNA sense strand
uagcugaccugaauaaugu

SEQ ID NO: 217907 - RNA, 19 nt, Homo sapiens
  misc_RNA (1)...(19): siRNA sense strand
gcaugauucuauccaaauu

SEQ ID NO: 217908 - RNA, 19 nt, Homo sapiens
  misc_RNA (1)...(19): siRNA sense strand
ugaacuggcugcugaaugu

SEQ ID NO: 217909 - RNA, 19 nt, Homo sapiens
  misc_RNA (1)...(19): siRNA sense strand
gauauccugcagauuauua

SEQ ID NO: 217910 - RNA, 19 nt, Homo sapiens
  misc_RNA (1)...(19): siRNA sense strand
gagaagauguucgagacuu

SEQ ID NO: 217911 - RNA, 19 nt, Homo sapiens
  misc_RNA (1)...(19): siRNA sense strand
gcacuuuaauuaugacauc

SEQ ID NO: 217912 - RNA, 19 nt, Homo sapiens
  misc_RNA (1)...(19): siRNA sense strand
guaaagcacauuuggaaga

SEQ ID NO: 217913 - RNA, 19 nt, Homo sapiens
  misc_RNA (1)...(19): siRNA sense strand
gaauauugcacuccgacua

SEQ ID NO: 217914 - RNA, 19 nt, Homo sapiens
  misc_RNA (1)...(19): siRNA sense strand
uuauaggacugccaugaaa

SEQ ID NO: 217915 - RNA, 19 nt, Homo sapiens
  misc_RNA (1)...(19): siRNA sense strand
gggugaaguugcauccuuu

SEQ ID NO: 217916 - RNA, 19 nt, Homo sapiens
  misc_RNA (1)...(19): siRNA sense strand
gcaagagcacaacaauuug

SEQ ID NO: 217917 - RNA, 19 nt, Homo sapiens
  misc_RNA (1)...(19): siRNA sense strand
gcacaacaauuuggucaac

SEQ ID NO: 217918 - RNA, 19 nt, Homo sapiens
  misc_RNA (1)...(19): siRNA sense strand
agcaagagcacaacaauuu

SEQ ID NO: 217919 - RNA, 19 nt, Homo sapiens
  misc_RNA (1)...(19): siRNA sense strand
agaagauguucgagacuuu

SEQ ID NO: 217920 - RNA, 19 nt, Homo sapiens
  misc_RNA (1)...(19): siRNA sense strand
gagcaagagcacaacaauu

SEQ ID NO: 217921 - RNA, 19 nt, Homo sapiens
  misc_RNA (1)...(19): siRNA sense strand
ucaagcaaguggcaaguuc

SEQ ID NO: 217922 - RNA, 19 nt, Homo sapiens
  misc_RNA (1)...(19): siRNA sense strand
ccacgagacucaaacaacu

SEQ ID NO: 217923 - RNA, 19 nt, Homo sapiens
  misc_RNA (1)...(19): siRNA sense strand
cagcacaaccucaagcaaa

SEQ ID NO: 217924 - RNA, 19 nt, Homo sapiens
  misc_RNA (1)...(19): siRNA sense strand
gcaaagaguguccaaucau

SEQ ID NO: 217925 - RNA, 19 nt, Homo sapiens
  misc_RNA (1)...(19): siRNA sense strand
auggauauccugcagauua

SEQ ID NO: 217926 - RNA, 19 nt, Homo sapiens
  misc_RNA (1)...(19): siRNA sense strand
uguaacaucugcaaagagu

SEQ ID NO: 217927 - RNA, 19 nt, Homo sapiens
  misc_RNA (1)...(19): siRNA sense strand
guccggagcugcuuccaau

SEQ ID NO: 217928 - RNA, 19 nt, Homo sapiens
  misc_RNA (1)...(19): siRNA sense strand
gcaaguggcaaguucaaca

SEQ ID NO: 217929 - RNA, 19 nt, Homo sapiens
  misc_RNA (1)...(19): siRNA sense strand
gcuuccaauuugcuaauaa

SEQ ID NO: 217930 - RNA, 19 nt, Homo sapiens
  misc_RNA (1)...(19): siRNA sense strand
uggaagacaaguacagaua

SEQ ID NO: 217931 - RNA, 19 nt, Homo sapiens
  misc_RNA (1)...(19): siRNA sense strand
ggauccguguccugucuuu

SEQ ID NO: 217932 - RNA, 19 nt, Homo sapiens
  misc_RNA (1)...(19): siRNA sense strand
gucuuuagcugaccugaau

SEQ ID NO: 217933 - RNA, 19 nt, Homo sapiens
  misc_RNA (1)...(19): siRNA sense strand
gacaaguacagauaccuuu

SEQ ID NO: 217934 - RNA, 19 nt, Homo sapiens
  misc_RNA (1)...(19): siRNA sense strand
ccaagcaucaggccaaaug

SEQ ID NO: 217935 - RNA, 19 nt, Homo sapiens
  misc_RNA (1)...(19): siRNA sense strand
ggagcaagagcacaacaau

SEQ ID NO: 217936 - RNA, 19 nt, Homo sapiens
  misc_RNA (1)...(19): siRNA sense strand
guguaaagcacauuuggaa

SEQ ID NO: 217937 - RNA, 19 nt, Homo sapiens
  misc_RNA (1)...(19): siRNA sense strand
caagacaguugggugaagu

SEQ ID NO: 217938 - RNA, 19 nt, Homo sapiens
  misc_RNA (1)...(19): siRNA sense strand
gaagauguucgagacuuug

SEQ ID NO: 217939 - RNA, 19 nt, Homo sapiens
  misc_RNA (1)...(19): siRNA sense strand
gucagauucucagcuuaua

SEQ ID NO: 217940 - RNA, 19 nt, Homo sapiens
  misc_RNA (1)...(19): siRNA sense strand
uaacaucugcaaagagugu

SEQ ID NO: 217941 - RNA, 19 nt, Homo sapiens
  misc_RNA (1)...(19): siRNA sense strand
cggagcugcuuccaauuug

SEQ ID NO: 217942 - RNA, 19 nt, Homo sapiens
  misc_RNA (1)...(19): siRNA sense strand
gaagacaaguacagauacc

SEQ ID NO: 217943 - RNA, 19 nt, Homo sapiens
  misc_RNA (1)...(19): siRNA sense strand
ccauggauauccugcagau

SEQ ID NO: 217944 - RNA, 19 nt, Homo sapiens
  misc_RNA (1)...(19): siRNA sense strand
ggcaucauuucccugugua

SEQ ID NO: 217945 - RNA, 19 nt, Homo sapiens
  misc_RNA (1)...(19): siRNA sense strand
uggauauccugcagauuau

SEQ ID NO: 217946 - RNA, 19 nt, Homo sapiens
  misc_RNA (1)...(19): siRNA sense strand
ggaagacaaguacagauac

SEQ ID NO: 217947 - RNA, 19 nt, Homo sapiens
  misc_RNA (1)...(19): siRNA sense strand
ugcaaagaguguccaauca

SEQ ID NO: 217948 - RNA, 19 nt, Homo sapiens
  misc_RNA (1)...(19): siRNA sense strand
guggauaugugucugaacu

SEQ ID NO: 217949 - RNA, 19 nt, Homo sapiens
  misc_RNA (1)...(19): siRNA sense strand
acuggcugcugaauguuua

SEQ ID NO: 217950 - RNA, 19 nt, Homo sapiens
  misc_RNA (1)...(19): siRNA sense strand
acuaucccaugguggaaua

SEQ ID NO: 217951 - RNA, 19 nt, Homo sapiens
  misc_RNA (1)...(19): siRNA sense strand
ccggagcugcuuccaauuu

SEQ ID NO: 217952 - RNA, 19 nt, Homo sapiens
  misc_RNA (1)...(19): siRNA sense strand
ccaaauuccaagacaguug

SEQ ID NO: 217953 - RNA, 19 nt, Homo sapiens
  misc_RNA (1)...(19): siRNA sense strand
cagaaacugccaagcauca

SEQ ID NO: 217954 - RNA, 19 nt, Homo sapiens
  misc_RNA (1)...(19): siRNA sense strand
uaugacaucugccaaagcu

SEQ ID NO: 217955 - RNA, 19 nt, Homo sapiens
  misc_RNA (1)...(19): siRNA sense strand
aaugucagauucucagcuu

SEQ ID NO: 217956 - RNA, 19 nt, Homo sapiens
  misc_RNA (1)...(19): siRNA sense strand
ucgagacuuugccaaggua

SEQ ID NO: 217957 - RNA, 19 nt, Homo sapiens
  misc_RNA (1)...(19): siRNA sense strand
gcaaaaggccauaaaaugc

SEQ ID NO: 217958 - RNA, 19 nt, Homo sapiens
  misc_RNA (1)...(19): siRNA sense strand
cugcaugauucuauccaaa

SEQ ID NO: 217959 - RNA, 19 nt, Homo sapiens
  misc_RNA (1)...(19): siRNA sense strand
uaaagcacauuuggaagac

SEQ ID NO: 217960 - RNA, 19 nt, Homo sapiens
  misc_RNA (1)...(19): siRNA sense strand
acaggagucuaaagcacuu

SEQ ID NO: 217961 - RNA, 19 nt, Homo sapiens
  misc_RNA (1)...(19): siRNA sense strand
acagauaccuuuucaagca

SEQ ID NO: 217962 - RNA, 19 nt, Homo sapiens
  misc_RNA (1)...(19): siRNA sense strand
aagcacauuuggaagacaa

SEQ ID NO: 217963 - RNA, 19 nt, Homo sapiens
  misc_RNA (1)...(19): siRNA sense strand
gcuaauaauaagccagaga

SEQ ID NO: 217964 - RNA, 19 nt, Homo sapiens
  misc_RNA (1)...(19): siRNA sense strand
caagagcacaacaauuugg

SEQ ID NO: 217965 - RNA, 19 nt, Homo sapiens
  misc_RNA (1)...(19): siRNA sense strand
ccugucagcugcaugugau

SEQ ID NO: 217966 - RNA, 19 nt, Homo sapiens
  misc_RNA (1)...(19): siRNA sense strand
gcugcugaauguuuaugau

SEQ ID NO: 217967 - RNA, 19 nt, Homo sapiens
  misc_RNA (1)...(19): siRNA sense strand
acagagcucuaccagucuu

SEQ ID NO: 217968 - RNA, 19 nt, Homo sapiens
  misc_RNA (1)...(19): siRNA sense strand
acaguugggugaaguugca

SEQ ID NO: 217969 - RNA, 19 nt, Homo sapiens
  misc_RNA (1)...(19): siRNA sense strand
guuugaccacuauuuauga

SEQ ID NO: 217970 - RNA, 19 nt, Homo sapiens
  misc_RNA (1)...(19): siRNA sense strand
gcuuauaggacugccauga

SEQ ID NO: 217971 - RNA, 19 nt, Homo sapiens
  misc_RNA (1)...(19): siRNA sense strand
caucaggccaaauguaaca

SEQ ID NO: 217972 - RNA, 19 nt, Homo sapiens
  misc_RNA (1)...(19): siRNA sense strand
gauucuauccaaauuccaa

SEQ ID NO: 217973 - RNA, 19 nt, Homo sapiens
  misc_RNA (1)...(19): siRNA sense strand
ggcaaguucaacaggauuu

SEQ ID NO: 217974 - RNA, 19 nt, Homo sapiens
  misc_RNA (1)...(19): siRNA sense strand
gaacuggcugcugaauguu

SEQ ID NO: 217975 - RNA, 19 nt, Homo sapiens
  misc_RNA (1)...(19): siRNA sense strand
cugcugaauguuuaugaua

SEQ ID NO: 217976 - RNA, 19 nt, Homo sapiens
  misc_RNA (1)...(19): siRNA sense strand
aagcaucaggccaaaugua

SEQ ID NO: 217977 - RNA, 19 nt, Homo sapiens
  misc_RNA (1)...(19): siRNA sense strand
uggcaucauuucccugugu

SEQ ID NO: 217978 - RNA, 19 nt, Homo sapiens
  misc_RNA (1)...(19): siRNA sense strand
ccaugaaacuccgaagacu

SEQ ID NO: 217979 - RNA, 19 nt, Homo sapiens
  misc_RNA (1)...(19): siRNA sense strand
auaauaagccagagaucga

SEQ ID NO: 217980 - RNA, 19 nt, Homo sapiens
  misc_RNA (1)...(19): siRNA sense strand
cuaauaauaagccagagau

SEQ ID NO: 217981 - RNA, 19 nt, Homo sapiens
  misc_RNA (1)...(19): siRNA sense strand
ugggugaaguugcauccuu

SEQ ID NO: 217982 - RNA, 19 nt, Homo sapiens
  misc_RNA (1)...(19): siRNA sense strand
caucauuucccuguguaaa

SEQ ID NO: 217983 - RNA, 19 nt, Homo sapiens
  misc_RNA (1)...(19): siRNA sense strand
gcguggauaugugucugaa

SEQ ID NO: 217984 - RNA, 19 nt, Homo sapiens
  misc_RNA (1)...(19): siRNA sense strand
gcacuaucccaugguggaa

SEQ ID NO: 217985 - RNA, 19 nt, Homo sapiens
  misc_RNA (1)...(19): siRNA sense strand
gagccugucagcugcaugu

SEQ ID NO: 217986 - RNA, 19 nt, Homo sapiens
  misc_RNA (1)...(19): siRNA sense strand
guacagauaccuuuucaag

SEQ ID NO: 217987 - RNA, 19 nt, Homo sapiens
  misc_RNA (1)...(19): siRNA sense strand
gucccucucugcguggaua

SEQ ID NO: 217988 - RNA, 19 nt, Homo sapiens
  misc_RNA (1)...(19): siRNA sense strand
ggagcugcuuccaauuugc

SEQ ID NO: 217989 - RNA, 19 nt, Homo sapiens
  misc_RNA (1)...(19): siRNA sense strand
uuagcugaccugaauaaug

SEQ ID NO: 217990 - RNA, 19 nt, Homo sapiens
  misc_RNA (1)...(19): siRNA sense strand
guggcaaguucaacaggau

SEQ ID NO: 217991 - RNA, 19 nt, Homo sapiens
  misc_RNA (1)...(19): siRNA sense strand
acaacaauuuggucaacgu

SEQ ID NO: 217992 - RNA, 19 nt, Homo sapiens
  misc_RNA (1)...(19): siRNA sense strand
gacuacaucaggagaagau

SEQ ID NO: 217993 - RNA, 19 nt, Homo sapiens
  misc_RNA (1)...(19): siRNA sense strand
uaauaagccagagaucgaa

SEQ ID NO: 217994 - RNA, 19 nt, Homo sapiens
  misc_RNA (1)...(19): siRNA sense strand
ugucagauucucagcuuau

SEQ ID NO: 217995 - RNA, 19 nt, Homo sapiens
  misc_RNA (1)...(19): siRNA sense strand
ggauauccugcagauuauu

SEQ ID NO: 217996 - RNA, 19 nt, Homo sapiens
  misc_RNA (1)...(19): siRNA sense strand
agcaucaggccaaauguaa

SEQ ID NO: 217997 - RNA, 19 nt, Homo sapiens
  misc_RNA (1)...(19): siRNA sense strand
gcccuuugcuuggaucucu

SEQ ID NO: 217998 - RNA, 19 nt, Homo sapiens
  misc_RNA (1)...(19): siRNA sense strand
gcugaauguuuaugauacg

SEQ ID NO: 217999 - RNA, 19 nt, Homo sapiens
  misc_RNA (1)...(19): siRNA sense strand
agacuuugccaagguacua

SEQ ID NO: 218000 - RNA, 19 nt, Homo sapiens
  misc_RNA (1)...(19): siRNA sense strand
caagcaaguggcaaguuca

SEQ ID NO: 218001 - RNA, 19 nt, Homo sapiens
  misc_RNA (1)...(19): siRNA sense strand
agacaaguacagauaccuu

SEQ ID NO: 218002 - RNA, 19 nt, Homo sapiens
  misc_RNA (1)...(19): siRNA sense strand
gcaucauuucccuguguaa

SEQ ID NO: 218003 - RNA, 19 nt, Homo sapiens
  misc_RNA (1)...(19): siRNA sense strand
cugcaaagaguguccaauc

SEQ ID NO: 218004 - RNA, 19 nt, Homo sapiens
  misc_RNA (1)...(19): siRNA sense strand
cuuauaggacugccaugaa

SEQ ID NO: 218005 - RNA, 19 nt, Homo sapiens
  misc_RNA (1)...(19): siRNA sense strand
caaagaguguccaaucauu

SEQ ID NO: 218006 - RNA, 19 nt, Homo sapiens
  misc_RNA (1)...(19): siRNA sense strand
uagcugaccugaauaaugu

SEQ ID NO: 218007 - RNA, 19 nt, Homo sapiens
  misc_RNA (1)...(19): siRNA sense strand
gcaugauucuauccaaauu

SEQ ID NO: 218008 - RNA, 19 nt, Homo sapiens
  misc_RNA (1)...(19): siRNA sense strand
ugaacuggcugcugaaugu

SEQ ID NO: 218009 - RNA, 19 nt, Homo sapiens
  misc_RNA (1)...(19): siRNA sense strand
gauauccugcagauuauua

SEQ ID NO: 218010 - RNA, 19 nt, Homo sapiens
  misc_RNA (1)...(19): siRNA sense strand
gagaagauguucgagacuu

SEQ ID NO: 218011 - RNA, 19 nt, Homo sapiens
  misc_RNA (1)...(19): siRNA sense strand
gcacuuuaauuaugacauc

SEQ ID NO: 218012 - RNA, 19 nt, Homo sapiens
  misc_RNA (1)...(19): siRNA sense strand
guaaagcacauuuggaaga

SEQ ID NO: 218013 - RNA, 19 nt, Homo sapiens
  misc_RNA (1)...(19): siRNA sense strand
gaauauugcacuccgacua

SEQ ID NO: 218014 - RNA, 19 nt, Homo sapiens
  misc_RNA (1)...(19): siRNA sense strand
uuauaggacugccaugaaa

SEQ ID NO: 218015 - RNA, 19 nt, Homo sapiens
  misc_RNA (1)...(19): siRNA sense strand
gggugaaguugcauccuuu

SEQ ID NO: 218016 - RNA, 19 nt, Homo sapiens
  misc_RNA (1)...(19): siRNA sense strand
gcaagagcacaacaauuug

SEQ ID NO: 218017 - RNA, 19 nt, Homo sapiens
  misc_RNA (1)...(19): siRNA sense strand
gcacaacaauuuggucaac

SEQ ID NO: 218018 - RNA, 19 nt, Homo sapiens
  misc_RNA (1)...(19): siRNA sense strand
agcaagagcacaacaauuu

SEQ ID NO: 218019 - RNA, 19 nt, Homo sapiens
  misc_RNA (1)...(19): siRNA sense strand
agaagauguucgagacuuu

SEQ ID NO: 218020 - RNA, 19 nt, Homo sapiens
  misc_RNA (1)...(19): siRNA sense strand
gagcaagagcacaacaauu

SEQ ID NO: 218021 - RNA, 19 nt, Homo sapiens
  misc_RNA (1)...(19): siRNA sense strand
ucaagcaaguggcaaguuc

SEQ ID NO: 218022 - RNA, 19 nt, Homo sapiens
  misc_RNA (1)...(19): siRNA sense strand
ccacgagacucaaacaacu

SEQ ID NO: 218023 - RNA, 19 nt, Homo sapiens
  misc_RNA (1)...(19): siRNA sense strand
cagcacaaccucaagcaaa

SEQ ID NO: 218024 - RNA, 19 nt, Homo sapiens
  misc_RNA (1)...(19): siRNA sense strand
gcaaagaguguccaaucau

SEQ ID NO: 218025 - RNA, 19 nt, Homo sapiens
  misc_RNA (1)...(19): siRNA sense strand
auggauauccugcagauua

SEQ ID NO: 218026 - RNA, 19 nt, Homo sapiens
  misc_RNA (1)...(19): siRNA sense strand
uguaacaucugcaaagagu

SEQ ID NO: 218027 - RNA, 19 nt, Homo sapiens
  misc_RNA (1)...(19): siRNA sense strand
guccggagcugcuuccaau

SEQ ID NO: 218028 - RNA, 19 nt, Homo sapiens
  misc_RNA (1)...(19): siRNA sense strand
gcaaguggcaaguucaaca

SEQ ID NO: 218029 - RNA, 19 nt, Homo sapiens
  misc_RNA (1)...(19): siRNA sense strand
gcuuccaauuugcuaauaa

SEQ ID NO: 218030 - RNA, 19 nt, Homo sapiens
  misc_RNA (1)...(19): siRNA sense strand
uggaagacaaguacagaua

SEQ ID NO: 218031 - RNA, 19 nt, Homo sapiens
  misc_RNA (1)...(19): siRNA sense strand
ggauccguguccugucuuu

SEQ ID NO: 218032 - RNA, 19 nt, Homo sapiens
  misc_RNA (1)...(19): siRNA sense strand
gucuuuagcugaccugaau

SEQ ID NO: 218033 - RNA, 19 nt, Homo sapiens
  misc_RNA (1)...(19): siRNA sense strand
gacaaguacagauaccuuu

SEQ ID NO: 218034 - RNA, 19 nt, Homo sapiens
  misc_RNA (1)...(19): siRNA sense strand
ccaagcaucaggccaaaug

SEQ ID NO: 218035 - RNA, 19 nt, Homo sapiens
  misc_RNA (1)...(19): siRNA sense strand
ggagcaagagcacaacaau

SEQ ID NO: 218036 - RNA, 19 nt, Homo sapiens
  misc_RNA (1)...(19): siRNA sense strand
guguaaagcacauuuggaa

SEQ ID NO: 218037 - RNA, 19 nt, Homo sapiens
  misc_RNA (1)...(19): siRNA sense strand
caagacaguugggugaagu

SEQ ID NO: 218038 - RNA, 19 nt, Homo sapiens
  misc_RNA (1)...(19): siRNA sense strand
gaagauguucgagacuuug

SEQ ID NO: 218039 - RNA, 19 nt, Homo sapiens
  misc_RNA (1)...(19): siRNA sense strand
gucagauucucagcuuaua

SEQ ID NO: 218040 - RNA, 19 nt, Homo sapiens
  misc_RNA (1)...(19): siRNA sense strand
uaacaucugcaaagagugu

SEQ ID NO: 218041 - RNA, 19 nt, Homo sapiens
  misc_RNA (1)...(19): siRNA sense strand
cggagcugcuuccaauuug

SEQ ID NO: 218042 - RNA, 19 nt, Homo sapiens
  misc_RNA (1)...(19): siRNA sense strand
gaagacaaguacagauacc

SEQ ID NO: 218043 - RNA, 19 nt, Homo sapiens
  misc_RNA (1)...(19): siRNA sense strand
ccauggauauccugcagau

SEQ ID NO: 218044 - RNA, 19 nt, Homo sapiens
  misc_RNA (1)...(19): siRNA sense strand
ggcaucauuucccugugua

SEQ ID NO: 218045 - RNA, 19 nt, Homo sapiens
  misc_RNA (1)...(19): siRNA sense strand
uggauauccugcagauuau

SEQ ID NO: 218046 - RNA, 19 nt, Homo sapiens
  misc_RNA (1)...(19): siRNA sense strand
ggaagacaaguacagauac

SEQ ID NO: 218047 - RNA, 19 nt, Homo sapiens
  misc_RNA (1)...(19): siRNA sense strand
ugcaaagaguguccaauca

SEQ ID NO: 218048 - RNA, 19 nt, Homo sapiens
  misc_RNA (1)...(19): siRNA sense strand
guggauaugugucugaacu

SEQ ID NO: 218049 - RNA, 19 nt, Homo sapiens
  misc_RNA (1)...(19): siRNA sense strand
acuggcugcugaauguuua

SEQ ID NO: 218050 - RNA, 19 nt, Homo sapiens
  misc_RNA (1)...(19): siRNA sense strand
acuaucccaugguggaaua

SEQ ID NO: 218051 - RNA, 19 nt, Homo sapiens
  misc_RNA (1)...(19): siRNA sense strand
ccggagcugcuuccaauuu

SEQ ID NO: 218052 - RNA, 19 nt, Homo sapiens
  misc_RNA (1)...(19): siRNA sense strand
ccaaauuccaagacaguug

SEQ ID NO: 218053 - RNA, 19 nt, Homo sapiens
  misc_RNA (1)...(19): siRNA sense strand
cagaaacugccaagcauca

SEQ ID NO: 218054 - RNA, 19 nt, Homo sapiens
  misc_RNA (1)...(19): siRNA sense strand
uaugacaucugccaaagcu

SEQ ID NO: 218055 - RNA, 19 nt, Homo sapiens
  misc_RNA (1)...(19): siRNA sense strand
aaugucagauucucagcuu

SEQ ID NO: 218056 - RNA, 19 nt, Homo sapiens
  misc_RNA (1)...(19): siRNA sense strand
ucgagacuuugccaaggua

SEQ ID NO: 218057 - RNA, 19 nt, Homo sapiens
  misc_RNA (1)...(19): siRNA sense strand
gcaaaaggccauaaaaugc

SEQ ID NO: 218058 - RNA, 19 nt, Homo sapiens
  misc_RNA (1)...(19): siRNA sense strand
cugcaugauucuauccaaa

SEQ ID NO: 218059 - RNA, 19 nt, Homo sapiens
  misc_RNA (1)...(19): siRNA sense strand
uaaagcacauuuggaagac

SEQ ID NO: 218060 - RNA, 19 nt, Homo sapiens
  misc_RNA (1)...(19): siRNA sense strand
acaggagucuaaagcacuu

SEQ ID NO: 218061 - RNA, 19 nt, Homo sapiens
  misc_RNA (1)...(19): siRNA sense strand
acagauaccuuuucaagca

SEQ ID NO: 218062 - RNA, 19 nt, Homo sapiens
  misc_RNA (1)...(19): siRNA sense strand
aagcacauuuggaagacaa

SEQ ID NO: 218063 - RNA, 19 nt, Homo sapiens
  misc_RNA (1)...(19): siRNA sense strand
gcuaauaauaagccagaga

SEQ ID NO: 218064 - RNA, 19 nt, Homo sapiens
  misc_RNA (1)...(19): siRNA sense strand
caagagcacaacaauuugg

SEQ ID NO: 218065 - RNA, 19 nt, Homo sapiens
  misc_RNA (1)...(19): siRNA sense strand
ccugucagcugcaugugau

SEQ ID NO: 218066 - RNA, 19 nt, Homo sapiens
  misc_RNA (1)...(19): siRNA sense strand
gcugcugaauguuuaugau

SEQ ID NO: 218067 - RNA, 19 nt, Homo sapiens
  misc_RNA (1)...(19): siRNA sense strand
acagagcucuaccagucuu

SEQ ID NO: 218068 - RNA, 19 nt, Homo sapiens
  misc_RNA (1)...(19): siRNA sense strand
acaguugggugaaguugca

SEQ ID NO: 218069 - RNA, 19 nt, Homo sapiens
  misc_RNA (1)...(19): siRNA sense strand
guuugaccacuauuuauga

SEQ ID NO: 218070 - RNA, 19 nt, Homo sapiens
  misc_RNA (1)...(19): siRNA sense strand
gcuuauaggacugccauga

SEQ ID NO: 218071 - RNA, 19 nt, Homo sapiens
  misc_RNA (1)...(19): siRNA sense strand
caucaggccaaauguaaca

SEQ ID NO: 218072 - RNA, 19 nt, Homo sapiens
  misc_RNA (1)...(19): siRNA sense strand
gauucuauccaaauuccaa

SEQ ID NO: 218073 - RNA, 19 nt, Homo sapiens
  misc_RNA (1)...(19): siRNA sense strand
ggcaaguucaacaggauuu

SEQ ID NO: 218074 - RNA, 19 nt, Homo sapiens
  misc_RNA (1)...(19): siRNA sense strand
gaacuggcugcugaauguu

SEQ ID NO: 218075 - RNA, 19 nt, Homo sapiens
  misc_RNA (1)...(19): siRNA sense strand
cugcugaauguuuaugaua

SEQ ID NO: 218076 - RNA, 19 nt, Homo sapiens
  misc_RNA (1)...(19): siRNA sense strand
aagcaucaggccaaaugua

SEQ ID NO: 218077 - RNA, 19 nt, Homo sapiens
  misc_RNA (1)...(19): siRNA sense strand
uggcaucauuucccugugu

SEQ ID NO: 218078 - RNA, 19 nt, Homo sapiens
  misc_RNA (1)...(19): siRNA sense strand
ccaugaaacuccgaagacu

SEQ ID NO: 218079 - RNA, 19 nt, Homo sapiens
  misc_RNA (1)...(19): siRNA sense strand
auaauaagccagagaucga

SEQ ID NO: 218080 - RNA, 19 nt, Homo sapiens
  misc_RNA (1)...(19): siRNA sense strand
cuaauaauaagccagagau

SEQ ID NO: 218081 - RNA, 19 nt, Homo sapiens
  misc_RNA (1)...(19): siRNA sense strand
ugggugaaguugcauccuu

SEQ ID NO: 218082 - RNA, 19 nt, Homo sapiens
  misc_RNA (1)...(19): siRNA sense strand
caucauuucccuguguaaa

SEQ ID NO: 218083 - RNA, 19 nt, Homo sapiens
  misc_RNA (1)...(19): siRNA sense strand
gcguggauaugugucugaa

SEQ ID NO: 218084 - RNA, 19 nt, Homo sapiens
  misc_RNA (1)...(19): siRNA sense strand
gcacuaucccaugguggaa

SEQ ID NO: 218085 - RNA, 19 nt, Homo sapiens
  misc_RNA (1)...(19): siRNA sense strand
gagccugucagcugcaugu

SEQ ID NO: 218086 - RNA, 19 nt, Homo sapiens
  misc_RNA (1)...(19): siRNA sense strand
guacagauaccuuuucaag

SEQ ID NO: 218087 - RNA, 19 nt, Homo sapiens
  misc_RNA (1)...(19): siRNA sense strand
gucccucucugcguggaua

SEQ ID NO: 218088 - RNA, 19 nt, Homo sapiens
  misc_RNA (1)...(19): siRNA sense strand
ggagcugcuuccaauuugc

SEQ ID NO: 218089 - RNA, 19 nt, Homo sapiens
  misc_RNA (1)...(19): siRNA sense strand
uuagcugaccugaauaaug

SEQ ID NO: 218090 - RNA, 19 nt, Homo sapiens
  misc_RNA (1)...(19): siRNA sense strand
guggcaaguucaacaggau

SEQ ID NO: 218091 - RNA, 19 nt, Homo sapiens
  misc_RNA (1)...(19): siRNA sense strand
acaacaauuuggucaacgu

SEQ ID NO: 218092 - RNA, 19 nt, Homo sapiens
  misc_RNA (1)...(19): siRNA sense strand
gacuacaucaggagaagau

SEQ ID NO: 218093 - RNA, 19 nt, Homo sapiens
  misc_RNA (1)...(19): siRNA sense strand
uaauaagccagagaucgaa

SEQ ID NO: 218094 - RNA, 19 nt, Homo sapiens
  misc_RNA (1)...(19): siRNA sense strand
ugucagauucucagcuuau

SEQ ID NO: 218095 - RNA, 19 nt, Homo sapiens
  misc_RNA (1)...(19): siRNA sense strand
ggauauccugcagauuauu

SEQ ID NO: 218096 - RNA, 19 nt, Homo sapiens
  misc_RNA (1)...(19): siRNA sense strand
agcaucaggccaaauguaa

SEQ ID NO: 218097 - RNA, 19 nt, Homo sapiens
  misc_RNA (1)...(19): siRNA sense strand
gcccuuugcuuggaucucu

SEQ ID NO: 218098 - RNA, 19 nt, Homo sapiens
  misc_RNA (1)...(19): siRNA sense strand
gcugaauguuuaugauacg

SEQ ID NO: 218099 - RNA, 19 nt, Homo sapiens
  misc_RNA (1)...(19): siRNA sense strand
agacuuugccaagguacua

SEQ ID NO: 218100 - RNA, 19 nt, Homo sapiens
  misc_RNA (1)...(19): siRNA sense strand
caagcaaguggcaaguuca

SEQ ID NO: 218101 - RNA, 19 nt, Homo sapiens
  misc_RNA (1)...(19): siRNA sense strand
agacaaguacagauaccuu

SEQ ID NO: 218102 - RNA, 19 nt, Homo sapiens
  misc_RNA (1)...(19): siRNA sense strand
gcaucauuucccuguguaa

SEQ ID NO: 218103 - RNA, 19 nt, Homo sapiens
  misc_RNA (1)...(19): siRNA sense strand
cugcaaagaguguccaauc

SEQ ID NO: 218104 - RNA, 19 nt, Homo sapiens
  misc_RNA (1)...(19): siRNA sense strand
cuuauaggacugccaugaa

SEQ ID NO: 218105 - RNA, 19 nt, Homo sapiens
  misc_RNA (1)...(19): siRNA sense strand
caaagaguguccaaucauu

SEQ ID NO: 218106 - RNA, 19 nt, Homo sapiens
  misc_RNA (1)...(19): siRNA sense strand
uagcugaccugaauaaugu

SEQ ID NO: 218107 - RNA, 19 nt, Homo sapiens
  misc_RNA (1)...(19): siRNA sense strand
gcaugauucuauccaaauu

SEQ ID NO: 218108 - RNA, 19 nt, Homo sapiens
  misc_RNA (1)...(19): siRNA sense strand
ugaacuggcugcugaaugu

SEQ ID NO: 218109 - RNA, 19 nt, Homo sapiens
  misc_RNA (1)...(19): siRNA sense strand
gauauccugcagauuauua

SEQ ID NO: 218110 - RNA, 19 nt, Homo sapiens
  misc_RNA (1)...(19): siRNA sense strand
gagaagauguucgagacuu

SEQ ID NO: 218111 - RNA, 19 nt, Homo sapiens
  misc_RNA (1)...(19): siRNA sense strand
gcacuuuaauuaugacauc

SEQ ID NO: 218112 - RNA, 19 nt, Homo sapiens
  misc_RNA (1)...(19): siRNA sense strand
guaaagcacauuuggaaga

SEQ ID NO: 218113 - RNA, 19 nt, Homo sapiens
  misc_RNA (1)...(19): siRNA sense strand
gaauauugcacuccgacua

SEQ ID NO: 218114 - RNA, 19 nt, Homo sapiens
  misc_RNA (1)...(19): siRNA sense strand
uuauaggacugccaugaaa

SEQ ID NO: 218115 - RNA, 19 nt, Homo sapiens
  misc_RNA (1)...(19): siRNA sense strand
gggugaaguugcauccuuu

SEQ ID NO: 218116 - RNA, 19 nt, Homo sapiens
  misc_RNA (1)...(19): siRNA sense strand
gcaagagcacaacaauuug

SEQ ID NO: 218117 - RNA, 19 nt, Homo sapiens
  misc_RNA (1)...(19): siRNA sense strand
gcacaacaauuuggucaac

SEQ ID NO: 218118 - RNA, 19 nt, Homo sapiens
  misc_RNA (1)...(19): siRNA sense strand
agcaagagcacaacaauuu

SEQ ID NO: 218119 - RNA, 19 nt, Homo sapiens
  misc_RNA (1)...(19): siRNA sense strand
agaagauguucgagacuuu

SEQ ID NO: 218120 - RNA, 19 nt, Homo sapiens
  misc_RNA (1)...(19): siRNA sense strand
gagcaagagcacaacaauu

SEQ ID NO: 218121 - RNA, 19 nt, Homo sapiens
  misc_RNA (1)...(19): siRNA sense strand
ucaagcaaguggcaaguuc

SEQ ID NO: 218122 - RNA, 19 nt, Homo sapiens
  misc_RNA (1)...(19): siRNA sense strand
ccacgagacucaaacaacu

SEQ ID NO: 218123 - RNA, 19 nt, Homo sapiens
  misc_RNA (1)...(19): siRNA sense strand
cagcacaaccucaagcaaa

SEQ ID NO: 218124 - RNA, 19 nt, Homo sapiens
  misc_RNA (1)...(19): siRNA sense strand
gcaaagaguguccaaucau

SEQ ID NO: 218125 - RNA, 19 nt, Homo sapiens
  misc_RNA (1)...(19): siRNA sense strand
auggauauccugcagauua

SEQ ID NO: 218126 - RNA, 19 nt, Homo sapiens
  misc_RNA (1)...(19): siRNA sense strand
uguaacaucugcaaagagu

SEQ ID NO: 218127 - RNA, 19 nt, Homo sapiens
  misc_RNA (1)...(19): siRNA sense strand
guccggagcugcuuccaau

SEQ ID NO: 218128 - RNA, 19 nt, Homo sapiens
  misc_RNA (1)...(19): siRNA sense strand
gcaaguggcaaguucaaca

SEQ ID NO: 218129 - RNA, 19 nt, Homo sapiens
  misc_RNA (1)...(19): siRNA sense strand
gcuuccaauuugcuaauaa

SEQ ID NO: 218130 - RNA, 19 nt, Homo sapiens
  misc_RNA (1)...(19): siRNA sense strand
uggaagacaaguacagaua

SEQ ID NO: 218131 - RNA, 19 nt, Homo sapiens
  misc_RNA (1)...(19): siRNA sense strand
ggauccguguccugucuuu

SEQ ID NO: 218132 - RNA, 19 nt, Homo sapiens
  misc_RNA (1)...(19): siRNA sense strand
gucuuuagcugaccugaau

SEQ ID NO: 218133 - RNA, 19 nt, Homo sapiens
  misc_RNA (1)...(19): siRNA sense strand
gacaaguacagauaccuuu

SEQ ID NO: 218134 - RNA, 19 nt, Homo sapiens
  misc_RNA (1)...(19): siRNA sense strand
ccaagcaucaggccaaaug

SEQ ID NO: 218135 - RNA, 19 nt, Homo sapiens
  misc_RNA (1)...(19): siRNA sense strand
ggagcaagagcacaacaau

SEQ ID NO: 218136 - RNA, 19 nt, Homo sapiens
  misc_RNA (1)...(19): siRNA sense strand
guguaaagcacauuuggaa

SEQ ID NO: 218137 - RNA, 19 nt, Homo sapiens
  misc_RNA (1)...(19): siRNA sense strand
caagacaguugggugaagu

SEQ ID NO: 218138 - RNA, 19 nt, Homo sapiens
  misc_RNA (1)...(19): siRNA sense strand
gaagauguucgagacuuug

SEQ ID NO: 218139 - RNA, 19 nt, Homo sapiens
  misc_RNA (1)...(19): siRNA sense strand
gucagauucucagcuuaua

SEQ ID NO: 218140 - RNA, 19 nt, Homo sapiens
  misc_RNA (1)...(19): siRNA sense strand
uaacaucugcaaagagugu

SEQ ID NO: 218141 - RNA, 19 nt, Homo sapiens
  misc_RNA (1)...(19): siRNA sense strand
cggagcugcuuccaauuug

SEQ ID NO: 218142 - RNA, 19 nt, Homo sapiens
  misc_RNA (1)...(19): siRNA sense strand
gaagacaaguacagauacc

SEQ ID NO: 218143 - RNA, 19 nt, Homo sapiens
  misc_RNA (1)...(19): siRNA sense strand
ccauggauauccugcagau

SEQ ID NO: 218144 - RNA, 19 nt, Homo sapiens
  misc_RNA (1)...(19): siRNA sense strand
ggcaucauuucccugugua

SEQ ID NO: 218145 - RNA, 19 nt, Homo sapiens
  misc_RNA (1)...(19): siRNA sense strand
uggauauccugcagauuau

SEQ ID NO: 218146 - RNA, 19 nt, Homo sapiens
  misc_RNA (1)...(19): siRNA sense strand
ggaagacaaguacagauac

SEQ ID NO: 218147 - RNA, 19 nt, Homo sapiens
  misc_RNA (1)...(19): siRNA sense strand
ugcaaagaguguccaauca

SEQ ID NO: 218148 - RNA, 19 nt, Homo sapiens
  misc_RNA (1)...(19): siRNA sense strand
guggauaugugucugaacu

SEQ ID NO: 218149 - RNA, 19 nt, Homo sapiens
  misc_RNA (1)...(19): siRNA sense strand
acuggcugcugaauguuua

SEQ ID NO: 218150 - RNA, 19 nt, Homo sapiens
  misc_RNA (1)...(19): siRNA sense strand
acuaucccaugguggaaua

SEQ ID NO: 218151 - RNA, 19 nt, Homo sapiens
  misc_RNA (1)...(19): siRNA sense strand
ccggagcugcuuccaauuu

SEQ ID NO: 218152 - RNA, 19 nt, Homo sapiens
  misc_RNA (1)...(19): siRNA sense strand
ccaaauuccaagacaguug

SEQ ID NO: 218153 - RNA, 19 nt, Homo sapiens
  misc_RNA (1)...(19): siRNA sense strand
cagaaacugccaagcauca

SEQ ID NO: 218154 - RNA, 19 nt, Homo sapiens
  misc_RNA (1)...(19): siRNA sense strand
uaugacaucugccaaagcu

SEQ ID NO: 218155 - RNA, 19 nt, Homo sapiens
  misc_RNA (1)...(19): siRNA sense strand
aaugucagauucucagcuu

SEQ ID NO: 218156 - RNA, 19 nt, Homo sapiens
  misc_RNA (1)...(19): siRNA sense strand
ucgagacuuugccaaggua

SEQ ID NO: 218157 - RNA, 19 nt, Homo sapiens
  misc_RNA (1)...(19): siRNA sense strand
gcaaaaggccauaaaaugc

SEQ ID NO: 218158 - RNA, 19 nt, Homo sapiens
  misc_RNA (1)...(19): siRNA sense strand
cugcaugauucuauccaaa

SEQ ID NO: 218159 - RNA, 19 nt, Homo sapiens
  misc_RNA (1)...(19): siRNA sense strand
uaaagcacauuuggaagac

SEQ ID NO: 218160 - RNA, 19 nt, Homo sapiens
  misc_RNA (1)...(19): siRNA sense strand
acaggagucuaaagcacuu

SEQ ID NO: 218161 - RNA, 19 nt, Homo sapiens
  misc_RNA (1)...(19): siRNA sense strand
acagauaccuuuucaagca

SEQ ID NO: 218162 - RNA, 19 nt, Homo sapiens
  misc_RNA (1)...(19): siRNA sense strand
aagcacauuuggaagacaa

SEQ ID NO: 218163 - RNA, 19 nt, Homo sapiens
  misc_RNA (1)...(19): siRNA sense strand
gcuaauaauaagccagaga

SEQ ID NO: 218164 - RNA, 19 nt, Homo sapiens
  misc_RNA (1)...(19): siRNA sense strand
caagagcacaacaauuugg

SEQ ID NO: 218165 - RNA, 19 nt, Homo sapiens
  misc_RNA (1)...(19): siRNA sense strand
ccugucagcugcaugugau

SEQ ID NO: 218166 - RNA, 19 nt, Homo sapiens
  misc_RNA (1)...(19): siRNA sense strand
gcugcugaauguuuaugau

SEQ ID NO: 218167 - RNA, 19 nt, Homo sapiens
  misc_RNA (1)...(19): siRNA sense strand
acagagcucuaccagucuu

SEQ ID NO: 218168 - RNA, 19 nt, Homo sapiens
  misc_RNA (1)...(19): siRNA sense strand
acaguugggugaaguugca

SEQ ID NO: 218169 - RNA, 19 nt, Homo sapiens
  misc_RNA (1)...(19): siRNA sense strand
guuugaccacuauuuauga

SEQ ID NO: 218170 - RNA, 19 nt, Homo sapiens
  misc_RNA (1)...(19): siRNA sense strand
gcuuauaggacugccauga

SEQ ID NO: 218171 - RNA, 19 nt, Homo sapiens
  misc_RNA (1)...(19): siRNA sense strand
caucaggccaaauguaaca

SEQ ID NO: 218172 - RNA, 19 nt, Homo sapiens
  misc_RNA (1)...(19): siRNA sense strand
gauucuauccaaauuccaa

SEQ ID NO: 218173 - RNA, 19 nt, Homo sapiens
  misc_RNA (1)...(19): siRNA sense strand
ggcaaguucaacaggauuu

SEQ ID NO: 218174 - RNA, 19 nt, Homo sapiens
  misc_RNA (1)...(19): siRNA sense strand
gaacuggcugcugaauguu

SEQ ID NO: 218175 - RNA, 19 nt, Homo sapiens
  misc_RNA (1)...(19): siRNA sense strand
cugcugaauguuuaugaua

SEQ ID NO: 218176 - RNA, 19 nt, Homo sapiens
  misc_RNA (1)...(19): siRNA sense strand
aagcaucaggccaaaugua

SEQ ID NO: 218177 - RNA, 19 nt, Homo sapiens
  misc_RNA (1)...(19): siRNA sense strand
uggcaucauuucccugugu

SEQ ID NO: 218178 - RNA, 19 nt, Homo sapiens
  misc_RNA (1)...(19): siRNA sense strand
ccaugaaacuccgaagacu

SEQ ID NO: 218179 - RNA, 19 nt, Homo sapiens
  misc_RNA (1)...(19): siRNA sense strand
auaauaagccagagaucga

SEQ ID NO: 218180 - RNA, 19 nt, Homo sapiens
  misc_RNA (1)...(19): siRNA sense strand
cuaauaauaagccagagau

SEQ ID NO: 218181 - RNA, 19 nt, Homo sapiens
  misc_RNA (1)...(19): siRNA sense strand
ugggugaaguugcauccuu

SEQ ID NO: 218182 - RNA, 19 nt, Homo sapiens
  misc_RNA (1)...(19): siRNA sense strand
caucauuucccuguguaaa

SEQ ID NO: 218183 - RNA, 19 nt, Homo sapiens
  misc_RNA (1)...(19): siRNA sense strand
gcguggauaugugucugaa

SEQ ID NO: 218184 - RNA, 19 nt, Homo sapiens
  misc_RNA (1)...(19): siRNA sense strand
gcacuaucccaugguggaa

SEQ ID NO: 218185 - RNA, 19 nt, Homo sapiens
  misc_RNA (1)...(19): siRNA sense strand
gagccugucagcugcaugu

SEQ ID NO: 218186 - RNA, 19 nt, Homo sapiens
  misc_RNA (1)...(19): siRNA sense strand
guacagauaccuuuucaag

SEQ ID NO: 218187 - RNA, 19 nt, Homo sapiens
  misc_RNA (1)...(19): siRNA sense strand
gucccucucugcguggaua

SEQ ID NO: 218188 - RNA, 19 nt, Homo sapiens
  misc_RNA (1)...(19): siRNA sense strand
ggagcugcuuccaauuugc

SEQ ID NO: 218189 - RNA, 19 nt, Homo sapiens
  misc_RNA (1)...(19): siRNA sense strand
uuagcugaccugaauaaug

SEQ ID NO: 218190 - RNA, 19 nt, Homo sapiens
  misc_RNA (1)...(19): siRNA sense strand
guggcaaguucaacaggau

SEQ ID NO: 218191 - RNA, 19 nt, Homo sapiens
  misc_RNA (1)...(19): siRNA sense strand
acaacaauuuggucaacgu

SEQ ID NO: 218192 - RNA, 19 nt, Homo sapiens
  misc_RNA (1)...(19): siRNA sense strand
gacuacaucaggagaagau

SEQ ID NO: 218193 - RNA, 19 nt, Homo sapiens
  misc_RNA (1)...(19): siRNA sense strand
uaauaagccagagaucgaa

SEQ ID NO: 218194 - RNA, 19 nt, Homo sapiens
  misc_RNA (1)...(19): siRNA sense strand
ugucagauucucagcuuau

SEQ ID NO: 218195 - RNA, 19 nt, Homo sapiens
  misc_RNA (1)...(19): siRNA sense strand
ggauauccugcagauuauu

SEQ ID NO: 218196 - RNA, 19 nt, Homo sapiens
  misc_RNA (1)...(19): siRNA sense strand
agcaucaggccaaauguaa

SEQ ID NO: 218197 - RNA, 19 nt, Homo sapiens
  misc_RNA (1)...(19): siRNA sense strand
gcccuuugcuuggaucucu

SEQ ID NO: 218198 - RNA, 19 nt, Homo sapiens
  misc_RNA (1)...(19): siRNA sense strand
gcugaauguuuaugauacg

SEQ ID NO: 218199 - RNA, 19 nt, Homo sapiens
  misc_RNA (1)...(19): siRNA sense strand
agacuuugccaagguacua

SEQ ID NO: 218200 - RNA, 19 nt, Homo sapiens
  misc_RNA (1)...(19): siRNA sense strand
caagcaaguggcaaguuca

SEQ ID NO: 218201 - RNA, 19 nt, Homo sapiens
  misc_RNA (1)...(19): siRNA sense strand
agacaaguacagauaccuu

SEQ ID NO: 218202 - RNA, 19 nt, Homo sapiens
  misc_RNA (1)...(19): siRNA sense strand
gcaucauuucccuguguaa

SEQ ID NO: 218203 - RNA, 19 nt, Homo sapiens
  misc_RNA (1)...(19): siRNA sense strand
cugcaaagaguguccaauc

SEQ ID NO: 218204 - RNA, 19 nt, Homo sapiens
  misc_RNA (1)...(19): siRNA sense strand
cuuauaggacugccaugaa

SEQ ID NO: 218205 - RNA, 19 nt, Homo sapiens
  misc_RNA (1)...(19): siRNA sense strand
caaagaguguccaaucauu

SEQ ID NO: 218206 - RNA, 19 nt, Homo sapiens
  misc_RNA (1)...(19): siRNA sense strand
uagcugaccugaauaaugu

SEQ ID NO: 218207 - RNA, 19 nt, Homo sapiens
  misc_RNA (1)...(19): siRNA sense strand
gcaugauucuauccaaauu

SEQ ID NO: 218208 - RNA, 19 nt, Homo sapiens
  misc_RNA (1)...(19): siRNA sense strand
ugaacuggcugcugaaugu

SEQ ID NO: 218209 - RNA, 19 nt, Homo sapiens
  misc_RNA (1)...(19): siRNA sense strand
gauauccugcagauuauua

SEQ ID NO: 218210 - RNA, 19 nt, Homo sapiens
  misc_RNA (1)...(19): siRNA sense strand
gagaagauguucgagacuu

SEQ ID NO: 218211 - RNA, 19 nt, Homo sapiens
  misc_RNA (1)...(19): siRNA sense strand
gcacuuuaauuaugacauc

SEQ ID NO: 218212 - RNA, 19 nt, Homo sapiens
  misc_RNA (1)...(19): siRNA sense strand
guaaagcacauuuggaaga

SEQ ID NO: 218213 - RNA, 19 nt, Homo sapiens
  misc_RNA (1)...(19): siRNA sense strand
gaauauugcacuccgacua

SEQ ID NO: 218214 - RNA, 19 nt, Homo sapiens
  misc_RNA (1)...(19): siRNA sense strand
uuauaggacugccaugaaa

SEQ ID NO: 218215 - RNA, 19 nt, Homo sapiens
  misc_RNA (1)...(19): siRNA sense strand
gggugaaguugcauccuuu

SEQ ID NO: 218216 - RNA, 19 nt, Homo sapiens
  misc_RNA (1)...(19): siRNA sense strand
gcaagagcacaacaauuug

SEQ ID NO: 218217 - RNA, 19 nt, Homo sapiens
  misc_RNA (1)...(19): siRNA sense strand
gcacaacaauuuggucaac

SEQ ID NO: 218218 - RNA, 19 nt, Homo sapiens
  misc_RNA (1)...(19): siRNA sense strand
agcaagagcacaacaauuu

SEQ ID NO: 218219 - RNA, 19 nt, Homo sapiens
  misc_RNA (1)...(19): siRNA sense strand
agaagauguucgagacuuu

SEQ ID NO: 218220 - RNA, 19 nt, Homo sapiens
  misc_RNA (1)...(19): siRNA sense strand
gagcaagagcacaacaauu

SEQ ID NO: 218221 - RNA, 19 nt, Homo sapiens
  misc_RNA (1)...(19): siRNA sense strand
ucaagcaaguggcaaguuc

SEQ ID NO: 218222 - RNA, 19 nt, Homo sapiens
  misc_RNA (1)...(19): siRNA sense strand
ccacgagacucaaacaacu

SEQ ID NO: 218223 - RNA, 19 nt, Homo sapiens
  misc_RNA (1)...(19): siRNA sense strand
cagcacaaccucaagcaaa

SEQ ID NO: 218224 - RNA, 19 nt, Homo sapiens
  misc_RNA (1)...(19): siRNA sense strand
gcaaagaguguccaaucau

SEQ ID NO: 218225 - RNA, 19 nt, Homo sapiens
  misc_RNA (1)...(19): siRNA sense strand
auggauauccugcagauua

SEQ ID NO: 218226 - RNA, 19 nt, Homo sapiens
  misc_RNA (1)...(19): siRNA sense strand
uguaacaucugcaaagagu

SEQ ID NO: 218227 - RNA, 19 nt, Homo sapiens
  misc_RNA (1)...(19): siRNA sense strand
guccggagcugcuuccaau

SEQ ID NO: 218228 - RNA, 19 nt, Homo sapiens
  misc_RNA (1)...(19): siRNA sense strand
gcaaguggcaaguucaaca

SEQ ID NO: 218229 - RNA, 19 nt, Homo sapiens
  misc_RNA (1)...(19): siRNA sense strand
gcuuccaauuugcuaauaa

SEQ ID NO: 218230 - RNA, 19 nt, Homo sapiens
  misc_RNA (1)...(19): siRNA sense strand
uggaagacaaguacagaua

SEQ ID NO: 218231 - RNA, 19 nt, Homo sapiens
  misc_RNA (1)...(19): siRNA sense strand
ggauccguguccugucuuu

SEQ ID NO: 218232 - RNA, 19 nt, Homo sapiens
  misc_RNA (1)...(19): siRNA sense strand
gucuuuagcugaccugaau

SEQ ID NO: 218233 - RNA, 19 nt, Homo sapiens
  misc_RNA (1)...(19): siRNA sense strand
gacaaguacagauaccuuu

SEQ ID NO: 218234 - RNA, 19 nt, Homo sapiens
  misc_RNA (1)...(19): siRNA sense strand
ccaagcaucaggccaaaug

SEQ ID NO: 218235 - RNA, 19 nt, Homo sapiens
  misc_RNA (1)...(19): siRNA sense strand
ggagcaagagcacaacaau

SEQ ID NO: 218236 - RNA, 19 nt, Homo sapiens
  misc_RNA (1)...(19): siRNA sense strand
guguaaagcacauuuggaa

SEQ ID NO: 218237 - RNA, 19 nt, Homo sapiens
  misc_RNA (1)...(19): siRNA sense strand
caagacaguugggugaagu

SEQ ID NO: 218238 - RNA, 19 nt, Homo sapiens
  misc_RNA (1)...(19): siRNA sense strand
gaagauguucgagacuuug

SEQ ID NO: 218239 - RNA, 19 nt, Homo sapiens
  misc_RNA (1)...(19): siRNA sense strand
gucagauucucagcuuaua

SEQ ID NO: 218240 - RNA, 19 nt, Homo sapiens
  misc_RNA (1)...(19): siRNA sense strand
uaacaucugcaaagagugu

SEQ ID NO: 218241 - RNA, 19 nt, Homo sapiens
  misc_RNA (1)...(19): siRNA sense strand
cggagcugcuuccaauuug

SEQ ID NO: 218242 - RNA, 19 nt, Homo sapiens
  misc_RNA (1)...(19): siRNA sense strand
gaagacaaguacagauacc

SEQ ID NO: 218243 - RNA, 19 nt, Homo sapiens
  misc_RNA (1)...(19): siRNA sense strand
ccauggauauccugcagau

SEQ ID NO: 218244 - RNA, 19 nt, Homo sapiens
  misc_RNA (1)...(19): siRNA sense strand
ggcaucauuucccugugua

SEQ ID NO: 218245 - RNA, 19 nt, Homo sapiens
  misc_RNA (1)...(19): siRNA sense strand
uggauauccugcagauuau

SEQ ID NO: 218246 - RNA, 19 nt, Homo sapiens
  misc_RNA (1)...(19): siRNA sense strand
ggaagacaaguacagauac

SEQ ID NO: 218247 - RNA, 19 nt, Homo sapiens
  misc_RNA (1)...(19): siRNA sense strand
ugcaaagaguguccaauca

SEQ ID NO: 218248 - RNA, 19 nt, Homo sapiens
  misc_RNA (1)...(19): siRNA sense strand
guggauaugugucugaacu

SEQ ID NO: 218249 - RNA, 19 nt, Homo sapiens
  misc_RNA (1)...(19): siRNA sense strand
acuggcugcugaauguuua

SEQ ID NO: 218250 - RNA, 19 nt, Homo sapiens
  misc_RNA (1)...(19): siRNA sense strand
acuaucccaugguggaaua

SEQ ID NO: 218251 - RNA, 19 nt, Homo sapiens
  misc_RNA (1)...(19): siRNA sense strand
ccggagcugcuuccaauuu

SEQ ID NO: 218252 - RNA, 19 nt, Homo sapiens
  misc_RNA (1)...(19): siRNA sense strand
ccaaauuccaagacaguug

SEQ ID NO: 218253 - RNA, 19 nt, Homo sapiens
  misc_RNA (1)...(19): siRNA sense strand
cagaaacugccaagcauca

SEQ ID NO: 218254 - RNA, 19 nt, Homo sapiens
  misc_RNA (1)...(19): siRNA sense strand
uaugacaucugccaaagcu

SEQ ID NO: 218255 - RNA, 19 nt, Homo sapiens
  misc_RNA (1)...(19): siRNA sense strand
aaugucagauucucagcuu

SEQ ID NO: 218256 - RNA, 19 nt, Homo sapiens
  misc_RNA (1)...(19): siRNA sense strand
ucgagacuuugccaaggua

SEQ ID NO: 218257 - RNA, 19 nt, Homo sapiens
  misc_RNA (1)...(19): siRNA sense strand
gcaaaaggccauaaaaugc

SEQ ID NO: 218258 - RNA, 19 nt, Homo sapiens
  misc_RNA (1)...(19): siRNA sense strand
cugcaugauucuauccaaa

SEQ ID NO: 218259 - RNA, 19 nt, Homo sapiens
  misc_RNA (1)...(19): siRNA sense strand
uaaagcacauuuggaagac

SEQ ID NO: 218260 - RNA, 19 nt, Homo sapiens
  misc_RNA (1)...(19): siRNA sense strand
acaggagucuaaagcacuu

SEQ ID NO: 218261 - RNA, 19 nt, Homo sapiens
  misc_RNA (1)...(19): siRNA sense strand
acagauaccuuuucaagca

SEQ ID NO: 218262 - RNA, 19 nt, Homo sapiens
  misc_RNA (1)...(19): siRNA sense strand
aagcacauuuggaagacaa

SEQ ID NO: 218263 - RNA, 19 nt, Homo sapiens
  misc_RNA (1)...(19): siRNA sense strand
gcuaauaauaagccagaga

SEQ ID NO: 218264 - RNA, 19 nt, Homo sapiens
  misc_RNA (1)...(19): siRNA sense strand
caagagcacaacaauuugg

SEQ ID NO: 218265 - RNA, 19 nt, Homo sapiens
  misc_RNA (1)...(19): siRNA sense strand
ccugucagcugcaugugau

SEQ ID NO: 218266 - RNA, 19 nt, Homo sapiens
  misc_RNA (1)...(19): siRNA sense strand
gcugcugaauguuuaugau

SEQ ID NO: 218267 - RNA, 19 nt, Homo sapiens
  misc_RNA (1)...(19): siRNA sense strand
acagagcucuaccagucuu

SEQ ID NO: 218268 - RNA, 19 nt, Homo sapiens
  misc_RNA (1)...(19): siRNA sense strand
acaguugggugaaguugca

SEQ ID NO: 218269 - RNA, 19 nt, Homo sapiens
  misc_RNA (1)...(19): siRNA sense strand
guuugaccacuauuuauga

SEQ ID NO: 218270 - RNA, 19 nt, Homo sapiens
  misc_RNA (1)...(19): siRNA sense strand
gcuuauaggacugccauga

SEQ ID NO: 218271 - RNA, 19 nt, Homo sapiens
  misc_RNA (1)...(19): siRNA sense strand
caucaggccaaauguaaca

SEQ ID NO: 218272 - RNA, 19 nt, Homo sapiens
  misc_RNA (1)...(19): siRNA sense strand
gauucuauccaaauuccaa

SEQ ID NO: 218273 - RNA, 19 nt, Homo sapiens
  misc_RNA (1)...(19): siRNA sense strand
ggcaaguucaacaggauuu

SEQ ID NO: 218274 - RNA, 19 nt, Homo sapiens
  misc_RNA (1)...(19): siRNA sense strand
gaacuggcugcugaauguu

SEQ ID NO: 218275 - RNA, 19 nt, Homo sapiens
  misc_RNA (1)...(19): siRNA sense strand
cugcugaauguuuaugaua

SEQ ID NO: 218276 - RNA, 19 nt, Homo sapiens
  misc_RNA (1)...(19): siRNA sense strand
aagcaucaggccaaaugua

SEQ ID NO: 218277 - RNA, 19 nt, Homo sapiens
  misc_RNA (1)...(19): siRNA sense strand
uggcaucauuucccugugu

SEQ ID NO: 218278 - RNA, 19 nt, Homo sapiens
  misc_RNA (1)...(19): siRNA sense strand
ccaugaaacuccgaagacu

SEQ ID NO: 218279 - RNA, 19 nt, Homo sapiens
  misc_RNA (1)...(19): siRNA sense strand
auaauaagccagagaucga

SEQ ID NO: 218280 - RNA, 19 nt, Homo sapiens
  misc_RNA (1)...(19): siRNA sense strand
cuaauaauaagccagagau

SEQ ID NO: 218281 - RNA, 19 nt, Homo sapiens
  misc_RNA (1)...(19): siRNA sense strand
ugggugaaguugcauccuu

SEQ ID NO: 218282 - RNA, 19 nt, Homo sapiens
  misc_RNA (1)...(19): siRNA sense strand
caucauuucccuguguaaa

SEQ ID NO: 218283 - RNA, 19 nt, Homo sapiens
  misc_RNA (1)...(19): siRNA sense strand
gcguggauaugugucugaa

SEQ ID NO: 218284 - RNA, 19 nt, Homo sapiens
  misc_RNA (1)...(19): siRNA sense strand
gcacuaucccaugguggaa

SEQ ID NO: 218285 - RNA, 19 nt, Homo sapiens
  misc_RNA (1)...(19): siRNA sense strand
gagccugucagcugcaugu

SEQ ID NO: 218286 - RNA, 19 nt, Homo sapiens
  misc_RNA (1)...(19): siRNA sense strand
guacagauaccuuuucaag

SEQ ID NO: 218287 - RNA, 19 nt, Homo sapiens
  misc_RNA (1)...(19): siRNA sense strand
gucccucucugcguggaua

SEQ ID NO: 218288 - RNA, 19 nt, Homo sapiens
  misc_RNA (1)...(19): siRNA sense strand
ggagcugcuuccaauuugc

SEQ ID NO: 218289 - RNA, 19 nt, Homo sapiens
  misc_RNA (1)...(19): siRNA sense strand
uuagcugaccugaauaaug

SEQ ID NO: 218290 - RNA, 19 nt, Homo sapiens
  misc_RNA (1)...(19): siRNA sense strand
guggcaaguucaacaggau

SEQ ID NO: 218291 - RNA, 19 nt, Homo sapiens
  misc_RNA (1)...(19): siRNA sense strand
acaacaauuuggucaacgu

SEQ ID NO: 218292 - RNA, 19 nt, Homo sapiens
  misc_RNA (1)...(19): siRNA sense strand
gacuacaucaggagaagau

SEQ ID NO: 218293 - RNA, 19 nt, Homo sapiens
  misc_RNA (1)...(19): siRNA sense strand
uaauaagccagagaucgaa

SEQ ID NO: 218294 - RNA, 19 nt, Homo sapiens
  misc_RNA (1)...(19): siRNA sense strand
ugucagauucucagcuuau

SEQ ID NO: 218295 - RNA, 19 nt, Homo sapiens
  misc_RNA (1)...(19): siRNA sense strand
ggauauccugcagauuauu

SEQ ID NO: 218296 - RNA, 19 nt, Homo sapiens
  misc_RNA (1)...(19): siRNA sense strand
agcaucaggccaaauguaa

SEQ ID NO: 218297 - RNA, 19 nt, Homo sapiens
  misc_RNA (1)...(19): siRNA sense strand
gcccuuugcuuggaucucu

SEQ ID NO: 218298 - RNA, 19 nt, Homo sapiens
  misc_RNA (1)...(19): siRNA sense strand
gcugaauguuuaugauacg

SEQ ID NO: 218299 - RNA, 19 nt, Homo sapiens
  misc_RNA (1)...(19): siRNA sense strand
agacuuugccaagguacua

SEQ ID NO: 218300 - RNA, 19 nt, Homo sapiens
  misc_RNA (1)...(19): siRNA sense strand
caagcaaguggcaaguuca

SEQ ID NO: 218301 - RNA, 19 nt, Homo sapiens
  misc_RNA (1)...(19): siRNA sense strand
agacaaguacagauaccuu

SEQ ID NO: 218302 - RNA, 19 nt, Homo sapiens
  misc_RNA (1)...(19): siRNA sense strand
gcaucauuucccuguguaa

SEQ ID NO: 218303 - RNA, 19 nt, Homo sapiens
  misc_RNA (1)...(19): siRNA sense strand
cugcaaagaguguccaauc

SEQ ID NO: 218304 - RNA, 19 nt, Homo sapiens
  misc_RNA (1)...(19): siRNA sense strand
cuuauaggacugccaugaa

SEQ ID NO: 218305 - RNA, 19 nt, Homo sapiens
  misc_RNA (1)...(19): siRNA sense strand
caaagaguguccaaucauu

SEQ ID NO: 218306 - RNA, 19 nt, Homo sapiens
  misc_RNA (1)...(19): siRNA sense strand
uagcugaccugaauaaugu

SEQ ID NO: 218307 - RNA, 19 nt, Homo sapiens
  misc_RNA (1)...(19): siRNA sense strand
gcaugauucuauccaaauu

SEQ ID NO: 218308 - RNA, 19 nt, Homo sapiens
  misc_RNA (1)...(19): siRNA sense strand
ugaacuggcugcugaaugu

SEQ ID NO: 218309 - RNA, 19 nt, Homo sapiens
  misc_RNA (1)...(19): siRNA sense strand
gauauccugcagauuauua

SEQ ID NO: 218310 - RNA, 19 nt, Homo sapiens
  misc_RNA (1)...(19): siRNA sense strand
gagaagauguucgagacuu

SEQ ID NO: 218311 - RNA, 19 nt, Homo sapiens
  misc_RNA (1)...(19): siRNA sense strand
gcacuuuaauuaugacauc

SEQ ID NO: 218312 - RNA, 19 nt, Homo sapiens
  misc_RNA (1)...(19): siRNA sense strand
guaaagcacauuuggaaga

SEQ ID NO: 218313 - RNA, 19 nt, Homo sapiens
  misc_RNA (1)...(19): siRNA sense strand
gaauauugcacuccgacua

SEQ ID NO: 218314 - RNA, 19 nt, Homo sapiens
  misc_RNA (1)...(19): siRNA sense strand
uuauaggacugccaugaaa

SEQ ID NO: 218315 - RNA, 19 nt, Homo sapiens
  misc_RNA (1)...(19): siRNA sense strand
gggugaaguugcauccuuu

SEQ ID NO: 218316 - RNA, 19 nt, Homo sapiens
  misc_RNA (1)...(19): siRNA sense strand
gcaagagcacaacaauuug

SEQ ID NO: 218317 - RNA, 19 nt, Homo sapiens
  misc_RNA (1)...(19): siRNA sense strand
gcacaacaauuuggucaac

SEQ ID NO: 218318 - RNA, 19 nt, Homo sapiens
  misc_RNA (1)...(19): siRNA sense strand
agcaagagcacaacaauuu

SEQ ID NO: 218319 - RNA, 19 nt, Homo sapiens
  misc_RNA (1)...(19): siRNA sense strand
agaagauguucgagacuuu

SEQ ID NO: 218320 - RNA, 19 nt, Homo sapiens
  misc_RNA (1)...(19): siRNA sense strand
gagcaagagcacaacaauu

SEQ ID NO: 218321 - RNA, 19 nt, Homo sapiens
  misc_RNA (1)...(19): siRNA sense strand
ucaagcaaguggcaaguuc

SEQ ID NO: 218322 - RNA, 19 nt, Homo sapiens
  misc_RNA (1)...(19): siRNA sense strand
ccacgagacucaaacaacu

SEQ ID NO: 218323 - RNA, 19 nt, Homo sapiens
  misc_RNA (1)...(19): siRNA sense strand
cagcacaaccucaagcaaa

SEQ ID NO: 218324 - RNA, 19 nt, Homo sapiens
  misc_RNA (1)...(19): siRNA sense strand
gcaaagaguguccaaucau

SEQ ID NO: 218325 - RNA, 19 nt, Homo sapiens
  misc_RNA (1)...(19): siRNA sense strand
auggauauccugcagauua

SEQ ID NO: 218326 - RNA, 19 nt, Homo sapiens
  misc_RNA (1)...(19): siRNA sense strand
uguaacaucugcaaagagu

SEQ ID NO: 218327 - RNA, 19 nt, Homo sapiens
  misc_RNA (1)...(19): siRNA sense strand
guccggagcugcuuccaau

SEQ ID NO: 218328 - RNA, 19 nt, Homo sapiens
  misc_RNA (1)...(19): siRNA sense strand
gcaaguggcaaguucaaca

SEQ ID NO: 218329 - RNA, 19 nt, Homo sapiens
  misc_RNA (1)...(19): siRNA sense strand
gcuuccaauuugcuaauaa

SEQ ID NO: 218330 - RNA, 19 nt, Homo sapiens
  misc_RNA (1)...(19): siRNA sense strand
uggaagacaaguacagaua

SEQ ID NO: 218331 - RNA, 19 nt, Homo sapiens
  misc_RNA (1)...(19): siRNA sense strand
ggauccguguccugucuuu

SEQ ID NO: 218332 - RNA, 19 nt, Homo sapiens
  misc_RNA (1)...(19): siRNA sense strand
gucuuuagcugaccugaau

SEQ ID NO: 218333 - RNA, 19 nt, Homo sapiens
  misc_RNA (1)...(19): siRNA sense strand
gacaaguacagauaccuuu

SEQ ID NO: 218334 - RNA, 19 nt, Homo sapiens
  misc_RNA (1)...(19): siRNA sense strand
ccaagcaucaggccaaaug

SEQ ID NO: 218335 - RNA, 19 nt, Homo sapiens
  misc_RNA (1)...(19): siRNA sense strand
ggagcaagagcacaacaau

SEQ ID NO: 218336 - RNA, 19 nt, Homo sapiens
  misc_RNA (1)...(19): siRNA sense strand
guguaaagcacauuuggaa

SEQ ID NO: 218337 - RNA, 19 nt, Homo sapiens
  misc_RNA (1)...(19): siRNA sense strand
caagacaguugggugaagu

SEQ ID NO: 218338 - RNA, 19 nt, Homo sapiens
  misc_RNA (1)...(19): siRNA sense strand
gaagauguucgagacuuug

SEQ ID NO: 218339 - RNA, 19 nt, Homo sapiens
  misc_RNA (1)...(19): siRNA sense strand
gucagauucucagcuuaua

SEQ ID NO: 218340 - RNA, 19 nt, Homo sapiens
  misc_RNA (1)...(19): siRNA sense strand
uaacaucugcaaagagugu

SEQ ID NO: 218341 - RNA, 19 nt, Homo sapiens
  misc_RNA (1)...(19): siRNA sense strand
cggagcugcuuccaauuug

SEQ ID NO: 218342 - RNA, 19 nt, Homo sapiens
  misc_RNA (1)...(19): siRNA sense strand
gaagacaaguacagauacc

SEQ ID NO: 218343 - RNA, 19 nt, Homo sapiens
  misc_RNA (1)...(19): siRNA sense strand
ccauggauauccugcagau

SEQ ID NO: 218344 - RNA, 19 nt, Homo sapiens
  misc_RNA (1)...(19): siRNA sense strand
ggcaucauuucccugugua

SEQ ID NO: 218345 - RNA, 19 nt, Homo sapiens
  misc_RNA (1)...(19): siRNA sense strand
uggauauccugcagauuau

SEQ ID NO: 218346 - RNA, 19 nt, Homo sapiens
  misc_RNA (1)...(19): siRNA sense strand
ggaagacaaguacagauac

SEQ ID NO: 218347 - RNA, 19 nt, Homo sapiens
  misc_RNA (1)...(19): siRNA sense strand
ugcaaagaguguccaauca

SEQ ID NO: 218348 - RNA, 19 nt, Homo sapiens
  misc_RNA (1)...(19): siRNA sense strand
guggauaugugucugaacu

SEQ ID NO: 218349 - RNA, 19 nt, Homo sapiens
  misc_RNA (1)...(19): siRNA sense strand
acuggcugcugaauguuua

SEQ ID NO: 218350 - RNA, 19 nt, Homo sapiens
  misc_RNA (1)...(19): siRNA sense strand
acuaucccaugguggaaua

SEQ ID NO: 218351 - RNA, 19 nt, Homo sapiens
  misc_RNA (1)...(19): siRNA sense strand
ccggagcugcuuccaauuu

SEQ ID NO: 218352 - RNA, 19 nt, Homo sapiens
  misc_RNA (1)...(19): siRNA sense strand
ccaaauuccaagacaguug

SEQ ID NO: 218353 - RNA, 19 nt, Homo sapiens
  misc_RNA (1)...(19): siRNA sense strand
cagaaacugccaagcauca

SEQ ID NO: 218354 - RNA, 19 nt, Homo sapiens
  misc_RNA (1)...(19): siRNA sense strand
uaugacaucugccaaagcu

SEQ ID NO: 218355 - RNA, 19 nt, Homo sapiens
  misc_RNA (1)...(19): siRNA sense strand
aaugucagauucucagcuu

SEQ ID NO: 218356 - RNA, 19 nt, Homo sapiens
  misc_RNA (1)...(19): siRNA sense strand
ucgagacuuugccaaggua

SEQ ID NO: 218357 - RNA, 19 nt, Homo sapiens
  misc_RNA (1)...(19): siRNA sense strand
gcaaaaggccauaaaaugc

SEQ ID NO: 218358 - RNA, 19 nt, Homo sapiens
  misc_RNA (1)...(19): siRNA sense strand
cugcaugauucuauccaaa

SEQ ID NO: 218359 - RNA, 19 nt, Homo sapiens
  misc_RNA (1)...(19): siRNA sense strand
uaaagcacauuuggaagac

SEQ ID NO: 218360 - RNA, 19 nt, Homo sapiens
  misc_RNA (1)...(19): siRNA sense strand
acaggagucuaaagcacuu

SEQ ID NO: 218361 - RNA, 19 nt, Homo sapiens
  misc_RNA (1)...(19): siRNA sense strand
acagauaccuuuucaagca

SEQ ID NO: 218362 - RNA, 19 nt, Homo sapiens
  misc_RNA (1)...(19): siRNA sense strand
aagcacauuuggaagacaa

SEQ ID NO: 218363 - RNA, 19 nt, Homo sapiens
  misc_RNA (1)...(19): siRNA sense strand
gcuaauaauaagccagaga

SEQ ID NO: 218364 - RNA, 19 nt, Homo sapiens
  misc_RNA (1)...(19): siRNA sense strand
caagagcacaacaauuugg

SEQ ID NO: 218365 - RNA, 19 nt, Homo sapiens
  misc_RNA (1)...(19): siRNA sense strand
ccugucagcugcaugugau

SEQ ID NO: 218366 - RNA, 19 nt, Homo sapiens
  misc_RNA (1)...(19): siRNA sense strand
gcugcugaauguuuaugau

SEQ ID NO: 218367 - RNA, 19 nt, Homo sapiens
  misc_RNA (1)...(19): siRNA sense strand
acagagcucuaccagucuu

SEQ ID NO: 218368 - RNA, 19 nt, Homo sapiens
  misc_RNA (1)...(19): siRNA sense strand
acaguugggugaaguugca

SEQ ID NO: 218369 - RNA, 19 nt, Homo sapiens
  misc_RNA (1)...(19): siRNA sense strand
guuugaccacuauuuauga

SEQ ID NO: 218370 - RNA, 19 nt, Homo sapiens
  misc_RNA (1)...(19): siRNA sense strand
gcuuauaggacugccauga

SEQ ID NO: 218371 - RNA, 19 nt, Homo sapiens
  misc_RNA (1)...(19): siRNA sense strand
caucaggccaaauguaaca

SEQ ID NO: 218372 - RNA, 19 nt, Homo sapiens
  misc_RNA (1)...(19): siRNA sense strand
gauucuauccaaauuccaa

SEQ ID NO: 218373 - RNA, 19 nt, Homo sapiens
  misc_RNA (1)...(19): siRNA sense strand
ggcaaguucaacaggauuu

SEQ ID NO: 218374 - RNA, 19 nt, Homo sapiens
  misc_RNA (1)...(19): siRNA sense strand
gaacuggcugcugaauguu

SEQ ID NO: 218375 - RNA, 19 nt, Homo sapiens
  misc_RNA (1)...(19): siRNA sense strand
cugcugaauguuuaugaua

SEQ ID NO: 218376 - RNA, 19 nt, Homo sapiens
  misc_RNA (1)...(19): siRNA sense strand
aagcaucaggccaaaugua

SEQ ID NO: 218377 - RNA, 19 nt, Homo sapiens
  misc_RNA (1)...(19): siRNA sense strand
uggcaucauuucccugugu

SEQ ID NO: 218378 - RNA, 19 nt, Homo sapiens
  misc_RNA (1)...(19): siRNA sense strand
ccaugaaacuccgaagacu

SEQ ID NO: 218379 - RNA, 19 nt, Homo sapiens
  misc_RNA (1)...(19): siRNA sense strand
auaauaagccagagaucga

SEQ ID NO: 218380 - RNA, 19 nt, Homo sapiens
  misc_RNA (1)...(19): siRNA sense strand
cuaauaauaagccagagau

SEQ ID NO: 218381 - RNA, 19 nt, Homo sapiens
  misc_RNA (1)...(19): siRNA sense strand
ugggugaaguugcauccuu

SEQ ID NO: 218382 - RNA, 19 nt, Homo sapiens
  misc_RNA (1)...(19): siRNA sense strand
caucauuucccuguguaaa

SEQ ID NO: 218383 - RNA, 19 nt, Homo sapiens
  misc_RNA (1)...(19): siRNA sense strand
gcguggauaugugucugaa

SEQ ID NO: 218384 - RNA, 19 nt, Homo sapiens
  misc_RNA (1)...(19): siRNA sense strand
gcacuaucccaugguggaa

SEQ ID NO: 218385 - RNA, 19 nt, Homo sapiens
  misc_RNA (1)...(19): siRNA sense strand
gagccugucagcugcaugu

SEQ ID NO: 218386 - RNA, 19 nt, Homo sapiens
  misc_RNA (1)...(19): siRNA sense strand
guacagauaccuuuucaag

SEQ ID NO: 218387 - RNA, 19 nt, Homo sapiens
  misc_RNA (1)...(19): siRNA sense strand
gucccucucugcguggaua

SEQ ID NO: 218388 - RNA, 19 nt, Homo sapiens
  misc_RNA (1)...(19): siRNA sense strand
ggagcugcuuccaauuugc

SEQ ID NO: 218389 - RNA, 19 nt, Homo sapiens
  misc_RNA (1)...(19): siRNA sense strand
uuagcugaccugaauaaug

SEQ ID NO: 218390 - RNA, 19 nt, Homo sapiens
  misc_RNA (1)...(19): siRNA sense strand
guggcaaguucaacaggau

SEQ ID NO: 218391 - RNA, 19 nt, Homo sapiens
  misc_RNA (1)...(19): siRNA sense strand
acaacaauuuggucaacgu

SEQ ID NO: 218392 - RNA, 19 nt, Homo sapiens
  misc_RNA (1)...(19): siRNA sense strand
gacuacaucaggagaagau

SEQ ID NO: 218393 - RNA, 19 nt, Homo sapiens
  misc_RNA (1)...(19): siRNA sense strand
uaauaagccagagaucgaa

SEQ ID NO: 218394 - RNA, 19 nt, Homo sapiens
  misc_RNA (1)...(19): siRNA sense strand
ugucagauucucagcuuau

SEQ ID NO: 218395 - RNA, 19 nt, Homo sapiens
  misc_RNA (1)...(19): siRNA sense strand
ggauauccugcagauuauu

SEQ ID NO: 218396 - RNA, 19 nt, Homo sapiens
  misc_RNA (1)...(19): siRNA sense strand
agcaucaggccaaauguaa

SEQ ID NO: 218397 - RNA, 19 nt, Homo sapiens
  misc_RNA (1)...(19): siRNA sense strand
gcccuuugcuuggaucucu

SEQ ID NO: 218398 - RNA, 19 nt, Homo sapiens
  misc_RNA (1)...(19): siRNA sense strand
gcugaauguuuaugauacg

SEQ ID NO: 218399 - RNA, 19 nt, Homo sapiens
  misc_RNA (1)...(19): siRNA sense strand
agacuuugccaagguacua

SEQ ID NO: 218400 - RNA, 19 nt, Homo sapiens
  misc_RNA (1)...(19): siRNA sense strand
caagcaaguggcaaguuca

SEQ ID NO: 218401 - RNA, 19 nt, Homo sapiens
  misc_RNA (1)...(19): siRNA sense strand
agacaaguacagauaccuu

SEQ ID NO: 218402 - RNA, 19 nt, Homo sapiens
  misc_RNA (1)...(19): siRNA sense strand
gcaucauuucccuguguaa

SEQ ID NO: 218403 - RNA, 19 nt, Homo sapiens
  misc_RNA (1)...(19): siRNA sense strand
cugcaaagaguguccaauc

SEQ ID NO: 218404 - RNA, 19 nt, Homo sapiens
  misc_RNA (1)...(19): siRNA sense strand
cuuauaggacugccaugaa

SEQ ID NO: 218405 - RNA, 19 nt, Homo sapiens
  misc_RNA (1)...(19): siRNA sense strand
caaagaguguccaaucauu

SEQ ID NO: 218406 - RNA, 19 nt, Homo sapiens
  misc_RNA (1)...(19): siRNA sense strand
uagcugaccugaauaaugu

SEQ ID NO: 218407 - RNA, 19 nt, Homo sapiens
  misc_RNA (1)...(19): siRNA sense strand
gcaugauucuauccaaauu

SEQ ID NO: 218408 - RNA, 19 nt, Homo sapiens
  misc_RNA (1)...(19): siRNA sense strand
ugaacuggcugcugaaugu

SEQ ID NO: 218409 - RNA, 19 nt, Homo sapiens
  misc_RNA (1)...(19): siRNA sense strand
gauauccugcagauuauua

SEQ ID NO: 218410 - RNA, 19 nt, Homo sapiens
  misc_RNA (1)...(19): siRNA sense strand
gagaagauguucgagacuu

SEQ ID NO: 218411 - RNA, 19 nt, Homo sapiens
  misc_RNA (1)...(19): siRNA sense strand
gcacuuuaauuaugacauc

SEQ ID NO: 218412 - RNA, 19 nt, Homo sapiens
  misc_RNA (1)...(19): siRNA sense strand
guaaagcacauuuggaaga

SEQ ID NO: 218413 - RNA, 19 nt, Homo sapiens
  misc_RNA (1)...(19): siRNA sense strand
gaauauugcacuccgacua

SEQ ID NO: 218414 - RNA, 19 nt, Homo sapiens
  misc_RNA (1)...(19): siRNA sense strand
uuauaggacugccaugaaa

SEQ ID NO: 218415 - RNA, 19 nt, Homo sapiens
  misc_RNA (1)...(19): siRNA sense strand
gggugaaguugcauccuuu

SEQ ID NO: 218416 - RNA, 19 nt, Homo sapiens
  misc_RNA (1)...(19): siRNA sense strand
gcaagagcacaacaauuug

SEQ ID NO: 218417 - RNA, 19 nt, Homo sapiens
  misc_RNA (1)...(19): siRNA sense strand
gcacaacaauuuggucaac

SEQ ID NO: 218418 - RNA, 19 nt, Homo sapiens
  misc_RNA (1)...(19): siRNA sense strand
agcaagagcacaacaauuu

SEQ ID NO: 218419 - RNA, 19 nt, Homo sapiens
  misc_RNA (1)...(19): siRNA sense strand
agaagauguucgagacuuu

SEQ ID NO: 218420 - RNA, 19 nt, Homo sapiens
  misc_RNA (1)...(19): siRNA sense strand
gagcaagagcacaacaauu

SEQ ID NO: 218421 - RNA, 19 nt, Homo sapiens
  misc_RNA (1)...(19): siRNA sense strand
ucaagcaaguggcaaguuc

SEQ ID NO: 218422 - RNA, 19 nt, Homo sapiens
  misc_RNA (1)...(19): siRNA sense strand
ccacgagacucaaacaacu

SEQ ID NO: 218423 - RNA, 19 nt, Homo sapiens
  misc_RNA (1)...(19): siRNA sense strand
cagcacaaccucaagcaaa

SEQ ID NO: 218424 - RNA, 19 nt, Homo sapiens
  misc_RNA (1)...(19): siRNA sense strand
gcaaagaguguccaaucau

SEQ ID NO: 218425 - RNA, 19 nt, Homo sapiens
  misc_RNA (1)...(19): siRNA sense strand
auggauauccugcagauua

SEQ ID NO: 218426 - RNA, 19 nt, Homo sapiens
  misc_RNA (1)...(19): siRNA sense strand
uguaacaucugcaaagagu

SEQ ID NO: 218427 - RNA, 19 nt, Homo sapiens
  misc_RNA (1)...(19): siRNA sense strand
guccggagcugcuuccaau

SEQ ID NO: 218428 - RNA, 19 nt, Homo sapiens
  misc_RNA (1)...(19): siRNA sense strand
gcaaguggcaaguucaaca

SEQ ID NO: 218429 - RNA, 19 nt, Homo sapiens
  misc_RNA (1)...(19): siRNA sense strand
gcuuccaauuugcuaauaa

SEQ ID NO: 218430 - RNA, 19 nt, Homo sapiens
  misc_RNA (1)...(19): siRNA sense strand
uggaagacaaguacagaua

SEQ ID NO: 218431 - RNA, 19 nt, Homo sapiens
  misc_RNA (1)...(19): siRNA sense strand
ggauccguguccugucuuu

SEQ ID NO: 218432 - RNA, 19 nt, Homo sapiens
  misc_RNA (1)...(19): siRNA sense strand
gucuuuagcugaccugaau

SEQ ID NO: 218433 - RNA, 19 nt, Homo sapiens
  misc_RNA (1)...(19): siRNA sense strand
gacaaguacagauaccuuu

SEQ ID NO: 218434 - RNA, 19 nt, Homo sapiens
  misc_RNA (1)...(19): siRNA sense strand
ccaagcaucaggccaaaug

SEQ ID NO: 218435 - RNA, 19 nt, Homo sapiens
  misc_RNA (1)...(19): siRNA sense strand
ggagcaagagcacaacaau

SEQ ID NO: 218436 - RNA, 19 nt, Homo sapiens
  misc_RNA (1)...(19): siRNA sense strand
guguaaagcacauuuggaa

SEQ ID NO: 218437 - RNA, 19 nt, Homo sapiens
  misc_RNA (1)...(19): siRNA sense strand
caagacaguugggugaagu

SEQ ID NO: 218438 - RNA, 19 nt, Homo sapiens
  misc_RNA (1)...(19): siRNA sense strand
gaagauguucgagacuuug

SEQ ID NO: 218439 - RNA, 19 nt, Homo sapiens
  misc_RNA (1)...(19): siRNA sense strand
gucagauucucagcuuaua

SEQ ID NO: 218440 - RNA, 19 nt, Homo sapiens
  misc_RNA (1)...(19): siRNA sense strand
uaacaucugcaaagagugu

SEQ ID NO: 218441 - RNA, 19 nt, Homo sapiens
  misc_RNA (1)...(19): siRNA sense strand
cggagcugcuuccaauuug

SEQ ID NO: 218442 - RNA, 19 nt, Homo sapiens
  misc_RNA (1)...(19): siRNA sense strand
gaagacaaguacagauacc

SEQ ID NO: 218443 - RNA, 19 nt, Homo sapiens
  misc_RNA (1)...(19): siRNA sense strand
ccauggauauccugcagau

SEQ ID NO: 218444 - RNA, 19 nt, Homo sapiens
  misc_RNA (1)...(19): siRNA sense strand
ggcaucauuucccugugua

SEQ ID NO: 218445 - RNA, 19 nt, Homo sapiens
  misc_RNA (1)...(19): siRNA sense strand
uggauauccugcagauuau

SEQ ID NO: 218446 - RNA, 19 nt, Homo sapiens
  misc_RNA (1)...(19): siRNA sense strand
ggaagacaaguacagauac

SEQ ID NO: 218447 - RNA, 19 nt, Homo sapiens
  misc_RNA (1)...(19): siRNA sense strand
ugcaaagaguguccaauca

SEQ ID NO: 218448 - RNA, 19 nt, Homo sapiens
  misc_RNA (1)...(19): siRNA sense strand
guggauaugugucugaacu

SEQ ID NO: 218449 - RNA, 19 nt, Homo sapiens
  misc_RNA (1)...(19): siRNA sense strand
acuggcugcugaauguuua

SEQ ID NO: 218450 - RNA, 19 nt, Homo sapiens
  misc_RNA (1)...(19): siRNA sense strand
acuaucccaugguggaaua

SEQ ID NO: 218451 - RNA, 19 nt, Homo sapiens
  misc_RNA (1)...(19): siRNA sense strand
ccggagcugcuuccaauuu

SEQ ID NO: 218452 - RNA, 19 nt, Homo sapiens
  misc_RNA (1)...(19): siRNA sense strand
ccaaauuccaagacaguug

SEQ ID NO: 218453 - RNA, 19 nt, Homo sapiens
  misc_RNA (1)...(19): siRNA sense strand
cagaaacugccaagcauca

SEQ ID NO: 218454 - RNA, 19 nt, Homo sapiens
  misc_RNA (1)...(19): siRNA sense strand
uaugacaucugccaaagcu

SEQ ID NO: 218455 - RNA, 19 nt, Homo sapiens
  misc_RNA (1)...(19): siRNA sense strand
aaugucagauucucagcuu

SEQ ID NO: 218456 - RNA, 19 nt, Homo sapiens
  misc_RNA (1)...(19): siRNA sense strand
ucgagacuuugccaaggua

SEQ ID NO: 218457 - RNA, 19 nt, Homo sapiens
  misc_RNA (1)...(19): siRNA sense strand
gcaaaaggccauaaaaugc

SEQ ID NO: 218458 - RNA, 19 nt, Homo sapiens
  misc_RNA (1)...(19): siRNA sense strand
cugcaugauucuauccaaa

SEQ ID NO: 218459 - RNA, 19 nt, Homo sapiens
  misc_RNA (1)...(19): siRNA sense strand
uaaagcacauuuggaagac

SEQ ID NO: 218460 - RNA, 19 nt, Homo sapiens
  misc_RNA (1)...(19): siRNA sense strand
acaggagucuaaagcacuu

SEQ ID NO: 218461 - RNA, 19 nt, Homo sapiens
  misc_RNA (1)...(19): siRNA sense strand
acagauaccuuuucaagca

SEQ ID NO: 218462 - RNA, 19 nt, Homo sapiens
  misc_RNA (1)...(19): siRNA sense strand
aagcacauuuggaagacaa

SEQ ID NO: 218463 - RNA, 19 nt, Homo sapiens
  misc_RNA (1)...(19): siRNA sense strand
gcuaauaauaagccagaga

SEQ ID NO: 218464 - RNA, 19 nt, Homo sapiens
  misc_RNA (1)...(19): siRNA sense strand
caagagcacaacaauuugg

SEQ ID NO: 218465 - RNA, 19 nt, Homo sapiens
  misc_RNA (1)...(19): siRNA sense strand
ccugucagcugcaugugau

SEQ ID NO: 218466 - RNA, 19 nt, Homo sapiens
  misc_RNA (1)...(19): siRNA sense strand
gcugcugaauguuuaugau

SEQ ID NO: 218467 - RNA, 19 nt, Homo sapiens
  misc_RNA (1)...(19): siRNA sense strand
acagagcucuaccagucuu

SEQ ID NO: 218468 - RNA, 19 nt, Homo sapiens
  misc_RNA (1)...(19): siRNA sense strand
acaguugggugaaguugca

SEQ ID NO: 218469 - RNA, 19 nt, Homo sapiens
  misc_RNA (1)...(19): siRNA sense strand
guuugaccacuauuuauga

SEQ ID NO: 218470 - RNA, 19 nt, Homo sapiens
  misc_RNA (1)...(19): siRNA sense strand
gcuuauaggacugccauga

SEQ ID NO: 218471 - RNA, 19 nt, Homo sapiens
  misc_RNA (1)...(19): siRNA sense strand
caucaggccaaauguaaca

SEQ ID NO: 218472 - RNA, 19 nt, Homo sapiens
  misc_RNA (1)...(19): siRNA sense strand
gauucuauccaaauuccaa

SEQ ID NO: 218473 - RNA, 19 nt, Homo sapiens
  misc_RNA (1)...(19): siRNA sense strand
ggcaaguucaacaggauuu

SEQ ID NO: 218474 - RNA, 19 nt, Homo sapiens
  misc_RNA (1)...(19): siRNA sense strand
gaacuggcugcugaauguu

SEQ ID NO: 218475 - RNA, 19 nt, Homo sapiens
  misc_RNA (1)...(19): siRNA sense strand
cugcugaauguuuaugaua

SEQ ID NO: 218476 - RNA, 19 nt, Homo sapiens
  misc_RNA (1)...(19): siRNA sense strand
aagcaucaggccaaaugua

SEQ ID NO: 218477 - RNA, 19 nt, Homo sapiens
  misc_RNA (1)...(19): siRNA sense strand
uggcaucauuucccugugu

SEQ ID NO: 218478 - RNA, 19 nt, Homo sapiens
  misc_RNA (1)...(19): siRNA sense strand
ccaugaaacuccgaagacu

SEQ ID NO: 218479 - RNA, 19 nt, Homo sapiens
  misc_RNA (1)...(19): siRNA sense strand
auaauaagccagagaucga

SEQ ID NO: 218480 - RNA, 19 nt, Homo sapiens
  misc_RNA (1)...(19): siRNA sense strand
cuaauaauaagccagagau

SEQ ID NO: 218481 - RNA, 19 nt, Homo sapiens
  misc_RNA (1)...(19): siRNA sense strand
ugggugaaguugcauccuu

SEQ ID NO: 218482 - RNA, 19 nt, Homo sapiens
  misc_RNA (1)...(19): siRNA sense strand
caucauuucccuguguaaa

SEQ ID NO: 218483 - RNA, 19 nt, Homo sapiens
  misc_RNA (1)...(19): siRNA sense strand
gcguggauaugugucugaa

SEQ ID NO: 218484 - RNA, 19 nt, Homo sapiens
  misc_RNA (1)...(19): siRNA sense strand
gcacuaucccaugguggaa

SEQ ID NO: 218485 - RNA, 19 nt, Homo sapiens
  misc_RNA (1)...(19): siRNA sense strand
gagccugucagcugcaugu

SEQ ID NO: 218486 - RNA, 19 nt, Homo sapiens
  misc_RNA (1)...(19): siRNA sense strand
guacagauaccuuuucaag

SEQ ID NO: 218487 - RNA, 19 nt, Homo sapiens
  misc_RNA (1)...(19): siRNA sense strand
gucccucucugcguggaua

SEQ ID NO: 218488 - RNA, 19 nt, Homo sapiens
  misc_RNA (1)...(19): siRNA sense strand
ggagcugcuuccaauuugc

SEQ ID NO: 218489 - RNA, 19 nt, Homo sapiens
  misc_RNA (1)...(19): siRNA sense strand
uuagcugaccugaauaaug

SEQ ID NO: 218490 - RNA, 19 nt, Homo sapiens
  misc_RNA (1)...(19): siRNA sense strand
guggcaaguucaacaggau

SEQ ID NO: 218491 - RNA, 19 nt, Homo sapiens
  misc_RNA (1)...(19): siRNA sense strand
acaacaauuuggucaacgu

SEQ ID NO: 218492 - RNA, 19 nt, Homo sapiens
  misc_RNA (1)...(19): siRNA sense strand
gacuacaucaggagaagau

SEQ ID NO: 218493 - RNA, 19 nt, Homo sapiens
  misc_RNA (1)...(19): siRNA sense strand
uaauaagccagagaucgaa

SEQ ID NO: 218494 - RNA, 19 nt, Homo sapiens
  misc_RNA (1)...(19): siRNA sense strand
ugucagauucucagcuuau

SEQ ID NO: 218495 - RNA, 19 nt, Homo sapiens
  misc_RNA (1)...(19): siRNA sense strand
ggauauccugcagauuauu

SEQ ID NO: 218496 - RNA, 19 nt, Homo sapiens
  misc_RNA (1)...(19): siRNA sense strand
agcaucaggccaaauguaa

SEQ ID NO: 218497 - RNA, 19 nt, Homo sapiens
  misc_RNA (1)...(19): siRNA sense strand
gcccuuugcuuggaucucu

SEQ ID NO: 218498 - RNA, 19 nt, Homo sapiens
  misc_RNA (1)...(19): siRNA sense strand
gcugaauguuuaugauacg

SEQ ID NO: 218499 - RNA, 19 nt, Homo sapiens
  misc_RNA (1)...(19): siRNA sense strand
agacuuugccaagguacua

SEQ ID NO: 218500 - RNA, 19 nt, Homo sapiens
  misc_RNA (1)...(19): siRNA sense strand
caagcaaguggcaaguuca

SEQ ID NO: 218501 - RNA, 19 nt, Homo sapiens
  misc_RNA (1)...(19): siRNA sense strand
agacaaguacagauaccuu

SEQ ID NO: 218502 - RNA, 19 nt, Homo sapiens
  misc_RNA (1)...(19): siRNA sense strand
gcaucauuucccuguguaa

SEQ ID NO: 218503 - RNA, 19 nt, Homo sapiens
  misc_RNA (1)...(19): siRNA sense strand
cugcaaagaguguccaauc

SEQ ID NO: 218504 - RNA, 19 nt, Homo sapiens
  misc_RNA (1)...(19): siRNA sense strand
cuuauaggacugccaugaa

SEQ ID NO: 218505 - RNA, 19 nt, Homo sapiens
  misc_RNA (1)...(19): siRNA sense strand
caaagaguguccaaucauu

SEQ ID NO: 218506 - RNA, 19 nt, Homo sapiens
  misc_RNA (1)...(19): siRNA sense strand
uagcugaccugaauaaugu

SEQ ID NO: 218507 - RNA, 19 nt, Homo sapiens
  misc_RNA (1)...(19): siRNA sense strand
gcaugauucuauccaaauu

SEQ ID NO: 218508 - RNA, 19 nt, Homo sapiens
  misc_RNA (1)...(19): siRNA sense strand
ugaacuggcugcugaaugu

SEQ ID NO: 218509 - RNA, 19 nt, Homo sapiens
  misc_RNA (1)...(19): siRNA sense strand
gauauccugcagauuauua

SEQ ID NO: 218510 - RNA, 19 nt, Homo sapiens
  misc_RNA (1)...(19): siRNA sense strand
gagaagauguucgagacuu

SEQ ID NO: 218511 - RNA, 19 nt, Homo sapiens
  misc_RNA (1)...(19): siRNA sense strand
gcacuuuaauuaugacauc

SEQ ID NO: 218512 - RNA, 19 nt, Homo sapiens
  misc_RNA (1)...(19): siRNA sense strand
guaaagcacauuuggaaga

SEQ ID NO: 218513 - RNA, 19 nt, Homo sapiens
  misc_RNA (1)...(19): siRNA sense strand
gaauauugcacuccgacua

SEQ ID NO: 218514 - RNA, 19 nt, Homo sapiens
  misc_RNA (1)...(19): siRNA sense strand
uuauaggacugccaugaaa

SEQ ID NO: 218515 - RNA, 19 nt, Homo sapiens
  misc_RNA (1)...(19): siRNA sense strand
gggugaaguugcauccuuu

SEQ ID NO: 218516 - RNA, 19 nt, Homo sapiens
  misc_RNA (1)...(19): siRNA sense strand
gcaagagcacaacaauuug

SEQ ID NO: 218517 - RNA, 19 nt, Homo sapiens
  misc_RNA (1)...(19): siRNA sense strand
gcacaacaauuuggucaac

SEQ ID NO: 218518 - RNA, 19 nt, Homo sapiens
  misc_RNA (1)...(19): siRNA sense strand
agcaagagcacaacaauuu

SEQ ID NO: 218519 - RNA, 19 nt, Homo sapiens
  misc_RNA (1)...(19): siRNA sense strand
agaagauguucgagacuuu

SEQ ID NO: 218520 - RNA, 19 nt, Homo sapiens
  misc_RNA (1)...(19): siRNA sense strand
gagcaagagcacaacaauu

SEQ ID NO: 218521 - RNA, 19 nt, Homo sapiens
  misc_RNA (1)...(19): siRNA sense strand
ucaagcaaguggcaaguuc

SEQ ID NO: 218522 - RNA, 19 nt, Homo sapiens
  misc_RNA (1)...(19): siRNA sense strand
ccacgagacucaaacaacu

SEQ ID NO: 218523 - RNA, 19 nt, Homo sapiens
  misc_RNA (1)...(19): siRNA sense strand
cagcacaaccucaagcaaa

SEQ ID NO: 218524 - RNA, 19 nt, Homo sapiens
  misc_RNA (1)...(19): siRNA sense strand
gcaaagaguguccaaucau

SEQ ID NO: 218525 - RNA, 19 nt, Homo sapiens
  misc_RNA (1)...(19): siRNA sense strand
auggauauccugcagauua

SEQ ID NO: 218526 - RNA, 19 nt, Homo sapiens
  misc_RNA (1)...(19): siRNA sense strand
uguaacaucugcaaagagu

SEQ ID NO: 218527 - RNA, 19 nt, Homo sapiens
  misc_RNA (1)...(19): siRNA sense strand
guccggagcugcuuccaau

SEQ ID NO: 218528 - RNA, 19 nt, Homo sapiens
  misc_RNA (1)...(19): siRNA sense strand
gcaaguggcaaguucaaca

SEQ ID NO: 218529 - RNA, 19 nt, Homo sapiens
  misc_RNA (1)...(19): siRNA sense strand
gcuuccaauuugcuaauaa

SEQ ID NO: 218530 - RNA, 19 nt, Homo sapiens
  misc_RNA (1)...(19): siRNA sense strand
uggaagacaaguacagaua

SEQ ID NO: 218531 - RNA, 19 nt, Homo sapiens
  misc_RNA (1)...(19): siRNA sense strand
ggauccguguccugucuuu

SEQ ID NO: 218532 - RNA, 19 nt, Homo sapiens
  misc_RNA (1)...(19): siRNA sense strand
gucuuuagcugaccugaau

SEQ ID NO: 218533 - RNA, 19 nt, Homo sapiens
  misc_RNA (1)...(19): siRNA sense strand
gacaaguacagauaccuuu

SEQ ID NO: 218534 - RNA, 19 nt, Homo sapiens
  misc_RNA (1)...(19): siRNA sense strand
ccaagcaucaggccaaaug

SEQ ID NO: 218535 - RNA, 19 nt, Homo sapiens
  misc_RNA (1)...(19): siRNA sense strand
ggagcaagagcacaacaau

SEQ ID NO: 218536 - RNA, 19 nt, Homo sapiens
  misc_RNA (1)...(19): siRNA sense strand
guguaaagcacauuuggaa

SEQ ID NO: 218537 - RNA, 19 nt, Homo sapiens
  misc_RNA (1)...(19): siRNA sense strand
caagacaguugggugaagu

SEQ ID NO: 218538 - RNA, 19 nt, Homo sapiens
  misc_RNA (1)...(19): siRNA sense strand
gaagauguucgagacuuug

SEQ ID NO: 218539 - RNA, 19 nt, Homo sapiens
  misc_RNA (1)...(19): siRNA sense strand
gucagauucucagcuuaua

SEQ ID NO: 218540 - RNA, 19 nt, Homo sapiens
  misc_RNA (1)...(19): siRNA sense strand
uaacaucugcaaagagugu

SEQ ID NO: 218541 - RNA, 19 nt, Homo sapiens
  misc_RNA (1)...(19): siRNA sense strand
cggagcugcuuccaauuug

SEQ ID NO: 218542 - RNA, 19 nt, Homo sapiens
  misc_RNA (1)...(19): siRNA sense strand
gaagacaaguacagauacc

SEQ ID NO: 218543 - RNA, 19 nt, Homo sapiens
  misc_RNA (1)...(19): siRNA sense strand
ccauggauauccugcagau

SEQ ID NO: 218544 - RNA, 19 nt, Homo sapiens
  misc_RNA (1)...(19): siRNA sense strand
ggcaucauuucccugugua

SEQ ID NO: 218545 - RNA, 19 nt, Homo sapiens
  misc_RNA (1)...(19): siRNA sense strand
uggauauccugcagauuau

SEQ ID NO: 218546 - RNA, 19 nt, Homo sapiens
  misc_RNA (1)...(19): siRNA sense strand
ggaagacaaguacagauac

SEQ ID NO: 218547 - RNA, 19 nt, Homo sapiens
  misc_RNA (1)...(19): siRNA sense strand
ugcaaagaguguccaauca

SEQ ID NO: 218548 - RNA, 19 nt, Homo sapiens
  misc_RNA (1)...(19): siRNA sense strand
guggauaugugucugaacu

SEQ ID NO: 218549 - RNA, 19 nt, Homo sapiens
  misc_RNA (1)...(19): siRNA sense strand
acuggcugcugaauguuua

SEQ ID NO: 218550 - RNA, 19 nt, Homo sapiens
  misc_RNA (1)...(19): siRNA sense strand
acuaucccaugguggaaua

SEQ ID NO: 218551 - RNA, 19 nt, Homo sapiens
  misc_RNA (1)...(19): siRNA sense strand
ccggagcugcuuccaauuu

SEQ ID NO: 218552 - RNA, 19 nt, Homo sapiens
  misc_RNA (1)...(19): siRNA sense strand
ccaaauuccaagacaguug

SEQ ID NO: 218553 - RNA, 19 nt, Homo sapiens
  misc_RNA (1)...(19): siRNA sense strand
cagaaacugccaagcauca

SEQ ID NO: 218554 - RNA, 19 nt, Homo sapiens
  misc_RNA (1)...(19): siRNA sense strand
uaugacaucugccaaagcu

SEQ ID NO: 218555 - RNA, 19 nt, Homo sapiens
  misc_RNA (1)...(19): siRNA sense strand
aaugucagauucucagcuu

SEQ ID NO: 218556 - RNA, 19 nt, Homo sapiens
  misc_RNA (1)...(19): siRNA sense strand
ucgagacuuugccaaggua

SEQ ID NO: 218557 - RNA, 19 nt, Homo sapiens
  misc_RNA (1)...(19): siRNA sense strand
gcaaaaggccauaaaaugc

SEQ ID NO: 218558 - RNA, 19 nt, Homo sapiens
  misc_RNA (1)...(19): siRNA sense strand
cugcaugauucuauccaaa

SEQ ID NO: 218559 - RNA, 19 nt, Homo sapiens
  misc_RNA (1)...(19): siRNA sense strand
uaaagcacauuuggaagac

SEQ ID NO: 218560 - RNA, 19 nt, Homo sapiens
  misc_RNA (1)...(19): siRNA sense strand
acaggagucuaaagcacuu

SEQ ID NO: 218561 - RNA, 19 nt, Homo sapiens
  misc_RNA (1)...(19): siRNA sense strand
acagauaccuuuucaagca

SEQ ID NO: 218562 - RNA, 19 nt, Homo sapiens
  misc_RNA (1)...(19): siRNA sense strand
aagcacauuuggaagacaa

SEQ ID NO: 218563 - RNA, 19 nt, Homo sapiens
  misc_RNA (1)...(19): siRNA sense strand
gcuaauaauaagccagaga

SEQ ID NO: 218564 - RNA, 19 nt, Homo sapiens
  misc_RNA (1)...(19): siRNA sense strand
caagagcacaacaauuugg

SEQ ID NO: 218565 - RNA, 19 nt, Homo sapiens
  misc_RNA (1)...(19): siRNA sense strand
ccugucagcugcaugugau

SEQ ID NO: 218566 - RNA, 19 nt, Homo sapiens
  misc_RNA (1)...(19): siRNA sense strand
gcugcugaauguuuaugau

SEQ ID NO: 218567 - RNA, 19 nt, Homo sapiens
  misc_RNA (1)...(19): siRNA sense strand
acagagcucuaccagucuu

SEQ ID NO: 218568 - RNA, 19 nt, Homo sapiens
  misc_RNA (1)...(19): siRNA sense strand
acaguugggugaaguugca

SEQ ID NO: 218569 - RNA, 19 nt, Homo sapiens
  misc_RNA (1)...(19): siRNA sense strand
guuugaccacuauuuauga

SEQ ID NO: 218570 - RNA, 19 nt, Homo sapiens
  misc_RNA (1)...(19): siRNA sense strand
gcuuauaggacugccauga

SEQ ID NO: 218571 - RNA, 19 nt, Homo sapiens
  misc_RNA (1)...(19): siRNA sense strand
caucaggccaaauguaaca

SEQ ID NO: 218572 - RNA, 19 nt, Homo sapiens
  misc_RNA (1)...(19): siRNA sense strand
gauucuauccaaauuccaa

SEQ ID NO: 218573 - RNA, 19 nt, Homo sapiens
  misc_RNA (1)...(19): siRNA sense strand
ggcaaguucaacaggauuu

SEQ ID NO: 218574 - RNA, 19 nt, Homo sapiens
  misc_RNA (1)...(19): siRNA sense strand
gaacuggcugcugaauguu

SEQ ID NO: 218575 - RNA, 19 nt, Homo sapiens
  misc_RNA (1)...(19): siRNA sense strand
cugcugaauguuuaugaua

SEQ ID NO: 218576 - RNA, 19 nt, Homo sapiens
  misc_RNA (1)...(19): siRNA sense strand
aagcaucaggccaaaugua

SEQ ID NO: 218577 - RNA, 19 nt, Homo sapiens
  misc_RNA (1)...(19): siRNA sense strand
uggcaucauuucccugugu

SEQ ID NO: 218578 - RNA, 19 nt, Homo sapiens
  misc_RNA (1)...(19): siRNA sense strand
ccaugaaacuccgaagacu

SEQ ID NO: 218579 - RNA, 19 nt, Homo sapiens
  misc_RNA (1)...(19): siRNA sense strand
auaauaagccagagaucga

SEQ ID NO: 218580 - RNA, 19 nt, Homo sapiens
  misc_RNA (1)...(19): siRNA sense strand
cuaauaauaagccagagau

SEQ ID NO: 218581 - RNA, 19 nt, Homo sapiens
  misc_RNA (1)...(19): siRNA sense strand
ugggugaaguugcauccuu

SEQ ID NO: 218582 - RNA, 19 nt, Homo sapiens
  misc_RNA (1)...(19): siRNA sense strand
caucauuucccuguguaaa

SEQ ID NO: 218583 - RNA, 19 nt, Homo sapiens
  misc_RNA (1)...(19): siRNA sense strand
gcguggauaugugucugaa

SEQ ID NO: 218584 - RNA, 19 nt, Homo sapiens
  misc_RNA (1)...(19): siRNA sense strand
gcacuaucccaugguggaa

SEQ ID NO: 218585 - RNA, 19 nt, Homo sapiens
  misc_RNA (1)...(19): siRNA sense strand
gagccugucagcugcaugu

SEQ ID NO: 218586 - RNA, 19 nt, Homo sapiens
  misc_RNA (1)...(19): siRNA sense strand
guacagauaccuuuucaag

SEQ ID NO: 218587 - RNA, 19 nt, Homo sapiens
  misc_RNA (1)...(19): siRNA sense strand
gucccucucugcguggaua

SEQ ID NO: 218588 - RNA, 19 nt, Homo sapiens
  misc_RNA (1)...(19): siRNA sense strand
ggagcugcuuccaauuugc

SEQ ID NO: 218589 - RNA, 19 nt, Homo sapiens
  misc_RNA (1)...(19): siRNA sense strand
uuagcugaccugaauaaug

SEQ ID NO: 218590 - RNA, 19 nt, Homo sapiens
  misc_RNA (1)...(19): siRNA sense strand
guggcaaguucaacaggau

SEQ ID NO: 218591 - RNA, 19 nt, Homo sapiens
  misc_RNA (1)...(19): siRNA sense strand
acaacaauuuggucaacgu

SEQ ID NO: 218592 - RNA, 19 nt, Homo sapiens
  misc_RNA (1)...(19): siRNA sense strand
gacuacaucaggagaagau

SEQ ID NO: 218593 - RNA, 19 nt, Homo sapiens
  misc_RNA (1)...(19): siRNA sense strand
uaauaagccagagaucgaa

SEQ ID NO: 218594 - RNA, 19 nt, Homo sapiens
  misc_RNA (1)...(19): siRNA sense strand
ugucagauucucagcuuau

SEQ ID NO: 218595 - RNA, 19 nt, Homo sapiens
  misc_RNA (1)...(19): siRNA sense strand
ggauauccugcagauuauu

SEQ ID NO: 218596 - RNA, 19 nt, Homo sapiens
  misc_RNA (1)...(19): siRNA sense strand
agcaucaggccaaauguaa

SEQ ID NO: 218597 - RNA, 19 nt, Homo sapiens
  misc_RNA (1)...(19): siRNA sense strand
gcccuuugcuuggaucucu

SEQ ID NO: 218598 - RNA, 19 nt, Homo sapiens
  misc_RNA (1)...(19): siRNA sense strand
gcugaauguuuaugauacg

SEQ ID NO: 218599 - RNA, 19 nt, Homo sapiens
  misc_RNA (1)...(19): siRNA sense strand
agacuuugccaagguacua

SEQ ID NO: 218600 - RNA, 19 nt, Homo sapiens
  misc_RNA (1)...(19): siRNA sense strand
caagcaaguggcaaguuca

SEQ ID NO: 218601 - RNA, 19 nt, Homo sapiens
  misc_RNA (1)...(19): siRNA sense strand
agacaaguacagauaccuu

SEQ ID NO: 218602 - RNA, 19 nt, Homo sapiens
  misc_RNA (1)...(19): siRNA sense strand
gcaucauuucccuguguaa

SEQ ID NO: 218603 - RNA, 19 nt, Homo sapiens
  misc_RNA (1)...(19): siRNA sense strand
cugcaaagaguguccaauc

SEQ ID NO: 218604 - RNA, 19 nt, Homo sapiens
  misc_RNA (1)...(19): siRNA sense strand
cuuauaggacugccaugaa

SEQ ID NO: 218605 - RNA, 19 nt, Homo sapiens
  misc_RNA (1)...(19): siRNA sense strand
caaagaguguccaaucauu

SEQ ID NO: 218606 - RNA, 19 nt, Homo sapiens
  misc_RNA (1)...(19): siRNA sense strand
uagcugaccugaauaaugu

SEQ ID NO: 218607 - RNA, 19 nt, Homo sapiens
  misc_RNA (1)...(19): siRNA sense strand
gcaugauucuauccaaauu

SEQ ID NO: 218608 - RNA, 19 nt, Homo sapiens
  misc_RNA (1)...(19): siRNA sense strand
ugaacuggcugcugaaugu

SEQ ID NO: 218609 - RNA, 19 nt, Homo sapiens
  misc_RNA (1)...(19): siRNA sense strand
gauauccugcagauuauua

SEQ ID NO: 218610 - RNA, 19 nt, Homo sapiens
  misc_RNA (1)...(19): siRNA sense strand
gagaagauguucgagacuu

SEQ ID NO: 218611 - RNA, 19 nt, Homo sapiens
  misc_RNA (1)...(19): siRNA sense strand
gcacuuuaauuaugacauc

SEQ ID NO: 218612 - RNA, 19 nt, Homo sapiens
  misc_RNA (1)...(19): siRNA sense strand
guaaagcacauuuggaaga

SEQ ID NO: 218613 - RNA, 19 nt, Homo sapiens
  misc_RNA (1)...(19): siRNA sense strand
gaauauugcacuccgacua

SEQ ID NO: 218614 - RNA, 19 nt, Homo sapiens
  misc_RNA (1)...(19): siRNA sense strand
uuauaggacugccaugaaa

SEQ ID NO: 218615 - RNA, 19 nt, Homo sapiens
  misc_RNA (1)...(19): siRNA sense strand
gggugaaguugcauccuuu

SEQ ID NO: 218616 - RNA, 19 nt, Homo sapiens
  misc_RNA (1)...(19): siRNA sense strand
gcaagagcacaacaauuug

SEQ ID NO: 218617 - RNA, 19 nt, Homo sapiens
  misc_RNA (1)...(19): siRNA sense strand
gcacaacaauuuggucaac

SEQ ID NO: 218618 - RNA, 19 nt, Homo sapiens
  misc_RNA (1)...(19): siRNA sense strand
agcaagagcacaacaauuu

SEQ ID NO: 218619 - RNA, 19 nt, Homo sapiens
  misc_RNA (1)...(19): siRNA sense strand
agaagauguucgagacuuu

SEQ ID NO: 218620 - RNA, 19 nt, Homo sapiens
  misc_RNA (1)...(19): siRNA sense strand
gagcaagagcacaacaauu

SEQ ID NO: 218621 - RNA, 19 nt, Homo sapiens
  misc_RNA (1)...(19): siRNA sense strand
ucaagcaaguggcaaguuc

SEQ ID NO: 218622 - RNA, 19 nt, Homo sapiens
  misc_RNA (1)...(19): siRNA sense strand
ccacgagacucaaacaacu

SEQ ID NO: 218623 - RNA, 19 nt, Homo sapiens
  misc_RNA (1)...(19): siRNA sense strand
cagcacaaccucaagcaaa

SEQ ID NO: 218624 - RNA, 19 nt, Homo sapiens
  misc_RNA (1)...(19): siRNA sense strand
gcaaagaguguccaaucau

SEQ ID NO: 218625 - RNA, 19 nt, Homo sapiens
  misc_RNA (1)...(19): siRNA sense strand
auggauauccugcagauua

SEQ ID NO: 218626 - RNA, 19 nt, Homo sapiens
  misc_RNA (1)...(19): siRNA sense strand
uguaacaucugcaaagagu

SEQ ID NO: 218627 - RNA, 19 nt, Homo sapiens
  misc_RNA (1)...(19): siRNA sense strand
guccggagcugcuuccaau

SEQ ID NO: 218628 - RNA, 19 nt, Homo sapiens
  misc_RNA (1)...(19): siRNA sense strand
gcaaguggcaaguucaaca

SEQ ID NO: 218629 - RNA, 19 nt, Homo sapiens
  misc_RNA (1)...(19): siRNA sense strand
gcuuccaauuugcuaauaa

SEQ ID NO: 218630 - RNA, 19 nt, Homo sapiens
  misc_RNA (1)...(19): siRNA sense strand
uggaagacaaguacagaua

SEQ ID NO: 218631 - RNA, 19 nt, Homo sapiens
  misc_RNA (1)...(19): siRNA sense strand
ggauccguguccugucuuu

SEQ ID NO: 218632 - RNA, 19 nt, Homo sapiens
  misc_RNA (1)...(19): siRNA sense strand
gucuuuagcugaccugaau

SEQ ID NO: 218633 - RNA, 19 nt, Homo sapiens
  misc_RNA (1)...(19): siRNA sense strand
gacaaguacagauaccuuu

SEQ ID NO: 218634 - RNA, 19 nt, Homo sapiens
  misc_RNA (1)...(19): siRNA sense strand
ccaagcaucaggccaaaug

SEQ ID NO: 218635 - RNA, 19 nt, Homo sapiens
  misc_RNA (1)...(19): siRNA sense strand
ggagcaagagcacaacaau

SEQ ID NO: 218636 - RNA, 19 nt, Homo sapiens
  misc_RNA (1)...(19): siRNA sense strand
guguaaagcacauuuggaa

SEQ ID NO: 218637 - RNA, 19 nt, Homo sapiens
  misc_RNA (1)...(19): siRNA sense strand
caagacaguugggugaagu

SEQ ID NO: 218638 - RNA, 19 nt, Homo sapiens
  misc_RNA (1)...(19): siRNA sense strand
gaagauguucgagacuuug

SEQ ID NO: 218639 - RNA, 19 nt, Homo sapiens
  misc_RNA (1)...(19): siRNA sense strand
gucagauucucagcuuaua

SEQ ID NO: 218640 - RNA, 19 nt, Homo sapiens
  misc_RNA (1)...(19): siRNA sense strand
uaacaucugcaaagagugu

SEQ ID NO: 218641 - RNA, 19 nt, Homo sapiens
  misc_RNA (1)...(19): siRNA sense strand
cggagcugcuuccaauuug

SEQ ID NO: 218642 - RNA, 19 nt, Homo sapiens
  misc_RNA (1)...(19): siRNA sense strand
gaagacaaguacagauacc

SEQ ID NO: 218643 - RNA, 19 nt, Homo sapiens
  misc_RNA (1)...(19): siRNA sense strand
ccauggauauccugcagau

SEQ ID NO: 218644 - RNA, 19 nt, Homo sapiens
  misc_RNA (1)...(19): siRNA sense strand
ggcaucauuucccugugua

SEQ ID NO: 218645 - RNA, 19 nt, Homo sapiens
  misc_RNA (1)...(19): siRNA sense strand
uggauauccugcagauuau

SEQ ID NO: 218646 - RNA, 19 nt, Homo sapiens
  misc_RNA (1)...(19): siRNA sense strand
ggaagacaaguacagauac

SEQ ID NO: 218647 - RNA, 19 nt, Homo sapiens
  misc_RNA (1)...(19): siRNA sense strand
ugcaaagaguguccaauca

SEQ ID NO: 218648 - RNA, 19 nt, Homo sapiens
  misc_RNA (1)...(19): siRNA sense strand
guggauaugugucugaacu

SEQ ID NO: 218649 - RNA, 19 nt, Homo sapiens
  misc_RNA (1)...(19): siRNA sense strand
acuggcugcugaauguuua

SEQ ID NO: 218650 - RNA, 19 nt, Homo sapiens
  misc_RNA (1)...(19): siRNA sense strand
acuaucccaugguggaaua

SEQ ID NO: 218651 - RNA, 19 nt, Homo sapiens
  misc_RNA (1)...(19): siRNA sense strand
ccggagcugcuuccaauuu

SEQ ID NO: 218652 - RNA, 19 nt, Homo sapiens
  misc_RNA (1)...(19): siRNA sense strand
ccaaauuccaagacaguug

SEQ ID NO: 218653 - RNA, 19 nt, Homo sapiens
  misc_RNA (1)...(19): siRNA sense strand
cagaaacugccaagcauca

SEQ ID NO: 218654 - RNA, 19 nt, Homo sapiens
  misc_RNA (1)...(19): siRNA sense strand
uaugacaucugccaaagcu

SEQ ID NO: 218655 - RNA, 19 nt, Homo sapiens
  misc_RNA (1)...(19): siRNA sense strand
aaugucagauucucagcuu

SEQ ID NO: 218656 - RNA, 19 nt, Homo sapiens
  misc_RNA (1)...(19): siRNA sense strand
ucgagacuuugccaaggua

SEQ ID NO: 218657 - RNA, 19 nt, Homo sapiens
  misc_RNA (1)...(19): siRNA sense strand
gcaaaaggccauaaaaugc

SEQ ID NO: 218658 - RNA, 19 nt, Homo sapiens
  misc_RNA (1)...(19): siRNA sense strand
cugcaugauucuauccaaa

SEQ ID NO: 218659 - RNA, 19 nt, Homo sapiens
  misc_RNA (1)...(19): siRNA sense strand
uaaagcacauuuggaagac

SEQ ID NO: 218660 - RNA, 19 nt, Homo sapiens
  misc_RNA (1)...(19): siRNA sense strand
acaggagucuaaagcacuu

SEQ ID NO: 218661 - RNA, 19 nt, Homo sapiens
  misc_RNA (1)...(19): siRNA sense strand
acagauaccuuuucaagca

SEQ ID NO: 218662 - RNA, 19 nt, Homo sapiens
  misc_RNA (1)...(19): siRNA sense strand
aagcacauuuggaagacaa

SEQ ID NO: 218663 - RNA, 19 nt, Homo sapiens
  misc_RNA (1)...(19): siRNA sense strand
gcuaauaauaagccagaga

SEQ ID NO: 218664 - RNA, 19 nt, Homo sapiens
  misc_RNA (1)...(19): siRNA sense strand
caagagcacaacaauuugg

SEQ ID NO: 218665 - RNA, 19 nt, Homo sapiens
  misc_RNA (1)...(19): siRNA sense strand
ccugucagcugcaugugau

SEQ ID NO: 218666 - RNA, 19 nt, Homo sapiens
  misc_RNA (1)...(19): siRNA sense strand
gcugcugaauguuuaugau

SEQ ID NO: 218667 - RNA, 19 nt, Homo sapiens
  misc_RNA (1)...(19): siRNA sense strand
acagagcucuaccagucuu

SEQ ID NO: 218668 - RNA, 19 nt, Homo sapiens
  misc_RNA (1)...(19): siRNA sense strand
acaguugggugaaguugca

SEQ ID NO: 218669 - RNA, 19 nt, Homo sapiens
  misc_RNA (1)...(19): siRNA sense strand
guuugaccacuauuuauga

SEQ ID NO: 218670 - RNA, 19 nt, Homo sapiens
  misc_RNA (1)...(19): siRNA sense strand
gcuuauaggacugccauga

SEQ ID NO: 218671 - RNA, 19 nt, Homo sapiens
  misc_RNA (1)...(19): siRNA sense strand
caucaggccaaauguaaca

SEQ ID NO: 218672 - RNA, 19 nt, Homo sapiens
  misc_RNA (1)...(19): siRNA sense strand
gauucuauccaaauuccaa

SEQ ID NO: 218673 - RNA, 19 nt, Homo sapiens
  misc_RNA (1)...(19): siRNA sense strand
ggcaaguucaacaggauuu

SEQ ID NO: 218674 - RNA, 19 nt, Homo sapiens
  misc_RNA (1)...(19): siRNA sense strand
gaacuggcugcugaauguu

SEQ ID NO: 218675 - RNA, 19 nt, Homo sapiens
  misc_RNA (1)...(19): siRNA sense strand
cugcugaauguuuaugaua

SEQ ID NO: 218676 - RNA, 19 nt, Homo sapiens
  misc_RNA (1)...(19): siRNA sense strand
aagcaucaggccaaaugua

SEQ ID NO: 218677 - RNA, 19 nt, Homo sapiens
  misc_RNA (1)...(19): siRNA sense strand
uggcaucauuucccugugu

SEQ ID NO: 218678 - RNA, 19 nt, Homo sapiens
  misc_RNA (1)...(19): siRNA sense strand
ccaugaaacuccgaagacu

SEQ ID NO: 218679 - RNA, 19 nt, Homo sapiens
  misc_RNA (1)...(19): siRNA sense strand
auaauaagccagagaucga

SEQ ID NO: 218680 - RNA, 19 nt, Homo sapiens
  misc_RNA (1)...(19): siRNA sense strand
cuaauaauaagccagagau

SEQ ID NO: 218681 - RNA, 19 nt, Homo sapiens
  misc_RNA (1)...(19): siRNA sense strand
ugggugaaguugcauccuu

SEQ ID NO: 218682 - RNA, 19 nt, Homo sapiens
  misc_RNA (1)...(19): siRNA sense strand
caucauuucccuguguaaa

SEQ ID NO: 218683 - RNA, 19 nt, Homo sapiens
  misc_RNA (1)...(19): siRNA sense strand
gcguggauaugugucugaa

SEQ ID NO: 218684 - RNA, 19 nt, Homo sapiens
  misc_RNA (1)...(19): siRNA sense strand
gcacuaucccaugguggaa

SEQ ID NO: 218685 - RNA, 19 nt, Homo sapiens
  misc_RNA (1)...(19): siRNA sense strand
gagccugucagcugcaugu

SEQ ID NO: 218686 - RNA, 19 nt, Homo sapiens
  misc_RNA (1)...(19): siRNA sense strand
guacagauaccuuuucaag

SEQ ID NO: 218687 - RNA, 19 nt, Homo sapiens
  misc_RNA (1)...(19): siRNA sense strand
gucccucucugcguggaua

SEQ ID NO: 218688 - RNA, 19 nt, Homo sapiens
  misc_RNA (1)...(19): siRNA sense strand
ggagcugcuuccaauuugc

SEQ ID NO: 218689 - RNA, 19 nt, Homo sapiens
  misc_RNA (1)...(19): siRNA sense strand
uuagcugaccugaauaaug

SEQ ID NO: 218690 - RNA, 19 nt, Homo sapiens
  misc_RNA (1)...(19): siRNA sense strand
guggcaaguucaacaggau

SEQ ID NO: 218691 - RNA, 19 nt, Homo sapiens
  misc_RNA (1)...(19): siRNA sense strand
acaacaauuuggucaacgu

SEQ ID NO: 218692 - RNA, 19 nt, Homo sapiens
  misc_RNA (1)...(19): siRNA sense strand
gacuacaucaggagaagau

SEQ ID NO: 218693 - RNA, 19 nt, Homo sapiens
  misc_RNA (1)...(19): siRNA sense strand
uaauaagccagagaucgaa

SEQ ID NO: 218694 - RNA, 19 nt, Homo sapiens
  misc_RNA (1)...(19): siRNA sense strand
ugucagauucucagcuuau

SEQ ID NO: 218695 - RNA, 19 nt, Homo sapiens
  misc_RNA (1)...(19): siRNA sense strand
ggauauccugcagauuauu

SEQ ID NO: 218696 - RNA, 19 nt, Homo sapiens
  misc_RNA (1)...(19): siRNA sense strand
agcaucaggccaaauguaa

SEQ ID NO: 218697 - RNA, 19 nt, Homo sapiens
  misc_RNA (1)...(19): siRNA sense strand
gcccuuugcuuggaucucu

SEQ ID NO: 218698 - RNA, 19 nt, Homo sapiens
  misc_RNA (1)...(19): siRNA sense strand
gcugaauguuuaugauacg

SEQ ID NO: 218699 - RNA, 19 nt, Homo sapiens
  misc_RNA (1)...(19): siRNA sense strand
agacuuugccaagguacua

SEQ ID NO: 218700 - RNA, 19 nt, Homo sapiens
  misc_RNA (1)...(19): siRNA sense strand
caagcaaguggcaaguuca

SEQ ID NO: 218701 - RNA, 19 nt, Homo sapiens
  misc_RNA (1)...(19): siRNA sense strand
agacaaguacagauaccuu

SEQ ID NO: 218702 - RNA, 19 nt, Homo sapiens
  misc_RNA (1)...(19): siRNA sense strand
gcaucauuucccuguguaa

SEQ ID NO: 218703 - RNA, 19 nt, Homo sapiens
  misc_RNA (1)...(19): siRNA sense strand
cugcaaagaguguccaauc

SEQ ID NO: 218704 - RNA, 19 nt, Homo sapiens
  misc_RNA (1)...(19): siRNA sense strand
cuuauaggacugccaugaa

SEQ ID NO: 218705 - RNA, 19 nt, Homo sapiens
  misc_RNA (1)...(19): siRNA sense strand
caaagaguguccaaucauu

SEQ ID NO: 218706 - RNA, 19 nt, Homo sapiens
  misc_RNA (1)...(19): siRNA sense strand
uagcugaccugaauaaugu

SEQ ID NO: 218707 - RNA, 19 nt, Homo sapiens
  misc_RNA (1)...(19): siRNA sense strand
gcaugauucuauccaaauu

SEQ ID NO: 218708 - RNA, 19 nt, Homo sapiens
  misc_RNA (1)...(19): siRNA sense strand
ugaacuggcugcugaaugu

SEQ ID NO: 218709 - RNA, 19 nt, Homo sapiens
  misc_RNA (1)...(19): siRNA sense strand
gauauccugcagauuauua

SEQ ID NO: 218710 - RNA, 19 nt, Homo sapiens
  misc_RNA (1)...(19): siRNA sense strand
gagaagauguucgagacuu

SEQ ID NO: 218711 - RNA, 19 nt, Homo sapiens
  misc_RNA (1)...(19): siRNA sense strand
gcacuuuaauuaugacauc

SEQ ID NO: 218712 - RNA, 19 nt, Homo sapiens
  misc_RNA (1)...(19): siRNA sense strand
guaaagcacauuuggaaga

SEQ ID NO: 218713 - RNA, 19 nt, Homo sapiens
  misc_RNA (1)...(19): siRNA sense strand
gaauauugcacuccgacua

SEQ ID NO: 218714 - RNA, 19 nt, Homo sapiens
  misc_RNA (1)...(19): siRNA sense strand
uuauaggacugccaugaaa

SEQ ID NO: 218715 - RNA, 19 nt, Homo sapiens
  misc_RNA (1)...(19): siRNA sense strand
gggugaaguugcauccuuu

SEQ ID NO: 218716 - RNA, 19 nt, Homo sapiens
  misc_RNA (1)...(19): siRNA sense strand
gcaagagcacaacaauuug

SEQ ID NO: 218717 - RNA, 19 nt, Homo sapiens
  misc_RNA (1)...(19): siRNA sense strand
gcacaacaauuuggucaac

SEQ ID NO: 218718 - RNA, 19 nt, Homo sapiens
  misc_RNA (1)...(19): siRNA sense strand
agcaagagcacaacaauuu

SEQ ID NO: 218719 - RNA, 19 nt, Homo sapiens
  misc_RNA (1)...(19): siRNA sense strand
agaagauguucgagacuuu

SEQ ID NO: 218720 - RNA, 19 nt, Homo sapiens
  misc_RNA (1)...(19): siRNA sense strand
gagcaagagcacaacaauu

SEQ ID NO: 218721 - RNA, 19 nt, Homo sapiens
  misc_RNA (1)...(19): siRNA sense strand
ucaagcaaguggcaaguuc

SEQ ID NO: 218722 - RNA, 19 nt, Homo sapiens
  misc_RNA (1)...(19): siRNA sense strand
ccacgagacucaaacaacu

SEQ ID NO: 218723 - RNA, 19 nt, Homo sapiens
  misc_RNA (1)...(19): siRNA sense strand
cagcacaaccucaagcaaa

SEQ ID NO: 218724 - RNA, 19 nt, Homo sapiens
  misc_RNA (1)...(19): siRNA sense strand
gcaaagaguguccaaucau

SEQ ID NO: 218725 - RNA, 19 nt, Homo sapiens
  misc_RNA (1)...(19): siRNA sense strand
auggauauccugcagauua

SEQ ID NO: 218726 - RNA, 19 nt, Homo sapiens
  misc_RNA (1)...(19): siRNA sense strand
uguaacaucugcaaagagu

SEQ ID NO: 218727 - RNA, 19 nt, Homo sapiens
  misc_RNA (1)...(19): siRNA sense strand
guccggagcugcuuccaau

SEQ ID NO: 218728 - RNA, 19 nt, Homo sapiens
  misc_RNA (1)...(19): siRNA sense strand
gcaaguggcaaguucaaca

SEQ ID NO: 218729 - RNA, 19 nt, Homo sapiens
  misc_RNA (1)...(19): siRNA sense strand
gcuuccaauuugcuaauaa

SEQ ID NO: 218730 - RNA, 19 nt, Homo sapiens
  misc_RNA (1)...(19): siRNA sense strand
uggaagacaaguacagaua

SEQ ID NO: 218731 - RNA, 19 nt, Homo sapiens
  misc_RNA (1)...(19): siRNA sense strand
ggauccguguccugucuuu

SEQ ID NO: 218732 - RNA, 19 nt, Homo sapiens
  misc_RNA (1)...(19): siRNA sense strand
gucuuuagcugaccugaau

SEQ ID NO: 218733 - RNA, 19 nt, Homo sapiens
  misc_RNA (1)...(19): siRNA sense strand
gacaaguacagauaccuuu

SEQ ID NO: 218734 - RNA, 19 nt, Homo sapiens
  misc_RNA (1)...(19): siRNA sense strand
ccaagcaucaggccaaaug

SEQ ID NO: 218735 - RNA, 19 nt, Homo sapiens
  misc_RNA (1)...(19): siRNA sense strand
ggagcaagagcacaacaau

SEQ ID NO: 218736 - RNA, 19 nt, Homo sapiens
  misc_RNA (1)...(19): siRNA sense strand
guguaaagcacauuuggaa

SEQ ID NO: 218737 - RNA, 19 nt, Homo sapiens
  misc_RNA (1)...(19): siRNA sense strand
caagacaguugggugaagu

SEQ ID NO: 218738 - RNA, 19 nt, Homo sapiens
  misc_RNA (1)...(19): siRNA sense strand
gaagauguucgagacuuug

SEQ ID NO: 218739 - RNA, 19 nt, Homo sapiens
  misc_RNA (1)...(19): siRNA sense strand
gucagauucucagcuuaua

SEQ ID NO: 218740 - RNA, 19 nt, Homo sapiens
  misc_RNA (1)...(19): siRNA sense strand
uaacaucugcaaagagugu

SEQ ID NO: 218741 - RNA, 19 nt, Homo sapiens
  misc_RNA (1)...(19): siRNA sense strand
cggagcugcuuccaauuug

SEQ ID NO: 218742 - RNA, 19 nt, Homo sapiens
  misc_RNA (1)...(19): siRNA sense strand
gaagacaaguacagauacc

SEQ ID NO: 218743 - RNA, 19 nt, Homo sapiens
  misc_RNA (1)...(19): siRNA sense strand
ccauggauauccugcagau

SEQ ID NO: 218744 - RNA, 19 nt, Homo sapiens
  misc_RNA (1)...(19): siRNA sense strand
ggcaucauuucccugugua

SEQ ID NO: 218745 - RNA, 19 nt, Homo sapiens
  misc_RNA (1)...(19): siRNA sense strand
uggauauccugcagauuau

SEQ ID NO: 218746 - RNA, 19 nt, Homo sapiens
  misc_RNA (1)...(19): siRNA sense strand
ggaagacaaguacagauac

SEQ ID NO: 218747 - RNA, 19 nt, Homo sapiens
  misc_RNA (1)...(19): siRNA sense strand
ugcaaagaguguccaauca

SEQ ID NO: 218748 - RNA, 19 nt, Homo sapiens
  misc_RNA (1)...(19): siRNA sense strand
guggauaugugucugaacu

SEQ ID NO: 218749 - RNA, 19 nt, Homo sapiens
  misc_RNA (1)...(19): siRNA sense strand
acuggcugcugaauguuua

SEQ ID NO: 218750 - RNA, 19 nt, Homo sapiens
  misc_RNA (1)...(19): siRNA sense strand
acuaucccaugguggaaua

SEQ ID NO: 218751 - RNA, 19 nt, Homo sapiens
  misc_RNA (1)...(19): siRNA sense strand
ccggagcugcuuccaauuu

SEQ ID NO: 218752 - RNA, 19 nt, Homo sapiens
  misc_RNA (1)...(19): siRNA sense strand
ccaaauuccaagacaguug

SEQ ID NO: 218753 - RNA, 19 nt, Homo sapiens
  misc_RNA (1)...(19): siRNA sense strand
cagaaacugccaagcauca

SEQ ID NO: 218754 - RNA, 19 nt, Homo sapiens
  misc_RNA (1)...(19): siRNA sense strand
uaugacaucugccaaagcu

SEQ ID NO: 218755 - RNA, 19 nt, Homo sapiens
  misc_RNA (1)...(19): siRNA sense strand
aaugucagauucucagcuu

SEQ ID NO: 218756 - RNA, 19 nt, Homo sapiens
  misc_RNA (1)...(19): siRNA sense strand
ucgagacuuugccaaggua

SEQ ID NO: 218757 - RNA, 19 nt, Homo sapiens
  misc_RNA (1)...(19): siRNA sense strand
gcaaaaggccauaaaaugc

SEQ ID NO: 218758 - RNA, 19 nt, Homo sapiens
  misc_RNA (1)...(19): siRNA sense strand
cugcaugauucuauccaaa

SEQ ID NO: 218759 - RNA, 19 nt, Homo sapiens
  misc_RNA (1)...(19): siRNA sense strand
uaaagcacauuuggaagac

SEQ ID NO: 218760 - RNA, 19 nt, Homo sapiens
  misc_RNA (1)...(19): siRNA sense strand
acaggagucuaaagcacuu

SEQ ID NO: 218761 - RNA, 19 nt, Homo sapiens
  misc_RNA (1)...(19): siRNA sense strand
acagauaccuuuucaagca

SEQ ID NO: 218762 - RNA, 19 nt, Homo sapiens
  misc_RNA (1)...(19): siRNA sense strand
aagcacauuuggaagacaa

SEQ ID NO: 218763 - RNA, 19 nt, Homo sapiens
  misc_RNA (1)...(19): siRNA sense strand
gcuaauaauaagccagaga

SEQ ID NO: 218764 - RNA, 19 nt, Homo sapiens
  misc_RNA (1)...(19): siRNA sense strand
caagagcacaacaauuugg

SEQ ID NO: 218765 - RNA, 19 nt, Homo sapiens
  misc_RNA (1)...(19): siRNA sense strand
ccugucagcugcaugugau

SEQ ID NO: 218766 - RNA, 19 nt, Homo sapiens
  misc_RNA (1)...(19): siRNA sense strand
gcugcugaauguuuaugau

SEQ ID NO: 218767 - RNA, 19 nt, Homo sapiens
  misc_RNA (1)...(19): siRNA sense strand
acagagcucuaccagucuu

SEQ ID NO: 218768 - RNA, 19 nt, Homo sapiens
  misc_RNA (1)...(19): siRNA sense strand
acaguugggugaaguugca

SEQ ID NO: 218769 - RNA, 19 nt, Homo sapiens
  misc_RNA (1)...(19): siRNA sense strand
guuugaccacuauuuauga

SEQ ID NO: 218770 - RNA, 19 nt, Homo sapiens
  misc_RNA (1)...(19): siRNA sense strand
gcuuauaggacugccauga

SEQ ID NO: 218771 - RNA, 19 nt, Homo sapiens
  misc_RNA (1)...(19): siRNA sense strand
caucaggccaaauguaaca

SEQ ID NO: 218772 - RNA, 19 nt, Homo sapiens
  misc_RNA (1)...(19): siRNA sense strand
gauucuauccaaauuccaa

SEQ ID NO: 218773 - RNA, 19 nt, Homo sapiens
  misc_RNA (1)...(19): siRNA sense strand
ggcaaguucaacaggauuu

SEQ ID NO: 218774 - RNA, 19 nt, Homo sapiens
  misc_RNA (1)...(19): siRNA sense strand
gaacuggcugcugaauguu

SEQ ID NO: 218775 - RNA, 19 nt, Homo sapiens
  misc_RNA (1)...(19): siRNA sense strand
cugcugaauguuuaugaua

SEQ ID NO: 218776 - RNA, 19 nt, Homo sapiens
  misc_RNA (1)...(19): siRNA sense strand
aagcaucaggccaaaugua

SEQ ID NO: 218777 - RNA, 19 nt, Homo sapiens
  misc_RNA (1)...(19): siRNA sense strand
uggcaucauuucccugugu

SEQ ID NO: 218778 - RNA, 19 nt, Homo sapiens
  misc_RNA (1)...(19): siRNA sense strand
ccaugaaacuccgaagacu

SEQ ID NO: 218779 - RNA, 19 nt, Homo sapiens
  misc_RNA (1)...(19): siRNA sense strand
auaauaagccagagaucga

SEQ ID NO: 218780 - RNA, 19 nt, Homo sapiens
  misc_RNA (1)...(19): siRNA sense strand
cuaauaauaagccagagau

SEQ ID NO: 218781 - RNA, 19 nt, Homo sapiens
  misc_RNA (1)...(19): siRNA sense strand
ugggugaaguugcauccuu

SEQ ID NO: 218782 - RNA, 19 nt, Homo sapiens
  misc_RNA (1)...(19): siRNA sense strand
caucauuucccuguguaaa

SEQ ID NO: 218783 - RNA, 19 nt, Homo sapiens
  misc_RNA (1)...(19): siRNA sense strand
gcguggauaugugucugaa

SEQ ID NO: 218784 - RNA, 19 nt, Homo sapiens
  misc_RNA (1)...(19): siRNA sense strand
gcacuaucccaugguggaa

SEQ ID NO: 218785 - RNA, 19 nt, Homo sapiens
  misc_RNA (1)...(19): siRNA sense strand
gagccugucagcugcaugu

SEQ ID NO: 218786 - RNA, 19 nt, Homo sapiens
  misc_RNA (1)...(19): siRNA sense strand
guacagauaccuuuucaag

SEQ ID NO: 218787 - RNA, 19 nt, Homo sapiens
  misc_RNA (1)...(19): siRNA sense strand
gucccucucugcguggaua

SEQ ID NO: 218788 - RNA, 19 nt, Homo sapiens
  misc_RNA (1)...(19): siRNA sense strand
ggagcugcuuccaauuugc

SEQ ID NO: 218789 - RNA, 19 nt, Homo sapiens
  misc_RNA (1)...(19): siRNA sense strand
uuagcugaccugaauaaug

SEQ ID NO: 218790 - RNA, 19 nt, Homo sapiens
  misc_RNA (1)...(19): siRNA sense strand
guggcaaguucaacaggau

SEQ ID NO: 218791 - RNA, 19 nt, Homo sapiens
  misc_RNA (1)...(19): siRNA sense strand
acaacaauuuggucaacgu

SEQ ID NO: 218792 - RNA, 19 nt, Homo sapiens
  misc_RNA (1)...(19): siRNA sense strand
gacuacaucaggagaagau

SEQ ID NO: 218793 - RNA, 19 nt, Homo sapiens
  misc_RNA (1)...(19): siRNA sense strand
uaauaagccagagaucgaa

SEQ ID NO: 218794 - RNA, 19 nt, Homo sapiens
  misc_RNA (1)...(19): siRNA sense strand
ugucagauucucagcuuau

SEQ ID NO: 218795 - RNA, 19 nt, Homo sapiens
  misc_RNA (1)...(19): siRNA sense strand
ggauauccugcagauuauu

SEQ ID NO: 218796 - RNA, 19 nt, Homo sapiens
  misc_RNA (1)...(19): siRNA sense strand
agcaucaggccaaauguaa

SEQ ID NO: 218797 - RNA, 19 nt, Homo sapiens
  misc_RNA (1)...(19): siRNA sense strand
gcccuuugcuuggaucucu

SEQ ID NO: 218798 - RNA, 19 nt, Homo sapiens
  misc_RNA (1)...(19): siRNA sense strand
gcugaauguuuaugauacg

SEQ ID NO: 218799 - RNA, 19 nt, Homo sapiens
  misc_RNA (1)...(19): siRNA sense strand
agacuuugccaagguacua

SEQ ID NO: 218800 - RNA, 19 nt, Homo sapiens
  misc_RNA (1)...(19): siRNA sense strand
caagcaaguggcaaguuca

SEQ ID NO: 218801 - RNA, 19 nt, Homo sapiens
  misc_RNA (1)...(19): siRNA sense strand
agacaaguacagauaccuu

SEQ ID NO: 218802 - RNA, 19 nt, Homo sapiens
  misc_RNA (1)...(19): siRNA sense strand
gcaucauuucccuguguaa

SEQ ID NO: 218803 - RNA, 19 nt, Homo sapiens
  misc_RNA (1)...(19): siRNA sense strand
cugcaaagaguguccaauc

SEQ ID NO: 218804 - RNA, 19 nt, Homo sapiens
  misc_RNA (1)...(19): siRNA sense strand
cuuauaggacugccaugaa

SEQ ID NO: 218805 - RNA, 19 nt, Homo sapiens
  misc_RNA (1)...(19): siRNA sense strand
caaagaguguccaaucauu

SEQ ID NO: 218806 - RNA, 19 nt, Homo sapiens
  misc_RNA (1)...(19): siRNA sense strand
uagcugaccugaauaaugu

SEQ ID NO: 218807 - RNA, 19 nt, Homo sapiens
  misc_RNA (1)...(19): siRNA sense strand
gcaugauucuauccaaauu

SEQ ID NO: 218808 - RNA, 19 nt, Homo sapiens
  misc_RNA (1)...(19): siRNA sense strand
ugaacuggcugcugaaugu

SEQ ID NO: 218809 - RNA, 19 nt, Homo sapiens
  misc_RNA (1)...(19): siRNA sense strand
gauauccugcagauuauua

SEQ ID NO: 218810 - RNA, 19 nt, Homo sapiens
  misc_RNA (1)...(19): siRNA sense strand
gagaagauguucgagacuu

SEQ ID NO: 218811 - RNA, 19 nt, Homo sapiens
  misc_RNA (1)...(19): siRNA sense strand
gcacuuuaauuaugacauc

SEQ ID NO: 218812 - RNA, 19 nt, Homo sapiens
  misc_RNA (1)...(19): siRNA sense strand
guaaagcacauuuggaaga

SEQ ID NO: 218813 - RNA, 19 nt, Homo sapiens
  misc_RNA (1)...(19): siRNA sense strand
gaauauugcacuccgacua

SEQ ID NO: 218814 - RNA, 19 nt, Homo sapiens
  misc_RNA (1)...(19): siRNA sense strand
uuauaggacugccaugaaa

SEQ ID NO: 218815 - RNA, 19 nt, Homo sapiens
  misc_RNA (1)...(19): siRNA sense strand
gggugaaguugcauccuuu

SEQ ID NO: 218816 - RNA, 19 nt, Homo sapiens
  misc_RNA (1)...(19): siRNA sense strand
gcaagagcacaacaauuug

SEQ ID NO: 218817 - RNA, 19 nt, Homo sapiens
  misc_RNA (1)...(19): siRNA sense strand
gcacaacaauuuggucaac

SEQ ID NO: 218818 - RNA, 19 nt, Homo sapiens
  misc_RNA (1)...(19): siRNA sense strand
agcaagagcacaacaauuu

SEQ ID NO: 218819 - RNA, 19 nt, Homo sapiens
  misc_RNA (1)...(19): siRNA sense strand
agaagauguucgagacuuu

SEQ ID NO: 218820 - RNA, 19 nt, Homo sapiens
  misc_RNA (1)...(19): siRNA sense strand
gagcaagagcacaacaauu

SEQ ID NO: 218821 - RNA, 19 nt, Homo sapiens
  misc_RNA (1)...(19): siRNA sense strand
ucaagcaaguggcaaguuc

SEQ ID NO: 218822 - RNA, 19 nt, Homo sapiens
  misc_RNA (1)...(19): siRNA sense strand
ccacgagacucaaacaacu

SEQ ID NO: 218823 - RNA, 19 nt, Homo sapiens
  misc_RNA (1)...(19): siRNA sense strand
cagcacaaccucaagcaaa

SEQ ID NO: 218824 - RNA, 19 nt, Homo sapiens
  misc_RNA (1)...(19): siRNA sense strand
gcaaagaguguccaaucau

SEQ ID NO: 218825 - RNA, 19 nt, Homo sapiens
  misc_RNA (1)...(19): siRNA sense strand
auggauauccugcagauua

SEQ ID NO: 218826 - RNA, 19 nt, Homo sapiens
  misc_RNA (1)...(19): siRNA sense strand
uguaacaucugcaaagagu

SEQ ID NO: 218827 - RNA, 19 nt, Homo sapiens
  misc_RNA (1)...(19): siRNA sense strand
guccggagcugcuuccaau

SEQ ID NO: 218828 - RNA, 19 nt, Homo sapiens
  misc_RNA (1)...(19): siRNA sense strand
gcaaguggcaaguucaaca

SEQ ID NO: 218829 - RNA, 19 nt, Homo sapiens
  misc_RNA (1)...(19): siRNA sense strand
gcuuccaauuugcuaauaa

SEQ ID NO: 218830 - RNA, 19 nt, Homo sapiens
  misc_RNA (1)...(19): siRNA sense strand
uggaagacaaguacagaua

SEQ ID NO: 218831 - RNA, 19 nt, Homo sapiens
  misc_RNA (1)...(19): siRNA sense strand
ggauccguguccugucuuu

SEQ ID NO: 218832 - RNA, 19 nt, Homo sapiens
  misc_RNA (1)...(19): siRNA sense strand
gucuuuagcugaccugaau

SEQ ID NO: 218833 - RNA, 19 nt, Homo sapiens
  misc_RNA (1)...(19): siRNA sense strand
gacaaguacagauaccuuu

SEQ ID NO: 218834 - RNA, 19 nt, Homo sapiens
  misc_RNA (1)...(19): siRNA sense strand
ccaagcaucaggccaaaug

SEQ ID NO: 218835 - RNA, 19 nt, Homo sapiens
  misc_RNA (1)...(19): siRNA sense strand
ggagcaagagcacaacaau

SEQ ID NO: 218836 - RNA, 19 nt, Homo sapiens
  misc_RNA (1)...(19): siRNA sense strand
guguaaagcacauuuggaa

SEQ ID NO: 218837 - RNA, 19 nt, Homo sapiens
  misc_RNA (1)...(19): siRNA sense strand
caagacaguugggugaagu

SEQ ID NO: 218838 - RNA, 19 nt, Homo sapiens
  misc_RNA (1)...(19): siRNA sense strand
gaagauguucgagacuuug

SEQ ID NO: 218839 - RNA, 19 nt, Homo sapiens
  misc_RNA (1)...(19): siRNA sense strand
gucagauucucagcuuaua

SEQ ID NO: 218840 - RNA, 19 nt, Homo sapiens
  misc_RNA (1)...(19): siRNA sense strand
uaacaucugcaaagagugu

SEQ ID NO: 218841 - RNA, 19 nt, Homo sapiens
  misc_RNA (1)...(19): siRNA sense strand
cggagcugcuuccaauuug

SEQ ID NO: 218842 - RNA, 19 nt, Homo sapiens
  misc_RNA (1)...(19): siRNA sense strand
gaagacaaguacagauacc

SEQ ID NO: 218843 - RNA, 19 nt, Homo sapiens
  misc_RNA (1)...(19): siRNA sense strand
ccauggauauccugcagau

SEQ ID NO: 218844 - RNA, 19 nt, Homo sapiens
  misc_RNA (1)...(19): siRNA sense strand
ggcaucauuucccugugua

SEQ ID NO: 218845 - RNA, 19 nt, Homo sapiens
  misc_RNA (1)...(19): siRNA sense strand
uggauauccugcagauuau

SEQ ID NO: 218846 - RNA, 19 nt, Homo sapiens
  misc_RNA (1)...(19): siRNA sense strand
ggaagacaaguacagauac

SEQ ID NO: 218847 - RNA, 19 nt, Homo sapiens
  misc_RNA (1)...(19): siRNA sense strand
ugcaaagaguguccaauca

SEQ ID NO: 218848 - RNA, 19 nt, Homo sapiens
  misc_RNA (1)...(19): siRNA sense strand
guggauaugugucugaacu

SEQ ID NO: 218849 - RNA, 19 nt, Homo sapiens
  misc_RNA (1)...(19): siRNA sense strand
acuggcugcugaauguuua

SEQ ID NO: 218850 - RNA, 19 nt, Homo sapiens
  misc_RNA (1)...(19): siRNA sense strand
acuaucccaugguggaaua

SEQ ID NO: 218851 - RNA, 19 nt, Homo sapiens
  misc_RNA (1)...(19): siRNA sense strand
ccggagcugcuuccaauuu

SEQ ID NO: 218852 - RNA, 19 nt, Homo sapiens
  misc_RNA (1)...(19): siRNA sense strand
ccaaauuccaagacaguug

SEQ ID NO: 218853 - RNA, 19 nt, Homo sapiens
  misc_RNA (1)...(19): siRNA sense strand
cagaaacugccaagcauca

SEQ ID NO: 218854 - RNA, 19 nt, Homo sapiens
  misc_RNA (1)...(19): siRNA sense strand
uaugacaucugccaaagcu

SEQ ID NO: 218855 - RNA, 19 nt, Homo sapiens
  misc_RNA (1)...(19): siRNA sense strand
aaugucagauucucagcuu

SEQ ID NO: 218856 - RNA, 19 nt, Homo sapiens
  misc_RNA (1)...(19): siRNA sense strand
ucgagacuuugccaaggua

SEQ ID NO: 218857 - RNA, 19 nt, Homo sapiens
  misc_RNA (1)...(19): siRNA sense strand
gcaaaaggccauaaaaugc

SEQ ID NO: 218858 - RNA, 19 nt, Homo sapiens
  misc_RNA (1)...(19): siRNA sense strand
cugcaugauucuauccaaa

SEQ ID NO: 218859 - RNA, 19 nt, Homo sapiens
  misc_RNA (1)...(19): siRNA sense strand
uaaagcacauuuggaagac

SEQ ID NO: 218860 - RNA, 19 nt, Homo sapiens
  misc_RNA (1)...(19): siRNA sense strand
acaggagucuaaagcacuu

SEQ ID NO: 218861 - RNA, 19 nt, Homo sapiens
  misc_RNA (1)...(19): siRNA sense strand
acagauaccuuuucaagca

SEQ ID NO: 218862 - RNA, 19 nt, Homo sapiens
  misc_RNA (1)...(19): siRNA sense strand
aagcacauuuggaagacaa

SEQ ID NO: 218863 - RNA, 19 nt, Homo sapiens
  misc_RNA (1)...(19): siRNA sense strand
gcuaauaauaagccagaga

SEQ ID NO: 218864 - RNA, 19 nt, Homo sapiens
  misc_RNA (1)...(19): siRNA sense strand
caagagcacaacaauuugg

SEQ ID NO: 218865 - RNA, 19 nt, Homo sapiens
  misc_RNA (1)...(19): siRNA sense strand
ccugucagcugcaugugau

SEQ ID NO: 218866 - RNA, 19 nt, Homo sapiens
  misc_RNA (1)...(19): siRNA sense strand
gcugcugaauguuuaugau

SEQ ID NO: 218867 - RNA, 19 nt, Homo sapiens
  misc_RNA (1)...(19): siRNA sense strand
acagagcucuaccagucuu

SEQ ID NO: 218868 - RNA, 19 nt, Homo sapiens
  misc_RNA (1)...(19): siRNA sense strand
acaguugggugaaguugca

SEQ ID NO: 218869 - RNA, 19 nt, Homo sapiens
  misc_RNA (1)...(19): siRNA sense strand
guuugaccacuauuuauga

SEQ ID NO: 218870 - RNA, 19 nt, Homo sapiens
  misc_RNA (1)...(19): siRNA sense strand
gcuuauaggacugccauga

SEQ ID NO: 218871 - RNA, 19 nt, Homo sapiens
  misc_RNA (1)...(19): siRNA sense strand
caucaggccaaauguaaca

SEQ ID NO: 218872 - RNA, 19 nt, Homo sapiens
  misc_RNA (1)...(19): siRNA sense strand
gauucuauccaaauuccaa

SEQ ID NO: 218873 - RNA, 19 nt, Homo sapiens
  misc_RNA (1)...(19): siRNA sense strand
ggcaaguucaacaggauuu

SEQ ID NO: 218874 - RNA, 19 nt, Homo sapiens
  misc_RNA (1)...(19): siRNA sense strand
gaacuggcugcugaauguu

SEQ ID NO: 218875 - RNA, 19 nt, Homo sapiens
  misc_RNA (1)...(19): siRNA sense strand
cugcugaauguuuaugaua

SEQ ID NO: 218876 - RNA, 19 nt, Homo sapiens
  misc_RNA (1)...(19): siRNA sense strand
aagcaucaggccaaaugua

SEQ ID NO: 218877 - RNA, 19 nt, Homo sapiens
  misc_RNA (1)...(19): siRNA sense strand
uggcaucauuucccugugu

SEQ ID NO: 218878 - RNA, 19 nt, Homo sapiens
  misc_RNA (1)...(19): siRNA sense strand
ccaugaaacuccgaagacu

SEQ ID NO: 218879 - RNA, 19 nt, Homo sapiens
  misc_RNA (1)...(19): siRNA sense strand
auaauaagccagagaucga

SEQ ID NO: 218880 - RNA, 19 nt, Homo sapiens
  misc_RNA (1)...(19): siRNA sense strand
cuaauaauaagccagagau

SEQ ID NO: 218881 - RNA, 19 nt, Homo sapiens
  misc_RNA (1)...(19): siRNA sense strand
ugggugaaguugcauccuu

SEQ ID NO: 218882 - RNA, 19 nt, Homo sapiens
  misc_RNA (1)...(19): siRNA sense strand
caucauuucccuguguaaa

SEQ ID NO: 218883 - RNA, 19 nt, Homo sapiens
  misc_RNA (1)...(19): siRNA sense strand
gcguggauaugugucugaa

SEQ ID NO: 218884 - RNA, 19 nt, Homo sapiens
  misc_RNA (1)...(19): siRNA sense strand
gcacuaucccaugguggaa

SEQ ID NO: 218885 - RNA, 19 nt, Homo sapiens
  misc_RNA (1)...(19): siRNA sense strand
gagccugucagcugcaugu

SEQ ID NO: 218886 - RNA, 19 nt, Homo sapiens
  misc_RNA (1)...(19): siRNA sense strand
guacagauaccuuuucaag

SEQ ID NO: 218887 - RNA, 19 nt, Homo sapiens
  misc_RNA (1)...(19): siRNA sense strand
gucccucucugcguggaua

SEQ ID NO: 218888 - RNA, 19 nt, Homo sapiens
  misc_RNA (1)...(19): siRNA sense strand
ggagcugcuuccaauuugc

SEQ ID NO: 218889 - RNA, 19 nt, Homo sapiens
  misc_RNA (1)...(19): siRNA sense strand
uuagcugaccugaauaaug

SEQ ID NO: 218890 - RNA, 19 nt, Homo sapiens
  misc_RNA (1)...(19): siRNA sense strand
guggcaaguucaacaggau

SEQ ID NO: 218891 - RNA, 19 nt, Homo sapiens
  misc_RNA (1)...(19): siRNA sense strand
acaacaauuuggucaacgu

SEQ ID NO: 218892 - RNA, 19 nt, Homo sapiens
  misc_RNA (1)...(19): siRNA sense strand
gacuacaucaggagaagau

SEQ ID NO: 218893 - RNA, 19 nt, Homo sapiens
  misc_RNA (1)...(19): siRNA sense strand
uaauaagccagagaucgaa

SEQ ID NO: 218894 - RNA, 19 nt, Homo sapiens
  misc_RNA (1)...(19): siRNA sense strand
ugucagauucucagcuuau

SEQ ID NO: 218895 - RNA, 19 nt, Homo sapiens
  misc_RNA (1)...(19): siRNA sense strand
ggauauccugcagauuauu

SEQ ID NO: 218896 - RNA, 19 nt, Homo sapiens
  misc_RNA (1)...(19): siRNA sense strand
agcaucaggccaaauguaa

SEQ ID NO: 218897 - RNA, 19 nt, Homo sapiens
  misc_RNA (1)...(19): siRNA sense strand
gcccuuugcuuggaucucu

SEQ ID NO: 218898 - RNA, 19 nt, Homo sapiens
  misc_RNA (1)...(19): siRNA sense strand
gcugaauguuuaugauacg

SEQ ID NO: 218899 - RNA, 19 nt, Homo sapiens
  misc_RNA (1)...(19): siRNA sense strand
agacuuugccaagguacua

SEQ ID NO: 218900 - RNA, 19 nt, Homo sapiens
  misc_RNA (1)...(19): siRNA sense strand
caagcaaguggcaaguuca

SEQ ID NO: 218901 - RNA, 19 nt, Homo sapiens
  misc_RNA (1)...(19): siRNA sense strand
agacaaguacagauaccuu

SEQ ID NO: 218902 - RNA, 19 nt, Homo sapiens
  misc_RNA (1)...(19): siRNA sense strand
gcaucauuucccuguguaa

SEQ ID NO: 218903 - RNA, 19 nt, Homo sapiens
  misc_RNA (1)...(19): siRNA sense strand
cugcaaagaguguccaauc

SEQ ID NO: 218904 - RNA, 19 nt, Homo sapiens
  misc_RNA (1)...(19): siRNA sense strand
cuuauaggacugccaugaa

SEQ ID NO: 218905 - RNA, 19 nt, Homo sapiens
  misc_RNA (1)...(19): siRNA sense strand
caaagaguguccaaucauu

SEQ ID NO: 218906 - RNA, 19 nt, Homo sapiens
  misc_RNA (1)...(19): siRNA sense strand
uagcugaccugaauaaugu

SEQ ID NO: 218907 - RNA, 19 nt, Homo sapiens
  misc_RNA (1)...(19): siRNA sense strand
gcaugauucuauccaaauu

SEQ ID NO: 218908 - RNA, 19 nt, Homo sapiens
  misc_RNA (1)...(19): siRNA sense strand
ugaacuggcugcugaaugu

SEQ ID NO: 218909 - RNA, 19 nt, Homo sapiens
  misc_RNA (1)...(19): siRNA sense strand
gauauccugcagauuauua

SEQ ID NO: 218910 - RNA, 19 nt, Homo sapiens
  misc_RNA (1)...(19): siRNA sense strand
gagaagauguucgagacuu

SEQ ID NO: 218911 - RNA, 19 nt, Homo sapiens
  misc_RNA (1)...(19): siRNA sense strand
gcacuuuaauuaugacauc

SEQ ID NO: 218912 - RNA, 19 nt, Homo sapiens
  misc_RNA (1)...(19): siRNA sense strand
guaaagcacauuuggaaga

SEQ ID NO: 218913 - RNA, 19 nt, Homo sapiens
  misc_RNA (1)...(19): siRNA sense strand
gaauauugcacuccgacua

SEQ ID NO: 218914 - RNA, 19 nt, Homo sapiens
  misc_RNA (1)...(19): siRNA sense strand
uuauaggacugccaugaaa

SEQ ID NO: 218915 - RNA, 19 nt, Homo sapiens
  misc_RNA (1)...(19): siRNA sense strand
gggugaaguugcauccuuu

SEQ ID NO: 218916 - RNA, 19 nt, Homo sapiens
  misc_RNA (1)...(19): siRNA sense strand
gcaagagcacaacaauuug

SEQ ID NO: 218917 - RNA, 19 nt, Homo sapiens
  misc_RNA (1)...(19): siRNA sense strand
gcacaacaauuuggucaac

SEQ ID NO: 218918 - RNA, 19 nt, Homo sapiens
  misc_RNA (1)...(19): siRNA sense strand
agcaagagcacaacaauuu

SEQ ID NO: 218919 - RNA, 19 nt, Homo sapiens
  misc_RNA (1)...(19): siRNA sense strand
agaagauguucgagacuuu

SEQ ID NO: 218920 - RNA, 19 nt, Homo sapiens
  misc_RNA (1)...(19): siRNA sense strand
gagcaagagcacaacaauu

SEQ ID NO: 218921 - RNA, 19 nt, Homo sapiens
  misc_RNA (1)...(19): siRNA sense strand
ucaagcaaguggcaaguuc

SEQ ID NO: 218922 - RNA, 19 nt, Homo sapiens
  misc_RNA (1)...(19): siRNA sense strand
ccacgagacucaaacaacu

SEQ ID NO: 218923 - RNA, 19 nt, Homo sapiens
  misc_RNA (1)...(19): siRNA sense strand
cagcacaaccucaagcaaa

SEQ ID NO: 218924 - RNA, 19 nt, Homo sapiens
  misc_RNA (1)...(19): siRNA sense strand
gcaaagaguguccaaucau

SEQ ID NO: 218925 - RNA, 19 nt, Homo sapiens
  misc_RNA (1)...(19): siRNA sense strand
auggauauccugcagauua

SEQ ID NO: 218926 - RNA, 19 nt, Homo sapiens
  misc_RNA (1)...(19): siRNA sense strand
uguaacaucugcaaagagu

SEQ ID NO: 218927 - RNA, 19 nt, Homo sapiens
  misc_RNA (1)...(19): siRNA sense strand
guccggagcugcuuccaau

SEQ ID NO: 218928 - RNA, 19 nt, Homo sapiens
  misc_RNA (1)...(19): siRNA sense strand
gcaaguggcaaguucaaca

SEQ ID NO: 218929 - RNA, 19 nt, Homo sapiens
  misc_RNA (1)...(19): siRNA sense strand
gcuuccaauuugcuaauaa

SEQ ID NO: 218930 - RNA, 19 nt, Homo sapiens
  misc_RNA (1)...(19): siRNA sense strand
uggaagacaaguacagaua

SEQ ID NO: 218931 - RNA, 19 nt, Homo sapiens
  misc_RNA (1)...(19): siRNA sense strand
ggauccguguccugucuuu

SEQ ID NO: 218932 - RNA, 19 nt, Homo sapiens
  misc_RNA (1)...(19): siRNA sense strand
gucuuuagcugaccugaau

SEQ ID NO: 218933 - RNA, 19 nt, Homo sapiens
  misc_RNA (1)...(19): siRNA sense strand
gacaaguacagauaccuuu

SEQ ID NO: 218934 - RNA, 19 nt, Homo sapiens
  misc_RNA (1)...(19): siRNA sense strand
ccaagcaucaggccaaaug

SEQ ID NO: 218935 - RNA, 19 nt, Homo sapiens
  misc_RNA (1)...(19): siRNA sense strand
ggagcaagagcacaacaau

SEQ ID NO: 218936 - RNA, 19 nt, Homo sapiens
  misc_RNA (1)...(19): siRNA sense strand
guguaaagcacauuuggaa

SEQ ID NO: 218937 - RNA, 19 nt, Homo sapiens
  misc_RNA (1)...(19): siRNA sense strand
caagacaguugggugaagu

SEQ ID NO: 218938 - RNA, 19 nt, Homo sapiens
  misc_RNA (1)...(19): siRNA sense strand
gaagauguucgagacuuug

SEQ ID NO: 218939 - RNA, 19 nt, Homo sapiens
  misc_RNA (1)...(19): siRNA sense strand
gucagauucucagcuuaua

SEQ ID NO: 218940 - RNA, 19 nt, Homo sapiens
  misc_RNA (1)...(19): siRNA sense strand
uaacaucugcaaagagugu

SEQ ID NO: 218941 - RNA, 19 nt, Homo sapiens
  misc_RNA (1)...(19): siRNA sense strand
cggagcugcuuccaauuug

SEQ ID NO: 218942 - RNA, 19 nt, Homo sapiens
  misc_RNA (1)...(19): siRNA sense strand
gaagacaaguacagauacc

SEQ ID NO: 218943 - RNA, 19 nt, Homo sapiens
  misc_RNA (1)...(19): siRNA sense strand
ccauggauauccugcagau

SEQ ID NO: 218944 - RNA, 19 nt, Homo sapiens
  misc_RNA (1)...(19): siRNA sense strand
ggcaucauuucccugugua

SEQ ID NO: 218945 - RNA, 19 nt, Homo sapiens
  misc_RNA (1)...(19): siRNA sense strand
uggauauccugcagauuau

SEQ ID NO: 218946 - RNA, 19 nt, Homo sapiens
  misc_RNA (1)...(19): siRNA sense strand
ggaagacaaguacagauac

SEQ ID NO: 218947 - RNA, 19 nt, Homo sapiens
  misc_RNA (1)...(19): siRNA sense strand
ugcaaagaguguccaauca

SEQ ID NO: 218948 - RNA, 19 nt, Homo sapiens
  misc_RNA (1)...(19): siRNA sense strand
guggauaugugucugaacu

SEQ ID NO: 218949 - RNA, 19 nt, Homo sapiens
  misc_RNA (1)...(19): siRNA sense strand
acuggcugcugaauguuua

SEQ ID NO: 218950 - RNA, 19 nt, Homo sapiens
  misc_RNA (1)...(19): siRNA sense strand
acuaucccaugguggaaua

SEQ ID NO: 218951 - RNA, 19 nt, Homo sapiens
  misc_RNA (1)...(19): siRNA sense strand
ccggagcugcuuccaauuu

SEQ ID NO: 218952 - RNA, 19 nt, Homo sapiens
  misc_RNA (1)...(19): siRNA sense strand
ccaaauuccaagacaguug

SEQ ID NO: 218953 - RNA, 19 nt, Homo sapiens
  misc_RNA (1)...(19): siRNA sense strand
cagaaacugccaagcauca

SEQ ID NO: 218954 - RNA, 19 nt, Homo sapiens
  misc_RNA (1)...(19): siRNA sense strand
uaugacaucugccaaagcu

SEQ ID NO: 218955 - RNA, 19 nt, Homo sapiens
  misc_RNA (1)...(19): siRNA sense strand
aaugucagauucucagcuu

SEQ ID NO: 218956 - RNA, 19 nt, Homo sapiens
  misc_RNA (1)...(19): siRNA sense strand
ucgagacuuugccaaggua

SEQ ID NO: 218957 - RNA, 19 nt, Homo sapiens
  misc_RNA (1)...(19): siRNA sense strand
gcaaaaggccauaaaaugc

SEQ ID NO: 218958 - RNA, 19 nt, Homo sapiens
  misc_RNA (1)...(19): siRNA sense strand
cugcaugauucuauccaaa

SEQ ID NO: 218959 - RNA, 19 nt, Homo sapiens
  misc_RNA (1)...(19): siRNA sense strand
uaaagcacauuuggaagac

SEQ ID NO: 218960 - RNA, 19 nt, Homo sapiens
  misc_RNA (1)...(19): siRNA sense strand
acaggagucuaaagcacuu

SEQ ID NO: 218961 - RNA, 19 nt, Homo sapiens
  misc_RNA (1)...(19): siRNA sense strand
acagauaccuuuucaagca

SEQ ID NO: 218962 - RNA, 19 nt, Homo sapiens
  misc_RNA (1)...(19): siRNA sense strand
aagcacauuuggaagacaa

SEQ ID NO: 218963 - RNA, 19 nt, Homo sapiens
  misc_RNA (1)...(19): siRNA sense strand
gcuaauaauaagccagaga

SEQ ID NO: 218964 - RNA, 19 nt, Homo sapiens
  misc_RNA (1)...(19): siRNA sense strand
caagagcacaacaauuugg

SEQ ID NO: 218965 - RNA, 19 nt, Homo sapiens
  misc_RNA (1)...(19): siRNA sense strand
ccugucagcugcaugugau

SEQ ID NO: 218966 - RNA, 19 nt, Homo sapiens
  misc_RNA (1)...(19): siRNA sense strand
gcugcugaauguuuaugau

SEQ ID NO: 218967 - RNA, 19 nt, Homo sapiens
  misc_RNA (1)...(19): siRNA sense strand
acagagcucuaccagucuu

SEQ ID NO: 218968 - RNA, 19 nt, Homo sapiens
  misc_RNA (1)...(19): siRNA sense strand
acaguugggugaaguugca

SEQ ID NO: 218969 - RNA, 19 nt, Homo sapiens
  misc_RNA (1)...(19): siRNA sense strand
guuugaccacuauuuauga

SEQ ID NO: 218970 - RNA, 19 nt, Homo sapiens
  misc_RNA (1)...(19): siRNA sense strand
gcuuauaggacugccauga

SEQ ID NO: 218971 - RNA, 19 nt, Homo sapiens
  misc_RNA (1)...(19): siRNA sense strand
caucaggccaaauguaaca

SEQ ID NO: 218972 - RNA, 19 nt, Homo sapiens
  misc_RNA (1)...(19): siRNA sense strand
gauucuauccaaauuccaa

SEQ ID NO: 218973 - RNA, 19 nt, Homo sapiens
  misc_RNA (1)...(19): siRNA sense strand
ggcaaguucaacaggauuu

SEQ ID NO: 218974 - RNA, 19 nt, Homo sapiens
  misc_RNA (1)...(19): siRNA sense strand
gaacuggcugcugaauguu

SEQ ID NO: 218975 - RNA, 19 nt, Homo sapiens
  misc_RNA (1)...(19): siRNA sense strand
cugcugaauguuuaugaua

SEQ ID NO: 218976 - RNA, 19 nt, Homo sapiens
  misc_RNA (1)...(19): siRNA sense strand
aagcaucaggccaaaugua

SEQ ID NO: 218977 - RNA, 19 nt, Homo sapiens
  misc_RNA (1)...(19): siRNA sense strand
uggcaucauuucccugugu

SEQ ID NO: 218978 - RNA, 19 nt, Homo sapiens
  misc_RNA (1)...(19): siRNA sense strand
ccaugaaacuccgaagacu

SEQ ID NO: 218979 - RNA, 19 nt, Homo sapiens
  misc_RNA (1)...(19): siRNA sense strand
auaauaagccagagaucga

SEQ ID NO: 218980 - RNA, 19 nt, Homo sapiens
  misc_RNA (1)...(19): siRNA sense strand
cuaauaauaagccagagau

SEQ ID NO: 218981 - RNA, 19 nt, Homo sapiens
  misc_RNA (1)...(19): siRNA sense strand
ugggugaaguugcauccuu

SEQ ID NO: 218982 - RNA, 19 nt, Homo sapiens
  misc_RNA (1)...(19): siRNA sense strand
caucauuucccuguguaaa

SEQ ID NO: 218983 - RNA, 19 nt, Homo sapiens
  misc_RNA (1)...(19): siRNA sense strand
gcguggauaugugucugaa

SEQ ID NO: 218984 - RNA, 19 nt, Homo sapiens
  misc_RNA (1)...(19): siRNA sense strand
gcacuaucccaugguggaa

SEQ ID NO: 218985 - RNA, 19 nt, Homo sapiens
  misc_RNA (1)...(19): siRNA sense strand
gagccugucagcugcaugu

SEQ ID NO: 218986 - RNA, 19 nt, Homo sapiens
  misc_RNA (1)...(19): siRNA sense strand
guacagauaccuuuucaag

SEQ ID NO: 218987 - RNA, 19 nt, Homo sapiens
  misc_RNA (1)...(19): siRNA sense strand
gucccucucugcguggaua

SEQ ID NO: 218988 - RNA, 19 nt, Homo sapiens
  misc_RNA (1)...(19): siRNA sense strand
ggagcugcuuccaauuugc

SEQ ID NO: 218989 - RNA, 19 nt, Homo sapiens
  misc_RNA (1)...(19): siRNA sense strand
uuagcugaccugaauaaug

SEQ ID NO: 218990 - RNA, 19 nt, Homo sapiens
  misc_RNA (1)...(19): siRNA sense strand
guggcaaguucaacaggau

SEQ ID NO: 218991 - RNA, 19 nt, Homo sapiens
  misc_RNA (1)...(19): siRNA sense strand
acaacaauuuggucaacgu

SEQ ID NO: 218992 - RNA, 19 nt, Homo sapiens
  misc_RNA (1)...(19): siRNA sense strand
gacuacaucaggagaagau

SEQ ID NO: 218993 - RNA, 19 nt, Homo sapiens
  misc_RNA (1)...(19): siRNA sense strand
uaauaagccagagaucgaa

SEQ ID NO: 218994 - RNA, 19 nt, Homo sapiens
  misc_RNA (1)...(19): siRNA sense strand
ugucagauucucagcuuau

SEQ ID NO: 218995 - RNA, 19 nt, Homo sapiens
  misc_RNA (1)...(19): siRNA sense strand
ggauauccugcagauuauu

SEQ ID NO: 218996 - RNA, 19 nt, Homo sapiens
  misc_RNA (1)...(19): siRNA sense strand
agcaucaggccaaauguaa

SEQ ID NO: 218997 - RNA, 19 nt, Homo sapiens
  misc_RNA (1)...(19): siRNA sense strand
gcccuuugcuuggaucucu

SEQ ID NO: 218998 - RNA, 19 nt, Homo sapiens
  misc_RNA (1)...(19): siRNA sense strand
gcugaauguuuaugauacg

SEQ ID NO: 218999 - RNA, 19 nt, Homo sapiens
  misc_RNA (1)...(19): siRNA sense strand
agacuuugccaagguacua

SEQ ID NO: 219000 - RNA, 19 nt, Homo sapiens
  misc_RNA (1)...(19): siRNA sense strand
caagcaaguggcaaguuca

SEQ ID NO: 219001 - RNA, 19 nt, Homo sapiens
  misc_RNA (1)...(19): siRNA sense strand
agacaaguacagauaccuu

SEQ ID NO: 219002 - RNA, 19 nt, Homo sapiens
  misc_RNA (1)...(19): siRNA sense strand
gcaucauuucccuguguaa

SEQ ID NO: 219003 - RNA, 19 nt, Homo sapiens
  misc_RNA (1)...(19): siRNA sense strand
cugcaaagaguguccaauc

SEQ ID NO: 219004 - RNA, 19 nt, Homo sapiens
  misc_RNA (1)...(19): siRNA sense strand
cuuauaggacugccaugaa

SEQ ID NO: 219005 - RNA, 19 nt, Homo sapiens
  misc_RNA (1)...(19): siRNA sense strand
caaagaguguccaaucauu

SEQ ID NO: 219006 - RNA, 19 nt, Homo sapiens
  misc_RNA (1)...(19): siRNA sense strand
uagcugaccugaauaaugu

SEQ ID NO: 219007 - RNA, 19 nt, Homo sapiens
  misc_RNA (1)...(19): siRNA sense strand
gcaugauucuauccaaauu

SEQ ID NO: 219008 - RNA, 19 nt, Homo sapiens
  misc_RNA (1)...(19): siRNA sense strand
ugaacuggcugcugaaugu

SEQ ID NO: 219009 - RNA, 19 nt, Homo sapiens
  misc_RNA (1)...(19): siRNA sense strand
gauauccugcagauuauua

SEQ ID NO: 219010 - RNA, 19 nt, Homo sapiens
  misc_RNA (1)...(19): siRNA sense strand
gagaagauguucgagacuu

SEQ ID NO: 219011 - RNA, 19 nt, Homo sapiens
  misc_RNA (1)...(19): siRNA sense strand
gcacuuuaauuaugacauc

SEQ ID NO: 219012 - RNA, 19 nt, Homo sapiens
  misc_RNA (1)...(19): siRNA sense strand
guaaagcacauuuggaaga

SEQ ID NO: 219013 - RNA, 19 nt, Homo sapiens
  misc_RNA (1)...(19): siRNA sense strand
gaauauugcacuccgacua

SEQ ID NO: 219014 - RNA, 19 nt, Homo sapiens
  misc_RNA (1)...(19): siRNA sense strand
uuauaggacugccaugaaa

SEQ ID NO: 219015 - RNA, 19 nt, Homo sapiens
  misc_RNA (1)...(19): siRNA sense strand
gggugaaguugcauccuuu

SEQ ID NO: 219016 - RNA, 19 nt, Homo sapiens
  misc_RNA (1)...(19): siRNA sense strand
gcaagagcacaacaauuug

SEQ ID NO: 219017 - RNA, 19 nt, Homo sapiens
  misc_RNA (1)...(19): siRNA sense strand
gcacaacaauuuggucaac

SEQ ID NO: 219018 - RNA, 19 nt, Homo sapiens
  misc_RNA (1)...(19): siRNA sense strand
agcaagagcacaacaauuu

SEQ ID NO: 219019 - RNA, 19 nt, Homo sapiens
  misc_RNA (1)...(19): siRNA sense strand
agaagauguucgagacuuu

SEQ ID NO: 219020 - RNA, 19 nt, Homo sapiens
  misc_RNA (1)...(19): siRNA sense strand
gagcaagagcacaacaauu

SEQ ID NO: 219021 - RNA, 19 nt, Homo sapiens
  misc_RNA (1)...(19): siRNA sense strand
ucaagcaaguggcaaguuc

SEQ ID NO: 219022 - RNA, 19 nt, Homo sapiens
  misc_RNA (1)...(19): siRNA sense strand
ccacgagacucaaacaacu

SEQ ID NO: 219023 - RNA, 19 nt, Homo sapiens
  misc_RNA (1)...(19): siRNA sense strand
cagcacaaccucaagcaaa

SEQ ID NO: 219024 - RNA, 19 nt, Homo sapiens
  misc_RNA (1)...(19): siRNA sense strand
gcaaagaguguccaaucau

SEQ ID NO: 219025 - RNA, 19 nt, Homo sapiens
  misc_RNA (1)...(19): siRNA sense strand
auggauauccugcagauua

SEQ ID NO: 219026 - RNA, 19 nt, Homo sapiens
  misc_RNA (1)...(19): siRNA sense strand
uguaacaucugcaaagagu

SEQ ID NO: 219027 - RNA, 19 nt, Homo sapiens
  misc_RNA (1)...(19): siRNA sense strand
guccggagcugcuuccaau

SEQ ID NO: 219028 - RNA, 19 nt, Homo sapiens
  misc_RNA (1)...(19): siRNA sense strand
gcaaguggcaaguucaaca

SEQ ID NO: 219029 - RNA, 19 nt, Homo sapiens
  misc_RNA (1)...(19): siRNA sense strand
gcuuccaauuugcuaauaa

SEQ ID NO: 219030 - RNA, 19 nt, Homo sapiens
  misc_RNA (1)...(19): siRNA sense strand
uggaagacaaguacagaua

SEQ ID NO: 219031 - RNA, 19 nt, Homo sapiens
  misc_RNA (1)...(19): siRNA sense strand
ggauccguguccugucuuu

SEQ ID NO: 219032 - RNA, 19 nt, Homo sapiens
  misc_RNA (1)...(19): siRNA sense strand
gucuuuagcugaccugaau

SEQ ID NO: 219033 - RNA, 19 nt, Homo sapiens
  misc_RNA (1)...(19): siRNA sense strand
gacaaguacagauaccuuu

SEQ ID NO: 219034 - RNA, 19 nt, Homo sapiens
  misc_RNA (1)...(19): siRNA sense strand
ccaagcaucaggccaaaug

SEQ ID NO: 219035 - RNA, 19 nt, Homo sapiens
  misc_RNA (1)...(19): siRNA sense strand
ggagcaagagcacaacaau

SEQ ID NO: 219036 - RNA, 19 nt, Homo sapiens
  misc_RNA (1)...(19): siRNA sense strand
guguaaagcacauuuggaa

SEQ ID NO: 219037 - RNA, 19 nt, Homo sapiens
  misc_RNA (1)...(19): siRNA sense strand
caagacaguugggugaagu

SEQ ID NO: 219038 - RNA, 19 nt, Homo sapiens
  misc_RNA (1)...(19): siRNA sense strand
gaagauguucgagacuuug

SEQ ID NO: 219039 - RNA, 19 nt, Homo sapiens
  misc_RNA (1)...(19): siRNA sense strand
gucagauucucagcuuaua

SEQ ID NO: 219040 - RNA, 19 nt, Homo sapiens
  misc_RNA (1)...(19): siRNA sense strand
uaacaucugcaaagagugu

SEQ ID NO: 219041 - RNA, 19 nt, Homo sapiens
  misc_RNA (1)...(19): siRNA sense strand
cggagcugcuuccaauuug

SEQ ID NO: 219042 - RNA, 19 nt, Homo sapiens
  misc_RNA (1)...(19): siRNA sense strand
gaagacaaguacagauacc

SEQ ID NO: 219043 - RNA, 19 nt, Homo sapiens
  misc_RNA (1)...(19): siRNA sense strand
ccauggauauccugcagau

SEQ ID NO: 219044 - RNA, 19 nt, Homo sapiens
  misc_RNA (1)...(19): siRNA sense strand
ggcaucauuucccugugua

SEQ ID NO: 219045 - RNA, 19 nt, Homo sapiens
  misc_RNA (1)...(19): siRNA sense strand
uggauauccugcagauuau

SEQ ID NO: 219046 - RNA, 19 nt, Homo sapiens
  misc_RNA (1)...(19): siRNA sense strand
ggaagacaaguacagauac

SEQ ID NO: 219047 - RNA, 19 nt, Homo sapiens
  misc_RNA (1)...(19): siRNA sense strand
ugcaaagaguguccaauca

SEQ ID NO: 219048 - RNA, 19 nt, Homo sapiens
  misc_RNA (1)...(19): siRNA sense strand
guggauaugugucugaacu

SEQ ID NO: 219049 - RNA, 19 nt, Homo sapiens
  misc_RNA (1)...(19): siRNA sense strand
acuggcugcugaauguuua

SEQ ID NO: 219050 - RNA, 19 nt, Homo sapiens
  misc_RNA (1)...(19): siRNA sense strand
acuaucccaugguggaaua

SEQ ID NO: 219051 - RNA, 19 nt, Homo sapiens
  misc_RNA (1)...(19): siRNA sense strand
ccggagcugcuuccaauuu

SEQ ID NO: 219052 - RNA, 19 nt, Homo sapiens
  misc_RNA (1)...(19): siRNA sense strand
ccaaauuccaagacaguug

SEQ ID NO: 219053 - RNA, 19 nt, Homo sapiens
  misc_RNA (1)...(19): siRNA sense strand
cagaaacugccaagcauca

SEQ ID NO: 219054 - RNA, 19 nt, Homo sapiens
  misc_RNA (1)...(19): siRNA sense strand
uaugacaucugccaaagcu

SEQ ID NO: 219055 - RNA, 19 nt, Homo sapiens
  misc_RNA (1)...(19): siRNA sense strand
aaugucagauucucagcuu

SEQ ID NO: 219056 - RNA, 19 nt, Homo sapiens
  misc_RNA (1)...(19): siRNA sense strand
ucgagacuuugccaaggua

SEQ ID NO: 219057 - RNA, 19 nt, Homo sapiens
  misc_RNA (1)...(19): siRNA sense strand
gcaaaaggccauaaaaugc

SEQ ID NO: 219058 - RNA, 19 nt, Homo sapiens
  misc_RNA (1)...(19): siRNA sense strand
cugcaugauucuauccaaa

SEQ ID NO: 219059 - RNA, 19 nt, Homo sapiens
  misc_RNA (1)...(19): siRNA sense strand
uaaagcacauuuggaagac

SEQ ID NO: 219060 - RNA, 19 nt, Homo sapiens
  misc_RNA (1)...(19): siRNA sense strand
acaggagucuaaagcacuu

SEQ ID NO: 219061 - RNA, 19 nt, Homo sapiens
  misc_RNA (1)...(19): siRNA sense strand
acagauaccuuuucaagca

SEQ ID NO: 219062 - RNA, 19 nt, Homo sapiens
  misc_RNA (1)...(19): siRNA sense strand
aagcacauuuggaagacaa

SEQ ID NO: 219063 - RNA, 19 nt, Homo sapiens
  misc_RNA (1)...(19): siRNA sense strand
gcuaauaauaagccagaga

SEQ ID NO: 219064 - RNA, 19 nt, Homo sapiens
  misc_RNA (1)...(19): siRNA sense strand
caagagcacaacaauuugg

SEQ ID NO: 219065 - RNA, 19 nt, Homo sapiens
  misc_RNA (1)...(19): siRNA sense strand
ccugucagcugcaugugau

SEQ ID NO: 219066 - RNA, 19 nt, Homo sapiens
  misc_RNA (1)...(19): siRNA sense strand
gcugcugaauguuuaugau

SEQ ID NO: 219067 - RNA, 19 nt, Homo sapiens
  misc_RNA (1)...(19): siRNA sense strand
acagagcucuaccagucuu

SEQ ID NO: 219068 - RNA, 19 nt, Homo sapiens
  misc_RNA (1)...(19): siRNA sense strand
acaguugggugaaguugca

SEQ ID NO: 219069 - RNA, 19 nt, Homo sapiens
  misc_RNA (1)...(19): siRNA sense strand
guuugaccacuauuuauga

SEQ ID NO: 219070 - RNA, 19 nt, Homo sapiens
  misc_RNA (1)...(19): siRNA sense strand
gcuuauaggacugccauga

SEQ ID NO: 219071 - RNA, 19 nt, Homo sapiens
  misc_RNA (1)...(19): siRNA sense strand
caucaggccaaauguaaca

SEQ ID NO: 219072 - RNA, 19 nt, Homo sapiens
  misc_RNA (1)...(19): siRNA sense strand
gauucuauccaaauuccaa

SEQ ID NO: 219073 - RNA, 19 nt, Homo sapiens
  misc_RNA (1)...(19): siRNA sense strand
ggcaaguucaacaggauuu

SEQ ID NO: 219074 - RNA, 19 nt, Homo sapiens
  misc_RNA (1)...(19): siRNA sense strand
gaacuggcugcugaauguu

SEQ ID NO: 219075 - RNA, 19 nt, Homo sapiens
  misc_RNA (1)...(19): siRNA sense strand
cugcugaauguuuaugaua

SEQ ID NO: 219076 - RNA, 19 nt, Homo sapiens
  misc_RNA (1)...(19): siRNA sense strand
aagcaucaggccaaaugua

SEQ ID NO: 219077 - RNA, 19 nt, Homo sapiens
  misc_RNA (1)...(19): siRNA sense strand
uggcaucauuucccugugu

SEQ ID NO: 219078 - RNA, 19 nt, Homo sapiens
  misc_RNA (1)...(19): siRNA sense strand
ccaugaaacuccgaagacu

SEQ ID NO: 219079 - RNA, 19 nt, Homo sapiens
  misc_RNA (1)...(19): siRNA sense strand
auaauaagccagagaucga

SEQ ID NO: 219080 - RNA, 19 nt, Homo sapiens
  misc_RNA (1)...(19): siRNA sense strand
cuaauaauaagccagagau

SEQ ID NO: 219081 - RNA, 19 nt, Homo sapiens
  misc_RNA (1)...(19): siRNA sense strand
ugggugaaguugcauccuu

SEQ ID NO: 219082 - RNA, 19 nt, Homo sapiens
  misc_RNA (1)...(19): siRNA sense strand
caucauuucccuguguaaa

SEQ ID NO: 219083 - RNA, 19 nt, Homo sapiens
  misc_RNA (1)...(19): siRNA sense strand
gcguggauaugugucugaa

SEQ ID NO: 219084 - RNA, 19 nt, Homo sapiens
  misc_RNA (1)...(19): siRNA sense strand
gcacuaucccaugguggaa

SEQ ID NO: 219085 - RNA, 19 nt, Homo sapiens
  misc_RNA (1)...(19): siRNA sense strand
gagccugucagcugcaugu

SEQ ID NO: 219086 - RNA, 19 nt, Homo sapiens
  misc_RNA (1)...(19): siRNA sense strand
guacagauaccuuuucaag

SEQ ID NO: 219087 - RNA, 19 nt, Homo sapiens
  misc_RNA (1)...(19): siRNA sense strand
gucccucucugcguggaua

SEQ ID NO: 219088 - RNA, 19 nt, Homo sapiens
  misc_RNA (1)...(19): siRNA sense strand
ggagcugcuuccaauuugc

SEQ ID NO: 219089 - RNA, 19 nt, Homo sapiens
  misc_RNA (1)...(19): siRNA sense strand
uuagcugaccugaauaaug

SEQ ID NO: 219090 - RNA, 19 nt, Homo sapiens
  misc_RNA (1)...(19): siRNA sense strand
guggcaaguucaacaggau

SEQ ID NO: 219091 - RNA, 19 nt, Homo sapiens
  misc_RNA (1)...(19): siRNA sense strand
acaacaauuuggucaacgu

SEQ ID NO: 219092 - RNA, 19 nt, Homo sapiens
  misc_RNA (1)...(19): siRNA sense strand
gacuacaucaggagaagau

SEQ ID NO: 219093 - RNA, 19 nt, Homo sapiens
  misc_RNA (1)...(19): siRNA sense strand
uaauaagccagagaucgaa

SEQ ID NO: 219094 - RNA, 19 nt, Homo sapiens
  misc_RNA (1)...(19): siRNA sense strand
ugucagauucucagcuuau

SEQ ID NO: 219095 - RNA, 19 nt, Homo sapiens
  misc_RNA (1)...(19): siRNA sense strand
ggauauccugcagauuauu

SEQ ID NO: 219096 - RNA, 19 nt, Homo sapiens
  misc_RNA (1)...(19): siRNA sense strand
agcaucaggccaaauguaa

SEQ ID NO: 219097 - RNA, 19 nt, Homo sapiens
  misc_RNA (1)...(19): siRNA sense strand
gcccuuugcuuggaucucu

SEQ ID NO: 219098 - RNA, 19 nt, Homo sapiens
  misc_RNA (1)...(19): siRNA sense strand
gcugaauguuuaugauacg

SEQ ID NO: 219099 - RNA, 19 nt, Homo sapiens
  misc_RNA (1)...(19): siRNA sense strand
agacuuugccaagguacua

SEQ ID NO: 219100 - RNA, 19 nt, Homo sapiens
  misc_RNA (1)...(19): siRNA sense strand
caagcaaguggcaaguuca

SEQ ID NO: 219101 - RNA, 19 nt, Homo sapiens
  misc_RNA (1)...(19): siRNA sense strand
agacaaguacagauaccuu

SEQ ID NO: 219102 - RNA, 19 nt, Homo sapiens
  misc_RNA (1)...(19): siRNA sense strand
gcaucauuucccuguguaa

SEQ ID NO: 219103 - RNA, 19 nt, Homo sapiens
  misc_RNA (1)...(19): siRNA sense strand
cugcaaagaguguccaauc

SEQ ID NO: 219104 - RNA, 19 nt, Homo sapiens
  misc_RNA (1)...(19): siRNA sense strand
cuuauaggacugccaugaa

SEQ ID NO: 219105 - RNA, 19 nt, Homo sapiens
  misc_RNA (1)...(19): siRNA sense strand
caaagaguguccaaucauu

SEQ ID NO: 219106 - RNA, 19 nt, Homo sapiens
  misc_RNA (1)...(19): siRNA sense strand
uagcugaccugaauaaugu

SEQ ID NO: 219107 - RNA, 19 nt, Homo sapiens
  misc_RNA (1)...(19): siRNA sense strand
gcaugauucuauccaaauu

SEQ ID NO: 219108 - RNA, 19 nt, Homo sapiens
  misc_RNA (1)...(19): siRNA sense strand
ugaacuggcugcugaaugu

SEQ ID NO: 219109 - RNA, 19 nt, Homo sapiens
  misc_RNA (1)...(19): siRNA sense strand
gauauccugcagauuauua

SEQ ID NO: 219110 - RNA, 19 nt, Homo sapiens
  misc_RNA (1)...(19): siRNA sense strand
gagaagauguucgagacuu

SEQ ID NO: 219111 - RNA, 19 nt, Homo sapiens
  misc_RNA (1)...(19): siRNA sense strand
gcacuuuaauuaugacauc

SEQ ID NO: 219112 - RNA, 19 nt, Homo sapiens
  misc_RNA (1)...(19): siRNA sense strand
guaaagcacauuuggaaga

SEQ ID NO: 219113 - RNA, 19 nt, Homo sapiens
  misc_RNA (1)...(19): siRNA sense strand
gaauauugcacuccgacua

SEQ ID NO: 219114 - RNA, 19 nt, Homo sapiens
  misc_RNA (1)...(19): siRNA sense strand
uuauaggacugccaugaaa

SEQ ID NO: 219115 - RNA, 19 nt, Homo sapiens
  misc_RNA (1)...(19): siRNA sense strand
gggugaaguugcauccuuu

SEQ ID NO: 219116 - RNA, 19 nt, Homo sapiens
  misc_RNA (1)...(19): siRNA sense strand
gcaagagcacaacaauuug

SEQ ID NO: 219117 - RNA, 19 nt, Homo sapiens
  misc_RNA (1)...(19): siRNA sense strand
gcacaacaauuuggucaac

SEQ ID NO: 219118 - RNA, 19 nt, Homo sapiens
  misc_RNA (1)...(19): siRNA sense strand
agcaagagcacaacaauuu

SEQ ID NO: 219119 - RNA, 19 nt, Homo sapiens
  misc_RNA (1)...(19): siRNA sense strand
agaagauguucgagacuuu

SEQ ID NO: 219120 - RNA, 19 nt, Homo sapiens
  misc_RNA (1)...(19): siRNA sense strand
gagcaagagcacaacaauu

SEQ ID NO: 219121 - RNA, 19 nt, Homo sapiens
  misc_RNA (1)...(19): siRNA sense strand
ucaagcaaguggcaaguuc

SEQ ID NO: 219122 - RNA, 19 nt, Homo sapiens
  misc_RNA (1)...(19): siRNA sense strand
ccacgagacucaaacaacu

SEQ ID NO: 219123 - RNA, 19 nt, Homo sapiens
  misc_RNA (1)...(19): siRNA sense strand
cagcacaaccucaagcaaa

SEQ ID NO: 219124 - RNA, 19 nt, Homo sapiens
  misc_RNA (1)...(19): siRNA sense strand
gcaaagaguguccaaucau

SEQ ID NO: 219125 - RNA, 19 nt, Homo sapiens
  misc_RNA (1)...(19): siRNA sense strand
auggauauccugcagauua

SEQ ID NO: 219126 - RNA, 19 nt, Homo sapiens
  misc_RNA (1)...(19): siRNA sense strand
uguaacaucugcaaagagu

SEQ ID NO: 219127 - RNA, 19 nt, Homo sapiens
  misc_RNA (1)...(19): siRNA sense strand
guccggagcugcuuccaau

SEQ ID NO: 219128 - RNA, 19 nt, Homo sapiens
  misc_RNA (1)...(19): siRNA sense strand
gcaaguggcaaguucaaca

SEQ ID NO: 219129 - RNA, 19 nt, Homo sapiens
  misc_RNA (1)...(19): siRNA sense strand
gcuuccaauuugcuaauaa

SEQ ID NO: 219130 - RNA, 19 nt, Homo sapiens
  misc_RNA (1)...(19): siRNA sense strand
uggaagacaaguacagaua

SEQ ID NO: 219131 - RNA, 19 nt, Homo sapiens
  misc_RNA (1)...(19): siRNA sense strand
ggauccguguccugucuuu

SEQ ID NO: 219132 - RNA, 19 nt, Homo sapiens
  misc_RNA (1)...(19): siRNA sense strand
gucuuuagcugaccugaau

SEQ ID NO: 219133 - RNA, 19 nt, Homo sapiens
  misc_RNA (1)...(19): siRNA sense strand
gacaaguacagauaccuuu

SEQ ID NO: 219134 - RNA, 19 nt, Homo sapiens
  misc_RNA (1)...(19): siRNA sense strand
ccaagcaucaggccaaaug

SEQ ID NO: 219135 - RNA, 19 nt, Homo sapiens
  misc_RNA (1)...(19): siRNA sense strand
ggagcaagagcacaacaau

SEQ ID NO: 219136 - RNA, 19 nt, Homo sapiens
  misc_RNA (1)...(19): siRNA sense strand
guguaaagcacauuuggaa

SEQ ID NO: 219137 - RNA, 19 nt, Homo sapiens
  misc_RNA (1)...(19): siRNA sense strand
caagacaguugggugaagu

SEQ ID NO: 219138 - RNA, 19 nt, Homo sapiens
  misc_RNA (1)...(19): siRNA sense strand
gaagauguucgagacuuug

SEQ ID NO: 219139 - RNA, 19 nt, Homo sapiens
  misc_RNA (1)...(19): siRNA sense strand
gucagauucucagcuuaua

SEQ ID NO: 219140 - RNA, 19 nt, Homo sapiens
  misc_RNA (1)...(19): siRNA sense strand
uaacaucugcaaagagugu

SEQ ID NO: 219141 - RNA, 19 nt, Homo sapiens
  misc_RNA (1)...(19): siRNA sense strand
cggagcugcuuccaauuug

SEQ ID NO: 219142 - RNA, 19 nt, Homo sapiens
  misc_RNA (1)...(19): siRNA sense strand
gaagacaaguacagauacc

SEQ ID NO: 219143 - RNA, 19 nt, Homo sapiens
  misc_RNA (1)...(19): siRNA sense strand
ccauggauauccugcagau

SEQ ID NO: 219144 - RNA, 19 nt, Homo sapiens
  misc_RNA (1)...(19): siRNA sense strand
ggcaucauuucccugugua

SEQ ID NO: 219145 - RNA, 19 nt, Homo sapiens
  misc_RNA (1)...(19): siRNA sense strand
uggauauccugcagauuau

SEQ ID NO: 219146 - RNA, 19 nt, Homo sapiens
  misc_RNA (1)...(19): siRNA sense strand
ggaagacaaguacagauac

SEQ ID NO: 219147 - RNA, 19 nt, Homo sapiens
  misc_RNA (1)...(19): siRNA sense strand
ugcaaagaguguccaauca

SEQ ID NO: 219148 - RNA, 19 nt, Homo sapiens
  misc_RNA (1)...(19): siRNA sense strand
guggauaugugucugaacu

SEQ ID NO: 219149 - RNA, 19 nt, Homo sapiens
  misc_RNA (1)...(19): siRNA sense strand
acuggcugcugaauguuua

SEQ ID NO: 219150 - RNA, 19 nt, Homo sapiens
  misc_RNA (1)...(19): siRNA sense strand
acuaucccaugguggaaua

SEQ ID NO: 219151 - RNA, 19 nt, Homo sapiens
  misc_RNA (1)...(19): siRNA sense strand
ccggagcugcuuccaauuu

SEQ ID NO: 219152 - RNA, 19 nt, Homo sapiens
  misc_RNA (1)...(19): siRNA sense strand
ccaaauuccaagacaguug

SEQ ID NO: 219153 - RNA, 19 nt, Homo sapiens
  misc_RNA (1)...(19): siRNA sense strand
cagaaacugccaagcauca

SEQ ID NO: 219154 - RNA, 19 nt, Homo sapiens
  misc_RNA (1)...(19): siRNA sense strand
uaugacaucugccaaagcu

SEQ ID NO: 219155 - RNA, 19 nt, Homo sapiens
  misc_RNA (1)...(19): siRNA sense strand
aaugucagauucucagcuu

SEQ ID NO: 219156 - RNA, 19 nt, Homo sapiens
  misc_RNA (1)...(19): siRNA sense strand
ucgagacuuugccaaggua

SEQ ID NO: 219157 - RNA, 19 nt, Homo sapiens
  misc_RNA (1)...(19): siRNA sense strand
gcaaaaggccauaaaaugc

SEQ ID NO: 219158 - RNA, 19 nt, Homo sapiens
  misc_RNA (1)...(19): siRNA sense strand
cugcaugauucuauccaaa

SEQ ID NO: 219159 - RNA, 19 nt, Homo sapiens
  misc_RNA (1)...(19): siRNA sense strand
uaaagcacauuuggaagac

SEQ ID NO: 219160 - RNA, 19 nt, Homo sapiens
  misc_RNA (1)...(19): siRNA sense strand
acaggagucuaaagcacuu

SEQ ID NO: 219161 - RNA, 19 nt, Homo sapiens
  misc_RNA (1)...(19): siRNA sense strand
acagauaccuuuucaagca

SEQ ID NO: 219162 - RNA, 19 nt, Homo sapiens
  misc_RNA (1)...(19): siRNA sense strand
aagcacauuuggaagacaa

SEQ ID NO: 219163 - RNA, 19 nt, Homo sapiens
  misc_RNA (1)...(19): siRNA sense strand
gcuaauaauaagccagaga

SEQ ID NO: 219164 - RNA, 19 nt, Homo sapiens
  misc_RNA (1)...(19): siRNA sense strand
caagagcacaacaauuugg

SEQ ID NO: 219165 - RNA, 19 nt, Homo sapiens
  misc_RNA (1)...(19): siRNA sense strand
ccugucagcugcaugugau

SEQ ID NO: 219166 - RNA, 19 nt, Homo sapiens
  misc_RNA (1)...(19): siRNA sense strand
gcugcugaauguuuaugau

SEQ ID NO: 219167 - RNA, 19 nt, Homo sapiens
  misc_RNA (1)...(19): siRNA sense strand
acagagcucuaccagucuu

SEQ ID NO: 219168 - RNA, 19 nt, Homo sapiens
  misc_RNA (1)...(19): siRNA sense strand
acaguugggugaaguugca

SEQ ID NO: 219169 - RNA, 19 nt, Homo sapiens
  misc_RNA (1)...(19): siRNA sense strand
guuugaccacuauuuauga

SEQ ID NO: 219170 - RNA, 19 nt, Homo sapiens
  misc_RNA (1)...(19): siRNA sense strand
gcuuauaggacugccauga

SEQ ID NO: 219171 - RNA, 19 nt, Homo sapiens
  misc_RNA (1)...(19): siRNA sense strand
caucaggccaaauguaaca

SEQ ID NO: 219172 - RNA, 19 nt, Homo sapiens
  misc_RNA (1)...(19): siRNA sense strand
gauucuauccaaauuccaa

SEQ ID NO: 219173 - RNA, 19 nt, Homo sapiens
  misc_RNA (1)...(19): siRNA sense strand
ggcaaguucaacaggauuu

SEQ ID NO: 219174 - RNA, 19 nt, Homo sapiens
  misc_RNA (1)...(19): siRNA sense strand
gaacuggcugcugaauguu

SEQ ID NO: 219175 - RNA, 19 nt, Homo sapiens
  misc_RNA (1)...(19): siRNA sense strand
cugcugaauguuuaugaua

SEQ ID NO: 219176 - RNA, 19 nt, Homo sapiens
  misc_RNA (1)...(19): siRNA sense strand
aagcaucaggccaaaugua

SEQ ID NO: 219177 - RNA, 19 nt, Homo sapiens
  misc_RNA (1)...(19): siRNA sense strand
uggcaucauuucccugugu

SEQ ID NO: 219178 - RNA, 19 nt, Homo sapiens
  misc_RNA (1)...(19): siRNA sense strand
ccaugaaacuccgaagacu

SEQ ID NO: 219179 - RNA, 19 nt, Homo sapiens
  misc_RNA (1)...(19): siRNA sense strand
auaauaagccagagaucga

SEQ ID NO: 219180 - RNA, 19 nt, Homo sapiens
  misc_RNA (1)...(19): siRNA sense strand
cuaauaauaagccagagau

SEQ ID NO: 219181 - RNA, 19 nt, Homo sapiens
  misc_RNA (1)...(19): siRNA sense strand
ugggugaaguugcauccuu

SEQ ID NO: 219182 - RNA, 19 nt, Homo sapiens
  misc_RNA (1)...(19): siRNA sense strand
caucauuucccuguguaaa

SEQ ID NO: 219183 - RNA, 19 nt, Homo sapiens
  misc_RNA (1)...(19): siRNA sense strand
gcguggauaugugucugaa

SEQ ID NO: 219184 - RNA, 19 nt, Homo sapiens
  misc_RNA (1)...(19): siRNA sense strand
gcacuaucccaugguggaa

SEQ ID NO: 219185 - RNA, 19 nt, Homo sapiens
  misc_RNA (1)...(19): siRNA sense strand
gagccugucagcugcaugu

SEQ ID NO: 219186 - RNA, 19 nt, Homo sapiens
  misc_RNA (1)...(19): siRNA sense strand
guacagauaccuuuucaag

SEQ ID NO: 219187 - RNA, 19 nt, Homo sapiens
  misc_RNA (1)...(19): siRNA sense strand
gucccucucugcguggaua

SEQ ID NO: 219188 - RNA, 19 nt, Homo sapiens
  misc_RNA (1)...(19): siRNA sense strand
ggagcugcuuccaauuugc

SEQ ID NO: 219189 - RNA, 19 nt, Homo sapiens
  misc_RNA (1)...(19): siRNA sense strand
uuagcugaccugaauaaug

SEQ ID NO: 219190 - RNA, 19 nt, Homo sapiens
  misc_RNA (1)...(19): siRNA sense strand
guggcaaguucaacaggau

SEQ ID NO: 219191 - RNA, 19 nt, Homo sapiens
  misc_RNA (1)...(19): siRNA sense strand
acaacaauuuggucaacgu

SEQ ID NO: 219192 - RNA, 19 nt, Homo sapiens
  misc_RNA (1)...(19): siRNA sense strand
gacuacaucaggagaagau

SEQ ID NO: 219193 - RNA, 19 nt, Homo sapiens
  misc_RNA (1)...(19): siRNA sense strand
uaauaagccagagaucgaa

SEQ ID NO: 219194 - RNA, 19 nt, Homo sapiens
  misc_RNA (1)...(19): siRNA sense strand
ugucagauucucagcuuau

SEQ ID NO: 219195 - RNA, 19 nt, Homo sapiens
  misc_RNA (1)...(19): siRNA sense strand
ggauauccugcagauuauu

SEQ ID NO: 219196 - RNA, 19 nt, Homo sapiens
  misc_RNA (1)...(19): siRNA sense strand
agcaucaggccaaauguaa

SEQ ID NO: 219197 - RNA, 19 nt, Homo sapiens
  misc_RNA (1)...(19): siRNA sense strand
gcccuuugcuuggaucucu

SEQ ID NO: 219198 - RNA, 19 nt, Homo sapiens
  misc_RNA (1)...(19): siRNA sense strand
gcugaauguuuaugauacg

SEQ ID NO: 219199 - RNA, 19 nt, Homo sapiens
  misc_RNA (1)...(19): siRNA sense strand
agacuuugccaagguacua

SEQ ID NO: 219200 - RNA, 19 nt, Homo sapiens
  misc_RNA (1)...(19): siRNA sense strand
caagcaaguggcaaguuca

SEQ ID NO: 219201 - RNA, 19 nt, Homo sapiens
  misc_RNA (1)...(19): siRNA sense strand
agacaaguacagauaccuu

SEQ ID NO: 219202 - RNA, 19 nt, Homo sapiens
  misc_RNA (1)...(19): siRNA sense strand
gcaucauuucccuguguaa

SEQ ID NO: 219203 - RNA, 19 nt, Homo sapiens
  misc_RNA (1)...(19): siRNA sense strand
cugcaaagaguguccaauc

SEQ ID NO: 219204 - RNA, 19 nt, Homo sapiens
  misc_RNA (1)...(19): siRNA sense strand
cuuauaggacugccaugaa

SEQ ID NO: 219205 - RNA, 19 nt, Homo sapiens
  misc_RNA (1)...(19): siRNA sense strand
caaagaguguccaaucauu

SEQ ID NO: 219206 - RNA, 19 nt, Homo sapiens
  misc_RNA (1)...(19): siRNA sense strand
uagcugaccugaauaaugu

SEQ ID NO: 219207 - RNA, 19 nt, Homo sapiens
  misc_RNA (1)...(19): siRNA sense strand
gcaugauucuauccaaauu

SEQ ID NO: 219208 - RNA, 19 nt, Homo sapiens
  misc_RNA (1)...(19): siRNA sense strand
ugaacuggcugcugaaugu

SEQ ID NO: 219209 - RNA, 19 nt, Homo sapiens
  misc_RNA (1)...(19): siRNA sense strand
gauauccugcagauuauua

SEQ ID NO: 219210 - RNA, 19 nt, Homo sapiens
  misc_RNA (1)...(19): siRNA sense strand
gagaagauguucgagacuu

SEQ ID NO: 219211 - RNA, 19 nt, Homo sapiens
  misc_RNA (1)...(19): siRNA sense strand
gcacuuuaauuaugacauc

SEQ ID NO: 219212 - RNA, 19 nt, Homo sapiens
  misc_RNA (1)...(19): siRNA sense strand
guaaagcacauuuggaaga

SEQ ID NO: 219213 - RNA, 19 nt, Homo sapiens
  misc_RNA (1)...(19): siRNA sense strand
gaauauugcacuccgacua

SEQ ID NO: 219214 - RNA, 19 nt, Homo sapiens
  misc_RNA (1)...(19): siRNA sense strand
uuauaggacugccaugaaa

SEQ ID NO: 219215 - RNA, 19 nt, Homo sapiens
  misc_RNA (1)...(19): siRNA sense strand
gggugaaguugcauccuuu

SEQ ID NO: 219216 - RNA, 19 nt, Homo sapiens
  misc_RNA (1)...(19): siRNA sense strand
gcaagagcacaacaauuug

SEQ ID NO: 219217 - RNA, 19 nt, Homo sapiens
  misc_RNA (1)...(19): siRNA sense strand
gcacaacaauuuggucaac

SEQ ID NO: 219218 - RNA, 19 nt, Homo sapiens
  misc_RNA (1)...(19): siRNA sense strand
agcaagagcacaacaauuu

SEQ ID NO: 219219 - RNA, 19 nt, Homo sapiens
  misc_RNA (1)...(19): siRNA sense strand
agaagauguucgagacuuu

SEQ ID NO: 219220 - RNA, 19 nt, Homo sapiens
  misc_RNA (1)...(19): siRNA sense strand
gagcaagagcacaacaauu

SEQ ID NO: 219221 - RNA, 19 nt, Homo sapiens
  misc_RNA (1)...(19): siRNA sense strand
ucaagcaaguggcaaguuc

SEQ ID NO: 219222 - RNA, 19 nt, Homo sapiens
  misc_RNA (1)...(19): siRNA sense strand
ccacgagacucaaacaacu

SEQ ID NO: 219223 - RNA, 19 nt, Homo sapiens
  misc_RNA (1)...(19): siRNA sense strand
cagcacaaccucaagcaaa

SEQ ID NO: 219224 - RNA, 19 nt, Homo sapiens
  misc_RNA (1)...(19): siRNA sense strand
gcaaagaguguccaaucau

SEQ ID NO: 219225 - RNA, 19 nt, Homo sapiens
  misc_RNA (1)...(19): siRNA sense strand
auggauauccugcagauua

SEQ ID NO: 219226 - RNA, 19 nt, Homo sapiens
  misc_RNA (1)...(19): siRNA sense strand
uguaacaucugcaaagagu

SEQ ID NO: 219227 - RNA, 19 nt, Homo sapiens
  misc_RNA (1)...(19): siRNA sense strand
guccggagcugcuuccaau

SEQ ID NO: 219228 - RNA, 19 nt, Homo sapiens
  misc_RNA (1)...(19): siRNA sense strand
gcaaguggcaaguucaaca

SEQ ID NO: 219229 - RNA, 19 nt, Homo sapiens
  misc_RNA (1)...(19): siRNA sense strand
gcuuccaauuugcuaauaa

SEQ ID NO: 219230 - RNA, 19 nt, Homo sapiens
  misc_RNA (1)...(19): siRNA sense strand
uggaagacaaguacagaua

SEQ ID NO: 219231 - RNA, 19 nt, Homo sapiens
  misc_RNA (1)...(19): siRNA sense strand
ggauccguguccugucuuu

SEQ ID NO: 219232 - RNA, 19 nt, Homo sapiens
  misc_RNA (1)...(19): siRNA sense strand
gucuuuagcugaccugaau

SEQ ID NO: 219233 - RNA, 19 nt, Homo sapiens
  misc_RNA (1)...(19): siRNA sense strand
gacaaguacagauaccuuu

SEQ ID NO: 219234 - RNA, 19 nt, Homo sapiens
  misc_RNA (1)...(19): siRNA sense strand
ccaagcaucaggccaaaug

SEQ ID NO: 219235 - RNA, 19 nt, Homo sapiens
  misc_RNA (1)...(19): siRNA sense strand
ggagcaagagcacaacaau

SEQ ID NO: 219236 - RNA, 19 nt, Homo sapiens
  misc_RNA (1)...(19): siRNA sense strand
guguaaagcacauuuggaa

SEQ ID NO: 219237 - RNA, 19 nt, Homo sapiens
  misc_RNA (1)...(19): siRNA sense strand
caagacaguugggugaagu

SEQ ID NO: 219238 - RNA, 19 nt, Homo sapiens
  misc_RNA (1)...(19): siRNA sense strand
gaagauguucgagacuuug

SEQ ID NO: 219239 - RNA, 19 nt, Homo sapiens
  misc_RNA (1)...(19): siRNA sense strand
gucagauucucagcuuaua

SEQ ID NO: 219240 - RNA, 19 nt, Homo sapiens
  misc_RNA (1)...(19): siRNA sense strand
uaacaucugcaaagagugu

SEQ ID NO: 219241 - RNA, 19 nt, Homo sapiens
  misc_RNA (1)...(19): siRNA sense strand
cggagcugcuuccaauuug

SEQ ID NO: 219242 - RNA, 19 nt, Homo sapiens
  misc_RNA (1)...(19): siRNA sense strand
gaagacaaguacagauacc

SEQ ID NO: 219243 - RNA, 19 nt, Homo sapiens
  misc_RNA (1)...(19): siRNA sense strand
ccauggauauccugcagau

SEQ ID NO: 219244 - RNA, 19 nt, Homo sapiens
  misc_RNA (1)...(19): siRNA sense strand
ggcaucauuucccugugua

SEQ ID NO: 219245 - RNA, 19 nt, Homo sapiens
  misc_RNA (1)...(19): siRNA sense strand
uggauauccugcagauuau

SEQ ID NO: 219246 - RNA, 19 nt, Homo sapiens
  misc_RNA (1)...(19): siRNA sense strand
ggaagacaaguacagauac

SEQ ID NO: 219247 - RNA, 19 nt, Homo sapiens
  misc_RNA (1)...(19): siRNA sense strand
ugcaaagaguguccaauca

SEQ ID NO: 219248 - RNA, 19 nt, Homo sapiens
  misc_RNA (1)...(19): siRNA sense strand
guggauaugugucugaacu

SEQ ID NO: 219249 - RNA, 19 nt, Homo sapiens
  misc_RNA (1)...(19): siRNA sense strand
acuggcugcugaauguuua

SEQ ID NO: 219250 - RNA, 19 nt, Homo sapiens
  misc_RNA (1)...(19): siRNA sense strand
acuaucccaugguggaaua

SEQ ID NO: 219251 - RNA, 19 nt, Homo sapiens
  misc_RNA (1)...(19): siRNA sense strand
ccggagcugcuuccaauuu

SEQ ID NO: 219252 - RNA, 19 nt, Homo sapiens
  misc_RNA (1)...(19): siRNA sense strand
ccaaauuccaagacaguug

SEQ ID NO: 219253 - RNA, 19 nt, Homo sapiens
  misc_RNA (1)...(19): siRNA sense strand
cagaaacugccaagcauca

SEQ ID NO: 219254 - RNA, 19 nt, Homo sapiens
  misc_RNA (1)...(19): siRNA sense strand
uaugacaucugccaaagcu

SEQ ID NO: 219255 - RNA, 19 nt, Homo sapiens
  misc_RNA (1)...(19): siRNA sense strand
aaugucagauucucagcuu

SEQ ID NO: 219256 - RNA, 19 nt, Homo sapiens
  misc_RNA (1)...(19): siRNA sense strand
ucgagacuuugccaaggua

SEQ ID NO: 219257 - RNA, 19 nt, Homo sapiens
  misc_RNA (1)...(19): siRNA sense strand
gcaaaaggccauaaaaugc

SEQ ID NO: 219258 - RNA, 19 nt, Homo sapiens
  misc_RNA (1)...(19): siRNA sense strand
cugcaugauucuauccaaa

SEQ ID NO: 219259 - RNA, 19 nt, Homo sapiens
  misc_RNA (1)...(19): siRNA sense strand
uaaagcacauuuggaagac

SEQ ID NO: 219260 - RNA, 19 nt, Homo sapiens
  misc_RNA (1)...(19): siRNA sense strand
acaggagucuaaagcacuu

SEQ ID NO: 219261 - RNA, 19 nt, Homo sapiens
  misc_RNA (1)...(19): siRNA sense strand
acagauaccuuuucaagca

SEQ ID NO: 219262 - RNA, 19 nt, Homo sapiens
  misc_RNA (1)...(19): siRNA sense strand
aagcacauuuggaagacaa

SEQ ID NO: 219263 - RNA, 19 nt, Homo sapiens
  misc_RNA (1)...(19): siRNA sense strand
gcuaauaauaagccagaga

SEQ ID NO: 219264 - RNA, 19 nt, Homo sapiens
  misc_RNA (1)...(19): siRNA sense strand
caagagcacaacaauuugg

SEQ ID NO: 219265 - RNA, 19 nt, Homo sapiens
  misc_RNA (1)...(19): siRNA sense strand
ccugucagcugcaugugau

SEQ ID NO: 219266 - RNA, 19 nt, Homo sapiens
  misc_RNA (1)...(19): siRNA sense strand
gcugcugaauguuuaugau

SEQ ID NO: 219267 - RNA, 19 nt, Homo sapiens
  misc_RNA (1)...(19): siRNA sense strand
acagagcucuaccagucuu

SEQ ID NO: 219268 - RNA, 19 nt, Homo sapiens
  misc_RNA (1)...(19): siRNA sense strand
acaguugggugaaguugca

SEQ ID NO: 219269 - RNA, 19 nt, Homo sapiens
  misc_RNA (1)...(19): siRNA sense strand
guuugaccacuauuuauga

SEQ ID NO: 219270 - RNA, 19 nt, Homo sapiens
  misc_RNA (1)...(19): siRNA sense strand
gcuuauaggacugccauga

SEQ ID NO: 219271 - RNA, 19 nt, Homo sapiens
  misc_RNA (1)...(19): siRNA sense strand
caucaggccaaauguaaca

SEQ ID NO: 219272 - RNA, 19 nt, Homo sapiens
  misc_RNA (1)...(19): siRNA sense strand
gauucuauccaaauuccaa

SEQ ID NO: 219273 - RNA, 19 nt, Homo sapiens
  misc_RNA (1)...(19): siRNA sense strand
ggcaaguucaacaggauuu

SEQ ID NO: 219274 - RNA, 19 nt, Homo sapiens
  misc_RNA (1)...(19): siRNA sense strand
gaacuggcugcugaauguu

SEQ ID NO: 219275 - RNA, 19 nt, Homo sapiens
  misc_RNA (1)...(19): siRNA sense strand
cugcugaauguuuaugaua

SEQ ID NO: 219276 - RNA, 19 nt, Homo sapiens
  misc_RNA (1)...(19): siRNA sense strand
aagcaucaggccaaaugua

SEQ ID NO: 219277 - RNA, 19 nt, Homo sapiens
  misc_RNA (1)...(19): siRNA sense strand
uggcaucauuucccugugu

SEQ ID NO: 219278 - RNA, 19 nt, Homo sapiens
  misc_RNA (1)...(19): siRNA sense strand
ccaugaaacuccgaagacu

SEQ ID NO: 219279 - RNA, 19 nt, Homo sapiens
  misc_RNA (1)...(19): siRNA sense strand
auaauaagccagagaucga

SEQ ID NO: 219280 - RNA, 19 nt, Homo sapiens
  misc_RNA (1)...(19): siRNA sense strand
cuaauaauaagccagagau

SEQ ID NO: 219281 - RNA, 19 nt, Homo sapiens
  misc_RNA (1)...(19): siRNA sense strand
ugggugaaguugcauccuu

SEQ ID NO: 219282 - RNA, 19 nt, Homo sapiens
  misc_RNA (1)...(19): siRNA sense strand
caucauuucccuguguaaa

SEQ ID NO: 219283 - RNA, 19 nt, Homo sapiens
  misc_RNA (1)...(19): siRNA sense strand
gcguggauaugugucugaa

SEQ ID NO: 219284 - RNA, 19 nt, Homo sapiens
  misc_RNA (1)...(19): siRNA sense strand
gcacuaucccaugguggaa

SEQ ID NO: 219285 - RNA, 19 nt, Homo sapiens
  misc_RNA (1)...(19): siRNA sense strand
gagccugucagcugcaugu

SEQ ID NO: 219286 - RNA, 19 nt, Homo sapiens
  misc_RNA (1)...(19): siRNA sense strand
guacagauaccuuuucaag

SEQ ID NO: 219287 - RNA, 19 nt, Homo sapiens
  misc_RNA (1)...(19): siRNA sense strand
gucccucucugcguggaua

SEQ ID NO: 219288 - RNA, 19 nt, Homo sapiens
  misc_RNA (1)...(19): siRNA sense strand
ggagcugcuuccaauuugc

SEQ ID NO: 219289 - RNA, 19 nt, Homo sapiens
  misc_RNA (1)...(19): siRNA sense strand
uuagcugaccugaauaaug

SEQ ID NO: 219290 - RNA, 19 nt, Homo sapiens
  misc_RNA (1)...(19): siRNA sense strand
guggcaaguucaacaggau

SEQ ID NO: 219291 - RNA, 19 nt, Homo sapiens
  misc_RNA (1)...(19): siRNA sense strand
acaacaauuuggucaacgu

SEQ ID NO: 219292 - RNA, 19 nt, Homo sapiens
  misc_RNA (1)...(19): siRNA sense strand
gacuacaucaggagaagau

SEQ ID NO: 219293 - RNA, 19 nt, Homo sapiens
  misc_RNA (1)...(19): siRNA sense strand
uaauaagccagagaucgaa

SEQ ID NO: 219294 - RNA, 19 nt, Homo sapiens
  misc_RNA (1)...(19): siRNA sense strand
ugucagauucucagcuuau

SEQ ID NO: 219295 - RNA, 19 nt, Homo sapiens
  misc_RNA (1)...(19): siRNA sense strand
ggauauccugcagauuauu

SEQ ID NO: 219296 - RNA, 19 nt, Homo sapiens
  misc_RNA (1)...(19): siRNA sense strand
agcaucaggccaaauguaa

SEQ ID NO: 219297 - RNA, 19 nt, Homo sapiens
  misc_RNA (1)...(19): siRNA sense strand
gcccuuugcuuggaucucu

SEQ ID NO: 219298 - RNA, 19 nt, Homo sapiens
  misc_RNA (1)...(19): siRNA sense strand
gcugaauguuuaugauacg

SEQ ID NO: 219299 - RNA, 19 nt, Homo sapiens
  misc_RNA (1)...(19): siRNA sense strand
agacuuugccaagguacua

SEQ ID NO: 219300 - RNA, 19 nt, Homo sapiens
  misc_RNA (1)...(19): siRNA sense strand
caagcaaguggcaaguuca

SEQ ID NO: 219301 - RNA, 19 nt, Homo sapiens
  misc_RNA (1)...(19): siRNA sense strand
agacaaguacagauaccuu

SEQ ID NO: 219302 - RNA, 19 nt, Homo sapiens
  misc_RNA (1)...(19): siRNA sense strand
gcaucauuucccuguguaa

SEQ ID NO: 219303 - RNA, 19 nt, Homo sapiens
  misc_RNA (1)...(19): siRNA sense strand
cugcaaagaguguccaauc

SEQ ID NO: 219304 - RNA, 19 nt, Homo sapiens
  misc_RNA (1)...(19): siRNA sense strand
cuuauaggacugccaugaa

SEQ ID NO: 219305 - RNA, 19 nt, Homo sapiens
  misc_RNA (1)...(19): siRNA sense strand
caaagaguguccaaucauu

SEQ ID NO: 219306 - RNA, 19 nt, Homo sapiens
  misc_RNA (1)...(19): siRNA sense strand
uagcugaccugaauaaugu

SEQ ID NO: 219307 - RNA, 19 nt, Homo sapiens
  misc_RNA (1)...(19): siRNA sense strand
gcaugauucuauccaaauu

SEQ ID NO: 219308 - RNA, 19 nt, Homo sapiens
  misc_RNA (1)...(19): siRNA sense strand
ugaacuggcugcugaaugu

SEQ ID NO: 219309 - RNA, 19 nt, Homo sapiens
  misc_RNA (1)...(19): siRNA sense strand
gauauccugcagauuauua

SEQ ID NO: 219310 - RNA, 19 nt, Homo sapiens
  misc_RNA (1)...(19): siRNA sense strand
gagaagauguucgagacuu

SEQ ID NO: 219311 - RNA, 19 nt, Homo sapiens
  misc_RNA (1)...(19): siRNA sense strand
gcacuuuaauuaugacauc

SEQ ID NO: 219312 - RNA, 19 nt, Homo sapiens
  misc_RNA (1)...(19): siRNA sense strand
guaaagcacauuuggaaga

SEQ ID NO: 219313 - RNA, 19 nt, Homo sapiens
  misc_RNA (1)...(19): siRNA sense strand
gaauauugcacuccgacua

SEQ ID NO: 219314 - RNA, 19 nt, Homo sapiens
  misc_RNA (1)...(19): siRNA sense strand
uuauaggacugccaugaaa

SEQ ID NO: 219315 - RNA, 19 nt, Homo sapiens
  misc_RNA (1)...(19): siRNA sense strand
gggugaaguugcauccuuu

SEQ ID NO: 219316 - RNA, 19 nt, Homo sapiens
  misc_RNA (1)...(19): siRNA sense strand
gcaagagcacaacaauuug

SEQ ID NO: 219317 - RNA, 19 nt, Homo sapiens
  misc_RNA (1)...(19): siRNA sense strand
gcacaacaauuuggucaac

SEQ ID NO: 219318 - RNA, 19 nt, Homo sapiens
  misc_RNA (1)...(19): siRNA sense strand
agcaagagcacaacaauuu

SEQ ID NO: 219319 - RNA, 19 nt, Homo sapiens
  misc_RNA (1)...(19): siRNA sense strand
agaagauguucgagacuuu

SEQ ID NO: 219320 - RNA, 19 nt, Homo sapiens
  misc_RNA (1)...(19): siRNA sense strand
gagcaagagcacaacaauu

SEQ ID NO: 219321 - RNA, 19 nt, Homo sapiens
  misc_RNA (1)...(19): siRNA sense strand
ucaagcaaguggcaaguuc

SEQ ID NO: 219322 - RNA, 19 nt, Homo sapiens
  misc_RNA (1)...(19): siRNA sense strand
ccacgagacucaaacaacu

SEQ ID NO: 219323 - RNA, 19 nt, Homo sapiens
  misc_RNA (1)...(19): siRNA sense strand
cagcacaaccucaagcaaa

SEQ ID NO: 219324 - RNA, 19 nt, Homo sapiens
  misc_RNA (1)...(19): siRNA sense strand
gcaaagaguguccaaucau

SEQ ID NO: 219325 - RNA, 19 nt, Homo sapiens
  misc_RNA (1)...(19): siRNA sense strand
auggauauccugcagauua

SEQ ID NO: 219326 - RNA, 19 nt, Homo sapiens
  misc_RNA (1)...(19): siRNA sense strand
uguaacaucugcaaagagu

SEQ ID NO: 219327 - RNA, 19 nt, Homo sapiens
  misc_RNA (1)...(19): siRNA sense strand
guccggagcugcuuccaau

SEQ ID NO: 219328 - RNA, 19 nt, Homo sapiens
  misc_RNA (1)...(19): siRNA sense strand
gcaaguggcaaguucaaca

SEQ ID NO: 219329 - RNA, 19 nt, Homo sapiens
  misc_RNA (1)...(19): siRNA sense strand
gcuuccaauuugcuaauaa

SEQ ID NO: 219330 - RNA, 19 nt, Homo sapiens
  misc_RNA (1)...(19): siRNA sense strand
uggaagacaaguacagaua

SEQ ID NO: 219331 - RNA, 19 nt, Homo sapiens
  misc_RNA (1)...(19): siRNA sense strand
ggauccguguccugucuuu

SEQ ID NO: 219332 - RNA, 19 nt, Homo sapiens
  misc_RNA (1)...(19): siRNA sense strand
gucuuuagcugaccugaau

SEQ ID NO: 219333 - RNA, 19 nt, Homo sapiens
  misc_RNA (1)...(19): siRNA sense strand
gacaaguacagauaccuuu

SEQ ID NO: 219334 - RNA, 19 nt, Homo sapiens
  misc_RNA (1)...(19): siRNA sense strand
ccaagcaucaggccaaaug

SEQ ID NO: 219335 - RNA, 19 nt, Homo sapiens
  misc_RNA (1)...(19): siRNA sense strand
ggagcaagagcacaacaau

SEQ ID NO: 219336 - RNA, 19 nt, Homo sapiens
  misc_RNA (1)...(19): siRNA sense strand
guguaaagcacauuuggaa

SEQ ID NO: 219337 - RNA, 19 nt, Homo sapiens
  misc_RNA (1)...(19): siRNA sense strand
caagacaguugggugaagu

SEQ ID NO: 219338 - RNA, 19 nt, Homo sapiens
  misc_RNA (1)...(19): siRNA sense strand
gaagauguucgagacuuug

SEQ ID NO: 219339 - RNA, 19 nt, Homo sapiens
  misc_RNA (1)...(19): siRNA sense strand
gucagauucucagcuuaua

SEQ ID NO: 219340 - RNA, 19 nt, Homo sapiens
  misc_RNA (1)...(19): siRNA sense strand
uaacaucugcaaagagugu

SEQ ID NO: 219341 - RNA, 19 nt, Homo sapiens
  misc_RNA (1)...(19): siRNA sense strand
cggagcugcuuccaauuug

SEQ ID NO: 219342 - RNA, 19 nt, Homo sapiens
  misc_RNA (1)...(19): siRNA sense strand
gaagacaaguacagauacc

SEQ ID NO: 219343 - RNA, 19 nt, Homo sapiens
  misc_RNA (1)...(19): siRNA sense strand
ccauggauauccugcagau

SEQ ID NO: 219344 - RNA, 19 nt, Homo sapiens
  misc_RNA (1)...(19): siRNA sense strand
ggcaucauuucccugugua

SEQ ID NO: 219345 - RNA, 19 nt, Homo sapiens
  misc_RNA (1)...(19): siRNA sense strand
uggauauccugcagauuau

SEQ ID NO: 219346 - RNA, 19 nt, Homo sapiens
  misc_RNA (1)...(19): siRNA sense strand
ggaagacaaguacagauac

SEQ ID NO: 219347 - RNA, 19 nt, Homo sapiens
  misc_RNA (1)...(19): siRNA sense strand
ugcaaagaguguccaauca

SEQ ID NO: 219348 - RNA, 19 nt, Homo sapiens
  misc_RNA (1)...(19): siRNA sense strand
guggauaugugucugaacu

SEQ ID NO: 219349 - RNA, 19 nt, Homo sapiens
  misc_RNA (1)...(19): siRNA sense strand
acuggcugcugaauguuua

SEQ ID NO: 219350 - RNA, 19 nt, Homo sapiens
  misc_RNA (1)...(19): siRNA sense strand
acuaucccaugguggaaua

SEQ ID NO: 219351 - RNA, 19 nt, Homo sapiens
  misc_RNA (1)...(19): siRNA sense strand
ccggagcugcuuccaauuu

SEQ ID NO: 219352 - RNA, 19 nt, Homo sapiens
  misc_RNA (1)...(19): siRNA sense strand
ccaaauuccaagacaguug

SEQ ID NO: 219353 - RNA, 19 nt, Homo sapiens
  misc_RNA (1)...(19): siRNA sense strand
cagaaacugccaagcauca

SEQ ID NO: 219354 - RNA, 19 nt, Homo sapiens
  misc_RNA (1)...(19): siRNA sense strand
uaugacaucugccaaagcu

SEQ ID NO: 219355 - RNA, 19 nt, Homo sapiens
  misc_RNA (1)...(19): siRNA sense strand
aaugucagauucucagcuu

SEQ ID NO: 219356 - RNA, 19 nt, Homo sapiens
  misc_RNA (1)...(19): siRNA sense strand
ucgagacuuugccaaggua

SEQ ID NO: 219357 - RNA, 19 nt, Homo sapiens
  misc_RNA (1)...(19): siRNA sense strand
gcaaaaggccauaaaaugc

SEQ ID NO: 219358 - RNA, 19 nt, Homo sapiens
  misc_RNA (1)...(19): siRNA sense strand
cugcaugauucuauccaaa

SEQ ID NO: 219359 - RNA, 19 nt, Homo sapiens
  misc_RNA (1)...(19): siRNA sense strand
uaaagcacauuuggaagac

SEQ ID NO: 219360 - RNA, 19 nt, Homo sapiens
  misc_RNA (1)...(19): siRNA sense strand
acaggagucuaaagcacuu

SEQ ID NO: 219361 - RNA, 19 nt, Homo sapiens
  misc_RNA (1)...(19): siRNA sense strand
acagauaccuuuucaagca

SEQ ID NO: 219362 - RNA, 19 nt, Homo sapiens
  misc_RNA (1)...(19): siRNA sense strand
aagcacauuuggaagacaa

SEQ ID NO: 219363 - RNA, 19 nt, Homo sapiens
  misc_RNA (1)...(19): siRNA sense strand
gcuaauaauaagccagaga

SEQ ID NO: 219364 - RNA, 19 nt, Homo sapiens
  misc_RNA (1)...(19): siRNA sense strand
caagagcacaacaauuugg

SEQ ID NO: 219365 - RNA, 19 nt, Homo sapiens
  misc_RNA (1)...(19): siRNA sense strand
ccugucagcugcaugugau

SEQ ID NO: 219366 - RNA, 19 nt, Homo sapiens
  misc_RNA (1)...(19): siRNA sense strand
gcugcugaauguuuaugau

SEQ ID NO: 219367 - RNA, 19 nt, Homo sapiens
  misc_RNA (1)...(19): siRNA sense strand
acagagcucuaccagucuu

SEQ ID NO: 219368 - RNA, 19 nt, Homo sapiens
  misc_RNA (1)...(19): siRNA sense strand
acaguugggugaaguugca

SEQ ID NO: 219369 - RNA, 19 nt, Homo sapiens
  misc_RNA (1)...(19): siRNA sense strand
guuugaccacuauuuauga

SEQ ID NO: 219370 - RNA, 19 nt, Homo sapiens
  misc_RNA (1)...(19): siRNA sense strand
gcuuauaggacugccauga

SEQ ID NO: 219371 - RNA, 19 nt, Homo sapiens
  misc_RNA (1)...(19): siRNA sense strand
caucaggccaaauguaaca

SEQ ID NO: 219372 - RNA, 19 nt, Homo sapiens
  misc_RNA (1)...(19): siRNA sense strand
gauucuauccaaauuccaa

SEQ ID NO: 219373 - RNA, 19 nt, Homo sapiens
  misc_RNA (1)...(19): siRNA sense strand
ggcaaguucaacaggauuu

SEQ ID NO: 219374 - RNA, 19 nt, Homo sapiens
  misc_RNA (1)...(19): siRNA sense strand
gaacuggcugcugaauguu

SEQ ID NO: 219375 - RNA, 19 nt, Homo sapiens
  misc_RNA (1)...(19): siRNA sense strand
cugcugaauguuuaugaua

SEQ ID NO: 219376 - RNA, 19 nt, Homo sapiens
  misc_RNA (1)...(19): siRNA sense strand
aagcaucaggccaaaugua

SEQ ID NO: 219377 - RNA, 19 nt, Homo sapiens
  misc_RNA (1)...(19): siRNA sense strand
uggcaucauuucccugugu

SEQ ID NO: 219378 - RNA, 19 nt, Homo sapiens
  misc_RNA (1)...(19): siRNA sense strand
ccaugaaacuccgaagacu

SEQ ID NO: 219379 - RNA, 19 nt, Homo sapiens
  misc_RNA (1)...(19): siRNA sense strand
auaauaagccagagaucga

SEQ ID NO: 219380 - RNA, 19 nt, Homo sapiens
  misc_RNA (1)...(19): siRNA sense strand
cuaauaauaagccagagau

SEQ ID NO: 219381 - RNA, 19 nt, Homo sapiens
  misc_RNA (1)...(19): siRNA sense strand
ugggugaaguugcauccuu

SEQ ID NO: 219382 - RNA, 19 nt, Homo sapiens
  misc_RNA (1)...(19): siRNA sense strand
caucauuucccuguguaaa

SEQ ID NO: 219383 - RNA, 19 nt, Homo sapiens
  misc_RNA (1)...(19): siRNA sense strand
gcguggauaugugucugaa

SEQ ID NO: 219384 - RNA, 19 nt, Homo sapiens
  misc_RNA (1)...(19): siRNA sense strand
gcacuaucccaugguggaa

SEQ ID NO: 219385 - RNA, 19 nt, Homo sapiens
  misc_RNA (1)...(19): siRNA sense strand
gagccugucagcugcaugu

SEQ ID NO: 219386 - RNA, 19 nt, Homo sapiens
  misc_RNA (1)...(19): siRNA sense strand
guacagauaccuuuucaag

SEQ ID NO: 219387 - RNA, 19 nt, Homo sapiens
  misc_RNA (1)...(19): siRNA sense strand
gucccucucugcguggaua

SEQ ID NO: 219388 - RNA, 19 nt, Homo sapiens
  misc_RNA (1)...(19): siRNA sense strand
ggagcugcuuccaauuugc

SEQ ID NO: 219389 - RNA, 19 nt, Homo sapiens
  misc_RNA (1)...(19): siRNA sense strand
uuagcugaccugaauaaug

SEQ ID NO: 219390 - RNA, 19 nt, Homo sapiens
  misc_RNA (1)...(19): siRNA sense strand
guggcaaguucaacaggau

SEQ ID NO: 219391 - RNA, 19 nt, Homo sapiens
  misc_RNA (1)...(19): siRNA sense strand
acaacaauuuggucaacgu

SEQ ID NO: 219392 - RNA, 19 nt, Homo sapiens
  misc_RNA (1)...(19): siRNA sense strand
gacuacaucaggagaagau

SEQ ID NO: 219393 - RNA, 19 nt, Homo sapiens
  misc_RNA (1)...(19): siRNA sense strand
uaauaagccagagaucgaa

SEQ ID NO: 219394 - RNA, 19 nt, Homo sapiens
  misc_RNA (1)...(19): siRNA sense strand
ugucagauucucagcuuau

SEQ ID NO: 219395 - RNA, 19 nt, Homo sapiens
  misc_RNA (1)...(19): siRNA sense strand
ggauauccugcagauuauu

SEQ ID NO: 219396 - RNA, 19 nt, Homo sapiens
  misc_RNA (1)...(19): siRNA sense strand
agcaucaggccaaauguaa

SEQ ID NO: 219397 - RNA, 19 nt, Homo sapiens
  misc_RNA (1)...(19): siRNA sense strand
gcccuuugcuuggaucucu

SEQ ID NO: 219398 - RNA, 19 nt, Homo sapiens
  misc_RNA (1)...(19): siRNA sense strand
gcugaauguuuaugauacg

SEQ ID NO: 219399 - RNA, 19 nt, Homo sapiens
  misc_RNA (1)...(19): siRNA sense strand
agacuuugccaagguacua

SEQ ID NO: 219400 - RNA, 19 nt, Homo sapiens
  misc_RNA (1)...(19): siRNA sense strand
caagcaaguggcaaguuca

SEQ ID NO: 219401 - RNA, 19 nt, Homo sapiens
  misc_RNA (1)...(19): siRNA sense strand
agacaaguacagauaccuu

SEQ ID NO: 219402 - RNA, 19 nt, Homo sapiens
  misc_RNA (1)...(19): siRNA sense strand
gcaucauuucccuguguaa

SEQ ID NO: 219403 - RNA, 19 nt, Homo sapiens
  misc_RNA (1)...(19): siRNA sense strand
cugcaaagaguguccaauc

SEQ ID NO: 219404 - RNA, 19 nt, Homo sapiens
  misc_RNA (1)...(19): siRNA sense strand
cuuauaggacugccaugaa

SEQ ID NO: 219405 - RNA, 19 nt, Homo sapiens
  misc_RNA (1)...(19): siRNA sense strand
caaagaguguccaaucauu

SEQ ID NO: 219406 - RNA, 19 nt, Homo sapiens
  misc_RNA (1)...(19): siRNA sense strand
uagcugaccugaauaaugu

SEQ ID NO: 219407 - RNA, 19 nt, Homo sapiens
  misc_RNA (1)...(19): siRNA sense strand
gcaugauucuauccaaauu

SEQ ID NO: 219408 - RNA, 19 nt, Homo sapiens
  misc_RNA (1)...(19): siRNA sense strand
ugaacuggcugcugaaugu

SEQ ID NO: 219409 - RNA, 19 nt, Homo sapiens
  misc_RNA (1)...(19): siRNA sense strand
gauauccugcagauuauua

SEQ ID NO: 219410 - RNA, 19 nt, Homo sapiens
  misc_RNA (1)...(19): siRNA sense strand
gagaagauguucgagacuu

SEQ ID NO: 219411 - RNA, 19 nt, Homo sapiens
  misc_RNA (1)...(19): siRNA sense strand
gcacuuuaauuaugacauc

SEQ ID NO: 219412 - RNA, 19 nt, Homo sapiens
  misc_RNA (1)...(19): siRNA sense strand
guaaagcacauuuggaaga

SEQ ID NO: 219413 - RNA, 19 nt, Homo sapiens
  misc_RNA (1)...(19): siRNA sense strand
gaauauugcacuccgacua

SEQ ID NO: 219414 - RNA, 19 nt, Homo sapiens
  misc_RNA (1)...(19): siRNA sense strand
uuauaggacugccaugaaa

SEQ ID NO: 219415 - RNA, 19 nt, Homo sapiens
  misc_RNA (1)...(19): siRNA sense strand
gggugaaguugcauccuuu

SEQ ID NO: 219416 - RNA, 19 nt, Homo sapiens
  misc_RNA (1)...(19): siRNA sense strand
gcaagagcacaacaauuug

SEQ ID NO: 219417 - RNA, 19 nt, Homo sapiens
  misc_RNA (1)...(19): siRNA sense strand
gcacaacaauuuggucaac

SEQ ID NO: 219418 - RNA, 19 nt, Homo sapiens
  misc_RNA (1)...(19): siRNA sense strand
agcaagagcacaacaauuu

SEQ ID NO: 219419 - RNA, 19 nt, Homo sapiens
  misc_RNA (1)...(19): siRNA sense strand
agaagauguucgagacuuu

SEQ ID NO: 219420 - RNA, 19 nt, Homo sapiens
  misc_RNA (1)...(19): siRNA sense strand
gagcaagagcacaacaauu

SEQ ID NO: 219421 - RNA, 19 nt, Homo sapiens
  misc_RNA (1)...(19): siRNA sense strand
ucaagcaaguggcaaguuc

SEQ ID NO: 219422 - RNA, 19 nt, Homo sapiens
  misc_RNA (1)...(19): siRNA sense strand
ccacgagacucaaacaacu

SEQ ID NO: 219423 - RNA, 19 nt, Homo sapiens
  misc_RNA (1)...(19): siRNA sense strand
cagcacaaccucaagcaaa

SEQ ID NO: 219424 - RNA, 19 nt, Homo sapiens
  misc_RNA (1)...(19): siRNA sense strand
gcaaagaguguccaaucau

SEQ ID NO: 219425 - RNA, 19 nt, Homo sapiens
  misc_RNA (1)...(19): siRNA sense strand
auggauauccugcagauua

SEQ ID NO: 219426 - RNA, 19 nt, Homo sapiens
  misc_RNA (1)...(19): siRNA sense strand
uguaacaucugcaaagagu

SEQ ID NO: 219427 - RNA, 19 nt, Homo sapiens
  misc_RNA (1)...(19): siRNA sense strand
guccggagcugcuuccaau

SEQ ID NO: 219428 - RNA, 19 nt, Homo sapiens
  misc_RNA (1)...(19): siRNA sense strand
gcaaguggcaaguucaaca

SEQ ID NO: 219429 - RNA, 19 nt, Homo sapiens
  misc_RNA (1)...(19): siRNA sense strand
gcuuccaauuugcuaauaa

SEQ ID NO: 219430 - RNA, 19 nt, Homo sapiens
  misc_RNA (1)...(19): siRNA sense strand
uggaagacaaguacagaua

SEQ ID NO: 219431 - RNA, 19 nt, Homo sapiens
  misc_RNA (1)...(19): siRNA sense strand
ggauccguguccugucuuu

SEQ ID NO: 219432 - RNA, 19 nt, Homo sapiens
  misc_RNA (1)...(19): siRNA sense strand
gucuuuagcugaccugaau

SEQ ID NO: 219433 - RNA, 19 nt, Homo sapiens
  misc_RNA (1)...(19): siRNA sense strand
gacaaguacagauaccuuu

SEQ ID NO: 219434 - RNA, 19 nt, Homo sapiens
  misc_RNA (1)...(19): siRNA sense strand
ccaagcaucaggccaaaug

SEQ ID NO: 219435 - RNA, 19 nt, Homo sapiens
  misc_RNA (1)...(19): siRNA sense strand
ggagcaagagcacaacaau

SEQ ID NO: 219436 - RNA, 19 nt, Homo sapiens
  misc_RNA (1)...(19): siRNA sense strand
guguaaagcacauuuggaa

SEQ ID NO: 219437 - RNA, 19 nt, Homo sapiens
  misc_RNA (1)...(19): siRNA sense strand
caagacaguugggugaagu

SEQ ID NO: 219438 - RNA, 19 nt, Homo sapiens
  misc_RNA (1)...(19): siRNA sense strand
gaagauguucgagacuuug

SEQ ID NO: 219439 - RNA, 19 nt, Homo sapiens
  misc_RNA (1)...(19): siRNA sense strand
gucagauucucagcuuaua

SEQ ID NO: 219440 - RNA, 19 nt, Homo sapiens
  misc_RNA (1)...(19): siRNA sense strand
uaacaucugcaaagagugu

SEQ ID NO: 219441 - RNA, 19 nt, Homo sapiens
  misc_RNA (1)...(19): siRNA sense strand
cggagcugcuuccaauuug

SEQ ID NO: 219442 - RNA, 19 nt, Homo sapiens
  misc_RNA (1)...(19): siRNA sense strand
gaagacaaguacagauacc

SEQ ID NO: 219443 - RNA, 19 nt, Homo sapiens
  misc_RNA (1)...(19): siRNA sense strand
ccauggauauccugcagau

SEQ ID NO: 219444 - RNA, 19 nt, Homo sapiens
  misc_RNA (1)...(19): siRNA sense strand
ggcaucauuucccugugua

SEQ ID NO: 219445 - RNA, 19 nt, Homo sapiens
  misc_RNA (1)...(19): siRNA sense strand
uggauauccugcagauuau

SEQ ID NO: 219446 - RNA, 19 nt, Homo sapiens
  misc_RNA (1)...(19): siRNA sense strand
ggaagacaaguacagauac

SEQ ID NO: 219447 - RNA, 19 nt, Homo sapiens
  misc_RNA (1)...(19): siRNA sense strand
ugcaaagaguguccaauca

SEQ ID NO: 219448 - RNA, 19 nt, Homo sapiens
  misc_RNA (1)...(19): siRNA sense strand
guggauaugugucugaacu

SEQ ID NO: 219449 - RNA, 19 nt, Homo sapiens
  misc_RNA (1)...(19): siRNA sense strand
acuggcugcugaauguuua

SEQ ID NO: 219450 - RNA, 19 nt, Homo sapiens
  misc_RNA (1)...(19): siRNA sense strand
acuaucccaugguggaaua

SEQ ID NO: 219451 - RNA, 19 nt, Homo sapiens
  misc_RNA (1)...(19): siRNA sense strand
ccggagcugcuuccaauuu

SEQ ID NO: 219452 - RNA, 19 nt, Homo sapiens
  misc_RNA (1)...(19): siRNA sense strand
ccaaauuccaagacaguug

SEQ ID NO: 219453 - RNA, 19 nt, Homo sapiens
  misc_RNA (1)...(19): siRNA sense strand
cagaaacugccaagcauca

SEQ ID NO: 219454 - RNA, 19 nt, Homo sapiens
  misc_RNA (1)...(19): siRNA sense strand
uaugacaucugccaaagcu

SEQ ID NO: 219455 - RNA, 19 nt, Homo sapiens
  misc_RNA (1)...(19): siRNA sense strand
aaugucagauucucagcuu

SEQ ID NO: 219456 - RNA, 19 nt, Homo sapiens
  misc_RNA (1)...(19): siRNA sense strand
ucgagacuuugccaaggua

SEQ ID NO: 219457 - RNA, 19 nt, Homo sapiens
  misc_RNA (1)...(19): siRNA sense strand
gcaaaaggccauaaaaugc

SEQ ID NO: 219458 - RNA, 19 nt, Homo sapiens
  misc_RNA (1)...(19): siRNA sense strand
cugcaugauucuauccaaa

SEQ ID NO: 219459 - RNA, 19 nt, Homo sapiens
  misc_RNA (1)...(19): siRNA sense strand
uaaagcacauuuggaagac

SEQ ID NO: 219460 - RNA, 19 nt, Homo sapiens
  misc_RNA (1)...(19): siRNA sense strand
acaggagucuaaagcacuu

SEQ ID NO: 219461 - RNA, 19 nt, Homo sapiens
  misc_RNA (1)...(19): siRNA sense strand
acagauaccuuuucaagca

SEQ ID NO: 219462 - RNA, 19 nt, Homo sapiens
  misc_RNA (1)...(19): siRNA sense strand
aagcacauuuggaagacaa

SEQ ID NO: 219463 - RNA, 19 nt, Homo sapiens
  misc_RNA (1)...(19): siRNA sense strand
gcuaauaauaagccagaga

SEQ ID NO: 219464 - RNA, 19 nt, Homo sapiens
  misc_RNA (1)...(19): siRNA sense strand
caagagcacaacaauuugg

SEQ ID NO: 219465 - RNA, 19 nt, Homo sapiens
  misc_RNA (1)...(19): siRNA sense strand
ccugucagcugcaugugau

SEQ ID NO: 219466 - RNA, 19 nt, Homo sapiens
  misc_RNA (1)...(19): siRNA sense strand
gcugcugaauguuuaugau

SEQ ID NO: 219467 - RNA, 19 nt, Homo sapiens
  misc_RNA (1)...(19): siRNA sense strand
acagagcucuaccagucuu

SEQ ID NO: 219468 - RNA, 19 nt, Homo sapiens
  misc_RNA (1)...(19): siRNA sense strand
acaguugggugaaguugca

SEQ ID NO: 219469 - RNA, 19 nt, Homo sapiens
  misc_RNA (1)...(19): siRNA sense strand
guuugaccacuauuuauga

SEQ ID NO: 219470 - RNA, 19 nt, Homo sapiens
  misc_RNA (1)...(19): siRNA sense strand
gcuuauaggacugccauga

SEQ ID NO: 219471 - RNA, 19 nt, Homo sapiens
  misc_RNA (1)...(19): siRNA sense strand
caucaggccaaauguaaca

SEQ ID NO: 219472 - RNA, 19 nt, Homo sapiens
  misc_RNA (1)...(19): siRNA sense strand
gauucuauccaaauuccaa

SEQ ID NO: 219473 - RNA, 19 nt, Homo sapiens
  misc_RNA (1)...(19): siRNA sense strand
ggcaaguucaacaggauuu

SEQ ID NO: 219474 - RNA, 19 nt, Homo sapiens
  misc_RNA (1)...(19): siRNA sense strand
gaacuggcugcugaauguu

SEQ ID NO: 219475 - RNA, 19 nt, Homo sapiens
  misc_RNA (1)...(19): siRNA sense strand
cugcugaauguuuaugaua

SEQ ID NO: 219476 - RNA, 19 nt, Homo sapiens
  misc_RNA (1)...(19): siRNA sense strand
aagcaucaggccaaaugua

SEQ ID NO: 219477 - RNA, 19 nt, Homo sapiens
  misc_RNA (1)...(19): siRNA sense strand
uggcaucauuucccugugu

SEQ ID NO: 219478 - RNA, 19 nt, Homo sapiens
  misc_RNA (1)...(19): siRNA sense strand
ccaugaaacuccgaagacu

SEQ ID NO: 219479 - RNA, 19 nt, Homo sapiens
  misc_RNA (1)...(19): siRNA sense strand
auaauaagccagagaucga

SEQ ID NO: 219480 - RNA, 19 nt, Homo sapiens
  misc_RNA (1)...(19): siRNA sense strand
cuaauaauaagccagagau

SEQ ID NO: 219481 - RNA, 19 nt, Homo sapiens
  misc_RNA (1)...(19): siRNA sense strand
ugggugaaguugcauccuu

SEQ ID NO: 219482 - RNA, 19 nt, Homo sapiens
  misc_RNA (1)...(19): siRNA sense strand
caucauuucccuguguaaa

SEQ ID NO: 219483 - RNA, 19 nt, Homo sapiens
  misc_RNA (1)...(19): siRNA sense strand
gcguggauaugugucugaa

SEQ ID NO: 219484 - RNA, 19 nt, Homo sapiens
  misc_RNA (1)...(19): siRNA sense strand
gcacuaucccaugguggaa

SEQ ID NO: 219485 - RNA, 19 nt, Homo sapiens
  misc_RNA (1)...(19): siRNA sense strand
gagccugucagcugcaugu

SEQ ID NO: 219486 - RNA, 19 nt, Homo sapiens
  misc_RNA (1)...(19): siRNA sense strand
guacagauaccuuuucaag

SEQ ID NO: 219487 - RNA, 19 nt, Homo sapiens
  misc_RNA (1)...(19): siRNA sense strand
gucccucucugcguggaua

SEQ ID NO: 219488 - RNA, 19 nt, Homo sapiens
  misc_RNA (1)...(19): siRNA sense strand
ggagcugcuuccaauuugc

SEQ ID NO: 219489 - RNA, 19 nt, Homo sapiens
  misc_RNA (1)...(19): siRNA sense strand
uuagcugaccugaauaaug

SEQ ID NO: 219490 - RNA, 19 nt, Homo sapiens
  misc_RNA (1)...(19): siRNA sense strand
guggcaaguucaacaggau

SEQ ID NO: 219491 - RNA, 19 nt, Homo sapiens
  misc_RNA (1)...(19): siRNA sense strand
acaacaauuuggucaacgu

SEQ ID NO: 219492 - RNA, 19 nt, Homo sapiens
  misc_RNA (1)...(19): siRNA sense strand
gacuacaucaggagaagau

SEQ ID NO: 219493 - RNA, 19 nt, Homo sapiens
  misc_RNA (1)...(19): siRNA sense strand
uaauaagccagagaucgaa

SEQ ID NO: 219494 - RNA, 19 nt, Homo sapiens
  misc_RNA (1)...(19): siRNA sense strand
ugucagauucucagcuuau

SEQ ID NO: 219495 - RNA, 19 nt, Homo sapiens
  misc_RNA (1)...(19): siRNA sense strand
ggauauccugcagauuauu

SEQ ID NO: 219496 - RNA, 19 nt, Homo sapiens
  misc_RNA (1)...(19): siRNA sense strand
agcaucaggccaaauguaa

SEQ ID NO: 219497 - RNA, 19 nt, Homo sapiens
  misc_RNA (1)...(19): siRNA sense strand
gcccuuugcuuggaucucu

SEQ ID NO: 219498 - RNA, 19 nt, Homo sapiens
  misc_RNA (1)...(19): siRNA sense strand
gcugaauguuuaugauacg

SEQ ID NO: 219499 - RNA, 19 nt, Homo sapiens
  misc_RNA (1)...(19): siRNA sense strand
agacuuugccaagguacua

SEQ ID NO: 219500 - RNA, 19 nt, Homo sapiens
  misc_RNA (1)...(19): siRNA sense strand
caagcaaguggcaaguuca

SEQ ID NO: 219501 - RNA, 19 nt, Homo sapiens
  misc_RNA (1)...(19): siRNA sense strand
agacaaguacagauaccuu

SEQ ID NO: 219502 - RNA, 19 nt, Homo sapiens
  misc_RNA (1)...(19): siRNA sense strand
gcaucauuucccuguguaa

SEQ ID NO: 219503 - RNA, 19 nt, Homo sapiens
  misc_RNA (1)...(19): siRNA sense strand
cugcaaagaguguccaauc

SEQ ID NO: 219504 - RNA, 19 nt, Homo sapiens
  misc_RNA (1)...(19): siRNA sense strand
cuuauaggacugccaugaa

SEQ ID NO: 219505 - RNA, 19 nt, Homo sapiens
  misc_RNA (1)...(19): siRNA sense strand
caaagaguguccaaucauu

SEQ ID NO: 219506 - RNA, 19 nt, Homo sapiens
  misc_RNA (1)...(19): siRNA sense strand
uagcugaccugaauaaugu

SEQ ID NO: 219507 - RNA, 19 nt, Homo sapiens
  misc_RNA (1)...(19): siRNA sense strand
gcaugauucuauccaaauu

SEQ ID NO: 219508 - RNA, 19 nt, Homo sapiens
  misc_RNA (1)...(19): siRNA sense strand
ugaacuggcugcugaaugu

SEQ ID NO: 219509 - RNA, 19 nt, Homo sapiens
  misc_RNA (1)...(19): siRNA sense strand
gauauccugcagauuauua

SEQ ID NO: 219510 - RNA, 19 nt, Homo sapiens
  misc_RNA (1)...(19): siRNA sense strand
gagaagauguucgagacuu

SEQ ID NO: 219511 - RNA, 19 nt, Homo sapiens
  misc_RNA (1)...(19): siRNA sense strand
gcacuuuaauuaugacauc

SEQ ID NO: 219512 - RNA, 19 nt, Homo sapiens
  misc_RNA (1)...(19): siRNA sense strand
guaaagcacauuuggaaga

SEQ ID NO: 219513 - RNA, 19 nt, Homo sapiens
  misc_RNA (1)...(19): siRNA sense strand
gaauauugcacuccgacua

SEQ ID NO: 219514 - RNA, 19 nt, Homo sapiens
  misc_RNA (1)...(19): siRNA sense strand
uuauaggacugccaugaaa

SEQ ID NO: 219515 - RNA, 19 nt, Homo sapiens
  misc_RNA (1)...(19): siRNA sense strand
gggugaaguugcauccuuu

SEQ ID NO: 219516 - RNA, 19 nt, Homo sapiens
  misc_RNA (1)...(19): siRNA sense strand
gcaagagcacaacaauuug

SEQ ID NO: 219517 - RNA, 19 nt, Homo sapiens
  misc_RNA (1)...(19): siRNA sense strand
gcacaacaauuuggucaac

SEQ ID NO: 219518 - RNA, 19 nt, Homo sapiens
  misc_RNA (1)...(19): siRNA sense strand
agcaagagcacaacaauuu

SEQ ID NO: 219519 - RNA, 19 nt, Homo sapiens
  misc_RNA (1)...(19): siRNA sense strand
agaagauguucgagacuuu

SEQ ID NO: 219520 - RNA, 19 nt, Homo sapiens
  misc_RNA (1)...(19): siRNA sense strand
gagcaagagcacaacaauu

SEQ ID NO: 219521 - RNA, 19 nt, Homo sapiens
  misc_RNA (1)...(19): siRNA sense strand
ucaagcaaguggcaaguuc

SEQ ID NO: 219522 - RNA, 19 nt, Homo sapiens
  misc_RNA (1)...(19): siRNA sense strand
ccacgagacucaaacaacu

SEQ ID NO: 219523 - RNA, 19 nt, Homo sapiens
  misc_RNA (1)...(19): siRNA sense strand
cagcacaaccucaagcaaa

SEQ ID NO: 219524 - RNA, 19 nt, Homo sapiens
  misc_RNA (1)...(19): siRNA sense strand
gcaaagaguguccaaucau

SEQ ID NO: 219525 - RNA, 19 nt, Homo sapiens
  misc_RNA (1)...(19): siRNA sense strand
auggauauccugcagauua

SEQ ID NO: 219526 - RNA, 19 nt, Homo sapiens
  misc_RNA (1)...(19): siRNA sense strand
uguaacaucugcaaagagu

SEQ ID NO: 219527 - RNA, 19 nt, Homo sapiens
  misc_RNA (1)...(19): siRNA sense strand
guccggagcugcuuccaau

SEQ ID NO: 219528 - RNA, 19 nt, Homo sapiens
  misc_RNA (1)...(19): siRNA sense strand
gcaaguggcaaguucaaca

SEQ ID NO: 219529 - RNA, 19 nt, Homo sapiens
  misc_RNA (1)...(19): siRNA sense strand
gcuuccaauuugcuaauaa

SEQ ID NO: 219530 - RNA, 19 nt, Homo sapiens
  misc_RNA (1)...(19): siRNA sense strand
uggaagacaaguacagaua

SEQ ID NO: 219531 - RNA, 19 nt, Homo sapiens
  misc_RNA (1)...(19): siRNA sense strand
ggauccguguccugucuuu

SEQ ID NO: 219532 - RNA, 19 nt, Homo sapiens
  misc_RNA (1)...(19): siRNA sense strand
gucuuuagcugaccugaau

SEQ ID NO: 219533 - RNA, 19 nt, Homo sapiens
  misc_RNA (1)...(19): siRNA sense strand
gacaaguacagauaccuuu

SEQ ID NO: 219534 - RNA, 19 nt, Homo sapiens
  misc_RNA (1)...(19): siRNA sense strand
ccaagcaucaggccaaaug

SEQ ID NO: 219535 - RNA, 19 nt, Homo sapiens
  misc_RNA (1)...(19): siRNA sense strand
ggagcaagagcacaacaau

SEQ ID NO: 219536 - RNA, 19 nt, Homo sapiens
  misc_RNA (1)...(19): siRNA sense strand
guguaaagcacauuuggaa

SEQ ID NO: 219537 - RNA, 19 nt, Homo sapiens
  misc_RNA (1)...(19): siRNA sense strand
caagacaguugggugaagu

SEQ ID NO: 219538 - RNA, 19 nt, Homo sapiens
  misc_RNA (1)...(19): siRNA sense strand
gaagauguucgagacuuug

SEQ ID NO: 219539 - RNA, 19 nt, Homo sapiens
  misc_RNA (1)...(19): siRNA sense strand
gucagauucucagcuuaua

SEQ ID NO: 219540 - RNA, 19 nt, Homo sapiens
  misc_RNA (1)...(19): siRNA sense strand
uaacaucugcaaagagugu

SEQ ID NO: 219541 - RNA, 19 nt, Homo sapiens
  misc_RNA (1)...(19): siRNA sense strand
cggagcugcuuccaauuug

SEQ ID NO: 219542 - RNA, 19 nt, Homo sapiens
  misc_RNA (1)...(19): siRNA sense strand
gaagacaaguacagauacc

SEQ ID NO: 219543 - RNA, 19 nt, Homo sapiens
  misc_RNA (1)...(19): siRNA sense strand
ccauggauauccugcagau

SEQ ID NO: 219544 - RNA, 19 nt, Homo sapiens
  misc_RNA (1)...(19): siRNA sense strand
ggcaucauuucccugugua

SEQ ID NO: 219545 - RNA, 19 nt, Homo sapiens
  misc_RNA (1)...(19): siRNA sense strand
uggauauccugcagauuau

SEQ ID NO: 219546 - RNA, 19 nt, Homo sapiens
  misc_RNA (1)...(19): siRNA sense strand
ggaagacaaguacagauac

SEQ ID NO: 219547 - RNA, 19 nt, Homo sapiens
  misc_RNA (1)...(19): siRNA sense strand
ugcaaagaguguccaauca

SEQ ID NO: 219548 - RNA, 19 nt, Homo sapiens
  misc_RNA (1)...(19): siRNA sense strand
guggauaugugucugaacu

SEQ ID NO: 219549 - RNA, 19 nt, Homo sapiens
  misc_RNA (1)...(19): siRNA sense strand
acuggcugcugaauguuua

SEQ ID NO: 219550 - RNA, 19 nt, Homo sapiens
  misc_RNA (1)...(19): siRNA sense strand
acuaucccaugguggaaua

SEQ ID NO: 219551 - RNA, 19 nt, Homo sapiens
  misc_RNA (1)...(19): siRNA sense strand
ccggagcugcuuccaauuu

SEQ ID NO: 219552 - RNA, 19 nt, Homo sapiens
  misc_RNA (1)...(19): siRNA sense strand
ccaaauuccaagacaguug

SEQ ID NO: 219553 - RNA, 19 nt, Homo sapiens
  misc_RNA (1)...(19): siRNA sense strand
cagaaacugccaagcauca

SEQ ID NO: 219554 - RNA, 19 nt, Homo sapiens
  misc_RNA (1)...(19): siRNA sense strand
uaugacaucugccaaagcu

SEQ ID NO: 219555 - RNA, 19 nt, Homo sapiens
  misc_RNA (1)...(19): siRNA sense strand
aaugucagauucucagcuu

SEQ ID NO: 219556 - RNA, 19 nt, Homo sapiens
  misc_RNA (1)...(19): siRNA sense strand
ucgagacuuugccaaggua

SEQ ID NO: 219557 - RNA, 19 nt, Homo sapiens
  misc_RNA (1)...(19): siRNA sense strand
gcaaaaggccauaaaaugc

SEQ ID NO: 219558 - RNA, 19 nt, Homo sapiens
  misc_RNA (1)...(19): siRNA sense strand
cugcaugauucuauccaaa

SEQ ID NO: 219559 - RNA, 19 nt, Homo sapiens
  misc_RNA (1)...(19): siRNA sense strand
uaaagcacauuuggaagac

SEQ ID NO: 219560 - RNA, 19 nt, Homo sapiens
  misc_RNA (1)...(19): siRNA sense strand
acaggagucuaaagcacuu

SEQ ID NO: 219561 - RNA, 19 nt, Homo sapiens
  misc_RNA (1)...(19): siRNA sense strand
acagauaccuuuucaagca

SEQ ID NO: 219562 - RNA, 19 nt, Homo sapiens
  misc_RNA (1)...(19): siRNA sense strand
aagcacauuuggaagacaa

SEQ ID NO: 219563 - RNA, 19 nt, Homo sapiens
  misc_RNA (1)...(19): siRNA sense strand
gcuaauaauaagccagaga

SEQ ID NO: 219564 - RNA, 19 nt, Homo sapiens
  misc_RNA (1)...(19): siRNA sense strand
caagagcacaacaauuugg

SEQ ID NO: 219565 - RNA, 19 nt, Homo sapiens
  misc_RNA (1)...(19): siRNA sense strand
ccugucagcugcaugugau

SEQ ID NO: 219566 - RNA, 19 nt, Homo sapiens
  misc_RNA (1)...(19): siRNA sense strand
gcugcugaauguuuaugau

SEQ ID NO: 219567 - RNA, 19 nt, Homo sapiens
  misc_RNA (1)...(19): siRNA sense strand
acagagcucuaccagucuu

SEQ ID NO: 219568 - RNA, 19 nt, Homo sapiens
  misc_RNA (1)...(19): siRNA sense strand
acaguugggugaaguugca

SEQ ID NO: 219569 - RNA, 19 nt, Homo sapiens
  misc_RNA (1)...(19): siRNA sense strand
guuugaccacuauuuauga

SEQ ID NO: 219570 - RNA, 19 nt, Homo sapiens
  misc_RNA (1)...(19): siRNA sense strand
gcuuauaggacugccauga

SEQ ID NO: 219571 - RNA, 19 nt, Homo sapiens
  misc_RNA (1)...(19): siRNA sense strand
caucaggccaaauguaaca

SEQ ID NO: 219572 - RNA, 19 nt, Homo sapiens
  misc_RNA (1)...(19): siRNA sense strand
gauucuauccaaauuccaa

SEQ ID NO: 219573 - RNA, 19 nt, Homo sapiens
  misc_RNA (1)...(19): siRNA sense strand
ggcaaguucaacaggauuu

SEQ ID NO: 219574 - RNA, 19 nt, Homo sapiens
  misc_RNA (1)...(19): siRNA sense strand
gaacuggcugcugaauguu

SEQ ID NO: 219575 - RNA, 19 nt, Homo sapiens
  misc_RNA (1)...(19): siRNA sense strand
cugcugaauguuuaugaua

SEQ ID NO: 219576 - RNA, 19 nt, Homo sapiens
  misc_RNA (1)...(19): siRNA sense strand
aagcaucaggccaaaugua

SEQ ID NO: 219577 - RNA, 19 nt, Homo sapiens
  misc_RNA (1)...(19): siRNA sense strand
uggcaucauuucccugugu

SEQ ID NO: 219578 - RNA, 19 nt, Homo sapiens
  misc_RNA (1)...(19): siRNA sense strand
ccaugaaacuccgaagacu

SEQ ID NO: 219579 - RNA, 19 nt, Homo sapiens
  misc_RNA (1)...(19): siRNA sense strand
auaauaagccagagaucga

SEQ ID NO: 219580 - RNA, 19 nt, Homo sapiens
  misc_RNA (1)...(19): siRNA sense strand
cuaauaauaagccagagau

SEQ ID NO: 219581 - RNA, 19 nt, Homo sapiens
  misc_RNA (1)...(19): siRNA sense strand
ugggugaaguugcauccuu

SEQ ID NO: 219582 - RNA, 19 nt, Homo sapiens
  misc_RNA (1)...(19): siRNA sense strand
caucauuucccuguguaaa

SEQ ID NO: 219583 - RNA, 19 nt, Homo sapiens
  misc_RNA (1)...(19): siRNA sense strand
gcguggauaugugucugaa

SEQ ID NO: 219584 - RNA, 19 nt, Homo sapiens
  misc_RNA (1)...(19): siRNA sense strand
gcacuaucccaugguggaa

SEQ ID NO: 219585 - RNA, 19 nt, Homo sapiens
  misc_RNA (1)...(19): siRNA sense strand
gagccugucagcugcaugu

SEQ ID NO: 219586 - RNA, 19 nt, Homo sapiens
  misc_RNA (1)...(19): siRNA sense strand
guacagauaccuuuucaag

SEQ ID NO: 219587 - RNA, 19 nt, Homo sapiens
  misc_RNA (1)...(19): siRNA sense strand
gucccucucugcguggaua

SEQ ID NO: 219588 - RNA, 19 nt, Homo sapiens
  misc_RNA (1)...(19): siRNA sense strand
ggagcugcuuccaauuugc

SEQ ID NO: 219589 - RNA, 19 nt, Homo sapiens
  misc_RNA (1)...(19): siRNA sense strand
uuagcugaccugaauaaug

SEQ ID NO: 219590 - RNA, 19 nt, Homo sapiens
  misc_RNA (1)...(19): siRNA sense strand
guggcaaguucaacaggau

SEQ ID NO: 219591 - RNA, 19 nt, Homo sapiens
  misc_RNA (1)...(19): siRNA sense strand
acaacaauuuggucaacgu

SEQ ID NO: 219592 - RNA, 19 nt, Homo sapiens
  misc_RNA (1)...(19): siRNA sense strand
gacuacaucaggagaagau

SEQ ID NO: 219593 - RNA, 19 nt, Homo sapiens
  misc_RNA (1)...(19): siRNA sense strand
uaauaagccagagaucgaa

SEQ ID NO: 219594 - RNA, 19 nt, Homo sapiens
  misc_RNA (1)...(19): siRNA sense strand
ugucagauucucagcuuau

SEQ ID NO: 219595 - RNA, 19 nt, Homo sapiens
  misc_RNA (1)...(19): siRNA sense strand
ggauauccugcagauuauu

SEQ ID NO: 219596 - RNA, 19 nt, Homo sapiens
  misc_RNA (1)...(19): siRNA sense strand
agcaucaggccaaauguaa

SEQ ID NO: 219597 - RNA, 19 nt, Homo sapiens
  misc_RNA (1)...(19): siRNA sense strand
gcccuuugcuuggaucucu

SEQ ID NO: 219598 - RNA, 19 nt, Homo sapiens
  misc_RNA (1)...(19): siRNA sense strand
gcugaauguuuaugauacg

SEQ ID NO: 219599 - RNA, 19 nt, Homo sapiens
  misc_RNA (1)...(19): siRNA sense strand
agacuuugccaagguacua

SEQ ID NO: 219600 - RNA, 19 nt, Homo sapiens
  misc_RNA (1)...(19): siRNA sense strand
caagcaaguggcaaguuca

SEQ ID NO: 219601 - RNA, 19 nt, Homo sapiens
  misc_RNA (1)...(19): siRNA sense strand
agacaaguacagauaccuu

SEQ ID NO: 219602 - RNA, 19 nt, Homo sapiens
  misc_RNA (1)...(19): siRNA sense strand
gcaucauuucccuguguaa

SEQ ID NO: 219603 - RNA, 19 nt, Homo sapiens
  misc_RNA (1)...(19): siRNA sense strand
cugcaaagaguguccaauc

SEQ ID NO: 219604 - RNA, 19 nt, Homo sapiens
  misc_RNA (1)...(19): siRNA sense strand
cuuauaggacugccaugaa

SEQ ID NO: 219605 - RNA, 19 nt, Homo sapiens
  misc_RNA (1)...(19): siRNA sense strand
caaagaguguccaaucauu

SEQ ID NO: 219606 - RNA, 19 nt, Homo sapiens
  misc_RNA (1)...(19): siRNA sense strand
uagcugaccugaauaaugu

SEQ ID NO: 219607 - RNA, 19 nt, Homo sapiens
  misc_RNA (1)...(19): siRNA sense strand
gcaugauucuauccaaauu

SEQ ID NO: 219608 - RNA, 19 nt, Homo sapiens
  misc_RNA (1)...(19): siRNA sense strand
ugaacuggcugcugaaugu

SEQ ID NO: 219609 - RNA, 19 nt, Homo sapiens
  misc_RNA (1)...(19): siRNA sense strand
gauauccugcagauuauua

SEQ ID NO: 219610 - RNA, 19 nt, Homo sapiens
  misc_RNA (1)...(19): siRNA sense strand
gagaagauguucgagacuu

SEQ ID NO: 219611 - RNA, 19 nt, Homo sapiens
  misc_RNA (1)...(19): siRNA sense strand
gcacuuuaauuaugacauc

SEQ ID NO: 219612 - RNA, 19 nt, Homo sapiens
  misc_RNA (1)...(19): siRNA sense strand
guaaagcacauuuggaaga

SEQ ID NO: 219613 - RNA, 19 nt, Homo sapiens
  misc_RNA (1)...(19): siRNA sense strand
gaauauugcacuccgacua

SEQ ID NO: 219614 - RNA, 19 nt, Homo sapiens
  misc_RNA (1)...(19): siRNA sense strand
uuauaggacugccaugaaa

SEQ ID NO: 219615 - RNA, 19 nt, Homo sapiens
  misc_RNA (1)...(19): siRNA sense strand
gggugaaguugcauccuuu

SEQ ID NO: 219616 - RNA, 19 nt, Homo sapiens
  misc_RNA (1)...(19): siRNA sense strand
gcaagagcacaacaauuug

SEQ ID NO: 219617 - RNA, 19 nt, Homo sapiens
  misc_RNA (1)...(19): siRNA sense strand
gcacaacaauuuggucaac

SEQ ID NO: 219618 - RNA, 19 nt, Homo sapiens
  misc_RNA (1)...(19): siRNA sense strand
agcaagagcacaacaauuu

SEQ ID NO: 219619 - RNA, 19 nt, Homo sapiens
  misc_RNA (1)...(19): siRNA sense strand
agaagauguucgagacuuu

SEQ ID NO: 219620 - RNA, 19 nt, Homo sapiens
  misc_RNA (1)...(19): siRNA sense strand
gagcaagagcacaacaauu

SEQ ID NO: 219621 - RNA, 19 nt, Homo sapiens
  misc_RNA (1)...(19): siRNA sense strand
ucaagcaaguggcaaguuc

SEQ ID NO: 219622 - RNA, 19 nt, Homo sapiens
  misc_RNA (1)...(19): siRNA sense strand
ccacgagacucaaacaacu

SEQ ID NO: 219623 - RNA, 19 nt, Homo sapiens
  misc_RNA (1)...(19): siRNA sense strand
cagcacaaccucaagcaaa

SEQ ID NO: 219624 - RNA, 19 nt, Homo sapiens
  misc_RNA (1)...(19): siRNA sense strand
gcaaagaguguccaaucau

SEQ ID NO: 219625 - RNA, 19 nt, Homo sapiens
  misc_RNA (1)...(19): siRNA sense strand
auggauauccugcagauua

SEQ ID NO: 219626 - RNA, 19 nt, Homo sapiens
  misc_RNA (1)...(19): siRNA sense strand
uguaacaucugcaaagagu

SEQ ID NO: 219627 - RNA, 19 nt, Homo sapiens
  misc_RNA (1)...(19): siRNA sense strand
guccggagcugcuuccaau

SEQ ID NO: 219628 - RNA, 19 nt, Homo sapiens
  misc_RNA (1)...(19): siRNA sense strand
gcaaguggcaaguucaaca

SEQ ID NO: 219629 - RNA, 19 nt, Homo sapiens
  misc_RNA (1)...(19): siRNA sense strand
gcuuccaauuugcuaauaa

SEQ ID NO: 219630 - RNA, 19 nt, Homo sapiens
  misc_RNA (1)...(19): siRNA sense strand
uggaagacaaguacagaua

SEQ ID NO: 219631 - RNA, 19 nt, Homo sapiens
  misc_RNA (1)...(19): siRNA sense strand
ggauccguguccugucuuu

SEQ ID NO: 219632 - RNA, 19 nt, Homo sapiens
  misc_RNA (1)...(19): siRNA sense strand
gucuuuagcugaccugaau

SEQ ID NO: 219633 - RNA, 19 nt, Homo sapiens
  misc_RNA (1)...(19): siRNA sense strand
gacaaguacagauaccuuu

SEQ ID NO: 219634 - RNA, 19 nt, Homo sapiens
  misc_RNA (1)...(19): siRNA sense strand
ccaagcaucaggccaaaug

SEQ ID NO: 219635 - RNA, 19 nt, Homo sapiens
  misc_RNA (1)...(19): siRNA sense strand
ggagcaagagcacaacaau

SEQ ID NO: 219636 - RNA, 19 nt, Homo sapiens
  misc_RNA (1)...(19): siRNA sense strand
guguaaagcacauuuggaa

SEQ ID NO: 219637 - RNA, 19 nt, Homo sapiens
  misc_RNA (1)...(19): siRNA sense strand
caagacaguugggugaagu

SEQ ID NO: 219638 - RNA, 19 nt, Homo sapiens
  misc_RNA (1)...(19): siRNA sense strand
gaagauguucgagacuuug

SEQ ID NO: 219639 - RNA, 19 nt, Homo sapiens
  misc_RNA (1)...(19): siRNA sense strand
gucagauucucagcuuaua

SEQ ID NO: 219640 - RNA, 19 nt, Homo sapiens
  misc_RNA (1)...(19): siRNA sense strand
uaacaucugcaaagagugu

SEQ ID NO: 219641 - RNA, 19 nt, Homo sapiens
  misc_RNA (1)...(19): siRNA sense strand
cggagcugcuuccaauuug

SEQ ID NO: 219642 - RNA, 19 nt, Homo sapiens
  misc_RNA (1)...(19): siRNA sense strand
gaagacaaguacagauacc

SEQ ID NO: 219643 - RNA, 19 nt, Homo sapiens
  misc_RNA (1)...(19): siRNA sense strand
ccauggauauccugcagau

SEQ ID NO: 219644 - RNA, 19 nt, Homo sapiens
  misc_RNA (1)...(19): siRNA sense strand
ggcaucauuucccugugua

SEQ ID NO: 219645 - RNA, 19 nt, Homo sapiens
  misc_RNA (1)...(19): siRNA sense strand
uggauauccugcagauuau

SEQ ID NO: 219646 - RNA, 19 nt, Homo sapiens
  misc_RNA (1)...(19): siRNA sense strand
ggaagacaaguacagauac

SEQ ID NO: 219647 - RNA, 19 nt, Homo sapiens
  misc_RNA (1)...(19): siRNA sense strand
ugcaaagaguguccaauca

SEQ ID NO: 219648 - RNA, 19 nt, Homo sapiens
  misc_RNA (1)...(19): siRNA sense strand
guggauaugugucugaacu

SEQ ID NO: 219649 - RNA, 19 nt, Homo sapiens
  misc_RNA (1)...(19): siRNA sense strand
acuggcugcugaauguuua

SEQ ID NO: 219650 - RNA, 19 nt, Homo sapiens
  misc_RNA (1)...(19): siRNA sense strand
acuaucccaugguggaaua

SEQ ID NO: 219651 - RNA, 19 nt, Homo sapiens
  misc_RNA (1)...(19): siRNA sense strand
ccggagcugcuuccaauuu

SEQ ID NO: 219652 - RNA, 19 nt, Homo sapiens
  misc_RNA (1)...(19): siRNA sense strand
ccaaauuccaagacaguug

SEQ ID NO: 219653 - RNA, 19 nt, Homo sapiens
  misc_RNA (1)...(19): siRNA sense strand
cagaaacugccaagcauca

SEQ ID NO: 219654 - RNA, 19 nt, Homo sapiens
  misc_RNA (1)...(19): siRNA sense strand
uaugacaucugccaaagcu

SEQ ID NO: 219655 - RNA, 19 nt, Homo sapiens
  misc_RNA (1)...(19): siRNA sense strand
aaugucagauucucagcuu

SEQ ID NO: 219656 - RNA, 19 nt, Homo sapiens
  misc_RNA (1)...(19): siRNA sense strand
ucgagacuuugccaaggua

SEQ ID NO: 219657 - RNA, 19 nt, Homo sapiens
  misc_RNA (1)...(19): siRNA sense strand
gcaaaaggccauaaaaugc

SEQ ID NO: 219658 - RNA, 19 nt, Homo sapiens
  misc_RNA (1)...(19): siRNA sense strand
cugcaugauucuauccaaa

SEQ ID NO: 219659 - RNA, 19 nt, Homo sapiens
  misc_RNA (1)...(19): siRNA sense strand
uaaagcacauuuggaagac

SEQ ID NO: 219660 - RNA, 19 nt, Homo sapiens
  misc_RNA (1)...(19): siRNA sense strand
acaggagucuaaagcacuu

SEQ ID NO: 219661 - RNA, 19 nt, Homo sapiens
  misc_RNA (1)...(19): siRNA sense strand
acagauaccuuuucaagca

SEQ ID NO: 219662 - RNA, 19 nt, Homo sapiens
  misc_RNA (1)...(19): siRNA sense strand
aagcacauuuggaagacaa

SEQ ID NO: 219663 - RNA, 19 nt, Homo sapiens
  misc_RNA (1)...(19): siRNA sense strand
gcuaauaauaagccagaga

SEQ ID NO: 219664 - RNA, 19 nt, Homo sapiens
  misc_RNA (1)...(19): siRNA sense strand
caagagcacaacaauuugg

SEQ ID NO: 219665 - RNA, 19 nt, Homo sapiens
  misc_RNA (1)...(19): siRNA sense strand
ccugucagcugcaugugau

SEQ ID NO: 219666 - RNA, 19 nt, Homo sapiens
  misc_RNA (1)...(19): siRNA sense strand
gcugcugaauguuuaugau

SEQ ID NO: 219667 - RNA, 19 nt, Homo sapiens
  misc_RNA (1)...(19): siRNA sense strand
acagagcucuaccagucuu

SEQ ID NO: 219668 - RNA, 19 nt, Homo sapiens
  misc_RNA (1)...(19): siRNA sense strand
acaguugggugaaguugca

SEQ ID NO: 219669 - RNA, 19 nt, Homo sapiens
  misc_RNA (1)...(19): siRNA sense strand
guuugaccacuauuuauga

SEQ ID NO: 219670 - RNA, 19 nt, Homo sapiens
  misc_RNA (1)...(19): siRNA sense strand
gcuuauaggacugccauga

SEQ ID NO: 219671 - RNA, 19 nt, Homo sapiens
  misc_RNA (1)...(19): siRNA sense strand
caucaggccaaauguaaca

SEQ ID NO: 219672 - RNA, 19 nt, Homo sapiens
  misc_RNA (1)...(19): siRNA sense strand
gauucuauccaaauuccaa

SEQ ID NO: 219673 - RNA, 19 nt, Homo sapiens
  misc_RNA (1)...(19): siRNA sense strand
ggcaaguucaacaggauuu

SEQ ID NO: 219674 - RNA, 19 nt, Homo sapiens
  misc_RNA (1)...(19): siRNA sense strand
gaacuggcugcugaauguu

SEQ ID NO: 219675 - RNA, 19 nt, Homo sapiens
  misc_RNA (1)...(19): siRNA sense strand
cugcugaauguuuaugaua

SEQ ID NO: 219676 - RNA, 19 nt, Homo sapiens
  misc_RNA (1)...(19): siRNA sense strand
aagcaucaggccaaaugua

SEQ ID NO: 219677 - RNA, 19 nt, Homo sapiens
  misc_RNA (1)...(19): siRNA sense strand
uggcaucauuucccugugu

SEQ ID NO: 219678 - RNA, 19 nt, Homo sapiens
  misc_RNA (1)...(19): siRNA sense strand
ccaugaaacuccgaagacu

SEQ ID NO: 219679 - RNA, 19 nt, Homo sapiens
  misc_RNA (1)...(19): siRNA sense strand
auaauaagccagagaucga

SEQ ID NO: 219680 - RNA, 19 nt, Homo sapiens
  misc_RNA (1)...(19): siRNA sense strand
cuaauaauaagccagagau

SEQ ID NO: 219681 - RNA, 19 nt, Homo sapiens
  misc_RNA (1)...(19): siRNA sense strand
ugggugaaguugcauccuu

SEQ ID NO: 219682 - RNA, 19 nt, Homo sapiens
  misc_RNA (1)...(19): siRNA sense strand
caucauuucccuguguaaa

SEQ ID NO: 219683 - RNA, 19 nt, Homo sapiens
  misc_RNA (1)...(19): siRNA sense strand
gcguggauaugugucugaa

SEQ ID NO: 219684 - RNA, 19 nt, Homo sapiens
  misc_RNA (1)...(19): siRNA sense strand
gcacuaucccaugguggaa

SEQ ID NO: 219685 - RNA, 19 nt, Homo sapiens
  misc_RNA (1)...(19): siRNA sense strand
gagccugucagcugcaugu

SEQ ID NO: 219686 - RNA, 19 nt, Homo sapiens
  misc_RNA (1)...(19): siRNA sense strand
guacagauaccuuuucaag

SEQ ID NO: 219687 - RNA, 19 nt, Homo sapiens
  misc_RNA (1)...(19): siRNA sense strand
gucccucucugcguggaua

SEQ ID NO: 219688 - RNA, 19 nt, Homo sapiens
  misc_RNA (1)...(19): siRNA sense strand
ggagcugcuuccaauuugc

SEQ ID NO: 219689 - RNA, 19 nt, Homo sapiens
  misc_RNA (1)...(19): siRNA sense strand
uuagcugaccugaauaaug

SEQ ID NO: 219690 - RNA, 19 nt, Homo sapiens
  misc_RNA (1)...(19): siRNA sense strand
guggcaaguucaacaggau

SEQ ID NO: 219691 - RNA, 19 nt, Homo sapiens
  misc_RNA (1)...(19): siRNA sense strand
acaacaauuuggucaacgu

SEQ ID NO: 219692 - RNA, 19 nt, Homo sapiens
  misc_RNA (1)...(19): siRNA sense strand
gacuacaucaggagaagau

SEQ ID NO: 219693 - RNA, 19 nt, Homo sapiens
  misc_RNA (1)...(19): siRNA sense strand
uaauaagccagagaucgaa

SEQ ID NO: 219694 - RNA, 19 nt, Homo sapiens
  misc_RNA (1)...(19): siRNA sense strand
ugucagauucucagcuuau

SEQ ID NO: 219695 - RNA, 19 nt, Homo sapiens
  misc_RNA (1)...(19): siRNA sense strand
ggauauccugcagauuauu

SEQ ID NO: 219696 - RNA, 19 nt, Homo sapiens
  misc_RNA (1)...(19): siRNA sense strand
agcaucaggccaaauguaa

SEQ ID NO: 219697 - RNA, 19 nt, Homo sapiens
  misc_RNA (1)...(19): siRNA sense strand
gcccuuugcuuggaucucu

SEQ ID NO: 219698 - RNA, 19 nt, Homo sapiens
  misc_RNA (1)...(19): siRNA sense strand
gcugaauguuuaugauacg

SEQ ID NO: 219699 - RNA, 19 nt, Homo sapiens
  misc_RNA (1)...(19): siRNA sense strand
agacuuugccaagguacua

SEQ ID NO: 219700 - RNA, 19 nt, Homo sapiens
  misc_RNA (1)...(19): siRNA sense strand
caagcaaguggcaaguuca

SEQ ID NO: 219701 - RNA, 19 nt, Homo sapiens
  misc_RNA (1)...(19): siRNA sense strand
agacaaguacagauaccuu

SEQ ID NO: 219702 - RNA, 19 nt, Homo sapiens
  misc_RNA (1)...(19): siRNA sense strand
gcaucauuucccuguguaa

SEQ ID NO: 219703 - RNA, 19 nt, Homo sapiens
  misc_RNA (1)...(19): siRNA sense strand
cugcaaagaguguccaauc

SEQ ID NO: 219704 - RNA, 19 nt, Homo sapiens
  misc_RNA (1)...(19): siRNA sense strand
cuuauaggacugccaugaa

SEQ ID NO: 219705 - RNA, 19 nt, Homo sapiens
  misc_RNA (1)...(19): siRNA sense strand
caaagaguguccaaucauu

SEQ ID NO: 219706 - RNA, 19 nt, Homo sapiens
  misc_RNA (1)...(19): siRNA sense strand
uagcugaccugaauaaugu

SEQ ID NO: 219707 - RNA, 19 nt, Homo sapiens
  misc_RNA (1)...(19): siRNA sense strand
gcaugauucuauccaaauu

SEQ ID NO: 219708 - RNA, 19 nt, Homo sapiens
  misc_RNA (1)...(19): siRNA sense strand
ugaacuggcugcugaaugu

SEQ ID NO: 219709 - RNA, 19 nt, Homo sapiens
  misc_RNA (1)...(19): siRNA sense strand
gauauccugcagauuauua

SEQ ID NO: 219710 - RNA, 19 nt, Homo sapiens
  misc_RNA (1)...(19): siRNA sense strand
gagaagauguucgagacuu

SEQ ID NO: 219711 - RNA, 19 nt, Homo sapiens
  misc_RNA (1)...(19): siRNA sense strand
gcacuuuaauuaugacauc

SEQ ID NO: 219712 - RNA, 19 nt, Homo sapiens
  misc_RNA (1)...(19): siRNA sense strand
guaaagcacauuuggaaga

SEQ ID NO: 219713 - RNA, 19 nt, Homo sapiens
  misc_RNA (1)...(19): siRNA sense strand
gaauauugcacuccgacua

SEQ ID NO: 219714 - RNA, 19 nt, Homo sapiens
  misc_RNA (1)...(19): siRNA sense strand
uuauaggacugccaugaaa

SEQ ID NO: 219715 - RNA, 19 nt, Homo sapiens
  misc_RNA (1)...(19): siRNA sense strand
gggugaaguugcauccuuu

SEQ ID NO: 219716 - RNA, 19 nt, Homo sapiens
  misc_RNA (1)...(19): siRNA sense strand
gcaagagcacaacaauuug

SEQ ID NO: 219717 - RNA, 19 nt, Homo sapiens
  misc_RNA (1)...(19): siRNA sense strand
gcacaacaauuuggucaac

SEQ ID NO: 219718 - RNA, 19 nt, Homo sapiens
  misc_RNA (1)...(19): siRNA sense strand
agcaagagcacaacaauuu

SEQ ID NO: 219719 - RNA, 19 nt, Homo sapiens
  misc_RNA (1)...(19): siRNA sense strand
agaagauguucgagacuuu

SEQ ID NO: 219720 - RNA, 19 nt, Homo sapiens
  misc_RNA (1)...(19): siRNA sense strand
gagcaagagcacaacaauu

SEQ ID NO: 219721 - RNA, 19 nt, Homo sapiens
  misc_RNA (1)...(19): siRNA sense strand
ucaagcaaguggcaaguuc

SEQ ID NO: 219722 - RNA, 19 nt, Homo sapiens
  misc_RNA (1)...(19): siRNA sense strand
ccacgagacucaaacaacu

SEQ ID NO: 219723 - RNA, 19 nt, Homo sapiens
  misc_RNA (1)...(19): siRNA sense strand
cagcacaaccucaagcaaa

SEQ ID NO: 219724 - RNA, 19 nt, Homo sapiens
  misc_RNA (1)...(19): siRNA sense strand
gcaaagaguguccaaucau

SEQ ID NO: 219725 - RNA, 19 nt, Homo sapiens
  misc_RNA (1)...(19): siRNA sense strand
auggauauccugcagauua

SEQ ID NO: 219726 - RNA, 19 nt, Homo sapiens
  misc_RNA (1)...(19): siRNA sense strand
uguaacaucugcaaagagu

SEQ ID NO: 219727 - RNA, 19 nt, Homo sapiens
  misc_RNA (1)...(19): siRNA sense strand
guccggagcugcuuccaau

SEQ ID NO: 219728 - RNA, 19 nt, Homo sapiens
  misc_RNA (1)...(19): siRNA sense strand
gcaaguggcaaguucaaca

SEQ ID NO: 219729 - RNA, 19 nt, Homo sapiens
  misc_RNA (1)...(19): siRNA sense strand
gcuuccaauuugcuaauaa

SEQ ID NO: 219730 - RNA, 19 nt, Homo sapiens
  misc_RNA (1)...(19): siRNA sense strand
uggaagacaaguacagaua

SEQ ID NO: 219731 - RNA, 19 nt, Homo sapiens
  misc_RNA (1)...(19): siRNA sense strand
ggauccguguccugucuuu

SEQ ID NO: 219732 - RNA, 19 nt, Homo sapiens
  misc_RNA (1)...(19): siRNA sense strand
gucuuuagcugaccugaau

SEQ ID NO: 219733 - RNA, 19 nt, Homo sapiens
  misc_RNA (1)...(19): siRNA sense strand
gacaaguacagauaccuuu

SEQ ID NO: 219734 - RNA, 19 nt, Homo sapiens
  misc_RNA (1)...(19): siRNA sense strand
ccaagcaucaggccaaaug

SEQ ID NO: 219735 - RNA, 19 nt, Homo sapiens
  misc_RNA (1)...(19): siRNA sense strand
ggagcaagagcacaacaau

SEQ ID NO: 219736 - RNA, 19 nt, Homo sapiens
  misc_RNA (1)...(19): siRNA sense strand
guguaaagcacauuuggaa

SEQ ID NO: 219737 - RNA, 19 nt, Homo sapiens
  misc_RNA (1)...(19): siRNA sense strand
caagacaguugggugaagu

SEQ ID NO: 219738 - RNA, 19 nt, Homo sapiens
  misc_RNA (1)...(19): siRNA sense strand
gaagauguucgagacuuug

SEQ ID NO: 219739 - RNA, 19 nt, Homo sapiens
  misc_RNA (1)...(19): siRNA sense strand
gucagauucucagcuuaua

SEQ ID NO: 219740 - RNA, 19 nt, Homo sapiens
  misc_RNA (1)...(19): siRNA sense strand
uaacaucugcaaagagugu

SEQ ID NO: 219741 - RNA, 19 nt, Homo sapiens
  misc_RNA (1)...(19): siRNA sense strand
cggagcugcuuccaauuug

SEQ ID NO: 219742 - RNA, 19 nt, Homo sapiens
  misc_RNA (1)...(19): siRNA sense strand
gaagacaaguacagauacc

SEQ ID NO: 219743 - RNA, 19 nt, Homo sapiens
  misc_RNA (1)...(19): siRNA sense strand
ccauggauauccugcagau

SEQ ID NO: 219744 - RNA, 19 nt, Homo sapiens
  misc_RNA (1)...(19): siRNA sense strand
ggcaucauuucccugugua

SEQ ID NO: 219745 - RNA, 19 nt, Homo sapiens
  misc_RNA (1)...(19): siRNA sense strand
uggauauccugcagauuau

SEQ ID NO: 219746 - RNA, 19 nt, Homo sapiens
  misc_RNA (1)...(19): siRNA sense strand
ggaagacaaguacagauac

SEQ ID NO: 219747 - RNA, 19 nt, Homo sapiens
  misc_RNA (1)...(19): siRNA sense strand
ugcaaagaguguccaauca

SEQ ID NO: 219748 - RNA, 19 nt, Homo sapiens
  misc_RNA (1)...(19): siRNA sense strand
guggauaugugucugaacu

SEQ ID NO: 219749 - RNA, 19 nt, Homo sapiens
  misc_RNA (1)...(19): siRNA sense strand
acuggcugcugaauguuua

SEQ ID NO: 219750 - RNA, 19 nt, Homo sapiens
  misc_RNA (1)...(19): siRNA sense strand
acuaucccaugguggaaua

SEQ ID NO: 219751 - RNA, 19 nt, Homo sapiens
  misc_RNA (1)...(19): siRNA sense strand
ccggagcugcuuccaauuu

SEQ ID NO: 219752 - RNA, 19 nt, Homo sapiens
  misc_RNA (1)...(19): siRNA sense strand
ccaaauuccaagacaguug

SEQ ID NO: 219753 - RNA, 19 nt, Homo sapiens
  misc_RNA (1)...(19): siRNA sense strand
cagaaacugccaagcauca

SEQ ID NO: 219754 - RNA, 19 nt, Homo sapiens
  misc_RNA (1)...(19): siRNA sense strand
uaugacaucugccaaagcu

SEQ ID NO: 219755 - RNA, 19 nt, Homo sapiens
  misc_RNA (1)...(19): siRNA sense strand
aaugucagauucucagcuu

SEQ ID NO: 219756 - RNA, 19 nt, Homo sapiens
  misc_RNA (1)...(19): siRNA sense strand
ucgagacuuugccaaggua

SEQ ID NO: 219757 - RNA, 19 nt, Homo sapiens
  misc_RNA (1)...(19): siRNA sense strand
gcaaaaggccauaaaaugc

SEQ ID NO: 219758 - RNA, 19 nt, Homo sapiens
  misc_RNA (1)...(19): siRNA sense strand
cugcaugauucuauccaaa

SEQ ID NO: 219759 - RNA, 19 nt, Homo sapiens
  misc_RNA (1)...(19): siRNA sense strand
uaaagcacauuuggaagac

SEQ ID NO: 219760 - RNA, 19 nt, Homo sapiens
  misc_RNA (1)...(19): siRNA sense strand
acaggagucuaaagcacuu

SEQ ID NO: 219761 - RNA, 19 nt, Homo sapiens
  misc_RNA (1)...(19): siRNA sense strand
acagauaccuuuucaagca

SEQ ID NO: 219762 - RNA, 19 nt, Homo sapiens
  misc_RNA (1)...(19): siRNA sense strand
aagcacauuuggaagacaa

SEQ ID NO: 219763 - RNA, 19 nt, Homo sapiens
  misc_RNA (1)...(19): siRNA sense strand
gcuaauaauaagccagaga

SEQ ID NO: 219764 - RNA, 19 nt, Homo sapiens
  misc_RNA (1)...(19): siRNA sense strand
caagagcacaacaauuugg

SEQ ID NO: 219765 - RNA, 19 nt, Homo sapiens
  misc_RNA (1)...(19): siRNA sense strand
ccugucagcugcaugugau

SEQ ID NO: 219766 - RNA, 19 nt, Homo sapiens
  misc_RNA (1)...(19): siRNA sense strand
gcugcugaauguuuaugau

SEQ ID NO: 219767 - RNA, 19 nt, Homo sapiens
  misc_RNA (1)...(19): siRNA sense strand
acagagcucuaccagucuu

SEQ ID NO: 219768 - RNA, 19 nt, Homo sapiens
  misc_RNA (1)...(19): siRNA sense strand
acaguugggugaaguugca

SEQ ID NO: 219769 - RNA, 19 nt, Homo sapiens
  misc_RNA (1)...(19): siRNA sense strand
guuugaccacuauuuauga

SEQ ID NO: 219770 - RNA, 19 nt, Homo sapiens
  misc_RNA (1)...(19): siRNA sense strand
gcuuauaggacugccauga

SEQ ID NO: 219771 - RNA, 19 nt, Homo sapiens
  misc_RNA (1)...(19): siRNA sense strand
caucaggccaaauguaaca

SEQ ID NO: 219772 - RNA, 19 nt, Homo sapiens
  misc_RNA (1)...(19): siRNA sense strand
gauucuauccaaauuccaa

SEQ ID NO: 219773 - RNA, 19 nt, Homo sapiens
  misc_RNA (1)...(19): siRNA sense strand
ggcaaguucaacaggauuu

SEQ ID NO: 219774 - RNA, 19 nt, Homo sapiens
  misc_RNA (1)...(19): siRNA sense strand
gaacuggcugcugaauguu

SEQ ID NO: 219775 - RNA, 19 nt, Homo sapiens
  misc_RNA (1)...(19): siRNA sense strand
cugcugaauguuuaugaua

SEQ ID NO: 219776 - RNA, 19 nt, Homo sapiens
  misc_RNA (1)...(19): siRNA sense strand
aagcaucaggccaaaugua

SEQ ID NO: 219777 - RNA, 19 nt, Homo sapiens
  misc_RNA (1)...(19): siRNA sense strand
uggcaucauuucccugugu

SEQ ID NO: 219778 - RNA, 19 nt, Homo sapiens
  misc_RNA (1)...(19): siRNA sense strand
ccaugaaacuccgaagacu

SEQ ID NO: 219779 - RNA, 19 nt, Homo sapiens
  misc_RNA (1)...(19): siRNA sense strand
auaauaagccagagaucga

SEQ ID NO: 219780 - RNA, 19 nt, Homo sapiens
  misc_RNA (1)...(19): siRNA sense strand
cuaauaauaagccagagau

SEQ ID NO: 219781 - RNA, 19 nt, Homo sapiens
  misc_RNA (1)...(19): siRNA sense strand
ugggugaaguugcauccuu

SEQ ID NO: 219782 - RNA, 19 nt, Homo sapiens
  misc_RNA (1)...(19): siRNA sense strand
caucauuucccuguguaaa

SEQ ID NO: 219783 - RNA, 19 nt, Homo sapiens
  misc_RNA (1)...(19): siRNA sense strand
gcguggauaugugucugaa

SEQ ID NO: 219784 - RNA, 19 nt, Homo sapiens
  misc_RNA (1)...(19): siRNA sense strand
gcacuaucccaugguggaa

SEQ ID NO: 219785 - RNA, 19 nt, Homo sapiens
  misc_RNA (1)...(19): siRNA sense strand
gagccugucagcugcaugu

SEQ ID NO: 219786 - RNA, 19 nt, Homo sapiens
  misc_RNA (1)...(19): siRNA sense strand
guacagauaccuuuucaag

SEQ ID NO: 219787 - RNA, 19 nt, Homo sapiens
  misc_RNA (1)...(19): siRNA sense strand
gucccucucugcguggaua

SEQ ID NO: 219788 - RNA, 19 nt, Homo sapiens
  misc_RNA (1)...(19): siRNA sense strand
ggagcugcuuccaauuugc

SEQ ID NO: 219789 - RNA, 19 nt, Homo sapiens
  misc_RNA (1)...(19): siRNA sense strand
uuagcugaccugaauaaug

SEQ ID NO: 219790 - RNA, 19 nt, Homo sapiens
  misc_RNA (1)...(19): siRNA sense strand
guggcaaguucaacaggau

SEQ ID NO: 219791 - RNA, 19 nt, Homo sapiens
  misc_RNA (1)...(19): siRNA sense strand
acaacaauuuggucaacgu

SEQ ID NO: 219792 - RNA, 19 nt, Homo sapiens
  misc_RNA (1)...(19): siRNA sense strand
gacuacaucaggagaagau

SEQ ID NO: 219793 - RNA, 19 nt, Homo sapiens
  misc_RNA (1)...(19): siRNA sense strand
uaauaagccagagaucgaa

SEQ ID NO: 219794 - RNA, 19 nt, Homo sapiens
  misc_RNA (1)...(19): siRNA sense strand
ugucagauucucagcuuau

SEQ ID NO: 219795 - RNA, 19 nt, Homo sapiens
  misc_RNA (1)...(19): siRNA sense strand
ggauauccugcagauuauu

SEQ ID NO: 219796 - RNA, 19 nt, Homo sapiens
  misc_RNA (1)...(19): siRNA sense strand
agcaucaggccaaauguaa

SEQ ID NO: 219797 - RNA, 19 nt, Homo sapiens
  misc_RNA (1)...(19): siRNA sense strand
gcccuuugcuuggaucucu

SEQ ID NO: 219798 - RNA, 19 nt, Homo sapiens
  misc_RNA (1)...(19): siRNA sense strand
gcugaauguuuaugauacg

SEQ ID NO: 219799 - RNA, 19 nt, Homo sapiens
  misc_RNA (1)...(19): siRNA sense strand
agacuuugccaagguacua

SEQ ID NO: 219800 - RNA, 19 nt, Homo sapiens
  misc_RNA (1)...(19): siRNA sense strand
caagcaaguggcaaguuca

SEQ ID NO: 219801 - RNA, 19 nt, Homo sapiens
  misc_RNA (1)...(19): siRNA sense strand
agacaaguacagauaccuu

SEQ ID NO: 219802 - RNA, 19 nt, Homo sapiens
  misc_RNA (1)...(19): siRNA sense strand
gcaucauuucccuguguaa

SEQ ID NO: 219803 - RNA, 19 nt, Homo sapiens
  misc_RNA (1)...(19): siRNA sense strand
cugcaaagaguguccaauc

SEQ ID NO: 219804 - RNA, 19 nt, Homo sapiens
  misc_RNA (1)...(19): siRNA sense strand
cuuauaggacugccaugaa

SEQ ID NO: 219805 - RNA, 19 nt, Homo sapiens
  misc_RNA (1)...(19): siRNA sense strand
caaagaguguccaaucauu

SEQ ID NO: 219806 - RNA, 19 nt, Homo sapiens
  misc_RNA (1)...(19): siRNA sense strand
uagcugaccugaauaaugu

SEQ ID NO: 219807 - RNA, 19 nt, Homo sapiens
  misc_RNA (1)...(19): siRNA sense strand
gcaugauucuauccaaauu

SEQ ID NO: 219808 - RNA, 19 nt, Homo sapiens
  misc_RNA (1)...(19): siRNA sense strand
ugaacuggcugcugaaugu

SEQ ID NO: 219809 - RNA, 19 nt, Homo sapiens
  misc_RNA (1)...(19): siRNA sense strand
gauauccugcagauuauua

SEQ ID NO: 219810 - RNA, 19 nt, Homo sapiens
  misc_RNA (1)...(19): siRNA sense strand
gagaagauguucgagacuu

SEQ ID NO: 219811 - RNA, 19 nt, Homo sapiens
  misc_RNA (1)...(19): siRNA sense strand
gcacuuuaauuaugacauc

SEQ ID NO: 219812 - RNA, 19 nt, Homo sapiens
  misc_RNA (1)...(19): siRNA sense strand
guaaagcacauuuggaaga

SEQ ID NO: 219813 - RNA, 19 nt, Homo sapiens
  misc_RNA (1)...(19): siRNA sense strand
gaauauugcacuccgacua

SEQ ID NO: 219814 - RNA, 19 nt, Homo sapiens
  misc_RNA (1)...(19): siRNA sense strand
uuauaggacugccaugaaa

SEQ ID NO: 219815 - RNA, 19 nt, Homo sapiens
  misc_RNA (1)...(19): siRNA sense strand
gggugaaguugcauccuuu

SEQ ID NO: 219816 - RNA, 19 nt, Homo sapiens
  misc_RNA (1)...(19): siRNA sense strand
gcaagagcacaacaauuug

SEQ ID NO: 219817 - RNA, 19 nt, Homo sapiens
  misc_RNA (1)...(19): siRNA sense strand
gcacaacaauuuggucaac

SEQ ID NO: 219818 - RNA, 19 nt, Homo sapiens
  misc_RNA (1)...(19): siRNA sense strand
agcaagagcacaacaauuu

SEQ ID NO: 219819 - RNA, 19 nt, Homo sapiens
  misc_RNA (1)...(19): siRNA sense strand
agaagauguucgagacuuu

SEQ ID NO: 219820 - RNA, 19 nt, Homo sapiens
  misc_RNA (1)...(19): siRNA sense strand
gagcaagagcacaacaauu

SEQ ID NO: 219821 - RNA, 19 nt, Homo sapiens
  misc_RNA (1)...(19): siRNA sense strand
ucaagcaaguggcaaguuc

SEQ ID NO: 219822 - RNA, 19 nt, Homo sapiens
  misc_RNA (1)...(19): siRNA sense strand
ccacgagacucaaacaacu

SEQ ID NO: 219823 - RNA, 19 nt, Homo sapiens
  misc_RNA (1)...(19): siRNA sense strand
cagcacaaccucaagcaaa

SEQ ID NO: 219824 - RNA, 19 nt, Homo sapiens
  misc_RNA (1)...(19): siRNA sense strand
gcaaagaguguccaaucau

SEQ ID NO: 219825 - RNA, 19 nt, Homo sapiens
  misc_RNA (1)...(19): siRNA sense strand
auggauauccugcagauua

SEQ ID NO: 219826 - RNA, 19 nt, Homo sapiens
  misc_RNA (1)...(19): siRNA sense strand
uguaacaucugcaaagagu

SEQ ID NO: 219827 - RNA, 19 nt, Homo sapiens
  misc_RNA (1)...(19): siRNA sense strand
guccggagcugcuuccaau

SEQ ID NO: 219828 - RNA, 19 nt, Homo sapiens
  misc_RNA (1)...(19): siRNA sense strand
gcaaguggcaaguucaaca

SEQ ID NO: 219829 - RNA, 19 nt, Homo sapiens
  misc_RNA (1)...(19): siRNA sense strand
gcuuccaauuugcuaauaa

SEQ ID NO: 219830 - RNA, 19 nt, Homo sapiens
  misc_RNA (1)...(19): siRNA sense strand
uggaagacaaguacagaua

SEQ ID NO: 219831 - RNA, 19 nt, Homo sapiens
  misc_RNA (1)...(19): siRNA sense strand
ggauccguguccugucuuu

SEQ ID NO: 219832 - RNA, 19 nt, Homo sapiens
  misc_RNA (1)...(19): siRNA sense strand
gucuuuagcugaccugaau

SEQ ID NO: 219833 - RNA, 19 nt, Homo sapiens
  misc_RNA (1)...(19): siRNA sense strand
gacaaguacagauaccuuu

SEQ ID NO: 219834 - RNA, 19 nt, Homo sapiens
  misc_RNA (1)...(19): siRNA sense strand
ccaagcaucaggccaaaug

SEQ ID NO: 219835 - RNA, 19 nt, Homo sapiens
  misc_RNA (1)...(19): siRNA sense strand
ggagcaagagcacaacaau

SEQ ID NO: 219836 - RNA, 19 nt, Homo sapiens
  misc_RNA (1)...(19): siRNA sense strand
guguaaagcacauuuggaa

SEQ ID NO: 219837 - RNA, 19 nt, Homo sapiens
  misc_RNA (1)...(19): siRNA sense strand
caagacaguugggugaagu

SEQ ID NO: 219838 - RNA, 19 nt, Homo sapiens
  misc_RNA (1)...(19): siRNA sense strand
gaagauguucgagacuuug

SEQ ID NO: 219839 - RNA, 19 nt, Homo sapiens
  misc_RNA (1)...(19): siRNA sense strand
gucagauucucagcuuaua

SEQ ID NO: 219840 - RNA, 19 nt, Homo sapiens
  misc_RNA (1)...(19): siRNA sense strand
uaacaucugcaaagagugu

SEQ ID NO: 219841 - RNA, 19 nt, Homo sapiens
  misc_RNA (1)...(19): siRNA sense strand
cggagcugcuuccaauuug

SEQ ID NO: 219842 - RNA, 19 nt, Homo sapiens
  misc_RNA (1)...(19): siRNA sense strand
gaagacaaguacagauacc

SEQ ID NO: 219843 - RNA, 19 nt, Homo sapiens
  misc_RNA (1)...(19): siRNA sense strand
ccauggauauccugcagau

SEQ ID NO: 219844 - RNA, 19 nt, Homo sapiens
  misc_RNA (1)...(19): siRNA sense strand
ggcaucauuucccugugua

SEQ ID NO: 219845 - RNA, 19 nt, Homo sapiens
  misc_RNA (1)...(19): siRNA sense strand
uggauauccugcagauuau

SEQ ID NO: 219846 - RNA, 19 nt, Homo sapiens
  misc_RNA (1)...(19): siRNA sense strand
ggaagacaaguacagauac

SEQ ID NO: 219847 - RNA, 19 nt, Homo sapiens
  misc_RNA (1)...(19): siRNA sense strand
ugcaaagaguguccaauca

SEQ ID NO: 219848 - RNA, 19 nt, Homo sapiens
  misc_RNA (1)...(19): siRNA sense strand
guggauaugugucugaacu

SEQ ID NO: 219849 - RNA, 19 nt, Homo sapiens
  misc_RNA (1)...(19): siRNA sense strand
acuggcugcugaauguuua

SEQ ID NO: 219850 - RNA, 19 nt, Homo sapiens
  misc_RNA (1)...(19): siRNA sense strand
acuaucccaugguggaaua

SEQ ID NO: 219851 - RNA, 19 nt, Homo sapiens
  misc_RNA (1)...(19): siRNA sense strand
ccggagcugcuuccaauuu

SEQ ID NO: 219852 - RNA, 19 nt, Homo sapiens
  misc_RNA (1)...(19): siRNA sense strand
ccaaauuccaagacaguug

SEQ ID NO: 219853 - RNA, 19 nt, Homo sapiens
  misc_RNA (1)...(19): siRNA sense strand
cagaaacugccaagcauca

SEQ ID NO: 219854 - RNA, 19 nt, Homo sapiens
  misc_RNA (1)...(19): siRNA sense strand
uaugacaucugccaaagcu

SEQ ID NO: 219855 - RNA, 19 nt, Homo sapiens
  misc_RNA (1)...(19): siRNA sense strand
aaugucagauucucagcuu

SEQ ID NO: 219856 - RNA, 19 nt, Homo sapiens
  misc_RNA (1)...(19): siRNA sense strand
ucgagacuuugccaaggua

SEQ ID NO: 219857 - RNA, 19 nt, Homo sapiens
  misc_RNA (1)...(19): siRNA sense strand
gcaaaaggccauaaaaugc

SEQ ID NO: 219858 - RNA, 19 nt, Homo sapiens
  misc_RNA (1)...(19): siRNA sense strand
cugcaugauucuauccaaa

SEQ ID NO: 219859 - RNA, 19 nt, Homo sapiens
  misc_RNA (1)...(19): siRNA sense strand
uaaagcacauuuggaagac

SEQ ID NO: 219860 - RNA, 19 nt, Homo sapiens
  misc_RNA (1)...(19): siRNA sense strand
acaggagucuaaagcacuu

SEQ ID NO: 219861 - RNA, 19 nt, Homo sapiens
  misc_RNA (1)...(19): siRNA sense strand
acagauaccuuuucaagca

SEQ ID NO: 219862 - RNA, 19 nt, Homo sapiens
  misc_RNA (1)...(19): siRNA sense strand
aagcacauuuggaagacaa

SEQ ID NO: 219863 - RNA, 19 nt, Homo sapiens
  misc_RNA (1)...(19): siRNA sense strand
gcuaauaauaagccagaga

SEQ ID NO: 219864 - RNA, 19 nt, Homo sapiens
  misc_RNA (1)...(19): siRNA sense strand
caagagcacaacaauuugg

SEQ ID NO: 219865 - RNA, 19 nt, Homo sapiens
  misc_RNA (1)...(19): siRNA sense strand
ccugucagcugcaugugau

SEQ ID NO: 219866 - RNA, 19 nt, Homo sapiens
  misc_RNA (1)...(19): siRNA sense strand
gcugcugaauguuuaugau

SEQ ID NO: 219867 - RNA, 19 nt, Homo sapiens
  misc_RNA (1)...(19): siRNA sense strand
acagagcucuaccagucuu

SEQ ID NO: 219868 - RNA, 19 nt, Homo sapiens
  misc_RNA (1)...(19): siRNA sense strand
acaguugggugaaguugca

SEQ ID NO: 219869 - RNA, 19 nt, Homo sapiens
  misc_RNA (1)...(19): siRNA sense strand
guuugaccacuauuuauga

SEQ ID NO: 219870 - RNA, 19 nt, Homo sapiens
  misc_RNA (1)...(19): siRNA sense strand
gcuuauaggacugccauga

SEQ ID NO: 219871 - RNA, 19 nt, Homo sapiens
  misc_RNA (1)...(19): siRNA sense strand
caucaggccaaauguaaca

SEQ ID NO: 219872 - RNA, 19 nt, Homo sapiens
  misc_RNA (1)...(19): siRNA sense strand
gauucuauccaaauuccaa

SEQ ID NO: 219873 - RNA, 19 nt, Homo sapiens
  misc_RNA (1)...(19): siRNA sense strand
ggcaaguucaacaggauuu

SEQ ID NO: 219874 - RNA, 19 nt, Homo sapiens
  misc_RNA (1)...(19): siRNA sense strand
gaacuggcugcugaauguu

SEQ ID NO: 219875 - RNA, 19 nt, Homo sapiens
  misc_RNA (1)...(19): siRNA sense strand
cugcugaauguuuaugaua

SEQ ID NO: 219876 - RNA, 19 nt, Homo sapiens
  misc_RNA (1)...(19): siRNA sense strand
aagcaucaggccaaaugua

SEQ ID NO: 219877 - RNA, 19 nt, Homo sapiens
  misc_RNA (1)...(19): siRNA sense strand
uggcaucauuucccugugu

SEQ ID NO: 219878 - RNA, 19 nt, Homo sapiens
  misc_RNA (1)...(19): siRNA sense strand
ccaugaaacuccgaagacu

SEQ ID NO: 219879 - RNA, 19 nt, Homo sapiens
  misc_RNA (1)...(19): siRNA sense strand
auaauaagccagagaucga

SEQ ID NO: 219880 - RNA, 19 nt, Homo sapiens
  misc_RNA (1)...(19): siRNA sense strand
cuaauaauaagccagagau

SEQ ID NO: 219881 - RNA, 19 nt, Homo sapiens
  misc_RNA (1)...(19): siRNA sense strand
ugggugaaguugcauccuu

SEQ ID NO: 219882 - RNA, 19 nt, Homo sapiens
  misc_RNA (1)...(19): siRNA sense strand
caucauuucccuguguaaa

SEQ ID NO: 219883 - RNA, 19 nt, Homo sapiens
  misc_RNA (1)...(19): siRNA sense strand
gcguggauaugugucugaa

SEQ ID NO: 219884 - RNA, 19 nt, Homo sapiens
  misc_RNA (1)...(19): siRNA sense strand
gcacuaucccaugguggaa

SEQ ID NO: 219885 - RNA, 19 nt, Homo sapiens
  misc_RNA (1)...(19): siRNA sense strand
gagccugucagcugcaugu

SEQ ID NO: 219886 - RNA, 19 nt, Homo sapiens
  misc_RNA (1)...(19): siRNA sense strand
guacagauaccuuuucaag

SEQ ID NO: 219887 - RNA, 19 nt, Homo sapiens
  misc_RNA (1)...(19): siRNA sense strand
gucccucucugcguggaua

SEQ ID NO: 219888 - RNA, 19 nt, Homo sapiens
  misc_RNA (1)...(19): siRNA sense strand
ggagcugcuuccaauuugc

SEQ ID NO: 219889 - RNA, 19 nt, Homo sapiens
  misc_RNA (1)...(19): siRNA sense strand
uuagcugaccugaauaaug

SEQ ID NO: 219890 - RNA, 19 nt, Homo sapiens
  misc_RNA (1)...(19): siRNA sense strand
guggcaaguucaacaggau

SEQ ID NO: 219891 - RNA, 19 nt, Homo sapiens
  misc_RNA (1)...(19): siRNA sense strand
acaacaauuuggucaacgu

SEQ ID NO: 219892 - RNA, 19 nt, Homo sapiens
  misc_RNA (1)...(19): siRNA sense strand
gacuacaucaggagaagau

SEQ ID NO: 219893 - RNA, 19 nt, Homo sapiens
  misc_RNA (1)...(19): siRNA sense strand
uaauaagccagagaucgaa

SEQ ID NO: 219894 - RNA, 19 nt, Homo sapiens
  misc_RNA (1)...(19): siRNA sense strand
ugucagauucucagcuuau

SEQ ID NO: 219895 - RNA, 19 nt, Homo sapiens
  misc_RNA (1)...(19): siRNA sense strand
ggauauccugcagauuauu

SEQ ID NO: 219896 - RNA, 19 nt, Homo sapiens
  misc_RNA (1)...(19): siRNA sense strand
agcaucaggccaaauguaa

SEQ ID NO: 219897 - RNA, 19 nt, Homo sapiens
  misc_RNA (1)...(19): siRNA sense strand
gcccuuugcuuggaucucu

SEQ ID NO: 219898 - RNA, 19 nt, Homo sapiens
  misc_RNA (1)...(19): siRNA sense strand
gcugaauguuuaugauacg

SEQ ID NO: 219899 - RNA, 19 nt, Homo sapiens
  misc_RNA (1)...(19): siRNA sense strand
agacuuugccaagguacua

SEQ ID NO: 219900 - RNA, 19 nt, Homo sapiens
  misc_RNA (1)...(19): siRNA sense strand
caagcaaguggcaaguuca

SEQ ID NO: 219901 - RNA, 19 nt, Homo sapiens
  misc_RNA (1)...(19): siRNA sense strand
agacaaguacagauaccuu

SEQ ID NO: 219902 - RNA, 19 nt, Homo sapiens
  misc_RNA (1)...(19): siRNA sense strand
gcaucauuucccuguguaa

SEQ ID NO: 219903 - RNA, 19 nt, Homo sapiens
  misc_RNA (1)...(19): siRNA sense strand
cugcaaagaguguccaauc

SEQ ID NO: 219904 - RNA, 19 nt, Homo sapiens
  misc_RNA (1)...(19): siRNA sense strand
cuuauaggacugccaugaa

SEQ ID NO: 219905 - RNA, 19 nt, Homo sapiens
  misc_RNA (1)...(19): siRNA sense strand
caaagaguguccaaucauu

SEQ ID NO: 219906 - RNA, 19 nt, Homo sapiens
  misc_RNA (1)...(19): siRNA sense strand
uagcugaccugaauaaugu

SEQ ID NO: 219907 - RNA, 19 nt, Homo sapiens
  misc_RNA (1)...(19): siRNA sense strand
gcaugauucuauccaaauu

SEQ ID NO: 219908 - RNA, 19 nt, Homo sapiens
  misc_RNA (1)...(19): siRNA sense strand
ugaacuggcugcugaaugu

SEQ ID NO: 219909 - RNA, 19 nt, Homo sapiens
  misc_RNA (1)...(19): siRNA sense strand
gauauccugcagauuauua

SEQ ID NO: 219910 - RNA, 19 nt, Homo sapiens
  misc_RNA (1)...(19): siRNA sense strand
gagaagauguucgagacuu

SEQ ID NO: 219911 - RNA, 19 nt, Homo sapiens
  misc_RNA (1)...(19): siRNA sense strand
gcacuuuaauuaugacauc

SEQ ID NO: 219912 - RNA, 19 nt, Homo sapiens
  misc_RNA (1)...(19): siRNA sense strand
guaaagcacauuuggaaga

SEQ ID NO: 219913 - RNA, 19 nt, Homo sapiens
  misc_RNA (1)...(19): siRNA sense strand
gaauauugcacuccgacua

SEQ ID NO: 219914 - RNA, 19 nt, Homo sapiens
  misc_RNA (1)...(19): siRNA sense strand
uuauaggacugccaugaaa

SEQ ID NO: 219915 - RNA, 19 nt, Homo sapiens
  misc_RNA (1)...(19): siRNA sense strand
gggugaaguugcauccuuu

SEQ ID NO: 219916 - RNA, 19 nt, Homo sapiens
  misc_RNA (1)...(19): siRNA sense strand
gcaagagcacaacaauuug

SEQ ID NO: 219917 - RNA, 19 nt, Homo sapiens
  misc_RNA (1)...(19): siRNA sense strand
gcacaacaauuuggucaac

SEQ ID NO: 219918 - RNA, 19 nt, Homo sapiens
  misc_RNA (1)...(19): siRNA sense strand
agcaagagcacaacaauuu

SEQ ID NO: 219919 - RNA, 19 nt, Homo sapiens
  misc_RNA (1)...(19): siRNA sense strand
agaagauguucgagacuuu

SEQ ID NO: 219920 - RNA, 19 nt, Homo sapiens
  misc_RNA (1)...(19): siRNA sense strand
gagcaagagcacaacaauu

SEQ ID NO: 219921 - RNA, 19 nt, Homo sapiens
  misc_RNA (1)...(19): siRNA sense strand
ucaagcaaguggcaaguuc

SEQ ID NO: 219922 - RNA, 19 nt, Homo sapiens
  misc_RNA (1)...(19): siRNA sense strand
ccacgagacucaaacaacu

SEQ ID NO: 219923 - RNA, 19 nt, Homo sapiens
  misc_RNA (1)...(19): siRNA sense strand
cagcacaaccucaagcaaa

SEQ ID NO: 219924 - RNA, 19 nt, Homo sapiens
  misc_RNA (1)...(19): siRNA sense strand
gcaaagaguguccaaucau

SEQ ID NO: 219925 - RNA, 19 nt, Homo sapiens
  misc_RNA (1)...(19): siRNA sense strand
auggauauccugcagauua

SEQ ID NO: 219926 - RNA, 19 nt, Homo sapiens
  misc_RNA (1)...(19): siRNA sense strand
uguaacaucugcaaagagu

SEQ ID NO: 219927 - RNA, 19 nt, Homo sapiens
  misc_RNA (1)...(19): siRNA sense strand
guccggagcugcuuccaau

SEQ ID NO: 219928 - RNA, 19 nt, Homo sapiens
  misc_RNA (1)...(19): siRNA sense strand
gcaaguggcaaguucaaca

SEQ ID NO: 219929 - RNA, 19 nt, Homo sapiens
  misc_RNA (1)...(19): siRNA sense strand
gcuuccaauuugcuaauaa

SEQ ID NO: 219930 - RNA, 19 nt, Homo sapiens
  misc_RNA (1)...(19): siRNA sense strand
uggaagacaaguacagaua

SEQ ID NO: 219931 - RNA, 19 nt, Homo sapiens
  misc_RNA (1)...(19): siRNA sense strand
ggauccguguccugucuuu

SEQ ID NO: 219932 - RNA, 19 nt, Homo sapiens
  misc_RNA (1)...(19): siRNA sense strand
gucuuuagcugaccugaau

SEQ ID NO: 219933 - RNA, 19 nt, Homo sapiens
  misc_RNA (1)...(19): siRNA sense strand
gacaaguacagauaccuuu

SEQ ID NO: 219934 - RNA, 19 nt, Homo sapiens
  misc_RNA (1)...(19): siRNA sense strand
ccaagcaucaggccaaaug

SEQ ID NO: 219935 - RNA, 19 nt, Homo sapiens
  misc_RNA (1)...(19): siRNA sense strand
ggagcaagagcacaacaau

SEQ ID NO: 219936 - RNA, 19 nt, Homo sapiens
  misc_RNA (1)...(19): siRNA sense strand
guguaaagcacauuuggaa

SEQ ID NO: 219937 - RNA, 19 nt, Homo sapiens
  misc_RNA (1)...(19): siRNA sense strand
caagacaguugggugaagu

SEQ ID NO: 219938 - RNA, 19 nt, Homo sapiens
  misc_RNA (1)...(19): siRNA sense strand
gaagauguucgagacuuug

SEQ ID NO: 219939 - RNA, 19 nt, Homo sapiens
  misc_RNA (1)...(19): siRNA sense strand
gucagauucucagcuuaua

SEQ ID NO: 219940 - RNA, 19 nt, Homo sapiens
  misc_RNA (1)...(19): siRNA sense strand
uaacaucugcaaagagugu

SEQ ID NO: 219941 - RNA, 19 nt, Homo sapiens
  misc_RNA (1)...(19): siRNA sense strand
cggagcugcuuccaauuug

SEQ ID NO: 219942 - RNA, 19 nt, Homo sapiens
  misc_RNA (1)...(19): siRNA sense strand
gaagacaaguacagauacc

SEQ ID NO: 219943 - RNA, 19 nt, Homo sapiens
  misc_RNA (1)...(19): siRNA sense strand
ccauggauauccugcagau

SEQ ID NO: 219944 - RNA, 19 nt, Homo sapiens
  misc_RNA (1)...(19): siRNA sense strand
ggcaucauuucccugugua

SEQ ID NO: 219945 - RNA, 19 nt, Homo sapiens
  misc_RNA (1)...(19): siRNA sense strand
uggauauccugcagauuau

SEQ ID NO: 219946 - RNA, 19 nt, Homo sapiens
  misc_RNA (1)...(19): siRNA sense strand
ggaagacaaguacagauac

SEQ ID NO: 219947 - RNA, 19 nt, Homo sapiens
  misc_RNA (1)...(19): siRNA sense strand
ugcaaagaguguccaauca

SEQ ID NO: 219948 - RNA, 19 nt, Homo sapiens
  misc_RNA (1)...(19): siRNA sense strand
guggauaugugucugaacu

SEQ ID NO: 219949 - RNA, 19 nt, Homo sapiens
  misc_RNA (1)...(19): siRNA sense strand
acuggcugcugaauguuua

SEQ ID NO: 219950 - RNA, 19 nt, Homo sapiens
  misc_RNA (1)...(19): siRNA sense strand
acuaucccaugguggaaua

SEQ ID NO: 219951 - RNA, 19 nt, Homo sapiens
  misc_RNA (1)...(19): siRNA sense strand
ccggagcugcuuccaauuu

SEQ ID NO: 219952 - RNA, 19 nt, Homo sapiens
  misc_RNA (1)...(19): siRNA sense strand
ccaaauuccaagacaguug

SEQ ID NO: 219953 - RNA, 19 nt, Homo sapiens
  misc_RNA (1)...(19): siRNA sense strand
cagaaacugccaagcauca

SEQ ID NO: 219954 - RNA, 19 nt, Homo sapiens
  misc_RNA (1)...(19): siRNA sense strand
uaugacaucugccaaagcu

SEQ ID NO: 219955 - RNA, 19 nt, Homo sapiens
  misc_RNA (1)...(19): siRNA sense strand
aaugucagauucucagcuu

SEQ ID NO: 219956 - RNA, 19 nt, Homo sapiens
  misc_RNA (1)...(19): siRNA sense strand
ucgagacuuugccaaggua

SEQ ID NO: 219957 - RNA, 19 nt, Homo sapiens
  misc_RNA (1)...(19): siRNA sense strand
gcaaaaggccauaaaaugc

SEQ ID NO: 219958 - RNA, 19 nt, Homo sapiens
  misc_RNA (1)...(19): siRNA sense strand
cugcaugauucuauccaaa

SEQ ID NO: 219959 - RNA, 19 nt, Homo sapiens
  misc_RNA (1)...(19): siRNA sense strand
uaaagcacauuuggaagac

SEQ ID NO: 219960 - RNA, 19 nt, Homo sapiens
  misc_RNA (1)...(19): siRNA sense strand
acaggagucuaaagcacuu

SEQ ID NO: 219961 - RNA, 19 nt, Homo sapiens
  misc_RNA (1)...(19): siRNA sense strand
acagauaccuuuucaagca

SEQ ID NO: 219962 - RNA, 19 nt, Homo sapiens
  misc_RNA (1)...(19): siRNA sense strand
aagcacauuuggaagacaa

SEQ ID NO: 219963 - RNA, 19 nt, Homo sapiens
  misc_RNA (1)...(19): siRNA sense strand
gcuaauaauaagccagaga

SEQ ID NO: 219964 - RNA, 19 nt, Homo sapiens
  misc_RNA (1)...(19): siRNA sense strand
caagagcacaacaauuugg

SEQ ID NO: 219965 - RNA, 19 nt, Homo sapiens
  misc_RNA (1)...(19): siRNA sense strand
ccugucagcugcaugugau

SEQ ID NO: 219966 - RNA, 19 nt, Homo sapiens
  misc_RNA (1)...(19): siRNA sense strand
gcugcugaauguuuaugau

SEQ ID NO: 219967 - RNA, 19 nt, Homo sapiens
  misc_RNA (1)...(19): siRNA sense strand
acagagcucuaccagucuu

SEQ ID NO: 219968 - RNA, 19 nt, Homo sapiens
  misc_RNA (1)...(19): siRNA sense strand
acaguugggugaaguugca

SEQ ID NO: 219969 - RNA, 19 nt, Homo sapiens
  misc_RNA (1)...(19): siRNA sense strand
guuugaccacuauuuauga

SEQ ID NO: 219970 - RNA, 19 nt, Homo sapiens
  misc_RNA (1)...(19): siRNA sense strand
gcuuauaggacugccauga

SEQ ID NO: 219971 - RNA, 19 nt, Homo sapiens
  misc_RNA (1)...(19): siRNA sense strand
caucaggccaaauguaaca

SEQ ID NO: 219972 - RNA, 19 nt, Homo sapiens
  misc_RNA (1)...(19): siRNA sense strand
gauucuauccaaauuccaa

SEQ ID NO: 219973 - RNA, 19 nt, Homo sapiens
  misc_RNA (1)...(19): siRNA sense strand
ggcaaguucaacaggauuu

SEQ ID NO: 219974 - RNA, 19 nt, Homo sapiens
  misc_RNA (1)...(19): siRNA sense strand
gaacuggcugcugaauguu

SEQ ID NO: 219975 - RNA, 19 nt, Homo sapiens
  misc_RNA (1)...(19): siRNA sense strand
cugcugaauguuuaugaua

SEQ ID NO: 219976 - RNA, 19 nt, Homo sapiens
  misc_RNA (1)...(19): siRNA sense strand
aagcaucaggccaaaugua

SEQ ID NO: 219977 - RNA, 19 nt, Homo sapiens
  misc_RNA (1)...(19): siRNA sense strand
uggcaucauuucccugugu

SEQ ID NO: 219978 - RNA, 19 nt, Homo sapiens
  misc_RNA (1)...(19): siRNA sense strand
ccaugaaacuccgaagacu

SEQ ID NO: 219979 - RNA, 19 nt, Homo sapiens
  misc_RNA (1)...(19): siRNA sense strand
auaauaagccagagaucga

SEQ ID NO: 219980 - RNA, 19 nt, Homo sapiens
  misc_RNA (1)...(19): siRNA sense strand
cuaauaauaagccagagau

SEQ ID NO: 219981 - RNA, 19 nt, Homo sapiens
  misc_RNA (1)...(19): siRNA sense strand
ugggugaaguugcauccuu

SEQ ID NO: 219982 - RNA, 19 nt, Homo sapiens
  misc_RNA (1)...(19): siRNA sense strand
caucauuucccuguguaaa

SEQ ID NO: 219983 - RNA, 19 nt, Homo sapiens
  misc_RNA (1)...(19): siRNA sense strand
gcguggauaugugucugaa

SEQ ID NO: 219984 - RNA, 19 nt, Homo sapiens
  misc_RNA (1)...(19): siRNA sense strand
gcacuaucccaugguggaa

SEQ ID NO: 219985 - RNA, 19 nt, Homo sapiens
  misc_RNA (1)...(19): siRNA sense strand
gagccugucagcugcaugu

SEQ ID NO: 219986 - RNA, 19 nt, Homo sapiens
  misc_RNA (1)...(19): siRNA sense strand
guacagauaccuuuucaag

SEQ ID NO: 219987 - RNA, 19 nt, Homo sapiens
  misc_RNA (1)...(19): siRNA sense strand
gucccucucugcguggaua

SEQ ID NO: 219988 - RNA, 19 nt, Homo sapiens
  misc_RNA (1)...(19): siRNA sense strand
ggagcugcuuccaauuugc

SEQ ID NO: 219989 - RNA, 19 nt, Homo sapiens
  misc_RNA (1)...(19): siRNA sense strand
uuagcugaccugaauaaug

SEQ ID NO: 219990 - RNA, 19 nt, Homo sapiens
  misc_RNA (1)...(19): siRNA sense strand
guggcaaguucaacaggau

SEQ ID NO: 219991 - RNA, 19 nt, Homo sapiens
  misc_RNA (1)...(19): siRNA sense strand
acaacaauuuggucaacgu

SEQ ID NO: 219992 - RNA, 19 nt, Homo sapiens
  misc_RNA (1)...(19): siRNA sense strand
gacuacaucaggagaagau

SEQ ID NO: 219993 - RNA, 19 nt, Homo sapiens
  misc_RNA (1)...(19): siRNA sense strand
uaauaagccagagaucgaa

SEQ ID NO: 219994 - RNA, 19 nt, Homo sapiens
  misc_RNA (1)...(19): siRNA sense strand
ugucagauucucagcuuau

SEQ ID NO: 219995 - RNA, 19 nt, Homo sapiens
  misc_RNA (1)...(19): siRNA sense strand
ggauauccugcagauuauu

SEQ ID NO: 219996 - RNA, 19 nt, Homo sapiens
  misc_RNA (1)...(19): siRNA sense strand
agcaucaggccaaauguaa

SEQ ID NO: 219997 - RNA, 19 nt, Homo sapiens
  misc_RNA (1)...(19): siRNA sense strand
gcccuuugcuuggaucucu

SEQ ID NO: 219998 - RNA, 19 nt, Homo sapiens
  misc_RNA (1)...(19): siRNA sense strand
gcugaauguuuaugauacg

SEQ ID NO: 219999 - RNA, 19 nt, Homo sapiens
  misc_RNA (1)...(19): siRNA sense strand
agacuuugccaagguacua

SEQ ID NO: 220000 - RNA, 19 nt, Homo sapiens
  misc_RNA (1)...(19): siRNA sense strand
caagcaaguggcaaguuca

SEQ ID NO: 220001 - RNA, 19 nt, Homo sapiens
  misc_RNA (1)...(19): siRNA sense strand
agacaaguacagauaccuu

SEQ ID NO: 220002 - RNA, 19 nt, Homo sapiens
  misc_RNA (1)...(19): siRNA sense strand
gcaucauuucccuguguaa

SEQ ID NO: 220003 - RNA, 19 nt, Homo sapiens
  misc_RNA (1)...(19): siRNA sense strand
cugcaaagaguguccaauc

SEQ ID NO: 220004 - RNA, 19 nt, Homo sapiens
  misc_RNA (1)...(19): siRNA sense strand
cuuauaggacugccaugaa

SEQ ID NO: 220005 - RNA, 19 nt, Homo sapiens
  misc_RNA (1)...(19): siRNA sense strand
caaagaguguccaaucauu

SEQ ID NO: 220006 - RNA, 19 nt, Homo sapiens
  misc_RNA (1)...(19): siRNA sense strand
uagcugaccugaauaaugu

SEQ ID NO: 220007 - RNA, 19 nt, Homo sapiens
  misc_RNA (1)...(19): siRNA sense strand
gcaugauucuauccaaauu

SEQ ID NO: 220008 - RNA, 19 nt, Homo sapiens
  misc_RNA (1)...(19): siRNA sense strand
ugaacuggcugcugaaugu

SEQ ID NO: 220009 - RNA, 19 nt, Homo sapiens
  misc_RNA (1)...(19): siRNA sense strand
gauauccugcagauuauua

SEQ ID NO: 220010 - RNA, 19 nt, Homo sapiens
  misc_RNA (1)...(19): siRNA sense strand
gagaagauguucgagacuu

SEQ ID NO: 220011 - RNA, 19 nt, Homo sapiens
  misc_RNA (1)...(19): siRNA sense strand
gcacuuuaauuaugacauc

SEQ ID NO: 220012 - RNA, 19 nt, Homo sapiens
  misc_RNA (1)...(19): siRNA sense strand
guaaagcacauuuggaaga

SEQ ID NO: 220013 - RNA, 19 nt, Homo sapiens
  misc_RNA (1)...(19): siRNA sense strand
gaauauugcacuccgacua

SEQ ID NO: 220014 - RNA, 19 nt, Homo sapiens
  misc_RNA (1)...(19): siRNA sense strand
uuauaggacugccaugaaa

SEQ ID NO: 220015 - RNA, 19 nt, Homo sapiens
  misc_RNA (1)...(19): siRNA sense strand
gggugaaguugcauccuuu

SEQ ID NO: 220016 - RNA, 19 nt, Homo sapiens
  misc_RNA (1)...(19): siRNA sense strand
gcaagagcacaacaauuug

SEQ ID NO: 220017 - RNA, 19 nt, Homo sapiens
  misc_RNA (1)...(19): siRNA sense strand
gcacaacaauuuggucaac

SEQ ID NO: 220018 - RNA, 19 nt, Homo sapiens
  misc_RNA (1)...(19): siRNA sense strand
agcaagagcacaacaauuu

SEQ ID NO: 220019 - RNA, 19 nt, Homo sapiens
  misc_RNA (1)...(19): siRNA sense strand
agaagauguucgagacuuu

SEQ ID NO: 220020 - RNA, 19 nt, Homo sapiens
  misc_RNA (1)...(19): siRNA sense strand
gagcaagagcacaacaauu

SEQ ID NO: 220021 - RNA, 19 nt, Homo sapiens
  misc_RNA (1)...(19): siRNA sense strand
ucaagcaaguggcaaguuc

SEQ ID NO: 220022 - RNA, 19 nt, Homo sapiens
  misc_RNA (1)...(19): siRNA sense strand
ccacgagacucaaacaacu

SEQ ID NO: 220023 - RNA, 19 nt, Homo sapiens
  misc_RNA (1)...(19): siRNA sense strand
cagcacaaccucaagcaaa

SEQ ID NO: 220024 - RNA, 19 nt, Homo sapiens
  misc_RNA (1)...(19): siRNA sense strand
gcaaagaguguccaaucau

SEQ ID NO: 220025 - RNA, 19 nt, Homo sapiens
  misc_RNA (1)...(19): siRNA sense strand
auggauauccugcagauua

SEQ ID NO: 220026 - RNA, 19 nt, Homo sapiens
  misc_RNA (1)...(19): siRNA sense strand
uguaacaucugcaaagagu

SEQ ID NO: 220027 - RNA, 19 nt, Homo sapiens
  misc_RNA (1)...(19): siRNA sense strand
guccggagcugcuuccaau

SEQ ID NO: 220028 - RNA, 19 nt, Homo sapiens
  misc_RNA (1)...(19): siRNA sense strand
gcaaguggcaaguucaaca

SEQ ID NO: 220029 - RNA, 19 nt, Homo sapiens
  misc_RNA (1)...(19): siRNA sense strand
gcuuccaauuugcuaauaa

SEQ ID NO: 220030 - RNA, 19 nt, Homo sapiens
  misc_RNA (1)...(19): siRNA sense strand
uggaagacaaguacagaua

SEQ ID NO: 220031 - RNA, 19 nt, Homo sapiens
  misc_RNA (1)...(19): siRNA sense strand
ggauccguguccugucuuu

SEQ ID NO: 220032 - RNA, 19 nt, Homo sapiens
  misc_RNA (1)...(19): siRNA sense strand
gucuuuagcugaccugaau

SEQ ID NO: 220033 - RNA, 19 nt, Homo sapiens
  misc_RNA (1)...(19): siRNA sense strand
gacaaguacagauaccuuu

SEQ ID NO: 220034 - RNA, 19 nt, Homo sapiens
  misc_RNA (1)...(19): siRNA sense strand
ccaagcaucaggccaaaug

SEQ ID NO: 220035 - RNA, 19 nt, Homo sapiens
  misc_RNA (1)...(19): siRNA sense strand
ggagcaagagcacaacaau

SEQ ID NO: 220036 - RNA, 19 nt, Homo sapiens
  misc_RNA (1)...(19): siRNA sense strand
guguaaagcacauuuggaa

SEQ ID NO: 220037 - RNA, 19 nt, Homo sapiens
  misc_RNA (1)...(19): siRNA sense strand
caagacaguugggugaagu

SEQ ID NO: 220038 - RNA, 19 nt, Homo sapiens
  misc_RNA (1)...(19): siRNA sense strand
gaagauguucgagacuuug

SEQ ID NO: 220039 - RNA, 19 nt, Homo sapiens
  misc_RNA (1)...(19): siRNA sense strand
gucagauucucagcuuaua

SEQ ID NO: 220040 - RNA, 19 nt, Homo sapiens
  misc_RNA (1)...(19): siRNA sense strand
uaacaucugcaaagagugu

SEQ ID NO: 220041 - RNA, 19 nt, Homo sapiens
  misc_RNA (1)...(19): siRNA sense strand
cggagcugcuuccaauuug

SEQ ID NO: 220042 - RNA, 19 nt, Homo sapiens
  misc_RNA (1)...(19): siRNA sense strand
gaagacaaguacagauacc

SEQ ID NO: 220043 - RNA, 19 nt, Homo sapiens
  misc_RNA (1)...(19): siRNA sense strand
ccauggauauccugcagau

SEQ ID NO: 220044 - RNA, 19 nt, Homo sapiens
  misc_RNA (1)...(19): siRNA sense strand
ggcaucauuucccugugua

SEQ ID NO: 220045 - RNA, 19 nt, Homo sapiens
  misc_RNA (1)...(19): siRNA sense strand
uggauauccugcagauuau

SEQ ID NO: 220046 - RNA, 19 nt, Homo sapiens
  misc_RNA (1)...(19): siRNA sense strand
ggaagacaaguacagauac

SEQ ID NO: 220047 - RNA, 19 nt, Homo sapiens
  misc_RNA (1)...(19): siRNA sense strand
ugcaaagaguguccaauca

SEQ ID NO: 220048 - RNA, 19 nt, Homo sapiens
  misc_RNA (1)...(19): siRNA sense strand
guggauaugugucugaacu

SEQ ID NO: 220049 - RNA, 19 nt, Homo sapiens
  misc_RNA (1)...(19): siRNA sense strand
acuggcugcugaauguuua

SEQ ID NO: 220050 - RNA, 19 nt, Homo sapiens
  misc_RNA (1)...(19): siRNA sense strand
acuaucccaugguggaaua

SEQ ID NO: 220051 - RNA, 19 nt, Homo sapiens
  misc_RNA (1)...(19): siRNA sense strand
ccggagcugcuuccaauuu

SEQ ID NO: 220052 - RNA, 19 nt, Homo sapiens
  misc_RNA (1)...(19): siRNA sense strand
ccaaauuccaagacaguug

SEQ ID NO: 220053 - RNA, 19 nt, Homo sapiens
  misc_RNA (1)...(19): siRNA sense strand
cagaaacugccaagcauca

SEQ ID NO: 220054 - RNA, 19 nt, Homo sapiens
  misc_RNA (1)...(19): siRNA sense strand
uaugacaucugccaaagcu

SEQ ID NO: 220055 - RNA, 19 nt, Homo sapiens
  misc_RNA (1)...(19): siRNA sense strand
aaugucagauucucagcuu

SEQ ID NO: 220056 - RNA, 19 nt, Homo sapiens
  misc_RNA (1)...(19): siRNA sense strand
ucgagacuuugccaaggua

SEQ ID NO: 220057 - RNA, 19 nt, Homo sapiens
  misc_RNA (1)...(19): siRNA sense strand
gcaaaaggccauaaaaugc

SEQ ID NO: 220058 - RNA, 19 nt, Homo sapiens
  misc_RNA (1)...(19): siRNA sense strand
cugcaugauucuauccaaa

SEQ ID NO: 220059 - RNA, 19 nt, Homo sapiens
  misc_RNA (1)...(19): siRNA sense strand
uaaagcacauuuggaagac

SEQ ID NO: 220060 - RNA, 19 nt, Homo sapiens
  misc_RNA (1)...(19): siRNA sense strand
acaggagucuaaagcacuu

SEQ ID NO: 220061 - RNA, 19 nt, Homo sapiens
  misc_RNA (1)...(19): siRNA sense strand
acagauaccuuuucaagca

SEQ ID NO: 220062 - RNA, 19 nt, Homo sapiens
  misc_RNA (1)...(19): siRNA sense strand
aagcacauuuggaagacaa

SEQ ID NO: 220063 - RNA, 19 nt, Homo sapiens
  misc_RNA (1)...(19): siRNA sense strand
gcuaauaauaagccagaga

SEQ ID NO: 220064 - RNA, 19 nt, Homo sapiens
  misc_RNA (1)...(19): siRNA sense strand
caagagcacaacaauuugg

SEQ ID NO: 220065 - RNA, 19 nt, Homo sapiens
  misc_RNA (1)...(19): siRNA sense strand
ccugucagcugcaugugau

SEQ ID NO: 220066 - RNA, 19 nt, Homo sapiens
  misc_RNA (1)...(19): siRNA sense strand
gcugcugaauguuuaugau

SEQ ID NO: 220067 - RNA, 19 nt, Homo sapiens
  misc_RNA (1)...(19): siRNA sense strand
acagagcucuaccagucuu

SEQ ID NO: 220068 - RNA, 19 nt, Homo sapiens
  misc_RNA (1)...(19): siRNA sense strand
acaguugggugaaguugca

SEQ ID NO: 220069 - RNA, 19 nt, Homo sapiens
  misc_RNA (1)...(19): siRNA sense strand
guuugaccacuauuuauga

SEQ ID NO: 220070 - RNA, 19 nt, Homo sapiens
  misc_RNA (1)...(19): siRNA sense strand
gcuuauaggacugccauga

SEQ ID NO: 220071 - RNA, 19 nt, Homo sapiens
  misc_RNA (1)...(19): siRNA sense strand
caucaggccaaauguaaca

SEQ ID NO: 220072 - RNA, 19 nt, Homo sapiens
  misc_RNA (1)...(19): siRNA sense strand
gauucuauccaaauuccaa

SEQ ID NO: 220073 - RNA, 19 nt, Homo sapiens
  misc_RNA (1)...(19): siRNA sense strand
ggcaaguucaacaggauuu

SEQ ID NO: 220074 - RNA, 19 nt, Homo sapiens
  misc_RNA (1)...(19): siRNA sense strand
gaacuggcugcugaauguu

SEQ ID NO: 220075 - RNA, 19 nt, Homo sapiens
  misc_RNA (1)...(19): siRNA sense strand
cugcugaauguuuaugaua

SEQ ID NO: 220076 - RNA, 19 nt, Homo sapiens
  misc_RNA (1)...(19): siRNA sense strand
aagcaucaggccaaaugua

SEQ ID NO: 220077 - RNA, 19 nt, Homo sapiens
  misc_RNA (1)...(19): siRNA sense strand
uggcaucauuucccugugu

SEQ ID NO: 220078 - RNA, 19 nt, Homo sapiens
  misc_RNA (1)...(19): siRNA sense strand
ccaugaaacuccgaagacu

SEQ ID NO: 220079 - RNA, 19 nt, Homo sapiens
  misc_RNA (1)...(19): siRNA sense strand
auaauaagccagagaucga

SEQ ID NO: 220080 - RNA, 19 nt, Homo sapiens
  misc_RNA (1)...(19): siRNA sense strand
cuaauaauaagccagagau

SEQ ID NO: 220081 - RNA, 19 nt, Homo sapiens
  misc_RNA (1)...(19): siRNA sense strand
ugggugaaguugcauccuu

SEQ ID NO: 220082 - RNA, 19 nt, Homo sapiens
  misc_RNA (1)...(19): siRNA sense strand
caucauuucccuguguaaa

SEQ ID NO: 220083 - RNA, 19 nt, Homo sapiens
  misc_RNA (1)...(19): siRNA sense strand
gcguggauaugugucugaa

SEQ ID NO: 220084 - RNA, 19 nt, Homo sapiens
  misc_RNA (1)...(19): siRNA sense strand
gcacuaucccaugguggaa

SEQ ID NO: 220085 - RNA, 19 nt, Homo sapiens
  misc_RNA (1)...(19): siRNA sense strand
gagccugucagcugcaugu

SEQ ID NO: 220086 - RNA, 19 nt, Homo sapiens
  misc_RNA (1)...(19): siRNA sense strand
guacagauaccuuuucaag

SEQ ID NO: 220087 - RNA, 19 nt, Homo sapiens
  misc_RNA (1)...(19): siRNA sense strand
gucccucucugcguggaua

SEQ ID NO: 220088 - RNA, 19 nt, Homo sapiens
  misc_RNA (1)...(19): siRNA sense strand
ggagcugcuuccaauuugc

SEQ ID NO: 220089 - RNA, 19 nt, Homo sapiens
  misc_RNA (1)...(19): siRNA sense strand
uuagcugaccugaauaaug

SEQ ID NO: 220090 - RNA, 19 nt, Homo sapiens
  misc_RNA (1)...(19): siRNA sense strand
guggcaaguucaacaggau

SEQ ID NO: 220091 - RNA, 19 nt, Homo sapiens
  misc_RNA (1)...(19): siRNA sense strand
acaacaauuuggucaacgu

SEQ ID NO: 220092 - RNA, 19 nt, Homo sapiens
  misc_RNA (1)...(19): siRNA sense strand
gacuacaucaggagaagau

SEQ ID NO: 220093 - RNA, 19 nt, Homo sapiens
  misc_RNA (1)...(19): siRNA sense strand
uaauaagccagagaucgaa

SEQ ID NO: 220094 - RNA, 19 nt, Homo sapiens
  misc_RNA (1)...(19): siRNA sense strand
ugucagauucucagcuuau

SEQ ID NO: 220095 - RNA, 19 nt, Homo sapiens
  misc_RNA (1)...(19): siRNA sense strand
ggauauccugcagauuauu

SEQ ID NO: 220096 - RNA, 19 nt, Homo sapiens
  misc_RNA (1)...(19): siRNA sense strand
agcaucaggccaaauguaa

SEQ ID NO: 220097 - RNA, 19 nt, Homo sapiens
  misc_RNA (1)...(19): siRNA sense strand
gcccuuugcuuggaucucu

SEQ ID NO: 220098 - RNA, 19 nt, Homo sapiens
  misc_RNA (1)...(19): siRNA sense strand
gcugaauguuuaugauacg

SEQ ID NO: 220099 - RNA, 19 nt, Homo sapiens
  misc_RNA (1)...(19): siRNA sense strand
agacuuugccaagguacua

SEQ ID NO: 220100 - RNA, 19 nt, Homo sapiens
  misc_RNA (1)...(19): siRNA sense strand
caagcaaguggcaaguuca

SEQ ID NO: 220101 - RNA, 19 nt, Homo sapiens
  misc_RNA (1)...(19): siRNA sense strand
agacaaguacagauaccuu

SEQ ID NO: 220102 - RNA, 19 nt, Homo sapiens
  misc_RNA (1)...(19): siRNA sense strand
gcaucauuucccuguguaa

SEQ ID NO: 220103 - RNA, 19 nt, Homo sapiens
  misc_RNA (1)...(19): siRNA sense strand
cugcaaagaguguccaauc

SEQ ID NO: 220104 - RNA, 19 nt, Homo sapiens
  misc_RNA (1)...(19): siRNA sense strand
cuuauaggacugccaugaa

SEQ ID NO: 220105 - RNA, 19 nt, Homo sapiens
  misc_RNA (1)...(19): siRNA sense strand
caaagaguguccaaucauu

SEQ ID NO: 220106 - RNA, 19 nt, Homo sapiens
  misc_RNA (1)...(19): siRNA sense strand
uagcugaccugaauaaugu

SEQ ID NO: 220107 - RNA, 19 nt, Homo sapiens
  misc_RNA (1)...(19): siRNA sense strand
gcaugauucuauccaaauu

SEQ ID NO: 220108 - RNA, 19 nt, Homo sapiens
  misc_RNA (1)...(19): siRNA sense strand
ugaacuggcugcugaaugu

SEQ ID NO: 220109 - RNA, 19 nt, Homo sapiens
  misc_RNA (1)...(19): siRNA sense strand
gauauccugcagauuauua

SEQ ID NO: 220110 - RNA, 19 nt, Homo sapiens
  misc_RNA (1)...(19): siRNA sense strand
gagaagauguucgagacuu

SEQ ID NO: 220111 - RNA, 19 nt, Homo sapiens
  misc_RNA (1)...(19): siRNA sense strand
gcacuuuaauuaugacauc

SEQ ID NO: 220112 - RNA, 19 nt, Homo sapiens
  misc_RNA (1)...(19): siRNA sense strand
guaaagcacauuuggaaga

SEQ ID NO: 220113 - RNA, 19 nt, Homo sapiens
  misc_RNA (1)...(19): siRNA sense strand
gaauauugcacuccgacua

SEQ ID NO: 220114 - RNA, 19 nt, Homo sapiens
  misc_RNA (1)...(19): siRNA sense strand
uuauaggacugccaugaaa

SEQ ID NO: 220115 - RNA, 19 nt, Homo sapiens
  misc_RNA (1)...(19): siRNA sense strand
gggugaaguugcauccuuu

SEQ ID NO: 220116 - RNA, 19 nt, Homo sapiens
  misc_RNA (1)...(19): siRNA sense strand
gcaagagcacaacaauuug

SEQ ID NO: 220117 - RNA, 19 nt, Homo sapiens
  misc_RNA (1)...(19): siRNA sense strand
gcacaacaauuuggucaac

SEQ ID NO: 220118 - RNA, 19 nt, Homo sapiens
  misc_RNA (1)...(19): siRNA sense strand
agcaagagcacaacaauuu

SEQ ID NO: 220119 - RNA, 19 nt, Homo sapiens
  misc_RNA (1)...(19): siRNA sense strand
agaagauguucgagacuuu

SEQ ID NO: 220120 - RNA, 19 nt, Homo sapiens
  misc_RNA (1)...(19): siRNA sense strand
gagcaagagcacaacaauu

SEQ ID NO: 220121 - RNA, 19 nt, Homo sapiens
  misc_RNA (1)...(19): siRNA sense strand
ucaagcaaguggcaaguuc

SEQ ID NO: 220122 - RNA, 19 nt, Homo sapiens
  misc_RNA (1)...(19): siRNA sense strand
ccacgagacucaaacaacu

SEQ ID NO: 220123 - RNA, 19 nt, Homo sapiens
  misc_RNA (1)...(19): siRNA sense strand
cagcacaaccucaagcaaa

SEQ ID NO: 220124 - RNA, 19 nt, Homo sapiens
  misc_RNA (1)...(19): siRNA sense strand
gcaaagaguguccaaucau

SEQ ID NO: 220125 - RNA, 19 nt, Homo sapiens
  misc_RNA (1)...(19): siRNA sense strand
auggauauccugcagauua

SEQ ID NO: 220126 - RNA, 19 nt, Homo sapiens
  misc_RNA (1)...(19): siRNA sense strand
uguaacaucugcaaagagu

SEQ ID NO: 220127 - RNA, 19 nt, Homo sapiens
  misc_RNA (1)...(19): siRNA sense strand
guccggagcugcuuccaau

SEQ ID NO: 220128 - RNA, 19 nt, Homo sapiens
  misc_RNA (1)...(19): siRNA sense strand
gcaaguggcaaguucaaca

SEQ ID NO: 220129 - RNA, 19 nt, Homo sapiens
  misc_RNA (1)...(19): siRNA sense strand
gcuuccaauuugcuaauaa

SEQ ID NO: 220130 - RNA, 19 nt, Homo sapiens
  misc_RNA (1)...(19): siRNA sense strand
uggaagacaaguacagaua

SEQ ID NO: 220131 - RNA, 19 nt, Homo sapiens
  misc_RNA (1)...(19): siRNA sense strand
ggauccguguccugucuuu

SEQ ID NO: 220132 - RNA, 19 nt, Homo sapiens
  misc_RNA (1)...(19): siRNA sense strand
gucuuuagcugaccugaau

SEQ ID NO: 220133 - RNA, 19 nt, Homo sapiens
  misc_RNA (1)...(19): siRNA sense strand
gacaaguacagauaccuuu

SEQ ID NO: 220134 - RNA, 19 nt, Homo sapiens
  misc_RNA (1)...(19): siRNA sense strand
ccaagcaucaggccaaaug

SEQ ID NO: 220135 - RNA, 19 nt, Homo sapiens
  misc_RNA (1)...(19): siRNA sense strand
ggagcaagagcacaacaau

SEQ ID NO: 220136 - RNA, 19 nt, Homo sapiens
  misc_RNA (1)...(19): siRNA sense strand
guguaaagcacauuuggaa

SEQ ID NO: 220137 - RNA, 19 nt, Homo sapiens
  misc_RNA (1)...(19): siRNA sense strand
caagacaguugggugaagu

SEQ ID NO: 220138 - RNA, 19 nt, Homo sapiens
  misc_RNA (1)...(19): siRNA sense strand
gaagauguucgagacuuug

SEQ ID NO: 220139 - RNA, 19 nt, Homo sapiens
  misc_RNA (1)...(19): siRNA sense strand
gucagauucucagcuuaua

SEQ ID NO: 220140 - RNA, 19 nt, Homo sapiens
  misc_RNA (1)...(19): siRNA sense strand
uaacaucugcaaagagugu

SEQ ID NO: 220141 - RNA, 19 nt, Homo sapiens
  misc_RNA (1)...(19): siRNA sense strand
cggagcugcuuccaauuug

SEQ ID NO: 220142 - RNA, 19 nt, Homo sapiens
  misc_RNA (1)...(19): siRNA sense strand
gaagacaaguacagauacc

SEQ ID NO: 220143 - RNA, 19 nt, Homo sapiens
  misc_RNA (1)...(19): siRNA sense strand
ccauggauauccugcagau

SEQ ID NO: 220144 - RNA, 19 nt, Homo sapiens
  misc_RNA (1)...(19): siRNA sense strand
ggcaucauuucccugugua

SEQ ID NO: 220145 - RNA, 19 nt, Homo sapiens
  misc_RNA (1)...(19): siRNA sense strand
uggauauccugcagauuau

SEQ ID NO: 220146 - RNA, 19 nt, Homo sapiens
  misc_RNA (1)...(19): siRNA sense strand
ggaagacaaguacagauac

SEQ ID NO: 220147 - RNA, 19 nt, Homo sapiens
  misc_RNA (1)...(19): siRNA sense strand
ugcaaagaguguccaauca

SEQ ID NO: 220148 - RNA, 19 nt, Homo sapiens
  misc_RNA (1)...(19): siRNA sense strand
guggauaugugucugaacu

SEQ ID NO: 220149 - RNA, 19 nt, Homo sapiens
  misc_RNA (1)...(19): siRNA sense strand
acuggcugcugaauguuua

SEQ ID NO: 220150 - RNA, 19 nt, Homo sapiens
  misc_RNA (1)...(19): siRNA sense strand
acuaucccaugguggaaua

SEQ ID NO: 220151 - RNA, 19 nt, Homo sapiens
  misc_RNA (1)...(19): siRNA sense strand
ccggagcugcuuccaauuu

SEQ ID NO: 220152 - RNA, 19 nt, Homo sapiens
  misc_RNA (1)...(19): siRNA sense strand
ccaaauuccaagacaguug

SEQ ID NO: 220153 - RNA, 19 nt, Homo sapiens
  misc_RNA (1)...(19): siRNA sense strand
cagaaacugccaagcauca

SEQ ID NO: 220154 - RNA, 19 nt, Homo sapiens
  misc_RNA (1)...(19): siRNA sense strand
uaugacaucugccaaagcu

SEQ ID NO: 220155 - RNA, 19 nt, Homo sapiens
  misc_RNA (1)...(19): siRNA sense strand
aaugucagauucucagcuu

SEQ ID NO: 220156 - RNA, 19 nt, Homo sapiens
  misc_RNA (1)...(19): siRNA sense strand
ucgagacuuugccaaggua

SEQ ID NO: 220157 - RNA, 19 nt, Homo sapiens
  misc_RNA (1)...(19): siRNA sense strand
gcaaaaggccauaaaaugc

SEQ ID NO: 220158 - RNA, 19 nt, Homo sapiens
  misc_RNA (1)...(19): siRNA sense strand
cugcaugauucuauccaaa

SEQ ID NO: 220159 - RNA, 19 nt, Homo sapiens
  misc_RNA (1)...(19): siRNA sense strand
uaaagcacauuuggaagac

SEQ ID NO: 220160 - RNA, 19 nt, Homo sapiens
  misc_RNA (1)...(19): siRNA sense strand
acaggagucuaaagcacuu

SEQ ID NO: 220161 - RNA, 19 nt, Homo sapiens
  misc_RNA (1)...(19): siRNA sense strand
acagauaccuuuucaagca

SEQ ID NO: 220162 - RNA, 19 nt, Homo sapiens
  misc_RNA (1)...(19): siRNA sense strand
aagcacauuuggaagacaa

SEQ ID NO: 220163 - RNA, 19 nt, Homo sapiens
  misc_RNA (1)...(19): siRNA sense strand
gcuaauaauaagccagaga

SEQ ID NO: 220164 - RNA, 19 nt, Homo sapiens
  misc_RNA (1)...(19): siRNA sense strand
caagagcacaacaauuugg

SEQ ID NO: 220165 - RNA, 19 nt, Homo sapiens
  misc_RNA (1)...(19): siRNA sense strand
ccugucagcugcaugugau

SEQ ID NO: 220166 - RNA, 19 nt, Homo sapiens
  misc_RNA (1)...(19): siRNA sense strand
gcugcugaauguuuaugau

SEQ ID NO: 220167 - RNA, 19 nt, Homo sapiens
  misc_RNA (1)...(19): siRNA sense strand
acagagcucuaccagucuu

SEQ ID NO: 220168 - RNA, 19 nt, Homo sapiens
  misc_RNA (1)...(19): siRNA sense strand
acaguugggugaaguugca

SEQ ID NO: 220169 - RNA, 19 nt, Homo sapiens
  misc_RNA (1)...(19): siRNA sense strand
guuugaccacuauuuauga

SEQ ID NO: 220170 - RNA, 19 nt, Homo sapiens
  misc_RNA (1)...(19): siRNA sense strand
gcuuauaggacugccauga

SEQ ID NO: 220171 - RNA, 19 nt, Homo sapiens
  misc_RNA (1)...(19): siRNA sense strand
caucaggccaaauguaaca

SEQ ID NO: 220172 - RNA, 19 nt, Homo sapiens
  misc_RNA (1)...(19): siRNA sense strand
gauucuauccaaauuccaa

SEQ ID NO: 220173 - RNA, 19 nt, Homo sapiens
  misc_RNA (1)...(19): siRNA sense strand
ggcaaguucaacaggauuu

SEQ ID NO: 220174 - RNA, 19 nt, Homo sapiens
  misc_RNA (1)...(19): siRNA sense strand
gaacuggcugcugaauguu

SEQ ID NO: 220175 - RNA, 19 nt, Homo sapiens
  misc_RNA (1)...(19): siRNA sense strand
cugcugaauguuuaugaua

SEQ ID NO: 220176 - RNA, 19 nt, Homo sapiens
  misc_RNA (1)...(19): siRNA sense strand
aagcaucaggccaaaugua

SEQ ID NO: 220177 - RNA, 19 nt, Homo sapiens
  misc_RNA (1)...(19): siRNA sense strand
uggcaucauuucccugugu

SEQ ID NO: 220178 - RNA, 19 nt, Homo sapiens
  misc_RNA (1)...(19): siRNA sense strand
ccaugaaacuccgaagacu

SEQ ID NO: 220179 - RNA, 19 nt, Homo sapiens
  misc_RNA (1)...(19): siRNA sense strand
auaauaagccagagaucga

SEQ ID NO: 220180 - RNA, 19 nt, Homo sapiens
  misc_RNA (1)...(19): siRNA sense strand
cuaauaauaagccagagau

SEQ ID NO: 220181 - RNA, 19 nt, Homo sapiens
  misc_RNA (1)...(19): siRNA sense strand
ugggugaaguugcauccuu

SEQ ID NO: 220182 - RNA, 19 nt, Homo sapiens
  misc_RNA (1)...(19): siRNA sense strand
caucauuucccuguguaaa

SEQ ID NO: 220183 - RNA, 19 nt, Homo sapiens
  misc_RNA (1)...(19): siRNA sense strand
gcguggauaugugucugaa

SEQ ID NO: 220184 - RNA, 19 nt, Homo sapiens
  misc_RNA (1)...(19): siRNA sense strand
gcacuaucccaugguggaa

SEQ ID NO: 220185 - RNA, 19 nt, Homo sapiens
  misc_RNA (1)...(19): siRNA sense strand
gagccugucagcugcaugu

SEQ ID NO: 220186 - RNA, 19 nt, Homo sapiens
  misc_RNA (1)...(19): siRNA sense strand
guacagauaccuuuucaag

SEQ ID NO: 220187 - RNA, 19 nt, Homo sapiens
  misc_RNA (1)...(19): siRNA sense strand
gucccucucugcguggaua

SEQ ID NO: 220188 - RNA, 19 nt, Homo sapiens
  misc_RNA (1)...(19): siRNA sense strand
ggagcugcuuccaauuugc

SEQ ID NO: 220189 - RNA, 19 nt, Homo sapiens
  misc_RNA (1)...(19): siRNA sense strand
uuagcugaccugaauaaug

SEQ ID NO: 220190 - RNA, 19 nt, Homo sapiens
  misc_RNA (1)...(19): siRNA sense strand
guggcaaguucaacaggau

SEQ ID NO: 220191 - RNA, 19 nt, Homo sapiens
  misc_RNA (1)...(19): siRNA sense strand
acaacaauuuggucaacgu

SEQ ID NO: 220192 - RNA, 19 nt, Homo sapiens
  misc_RNA (1)...(19): siRNA sense strand
gacuacaucaggagaagau

SEQ ID NO: 220193 - RNA, 19 nt, Homo sapiens
  misc_RNA (1)...(19): siRNA sense strand
uaauaagccagagaucgaa

SEQ ID NO: 220194 - RNA, 19 nt, Homo sapiens
  misc_RNA (1)...(19): siRNA sense strand
ugucagauucucagcuuau

SEQ ID NO: 220195 - RNA, 19 nt, Homo sapiens
  misc_RNA (1)...(19): siRNA sense strand
ggauauccugcagauuauu

SEQ ID NO: 220196 - RNA, 19 nt, Homo sapiens
  misc_RNA (1)...(19): siRNA sense strand
agcaucaggccaaauguaa

SEQ ID NO: 220197 - RNA, 19 nt, Homo sapiens
  misc_RNA (1)...(19): siRNA sense strand
gcccuuugcuuggaucucu

SEQ ID NO: 220198 - RNA, 19 nt, Homo sapiens
  misc_RNA (1)...(19): siRNA sense strand
gcugaauguuuaugauacg

SEQ ID NO: 220199 - RNA, 19 nt, Homo sapiens
  misc_RNA (1)...(19): siRNA sense strand
agacuuugccaagguacua

SEQ ID NO: 220200 - RNA, 19 nt, Homo sapiens
  misc_RNA (1)...(19): siRNA sense strand
caagcaaguggcaaguuca

SEQ ID NO: 220201 - RNA, 19 nt, Homo sapiens
  misc_RNA (1)...(19): siRNA sense strand
agacaaguacagauaccuu

SEQ ID NO: 220202 - RNA, 19 nt, Homo sapiens
  misc_RNA (1)...(19): siRNA sense strand
gcaucauuucccuguguaa

SEQ ID NO: 220203 - RNA, 19 nt, Homo sapiens
  misc_RNA (1)...(19): siRNA sense strand
cugcaaagaguguccaauc

SEQ ID NO: 220204 - RNA, 19 nt, Homo sapiens
  misc_RNA (1)...(19): siRNA sense strand
cuuauaggacugccaugaa

SEQ ID NO: 220205 - RNA, 19 nt, Homo sapiens
  misc_RNA (1)...(19): siRNA sense strand
caaagaguguccaaucauu

SEQ ID NO: 220206 - RNA, 19 nt, Homo sapiens
  misc_RNA (1)...(19): siRNA sense strand
uagcugaccugaauaaugu

SEQ ID NO: 220207 - RNA, 19 nt, Homo sapiens
  misc_RNA (1)...(19): siRNA sense strand
gcaugauucuauccaaauu

SEQ ID NO: 220208 - RNA, 19 nt, Homo sapiens
  misc_RNA (1)...(19): siRNA sense strand
ugaacuggcugcugaaugu

SEQ ID NO: 220209 - RNA, 19 nt, Homo sapiens
  misc_RNA (1)...(19): siRNA sense strand
gauauccugcagauuauua

SEQ ID NO: 220210 - RNA, 19 nt, Homo sapiens
  misc_RNA (1)...(19): siRNA sense strand
gagaagauguucgagacuu

SEQ ID NO: 220211 - RNA, 19 nt, Homo sapiens
  misc_RNA (1)...(19): siRNA sense strand
gcacuuuaauuaugacauc

SEQ ID NO: 220212 - RNA, 19 nt, Homo sapiens
  misc_RNA (1)...(19): siRNA sense strand
guaaagcacauuuggaaga

SEQ ID NO: 220213 - RNA, 19 nt, Homo sapiens
  misc_RNA (1)...(19): siRNA sense strand
gaauauugcacuccgacua

SEQ ID NO: 220214 - RNA, 19 nt, Homo sapiens
  misc_RNA (1)...(19): siRNA sense strand
uuauaggacugccaugaaa

SEQ ID NO: 220215 - RNA, 19 nt, Homo sapiens
  misc_RNA (1)...(19): siRNA sense strand
gggugaaguugcauccuuu

SEQ ID NO: 220216 - RNA, 19 nt, Homo sapiens
  misc_RNA (1)...(19): siRNA sense strand
gcaagagcacaacaauuug

SEQ ID NO: 220217 - RNA, 19 nt, Homo sapiens
  misc_RNA (1)...(19): siRNA sense strand
gcacaacaauuuggucaac

SEQ ID NO: 220218 - RNA, 19 nt, Homo sapiens
  misc_RNA (1)...(19): siRNA sense strand
agcaagagcacaacaauuu

SEQ ID NO: 220219 - RNA, 19 nt, Homo sapiens
  misc_RNA (1)...(19): siRNA sense strand
agaagauguucgagacuuu

SEQ ID NO: 220220 - RNA, 19 nt, Homo sapiens
  misc_RNA (1)...(19): siRNA sense strand
gagcaagagcacaacaauu

SEQ ID NO: 220221 - RNA, 19 nt, Homo sapiens
  misc_RNA (1)...(19): siRNA sense strand
ucaagcaaguggcaaguuc

SEQ ID NO: 220222 - RNA, 19 nt, Homo sapiens
  misc_RNA (1)...(19): siRNA sense strand
ccacgagacucaaacaacu

SEQ ID NO: 220223 - RNA, 19 nt, Homo sapiens
  misc_RNA (1)...(19): siRNA sense strand
cagcacaaccucaagcaaa

SEQ ID NO: 220224 - RNA, 19 nt, Homo sapiens
  misc_RNA (1)...(19): siRNA sense strand
gcaaagaguguccaaucau

SEQ ID NO: 220225 - RNA, 19 nt, Homo sapiens
  misc_RNA (1)...(19): siRNA sense strand
auggauauccugcagauua

SEQ ID NO: 220226 - RNA, 19 nt, Homo sapiens
  misc_RNA (1)...(19): siRNA sense strand
uguaacaucugcaaagagu

SEQ ID NO: 220227 - RNA, 19 nt, Homo sapiens
  misc_RNA (1)...(19): siRNA sense strand
guccggagcugcuuccaau

SEQ ID NO: 220228 - RNA, 19 nt, Homo sapiens
  misc_RNA (1)...(19): siRNA sense strand
gcaaguggcaaguucaaca

SEQ ID NO: 220229 - RNA, 19 nt, Homo sapiens
  misc_RNA (1)...(19): siRNA sense strand
gcuuccaauuugcuaauaa

SEQ ID NO: 220230 - RNA, 19 nt, Homo sapiens
  misc_RNA (1)...(19): siRNA sense strand
uggaagacaaguacagaua

SEQ ID NO: 220231 - RNA, 19 nt, Homo sapiens
  misc_RNA (1)...(19): siRNA sense strand
ggauccguguccugucuuu

SEQ ID NO: 220232 - RNA, 19 nt, Homo sapiens
  misc_RNA (1)...(19): siRNA sense strand
gucuuuagcugaccugaau

SEQ ID NO: 220233 - RNA, 19 nt, Homo sapiens
  misc_RNA (1)...(19): siRNA sense strand
gacaaguacagauaccuuu

SEQ ID NO: 220234 - RNA, 19 nt, Homo sapiens
  misc_RNA (1)...(19): siRNA sense strand
ccaagcaucaggccaaaug

SEQ ID NO: 220235 - RNA, 19 nt, Homo sapiens
  misc_RNA (1)...(19): siRNA sense strand
ggagcaagagcacaacaau

SEQ ID NO: 220236 - RNA, 19 nt, Homo sapiens
  misc_RNA (1)...(19): siRNA sense strand
guguaaagcacauuuggaa

SEQ ID NO: 220237 - RNA, 19 nt, Homo sapiens
  misc_RNA (1)...(19): siRNA sense strand
caagacaguugggugaagu

SEQ ID NO: 220238 - RNA, 19 nt, Homo sapiens
  misc_RNA (1)...(19): siRNA sense strand
gaagauguucgagacuuug

SEQ ID NO: 220239 - RNA, 19 nt, Homo sapiens
  misc_RNA (1)...(19): siRNA sense strand
gucagauucucagcuuaua

SEQ ID NO: 220240 - RNA, 19 nt, Homo sapiens
  misc_RNA (1)...(19): siRNA sense strand
uaacaucugcaaagagugu

SEQ ID NO: 220241 - RNA, 19 nt, Homo sapiens
  misc_RNA (1)...(19): siRNA sense strand
cggagcugcuuccaauuug

SEQ ID NO: 220242 - RNA, 19 nt, Homo sapiens
  misc_RNA (1)...(19): siRNA sense strand
gaagacaaguacagauacc

SEQ ID NO: 220243 - RNA, 19 nt, Homo sapiens
  misc_RNA (1)...(19): siRNA sense strand
ccauggauauccugcagau

SEQ ID NO: 220244 - RNA, 19 nt, Homo sapiens
  misc_RNA (1)...(19): siRNA sense strand
ggcaucauuucccugugua

SEQ ID NO: 220245 - RNA, 19 nt, Homo sapiens
  misc_RNA (1)...(19): siRNA sense strand
uggauauccugcagauuau

SEQ ID NO: 220246 - RNA, 19 nt, Homo sapiens
  misc_RNA (1)...(19): siRNA sense strand
ggaagacaaguacagauac

SEQ ID NO: 220247 - RNA, 19 nt, Homo sapiens
  misc_RNA (1)...(19): siRNA sense strand
ugcaaagaguguccaauca

SEQ ID NO: 220248 - RNA, 19 nt, Homo sapiens
  misc_RNA (1)...(19): siRNA sense strand
guggauaugugucugaacu

SEQ ID NO: 220249 - RNA, 19 nt, Homo sapiens
  misc_RNA (1)...(19): siRNA sense strand
acuggcugcugaauguuua

SEQ ID NO: 220250 - RNA, 19 nt, Homo sapiens
  misc_RNA (1)...(19): siRNA sense strand
acuaucccaugguggaaua

SEQ ID NO: 220251 - RNA, 19 nt, Homo sapiens
  misc_RNA (1)...(19): siRNA sense strand
ccggagcugcuuccaauuu

SEQ ID NO: 220252 - RNA, 19 nt, Homo sapiens
  misc_RNA (1)...(19): siRNA sense strand
ccaaauuccaagacaguug

SEQ ID NO: 220253 - RNA, 19 nt, Homo sapiens
  misc_RNA (1)...(19): siRNA sense strand
cagaaacugccaagcauca

SEQ ID NO: 220254 - RNA, 19 nt, Homo sapiens
  misc_RNA (1)...(19): siRNA sense strand
uaugacaucugccaaagcu

SEQ ID NO: 220255 - RNA, 19 nt, Homo sapiens
  misc_RNA (1)...(19): siRNA sense strand
aaugucagauucucagcuu

SEQ ID NO: 220256 - RNA, 19 nt, Homo sapiens
  misc_RNA (1)...(19): siRNA sense strand
ucgagacuuugccaaggua

SEQ ID NO: 220257 - RNA, 19 nt, Homo sapiens
  misc_RNA (1)...(19): siRNA sense strand
gcaaaaggccauaaaaugc

SEQ ID NO: 220258 - RNA, 19 nt, Homo sapiens
  misc_RNA (1)...(19): siRNA sense strand
cugcaugauucuauccaaa

SEQ ID NO: 220259 - RNA, 19 nt, Homo sapiens
  misc_RNA (1)...(19): siRNA sense strand
uaaagcacauuuggaagac

SEQ ID NO: 220260 - RNA, 19 nt, Homo sapiens
  misc_RNA (1)...(19): siRNA sense strand
acaggagucuaaagcacuu

SEQ ID NO: 220261 - RNA, 19 nt, Homo sapiens
  misc_RNA (1)...(19): siRNA sense strand
acagauaccuuuucaagca

SEQ ID NO: 220262 - RNA, 19 nt, Homo sapiens
  misc_RNA (1)...(19): siRNA sense strand
aagcacauuuggaagacaa

SEQ ID NO: 220263 - RNA, 19 nt, Homo sapiens
  misc_RNA (1)...(19): siRNA sense strand
gcuaauaauaagccagaga

SEQ ID NO: 220264 - RNA, 19 nt, Homo sapiens
  misc_RNA (1)...(19): siRNA sense strand
caagagcacaacaauuugg

SEQ ID NO: 220265 - RNA, 19 nt, Homo sapiens
  misc_RNA (1)...(19): siRNA sense strand
ccugucagcugcaugugau

SEQ ID NO: 220266 - RNA, 19 nt, Homo sapiens
  misc_RNA (1)...(19): siRNA sense strand
gcugcugaauguuuaugau

SEQ ID NO: 220267 - RNA, 19 nt, Homo sapiens
  misc_RNA (1)...(19): siRNA sense strand
acagagcucuaccagucuu

SEQ ID NO: 220268 - RNA, 19 nt, Homo sapiens
  misc_RNA (1)...(19): siRNA sense strand
acaguugggugaaguugca

SEQ ID NO: 220269 - RNA, 19 nt, Homo sapiens
  misc_RNA (1)...(19): siRNA sense strand
guuugaccacuauuuauga

SEQ ID NO: 220270 - RNA, 19 nt, Homo sapiens
  misc_RNA (1)...(19): siRNA sense strand
gcuuauaggacugccauga

SEQ ID NO: 220271 - RNA, 19 nt, Homo sapiens
  misc_RNA (1)...(19): siRNA sense strand
caucaggccaaauguaaca

SEQ ID NO: 220272 - RNA, 19 nt, Homo sapiens
  misc_RNA (1)...(19): siRNA sense strand
gauucuauccaaauuccaa

SEQ ID NO: 220273 - RNA, 19 nt, Homo sapiens
  misc_RNA (1)...(19): siRNA sense strand
ggcaaguucaacaggauuu

SEQ ID NO: 220274 - RNA, 19 nt, Homo sapiens
  misc_RNA (1)...(19): siRNA sense strand
gaacuggcugcugaauguu

SEQ ID NO: 220275 - RNA, 19 nt, Homo sapiens
  misc_RNA (1)...(19): siRNA sense strand
cugcugaauguuuaugaua

SEQ ID NO: 220276 - RNA, 19 nt, Homo sapiens
  misc_RNA (1)...(19): siRNA sense strand
aagcaucaggccaaaugua

SEQ ID NO: 220277 - RNA, 19 nt, Homo sapiens
  misc_RNA (1)...(19): siRNA sense strand
uggcaucauuucccugugu

SEQ ID NO: 220278 - RNA, 19 nt, Homo sapiens
  misc_RNA (1)...(19): siRNA sense strand
ccaugaaacuccgaagacu

SEQ ID NO: 220279 - RNA, 19 nt, Homo sapiens
  misc_RNA (1)...(19): siRNA sense strand
auaauaagccagagaucga

SEQ ID NO: 220280 - RNA, 19 nt, Homo sapiens
  misc_RNA (1)...(19): siRNA sense strand
cuaauaauaagccagagau

SEQ ID NO: 220281 - RNA, 19 nt, Homo sapiens
  misc_RNA (1)...(19): siRNA sense strand
ugggugaaguugcauccuu

SEQ ID NO: 220282 - RNA, 19 nt, Homo sapiens
  misc_RNA (1)...(19): siRNA sense strand
caucauuucccuguguaaa

SEQ ID NO: 220283 - RNA, 19 nt, Homo sapiens
  misc_RNA (1)...(19): siRNA sense strand
gcguggauaugugucugaa

SEQ ID NO: 220284 - RNA, 19 nt, Homo sapiens
  misc_RNA (1)...(19): siRNA sense strand
gcacuaucccaugguggaa

SEQ ID NO: 220285 - RNA, 19 nt, Homo sapiens
  misc_RNA (1)...(19): siRNA sense strand
gagccugucagcugcaugu

SEQ ID NO: 220286 - RNA, 19 nt, Homo sapiens
  misc_RNA (1)...(19): siRNA sense strand
guacagauaccuuuucaag

SEQ ID NO: 220287 - RNA, 19 nt, Homo sapiens
  misc_RNA (1)...(19): siRNA sense strand
gucccucucugcguggaua

SEQ ID NO: 220288 - RNA, 19 nt, Homo sapiens
  misc_RNA (1)...(19): siRNA sense strand
ggagcugcuuccaauuugc

SEQ ID NO: 220289 - RNA, 19 nt, Homo sapiens
  misc_RNA (1)...(19): siRNA sense strand
uuagcugaccugaauaaug

SEQ ID NO: 220290 - RNA, 19 nt, Homo sapiens
  misc_RNA (1)...(19): siRNA sense strand
guggcaaguucaacaggau

SEQ ID NO: 220291 - RNA, 19 nt, Homo sapiens
  misc_RNA (1)...(19): siRNA sense strand
acaacaauuuggucaacgu

SEQ ID NO: 220292 - RNA, 19 nt, Homo sapiens
  misc_RNA (1)...(19): siRNA sense strand
gacuacaucaggagaagau

SEQ ID NO: 220293 - RNA, 19 nt, Homo sapiens
  misc_RNA (1)...(19): siRNA sense strand
uaauaagccagagaucgaa

SEQ ID NO: 220294 - RNA, 19 nt, Homo sapiens
  misc_RNA (1)...(19): siRNA sense strand
ugucagauucucagcuuau

SEQ ID NO: 220295 - RNA, 19 nt, Homo sapiens
  misc_RNA (1)...(19): siRNA sense strand
ggauauccugcagauuauu

SEQ ID NO: 220296 - RNA, 19 nt, Homo sapiens
  misc_RNA (1)...(19): siRNA sense strand
agcaucaggccaaauguaa

SEQ ID NO: 220297 - RNA, 19 nt, Homo sapiens
  misc_RNA (1)...(19): siRNA sense strand
gcccuuugcuuggaucucu

SEQ ID NO: 220298 - RNA, 19 nt, Homo sapiens
  misc_RNA (1)...(19): siRNA sense strand
gcugaauguuuaugauacg

SEQ ID NO: 220299 - RNA, 19 nt, Homo sapiens
  misc_RNA (1)...(19): siRNA sense strand
agacuuugccaagguacua

SEQ ID NO: 220300 - RNA, 19 nt, Homo sapiens
  misc_RNA (1)...(19): siRNA sense strand
caagcaaguggcaaguuca

SEQ ID NO: 220301 - RNA, 19 nt, Homo sapiens
  misc_RNA (1)...(19): siRNA sense strand
agacaaguacagauaccuu

SEQ ID NO: 220302 - RNA, 19 nt, Homo sapiens
  misc_RNA (1)...(19): siRNA sense strand
gcaucauuucccuguguaa

SEQ ID NO: 220303 - RNA, 19 nt, Homo sapiens
  misc_RNA (1)...(19): siRNA sense strand
cugcaaagaguguccaauc

SEQ ID NO: 220304 - RNA, 19 nt, Homo sapiens
  misc_RNA (1)...(19): siRNA sense strand
cuuauaggacugccaugaa

SEQ ID NO: 220305 - RNA, 19 nt, Homo sapiens
  misc_RNA (1)...(19): siRNA sense strand
caaagaguguccaaucauu

SEQ ID NO: 220306 - RNA, 19 nt, Homo sapiens
  misc_RNA (1)...(19): siRNA sense strand
uagcugaccugaauaaugu

SEQ ID NO: 220307 - RNA, 19 nt, Homo sapiens
  misc_RNA (1)...(19): siRNA sense strand
gcaugauucuauccaaauu

SEQ ID NO: 220308 - RNA, 19 nt, Homo sapiens
  misc_RNA (1)...(19): siRNA sense strand
ugaacuggcugcugaaugu

SEQ ID NO: 220309 - RNA, 19 nt, Homo sapiens
  misc_RNA (1)...(19): siRNA sense strand
gauauccugcagauuauua

SEQ ID NO: 220310 - RNA, 19 nt, Homo sapiens
  misc_RNA (1)...(19): siRNA sense strand
gagaagauguucgagacuu

SEQ ID NO: 220311 - RNA, 19 nt, Homo sapiens
  misc_RNA (1)...(19): siRNA sense strand
gcacuuuaauuaugacauc

SEQ ID NO: 220312 - RNA, 19 nt, Homo sapiens
  misc_RNA (1)...(19): siRNA sense strand
guaaagcacauuuggaaga

SEQ ID NO: 220313 - RNA, 19 nt, Homo sapiens
  misc_RNA (1)...(19): siRNA sense strand
gaauauugcacuccgacua

SEQ ID NO: 220314 - RNA, 19 nt, Homo sapiens
  misc_RNA (1)...(19): siRNA sense strand
uuauaggacugccaugaaa

SEQ ID NO: 220315 - RNA, 19 nt, Homo sapiens
  misc_RNA (1)...(19): siRNA sense strand
gggugaaguugcauccuuu

SEQ ID NO: 220316 - RNA, 19 nt, Homo sapiens
  misc_RNA (1)...(19): siRNA sense strand
gcaagagcacaacaauuug

SEQ ID NO: 220317 - RNA, 19 nt, Homo sapiens
  misc_RNA (1)...(19): siRNA sense strand
gcacaacaauuuggucaac

SEQ ID NO: 220318 - RNA, 19 nt, Homo sapiens
  misc_RNA (1)...(19): siRNA sense strand
agcaagagcacaacaauuu

SEQ ID NO: 220319 - RNA, 19 nt, Homo sapiens
  misc_RNA (1)...(19): siRNA sense strand
agaagauguucgagacuuu

SEQ ID NO: 220320 - RNA, 19 nt, Homo sapiens
  misc_RNA (1)...(19): siRNA sense strand
gagcaagagcacaacaauu

SEQ ID NO: 220321 - RNA, 19 nt, Homo sapiens
  misc_RNA (1)...(19): siRNA sense strand
ucaagcaaguggcaaguuc

SEQ ID NO: 220322 - RNA, 19 nt, Homo sapiens
  misc_RNA (1)...(19): siRNA sense strand
ccacgagacucaaacaacu

SEQ ID NO: 220323 - RNA, 19 nt, Homo sapiens
  misc_RNA (1)...(19): siRNA sense strand
cagcacaaccucaagcaaa

SEQ ID NO: 220324 - RNA, 19 nt, Homo sapiens
  misc_RNA (1)...(19): siRNA sense strand
gcaaagaguguccaaucau

SEQ ID NO: 220325 - RNA, 19 nt, Homo sapiens
  misc_RNA (1)...(19): siRNA sense strand
auggauauccugcagauua

SEQ ID NO: 220326 - RNA, 19 nt, Homo sapiens
  misc_RNA (1)...(19): siRNA sense strand
uguaacaucugcaaagagu

SEQ ID NO: 220327 - RNA, 19 nt, Homo sapiens
  misc_RNA (1)...(19): siRNA sense strand
guccggagcugcuuccaau

SEQ ID NO: 220328 - RNA, 19 nt, Homo sapiens
  misc_RNA (1)...(19): siRNA sense strand
gcaaguggcaaguucaaca

SEQ ID NO: 220329 - RNA, 19 nt, Homo sapiens
  misc_RNA (1)...(19): siRNA sense strand
gcuuccaauuugcuaauaa

SEQ ID NO: 220330 - RNA, 19 nt, Homo sapiens
  misc_RNA (1)...(19): siRNA sense strand
uggaagacaaguacagaua

SEQ ID NO: 220331 - RNA, 19 nt, Homo sapiens
  misc_RNA (1)...(19): siRNA sense strand
ggauccguguccugucuuu

SEQ ID NO: 220332 - RNA, 19 nt, Homo sapiens
  misc_RNA (1)...(19): siRNA sense strand
gucuuuagcugaccugaau

SEQ ID NO: 220333 - RNA, 19 nt, Homo sapiens
  misc_RNA (1)...(19): siRNA sense strand
gacaaguacagauaccuuu

SEQ ID NO: 220334 - RNA, 19 nt, Homo sapiens
  misc_RNA (1)...(19): siRNA sense strand
ccaagcaucaggccaaaug

SEQ ID NO: 220335 - RNA, 19 nt, Homo sapiens
  misc_RNA (1)...(19): siRNA sense strand
ggagcaagagcacaacaau

SEQ ID NO: 220336 - RNA, 19 nt, Homo sapiens
  misc_RNA (1)...(19): siRNA sense strand
guguaaagcacauuuggaa

SEQ ID NO: 220337 - RNA, 19 nt, Homo sapiens
  misc_RNA (1)...(19): siRNA sense strand
caagacaguugggugaagu

SEQ ID NO: 220338 - RNA, 19 nt, Homo sapiens
  misc_RNA (1)...(19): siRNA sense strand
gaagauguucgagacuuug

SEQ ID NO: 220339 - RNA, 19 nt, Homo sapiens
  misc_RNA (1)...(19): siRNA sense strand
gucagauucucagcuuaua

SEQ ID NO: 220340 - RNA, 19 nt, Homo sapiens
  misc_RNA (1)...(19): siRNA sense strand
uaacaucugcaaagagugu

SEQ ID NO: 220341 - RNA, 19 nt, Homo sapiens
  misc_RNA (1)...(19): siRNA sense strand
cggagcugcuuccaauuug

SEQ ID NO: 220342 - RNA, 19 nt, Homo sapiens
  misc_RNA (1)...(19): siRNA sense strand
gaagacaaguacagauacc

SEQ ID NO: 220343 - RNA, 19 nt, Homo sapiens
  misc_RNA (1)...(19): siRNA sense strand
ccauggauauccugcagau

SEQ ID NO: 220344 - RNA, 19 nt, Homo sapiens
  misc_RNA (1)...(19): siRNA sense strand
ggcaucauuucccugugua

SEQ ID NO: 220345 - RNA, 19 nt, Homo sapiens
  misc_RNA (1)...(19): siRNA sense strand
uggauauccugcagauuau

SEQ ID NO: 220346 - RNA, 19 nt, Homo sapiens
  misc_RNA (1)...(19): siRNA sense strand
ggaagacaaguacagauac

SEQ ID NO: 220347 - RNA, 19 nt, Homo sapiens
  misc_RNA (1)...(19): siRNA sense strand
ugcaaagaguguccaauca

SEQ ID NO: 220348 - RNA, 19 nt, Homo sapiens
  misc_RNA (1)...(19): siRNA sense strand
guggauaugugucugaacu

SEQ ID NO: 220349 - RNA, 19 nt, Homo sapiens
  misc_RNA (1)...(19): siRNA sense strand
acuggcugcugaauguuua

SEQ ID NO: 220350 - RNA, 19 nt, Homo sapiens
  misc_RNA (1)...(19): siRNA sense strand
acuaucccaugguggaaua

SEQ ID NO: 220351 - RNA, 19 nt, Homo sapiens
  misc_RNA (1)...(19): siRNA sense strand
ccggagcugcuuccaauuu

SEQ ID NO: 220352 - RNA, 19 nt, Homo sapiens
  misc_RNA (1)...(19): siRNA sense strand
ccaaauuccaagacaguug

SEQ ID NO: 220353 - RNA, 19 nt, Homo sapiens
  misc_RNA (1)...(19): siRNA sense strand
cagaaacugccaagcauca

SEQ ID NO: 220354 - RNA, 19 nt, Homo sapiens
  misc_RNA (1)...(19): siRNA sense strand
uaugacaucugccaaagcu

SEQ ID NO: 220355 - RNA, 19 nt, Homo sapiens
  misc_RNA (1)...(19): siRNA sense strand
aaugucagauucucagcuu

SEQ ID NO: 220356 - RNA, 19 nt, Homo sapiens
  misc_RNA (1)...(19): siRNA sense strand
ucgagacuuugccaaggua

SEQ ID NO: 220357 - RNA, 19 nt, Homo sapiens
  misc_RNA (1)...(19): siRNA sense strand
gcaaaaggccauaaaaugc

SEQ ID NO: 220358 - RNA, 19 nt, Homo sapiens
  misc_RNA (1)...(19): siRNA sense strand
cugcaugauucuauccaaa

SEQ ID NO: 220359 - RNA, 19 nt, Homo sapiens
  misc_RNA (1)...(19): siRNA sense strand
uaaagcacauuuggaagac

SEQ ID NO: 220360 - RNA, 19 nt, Homo sapiens
  misc_RNA (1)...(19): siRNA sense strand
acaggagucuaaagcacuu

SEQ ID NO: 220361 - RNA, 19 nt, Homo sapiens
  misc_RNA (1)...(19): siRNA sense strand
acagauaccuuuucaagca

SEQ ID NO: 220362 - RNA, 19 nt, Homo sapiens
  misc_RNA (1)...(19): siRNA sense strand
aagcacauuuggaagacaa

SEQ ID NO: 220363 - RNA, 19 nt, Homo sapiens
  misc_RNA (1)...(19): siRNA sense strand
gcuaauaauaagccagaga

SEQ ID NO: 220364 - RNA, 19 nt, Homo sapiens
  misc_RNA (1)...(19): siRNA sense strand
caagagcacaacaauuugg

SEQ ID NO: 220365 - RNA, 19 nt, Homo sapiens
  misc_RNA (1)...(19): siRNA sense strand
ccugucagcugcaugugau

SEQ ID NO: 220366 - RNA, 19 nt, Homo sapiens
  misc_RNA (1)...(19): siRNA sense strand
gcugcugaauguuuaugau

SEQ ID NO: 220367 - RNA, 19 nt, Homo sapiens
  misc_RNA (1)...(19): siRNA sense strand
acagagcucuaccagucuu

SEQ ID NO: 220368 - RNA, 19 nt, Homo sapiens
  misc_RNA (1)...(19): siRNA sense strand
acaguugggugaaguugca

SEQ ID NO: 220369 - RNA, 19 nt, Homo sapiens
  misc_RNA (1)...(19): siRNA sense strand
guuugaccacuauuuauga

SEQ ID NO: 220370 - RNA, 19 nt, Homo sapiens
  misc_RNA (1)...(19): siRNA sense strand
gcuuauaggacugccauga

SEQ ID NO: 220371 - RNA, 19 nt, Homo sapiens
  misc_RNA (1)...(19): siRNA sense strand
caucaggccaaauguaaca

SEQ ID NO: 220372 - RNA, 19 nt, Homo sapiens
  misc_RNA (1)...(19): siRNA sense strand
gauucuauccaaauuccaa

SEQ ID NO: 220373 - RNA, 19 nt, Homo sapiens
  misc_RNA (1)...(19): siRNA sense strand
ggcaaguucaacaggauuu

SEQ ID NO: 220374 - RNA, 19 nt, Homo sapiens
  misc_RNA (1)...(19): siRNA sense strand
gaacuggcugcugaauguu

SEQ ID NO: 220375 - RNA, 19 nt, Homo sapiens
  misc_RNA (1)...(19): siRNA sense strand
cugcugaauguuuaugaua

SEQ ID NO: 220376 - RNA, 19 nt, Homo sapiens
  misc_RNA (1)...(19): siRNA sense strand
aagcaucaggccaaaugua

SEQ ID NO: 220377 - RNA, 19 nt, Homo sapiens
  misc_RNA (1)...(19): siRNA sense strand
uggcaucauuucccugugu

SEQ ID NO: 220378 - RNA, 19 nt, Homo sapiens
  misc_RNA (1)...(19): siRNA sense strand
ccaugaaacuccgaagacu

SEQ ID NO: 220379 - RNA, 19 nt, Homo sapiens
  misc_RNA (1)...(19): siRNA sense strand
auaauaagccagagaucga

SEQ ID NO: 220380 - RNA, 19 nt, Homo sapiens
  misc_RNA (1)...(19): siRNA sense strand
cuaauaauaagccagagau

SEQ ID NO: 220381 - RNA, 19 nt, Homo sapiens
  misc_RNA (1)...(19): siRNA sense strand
ugggugaaguugcauccuu

SEQ ID NO: 220382 - RNA, 19 nt, Homo sapiens
  misc_RNA (1)...(19): siRNA sense strand
caucauuucccuguguaaa

SEQ ID NO: 220383 - RNA, 19 nt, Homo sapiens
  misc_RNA (1)...(19): siRNA sense strand
gcguggauaugugucugaa

SEQ ID NO: 220384 - RNA, 19 nt, Homo sapiens
  misc_RNA (1)...(19): siRNA sense strand
gcacuaucccaugguggaa

SEQ ID NO: 220385 - RNA, 19 nt, Homo sapiens
  misc_RNA (1)...(19): siRNA sense strand
gagccugucagcugcaugu

SEQ ID NO: 220386 - RNA, 19 nt, Homo sapiens
  misc_RNA (1)...(19): siRNA sense strand
guacagauaccuuuucaag

SEQ ID NO: 220387 - RNA, 19 nt, Homo sapiens
  misc_RNA (1)...(19): siRNA sense strand
gucccucucugcguggaua

SEQ ID NO: 220388 - RNA, 19 nt, Homo sapiens
  misc_RNA (1)...(19): siRNA sense strand
ggagcugcuuccaauuugc

SEQ ID NO: 220389 - RNA, 19 nt, Homo sapiens
  misc_RNA (1)...(19): siRNA sense strand
uuagcugaccugaauaaug

SEQ ID NO: 220390 - RNA, 19 nt, Homo sapiens
  misc_RNA (1)...(19): siRNA sense strand
guggcaaguucaacaggau

SEQ ID NO: 220391 - RNA, 19 nt, Homo sapiens
  misc_RNA (1)...(19): siRNA sense strand
acaacaauuuggucaacgu

SEQ ID NO: 220392 - RNA, 19 nt, Homo sapiens
  misc_RNA (1)...(19): siRNA sense strand
gacuacaucaggagaagau

SEQ ID NO: 220393 - RNA, 19 nt, Homo sapiens
  misc_RNA (1)...(19): siRNA sense strand
uaauaagccagagaucgaa

SEQ ID NO: 220394 - RNA, 19 nt, Homo sapiens
  misc_RNA (1)...(19): siRNA sense strand
ugucagauucucagcuuau

SEQ ID NO: 220395 - RNA, 19 nt, Homo sapiens
  misc_RNA (1)...(19): siRNA sense strand
ggauauccugcagauuauu

SEQ ID NO: 220396 - RNA, 19 nt, Homo sapiens
  misc_RNA (1)...(19): siRNA sense strand
agcaucaggccaaauguaa

SEQ ID NO: 220397 - RNA, 19 nt, Homo sapiens
  misc_RNA (1)...(19): siRNA sense strand
gcccuuugcuuggaucucu

SEQ ID NO: 220398 - RNA, 19 nt, Homo sapiens
  misc_RNA (1)...(19): siRNA sense strand
gcugaauguuuaugauacg

SEQ ID NO: 220399 - RNA, 19 nt, Homo sapiens
  misc_RNA (1)...(19): siRNA sense strand
agacuuugccaagguacua

SEQ ID NO: 220400 - RNA, 19 nt, Homo sapiens
  misc_RNA (1)...(19): siRNA sense strand
caagcaaguggcaaguuca

SEQ ID NO: 220401 - RNA, 19 nt, Homo sapiens
  misc_RNA (1)...(19): siRNA sense strand
agacaaguacagauaccuu

SEQ ID NO: 220402 - RNA, 19 nt, Homo sapiens
  misc_RNA (1)...(19): siRNA sense strand
gcaucauuucccuguguaa

SEQ ID NO: 220403 - RNA, 19 nt, Homo sapiens
  misc_RNA (1)...(19): siRNA sense strand
cugcaaagaguguccaauc

SEQ ID NO: 220404 - RNA, 19 nt, Homo sapiens
  misc_RNA (1)...(19): siRNA sense strand
cuuauaggacugccaugaa

SEQ ID NO: 220405 - RNA, 19 nt, Homo sapiens
  misc_RNA (1)...(19): siRNA sense strand
caaagaguguccaaucauu

SEQ ID NO: 220406 - RNA, 19 nt, Homo sapiens
  misc_RNA (1)...(19): siRNA sense strand
uagcugaccugaauaaugu

SEQ ID NO: 220407 - RNA, 19 nt, Homo sapiens
  misc_RNA (1)...(19): siRNA sense strand
gcaugauucuauccaaauu

SEQ ID NO: 220408 - RNA, 19 nt, Homo sapiens
  misc_RNA (1)...(19): siRNA sense strand
ugaacuggcugcugaaugu

SEQ ID NO: 220409 - RNA, 19 nt, Homo sapiens
  misc_RNA (1)...(19): siRNA sense strand
gauauccugcagauuauua

SEQ ID NO: 220410 - RNA, 19 nt, Homo sapiens
  misc_RNA (1)...(19): siRNA sense strand
gagaagauguucgagacuu

SEQ ID NO: 220411 - RNA, 19 nt, Homo sapiens
  misc_RNA (1)...(19): siRNA sense strand
gcacuuuaauuaugacauc

SEQ ID NO: 220412 - RNA, 19 nt, Homo sapiens
  misc_RNA (1)...(19): siRNA sense strand
guaaagcacauuuggaaga

SEQ ID NO: 220413 - RNA, 19 nt, Homo sapiens
  misc_RNA (1)...(19): siRNA sense strand
gaauauugcacuccgacua

SEQ ID NO: 220414 - RNA, 19 nt, Homo sapiens
  misc_RNA (1)...(19): siRNA sense strand
uuauaggacugccaugaaa

SEQ ID NO: 220415 - RNA, 19 nt, Homo sapiens
  misc_RNA (1)...(19): siRNA sense strand
gggugaaguugcauccuuu

SEQ ID NO: 220416 - RNA, 19 nt, Homo sapiens
  misc_RNA (1)...(19): siRNA sense strand
gcaagagcacaacaauuug

SEQ ID NO: 220417 - RNA, 19 nt, Homo sapiens
  misc_RNA (1)...(19): siRNA sense strand
gcacaacaauuuggucaac

SEQ ID NO: 220418 - RNA, 19 nt, Homo sapiens
  misc_RNA (1)...(19): siRNA sense strand
agcaagagcacaacaauuu

SEQ ID NO: 220419 - RNA, 19 nt, Homo sapiens
  misc_RNA (1)...(19): siRNA sense strand
agaagauguucgagacuuu

SEQ ID NO: 220420 - RNA, 19 nt, Homo sapiens
  misc_RNA (1)...(19): siRNA sense strand
gagcaagagcacaacaauu

SEQ ID NO: 220421 - RNA, 19 nt, Homo sapiens
  misc_RNA (1)...(19): siRNA sense strand
ucaagcaaguggcaaguuc

SEQ ID NO: 220422 - RNA, 19 nt, Homo sapiens
  misc_RNA (1)...(19): siRNA sense strand
ccacgagacucaaacaacu

SEQ ID NO: 220423 - RNA, 19 nt, Homo sapiens
  misc_RNA (1)...(19): siRNA sense strand
cagcacaaccucaagcaaa

SEQ ID NO: 220424 - RNA, 19 nt, Homo sapiens
  misc_RNA (1)...(19): siRNA sense strand
gcaaagaguguccaaucau

SEQ ID NO: 220425 - RNA, 19 nt, Homo sapiens
  misc_RNA (1)...(19): siRNA sense strand
auggauauccugcagauua

SEQ ID NO: 220426 - RNA, 19 nt, Homo sapiens
  misc_RNA (1)...(19): siRNA sense strand
uguaacaucugcaaagagu

SEQ ID NO: 220427 - RNA, 19 nt, Homo sapiens
  misc_RNA (1)...(19): siRNA sense strand
guccggagcugcuuccaau

SEQ ID NO: 220428 - RNA, 19 nt, Homo sapiens
  misc_RNA (1)...(19): siRNA sense strand
gcaaguggcaaguucaaca

SEQ ID NO: 220429 - RNA, 19 nt, Homo sapiens
  misc_RNA (1)...(19): siRNA sense strand
gcuuccaauuugcuaauaa

SEQ ID NO: 220430 - RNA, 19 nt, Homo sapiens
  misc_RNA (1)...(19): siRNA sense strand
uggaagacaaguacagaua

SEQ ID NO: 220431 - RNA, 19 nt, Homo sapiens
  misc_RNA (1)...(19): siRNA sense strand
ggauccguguccugucuuu

SEQ ID NO: 220432 - RNA, 19 nt, Homo sapiens
  misc_RNA (1)...(19): siRNA sense strand
gucuuuagcugaccugaau

SEQ ID NO: 220433 - RNA, 19 nt, Homo sapiens
  misc_RNA (1)...(19): siRNA sense strand
gacaaguacagauaccuuu

SEQ ID NO: 220434 - RNA, 19 nt, Homo sapiens
  misc_RNA (1)...(19): siRNA sense strand
ccaagcaucaggccaaaug

SEQ ID NO: 220435 - RNA, 19 nt, Homo sapiens
  misc_RNA (1)...(19): siRNA sense strand
ggagcaagagcacaacaau

SEQ ID NO: 220436 - RNA, 19 nt, Homo sapiens
  misc_RNA (1)...(19): siRNA sense strand
guguaaagcacauuuggaa

SEQ ID NO: 220437 - RNA, 19 nt, Homo sapiens
  misc_RNA (1)...(19): siRNA sense strand
caagacaguugggugaagu

SEQ ID NO: 220438 - RNA, 19 nt, Homo sapiens
  misc_RNA (1)...(19): siRNA sense strand
gaagauguucgagacuuug

SEQ ID NO: 220439 - RNA, 19 nt, Homo sapiens
  misc_RNA (1)...(19): siRNA sense strand
gucagauucucagcuuaua

SEQ ID NO: 220440 - RNA, 19 nt, Homo sapiens
  misc_RNA (1)...(19): siRNA sense strand
uaacaucugcaaagagugu

SEQ ID NO: 220441 - RNA, 19 nt, Homo sapiens
  misc_RNA (1)...(19): siRNA sense strand
cggagcugcuuccaauuug

SEQ ID NO: 220442 - RNA, 19 nt, Homo sapiens
  misc_RNA (1)...(19): siRNA sense strand
gaagacaaguacagauacc

SEQ ID NO: 220443 - RNA, 19 nt, Homo sapiens
  misc_RNA (1)...(19): siRNA sense strand
ccauggauauccugcagau

SEQ ID NO: 220444 - RNA, 19 nt, Homo sapiens
  misc_RNA (1)...(19): siRNA sense strand
ggcaucauuucccugugua

SEQ ID NO: 220445 - RNA, 19 nt, Homo sapiens
  misc_RNA (1)...(19): siRNA sense strand
uggauauccugcagauuau

SEQ ID NO: 220446 - RNA, 19 nt, Homo sapiens
  misc_RNA (1)...(19): siRNA sense strand
ggaagacaaguacagauac

SEQ ID NO: 220447 - RNA, 19 nt, Homo sapiens
  misc_RNA (1)...(19): siRNA sense strand
ugcaaagaguguccaauca

SEQ ID NO: 220448 - RNA, 19 nt, Homo sapiens
  misc_RNA (1)...(19): siRNA sense strand
guggauaugugucugaacu

SEQ ID NO: 220449 - RNA, 19 nt, Homo sapiens
  misc_RNA (1)...(19): siRNA sense strand
acuggcugcugaauguuua

SEQ ID NO: 220450 - RNA, 19 nt, Homo sapiens
  misc_RNA (1)...(19): siRNA sense strand
acuaucccaugguggaaua

SEQ ID NO: 220451 - RNA, 19 nt, Homo sapiens
  misc_RNA (1)...(19): siRNA sense strand
ccggagcugcuuccaauuu

SEQ ID NO: 220452 - RNA, 19 nt, Homo sapiens
  misc_RNA (1)...(19): siRNA sense strand
ccaaauuccaagacaguug

SEQ ID NO: 220453 - RNA, 19 nt, Homo sapiens
  misc_RNA (1)...(19): siRNA sense strand
cagaaacugccaagcauca

SEQ ID NO: 220454 - RNA, 19 nt, Homo sapiens
  misc_RNA (1)...(19): siRNA sense strand
uaugacaucugccaaagcu

SEQ ID NO: 220455 - RNA, 19 nt, Homo sapiens
  misc_RNA (1)...(19): siRNA sense strand
aaugucagauucucagcuu

SEQ ID NO: 220456 - RNA, 19 nt, Homo sapiens
  misc_RNA (1)...(19): siRNA sense strand
ucgagacuuugccaaggua

SEQ ID NO: 220457 - RNA, 19 nt, Homo sapiens
  misc_RNA (1)...(19): siRNA sense strand
gcaaaaggccauaaaaugc

SEQ ID NO: 220458 - RNA, 19 nt, Homo sapiens
  misc_RNA (1)...(19): siRNA sense strand
cugcaugauucuauccaaa

SEQ ID NO: 220459 - RNA, 19 nt, Homo sapiens
  misc_RNA (1)...(19): siRNA sense strand
uaaagcacauuuggaagac

SEQ ID NO: 220460 - RNA, 19 nt, Homo sapiens
  misc_RNA (1)...(19): siRNA sense strand
acaggagucuaaagcacuu

SEQ ID NO: 220461 - RNA, 19 nt, Homo sapiens
  misc_RNA (1)...(19): siRNA sense strand
acagauaccuuuucaagca

SEQ ID NO: 220462 - RNA, 19 nt, Homo sapiens
  misc_RNA (1)...(19): siRNA sense strand
aagcacauuuggaagacaa

SEQ ID NO: 220463 - RNA, 19 nt, Homo sapiens
  misc_RNA (1)...(19): siRNA sense strand
gcuaauaauaagccagaga

SEQ ID NO: 220464 - RNA, 19 nt, Homo sapiens
  misc_RNA (1)...(19): siRNA sense strand
caagagcacaacaauuugg

SEQ ID NO: 220465 - RNA, 19 nt, Homo sapiens
  misc_RNA (1)...(19): siRNA sense strand
ccugucagcugcaugugau

SEQ ID NO: 220466 - RNA, 19 nt, Homo sapiens
  misc_RNA (1)...(19): siRNA sense strand
gcugcugaauguuuaugau

SEQ ID NO: 220467 - RNA, 19 nt, Homo sapiens
  misc_RNA (1)...(19): siRNA sense strand
acagagcucuaccagucuu

SEQ ID NO: 220468 - RNA, 19 nt, Homo sapiens
  misc_RNA (1)...(19): siRNA sense strand
acaguugggugaaguugca

SEQ ID NO: 220469 - RNA, 19 nt, Homo sapiens
  misc_RNA (1)...(19): siRNA sense strand
guuugaccacuauuuauga

SEQ ID NO: 220470 - RNA, 19 nt, Homo sapiens
  misc_RNA (1)...(19): siRNA sense strand
gcuuauaggacugccauga

SEQ ID NO: 220471 - RNA, 19 nt, Homo sapiens
  misc_RNA (1)...(19): siRNA sense strand
caucaggccaaauguaaca

SEQ ID NO: 220472 - RNA, 19 nt, Homo sapiens
  misc_RNA (1)...(19): siRNA sense strand
gauucuauccaaauuccaa

SEQ ID NO: 220473 - RNA, 19 nt, Homo sapiens
  misc_RNA (1)...(19): siRNA sense strand
ggcaaguucaacaggauuu

SEQ ID NO: 220474 - RNA, 19 nt, Homo sapiens
  misc_RNA (1)...(19): siRNA sense strand
gaacuggcugcugaauguu

SEQ ID NO: 220475 - RNA, 19 nt, Homo sapiens
  misc_RNA (1)...(19): siRNA sense strand
cugcugaauguuuaugaua

SEQ ID NO: 220476 - RNA, 19 nt, Homo sapiens
  misc_RNA (1)...(19): siRNA sense strand
aagcaucaggccaaaugua

SEQ ID NO: 220477 - RNA, 19 nt, Homo sapiens
  misc_RNA (1)...(19): siRNA sense strand
uggcaucauuucccugugu

SEQ ID NO: 220478 - RNA, 19 nt, Homo sapiens
  misc_RNA (1)...(19): siRNA sense strand
ccaugaaacuccgaagacu

SEQ ID NO: 220479 - RNA, 19 nt, Homo sapiens
  misc_RNA (1)...(19): siRNA sense strand
auaauaagccagagaucga

SEQ ID NO: 220480 - RNA, 19 nt, Homo sapiens
  misc_RNA (1)...(19): siRNA sense strand
cuaauaauaagccagagau

SEQ ID NO: 220481 - RNA, 19 nt, Homo sapiens
  misc_RNA (1)...(19): siRNA sense strand
ugggugaaguugcauccuu

SEQ ID NO: 220482 - RNA, 19 nt, Homo sapiens
  misc_RNA (1)...(19): siRNA sense strand
caucauuucccuguguaaa

SEQ ID NO: 220483 - RNA, 19 nt, Homo sapiens
  misc_RNA (1)...(19): siRNA sense strand
gcguggauaugugucugaa

SEQ ID NO: 220484 - RNA, 19 nt, Homo sapiens
  misc_RNA (1)...(19): siRNA sense strand
gcacuaucccaugguggaa

SEQ ID NO: 220485 - RNA, 19 nt, Homo sapiens
  misc_RNA (1)...(19): siRNA sense strand
gagccugucagcugcaugu

SEQ ID NO: 220486 - RNA, 19 nt, Homo sapiens
  misc_RNA (1)...(19): siRNA sense strand
guacagauaccuuuucaag

SEQ ID NO: 220487 - RNA, 19 nt, Homo sapiens
  misc_RNA (1)...(19): siRNA sense strand
gucccucucugcguggaua

SEQ ID NO: 220488 - RNA, 19 nt, Homo sapiens
  misc_RNA (1)...(19): siRNA sense strand
ggagcugcuuccaauuugc

SEQ ID NO: 220489 - RNA, 19 nt, Homo sapiens
  misc_RNA (1)...(19): siRNA sense strand
uuagcugaccugaauaaug

SEQ ID NO: 220490 - RNA, 19 nt, Homo sapiens
  misc_RNA (1)...(19): siRNA sense strand
guggcaaguucaacaggau

SEQ ID NO: 220491 - RNA, 19 nt, Homo sapiens
  misc_RNA (1)...(19): siRNA sense strand
acaacaauuuggucaacgu

SEQ ID NO: 220492 - RNA, 19 nt, Homo sapiens
  misc_RNA (1)...(19): siRNA sense strand
gacuacaucaggagaagau

SEQ ID NO: 220493 - RNA, 19 nt, Homo sapiens
  misc_RNA (1)...(19): siRNA sense strand
uaauaagccagagaucgaa

SEQ ID NO: 220494 - RNA, 19 nt, Homo sapiens
  misc_RNA (1)...(19): siRNA sense strand
ugucagauucucagcuuau

SEQ ID NO: 220495 - RNA, 19 nt, Homo sapiens
  misc_RNA (1)...(19): siRNA sense strand
ggauauccugcagauuauu

SEQ ID NO: 220496 - RNA, 19 nt, Homo sapiens
  misc_RNA (1)...(19): siRNA sense strand
agcaucaggccaaauguaa

SEQ ID NO: 220497 - RNA, 19 nt, Homo sapiens
  misc_RNA (1)...(19): siRNA sense strand
gcccuuugcuuggaucucu

SEQ ID NO: 220498 - RNA, 19 nt, Homo sapiens
  misc_RNA (1)...(19): siRNA sense strand
gcugaauguuuaugauacg

SEQ ID NO: 220499 - RNA, 19 nt, Homo sapiens
  misc_RNA (1)...(19): siRNA sense strand
agacuuugccaagguacua

SEQ ID NO: 220500 - RNA, 19 nt, Homo sapiens
  misc_RNA (1)...(19): siRNA sense strand
caagcaaguggcaaguuca

SEQ ID NO: 220501 - RNA, 19 nt, Homo sapiens
  misc_RNA (1)...(19): siRNA sense strand
agacaaguacagauaccuu

SEQ ID NO: 220502 - RNA, 19 nt, Homo sapiens
  misc_RNA (1)...(19): siRNA sense strand
gcaucauuucccuguguaa

SEQ ID NO: 220503 - RNA, 19 nt, Homo sapiens
  misc_RNA (1)...(19): siRNA sense strand
cugcaaagaguguccaauc

SEQ ID NO: 220504 - RNA, 19 nt, Homo sapiens
  misc_RNA (1)...(19): siRNA sense strand
cuuauaggacugccaugaa

SEQ ID NO: 220505 - RNA, 19 nt, Homo sapiens
  misc_RNA (1)...(19): siRNA sense strand
caaagaguguccaaucauu

SEQ ID NO: 220506 - RNA, 19 nt, Homo sapiens
  misc_RNA (1)...(19): siRNA sense strand
uagcugaccugaauaaugu

SEQ ID NO: 220507 - RNA, 19 nt, Homo sapiens
  misc_RNA (1)...(19): siRNA sense strand
gcaugauucuauccaaauu

SEQ ID NO: 220508 - RNA, 19 nt, Homo sapiens
  misc_RNA (1)...(19): siRNA sense strand
ugaacuggcugcugaaugu

SEQ ID NO: 220509 - RNA, 19 nt, Homo sapiens
  misc_RNA (1)...(19): siRNA sense strand
gauauccugcagauuauua

SEQ ID NO: 220510 - RNA, 19 nt, Homo sapiens
  misc_RNA (1)...(19): siRNA sense strand
gagaagauguucgagacuu

SEQ ID NO: 220511 - RNA, 19 nt, Homo sapiens
  misc_RNA (1)...(19): siRNA sense strand
gcacuuuaauuaugacauc

SEQ ID NO: 220512 - RNA, 19 nt, Homo sapiens
  misc_RNA (1)...(19): siRNA sense strand
guaaagcacauuuggaaga

SEQ ID NO: 220513 - RNA, 19 nt, Homo sapiens
  misc_RNA (1)...(19): siRNA sense strand
gaauauugcacuccgacua

SEQ ID NO: 220514 - RNA, 19 nt, Homo sapiens
  misc_RNA (1)...(19): siRNA sense strand
uuauaggacugccaugaaa

SEQ ID NO: 220515 - RNA, 19 nt, Homo sapiens
  misc_RNA (1)...(19): siRNA sense strand
gggugaaguugcauccuuu

SEQ ID NO: 220516 - RNA, 19 nt, Homo sapiens
  misc_RNA (1)...(19): siRNA sense strand
gcaagagcacaacaauuug

SEQ ID NO: 220517 - RNA, 19 nt, Homo sapiens
  misc_RNA (1)...(19): siRNA sense strand
gcacaacaauuuggucaac

SEQ ID NO: 220518 - RNA, 19 nt, Homo sapiens
  misc_RNA (1)...(19): siRNA sense strand
agcaagagcacaacaauuu

SEQ ID NO: 220519 - RNA, 19 nt, Homo sapiens
  misc_RNA (1)...(19): siRNA sense strand
agaagauguucgagacuuu

SEQ ID NO: 220520 - RNA, 19 nt, Homo sapiens
  misc_RNA (1)...(19): siRNA sense strand
gagcaagagcacaacaauu

SEQ ID NO: 220521 - RNA, 19 nt, Homo sapiens
  misc_RNA (1)...(19): siRNA sense strand
ucaagcaaguggcaaguuc

SEQ ID NO: 220522 - RNA, 19 nt, Homo sapiens
  misc_RNA (1)...(19): siRNA sense strand
ccacgagacucaaacaacu

SEQ ID NO: 220523 - RNA, 19 nt, Homo sapiens
  misc_RNA (1)...(19): siRNA sense strand
cagcacaaccucaagcaaa

SEQ ID NO: 220524 - RNA, 19 nt, Homo sapiens
  misc_RNA (1)...(19): siRNA sense strand
gcaaagaguguccaaucau

SEQ ID NO: 220525 - RNA, 19 nt, Homo sapiens
  misc_RNA (1)...(19): siRNA sense strand
auggauauccugcagauua

SEQ ID NO: 220526 - RNA, 19 nt, Homo sapiens
  misc_RNA (1)...(19): siRNA sense strand
uguaacaucugcaaagagu

SEQ ID NO: 220527 - RNA, 19 nt, Homo sapiens
  misc_RNA (1)...(19): siRNA sense strand
guccggagcugcuuccaau

SEQ ID NO: 220528 - RNA, 19 nt, Homo sapiens
  misc_RNA (1)...(19): siRNA sense strand
gcaaguggcaaguucaaca

SEQ ID NO: 220529 - RNA, 19 nt, Homo sapiens
  misc_RNA (1)...(19): siRNA sense strand
gcuuccaauuugcuaauaa

SEQ ID NO: 220530 - RNA, 19 nt, Homo sapiens
  misc_RNA (1)...(19): siRNA sense strand
uggaagacaaguacagaua

SEQ ID NO: 220531 - RNA, 19 nt, Homo sapiens
  misc_RNA (1)...(19): siRNA sense strand
ggauccguguccugucuuu

SEQ ID NO: 220532 - RNA, 19 nt, Homo sapiens
  misc_RNA (1)...(19): siRNA sense strand
gucuuuagcugaccugaau

SEQ ID NO: 220533 - RNA, 19 nt, Homo sapiens
  misc_RNA (1)...(19): siRNA sense strand
gacaaguacagauaccuuu

SEQ ID NO: 220534 - RNA, 19 nt, Homo sapiens
  misc_RNA (1)...(19): siRNA sense strand
ccaagcaucaggccaaaug

SEQ ID NO: 220535 - RNA, 19 nt, Homo sapiens
  misc_RNA (1)...(19): siRNA sense strand
ggagcaagagcacaacaau

SEQ ID NO: 220536 - RNA, 19 nt, Homo sapiens
  misc_RNA (1)...(19): siRNA sense strand
guguaaagcacauuuggaa

SEQ ID NO: 220537 - RNA, 19 nt, Homo sapiens
  misc_RNA (1)...(19): siRNA sense strand
caagacaguugggugaagu

SEQ ID NO: 220538 - RNA, 19 nt, Homo sapiens
  misc_RNA (1)...(19): siRNA sense strand
gaagauguucgagacuuug

SEQ ID NO: 220539 - RNA, 19 nt, Homo sapiens
  misc_RNA (1)...(19): siRNA sense strand
gucagauucucagcuuaua

SEQ ID NO: 220540 - RNA, 19 nt, Homo sapiens
  misc_RNA (1)...(19): siRNA sense strand
uaacaucugcaaagagugu

SEQ ID NO: 220541 - RNA, 19 nt, Homo sapiens
  misc_RNA (1)...(19): siRNA sense strand
cggagcugcuuccaauuug

SEQ ID NO: 220542 - RNA, 19 nt, Homo sapiens
  misc_RNA (1)...(19): siRNA sense strand
gaagacaaguacagauacc

SEQ ID NO: 220543 - RNA, 19 nt, Homo sapiens
  misc_RNA (1)...(19): siRNA sense strand
ccauggauauccugcagau

SEQ ID NO: 220544 - RNA, 19 nt, Homo sapiens
  misc_RNA (1)...(19): siRNA sense strand
ggcaucauuucccugugua

SEQ ID NO: 220545 - RNA, 19 nt, Homo sapiens
  misc_RNA (1)...(19): siRNA sense strand
uggauauccugcagauuau

SEQ ID NO: 220546 - RNA, 19 nt, Homo sapiens
  misc_RNA (1)...(19): siRNA sense strand
ggaagacaaguacagauac

SEQ ID NO: 220547 - RNA, 19 nt, Homo sapiens
  misc_RNA (1)...(19): siRNA sense strand
ugcaaagaguguccaauca

SEQ ID NO: 220548 - RNA, 19 nt, Homo sapiens
  misc_RNA (1)...(19): siRNA sense strand
guggauaugugucugaacu

SEQ ID NO: 220549 - RNA, 19 nt, Homo sapiens
  misc_RNA (1)...(19): siRNA sense strand
acuggcugcugaauguuua

SEQ ID NO: 220550 - RNA, 19 nt, Homo sapiens
  misc_RNA (1)...(19): siRNA sense strand
acuaucccaugguggaaua

SEQ ID NO: 220551 - RNA, 19 nt, Homo sapiens
  misc_RNA (1)...(19): siRNA sense strand
ccggagcugcuuccaauuu

SEQ ID NO: 220552 - RNA, 19 nt, Homo sapiens
  misc_RNA (1)...(19): siRNA sense strand
ccaaauuccaagacaguug

SEQ ID NO: 220553 - RNA, 19 nt, Homo sapiens
  misc_RNA (1)...(19): siRNA sense strand
cagaaacugccaagcauca

SEQ ID NO: 220554 - RNA, 19 nt, Homo sapiens
  misc_RNA (1)...(19): siRNA sense strand
uaugacaucugccaaagcu

SEQ ID NO: 220555 - RNA, 19 nt, Homo sapiens
  misc_RNA (1)...(19): siRNA sense strand
aaugucagauucucagcuu

SEQ ID NO: 220556 - RNA, 19 nt, Homo sapiens
  misc_RNA (1)...(19): siRNA sense strand
ucgagacuuugccaaggua

SEQ ID NO: 220557 - RNA, 19 nt, Homo sapiens
  misc_RNA (1)...(19): siRNA sense strand
gcaaaaggccauaaaaugc

SEQ ID NO: 220558 - RNA, 19 nt, Homo sapiens
  misc_RNA (1)...(19): siRNA sense strand
cugcaugauucuauccaaa

SEQ ID NO: 220559 - RNA, 19 nt, Homo sapiens
  misc_RNA (1)...(19): siRNA sense strand
uaaagcacauuuggaagac

SEQ ID NO: 220560 - RNA, 19 nt, Homo sapiens
  misc_RNA (1)...(19): siRNA sense strand
acaggagucuaaagcacuu

SEQ ID NO: 220561 - RNA, 19 nt, Homo sapiens
  misc_RNA (1)...(19): siRNA sense strand
acagauaccuuuucaagca

SEQ ID NO: 220562 - RNA, 19 nt, Homo sapiens
  misc_RNA (1)...(19): siRNA sense strand
aagcacauuuggaagacaa

SEQ ID NO: 220563 - RNA, 19 nt, Homo sapiens
  misc_RNA (1)...(19): siRNA sense strand
gcuaauaauaagccagaga

SEQ ID NO: 220564 - RNA, 19 nt, Homo sapiens
  misc_RNA (1)...(19): siRNA sense strand
caagagcacaacaauuugg

SEQ ID NO: 220565 - RNA, 19 nt, Homo sapiens
  misc_RNA (1)...(19): siRNA sense strand
ccugucagcugcaugugau

SEQ ID NO: 220566 - RNA, 19 nt, Homo sapiens
  misc_RNA (1)...(19): siRNA sense strand
gcugcugaauguuuaugau

SEQ ID NO: 220567 - RNA, 19 nt, Homo sapiens
  misc_RNA (1)...(19): siRNA sense strand
acagagcucuaccagucuu

SEQ ID NO: 220568 - RNA, 19 nt, Homo sapiens
  misc_RNA (1)...(19): siRNA sense strand
acaguugggugaaguugca

SEQ ID NO: 220569 - RNA, 19 nt, Homo sapiens
  misc_RNA (1)...(19): siRNA sense strand
guuugaccacuauuuauga

SEQ ID NO: 220570 - RNA, 19 nt, Homo sapiens
  misc_RNA (1)...(19): siRNA sense strand
gcuuauaggacugccauga

SEQ ID NO: 220571 - RNA, 19 nt, Homo sapiens
  misc_RNA (1)...(19): siRNA sense strand
caucaggccaaauguaaca

SEQ ID NO: 220572 - RNA, 19 nt, Homo sapiens
  misc_RNA (1)...(19): siRNA sense strand
gauucuauccaaauuccaa

SEQ ID NO: 220573 - RNA, 19 nt, Homo sapiens
  misc_RNA (1)...(19): siRNA sense strand
ggcaaguucaacaggauuu

SEQ ID NO: 220574 - RNA, 19 nt, Homo sapiens
  misc_RNA (1)...(19): siRNA sense strand
gaacuggcugcugaauguu

SEQ ID NO: 220575 - RNA, 19 nt, Homo sapiens
  misc_RNA (1)...(19): siRNA sense strand
cugcugaauguuuaugaua

SEQ ID NO: 220576 - RNA, 19 nt, Homo sapiens
  misc_RNA (1)...(19): siRNA sense strand
aagcaucaggccaaaugua

SEQ ID NO: 220577 - RNA, 19 nt, Homo sapiens
  misc_RNA (1)...(19): siRNA sense strand
uggcaucauuucccugugu

SEQ ID NO: 220578 - RNA, 19 nt, Homo sapiens
  misc_RNA (1)...(19): siRNA sense strand
ccaugaaacuccgaagacu

SEQ ID NO: 220579 - RNA, 19 nt, Homo sapiens
  misc_RNA (1)...(19): siRNA sense strand
auaauaagccagagaucga

SEQ ID NO: 220580 - RNA, 19 nt, Homo sapiens
  misc_RNA (1)...(19): siRNA sense strand
cuaauaauaagccagagau

SEQ ID NO: 220581 - RNA, 19 nt, Homo sapiens
  misc_RNA (1)...(19): siRNA sense strand
ugggugaaguugcauccuu

SEQ ID NO: 220582 - RNA, 19 nt, Homo sapiens
  misc_RNA (1)...(19): siRNA sense strand
caucauuucccuguguaaa

SEQ ID NO: 220583 - RNA, 19 nt, Homo sapiens
  misc_RNA (1)...(19): siRNA sense strand
gcguggauaugugucugaa

SEQ ID NO: 220584 - RNA, 19 nt, Homo sapiens
  misc_RNA (1)...(19): siRNA sense strand
gcacuaucccaugguggaa

SEQ ID NO: 220585 - RNA, 19 nt, Homo sapiens
  misc_RNA (1)...(19): siRNA sense strand
gagccugucagcugcaugu

SEQ ID NO: 220586 - RNA, 19 nt, Homo sapiens
  misc_RNA (1)...(19): siRNA sense strand
guacagauaccuuuucaag

SEQ ID NO: 220587 - RNA, 19 nt, Homo sapiens
  misc_RNA (1)...(19): siRNA sense strand
gucccucucugcguggaua

SEQ ID NO: 220588 - RNA, 19 nt, Homo sapiens
  misc_RNA (1)...(19): siRNA sense strand
ggagcugcuuccaauuugc

SEQ ID NO: 220589 - RNA, 19 nt, Homo sapiens
  misc_RNA (1)...(19): siRNA sense strand
uuagcugaccugaauaaug

SEQ ID NO: 220590 - RNA, 19 nt, Homo sapiens
  misc_RNA (1)...(19): siRNA sense strand
guggcaaguucaacaggau

SEQ ID NO: 220591 - RNA, 19 nt, Homo sapiens
  misc_RNA (1)...(19): siRNA sense strand
acaacaauuuggucaacgu

SEQ ID NO: 220592 - RNA, 19 nt, Homo sapiens
  misc_RNA (1)...(19): siRNA sense strand
gacuacaucaggagaagau

SEQ ID NO: 220593 - RNA, 19 nt, Homo sapiens
  misc_RNA (1)...(19): siRNA sense strand
uaauaagccagagaucgaa

SEQ ID NO: 220594 - RNA, 19 nt, Homo sapiens
  misc_RNA (1)...(19): siRNA sense strand
ugucagauucucagcuuau

SEQ ID NO: 220595 - RNA, 19 nt, Homo sapiens
  misc_RNA (1)...(19): siRNA sense strand
ggauauccugcagauuauu

SEQ ID NO: 220596 - RNA, 19 nt, Homo sapiens
  misc_RNA (1)...(19): siRNA sense strand
agcaucaggccaaauguaa

SEQ ID NO: 220597 - RNA, 19 nt, Homo sapiens
  misc_RNA (1)...(19): siRNA sense strand
gcccuuugcuuggaucucu

SEQ ID NO: 220598 - RNA, 19 nt, Homo sapiens
  misc_RNA (1)...(19): siRNA sense strand
gcugaauguuuaugauacg

SEQ ID NO: 220599 - RNA, 19 nt, Homo sapiens
  misc_RNA (1)...(19): siRNA sense strand
agacuuugccaagguacua

SEQ ID NO: 220600 - RNA, 19 nt, Homo sapiens
  misc_RNA (1)...(19): siRNA sense strand
caagcaaguggcaaguuca

SEQ ID NO: 220601 - RNA, 19 nt, Homo sapiens
  misc_RNA (1)...(19): siRNA sense strand
agacaaguacagauaccuu

SEQ ID NO: 220602 - RNA, 19 nt, Homo sapiens
  misc_RNA (1)...(19): siRNA sense strand
gcaucauuucccuguguaa

SEQ ID NO: 220603 - RNA, 19 nt, Homo sapiens
  misc_RNA (1)...(19): siRNA sense strand
cugcaaagaguguccaauc

SEQ ID NO: 220604 - RNA, 19 nt, Homo sapiens
  misc_RNA (1)...(19): siRNA sense strand
cuuauaggacugccaugaa

SEQ ID NO: 220605 - RNA, 19 nt, Homo sapiens
  misc_RNA (1)...(19): siRNA sense strand
caaagaguguccaaucauu

SEQ ID NO: 220606 - RNA, 19 nt, Homo sapiens
  misc_RNA (1)...(19): siRNA sense strand
uagcugaccugaauaaugu

SEQ ID NO: 220607 - RNA, 19 nt, Homo sapiens
  misc_RNA (1)...(19): siRNA sense strand
gcaugauucuauccaaauu

SEQ ID NO: 220608 - RNA, 19 nt, Homo sapiens
  misc_RNA (1)...(19): siRNA sense strand
ugaacuggcugcugaaugu

SEQ ID NO: 220609 - RNA, 19 nt, Homo sapiens
  misc_RNA (1)...(19): siRNA sense strand
gauauccugcagauuauua

SEQ ID NO: 220610 - RNA, 19 nt, Homo sapiens
  misc_RNA (1)...(19): siRNA sense strand
gagaagauguucgagacuu

SEQ ID NO: 220611 - RNA, 19 nt, Homo sapiens
  misc_RNA (1)...(19): siRNA sense strand
gcacuuuaauuaugacauc

SEQ ID NO: 220612 - RNA, 19 nt, Homo sapiens
  misc_RNA (1)...(19): siRNA sense strand
guaaagcacauuuggaaga

SEQ ID NO: 220613 - RNA, 19 nt, Homo sapiens
  misc_RNA (1)...(19): siRNA sense strand
gaauauugcacuccgacua

SEQ ID NO: 220614 - RNA, 19 nt, Homo sapiens
  misc_RNA (1)...(19): siRNA sense strand
uuauaggacugccaugaaa

SEQ ID NO: 220615 - RNA, 19 nt, Homo sapiens
  misc_RNA (1)...(19): siRNA sense strand
gggugaaguugcauccuuu

SEQ ID NO: 220616 - RNA, 19 nt, Homo sapiens
  misc_RNA (1)...(19): siRNA sense strand
gcaagagcacaacaauuug

SEQ ID NO: 220617 - RNA, 19 nt, Homo sapiens
  misc_RNA (1)...(19): siRNA sense strand
gcacaacaauuuggucaac

SEQ ID NO: 220618 - RNA, 19 nt, Homo sapiens
  misc_RNA (1)...(19): siRNA sense strand
agcaagagcacaacaauuu

SEQ ID NO: 220619 - RNA, 19 nt, Homo sapiens
  misc_RNA (1)...(19): siRNA sense strand
agaagauguucgagacuuu

SEQ ID NO: 220620 - RNA, 19 nt, Homo sapiens
  misc_RNA (1)...(19): siRNA sense strand
gagcaagagcacaacaauu

SEQ ID NO: 220621 - RNA, 19 nt, Homo sapiens
  misc_RNA (1)...(19): siRNA sense strand
ucaagcaaguggcaaguuc

SEQ ID NO: 220622 - RNA, 19 nt, Homo sapiens
  misc_RNA (1)...(19): siRNA sense strand
ccacgagacucaaacaacu

SEQ ID NO: 220623 - RNA, 19 nt, Homo sapiens
  misc_RNA (1)...(19): siRNA sense strand
cagcacaaccucaagcaaa

SEQ ID NO: 220624 - RNA, 19 nt, Homo sapiens
  misc_RNA (1)...(19): siRNA sense strand
gcaaagaguguccaaucau

SEQ ID NO: 220625 - RNA, 19 nt, Homo sapiens
  misc_RNA (1)...(19): siRNA sense strand
auggauauccugcagauua

SEQ ID NO: 220626 - RNA, 19 nt, Homo sapiens
  misc_RNA (1)...(19): siRNA sense strand
uguaacaucugcaaagagu

SEQ ID NO: 220627 - RNA, 19 nt, Homo sapiens
  misc_RNA (1)...(19): siRNA sense strand
guccggagcugcuuccaau

SEQ ID NO: 220628 - RNA, 19 nt, Homo sapiens
  misc_RNA (1)...(19): siRNA sense strand
gcaaguggcaaguucaaca

SEQ ID NO: 220629 - RNA, 19 nt, Homo sapiens
  misc_RNA (1)...(19): siRNA sense strand
gcuuccaauuugcuaauaa

SEQ ID NO: 220630 - RNA, 19 nt, Homo sapiens
  misc_RNA (1)...(19): siRNA sense strand
uggaagacaaguacagaua

SEQ ID NO: 220631 - RNA, 19 nt, Homo sapiens
  misc_RNA (1)...(19): siRNA sense strand
ggauccguguccugucuuu

SEQ ID NO: 220632 - RNA, 19 nt, Homo sapiens
  misc_RNA (1)...(19): siRNA sense strand
gucuuuagcugaccugaau

SEQ ID NO: 220633 - RNA, 19 nt, Homo sapiens
  misc_RNA (1)...(19): siRNA sense strand
gacaaguacagauaccuuu

SEQ ID NO: 220634 - RNA, 19 nt, Homo sapiens
  misc_RNA (1)...(19): siRNA sense strand
ccaagcaucaggccaaaug

SEQ ID NO: 220635 - RNA, 19 nt, Homo sapiens
  misc_RNA (1)...(19): siRNA sense strand
ggagcaagagcacaacaau

SEQ ID NO: 220636 - RNA, 19 nt, Homo sapiens
  misc_RNA (1)...(19): siRNA sense strand
guguaaagcacauuuggaa

SEQ ID NO: 220637 - RNA, 19 nt, Homo sapiens
  misc_RNA (1)...(19): siRNA sense strand
caagacaguugggugaagu

SEQ ID NO: 220638 - RNA, 19 nt, Homo sapiens
  misc_RNA (1)...(19): siRNA sense strand
gaagauguucgagacuuug

SEQ ID NO: 220639 - RNA, 19 nt, Homo sapiens
  misc_RNA (1)...(19): siRNA sense strand
gucagauucucagcuuaua

SEQ ID NO: 220640 - RNA, 19 nt, Homo sapiens
  misc_RNA (1)...(19): siRNA sense strand
uaacaucugcaaagagugu

SEQ ID NO: 220641 - RNA, 19 nt, Homo sapiens
  misc_RNA (1)...(19): siRNA sense strand
cggagcugcuuccaauuug

SEQ ID NO: 220642 - RNA, 19 nt, Homo sapiens
  misc_RNA (1)...(19): siRNA sense strand
gaagacaaguacagauacc

SEQ ID NO: 220643 - RNA, 19 nt, Homo sapiens
  misc_RNA (1)...(19): siRNA sense strand
ccauggauauccugcagau

SEQ ID NO: 220644 - RNA, 19 nt, Homo sapiens
  misc_RNA (1)...(19): siRNA sense strand
ggcaucauuucccugugua

SEQ ID NO: 220645 - RNA, 19 nt, Homo sapiens
  misc_RNA (1)...(19): siRNA sense strand
uggauauccugcagauuau

SEQ ID NO: 220646 - RNA, 19 nt, Homo sapiens
  misc_RNA (1)...(19): siRNA sense strand
ggaagacaaguacagauac

SEQ ID NO: 220647 - RNA, 19 nt, Homo sapiens
  misc_RNA (1)...(19): siRNA sense strand
ugcaaagaguguccaauca

SEQ ID NO: 220648 - RNA, 19 nt, Homo sapiens
  misc_RNA (1)...(19): siRNA sense strand
guggauaugugucugaacu

SEQ ID NO: 220649 - RNA, 19 nt, Homo sapiens
  misc_RNA (1)...(19): siRNA sense strand
acuggcugcugaauguuua

SEQ ID NO: 220650 - RNA, 19 nt, Homo sapiens
  misc_RNA (1)...(19): siRNA sense strand
acuaucccaugguggaaua

SEQ ID NO: 220651 - RNA, 19 nt, Homo sapiens
  misc_RNA (1)...(19): siRNA sense strand
ccggagcugcuuccaauuu

SEQ ID NO: 220652 - RNA, 19 nt, Homo sapiens
  misc_RNA (1)...(19): siRNA sense strand
ccaaauuccaagacaguug

SEQ ID NO: 220653 - RNA, 19 nt, Homo sapiens
  misc_RNA (1)...(19): siRNA sense strand
cagaaacugccaagcauca

SEQ ID NO: 220654 - RNA, 19 nt, Homo sapiens
  misc_RNA (1)...(19): siRNA sense strand
uaugacaucugccaaagcu

SEQ ID NO: 220655 - RNA, 19 nt, Homo sapiens
  misc_RNA (1)...(19): siRNA sense strand
aaugucagauucucagcuu

SEQ ID NO: 220656 - RNA, 19 nt, Homo sapiens
  misc_RNA (1)...(19): siRNA sense strand
ucgagacuuugccaaggua

SEQ ID NO: 220657 - RNA, 19 nt, Homo sapiens
  misc_RNA (1)...(19): siRNA sense strand
gcaaaaggccauaaaaugc

SEQ ID NO: 220658 - RNA, 19 nt, Homo sapiens
  misc_RNA (1)...(19): siRNA sense strand
cugcaugauucuauccaaa

SEQ ID NO: 220659 - RNA, 19 nt, Homo sapiens
  misc_RNA (1)...(19): siRNA sense strand
uaaagcacauuuggaagac

SEQ ID NO: 220660 - RNA, 19 nt, Homo sapiens
  misc_RNA (1)...(19): siRNA sense strand
acaggagucuaaagcacuu

SEQ ID NO: 220661 - RNA, 19 nt, Homo sapiens
  misc_RNA (1)...(19): siRNA sense strand
acagauaccuuuucaagca

SEQ ID NO: 220662 - RNA, 19 nt, Homo sapiens
  misc_RNA (1)...(19): siRNA sense strand
aagcacauuuggaagacaa

SEQ ID NO: 220663 - RNA, 19 nt, Homo sapiens
  misc_RNA (1)...(19): siRNA sense strand
gcuaauaauaagccagaga

SEQ ID NO: 220664 - RNA, 19 nt, Homo sapiens
  misc_RNA (1)...(19): siRNA sense strand
caagagcacaacaauuugg

SEQ ID NO: 220665 - RNA, 19 nt, Homo sapiens
  misc_RNA (1)...(19): siRNA sense strand
ccugucagcugcaugugau

SEQ ID NO: 220666 - RNA, 19 nt, Homo sapiens
  misc_RNA (1)...(19): siRNA sense strand
gcugcugaauguuuaugau

SEQ ID NO: 220667 - RNA, 19 nt, Homo sapiens
  misc_RNA (1)...(19): siRNA sense strand
acagagcucuaccagucuu

SEQ ID NO: 220668 - RNA, 19 nt, Homo sapiens
  misc_RNA (1)...(19): siRNA sense strand
acaguugggugaaguugca

SEQ ID NO: 220669 - RNA, 19 nt, Homo sapiens
  misc_RNA (1)...(19): siRNA sense strand
guuugaccacuauuuauga

SEQ ID NO: 220670 - RNA, 19 nt, Homo sapiens
  misc_RNA (1)...(19): siRNA sense strand
gcuuauaggacugccauga

SEQ ID NO: 220671 - RNA, 19 nt, Homo sapiens
  misc_RNA (1)...(19): siRNA sense strand
caucaggccaaauguaaca

SEQ ID NO: 220672 - RNA, 19 nt, Homo sapiens
  misc_RNA (1)...(19): siRNA sense strand
gauucuauccaaauuccaa

SEQ ID NO: 220673 - RNA, 19 nt, Homo sapiens
  misc_RNA (1)...(19): siRNA sense strand
ggcaaguucaacaggauuu

SEQ ID NO: 220674 - RNA, 19 nt, Homo sapiens
  misc_RNA (1)...(19): siRNA sense strand
gaacuggcugcugaauguu

SEQ ID NO: 220675 - RNA, 19 nt, Homo sapiens
  misc_RNA (1)...(19): siRNA sense strand
cugcugaauguuuaugaua

SEQ ID NO: 220676 - RNA, 19 nt, Homo sapiens
  misc_RNA (1)...(19): siRNA sense strand
aagcaucaggccaaaugua

SEQ ID NO: 220677 - RNA, 19 nt, Homo sapiens
  misc_RNA (1)...(19): siRNA sense strand
uggcaucauuucccugugu

SEQ ID NO: 220678 - RNA, 19 nt, Homo sapiens
  misc_RNA (1)...(19): siRNA sense strand
ccaugaaacuccgaagacu

SEQ ID NO: 220679 - RNA, 19 nt, Homo sapiens
  misc_RNA (1)...(19): siRNA sense strand
auaauaagccagagaucga

SEQ ID NO: 220680 - RNA, 19 nt, Homo sapiens
  misc_RNA (1)...(19): siRNA sense strand
cuaauaauaagccagagau

SEQ ID NO: 220681 - RNA, 19 nt, Homo sapiens
  misc_RNA (1)...(19): siRNA sense strand
ugggugaaguugcauccuu

SEQ ID NO: 220682 - RNA, 19 nt, Homo sapiens
  misc_RNA (1)...(19): siRNA sense strand
caucauuucccuguguaaa

SEQ ID NO: 220683 - RNA, 19 nt, Homo sapiens
  misc_RNA (1)...(19): siRNA sense strand
gcguggauaugugucugaa

SEQ ID NO: 220684 - RNA, 19 nt, Homo sapiens
  misc_RNA (1)...(19): siRNA sense strand
gcacuaucccaugguggaa

SEQ ID NO: 220685 - RNA, 19 nt, Homo sapiens
  misc_RNA (1)...(19): siRNA sense strand
gagccugucagcugcaugu

SEQ ID NO: 220686 - RNA, 19 nt, Homo sapiens
  misc_RNA (1)...(19): siRNA sense strand
guacagauaccuuuucaag

SEQ ID NO: 220687 - RNA, 19 nt, Homo sapiens
  misc_RNA (1)...(19): siRNA sense strand
gucccucucugcguggaua

SEQ ID NO: 220688 - RNA, 19 nt, Homo sapiens
  misc_RNA (1)...(19): siRNA sense strand
ggagcugcuuccaauuugc

SEQ ID NO: 220689 - RNA, 19 nt, Homo sapiens
  misc_RNA (1)...(19): siRNA sense strand
uuagcugaccugaauaaug

SEQ ID NO: 220690 - RNA, 19 nt, Homo sapiens
  misc_RNA (1)...(19): siRNA sense strand
guggcaaguucaacaggau

SEQ ID NO: 220691 - RNA, 19 nt, Homo sapiens
  misc_RNA (1)...(19): siRNA sense strand
acaacaauuuggucaacgu

SEQ ID NO: 220692 - RNA, 19 nt, Homo sapiens
  misc_RNA (1)...(19): siRNA sense strand
gacuacaucaggagaagau

SEQ ID NO: 220693 - RNA, 19 nt, Homo sapiens
  misc_RNA (1)...(19): siRNA sense strand
uaauaagccagagaucgaa

SEQ ID NO: 220694 - RNA, 19 nt, Homo sapiens
  misc_RNA (1)...(19): siRNA sense strand
ugucagauucucagcuuau

SEQ ID NO: 220695 - RNA, 19 nt, Homo sapiens
  misc_RNA (1)...(19): siRNA sense strand
ggauauccugcagauuauu

SEQ ID NO: 220696 - RNA, 19 nt, Homo sapiens
  misc_RNA (1)...(19): siRNA sense strand
agcaucaggccaaauguaa

SEQ ID NO: 220697 - RNA, 19 nt, Homo sapiens
  misc_RNA (1)...(19): siRNA sense strand
gcccuuugcuuggaucucu

SEQ ID NO: 220698 - RNA, 19 nt, Homo sapiens
  misc_RNA (1)...(19): siRNA sense strand
gcugaauguuuaugauacg

SEQ ID NO: 220699 - RNA, 19 nt, Homo sapiens
  misc_RNA (1)...(19): siRNA sense strand
agacuuugccaagguacua

SEQ ID NO: 220700 - RNA, 19 nt, Homo sapiens
  misc_RNA (1)...(19): siRNA sense strand
caagcaaguggcaaguuca

SEQ ID NO: 220701 - RNA, 19 nt, Homo sapiens
  misc_RNA (1)...(19): siRNA sense strand
agacaaguacagauaccuu

SEQ ID NO: 220702 - RNA, 19 nt, Homo sapiens
  misc_RNA (1)...(19): siRNA sense strand
gcaucauuucccuguguaa

SEQ ID NO: 220703 - RNA, 19 nt, Homo sapiens
  misc_RNA (1)...(19): siRNA sense strand
cugcaaagaguguccaauc

SEQ ID NO: 220704 - RNA, 19 nt, Homo sapiens
  misc_RNA (1)...(19): siRNA sense strand
cuuauaggacugccaugaa

SEQ ID NO: 220705 - RNA, 19 nt, Homo sapiens
  misc_RNA (1)...(19): siRNA sense strand
caaagaguguccaaucauu

SEQ ID NO: 220706 - RNA, 19 nt, Homo sapiens
  misc_RNA (1)...(19): siRNA sense strand
uagcugaccugaauaaugu

SEQ ID NO: 220707 - RNA, 19 nt, Homo sapiens
  misc_RNA (1)...(19): siRNA sense strand
gcaugauucuauccaaauu

SEQ ID NO: 220708 - RNA, 19 nt, Homo sapiens
  misc_RNA (1)...(19): siRNA sense strand
ugaacuggcugcugaaugu

SEQ ID NO: 220709 - RNA, 19 nt, Homo sapiens
  misc_RNA (1)...(19): siRNA sense strand
gauauccugcagauuauua

SEQ ID NO: 220710 - RNA, 19 nt, Homo sapiens
  misc_RNA (1)...(19): siRNA sense strand
gagaagauguucgagacuu

SEQ ID NO: 220711 - RNA, 19 nt, Homo sapiens
  misc_RNA (1)...(19): siRNA sense strand
gcacuuuaauuaugacauc

SEQ ID NO: 220712 - RNA, 19 nt, Homo sapiens
  misc_RNA (1)...(19): siRNA sense strand
guaaagcacauuuggaaga

SEQ ID NO: 220713 - RNA, 19 nt, Homo sapiens
  misc_RNA (1)...(19): siRNA sense strand
gaauauugcacuccgacua

SEQ ID NO: 220714 - RNA, 19 nt, Homo sapiens
  misc_RNA (1)...(19): siRNA sense strand
uuauaggacugccaugaaa

SEQ ID NO: 220715 - RNA, 19 nt, Homo sapiens
  misc_RNA (1)...(19): siRNA sense strand
gggugaaguugcauccuuu

SEQ ID NO: 220716 - RNA, 19 nt, Homo sapiens
  misc_RNA (1)...(19): siRNA sense strand
gcaagagcacaacaauuug

SEQ ID NO: 220717 - RNA, 19 nt, Homo sapiens
  misc_RNA (1)...(19): siRNA sense strand
gcacaacaauuuggucaac

SEQ ID NO: 220718 - RNA, 19 nt, Homo sapiens
  misc_RNA (1)...(19): siRNA sense strand
agcaagagcacaacaauuu

SEQ ID NO: 220719 - RNA, 19 nt, Homo sapiens
  misc_RNA (1)...(19): siRNA sense strand
agaagauguucgagacuuu

SEQ ID NO: 220720 - RNA, 19 nt, Homo sapiens
  misc_RNA (1)...(19): siRNA sense strand
gagcaagagcacaacaauu

SEQ ID NO: 220721 - RNA, 19 nt, Homo sapiens
  misc_RNA (1)...(19): siRNA sense strand
ucaagcaaguggcaaguuc

SEQ ID NO: 220722 - RNA, 19 nt, Homo sapiens
  misc_RNA (1)...(19): siRNA sense strand
ccacgagacucaaacaacu

SEQ ID NO: 220723 - RNA, 19 nt, Homo sapiens
  misc_RNA (1)...(19): siRNA sense strand
cagcacaaccucaagcaaa

SEQ ID NO: 220724 - RNA, 19 nt, Homo sapiens
  misc_RNA (1)...(19): siRNA sense strand
gcaaagaguguccaaucau

SEQ ID NO: 220725 - RNA, 19 nt, Homo sapiens
  misc_RNA (1)...(19): siRNA sense strand
auggauauccugcagauua

SEQ ID NO: 220726 - RNA, 19 nt, Homo sapiens
  misc_RNA (1)...(19): siRNA sense strand
uguaacaucugcaaagagu

SEQ ID NO: 220727 - RNA, 19 nt, Homo sapiens
  misc_RNA (1)...(19): siRNA sense strand
guccggagcugcuuccaau

SEQ ID NO: 220728 - RNA, 19 nt, Homo sapiens
  misc_RNA (1)...(19): siRNA sense strand
gcaaguggcaaguucaaca

SEQ ID NO: 220729 - RNA, 19 nt, Homo sapiens
  misc_RNA (1)...(19): siRNA sense strand
gcuuccaauuugcuaauaa

SEQ ID NO: 220730 - RNA, 19 nt, Homo sapiens
  misc_RNA (1)...(19): siRNA sense strand
uggaagacaaguacagaua

SEQ ID NO: 220731 - RNA, 19 nt, Homo sapiens
  misc_RNA (1)...(19): siRNA sense strand
ggauccguguccugucuuu

SEQ ID NO: 220732 - RNA, 19 nt, Homo sapiens
  misc_RNA (1)...(19): siRNA sense strand
gucuuuagcugaccugaau

SEQ ID NO: 220733 - RNA, 19 nt, Homo sapiens
  misc_RNA (1)...(19): siRNA sense strand
gacaaguacagauaccuuu

SEQ ID NO: 220734 - RNA, 19 nt, Homo sapiens
  misc_RNA (1)...(19): siRNA sense strand
ccaagcaucaggccaaaug

SEQ ID NO: 220735 - RNA, 19 nt, Homo sapiens
  misc_RNA (1)...(19): siRNA sense strand
ggagcaagagcacaacaau

SEQ ID NO: 220736 - RNA, 19 nt, Homo sapiens
  misc_RNA (1)...(19): siRNA sense strand
guguaaagcacauuuggaa

SEQ ID NO: 220737 - RNA, 19 nt, Homo sapiens
  misc_RNA (1)...(19): siRNA sense strand
caagacaguugggugaagu

SEQ ID NO: 220738 - RNA, 19 nt, Homo sapiens
  misc_RNA (1)...(19): siRNA sense strand
gaagauguucgagacuuug

SEQ ID NO: 220739 - RNA, 19 nt, Homo sapiens
  misc_RNA (1)...(19): siRNA sense strand
gucagauucucagcuuaua

SEQ ID NO: 220740 - RNA, 19 nt, Homo sapiens
  misc_RNA (1)...(19): siRNA sense strand
uaacaucugcaaagagugu

SEQ ID NO: 220741 - RNA, 19 nt, Homo sapiens
  misc_RNA (1)...(19): siRNA sense strand
cggagcugcuuccaauuug

SEQ ID NO: 220742 - RNA, 19 nt, Homo sapiens
  misc_RNA (1)...(19): siRNA sense strand
gaagacaaguacagauacc

SEQ ID NO: 220743 - RNA, 19 nt, Homo sapiens
  misc_RNA (1)...(19): siRNA sense strand
ccauggauauccugcagau

SEQ ID NO: 220744 - RNA, 19 nt, Homo sapiens
  misc_RNA (1)...(19): siRNA sense strand
ggcaucauuucccugugua

SEQ ID NO: 220745 - RNA, 19 nt, Homo sapiens
  misc_RNA (1)...(19): siRNA sense strand
uggauauccugcagauuau

SEQ ID NO: 220746 - RNA, 19 nt, Homo sapiens
  misc_RNA (1)...(19): siRNA sense strand
ggaagacaaguacagauac

SEQ ID NO: 220747 - RNA, 19 nt, Homo sapiens
  misc_RNA (1)...(19): siRNA sense strand
ugcaaagaguguccaauca

SEQ ID NO: 220748 - RNA, 19 nt, Homo sapiens
  misc_RNA (1)...(19): siRNA sense strand
guggauaugugucugaacu

SEQ ID NO: 220749 - RNA, 19 nt, Homo sapiens
  misc_RNA (1)...(19): siRNA sense strand
acuggcugcugaauguuua

SEQ ID NO: 220750 - RNA, 19 nt, Homo sapiens
  misc_RNA (1)...(19): siRNA sense strand
acuaucccaugguggaaua

SEQ ID NO: 220751 - RNA, 19 nt, Homo sapiens
  misc_RNA (1)...(19): siRNA sense strand
ccggagcugcuuccaauuu

SEQ ID NO: 220752 - RNA, 19 nt, Homo sapiens
  misc_RNA (1)...(19): siRNA sense strand
ccaaauuccaagacaguug

SEQ ID NO: 220753 - RNA, 19 nt, Homo sapiens
  misc_RNA (1)...(19): siRNA sense strand
cagaaacugccaagcauca

SEQ ID NO: 220754 - RNA, 19 nt, Homo sapiens
  misc_RNA (1)...(19): siRNA sense strand
uaugacaucugccaaagcu

SEQ ID NO: 220755 - RNA, 19 nt, Homo sapiens
  misc_RNA (1)...(19): siRNA sense strand
aaugucagauucucagcuu

SEQ ID NO: 220756 - RNA, 19 nt, Homo sapiens
  misc_RNA (1)...(19): siRNA sense strand
ucgagacuuugccaaggua

SEQ ID NO: 220757 - RNA, 19 nt, Homo sapiens
  misc_RNA (1)...(19): siRNA sense strand
gcaaaaggccauaaaaugc

SEQ ID NO: 220758 - RNA, 19 nt, Homo sapiens
  misc_RNA (1)...(19): siRNA sense strand
cugcaugauucuauccaaa

SEQ ID NO: 220759 - RNA, 19 nt, Homo sapiens
  misc_RNA (1)...(19): siRNA sense strand
uaaagcacauuuggaagac

SEQ ID NO: 220760 - RNA, 19 nt, Homo sapiens
  misc_RNA (1)...(19): siRNA sense strand
acaggagucuaaagcacuu

SEQ ID NO: 220761 - RNA, 19 nt, Homo sapiens
  misc_RNA (1)...(19): siRNA sense strand
acagauaccuuuucaagca

SEQ ID NO: 220762 - RNA, 19 nt, Homo sapiens
  misc_RNA (1)...(19): siRNA sense strand
aagcacauuuggaagacaa

SEQ ID NO: 220763 - RNA, 19 nt, Homo sapiens
  misc_RNA (1)...(19): siRNA sense strand
gcuaauaauaagccagaga

SEQ ID NO: 220764 - RNA, 19 nt, Homo sapiens
  misc_RNA (1)...(19): siRNA sense strand
caagagcacaacaauuugg

SEQ ID NO: 220765 - RNA, 19 nt, Homo sapiens
  misc_RNA (1)...(19): siRNA sense strand
ccugucagcugcaugugau

SEQ ID NO: 220766 - RNA, 19 nt, Homo sapiens
  misc_RNA (1)...(19): siRNA sense strand
gcugcugaauguuuaugau

SEQ ID NO: 220767 - RNA, 19 nt, Homo sapiens
  misc_RNA (1)...(19): siRNA sense strand
acagagcucuaccagucuu

SEQ ID NO: 220768 - RNA, 19 nt, Homo sapiens
  misc_RNA (1)...(19): siRNA sense strand
acaguugggugaaguugca

SEQ ID NO: 220769 - RNA, 19 nt, Homo sapiens
  misc_RNA (1)...(19): siRNA sense strand
guuugaccacuauuuauga

SEQ ID NO: 220770 - RNA, 19 nt, Homo sapiens
  misc_RNA (1)...(19): siRNA sense strand
gcuuauaggacugccauga

SEQ ID NO: 220771 - RNA, 19 nt, Homo sapiens
  misc_RNA (1)...(19): siRNA sense strand
caucaggccaaauguaaca

SEQ ID NO: 220772 - RNA, 19 nt, Homo sapiens
  misc_RNA (1)...(19): siRNA sense strand
gauucuauccaaauuccaa

SEQ ID NO: 220773 - RNA, 19 nt, Homo sapiens
  misc_RNA (1)...(19): siRNA sense strand
ggcaaguucaacaggauuu

SEQ ID NO: 220774 - RNA, 19 nt, Homo sapiens
  misc_RNA (1)...(19): siRNA sense strand
gaacuggcugcugaauguu

SEQ ID NO: 220775 - RNA, 19 nt, Homo sapiens
  misc_RNA (1)...(19): siRNA sense strand
cugcugaauguuuaugaua

SEQ ID NO: 220776 - RNA, 19 nt, Homo sapiens
  misc_RNA (1)...(19): siRNA sense strand
aagcaucaggccaaaugua

SEQ ID NO: 220777 - RNA, 19 nt, Homo sapiens
  misc_RNA (1)...(19): siRNA sense strand
uggcaucauuucccugugu

SEQ ID NO: 220778 - RNA, 19 nt, Homo sapiens
  misc_RNA (1)...(19): siRNA sense strand
ccaugaaacuccgaagacu

SEQ ID NO: 220779 - RNA, 19 nt, Homo sapiens
  misc_RNA (1)...(19): siRNA sense strand
auaauaagccagagaucga

SEQ ID NO: 220780 - RNA, 19 nt, Homo sapiens
  misc_RNA (1)...(19): siRNA sense strand
cuaauaauaagccagagau

SEQ ID NO: 220781 - RNA, 19 nt, Homo sapiens
  misc_RNA (1)...(19): siRNA sense strand
ugggugaaguugcauccuu

SEQ ID NO: 220782 - RNA, 19 nt, Homo sapiens
  misc_RNA (1)...(19): siRNA sense strand
caucauuucccuguguaaa

SEQ ID NO: 220783 - RNA, 19 nt, Homo sapiens
  misc_RNA (1)...(19): siRNA sense strand
gcguggauaugugucugaa

SEQ ID NO: 220784 - RNA, 19 nt, Homo sapiens
  misc_RNA (1)...(19): siRNA sense strand
gcacuaucccaugguggaa

SEQ ID NO: 220785 - RNA, 19 nt, Homo sapiens
  misc_RNA (1)...(19): siRNA sense strand
gagccugucagcugcaugu

SEQ ID NO: 220786 - RNA, 19 nt, Homo sapiens
  misc_RNA (1)...(19): siRNA sense strand
guacagauaccuuuucaag

SEQ ID NO: 220787 - RNA, 19 nt, Homo sapiens
  misc_RNA (1)...(19): siRNA sense strand
gucccucucugcguggaua

SEQ ID NO: 220788 - RNA, 19 nt, Homo sapiens
  misc_RNA (1)...(19): siRNA sense strand
ggagcugcuuccaauuugc

SEQ ID NO: 220789 - RNA, 19 nt, Homo sapiens
  misc_RNA (1)...(19): siRNA sense strand
uuagcugaccugaauaaug

SEQ ID NO: 220790 - RNA, 19 nt, Homo sapiens
  misc_RNA (1)...(19): siRNA sense strand
guggcaaguucaacaggau

SEQ ID NO: 220791 - RNA, 19 nt, Homo sapiens
  misc_RNA (1)...(19): siRNA sense strand
acaacaauuuggucaacgu

SEQ ID NO: 220792 - RNA, 19 nt, Homo sapiens
  misc_RNA (1)...(19): siRNA sense strand
gacuacaucaggagaagau

SEQ ID NO: 220793 - RNA, 19 nt, Homo sapiens
  misc_RNA (1)...(19): siRNA sense strand
uaauaagccagagaucgaa

SEQ ID NO: 220794 - RNA, 19 nt, Homo sapiens
  misc_RNA (1)...(19): siRNA sense strand
ugucagauucucagcuuau

SEQ ID NO: 220795 - RNA, 19 nt, Homo sapiens
  misc_RNA (1)...(19): siRNA sense strand
ggauauccugcagauuauu

SEQ ID NO: 220796 - RNA, 19 nt, Homo sapiens
  misc_RNA (1)...(19): siRNA sense strand
agcaucaggccaaauguaa

SEQ ID NO: 220797 - RNA, 19 nt, Homo sapiens
  misc_RNA (1)...(19): siRNA sense strand
gcccuuugcuuggaucucu

SEQ ID NO: 220798 - RNA, 19 nt, Homo sapiens
  misc_RNA (1)...(19): siRNA sense strand
gcugaauguuuaugauacg

SEQ ID NO: 220799 - RNA, 19 nt, Homo sapiens
  misc_RNA (1)...(19): siRNA sense strand
agacuuugccaagguacua

SEQ ID NO: 220800 - RNA, 19 nt, Homo sapiens
  misc_RNA (1)...(19): siRNA sense strand
caagcaaguggcaaguuca

SEQ ID NO: 220801 - RNA, 19 nt, Homo sapiens
  misc_RNA (1)...(19): siRNA sense strand
agacaaguacagauaccuu

SEQ ID NO: 220802 - RNA, 19 nt, Homo sapiens
  misc_RNA (1)...(19): siRNA sense strand
gcaucauuucccuguguaa

SEQ ID NO: 220803 - RNA, 19 nt, Homo sapiens
  misc_RNA (1)...(19): siRNA sense strand
cugcaaagaguguccaauc

SEQ ID NO: 220804 - RNA, 19 nt, Homo sapiens
  misc_RNA (1)...(19): siRNA sense strand
cuuauaggacugccaugaa

SEQ ID NO: 220805 - RNA, 19 nt, Homo sapiens
  misc_RNA (1)...(19): siRNA sense strand
caaagaguguccaaucauu

SEQ ID NO: 220806 - RNA, 19 nt, Homo sapiens
  misc_RNA (1)...(19): siRNA sense strand
uagcugaccugaauaaugu

SEQ ID NO: 220807 - RNA, 19 nt, Homo sapiens
  misc_RNA (1)...(19): siRNA sense strand
gcaugauucuauccaaauu

SEQ ID NO: 220808 - RNA, 19 nt, Homo sapiens
  misc_RNA (1)...(19): siRNA sense strand
ugaacuggcugcugaaugu

SEQ ID NO: 220809 - RNA, 19 nt, Homo sapiens
  misc_RNA (1)...(19): siRNA sense strand
gauauccugcagauuauua

SEQ ID NO: 220810 - RNA, 19 nt, Homo sapiens
  misc_RNA (1)...(19): siRNA sense strand
gagaagauguucgagacuu

SEQ ID NO: 220811 - RNA, 19 nt, Homo sapiens
  misc_RNA (1)...(19): siRNA sense strand
gcacuuuaauuaugacauc

SEQ ID NO: 220812 - RNA, 19 nt, Homo sapiens
  misc_RNA (1)...(19): siRNA sense strand
guaaagcacauuuggaaga

SEQ ID NO: 220813 - RNA, 19 nt, Homo sapiens
  misc_RNA (1)...(19): siRNA sense strand
gaauauugcacuccgacua

SEQ ID NO: 220814 - RNA, 19 nt, Homo sapiens
  misc_RNA (1)...(19): siRNA sense strand
uuauaggacugccaugaaa

SEQ ID NO: 220815 - RNA, 19 nt, Homo sapiens
  misc_RNA (1)...(19): siRNA sense strand
gggugaaguugcauccuuu

SEQ ID NO: 220816 - RNA, 19 nt, Homo sapiens
  misc_RNA (1)...(19): siRNA sense strand
gcaagagcacaacaauuug

SEQ ID NO: 220817 - RNA, 19 nt, Homo sapiens
  misc_RNA (1)...(19): siRNA sense strand
gcacaacaauuuggucaac

SEQ ID NO: 220818 - RNA, 19 nt, Homo sapiens
  misc_RNA (1)...(19): siRNA sense strand
agcaagagcacaacaauuu

SEQ ID NO: 220819 - RNA, 19 nt, Homo sapiens
  misc_RNA (1)...(19): siRNA sense strand
agaagauguucgagacuuu

SEQ ID NO: 220820 - RNA, 19 nt, Homo sapiens
  misc_RNA (1)...(19): siRNA sense strand
gagcaagagcacaacaauu

SEQ ID NO: 220821 - RNA, 19 nt, Homo sapiens
  misc_RNA (1)...(19): siRNA sense strand
ucaagcaaguggcaaguuc

SEQ ID NO: 220822 - RNA, 19 nt, Homo sapiens
  misc_RNA (1)...(19): siRNA sense strand
ccacgagacucaaacaacu

SEQ ID NO: 220823 - RNA, 19 nt, Homo sapiens
  misc_RNA (1)...(19): siRNA sense strand
cagcacaaccucaagcaaa

SEQ ID NO: 220824 - RNA, 19 nt, Homo sapiens
  misc_RNA (1)...(19): siRNA sense strand
gcaaagaguguccaaucau

SEQ ID NO: 220825 - RNA, 19 nt, Homo sapiens
  misc_RNA (1)...(19): siRNA sense strand
auggauauccugcagauua

SEQ ID NO: 220826 - RNA, 19 nt, Homo sapiens
  misc_RNA (1)...(19): siRNA sense strand
uguaacaucugcaaagagu

SEQ ID NO: 220827 - RNA, 19 nt, Homo sapiens
  misc_RNA (1)...(19): siRNA sense strand
guccggagcugcuuccaau

SEQ ID NO: 220828 - RNA, 19 nt, Homo sapiens
  misc_RNA (1)...(19): siRNA sense strand
gcaaguggcaaguucaaca

SEQ ID NO: 220829 - RNA, 19 nt, Homo sapiens
  misc_RNA (1)...(19): siRNA sense strand
gcuuccaauuugcuaauaa

SEQ ID NO: 220830 - RNA, 19 nt, Homo sapiens
  misc_RNA (1)...(19): siRNA sense strand
uggaagacaaguacagaua

SEQ ID NO: 220831 - RNA, 19 nt, Homo sapiens
  misc_RNA (1)...(19): siRNA sense strand
ggauccguguccugucuuu

SEQ ID NO: 220832 - RNA, 19 nt, Homo sapiens
  misc_RNA (1)...(19): siRNA sense strand
gucuuuagcugaccugaau

SEQ ID NO: 220833 - RNA, 19 nt, Homo sapiens
  misc_RNA (1)...(19): siRNA sense strand
gacaaguacagauaccuuu

SEQ ID NO: 220834 - RNA, 19 nt, Homo sapiens
  misc_RNA (1)...(19): siRNA sense strand
ccaagcaucaggccaaaug

SEQ ID NO: 220835 - RNA, 19 nt, Homo sapiens
  misc_RNA (1)...(19): siRNA sense strand
ggagcaagagcacaacaau

SEQ ID NO: 220836 - RNA, 19 nt, Homo sapiens
  misc_RNA (1)...(19): siRNA sense strand
guguaaagcacauuuggaa

SEQ ID NO: 220837 - RNA, 19 nt, Homo sapiens
  misc_RNA (1)...(19): siRNA sense strand
caagacaguugggugaagu

SEQ ID NO: 220838 - RNA, 19 nt, Homo sapiens
  misc_RNA (1)...(19): siRNA sense strand
gaagauguucgagacuuug

SEQ ID NO: 220839 - RNA, 19 nt, Homo sapiens
  misc_RNA (1)...(19): siRNA sense strand
gucagauucucagcuuaua

SEQ ID NO: 220840 - RNA, 19 nt, Homo sapiens
  misc_RNA (1)...(19): siRNA sense strand
uaacaucugcaaagagugu

SEQ ID NO: 220841 - RNA, 19 nt, Homo sapiens
  misc_RNA (1)...(19): siRNA sense strand
cggagcugcuuccaauuug

SEQ ID NO: 220842 - RNA, 19 nt, Homo sapiens
  misc_RNA (1)...(19): siRNA sense strand
gaagacaaguacagauacc

SEQ ID NO: 220843 - RNA, 19 nt, Homo sapiens
  misc_RNA (1)...(19): siRNA sense strand
ccauggauauccugcagau

SEQ ID NO: 220844 - RNA, 19 nt, Homo sapiens
  misc_RNA (1)...(19): siRNA sense strand
ggcaucauuucccugugua

SEQ ID NO: 220845 - RNA, 19 nt, Homo sapiens
  misc_RNA (1)...(19): siRNA sense strand
uggauauccugcagauuau

SEQ ID NO: 220846 - RNA, 19 nt, Homo sapiens
  misc_RNA (1)...(19): siRNA sense strand
ggaagacaaguacagauac

SEQ ID NO: 220847 - RNA, 19 nt, Homo sapiens
  misc_RNA (1)...(19): siRNA sense strand
ugcaaagaguguccaauca

SEQ ID NO: 220848 - RNA, 19 nt, Homo sapiens
  misc_RNA (1)...(19): siRNA sense strand
guggauaugugucugaacu

SEQ ID NO: 220849 - RNA, 19 nt, Homo sapiens
  misc_RNA (1)...(19): siRNA sense strand
acuggcugcugaauguuua

SEQ ID NO: 220850 - RNA, 19 nt, Homo sapiens
  misc_RNA (1)...(19): siRNA sense strand
acuaucccaugguggaaua

SEQ ID NO: 220851 - RNA, 19 nt, Homo sapiens
  misc_RNA (1)...(19): siRNA sense strand
ccggagcugcuuccaauuu

SEQ ID NO: 220852 - RNA, 19 nt, Homo sapiens
  misc_RNA (1)...(19): siRNA sense strand
ccaaauuccaagacaguug

SEQ ID NO: 220853 - RNA, 19 nt, Homo sapiens
  misc_RNA (1)...(19): siRNA sense strand
cagaaacugccaagcauca

SEQ ID NO: 220854 - RNA, 19 nt, Homo sapiens
  misc_RNA (1)...(19): siRNA sense strand
uaugacaucugccaaagcu

SEQ ID NO: 220855 - RNA, 19 nt, Homo sapiens
  misc_RNA (1)...(19): siRNA sense strand
aaugucagauucucagcuu

SEQ ID NO: 220856 - RNA, 19 nt, Homo sapiens
  misc_RNA (1)...(19): siRNA sense strand
ucgagacuuugccaaggua

SEQ ID NO: 220857 - RNA, 19 nt, Homo sapiens
  misc_RNA (1)...(19): siRNA sense strand
gcaaaaggccauaaaaugc

SEQ ID NO: 220858 - RNA, 19 nt, Homo sapiens
  misc_RNA (1)...(19): siRNA sense strand
cugcaugauucuauccaaa

SEQ ID NO: 220859 - RNA, 19 nt, Homo sapiens
  misc_RNA (1)...(19): siRNA sense strand
uaaagcacauuuggaagac

SEQ ID NO: 220860 - RNA, 19 nt, Homo sapiens
  misc_RNA (1)...(19): siRNA sense strand
acaggagucuaaagcacuu

SEQ ID NO: 220861 - RNA, 19 nt, Homo sapiens
  misc_RNA (1)...(19): siRNA sense strand
acagauaccuuuucaagca

SEQ ID NO: 220862 - RNA, 19 nt, Homo sapiens
  misc_RNA (1)...(19): siRNA sense strand
aagcacauuuggaagacaa

SEQ ID NO: 220863 - RNA, 19 nt, Homo sapiens
  misc_RNA (1)...(19): siRNA sense strand
gcuaauaauaagccagaga

SEQ ID NO: 220864 - RNA, 19 nt, Homo sapiens
  misc_RNA (1)...(19): siRNA sense strand
caagagcacaacaauuugg

SEQ ID NO: 220865 - RNA, 19 nt, Homo sapiens
  misc_RNA (1)...(19): siRNA sense strand
ccugucagcugcaugugau

SEQ ID NO: 220866 - RNA, 19 nt, Homo sapiens
  misc_RNA (1)...(19): siRNA sense strand
gcugcugaauguuuaugau

SEQ ID NO: 220867 - RNA, 19 nt, Homo sapiens
  misc_RNA (1)...(19): siRNA sense strand
acagagcucuaccagucuu

SEQ ID NO: 220868 - RNA, 19 nt, Homo sapiens
  misc_RNA (1)...(19): siRNA sense strand
acaguugggugaaguugca

SEQ ID NO: 220869 - RNA, 19 nt, Homo sapiens
  misc_RNA (1)...(19): siRNA sense strand
guuugaccacuauuuauga

SEQ ID NO: 220870 - RNA, 19 nt, Homo sapiens
  misc_RNA (1)...(19): siRNA sense strand
gcuuauaggacugccauga

SEQ ID NO: 220871 - RNA, 19 nt, Homo sapiens
  misc_RNA (1)...(19): siRNA sense strand
caucaggccaaauguaaca

SEQ ID NO: 220872 - RNA, 19 nt, Homo sapiens
  misc_RNA (1)...(19): siRNA sense strand
gauucuauccaaauuccaa

SEQ ID NO: 220873 - RNA, 19 nt, Homo sapiens
  misc_RNA (1)...(19): siRNA sense strand
ggcaaguucaacaggauuu

SEQ ID NO: 220874 - RNA, 19 nt, Homo sapiens
  misc_RNA (1)...(19): siRNA sense strand
gaacuggcugcugaauguu

SEQ ID NO: 220875 - RNA, 19 nt, Homo sapiens
  misc_RNA (1)...(19): siRNA sense strand
cugcugaauguuuaugaua

SEQ ID NO: 220876 - RNA, 19 nt, Homo sapiens
  misc_RNA (1)...(19): siRNA sense strand
aagcaucaggccaaaugua

SEQ ID NO: 220877 - RNA, 19 nt, Homo sapiens
  misc_RNA (1)...(19): siRNA sense strand
uggcaucauuucccugugu

SEQ ID NO: 220878 - RNA, 19 nt, Homo sapiens
  misc_RNA (1)...(19): siRNA sense strand
ccaugaaacuccgaagacu

SEQ ID NO: 220879 - RNA, 19 nt, Homo sapiens
  misc_RNA (1)...(19): siRNA sense strand
auaauaagccagagaucga

SEQ ID NO: 220880 - RNA, 19 nt, Homo sapiens
  misc_RNA (1)...(19): siRNA sense strand
cuaauaauaagccagagau

SEQ ID NO: 220881 - RNA, 19 nt, Homo sapiens
  misc_RNA (1)...(19): siRNA sense strand
ugggugaaguugcauccuu

SEQ ID NO: 220882 - RNA, 19 nt, Homo sapiens
  misc_RNA (1)...(19): siRNA sense strand
caucauuucccuguguaaa

SEQ ID NO: 220883 - RNA, 19 nt, Homo sapiens
  misc_RNA (1)...(19): siRNA sense strand
gcguggauaugugucugaa

SEQ ID NO: 220884 - RNA, 19 nt, Homo sapiens
  misc_RNA (1)...(19): siRNA sense strand
gcacuaucccaugguggaa

SEQ ID NO: 220885 - RNA, 19 nt, Homo sapiens
  misc_RNA (1)...(19): siRNA sense strand
gagccugucagcugcaugu

SEQ ID NO: 220886 - RNA, 19 nt, Homo sapiens
  misc_RNA (1)...(19): siRNA sense strand
guacagauaccuuuucaag

SEQ ID NO: 220887 - RNA, 19 nt, Homo sapiens
  misc_RNA (1)...(19): siRNA sense strand
gucccucucugcguggaua

SEQ ID NO: 220888 - RNA, 19 nt, Homo sapiens
  misc_RNA (1)...(19): siRNA sense strand
ggagcugcuuccaauuugc

SEQ ID NO: 220889 - RNA, 19 nt, Homo sapiens
  misc_RNA (1)...(19): siRNA sense strand
uuagcugaccugaauaaug

SEQ ID NO: 220890 - RNA, 19 nt, Homo sapiens
  misc_RNA (1)...(19): siRNA sense strand
guggcaaguucaacaggau

SEQ ID NO: 220891 - RNA, 19 nt, Homo sapiens
  misc_RNA (1)...(19): siRNA sense strand
acaacaauuuggucaacgu

SEQ ID NO: 220892 - RNA, 19 nt, Homo sapiens
  misc_RNA (1)...(19): siRNA sense strand
gacuacaucaggagaagau

SEQ ID NO: 220893 - RNA, 19 nt, Homo sapiens
  misc_RNA (1)...(19): siRNA sense strand
uaauaagccagagaucgaa

SEQ ID NO: 220894 - RNA, 19 nt, Homo sapiens
  misc_RNA (1)...(19): siRNA sense strand
ugucagauucucagcuuau

SEQ ID NO: 220895 - RNA, 19 nt, Homo sapiens
  misc_RNA (1)...(19): siRNA sense strand
ggauauccugcagauuauu

SEQ ID NO: 220896 - RNA, 19 nt, Homo sapiens
  misc_RNA (1)...(19): siRNA sense strand
agcaucaggccaaauguaa

SEQ ID NO: 220897 - RNA, 19 nt, Homo sapiens
  misc_RNA (1)...(19): siRNA sense strand
gcccuuugcuuggaucucu

SEQ ID NO: 220898 - RNA, 19 nt, Homo sapiens
  misc_RNA (1)...(19): siRNA sense strand
gcugaauguuuaugauacg

SEQ ID NO: 220899 - RNA, 19 nt, Homo sapiens
  misc_RNA (1)...(19): siRNA sense strand
agacuuugccaagguacua

SEQ ID NO: 220900 - RNA, 19 nt, Homo sapiens
  misc_RNA (1)...(19): siRNA sense strand
caagcaaguggcaaguuca

SEQ ID NO: 220901 - RNA, 19 nt, Homo sapiens
  misc_RNA (1)...(19): siRNA sense strand
agacaaguacagauaccuu

SEQ ID NO: 220902 - RNA, 19 nt, Homo sapiens
  misc_RNA (1)...(19): siRNA sense strand
gcaucauuucccuguguaa

SEQ ID NO: 220903 - RNA, 19 nt, Homo sapiens
  misc_RNA (1)...(19): siRNA sense strand
cugcaaagaguguccaauc

SEQ ID NO: 220904 - RNA, 19 nt, Homo sapiens
  misc_RNA (1)...(19): siRNA sense strand
cuuauaggacugccaugaa

SEQ ID NO: 220905 - RNA, 19 nt, Homo sapiens
  misc_RNA (1)...(19): siRNA sense strand
caaagaguguccaaucauu

SEQ ID NO: 220906 - RNA, 19 nt, Homo sapiens
  misc_RNA (1)...(19): siRNA sense strand
uagcugaccugaauaaugu

SEQ ID NO: 220907 - RNA, 19 nt, Homo sapiens
  misc_RNA (1)...(19): siRNA sense strand
gcaugauucuauccaaauu

SEQ ID NO: 220908 - RNA, 19 nt, Homo sapiens
  misc_RNA (1)...(19): siRNA sense strand
ugaacuggcugcugaaugu

SEQ ID NO: 220909 - RNA, 19 nt, Homo sapiens
  misc_RNA (1)...(19): siRNA sense strand
gauauccugcagauuauua

SEQ ID NO: 220910 - RNA, 19 nt, Homo sapiens
  misc_RNA (1)...(19): siRNA sense strand
gagaagauguucgagacuu

SEQ ID NO: 220911 - RNA, 19 nt, Homo sapiens
  misc_RNA (1)...(19): siRNA sense strand
gcacuuuaauuaugacauc

SEQ ID NO: 220912 - RNA, 19 nt, Homo sapiens
  misc_RNA (1)...(19): siRNA sense strand
guaaagcacauuuggaaga

SEQ ID NO: 220913 - RNA, 19 nt, Homo sapiens
  misc_RNA (1)...(19): siRNA sense strand
gaauauugcacuccgacua

SEQ ID NO: 220914 - RNA, 19 nt, Homo sapiens
  misc_RNA (1)...(19): siRNA sense strand
uuauaggacugccaugaaa

SEQ ID NO: 220915 - RNA, 19 nt, Homo sapiens
  misc_RNA (1)...(19): siRNA sense strand
gggugaaguugcauccuuu

SEQ ID NO: 220916 - RNA, 19 nt, Homo sapiens
  misc_RNA (1)...(19): siRNA sense strand
gcaagagcacaacaauuug

SEQ ID NO: 220917 - RNA, 19 nt, Homo sapiens
  misc_RNA (1)...(19): siRNA sense strand
gcacaacaauuuggucaac

SEQ ID NO: 220918 - RNA, 19 nt, Homo sapiens
  misc_RNA (1)...(19): siRNA sense strand
agcaagagcacaacaauuu

SEQ ID NO: 220919 - RNA, 19 nt, Homo sapiens
  misc_RNA (1)...(19): siRNA sense strand
agaagauguucgagacuuu

SEQ ID NO: 220920 - RNA, 19 nt, Homo sapiens
  misc_RNA (1)...(19): siRNA sense strand
gagcaagagcacaacaauu

SEQ ID NO: 220921 - RNA, 19 nt, Homo sapiens
  misc_RNA (1)...(19): siRNA sense strand
ucaagcaaguggcaaguuc

SEQ ID NO: 220922 - RNA, 19 nt, Homo sapiens
  misc_RNA (1)...(19): siRNA sense strand
ccacgagacucaaacaacu

SEQ ID NO: 220923 - RNA, 19 nt, Homo sapiens
  misc_RNA (1)...(19): siRNA sense strand
cagcacaaccucaagcaaa

SEQ ID NO: 220924 - RNA, 19 nt, Homo sapiens
  misc_RNA (1)...(19): siRNA sense strand
gcaaagaguguccaaucau

SEQ ID NO: 220925 - RNA, 19 nt, Homo sapiens
  misc_RNA (1)...(19): siRNA sense strand
auggauauccugcagauua

SEQ ID NO: 220926 - RNA, 19 nt, Homo sapiens
  misc_RNA (1)...(19): siRNA sense strand
uguaacaucugcaaagagu

SEQ ID NO: 220927 - RNA, 19 nt, Homo sapiens
  misc_RNA (1)...(19): siRNA sense strand
guccggagcugcuuccaau

SEQ ID NO: 220928 - RNA, 19 nt, Homo sapiens
  misc_RNA (1)...(19): siRNA sense strand
gcaaguggcaaguucaaca

SEQ ID NO: 220929 - RNA, 19 nt, Homo sapiens
  misc_RNA (1)...(19): siRNA sense strand
gcuuccaauuugcuaauaa

SEQ ID NO: 220930 - RNA, 19 nt, Homo sapiens
  misc_RNA (1)...(19): siRNA sense strand
uggaagacaaguacagaua

SEQ ID NO: 220931 - RNA, 19 nt, Homo sapiens
  misc_RNA (1)...(19): siRNA sense strand
ggauccguguccugucuuu

SEQ ID NO: 220932 - RNA, 19 nt, Homo sapiens
  misc_RNA (1)...(19): siRNA sense strand
gucuuuagcugaccugaau

SEQ ID NO: 220933 - RNA, 19 nt, Homo sapiens
  misc_RNA (1)...(19): siRNA sense strand
gacaaguacagauaccuuu

SEQ ID NO: 220934 - RNA, 19 nt, Homo sapiens
  misc_RNA (1)...(19): siRNA sense strand
ccaagcaucaggccaaaug

SEQ ID NO: 220935 - RNA, 19 nt, Homo sapiens
  misc_RNA (1)...(19): siRNA sense strand
ggagcaagagcacaacaau

SEQ ID NO: 220936 - RNA, 19 nt, Homo sapiens
  misc_RNA (1)...(19): siRNA sense strand
guguaaagcacauuuggaa

SEQ ID NO: 220937 - RNA, 19 nt, Homo sapiens
  misc_RNA (1)...(19): siRNA sense strand
caagacaguugggugaagu

SEQ ID NO: 220938 - RNA, 19 nt, Homo sapiens
  misc_RNA (1)...(19): siRNA sense strand
gaagauguucgagacuuug

SEQ ID NO: 220939 - RNA, 19 nt, Homo sapiens
  misc_RNA (1)...(19): siRNA sense strand
gucagauucucagcuuaua

SEQ ID NO: 220940 - RNA, 19 nt, Homo sapiens
  misc_RNA (1)...(19): siRNA sense strand
uaacaucugcaaagagugu

SEQ ID NO: 220941 - RNA, 19 nt, Homo sapiens
  misc_RNA (1)...(19): siRNA sense strand
cggagcugcuuccaauuug

SEQ ID NO: 220942 - RNA, 19 nt, Homo sapiens
  misc_RNA (1)...(19): siRNA sense strand
gaagacaaguacagauacc

SEQ ID NO: 220943 - RNA, 19 nt, Homo sapiens
  misc_RNA (1)...(19): siRNA sense strand
ccauggauauccugcagau

SEQ ID NO: 220944 - RNA, 19 nt, Homo sapiens
  misc_RNA (1)...(19): siRNA sense strand
ggcaucauuucccugugua

SEQ ID NO: 220945 - RNA, 19 nt, Homo sapiens
  misc_RNA (1)...(19): siRNA sense strand
uggauauccugcagauuau

SEQ ID NO: 220946 - RNA, 19 nt, Homo sapiens
  misc_RNA (1)...(19): siRNA sense strand
ggaagacaaguacagauac

SEQ ID NO: 220947 - RNA, 19 nt, Homo sapiens
  misc_RNA (1)...(19): siRNA sense strand
ugcaaagaguguccaauca

SEQ ID NO: 220948 - RNA, 19 nt, Homo sapiens
  misc_RNA (1)...(19): siRNA sense strand
guggauaugugucugaacu

SEQ ID NO: 220949 - RNA, 19 nt, Homo sapiens
  misc_RNA (1)...(19): siRNA sense strand
acuggcugcugaauguuua

SEQ ID NO: 220950 - RNA, 19 nt, Homo sapiens
  misc_RNA (1)...(19): siRNA sense strand
acuaucccaugguggaaua

SEQ ID NO: 220951 - RNA, 19 nt, Homo sapiens
  misc_RNA (1)...(19): siRNA sense strand
ccggagcugcuuccaauuu

SEQ ID NO: 220952 - RNA, 19 nt, Homo sapiens
  misc_RNA (1)...(19): siRNA sense strand
ccaaauuccaagacaguug

SEQ ID NO: 220953 - RNA, 19 nt, Homo sapiens
  misc_RNA (1)...(19): siRNA sense strand
cagaaacugccaagcauca

SEQ ID NO: 220954 - RNA, 19 nt, Homo sapiens
  misc_RNA (1)...(19): siRNA sense strand
uaugacaucugccaaagcu

SEQ ID NO: 220955 - RNA, 19 nt, Homo sapiens
  misc_RNA (1)...(19): siRNA sense strand
aaugucagauucucagcuu

SEQ ID NO: 220956 - RNA, 19 nt, Homo sapiens
  misc_RNA (1)...(19): siRNA sense strand
ucgagacuuugccaaggua

SEQ ID NO: 220957 - RNA, 19 nt, Homo sapiens
  misc_RNA (1)...(19): siRNA sense strand
gcaaaaggccauaaaaugc

SEQ ID NO: 220958 - RNA, 19 nt, Homo sapiens
  misc_RNA (1)...(19): siRNA sense strand
cugcaugauucuauccaaa

SEQ ID NO: 220959 - RNA, 19 nt, Homo sapiens
  misc_RNA (1)...(19): siRNA sense strand
uaaagcacauuuggaagac

SEQ ID NO: 220960 - RNA, 19 nt, Homo sapiens
  misc_RNA (1)...(19): siRNA sense strand
acaggagucuaaagcacuu

SEQ ID NO: 220961 - RNA, 19 nt, Homo sapiens
  misc_RNA (1)...(19): siRNA sense strand
acagauaccuuuucaagca

SEQ ID NO: 220962 - RNA, 19 nt, Homo sapiens
  misc_RNA (1)...(19): siRNA sense strand
aagcacauuuggaagacaa

SEQ ID NO: 220963 - RNA, 19 nt, Homo sapiens
  misc_RNA (1)...(19): siRNA sense strand
gcuaauaauaagccagaga

SEQ ID NO: 220964 - RNA, 19 nt, Homo sapiens
  misc_RNA (1)...(19): siRNA sense strand
caagagcacaacaauuugg

SEQ ID NO: 220965 - RNA, 19 nt, Homo sapiens
  misc_RNA (1)...(19): siRNA sense strand
ccugucagcugcaugugau

SEQ ID NO: 220966 - RNA, 19 nt, Homo sapiens
  misc_RNA (1)...(19): siRNA sense strand
gcugcugaauguuuaugau

SEQ ID NO: 220967 - RNA, 19 nt, Homo sapiens
  misc_RNA (1)...(19): siRNA sense strand
acagagcucuaccagucuu

SEQ ID NO: 220968 - RNA, 19 nt, Homo sapiens
  misc_RNA (1)...(19): siRNA sense strand
acaguugggugaaguugca

SEQ ID NO: 220969 - RNA, 19 nt, Homo sapiens
  misc_RNA (1)...(19): siRNA sense strand
guuugaccacuauuuauga

SEQ ID NO: 220970 - RNA, 19 nt, Homo sapiens
  misc_RNA (1)...(19): siRNA sense strand
gcuuauaggacugccauga

SEQ ID NO: 220971 - RNA, 19 nt, Homo sapiens
  misc_RNA (1)...(19): siRNA sense strand
caucaggccaaauguaaca

SEQ ID NO: 220972 - RNA, 19 nt, Homo sapiens
  misc_RNA (1)...(19): siRNA sense strand
gauucuauccaaauuccaa

SEQ ID NO: 220973 - RNA, 19 nt, Homo sapiens
  misc_RNA (1)...(19): siRNA sense strand
ggcaaguucaacaggauuu

SEQ ID NO: 220974 - RNA, 19 nt, Homo sapiens
  misc_RNA (1)...(19): siRNA sense strand
gaacuggcugcugaauguu

SEQ ID NO: 220975 - RNA, 19 nt, Homo sapiens
  misc_RNA (1)...(19): siRNA sense strand
cugcugaauguuuaugaua

SEQ ID NO: 220976 - RNA, 19 nt, Homo sapiens
  misc_RNA (1)...(19): siRNA sense strand
aagcaucaggccaaaugua

SEQ ID NO: 220977 - RNA, 19 nt, Homo sapiens
  misc_RNA (1)...(19): siRNA sense strand
uggcaucauuucccugugu

SEQ ID NO: 220978 - RNA, 19 nt, Homo sapiens
  misc_RNA (1)...(19): siRNA sense strand
ccaugaaacuccgaagacu

SEQ ID NO: 220979 - RNA, 19 nt, Homo sapiens
  misc_RNA (1)...(19): siRNA sense strand
auaauaagccagagaucga

SEQ ID NO: 220980 - RNA, 19 nt, Homo sapiens
  misc_RNA (1)...(19): siRNA sense strand
cuaauaauaagccagagau

SEQ ID NO: 220981 - RNA, 19 nt, Homo sapiens
  misc_RNA (1)...(19): siRNA sense strand
ugggugaaguugcauccuu

SEQ ID NO: 220982 - RNA, 19 nt, Homo sapiens
  misc_RNA (1)...(19): siRNA sense strand
caucauuucccuguguaaa

SEQ ID NO: 220983 - RNA, 19 nt, Homo sapiens
  misc_RNA (1)...(19): siRNA sense strand
gcguggauaugugucugaa

SEQ ID NO: 220984 - RNA, 19 nt, Homo sapiens
  misc_RNA (1)...(19): siRNA sense strand
gcacuaucccaugguggaa

SEQ ID NO: 220985 - RNA, 19 nt, Homo sapiens
  misc_RNA (1)...(19): siRNA sense strand
gagccugucagcugcaugu

SEQ ID NO: 220986 - RNA, 19 nt, Homo sapiens
  misc_RNA (1)...(19): siRNA sense strand
guacagauaccuuuucaag

SEQ ID NO: 220987 - RNA, 19 nt, Homo sapiens
  misc_RNA (1)...(19): siRNA sense strand
gucccucucugcguggaua

SEQ ID NO: 220988 - RNA, 19 nt, Homo sapiens
  misc_RNA (1)...(19): siRNA sense strand
ggagcugcuuccaauuugc

SEQ ID NO: 220989 - RNA, 19 nt, Homo sapiens
  misc_RNA (1)...(19): siRNA sense strand
uuagcugaccugaauaaug

SEQ ID NO: 220990 - RNA, 19 nt, Homo sapiens
  misc_RNA (1)...(19): siRNA sense strand
guggcaaguucaacaggau

SEQ ID NO: 220991 - RNA, 19 nt, Homo sapiens
  misc_RNA (1)...(19): siRNA sense strand
acaacaauuuggucaacgu

SEQ ID NO: 220992 - RNA, 19 nt, Homo sapiens
  misc_RNA (1)...(19): siRNA sense strand
gacuacaucaggagaagau

SEQ ID NO: 220993 - RNA, 19 nt, Homo sapiens
  misc_RNA (1)...(19): siRNA sense strand
uaauaagccagagaucgaa

SEQ ID NO: 220994 - RNA, 19 nt, Homo sapiens
  misc_RNA (1)...(19): siRNA sense strand
ugucagauucucagcuuau

SEQ ID NO: 220995 - RNA, 19 nt, Homo sapiens
  misc_RNA (1)...(19): siRNA sense strand
ggauauccugcagauuauu

SEQ ID NO: 220996 - RNA, 19 nt, Homo sapiens
  misc_RNA (1)...(19): siRNA sense strand
agcaucaggccaaauguaa

SEQ ID NO: 220997 - RNA, 19 nt, Homo sapiens
  misc_RNA (1)...(19): siRNA sense strand
gcccuuugcuuggaucucu

SEQ ID NO: 220998 - RNA, 19 nt, Homo sapiens
  misc_RNA (1)...(19): siRNA sense strand
gcugaauguuuaugauacg

SEQ ID NO: 220999 - RNA, 19 nt, Homo sapiens
  misc_RNA (1)...(19): siRNA sense strand
agacuuugccaagguacua

SEQ ID NO: 221000 - RNA, 19 nt, Homo sapiens
  misc_RNA (1)...(19): siRNA sense strand
caagcaaguggcaaguuca

SEQ ID NO: 221001 - RNA, 19 nt, Homo sapiens
  misc_RNA (1)...(19): siRNA sense strand
agacaaguacagauaccuu

SEQ ID NO: 221002 - RNA, 19 nt, Homo sapiens
  misc_RNA (1)...(19): siRNA sense strand
gcaucauuucccuguguaa

SEQ ID NO: 221003 - RNA, 19 nt, Homo sapiens
  misc_RNA (1)...(19): siRNA sense strand
cugcaaagaguguccaauc

SEQ ID NO: 221004 - RNA, 19 nt, Homo sapiens
  misc_RNA (1)...(19): siRNA sense strand
cuuauaggacugccaugaa

SEQ ID NO: 221005 - RNA, 19 nt, Homo sapiens
  misc_RNA (1)...(19): siRNA sense strand
caaagaguguccaaucauu

SEQ ID NO: 221006 - RNA, 19 nt, Homo sapiens
  misc_RNA (1)...(19): siRNA sense strand
uagcugaccugaauaaugu

SEQ ID NO: 221007 - RNA, 19 nt, Homo sapiens
  misc_RNA (1)...(19): siRNA sense strand
gcaugauucuauccaaauu

SEQ ID NO: 221008 - RNA, 19 nt, Homo sapiens
  misc_RNA (1)...(19): siRNA sense strand
ugaacuggcugcugaaugu

SEQ ID NO: 221009 - RNA, 19 nt, Homo sapiens
  misc_RNA (1)...(19): siRNA sense strand
gauauccugcagauuauua

SEQ ID NO: 221010 - RNA, 19 nt, Homo sapiens
  misc_RNA (1)...(19): siRNA sense strand
gagaagauguucgagacuu

SEQ ID NO: 221011 - RNA, 19 nt, Homo sapiens
  misc_RNA (1)...(19): siRNA sense strand
gcacuuuaauuaugacauc

SEQ ID NO: 221012 - RNA, 19 nt, Homo sapiens
  misc_RNA (1)...(19): siRNA sense strand
guaaagcacauuuggaaga

SEQ ID NO: 221013 - RNA, 19 nt, Homo sapiens
  misc_RNA (1)...(19): siRNA sense strand
gaauauugcacuccgacua

SEQ ID NO: 221014 - RNA, 19 nt, Homo sapiens
  misc_RNA (1)...(19): siRNA sense strand
uuauaggacugccaugaaa

SEQ ID NO: 221015 - RNA, 19 nt, Homo sapiens
  misc_RNA (1)...(19): siRNA sense strand
gggugaaguugcauccuuu

SEQ ID NO: 221016 - RNA, 19 nt, Homo sapiens
  misc_RNA (1)...(19): siRNA sense strand
gcaagagcacaacaauuug

SEQ ID NO: 221017 - RNA, 19 nt, Homo sapiens
  misc_RNA (1)...(19): siRNA sense strand
gcacaacaauuuggucaac

SEQ ID NO: 221018 - RNA, 19 nt, Homo sapiens
  misc_RNA (1)...(19): siRNA sense strand
agcaagagcacaacaauuu

SEQ ID NO: 221019 - RNA, 19 nt, Homo sapiens
  misc_RNA (1)...(19): siRNA sense strand
agaagauguucgagacuuu

SEQ ID NO: 221020 - RNA, 19 nt, Homo sapiens
  misc_RNA (1)...(19): siRNA sense strand
gagcaagagcacaacaauu

SEQ ID NO: 221021 - RNA, 19 nt, Homo sapiens
  misc_RNA (1)...(19): siRNA sense strand
ucaagcaaguggcaaguuc

SEQ ID NO: 221022 - RNA, 19 nt, Homo sapiens
  misc_RNA (1)...(19): siRNA sense strand
ccacgagacucaaacaacu

SEQ ID NO: 221023 - RNA, 19 nt, Homo sapiens
  misc_RNA (1)...(19): siRNA sense strand
cagcacaaccucaagcaaa

SEQ ID NO: 221024 - RNA, 19 nt, Homo sapiens
  misc_RNA (1)...(19): siRNA sense strand
gcaaagaguguccaaucau

SEQ ID NO: 221025 - RNA, 19 nt, Homo sapiens
  misc_RNA (1)...(19): siRNA sense strand
auggauauccugcagauua

SEQ ID NO: 221026 - RNA, 19 nt, Homo sapiens
  misc_RNA (1)...(19): siRNA sense strand
uguaacaucugcaaagagu

SEQ ID NO: 221027 - RNA, 19 nt, Homo sapiens
  misc_RNA (1)...(19): siRNA sense strand
guccggagcugcuuccaau

SEQ ID NO: 221028 - RNA, 19 nt, Homo sapiens
  misc_RNA (1)...(19): siRNA sense strand
gcaaguggcaaguucaaca

SEQ ID NO: 221029 - RNA, 19 nt, Homo sapiens
  misc_RNA (1)...(19): siRNA sense strand
gcuuccaauuugcuaauaa

SEQ ID NO: 221030 - RNA, 19 nt, Homo sapiens
  misc_RNA (1)...(19): siRNA sense strand
uggaagacaaguacagaua

SEQ ID NO: 221031 - RNA, 19 nt, Homo sapiens
  misc_RNA (1)...(19): siRNA sense strand
ggauccguguccugucuuu

SEQ ID NO: 221032 - RNA, 19 nt, Homo sapiens
  misc_RNA (1)...(19): siRNA sense strand
gucuuuagcugaccugaau

SEQ ID NO: 221033 - RNA, 19 nt, Homo sapiens
  misc_RNA (1)...(19): siRNA sense strand
gacaaguacagauaccuuu

SEQ ID NO: 221034 - RNA, 19 nt, Homo sapiens
  misc_RNA (1)...(19): siRNA sense strand
ccaagcaucaggccaaaug

SEQ ID NO: 221035 - RNA, 19 nt, Homo sapiens
  misc_RNA (1)...(19): siRNA sense strand
ggagcaagagcacaacaau

SEQ ID NO: 221036 - RNA, 19 nt, Homo sapiens
  misc_RNA (1)...(19): siRNA sense strand
guguaaagcacauuuggaa

SEQ ID NO: 221037 - RNA, 19 nt, Homo sapiens
  misc_RNA (1)...(19): siRNA sense strand
caagacaguugggugaagu

SEQ ID NO: 221038 - RNA, 19 nt, Homo sapiens
  misc_RNA (1)...(19): siRNA sense strand
gaagauguucgagacuuug

SEQ ID NO: 221039 - RNA, 19 nt, Homo sapiens
  misc_RNA (1)...(19): siRNA sense strand
gucagauucucagcuuaua

SEQ ID NO: 221040 - RNA, 19 nt, Homo sapiens
  misc_RNA (1)...(19): siRNA sense strand
uaacaucugcaaagagugu

SEQ ID NO: 221041 - RNA, 19 nt, Homo sapiens
  misc_RNA (1)...(19): siRNA sense strand
cggagcugcuuccaauuug

SEQ ID NO: 221042 - RNA, 19 nt, Homo sapiens
  misc_RNA (1)...(19): siRNA sense strand
gaagacaaguacagauacc

SEQ ID NO: 221043 - RNA, 19 nt, Homo sapiens
  misc_RNA (1)...(19): siRNA sense strand
ccauggauauccugcagau

SEQ ID NO: 221044 - RNA, 19 nt, Homo sapiens
  misc_RNA (1)...(19): siRNA sense strand
ggcaucauuucccugugua

SEQ ID NO: 221045 - RNA, 19 nt, Homo sapiens
  misc_RNA (1)...(19): siRNA sense strand
uggauauccugcagauuau

SEQ ID NO: 221046 - RNA, 19 nt, Homo sapiens
  misc_RNA (1)...(19): siRNA sense strand
ggaagacaaguacagauac

SEQ ID NO: 221047 - RNA, 19 nt, Homo sapiens
  misc_RNA (1)...(19): siRNA sense strand
ugcaaagaguguccaauca

SEQ ID NO: 221048 - RNA, 19 nt, Homo sapiens
  misc_RNA (1)...(19): siRNA sense strand
guggauaugugucugaacu

SEQ ID NO: 221049 - RNA, 19 nt, Homo sapiens
  misc_RNA (1)...(19): siRNA sense strand
acuggcugcugaauguuua

SEQ ID NO: 221050 - RNA, 19 nt, Homo sapiens
  misc_RNA (1)...(19): siRNA sense strand
acuaucccaugguggaaua

SEQ ID NO: 221051 - RNA, 19 nt, Homo sapiens
  misc_RNA (1)...(19): siRNA sense strand
ccggagcugcuuccaauuu

SEQ ID NO: 221052 - RNA, 19 nt, Homo sapiens
  misc_RNA (1)...(19): siRNA sense strand
ccaaauuccaagacaguug

SEQ ID NO: 221053 - RNA, 19 nt, Homo sapiens
  misc_RNA (1)...(19): siRNA sense strand
cagaaacugccaagcauca

SEQ ID NO: 221054 - RNA, 19 nt, Homo sapiens
  misc_RNA (1)...(19): siRNA sense strand
uaugacaucugccaaagcu

SEQ ID NO: 221055 - RNA, 19 nt, Homo sapiens
  misc_RNA (1)...(19): siRNA sense strand
aaugucagauucucagcuu

SEQ ID NO: 221056 - RNA, 19 nt, Homo sapiens
  misc_RNA (1)...(19): siRNA sense strand
ucgagacuuugccaaggua

SEQ ID NO: 221057 - RNA, 19 nt, Homo sapiens
  misc_RNA (1)...(19): siRNA sense strand
gcaaaaggccauaaaaugc

SEQ ID NO: 221058 - RNA, 19 nt, Homo sapiens
  misc_RNA (1)...(19): siRNA sense strand
cugcaugauucuauccaaa

SEQ ID NO: 221059 - RNA, 19 nt, Homo sapiens
  misc_RNA (1)...(19): siRNA sense strand
uaaagcacauuuggaagac

SEQ ID NO: 221060 - RNA, 19 nt, Homo sapiens
  misc_RNA (1)...(19): siRNA sense strand
acaggagucuaaagcacuu

SEQ ID NO: 221061 - RNA, 19 nt, Homo sapiens
  misc_RNA (1)...(19): siRNA sense strand
acagauaccuuuucaagca

SEQ ID NO: 221062 - RNA, 19 nt, Homo sapiens
  misc_RNA (1)...(19): siRNA sense strand
aagcacauuuggaagacaa

SEQ ID NO: 221063 - RNA, 19 nt, Homo sapiens
  misc_RNA (1)...(19): siRNA sense strand
gcuaauaauaagccagaga

SEQ ID NO: 221064 - RNA, 19 nt, Homo sapiens
  misc_RNA (1)...(19): siRNA sense strand
caagagcacaacaauuugg

SEQ ID NO: 221065 - RNA, 19 nt, Homo sapiens
  misc_RNA (1)...(19): siRNA sense strand
ccugucagcugcaugugau

SEQ ID NO: 221066 - RNA, 19 nt, Homo sapiens
  misc_RNA (1)...(19): siRNA sense strand
gcugcugaauguuuaugau

SEQ ID NO: 221067 - RNA, 19 nt, Homo sapiens
  misc_RNA (1)...(19): siRNA sense strand
acagagcucuaccagucuu

SEQ ID NO: 221068 - RNA, 19 nt, Homo sapiens
  misc_RNA (1)...(19): siRNA sense strand
acaguugggugaaguugca

SEQ ID NO: 221069 - RNA, 19 nt, Homo sapiens
  misc_RNA (1)...(19): siRNA sense strand
guuugaccacuauuuauga

SEQ ID NO: 221070 - RNA, 19 nt, Homo sapiens
  misc_RNA (1)...(19): siRNA sense strand
gcuuauaggacugccauga

SEQ ID NO: 221071 - RNA, 19 nt, Homo sapiens
  misc_RNA (1)...(19): siRNA sense strand
caucaggccaaauguaaca

SEQ ID NO: 221072 - RNA, 19 nt, Homo sapiens
  misc_RNA (1)...(19): siRNA sense strand
gauucuauccaaauuccaa

SEQ ID NO: 221073 - RNA, 19 nt, Homo sapiens
  misc_RNA (1)...(19): siRNA sense strand
ggcaaguucaacaggauuu

SEQ ID NO: 221074 - RNA, 19 nt, Homo sapiens
  misc_RNA (1)...(19): siRNA sense strand
gaacuggcugcugaauguu

SEQ ID NO: 221075 - RNA, 19 nt, Homo sapiens
  misc_RNA (1)...(19): siRNA sense strand
cugcugaauguuuaugaua

SEQ ID NO: 221076 - RNA, 19 nt, Homo sapiens
  misc_RNA (1)...(19): siRNA sense strand
aagcaucaggccaaaugua

SEQ ID NO: 221077 - RNA, 19 nt, Homo sapiens
  misc_RNA (1)...(19): siRNA sense strand
uggcaucauuucccugugu

SEQ ID NO: 221078 - RNA, 19 nt, Homo sapiens
  misc_RNA (1)...(19): siRNA sense strand
ccaugaaacuccgaagacu

SEQ ID NO: 221079 - RNA, 19 nt, Homo sapiens
  misc_RNA (1)...(19): siRNA sense strand
auaauaagccagagaucga

SEQ ID NO: 221080 - RNA, 19 nt, Homo sapiens
  misc_RNA (1)...(19): siRNA sense strand
cuaauaauaagccagagau

SEQ ID NO: 221081 - RNA, 19 nt, Homo sapiens
  misc_RNA (1)...(19): siRNA sense strand
ugggugaaguugcauccuu

SEQ ID NO: 221082 - RNA, 19 nt, Homo sapiens
  misc_RNA (1)...(19): siRNA sense strand
caucauuucccuguguaaa

SEQ ID NO: 221083 - RNA, 19 nt, Homo sapiens
  misc_RNA (1)...(19): siRNA sense strand
gcguggauaugugucugaa

SEQ ID NO: 221084 - RNA, 19 nt, Homo sapiens
  misc_RNA (1)...(19): siRNA sense strand
gcacuaucccaugguggaa

SEQ ID NO: 221085 - RNA, 19 nt, Homo sapiens
  misc_RNA (1)...(19): siRNA sense strand
gagccugucagcugcaugu

SEQ ID NO: 221086 - RNA, 19 nt, Homo sapiens
  misc_RNA (1)...(19): siRNA sense strand
guacagauaccuuuucaag

SEQ ID NO: 221087 - RNA, 19 nt, Homo sapiens
  misc_RNA (1)...(19): siRNA sense strand
gucccucucugcguggaua

SEQ ID NO: 221088 - RNA, 19 nt, Homo sapiens
  misc_RNA (1)...(19): siRNA sense strand
ggagcugcuuccaauuugc

SEQ ID NO: 221089 - RNA, 19 nt, Homo sapiens
  misc_RNA (1)...(19): siRNA sense strand
uuagcugaccugaauaaug

SEQ ID NO: 221090 - RNA, 19 nt, Homo sapiens
  misc_RNA (1)...(19): siRNA sense strand
guggcaaguucaacaggau

SEQ ID NO: 221091 - RNA, 19 nt, Homo sapiens
  misc_RNA (1)...(19): siRNA sense strand
acaacaauuuggucaacgu

SEQ ID NO: 221092 - RNA, 19 nt, Homo sapiens
  misc_RNA (1)...(19): siRNA sense strand
gacuacaucaggagaagau

SEQ ID NO: 221093 - RNA, 19 nt, Homo sapiens
  misc_RNA (1)...(19): siRNA sense strand
uaauaagccagagaucgaa

SEQ ID NO: 221094 - RNA, 19 nt, Homo sapiens
  misc_RNA (1)...(19): siRNA sense strand
ugucagauucucagcuuau

SEQ ID NO: 221095 - RNA, 19 nt, Homo sapiens
  misc_RNA (1)...(19): siRNA sense strand
ggauauccugcagauuauu

SEQ ID NO: 221096 - RNA, 19 nt, Homo sapiens
  misc_RNA (1)...(19): siRNA sense strand
agcaucaggccaaauguaa

SEQ ID NO: 221097 - RNA, 19 nt, Homo sapiens
  misc_RNA (1)...(19): siRNA sense strand
gcccuuugcuuggaucucu

SEQ ID NO: 221098 - RNA, 19 nt, Homo sapiens
  misc_RNA (1)...(19): siRNA sense strand
gcugaauguuuaugauacg

SEQ ID NO: 221099 - RNA, 19 nt, Homo sapiens
  misc_RNA (1)...(19): siRNA sense strand
agacuuugccaagguacua

SEQ ID NO: 221100 - RNA, 19 nt, Homo sapiens
  misc_RNA (1)...(19): siRNA sense strand
caagcaaguggcaaguuca

SEQ ID NO: 221101 - RNA, 19 nt, Homo sapiens
  misc_RNA (1)...(19): siRNA sense strand
agacaaguacagauaccuu

SEQ ID NO: 221102 - RNA, 19 nt, Homo sapiens
  misc_RNA (1)...(19): siRNA sense strand
gcaucauuucccuguguaa

SEQ ID NO: 221103 - RNA, 19 nt, Homo sapiens
  misc_RNA (1)...(19): siRNA sense strand
cugcaaagaguguccaauc

SEQ ID NO: 221104 - RNA, 19 nt, Homo sapiens
  misc_RNA (1)...(19): siRNA sense strand
cuuauaggacugccaugaa

SEQ ID NO: 221105 - RNA, 19 nt, Homo sapiens
  misc_RNA (1)...(19): siRNA sense strand
caaagaguguccaaucauu

SEQ ID NO: 221106 - RNA, 19 nt, Homo sapiens
  misc_RNA (1)...(19): siRNA sense strand
uagcugaccugaauaaugu

SEQ ID NO: 221107 - RNA, 19 nt, Homo sapiens
  misc_RNA (1)...(19): siRNA sense strand
gcaugauucuauccaaauu

SEQ ID NO: 221108 - RNA, 19 nt, Homo sapiens
  misc_RNA (1)...(19): siRNA sense strand
ugaacuggcugcugaaugu

SEQ ID NO: 221109 - RNA, 19 nt, Homo sapiens
  misc_RNA (1)...(19): siRNA sense strand
gauauccugcagauuauua

SEQ ID NO: 221110 - RNA, 19 nt, Homo sapiens
  misc_RNA (1)...(19): siRNA sense strand
gagaagauguucgagacuu

SEQ ID NO: 221111 - RNA, 19 nt, Homo sapiens
  misc_RNA (1)...(19): siRNA sense strand
gcacuuuaauuaugacauc

SEQ ID NO: 221112 - RNA, 19 nt, Homo sapiens
  misc_RNA (1)...(19): siRNA sense strand
guaaagcacauuuggaaga

SEQ ID NO: 221113 - RNA, 19 nt, Homo sapiens
  misc_RNA (1)...(19): siRNA sense strand
gaauauugcacuccgacua

SEQ ID NO: 221114 - RNA, 19 nt, Homo sapiens
  misc_RNA (1)...(19): siRNA sense strand
uuauaggacugccaugaaa

SEQ ID NO: 221115 - RNA, 19 nt, Homo sapiens
  misc_RNA (1)...(19): siRNA sense strand
gggugaaguugcauccuuu

SEQ ID NO: 221116 - RNA, 19 nt, Homo sapiens
  misc_RNA (1)...(19): siRNA sense strand
gcaagagcacaacaauuug

SEQ ID NO: 221117 - RNA, 19 nt, Homo sapiens
  misc_RNA (1)...(19): siRNA sense strand
gcacaacaauuuggucaac

SEQ ID NO: 221118 - RNA, 19 nt, Homo sapiens
  misc_RNA (1)...(19): siRNA sense strand
agcaagagcacaacaauuu

SEQ ID NO: 221119 - RNA, 19 nt, Homo sapiens
  misc_RNA (1)...(19): siRNA sense strand
agaagauguucgagacuuu

SEQ ID NO: 221120 - RNA, 19 nt, Homo sapiens
  misc_RNA (1)...(19): siRNA sense strand
gagcaagagcacaacaauu

SEQ ID NO: 221121 - RNA, 19 nt, Homo sapiens
  misc_RNA (1)...(19): siRNA sense strand
ucaagcaaguggcaaguuc

SEQ ID NO: 221122 - RNA, 19 nt, Homo sapiens
  misc_RNA (1)...(19): siRNA sense strand
ccacgagacucaaacaacu

SEQ ID NO: 221123 - RNA, 19 nt, Homo sapiens
  misc_RNA (1)...(19): siRNA sense strand
cagcacaaccucaagcaaa

SEQ ID NO: 221124 - RNA, 19 nt, Homo sapiens
  misc_RNA (1)...(19): siRNA sense strand
gcaaagaguguccaaucau

SEQ ID NO: 221125 - RNA, 19 nt, Homo sapiens
  misc_RNA (1)...(19): siRNA sense strand
auggauauccugcagauua

SEQ ID NO: 221126 - RNA, 19 nt, Homo sapiens
  misc_RNA (1)...(19): siRNA sense strand
uguaacaucugcaaagagu

SEQ ID NO: 221127 - RNA, 19 nt, Homo sapiens
  misc_RNA (1)...(19): siRNA sense strand
guccggagcugcuuccaau

SEQ ID NO: 221128 - RNA, 19 nt, Homo sapiens
  misc_RNA (1)...(19): siRNA sense strand
gcaaguggcaaguucaaca

SEQ ID NO: 221129 - RNA, 19 nt, Homo sapiens
  misc_RNA (1)...(19): siRNA sense strand
gcuuccaauuugcuaauaa

SEQ ID NO: 221130 - RNA, 19 nt, Homo sapiens
  misc_RNA (1)...(19): siRNA sense strand
uggaagacaaguacagaua

SEQ ID NO: 221131 - RNA, 19 nt, Homo sapiens
  misc_RNA (1)...(19): siRNA sense strand
ggauccguguccugucuuu

SEQ ID NO: 221132 - RNA, 19 nt, Homo sapiens
  misc_RNA (1)...(19): siRNA sense strand
gucuuuagcugaccugaau

SEQ ID NO: 221133 - RNA, 19 nt, Homo sapiens
  misc_RNA (1)...(19): siRNA sense strand
gacaaguacagauaccuuu

SEQ ID NO: 221134 - RNA, 19 nt, Homo sapiens
  misc_RNA (1)...(19): siRNA sense strand
ccaagcaucaggccaaaug

SEQ ID NO: 221135 - RNA, 19 nt, Homo sapiens
  misc_RNA (1)...(19): siRNA sense strand
ggagcaagagcacaacaau

SEQ ID NO: 221136 - RNA, 19 nt, Homo sapiens
  misc_RNA (1)...(19): siRNA sense strand
guguaaagcacauuuggaa

SEQ ID NO: 221137 - RNA, 19 nt, Homo sapiens
  misc_RNA (1)...(19): siRNA sense strand
caagacaguugggugaagu

SEQ ID NO: 221138 - RNA, 19 nt, Homo sapiens
  misc_RNA (1)...(19): siRNA sense strand
gaagauguucgagacuuug

SEQ ID NO: 221139 - RNA, 19 nt, Homo sapiens
  misc_RNA (1)...(19): siRNA sense strand
gucagauucucagcuuaua

SEQ ID NO: 221140 - RNA, 19 nt, Homo sapiens
  misc_RNA (1)...(19): siRNA sense strand
uaacaucugcaaagagugu

SEQ ID NO: 221141 - RNA, 19 nt, Homo sapiens
  misc_RNA (1)...(19): siRNA sense strand
cggagcugcuuccaauuug

SEQ ID NO: 221142 - RNA, 19 nt, Homo sapiens
  misc_RNA (1)...(19): siRNA sense strand
gaagacaaguacagauacc

SEQ ID NO: 221143 - RNA, 19 nt, Homo sapiens
  misc_RNA (1)...(19): siRNA sense strand
ccauggauauccugcagau

SEQ ID NO: 221144 - RNA, 19 nt, Homo sapiens
  misc_RNA (1)...(19): siRNA sense strand
ggcaucauuucccugugua

SEQ ID NO: 221145 - RNA, 19 nt, Homo sapiens
  misc_RNA (1)...(19): siRNA sense strand
uggauauccugcagauuau

SEQ ID NO: 221146 - RNA, 19 nt, Homo sapiens
  misc_RNA (1)...(19): siRNA sense strand
ggaagacaaguacagauac

SEQ ID NO: 221147 - RNA, 19 nt, Homo sapiens
  misc_RNA (1)...(19): siRNA sense strand
ugcaaagaguguccaauca

SEQ ID NO: 221148 - RNA, 19 nt, Homo sapiens
  misc_RNA (1)...(19): siRNA sense strand
guggauaugugucugaacu

SEQ ID NO: 221149 - RNA, 19 nt, Homo sapiens
  misc_RNA (1)...(19): siRNA sense strand
acuggcugcugaauguuua

SEQ ID NO: 221150 - RNA, 19 nt, Homo sapiens
  misc_RNA (1)...(19): siRNA sense strand
acuaucccaugguggaaua

SEQ ID NO: 221151 - RNA, 19 nt, Homo sapiens
  misc_RNA (1)...(19): siRNA sense strand
ccggagcugcuuccaauuu

SEQ ID NO: 221152 - RNA, 19 nt, Homo sapiens
  misc_RNA (1)...(19): siRNA sense strand
ccaaauuccaagacaguug

SEQ ID NO: 221153 - RNA, 19 nt, Homo sapiens
  misc_RNA (1)...(19): siRNA sense strand
cagaaacugccaagcauca

SEQ ID NO: 221154 - RNA, 19 nt, Homo sapiens
  misc_RNA (1)...(19): siRNA sense strand
uaugacaucugccaaagcu

SEQ ID NO: 221155 - RNA, 19 nt, Homo sapiens
  misc_RNA (1)...(19): siRNA sense strand
aaugucagauucucagcuu

SEQ ID NO: 221156 - RNA, 19 nt, Homo sapiens
  misc_RNA (1)...(19): siRNA sense strand
ucgagacuuugccaaggua

SEQ ID NO: 221157 - RNA, 19 nt, Homo sapiens
  misc_RNA (1)...(19): siRNA sense strand
gcaaaaggccauaaaaugc

SEQ ID NO: 221158 - RNA, 19 nt, Homo sapiens
  misc_RNA (1)...(19): siRNA sense strand
cugcaugauucuauccaaa

SEQ ID NO: 221159 - RNA, 19 nt, Homo sapiens
  misc_RNA (1)...(19): siRNA sense strand
uaaagcacauuuggaagac

SEQ ID NO: 221160 - RNA, 19 nt, Homo sapiens
  misc_RNA (1)...(19): siRNA sense strand
acaggagucuaaagcacuu

SEQ ID NO: 221161 - RNA, 19 nt, Homo sapiens
  misc_RNA (1)...(19): siRNA sense strand
acagauaccuuuucaagca

SEQ ID NO: 221162 - RNA, 19 nt, Homo sapiens
  misc_RNA (1)...(19): siRNA sense strand
aagcacauuuggaagacaa

SEQ ID NO: 221163 - RNA, 19 nt, Homo sapiens
  misc_RNA (1)...(19): siRNA sense strand
gcuaauaauaagccagaga

SEQ ID NO: 221164 - RNA, 19 nt, Homo sapiens
  misc_RNA (1)...(19): siRNA sense strand
caagagcacaacaauuugg

SEQ ID NO: 221165 - RNA, 19 nt, Homo sapiens
  misc_RNA (1)...(19): siRNA sense strand
ccugucagcugcaugugau

SEQ ID NO: 221166 - RNA, 19 nt, Homo sapiens
  misc_RNA (1)...(19): siRNA sense strand
gcugcugaauguuuaugau

SEQ ID NO: 221167 - RNA, 19 nt, Homo sapiens
  misc_RNA (1)...(19): siRNA sense strand
acagagcucuaccagucuu

SEQ ID NO: 221168 - RNA, 19 nt, Homo sapiens
  misc_RNA (1)...(19): siRNA sense strand
acaguugggugaaguugca

SEQ ID NO: 221169 - RNA, 19 nt, Homo sapiens
  misc_RNA (1)...(19): siRNA sense strand
guuugaccacuauuuauga

SEQ ID NO: 221170 - RNA, 19 nt, Homo sapiens
  misc_RNA (1)...(19): siRNA sense strand
gcuuauaggacugccauga

SEQ ID NO: 221171 - RNA, 19 nt, Homo sapiens
  misc_RNA (1)...(19): siRNA sense strand
caucaggccaaauguaaca

SEQ ID NO: 221172 - RNA, 19 nt, Homo sapiens
  misc_RNA (1)...(19): siRNA sense strand
gauucuauccaaauuccaa

SEQ ID NO: 221173 - RNA, 19 nt, Homo sapiens
  misc_RNA (1)...(19): siRNA sense strand
ggcaaguucaacaggauuu

SEQ ID NO: 221174 - RNA, 19 nt, Homo sapiens
  misc_RNA (1)...(19): siRNA sense strand
gaacuggcugcugaauguu

SEQ ID NO: 221175 - RNA, 19 nt, Homo sapiens
  misc_RNA (1)...(19): siRNA sense strand
cugcugaauguuuaugaua

SEQ ID NO: 221176 - RNA, 19 nt, Homo sapiens
  misc_RNA (1)...(19): siRNA sense strand
aagcaucaggccaaaugua

SEQ ID NO: 221177 - RNA, 19 nt, Homo sapiens
  misc_RNA (1)...(19): siRNA sense strand
uggcaucauuucccugugu

SEQ ID NO: 221178 - RNA, 19 nt, Homo sapiens
  misc_RNA (1)...(19): siRNA sense strand
ccaugaaacuccgaagacu

SEQ ID NO: 221179 - RNA, 19 nt, Homo sapiens
  misc_RNA (1)...(19): siRNA sense strand
auaauaagccagagaucga

SEQ ID NO: 221180 - RNA, 19 nt, Homo sapiens
  misc_RNA (1)...(19): siRNA sense strand
cuaauaauaagccagagau

SEQ ID NO: 221181 - RNA, 19 nt, Homo sapiens
  misc_RNA (1)...(19): siRNA sense strand
ugggugaaguugcauccuu

SEQ ID NO: 221182 - RNA, 19 nt, Homo sapiens
  misc_RNA (1)...(19): siRNA sense strand
caucauuucccuguguaaa

SEQ ID NO: 221183 - RNA, 19 nt, Homo sapiens
  misc_RNA (1)...(19): siRNA sense strand
gcguggauaugugucugaa

SEQ ID NO: 221184 - RNA, 19 nt, Homo sapiens
  misc_RNA (1)...(19): siRNA sense strand
gcacuaucccaugguggaa

SEQ ID NO: 221185 - RNA, 19 nt, Homo sapiens
  misc_RNA (1)...(19): siRNA sense strand
gagccugucagcugcaugu

SEQ ID NO: 221186 - RNA, 19 nt, Homo sapiens
  misc_RNA (1)...(19): siRNA sense strand
guacagauaccuuuucaag

SEQ ID NO: 221187 - RNA, 19 nt, Homo sapiens
  misc_RNA (1)...(19): siRNA sense strand
gucccucucugcguggaua

SEQ ID NO: 221188 - RNA, 19 nt, Homo sapiens
  misc_RNA (1)...(19): siRNA sense strand
ggagcugcuuccaauuugc

SEQ ID NO: 221189 - RNA, 19 nt, Homo sapiens
  misc_RNA (1)...(19): siRNA sense strand
uuagcugaccugaauaaug

SEQ ID NO: 221190 - RNA, 19 nt, Homo sapiens
  misc_RNA (1)...(19): siRNA sense strand
guggcaaguucaacaggau

SEQ ID NO: 221191 - RNA, 19 nt, Homo sapiens
  misc_RNA (1)...(19): siRNA sense strand
acaacaauuuggucaacgu

SEQ ID NO: 221192 - RNA, 19 nt, Homo sapiens
  misc_RNA (1)...(19): siRNA sense strand
gacuacaucaggagaagau

SEQ ID NO: 221193 - RNA, 19 nt, Homo sapiens
  misc_RNA (1)...(19): siRNA sense strand
uaauaagccagagaucgaa

SEQ ID NO: 221194 - RNA, 19 nt, Homo sapiens
  misc_RNA (1)...(19): siRNA sense strand
ugucagauucucagcuuau

SEQ ID NO: 221195 - RNA, 19 nt, Homo sapiens
  misc_RNA (1)...(19): siRNA sense strand
ggauauccugcagauuauu

SEQ ID NO: 221196 - RNA, 19 nt, Homo sapiens
  misc_RNA (1)...(19): siRNA sense strand
agcaucaggccaaauguaa

SEQ ID NO: 221197 - RNA, 19 nt, Homo sapiens
  misc_RNA (1)...(19): siRNA sense strand
gcccuuugcuuggaucucu

SEQ ID NO: 221198 - RNA, 19 nt, Homo sapiens
  misc_RNA (1)...(19): siRNA sense strand
gcugaauguuuaugauacg

SEQ ID NO: 221199 - RNA, 19 nt, Homo sapiens
  misc_RNA (1)...(19): siRNA sense strand
agacuuugccaagguacua

SEQ ID NO: 221200 - RNA, 19 nt, Homo sapiens
  misc_RNA (1)...(19): siRNA sense strand
caagcaaguggcaaguuca

SEQ ID NO: 221201 - RNA, 19 nt, Homo sapiens
  misc_RNA (1)...(19): siRNA sense strand
agacaaguacagauaccuu

SEQ ID NO: 221202 - RNA, 19 nt, Homo sapiens
  misc_RNA (1)...(19): siRNA sense strand
gcaucauuucccuguguaa

SEQ ID NO: 221203 - RNA, 19 nt, Homo sapiens
  misc_RNA (1)...(19): siRNA sense strand
cugcaaagaguguccaauc

SEQ ID NO: 221204 - RNA, 19 nt, Homo sapiens
  misc_RNA (1)...(19): siRNA sense strand
cuuauaggacugccaugaa

SEQ ID NO: 221205 - RNA, 19 nt, Homo sapiens
  misc_RNA (1)...(19): siRNA sense strand
caaagaguguccaaucauu

SEQ ID NO: 221206 - RNA, 19 nt, Homo sapiens
  misc_RNA (1)...(19): siRNA sense strand
uagcugaccugaauaaugu

SEQ ID NO: 221207 - RNA, 19 nt, Homo sapiens
  misc_RNA (1)...(19): siRNA sense strand
gcaugauucuauccaaauu

SEQ ID NO: 221208 - RNA, 19 nt, Homo sapiens
  misc_RNA (1)...(19): siRNA sense strand
ugaacuggcugcugaaugu

SEQ ID NO: 221209 - RNA, 19 nt, Homo sapiens
  misc_RNA (1)...(19): siRNA sense strand
gauauccugcagauuauua

SEQ ID NO: 221210 - RNA, 19 nt, Homo sapiens
  misc_RNA (1)...(19): siRNA sense strand
gagaagauguucgagacuu

SEQ ID NO: 221211 - RNA, 19 nt, Homo sapiens
  misc_RNA (1)...(19): siRNA sense strand
gcacuuuaauuaugacauc

SEQ ID NO: 221212 - RNA, 19 nt, Homo sapiens
  misc_RNA (1)...(19): siRNA sense strand
guaaagcacauuuggaaga

SEQ ID NO: 221213 - RNA, 19 nt, Homo sapiens
  misc_RNA (1)...(19): siRNA sense strand
gaauauugcacuccgacua

SEQ ID NO: 221214 - RNA, 19 nt, Homo sapiens
  misc_RNA (1)...(19): siRNA sense strand
uuauaggacugccaugaaa

SEQ ID NO: 221215 - RNA, 19 nt, Homo sapiens
  misc_RNA (1)...(19): siRNA sense strand
gggugaaguugcauccuuu

SEQ ID NO: 221216 - RNA, 19 nt, Homo sapiens
  misc_RNA (1)...(19): siRNA sense strand
gcaagagcacaacaauuug

SEQ ID NO: 221217 - RNA, 19 nt, Homo sapiens
  misc_RNA (1)...(19): siRNA sense strand
gcacaacaauuuggucaac

SEQ ID NO: 221218 - RNA, 19 nt, Homo sapiens
  misc_RNA (1)...(19): siRNA sense strand
agcaagagcacaacaauuu

SEQ ID NO: 221219 - RNA, 19 nt, Homo sapiens
  misc_RNA (1)...(19): siRNA sense strand
agaagauguucgagacuuu

SEQ ID NO: 221220 - RNA, 19 nt, Homo sapiens
  misc_RNA (1)...(19): siRNA sense strand
gagcaagagcacaacaauu

SEQ ID NO: 221221 - RNA, 19 nt, Homo sapiens
  misc_RNA (1)...(19): siRNA sense strand
ucaagcaaguggcaaguuc

SEQ ID NO: 221222 - RNA, 19 nt, Homo sapiens
  misc_RNA (1)...(19): siRNA sense strand
ccacgagacucaaacaacu

SEQ ID NO: 221223 - RNA, 19 nt, Homo sapiens
  misc_RNA (1)...(19): siRNA sense strand
cagcacaaccucaagcaaa

SEQ ID NO: 221224 - RNA, 19 nt, Homo sapiens
  misc_RNA (1)...(19): siRNA sense strand
gcaaagaguguccaaucau

SEQ ID NO: 221225 - RNA, 19 nt, Homo sapiens
  misc_RNA (1)...(19): siRNA sense strand
auggauauccugcagauua

SEQ ID NO: 221226 - RNA, 19 nt, Homo sapiens
  misc_RNA (1)...(19): siRNA sense strand
uguaacaucugcaaagagu

SEQ ID NO: 221227 - RNA, 19 nt, Homo sapiens
  misc_RNA (1)...(19): siRNA sense strand
guccggagcugcuuccaau

SEQ ID NO: 221228 - RNA, 19 nt, Homo sapiens
  misc_RNA (1)...(19): siRNA sense strand
gcaaguggcaaguucaaca

SEQ ID NO: 221229 - RNA, 19 nt, Homo sapiens
  misc_RNA (1)...(19): siRNA sense strand
gcuuccaauuugcuaauaa

SEQ ID NO: 221230 - RNA, 19 nt, Homo sapiens
  misc_RNA (1)...(19): siRNA sense strand
uggaagacaaguacagaua

SEQ ID NO: 221231 - RNA, 19 nt, Homo sapiens
  misc_RNA (1)...(19): siRNA sense strand
ggauccguguccugucuuu

SEQ ID NO: 221232 - RNA, 19 nt, Homo sapiens
  misc_RNA (1)...(19): siRNA sense strand
gucuuuagcugaccugaau

SEQ ID NO: 221233 - RNA, 19 nt, Homo sapiens
  misc_RNA (1)...(19): siRNA sense strand
gacaaguacagauaccuuu

SEQ ID NO: 221234 - RNA, 19 nt, Homo sapiens
  misc_RNA (1)...(19): siRNA sense strand
ccaagcaucaggccaaaug

SEQ ID NO: 221235 - RNA, 19 nt, Homo sapiens
  misc_RNA (1)...(19): siRNA sense strand
ggagcaagagcacaacaau

SEQ ID NO: 221236 - RNA, 19 nt, Homo sapiens
  misc_RNA (1)...(19): siRNA sense strand
guguaaagcacauuuggaa

SEQ ID NO: 221237 - RNA, 19 nt, Homo sapiens
  misc_RNA (1)...(19): siRNA sense strand
caagacaguugggugaagu

SEQ ID NO: 221238 - RNA, 19 nt, Homo sapiens
  misc_RNA (1)...(19): siRNA sense strand
gaagauguucgagacuuug

SEQ ID NO: 221239 - RNA, 19 nt, Homo sapiens
  misc_RNA (1)...(19): siRNA sense strand
gucagauucucagcuuaua

SEQ ID NO: 221240 - RNA, 19 nt, Homo sapiens
  misc_RNA (1)...(19): siRNA sense strand
uaacaucugcaaagagugu

SEQ ID NO: 221241 - RNA, 19 nt, Homo sapiens
  misc_RNA (1)...(19): siRNA sense strand
cggagcugcuuccaauuug

SEQ ID NO: 221242 - RNA, 19 nt, Homo sapiens
  misc_RNA (1)...(19): siRNA sense strand
gaagacaaguacagauacc

SEQ ID NO: 221243 - RNA, 19 nt, Homo sapiens
  misc_RNA (1)...(19): siRNA sense strand
ccauggauauccugcagau

SEQ ID NO: 221244 - RNA, 19 nt, Homo sapiens
  misc_RNA (1)...(19): siRNA sense strand
ggcaucauuucccugugua

SEQ ID NO: 221245 - RNA, 19 nt, Homo sapiens
  misc_RNA (1)...(19): siRNA sense strand
uggauauccugcagauuau

SEQ ID NO: 221246 - RNA, 19 nt, Homo sapiens
  misc_RNA (1)...(19): siRNA sense strand
ggaagacaaguacagauac

SEQ ID NO: 221247 - RNA, 19 nt, Homo sapiens
  misc_RNA (1)...(19): siRNA sense strand
ugcaaagaguguccaauca

SEQ ID NO: 221248 - RNA, 19 nt, Homo sapiens
  misc_RNA (1)...(19): siRNA sense strand
guggauaugugucugaacu

SEQ ID NO: 221249 - RNA, 19 nt, Homo sapiens
  misc_RNA (1)...(19): siRNA sense strand
acuggcugcugaauguuua

SEQ ID NO: 221250 - RNA, 19 nt, Homo sapiens
  misc_RNA (1)...(19): siRNA sense strand
acuaucccaugguggaaua

SEQ ID NO: 221251 - RNA, 19 nt, Homo sapiens
  misc_RNA (1)...(19): siRNA sense strand
ccggagcugcuuccaauuu

SEQ ID NO: 221252 - RNA, 19 nt, Homo sapiens
  misc_RNA (1)...(19): siRNA sense strand
ccaaauuccaagacaguug

SEQ ID NO: 221253 - RNA, 19 nt, Homo sapiens
  misc_RNA (1)...(19): siRNA sense strand
cagaaacugccaagcauca

SEQ ID NO: 221254 - RNA, 19 nt, Homo sapiens
  misc_RNA (1)...(19): siRNA sense strand
uaugacaucugccaaagcu

SEQ ID NO: 221255 - RNA, 19 nt, Homo sapiens
  misc_RNA (1)...(19): siRNA sense strand
aaugucagauucucagcuu

SEQ ID NO: 221256 - RNA, 19 nt, Homo sapiens
  misc_RNA (1)...(19): siRNA sense strand
ucgagacuuugccaaggua

SEQ ID NO: 221257 - RNA, 19 nt, Homo sapiens
  misc_RNA (1)...(19): siRNA sense strand
gcaaaaggccauaaaaugc

SEQ ID NO: 221258 - RNA, 19 nt, Homo sapiens
  misc_RNA (1)...(19): siRNA sense strand
cugcaugauucuauccaaa

SEQ ID NO: 221259 - RNA, 19 nt, Homo sapiens
  misc_RNA (1)...(19): siRNA sense strand
uaaagcacauuuggaagac

SEQ ID NO: 221260 - RNA, 19 nt, Homo sapiens
  misc_RNA (1)...(19): siRNA sense strand
acaggagucuaaagcacuu

SEQ ID NO: 221261 - RNA, 19 nt, Homo sapiens
  misc_RNA (1)...(19): siRNA sense strand
acagauaccuuuucaagca

SEQ ID NO: 221262 - RNA, 19 nt, Homo sapiens
  misc_RNA (1)...(19): siRNA sense strand
aagcacauuuggaagacaa

SEQ ID NO: 221263 - RNA, 19 nt, Homo sapiens
  misc_RNA (1)...(19): siRNA sense strand
gcuaauaauaagccagaga

SEQ ID NO: 221264 - RNA, 19 nt, Homo sapiens
  misc_RNA (1)...(19): siRNA sense strand
caagagcacaacaauuugg

SEQ ID NO: 221265 - RNA, 19 nt, Homo sapiens
  misc_RNA (1)...(19): siRNA sense strand
ccugucagcugcaugugau

SEQ ID NO: 221266 - RNA, 19 nt, Homo sapiens
  misc_RNA (1)...(19): siRNA sense strand
gcugcugaauguuuaugau

SEQ ID NO: 221267 - RNA, 19 nt, Homo sapiens
  misc_RNA (1)...(19): siRNA sense strand
acagagcucuaccagucuu

SEQ ID NO: 221268 - RNA, 19 nt, Homo sapiens
  misc_RNA (1)...(19): siRNA sense strand
acaguugggugaaguugca

SEQ ID NO: 221269 - RNA, 19 nt, Homo sapiens
  misc_RNA (1)...(19): siRNA sense strand
guuugaccacuauuuauga

SEQ ID NO: 221270 - RNA, 19 nt, Homo sapiens
  misc_RNA (1)...(19): siRNA sense strand
gcuuauaggacugccauga

SEQ ID NO: 221271 - RNA, 19 nt, Homo sapiens
  misc_RNA (1)...(19): siRNA sense strand
caucaggccaaauguaaca

SEQ ID NO: 221272 - RNA, 19 nt, Homo sapiens
  misc_RNA (1)...(19): siRNA sense strand
gauucuauccaaauuccaa

SEQ ID NO: 221273 - RNA, 19 nt, Homo sapiens
  misc_RNA (1)...(19): siRNA sense strand
ggcaaguucaacaggauuu

SEQ ID NO: 221274 - RNA, 19 nt, Homo sapiens
  misc_RNA (1)...(19): siRNA sense strand
gaacuggcugcugaauguu

SEQ ID NO: 221275 - RNA, 19 nt, Homo sapiens
  misc_RNA (1)...(19): siRNA sense strand
cugcugaauguuuaugaua

SEQ ID NO: 221276 - RNA, 19 nt, Homo sapiens
  misc_RNA (1)...(19): siRNA sense strand
aagcaucaggccaaaugua

SEQ ID NO: 221277 - RNA, 19 nt, Homo sapiens
  misc_RNA (1)...(19): siRNA sense strand
uggcaucauuucccugugu

SEQ ID NO: 221278 - RNA, 19 nt, Homo sapiens
  misc_RNA (1)...(19): siRNA sense strand
ccaugaaacuccgaagacu

SEQ ID NO: 221279 - RNA, 19 nt, Homo sapiens
  misc_RNA (1)...(19): siRNA sense strand
auaauaagccagagaucga

SEQ ID NO: 221280 - RNA, 19 nt, Homo sapiens
  misc_RNA (1)...(19): siRNA sense strand
cuaauaauaagccagagau

SEQ ID NO: 221281 - RNA, 19 nt, Homo sapiens
  misc_RNA (1)...(19): siRNA sense strand
ugggugaaguugcauccuu

SEQ ID NO: 221282 - RNA, 19 nt, Homo sapiens
  misc_RNA (1)...(19): siRNA sense strand
caucauuucccuguguaaa

SEQ ID NO: 221283 - RNA, 19 nt, Homo sapiens
  misc_RNA (1)...(19): siRNA sense strand
gcguggauaugugucugaa

SEQ ID NO: 221284 - RNA, 19 nt, Homo sapiens
  misc_RNA (1)...(19): siRNA sense strand
gcacuaucccaugguggaa

SEQ ID NO: 221285 - RNA, 19 nt, Homo sapiens
  misc_RNA (1)...(19): siRNA sense strand
gagccugucagcugcaugu

SEQ ID NO: 221286 - RNA, 19 nt, Homo sapiens
  misc_RNA (1)...(19): siRNA sense strand
guacagauaccuuuucaag

SEQ ID NO: 221287 - RNA, 19 nt, Homo sapiens
  misc_RNA (1)...(19): siRNA sense strand
gucccucucugcguggaua

SEQ ID NO: 221288 - RNA, 19 nt, Homo sapiens
  misc_RNA (1)...(19): siRNA sense strand
ggagcugcuuccaauuugc

SEQ ID NO: 221289 - RNA, 19 nt, Homo sapiens
  misc_RNA (1)...(19): siRNA sense strand
uuagcugaccugaauaaug

SEQ ID NO: 221290 - RNA, 19 nt, Homo sapiens
  misc_RNA (1)...(19): siRNA sense strand
guggcaaguucaacaggau

SEQ ID NO: 221291 - RNA, 19 nt, Homo sapiens
  misc_RNA (1)...(19): siRNA sense strand
acaacaauuuggucaacgu

SEQ ID NO: 221292 - RNA, 19 nt, Homo sapiens
  misc_RNA (1)...(19): siRNA sense strand
gacuacaucaggagaagau

SEQ ID NO: 221293 - RNA, 19 nt, Homo sapiens
  misc_RNA (1)...(19): siRNA sense strand
uaauaagccagagaucgaa

SEQ ID NO: 221294 - RNA, 19 nt, Homo sapiens
  misc_RNA (1)...(19): siRNA sense strand
ugucagauucucagcuuau

SEQ ID NO: 221295 - RNA, 19 nt, Homo sapiens
  misc_RNA (1)...(19): siRNA sense strand
ggauauccugcagauuauu

SEQ ID NO: 221296 - RNA, 19 nt, Homo sapiens
  misc_RNA (1)...(19): siRNA sense strand
agcaucaggccaaauguaa

SEQ ID NO: 221297 - RNA, 19 nt, Homo sapiens
  misc_RNA (1)...(19): siRNA sense strand
gcccuuugcuuggaucucu

SEQ ID NO: 221298 - RNA, 19 nt, Homo sapiens
  misc_RNA (1)...(19): siRNA sense strand
gcugaauguuuaugauacg

SEQ ID NO: 221299 - RNA, 19 nt, Homo sapiens
  misc_RNA (1)...(19): siRNA sense strand
agacuuugccaagguacua

SEQ ID NO: 221300 - RNA, 19 nt, Homo sapiens
  misc_RNA (1)...(19): siRNA sense strand
caagcaaguggcaaguuca

SEQ ID NO: 221301 - RNA, 19 nt, Homo sapiens
  misc_RNA (1)...(19): siRNA sense strand
agacaaguacagauaccuu

SEQ ID NO: 221302 - RNA, 19 nt, Homo sapiens
  misc_RNA (1)...(19): siRNA sense strand
gcaucauuucccuguguaa

SEQ ID NO: 221303 - RNA, 19 nt, Homo sapiens
  misc_RNA (1)...(19): siRNA sense strand
cugcaaagaguguccaauc

SEQ ID NO: 221304 - RNA, 19 nt, Homo sapiens
  misc_RNA (1)...(19): siRNA sense strand
cuuauaggacugccaugaa

SEQ ID NO: 221305 - RNA, 19 nt, Homo sapiens
  misc_RNA (1)...(19): siRNA sense strand
caaagaguguccaaucauu

SEQ ID NO: 221306 - RNA, 19 nt, Homo sapiens
  misc_RNA (1)...(19): siRNA sense strand
uagcugaccugaauaaugu

SEQ ID NO: 221307 - RNA, 19 nt, Homo sapiens
  misc_RNA (1)...(19): siRNA sense strand
gcaugauucuauccaaauu

SEQ ID NO: 221308 - RNA, 19 nt, Homo sapiens
  misc_RNA (1)...(19): siRNA sense strand
ugaacuggcugcugaaugu

SEQ ID NO: 221309 - RNA, 19 nt, Homo sapiens
  misc_RNA (1)...(19): siRNA sense strand
gauauccugcagauuauua

SEQ ID NO: 221310 - RNA, 19 nt, Homo sapiens
  misc_RNA (1)...(19): siRNA sense strand
gagaagauguucgagacuu

SEQ ID NO: 221311 - RNA, 19 nt, Homo sapiens
  misc_RNA (1)...(19): siRNA sense strand
gcacuuuaauuaugacauc

SEQ ID NO: 221312 - RNA, 19 nt, Homo sapiens
  misc_RNA (1)...(19): siRNA sense strand
guaaagcacauuuggaaga

SEQ ID NO: 221313 - RNA, 19 nt, Homo sapiens
  misc_RNA (1)...(19): siRNA sense strand
gaauauugcacuccgacua

SEQ ID NO: 221314 - RNA, 19 nt, Homo sapiens
  misc_RNA (1)...(19): siRNA sense strand
uuauaggacugccaugaaa

SEQ ID NO: 221315 - RNA, 19 nt, Homo sapiens
  misc_RNA (1)...(19): siRNA sense strand
gggugaaguugcauccuuu

SEQ ID NO: 221316 - RNA, 19 nt, Homo sapiens
  misc_RNA (1)...(19): siRNA sense strand
gcaagagcacaacaauuug

SEQ ID NO: 221317 - RNA, 19 nt, Homo sapiens
  misc_RNA (1)...(19): siRNA sense strand
gcacaacaauuuggucaac

SEQ ID NO: 221318 - RNA, 19 nt, Homo sapiens
  misc_RNA (1)...(19): siRNA sense strand
agcaagagcacaacaauuu

SEQ ID NO: 221319 - RNA, 19 nt, Homo sapiens
  misc_RNA (1)...(19): siRNA sense strand
agaagauguucgagacuuu

SEQ ID NO: 221320 - RNA, 19 nt, Homo sapiens
  misc_RNA (1)...(19): siRNA sense strand
gagcaagagcacaacaauu

SEQ ID NO: 221321 - RNA, 19 nt, Homo sapiens
  misc_RNA (1)...(19): siRNA sense strand
ucaagcaaguggcaaguuc

SEQ ID NO: 221322 - RNA, 19 nt, Homo sapiens
  misc_RNA (1)...(19): siRNA sense strand
ccacgagacucaaacaacu

SEQ ID NO: 221323 - RNA, 19 nt, Homo sapiens
  misc_RNA (1)...(19): siRNA sense strand
cagcacaaccucaagcaaa

SEQ ID NO: 221324 - RNA, 19 nt, Homo sapiens
  misc_RNA (1)...(19): siRNA sense strand
gcaaagaguguccaaucau

SEQ ID NO: 221325 - RNA, 19 nt, Homo sapiens
  misc_RNA (1)...(19): siRNA sense strand
auggauauccugcagauua

SEQ ID NO: 221326 - RNA, 19 nt, Homo sapiens
  misc_RNA (1)...(19): siRNA sense strand
uguaacaucugcaaagagu

SEQ ID NO: 221327 - RNA, 19 nt, Homo sapiens
  misc_RNA (1)...(19): siRNA sense strand
guccggagcugcuuccaau

SEQ ID NO: 221328 - RNA, 19 nt, Homo sapiens
  misc_RNA (1)...(19): siRNA sense strand
gcaaguggcaaguucaaca

SEQ ID NO: 221329 - RNA, 19 nt, Homo sapiens
  misc_RNA (1)...(19): siRNA sense strand
gcuuccaauuugcuaauaa

SEQ ID NO: 221330 - RNA, 19 nt, Homo sapiens
  misc_RNA (1)...(19): siRNA sense strand
uggaagacaaguacagaua

SEQ ID NO: 221331 - RNA, 19 nt, Homo sapiens
  misc_RNA (1)...(19): siRNA sense strand
ggauccguguccugucuuu

SEQ ID NO: 221332 - RNA, 19 nt, Homo sapiens
  misc_RNA (1)...(19): siRNA sense strand
gucuuuagcugaccugaau

SEQ ID NO: 221333 - RNA, 19 nt, Homo sapiens
  misc_RNA (1)...(19): siRNA sense strand
gacaaguacagauaccuuu

SEQ ID NO: 221334 - RNA, 19 nt, Homo sapiens
  misc_RNA (1)...(19): siRNA sense strand
ccaagcaucaggccaaaug

SEQ ID NO: 221335 - RNA, 19 nt, Homo sapiens
  misc_RNA (1)...(19): siRNA sense strand
ggagcaagagcacaacaau

SEQ ID NO: 221336 - RNA, 19 nt, Homo sapiens
  misc_RNA (1)...(19): siRNA sense strand
guguaaagcacauuuggaa

SEQ ID NO: 221337 - RNA, 19 nt, Homo sapiens
  misc_RNA (1)...(19): siRNA sense strand
caagacaguugggugaagu

SEQ ID NO: 221338 - RNA, 19 nt, Homo sapiens
  misc_RNA (1)...(19): siRNA sense strand
gaagauguucgagacuuug

SEQ ID NO: 221339 - RNA, 19 nt, Homo sapiens
  misc_RNA (1)...(19): siRNA sense strand
gucagauucucagcuuaua

SEQ ID NO: 221340 - RNA, 19 nt, Homo sapiens
  misc_RNA (1)...(19): siRNA sense strand
uaacaucugcaaagagugu

SEQ ID NO: 221341 - RNA, 19 nt, Homo sapiens
  misc_RNA (1)...(19): siRNA sense strand
cggagcugcuuccaauuug

SEQ ID NO: 221342 - RNA, 19 nt, Homo sapiens
  misc_RNA (1)...(19): siRNA sense strand
gaagacaaguacagauacc

SEQ ID NO: 221343 - RNA, 19 nt, Homo sapiens
  misc_RNA (1)...(19): siRNA sense strand
ccauggauauccugcagau

SEQ ID NO: 221344 - RNA, 19 nt, Homo sapiens
  misc_RNA (1)...(19): siRNA sense strand
ggcaucauuucccugugua

SEQ ID NO: 221345 - RNA, 19 nt, Homo sapiens
  misc_RNA (1)...(19): siRNA sense strand
uggauauccugcagauuau

SEQ ID NO: 221346 - RNA, 19 nt, Homo sapiens
  misc_RNA (1)...(19): siRNA sense strand
ggaagacaaguacagauac

SEQ ID NO: 221347 - RNA, 19 nt, Homo sapiens
  misc_RNA (1)...(19): siRNA sense strand
ugcaaagaguguccaauca

SEQ ID NO: 221348 - RNA, 19 nt, Homo sapiens
  misc_RNA (1)...(19): siRNA sense strand
guggauaugugucugaacu

SEQ ID NO: 221349 - RNA, 19 nt, Homo sapiens
  misc_RNA (1)...(19): siRNA sense strand
acuggcugcugaauguuua

SEQ ID NO: 221350 - RNA, 19 nt, Homo sapiens
  misc_RNA (1)...(19): siRNA sense strand
acuaucccaugguggaaua

SEQ ID NO: 221351 - RNA, 19 nt, Homo sapiens
  misc_RNA (1)...(19): siRNA sense strand
ccggagcugcuuccaauuu

SEQ ID NO: 221352 - RNA, 19 nt, Homo sapiens
  misc_RNA (1)...(19): siRNA sense strand
ccaaauuccaagacaguug

SEQ ID NO: 221353 - RNA, 19 nt, Homo sapiens
  misc_RNA (1)...(19): siRNA sense strand
cagaaacugccaagcauca

SEQ ID NO: 221354 - RNA, 19 nt, Homo sapiens
  misc_RNA (1)...(19): siRNA sense strand
uaugacaucugccaaagcu

SEQ ID NO: 221355 - RNA, 19 nt, Homo sapiens
  misc_RNA (1)...(19): siRNA sense strand
aaugucagauucucagcuu

SEQ ID NO: 221356 - RNA, 19 nt, Homo sapiens
  misc_RNA (1)...(19): siRNA sense strand
ucgagacuuugccaaggua

SEQ ID NO: 221357 - RNA, 19 nt, Homo sapiens
  misc_RNA (1)...(19): siRNA sense strand
gcaaaaggccauaaaaugc

SEQ ID NO: 221358 - RNA, 19 nt, Homo sapiens
  misc_RNA (1)...(19): siRNA sense strand
cugcaugauucuauccaaa

SEQ ID NO: 221359 - RNA, 19 nt, Homo sapiens
  misc_RNA (1)...(19): siRNA sense strand
uaaagcacauuuggaagac

SEQ ID NO: 221360 - RNA, 19 nt, Homo sapiens
  misc_RNA (1)...(19): siRNA sense strand
acaggagucuaaagcacuu

SEQ ID NO: 221361 - RNA, 19 nt, Homo sapiens
  misc_RNA (1)...(19): siRNA sense strand
acagauaccuuuucaagca

SEQ ID NO: 221362 - RNA, 19 nt, Homo sapiens
  misc_RNA (1)...(19): siRNA sense strand
aagcacauuuggaagacaa

SEQ ID NO: 221363 - RNA, 19 nt, Homo sapiens
  misc_RNA (1)...(19): siRNA sense strand
gcuaauaauaagccagaga

SEQ ID NO: 221364 - RNA, 19 nt, Homo sapiens
  misc_RNA (1)...(19): siRNA sense strand
caagagcacaacaauuugg

SEQ ID NO: 221365 - RNA, 19 nt, Homo sapiens
  misc_RNA (1)...(19): siRNA sense strand
ccugucagcugcaugugau

SEQ ID NO: 221366 - RNA, 19 nt, Homo sapiens
  misc_RNA (1)...(19): siRNA sense strand
gcugcugaauguuuaugau

SEQ ID NO: 221367 - RNA, 19 nt, Homo sapiens
  misc_RNA (1)...(19): siRNA sense strand
acagagcucuaccagucuu

SEQ ID NO: 221368 - RNA, 19 nt, Homo sapiens
  misc_RNA (1)...(19): siRNA sense strand
acaguugggugaaguugca

SEQ ID NO: 221369 - RNA, 19 nt, Homo sapiens
  misc_RNA (1)...(19): siRNA sense strand
guuugaccacuauuuauga

SEQ ID NO: 221370 - RNA, 19 nt, Homo sapiens
  misc_RNA (1)...(19): siRNA sense strand
gcuuauaggacugccauga

SEQ ID NO: 221371 - RNA, 19 nt, Homo sapiens
  misc_RNA (1)...(19): siRNA sense strand
caucaggccaaauguaaca

SEQ ID NO: 221372 - RNA, 19 nt, Homo sapiens
  misc_RNA (1)...(19): siRNA sense strand
gauucuauccaaauuccaa

SEQ ID NO: 221373 - RNA, 19 nt, Homo sapiens
  misc_RNA (1)...(19): siRNA sense strand
ggcaaguucaacaggauuu

SEQ ID NO: 221374 - RNA, 19 nt, Homo sapiens
  misc_RNA (1)...(19): siRNA sense strand
gaacuggcugcugaauguu

SEQ ID NO: 221375 - RNA, 19 nt, Homo sapiens
  misc_RNA (1)...(19): siRNA sense strand
cugcugaauguuuaugaua

SEQ ID NO: 221376 - RNA, 19 nt, Homo sapiens
  misc_RNA (1)...(19): siRNA sense strand
aagcaucaggccaaaugua

SEQ ID NO: 221377 - RNA, 19 nt, Homo sapiens
  misc_RNA (1)...(19): siRNA sense strand
uggcaucauuucccugugu

SEQ ID NO: 221378 - RNA, 19 nt, Homo sapiens
  misc_RNA (1)...(19): siRNA sense strand
ccaugaaacuccgaagacu

SEQ ID NO: 221379 - RNA, 19 nt, Homo sapiens
  misc_RNA (1)...(19): siRNA sense strand
auaauaagccagagaucga

SEQ ID NO: 221380 - RNA, 19 nt, Homo sapiens
  misc_RNA (1)...(19): siRNA sense strand
cuaauaauaagccagagau

SEQ ID NO: 221381 - RNA, 19 nt, Homo sapiens
  misc_RNA (1)...(19): siRNA sense strand
ugggugaaguugcauccuu

SEQ ID NO: 221382 - RNA, 19 nt, Homo sapiens
  misc_RNA (1)...(19): siRNA sense strand
caucauuucccuguguaaa

SEQ ID NO: 221383 - RNA, 19 nt, Homo sapiens
  misc_RNA (1)...(19): siRNA sense strand
gcguggauaugugucugaa

SEQ ID NO: 221384 - RNA, 19 nt, Homo sapiens
  misc_RNA (1)...(19): siRNA sense strand
gcacuaucccaugguggaa

SEQ ID NO: 221385 - RNA, 19 nt, Homo sapiens
  misc_RNA (1)...(19): siRNA sense strand
gagccugucagcugcaugu

SEQ ID NO: 221386 - RNA, 19 nt, Homo sapiens
  misc_RNA (1)...(19): siRNA sense strand
guacagauaccuuuucaag

SEQ ID NO: 221387 - RNA, 19 nt, Homo sapiens
  misc_RNA (1)...(19): siRNA sense strand
gucccucucugcguggaua

SEQ ID NO: 221388 - RNA, 19 nt, Homo sapiens
  misc_RNA (1)...(19): siRNA sense strand
ggagcugcuuccaauuugc

SEQ ID NO: 221389 - RNA, 19 nt, Homo sapiens
  misc_RNA (1)...(19): siRNA sense strand
uuagcugaccugaauaaug

SEQ ID NO: 221390 - RNA, 19 nt, Homo sapiens
  misc_RNA (1)...(19): siRNA sense strand
guggcaaguucaacaggau

SEQ ID NO: 221391 - RNA, 19 nt, Homo sapiens
  misc_RNA (1)...(19): siRNA sense strand
acaacaauuuggucaacgu

SEQ ID NO: 221392 - RNA, 19 nt, Homo sapiens
  misc_RNA (1)...(19): siRNA sense strand
gacuacaucaggagaagau

SEQ ID NO: 221393 - RNA, 19 nt, Homo sapiens
  misc_RNA (1)...(19): siRNA sense strand
uaauaagccagagaucgaa

SEQ ID NO: 221394 - RNA, 19 nt, Homo sapiens
  misc_RNA (1)...(19): siRNA sense strand
ugucagauucucagcuuau

SEQ ID NO: 221395 - RNA, 19 nt, Homo sapiens
  misc_RNA (1)...(19): siRNA sense strand
ggauauccugcagauuauu

SEQ ID NO: 221396 - RNA, 19 nt, Homo sapiens
  misc_RNA (1)...(19): siRNA sense strand
agcaucaggccaaauguaa

SEQ ID NO: 221397 - RNA, 19 nt, Homo sapiens
  misc_RNA (1)...(19): siRNA sense strand
gcccuuugcuuggaucucu

SEQ ID NO: 221398 - RNA, 19 nt, Homo sapiens
  misc_RNA (1)...(19): siRNA sense strand
gcugaauguuuaugauacg

SEQ ID NO: 221399 - RNA, 19 nt, Homo sapiens
  misc_RNA (1)...(19): siRNA sense strand
agacuuugccaagguacua

SEQ ID NO: 221400 - RNA, 19 nt, Homo sapiens
  misc_RNA (1)...(19): siRNA sense strand
caagcaaguggcaaguuca

SEQ ID NO: 221401 - RNA, 19 nt, Homo sapiens
  misc_RNA (1)...(19): siRNA sense strand
agacaaguacagauaccuu

SEQ ID NO: 221402 - RNA, 19 nt, Homo sapiens
  misc_RNA (1)...(19): siRNA sense strand
gcaucauuucccuguguaa

SEQ ID NO: 221403 - RNA, 19 nt, Homo sapiens
  misc_RNA (1)...(19): siRNA sense strand
cugcaaagaguguccaauc

SEQ ID NO: 221404 - RNA, 19 nt, Homo sapiens
  misc_RNA (1)...(19): siRNA sense strand
cuuauaggacugccaugaa

SEQ ID NO: 221405 - RNA, 19 nt, Homo sapiens
  misc_RNA (1)...(19): siRNA sense strand
caaagaguguccaaucauu

SEQ ID NO: 221406 - RNA, 19 nt, Homo sapiens
  misc_RNA (1)...(19): siRNA sense strand
uagcugaccugaauaaugu

SEQ ID NO: 221407 - RNA, 19 nt, Homo sapiens
  misc_RNA (1)...(19): siRNA sense strand
gcaugauucuauccaaauu

SEQ ID NO: 221408 - RNA, 19 nt, Homo sapiens
  misc_RNA (1)...(19): siRNA sense strand
ugaacuggcugcugaaugu

SEQ ID NO: 221409 - RNA, 19 nt, Homo sapiens
  misc_RNA (1)...(19): siRNA sense strand
gauauccugcagauuauua

SEQ ID NO: 221410 - RNA, 19 nt, Homo sapiens
  misc_RNA (1)...(19): siRNA sense strand
gagaagauguucgagacuu

SEQ ID NO: 221411 - RNA, 19 nt, Homo sapiens
  misc_RNA (1)...(19): siRNA sense strand
gcacuuuaauuaugacauc

SEQ ID NO: 221412 - RNA, 19 nt, Homo sapiens
  misc_RNA (1)...(19): siRNA sense strand
guaaagcacauuuggaaga

SEQ ID NO: 221413 - RNA, 19 nt, Homo sapiens
  misc_RNA (1)...(19): siRNA sense strand
gaauauugcacuccgacua

SEQ ID NO: 221414 - RNA, 19 nt, Homo sapiens
  misc_RNA (1)...(19): siRNA sense strand
uuauaggacugccaugaaa

SEQ ID NO: 221415 - RNA, 19 nt, Homo sapiens
  misc_RNA (1)...(19): siRNA sense strand
gggugaaguugcauccuuu

SEQ ID NO: 221416 - RNA, 19 nt, Homo sapiens
  misc_RNA (1)...(19): siRNA sense strand
gcaagagcacaacaauuug

SEQ ID NO: 221417 - RNA, 19 nt, Homo sapiens
  misc_RNA (1)...(19): siRNA sense strand
gcacaacaauuuggucaac

SEQ ID NO: 221418 - RNA, 19 nt, Homo sapiens
  misc_RNA (1)...(19): siRNA sense strand
agcaagagcacaacaauuu

SEQ ID NO: 221419 - RNA, 19 nt, Homo sapiens
  misc_RNA (1)...(19): siRNA sense strand
agaagauguucgagacuuu

SEQ ID NO: 221420 - RNA, 19 nt, Homo sapiens
  misc_RNA (1)...(19): siRNA sense strand
gagcaagagcacaacaauu

SEQ ID NO: 221421 - RNA, 19 nt, Homo sapiens
  misc_RNA (1)...(19): siRNA sense strand
ucaagcaaguggcaaguuc

SEQ ID NO: 221422 - RNA, 19 nt, Homo sapiens
  misc_RNA (1)...(19): siRNA sense strand
ccacgagacucaaacaacu

SEQ ID NO: 221423 - RNA, 19 nt, Homo sapiens
  misc_RNA (1)...(19): siRNA sense strand
cagcacaaccucaagcaaa

SEQ ID NO: 221424 - RNA, 19 nt, Homo sapiens
  misc_RNA (1)...(19): siRNA sense strand
gcaaagaguguccaaucau

SEQ ID NO: 221425 - RNA, 19 nt, Homo sapiens
  misc_RNA (1)...(19): siRNA sense strand
auggauauccugcagauua

SEQ ID NO: 221426 - RNA, 19 nt, Homo sapiens
  misc_RNA (1)...(19): siRNA sense strand
uguaacaucugcaaagagu

SEQ ID NO: 221427 - RNA, 19 nt, Homo sapiens
  misc_RNA (1)...(19): siRNA sense strand
guccggagcugcuuccaau

SEQ ID NO: 221428 - RNA, 19 nt, Homo sapiens
  misc_RNA (1)...(19): siRNA sense strand
gcaaguggcaaguucaaca

SEQ ID NO: 221429 - RNA, 19 nt, Homo sapiens
  misc_RNA (1)...(19): siRNA sense strand
gcuuccaauuugcuaauaa

SEQ ID NO: 221430 - RNA, 19 nt, Homo sapiens
  misc_RNA (1)...(19): siRNA sense strand
uggaagacaaguacagaua

SEQ ID NO: 221431 - RNA, 19 nt, Homo sapiens
  misc_RNA (1)...(19): siRNA sense strand
ggauccguguccugucuuu

SEQ ID NO: 221432 - RNA, 19 nt, Homo sapiens
  misc_RNA (1)...(19): siRNA sense strand
gucuuuagcugaccugaau

SEQ ID NO: 221433 - RNA, 19 nt, Homo sapiens
  misc_RNA (1)...(19): siRNA sense strand
gacaaguacagauaccuuu

SEQ ID NO: 221434 - RNA, 19 nt, Homo sapiens
  misc_RNA (1)...(19): siRNA sense strand
ccaagcaucaggccaaaug

SEQ ID NO: 221435 - RNA, 19 nt, Homo sapiens
  misc_RNA (1)...(19): siRNA sense strand
ggagcaagagcacaacaau

SEQ ID NO: 221436 - RNA, 19 nt, Homo sapiens
  misc_RNA (1)...(19): siRNA sense strand
guguaaagcacauuuggaa

SEQ ID NO: 221437 - RNA, 19 nt, Homo sapiens
  misc_RNA (1)...(19): siRNA sense strand
caagacaguugggugaagu

SEQ ID NO: 221438 - RNA, 19 nt, Homo sapiens
  misc_RNA (1)...(19): siRNA sense strand
gaagauguucgagacuuug

SEQ ID NO: 221439 - RNA, 19 nt, Homo sapiens
  misc_RNA (1)...(19): siRNA sense strand
gucagauucucagcuuaua

SEQ ID NO: 221440 - RNA, 19 nt, Homo sapiens
  misc_RNA (1)...(19): siRNA sense strand
uaacaucugcaaagagugu

SEQ ID NO: 221441 - RNA, 19 nt, Homo sapiens
  misc_RNA (1)...(19): siRNA sense strand
cggagcugcuuccaauuug

SEQ ID NO: 221442 - RNA, 19 nt, Homo sapiens
  misc_RNA (1)...(19): siRNA sense strand
gaagacaaguacagauacc

SEQ ID NO: 221443 - RNA, 19 nt, Homo sapiens
  misc_RNA (1)...(19): siRNA sense strand
ccauggauauccugcagau

SEQ ID NO: 221444 - RNA, 19 nt, Homo sapiens
  misc_RNA (1)...(19): siRNA sense strand
ggcaucauuucccugugua

SEQ ID NO: 221445 - RNA, 19 nt, Homo sapiens
  misc_RNA (1)...(19): siRNA sense strand
uggauauccugcagauuau

SEQ ID NO: 221446 - RNA, 19 nt, Homo sapiens
  misc_RNA (1)...(19): siRNA sense strand
ggaagacaaguacagauac

SEQ ID NO: 221447 - RNA, 19 nt, Homo sapiens
  misc_RNA (1)...(19): siRNA sense strand
ugcaaagaguguccaauca

SEQ ID NO: 221448 - RNA, 19 nt, Homo sapiens
  misc_RNA (1)...(19): siRNA sense strand
guggauaugugucugaacu

SEQ ID NO: 221449 - RNA, 19 nt, Homo sapiens
  misc_RNA (1)...(19): siRNA sense strand
acuggcugcugaauguuua

SEQ ID NO: 221450 - RNA, 19 nt, Homo sapiens
  misc_RNA (1)...(19): siRNA sense strand
acuaucccaugguggaaua

SEQ ID NO: 221451 - RNA, 19 nt, Homo sapiens
  misc_RNA (1)...(19): siRNA sense strand
ccggagcugcuuccaauuu

SEQ ID NO: 221452 - RNA, 19 nt, Homo sapiens
  misc_RNA (1)...(19): siRNA sense strand
ccaaauuccaagacaguug

SEQ ID NO: 221453 - RNA, 19 nt, Homo sapiens
  misc_RNA (1)...(19): siRNA sense strand
cagaaacugccaagcauca

SEQ ID NO: 221454 - RNA, 19 nt, Homo sapiens
  misc_RNA (1)...(19): siRNA sense strand
uaugacaucugccaaagcu

SEQ ID NO: 221455 - RNA, 19 nt, Homo sapiens
  misc_RNA (1)...(19): siRNA sense strand
aaugucagauucucagcuu

SEQ ID NO: 221456 - RNA, 19 nt, Homo sapiens
  misc_RNA (1)...(19): siRNA sense strand
ucgagacuuugccaaggua

SEQ ID NO: 221457 - RNA, 19 nt, Homo sapiens
  misc_RNA (1)...(19): siRNA sense strand
gcaaaaggccauaaaaugc

SEQ ID NO: 221458 - RNA, 19 nt, Homo sapiens
  misc_RNA (1)...(19): siRNA sense strand
cugcaugauucuauccaaa

SEQ ID NO: 221459 - RNA, 19 nt, Homo sapiens
  misc_RNA (1)...(19): siRNA sense strand
uaaagcacauuuggaagac

SEQ ID NO: 221460 - RNA, 19 nt, Homo sapiens
  misc_RNA (1)...(19): siRNA sense strand
acaggagucuaaagcacuu

SEQ ID NO: 221461 - RNA, 19 nt, Homo sapiens
  misc_RNA (1)...(19): siRNA sense strand
acagauaccuuuucaagca

SEQ ID NO: 221462 - RNA, 19 nt, Homo sapiens
  misc_RNA (1)...(19): siRNA sense strand
aagcacauuuggaagacaa

SEQ ID NO: 221463 - RNA, 19 nt, Homo sapiens
  misc_RNA (1)...(19): siRNA sense strand
gcuaauaauaagccagaga

SEQ ID NO: 221464 - RNA, 19 nt, Homo sapiens
  misc_RNA (1)...(19): siRNA sense strand
caagagcacaacaauuugg

SEQ ID NO: 221465 - RNA, 19 nt, Homo sapiens
  misc_RNA (1)...(19): siRNA sense strand
ccugucagcugcaugugau

SEQ ID NO: 221466 - RNA, 19 nt, Homo sapiens
  misc_RNA (1)...(19): siRNA sense strand
gcugcugaauguuuaugau

SEQ ID NO: 221467 - RNA, 19 nt, Homo sapiens
  misc_RNA (1)...(19): siRNA sense strand
acagagcucuaccagucuu

SEQ ID NO: 221468 - RNA, 19 nt, Homo sapiens
  misc_RNA (1)...(19): siRNA sense strand
acaguugggugaaguugca

SEQ ID NO: 221469 - RNA, 19 nt, Homo sapiens
  misc_RNA (1)...(19): siRNA sense strand
guuugaccacuauuuauga

SEQ ID NO: 221470 - RNA, 19 nt, Homo sapiens
  misc_RNA (1)...(19): siRNA sense strand
gcuuauaggacugccauga

SEQ ID NO: 221471 - RNA, 19 nt, Homo sapiens
  misc_RNA (1)...(19): siRNA sense strand
caucaggccaaauguaaca

SEQ ID NO: 221472 - RNA, 19 nt, Homo sapiens
  misc_RNA (1)...(19): siRNA sense strand
gauucuauccaaauuccaa

SEQ ID NO: 221473 - RNA, 19 nt, Homo sapiens
  misc_RNA (1)...(19): siRNA sense strand
ggcaaguucaacaggauuu

SEQ ID NO: 221474 - RNA, 19 nt, Homo sapiens
  misc_RNA (1)...(19): siRNA sense strand
gaacuggcugcugaauguu

SEQ ID NO: 221475 - RNA, 19 nt, Homo sapiens
  misc_RNA (1)...(19): siRNA sense strand
cugcugaauguuuaugaua

SEQ ID NO: 221476 - RNA, 19 nt, Homo sapiens
  misc_RNA (1)...(19): siRNA sense strand
aagcaucaggccaaaugua

SEQ ID NO: 221477 - RNA, 19 nt, Homo sapiens
  misc_RNA (1)...(19): siRNA sense strand
uggcaucauuucccugugu

SEQ ID NO: 221478 - RNA, 19 nt, Homo sapiens
  misc_RNA (1)...(19): siRNA sense strand
ccaugaaacuccgaagacu

SEQ ID NO: 221479 - RNA, 19 nt, Homo sapiens
  misc_RNA (1)...(19): siRNA sense strand
auaauaagccagagaucga

SEQ ID NO: 221480 - RNA, 19 nt, Homo sapiens
  misc_RNA (1)...(19): siRNA sense strand
cuaauaauaagccagagau

SEQ ID NO: 221481 - RNA, 19 nt, Homo sapiens
  misc_RNA (1)...(19): siRNA sense strand
ugggugaaguugcauccuu

SEQ ID NO: 221482 - RNA, 19 nt, Homo sapiens
  misc_RNA (1)...(19): siRNA sense strand
caucauuucccuguguaaa

SEQ ID NO: 221483 - RNA, 19 nt, Homo sapiens
  misc_RNA (1)...(19): siRNA sense strand
gcguggauaugugucugaa

SEQ ID NO: 221484 - RNA, 19 nt, Homo sapiens
  misc_RNA (1)...(19): siRNA sense strand
gcacuaucccaugguggaa

SEQ ID NO: 221485 - RNA, 19 nt, Homo sapiens
  misc_RNA (1)...(19): siRNA sense strand
gagccugucagcugcaugu

SEQ ID NO: 221486 - RNA, 19 nt, Homo sapiens
  misc_RNA (1)...(19): siRNA sense strand
guacagauaccuuuucaag

SEQ ID NO: 221487 - RNA, 19 nt, Homo sapiens
  misc_RNA (1)...(19): siRNA sense strand
gucccucucugcguggaua

SEQ ID NO: 221488 - RNA, 19 nt, Homo sapiens
  misc_RNA (1)...(19): siRNA sense strand
ggagcugcuuccaauuugc

SEQ ID NO: 221489 - RNA, 19 nt, Homo sapiens
  misc_RNA (1)...(19): siRNA sense strand
uuagcugaccugaauaaug

SEQ ID NO: 221490 - RNA, 19 nt, Homo sapiens
  misc_RNA (1)...(19): siRNA sense strand
guggcaaguucaacaggau

SEQ ID NO: 221491 - RNA, 19 nt, Homo sapiens
  misc_RNA (1)...(19): siRNA sense strand
acaacaauuuggucaacgu

SEQ ID NO: 221492 - RNA, 19 nt, Homo sapiens
  misc_RNA (1)...(19): siRNA sense strand
gacuacaucaggagaagau

SEQ ID NO: 221493 - RNA, 19 nt, Homo sapiens
  misc_RNA (1)...(19): siRNA sense strand
uaauaagccagagaucgaa

SEQ ID NO: 221494 - RNA, 19 nt, Homo sapiens
  misc_RNA (1)...(19): siRNA sense strand
ugucagauucucagcuuau

SEQ ID NO: 221495 - RNA, 19 nt, Homo sapiens
  misc_RNA (1)...(19): siRNA sense strand
ggauauccugcagauuauu

SEQ ID NO: 221496 - RNA, 19 nt, Homo sapiens
  misc_RNA (1)...(19): siRNA sense strand
agcaucaggccaaauguaa

SEQ ID NO: 221497 - RNA, 19 nt, Homo sapiens
  misc_RNA (1)...(19): siRNA sense strand
gcccuuugcuuggaucucu

SEQ ID NO: 221498 - RNA, 19 nt, Homo sapiens
  misc_RNA (1)...(19): siRNA sense strand
gcugaauguuuaugauacg

SEQ ID NO: 221499 - RNA, 19 nt, Homo sapiens
  misc_RNA (1)...(19): siRNA sense strand
agacuuugccaagguacua

SEQ ID NO: 221500 - RNA, 19 nt, Homo sapiens
  misc_RNA (1)...(19): siRNA sense strand
caagcaaguggcaaguuca

SEQ ID NO: 221501 - RNA, 19 nt, Homo sapiens
  misc_RNA (1)...(19): siRNA sense strand
agacaaguacagauaccuu

SEQ ID NO: 221502 - RNA, 19 nt, Homo sapiens
  misc_RNA (1)...(19): siRNA sense strand
gcaucauuucccuguguaa

SEQ ID NO: 221503 - RNA, 19 nt, Homo sapiens
  misc_RNA (1)...(19): siRNA sense strand
cugcaaagaguguccaauc

SEQ ID NO: 221504 - RNA, 19 nt, Homo sapiens
  misc_RNA (1)...(19): siRNA sense strand
cuuauaggacugccaugaa

SEQ ID NO: 221505 - RNA, 19 nt, Homo sapiens
  misc_RNA (1)...(19): siRNA sense strand
caaagaguguccaaucauu

SEQ ID NO: 221506 - RNA, 19 nt, Homo sapiens
  misc_RNA (1)...(19): siRNA sense strand
uagcugaccugaauaaugu

SEQ ID NO: 221507 - RNA, 19 nt, Homo sapiens
  misc_RNA (1)...(19): siRNA sense strand
gcaugauucuauccaaauu

SEQ ID NO: 221508 - RNA, 19 nt, Homo sapiens
  misc_RNA (1)...(19): siRNA sense strand
ugaacuggcugcugaaugu

SEQ ID NO: 221509 - RNA, 19 nt, Homo sapiens
  misc_RNA (1)...(19): siRNA sense strand
gauauccugcagauuauua

SEQ ID NO: 221510 - RNA, 19 nt, Homo sapiens
  misc_RNA (1)...(19): siRNA sense strand
gagaagauguucgagacuu

SEQ ID NO: 221511 - RNA, 19 nt, Homo sapiens
  misc_RNA (1)...(19): siRNA sense strand
gcacuuuaauuaugacauc

SEQ ID NO: 221512 - RNA, 19 nt, Homo sapiens
  misc_RNA (1)...(19): siRNA sense strand
guaaagcacauuuggaaga

SEQ ID NO: 221513 - RNA, 19 nt, Homo sapiens
  misc_RNA (1)...(19): siRNA sense strand
gaauauugcacuccgacua

SEQ ID NO: 221514 - RNA, 19 nt, Homo sapiens
  misc_RNA (1)...(19): siRNA sense strand
uuauaggacugccaugaaa

SEQ ID NO: 221515 - RNA, 19 nt, Homo sapiens
  misc_RNA (1)...(19): siRNA sense strand
gggugaaguugcauccuuu

SEQ ID NO: 221516 - RNA, 19 nt, Homo sapiens
  misc_RNA (1)...(19): siRNA sense strand
gcaagagcacaacaauuug

SEQ ID NO: 221517 - RNA, 19 nt, Homo sapiens
  misc_RNA (1)...(19): siRNA sense strand
gcacaacaauuuggucaac

SEQ ID NO: 221518 - RNA, 19 nt, Homo sapiens
  misc_RNA (1)...(19): siRNA sense strand
agcaagagcacaacaauuu

SEQ ID NO: 221519 - RNA, 19 nt, Homo sapiens
  misc_RNA (1)...(19): siRNA sense strand
agaagauguucgagacuuu

SEQ ID NO: 221520 - RNA, 19 nt, Homo sapiens
  misc_RNA (1)...(19): siRNA sense strand
gagcaagagcacaacaauu

SEQ ID NO: 221521 - RNA, 19 nt, Homo sapiens
  misc_RNA (1)...(19): siRNA sense strand
ucaagcaaguggcaaguuc

SEQ ID NO: 221522 - RNA, 19 nt, Homo sapiens
  misc_RNA (1)...(19): siRNA sense strand
ccacgagacucaaacaacu

SEQ ID NO: 221523 - RNA, 19 nt, Homo sapiens
  misc_RNA (1)...(19): siRNA sense strand
cagcacaaccucaagcaaa

SEQ ID NO: 221524 - RNA, 19 nt, Homo sapiens
  misc_RNA (1)...(19): siRNA sense strand
gcaaagaguguccaaucau

SEQ ID NO: 221525 - RNA, 19 nt, Homo sapiens
  misc_RNA (1)...(19): siRNA sense strand
auggauauccugcagauua

SEQ ID NO: 221526 - RNA, 19 nt, Homo sapiens
  misc_RNA (1)...(19): siRNA sense strand
uguaacaucugcaaagagu

SEQ ID NO: 221527 - RNA, 19 nt, Homo sapiens
  misc_RNA (1)...(19): siRNA sense strand
guccggagcugcuuccaau

SEQ ID NO: 221528 - RNA, 19 nt, Homo sapiens
  misc_RNA (1)...(19): siRNA sense strand
gcaaguggcaaguucaaca

SEQ ID NO: 221529 - RNA, 19 nt, Homo sapiens
  misc_RNA (1)...(19): siRNA sense strand
gcuuccaauuugcuaauaa

SEQ ID NO: 221530 - RNA, 19 nt, Homo sapiens
  misc_RNA (1)...(19): siRNA sense strand
uggaagacaaguacagaua

SEQ ID NO: 221531 - RNA, 19 nt, Homo sapiens
  misc_RNA (1)...(19): siRNA sense strand
ggauccguguccugucuuu

SEQ ID NO: 221532 - RNA, 19 nt, Homo sapiens
  misc_RNA (1)...(19): siRNA sense strand
gucuuuagcugaccugaau

SEQ ID NO: 221533 - RNA, 19 nt, Homo sapiens
  misc_RNA (1)...(19): siRNA sense strand
gacaaguacagauaccuuu

SEQ ID NO: 221534 - RNA, 19 nt, Homo sapiens
  misc_RNA (1)...(19): siRNA sense strand
ccaagcaucaggccaaaug

SEQ ID NO: 221535 - RNA, 19 nt, Homo sapiens
  misc_RNA (1)...(19): siRNA sense strand
ggagcaagagcacaacaau

SEQ ID NO: 221536 - RNA, 19 nt, Homo sapiens
  misc_RNA (1)...(19): siRNA sense strand
guguaaagcacauuuggaa

SEQ ID NO: 221537 - RNA, 19 nt, Homo sapiens
  misc_RNA (1)...(19): siRNA sense strand
caagacaguugggugaagu

SEQ ID NO: 221538 - RNA, 19 nt, Homo sapiens
  misc_RNA (1)...(19): siRNA sense strand
gaagauguucgagacuuug

SEQ ID NO: 221539 - RNA, 19 nt, Homo sapiens
  misc_RNA (1)...(19): siRNA sense strand
gucagauucucagcuuaua

SEQ ID NO: 221540 - RNA, 19 nt, Homo sapiens
  misc_RNA (1)...(19): siRNA sense strand
uaacaucugcaaagagugu

SEQ ID NO: 221541 - RNA, 19 nt, Homo sapiens
  misc_RNA (1)...(19): siRNA sense strand
cggagcugcuuccaauuug

SEQ ID NO: 221542 - RNA, 19 nt, Homo sapiens
  misc_RNA (1)...(19): siRNA sense strand
gaagacaaguacagauacc

SEQ ID NO: 221543 - RNA, 19 nt, Homo sapiens
  misc_RNA (1)...(19): siRNA sense strand
ccauggauauccugcagau

SEQ ID NO: 221544 - RNA, 19 nt, Homo sapiens
  misc_RNA (1)...(19): siRNA sense strand
ggcaucauuucccugugua

SEQ ID NO: 221545 - RNA, 19 nt, Homo sapiens
  misc_RNA (1)...(19): siRNA sense strand
uggauauccugcagauuau

SEQ ID NO: 221546 - RNA, 19 nt, Homo sapiens
  misc_RNA (1)...(19): siRNA sense strand
ggaagacaaguacagauac

SEQ ID NO: 221547 - RNA, 19 nt, Homo sapiens
  misc_RNA (1)...(19): siRNA sense strand
ugcaaagaguguccaauca

SEQ ID NO: 221548 - RNA, 19 nt, Homo sapiens
  misc_RNA (1)...(19): siRNA sense strand
guggauaugugucugaacu

SEQ ID NO: 221549 - RNA, 19 nt, Homo sapiens
  misc_RNA (1)...(19): siRNA sense strand
acuggcugcugaauguuua

SEQ ID NO: 221550 - RNA, 19 nt, Homo sapiens
  misc_RNA (1)...(19): siRNA sense strand
acuaucccaugguggaaua

SEQ ID NO: 221551 - RNA, 19 nt, Homo sapiens
  misc_RNA (1)...(19): siRNA sense strand
ccggagcugcuuccaauuu

SEQ ID NO: 221552 - RNA, 19 nt, Homo sapiens
  misc_RNA (1)...(19): siRNA sense strand
ccaaauuccaagacaguug

SEQ ID NO: 221553 - RNA, 19 nt, Homo sapiens
  misc_RNA (1)...(19): siRNA sense strand
cagaaacugccaagcauca

SEQ ID NO: 221554 - RNA, 19 nt, Homo sapiens
  misc_RNA (1)...(19): siRNA sense strand
uaugacaucugccaaagcu

SEQ ID NO: 221555 - RNA, 19 nt, Homo sapiens
  misc_RNA (1)...(19): siRNA sense strand
aaugucagauucucagcuu

SEQ ID NO: 221556 - RNA, 19 nt, Homo sapiens
  misc_RNA (1)...(19): siRNA sense strand
ucgagacuuugccaaggua

SEQ ID NO: 221557 - RNA, 19 nt, Homo sapiens
  misc_RNA (1)...(19): siRNA sense strand
gcaaaaggccauaaaaugc

SEQ ID NO: 221558 - RNA, 19 nt, Homo sapiens
  misc_RNA (1)...(19): siRNA sense strand
cugcaugauucuauccaaa

SEQ ID NO: 221559 - RNA, 19 nt, Homo sapiens
  misc_RNA (1)...(19): siRNA sense strand
uaaagcacauuuggaagac

SEQ ID NO: 221560 - RNA, 19 nt, Homo sapiens
  misc_RNA (1)...(19): siRNA sense strand
acaggagucuaaagcacuu

SEQ ID NO: 221561 - RNA, 19 nt, Homo sapiens
  misc_RNA (1)...(19): siRNA sense strand
acagauaccuuuucaagca

SEQ ID NO: 221562 - RNA, 19 nt, Homo sapiens
  misc_RNA (1)...(19): siRNA sense strand
aagcacauuuggaagacaa

SEQ ID NO: 221563 - RNA, 19 nt, Homo sapiens
  misc_RNA (1)...(19): siRNA sense strand
gcuaauaauaagccagaga

SEQ ID NO: 221564 - RNA, 19 nt, Homo sapiens
  misc_RNA (1)...(19): siRNA sense strand
caagagcacaacaauuugg

SEQ ID NO: 221565 - RNA, 19 nt, Homo sapiens
  misc_RNA (1)...(19): siRNA sense strand
ccugucagcugcaugugau

SEQ ID NO: 221566 - RNA, 19 nt, Homo sapiens
  misc_RNA (1)...(19): siRNA sense strand
gcugcugaauguuuaugau

SEQ ID NO: 221567 - RNA, 19 nt, Homo sapiens
  misc_RNA (1)...(19): siRNA sense strand
acagagcucuaccagucuu

SEQ ID NO: 221568 - RNA, 19 nt, Homo sapiens
  misc_RNA (1)...(19): siRNA sense strand
acaguugggugaaguugca

SEQ ID NO: 221569 - RNA, 19 nt, Homo sapiens
  misc_RNA (1)...(19): siRNA sense strand
guuugaccacuauuuauga

SEQ ID NO: 221570 - RNA, 19 nt, Homo sapiens
  misc_RNA (1)...(19): siRNA sense strand
gcuuauaggacugccauga

SEQ ID NO: 221571 - RNA, 19 nt, Homo sapiens
  misc_RNA (1)...(19): siRNA sense strand
caucaggccaaauguaaca

SEQ ID NO: 221572 - RNA, 19 nt, Homo sapiens
  misc_RNA (1)...(19): siRNA sense strand
gauucuauccaaauuccaa

SEQ ID NO: 221573 - RNA, 19 nt, Homo sapiens
  misc_RNA (1)...(19): siRNA sense strand
ggcaaguucaacaggauuu

SEQ ID NO: 221574 - RNA, 19 nt, Homo sapiens
  misc_RNA (1)...(19): siRNA sense strand
gaacuggcugcugaauguu

SEQ ID NO: 221575 - RNA, 19 nt, Homo sapiens
  misc_RNA (1)...(19): siRNA sense strand
cugcugaauguuuaugaua

SEQ ID NO: 221576 - RNA, 19 nt, Homo sapiens
  misc_RNA (1)...(19): siRNA sense strand
aagcaucaggccaaaugua

SEQ ID NO: 221577 - RNA, 19 nt, Homo sapiens
  misc_RNA (1)...(19): siRNA sense strand
uggcaucauuucccugugu

SEQ ID NO: 221578 - RNA, 19 nt, Homo sapiens
  misc_RNA (1)...(19): siRNA sense strand
ccaugaaacuccgaagacu

SEQ ID NO: 221579 - RNA, 19 nt, Homo sapiens
  misc_RNA (1)...(19): siRNA sense strand
auaauaagccagagaucga

SEQ ID NO: 221580 - RNA, 19 nt, Homo sapiens
  misc_RNA (1)...(19): siRNA sense strand
cuaauaauaagccagagau

SEQ ID NO: 221581 - RNA, 19 nt, Homo sapiens
  misc_RNA (1)...(19): siRNA sense strand
ugggugaaguugcauccuu

SEQ ID NO: 221582 - RNA, 19 nt, Homo sapiens
  misc_RNA (1)...(19): siRNA sense strand
caucauuucccuguguaaa

SEQ ID NO: 221583 - RNA, 19 nt, Homo sapiens
  misc_RNA (1)...(19): siRNA sense strand
gcguggauaugugucugaa

SEQ ID NO: 221584 - RNA, 19 nt, Homo sapiens
  misc_RNA (1)...(19): siRNA sense strand
gcacuaucccaugguggaa

SEQ ID NO: 221585 - RNA, 19 nt, Homo sapiens
  misc_RNA (1)...(19): siRNA sense strand
gagccugucagcugcaugu

SEQ ID NO: 221586 - RNA, 19 nt, Homo sapiens
  misc_RNA (1)...(19): siRNA sense strand
guacagauaccuuuucaag

SEQ ID NO: 221587 - RNA, 19 nt, Homo sapiens
  misc_RNA (1)...(19): siRNA sense strand
gucccucucugcguggaua

SEQ ID NO: 221588 - RNA, 19 nt, Homo sapiens
  misc_RNA (1)...(19): siRNA sense strand
ggagcugcuuccaauuugc

SEQ ID NO: 221589 - RNA, 19 nt, Homo sapiens
  misc_RNA (1)...(19): siRNA sense strand
uuagcugaccugaauaaug

SEQ ID NO: 221590 - RNA, 19 nt, Homo sapiens
  misc_RNA (1)...(19): siRNA sense strand
guggcaaguucaacaggau

SEQ ID NO: 221591 - RNA, 19 nt, Homo sapiens
  misc_RNA (1)...(19): siRNA sense strand
acaacaauuuggucaacgu

SEQ ID NO: 221592 - RNA, 19 nt, Homo sapiens
  misc_RNA (1)...(19): siRNA sense strand
gacuacaucaggagaagau

SEQ ID NO: 221593 - RNA, 19 nt, Homo sapiens
  misc_RNA (1)...(19): siRNA sense strand
uaauaagccagagaucgaa

SEQ ID NO: 221594 - RNA, 19 nt, Homo sapiens
  misc_RNA (1)...(19): siRNA sense strand
ugucagauucucagcuuau

SEQ ID NO: 221595 - RNA, 19 nt, Homo sapiens
  misc_RNA (1)...(19): siRNA sense strand
ggauauccugcagauuauu

SEQ ID NO: 221596 - RNA, 19 nt, Homo sapiens
  misc_RNA (1)...(19): siRNA sense strand
agcaucaggccaaauguaa

SEQ ID NO: 221597 - RNA, 19 nt, Homo sapiens
  misc_RNA (1)...(19): siRNA sense strand
gcccuuugcuuggaucucu

SEQ ID NO: 221598 - RNA, 19 nt, Homo sapiens
  misc_RNA (1)...(19): siRNA sense strand
gcugaauguuuaugauacg

SEQ ID NO: 221599 - RNA, 19 nt, Homo sapiens
  misc_RNA (1)...(19): siRNA sense strand
agacuuugccaagguacua

SEQ ID NO: 221600 - RNA, 19 nt, Homo sapiens
  misc_RNA (1)...(19): siRNA sense strand
caagcaaguggcaaguuca

SEQ ID NO: 221601 - RNA, 19 nt, Homo sapiens
  misc_RNA (1)...(19): siRNA sense strand
agacaaguacagauaccuu

SEQ ID NO: 221602 - RNA, 19 nt, Homo sapiens
  misc_RNA (1)...(19): siRNA sense strand
gcaucauuucccuguguaa

SEQ ID NO: 221603 - RNA, 19 nt, Homo sapiens
  misc_RNA (1)...(19): siRNA sense strand
cugcaaagaguguccaauc

SEQ ID NO: 221604 - RNA, 19 nt, Homo sapiens
  misc_RNA (1)...(19): siRNA sense strand
cuuauaggacugccaugaa

SEQ ID NO: 221605 - RNA, 19 nt, Homo sapiens
  misc_RNA (1)...(19): siRNA sense strand
caaagaguguccaaucauu

SEQ ID NO: 221606 - RNA, 19 nt, Homo sapiens
  misc_RNA (1)...(19): siRNA sense strand
uagcugaccugaauaaugu

SEQ ID NO: 221607 - RNA, 19 nt, Homo sapiens
  misc_RNA (1)...(19): siRNA sense strand
gcaugauucuauccaaauu

SEQ ID NO: 221608 - RNA, 19 nt, Homo sapiens
  misc_RNA (1)...(19): siRNA sense strand
ugaacuggcugcugaaugu

SEQ ID NO: 221609 - RNA, 19 nt, Homo sapiens
  misc_RNA (1)...(19): siRNA sense strand
gauauccugcagauuauua

SEQ ID NO: 221610 - RNA, 19 nt, Homo sapiens
  misc_RNA (1)...(19): siRNA sense strand
gagaagauguucgagacuu

SEQ ID NO: 221611 - RNA, 19 nt, Homo sapiens
  misc_RNA (1)...(19): siRNA sense strand
gcacuuuaauuaugacauc

SEQ ID NO: 221612 - RNA, 19 nt, Homo sapiens
  misc_RNA (1)...(19): siRNA sense strand
guaaagcacauuuggaaga

SEQ ID NO: 221613 - RNA, 19 nt, Homo sapiens
  misc_RNA (1)...(19): siRNA sense strand
gaauauugcacuccgacua

SEQ ID NO: 221614 - RNA, 19 nt, Homo sapiens
  misc_RNA (1)...(19): siRNA sense strand
uuauaggacugccaugaaa

SEQ ID NO: 221615 - RNA, 19 nt, Homo sapiens
  misc_RNA (1)...(19): siRNA sense strand
gggugaaguugcauccuuu

SEQ ID NO: 221616 - RNA, 19 nt, Homo sapiens
  misc_RNA (1)...(19): siRNA sense strand
gcaagagcacaacaauuug

SEQ ID NO: 221617 - RNA, 19 nt, Homo sapiens
  misc_RNA (1)...(19): siRNA sense strand
gcacaacaauuuggucaac

SEQ ID NO: 221618 - RNA, 19 nt, Homo sapiens
  misc_RNA (1)...(19): siRNA sense strand
agcaagagcacaacaauuu

SEQ ID NO: 221619 - RNA, 19 nt, Homo sapiens
  misc_RNA (1)...(19): siRNA sense strand
agaagauguucgagacuuu

SEQ ID NO: 221620 - RNA, 19 nt, Homo sapiens
  misc_RNA (1)...(19): siRNA sense strand
gagcaagagcacaacaauu

SEQ ID NO: 221621 - RNA, 19 nt, Homo sapiens
  misc_RNA (1)...(19): siRNA sense strand
ucaagcaaguggcaaguuc

SEQ ID NO: 221622 - RNA, 19 nt, Homo sapiens
  misc_RNA (1)...(19): siRNA sense strand
ccacgagacucaaacaacu

SEQ ID NO: 221623 - RNA, 19 nt, Homo sapiens
  misc_RNA (1)...(19): siRNA sense strand
cagcacaaccucaagcaaa

SEQ ID NO: 221624 - RNA, 19 nt, Homo sapiens
  misc_RNA (1)...(19): siRNA sense strand
gcaaagaguguccaaucau

SEQ ID NO: 221625 - RNA, 19 nt, Homo sapiens
  misc_RNA (1)...(19): siRNA sense strand
auggauauccugcagauua

SEQ ID NO: 221626 - RNA, 19 nt, Homo sapiens
  misc_RNA (1)...(19): siRNA sense strand
uguaacaucugcaaagagu

SEQ ID NO: 221627 - RNA, 19 nt, Homo sapiens
  misc_RNA (1)...(19): siRNA sense strand
guccggagcugcuuccaau

SEQ ID NO: 221628 - RNA, 19 nt, Homo sapiens
  misc_RNA (1)...(19): siRNA sense strand
gcaaguggcaaguucaaca

SEQ ID NO: 221629 - RNA, 19 nt, Homo sapiens
  misc_RNA (1)...(19): siRNA sense strand
gcuuccaauuugcuaauaa

SEQ ID NO: 221630 - RNA, 19 nt, Homo sapiens
  misc_RNA (1)...(19): siRNA sense strand
uggaagacaaguacagaua

SEQ ID NO: 221631 - RNA, 19 nt, Homo sapiens
  misc_RNA (1)...(19): siRNA sense strand
ggauccguguccugucuuu

SEQ ID NO: 221632 - RNA, 19 nt, Homo sapiens
  misc_RNA (1)...(19): siRNA sense strand
gucuuuagcugaccugaau

SEQ ID NO: 221633 - RNA, 19 nt, Homo sapiens
  misc_RNA (1)...(19): siRNA sense strand
gacaaguacagauaccuuu

SEQ ID NO: 221634 - RNA, 19 nt, Homo sapiens
  misc_RNA (1)...(19): siRNA sense strand
ccaagcaucaggccaaaug

SEQ ID NO: 221635 - RNA, 19 nt, Homo sapiens
  misc_RNA (1)...(19): siRNA sense strand
ggagcaagagcacaacaau

SEQ ID NO: 221636 - RNA, 19 nt, Homo sapiens
  misc_RNA (1)...(19): siRNA sense strand
guguaaagcacauuuggaa

SEQ ID NO: 221637 - RNA, 19 nt, Homo sapiens
  misc_RNA (1)...(19): siRNA sense strand
caagacaguugggugaagu

SEQ ID NO: 221638 - RNA, 19 nt, Homo sapiens
  misc_RNA (1)...(19): siRNA sense strand
gaagauguucgagacuuug

SEQ ID NO: 221639 - RNA, 19 nt, Homo sapiens
  misc_RNA (1)...(19): siRNA sense strand
gucagauucucagcuuaua

SEQ ID NO: 221640 - RNA, 19 nt, Homo sapiens
  misc_RNA (1)...(19): siRNA sense strand
uaacaucugcaaagagugu

SEQ ID NO: 221641 - RNA, 19 nt, Homo sapiens
  misc_RNA (1)...(19): siRNA sense strand
cggagcugcuuccaauuug

SEQ ID NO: 221642 - RNA, 19 nt, Homo sapiens
  misc_RNA (1)...(19): siRNA sense strand
gaagacaaguacagauacc

SEQ ID NO: 221643 - RNA, 19 nt, Homo sapiens
  misc_RNA (1)...(19): siRNA sense strand
ccauggauauccugcagau

SEQ ID NO: 221644 - RNA, 19 nt, Homo sapiens
  misc_RNA (1)...(19): siRNA sense strand
ggcaucauuucccugugua

SEQ ID NO: 221645 - RNA, 19 nt, Homo sapiens
  misc_RNA (1)...(19): siRNA sense strand
uggauauccugcagauuau

SEQ ID NO: 221646 - RNA, 19 nt, Homo sapiens
  misc_RNA (1)...(19): siRNA sense strand
ggaagacaaguacagauac

SEQ ID NO: 221647 - RNA, 19 nt, Homo sapiens
  misc_RNA (1)...(19): siRNA sense strand
ugcaaagaguguccaauca

SEQ ID NO: 221648 - RNA, 19 nt, Homo sapiens
  misc_RNA (1)...(19): siRNA sense strand
guggauaugugucugaacu

SEQ ID NO: 221649 - RNA, 19 nt, Homo sapiens
  misc_RNA (1)...(19): siRNA sense strand
acuggcugcugaauguuua

SEQ ID NO: 221650 - RNA, 19 nt, Homo sapiens
  misc_RNA (1)...(19): siRNA sense strand
acuaucccaugguggaaua

SEQ ID NO: 221651 - RNA, 19 nt, Homo sapiens
  misc_RNA (1)...(19): siRNA sense strand
ccggagcugcuuccaauuu

SEQ ID NO: 221652 - RNA, 19 nt, Homo sapiens
  misc_RNA (1)...(19): siRNA sense strand
ccaaauuccaagacaguug

SEQ ID NO: 221653 - RNA, 19 nt, Homo sapiens
  misc_RNA (1)...(19): siRNA sense strand
cagaaacugccaagcauca

SEQ ID NO: 221654 - RNA, 19 nt, Homo sapiens
  misc_RNA (1)...(19): siRNA sense strand
uaugacaucugccaaagcu

SEQ ID NO: 221655 - RNA, 19 nt, Homo sapiens
  misc_RNA (1)...(19): siRNA sense strand
aaugucagauucucagcuu

SEQ ID NO: 221656 - RNA, 19 nt, Homo sapiens
  misc_RNA (1)...(19): siRNA sense strand
ucgagacuuugccaaggua

SEQ ID NO: 221657 - RNA, 19 nt, Homo sapiens
  misc_RNA (1)...(19): siRNA sense strand
gcaaaaggccauaaaaugc

SEQ ID NO: 221658 - RNA, 19 nt, Homo sapiens
  misc_RNA (1)...(19): siRNA sense strand
cugcaugauucuauccaaa

SEQ ID NO: 221659 - RNA, 19 nt, Homo sapiens
  misc_RNA (1)...(19): siRNA sense strand
uaaagcacauuuggaagac

SEQ ID NO: 221660 - RNA, 19 nt, Homo sapiens
  misc_RNA (1)...(19): siRNA sense strand
acaggagucuaaagcacuu

SEQ ID NO: 221661 - RNA, 19 nt, Homo sapiens
  misc_RNA (1)...(19): siRNA sense strand
acagauaccuuuucaagca

SEQ ID NO: 221662 - RNA, 19 nt, Homo sapiens
  misc_RNA (1)...(19): siRNA sense strand
aagcacauuuggaagacaa

SEQ ID NO: 221663 - RNA, 19 nt, Homo sapiens
  misc_RNA (1)...(19): siRNA sense strand
gcuaauaauaagccagaga

SEQ ID NO: 221664 - RNA, 19 nt, Homo sapiens
  misc_RNA (1)...(19): siRNA sense strand
caagagcacaacaauuugg

SEQ ID NO: 221665 - RNA, 19 nt, Homo sapiens
  misc_RNA (1)...(19): siRNA sense strand
ccugucagcugcaugugau

SEQ ID NO: 221666 - RNA, 19 nt, Homo sapiens
  misc_RNA (1)...(19): siRNA sense strand
gcugcugaauguuuaugau

SEQ ID NO: 221667 - RNA, 19 nt, Homo sapiens
  misc_RNA (1)...(19): siRNA sense strand
acagagcucuaccagucuu

SEQ ID NO: 221668 - RNA, 19 nt, Homo sapiens
  misc_RNA (1)...(19): siRNA sense strand
acaguugggugaaguugca

SEQ ID NO: 221669 - RNA, 19 nt, Homo sapiens
  misc_RNA (1)...(19): siRNA sense strand
guuugaccacuauuuauga

SEQ ID NO: 221670 - RNA, 19 nt, Homo sapiens
  misc_RNA (1)...(19): siRNA sense strand
gcuuauaggacugccauga

SEQ ID NO: 221671 - RNA, 19 nt, Homo sapiens
  misc_RNA (1)...(19): siRNA sense strand
caucaggccaaauguaaca

SEQ ID NO: 221672 - RNA, 19 nt, Homo sapiens
  misc_RNA (1)...(19): siRNA sense strand
gauucuauccaaauuccaa

SEQ ID NO: 221673 - RNA, 19 nt, Homo sapiens
  misc_RNA (1)...(19): siRNA sense strand
ggcaaguucaacaggauuu

SEQ ID NO: 221674 - RNA, 19 nt, Homo sapiens
  misc_RNA (1)...(19): siRNA sense strand
gaacuggcugcugaauguu

SEQ ID NO: 221675 - RNA, 19 nt, Homo sapiens
  misc_RNA (1)...(19): siRNA sense strand
cugcugaauguuuaugaua

SEQ ID NO: 221676 - RNA, 19 nt, Homo sapiens
  misc_RNA (1)...(19): siRNA sense strand
aagcaucaggccaaaugua

SEQ ID NO: 221677 - RNA, 19 nt, Homo sapiens
  misc_RNA (1)...(19): siRNA sense strand
uggcaucauuucccugugu

SEQ ID NO: 221678 - RNA, 19 nt, Homo sapiens
  misc_RNA (1)...(19): siRNA sense strand
ccaugaaacuccgaagacu

SEQ ID NO: 221679 - RNA, 19 nt, Homo sapiens
  misc_RNA (1)...(19): siRNA sense strand
auaauaagccagagaucga

SEQ ID NO: 221680 - RNA, 19 nt, Homo sapiens
  misc_RNA (1)...(19): siRNA sense strand
cuaauaauaagccagagau

SEQ ID NO: 221681 - RNA, 19 nt, Homo sapiens
  misc_RNA (1)...(19): siRNA sense strand
ugggugaaguugcauccuu

SEQ ID NO: 221682 - RNA, 19 nt, Homo sapiens
  misc_RNA (1)...(19): siRNA sense strand
caucauuucccuguguaaa

SEQ ID NO: 221683 - RNA, 19 nt, Homo sapiens
  misc_RNA (1)...(19): siRNA sense strand
gcguggauaugugucugaa

SEQ ID NO: 221684 - RNA, 19 nt, Homo sapiens
  misc_RNA (1)...(19): siRNA sense strand
gcacuaucccaugguggaa

SEQ ID NO: 221685 - RNA, 19 nt, Homo sapiens
  misc_RNA (1)...(19): siRNA sense strand
gagccugucagcugcaugu

SEQ ID NO: 221686 - RNA, 19 nt, Homo sapiens
  misc_RNA (1)...(19): siRNA sense strand
guacagauaccuuuucaag

SEQ ID NO: 221687 - RNA, 19 nt, Homo sapiens
  misc_RNA (1)...(19): siRNA sense strand
gucccucucugcguggaua

SEQ ID NO: 221688 - RNA, 19 nt, Homo sapiens
  misc_RNA (1)...(19): siRNA sense strand
ggagcugcuuccaauuugc

SEQ ID NO: 221689 - RNA, 19 nt, Homo sapiens
  misc_RNA (1)...(19): siRNA sense strand
uuagcugaccugaauaaug

SEQ ID NO: 221690 - RNA, 19 nt, Homo sapiens
  misc_RNA (1)...(19): siRNA sense strand
guggcaaguucaacaggau

SEQ ID NO: 221691 - RNA, 19 nt, Homo sapiens
  misc_RNA (1)...(19): siRNA sense strand
acaacaauuuggucaacgu

SEQ ID NO: 221692 - RNA, 19 nt, Homo sapiens
  misc_RNA (1)...(19): siRNA sense strand
gacuacaucaggagaagau

SEQ ID NO: 221693 - RNA, 19 nt, Homo sapiens
  misc_RNA (1)...(19): siRNA sense strand
uaauaagccagagaucgaa

SEQ ID NO: 221694 - RNA, 19 nt, Homo sapiens
  misc_RNA (1)...(19): siRNA sense strand
ugucagauucucagcuuau

SEQ ID NO: 221695 - RNA, 19 nt, Homo sapiens
  misc_RNA (1)...(19): siRNA sense strand
ggauauccugcagauuauu

SEQ ID NO: 221696 - RNA, 19 nt, Homo sapiens
  misc_RNA (1)...(19): siRNA sense strand
agcaucaggccaaauguaa

SEQ ID NO: 221697 - RNA, 19 nt, Homo sapiens
  misc_RNA (1)...(19): siRNA sense strand
gcccuuugcuuggaucucu

SEQ ID NO: 221698 - RNA, 19 nt, Homo sapiens
  misc_RNA (1)...(19): siRNA sense strand
gcugaauguuuaugauacg

SEQ ID NO: 221699 - RNA, 19 nt, Homo sapiens
  misc_RNA (1)...(19): siRNA sense strand
agacuuugccaagguacua

SEQ ID NO: 221700 - RNA, 19 nt, Homo sapiens
  misc_RNA (1)...(19): siRNA sense strand
caagcaaguggcaaguuca

SEQ ID NO: 221701 - RNA, 19 nt, Homo sapiens
  misc_RNA (1)...(19): siRNA sense strand
agacaaguacagauaccuu

SEQ ID NO: 221702 - RNA, 19 nt, Homo sapiens
  misc_RNA (1)...(19): siRNA sense strand
gcaucauuucccuguguaa

SEQ ID NO: 221703 - RNA, 19 nt, Homo sapiens
  misc_RNA (1)...(19): siRNA sense strand
cugcaaagaguguccaauc

SEQ ID NO: 221704 - RNA, 19 nt, Homo sapiens
  misc_RNA (1)...(19): siRNA sense strand
cuuauaggacugccaugaa

SEQ ID NO: 221705 - RNA, 19 nt, Homo sapiens
  misc_RNA (1)...(19): siRNA sense strand
caaagaguguccaaucauu

SEQ ID NO: 221706 - RNA, 19 nt, Homo sapiens
  misc_RNA (1)...(19): siRNA sense strand
uagcugaccugaauaaugu

SEQ ID NO: 221707 - RNA, 19 nt, Homo sapiens
  misc_RNA (1)...(19): siRNA sense strand
gcaugauucuauccaaauu

SEQ ID NO: 221708 - RNA, 19 nt, Homo sapiens
  misc_RNA (1)...(19): siRNA sense strand
ugaacuggcugcugaaugu

SEQ ID NO: 221709 - RNA, 19 nt, Homo sapiens
  misc_RNA (1)...(19): siRNA sense strand
gauauccugcagauuauua

SEQ ID NO: 221710 - RNA, 19 nt, Homo sapiens
  misc_RNA (1)...(19): siRNA sense strand
gagaagauguucgagacuu

SEQ ID NO: 221711 - RNA, 19 nt, Homo sapiens
  misc_RNA (1)...(19): siRNA sense strand
gcacuuuaauuaugacauc

SEQ ID NO: 221712 - RNA, 19 nt, Homo sapiens
  misc_RNA (1)...(19): siRNA sense strand
guaaagcacauuuggaaga

SEQ ID NO: 221713 - RNA, 19 nt, Homo sapiens
  misc_RNA (1)...(19): siRNA sense strand
gaauauugcacuccgacua

SEQ ID NO: 221714 - RNA, 19 nt, Homo sapiens
  misc_RNA (1)...(19): siRNA sense strand
uuauaggacugccaugaaa

SEQ ID NO: 221715 - RNA, 19 nt, Homo sapiens
  misc_RNA (1)...(19): siRNA sense strand
gggugaaguugcauccuuu

SEQ ID NO: 221716 - RNA, 19 nt, Homo sapiens
  misc_RNA (1)...(19): siRNA sense strand
gcaagagcacaacaauuug

SEQ ID NO: 221717 - RNA, 19 nt, Homo sapiens
  misc_RNA (1)...(19): siRNA sense strand
gcacaacaauuuggucaac

SEQ ID NO: 221718 - RNA, 19 nt, Homo sapiens
  misc_RNA (1)...(19): siRNA sense strand
agcaagagcacaacaauuu

SEQ ID NO: 221719 - RNA, 19 nt, Homo sapiens
  misc_RNA (1)...(19): siRNA sense strand
agaagauguucgagacuuu

SEQ ID NO: 221720 - RNA, 19 nt, Homo sapiens
  misc_RNA (1)...(19): siRNA sense strand
gagcaagagcacaacaauu

SEQ ID NO: 221721 - RNA, 19 nt, Homo sapiens
  misc_RNA (1)...(19): siRNA sense strand
ucaagcaaguggcaaguuc

SEQ ID NO: 221722 - RNA, 19 nt, Homo sapiens
  misc_RNA (1)...(19): siRNA sense strand
ccacgagacucaaacaacu

SEQ ID NO: 221723 - RNA, 19 nt, Homo sapiens
  misc_RNA (1)...(19): siRNA sense strand
cagcacaaccucaagcaaa

SEQ ID NO: 221724 - RNA, 19 nt, Homo sapiens
  misc_RNA (1)...(19): siRNA sense strand
gcaaagaguguccaaucau

SEQ ID NO: 221725 - RNA, 19 nt, Homo sapiens
  misc_RNA (1)...(19): siRNA sense strand
auggauauccugcagauua

SEQ ID NO: 221726 - RNA, 19 nt, Homo sapiens
  misc_RNA (1)...(19): siRNA sense strand
uguaacaucugcaaagagu

SEQ ID NO: 221727 - RNA, 19 nt, Homo sapiens
  misc_RNA (1)...(19): siRNA sense strand
guccggagcugcuuccaau

SEQ ID NO: 221728 - RNA, 19 nt, Homo sapiens
  misc_RNA (1)...(19): siRNA sense strand
gcaaguggcaaguucaaca

SEQ ID NO: 221729 - RNA, 19 nt, Homo sapiens
  misc_RNA (1)...(19): siRNA sense strand
gcuuccaauuugcuaauaa

SEQ ID NO: 221730 - RNA, 19 nt, Homo sapiens
  misc_RNA (1)...(19): siRNA sense strand
uggaagacaaguacagaua

SEQ ID NO: 221731 - RNA, 19 nt, Homo sapiens
  misc_RNA (1)...(19): siRNA sense strand
ggauccguguccugucuuu

SEQ ID NO: 221732 - RNA, 19 nt, Homo sapiens
  misc_RNA (1)...(19): siRNA sense strand
gucuuuagcugaccugaau

SEQ ID NO: 221733 - RNA, 19 nt, Homo sapiens
  misc_RNA (1)...(19): siRNA sense strand
gacaaguacagauaccuuu

SEQ ID NO: 221734 - RNA, 19 nt, Homo sapiens
  misc_RNA (1)...(19): siRNA sense strand
ccaagcaucaggccaaaug

SEQ ID NO: 221735 - RNA, 19 nt, Homo sapiens
  misc_RNA (1)...(19): siRNA sense strand
ggagcaagagcacaacaau

SEQ ID NO: 221736 - RNA, 19 nt, Homo sapiens
  misc_RNA (1)...(19): siRNA sense strand
guguaaagcacauuuggaa

SEQ ID NO: 221737 - RNA, 19 nt, Homo sapiens
  misc_RNA (1)...(19): siRNA sense strand
caagacaguugggugaagu

SEQ ID NO: 221738 - RNA, 19 nt, Homo sapiens
  misc_RNA (1)...(19): siRNA sense strand
gaagauguucgagacuuug

SEQ ID NO: 221739 - RNA, 19 nt, Homo sapiens
  misc_RNA (1)...(19): siRNA sense strand
gucagauucucagcuuaua

SEQ ID NO: 221740 - RNA, 19 nt, Homo sapiens
  misc_RNA (1)...(19): siRNA sense strand
uaacaucugcaaagagugu

SEQ ID NO: 221741 - RNA, 19 nt, Homo sapiens
  misc_RNA (1)...(19): siRNA sense strand
cggagcugcuuccaauuug

SEQ ID NO: 221742 - RNA, 19 nt, Homo sapiens
  misc_RNA (1)...(19): siRNA sense strand
gaagacaaguacagauacc

SEQ ID NO: 221743 - RNA, 19 nt, Homo sapiens
  misc_RNA (1)...(19): siRNA sense strand
ccauggauauccugcagau

SEQ ID NO: 221744 - RNA, 19 nt, Homo sapiens
  misc_RNA (1)...(19): siRNA sense strand
ggcaucauuucccugugua

SEQ ID NO: 221745 - RNA, 19 nt, Homo sapiens
  misc_RNA (1)...(19): siRNA sense strand
uggauauccugcagauuau

SEQ ID NO: 221746 - RNA, 19 nt, Homo sapiens
  misc_RNA (1)...(19): siRNA sense strand
ggaagacaaguacagauac

SEQ ID NO: 221747 - RNA, 19 nt, Homo sapiens
  misc_RNA (1)...(19): siRNA sense strand
ugcaaagaguguccaauca

SEQ ID NO: 221748 - RNA, 19 nt, Homo sapiens
  misc_RNA (1)...(19): siRNA sense strand
guggauaugugucugaacu

SEQ ID NO: 221749 - RNA, 19 nt, Homo sapiens
  misc_RNA (1)...(19): siRNA sense strand
acuggcugcugaauguuua

SEQ ID NO: 221750 - RNA, 19 nt, Homo sapiens
  misc_RNA (1)...(19): siRNA sense strand
acuaucccaugguggaaua

SEQ ID NO: 221751 - RNA, 19 nt, Homo sapiens
  misc_RNA (1)...(19): siRNA sense strand
ccggagcugcuuccaauuu

SEQ ID NO: 221752 - RNA, 19 nt, Homo sapiens
  misc_RNA (1)...(19): siRNA sense strand
ccaaauuccaagacaguug

SEQ ID NO: 221753 - RNA, 19 nt, Homo sapiens
  misc_RNA (1)...(19): siRNA sense strand
cagaaacugccaagcauca

SEQ ID NO: 221754 - RNA, 19 nt, Homo sapiens
  misc_RNA (1)...(19): siRNA sense strand
uaugacaucugccaaagcu

SEQ ID NO: 221755 - RNA, 19 nt, Homo sapiens
  misc_RNA (1)...(19): siRNA sense strand
aaugucagauucucagcuu

SEQ ID NO: 221756 - RNA, 19 nt, Homo sapiens
  misc_RNA (1)...(19): siRNA sense strand
ucgagacuuugccaaggua

SEQ ID NO: 221757 - RNA, 19 nt, Homo sapiens
  misc_RNA (1)...(19): siRNA sense strand
gcaaaaggccauaaaaugc

SEQ ID NO: 221758 - RNA, 19 nt, Homo sapiens
  misc_RNA (1)...(19): siRNA sense strand
cugcaugauucuauccaaa

SEQ ID NO: 221759 - RNA, 19 nt, Homo sapiens
  misc_RNA (1)...(19): siRNA sense strand
uaaagcacauuuggaagac

SEQ ID NO: 221760 - RNA, 19 nt, Homo sapiens
  misc_RNA (1)...(19): siRNA sense strand
acaggagucuaaagcacuu

SEQ ID NO: 221761 - RNA, 19 nt, Homo sapiens
  misc_RNA (1)...(19): siRNA sense strand
acagauaccuuuucaagca

SEQ ID NO: 221762 - RNA, 19 nt, Homo sapiens
  misc_RNA (1)...(19): siRNA sense strand
aagcacauuuggaagacaa

SEQ ID NO: 221763 - RNA, 19 nt, Homo sapiens
  misc_RNA (1)...(19): siRNA sense strand
gcuaauaauaagccagaga

SEQ ID NO: 221764 - RNA, 19 nt, Homo sapiens
  misc_RNA (1)...(19): siRNA sense strand
caagagcacaacaauuugg

SEQ ID NO: 221765 - RNA, 19 nt, Homo sapiens
  misc_RNA (1)...(19): siRNA sense strand
ccugucagcugcaugugau

SEQ ID NO: 221766 - RNA, 19 nt, Homo sapiens
  misc_RNA (1)...(19): siRNA sense strand
gcugcugaauguuuaugau

SEQ ID NO: 221767 - RNA, 19 nt, Homo sapiens
  misc_RNA (1)...(19): siRNA sense strand
acagagcucuaccagucuu

SEQ ID NO: 221768 - RNA, 19 nt, Homo sapiens
  misc_RNA (1)...(19): siRNA sense strand
acaguugggugaaguugca

SEQ ID NO: 221769 - RNA, 19 nt, Homo sapiens
  misc_RNA (1)...(19): siRNA sense strand
guuugaccacuauuuauga

SEQ ID NO: 221770 - RNA, 19 nt, Homo sapiens
  misc_RNA (1)...(19): siRNA sense strand
gcuuauaggacugccauga

SEQ ID NO: 221771 - RNA, 19 nt, Homo sapiens
  misc_RNA (1)...(19): siRNA sense strand
caucaggccaaauguaaca

SEQ ID NO: 221772 - RNA, 19 nt, Homo sapiens
  misc_RNA (1)...(19): siRNA sense strand
gauucuauccaaauuccaa

SEQ ID NO: 221773 - RNA, 19 nt, Homo sapiens
  misc_RNA (1)...(19): siRNA sense strand
ggcaaguucaacaggauuu

SEQ ID NO: 221774 - RNA, 19 nt, Homo sapiens
  misc_RNA (1)...(19): siRNA sense strand
gaacuggcugcugaauguu

SEQ ID NO: 221775 - RNA, 19 nt, Homo sapiens
  misc_RNA (1)...(19): siRNA sense strand
cugcugaauguuuaugaua

SEQ ID NO: 221776 - RNA, 19 nt, Homo sapiens
  misc_RNA (1)...(19): siRNA sense strand
aagcaucaggccaaaugua

SEQ ID NO: 221777 - RNA, 19 nt, Homo sapiens
  misc_RNA (1)...(19): siRNA sense strand
uggcaucauuucccugugu

SEQ ID NO: 221778 - RNA, 19 nt, Homo sapiens
  misc_RNA (1)...(19): siRNA sense strand
ccaugaaacuccgaagacu

SEQ ID NO: 221779 - RNA, 19 nt, Homo sapiens
  misc_RNA (1)...(19): siRNA sense strand
auaauaagccagagaucga

SEQ ID NO: 221780 - RNA, 19 nt, Homo sapiens
  misc_RNA (1)...(19): siRNA sense strand
cuaauaauaagccagagau

SEQ ID NO: 221781 - RNA, 19 nt, Homo sapiens
  misc_RNA (1)...(19): siRNA sense strand
ugggugaaguugcauccuu

SEQ ID NO: 221782 - RNA, 19 nt, Homo sapiens
  misc_RNA (1)...(19): siRNA sense strand
caucauuucccuguguaaa

SEQ ID NO: 221783 - RNA, 19 nt, Homo sapiens
  misc_RNA (1)...(19): siRNA sense strand
gcguggauaugugucugaa

SEQ ID NO: 221784 - RNA, 19 nt, Homo sapiens
  misc_RNA (1)...(19): siRNA sense strand
gcacuaucccaugguggaa

SEQ ID NO: 221785 - RNA, 19 nt, Homo sapiens
  misc_RNA (1)...(19): siRNA sense strand
gagccugucagcugcaugu

SEQ ID NO: 221786 - RNA, 19 nt, Homo sapiens
  misc_RNA (1)...(19): siRNA sense strand
guacagauaccuuuucaag

SEQ ID NO: 221787 - RNA, 19 nt, Homo sapiens
  misc_RNA (1)...(19): siRNA sense strand
gucccucucugcguggaua

SEQ ID NO: 221788 - RNA, 19 nt, Homo sapiens
  misc_RNA (1)...(19): siRNA sense strand
ggagcugcuuccaauuugc

SEQ ID NO: 221789 - RNA, 19 nt, Homo sapiens
  misc_RNA (1)...(19): siRNA sense strand
uuagcugaccugaauaaug

SEQ ID NO: 221790 - RNA, 19 nt, Homo sapiens
  misc_RNA (1)...(19): siRNA sense strand
guggcaaguucaacaggau

SEQ ID NO: 221791 - RNA, 19 nt, Homo sapiens
  misc_RNA (1)...(19): siRNA sense strand
acaacaauuuggucaacgu

SEQ ID NO: 221792 - RNA, 19 nt, Homo sapiens
  misc_RNA (1)...(19): siRNA sense strand
gacuacaucaggagaagau

SEQ ID NO: 221793 - RNA, 19 nt, Homo sapiens
  misc_RNA (1)...(19): siRNA sense strand
uaauaagccagagaucgaa

SEQ ID NO: 221794 - RNA, 19 nt, Homo sapiens
  misc_RNA (1)...(19): siRNA sense strand
ugucagauucucagcuuau

SEQ ID NO: 221795 - RNA, 19 nt, Homo sapiens
  misc_RNA (1)...(19): siRNA sense strand
ggauauccugcagauuauu

SEQ ID NO: 221796 - RNA, 19 nt, Homo sapiens
  misc_RNA (1)...(19): siRNA sense strand
agcaucaggccaaauguaa

SEQ ID NO: 221797 - RNA, 19 nt, Homo sapiens
  misc_RNA (1)...(19): siRNA sense strand
gcccuuugcuuggaucucu

SEQ ID NO: 221798 - RNA, 19 nt, Homo sapiens
  misc_RNA (1)...(19): siRNA sense strand
gcugaauguuuaugauacg

SEQ ID NO: 221799 - RNA, 19 nt, Homo sapiens
  misc_RNA (1)...(19): siRNA sense strand
agacuuugccaagguacua

SEQ ID NO: 221800 - RNA, 19 nt, Homo sapiens
  misc_RNA (1)...(19): siRNA sense strand
caagcaaguggcaaguuca

SEQ ID NO: 221801 - RNA, 19 nt, Homo sapiens
  misc_RNA (1)...(19): siRNA sense strand
agacaaguacagauaccuu

SEQ ID NO: 221802 - RNA, 19 nt, Homo sapiens
  misc_RNA (1)...(19): siRNA sense strand
gcaucauuucccuguguaa

SEQ ID NO: 221803 - RNA, 19 nt, Homo sapiens
  misc_RNA (1)...(19): siRNA sense strand
cugcaaagaguguccaauc

SEQ ID NO: 221804 - RNA, 19 nt, Homo sapiens
  misc_RNA (1)...(19): siRNA sense strand
cuuauaggacugccaugaa

SEQ ID NO: 221805 - RNA, 19 nt, Homo sapiens
  misc_RNA (1)...(19): siRNA sense strand
caaagaguguccaaucauu

SEQ ID NO: 221806 - RNA, 19 nt, Homo sapiens
  misc_RNA (1)...(19): siRNA sense strand
uagcugaccugaauaaugu

SEQ ID NO: 221807 - RNA, 19 nt, Homo sapiens
  misc_RNA (1)...(19): siRNA sense strand
gcaugauucuauccaaauu

SEQ ID NO: 221808 - RNA, 19 nt, Homo sapiens
  misc_RNA (1)...(19): siRNA sense strand
ugaacuggcugcugaaugu

SEQ ID NO: 221809 - RNA, 19 nt, Homo sapiens
  misc_RNA (1)...(19): siRNA sense strand
gauauccugcagauuauua

SEQ ID NO: 221810 - RNA, 19 nt, Homo sapiens
  misc_RNA (1)...(19): siRNA sense strand
gagaagauguucgagacuu

SEQ ID NO: 221811 - RNA, 19 nt, Homo sapiens
  misc_RNA (1)...(19): siRNA sense strand
gcacuuuaauuaugacauc

SEQ ID NO: 221812 - RNA, 19 nt, Homo sapiens
  misc_RNA (1)...(19): siRNA sense strand
guaaagcacauuuggaaga

SEQ ID NO: 221813 - RNA, 19 nt, Homo sapiens
  misc_RNA (1)...(19): siRNA sense strand
gaauauugcacuccgacua

SEQ ID NO: 221814 - RNA, 19 nt, Homo sapiens
  misc_RNA (1)...(19): siRNA sense strand
uuauaggacugccaugaaa

SEQ ID NO: 221815 - RNA, 19 nt, Homo sapiens
  misc_RNA (1)...(19): siRNA sense strand
gggugaaguugcauccuuu

SEQ ID NO: 221816 - RNA, 19 nt, Homo sapiens
  misc_RNA (1)...(19): siRNA sense strand
gcaagagcacaacaauuug

SEQ ID NO: 221817 - RNA, 19 nt, Homo sapiens
  misc_RNA (1)...(19): siRNA sense strand
gcacaacaauuuggucaac

SEQ ID NO: 221818 - RNA, 19 nt, Homo sapiens
  misc_RNA (1)...(19): siRNA sense strand
agcaagagcacaacaauuu

SEQ ID NO: 221819 - RNA, 19 nt, Homo sapiens
  misc_RNA (1)...(19): siRNA sense strand
agaagauguucgagacuuu

SEQ ID NO: 221820 - RNA, 19 nt, Homo sapiens
  misc_RNA (1)...(19): siRNA sense strand
gagcaagagcacaacaauu

SEQ ID NO: 221821 - RNA, 19 nt, Homo sapiens
  misc_RNA (1)...(19): siRNA sense strand
ucaagcaaguggcaaguuc

SEQ ID NO: 221822 - RNA, 19 nt, Homo sapiens
  misc_RNA (1)...(19): siRNA sense strand
ccacgagacucaaacaacu

SEQ ID NO: 221823 - RNA, 19 nt, Homo sapiens
  misc_RNA (1)...(19): siRNA sense strand
cagcacaaccucaagcaaa

SEQ ID NO: 221824 - RNA, 19 nt, Homo sapiens
  misc_RNA (1)...(19): siRNA sense strand
gcaaagaguguccaaucau

SEQ ID NO: 221825 - RNA, 19 nt, Homo sapiens
  misc_RNA (1)...(19): siRNA sense strand
auggauauccugcagauua

SEQ ID NO: 221826 - RNA, 19 nt, Homo sapiens
  misc_RNA (1)...(19): siRNA sense strand
uguaacaucugcaaagagu

SEQ ID NO: 221827 - RNA, 19 nt, Homo sapiens
  misc_RNA (1)...(19): siRNA sense strand
guccggagcugcuuccaau

SEQ ID NO: 221828 - RNA, 19 nt, Homo sapiens
  misc_RNA (1)...(19): siRNA sense strand
gcaaguggcaaguucaaca

SEQ ID NO: 221829 - RNA, 19 nt, Homo sapiens
  misc_RNA (1)...(19): siRNA sense strand
gcuuccaauuugcuaauaa

SEQ ID NO: 221830 - RNA, 19 nt, Homo sapiens
  misc_RNA (1)...(19): siRNA sense strand
uggaagacaaguacagaua

SEQ ID NO: 221831 - RNA, 19 nt, Homo sapiens
  misc_RNA (1)...(19): siRNA sense strand
ggauccguguccugucuuu

SEQ ID NO: 221832 - RNA, 19 nt, Homo sapiens
  misc_RNA (1)...(19): siRNA sense strand
gucuuuagcugaccugaau

SEQ ID NO: 221833 - RNA, 19 nt, Homo sapiens
  misc_RNA (1)...(19): siRNA sense strand
gacaaguacagauaccuuu

SEQ ID NO: 221834 - RNA, 19 nt, Homo sapiens
  misc_RNA (1)...(19): siRNA sense strand
ccaagcaucaggccaaaug

SEQ ID NO: 221835 - RNA, 19 nt, Homo sapiens
  misc_RNA (1)...(19): siRNA sense strand
ggagcaagagcacaacaau

SEQ ID NO: 221836 - RNA, 19 nt, Homo sapiens
  misc_RNA (1)...(19): siRNA sense strand
guguaaagcacauuuggaa

SEQ ID NO: 221837 - RNA, 19 nt, Homo sapiens
  misc_RNA (1)...(19): siRNA sense strand
caagacaguugggugaagu

SEQ ID NO: 221838 - RNA, 19 nt, Homo sapiens
  misc_RNA (1)...(19): siRNA sense strand
gaagauguucgagacuuug

SEQ ID NO: 221839 - RNA, 19 nt, Homo sapiens
  misc_RNA (1)...(19): siRNA sense strand
gucagauucucagcuuaua

SEQ ID NO: 221840 - RNA, 19 nt, Homo sapiens
  misc_RNA (1)...(19): siRNA sense strand
uaacaucugcaaagagugu

SEQ ID NO: 221841 - RNA, 19 nt, Homo sapiens
  misc_RNA (1)...(19): siRNA sense strand
cggagcugcuuccaauuug

SEQ ID NO: 221842 - RNA, 19 nt, Homo sapiens
  misc_RNA (1)...(19): siRNA sense strand
gaagacaaguacagauacc

SEQ ID NO: 221843 - RNA, 19 nt, Homo sapiens
  misc_RNA (1)...(19): siRNA sense strand
ccauggauauccugcagau

SEQ ID NO: 221844 - RNA, 19 nt, Homo sapiens
  misc_RNA (1)...(19): siRNA sense strand
ggcaucauuucccugugua

SEQ ID NO: 221845 - RNA, 19 nt, Homo sapiens
  misc_RNA (1)...(19): siRNA sense strand
uggauauccugcagauuau

SEQ ID NO: 221846 - RNA, 19 nt, Homo sapiens
  misc_RNA (1)...(19): siRNA sense strand
ggaagacaaguacagauac

SEQ ID NO: 221847 - RNA, 19 nt, Homo sapiens
  misc_RNA (1)...(19): siRNA sense strand
ugcaaagaguguccaauca

SEQ ID NO: 221848 - RNA, 19 nt, Homo sapiens
  misc_RNA (1)...(19): siRNA sense strand
guggauaugugucugaacu

SEQ ID NO: 221849 - RNA, 19 nt, Homo sapiens
  misc_RNA (1)...(19): siRNA sense strand
acuggcugcugaauguuua

SEQ ID NO: 221850 - RNA, 19 nt, Homo sapiens
  misc_RNA (1)...(19): siRNA sense strand
acuaucccaugguggaaua

SEQ ID NO: 221851 - RNA, 19 nt, Homo sapiens
  misc_RNA (1)...(19): siRNA sense strand
ccggagcugcuuccaauuu

SEQ ID NO: 221852 - RNA, 19 nt, Homo sapiens
  misc_RNA (1)...(19): siRNA sense strand
ccaaauuccaagacaguug

SEQ ID NO: 221853 - RNA, 19 nt, Homo sapiens
  misc_RNA (1)...(19): siRNA sense strand
cagaaacugccaagcauca

SEQ ID NO: 221854 - RNA, 19 nt, Homo sapiens
  misc_RNA (1)...(19): siRNA sense strand
uaugacaucugccaaagcu

SEQ ID NO: 221855 - RNA, 19 nt, Homo sapiens
  misc_RNA (1)...(19): siRNA sense strand
aaugucagauucucagcuu

SEQ ID NO: 221856 - RNA, 19 nt, Homo sapiens
  misc_RNA (1)...(19): siRNA sense strand
ucgagacuuugccaaggua

SEQ ID NO: 221857 - RNA, 19 nt, Homo sapiens
  misc_RNA (1)...(19): siRNA sense strand
gcaaaaggccauaaaaugc

SEQ ID NO: 221858 - RNA, 19 nt, Homo sapiens
  misc_RNA (1)...(19): siRNA sense strand
cugcaugauucuauccaaa

SEQ ID NO: 221859 - RNA, 19 nt, Homo sapiens
  misc_RNA (1)...(19): siRNA sense strand
uaaagcacauuuggaagac

SEQ ID NO: 221860 - RNA, 19 nt, Homo sapiens
  misc_RNA (1)...(19): siRNA sense strand
acaggagucuaaagcacuu

SEQ ID NO: 221861 - RNA, 19 nt, Homo sapiens
  misc_RNA (1)...(19): siRNA sense strand
acagauaccuuuucaagca

SEQ ID NO: 221862 - RNA, 19 nt, Homo sapiens
  misc_RNA (1)...(19): siRNA sense strand
aagcacauuuggaagacaa

SEQ ID NO: 221863 - RNA, 19 nt, Homo sapiens
  misc_RNA (1)...(19): siRNA sense strand
gcuaauaauaagccagaga

SEQ ID NO: 221864 - RNA, 19 nt, Homo sapiens
  misc_RNA (1)...(19): siRNA sense strand
caagagcacaacaauuugg

SEQ ID NO: 221865 - RNA, 19 nt, Homo sapiens
  misc_RNA (1)...(19): siRNA sense strand
ccugucagcugcaugugau

SEQ ID NO: 221866 - RNA, 19 nt, Homo sapiens
  misc_RNA (1)...(19): siRNA sense strand
gcugcugaauguuuaugau

SEQ ID NO: 221867 - RNA, 19 nt, Homo sapiens
  misc_RNA (1)...(19): siRNA sense strand
acagagcucuaccagucuu

SEQ ID NO: 221868 - RNA, 19 nt, Homo sapiens
  misc_RNA (1)...(19): siRNA sense strand
acaguugggugaaguugca

SEQ ID NO: 221869 - RNA, 19 nt, Homo sapiens
  misc_RNA (1)...(19): siRNA sense strand
guuugaccacuauuuauga

SEQ ID NO: 221870 - RNA, 19 nt, Homo sapiens
  misc_RNA (1)...(19): siRNA sense strand
gcuuauaggacugccauga

SEQ ID NO: 221871 - RNA, 19 nt, Homo sapiens
  misc_RNA (1)...(19): siRNA sense strand
caucaggccaaauguaaca

SEQ ID NO: 221872 - RNA, 19 nt, Homo sapiens
  misc_RNA (1)...(19): siRNA sense strand
gauucuauccaaauuccaa

SEQ ID NO: 221873 - RNA, 19 nt, Homo sapiens
  misc_RNA (1)...(19): siRNA sense strand
ggcaaguucaacaggauuu

SEQ ID NO: 221874 - RNA, 19 nt, Homo sapiens
  misc_RNA (1)...(19): siRNA sense strand
gaacuggcugcugaauguu

SEQ ID NO: 221875 - RNA, 19 nt, Homo sapiens
  misc_RNA (1)...(19): siRNA sense strand
cugcugaauguuuaugaua

SEQ ID NO: 221876 - RNA, 19 nt, Homo sapiens
  misc_RNA (1)...(19): siRNA sense strand
aagcaucaggccaaaugua

SEQ ID NO: 221877 - RNA, 19 nt, Homo sapiens
  misc_RNA (1)...(19): siRNA sense strand
uggcaucauuucccugugu

SEQ ID NO: 221878 - RNA, 19 nt, Homo sapiens
  misc_RNA (1)...(19): siRNA sense strand
ccaugaaacuccgaagacu

SEQ ID NO: 221879 - RNA, 19 nt, Homo sapiens
  misc_RNA (1)...(19): siRNA sense strand
auaauaagccagagaucga

SEQ ID NO: 221880 - RNA, 19 nt, Homo sapiens
  misc_RNA (1)...(19): siRNA sense strand
cuaauaauaagccagagau

SEQ ID NO: 221881 - RNA, 19 nt, Homo sapiens
  misc_RNA (1)...(19): siRNA sense strand
ugggugaaguugcauccuu

SEQ ID NO: 221882 - RNA, 19 nt, Homo sapiens
  misc_RNA (1)...(19): siRNA sense strand
caucauuucccuguguaaa

SEQ ID NO: 221883 - RNA, 19 nt, Homo sapiens
  misc_RNA (1)...(19): siRNA sense strand
gcguggauaugugucugaa

SEQ ID NO: 221884 - RNA, 19 nt, Homo sapiens
  misc_RNA (1)...(19): siRNA sense strand
gcacuaucccaugguggaa

SEQ ID NO: 221885 - RNA, 19 nt, Homo sapiens
  misc_RNA (1)...(19): siRNA sense strand
gagccugucagcugcaugu

SEQ ID NO: 221886 - RNA, 19 nt, Homo sapiens
  misc_RNA (1)...(19): siRNA sense strand
guacagauaccuuuucaag

SEQ ID NO: 221887 - RNA, 19 nt, Homo sapiens
  misc_RNA (1)...(19): siRNA sense strand
gucccucucugcguggaua

SEQ ID NO: 221888 - RNA, 19 nt, Homo sapiens
  misc_RNA (1)...(19): siRNA sense strand
ggagcugcuuccaauuugc

SEQ ID NO: 221889 - RNA, 19 nt, Homo sapiens
  misc_RNA (1)...(19): siRNA sense strand
uuagcugaccugaauaaug

SEQ ID NO: 221890 - RNA, 19 nt, Homo sapiens
  misc_RNA (1)...(19): siRNA sense strand
guggcaaguucaacaggau

SEQ ID NO: 221891 - RNA, 19 nt, Homo sapiens
  misc_RNA (1)...(19): siRNA sense strand
acaacaauuuggucaacgu

SEQ ID NO: 221892 - RNA, 19 nt, Homo sapiens
  misc_RNA (1)...(19): siRNA sense strand
gacuacaucaggagaagau

SEQ ID NO: 221893 - RNA, 19 nt, Homo sapiens
  misc_RNA (1)...(19): siRNA sense strand
uaauaagccagagaucgaa

SEQ ID NO: 221894 - RNA, 19 nt, Homo sapiens
  misc_RNA (1)...(19): siRNA sense strand
ugucagauucucagcuuau

SEQ ID NO: 221895 - RNA, 19 nt, Homo sapiens
  misc_RNA (1)...(19): siRNA sense strand
ggauauccugcagauuauu

SEQ ID NO: 221896 - RNA, 19 nt, Homo sapiens
  misc_RNA (1)...(19): siRNA sense strand
agcaucaggccaaauguaa

SEQ ID NO: 221897 - RNA, 19 nt, Homo sapiens
  misc_RNA (1)...(19): siRNA sense strand
gcccuuugcuuggaucucu

SEQ ID NO: 221898 - RNA, 19 nt, Homo sapiens
  misc_RNA (1)...(19): siRNA sense strand
gcugaauguuuaugauacg

SEQ ID NO: 221899 - RNA, 19 nt, Homo sapiens
  misc_RNA (1)...(19): siRNA sense strand
agacuuugccaagguacua

SEQ ID NO: 221900 - RNA, 19 nt, Homo sapiens
  misc_RNA (1)...(19): siRNA sense strand
caagcaaguggcaaguuca

SEQ ID NO: 221901 - RNA, 19 nt, Homo sapiens
  misc_RNA (1)...(19): siRNA sense strand
agacaaguacagauaccuu

SEQ ID NO: 221902 - RNA, 19 nt, Homo sapiens
  misc_RNA (1)...(19): siRNA sense strand
gcaucauuucccuguguaa

SEQ ID NO: 221903 - RNA, 19 nt, Homo sapiens
  misc_RNA (1)...(19): siRNA sense strand
cugcaaagaguguccaauc

SEQ ID NO: 221904 - RNA, 19 nt, Homo sapiens
  misc_RNA (1)...(19): siRNA sense strand
cuuauaggacugccaugaa

SEQ ID NO: 221905 - RNA, 19 nt, Homo sapiens
  misc_RNA (1)...(19): siRNA sense strand
caaagaguguccaaucauu

SEQ ID NO: 221906 - RNA, 19 nt, Homo sapiens
  misc_RNA (1)...(19): siRNA sense strand
uagcugaccugaauaaugu

SEQ ID NO: 221907 - RNA, 19 nt, Homo sapiens
  misc_RNA (1)...(19): siRNA sense strand
gcaugauucuauccaaauu

SEQ ID NO: 221908 - RNA, 19 nt, Homo sapiens
  misc_RNA (1)...(19): siRNA sense strand
ugaacuggcugcugaaugu

SEQ ID NO: 221909 - RNA, 19 nt, Homo sapiens
  misc_RNA (1)...(19): siRNA sense strand
gauauccugcagauuauua

SEQ ID NO: 221910 - RNA, 19 nt, Homo sapiens
  misc_RNA (1)...(19): siRNA sense strand
gagaagauguucgagacuu

SEQ ID NO: 221911 - RNA, 19 nt, Homo sapiens
  misc_RNA (1)...(19): siRNA sense strand
gcacuuuaauuaugacauc

SEQ ID NO: 221912 - RNA, 19 nt, Homo sapiens
  misc_RNA (1)...(19): siRNA sense strand
guaaagcacauuuggaaga

SEQ ID NO: 221913 - RNA, 19 nt, Homo sapiens
  misc_RNA (1)...(19): siRNA sense strand
gaauauugcacuccgacua

SEQ ID NO: 221914 - RNA, 19 nt, Homo sapiens
  misc_RNA (1)...(19): siRNA sense strand
uuauaggacugccaugaaa

SEQ ID NO: 221915 - RNA, 19 nt, Homo sapiens
  misc_RNA (1)...(19): siRNA sense strand
gggugaaguugcauccuuu

SEQ ID NO: 221916 - RNA, 19 nt, Homo sapiens
  misc_RNA (1)...(19): siRNA sense strand
gcaagagcacaacaauuug

SEQ ID NO: 221917 - RNA, 19 nt, Homo sapiens
  misc_RNA (1)...(19): siRNA sense strand
gcacaacaauuuggucaac

SEQ ID NO: 221918 - RNA, 19 nt, Homo sapiens
  misc_RNA (1)...(19): siRNA sense strand
agcaagagcacaacaauuu

SEQ ID NO: 221919 - RNA, 19 nt, Homo sapiens
  misc_RNA (1)...(19): siRNA sense strand
agaagauguucgagacuuu

SEQ ID NO: 221920 - RNA, 19 nt, Homo sapiens
  misc_RNA (1)...(19): siRNA sense strand
gagcaagagcacaacaauu

SEQ ID NO: 221921 - RNA, 19 nt, Homo sapiens
  misc_RNA (1)...(19): siRNA sense strand
ucaagcaaguggcaaguuc

SEQ ID NO: 221922 - RNA, 19 nt, Homo sapiens
  misc_RNA (1)...(19): siRNA sense strand
ccacgagacucaaacaacu

SEQ ID NO: 221923 - RNA, 19 nt, Homo sapiens
  misc_RNA (1)...(19): siRNA sense strand
cagcacaaccucaagcaaa

SEQ ID NO: 221924 - RNA, 19 nt, Homo sapiens
  misc_RNA (1)...(19): siRNA sense strand
gcaaagaguguccaaucau

SEQ ID NO: 221925 - RNA, 19 nt, Homo sapiens
  misc_RNA (1)...(19): siRNA sense strand
auggauauccugcagauua

SEQ ID NO: 221926 - RNA, 19 nt, Homo sapiens
  misc_RNA (1)...(19): siRNA sense strand
uguaacaucugcaaagagu

SEQ ID NO: 221927 - RNA, 19 nt, Homo sapiens
  misc_RNA (1)...(19): siRNA sense strand
guccggagcugcuuccaau

SEQ ID NO: 221928 - RNA, 19 nt, Homo sapiens
  misc_RNA (1)...(19): siRNA sense strand
gcaaguggcaaguucaaca

SEQ ID NO: 221929 - RNA, 19 nt, Homo sapiens
  misc_RNA (1)...(19): siRNA sense strand
gcuuccaauuugcuaauaa

SEQ ID NO: 221930 - RNA, 19 nt, Homo sapiens
  misc_RNA (1)...(19): siRNA sense strand
uggaagacaaguacagaua

SEQ ID NO: 221931 - RNA, 19 nt, Homo sapiens
  misc_RNA (1)...(19): siRNA sense strand
ggauccguguccugucuuu

SEQ ID NO: 221932 - RNA, 19 nt, Homo sapiens
  misc_RNA (1)...(19): siRNA sense strand
gucuuuagcugaccugaau

SEQ ID NO: 221933 - RNA, 19 nt, Homo sapiens
  misc_RNA (1)...(19): siRNA sense strand
gacaaguacagauaccuuu

SEQ ID NO: 221934 - RNA, 19 nt, Homo sapiens
  misc_RNA (1)...(19): siRNA sense strand
ccaagcaucaggccaaaug

SEQ ID NO: 221935 - RNA, 19 nt, Homo sapiens
  misc_RNA (1)...(19): siRNA sense strand
ggagcaagagcacaacaau

SEQ ID NO: 221936 - RNA, 19 nt, Homo sapiens
  misc_RNA (1)...(19): siRNA sense strand
guguaaagcacauuuggaa

SEQ ID NO: 221937 - RNA, 19 nt, Homo sapiens
  misc_RNA (1)...(19): siRNA sense strand
caagacaguugggugaagu

SEQ ID NO: 221938 - RNA, 19 nt, Homo sapiens
  misc_RNA (1)...(19): siRNA sense strand
gaagauguucgagacuuug

SEQ ID NO: 221939 - RNA, 19 nt, Homo sapiens
  misc_RNA (1)...(19): siRNA sense strand
gucagauucucagcuuaua

SEQ ID NO: 221940 - RNA, 19 nt, Homo sapiens
  misc_RNA (1)...(19): siRNA sense strand
uaacaucugcaaagagugu

SEQ ID NO: 221941 - RNA, 19 nt, Homo sapiens
  misc_RNA (1)...(19): siRNA sense strand
cggagcugcuuccaauuug

SEQ ID NO: 221942 - RNA, 19 nt, Homo sapiens
  misc_RNA (1)...(19): siRNA sense strand
gaagacaaguacagauacc

SEQ ID NO: 221943 - RNA, 19 nt, Homo sapiens
  misc_RNA (1)...(19): siRNA sense strand
ccauggauauccugcagau

SEQ ID NO: 221944 - RNA, 19 nt, Homo sapiens
  misc_RNA (1)...(19): siRNA sense strand
ggcaucauuucccugugua

SEQ ID NO: 221945 - RNA, 19 nt, Homo sapiens
  misc_RNA (1)...(19): siRNA sense strand
uggauauccugcagauuau

SEQ ID NO: 221946 - RNA, 19 nt, Homo sapiens
  misc_RNA (1)...(19): siRNA sense strand
ggaagacaaguacagauac

SEQ ID NO: 221947 - RNA, 19 nt, Homo sapiens
  misc_RNA (1)...(19): siRNA sense strand
ugcaaagaguguccaauca

SEQ ID NO: 221948 - RNA, 19 nt, Homo sapiens
  misc_RNA (1)...(19): siRNA sense strand
guggauaugugucugaacu

SEQ ID NO: 221949 - RNA, 19 nt, Homo sapiens
  misc_RNA (1)...(19): siRNA sense strand
acuggcugcugaauguuua

SEQ ID NO: 221950 - RNA, 19 nt, Homo sapiens
  misc_RNA (1)...(19): siRNA sense strand
acuaucccaugguggaaua

SEQ ID NO: 221951 - RNA, 19 nt, Homo sapiens
  misc_RNA (1)...(19): siRNA sense strand
ccggagcugcuuccaauuu

SEQ ID NO: 221952 - RNA, 19 nt, Homo sapiens
  misc_RNA (1)...(19): siRNA sense strand
ccaaauuccaagacaguug

SEQ ID NO: 221953 - RNA, 19 nt, Homo sapiens
  misc_RNA (1)...(19): siRNA sense strand
cagaaacugccaagcauca

SEQ ID NO: 221954 - RNA, 19 nt, Homo sapiens
  misc_RNA (1)...(19): siRNA sense strand
uaugacaucugccaaagcu

SEQ ID NO: 221955 - RNA, 19 nt, Homo sapiens
  misc_RNA (1)...(19): siRNA sense strand
aaugucagauucucagcuu

SEQ ID NO: 221956 - RNA, 19 nt, Homo sapiens
  misc_RNA (1)...(19): siRNA sense strand
ucgagacuuugccaaggua

SEQ ID NO: 221957 - RNA, 19 nt, Homo sapiens
  misc_RNA (1)...(19): siRNA sense strand
gcaaaaggccauaaaaugc

SEQ ID NO: 221958 - RNA, 19 nt, Homo sapiens
  misc_RNA (1)...(19): siRNA sense strand
cugcaugauucuauccaaa

SEQ ID NO: 221959 - RNA, 19 nt, Homo sapiens
  misc_RNA (1)...(19): siRNA sense strand
uaaagcacauuuggaagac

SEQ ID NO: 221960 - RNA, 19 nt, Homo sapiens
  misc_RNA (1)...(19): siRNA sense strand
acaggagucuaaagcacuu

SEQ ID NO: 221961 - RNA, 19 nt, Homo sapiens
  misc_RNA (1)...(19): siRNA sense strand
acagauaccuuuucaagca

SEQ ID NO: 221962 - RNA, 19 nt, Homo sapiens
  misc_RNA (1)...(19): siRNA sense strand
aagcacauuuggaagacaa

SEQ ID NO: 221963 - RNA, 19 nt, Homo sapiens
  misc_RNA (1)...(19): siRNA sense strand
gcuaauaauaagccagaga

SEQ ID NO: 221964 - RNA, 19 nt, Homo sapiens
  misc_RNA (1)...(19): siRNA sense strand
caagagcacaacaauuugg

SEQ ID NO: 221965 - RNA, 19 nt, Homo sapiens
  misc_RNA (1)...(19): siRNA sense strand
ccugucagcugcaugugau

SEQ ID NO: 221966 - RNA, 19 nt, Homo sapiens
  misc_RNA (1)...(19): siRNA sense strand
gcugcugaauguuuaugau

SEQ ID NO: 221967 - RNA, 19 nt, Homo sapiens
  misc_RNA (1)...(19): siRNA sense strand
acagagcucuaccagucuu

SEQ ID NO: 221968 - RNA, 19 nt, Homo sapiens
  misc_RNA (1)...(19): siRNA sense strand
acaguugggugaaguugca

SEQ ID NO: 221969 - RNA, 19 nt, Homo sapiens
  misc_RNA (1)...(19): siRNA sense strand
guuugaccacuauuuauga

SEQ ID NO: 221970 - RNA, 19 nt, Homo sapiens
  misc_RNA (1)...(19): siRNA sense strand
gcuuauaggacugccauga

SEQ ID NO: 221971 - RNA, 19 nt, Homo sapiens
  misc_RNA (1)...(19): siRNA sense strand
caucaggccaaauguaaca

SEQ ID NO: 221972 - RNA, 19 nt, Homo sapiens
  misc_RNA (1)...(19): siRNA sense strand
gauucuauccaaauuccaa

SEQ ID NO: 221973 - RNA, 19 nt, Homo sapiens
  misc_RNA (1)...(19): siRNA sense strand
ggcaaguucaacaggauuu

SEQ ID NO: 221974 - RNA, 19 nt, Homo sapiens
  misc_RNA (1)...(19): siRNA sense strand
gaacuggcugcugaauguu

SEQ ID NO: 221975 - RNA, 19 nt, Homo sapiens
  misc_RNA (1)...(19): siRNA sense strand
cugcugaauguuuaugaua

SEQ ID NO: 221976 - RNA, 19 nt, Homo sapiens
  misc_RNA (1)...(19): siRNA sense strand
aagcaucaggccaaaugua

SEQ ID NO: 221977 - RNA, 19 nt, Homo sapiens
  misc_RNA (1)...(19): siRNA sense strand
uggcaucauuucccugugu

SEQ ID NO: 221978 - RNA, 19 nt, Homo sapiens
  misc_RNA (1)...(19): siRNA sense strand
ccaugaaacuccgaagacu

SEQ ID NO: 221979 - RNA, 19 nt, Homo sapiens
  misc_RNA (1)...(19): siRNA sense strand
auaauaagccagagaucga

SEQ ID NO: 221980 - RNA, 19 nt, Homo sapiens
  misc_RNA (1)...(19): siRNA sense strand
cuaauaauaagccagagau

SEQ ID NO: 221981 - RNA, 19 nt, Homo sapiens
  misc_RNA (1)...(19): siRNA sense strand
ugggugaaguugcauccuu

SEQ ID NO: 221982 - RNA, 19 nt, Homo sapiens
  misc_RNA (1)...(19): siRNA sense strand
caucauuucccuguguaaa

SEQ ID NO: 221983 - RNA, 19 nt, Homo sapiens
  misc_RNA (1)...(19): siRNA sense strand
gcguggauaugugucugaa

SEQ ID NO: 221984 - RNA, 19 nt, Homo sapiens
  misc_RNA (1)...(19): siRNA sense strand
gcacuaucccaugguggaa

SEQ ID NO: 221985 - RNA, 19 nt, Homo sapiens
  misc_RNA (1)...(19): siRNA sense strand
gagccugucagcugcaugu

SEQ ID NO: 221986 - RNA, 19 nt, Homo sapiens
  misc_RNA (1)...(19): siRNA sense strand
guacagauaccuuuucaag

SEQ ID NO: 221987 - RNA, 19 nt, Homo sapiens
  misc_RNA (1)...(19): siRNA sense strand
gucccucucugcguggaua

SEQ ID NO: 221988 - RNA, 19 nt, Homo sapiens
  misc_RNA (1)...(19): siRNA sense strand
ggagcugcuuccaauuugc

SEQ ID NO: 221989 - RNA, 19 nt, Homo sapiens
  misc_RNA (1)...(19): siRNA sense strand
uuagcugaccugaauaaug

SEQ ID NO: 221990 - RNA, 19 nt, Homo sapiens
  misc_RNA (1)...(19): siRNA sense strand
guggcaaguucaacaggau

SEQ ID NO: 221991 - RNA, 19 nt, Homo sapiens
  misc_RNA (1)...(19): siRNA sense strand
acaacaauuuggucaacgu

SEQ ID NO: 221992 - RNA, 19 nt, Homo sapiens
  misc_RNA (1)...(19): siRNA sense strand
gacuacaucaggagaagau

SEQ ID NO: 221993 - RNA, 19 nt, Homo sapiens
  misc_RNA (1)...(19): siRNA sense strand
uaauaagccagagaucgaa

SEQ ID NO: 221994 - RNA, 19 nt, Homo sapiens
  misc_RNA (1)...(19): siRNA sense strand
ugucagauucucagcuuau

SEQ ID NO: 221995 - RNA, 19 nt, Homo sapiens
  misc_RNA (1)...(19): siRNA sense strand
ggauauccugcagauuauu

SEQ ID NO: 221996 - RNA, 19 nt, Homo sapiens
  misc_RNA (1)...(19): siRNA sense strand
agcaucaggccaaauguaa

SEQ ID NO: 221997 - RNA, 19 nt, Homo sapiens
  misc_RNA (1)...(19): siRNA sense strand
gcccuuugcuuggaucucu

SEQ ID NO: 221998 - RNA, 19 nt, Homo sapiens
  misc_RNA (1)...(19): siRNA sense strand
gcugaauguuuaugauacg

SEQ ID NO: 221999 - RNA, 19 nt, Homo sapiens
  misc_RNA (1)...(19): siRNA sense strand
agacuuugccaagguacua

SEQ ID NO: 222000 - RNA, 19 nt, Homo sapiens
  misc_RNA (1)...(19): siRNA sense strand
caagcaaguggcaaguuca

SEQ ID NO: 222001 - RNA, 19 nt, Homo sapiens
  misc_RNA (1)...(19): siRNA sense strand
agacaaguacagauaccuu

SEQ ID NO: 222002 - RNA, 19 nt, Homo sapiens
  misc_RNA (1)...(19): siRNA sense strand
gcaucauuucccuguguaa

SEQ ID NO: 222003 - RNA, 19 nt, Homo sapiens
  misc_RNA (1)...(19): siRNA sense strand
cugcaaagaguguccaauc

SEQ ID NO: 222004 - RNA, 19 nt, Homo sapiens
  misc_RNA (1)...(19): siRNA sense strand
cuuauaggacugccaugaa

SEQ ID NO: 222005 - RNA, 19 nt, Homo sapiens
  misc_RNA (1)...(19): siRNA sense strand
caaagaguguccaaucauu

SEQ ID NO: 222006 - RNA, 19 nt, Homo sapiens
  misc_RNA (1)...(19): siRNA sense strand
uagcugaccugaauaaugu

SEQ ID NO: 222007 - RNA, 19 nt, Homo sapiens
  misc_RNA (1)...(19): siRNA sense strand
gcaugauucuauccaaauu

SEQ ID NO: 222008 - RNA, 19 nt, Homo sapiens
  misc_RNA (1)...(19): siRNA sense strand
ugaacuggcugcugaaugu

SEQ ID NO: 222009 - RNA, 19 nt, Homo sapiens
  misc_RNA (1)...(19): siRNA sense strand
gauauccugcagauuauua

SEQ ID NO: 222010 - RNA, 19 nt, Homo sapiens
  misc_RNA (1)...(19): siRNA sense strand
gagaagauguucgagacuu

SEQ ID NO: 222011 - RNA, 19 nt, Homo sapiens
  misc_RNA (1)...(19): siRNA sense strand
gcacuuuaauuaugacauc

SEQ ID NO: 222012 - RNA, 19 nt, Homo sapiens
  misc_RNA (1)...(19): siRNA sense strand
guaaagcacauuuggaaga

SEQ ID NO: 222013 - RNA, 19 nt, Homo sapiens
  misc_RNA (1)...(19): siRNA sense strand
gaauauugcacuccgacua

SEQ ID NO: 222014 - RNA, 19 nt, Homo sapiens
  misc_RNA (1)...(19): siRNA sense strand
uuauaggacugccaugaaa

SEQ ID NO: 222015 - RNA, 19 nt, Homo sapiens
  misc_RNA (1)...(19): siRNA sense strand
gggugaaguugcauccuuu

SEQ ID NO: 222016 - RNA, 19 nt, Homo sapiens
  misc_RNA (1)...(19): siRNA sense strand
gcaagagcacaacaauuug

SEQ ID NO: 222017 - RNA, 19 nt, Homo sapiens
  misc_RNA (1)...(19): siRNA sense strand
gcacaacaauuuggucaac

SEQ ID NO: 222018 - RNA, 19 nt, Homo sapiens
  misc_RNA (1)...(19): siRNA sense strand
agcaagagcacaacaauuu

SEQ ID NO: 222019 - RNA, 19 nt, Homo sapiens
  misc_RNA (1)...(19): siRNA sense strand
agaagauguucgagacuuu

SEQ ID NO: 222020 - RNA, 19 nt, Homo sapiens
  misc_RNA (1)...(19): siRNA sense strand
gagcaagagcacaacaauu

SEQ ID NO: 222021 - RNA, 19 nt, Homo sapiens
  misc_RNA (1)...(19): siRNA sense strand
ucaagcaaguggcaaguuc

SEQ ID NO: 222022 - RNA, 19 nt, Homo sapiens
  misc_RNA (1)...(19): siRNA sense strand
ccacgagacucaaacaacu

SEQ ID NO: 222023 - RNA, 19 nt, Homo sapiens
  misc_RNA (1)...(19): siRNA sense strand
cagcacaaccucaagcaaa

SEQ ID NO: 222024 - RNA, 19 nt, Homo sapiens
  misc_RNA (1)...(19): siRNA sense strand
gcaaagaguguccaaucau

SEQ ID NO: 222025 - RNA, 19 nt, Homo sapiens
  misc_RNA (1)...(19): siRNA sense strand
auggauauccugcagauua

SEQ ID NO: 222026 - RNA, 19 nt, Homo sapiens
  misc_RNA (1)...(19): siRNA sense strand
uguaacaucugcaaagagu

SEQ ID NO: 222027 - RNA, 19 nt, Homo sapiens
  misc_RNA (1)...(19): siRNA sense strand
guccggagcugcuuccaau

SEQ ID NO: 222028 - RNA, 19 nt, Homo sapiens
  misc_RNA (1)...(19): siRNA sense strand
gcaaguggcaaguucaaca

SEQ ID NO: 222029 - RNA, 19 nt, Homo sapiens
  misc_RNA (1)...(19): siRNA sense strand
gcuuccaauuugcuaauaa

SEQ ID NO: 222030 - RNA, 19 nt, Homo sapiens
  misc_RNA (1)...(19): siRNA sense strand
uggaagacaaguacagaua

SEQ ID NO: 222031 - RNA, 19 nt, Homo sapiens
  misc_RNA (1)...(19): siRNA sense strand
ggauccguguccugucuuu

SEQ ID NO: 222032 - RNA, 19 nt, Homo sapiens
  misc_RNA (1)...(19): siRNA sense strand
gucuuuagcugaccugaau

SEQ ID NO: 222033 - RNA, 19 nt, Homo sapiens
  misc_RNA (1)...(19): siRNA sense strand
gacaaguacagauaccuuu

SEQ ID NO: 222034 - RNA, 19 nt, Homo sapiens
  misc_RNA (1)...(19): siRNA sense strand
ccaagcaucaggccaaaug

SEQ ID NO: 222035 - RNA, 19 nt, Homo sapiens
  misc_RNA (1)...(19): siRNA sense strand
ggagcaagagcacaacaau

SEQ ID NO: 222036 - RNA, 19 nt, Homo sapiens
  misc_RNA (1)...(19): siRNA sense strand
guguaaagcacauuuggaa

SEQ ID NO: 222037 - RNA, 19 nt, Homo sapiens
  misc_RNA (1)...(19): siRNA sense strand
caagacaguugggugaagu

SEQ ID NO: 222038 - RNA, 19 nt, Homo sapiens
  misc_RNA (1)...(19): siRNA sense strand
gaagauguucgagacuuug

SEQ ID NO: 222039 - RNA, 19 nt, Homo sapiens
  misc_RNA (1)...(19): siRNA sense strand
gucagauucucagcuuaua

SEQ ID NO: 222040 - RNA, 19 nt, Homo sapiens
  misc_RNA (1)...(19): siRNA sense strand
uaacaucugcaaagagugu

SEQ ID NO: 222041 - RNA, 19 nt, Homo sapiens
  misc_RNA (1)...(19): siRNA sense strand
cggagcugcuuccaauuug

SEQ ID NO: 222042 - RNA, 19 nt, Homo sapiens
  misc_RNA (1)...(19): siRNA sense strand
gaagacaaguacagauacc

SEQ ID NO: 222043 - RNA, 19 nt, Homo sapiens
  misc_RNA (1)...(19): siRNA sense strand
ccauggauauccugcagau

SEQ ID NO: 222044 - RNA, 19 nt, Homo sapiens
  misc_RNA (1)...(19): siRNA sense strand
ggcaucauuucccugugua

SEQ ID NO: 222045 - RNA, 19 nt, Homo sapiens
  misc_RNA (1)...(19): siRNA sense strand
uggauauccugcagauuau

SEQ ID NO: 222046 - RNA, 19 nt, Homo sapiens
  misc_RNA (1)...(19): siRNA sense strand
ggaagacaaguacagauac

SEQ ID NO: 222047 - RNA, 19 nt, Homo sapiens
  misc_RNA (1)...(19): siRNA sense strand
ugcaaagaguguccaauca

SEQ ID NO: 222048 - RNA, 19 nt, Homo sapiens
  misc_RNA (1)...(19): siRNA sense strand
guggauaugugucugaacu

SEQ ID NO: 222049 - RNA, 19 nt, Homo sapiens
  misc_RNA (1)...(19): siRNA sense strand
acuggcugcugaauguuua

SEQ ID NO: 222050 - RNA, 19 nt, Homo sapiens
  misc_RNA (1)...(19): siRNA sense strand
acuaucccaugguggaaua

SEQ ID NO: 222051 - RNA, 19 nt, Homo sapiens
  misc_RNA (1)...(19): siRNA sense strand
ccggagcugcuuccaauuu

SEQ ID NO: 222052 - RNA, 19 nt, Homo sapiens
  misc_RNA (1)...(19): siRNA sense strand
ccaaauuccaagacaguug

SEQ ID NO: 222053 - RNA, 19 nt, Homo sapiens
  misc_RNA (1)...(19): siRNA sense strand
cagaaacugccaagcauca

SEQ ID NO: 222054 - RNA, 19 nt, Homo sapiens
  misc_RNA (1)...(19): siRNA sense strand
uaugacaucugccaaagcu

SEQ ID NO: 222055 - RNA, 19 nt, Homo sapiens
  misc_RNA (1)...(19): siRNA sense strand
aaugucagauucucagcuu

SEQ ID NO: 222056 - RNA, 19 nt, Homo sapiens
  misc_RNA (1)...(19): siRNA sense strand
ucgagacuuugccaaggua

SEQ ID NO: 222057 - RNA, 19 nt, Homo sapiens
  misc_RNA (1)...(19): siRNA sense strand
gcaaaaggccauaaaaugc

SEQ ID NO: 222058 - RNA, 19 nt, Homo sapiens
  misc_RNA (1)...(19): siRNA sense strand
cugcaugauucuauccaaa

SEQ ID NO: 222059 - RNA, 19 nt, Homo sapiens
  misc_RNA (1)...(19): siRNA sense strand
uaaagcacauuuggaagac

SEQ ID NO: 222060 - RNA, 19 nt, Homo sapiens
  misc_RNA (1)...(19): siRNA sense strand
acaggagucuaaagcacuu

SEQ ID NO: 222061 - RNA, 19 nt, Homo sapiens
  misc_RNA (1)...(19): siRNA sense strand
acagauaccuuuucaagca

SEQ ID NO: 222062 - RNA, 19 nt, Homo sapiens
  misc_RNA (1)...(19): siRNA sense strand
aagcacauuuggaagacaa

SEQ ID NO: 222063 - RNA, 19 nt, Homo sapiens
  misc_RNA (1)...(19): siRNA sense strand
gcuaauaauaagccagaga

SEQ ID NO: 222064 - RNA, 19 nt, Homo sapiens
  misc_RNA (1)...(19): siRNA sense strand
caagagcacaacaauuugg

SEQ ID NO: 222065 - RNA, 19 nt, Homo sapiens
  misc_RNA (1)...(19): siRNA sense strand
ccugucagcugcaugugau

SEQ ID NO: 222066 - RNA, 19 nt, Homo sapiens
  misc_RNA (1)...(19): siRNA sense strand
gcugcugaauguuuaugau

SEQ ID NO: 222067 - RNA, 19 nt, Homo sapiens
  misc_RNA (1)...(19): siRNA sense strand
acagagcucuaccagucuu

SEQ ID NO: 222068 - RNA, 19 nt, Homo sapiens
  misc_RNA (1)...(19): siRNA sense strand
acaguugggugaaguugca

SEQ ID NO: 222069 - RNA, 19 nt, Homo sapiens
  misc_RNA (1)...(19): siRNA sense strand
guuugaccacuauuuauga

SEQ ID NO: 222070 - RNA, 19 nt, Homo sapiens
  misc_RNA (1)...(19): siRNA sense strand
gcuuauaggacugccauga

SEQ ID NO: 222071 - RNA, 19 nt, Homo sapiens
  misc_RNA (1)...(19): siRNA sense strand
caucaggccaaauguaaca

SEQ ID NO: 222072 - RNA, 19 nt, Homo sapiens
  misc_RNA (1)...(19): siRNA sense strand
gauucuauccaaauuccaa

SEQ ID NO: 222073 - RNA, 19 nt, Homo sapiens
  misc_RNA (1)...(19): siRNA sense strand
ggcaaguucaacaggauuu

SEQ ID NO: 222074 - RNA, 19 nt, Homo sapiens
  misc_RNA (1)...(19): siRNA sense strand
gaacuggcugcugaauguu

SEQ ID NO: 222075 - RNA, 19 nt, Homo sapiens
  misc_RNA (1)...(19): siRNA sense strand
cugcugaauguuuaugaua

SEQ ID NO: 222076 - RNA, 19 nt, Homo sapiens
  misc_RNA (1)...(19): siRNA sense strand
aagcaucaggccaaaugua

SEQ ID NO: 222077 - RNA, 19 nt, Homo sapiens
  misc_RNA (1)...(19): siRNA sense strand
uggcaucauuucccugugu

SEQ ID NO: 222078 - RNA, 19 nt, Homo sapiens
  misc_RNA (1)...(19): siRNA sense strand
ccaugaaacuccgaagacu

SEQ ID NO: 222079 - RNA, 19 nt, Homo sapiens
  misc_RNA (1)...(19): siRNA sense strand
auaauaagccagagaucga

SEQ ID NO: 222080 - RNA, 19 nt, Homo sapiens
  misc_RNA (1)...(19): siRNA sense strand
cuaauaauaagccagagau

SEQ ID NO: 222081 - RNA, 19 nt, Homo sapiens
  misc_RNA (1)...(19): siRNA sense strand
ugggugaaguugcauccuu

SEQ ID NO: 222082 - RNA, 19 nt, Homo sapiens
  misc_RNA (1)...(19): siRNA sense strand
caucauuucccuguguaaa

SEQ ID NO: 222083 - RNA, 19 nt, Homo sapiens
  misc_RNA (1)...(19): siRNA sense strand
gcguggauaugugucugaa

SEQ ID NO: 222084 - RNA, 19 nt, Homo sapiens
  misc_RNA (1)...(19): siRNA sense strand
gcacuaucccaugguggaa

SEQ ID NO: 222085 - RNA, 19 nt, Homo sapiens
  misc_RNA (1)...(19): siRNA sense strand
gagccugucagcugcaugu

SEQ ID NO: 222086 - RNA, 19 nt, Homo sapiens
  misc_RNA (1)...(19): siRNA sense strand
guacagauaccuuuucaag

SEQ ID NO: 222087 - RNA, 19 nt, Homo sapiens
  misc_RNA (1)...(19): siRNA sense strand
gucccucucugcguggaua

SEQ ID NO: 222088 - RNA, 19 nt, Homo sapiens
  misc_RNA (1)...(19): siRNA sense strand
ggagcugcuuccaauuugc

SEQ ID NO: 222089 - RNA, 19 nt, Homo sapiens
  misc_RNA (1)...(19): siRNA sense strand
uuagcugaccugaauaaug

SEQ ID NO: 222090 - RNA, 19 nt, Homo sapiens
  misc_RNA (1)...(19): siRNA sense strand
guggcaaguucaacaggau

SEQ ID NO: 222091 - RNA, 19 nt, Homo sapiens
  misc_RNA (1)...(19): siRNA sense strand
acaacaauuuggucaacgu

SEQ ID NO: 222092 - RNA, 19 nt, Homo sapiens
  misc_RNA (1)...(19): siRNA sense strand
gacuacaucaggagaagau

SEQ ID NO: 222093 - RNA, 19 nt, Homo sapiens
  misc_RNA (1)...(19): siRNA sense strand
uaauaagccagagaucgaa

SEQ ID NO: 222094 - RNA, 19 nt, Homo sapiens
  misc_RNA (1)...(19): siRNA sense strand
ugucagauucucagcuuau

SEQ ID NO: 222095 - RNA, 19 nt, Homo sapiens
  misc_RNA (1)...(19): siRNA sense strand
ggauauccugcagauuauu

SEQ ID NO: 222096 - RNA, 19 nt, Homo sapiens
  misc_RNA (1)...(19): siRNA sense strand
agcaucaggccaaauguaa

SEQ ID NO: 222097 - RNA, 19 nt, Homo sapiens
  misc_RNA (1)...(19): siRNA sense strand
gcccuuugcuuggaucucu

SEQ ID NO: 222098 - RNA, 19 nt, Homo sapiens
  misc_RNA (1)...(19): siRNA sense strand
gcugaauguuuaugauacg

SEQ ID NO: 222099 - RNA, 19 nt, Homo sapiens
  misc_RNA (1)...(19): siRNA sense strand
agacuuugccaagguacua

SEQ ID NO: 222100 - RNA, 19 nt, Homo sapiens
  misc_RNA (1)...(19): siRNA sense strand
caagcaaguggcaaguuca

SEQ ID NO: 222101 - RNA, 19 nt, Homo sapiens
  misc_RNA (1)...(19): siRNA sense strand
agacaaguacagauaccuu

SEQ ID NO: 222102 - RNA, 19 nt, Homo sapiens
  misc_RNA (1)...(19): siRNA sense strand
gcaucauuucccuguguaa

SEQ ID NO: 222103 - RNA, 19 nt, Homo sapiens
  misc_RNA (1)...(19): siRNA sense strand
cugcaaagaguguccaauc

SEQ ID NO: 222104 - RNA, 19 nt, Homo sapiens
  misc_RNA (1)...(19): siRNA sense strand
cuuauaggacugccaugaa

SEQ ID NO: 222105 - RNA, 19 nt, Homo sapiens
  misc_RNA (1)...(19): siRNA sense strand
caaagaguguccaaucauu

SEQ ID NO: 222106 - RNA, 19 nt, Homo sapiens
  misc_RNA (1)...(19): siRNA sense strand
uagcugaccugaauaaugu

SEQ ID NO: 222107 - RNA, 19 nt, Homo sapiens
  misc_RNA (1)...(19): siRNA sense strand
gcaugauucuauccaaauu

SEQ ID NO: 222108 - RNA, 19 nt, Homo sapiens
  misc_RNA (1)...(19): siRNA sense strand
ugaacuggcugcugaaugu

SEQ ID NO: 222109 - RNA, 19 nt, Homo sapiens
  misc_RNA (1)...(19): siRNA sense strand
gauauccugcagauuauua

SEQ ID NO: 222110 - RNA, 19 nt, Homo sapiens
  misc_RNA (1)...(19): siRNA sense strand
gagaagauguucgagacuu

SEQ ID NO: 222111 - RNA, 19 nt, Homo sapiens
  misc_RNA (1)...(19): siRNA sense strand
gcacuuuaauuaugacauc

SEQ ID NO: 222112 - RNA, 19 nt, Homo sapiens
  misc_RNA (1)...(19): siRNA sense strand
guaaagcacauuuggaaga

SEQ ID NO: 222113 - RNA, 19 nt, Homo sapiens
  misc_RNA (1)...(19): siRNA sense strand
gaauauugcacuccgacua

SEQ ID NO: 222114 - RNA, 19 nt, Homo sapiens
  misc_RNA (1)...(19): siRNA sense strand
uuauaggacugccaugaaa

SEQ ID NO: 222115 - RNA, 19 nt, Homo sapiens
  misc_RNA (1)...(19): siRNA sense strand
gggugaaguugcauccuuu

SEQ ID NO: 222116 - RNA, 19 nt, Homo sapiens
  misc_RNA (1)...(19): siRNA sense strand
gcaagagcacaacaauuug

SEQ ID NO: 222117 - RNA, 19 nt, Homo sapiens
  misc_RNA (1)...(19): siRNA sense strand
gcacaacaauuuggucaac

SEQ ID NO: 222118 - RNA, 19 nt, Homo sapiens
  misc_RNA (1)...(19): siRNA sense strand
agcaagagcacaacaauuu

SEQ ID NO: 222119 - RNA, 19 nt, Homo sapiens
  misc_RNA (1)...(19): siRNA sense strand
agaagauguucgagacuuu

SEQ ID NO: 222120 - RNA, 19 nt, Homo sapiens
  misc_RNA (1)...(19): siRNA sense strand
gagcaagagcacaacaauu

SEQ ID NO: 222121 - RNA, 19 nt, Homo sapiens
  misc_RNA (1)...(19): siRNA sense strand
ucaagcaaguggcaaguuc

SEQ ID NO: 222122 - RNA, 19 nt, Homo sapiens
  misc_RNA (1)...(19): siRNA sense strand
ccacgagacucaaacaacu

SEQ ID NO: 222123 - RNA, 19 nt, Homo sapiens
  misc_RNA (1)...(19): siRNA sense strand
cagcacaaccucaagcaaa

SEQ ID NO: 222124 - RNA, 19 nt, Homo sapiens
  misc_RNA (1)...(19): siRNA sense strand
gcaaagaguguccaaucau

SEQ ID NO: 222125 - RNA, 19 nt, Homo sapiens
  misc_RNA (1)...(19): siRNA sense strand
auggauauccugcagauua

SEQ ID NO: 222126 - RNA, 19 nt, Homo sapiens
  misc_RNA (1)...(19): siRNA sense strand
uguaacaucugcaaagagu

SEQ ID NO: 222127 - RNA, 19 nt, Homo sapiens
  misc_RNA (1)...(19): siRNA sense strand
guccggagcugcuuccaau

SEQ ID NO: 222128 - RNA, 19 nt, Homo sapiens
  misc_RNA (1)...(19): siRNA sense strand
gcaaguggcaaguucaaca

SEQ ID NO: 222129 - RNA, 19 nt, Homo sapiens
  misc_RNA (1)...(19): siRNA sense strand
gcuuccaauuugcuaauaa

SEQ ID NO: 222130 - RNA, 19 nt, Homo sapiens
  misc_RNA (1)...(19): siRNA sense strand
uggaagacaaguacagaua

SEQ ID NO: 222131 - RNA, 19 nt, Homo sapiens
  misc_RNA (1)...(19): siRNA sense strand
ggauccguguccugucuuu

SEQ ID NO: 222132 - RNA, 19 nt, Homo sapiens
  misc_RNA (1)...(19): siRNA sense strand
gucuuuagcugaccugaau

SEQ ID NO: 222133 - RNA, 19 nt, Homo sapiens
  misc_RNA (1)...(19): siRNA sense strand
gacaaguacagauaccuuu

SEQ ID NO: 222134 - RNA, 19 nt, Homo sapiens
  misc_RNA (1)...(19): siRNA sense strand
ccaagcaucaggccaaaug

SEQ ID NO: 222135 - RNA, 19 nt, Homo sapiens
  misc_RNA (1)...(19): siRNA sense strand
ggagcaagagcacaacaau

SEQ ID NO: 222136 - RNA, 19 nt, Homo sapiens
  misc_RNA (1)...(19): siRNA sense strand
guguaaagcacauuuggaa

SEQ ID NO: 222137 - RNA, 19 nt, Homo sapiens
  misc_RNA (1)...(19): siRNA sense strand
caagacaguugggugaagu

SEQ ID NO: 222138 - RNA, 19 nt, Homo sapiens
  misc_RNA (1)...(19): siRNA sense strand
gaagauguucgagacuuug

SEQ ID NO: 222139 - RNA, 19 nt, Homo sapiens
  misc_RNA (1)...(19): siRNA sense strand
gucagauucucagcuuaua

SEQ ID NO: 222140 - RNA, 19 nt, Homo sapiens
  misc_RNA (1)...(19): siRNA sense strand
uaacaucugcaaagagugu

SEQ ID NO: 222141 - RNA, 19 nt, Homo sapiens
  misc_RNA (1)...(19): siRNA sense strand
cggagcugcuuccaauuug

SEQ ID NO: 222142 - RNA, 19 nt, Homo sapiens
  misc_RNA (1)...(19): siRNA sense strand
gaagacaaguacagauacc

SEQ ID NO: 222143 - RNA, 19 nt, Homo sapiens
  misc_RNA (1)...(19): siRNA sense strand
ccauggauauccugcagau

SEQ ID NO: 222144 - RNA, 19 nt, Homo sapiens
  misc_RNA (1)...(19): siRNA sense strand
ggcaucauuucccugugua

SEQ ID NO: 222145 - RNA, 19 nt, Homo sapiens
  misc_RNA (1)...(19): siRNA sense strand
uggauauccugcagauuau

SEQ ID NO: 222146 - RNA, 19 nt, Homo sapiens
  misc_RNA (1)...(19): siRNA sense strand
ggaagacaaguacagauac

SEQ ID NO: 222147 - RNA, 19 nt, Homo sapiens
  misc_RNA (1)...(19): siRNA sense strand
ugcaaagaguguccaauca

SEQ ID NO: 222148 - RNA, 19 nt, Homo sapiens
  misc_RNA (1)...(19): siRNA sense strand
guggauaugugucugaacu

SEQ ID NO: 222149 - RNA, 19 nt, Homo sapiens
  misc_RNA (1)...(19): siRNA sense strand
acuggcugcugaauguuua

SEQ ID NO: 222150 - RNA, 19 nt, Homo sapiens
  misc_RNA (1)...(19): siRNA sense strand
acuaucccaugguggaaua

SEQ ID NO: 222151 - RNA, 19 nt, Homo sapiens
  misc_RNA (1)...(19): siRNA sense strand
ccggagcugcuuccaauuu

SEQ ID NO: 222152 - RNA, 19 nt, Homo sapiens
  misc_RNA (1)...(19): siRNA sense strand
ccaaauuccaagacaguug

SEQ ID NO: 222153 - RNA, 19 nt, Homo sapiens
  misc_RNA (1)...(19): siRNA sense strand
cagaaacugccaagcauca

SEQ ID NO: 222154 - RNA, 19 nt, Homo sapiens
  misc_RNA (1)...(19): siRNA sense strand
uaugacaucugccaaagcu

SEQ ID NO: 222155 - RNA, 19 nt, Homo sapiens
  misc_RNA (1)...(19): siRNA sense strand
aaugucagauucucagcuu

SEQ ID NO: 222156 - RNA, 19 nt, Homo sapiens
  misc_RNA (1)...(19): siRNA sense strand
ucgagacuuugccaaggua

SEQ ID NO: 222157 - RNA, 19 nt, Homo sapiens
  misc_RNA (1)...(19): siRNA sense strand
gcaaaaggccauaaaaugc

SEQ ID NO: 222158 - RNA, 19 nt, Homo sapiens
  misc_RNA (1)...(19): siRNA sense strand
cugcaugauucuauccaaa

SEQ ID NO: 222159 - RNA, 19 nt, Homo sapiens
  misc_RNA (1)...(19): siRNA sense strand
uaaagcacauuuggaagac

SEQ ID NO: 222160 - RNA, 19 nt, Homo sapiens
  misc_RNA (1)...(19): siRNA sense strand
acaggagucuaaagcacuu

SEQ ID NO: 222161 - RNA, 19 nt, Homo sapiens
  misc_RNA (1)...(19): siRNA sense strand
acagauaccuuuucaagca

SEQ ID NO: 222162 - RNA, 19 nt, Homo sapiens
  misc_RNA (1)...(19): siRNA sense strand
aagcacauuuggaagacaa

SEQ ID NO: 222163 - RNA, 19 nt, Homo sapiens
  misc_RNA (1)...(19): siRNA sense strand
gcuaauaauaagccagaga

SEQ ID NO: 222164 - RNA, 19 nt, Homo sapiens
  misc_RNA (1)...(19): siRNA sense strand
caagagcacaacaauuugg

SEQ ID NO: 222165 - RNA, 19 nt, Homo sapiens
  misc_RNA (1)...(19): siRNA sense strand
ccugucagcugcaugugau

SEQ ID NO: 222166 - RNA, 19 nt, Homo sapiens
  misc_RNA (1)...(19): siRNA sense strand
gcugcugaauguuuaugau

SEQ ID NO: 222167 - RNA, 19 nt, Homo sapiens
  misc_RNA (1)...(19): siRNA sense strand
acagagcucuaccagucuu

SEQ ID NO: 222168 - RNA, 19 nt, Homo sapiens
  misc_RNA (1)...(19): siRNA sense strand
acaguugggugaaguugca

SEQ ID NO: 222169 - RNA, 19 nt, Homo sapiens
  misc_RNA (1)...(19): siRNA sense strand
guuugaccacuauuuauga

SEQ ID NO: 222170 - RNA, 19 nt, Homo sapiens
  misc_RNA (1)...(19): siRNA sense strand
gcuuauaggacugccauga

SEQ ID NO: 222171 - RNA, 19 nt, Homo sapiens
  misc_RNA (1)...(19): siRNA sense strand
caucaggccaaauguaaca

SEQ ID NO: 222172 - RNA, 19 nt, Homo sapiens
  misc_RNA (1)...(19): siRNA sense strand
gauucuauccaaauuccaa

SEQ ID NO: 222173 - RNA, 19 nt, Homo sapiens
  misc_RNA (1)...(19): siRNA sense strand
ggcaaguucaacaggauuu

SEQ ID NO: 222174 - RNA, 19 nt, Homo sapiens
  misc_RNA (1)...(19): siRNA sense strand
gaacuggcugcugaauguu

SEQ ID NO: 222175 - RNA, 19 nt, Homo sapiens
  misc_RNA (1)...(19): siRNA sense strand
cugcugaauguuuaugaua

SEQ ID NO: 222176 - RNA, 19 nt, Homo sapiens
  misc_RNA (1)...(19): siRNA sense strand
aagcaucaggccaaaugua

SEQ ID NO: 222177 - RNA, 19 nt, Homo sapiens
  misc_RNA (1)...(19): siRNA sense strand
uggcaucauuucccugugu

SEQ ID NO: 222178 - RNA, 19 nt, Homo sapiens
  misc_RNA (1)...(19): siRNA sense strand
ccaugaaacuccgaagacu

SEQ ID NO: 222179 - RNA, 19 nt, Homo sapiens
  misc_RNA (1)...(19): siRNA sense strand
auaauaagccagagaucga

SEQ ID NO: 222180 - RNA, 19 nt, Homo sapiens
  misc_RNA (1)...(19): siRNA sense strand
cuaauaauaagccagagau

SEQ ID NO: 222181 - RNA, 19 nt, Homo sapiens
  misc_RNA (1)...(19): siRNA sense strand
ugggugaaguugcauccuu

SEQ ID NO: 222182 - RNA, 19 nt, Homo sapiens
  misc_RNA (1)...(19): siRNA sense strand
caucauuucccuguguaaa

SEQ ID NO: 222183 - RNA, 19 nt, Homo sapiens
  misc_RNA (1)...(19): siRNA sense strand
gcguggauaugugucugaa

SEQ ID NO: 222184 - RNA, 19 nt, Homo sapiens
  misc_RNA (1)...(19): siRNA sense strand
gcacuaucccaugguggaa

SEQ ID NO: 222185 - RNA, 19 nt, Homo sapiens
  misc_RNA (1)...(19): siRNA sense strand
gagccugucagcugcaugu

SEQ ID NO: 222186 - RNA, 19 nt, Homo sapiens
  misc_RNA (1)...(19): siRNA sense strand
guacagauaccuuuucaag

SEQ ID NO: 222187 - RNA, 19 nt, Homo sapiens
  misc_RNA (1)...(19): siRNA sense strand
gucccucucugcguggaua

SEQ ID NO: 222188 - RNA, 19 nt, Homo sapiens
  misc_RNA (1)...(19): siRNA sense strand
ggagcugcuuccaauuugc

SEQ ID NO: 222189 - RNA, 19 nt, Homo sapiens
  misc_RNA (1)...(19): siRNA sense strand
uuagcugaccugaauaaug

SEQ ID NO: 222190 - RNA, 19 nt, Homo sapiens
  misc_RNA (1)...(19): siRNA sense strand
guggcaaguucaacaggau

SEQ ID NO: 222191 - RNA, 19 nt, Homo sapiens
  misc_RNA (1)...(19): siRNA sense strand
acaacaauuuggucaacgu

SEQ ID NO: 222192 - RNA, 19 nt, Homo sapiens
  misc_RNA (1)...(19): siRNA sense strand
gacuacaucaggagaagau

SEQ ID NO: 222193 - RNA, 19 nt, Homo sapiens
  misc_RNA (1)...(19): siRNA sense strand
uaauaagccagagaucgaa

SEQ ID NO: 222194 - RNA, 19 nt, Homo sapiens
  misc_RNA (1)...(19): siRNA sense strand
ugucagauucucagcuuau

SEQ ID NO: 222195 - RNA, 19 nt, Homo sapiens
  misc_RNA (1)...(19): siRNA sense strand
ggauauccugcagauuauu

SEQ ID NO: 222196 - RNA, 19 nt, Homo sapiens
  misc_RNA (1)...(19): siRNA sense strand
agcaucaggccaaauguaa

SEQ ID NO: 222197 - RNA, 19 nt, Homo sapiens
  misc_RNA (1)...(19): siRNA sense strand
gcccuuugcuuggaucucu

SEQ ID NO: 222198 - RNA, 19 nt, Homo sapiens
  misc_RNA (1)...(19): siRNA sense strand
gcugaauguuuaugauacg

SEQ ID NO: 222199 - RNA, 19 nt, Homo sapiens
  misc_RNA (1)...(19): siRNA sense strand
agacuuugccaagguacua

SEQ ID NO: 222200 - RNA, 19 nt, Homo sapiens
  misc_RNA (1)...(19): siRNA sense strand
caagcaaguggcaaguuca

SEQ ID NO: 222201 - RNA, 19 nt, Homo sapiens
  misc_RNA (1)...(19): siRNA sense strand
agacaaguacagauaccuu

SEQ ID NO: 222202 - RNA, 19 nt, Homo sapiens
  misc_RNA (1)...(19): siRNA sense strand
gcaucauuucccuguguaa

SEQ ID NO: 222203 - RNA, 19 nt, Homo sapiens
  misc_RNA (1)...(19): siRNA sense strand
cugcaaagaguguccaauc

SEQ ID NO: 222204 - RNA, 19 nt, Homo sapiens
  misc_RNA (1)...(19): siRNA sense strand
cuuauaggacugccaugaa

SEQ ID NO: 222205 - RNA, 19 nt, Homo sapiens
  misc_RNA (1)...(19): siRNA sense strand
caaagaguguccaaucauu

SEQ ID NO: 222206 - RNA, 19 nt, Homo sapiens
  misc_RNA (1)...(19): siRNA sense strand
uagcugaccugaauaaugu

SEQ ID NO: 222207 - RNA, 19 nt, Homo sapiens
  misc_RNA (1)...(19): siRNA sense strand
gcaugauucuauccaaauu

SEQ ID NO: 222208 - RNA, 19 nt, Homo sapiens
  misc_RNA (1)...(19): siRNA sense strand
ugaacuggcugcugaaugu

SEQ ID NO: 222209 - RNA, 19 nt, Homo sapiens
  misc_RNA (1)...(19): siRNA sense strand
gauauccugcagauuauua

SEQ ID NO: 222210 - RNA, 19 nt, Homo sapiens
  misc_RNA (1)...(19): siRNA sense strand
gagaagauguucgagacuu

SEQ ID NO: 222211 - RNA, 19 nt, Homo sapiens
  misc_RNA (1)...(19): siRNA sense strand
gcacuuuaauuaugacauc

SEQ ID NO: 222212 - RNA, 19 nt, Homo sapiens
  misc_RNA (1)...(19): siRNA sense strand
guaaagcacauuuggaaga

SEQ ID NO: 222213 - RNA, 19 nt, Homo sapiens
  misc_RNA (1)...(19): siRNA sense strand
gaauauugcacuccgacua

SEQ ID NO: 222214 - RNA, 19 nt, Homo sapiens
  misc_RNA (1)...(19): siRNA sense strand
uuauaggacugccaugaaa

SEQ ID NO: 222215 - RNA, 19 nt, Homo sapiens
  misc_RNA (1)...(19): siRNA sense strand
gggugaaguugcauccuuu

SEQ ID NO: 222216 - RNA, 19 nt, Homo sapiens
  misc_RNA (1)...(19): siRNA sense strand
gcaagagcacaacaauuug

SEQ ID NO: 222217 - RNA, 19 nt, Homo sapiens
  misc_RNA (1)...(19): siRNA sense strand
gcacaacaauuuggucaac

SEQ ID NO: 222218 - RNA, 19 nt, Homo sapiens
  misc_RNA (1)...(19): siRNA sense strand
agcaagagcacaacaauuu

SEQ ID NO: 222219 - RNA, 19 nt, Homo sapiens
  misc_RNA (1)...(19): siRNA sense strand
agaagauguucgagacuuu

SEQ ID NO: 222220 - RNA, 19 nt, Homo sapiens
  misc_RNA (1)...(19): siRNA sense strand
gagcaagagcacaacaauu

SEQ ID NO: 222221 - RNA, 19 nt, Homo sapiens
  misc_RNA (1)...(19): siRNA sense strand
ucaagcaaguggcaaguuc

SEQ ID NO: 222222 - RNA, 19 nt, Homo sapiens
  misc_RNA (1)...(19): siRNA sense strand
ccacgagacucaaacaacu

SEQ ID NO: 222223 - RNA, 19 nt, Homo sapiens
  misc_RNA (1)...(19): siRNA sense strand
cagcacaaccucaagcaaa

SEQ ID NO: 222224 - RNA, 19 nt, Homo sapiens
  misc_RNA (1)...(19): siRNA sense strand
gcaaagaguguccaaucau

SEQ ID NO: 222225 - RNA, 19 nt, Homo sapiens
  misc_RNA (1)...(19): siRNA sense strand
auggauauccugcagauua

SEQ ID NO: 222226 - RNA, 19 nt, Homo sapiens
  misc_RNA (1)...(19): siRNA sense strand
uguaacaucugcaaagagu

SEQ ID NO: 222227 - RNA, 19 nt, Homo sapiens
  misc_RNA (1)...(19): siRNA sense strand
guccggagcugcuuccaau

SEQ ID NO: 222228 - RNA, 19 nt, Homo sapiens
  misc_RNA (1)...(19): siRNA sense strand
gcaaguggcaaguucaaca

SEQ ID NO: 222229 - RNA, 19 nt, Homo sapiens
  misc_RNA (1)...(19): siRNA sense strand
gcuuccaauuugcuaauaa

SEQ ID NO: 222230 - RNA, 19 nt, Homo sapiens
  misc_RNA (1)...(19): siRNA sense strand
uggaagacaaguacagaua

SEQ ID NO: 222231 - RNA, 19 nt, Homo sapiens
  misc_RNA (1)...(19): siRNA sense strand
ggauccguguccugucuuu

SEQ ID NO: 222232 - RNA, 19 nt, Homo sapiens
  misc_RNA (1)...(19): siRNA sense strand
gucuuuagcugaccugaau

SEQ ID NO: 222233 - RNA, 19 nt, Homo sapiens
  misc_RNA (1)...(19): siRNA sense strand
gacaaguacagauaccuuu

SEQ ID NO: 222234 - RNA, 19 nt, Homo sapiens
  misc_RNA (1)...(19): siRNA sense strand
ccaagcaucaggccaaaug

SEQ ID NO: 222235 - RNA, 19 nt, Homo sapiens
  misc_RNA (1)...(19): siRNA sense strand
ggagcaagagcacaacaau

SEQ ID NO: 222236 - RNA, 19 nt, Homo sapiens
  misc_RNA (1)...(19): siRNA sense strand
guguaaagcacauuuggaa

SEQ ID NO: 222237 - RNA, 19 nt, Homo sapiens
  misc_RNA (1)...(19): siRNA sense strand
caagacaguugggugaagu

SEQ ID NO: 222238 - RNA, 19 nt, Homo sapiens
  misc_RNA (1)...(19): siRNA sense strand
gaagauguucgagacuuug

SEQ ID NO: 222239 - RNA, 19 nt, Homo sapiens
  misc_RNA (1)...(19): siRNA sense strand
gucagauucucagcuuaua

SEQ ID NO: 222240 - RNA, 19 nt, Homo sapiens
  misc_RNA (1)...(19): siRNA sense strand
uaacaucugcaaagagugu

SEQ ID NO: 222241 - RNA, 19 nt, Homo sapiens
  misc_RNA (1)...(19): siRNA sense strand
cggagcugcuuccaauuug

SEQ ID NO: 222242 - RNA, 19 nt, Homo sapiens
  misc_RNA (1)...(19): siRNA sense strand
gaagacaaguacagauacc

SEQ ID NO: 222243 - RNA, 19 nt, Homo sapiens
  misc_RNA (1)...(19): siRNA sense strand
ccauggauauccugcagau

SEQ ID NO: 222244 - RNA, 19 nt, Homo sapiens
  misc_RNA (1)...(19): siRNA sense strand
ggcaucauuucccugugua

SEQ ID NO: 222245 - RNA, 19 nt, Homo sapiens
  misc_RNA (1)...(19): siRNA sense strand
uggauauccugcagauuau

SEQ ID NO: 222246 - RNA, 19 nt, Homo sapiens
  misc_RNA (1)...(19): siRNA sense strand
ggaagacaaguacagauac

SEQ ID NO: 222247 - RNA, 19 nt, Homo sapiens
  misc_RNA (1)...(19): siRNA sense strand
ugcaaagaguguccaauca

SEQ ID NO: 222248 - RNA, 19 nt, Homo sapiens
  misc_RNA (1)...(19): siRNA sense strand
guggauaugugucugaacu

SEQ ID NO: 222249 - RNA, 19 nt, Homo sapiens
  misc_RNA (1)...(19): siRNA sense strand
acuggcugcugaauguuua

SEQ ID NO: 222250 - RNA, 19 nt, Homo sapiens
  misc_RNA (1)...(19): siRNA sense strand
acuaucccaugguggaaua

SEQ ID NO: 222251 - RNA, 19 nt, Homo sapiens
  misc_RNA (1)...(19): siRNA sense strand
ccggagcugcuuccaauuu

SEQ ID NO: 222252 - RNA, 19 nt, Homo sapiens
  misc_RNA (1)...(19): siRNA sense strand
ccaaauuccaagacaguug

SEQ ID NO: 222253 - RNA, 19 nt, Homo sapiens
  misc_RNA (1)...(19): siRNA sense strand
cagaaacugccaagcauca

SEQ ID NO: 222254 - RNA, 19 nt, Homo sapiens
  misc_RNA (1)...(19): siRNA sense strand
uaugacaucugccaaagcu

SEQ ID NO: 222255 - RNA, 19 nt, Homo sapiens
  misc_RNA (1)...(19): siRNA sense strand
aaugucagauucucagcuu

SEQ ID NO: 222256 - RNA, 19 nt, Homo sapiens
  misc_RNA (1)...(19): siRNA sense strand
ucgagacuuugccaaggua

SEQ ID NO: 222257 - RNA, 19 nt, Homo sapiens
  misc_RNA (1)...(19): siRNA sense strand
gcaaaaggccauaaaaugc

SEQ ID NO: 222258 - RNA, 19 nt, Homo sapiens
  misc_RNA (1)...(19): siRNA sense strand
cugcaugauucuauccaaa

SEQ ID NO: 222259 - RNA, 19 nt, Homo sapiens
  misc_RNA (1)...(19): siRNA sense strand
uaaagcacauuuggaagac

SEQ ID NO: 222260 - RNA, 19 nt, Homo sapiens
  misc_RNA (1)...(19): siRNA sense strand
acaggagucuaaagcacuu

SEQ ID NO: 222261 - RNA, 19 nt, Homo sapiens
  misc_RNA (1)...(19): siRNA sense strand
acagauaccuuuucaagca

SEQ ID NO: 222262 - RNA, 19 nt, Homo sapiens
  misc_RNA (1)...(19): siRNA sense strand
aagcacauuuggaagacaa

SEQ ID NO: 222263 - RNA, 19 nt, Homo sapiens
  misc_RNA (1)...(19): siRNA sense strand
gcuaauaauaagccagaga

SEQ ID NO: 222264 - RNA, 19 nt, Homo sapiens
  misc_RNA (1)...(19): siRNA sense strand
caagagcacaacaauuugg

SEQ ID NO: 222265 - RNA, 19 nt, Homo sapiens
  misc_RNA (1)...(19): siRNA sense strand
ccugucagcugcaugugau

SEQ ID NO: 222266 - RNA, 19 nt, Homo sapiens
  misc_RNA (1)...(19): siRNA sense strand
gcugcugaauguuuaugau

SEQ ID NO: 222267 - RNA, 19 nt, Homo sapiens
  misc_RNA (1)...(19): siRNA sense strand
acagagcucuaccagucuu

SEQ ID NO: 222268 - RNA, 19 nt, Homo sapiens
  misc_RNA (1)...(19): siRNA sense strand
acaguugggugaaguugca

SEQ ID NO: 222269 - RNA, 19 nt, Homo sapiens
  misc_RNA (1)...(19): siRNA sense strand
guuugaccacuauuuauga

SEQ ID NO: 222270 - RNA, 19 nt, Homo sapiens
  misc_RNA (1)...(19): siRNA sense strand
gcuuauaggacugccauga

SEQ ID NO: 222271 - RNA, 19 nt, Homo sapiens
  misc_RNA (1)...(19): siRNA sense strand
caucaggccaaauguaaca

SEQ ID NO: 222272 - RNA, 19 nt, Homo sapiens
  misc_RNA (1)...(19): siRNA sense strand
gauucuauccaaauuccaa

SEQ ID NO: 222273 - RNA, 19 nt, Homo sapiens
  misc_RNA (1)...(19): siRNA sense strand
ggcaaguucaacaggauuu

SEQ ID NO: 222274 - RNA, 19 nt, Homo sapiens
  misc_RNA (1)...(19): siRNA sense strand
gaacuggcugcugaauguu

SEQ ID NO: 222275 - RNA, 19 nt, Homo sapiens
  misc_RNA (1)...(19): siRNA sense strand
cugcugaauguuuaugaua

SEQ ID NO: 222276 - RNA, 19 nt, Homo sapiens
  misc_RNA (1)...(19): siRNA sense strand
aagcaucaggccaaaugua

SEQ ID NO: 222277 - RNA, 19 nt, Homo sapiens
  misc_RNA (1)...(19): siRNA sense strand
uggcaucauuucccugugu

SEQ ID NO: 222278 - RNA, 19 nt, Homo sapiens
  misc_RNA (1)...(19): siRNA sense strand
ccaugaaacuccgaagacu

SEQ ID NO: 222279 - RNA, 19 nt, Homo sapiens
  misc_RNA (1)...(19): siRNA sense strand
auaauaagccagagaucga

SEQ ID NO: 222280 - RNA, 19 nt, Homo sapiens
  misc_RNA (1)...(19): siRNA sense strand
cuaauaauaagccagagau

SEQ ID NO: 222281 - RNA, 19 nt, Homo sapiens
  misc_RNA (1)...(19): siRNA sense strand
ugggugaaguugcauccuu

SEQ ID NO: 222282 - RNA, 19 nt, Homo sapiens
  misc_RNA (1)...(19): siRNA sense strand
caucauuucccuguguaaa

SEQ ID NO: 222283 - RNA, 19 nt, Homo sapiens
  misc_RNA (1)...(19): siRNA sense strand
gcguggauaugugucugaa

SEQ ID NO: 222284 - RNA, 19 nt, Homo sapiens
  misc_RNA (1)...(19): siRNA sense strand
gcacuaucccaugguggaa

SEQ ID NO: 222285 - RNA, 19 nt, Homo sapiens
  misc_RNA (1)...(19): siRNA sense strand
gagccugucagcugcaugu

SEQ ID NO: 222286 - RNA, 19 nt, Homo sapiens
  misc_RNA (1)...(19): siRNA sense strand
guacagauaccuuuucaag

SEQ ID NO: 222287 - RNA, 19 nt, Homo sapiens
  misc_RNA (1)...(19): siRNA sense strand
gucccucucugcguggaua

SEQ ID NO: 222288 - RNA, 19 nt, Homo sapiens
  misc_RNA (1)...(19): siRNA sense strand
ggagcugcuuccaauuugc

SEQ ID NO: 222289 - RNA, 19 nt, Homo sapiens
  misc_RNA (1)...(19): siRNA sense strand
uuagcugaccugaauaaug

SEQ ID NO: 222290 - RNA, 19 nt, Homo sapiens
  misc_RNA (1)...(19): siRNA sense strand
guggcaaguucaacaggau

SEQ ID NO: 222291 - RNA, 19 nt, Homo sapiens
  misc_RNA (1)...(19): siRNA sense strand
acaacaauuuggucaacgu

SEQ ID NO: 222292 - RNA, 19 nt, Homo sapiens
  misc_RNA (1)...(19): siRNA sense strand
gacuacaucaggagaagau

SEQ ID NO: 222293 - RNA, 19 nt, Homo sapiens
  misc_RNA (1)...(19): siRNA sense strand
uaauaagccagagaucgaa

SEQ ID NO: 222294 - RNA, 19 nt, Homo sapiens
  misc_RNA (1)...(19): siRNA sense strand
ugucagauucucagcuuau

SEQ ID NO: 222295 - RNA, 19 nt, Homo sapiens
  misc_RNA (1)...(19): siRNA sense strand
ggauauccugcagauuauu

SEQ ID NO: 222296 - RNA, 19 nt, Homo sapiens
  misc_RNA (1)...(19): siRNA sense strand
agcaucaggccaaauguaa

SEQ ID NO: 222297 - RNA, 19 nt, Homo sapiens
  misc_RNA (1)...(19): siRNA sense strand
gcccuuugcuuggaucucu

SEQ ID NO: 222298 - RNA, 19 nt, Homo sapiens
  misc_RNA (1)...(19): siRNA sense strand
gcugaauguuuaugauacg

SEQ ID NO: 222299 - RNA, 19 nt, Homo sapiens
  misc_RNA (1)...(19): siRNA sense strand
agacuuugccaagguacua

SEQ ID NO: 222300 - RNA, 19 nt, Homo sapiens
  misc_RNA (1)...(19): siRNA sense strand
caagcaaguggcaaguuca

SEQ ID NO: 222301 - RNA, 19 nt, Homo sapiens
  misc_RNA (1)...(19): siRNA sense strand
agacaaguacagauaccuu

SEQ ID NO: 222302 - RNA, 19 nt, Homo sapiens
  misc_RNA (1)...(19): siRNA sense strand
gcaucauuucccuguguaa

SEQ ID NO: 222303 - RNA, 19 nt, Homo sapiens
  misc_RNA (1)...(19): siRNA sense strand
cugcaaagaguguccaauc

SEQ ID NO: 222304 - RNA, 19 nt, Homo sapiens
  misc_RNA (1)...(19): siRNA sense strand
cuuauaggacugccaugaa

SEQ ID NO: 222305 - RNA, 19 nt, Homo sapiens
  misc_RNA (1)...(19): siRNA sense strand
caaagaguguccaaucauu

SEQ ID NO: 222306 - RNA, 19 nt, Homo sapiens
  misc_RNA (1)...(19): siRNA sense strand
uagcugaccugaauaaugu

SEQ ID NO: 222307 - RNA, 19 nt, Homo sapiens
  misc_RNA (1)...(19): siRNA sense strand
gcaugauucuauccaaauu

SEQ ID NO: 222308 - RNA, 19 nt, Homo sapiens
  misc_RNA (1)...(19): siRNA sense strand
ugaacuggcugcugaaugu

SEQ ID NO: 222309 - RNA, 19 nt, Homo sapiens
  misc_RNA (1)...(19): siRNA sense strand
gauauccugcagauuauua

SEQ ID NO: 222310 - RNA, 19 nt, Homo sapiens
  misc_RNA (1)...(19): siRNA sense strand
gagaagauguucgagacuu

SEQ ID NO: 222311 - RNA, 19 nt, Homo sapiens
  misc_RNA (1)...(19): siRNA sense strand
gcacuuuaauuaugacauc

SEQ ID NO: 222312 - RNA, 19 nt, Homo sapiens
  misc_RNA (1)...(19): siRNA sense strand
guaaagcacauuuggaaga

SEQ ID NO: 222313 - RNA, 19 nt, Homo sapiens
  misc_RNA (1)...(19): siRNA sense strand
gaauauugcacuccgacua

SEQ ID NO: 222314 - RNA, 19 nt, Homo sapiens
  misc_RNA (1)...(19): siRNA sense strand
uuauaggacugccaugaaa

SEQ ID NO: 222315 - RNA, 19 nt, Homo sapiens
  misc_RNA (1)...(19): siRNA sense strand
gggugaaguugcauccuuu

SEQ ID NO: 222316 - RNA, 19 nt, Homo sapiens
  misc_RNA (1)...(19): siRNA sense strand
gcaagagcacaacaauuug

SEQ ID NO: 222317 - RNA, 19 nt, Homo sapiens
  misc_RNA (1)...(19): siRNA sense strand
gcacaacaauuuggucaac

SEQ ID NO: 222318 - RNA, 19 nt, Homo sapiens
  misc_RNA (1)...(19): siRNA sense strand
agcaagagcacaacaauuu

SEQ ID NO: 222319 - RNA, 19 nt, Homo sapiens
  misc_RNA (1)...(19): siRNA sense strand
agaagauguucgagacuuu

SEQ ID NO: 222320 - RNA, 19 nt, Homo sapiens
  misc_RNA (1)...(19): siRNA sense strand
gagcaagagcacaacaauu

SEQ ID NO: 222321 - RNA, 19 nt, Homo sapiens
  misc_RNA (1)...(19): siRNA sense strand
ucaagcaaguggcaaguuc

SEQ ID NO: 222322 - RNA, 19 nt, Homo sapiens
  misc_RNA (1)...(19): siRNA sense strand
ccacgagacucaaacaacu

SEQ ID NO: 222323 - RNA, 19 nt, Homo sapiens
  misc_RNA (1)...(19): siRNA sense strand
cagcacaaccucaagcaaa

SEQ ID NO: 222324 - RNA, 19 nt, Homo sapiens
  misc_RNA (1)...(19): siRNA sense strand
gcaaagaguguccaaucau

SEQ ID NO: 222325 - RNA, 19 nt, Homo sapiens
  misc_RNA (1)...(19): siRNA sense strand
auggauauccugcagauua

SEQ ID NO: 222326 - RNA, 19 nt, Homo sapiens
  misc_RNA (1)...(19): siRNA sense strand
uguaacaucugcaaagagu

SEQ ID NO: 222327 - RNA, 19 nt, Homo sapiens
  misc_RNA (1)...(19): siRNA sense strand
guccggagcugcuuccaau

SEQ ID NO: 222328 - RNA, 19 nt, Homo sapiens
  misc_RNA (1)...(19): siRNA sense strand
gcaaguggcaaguucaaca

SEQ ID NO: 222329 - RNA, 19 nt, Homo sapiens
  misc_RNA (1)...(19): siRNA sense strand
gcuuccaauuugcuaauaa

SEQ ID NO: 222330 - RNA, 19 nt, Homo sapiens
  misc_RNA (1)...(19): siRNA sense strand
uggaagacaaguacagaua

SEQ ID NO: 222331 - RNA, 19 nt, Homo sapiens
  misc_RNA (1)...(19): siRNA sense strand
ggauccguguccugucuuu

SEQ ID NO: 222332 - RNA, 19 nt, Homo sapiens
  misc_RNA (1)...(19): siRNA sense strand
gucuuuagcugaccugaau

SEQ ID NO: 222333 - RNA, 19 nt, Homo sapiens
  misc_RNA (1)...(19): siRNA sense strand
gacaaguacagauaccuuu

SEQ ID NO: 222334 - RNA, 19 nt, Homo sapiens
  misc_RNA (1)...(19): siRNA sense strand
ccaagcaucaggccaaaug

SEQ ID NO: 222335 - RNA, 19 nt, Homo sapiens
  misc_RNA (1)...(19): siRNA sense strand
ggagcaagagcacaacaau

SEQ ID NO: 222336 - RNA, 19 nt, Homo sapiens
  misc_RNA (1)...(19): siRNA sense strand
guguaaagcacauuuggaa

SEQ ID NO: 222337 - RNA, 19 nt, Homo sapiens
  misc_RNA (1)...(19): siRNA sense strand
caagacaguugggugaagu

SEQ ID NO: 222338 - RNA, 19 nt, Homo sapiens
  misc_RNA (1)...(19): siRNA sense strand
gaagauguucgagacuuug

SEQ ID NO: 222339 - RNA, 19 nt, Homo sapiens
  misc_RNA (1)...(19): siRNA sense strand
gucagauucucagcuuaua

SEQ ID NO: 222340 - RNA, 19 nt, Homo sapiens
  misc_RNA (1)...(19): siRNA sense strand
uaacaucugcaaagagugu

SEQ ID NO: 222341 - RNA, 19 nt, Homo sapiens
  misc_RNA (1)...(19): siRNA sense strand
cggagcugcuuccaauuug

SEQ ID NO: 222342 - RNA, 19 nt, Homo sapiens
  misc_RNA (1)...(19): siRNA sense strand
gaagacaaguacagauacc

SEQ ID NO: 222343 - RNA, 19 nt, Homo sapiens
  misc_RNA (1)...(19): siRNA sense strand
ccauggauauccugcagau

SEQ ID NO: 222344 - RNA, 19 nt, Homo sapiens
  misc_RNA (1)...(19): siRNA sense strand
ggcaucauuucccugugua

SEQ ID NO: 222345 - RNA, 19 nt, Homo sapiens
  misc_RNA (1)...(19): siRNA sense strand
uggauauccugcagauuau

SEQ ID NO: 222346 - RNA, 19 nt, Homo sapiens
  misc_RNA (1)...(19): siRNA sense strand
ggaagacaaguacagauac

SEQ ID NO: 222347 - RNA, 19 nt, Homo sapiens
  misc_RNA (1)...(19): siRNA sense strand
ugcaaagaguguccaauca

SEQ ID NO: 222348 - RNA, 19 nt, Homo sapiens
  misc_RNA (1)...(19): siRNA sense strand
guggauaugugucugaacu

SEQ ID NO: 222349 - RNA, 19 nt, Homo sapiens
  misc_RNA (1)...(19): siRNA sense strand
acuggcugcugaauguuua

SEQ ID NO: 222350 - RNA, 19 nt, Homo sapiens
  misc_RNA (1)...(19): siRNA sense strand
acuaucccaugguggaaua

SEQ ID NO: 222351 - RNA, 19 nt, Homo sapiens
  misc_RNA (1)...(19): siRNA sense strand
ccggagcugcuuccaauuu

SEQ ID NO: 222352 - RNA, 19 nt, Homo sapiens
  misc_RNA (1)...(19): siRNA sense strand
ccaaauuccaagacaguug

SEQ ID NO: 222353 - RNA, 19 nt, Homo sapiens
  misc_RNA (1)...(19): siRNA sense strand
cagaaacugccaagcauca

SEQ ID NO: 222354 - RNA, 19 nt, Homo sapiens
  misc_RNA (1)...(19): siRNA sense strand
uaugacaucugccaaagcu

SEQ ID NO: 222355 - RNA, 19 nt, Homo sapiens
  misc_RNA (1)...(19): siRNA sense strand
aaugucagauucucagcuu

SEQ ID NO: 222356 - RNA, 19 nt, Homo sapiens
  misc_RNA (1)...(19): siRNA sense strand
ucgagacuuugccaaggua

SEQ ID NO: 222357 - RNA, 19 nt, Homo sapiens
  misc_RNA (1)...(19): siRNA sense strand
gcaaaaggccauaaaaugc

SEQ ID NO: 222358 - RNA, 19 nt, Homo sapiens
  misc_RNA (1)...(19): siRNA sense strand
cugcaugauucuauccaaa

SEQ ID NO: 222359 - RNA, 19 nt, Homo sapiens
  misc_RNA (1)...(19): siRNA sense strand
uaaagcacauuuggaagac

SEQ ID NO: 222360 - RNA, 19 nt, Homo sapiens
  misc_RNA (1)...(19): siRNA sense strand
acaggagucuaaagcacuu

SEQ ID NO: 222361 - RNA, 19 nt, Homo sapiens
  misc_RNA (1)...(19): siRNA sense strand
acagauaccuuuucaagca

SEQ ID NO: 222362 - RNA, 19 nt, Homo sapiens
  misc_RNA (1)...(19): siRNA sense strand
aagcacauuuggaagacaa

SEQ ID NO: 222363 - RNA, 19 nt, Homo sapiens
  misc_RNA (1)...(19): siRNA sense strand
gcuaauaauaagccagaga

SEQ ID NO: 222364 - RNA, 19 nt, Homo sapiens
  misc_RNA (1)...(19): siRNA sense strand
caagagcacaacaauuugg

SEQ ID NO: 222365 - RNA, 19 nt, Homo sapiens
  misc_RNA (1)...(19): siRNA sense strand
ccugucagcugcaugugau

SEQ ID NO: 222366 - RNA, 19 nt, Homo sapiens
  misc_RNA (1)...(19): siRNA sense strand
gcugcugaauguuuaugau

SEQ ID NO: 222367 - RNA, 19 nt, Homo sapiens
  misc_RNA (1)...(19): siRNA sense strand
acagagcucuaccagucuu

SEQ ID NO: 222368 - RNA, 19 nt, Homo sapiens
  misc_RNA (1)...(19): siRNA sense strand
acaguugggugaaguugca

SEQ ID NO: 222369 - RNA, 19 nt, Homo sapiens
  misc_RNA (1)...(19): siRNA sense strand
guuugaccacuauuuauga

SEQ ID NO: 222370 - RNA, 19 nt, Homo sapiens
  misc_RNA (1)...(19): siRNA sense strand
gcuuauaggacugccauga

SEQ ID NO: 222371 - RNA, 19 nt, Homo sapiens
  misc_RNA (1)...(19): siRNA sense strand
caucaggccaaauguaaca

SEQ ID NO: 222372 - RNA, 19 nt, Homo sapiens
  misc_RNA (1)...(19): siRNA sense strand
gauucuauccaaauuccaa

SEQ ID NO: 222373 - RNA, 19 nt, Homo sapiens
  misc_RNA (1)...(19): siRNA sense strand
ggcaaguucaacaggauuu

SEQ ID NO: 222374 - RNA, 19 nt, Homo sapiens
  misc_RNA (1)...(19): siRNA sense strand
gaacuggcugcugaauguu

SEQ ID NO: 222375 - RNA, 19 nt, Homo sapiens
  misc_RNA (1)...(19): siRNA sense strand
cugcugaauguuuaugaua

SEQ ID NO: 222376 - RNA, 19 nt, Homo sapiens
  misc_RNA (1)...(19): siRNA sense strand
aagcaucaggccaaaugua

SEQ ID NO: 222377 - RNA, 19 nt, Homo sapiens
  misc_RNA (1)...(19): siRNA sense strand
uggcaucauuucccugugu

SEQ ID NO: 222378 - RNA, 19 nt, Homo sapiens
  misc_RNA (1)...(19): siRNA sense strand
ccaugaaacuccgaagacu

SEQ ID NO: 222379 - RNA, 19 nt, Homo sapiens
  misc_RNA (1)...(19): siRNA sense strand
auaauaagccagagaucga

SEQ ID NO: 222380 - RNA, 19 nt, Homo sapiens
  misc_RNA (1)...(19): siRNA sense strand
cuaauaauaagccagagau

SEQ ID NO: 222381 - RNA, 19 nt, Homo sapiens
  misc_RNA (1)...(19): siRNA sense strand
ugggugaaguugcauccuu

SEQ ID NO: 222382 - RNA, 19 nt, Homo sapiens
  misc_RNA (1)...(19): siRNA sense strand
caucauuucccuguguaaa

SEQ ID NO: 222383 - RNA, 19 nt, Homo sapiens
  misc_RNA (1)...(19): siRNA sense strand
gcguggauaugugucugaa

SEQ ID NO: 222384 - RNA, 19 nt, Homo sapiens
  misc_RNA (1)...(19): siRNA sense strand
gcacuaucccaugguggaa

SEQ ID NO: 222385 - RNA, 19 nt, Homo sapiens
  misc_RNA (1)...(19): siRNA sense strand
gagccugucagcugcaugu

SEQ ID NO: 222386 - RNA, 19 nt, Homo sapiens
  misc_RNA (1)...(19): siRNA sense strand
guacagauaccuuuucaag

SEQ ID NO: 222387 - RNA, 19 nt, Homo sapiens
  misc_RNA (1)...(19): siRNA sense strand
gucccucucugcguggaua

SEQ ID NO: 222388 - RNA, 19 nt, Homo sapiens
  misc_RNA (1)...(19): siRNA sense strand
ggagcugcuuccaauuugc

SEQ ID NO: 222389 - RNA, 19 nt, Homo sapiens
  misc_RNA (1)...(19): siRNA sense strand
uuagcugaccugaauaaug

SEQ ID NO: 222390 - RNA, 19 nt, Homo sapiens
  misc_RNA (1)...(19): siRNA sense strand
guggcaaguucaacaggau

SEQ ID NO: 222391 - RNA, 19 nt, Homo sapiens
  misc_RNA (1)...(19): siRNA sense strand
acaacaauuuggucaacgu

SEQ ID NO: 222392 - RNA, 19 nt, Homo sapiens
  misc_RNA (1)...(19): siRNA sense strand
gacuacaucaggagaagau

SEQ ID NO: 222393 - RNA, 19 nt, Homo sapiens
  misc_RNA (1)...(19): siRNA sense strand
uaauaagccagagaucgaa

SEQ ID NO: 222394 - RNA, 19 nt, Homo sapiens
  misc_RNA (1)...(19): siRNA sense strand
ugucagauucucagcuuau

SEQ ID NO: 222395 - RNA, 19 nt, Homo sapiens
  misc_RNA (1)...(19): siRNA sense strand
ggauauccugcagauuauu

SEQ ID NO: 222396 - RNA, 19 nt, Homo sapiens
  misc_RNA (1)...(19): siRNA sense strand
agcaucaggccaaauguaa

SEQ ID NO: 222397 - RNA, 19 nt, Homo sapiens
  misc_RNA (1)...(19): siRNA sense strand
gcccuuugcuuggaucucu

SEQ ID NO: 222398 - RNA, 19 nt, Homo sapiens
  misc_RNA (1)...(19): siRNA sense strand
gcugaauguuuaugauacg

SEQ ID NO: 222399 - RNA, 19 nt, Homo sapiens
  misc_RNA (1)...(19): siRNA sense strand
agacuuugccaagguacua

SEQ ID NO: 222400 - RNA, 19 nt, Homo sapiens
  misc_RNA (1)...(19): siRNA sense strand
caagcaaguggcaaguuca
